United States Patent Application Publication US 2021/0199660 A1 - sequence listing, part 24

SEQ ID NO: 334902 - DNA, 120 bp, Artificial Sequence
  ENSG00000137210_32 (sequence is synthesized)
cttagatgtagaacatacagtttactcttagggcatggccttagtgctatgcaaactccaaattccatctcccttgcagtgcgcagccgacgagatggttgctttgttttgacgctttcc

SEQ ID NO: 334903 - DNA, 120 bp, Artificial Sequence
  ENSG00000137210_33 (sequence is synthesized)
agctgttgctttacgttgacatctttagagtctcatctcgttaagccctgttcaggtgtcagccaagaattcaaagtgagtttaaacacaaattttagggtttcctctttgtggctccct

SEQ ID NO: 334904 - DNA, 120 bp, Artificial Sequence
  ENSG00000137210_34 (sequence is synthesized)
cttttccaaggtccgtcccctcaatttccaggtcctttggcagccccagactccatcctctgacaagtcaaaagcatcgcaatttctgctcagtcctagccattccacgccttgtgcact

SEQ ID NO: 334905 - DNA, 120 bp, Artificial Sequence
  ENSG00000137210_35 (sequence is synthesized)
attgtggagcactgcccaacacacagtagatactgcatgtggcagacacacgatagggtctcactaggtcacctaagctgaagtacagtagtggtggcactatcttggctcactgcagcc

SEQ ID NO: 334906 - DNA, 120 bp, Artificial Sequence
  ENSG00000137210_36 (sequence is synthesized)
gcctctctgtcctaaaaacagtttccaccgccagcccaagcagcaggggagcagaggaaacggcgggggcagcaggcgggcctacggccggcccagagagggcgtggcctcgcgggaaat

SEQ ID NO: 334907 - DNA, 120 bp, Artificial Sequence
  ENSG00000137216_0 (sequence is synthesized)
accacagaggcgtctggctaactcatctccagacctaagttgggaaaggggaggggagcgcggaaagcggagaagccggaggagacgctccggagtgaccagcgacggctgaacgcagcc

SEQ ID NO: 334908 - DNA, 120 bp, Artificial Sequence
  ENSG00000137216_1 (sequence is synthesized)
cgccctccccaagtcgacgccgcaacccggggaaagcaggaggaccatgcggcagtagcagccatgctgccctttctgctggccacactgggcaccacagccctcaacaacagcaacccc

SEQ ID NO: 334909 - DNA, 120 bp, Artificial Sequence
  ENSG00000137216_2 (sequence is synthesized)
aaggactactgctacagcgcccgcatccgcagcactgtcctgcagggcctgccctttgggggcgtccccaccgtgctggctctcgacttcatgtgcttccttgcactgctgttcttattc

SEQ ID NO: 334910 - DNA, 120 bp, Artificial Sequence
  ENSG00000137216_3 (sequence is synthesized)
tctatcctccggaaggtggcctgggactatgggcggctggccttggtgacagatgcagacaggcttcggcggcaggagagggaccgagtggaacaggaatatgtggcttcagctatgcac

SEQ ID NO: 334911 - DNA, 120 bp, Artificial Sequence
  ENSG00000137216_4 (sequence is synthesized)
ggggacagccatgaccggtatgagcgtctcacctctgtctccagctccgttgactttgaccaaagggacaatggtttctgttcctggctgacagccatcttcaggataaaggatgatgag

SEQ ID NO: 334912 - DNA, 120 bp, Artificial Sequence
  ENSG00000137216_5 (sequence is synthesized)
atccgggacaaatgtgggggcgatgccgtgcactacctgtcctttcagcggcacatcatcgggctgctggtggttgtgggcgtcctctccgtaggcatcgtgctgcctgtcaacttctca

SEQ ID NO: 334913 - DNA, 120 bp, Artificial Sequence
  ENSG00000137216_6 (sequence is synthesized)
ggggacctgctggagaacaatgcctacagctttgggagaaccaccattgccaacttgaaatcagggaacaacctgctatggctgcacacctccttcgccttcctgtatctgctgctcacc

SEQ ID NO: 334914 - DNA, 120 bp, Artificial Sequence
  ENSG00000137216_7 (sequence is synthesized)
gtctacagcatgcgtagacacacctccaagatgcgctacaaggaggatgatctggtgaagcggaccctcttcatcaatggaatctccaaatatgcagagtcagaaaagatcaagaagcat

SEQ ID NO: 334915 - DNA, 120 bp, Artificial Sequence
  ENSG00000137216_8 (sequence is synthesized)
tttgaggaagcctaccccaactgcacagttctcgaagcccgcccgtgttacaacgtggctcgcctaatgttcctcgatgcagagaggaagaaggccgagcggggaaagctgtacttcaca

SEQ ID NO: 334916 - DNA, 120 bp, Artificial Sequence
  ENSG00000137216_9 (sequence is synthesized)
aacctccagagcaaggagaacgtgcctaccatgatcaaccccaagccctgtggccacctctgctgctgtgtggtgcgaggctgtgagcaggtggaggccattgagtactacacaaagctg

SEQ ID NO: 334917 - DNA, 120 bp, Artificial Sequence
  ENSG00000137216_10 (sequence is synthesized)
gagcagaagctgaaggaagactacaagcgggagaaggagaaggtgaatgagaagcctcttggcatggcctttgtcaccttccacaatgagactatcaccgccatcatcctgaaggacttc

SEQ ID NO: 334918 - DNA, 120 bp, Artificial Sequence
  ENSG00000137216_11 (sequence is synthesized)
aacgtgtgtaaatgccagggctgcacctgccgtggggagccacgcccctcatcctgcagcgagtccctgcacatctccaactggaccgtgtcctatgcccctgaccctcagaacatctac

SEQ ID NO: 334919 - DNA, 120 bp, Artificial Sequence
  ENSG00000137216_12 (sequence is synthesized)
tgggagcacctctccatccgaggcttcatctggtggctgcgctgcctggtcatcaatgtcgtcctcttcatcctcctcttcttcctcaccactccagccatcatcatcaccaccatggac

SEQ ID NO: 334920 - DNA, 120 bp, Artificial Sequence
  ENSG00000137216_13 (sequence is synthesized)
tgcttctcggccctccttcccaccatcgtctactactcagccttctttgaagcccactggacacgctctggggagaacaggacaaccatgcacaagtgctacactttcctcatcttcatg

SEQ ID NO: 334921 - DNA, 120 bp, Artificial Sequence
  ENSG00000137216_14 (sequence is synthesized)
gtgctgctcctaccctcgctgggactgagcagcctggacctcttcttccgctggctctttgataagaaattcttggctgaggcagctattcggtttgagtgtgtgttcctgcccgacaac

SEQ ID NO: 334922 - DNA, 120 bp, Artificial Sequence
  ENSG00000137216_15 (sequence is synthesized)
ggcgccttcttcgtgaactacgtcattgcctcagcctttatcggcaacgccatggacctgctgcgcatcccaggcctgctcatgtacatgatccggctctgcctggcgcgctcggccgcc

SEQ ID NO: 334923 - DNA, 120 bp, Artificial Sequence
  ENSG00000137216_16 (sequence is synthesized)
gagaggcgcaacgtgaagcggcatcaggcctacgagttccagtttggcgcagcctacgcctggatgatgtgcgtcttcacggtggtcatgacctacagtatcacctgccccatcatcgtg

SEQ ID NO: 334924 - DNA, 120 bp, Artificial Sequence
  ENSG00000137216_17 (sequence is synthesized)
cccttcgggctcatgtacatgctgctgaagcacctggtagacaggtacaatctctactacgcctacctgccggccaagctggacaagaagatccactcgggggctgtgaaccaggtggtg

SEQ ID NO: 334925 - DNA, 120 bp, Artificial Sequence
  ENSG00000137216_18 (sequence is synthesized)
gccgcgcccatcctctgcctcttctggctgctcttcttttccaccatgcgcacggggttcctagctcccacgtctatgttcacatttgtggtcctggtcatcaccatcgtcatctgtctc

SEQ ID NO: 334926 - DNA, 120 bp, Artificial Sequence
  ENSG00000137216_19 (sequence is synthesized)
tgccacgtctgctttggacacttcaaatacctcagtgcccacaactacaagattgagcacacggagacagatactgtggaccccagaagcaatggacggccccccactgctgctgctgtc

SEQ ID NO: 334927 - DNA, 120 bp, Artificial Sequence
  ENSG00000137216_20 (sequence is synthesized)
cccaaatctgcgaaatacatcgctcaggtgctgcaggactcagaggtggacggggatggggatggggctcctgggagctcaggggatgagcccccatcatcctcatcccaagatgaggag

SEQ ID NO: 334928 - DNA, 120 bp, Artificial Sequence
  ENSG00000137216_21 (sequence is synthesized)
ttgctgatgccacccgacgccctcacggacacagacttccagtcttgcgaggacagcctcatagagaatgagattcaccagtaaggggagggaggggccctggaggccacatcctgcccc

SEQ ID NO: 334929 - DNA, 120 bp, Artificial Sequence
  ENSG00000137216_22 (sequence is synthesized)
accccacccccactcccacggacactaaaacgctaataatttattagatctaaagccccttcctccccagcccctgctttcattaaggtatttaaacttgggggtttcactgctctcccc

SEQ ID NO: 334930 - DNA, 120 bp, Artificial Sequence
  ENSG00000137216_23 (sequence is synthesized)
catgatggagggagggagccccccaacctcagtgaggagagccccgagccggccccggggcaaagaggggtgcagagggagttcccccagatcagtaccccccacccctccccagctagt

SEQ ID NO: 334931 - DNA, 120 bp, Artificial Sequence
  ENSG00000137216_24 (sequence is synthesized)
agcatgaccaggagagggttaatgagagccaagaggagtacctggtgcacctggtgccggtggctggagacctggggggcaggtggatctggggctgttcccccccctccgttttttcca

SEQ ID NO: 334932 - DNA, 120 bp, Artificial Sequence
  ENSG00000137216_25 (sequence is synthesized)
ccccacagttcctcctgggatctggccctccagggaagtggagcctccagcccctaggggatgcatgaggggggagggggtgctgagtgggaggaagagtcaggctcacagctggggtgg

SEQ ID NO: 334933 - DNA, 90 bp, Artificial Sequence
  ENSG00000137216_26 (sequence is synthesized)
tgctgagtgggaggaagagtcaggctcacagctggggtggcctgggggtgggggtgggcaaggctgacactggaaaatgggtttttgcac

SEQ ID NO: 334934 - DNA, 120 bp, Artificial Sequence
  ENSG00000137216_27 (sequence is synthesized)
gctcgagccgcccagcgactccccctccccctcccccagccccgccccgccccaacccggggctccgagccggagccgagtctgcgcctgggggaggaccatgcggcagtagcagccatg

SEQ ID NO: 334935 - DNA, 120 bp, Artificial Sequence
  ENSG00000137216_28 (sequence is synthesized)
gaagctatgcctggaggtaattatgagaatgggtgggacttgagggaggagagaggttcgggttggtgggctggggactcccgctgacagccctctgttcccccagggtttctgttcctg

SEQ ID NO: 334936 - DNA, 120 bp, Artificial Sequence
  ENSG00000137216_29 (sequence is synthesized)
aagatcccaccaccacccaaagaaaaaacctggactcagctgcgcgtcccctcccttcaacctcctgcgggacccagaggtgcccgggcccgcgggacccaggggtggcgcgcgctgccc

SEQ ID NO: 334937 - DNA, 120 bp, Artificial Sequence
  ENSG00000137216_30 (sequence is synthesized)
cccagcctcttcccttcccttccctgcaggcctcttttgtctcagccccaagaggtgtcagctaggtttgaatgctggcacagcagctcaggagctcccatcctgcaagttacataacct

SEQ ID NO: 334938 - DNA, 120 bp, Artificial Sequence
  ENSG00000137216_31 (sequence is synthesized)
aacccggggctccgagccggagccgagtctgcgcctgggggcccttatctccagaggccagagcttccatccacccaggcagcctggtgatctgtcctcactgccccctccccacgccca

SEQ ID NO: 334939 - DNA, 120 bp, Artificial Sequence
  ENSG00000137216_32 (sequence is synthesized)
tgcccagcccagcccgttctgcttgttccaaccccgtgccaccaaccagctcccaaaaacccctgtgtgcacttcccttgggctccctgccaccttccccctgagagaggccaccctcag

SEQ ID NO: 334940 - DNA, 120 bp, Artificial Sequence
  ENSG00000137216_33 (sequence is synthesized)
gtgtgcaacacctggagaaacacccagggaagagagagagcctgcatttagtcctgatctcagagaagtccccttccctcacccctcagtctaactgaaaaaatggaaaggttcaactag

SEQ ID NO: 334941 - DNA, 120 bp, Artificial Sequence
  ENSG00000137216_34 (sequence is synthesized)
cctctgtctccagctccgttgactttgaccaaagggacaatggtttctgttcctggctgacagccatcttcaggataaagtgaagcggaccctcttcatcaatggaatctccaaatatgc

SEQ ID NO: 334942 - DNA, 120 bp, Artificial Sequence
  ENSG00000137216_35 (sequence is synthesized)
gtgagtgggggcagcagtaggctgggagcagccagccagctgcaggcagaactcaggagatccagccagagtccagcaggcaggcagtgagcgctgagaaaggcaggaagccaggacagg

SEQ ID NO: 334943 - DNA, 120 bp, Artificial Sequence
  ENSG00000137218_0 (sequence is synthesized)
gctaggtgagccccaggtgtatcccagagggatccgggtgacttctctgcagactgtttgccatgacagcccaccaaggacggggggaataaagtgggaacccttccccatgcccctccc

SEQ ID NO: 334944 - DNA, 120 bp, Artificial Sequence
  ENSG00000137218_1 (sequence is synthesized)
acggtcagctccccgatggcctgggtgagggcaggctggctgctctgacaccatggggagctgctgcagctgcctgaacagagacagcgttccagacaaccaccccaccaagttcaaggt

SEQ ID NO: 334945 - DNA, 120 bp, Artificial Sequence
  ENSG00000137218_2 (sequence is synthesized)
gacaaatgtggatgatgagggggtggagctgggctctggggtgatggagctgacgcagagtgagctggtgctgcacctgcatcggcgtgaggccgtccgctggccttatctctgcttgcg

SEQ ID NO: 334946 - DNA, 120 bp, Artificial Sequence
  ENSG00000137218_3 (sequence is synthesized)
gcgctatggctacgactccaacctcttctcctttgagagtggccgccgatgtcagacaggccagggaatatttgcatttaagtgttcccgggctgaggaaatcttcaacctccttcagga

SEQ ID NO: 334947 - DNA, 120 bp, Artificial Sequence
  ENSG00000137218_4 (sequence is synthesized)
tctgatgcagtgcaacagcatcaatgtgatggaagagcctgtcatcatcacccgcaatagccaccccgctgagcttgacctccctcgagccccccagccacccaatgctctaggctacac

SEQ ID NO: 334948 - DNA, 120 bp, Artificial Sequence
  ENSG00000137218_5 (sequence is synthesized)
tgtctccagcttttccaatggctgccctggagagggcccacgattctcagctccccggcggctctcgacaagcagcctgcggcacccctcgcttggggaagagtccacccatgccctcat

SEQ ID NO: 334949 - DNA, 120 bp, Artificial Sequence
  ENSG00000137218_6 (sequence is synthesized)
tgctcctgatgagcagtcccacacctatgtcaacacaccggccagtgaagatgaccaccgcaggggccgccactgcctgcagcccctgcctgagggtcaggcacccttcctcccgcaggc

SEQ ID NO: 334950 - DNA, 120 bp, Artificial Sequence
  ENSG00000137218_7 (sequence is synthesized)
ccggggacctgaccaacgggacccacaggtgttcttgcagccaggccaggtgaagtttgtgttgggcccgacccctgctcggcggcacatggtgaagtgccagggcctctgtcccagcct

SEQ ID NO: 334951 - DNA, 120 bp, Artificial Sequence
  ENSG00000137218_8 (sequence is synthesized)
ccagcccaagtgcacctacgagaacgtcaccggggggctgtggcgaggggctggctggagactgagcccagaggagccgggctggaatggccttgcccaccgccgggccgccctgctgca

SEQ ID NO: 334952 - DNA, 120 bp, Artificial Sequence
  ENSG00000137218_9 (sequence is synthesized)
ctatgagaacctgcccccactgccccctgtgtgggaaagccaagcccagcagctgggaggggaggctggggatgatggggactcgagggatgggctcacaccctcttccaatggcttccc

SEQ ID NO: 334953 - DNA, 120 bp, Artificial Sequence
  ENSG00000137218_10 (sequence is synthesized)
tgatggtgaggaggacgagaccccactgcagaagcccaccagcacccgggccgccatccgcagccacggcagctttcctgtgccactgacccgccgccgcggctccccaagggtcttcaa

SEQ ID NO: 334954 - DNA, 120 bp, Artificial Sequence
  ENSG00000137218_11 (sequence is synthesized)
ctttgatttccgccggccggggcccgagcccccaaggcagcttaactacatccaggtggagctaaagggctggggtggagaccgccctaaggggccccagaacccctcgagcccccaagc

SEQ ID NO: 334955 - DNA, 120 bp, Artificial Sequence
  ENSG00000137218_12 (sequence is synthesized)
ccccatgcccaccacccaccctgcccgaagctcagactcctacgccgtgattgacctcaaaaagaccgtggccatgtccaacctgcagagagctctgccccgagacgatggcaccgccag

SEQ ID NO: 334956 - DNA, 120 bp, Artificial Sequence
  ENSG00000137218_13 (sequence is synthesized)
gaaaacccggcacaacagcaccgacctgcctctgtagggacttcccggtcctcaccaccctctgccccaccatgatccagcctctgcctcacactcctgtcctctgaacccaccctcccc

SEQ ID NO: 334957 - DNA, 120 bp, Artificial Sequence
  ENSG00000137218_14 (sequence is synthesized)
agggttcagggttgctttgcagaaggcatggaggtgggaccagatgcttccctgtgctggctggagtccccagagatatcagccaccgagtctcctggtctgtctccaggctggggagag

SEQ ID NO: 334958 - DNA, 120 bp, Artificial Sequence
  ENSG00000137218_15 (sequence is synthesized)
aagggtgaccaggcgaggagggagccgagacgtcaactgtgaagggttcctgtgattgcgtttagcgccctcccgttctgtccatttgtcttgtctgccgactgtccgtgtgtgtttttt

SEQ ID NO: 334959 - DNA, 120 bp, Artificial Sequence
  ENSG00000137218_16 (sequence is synthesized)
actgtccgtgtgtgttttttttggttggaattttgaaacattttgtacctgttgattttatttatcagtttatttttctatttattgttttaaatgtaatttaacatatttattattaat

SEQ ID NO: 334960 - DNA, 120 bp, Artificial Sequence
  ENSG00000137218_17 (sequence is synthesized)
cagctccccgatggcctgggtgaggtcattcaagcttgggtggtgtcctcttcattctaggcacagtcctgactattgtgacatataatccaagtactggaatcctggaggggaagagcc

SEQ ID NO: 334961 - DNA, 120 bp, Artificial Sequence
  ENSG00000137218_18 (sequence is synthesized)
aaatagtaaggcctctggtctccccttcagaaaaagggaaggaaacccagcattttttttaaatgaagaaatatccacttgaggttattaaaactgcactgttttaaatgttcagtcttc

SEQ ID NO: 334962 - DNA, 120 bp, Artificial Sequence
  ENSG00000137218_19 (sequence is synthesized)
atttgcactggatgttgggatggtagtaagggagaagagagaacttggatgaagtggaatggatgagggcaggctggctgctctgacaccatggggagctgctgcagctgcctgaacaga

SEQ ID NO: 334963 - DNA, 120 bp, Artificial Sequence
  ENSG00000137218_20 (sequence is synthesized)
gacagcgttccagacaaccaccccaccaagttcaagagaaaacaaaattctgtatttgtgagttaatatacgtaaagtatttaaaatagtgcttagtggccaggcacggtggctcacacc

SEQ ID NO: 334964 - DNA, 120 bp, Artificial Sequence
  ENSG00000137221_0 (sequence is synthesized)
acccggcctgccccgcggcaagatggcggcctgaacgcagctggcagcggcggaaagcttagatcagcctttccacagctgttagcagcatctgccccaatttcagctgaagattcaggt

SEQ ID NO: 334965 - DNA, 120 bp, Artificial Sequence
  ENSG00000137221_1 (sequence is synthesized)
gccccagggactggaagaaattacagtgcctacttggaaagaagaagagatagcgacttgccccagtccaaccccagagcgggagctgtggctaaaggaagtggaggggccgtgggatgc

SEQ ID NO: 334966 - DNA, 120 bp, Artificial Sequence
  ENSG00000137221_2 (sequence is synthesized)
ggagagccgagggctaactcccggacagcggaacagagagagctgccgacaaacagacgtccagagtccttctggccacatctctgagcctgcctccttcttgcttctcagcaggcggag

SEQ ID NO: 334967 - DNA, 120 bp, Artificial Sequence
  ENSG00000137221_3 (sequence is synthesized)
gagccgtcacctcccagaatgactagtgccgcccctgctaagaaaccctaccgtaaggcaccaccagagcatcgggagctgcgtttggaaattcctggatcccggcttgagcaggaggaa

SEQ ID NO: 334968 - DNA, 120 bp, Artificial Sequence
  ENSG00000137221_4 (sequence is synthesized)
cccctgactgatgcagaaaggatgaagctcttacaggaggagaatgaagagcttcgccggcgcctggcctccgccaccagacgcactgaggccctggaacgtgagctggaaattgggcag

SEQ ID NO: 334969 - DNA, 120 bp, Artificial Sequence
  ENSG00000137221_5 (sequence is synthesized)
gactgcctggagctggagctgggccagagccgcgaggagctggacaaatttaaggataagttccgcaggctgcagaacagctacacggcttcccagcggaccaaccaggagttggaggac

SEQ ID NO: 334970 - DNA, 120 bp, Artificial Sequence
  ENSG00000137221_6 (sequence is synthesized)
aagctgcacacactgatcaagaaggctgagatggataggaagacgctggactgggagattgtggagctgaccaacaagctgctggatgccaagaacaccatcaacaagctggaagagctc

SEQ ID NO: 334971 - DNA, 120 bp, Artificial Sequence
  ENSG00000137221_7 (sequence is synthesized)
aatgagcggtaccggctggactgcaacctggctgtacagctcctcaagtgcaacaagtcccacttccgaaaccacaagtttgccgatctgccctgtgagctacaggacatggttcggaaa

SEQ ID NO: 334972 - DNA, 120 bp, Artificial Sequence
  ENSG00000137221_8 (sequence is synthesized)
catttgcacagtggtcaagaggccgccagcccaggtcctgctcccagcctagccccaggggctgtggtgcctacctcagtcattgcccgagtgttagagaagccggagtctctactgctc

SEQ ID NO: 334973 - DNA, 120 bp, Artificial Sequence
  ENSG00000137221_9 (sequence is synthesized)
aattcagcccagtcaggcagcgccgggcgccccttggctgaggatgtctttgtgcatgtggacatgagtgagggtgtcccaggtgatccagccagtcccccggcccctggcagccccacc

SEQ ID NO: 334974 - DNA, 120 bp, Artificial Sequence
  ENSG00000137221_10 (sequence is synthesized)
ccacaacccaatggggagtgccactctctgggtactgccaggggctccccggaggaagagctgcccctgccagcctttgagaagctgaacccctacccaaccccgtctccaccacaccca

SEQ ID NO: 334975 - DNA, 120 bp, Artificial Sequence
  ENSG00000137221_11 (sequence is synthesized)
ttacgctacccgccaggccatttccctgagcctggtagaggaggggagtgagcgggcccgccccagcccagtgcccagcacccctgcctcagcccaggcctcaccccaccaccagcccag

SEQ ID NO: 334976 - DNA, 120 bp, Artificial Sequence
  ENSG00000137221_12 (sequence is synthesized)
cccagcacccctaacactcagtgccccagctagctctgccagctctgaagaggacctgctggtcagctggcagcgggcatttgtggaccgtactccaccacctgctgctgtggcccagcg

SEQ ID NO: 334977 - DNA, 120 bp, Artificial Sequence
  ENSG00000137221_13 (sequence is synthesized)
cacagcctttggacgcgatgccctccctgagctgcagcgccattttgcccatagccccgctgacagagatgaggtggtccaggcaccttctgcccgacccgaagagagtgagcttttgct

SEQ ID NO: 334978 - DNA, 120 bp, Artificial Sequence
  ENSG00000137221_14 (sequence is synthesized)
acccacagaacctgactctggctttcccagggaggaagaagagctgaacctgcctatcagtcctgaggaagagcgccagagcctgctgcccattaacaggggcacagaggaggggccagg

SEQ ID NO: 334979 - DNA, 120 bp, Artificial Sequence
  ENSG00000137221_15 (sequence is synthesized)
cacttcccacaccgagggcagggcctggccactccccagctccagtcgcccccagcgcagccccaagaggatgggggttcaccacctgcaccgcaaggacagcctgacccaggcccagga

SEQ ID NO: 334980 - DNA, 120 bp, Artificial Sequence
  ENSG00000137221_16 (sequence is synthesized)
gcagggcaacctgctcaactagggcccctgctggccttcctgccattgctgcaccaggactgcaaggagtccccacaccttggcagctcagggtccccagtccaagcccttgacctctcc

SEQ ID NO: 334981 - DNA, 120 bp, Artificial Sequence
  ENSG00000137221_17 (sequence is synthesized)
tctatccagacccgcacagctgtttcctgtgtggatggggtcaggttgtgggccatgccaggcctgtcagctgcgttgactgactgcagcagcttgcctcatggttttccctttttctta

SEQ ID NO: 334982 - DNA, 120 bp, Artificial Sequence
  ENSG00000137221_18 (sequence is synthesized)
gaatatttattcttcagaggtaacatgcagttgggtctcaagacctttcctccaatcagcccaacccagcccagactgggcttttctggggagctgaggagtttatcagtattcatcttc

SEQ ID NO: 334983 - DNA, 120 bp, Artificial Sequence
  ENSG00000137221_19 (sequence is synthesized)
catcctttcatagtcacaagttttgttattttgtttttttttgggggtgatggtgtaattgttaacctcatttccgtttcctacctgtttgcttccccccccagtcctccgcatgagctg

SEQ ID NO: 334984 - DNA, 120 bp, Artificial Sequence
  ENSG00000137221_20 (sequence is synthesized)
ttgccctccaggggcctggcacagctggccttggggacgagggagaggactgattcagggccccctcagctgtctcctccctccctctggaaaggagggtggggctcaggggcctcaagc

SEQ ID NO: 334985 - DNA, 120 bp, Artificial Sequence
  ENSG00000137221_21 (sequence is synthesized)
tgggctctgtgtgaggcctggcccccactcccaaccttggctctagactgttactcttaagctttgagaaattttcacattgatgactattttaaaatcaaataaaactattttactggt

SEQ ID NO: 334986 - DNA, 120 bp, Artificial Sequence
  ENSG00000137221_22 (sequence is synthesized)
accccagagcgggtacctgctgtcactgactcctgaattcattctcgctgtgtgtctacttttgcttttttggagctgtggctaaaggaagtggaggggccgtgggatgcggagagccga

SEQ ID NO: 334987 - DNA, 120 bp, Artificial Sequence
  ENSG00000137221_23 (sequence is synthesized)
agatgacgcgacacgccaagtgcgtggggattcccgcggccctggccactacccggcctgccccgcggcaagatggcggcctgaacgcagctggcagcggcggaaagagctgtggctaaa

SEQ ID NO: 334988 - DNA, 120 bp, Artificial Sequence
  ENSG00000137221_24 (sequence is synthesized)
agctttcagagtcctggtgcagcctggcagcagtgtttggggaacaggcgagatagaggagctgagccccttctccaacagccgtcctctctttctgttgaccaaccagagaggcttttt

SEQ ID NO: 334989 - DNA, 120 bp, Artificial Sequence
  ENSG00000137221_25 (sequence is synthesized)
gcctgaggtcagcaagctggcctccctggttggcagggggagtgcttggcttccatctggcatggtttccggatgggagaaagcccctgagggtctggtggagctgtggctaaaggaagt

SEQ ID NO: 334990 - DNA, 120 bp, Artificial Sequence
  ENSG00000137221_26 (sequence is synthesized)
tctaactccagtttctgcacctctctctgtcctcctcttcccactttgccctcctcttgcctccatgtcacctctcaagccagtcaactctgccactggttggtgtcccgtgtactgtcc

SEQ ID NO: 334991 - DNA, 120 bp, Artificial Sequence
  ENSG00000137221_27 (sequence is synthesized)
agggcccatcactagttctggggggccagccctgttggtttctgtaacagagacagagagagaagatcctgggcaggaaggagagggtagtcagagctatctgcccaaagagtactaaga

SEQ ID NO: 334992 - DNA, 120 bp, Artificial Sequence
  ENSG00000137221_28 (sequence is synthesized)
gaggattaggcccatctgatcatgttaccccaaggggtaaactctagaccccacagcttcaggcccaaggtttatgtggcctgcagaagtagaagaagtagaggtatttctttttttttt

SEQ ID NO: 334993 - DNA, 120 bp, Artificial Sequence
  ENSG00000137221_29 (sequence is synthesized)
caggcatgagccactgtgcccggcccagaagtagaggtatttctaaggctactggtctatgcagattctccaaacttaagtatggtttgggcagaagctgggagatagaagtttgagaac

SEQ ID NO: 334994 - DNA, 120 bp, Artificial Sequence
  ENSG00000137221_30 (sequence is synthesized)
gctgggagatagaagtttgagaacatgctggctgcagcagcagatccgggtttaaatcttggccaagttaaccaaagctttgagttgtcttcccctctccaggcctatgtgtctgtgaag

SEQ ID NO: 334995 - DNA, 120 bp, Artificial Sequence
  ENSG00000137221_31 (sequence is synthesized)
tgagggtatacacactggcatgctgtaagaacaggagatagcagagtgctgagtacacagaggtacttaaaggtgggagccattactttcgccatgagtcaagttatctttggctgcgat

SEQ ID NO: 334996 - DNA, 120 bp, Artificial Sequence
  ENSG00000137221_32 (sequence is synthesized)
tgggcttcaagagagcgtagaatcaggaggcgaatggctctgagggccctgctcttcttgctaaggagcccttccccagctcctggctcctgtaccagctgccacccttacagcccttta

SEQ ID NO: 334997 - DNA, 120 bp, Artificial Sequence
  ENSG00000137221_33 (sequence is synthesized)
gccacatgaggcctctggagaggagggcagtgctgggctggatttccaagagatgaataatggagaagcctgattgtgcagtggggaaactggagctgggggcttggtggccagctgaca

SEQ ID NO: 334998 - DNA, 120 bp, Artificial Sequence
  ENSG00000137221_34 (sequence is synthesized)
tgggctgtaaccagagacaggctgggagccatatccctacccccaattctttatttctattctccgatagtgaagggaggctggactgtcccctaccatcccctcttcctcccctgaccc

SEQ ID NO: 334999 - DNA, 120 bp, Artificial Sequence
  ENSG00000137221_35 (sequence is synthesized)
catgtcatcccttccttcctgagcccactctggagctccagggcatgcccttctatctctcatacccctctgcccttgatcccacaacaccctgccaggctcttacaggaggagaatgaa

SEQ ID NO: 335000 - DNA, 120 bp, Artificial Sequence
  ENSG00000137221_36 (sequence is synthesized)
ggcattacacagggccccacagtgtcagtgctgagcctggagcccaggtgtctccaactcccccgactggggttttcttcacgagtgttcctcagccttggcactctggatattttctat

SEQ ID NO: 335001 - DNA, 120 bp, Artificial Sequence
  ENSG00000137221_37 (sequence is synthesized)
tgggaatcatttgtggtgggagttgccctatggttgtgggatgaccaaagcatccccggcttctacccactaggtgccagtggcactccttccctccaggtttcgacaaccaaaaatgtc

SEQ ID NO: 335002 - DNA, 120 bp, Artificial Sequence
  ENSG00000137221_38 (sequence is synthesized)
tccagacacttgccagacgtccctggggaaggagagtgggcgccagacgtccctggggaaggagggtggacagagttgcctggttgagagctactgctctgtgttgctcccttttcagat

SEQ ID NO: 335003 - DNA, 120 bp, Artificial Sequence
  ENSG00000137221_39 (sequence is synthesized)
ttcttctcctagccctatgcctcctcattgcaaaggccggtgaccatcattatacaccaaatagccttgggcctccttctggaaatgctaggtgctctctttccatcattttctctatct

SEQ ID NO: 335004 - DNA, 120 bp, Artificial Sequence
  ENSG00000137221_40 (sequence is synthesized)
tcttggatctctgtgaggctttttcctggtgttctcatttgtaacccatgttccccaaatctcttagttgtttccaaactctgagaggcttgggagatgaggaccgatgtggagtaggga

SEQ ID NO: 335005 - DNA, 120 bp, Artificial Sequence
  ENSG00000137221_41 (sequence is synthesized)
caggacggaaccggacctattccagaattgggcaatgtgctgagaccatgaacacacagacacatgtatctcatctgggcctgtgacagtactgtcatggagaaaggcaggaacccagtg

SEQ ID NO: 335006 - DNA, 120 bp, Artificial Sequence
  ENSG00000137221_42 (sequence is synthesized)
cttccagtcatctgcctccagccgctttcccctcaggccctctgtttcatggccttcctgccgtggttctccctggggggccttccaggtcccagactgggcagcaggcctgtagcactg

SEQ ID NO: 335007 - DNA, 120 bp, Artificial Sequence
  ENSG00000137221_43 (sequence is synthesized)
acagacaggcggctgacacctggtttccactttcttcccttctctggtttcaggagctgtggctaaaggaagtggaggggccgtgggatgcggagagccgagggctaactcccggacagc

SEQ ID NO: 335008 - DNA, 120 bp, Artificial Sequence
  ENSG00000137221_44 (sequence is synthesized)
gctagactgttggtacagttggactttcccttggattaggtagaaataaaggttgggatgggttgttttagggactctgggaggagtgttgatgttgtggatattttttctggaaaatgg

SEQ ID NO: 335009 - DNA, 120 bp, Artificial Sequence
  ENSG00000137221_45 (sequence is synthesized)
cctatcagtcctgaggcctggcccccactcccaaccttggctctagactgttactcttaagctttgagaaattttcacattgatgactattttaaaatcaaataaaactattttactggt

SEQ ID NO: 335010 - DNA, 120 bp, Artificial Sequence
  ENSG00000137221_46 (sequence is synthesized)
gctaagaaaccctaccgtaaggcaccaccagagcatcgggagctgcgtttggaaattcctggatcccggcttgagcaggagagagccctgcagccctcttctgctataagagtctttggg

SEQ ID NO: 335011 - DNA, 120 bp, Artificial Sequence
  ENSG00000137221_47 (sequence is synthesized)
tcttctcccttgccctggccttctcctcagctgagatctgggattgtgggccctggctgttaccctgtgccccttgagtacacccgctcctttctcttccctgtatgaggcccgtttaac

SEQ ID NO: 335012 - DNA, 120 bp, Artificial Sequence
  ENSG00000137221_48 (sequence is synthesized)
tgtcaatgcctccctcccaggagagaggtggggagcctagcctgctctgcccttggctctggtagaggtactgattgatgtctccactgaacacccaaagcttcttggctccagtggcag

SEQ ID NO: 335013 - DNA, 120 bp, Artificial Sequence
  ENSG00000137221_49 (sequence is synthesized)
caagcccaggctgtgggagtggggaggggaggctgcagatccagtccctgaactggagatcagaaggctacttttgagcctgcagcttgctccctgctcaacaaggtgccctggctgcca

SEQ ID NO: 335014 - DNA, 120 bp, Artificial Sequence
  ENSG00000137221_50 (sequence is synthesized)
ccgcgccctgcttcctcttccctctcctagcctgatgctggaaacagctgcacacataggaggcttcagccccctggtttgcagttactgccgttgaggtaccagctgccttgcctggtg

SEQ ID NO: 335015 - DNA, 120 bp, Artificial Sequence
  ENSG00000137221_51 (sequence is synthesized)
cccagagcccctggaacctcaggggatggacagctcttatactgcctgtgtcctgggcccaggtggcaggaagtcatgctaagaaagcccccaccccacagccagtccagagagcgggag

SEQ ID NO: 335016 - DNA, 120 bp, Artificial Sequence
  ENSG00000137221_52 (sequence is synthesized)
agatgcccagtctccttctgtctgtccgtcatttgtctctgctctgtccgccttggctgccctagcacctgtggcctcttgtgtctccaggatgggaggaggtggagggagaggaagggc

SEQ ID NO: 335017 - DNA, 120 bp, Artificial Sequence
  ENSG00000137225_0 (sequence is synthesized)
aactgtcaagcaccgagctagccaccagcatgctgtactccccagggccgagtcttccggagtcagcagagagcctggatggatcacaggaggataagcctcggggctcatgtgcggagc

SEQ ID NO: 335018 - DNA, 120 bp, Artificial Sequence
  ENSG00000137225_1 (sequence is synthesized)
ccacttttactgatacgggaatggtggctcacataaacaacagccggctcaaggccaagggcgtgggccagcacgacaacgcccagaactttggtaaccagagctttgaggagctgcgag

SEQ ID NO: 335019 - DNA, 120 bp, Artificial Sequence
  ENSG00000137225_2 (sequence is synthesized)
cagcctgtctaagaaagggggagctcttcgaggaccccttattccctgctgaacccagctcactgggcttcaaggacctgggccccaactccaaaaatgtgcagaacatctcctggcagc

SEQ ID NO: 335020 - DNA, 120 bp, Artificial Sequence
  ENSG00000137225_3 (sequence is synthesized)
ggcccaaggatatcataaacaaccctctattcatcatggatgggatttctccaacagacatctgccaggggatcctcggggactgctggctgctggctgccatcggctcccttaccacct

SEQ ID NO: 335021 - DNA, 120 bp, Artificial Sequence
  ENSG00000137225_4 (sequence is synthesized)
gccccaaactgctataccgcgtggtgcccagaggacagagcttcaagaaaaactatgctggcatcttccattttcagatttggcagtttggacagtgggtgaacgtggtggtagatgacc

SEQ ID NO: 335022 - DNA, 120 bp, Artificial Sequence
  ENSG00000137225_5 (sequence is synthesized)
ggctgcccacaaagaatgacaagctggtgtttgtgcactcaaccgaacgcagtgagttctggagtgccctgctggagaaggcgtatgccaagctgagtgggtcctatgaagcattgtcag

SEQ ID NO: 335023 - DNA, 120 bp, Artificial Sequence
  ENSG00000137225_6 (sequence is synthesized)
ggggcagtaccatggagggccttgaggacttcacaggaggcgtggcccagagcttccaactccagaggccccctcagaacctgctcaggctccttaggaaggccgtggagcgatcctccc

SEQ ID NO: 335024 - DNA, 120 bp, Artificial Sequence
  ENSG00000137225_7 (sequence is synthesized)
tcatgggttgctccattgaagtcaccagtgatagtgaactggaatccatgactgacaagatgctggtgagagggcacgcttactctgtgactggccttcaggatgtccactacagaggca

SEQ ID NO: 335025 - DNA, 120 bp, Artificial Sequence
  ENSG00000137225_8 (sequence is synthesized)
aaatggaaacactgattcgggtccggaatccctggggccggattgagtggaatggagcttggagtgacagtgccagggagtgggaagaggtggcctcagacatccagatgcagctgctgc

SEQ ID NO: 335026 - DNA, 120 bp, Artificial Sequence
  ENSG00000137225_9 (sequence is synthesized)
acaagacggaggacggggagttctggatgtcctaccaagatttcctgaacaacttcacgctcctggagatctgcaacctcacgcctgatacactctctggggactacaagagctactggc

SEQ ID NO: 335027 - DNA, 120 bp, Artificial Sequence
  ENSG00000137225_10 (sequence is synthesized)
acaccaccttctacgagggcagctggcgcagaggcagctccgcagggggctgcaggaaccaccctggcacgttctggaccaacccccagtttaagatctctcttcctgagggggatgacc

SEQ ID NO: 335028 - DNA, 120 bp, Artificial Sequence
  ENSG00000137225_11 (sequence is synthesized)
ggcagcagggagcccagctgcagaccattggctttgtcctctacgcggtcccaaaagagtttcagaacattcaggatgtccacttgaagaaggaattcttcacgaagtatcaggaccacg

SEQ ID NO: 335029 - DNA, 120 bp, Artificial Sequence
  ENSG00000137225_12 (sequence is synthesized)
gcttctcagagatcttcaccaactcacgggaggtgagcagccaactccggctgcctccgggggaatatatcattattccctccacctttgagccacacagagatgctgacttcctgcttc

SEQ ID NO: 335030 - DNA, 120 bp, Artificial Sequence
  ENSG00000137225_13 (sequence is synthesized)
gggtcttcaccgagaagcacagcgagtcatgggaattggatgaagtcaactatgctgagcaactccaagaggaaaaggtctctgaggatgacatggaccaggacttcctacatttgttta

SEQ ID NO: 335031 - DNA, 120 bp, Artificial Sequence
  ENSG00000137225_14 (sequence is synthesized)
agatagtggcaggagagggcaaggagataggggtgtatgagctccagaggctgctcaacaggatggccatcaaattcaaaagcttcaagaccaagggctttggcctggatgcttgccgct

SEQ ID NO: 335032 - DNA, 120 bp, Artificial Sequence
  ENSG00000137225_15 (sequence is synthesized)
gcatgatcaacctcatggataaagatggctctggcaagctggggcttctagagttcaagatcctgtggaaaaaactcaagaaatggatggacatcttcagagagtgtgaccaggaccatt

SEQ ID NO: 335033 - DNA, 120 bp, Artificial Sequence
  ENSG00000137225_16 (sequence is synthesized)
caggcaccttgaactcctatgagatgcgcctggttattgagaaagcaggcatcaagctgaacaacaaggtaatgcaggtcctggtggccaggtatgcagatgatgacctgatcatagact

SEQ ID NO: 335034 - DNA, 120 bp, Artificial Sequence
  ENSG00000137225_17 (sequence is synthesized)
ttgacagcttcatcagctgtttcctgaggctaaagaccatgttcacattctttctaaccatggaccccaagaatactggccatatttgcttgagcctggaacagtggctgcagatgacca

SEQ ID NO: 335035 - DNA, 120 bp, Artificial Sequence
  ENSG00000137225_18 (sequence is synthesized)
tgtggggatagaggcgctgtaggagcctggtcatctctaccagcagcagcagcagcgaggttctagcccaggagggtggggtgcttcttgtagccctcagctctccggtctctgctgatg

SEQ ID NO: 335036 - DNA, 120 bp, Artificial Sequence
  ENSG00000137225_19 (sequence is synthesized)
aaatgggctccaggtggcagtgcccgggtcccaggtgccgtgtttactgcagcagtgggacctccgtgcccactcccccagctcagaggctttctcttttttccccaacccggcttctga

SEQ ID NO: 335037 - DNA, 120 bp, Artificial Sequence
  ENSG00000137225_20 (sequence is synthesized)
tggctggctttcccccaccatcgctctctcagagtatattttactaaagagtagttgatgcttccccagggtccccctggctggggaggccaagaatagggaagggacttgtagcccgtt

SEQ ID NO: 335038 - DNA, 120 bp, Artificial Sequence
  ENSG00000137225_21 (sequence is synthesized)
tcttaccctccatgcttgctgtcctgctcacacctacctgctgaccacccatcctggcacagcctctgttttcctccccatctgtggatactattctaataaatagcacatgccattggc

SEQ ID NO: 335039 - DNA, 120 bp, Artificial Sequence
  ENSG00000137225_22 (sequence is synthesized)
agaaccttcaactgtcaagcaccgagctagccaccagcatgctgtactccccagggccgagtcttccggagtcagcagagagcctggatggatcacaggaggataagcctcggggctcat

SEQ ID NO: 335040 - DNA, 120 bp, Artificial Sequence
  ENSG00000137225_23 (sequence is synthesized)
cttgttcctggacacatacccactccacccctggctgcaagtggattggcaaagggtggaatttggcgagaggctctgggggtcactgggttaggattccagccctcttcagggctggta

SEQ ID NO: 335041 - DNA, 120 bp, Artificial Sequence
  ENSG00000137225_24 (sequence is synthesized)
ggggtcgggaaaggaagagaccctgttggagttgcgggccacttagatggtgtccaggccaggtcagttggtggtggcacctacctccaaccctgcccggccaggctgttcaccctgggg

SEQ ID NO: 335042 - DNA, 120 bp, Artificial Sequence
  ENSG00000137225_25 (sequence is synthesized)
ctggaggggcccgagtggggttcacagttccccttcctagggcaaggagataggggtgtatgagctccagaggctgctcaacaggatggccatcaaatgtgagtcttccactcctgctgc

SEQ ID NO: 335043 - DNA, 120 bp, Artificial Sequence
  ENSG00000137225_26 (sequence is synthesized)
acacgacccctcccccatattttgtgcccctcttgatcactcccagtgcccccacgatacctcatttaccctgtctctcctttctaccccttcccttcctcacagtcaaaagcttcaaga

SEQ ID NO: 335044 - DNA, 120 bp, Artificial Sequence
  ENSG00000137225_27 (sequence is synthesized)
gtcctggtggccaggtatgcagatgatgacctgatcatagactttgacagcttcatcagctgtttcctgaggctaaagaccatgttcagtgagttaggcatctacccactccccagccta

SEQ ID NO: 335045 - DNA, 120 bp, Artificial Sequence
  ENSG00000137225_28 (sequence is synthesized)
aactgtcaagcaccgagctagccaccagcatgctgtactccccaggcccccaggagagctcaacaccctcagtcctcggagcagccagggtagaggctgcctggagtgactgcacggtgc

SEQ ID NO: 335046 - DNA, 120 bp, Artificial Sequence
  ENSG00000137251_0 (sequence is synthesized)
gttcaggctgaagtgtcttaatgactagaattcaggttccaaggagaagcccacaaggctaagggtattggatataacggaaagtggaagctatacctgacttccagagaatgtggaccg

SEQ ID NO: 335047 - DNA, 120 bp, Artificial Sequence
  ENSG00000137251_1 (sequence is synthesized)
gatataagatcttaatcttctcttatcttactacagaaatctggatggagaagcagtatttatctcaaagagaagtggacctagaggcttatttcactaggaatcacaccgttttgcaag

SEQ ID NO: 335048 - DNA, 120 bp, Artificial Sequence
  ENSG00000137251_2 (sequence is synthesized)
gtactcgattcaaaagagccattttccaagggcaatactgtagaaattttggctgttgtgaagacagagatgatggctgtgtcactgagttctatgcggcgaatgcgttgtgctactgtg

SEQ ID NO: 335049 - DNA, 120 bp, Artificial Sequence
  ENSG00000137251_3 (sequence is synthesized)
ataaattctgtgacagagaaaattctgattgctgtcctgactacaagtccttttgccgtgaagagaaagaatggcctcctcacacacagccttggtatccagaaggttgcttcaaagatg

SEQ ID NO: 335050 - DNA, 120 bp, Artificial Sequence
  ENSG00000137251_4 (sequence is synthesized)
gtcaacattatgaagagggatcagtaattaaagaaaactgcaactcctgcacatgctcaggacagcaatggaaatgttcccagcatgtatgccttgttcgttcagaattaattgaacagg

SEQ ID NO: 335051 - DNA, 120 bp, Artificial Sequence
  ENSG00000137251_5 (sequence is synthesized)
tcaataaaggagactatggatggacagcacagaattacagccaattttggggaatgactttagaagatggttttaaatttcgccttggcactttgccacctagtcccatgctcctgagca

SEQ ID NO: 335052 - DNA, 120 bp, Artificial Sequence
  ENSG00000137251_6 (sequence is synthesized)
tgaatgaaatgacagcttctttacctgcaacaactgatcttccagagttttttgttgcttcttataaatggcctggatggactcatggcccattggatcaaaaaaattgtgctgcatcct

SEQ ID NO: 335053 - DNA, 120 bp, Artificial Sequence
  ENSG00000137251_7 (sequence is synthesized)
ctcagaatttgatctcttgctgtgccaagaaccgtcatggatgcaatagtggaagcatcgatagggcttggtggtacctgagaaaacgtggactggtatcccacgcatgctacccacttt

SEQ ID NO: 335054 - DNA, 120 bp, Artificial Sequence
  ENSG00000137251_8 (sequence is synthesized)
tcaaagaccaaaatgctaccaacaatggatgtgccatggcaagcaggtctgatgggcgaggaaaacggcatgccacgaagccatgtcccaacaacgtagaaaaatctaacaggatctatc

SEQ ID NO: 335055 - DNA, 120 bp, Artificial Sequence
  ENSG00000137251_9 (sequence is synthesized)
aatgttctcctccatacagagtctcttccaacgaaactgagataatgaaagaaatcatgcaaaatggaccagttcaagccataatgcaagtccgtgaagatttcttccattataagacag

SEQ ID NO: 335056 - DNA, 120 bp, Artificial Sequence
  ENSG00000137251_10 (sequence is synthesized)
ggatatacagacatgttaccagcacaaataaagaatcagaaaaatatcgaaagcttcagacacatgcagtcaaactcactggatggggcacactgagaggagcacaagggcagaaagaaa

SEQ ID NO: 335057 - DNA, 120 bp, Artificial Sequence
  ENSG00000137251_11 (sequence is synthesized)
aattttggattgctgccaattcctggggaaagtcatggggagagaatggctatttcaggattcttcgaggagtaaatgagtccgacattgaaaagttgattatcgcagcttggggccaac

SEQ ID NO: 335058 - DNA, 120 bp, Artificial Sequence
  ENSG00000137251_12 (sequence is synthesized)
tgacgagttctgatgaaccataacatatcattaaatttccataaggtcatgcctttaagtaaccccctaaattgaagtttagcaatatgacattcttggtgacagtggaatctttgtctc

SEQ ID NO: 335059 - DNA, 120 bp, Artificial Sequence
  ENSG00000137251_13 (sequence is synthesized)
ttcaccgtgttaacataatctatctattttcttattttcccctctggtctatgcttctgcttccttcatattactgagcattaacaacaccaataaaggacagcagagtccctaaatgtc

SEQ ID NO: 335060 - DNA, 120 bp, Artificial Sequence
  ENSG00000137251_14 (sequence is synthesized)
cccagtgtttgtgctaagcagggactcaggtggagagaactaaggtcaccctcagggaatttcttgctgaattaggttccactaagccttgaaatcaaaacgcttctgaaatctggatgg

SEQ ID NO: 335061 - DNA, 120 bp, Artificial Sequence
  ENSG00000137251_15 (sequence is synthesized)
ggtaggtaaatggagtacagatgggaaatcaaaccagtgtgtgactgggcatgatttagagcaactgttattgatatgacagatcctagcaggcaacctcatgagagcctggatgttcgt

SEQ ID NO: 335062 - DNA, 120 bp, Artificial Sequence
  ENSG00000137252_0 (sequence is synthesized)
gactgagtgctggaatgaggagtaattgagcttcagctgagccggacgtagctttctcctcctggtgtcattgctgcagcctccagtgccgggtccctagttcctcagctgcctatcttc

SEQ ID NO: 335063 - DNA, 120 bp, Artificial Sequence
  ENSG00000137252_1 (sequence is synthesized)
ccggtgcaacatcgcctgtaaagacagcaaagccaccgcagaagttgcccggcagaagactccggaggcattggctcagtaacttttcacgtcattttctgctcgggagccccttctagc

SEQ ID NO: 335064 - DNA, 120 bp, Artificial Sequence
  ENSG00000137252_2 (sequence is synthesized)
ctctccgcgcagcctttcccaccgcaaatcaccagtgctcatggggcaggcggagaggagcttgcagcattgagcggaaccggacttgagcccgtgatgtccggcaccaaattggaggac

SEQ ID NO: 335065 - DNA, 120 bp, Artificial Sequence
  ENSG00000137252_3 (sequence is synthesized)
tcccccccttgtcgcaactggtcatctgcttcggagctgaatgaaactcaagagccctttttaaaccccaccgactatgacgacgaggaattcctgcggtacctgtggagggaatacctg

SEQ ID NO: 335066 - DNA, 120 bp, Artificial Sequence
  ENSG00000137252_4 (sequence is synthesized)
cacccgaaagaatatgagtgggtcctgatcgccgggtacatcatcgtgttcgtcgtggctctcattgggaacgtcctggtttgtgtggcagtgtggaagaaccaccacatgaggacggta

SEQ ID NO: 335067 - DNA, 120 bp, Artificial Sequence
  ENSG00000137252_5 (sequence is synthesized)
accaactacttcatagtcaatctttctctggctgatgtgctcgtgaccatcacctgccttccagccacactggtcgtggatatcactgagacctggttttttggacagtccctttgcaaa

SEQ ID NO: 335068 - DNA, 120 bp, Artificial Sequence
  ENSG00000137252_6 (sequence is synthesized)
gtgattccttatctacagaccgtgtcggtgtctgtgtctgtcctcacactgagctgtatcgccttggatcggtggtatgcaatctgtcaccctttgatgtttaagagcacagcaaagcgg

SEQ ID NO: 335069 - DNA, 120 bp, Artificial Sequence
  ENSG00000137252_7 (sequence is synthesized)
gcattataatgattcctcaggccatcgtcatggagtgcagcaccgtgttcccaggcttagccaataaaaccaccctctttacggtgtgtgatgagcgctggggtggtgaaatttatccca

SEQ ID NO: 335070 - DNA, 120 bp, Artificial Sequence
  ENSG00000137252_8 (sequence is synthesized)
agatgtaccacatctgtttctttctggtgacatacatggcaccactgtgtctcatggtgttggcttatctgcaaatatttcgcaaactctggtgtcgacagatccctggaacatcatctg

SEQ ID NO: 335071 - DNA, 120 bp, Artificial Sequence
  ENSG00000137252_9 (sequence is synthesized)
tagttcagagaaaatggaagcccctgcagcctgtttcacagcctcgagggccaggacagccaacgaagtcccggatgagcgctgtggcggctgaaataaagcagatccgagccagaagga

SEQ ID NO: 335072 - DNA, 120 bp, Artificial Sequence
  ENSG00000137252_10 (sequence is synthesized)
aaacagcccggatgttgatgattgtgcttttggtatttgcaatttgctatctaccaattagcatcctcaatgtgctaaagagagtatttgggatgtttgcccatactgaagacagagaga

SEQ ID NO: 335073 - DNA, 120 bp, Artificial Sequence
  ENSG00000137252_11 (sequence is synthesized)
ctgtgtatgcctggtttaccttttcacactggcttgtatatgccaatagtgctgcgaatccaattatttataattttctcagtggaaaatttcgagaggaatttaaagctgcgttttctt

SEQ ID NO: 335074 - DNA, 120 bp, Artificial Sequence
  ENSG00000137252_12 (sequence is synthesized)
gctgttgccttggagttcaccatcgccaggaggatcggctcaccaggggacgaactagcacagagagccggaagtccttgaccactcaaatcagcaactttgataacatatcaaaacttt

SEQ ID NO: 335075 - DNA, 120 bp, Artificial Sequence
  ENSG00000137252_13 (sequence is synthesized)
ctgagcaagttgtgctcactagcataagcacactcccagcagccaatggagcaggaccacttcaaaactggtagaatatttattcatatgacaaggatacctgagtaaaactatcctttt

SEQ ID NO: 335076 - DNA, 120 bp, Artificial Sequence
  ENSG00000137252_14 (sequence is synthesized)
taaaatcactgggaacagaaattttattatcctatgatgtgaagctaaaattacttgtggatcttttttttttttaatctattgctctttggaaataaaaaaaaagtcagtttaaaatga

SEQ ID NO: 335077 - DNA, 120 bp, Artificial Sequence
  ENSG00000137252_15 (sequence is synthesized)
attccttttgactcactgaaacaaatcaagaggtgaatatattgaagtgagttatttttagtgaaggtggaatttgagcattcaagcttcagctctccctcagcgagggaggaggctgtg

SEQ ID NO: 335078 - DNA, 120 bp, Artificial Sequence
  ENSG00000137261_0 (sequence is synthesized)
gaatcactggcgcgcgctttccccgagcctgcagaagctgccgcgggcggtgggcggggatcccccgggggtgcaaccttgctccacctgtgctgccctcggcgggcctggctggccccg

SEQ ID NO: 335079 - DNA, 120 bp, Artificial Sequence
  ENSG00000137261_1 (sequence is synthesized)
cgcagagcggcggcggcgctcgctgtcactgccggaggtgagagcgcagcagtagcttcagcctgtcttgggcttggtccagattcgctcctctggggctacgtcccggggaagaggaag

SEQ ID NO: 335080 - DNA, 120 bp, Artificial Sequence
  ENSG00000137261_2 (sequence is synthesized)
tcgctcctctggggctacgtcccggggaagaggaagcgaggattttgctggggtggggctgtacctcttaacagcaggtgcgcgcgcgagggtgtgaacgtgtgtgtgtgtgtgtgtgtg

SEQ ID NO: 335081 - DNA, 120 bp, Artificial Sequence
  ENSG00000137261_3 (sequence is synthesized)
gatgacgacgaggaggaacaagtgggacggcgagtgatgctcagggccagcagcaacgcatggggcgagcttcagtgtcgccagcagtgaccacagttcttgaggccaaatctggctcct

SEQ ID NO: 335082 - DNA, 120 bp, Artificial Sequence
  ENSG00000137261_4 (sequence is synthesized)
aaaaaacatcaaaggaagcttgcaccaaactctcttcagggccgcctcagaagcctgccatcacccactgtgtggtgcacaatggcgccccccacaggtgtgctctcttcattgctgctg

SEQ ID NO: 335083 - DNA, 120 bp, Artificial Sequence
  ENSG00000137261_5 (sequence is synthesized)
ctggtgacaattgcaggttgtgcccgtaagcagtgcagcgaggggaggacatattccaatgcagtcatttcacctaacttggaaaccaccagaatcatgcgggtgtctcacaccttccct

SEQ ID NO: 335084 - DNA, 120 bp, Artificial Sequence
  ENSG00000137261_6 (sequence is synthesized)
gtcgtagactgcacggccgcttgctgtgacctgtccagctgtgacctggcctggtggttcgagggccgctgctacctggtgagctgcccccacaaagagaactgtgagcccaagaagatg

SEQ ID NO: 335085 - DNA, 120 bp, Artificial Sequence
  ENSG00000137261_7 (sequence is synthesized)
ggccccatcaggtcttatctcacttttgtgctccggcctgttcagaggcctgcacagctgctggactatggggacatgatgctgaacaggggctccccctcggggatctggggggactca

SEQ ID NO: 335086 - DNA, 120 bp, Artificial Sequence
  ENSG00000137261_8 (sequence is synthesized)
cctgaggatatcagaaaggacttgacctttctaggcaaagattggggcctagaggagatgtctgagtactcagatgactaccgggagctggagaaggacctcttgcaacccagtggcaag

SEQ ID NO: 335087 - DNA, 120 bp, Artificial Sequence
  ENSG00000137261_9 (sequence is synthesized)
caggagcccagagggagtgccgagtacacggactggggcctactgccgggcagcgagggggccttcaactcctctgttggagacagtcctgcggtgccagcggagacgcagcaggaccct

SEQ ID NO: 335088 - DNA, 120 bp, Artificial Sequence
  ENSG00000137261_10 (sequence is synthesized)
gagctccattacctgaatgagtcggcttcaacccctgccccaaaactccctgagagaagtgtgttgcttcccttgccgactactccatcttcaggagaggtgttggagaaagaaaaggct

SEQ ID NO: 335089 - DNA, 120 bp, Artificial Sequence
  ENSG00000137261_11 (sequence is synthesized)
tctcagctccaggaacaatccagcaacagctctggaaaagaggttctaatgccttcccatagtcttcctccggcaagcctggagctcagctcagtcaccgtggagaaaagcccagtgctc

SEQ ID NO: 335090 - DNA, 120 bp, Artificial Sequence
  ENSG00000137261_12 (sequence is synthesized)
acagtcaccccggggagtacagagcacagcatcccaacacctcccactagcgcagccccctctgagtccaccccatctgagctacccatatctcctaccactgctcccaggacagtgaaa

SEQ ID NO: 335091 - DNA, 120 bp, Artificial Sequence
  ENSG00000137261_13 (sequence is synthesized)
gaacttacggtatcggctggagataacctaattataactttacccgacaatgaagttgaactgaaggcctttgttgcgccagcgccacctgtagaaacaacctacaactatgaatggaat

SEQ ID NO: 335092 - DNA, 120 bp, Artificial Sequence
  ENSG00000137261_14 (sequence is synthesized)
ttaataagccaccccacagactaccaaggtgaaataaaacaaggacacaagcaaactcttaacctctctcaattgtccgtcggactttatgtcttcaaagtcactgtttctagtgaaaac

SEQ ID NO: 335093 - DNA, 120 bp, Artificial Sequence
  ENSG00000137261_15 (sequence is synthesized)
gcctttggagaaggatttgtcaatgtcactgttaagcctgccagaagagtcaacctgccacctgtagcagttgtttctccccaactgcaagagctcactttgcctttgacgtcagccctc

SEQ ID NO: 335094 - DNA, 120 bp, Artificial Sequence
  ENSG00000137261_16 (sequence is synthesized)
attgatggcagccaaagtacagatgatactgaaatagtgagttatcattgggaagaaataaacgggcccttcatagaagagaagacttcagttgactctcccgtcttacgcttgtctaac

SEQ ID NO: 335095 - DNA, 120 bp, Artificial Sequence
  ENSG00000137261_17 (sequence is synthesized)
cttgatcctggtaactatagtttcaggttgactgttacagactcggacggagccactaactctacaactgcagccctaatagtgaacaatgctgtggactacccaccagttgctaatgca

SEQ ID NO: 335096 - DNA, 120 bp, Artificial Sequence
  ENSG00000137261_18 (sequence is synthesized)
ggaccaaatcacaccataactttgccccaaaactccatcactttgaatggaaaccagagcagtgacgatcaccagattgtcctctatgagtggtccctgggtcctgggagtgagggcaaa

SEQ ID NO: 335097 - DNA, 120 bp, Artificial Sequence
  ENSG00000137261_19 (sequence is synthesized)
catgtggtcatgcagggagtacagacgccataccttcatttatctgcaatgcaggaaggagattatacatttcagctgaaggtgacagattcttcaaggcaacagtctactgctgtggtg

SEQ ID NO: 335098 - DNA, 120 bp, Artificial Sequence
  ENSG00000137261_20 (sequence is synthesized)
actgtgattgtccagcctgaaaacaatagacctccagtggctgtggccggccctgataaagagctgatcttcccagtggaaagtgctaccctggatgggagcagcagcagcgatgaccac

SEQ ID NO: 335099 - DNA, 120 bp, Artificial Sequence
  ENSG00000137261_21 (sequence is synthesized)
ggcattgtcttctaccactgggagcacgtcagaggccccagtgcagtggagatggaaaatattgacaaagcaatagccactgtgactggtctccaggtggggacctaccacttccgtttg

SEQ ID NO: 335100 - DNA, 120 bp, Artificial Sequence
  ENSG00000137261_22 (sequence is synthesized)
acagtgaaagaccagcagggactgagcagcacgtccaccctcactgtggctgtgaagaaggaaaataatagtcctcccagagcccgggctggtggcagacatgttcttgtgcttcccaat

SEQ ID NO: 335101 - DNA, 120 bp, Artificial Sequence
  ENSG00000137261_23 (sequence is synthesized)
aattccattactttggatggttcaaggtctactgatgaccaaagaattgtgtcctatctgtggatccgggatggccagagtccagcagctggagatgtcatcgatggctctgaccacagt

SEQ ID NO: 335102 - DNA, 120 bp, Artificial Sequence
  ENSG00000137261_24 (sequence is synthesized)
gtggctctgcagcttacgaatctggtggagggggtgtacactttccacttgcgagtcaccgacagtcagggggcctcggacacagacactgccactgtggaagtgcagccagaccctagg

SEQ ID NO: 335103 - DNA, 120 bp, Artificial Sequence
  ENSG00000137261_25 (sequence is synthesized)
aagagtggcctggtggagctgaccctgcaggttggtgttgggcagctgacagagcagcggaaggacacccttgtgaggcagctggctgtgctgctgaacgtgctggactcggacattaag

SEQ ID NO: 335104 - DNA, 120 bp, Artificial Sequence
  ENSG00000137261_26 (sequence is synthesized)
gtccagaagattcgggcccactcggatctcagcaccgtgattgtgttttatgtacagagcaggccgcctttcaaggttctcaaagctgctgaagtggcccgaaatctgcacatgcggctc

SEQ ID NO: 335105 - DNA, 120 bp, Artificial Sequence
  ENSG00000137261_27 (sequence is synthesized)
tcaaaggagaaggctgacttcttgcttttcaaggtcttgagggttgatacagcaggttgccttctgaagtgttctggccatggtcactgcgaccccctcacaaagcgctgcatttgctct

SEQ ID NO: 335106 - DNA, 120 bp, Artificial Sequence
  ENSG00000137261_28 (sequence is synthesized)
tcacttggctttgcatctgctgctgcaaaagacaaaaaaggactaaaatcaggaaaaaaacaaagtacaccatcctggataacatggatgaacaggaaagaatggaactgaggcccaaat

SEQ ID NO: 335107 - DNA, 120 bp, Artificial Sequence
  ENSG00000137261_29 (sequence is synthesized)
atggtatcaagcaccgaagcacagagcacaactccagcctgatggtatccgagtctgagtttgacagtgaccaggacacaatcttcagccgagaaaagatggagagagggaatccaaagg

SEQ ID NO: 335108 - DNA, 120 bp, Artificial Sequence
  ENSG00000137261_30 (sequence is synthesized)
tttccatgaatggttccatcagaaatggagcttccttcagttattgctcaaaggacagataatggcgcagttcattgtaaagtggaaggaccccttgaatccaagaccagtcagtgggag

SEQ ID NO: 335109 - DNA, 120 bp, Artificial Sequence
  ENSG00000137261_31 (sequence is synthesized)
ttacagcacaaaacccactcttttagaatagttcattgaccttcttccccagtgggttagatgtgtatccccacgtactaaaagaccggtttttgaaggcacaaaacaaaaactttgctc

SEQ ID NO: 335110 - DNA, 120 bp, Artificial Sequence
  ENSG00000137261_32 (sequence is synthesized)
ttttaactgagatgcttgttaatagaaataaaggctgggtaaaactctaaggtatatacttaaaagagttttgagtttttgtagctggcacaatctcatattaaagatgaacaacgattt

SEQ ID NO: 335111 - DNA, 120 bp, Artificial Sequence
  ENSG00000137261_33 (sequence is synthesized)
ctatctgtagaaccttagagaaggtgaatgaaacaaggttttaaaaagggatgatttctgtcttagctgctgtgattgcctctaaggaacagcattctaaacacggtttctcttgtagga

SEQ ID NO: 335112 - DNA, 120 bp, Artificial Sequence
  ENSG00000137261_34 (sequence is synthesized)
cctgcagtcagatggctgtgtatgttaaaatagcttgtctaagaggcacgggccatctgtggaggtacggagtcttgcatgtagcaagctttctgtgctgacggcaacactcgcacagtg

SEQ ID NO: 335113 - DNA, 120 bp, Artificial Sequence
  ENSG00000137261_35 (sequence is synthesized)
ccaagccctcctggtttttaattctgtgctatgtcaatggcagttttcatctctctcaagaaagcagctgttggccattcaagagctaaggaagaatcgtattctaaggactgaggcaat

SEQ ID NO: 335114 - DNA, 120 bp, Artificial Sequence
  ENSG00000137261_36 (sequence is synthesized)
agaaaggggaggaggagcttaatgccgtgcaggttgaaggtagcattgtaacattatcttttctttctctaagaaaaactacactgactcctctcggtgttgtttagcagtatagttctc

SEQ ID NO: 335115 - DNA, 120 bp, Artificial Sequence
  ENSG00000137261_37 (sequence is synthesized)
taatgtaaacggatccccagtttacattaaatgcaatagaagtgattaattcattaagcatttattatgttctgtaggctgtgcgtttggactgccatagatagggataacgactcagca

SEQ ID NO: 335116 - DNA, 120 bp, Artificial Sequence
  ENSG00000137261_38 (sequence is synthesized)
attgtgtatatattccaaaactctgaaatacagtcagtcttaacttggatggcgtggttatgatactctggtccccgacaggtactttccaaaataacttgacatagatgtattcacttc

SEQ ID NO: 335117 - DNA, 120 bp, Artificial Sequence
  ENSG00000137261_39 (sequence is synthesized)
atatgtttaaaaatacatttaagtttttctaccgaataaatcttatttcaaacatgaaagacaattaaaacattcccacccacaaagcagtactcccgagcaattaactggagttaattg

SEQ ID NO: 335118 - DNA, 120 bp, Artificial Sequence
  ENSG00000137261_40 (sequence is synthesized)
tagcctgctacgttgactggttcagggtagttccccatccacccttggtcctgaggctggtggccttggtggtgcccttggcattttttgtgggaagattagaatgagagatagaaccag

SEQ ID NO: 335119 - DNA, 120 bp, Artificial Sequence
  ENSG00000137261_41 (sequence is synthesized)
tgttgtggtaccaagtgtgagcacacctaaacaatatcctgttgcacaatgcttttttaacacatgggaaaactaggaatgcattgctgatgaagaagcaaggtatttaaacaccagggc

SEQ ID NO: 335120 - DNA, 120 bp, Artificial Sequence
  ENSG00000137261_42 (sequence is synthesized)
aggagtgccagagaaaatgtttccccatgggttcttaaaaaaaattcagcttttaggtgcttttgtcatctcccgcagtattcatcctcatgggaccatcttatttttacttattgtaat

SEQ ID NO: 335121 - DNA, 120 bp, Artificial Sequence
  ENSG00000137261_43 (sequence is synthesized)
ttactggggaaaggcagaactaaaaagtgtgtcattttatttttaaaataattgctttgcttatgcctacactttctgtataactagccaattcaatactgtctatagtgttagaaggaa

SEQ ID NO: 335122 - DNA, 120 bp, Artificial Sequence
  ENSG00000137261_44 (sequence is synthesized)
aatgtgatttttttttttaaccagtattgagcttcataagcctagaatctgccttatcaggtgaccagggttatggttgtttgcatgcaaatgtgaatttctggcataggggacagcagc

SEQ ID NO: 335123 - DNA, 120 bp, Artificial Sequence
  ENSG00000137261_45 (sequence is synthesized)
ccaaatgtaaagtcatcgggcgtaatgaggaagaagggagtgaacatttaccgctttatgtacataacatatgcagtttacatactcatttgatccttataatcaaccttgaagaggaga

SEQ ID NO: 335124 - DNA, 120 bp, Artificial Sequence
  ENSG00000137261_46 (sequence is synthesized)
tactatcattcttatgttgcagatagccctctgaaggcccagagaggttaaataacttcccagaggtcatggccaagaagtagtggctccaagaactgaatgcaaattttttaaactgta

SEQ ID NO: 335125 - DNA, 120 bp, Artificial Sequence
  ENSG00000137261_47 (sequence is synthesized)
gagttctgctttccactaaacaaagaactcctgccttgatggatggagggcaaattctggtggaacttttgggccacctgaaagttctattcccaggactaagaggaatttcttttaatg

SEQ ID NO: 335126 - DNA, 120 bp, Artificial Sequence
  ENSG00000137261_48 (sequence is synthesized)
gatccagagagccaaggtcagagggagagatggcctgcatagtctcctgtggatcacacccgggccacccctccctctaggtttacagtggacttcttctgcccctcctccttttctgtc

SEQ ID NO: 335127 - DNA, 120 bp, Artificial Sequence
  ENSG00000137261_49 (sequence is synthesized)
cttggccatctcagcctggcctctctgatccttccatcacagaaggatcttgaatctctgggaaatcaaacatcacagtagtgatcagaaagtgagtcctgtcttgtcaccccatttctc

SEQ ID NO: 335128 - DNA, 120 bp, Artificial Sequence
  ENSG00000137261_50 (sequence is synthesized)
atcagaacaaagcacgagatggaatgaccaaccagcattcttcatggtggactgcttatcattgaggatctttgggagataaagcacgctaagagctctggacagagaaaaacaggccct

SEQ ID NO: 335129 - DNA, 120 bp, Artificial Sequence
  ENSG00000137261_51 (sequence is synthesized)
agaatatgggagtgggtgtttgtagggctcacaggctaacaagcactttagttgctggtttacattcaatgaaggaggattcatacccatggcattacaaggctaagcatgtgtatgact

SEQ ID NO: 335130 - DNA, 120 bp, Artificial Sequence
  ENSG00000137261_52 (sequence is synthesized)
aaggaactatctgaaaaacatgcagcaaggtaagaaaatgtaccactcaacaagccagtgatgccaccttttgtgcgcggggaggagagtgactaccattgttttttgtgtgacaaagct

SEQ ID NO: 335131 - DNA, 120 bp, Artificial Sequence
  ENSG00000137261_53 (sequence is synthesized)
atcatggactattttaatcttggttttattgcttaaaatatattatttttccctatgtgttgacaaggtatttctaatatcacactattaaatatatgcactaatctaaataaaggtgtc

SEQ ID NO: 335132 - DNA, 120 bp, Artificial Sequence
  ENSG00000137261_54 (sequence is synthesized)
tgtattttctgtaatgcttatttttagggggaaatttgttttctttatgcttcagggtagagggatttcccttgagtataggtcagcaaactgtggcctacagcctgtgtgtgcacgccc

SEQ ID NO: 335133 - DNA, 120 bp, Artificial Sequence
  ENSG00000137261_55 (sequence is synthesized)
catgagccgaaaagtgggtcttatgttttcaaatggttaaaaataaataaaaaaatttgaaacatgtgaactatatgacattcagatttgtgttcataaataaagttttattggaacata

SEQ ID NO: 335134 - DNA, 120 bp, Artificial Sequence
  ENSG00000137261_56 (sequence is synthesized)
agatactgtggcattgacaatcacggctctcaggttctcaggatgcctcacactagctgctcaaaaaaatttattcaaaatgctctttcttctacttgtccagtgctctaccattcagta

SEQ ID NO: 335135 - DNA, 120 bp, Artificial Sequence
  ENSG00000137265_0 (sequence is synthesized)
agtttcaccgctcgatcttgggacccaccgctgccctcagctccgagtccagggcgagtgcagagcagagcgggcggaggaccccgggcgcgggcgcggacggcacgcggggcatgaacc

SEQ ID NO: 335136 - DNA, 120 bp, Artificial Sequence
  ENSG00000137265_1 (sequence is synthesized)
tggagggcggcggccgaggcggagagttcggcatgagcgcggtgagctgcggcaacgggaagctccgccagtggctgatcgaccagatcgacagcggcaagtaccccgggctggtgtggg

SEQ ID NO: 335137 - DNA, 120 bp, Artificial Sequence
  ENSG00000137265_2 (sequence is synthesized)
agaacgaggagaagagcatcttccgcatcccctggaagcacgcgggcaagcaggactacaaccgcgaggaggacgccgcgctcttcaaggcttgggcactgtttaaaggaaagttccgag

SEQ ID NO: 335138 - DNA, 120 bp, Artificial Sequence
  ENSG00000137265_3 (sequence is synthesized)
aaggcatcgacaagccggaccctcccacctggaagacgcgcctgcggtgcgctttgaacaagagcaatgactttgaggaactggttgagcggagccagctggacatctcagacccgtaca

SEQ ID NO: 335139 - DNA, 120 bp, Artificial Sequence
  ENSG00000137265_4 (sequence is synthesized)
aagtgtacaggattgttcctgagggagccaaaaaaggagccaagcagctcaccctggaggacccgcagatgtccatgagccacccctacaccatgacaacgccttacccttcgctcccag

SEQ ID NO: 335140 - DNA, 120 bp, Artificial Sequence
  ENSG00000137265_5 (sequence is synthesized)
cccagcaggttcacaactacatgatgccacccctcgaccgaagctggagggactacgtcccggatcagccacacccggaaatcccgtaccaatgtcccatgacgtttggaccccgcggcc

SEQ ID NO: 335141 - DNA, 120 bp, Artificial Sequence
  ENSG00000137265_6 (sequence is synthesized)
accactggcaaggcccagcttgtgaaaatggttgccaggtgacaggaaccttttatgcttgtgccccacctgagtcccaggctcccggagtccccacagagccaagcataaggtctgccg

SEQ ID NO: 335142 - DNA, 120 bp, Artificial Sequence
  ENSG00000137265_7 (sequence is synthesized)
aagccttggcgttctcagactgccggctgcacatctgcctgtactaccgggaaatcctcgtgaaggagctgaccacgtccagccccgagggctgccggatctcccatggacatacgtatg

SEQ ID NO: 335143 - DNA, 120 bp, Artificial Sequence
  ENSG00000137265_8 (sequence is synthesized)
acgccagcaacctggaccaggtcctgttcccctacccagaggacaatggccagaggaaaaacattgagaagctgctgagccacctggagaggggcgtggtcctctggatggcccccgacg

SEQ ID NO: 335144 - DNA, 120 bp, Artificial Sequence
  ENSG00000137265_9 (sequence is synthesized)
ggctctatgcgaaaagactgtgccagagcaggatctactgggacgggcccctggcgctgtgcaacgaccggcccaacaaactggagagagaccagacctgcaagctctttgacacacagc

SEQ ID NO: 335145 - DNA, 120 bp, Artificial Sequence
  ENSG00000137265_10 (sequence is synthesized)
agttcttgtcagagctgcaagcgtttgctcaccacggccgctccctgccaagattccaggtgactctatgctttggagaggagtttccagaccctcagaggcaaagaaagctcatcacag

SEQ ID NO: 335146 - DNA, 120 bp, Artificial Sequence
  ENSG00000137265_11 (sequence is synthesized)
ctcacgtagaacctctgctagccagacaactatattattttgctcaacaaaacagtggacatttcctgaggggctacgatttaccagaacacatcagcaatccagaagattaccacagat

SEQ ID NO: 335147 - DNA, 85 bp, Artificial Sequence
  ENSG00000137265_12 (sequence is synthesized)
ttaccagaacacatcagcaatccagaagattaccacagatctatccgccattcctctattcaagaatgaaaaatgtcaagatgag

SEQ ID NO: 335148 - DNA, 120 bp, Artificial Sequence
  ENSG00000137265_13 (sequence is synthesized)
agtgattttcattgtaaatatttgactttagtgaaagcgtccaattgactgccctcttactgttttgaggaattcagaagtggagatttcagttcagcggttgaggagaattgcggcgag

SEQ ID NO: 335149 - DNA, 120 bp, Artificial Sequence
  ENSG00000137265_14 (sequence is synthesized)
acaagcatggaaaatcagtgacatctgattggcagatgagcttatttcaaaaggaagggtggctttgcatttcttgtgttctgtagactgccatcattgatgatcactgtgaaaattgac

SEQ ID NO: 335150 - DNA, 120 bp, Artificial Sequence
  ENSG00000137265_15 (sequence is synthesized)
caagtgatgtgtttacatttactgaaatgcgctctttaatttgttgtagattaggtcttgctggaagacagagaaaacttgcctttcagtattgacactgactagagtgatgactgcttg

SEQ ID NO: 335151 - DNA, 120 bp, Artificial Sequence
  ENSG00000137265_16 (sequence is synthesized)
taggtatgtctgtgccatttctcagggaagtaagatgtaaattgaagaagcctcacacgtaaaagaaatgtattaatgtatgtaggagctgcagttcttgtggaagacacttgctgagtg

SEQ ID NO: 335152 - DNA, 120 bp, Artificial Sequence
  ENSG00000137265_17 (sequence is synthesized)
aaggaaatgaatctttgactgaagccgtgcctgtagccttggggaggcccatcccccacctgccagcggtttcctggtgtgggtccctctgccccgccctccttcccattggctttctct

SEQ ID NO: 335153 - DNA, 120 bp, Artificial Sequence
  ENSG00000137265_18 (sequence is synthesized)
ccttggcctttcctggaagccagttagtaaacttcctattttcttgagtcaaaaaacatgagcgctactcttggatgggacatttttgtctgtcctacaatctagtaatgtctaagtaat

SEQ ID NO: 335154 - DNA, 120 bp, Artificial Sequence
  ENSG00000137265_19 (sequence is synthesized)
ggttaagttttcttgtttctgcatctttttgaccctcattctttagagatgctaaaattcttcgcataaagaagaagaaattaaggaacataaatcttaatacttgaactgttgcccttc

SEQ ID NO: 335155 - DNA, 120 bp, Artificial Sequence
  ENSG00000137265_20 (sequence is synthesized)
tgtccaagtacttaactatctgttcccttcctctgtgccacgctcctctgtttgtttggctgtccagcgatcagccatggcgacactaaaggaggaggagccggggactcccaggctgga

SEQ ID NO: 335156 - DNA, 120 bp, Artificial Sequence
  ENSG00000137265_21 (sequence is synthesized)
ggagctgactacggaactgcacactcagtgggctgtttctgcttatttcatctgttctatgcttcctcgtgccaattatagtttgacagggccttaaaattacttggctttttccaaatg

SEQ ID NO: 335157 - DNA, 120 bp, Artificial Sequence
  ENSG00000137265_22 (sequence is synthesized)
cttctatttatagaatcccaaagacctccacttgcttaagtatacctatcacttacatttttgtggttttgagaaagtacagcagtagactggggcgtcacctccaggccgtttctcata

SEQ ID NO: 335158 - DNA, 120 bp, Artificial Sequence
  ENSG00000137265_23 (sequence is synthesized)
ctacaggatatttactattactcccaggatcagcagaagattgcgtagctctcaaatgtgtgttcctgcttttctaatggatattttaaattcattcaacaagcacctagtaagtgcctg

SEQ ID NO: 335159 - DNA, 120 bp, Artificial Sequence
  ENSG00000137265_24 (sequence is synthesized)
ctgtatccctacattacacagttcagcctttatcaagcttagtgagcagtgagcactgaaacattattttttaatgtttaaaaagtttctaatattaaagtcagaatattaatacaatta

SEQ ID NO: 335160 - DNA, 120 bp, Artificial Sequence
  ENSG00000137265_25 (sequence is synthesized)
atattaatattaactacagaaaagacaaacagtagagaacagcaaaaaaataaaaaggatctccttttttcccagcccaaattctcctctctaaaagtgtccacaagaaggggtgtttat

SEQ ID NO: 335161 - DNA, 120 bp, Artificial Sequence
  ENSG00000137265_26 (sequence is synthesized)
tcttccaacacatttcacttttctgtaaatatacataaacttaaaaagaaaacctcatggagtcatcttgcacacactttcatgcagtgctctttgtagctaacagtgaagatttacctc

SEQ ID NO: 335162 - DNA, 120 bp, Artificial Sequence
  ENSG00000137265_27 (sequence is synthesized)
gttctgctcagaggccttgctgtggagctccactgccatgtacccagtagggtttgacatttcattagccatgcaacatggatatgtattgggcagcagactgtgtttcgtgaactgcag

SEQ ID NO: 335163 - DNA, 120 bp, Artificial Sequence
  ENSG00000137265_28 (sequence is synthesized)
tgatgtatacatcttatagatgcaaagtattttggggtatattatcctaagggaagataaagatgatattaagaactgctgtttcacggggcccttacctgtgaccctctttgctgaaga

SEQ ID NO: 335164 - DNA, 120 bp, Artificial Sequence
  ENSG00000137265_29 (sequence is synthesized)
atatttaaccccacacagcacttcaaagaagctgtcttggaagtctgtctcaggagcaccctgtcttcttaattctccaagcggatgctccatttcaattgctttgtgacttcttcttct

SEQ ID NO: 335165 - DNA, 120 bp, Artificial Sequence
  ENSG00000137265_30 (sequence is synthesized)
ttgtttttttaaatattatgctgctttaacagtggagctgaattttctggaaaatgcttcttggctggggccactacctcctttcctatctttacatctatgtgtatgttgactttttaa

SEQ ID NO: 335166 - DNA, 120 bp, Artificial Sequence
  ENSG00000137265_31 (sequence is synthesized)
aattctgagtgatccagggtatgacctagggaatgaactagctatgaaatactcagggttaggaatcctagcacttgtctcaggactctgaaaaggaacggcttcctcattccttgtctt

SEQ ID NO: 335167 - DNA, 120 bp, Artificial Sequence
  ENSG00000137265_32 (sequence is synthesized)
gataaagtggaattggcaaactagaatttagtttgtactcagtggacagtgctgttgaagatttgaggacttgttaaagagcactgggtcatatggaaaaaatgtatgtgtctcccaggt

SEQ ID NO: 335168 - DNA, 120 bp, Artificial Sequence
  ENSG00000137265_33 (sequence is synthesized)
gcatttcttggtttatgtcttgttcttgagattttgtatatttaggaaaacctcaagcagtaattaatatctcctggaacactatagagaaccaagtgaccgactcatttacaactgaaa

SEQ ID NO: 335169 - DNA, 120 bp, Artificial Sequence
  ENSG00000137265_34 (sequence is synthesized)
cctaggaagcccctgagtcctgagcgaaaacaggagagttagtcgccctacagaaaacccagctagactattgggtatgaactaaaaagagactgtgccatggtgagaaaaatgtaaaat

SEQ ID NO: 335170 - DNA, 120 bp, Artificial Sequence
  ENSG00000137265_35 (sequence is synthesized)
cctacagtgaaatgagcagcccttacagtattgttaccaccaagggcaggtaggtattagtgtttgaaaaagctggtctttgagcgagggcataaatacagctagccccaggggtggaac

SEQ ID NO: 335171 - DNA, 120 bp, Artificial Sequence
  ENSG00000137265_36 (sequence is synthesized)
aactctgggagtcttgggtactcgcacctcttggctttgttgatgctccgccaggaaggccacttgtgtgtgcgtgtcagttacttttttagtaacaattcagatccagtgtaaacttcc

SEQ ID NO: 335172 - DNA, 120 bp, Artificial Sequence
  ENSG00000137265_37 (sequence is synthesized)
gttcattgctctccagtcacatgcccccacttccccacaggtgaaagtttttctgaaagtgttgggattggttaaggtctttatttgtattacgtatctccccaagtcctctgtggccag

SEQ ID NO: 335173 - DNA, 120 bp, Artificial Sequence
  ENSG00000137265_38 (sequence is synthesized)
ctgcatctgtctgaatggtgcgtgaaggctctcagaccttacacaccattttgtaagttatgttttacatgccccgtttttgagactgatctcgatgcaggtggatctccttgagatcct

SEQ ID NO: 335174 - DNA, 120 bp, Artificial Sequence
  ENSG00000137265_39 (sequence is synthesized)
gatagcctgttacaggaatgaagtaaaggtcagtttttttttgtattgattttcacagctttgaggaacatgcataagaaatgtagctgaagtagaggggacgtgagagaagggccaggc

SEQ ID NO: 335175 - DNA, 120 bp, Artificial Sequence
  ENSG00000137265_40 (sequence is synthesized)
cggcaggccaaccctcctccaatggaaattcccgtgttgcttcaaactgagacagatgggacttaacaggcaatggggtccacttccccctcttcagcatcccccgtaccccactttctg

SEQ ID NO: 335176 - DNA, 120 bp, Artificial Sequence
  ENSG00000137265_41 (sequence is synthesized)
ctgaaagaactgccagcaggtaggaccccagaggcccccaaatgaaagcttgaatttcccctactggctctgcgttttgctgagatctgtaggaaaggatgcttcacaaactgaggtaga

SEQ ID NO: 335177 - DNA, 120 bp, Artificial Sequence
  ENSG00000137265_42 (sequence is synthesized)
taatgctatgctgtcgttggtatacatcatgaatttttatgtaaattgctctgcaaagcaaattgatatgtttgataaatttatgtttttaggtaaataaaaacttttaaaaatttgtta

SEQ ID NO: 335178 - DNA, 120 bp, Artificial Sequence
  ENSG00000137265_43 (sequence is synthesized)
gctccctgagggcgaggctgtgtgggccagctgcccacatggccagagaaccacagcagcccagacagcagaacttgccatttgctatggctgctccaacagcccagaaaaaccccaggt

SEQ ID NO: 335179 - DNA, 120 bp, Artificial Sequence
  ENSG00000137265_44 (sequence is synthesized)
ggccatggcgaatcctggtctgtcctgggcagcaccaaagctctttccccttcttagaggctgcgtgtgcagctcggggagaggggggttttctcactcctgtgggatggtggcatccca

SEQ ID NO: 335180 - DNA, 120 bp, Artificial Sequence
  ENSG00000137265_45 (sequence is synthesized)
cagccaagtttactctcaggatccatgctaggcactgcccttcgtgggatcttatttaaacaccacagagatcactccaggcagtggaaaacagccccccactttttatatagagaggag

SEQ ID NO: 335181 - DNA, 120 bp, Artificial Sequence
  ENSG00000137266_0 (sequence is synthesized)
cgcgcgggccccggcggcggcgcggagatccagccgctgcccccactgcatcctggaggcggcccgcacccgagctgctgctccgcggctgcggccccgagcctcttgttgctggactat

SEQ ID NO: 335182 - DNA, 120 bp, Artificial Sequence
  ENSG00000137266_1 (sequence is synthesized)
gacgggtcggtgctgcccttcctcgggggcctgggcgggggctatcagaagaccctcgtgctgctcacctggatcccggcgctgttcatcggcttcagccagttctcggactcgttcctc

SEQ ID NO: 335183 - DNA, 120 bp, Artificial Sequence
  ENSG00000137266_2 (sequence is synthesized)
ctggaccagcccaacttctggtgccgcggggccggcaaaggcaccgagctggcaggggtcaccaccacaggccggggcggggacatgggcaactggaccagcctccccaccacccccttc

SEQ ID NO: 335184 - DNA, 120 bp, Artificial Sequence
  ENSG00000137266_3 (sequence is synthesized)
gccactgccccctgggaggctgcgggcaaccggagcaacagcagcggcgcggacggaggcgacacaccacccctgccatcccctccggacaagggggacaacgcctccaactgtgactgc

SEQ ID NO: 335185 - DNA, 120 bp, Artificial Sequence
  ENSG00000137266_4 (sequence is synthesized)
cgcgcatgggactacggcatccgcgccggcctcgtccagaacgtggtcagcaagtgggatcttgtgtgtgataatgcctggaaggtccatatcgctaagttctccttactggttggatta

SEQ ID NO: 335186 - DNA, 120 bp, Artificial Sequence
  ENSG00000137266_5 (sequence is synthesized)
atctttggctacctaataactggatgcattgctgactgggtcggccggcggcctgtgctgctgttttccatcatcttcattctgatctttggactgactgtggcactgtcagtgaatgtg

SEQ ID NO: 335187 - DNA, 120 bp, Artificial Sequence
  ENSG00000137266_6 (sequence is synthesized)
acaatgttcagcacactcaggttctttgaaggattttgcctggctggaatcattctcaccttgtatgctttacgaatagagctgtgcccccctggaaaacggttcatgattacgatggtg

SEQ ID NO: 335188 - DNA, 120 bp, Artificial Sequence
  ENSG00000137266_7 (sequence is synthesized)
gcgagcttcgtggccatggcgggccagttcctcatgcctgggctagccgccctgtgccgggattggcaggtgctgcaggccctcatcatctgccccttcctgctcatgctgctctactgg

SEQ ID NO: 335189 - DNA, 120 bp, Artificial Sequence
  ENSG00000137266_8 (sequence is synthesized)
tcgatattccccgagtccctccggtggctaatggccacccagcagtttgagtctgcaaagaggctgatcctccacttcacacagaagaatcgcatgaaccctgagggcgacatcaagggt

SEQ ID NO: 335190 - DNA, 120 bp, Artificial Sequence
  ENSG00000137266_9 (sequence is synthesized)
gtgataccagagctggagaaagagctttcccggaggcccaagaaggtctgcatcgtgaaggtggtggggacacggaacctgtggaagaacattgtggtcctgtgtgtgaactcgctgacg

SEQ ID NO: 335191 - DNA, 120 bp, Artificial Sequence
  ENSG00000137266_10 (sequence is synthesized)
gggtacgggatccaccactgctttgccaggagcatgatgggccacgaggtgaaggtgccgctcctggagaacttctatgctgactactataccacggccagcatcgcgctggtgtcctgc

SEQ ID NO: 335192 - DNA, 120 bp, Artificial Sequence
  ENSG00000137266_11 (sequence is synthesized)
ctggccatgtgcgtggtggtccgattcctcgggcgcaggggagggctgctgctcttcatgatcctcaccgccctggcctcactcctgcagctcggcctcctcaacctgattggaaagtac

SEQ ID NO: 335193 - DNA, 120 bp, Artificial Sequence
  ENSG00000137266_12 (sequence is synthesized)
agccagcacccagactcagggatgagtgacagcgtcaaggacaaattttccatcgcgttttccatcgtgggcatgtttgcctcccatgcggtggggagcctcagcgtgttcttctgtgcg

SEQ ID NO: 335194 - DNA, 120 bp, Artificial Sequence
  ENSG00000137266_13 (sequence is synthesized)
gagatcaccccgacggtgataaggtgtggcgggctggggctggtgctggccagcgcgggcttcggcatgctgacggcacccatcatcgagctgcacaaccagaaaggctacttcctgcac

SEQ ID NO: 335195 - DNA, 120 bp, Artificial Sequence
  ENSG00000137266_14 (sequence is synthesized)
cacatcatctttgcctgctgcacgctcatctgcatcatctgcatcctcctgctgcccgagagcagggaccagaacctgcctgagaacatttctaacggggagcactacacgcgccagccg

SEQ ID NO: 335196 - DNA, 120 bp, Artificial Sequence
  ENSG00000137266_15 (sequence is synthesized)
ctgctgccgcacaagaagggggagcagccactgctgctcaccaacgccgagctcaaggactactcgggcctccacgatgccgcagccgcgggtgacacactgcccgagggtgccacggcc

SEQ ID NO: 335197 - DNA, 120 bp, Artificial Sequence
  ENSG00000137266_16 (sequence is synthesized)
aacggcatgaaggccatgtagcccggcctgcggaacccggggctccagggtctggggcagcttgggcacaggtttacagaccagggaccgaacacgcagccaggggtgggaaagctgcct

SEQ ID NO: 335198 - DNA, 120 bp, Artificial Sequence
  ENSG00000137266_17 (sequence is synthesized)
cagccaagctgagcctctcaactggtgtggggaaatcctgtctttccaaaagtccaaggagcgcgggtcggaggagacaaactctttggaaataaccctttcaagactttcttttctgcc

SEQ ID NO: 335199 - DNA, 120 bp, Artificial Sequence
  ENSG00000137266_18 (sequence is synthesized)
gttaaatgtgtgtatttattttggtcatttttacgagaagcactttattccctctccctctcactgatcacaaatggaatcacctccctgggcagcgagacgcagttgctctgggaagat

SEQ ID NO: 335200 - DNA, 120 bp, Artificial Sequence
  ENSG00000137266_19 (sequence is synthesized)
gccacagtgaccagggccatggccggtccctctggggagatgggacacggctcctggcagcacccaggagccccccaggctgcctgcctgcgtgcagaggcaggagaggaccgtggagcg

SEQ ID NO: 335201 - DNA, 120 bp, Artificial Sequence
  ENSG00000137266_20 (sequence is synthesized)
tttccgggactgcattttagacggagtgaaatgtacatgaatttggcttttgctagagtctgtgtatggttttttaaggtcctttttccctttctgtttgtaaggtaagagcttctgttc

SEQ ID NO: 335202 - DNA, 120 bp, Artificial Sequence
  ENSG00000137266_21 (sequence is synthesized)
gtgtgcagggaaagcagctcacagacgccgttaaaaccagcttcatctttccttcaggatcatccttttgtacttgatgctggaagctcttggagaaaaagcttaaacatttcaccagaa

SEQ ID NO: 335203 - DNA, 120 bp, Artificial Sequence
  ENSG00000137266_22 (sequence is synthesized)
tcatatcgccacagctttgtgagtacacagctaacagatgcgtcgagacctgagatgtgctcgtttttattcctcctctcccagattggctccagcagaaaagtccctcgtgcacaggca

SEQ ID NO: 335204 - DNA, 120 bp, Artificial Sequence
  ENSG00000137266_23 (sequence is synthesized)
gctcttgtgccggcactacttgaaaacatggctactttctaagctacaaaccattagaaaataactcaaaaagatggcagaggcaaatccacagaaggggggctgccctccacacacaca

SEQ ID NO: 335205 - DNA, 120 bp, Artificial Sequence
  ENSG00000137266_24 (sequence is synthesized)
cgcccgtcacccacaccttgagcacacaccatgaagatcaccagcttggatggccgtcacctcagacatcactccagggagcacccgcaggagctgggccccctcacgcctgccttcctg

SEQ ID NO: 335206 - DNA, 120 bp, Artificial Sequence
  ENSG00000137266_25 (sequence is synthesized)
ggccagcttcctgcttgcagtcactcgcatagcacagaggtggggcttcgggcagggagcggagattcctcataggtgagtccaaatgacctccagcctctcgaaggcatcaagacaaat

SEQ ID NO: 335207 - DNA, 120 bp, Artificial Sequence
  ENSG00000137266_26 (sequence is synthesized)
tgaaagaaagcaataactcaccaaagctcaacgctgcccctgcctcgacctccatgggtctcttcgtgttcctcgtttcaccccagaaagtggaggtttcctcttggcattttcggagga

SEQ ID NO: 335208 - DNA, 120 bp, Artificial Sequence
  ENSG00000137266_27 (sequence is synthesized)
aacttgtaggacacccaaggcgactaagagacagcctccttggcaagggcaggcaccactttgtagcaacttgggcaccagcttttctggacagcctggcttcttactggcattgtccaa

SEQ ID NO: 335209 - DNA, 120 bp, Artificial Sequence
  ENSG00000137266_28 (sequence is synthesized)
ctcatcccttctcgaagcatgtctttgccatgggctgtgtccttccagggaaattgtggtctcgggcctgggtgagacaatgaagtgacttccaaccgacagttgctagaattcacaggg

SEQ ID NO: 335210 - DNA, 120 bp, Artificial Sequence
  ENSG00000137266_29 (sequence is synthesized)
cagaaaaggggttgaccttctccccttctggctttccacccggcctgctgcttgctgtcgccactcatgtctcctccacatgcggtccacacatcagtaagggcctggagatgtgtaaag

SEQ ID NO: 335211 - DNA, 120 bp, Artificial Sequence
  ENSG00000137266_30 (sequence is synthesized)
acacagcaaggggcaagcagactcttggccacgtgtttccagtggctggaccacgccgacacctgggatcttgagatacccaggaagggaggctgtctggccagcctctccctgcctcca

SEQ ID NO: 335212 - DNA, 120 bp, Artificial Sequence
  ENSG00000137266_31 (sequence is synthesized)
cttgctccacgtccagctcctcaccttccctcttttttaaagtcacatttccatgtttcaacattagtttgcattcacctttacaaaggcctttctttagatctgtgcagcctttgcgtg

SEQ ID NO: 335213 - DNA, 120 bp, Artificial Sequence
  ENSG00000137266_32 (sequence is synthesized)
ccaaacttgtgaaattccttttaccttttttggagtacttgctataaagccacctgtcaacaaacccccattatgtacagaataggacctatccagtagccaggccagtaggcagttggg

SEQ ID NO: 335214 - DNA, 120 bp, Artificial Sequence
  ENSG00000137266_33 (sequence is synthesized)
gaaggtgggaaggatccagcgaggcccctgagcctgcacctggacaggtgtacgtctgcacccatcaccctcagcaccaggccaccctgcagtccacttactgtactgtgttgtggaagg

SEQ ID NO: 335215 - DNA, 120 bp, Artificial Sequence
  ENSG00000137266_34 (sequence is synthesized)
atatgctaagtgatgaaagttgcgagcagtctcactggtcgtgtaaacttttttttttttttggaaattgaagctgtagagtgctgcccgaaatctctaggaagttggtggcaagggaca

SEQ ID NO: 335216 - DNA, 120 bp, Artificial Sequence
  ENSG00000137266_35 (sequence is synthesized)
gcactcacactcttctggtcatgatctctgatctccacctcaaatgacaataaaaaactggtccaacgaagacactgctcagcacttcagccatcaggactaatccatcgatgactggaa

SEQ ID NO: 335217 - DNA, 120 bp, Artificial Sequence
  ENSG00000137266_36 (sequence is synthesized)
aagaggctagctttgaggaaaacagcctgggctcttgggagcagagtccagtgggtgtgaggctgacttgccgacggtcggcaggtaatggctctcagccggcgaggcggtcccacagct

SEQ ID NO: 335218 - DNA, 120 bp, Artificial Sequence
  ENSG00000137266_37 (sequence is synthesized)
ctcctcccagggcagcctgaggaggaggaggccgggtgcctgtttggtggcagcttcagcctagggatacctgaagctgttgagcaacacctttatgaaatgttgccagagcagcaacac

SEQ ID NO: 335219 - DNA, 120 bp, Artificial Sequence
  ENSG00000137266_38 (sequence is synthesized)
ttccctgtgggcacagccccgggaaatccggtaccaagtgagcaaggtggcaggacccacccaagcctgatacgcatctgggcccgccgggctcagcaggggaggctgctacggctgccc

SEQ ID NO: 335220 - DNA, 120 bp, Artificial Sequence
  ENSG00000137266_39 (sequence is synthesized)
acttcccagcaccgtctgtcacgcttgaacccctctgtgctgttcccttcctggctaatagggagacccttcgcaggcacccactgtttcaacttgaccctcccaccccctgctactctc

SEQ ID NO: 335221 - DNA, 120 bp, Artificial Sequence
  ENSG00000137266_40 (sequence is synthesized)
ctccacacacccctccgttccgctagcctaccctgtcagcctttcaataaaagttatgcacaaatgtgaacacctgagatggagctgaacatttcttcactttgttctttttctgaagtc

SEQ ID NO: 335222 - DNA, 120 bp, Artificial Sequence
  ENSG00000137266_41 (sequence is synthesized)
aaactcttatcaaatgccctaaaattattaccacccaagagaaacaggaaaaaggttacatgtttttgtttactgagagtaagatcacctgcatctggaagacgggctggtaaattggtt

SEQ ID NO: 335223 - DNA, 120 bp, Artificial Sequence
  ENSG00000137266_42 (sequence is synthesized)
tggctacagaacagaaagaaaacaaaaacaaacctcgtaagggaagtatcacactcagacaccaccgcttcctagagccaaatgagcaatcccaaactgcaagtgccataagtgggcctg

SEQ ID NO: 335224 - DNA, 120 bp, Artificial Sequence
  ENSG00000137266_43 (sequence is synthesized)
tgaggtcacaccgcccggcccgaggtatcgcatgtgcgggggaggtccacactacagctgtcctctcgtctagaaggcaccacctcgctttcatgtcccgtgtgttttggaaaagcagta

SEQ ID NO: 335225 - DNA, 120 bp, Artificial Sequence
  ENSG00000137266_44 (sequence is synthesized)
tggtgtgtcatgtctagcggcgaacacttccctccctgtccttgaggttgtaatataaaaactgtgtttctgtacgtgtgggtgggaattctctgacggtgctcgttcatagcacaagct

SEQ ID NO: 335226 - DNA, 120 bp, Artificial Sequence
  ENSG00000137266_45 (sequence is synthesized)
tacgctgagttctgaactgtcgttcacagctgcgtgtctgcatggtgtcgcatctgttgtacctttggggaaaatttgtatgtaaatgtacagaaataaaaacgttgccccattaacaga

SEQ ID NO: 335227 - DNA, 80 bp, Artificial Sequence
  ENSG00000137266_46 (sequence is synthesized)
ggaggcgcccgaagtcggagaaatacagcgcggccaccccgggagcagcagcctttgcccgcaccgccgcccgcagggcc

SEQ ID NO: 335228 - DNA, 80 bp, Artificial Sequence
  ENSG00000137266_47 (sequence is synthesized)
ctcctcctcctgccgcgtccggcgcggagcagcggagagcggcgggctcggcagccggcgcccgggccgcggaactgatg

SEQ ID NO: 335229 - DNA, 80 bp, Artificial Sequence
  ENSG00000137266_48 (sequence is synthesized)
gggtccggcgggtgacatgggggcggcctgacgcacccggagccgccgagcgctctctctcgagccgcgggccctcctcg

SEQ ID NO: 335230 - DNA, 80 bp, Artificial Sequence
  ENSG00000137266_49 (sequence is synthesized)
cggggcgcccgcggagcctccgccgcgctctatgcgcctctgcgggagccgcgggcccgggccatggccatagaccggcg

SEQ ID NO: 335231 - DNA, 120 bp, Artificial Sequence
  ENSG00000137266_50 (sequence is synthesized)
ttccctacctcacctgatggtatccaccgaagggcatttcactaccattaatggtgagtaataaaatcctccgtgttcattcagacctcactgcgtcactactttgaacgcctctgtaag

SEQ ID NO: 335232 - DNA, 120 bp, Artificial Sequence
  ENSG00000137266_51 (sequence is synthesized)
ctgtgtcttcactcgccccgaggtgggtggagggaggcctctcactctgcttcgagtcctggtcttaaaggtagtcagaggcagaggctggattaaacacacactgtttaccaagtgcca

SEQ ID NO: 335233 - DNA, 120 bp, Artificial Sequence
  ENSG00000137266_52 (sequence is synthesized)
ctctcagaccacctgagagacgggggccatcagtaaaattaagaggaatttttttcccttgttcgtgtatgttctgctgatccgtggcctgaaggttcctagagacgtcaagaaatgaat

SEQ ID NO: 335234 - DNA, 120 bp, Artificial Sequence
  ENSG00000137266_53 (sequence is synthesized)
atcttacactgtgattctgtgaggaaagactggtaacccaaaactctcttctctaatgtattttttaacgaaaatgacaatatttctttaataaagtatttataccaaactcttctctcc

SEQ ID NO: 335235 - DNA, 120 bp, Artificial Sequence
  ENSG00000137266_54 (sequence is synthesized)
gttggagcctcaacgcgcccgtaaaacactggcacaccacatagggcacttgtggtgggcagcagatgaaaacaatttcagtcgttggaatagagctgtgcccccctggaaaacggttca

SEQ ID NO: 335236 - DNA, 120 bp, Artificial Sequence
  ENSG00000137266_55 (sequence is synthesized)
aattgctcccaggagctgtgaaacagcaacatcctcaggctggcagaactgctgatacctcaagtgccctgttgttcttttggtggctgctgggcagtggaaggggcacgatcccctctg

SEQ ID NO: 335237 - DNA, 120 bp, Artificial Sequence
  ENSG00000137266_56 (sequence is synthesized)
gcttggtccccagagggaattgcatacccatccatgccgcaagctggacactgggaaggagctgtgctgtgcagccccaggcctccctcccaccctggcctggcttcctctcttccctca

SEQ ID NO: 335238 - DNA, 120 bp, Artificial Sequence
  ENSG00000137266_57 (sequence is synthesized)
tgataagatgcagaccgaggcttcgggaagtgaagctggtgggcgggggccaggattctagcccaggctcatgggctccagaactcctgctcccagccacggcactcgcacctttgtggc

SEQ ID NO: 335239 - DNA, 120 bp, Artificial Sequence
  ENSG00000137266_58 (sequence is synthesized)
agcaaaagtctgttctgtagctcactttgggctggctctttttatgtgggtttactcaaggcttggaggctaatggctgatgccccagtcttgacaatcatctaatggaataaacattaa

SEQ ID NO: 335240 - DNA, 120 bp, Artificial Sequence
  ENSG00000137266_59 (sequence is synthesized)
cgaagaccctgtaccagaaggcatctccttcctcgagaaatgcacagacggcgccctacccaggtgtggcgggctggggctggtgctggccagcgcgggcttcggcatgctgacggcacc

SEQ ID NO: 335241 - DNA, 120 bp, Artificial Sequence
  ENSG00000137266_60 (sequence is synthesized)
gccttccttcctccccttggtggggtgaggacgaccgggatgagtcgtctgagaagcactttgaggggggaggagctgaaggccacacctggaagggcgatttattccttgggcgctgcc

SEQ ID NO: 335242 - DNA, 120 bp, Artificial Sequence
  ENSG00000137266_61 (sequence is synthesized)
aggtgtctgccgccttcacccagaaaccgatgatgttcggagccaggcttcttcaaagtctcacagccagcctaccctcaaagcctgagtgattgtggaaggagccagcgttcactcagc

SEQ ID NO: 335243 - DNA, 120 bp, Artificial Sequence
  ENSG00000137266_62 (sequence is synthesized)
agaggaacagagctttcctgccgcaggctctcagtgaagatccagggagcagaggcgtgggcaaggagcactgggctcagatgcaggagaaccggtttgaaccctagcactaccgcctct

SEQ ID NO: 335244 - DNA, 120 bp, Artificial Sequence
  ENSG00000137266_63 (sequence is synthesized)
tgcacagcgccctgggctggtgcgactgcacatgcttcctgaaggcccggccccgggcaggacacacaatccccacacttcccactagttgcagcttgtggttctgtctgagaaggtttt

SEQ ID NO: 335245 - DNA, 120 bp, Artificial Sequence
  ENSG00000137266_64 (sequence is synthesized)
cctctctttttaaaaaattttattgtttaaactttctgtcttggaaaactgttcaaatatacacaaaaatagaagagtggaatgagcccatcacccagctccaaaaatctgcaaatgcac

SEQ ID NO: 335246 - DNA, 120 bp, Artificial Sequence
  ENSG00000137266_65 (sequence is synthesized)
tggccagtctggctcaccccttcttgctacccaccccacggggttattctgacatgaatttttatgaatggattgcagggaggtggaggtcttgtgttaggaggggggatttggagatat

SEQ ID NO: 335247 - DNA, 120 bp, Artificial Sequence
  ENSG00000137266_66 (sequence is synthesized)
ggagatattaaaggagtgatttacaaaagtccccctatctcttctaggcgaggggtgggcaaccttcagcctgtgggccacatcaggcccactgtctgtttttgtaaataaagttttatt

SEQ ID NO: 335248 - DNA, 120 bp, Artificial Sequence
  ENSG00000137266_67 (sequence is synthesized)
cgccggcttctcggaaatcaaagacgagtccctggctccaggctggtgtgggattaaccagcgtcagctctgtctctggctctggacacatcagcttcgtggttcatagctgaggtggct

SEQ ID NO: 335249 - DNA, 120 bp, Artificial Sequence
  ENSG00000137266_68 (sequence is synthesized)
gttggacccaaccccgaggcgcccaagaggcagtgagaacctggccctggggtcctgtccaggcagcagcaggaggaagggggaacagggagctactctgggcccaggaaatatgtcagt

SEQ ID NO: 335250 - DNA, 120 bp, Artificial Sequence
  ENSG00000137266_69 (sequence is synthesized)
gtctgagcgtctggcaagggggggagtgcagcggatcacttatgccgcacttccaccagaacctgtgctgccaactctgctaagagacctcacggcacagctagtgcaaaatgtttcaca

SEQ ID NO: 335251 - DNA, 120 bp, Artificial Sequence
  ENSG00000137266_70 (sequence is synthesized)
atcttcgtccagggccgcagtggctccggtgcacttagagtcaccctggggaactttcagaaatgcctgtaggaccccagcatccatcgtttaaaagaagttctctggacactttccacg

SEQ ID NO: 335252 - DNA, 120 bp, Artificial Sequence
  ENSG00000137266_71 (sequence is synthesized)
ggtgttgtcagcagcaggaaactggagctctcccgtgggacacagacaccaagcgctggaggccggagctgaactgggatcttgtgtgtgataatgcctggaaggtccatatcgctaagt

SEQ ID NO: 335253 - DNA, 120 bp, Artificial Sequence
  ENSG00000137267_0 (sequence is synthesized)
aggtctctgcgcagcccagcccgccggtccacgccgcgcaccgctccgagggccagcgccacccgctccgcagccggcaccatgcgcgagatcgtgcacatccaggcgggccagtgcggc

SEQ ID NO: 335254 - DNA, 120 bp, Artificial Sequence
  ENSG00000137267_1 (sequence is synthesized)
aaccagatcggcgccaagttttgggaggtcatcagcgatgagcatgggatcgaccccacaggcagttaccatggagacagtgacttgcagctggagagaatcaacgtgtactacaatgag

SEQ ID NO: 335255 - DNA, 120 bp, Artificial Sequence
  ENSG00000137267_2 (sequence is synthesized)
gctgctggtaacaaatatgtacctcgggccatcctggtggatctggagcctggcaccatggactctgtcaggtctggacccttcggccagatcttcagaccagacaacttcgtgttcggc

SEQ ID NO: 335256 - DNA, 120 bp, Artificial Sequence
  ENSG00000137267_3 (sequence is synthesized)
cagagtggagccgggaataactgggccaagggccactacacagagggagccgagctggtcgactcggtcctggatgtggtgaggaaggagtcagagagctgtgactgtctccagggcttc

SEQ ID NO: 335257 - DNA, 120 bp, Artificial Sequence
  ENSG00000137267_4 (sequence is synthesized)
cagctgacccactctctggggggcggcacggggtccgggatgggcaccctgctcatcagcaagatccgggaagagtacccagaccgcatcatgaacaccttcagcgtcatgccctcaccc

SEQ ID NO: 335258 - DNA, 120 bp, Artificial Sequence
  ENSG00000137267_5 (sequence is synthesized)
aaggtgtcagacacggtggtggagccctacaacgccaccctctctgtccaccagctggtggaaaacacagatgaaacctactccattgataacgaggccctgtatgacatctgcttccgc

SEQ ID NO: 335259 - DNA, 120 bp, Artificial Sequence
  ENSG00000137267_6 (sequence is synthesized)
catgagcggggtcaccacctgcctgcgcttcccgggccagctgaacgcagacctgcgcaagctggcggtgaacatggtgcccttccctcgcctgcacttcttcatgcccggcttcgcgcc

SEQ ID NO: 335260 - DNA, 120 bp, Artificial Sequence
  ENSG00000137267_7 (sequence is synthesized)
cctgaccagccggggcagccagcagtaccgggcgctcacggtgcccgagctcacccagcagatgttcgactccaagaacatgatggccgcctgcgacccgcgccacggccgctacctgac

SEQ ID NO: 335261 - DNA, 120 bp, Artificial Sequence
  ENSG00000137267_8 (sequence is synthesized)
ggtggctgccatcttccggggccgcatgtccatgaaggaggtggacgagcagatgctcaacgtgcagaacaagaacagcagctacttcgtggagtggatccccaacaacgtgaagacggc

SEQ ID NO: 335262 - DNA, 120 bp, Artificial Sequence
  ENSG00000137267_9 (sequence is synthesized)
cgtgtgcgacatcccgccccgcggcctgaagatgtcggccaccttcatcggcaacagcacggccatccaggagctgttcaagcgcatctccgagcagttcacggccatgttccggcgcaa

SEQ ID NO: 335263 - DNA, 120 bp, Artificial Sequence
  ENSG00000137267_10 (sequence is synthesized)
ggccttcctgcactggtacacgggcgagggcatggacgagatggagttcaccgaggccgagagcaacatgaacgacctggtgtccgagtaccagcagtaccaggacgccacggccgacga

SEQ ID NO: 335264 - DNA, 120 bp, Artificial Sequence
  ENSG00000137267_11 (sequence is synthesized)
acaaggggagttcgaggaggaggagggcgaggacgaggcttaaaaacttctcagatcaatcgtgcatccttagtgaacttctgttgtcctcaagcatggtctttctacttgtaaactatg

SEQ ID NO: 335265 - DNA, 120 bp, Artificial Sequence
  ENSG00000137267_12 (sequence is synthesized)
gtgctcagttttgcctctgttagaaattcacactgttgatgtaatgatgtggaactcctctaaaaattacagtattgtctgtgaaggtatctatactaataaaaaagcatgtgtagaaaa

SEQ ID NO: 335266 - DNA, 120 bp, Artificial Sequence
  ENSG00000137269_0 (sequence is synthesized)
ggcgacggcgactggcgggtgggagtggaggcaccggctggcgggcgggggtacagggacggggcaggggctcccgctccaggttccttgaagcacttccgaccgcgaagcccggcgcga

SEQ ID NO: 335267 - DNA, 120 bp, Artificial Sequence
  ENSG00000137269_1 (sequence is synthesized)
gaagcgagctaacccaagagccaacaacgagcgcggagagggcagcggactgagcggagccgccggccagagcgggctcggagcccgggtctccgccgctcgggacccggctaggcggcg

SEQ ID NO: 335268 - DNA, 120 bp, Artificial Sequence
  ENSG00000137269_2 (sequence is synthesized)
gcgggggcggcgatgttccactgcatccccctgtggcggtgcaaccgtcatgtggagagcatcgacaagcgccactgctcgctggtctacgtccccgaggagatctaccgctatgcccgg

SEQ ID NO: 335269 - DNA, 120 bp, Artificial Sequence
  ENSG00000137269_3 (sequence is synthesized)
agcctggaggagctgctgctggacgccaaccagctccgcgagctgcccgagcaatttttccagctagtcaaattacgaaagcttggacttagtgataatgaaattcagcggctccctcca

SEQ ID NO: 335270 - DNA, 120 bp, Artificial Sequence
  ENSG00000137269_4 (sequence is synthesized)
gaaatagcaaacttcatgcagctggtggaactagatgtgtctcgaaatgagattcctgaaattccagaaagcatttcattctgtaaagcactgcaggtagctgacttcagcggaaaccca

SEQ ID NO: 335271 - DNA, 120 bp, Artificial Sequence
  ENSG00000137269_5 (sequence is synthesized)
ctgactaggttgccagaaagctttcctgaattacagaatttaacatgtctttctgtaaatgacatctcactacagtctctacctgaaaatattggcaatctttataacctggcttcactg

SEQ ID NO: 335272 - DNA, 120 bp, Artificial Sequence
  ENSG00000137269_6 (sequence is synthesized)
gaactgagagagaatcttcttacatatcttcctgactctcttacccagctgcgaagactagaagaacttgatttaggaaacaatgaaatatataatttgccagaatcaattggagccctc

SEQ ID NO: 335273 - DNA, 120 bp, Artificial Sequence
  ENSG00000137269_7 (sequence is synthesized)
ttacatctaaaagatctctggttggatggaaatcaactgtcagaattacctcaggaaataggaaatctgaagaacctgctgtgtttagatgtctctgaaaacaggttggaaagacttcct

SEQ ID NO: 335274 - DNA, 120 bp, Artificial Sequence
  ENSG00000137269_8 (sequence is synthesized)
gaagaaatcagtggcctgacttcattaacggatttagtcatttcccagaacttattagaaacgattccggatggcattggaaaactaaagaaactgtcaatcttgaaggtggatcagaat

SEQ ID NO: 335275 - DNA, 120 bp, Artificial Sequence
  ENSG00000137269_9 (sequence is synthesized)
agactcacacagttgcctgaagcagttggggaatgtgaaagtctcactgagttagttcttacagaaaatcagctcctgaccctgcctaaaagcattggaaaactaaagaagttgagcaac

SEQ ID NO: 335276 - DNA, 120 bp, Artificial Sequence
  ENSG00000137269_10 (sequence is synthesized)
ttgaatgcagacagaaataaattagtgtccttaccaaaagagatcggcgggtgctgcagcctcactgtgttctgtgtacgtgacaacagactaactcggatacctgcagaggtgtcacag

SEQ ID NO: 335277 - DNA, 120 bp, Artificial Sequence
  ENSG00000137269_11 (sequence is synthesized)
gcaacagaacttcatgtcctggatgtggcagggaacaggttgctgcatctacctttatccctgactgccttgaagttgaaggctctgtggctatctgacaaccagtcccagcccctgctt

SEQ ID NO: 335278 - DNA, 120 bp, Artificial Sequence
  ENSG00000137269_12 (sequence is synthesized)
acattccagacagacacagactacaccacaggagagaagattttaacctgtgtcttacttcctcagctgccttctgaacctacttgtcaagagaatctgcctcgctgtggtgcactggag

SEQ ID NO: 335279 - DNA, 120 bp, Artificial Sequence
  ENSG00000137269_13 (sequence is synthesized)
cgtgctgtcaacagagtcagtgcgatccgatttgtggaggatgagaaagatgaagaagacaatgagacgagaacacttctaaggcgagccactccacacccaggggagttaaagcacatg

SEQ ID NO: 335280 - DNA, 120 bp, Artificial Sequence
  ENSG00000137269_14 (sequence is synthesized)
aaaaagacagtggagaatttacggaatgacatgaatgctgctaaaggactggactcaaacaaaaacgaggtcaatcatgccattgaccgagtgaccacttctgtgtagagtttcacctcc

SEQ ID NO: 335281 - DNA, 120 bp, Artificial Sequence
  ENSG00000137269_15 (sequence is synthesized)
aagttttacctcctgtgtcttcctctgctgtcgagacgttcctgtctgcttcccgggagcctcacgtgctccttgtcctaaccagcccccgcgcgccatcttcccgtggagtgtggggaa

SEQ ID NO: 335282 - DNA, 120 bp, Artificial Sequence
  ENSG00000137269_16 (sequence is synthesized)
gctgctgtctcccaggaagtgccttactcatcccgcaaccagtcagcgcaccagtggtctcccggtgtgattttttttttttttaatttcagttgtttgtaataagtagaatacactact

SEQ ID NO: 335283 - DNA, 120 bp, Artificial Sequence
  ENSG00000137269_17 (sequence is synthesized)
gtaaacatacgacctttgtttttgtcttatgttggggtaaaggaaagcaggaaggggaatttttatcctcctcccttccgtaaagtgctgggatattttgaatcccccaagttcccttgg

SEQ ID NO: 335284 - DNA, 120 bp, Artificial Sequence
  ENSG00000137269_18 (sequence is synthesized)
acctactgatgagagatagttttatgtatggggaaaaatggatactttttaaaccttttttggcagctcagatggtgtaaattttaaaattttgtataggtatttcataacaaaaatatg

SEQ ID NO: 335285 - DNA, 120 bp, Artificial Sequence
  ENSG00000137269_19 (sequence is synthesized)
tatttcttttttgttattttatcttgaaaacggtacatattttagtatttgtgcagaaaaacaagtcctaaagtatttgtttttatttgtaccatccacttgtgccttactgtatcctgt

SEQ ID NO: 335286 - DNA, 120 bp, Artificial Sequence
  ENSG00000137269_20 (sequence is synthesized)
gtcatgtccaatcagttgtaaacaatggcatctttgaacagtgtgatgagaataggaatgtggtgttttaaagcagtgttgcattttaatcagtaatctacctggtggatttgtttttaa

SEQ ID NO: 335287 - DNA, 120 bp, Artificial Sequence
  ENSG00000137269_21 (sequence is synthesized)
ccaaaaagatgaattatcaatgatttgtaattatatcagttgattttttttgaaaagatgaaccaaaggatttgactgctaatattttattccttacactttttttctgaataagtctct

SEQ ID NO: 335288 - DNA, 120 bp, Artificial Sequence
  ENSG00000137269_22 (sequence is synthesized)
cataatgagtgcagtgtcagactgtgcctactctgatggtatgtgccatttgtaaaataaaatagagcagaaaaacacaaaaagagaacactggttcagacattcagtgggcaagtaaat

SEQ ID NO: 335289 - DNA, 120 bp, Artificial Sequence
  ENSG00000137269_23 (sequence is synthesized)
tatggactgcaaaataatgatttttattcaagaaagctttaaaagttttatatccagatatacaaccacaataaagcaaaataacctactatcaaaatagaaatgttgctatctttataa

SEQ ID NO: 335290 - DNA, 120 bp, Artificial Sequence
  ENSG00000137269_24 (sequence is synthesized)
gtgcaatttaatttgtaaatagagtttgaatcaaagtatcacaaaatactgcttcaagatttaattttaaatctgctaatttaagggatattgggaaaagttttggtgtgtttctgttga

SEQ ID NO: 335291 - DNA, 120 bp, Artificial Sequence
  ENSG00000137269_25 (sequence is synthesized)
tttcttttttgtatgctgtgataaaagagaaatgaaaagtgccagtcactgtgtggtgtctaggaaaatcatatatatttttttctccaagaaataaattcatcctggacattggccata

SEQ ID NO: 335292 - DNA, 120 bp, Artificial Sequence
  ENSG00000137269_26 (sequence is synthesized)
ttttttttttttttttgctctgtaatctggaggttctaatgggagaagtgagagcagaaaagggaagcacaggaacctactgaggaatccacttgcaaagagtatgttgcgtcttaaaaa

SEQ ID NO: 335293 - DNA, 120 bp, Artificial Sequence
  ENSG00000137269_27 (sequence is synthesized)
cataacaccgtttttacattttgaaaccaatctcaggaagctccttttaatttttcctcattttgttgatagggattgatttgattacaaaatttgaggttgtgatgtctctttttttaa

SEQ ID NO: 335294 - DNA, 120 bp, Artificial Sequence
  ENSG00000137269_28 (sequence is synthesized)
acttctggggcagccgtgagcagcgggcacacgggcagccacgaaagcagcagcgagggtggtgcaaacacctcaaaactacaccgaatccagtagcgcctggcgcccccggcgcgcaag

SEQ ID NO: 335295 - DNA, 120 bp, Artificial Sequence
  ENSG00000137269_29 (sequence is synthesized)
gccgcctctactccgcctcatctttgtcccaagtcctttcacagtctgccttcctcaaacggcccgatgcgcccccgtctttgccggagtaagcagaccgccagcagccggcccgcaggt

SEQ ID NO: 335296 - DNA, 120 bp, Artificial Sequence
  ENSG00000137269_30 (sequence is synthesized)
cagtcgaccctctctggatgcaggtcgccgggaaaacccggagcggagcatccctcgggccgggaaacgccctcggcgcgcacccactggcgcgcatgctcagtccgcgcggcggctgcg

SEQ ID NO: 335297 - DNA, 120 bp, Artificial Sequence
  ENSG00000137269_31 (sequence is synthesized)
gggatcaaaaatgtcaaatgctttgaaaagacgcatgtgttgttttttaaaggtgtgaactctaaatctgtgagtatagagccaactggaggaattatgtcaaagaatgatcatcagtaa

SEQ ID NO: 335298 - DNA, 120 bp, Artificial Sequence
  ENSG00000137269_32 (sequence is synthesized)
cattaaggagagttggaaaaggtgaatttataggattttaaatgggagaaagaaagagattgacattttgggtttgatatacagagaatggtgacaccattggcagaaattgataatttg

SEQ ID NO: 335299 - DNA, 120 bp, Artificial Sequence
  ENSG00000137269_33 (sequence is synthesized)
ggagtttgacagaggaagtggatgcctttgggtttgatttttgaatttaatgtgaaattaagctccatcccataagcaattggaattataaaaattgatcttgatgcaaccatatttctg

SEQ ID NO: 335300 - DNA, 120 bp, Artificial Sequence
  ENSG00000137269_34 (sequence is synthesized)
ggcagagatttacattgggccatgctcatgtcttggatgaggttgaacaaactgttcacaaaggcatacacatagaggaaggtgaatgggaagctaaagccagcttcctaggactttttt

SEQ ID NO: 335301 - DNA, 120 bp, Artificial Sequence
  ENSG00000137269_35 (sequence is synthesized)
tttggttagtagtctaagcacgagaaaatgagacatcaccatctgttgtggagagtagctgtatggactgagaggcatttaaattctggcaagggaggtggaaatgctgacaatgaggag

SEQ ID NO: 335302 - DNA, 120 bp, Artificial Sequence
  ENSG00000137269_36 (sequence is synthesized)
gcaagggaggtggaaatgctgacaatgaggaggaagcttatagtgggtcaaacaaggaggtgtctagtgtgttgtttaaaaagaaggcttacaattagccaggcgtggtggcgggcgcct

SEQ ID NO: 335303 - DNA, 120 bp, Artificial Sequence
  ENSG00000137269_37 (sequence is synthesized)
ttatgccattagacttgctaattaaaaattctgcccttaaactctcaggaggagaagaagacaggaagccctcaatacactctaggtgtatggtatcagttgcagagaaaacagtggtat

SEQ ID NO: 335304 - DNA, 120 bp, Artificial Sequence
  ENSG00000137270_0 (sequence is synthesized)
agaaaatgaccagagcctgctgggacttgaaccagcagtaagattttcacgacacagtgctgtctgcttctccgtaagaagttagaagccctagaaaacaatctcctggtccaaggtgct

SEQ ID NO: 335305 - DNA, 120 bp, Artificial Sequence
  ENSG00000137270_1 (sequence is synthesized)
tgagtgggccgatccagctatatcaagaacctttgagaacaaaattctcaagcatttctgaggggagtcgaataggtgaaaaccttggctggcctgaccttatcatggaacctgacgact

SEQ ID NO: 335306 - DNA, 120 bp, Artificial Sequence
  ENSG00000137270_2 (sequence is synthesized)
ttgattctgaagacaaagagatattaagctgggatattaatgatgtgaaactgccacagaacgtgaaaaaaaccgactggttccaggagtggccagattcctatgccaaacacatctaca

SEQ ID NO: 335307 - DNA, 120 bp, Artificial Sequence
  ENSG00000137270_3 (sequence is synthesized)
gctcggaggacaagaatgcgcagcggcacctgagcagctgggccatgcgcaataccaacaaccacaactcccgcatcctcaagaagtcctgcctgggtgtggtggtgtgcggccgcgact

SEQ ID NO: 335308 - DNA, 120 bp, Artificial Sequence
  ENSG00000137270_4 (sequence is synthesized)
gtctcgcagaggaggggcgcaagatctacctgagacctgccatctgtgacaaggcccggcagaagcagcagcggaaacgctgtcccaactgtgacgggcctctgaagctcatcccttgcc

SEQ ID NO: 335309 - DNA, 120 bp, Artificial Sequence
  ENSG00000137270_5 (sequence is synthesized)
gaggtcatgggggcttcccggtcaccaacttctggaggcacgacggacgctttatatttttccagtcaaagggagagcatgatcatccaaaaccagaaaccaagttagaagctgaggcaa

SEQ ID NO: 335310 - DNA, 120 bp, Artificial Sequence
  ENSG00000137270_6 (sequence is synthesized)
gaagagccatgaagaaagtgaacacagcaccttcctccgtctcattgagcctgaaggggagcacagagaccaggtctcttccaggtgaaacacaaagtcaggggagtttacctttaactt

SEQ ID NO: 335311 - DNA, 120 bp, Artificial Sequence
  ENSG00000137270_7 (sequence is synthesized)
ggtctttccaggaaggcgtccaattgcctggtagttacagtggacatttaatagctaacactcctcagcagaactcactaaatgattgcttttccttctccaagagttatggtctgggag

SEQ ID NO: 335312 - DNA, 120 bp, Artificial Sequence
  ENSG00000137270_8 (sequence is synthesized)
gaatcacagatctgactgaccagacttccactgtggaccccatgaagctctatgaaaagcgcaaattgtccagtagcagaacctacagtagtggagacctgcttcctccttctgcctccg

SEQ ID NO: 335313 - DNA, 120 bp, Artificial Sequence
  ENSG00000137270_9 (sequence is synthesized)
gagtctactctgatcatggcgatctacaagcgtggagtaaaaatgctgctttggggagaaatcatcttgctgacaactgttattccaattatccttttcctctgaccagctggccttgca

SEQ ID NO: 335314 - DNA, 120 bp, Artificial Sequence
  ENSG00000137270_10 (sequence is synthesized)
gcttctctccttcccaaaactcttcagaacccttttaccagcagcttccattggagccacctgcagccaaaactggctgtcccccattatggccaaatccagcgggtaatctttatgaag

SEQ ID NO: 335315 - DNA, 120 bp, Artificial Sequence
  ENSG00000137270_11 (sequence is synthesized)
aacagctacgtccagtctcctgcataccattcacctcaagaagacccctttctcttcacctacgcctctcatcctcatcagcaatattcactgccaagcaagagcagcaaatgggatttt

SEQ ID NO: 335316 - DNA, 120 bp, Artificial Sequence
  ENSG00000137270_12 (sequence is synthesized)
gaggaagaaatgacatacttgggtttggatcactgcaacaatgatatgcttctgaacctgtgtcctttgagatgacccaaatctttcactatgtgcaccccagcccctcaaaaatgggga

SEQ ID NO: 335317 - DNA, 120 bp, Artificial Sequence
  ENSG00000137270_13 (sequence is synthesized)
aatggggaagggctgaaagaatttccttaggaaataatttttaaaacataaccacagataaatgagaatcatgataagcagtagacaaggcttttttctttttcttttttccttcttttt

SEQ ID NO: 335318 - DNA, 120 bp, Artificial Sequence
  ENSG00000137270_14 (sequence is synthesized)
gattacaggcgtgagccattgtgcccggctgacaaggcttttttcttcacatgagtaatttttttggcttcttctcctccactctagtatttccaccctcagtaaggaatggaaacctgt

SEQ ID NO: 335319 - DNA, 120 bp, Artificial Sequence
  ENSG00000137270_15 (sequence is synthesized)
cctcagtaaggaatggaaacctgtcccgtctggggtgtgaagtgccctctgctttttcccccacattgtttggggttcccagcacctcagccacattgcatgctgggttttcattgtcat

SEQ ID NO: 335320 - DNA, 120 bp, Artificial Sequence
  ENSG00000137270_16 (sequence is synthesized)
tgttgcaaatgaaatggagtagacatgtgaaatgctaacctatctaggacctgatctatgccttcttgggaactgagaatgaagaaacagaaatagatggtggaagaactgcctaaggtg

SEQ ID NO: 335321 - DNA, 120 bp, Artificial Sequence
  ENSG00000137270_17 (sequence is synthesized)
tgaaaagctgaagattctaccactgaagtactgaatatgttgtctagttgtgagactagtgtgtaaaatatatgttttctagatgatttctgagacttgtgatgacaaggaacctgacct

SEQ ID NO: 335322 - DNA, 120 bp, Artificial Sequence
  ENSG00000137270_18 (sequence is synthesized)
aaccccatttttcataaagacaaagaacagcaatgttaaattgccatatgaagagaaacactagtgatgtgcgtggtctccttgcctcttgtttccttccctcttcctcactgacttccc

SEQ ID NO: 335323 - DNA, 120 bp, Artificial Sequence
  ENSG00000137270_19 (sequence is synthesized)
cttgcacaggggcttctgttttatcccatttattatttgtggcacctatatcaatgtggggtttgtaataggtgagaaatatttgcttggagaagctcttgtgcaattagcctggcaatg

SEQ ID NO: 335324 - DNA, 120 bp, Artificial Sequence
  ENSG00000137270_20 (sequence is synthesized)
attggccggccatgtttgaatgccagtttctcttctttgctgaagtactttatgataaaagtaagcctagacataaaatctggagagaaccatgcaataaacaagtatttttgaaataaa

SEQ ID NO: 335325 - DNA, 80 bp, Artificial Sequence
  ENSG00000137273_0 (sequence is synthesized)
agagcgaggagcgctcctgaagggagacgtcgggctcgtccccggggtccaggccgcggtcccactcgcgggcgcagtcg

SEQ ID NO: 335326 - DNA, 80 bp, Artificial Sequence
  ENSG00000137273_1 (sequence is synthesized)
ggcgttgcctcccgcccgccgccgccgccgccgccagaagccccagaggagctgagggaggcgacgccgaagcgctggcc

SEQ ID NO: 335327 - DNA, 80 bp, Artificial Sequence
  ENSG00000137273_2 (sequence is synthesized)
cggagtggccacggctgcagcccgggcggcgggctagggcgctcgcagggcttctgggccgaccccgctccggcgcctcc

SEQ ID NO: 335328 - DNA, 120 bp, Artificial Sequence
  ENSG00000137273_3 (sequence is synthesized)
gccgccgccgccgccccggagaccacctcctcctcctcgtcgtcgtcctccgcctcctgcgcctcgtcctcgtcctcctccaattcggccagcgccccctcggctgcctgcaagagcgcg

SEQ ID NO: 335329 - DNA, 120 bp, Artificial Sequence
  ENSG00000137273_4 (sequence is synthesized)
ggcggcggcggcgcgggcgccgggagcgggggcgccaagaaggcgagctcggggctgcggcggcccgagaagccgccctactcgtacatcgcgctcatcgtcatggccatccagagctcg

SEQ ID NO: 335330 - DNA, 120 bp, Artificial Sequence
  ENSG00000137273_5 (sequence is synthesized)
cccagcaagcgcctgacgctcagcgagatctaccagttcctgcaggcgcgcttccccttcttccgcggcgcctaccagggctggaagaactcggtgcgccacaatctctcgctcaacgag

SEQ ID NO: 335331 - DNA, 120 bp, Artificial Sequence
  ENSG00000137273_6 (sequence is synthesized)
tgcttcatcaagctgcctaagggcctcgggcggcccggcaagggccactactggaccatcgacccggccagcgagttcatgttcgaggagggctcgttccgccgccggccgcgcggcttc

SEQ ID NO: 335332 - DNA, 120 bp, Artificial Sequence
  ENSG00000137273_7 (sequence is synthesized)
aggcggaagtgccaggcgctcaagcccatgtaccaccgcgtggtgagcggcttgggcttcggggcgtcgctgctgccccagggcttcgacttccaggcgcccccgtcggcgccgctcggc

SEQ ID NO: 335333 - DNA, 120 bp, Artificial Sequence
  ENSG00000137273_8 (sequence is synthesized)
tgccacagccagggcggctacggcggcctcgacatgatgcccgcgggctacgacgccggcgcgggcgcccccagccacgcgcaccctcaccaccaccaccaccaccacgtcccgcacatg

SEQ ID NO: 335334 - DNA, 120 bp, Artificial Sequence
  ENSG00000137273_9 (sequence is synthesized)
cccgggggcgtcggtgcggccgggggcggcggcggcggcgactacgggccggacagcagcagcagcccggtaccctcgtccccggccatggcgagcgccatcgaatgccactcgccctac

SEQ ID NO: 335335 - DNA, 120 bp, Artificial Sequence
  ENSG00000137273_10 (sequence is synthesized)
acgagccctgcggcgcactggagctcgcctggcgcctcgccttacctcaagcagccgcctgccctgacgcccagcagcaaccccgccgcctcggcaggcctgcactccagcatgtcctcc

SEQ ID NO: 335336 - DNA, 120 bp, Artificial Sequence
  ENSG00000137273_11 (sequence is synthesized)
tactcgctggagcagagctacttgcaccagaacgctcgcgaggacctctcagtgggactgccccgttaccagcatcactctactccagtgtgtgacagaaaagatttcgtcctcaacttc

SEQ ID NO: 335337 - DNA, 120 bp, Artificial Sequence
  ENSG00000137273_12 (sequence is synthesized)
aatgggatttcttctttccatccctcagctagcgggtcgtattatcaccatcaccaccagagcgtctgtcaggatattaagccctgcgtcatgtgaacggaaagaggccaagcgatggcc

SEQ ID NO: 335338 - DNA, 120 bp, Artificial Sequence
  ENSG00000137273_13 (sequence is synthesized)
gctctctcctctcccctcctcagagggggcagatagaaactgggacggattcaagtcacatgcacgcggatagcagtaagccacacacctgccacttagccagaatgcccaggatcgcgt

SEQ ID NO: 335339 - DNA, 120 bp, Artificial Sequence
  ENSG00000137273_14 (sequence is synthesized)
tggtcactgttatttgcctactgctggaagaaggacaaccgctggcaaggtagcgttccccaatctgaatacctgcaggctcccacatgagggagagggcagactcaggtgggaagatgt

SEQ ID NO: 335340 - DNA, 120 bp, Artificial Sequence
  ENSG00000137273_15 (sequence is synthesized)
gccatgcgtaaggcatcaacgtgtatctgtgggatcttcgttgccttcagtaatcagggtgtgaaaaaagcagacaagttgtgtgtgtgtgtgtgtgtctaagaaaacttgtgtgctttt

SEQ ID NO: 335341 - DNA, 120 bp, Artificial Sequence
  ENSG00000137273_16 (sequence is synthesized)
caaaaaggcagtgctaagcacaagatttcaagaaagcctcttcttgttgcctagctgagtgggagagtcattttccccagacactacatttggatacaggtgccaaagaacattattaag

SEQ ID NO: 335342 - DNA, 120 bp, Artificial Sequence
  ENSG00000137273_17 (sequence is synthesized)
gaattatttagaaacaatgtgtctagtttaagaaagtggttttcagtattgtgacaatacaacgtttttacaaggttgttttctaccaccatattttaaagatatttttatgaccgtgta

SEQ ID NO: 335343 - DNA, 120 bp, Artificial Sequence
  ENSG00000137273_18 (sequence is synthesized)
tactcacactttgcttgtattttaaaaggaggatatatttgcacttatgtatacttttacagtttgccaaaatattttgttgtaaaattttttttcaataaaatgtatataacaaatagt

SEQ ID NO: 335344 - DNA, 120 bp, Artificial Sequence
  ENSG00000137274_0 (sequence is synthesized)
gcactcccggcagctacgcgacctgtgaccatggtggctgtgctgggcggccggggcgtgttgcgcctgcggctgcttctctcagcgctgaagcccgggatccacgtcccacgggccgga

SEQ ID NO: 335345 - DNA, 120 bp, Artificial Sequence
  ENSG00000137274_1 (sequence is synthesized)
cccgcggccgcgttcggcacctcggtaacctctgccaaagtggctgtgaatggcgttcagctgcattaccagcagactggagagggagatcacgcagtcctgctacttcctgggatgtta

SEQ ID NO: 335346 - DNA, 120 bp, Artificial Sequence
  ENSG00000137274_2 (sequence is synthesized)
ggaagtggagagactgattttggacctcagctcaagaacctcaataagaagctcttcacggtggtcgcctgggatcctcgaggctatggacattccaggcccccagatcgcgatttccca

SEQ ID NO: 335347 - DNA, 120 bp, Artificial Sequence
  ENSG00000137274_3 (sequence is synthesized)
gcagacttttttgaaagggatgcaaaagatgctgttgatttgatgaaggcgctgaagtttaagaaggtttctctgctggggtggagtgatgggggcataaccgcactcattgctgctgca

SEQ ID NO: 335348 - DNA, 120 bp, Artificial Sequence
  ENSG00000137274_4 (sequence is synthesized)
aaatatccatcttacatccacaagatggtgatctggggcgccaacgcctacgtcactgacgaagacagcatgatatatgagggcatccgagatgtttccaaatggagtgagagaacaaga

SEQ ID NO: 335349 - DNA, 120 bp, Artificial Sequence
  ENSG00000137274_5 (sequence is synthesized)
aagcctctagaagccctctatgggtatgactactttgccagaacctgtgaaaagtgggtggatggcataagacagtttaaacatctcccagatggtaacatctgccggcacctgctgccc

SEQ ID NO: 335350 - DNA, 120 bp, Artificial Sequence
  ENSG00000137274_6 (sequence is synthesized)
cgggtccagtgccccgccttgattgtgcacggtgagaaggatcctctggtcccacggtttcatgccgacttcattcataagcacgtgaaaggctcacggctgcatttgatgccagaaggc

SEQ ID NO: 335351 - DNA, 120 bp, Artificial Sequence
  ENSG00000137274_7 (sequence is synthesized)
atcgtgttgctgcctgttaacatgatgcctttgaaactctccgcctttgaaactttctacccctcccttcaatcttatcctaaccaaatgagaataatgacatattgaaaacagcctcta

SEQ ID NO: 335352 - DNA, 90 bp, Artificial Sequence
  ENSG00000137274_8 (sequence is synthesized)
cactttgggaggctgaggtgggagattgtgcaatatagggagactccggctctacaaaaaagagtttttcaaaattagccaggcgaagtg

SEQ ID NO: 335353 - DNA, 120 bp, Artificial Sequence
  ENSG00000137274_9 (sequence is synthesized)
agcttgtgcaatatagggagactccggctctacaaaaaagagtttttcaaaattagccaggcgaagtggcacacatctgtggtcccaggtgctcaggaagctgaggtgggaggatcactt

SEQ ID NO: 335354 - DNA, 89 bp, Artificial Sequence
  ENSG00000137274_10 (sequence is synthesized)
ggaggatcacttgagcccaattcaaagctgcagtgagctgtaattgcatcactgcactccaacctgggcaacagagtaagaccttgtct

SEQ ID NO: 335355 - DNA, 120 bp, Artificial Sequence
  ENSG00000137274_11 (sequence is synthesized)
aaatccgattttctaagatgaagttgtgacaagttataccattgtcttaacaggtgaattcctgccataatttattttcaaataaattttaggtggagaatgtgtagtgttaatgttgga

SEQ ID NO: 335356 - DNA, 120 bp, Artificial Sequence
  ENSG00000137274_12 (sequence is synthesized)
gattttaagacatcttgaatttgtactgtaccttttatctgagaggttcaagcttcacttgtgtttttatttgtgtttatctatcatattcaaagagaagtagggagagtccgtgcccga

SEQ ID NO: 335357 - DNA, 120 bp, Artificial Sequence
  ENSG00000137274_13 (sequence is synthesized)
ggtcctcaattctaagatcagaggatgtccagaacagcagcagataggggcaggtttgctttaccccatatccctctcctggttcacttttgagagatgaatactttgggccagtaaagg

SEQ ID NO: 335358 - DNA, 120 bp, Artificial Sequence
  ENSG00000137274_14 (sequence is synthesized)
tgaacaaaatatgtattttcatcactctgtactaaaaggacaggaatgttattaattaaaacactaaagcagaaatcctacattgctattaaaattaaactttgattaccacaataaaaa

SEQ ID NO: 335359 - DNA, 120 bp, Artificial Sequence
  ENSG00000137274_15 (sequence is synthesized)
ggtcccgagagccctaagtcttctctttgcttgctgatctcgtaccttaatgtgcaaaagaatcacgttgggaactgaaaattcagaatcctgggcctcactcccagaggatctgatcta

SEQ ID NO: 335360 - DNA, 120 bp, Artificial Sequence
  ENSG00000137274_16 (sequence is synthesized)
ccgacgcagcgagggcgctatggctggcggcctcgcctcctggaaaggccatggtcgctgaggcgacgagcgagggcggggcagcgccgacggggacactcatcccgggagccagagcca

SEQ ID NO: 335361 - DNA, 79 bp, Artificial Sequence
  ENSG00000137274_17 (sequence is synthesized)
agatggggtttcaccgtgttgcccaggccggtctcgaactcctgagctcaggcagcacccggtcagcctgcctcctttc

SEQ ID NO: 335362 - DNA, 120 bp, Artificial Sequence
  ENSG00000137274_18 (sequence is synthesized)
gctaggattacaggcgcacccggtcagcctgcctcctttcttcgagtggatggattaagtcattgcaaggctgctttcctgattacattctgaccactttgagtagaaactactttgctt

SEQ ID NO: 335363 - DNA, 69 bp, Artificial Sequence
  ENSG00000137274_19 (sequence is synthesized)
gcatgatctcagctcactgcaatctctgtctcctgggttcaagcgattgaggcacattttttttgtatt

SEQ ID NO: 335364 - DNA, 88 bp, Artificial Sequence
  ENSG00000137274_20 (sequence is synthesized)
ctcccaattgctgggattacaggcctgagacaccatgcccagcctcctattctttatctgaaaaattaacaagatttccagttaaagt

SEQ ID NO: 335365 - DNA, 120 bp, Artificial Sequence
  ENSG00000137274_21 (sequence is synthesized)
attctttatctgaaaaattaacaagatttccagttaaagtaagaattgacatctttaagagaaattctgaattatagtttattttcatacagctgtttatgtttataatctcattttttt

SEQ ID NO: 335366 - DNA, 120 bp, Artificial Sequence
  ENSG00000137274_22 (sequence is synthesized)
ttaattactgagaaaatagagtagctaagatctaatcttggagtgcattgttacaaaatggttgtgattgaaggaccaatttgatccattaggtaatcatttcctgcatgaatcatctgc

SEQ ID NO: 335367 - DNA, 120 bp, Artificial Sequence
  ENSG00000137274_23 (sequence is synthesized)
caaaactttcacaatgaaaaggacatttggaaatgttactcttctggtttgagttgaaaacagcaaatatatcaaatgtatgccttataatgtttctgttcagatgcagcatccacccat

SEQ ID NO: 335368 - DNA, 120 bp, Artificial Sequence
  ENSG00000137274_24 (sequence is synthesized)
ggagacaggccctggaaatctctgctcttaaaacaaaaaaatgccatgaaacgatgtttgagacagttctccattaaagagggcacatttgtaaaatgtaaacttggatgttttgttgaa

SEQ ID NO: 335369 - DNA, 120 bp, Artificial Sequence
  ENSG00000137274_25 (sequence is synthesized)
gagagtagtgaaaagacaggaagatttaaaggtggaaatagggttaaatcagcaattcaaaaatacgttcatgatacagaggctgtagcagtgtataaactgtctcacagcgagggcctt

SEQ ID NO: 335370 - DNA, 120 bp, Artificial Sequence
  ENSG00000137274_26 (sequence is synthesized)
cgtgatgcgtcccccttctgtgctgactcatttggtaggagccctcttttccgactgtcctctcaggtttatggatgcttggtatagtgtagggattcattgcattgcacggctctggag

SEQ ID NO: 335371 - DNA, 120 bp, Artificial Sequence
  ENSG00000137274_27 (sequence is synthesized)
tgcgatggccctgagtgtgagttctgcctgtgtccccggcttgctgttagaatggatctgggcaggtaacttagcttcttgaagcttcggtttcctatctgtgacctcgaaaagctgttg

SEQ ID NO: 335372 - DNA, 120 bp, Artificial Sequence
  ENSG00000137274_28 (sequence is synthesized)
tggggattaaatgaggtattatctattcagctttggtgcaggatcaaagacagagtaagtgtctagtgaaaggttggtattactgttattacagaagtccttaatgaacaaacattttta

SEQ ID NO: 335373 - DNA, 120 bp, Artificial Sequence
  ENSG00000137274_29 (sequence is synthesized)
tatgctgaatgagttaaaacatgtaactactgtgtttaacagatgtgaaattgtttaaacagttgctggcaccaagtgagcactcaggcatgttgactttgatcatcacgtgatgatgca

SEQ ID NO: 335374 - DNA, 120 bp, Artificial Sequence
  ENSG00000137274_30 (sequence is synthesized)
gctggccggtgtgtgtcatctcgggacaggagagggaagtgtcagagacctggagaagtatttccctagtcagcaggtccgcttctcacttagcaggcagtgacttcccactgaagagga

SEQ ID NO: 335375 - DNA, 120 bp, Artificial Sequence
  ENSG00000137274_31 (sequence is synthesized)
gggaaaggcctggggcccgtgcagggcgggggagcactgccccgtcggggcagctcccagccttctcagagctgcagtgccttcctcttgacacacacggagagggaatggagaaggaaa

SEQ ID NO: 335376 - DNA, 120 bp, Artificial Sequence
  ENSG00000137274_32 (sequence is synthesized)
gagctagcttagggatgccaggaaccgcagacgcaactctctttttagccccacaacagccccggggaactgtgattgttcctgtttgtggctgaagctcccagtggttaaggagccacc

SEQ ID NO: 335377 - DNA, 120 bp, Artificial Sequence
  ENSG00000137274_33 (sequence is synthesized)
acagcctcacagaggcaggaaactgcagtacagggactagggcccaggctgtccatcattgcctcaggaaagttctcataaatgggggtaagtccttacagtctctccaaagtatgttag

SEQ ID NO: 335378 - DNA, 120 bp, Artificial Sequence
  ENSG00000137274_34 (sequence is synthesized)
tcaggagtgtcacagatgcatcagcgataaggagaagctgctttaccgtgcgcaagttgtataattaattccttgtgaggttcatatgctttgagggctggccggggcccctacactcat

SEQ ID NO: 335379 - DNA, 120 bp, Artificial Sequence
  ENSG00000137274_35 (sequence is synthesized)
ctgaaacgtgatttccagggaaaagctctacaggtgtcaagcacctaccactgttttcacggtgggaaccgccactgtggaatatagtggtggggtgtttatttgattttcctactattt

SEQ ID NO: 335380 - DNA, 120 bp, Artificial Sequence
  ENSG00000137274_36 (sequence is synthesized)
tatgcgaatttaaatcaggctgcttatttactagtagaactcagaaacaggcaaacaaacaagaaacagagagaaacagaaaagggaacccaaagaatgttagagctggaaggaatccca

SEQ ID NO: 335381 - DNA, 120 bp, Artificial Sequence
  ENSG00000137274_37 (sequence is synthesized)
ggcacggtcaaatccaaaacacagtttttacggatagggaaactgagggccaaggaggggcagggctcgccgagtttcgcctcctctgaccgcgtagaatggttgcactaaagcagattc

SEQ ID NO: 335382 - DNA, 120 bp, Artificial Sequence
  ENSG00000137274_38 (sequence is synthesized)
accgagaggggacggtctacgcgggtgccggcggttccaggactgcgaaaccacgagccgagtttcggtcgcccatgggaaagcacccggcagggcgtggcttcggggcggggcgggcag

SEQ ID NO: 335383 - DNA, 120 bp, Artificial Sequence
  ENSG00000137274_39 (sequence is synthesized)
gtttttgcatgctgtaaaatctatgatgcattcacaatactagatgccaaatactgatgattaattttagtgcttttttgaaatgttttcatatttgctacaatcaaacttaaatgactt

SEQ ID NO: 335384 - DNA, 120 bp, Artificial Sequence
  ENSG00000137274_40 (sequence is synthesized)
agaaaagtaggtaactttctactgctgttcagaattggattttttattcctttagtaaagtacccagtttttcctattgcaagtactctgtgaaatcacagttgcccataatttgggagg

SEQ ID NO: 335385 - DNA, 120 bp, Artificial Sequence
  ENSG00000137274_41 (sequence is synthesized)
gtgacaggggtcaaggaaaggggtgtgggaagaaggtaaaggaggaacgtgagtgggtaatcagtcatcctagtttgcttggcgttgggggattttccaggatgtgggactttcagtgct

SEQ ID NO: 335386 - DNA, 120 bp, Artificial Sequence
  ENSG00000137274_42 (sequence is synthesized)
ggcaaccaggtttggatggcgtcagaaggaatgcctgaagaagtgatatgccatgttgctgcccagtttcacactggaagagatcctgtgcaaagatccagcggcctgctttgggttcca

SEQ ID NO: 335387 - DNA, 120 bp, Artificial Sequence
  ENSG00000137274_43 (sequence is synthesized)
ccgccttgattgtgcacggtgagaaggatcctctggtcccacggtttcatgccgacttcattcataagcacgtgaaaggctcacgatgaattcaacaagttagcagaagacttcctacaa

SEQ ID NO: 335388 - DNA, 80 bp, Artificial Sequence
  ENSG00000137275_0 (sequence is synthesized)
agtccacgccctccagccgggcgcgctcgacgcggacggcgggccagctgccggagcgcggcgactccaggggacccaca

SEQ ID NO: 335389 - DNA, 120 bp, Artificial Sequence
  ENSG00000137275_1 (sequence is synthesized)
gagcgcggcaggacttggctggacggcgcggccacggagaagggcgcgggtacagctctgccggggggggaaaaagtggtaccattttgggcgttcttgagcttcagaatgcaaccagac

SEQ ID NO: 335390 - DNA, 120 bp, Artificial Sequence
  ENSG00000137275_2 (sequence is synthesized)
atgtccttgaatgtcattaagatgaaatccagtgacttcctggagagtgcagaactggacagcggaggctttgggaaggtgtctctgtgtttccacagaacccagggactcatgatcatg

SEQ ID NO: 335391 - DNA, 120 bp, Artificial Sequence
  ENSG00000137275_3 (sequence is synthesized)
aaaacagtgtacaaggggcccaactgcattgagcacaacgaggccctcttggaggaggcgaagatgatgaacagactgagacacagccgggtggtgaagctcctgggcgtcatcatagag

SEQ ID NO: 335392 - DNA, 120 bp, Artificial Sequence
  ENSG00000137275_4 (sequence is synthesized)
gaagggaagtactccctggtgatggagtacatggagaagggcaacctgatgcacgtgctgaaagccgagatgagtactccgctttctgtaaaaggaaggataattttggaaatcattgaa

SEQ ID NO: 335393 - DNA, 120 bp, Artificial Sequence
  ENSG00000137275_5 (sequence is synthesized)
ggaatgtgctacttacatggaaaaggcgtgatacacaaggacctgaagcctgaaaatatccttgttgataatgacttccacattaagatcgcagacctcggccttgcctcctttaagatg

SEQ ID NO: 335394 - DNA, 120 bp, Artificial Sequence
  ENSG00000137275_6 (sequence is synthesized)
tggagcaaactgaataatgaagagcacaatgagctgagggaagtggacggcaccgctaagaagaatggcggcaccctctactacatggcgcccgagcacctgaatgacgtcaacgcaaag

SEQ ID NO: 335395 - DNA, 120 bp, Artificial Sequence
  ENSG00000137275_7 (sequence is synthesized)
cccacagagaagtcggatgtgtacagctttgctgtagtactctgggcgatatttgcaaataaggagccatatgaaaatgctatctgtgagcagcagttgataatgtgcataaaatctggg

SEQ ID NO: 335396 - DNA, 120 bp, Artificial Sequence
  ENSG00000137275_8 (sequence is synthesized)
aacaggccagatgtggatgacatcactgagtactgcccaagagaaattatcagtctcatgaagctctgctgggaagcgaatccggaagctcggccgacatttcctggcattgaagaaaaa

SEQ ID NO: 335397 - DNA, 120 bp, Artificial Sequence
  ENSG00000137275_9 (sequence is synthesized)
tttaggcctttttatttaagtcaattagaagaaagtgtagaagaggacgtgaagagtttaaagaaagagtattcaaacgaaaatgcagttgtgaagagaatgcagtctcttcaacttgat

SEQ ID NO: 335398 - DNA, 120 bp, Artificial Sequence
  ENSG00000137275_10 (sequence is synthesized)
tgtgtggcagtaccttcaagccggtcaaattcagccacagaacagcctggttcactgcacagttcccagggacttgggatgggtcctgtggaggagtcctggtttgctccttccctggag

SEQ ID NO: 335399 - DNA, 120 bp, Artificial Sequence
  ENSG00000137275_11 (sequence is synthesized)
cacccacaagaagagaatgagcccagcctgcagagtaaactccaagacgaagccaactaccatctttatggcagccgcatggacaggcagacgaaacagcagcccagacagaatgtggct

SEQ ID NO: 335400 - DNA, 120 bp, Artificial Sequence
  ENSG00000137275_12 (sequence is synthesized)
tacaacagagaggaggaaaggagacgcagggtctcccatgacccttttgcacagcaaagaccttacgagaattttcagaatacagagggaaaaggcactgcttattccagtgcagccagt

SEQ ID NO: 335401 - DNA, 120 bp, Artificial Sequence
  ENSG00000137275_13 (sequence is synthesized)
catggtaatgcagtgcaccagccctcagggctcaccagccaacctcaagtactgtatcagaacaatggattatatagctcacatggctttggaacaagaccactggatccaggaacagca

SEQ ID NO: 335402 - DNA, 120 bp, Artificial Sequence
  ENSG00000137275_14 (sequence is synthesized)
ggtcccagagtttggtacaggccaattccaagtcatatgcctagtctgcataatatcccagtgcctgagaccaactatctaggaaatacacccaccatgccattcagctccttgccacca

SEQ ID NO: 335403 - DNA, 120 bp, Artificial Sequence
  ENSG00000137275_15 (sequence is synthesized)
acagatgaatctataaaatataccatatacaatagtactggcattcagattggagcctacaattatatggagattggtgggacgagttcatcactactagacagcacaaatacgaacttc

SEQ ID NO: 335404 - DNA, 120 bp, Artificial Sequence
  ENSG00000137275_16 (sequence is synthesized)
aaagaagagccagctgctaagtaccaagctatctttgataataccactagtctgacggataaacacctggacccaatcagggaaaatctgggaaagcactggaaaaactgtgcccgtaaa

SEQ ID NO: 335405 - DNA, 120 bp, Artificial Sequence
  ENSG00000137275_17 (sequence is synthesized)
cagtctcagattgatgaaattgaccatgactatgagcgagatggactgaaagaaaaggtttaccagatgctccaaaagtgggtgatgagggaaggcataaagggagccacggtggggaag

SEQ ID NO: 335406 - DNA, 120 bp, Artificial Sequence
  ENSG00000137275_18 (sequence is synthesized)
ctggcccaggcgctccaccagtgttccaggatcgaccttctgagcagcttgatttacgtcagccagaactaaccctggatgggctacggcagctgaagtggacgcctcacttagtggata

SEQ ID NO: 335407 - DNA, 120 bp, Artificial Sequence
  ENSG00000137275_19 (sequence is synthesized)
accccagaaagttggctgcctcagagcattcagaattctgtcctcactgataggggttctgtgtctgcagaaattttgtttcctgtacttcatagctggagaatggggaaagaaatctgc

SEQ ID NO: 335408 - DNA, 83 bp, Artificial Sequence
  ENSG00000137275_20 (sequence is synthesized)
ttctggactcaaatcaggcactgagccactgcgcccagccaacaatccgctctgaggaaagcgtaagcaggaagacctcttaa

SEQ ID NO: 335409 - DNA, 120 bp, Artificial Sequence
  ENSG00000137275_21 (sequence is synthesized)
aatccgctctgaggaaagcgtaagcaggaagacctcttaatggcatagcaccaataaaaaaatgactcctagttgtgtttggaaagggagagaagagatgtctgaggaaggtcatgttct

SEQ ID NO: 335410 - DNA, 120 bp, Artificial Sequence
  ENSG00000137275_22 (sequence is synthesized)
ttcagcttatggcatttcctagagttttgttgaagcaagaagaaaaactcagagaatataaaatcaacttttaaaattgtgtgctctcttcttcacgtaggctcctgttaaaaacaaagt

SEQ ID NO: 335411 - DNA, 120 bp, Artificial Sequence
  ENSG00000137275_23 (sequence is synthesized)
gcagtcagattctaagccctgttcagagacttcgtggatcacagctgcagctcaccgccacatcacaggatccgttaacgttaatacccaatactctgtcagccactgtaggctctaaga

SEQ ID NO: 335412 - DNA, 120 bp, Artificial Sequence
  ENSG00000137275_24 (sequence is synthesized)
accacgtgcagtcttcagcccattaaattatcgattattttttaatgaattgaatttatattgagtcttcaaattaactgaatggatttaaaggggtaccaaggaggggggaaacatcag

SEQ ID NO: 335413 - DNA, 120 bp, Artificial Sequence
  ENSG00000137275_25 (sequence is synthesized)
aatttcccaggcagttgttgcaaggaattggtactaaccgtgactacaacaaaaattcttgattgacttttaaagttatttcctggcattctggtaccttcacccagcctgagtgccctg

SEQ ID NO: 335414 - DNA, 120 bp, Artificial Sequence
  ENSG00000137275_26 (sequence is synthesized)
gagagggaacaggaaatgctgatctctacccctgggtgagaccagaacctcagggctgatactgttgagtggcttcctcggtttactctgtgtactgtgaaagtattttcatattttttc

SEQ ID NO: 335415 - DNA, 120 bp, Artificial Sequence
  ENSG00000137275_27 (sequence is synthesized)
tgtgtgccagagtgaaaaaggacagcttctgagtgtggtaattgtgcctctagcacccagcctttcaaagcccacctgaaacctgggggtggatgaaagaactagaatagaagactgaag

SEQ ID NO: 335416 - DNA, 120 bp, Artificial Sequence
  ENSG00000137275_28 (sequence is synthesized)
ctgggtaggccgctcagtgtccactggcattttgctaaaccgacaaggaaggctgtgtgcttagctctccccagagggagggcgagaagggtgtggtgatggtcaatctggctgtcggaa

SEQ ID NO: 335417 - DNA, 120 bp, Artificial Sequence
  ENSG00000137275_29 (sequence is synthesized)
cagattctggtgtcttgggctgataacagtgttgttgattctgattgtgaatcccctcaactctagcagacacatacacacccctgaaatggggctgcagagcaggctgtctcagccttg

SEQ ID NO: 335418 - DNA, 120 bp, Artificial Sequence
  ENSG00000137275_30 (sequence is synthesized)
ccactgtcggcatctcggcctgggtaattctgttgtggggactgtcctgttccttgtaggatgtttagtagcatccctgcccccacctactagatgccaggggcactgttctccccagcc

SEQ ID NO: 335419 - DNA, 120 bp, Artificial Sequence
  ENSG00000137275_31 (sequence is synthesized)
ccccgccccagttgtgacaatagtctctaaacattgtcaaatggtccaaggaaaggggaaaattgccccggttgagaagagcactgctgtaaagtaatgagcctcggctctcctgtctgc

SEQ ID NO: 335420 - DNA, 120 bp, Artificial Sequence
  ENSG00000137275_32 (sequence is synthesized)
acctgtccggttactacttggccaccacgcagccttggctcctacagcccaaaagggagaatggagggaggctccaggctttgctggaggggcctgggtgagttctgtttgctccttgta

SEQ ID NO: 335421 - DNA, 120 bp, Artificial Sequence
  ENSG00000137275_33 (sequence is synthesized)
ccaccatccaaatggtgttatcaaatctcttagattccaaagaggttgaataattaatgttcaaaggcaagagggcaaggcattttttaacactttttaaaataaaaatttataccacaa

SEQ ID NO: 335422 - DNA, 120 bp, Artificial Sequence
  ENSG00000137285_0 (sequence is synthesized)
ctcagcccgtcggttcccgagcgccttcccggtgaccccgcagtgggtgtgtgaggggaggacggacagacccagacgccgccggaccaggaggacgctgacgaggcaccatgcgtgaga

SEQ ID NO: 335423 - DNA, 120 bp, Artificial Sequence
  ENSG00000137285_1 (sequence is synthesized)
tcgtgcacatccaggcgggccagtgcggcaaccagatcggcgccaagttttgggaggtcatcagtgatgagcatgggattgaccccactggcagttaccatggagacagtgatttgcagc

SEQ ID NO: 335424 - DNA, 120 bp, Artificial Sequence
  ENSG00000137285_2 (sequence is synthesized)
tggagagaatcaatgtttactacaatgaagccactggtaacaaatatgttcctcgggccatcctcgtggatctggagccaggcacgatggattcggttaggtctggaccattcggccaga

SEQ ID NO: 335425 - DNA, 120 bp, Artificial Sequence
  ENSG00000137285_3 (sequence is synthesized)
tcttcagaccagacaatttcgtgtttggccagagtggagccgggaataactgggccaagggccactacacagagggagccgagctggtcgactcggtcctggatgtggtgaggaaggagt

SEQ ID NO: 335426 - DNA, 120 bp, Artificial Sequence
  ENSG00000137285_4 (sequence is synthesized)
cagagagctgtgactgtctccagggcttccagctgacccactctctggggggcggcacggggtccgggatgggcaccctgctcatcagcaagatccgggaagagtacccagaccgcatca

SEQ ID NO: 335427 - DNA, 120 bp, Artificial Sequence
  ENSG00000137285_5 (sequence is synthesized)
tgaacaccttcagcgtcatgccctcacccaaggtgtcagacacggtggtggagccctacaacgccaccctctcggtccaccagctggtggaaaacacagatgaaacctactgcattgaca

SEQ ID NO: 335428 - DNA, 120 bp, Artificial Sequence
  ENSG00000137285_6 (sequence is synthesized)
acgaggccctgtatgacatctgcttccgcaccctgaagctgaccacccccacctacggggacctcaaccacctggtgtcggccaccatgagcggggtcaccacctgcctgcgcttcccgg

SEQ ID NO: 335429 - DNA, 120 bp, Artificial Sequence
  ENSG00000137285_7 (sequence is synthesized)
gccagctgaacgcagacctgcgcaagctggcggtgaacatggtgcccttccctcgcctgcacttcttcatgcccggcttcgcgcccctgaccagccggggcagccagcagtaccgggcgc

SEQ ID NO: 335430 - DNA, 120 bp, Artificial Sequence
  ENSG00000137285_8 (sequence is synthesized)
acggtgcccgagctcacccagcagatgttcgactccaagaacatgatggccgcctgcgacccgcgccacggccgctacctgacggtggctgccatcttccggggccgcatgtccatgaag

SEQ ID NO: 335431 - DNA, 120 bp, Artificial Sequence
  ENSG00000137285_9 (sequence is synthesized)
gaggtggacgagcagatgctcaacgtgcagaacaagaacagcagctacttcgtggagtggatccccaacaacgtgaagacggccgtgtgcgacatcccgccccgcggcctgaagatgtcg

SEQ ID NO: 335432 - DNA, 120 bp, Artificial Sequence
  ENSG00000137285_10 (sequence is synthesized)
gccaccttcatcggcaacagcacggccatccaggagctgttcaagcgcatctccgagcagttcacggccatgttccggcgcaaggccttcctgcactggtacacgggcgagggcatggac

SEQ ID NO: 335433 - DNA, 120 bp, Artificial Sequence
  ENSG00000137285_11 (sequence is synthesized)
gagatggagttcaccgaggccgagagcaacatgaacgacctggtgtccgagtaccagcagtaccaggacgccacggccgacgaacaaggggagttcgaggaggaggagggcgaggacgag

SEQ ID NO: 335434 - DNA, 120 bp, Artificial Sequence
  ENSG00000137285_12 (sequence is synthesized)
gcgtagatgcccccgcgagacgggttagggaaagcggaggaggaaagcgagggggtggggggcttcccgggacgataacctggcagtggaaggaaagaagcatggtctactttaggtgtg

SEQ ID NO: 335435 - DNA, 120 bp, Artificial Sequence
  ENSG00000137285_13 (sequence is synthesized)
cgctgggtctctggtgctcttcactgttgcctgtcactttttttttccttttttgtaatattgatgacatcaatgtaacatttgagatatttctgaattactgttgtaatggctaaaatc

SEQ ID NO: 335436 - DNA, 120 bp, Artificial Sequence
  ENSG00000137285_14 (sequence is synthesized)
acataaacgtttgtgtcggaatggtgtcctctctttctcttcctttttctctttattaacgatttaaatgtaactttctgaacacattgcattgaattcttcctttaacaaaaagcaaag

SEQ ID NO: 335437 - DNA, 120 bp, Artificial Sequence
  ENSG00000137285_15 (sequence is synthesized)
gcgtaggtaaaagctcaaatgaatttattctttcggtatggtaaaattgaaccaatcacagttaagatgagagatcaacctgagttttaaaatacctttaataaatattagttgaaaaaa

SEQ ID NO: 335438 - DNA, 120 bp, Artificial Sequence
  ENSG00000137285_16 (sequence is synthesized)
ggaaatggcgccctagaaaagccaggatgctactccctccgccgatttgtaggacaaagcaggcaaagctctctcgtggaagctcggctctctcagtcccgaccgaggccattataactc

SEQ ID NO: 335439 - DNA, 120 bp, Artificial Sequence
  ENSG00000137288_0 (sequence is synthesized)
acgcggggcccaagatggcggccagccggtaccggcgttttcttaagctctgtgaggaatggccagtggacgagaccaaacggggccgggacttgggcgcttacctgcgacagcgggtag

SEQ ID NO: 335440 - DNA, 120 bp, Artificial Sequence
  ENSG00000137288_1 (sequence is synthesized)
cacaggcctttcgggagggagagaatacccaggttgcagagcctgaggcctgtgatcagatgtacgagagcttagcgcgactccattcaaactactacaaacacaagtaccctcgcccca

SEQ ID NO: 335441 - DNA, 120 bp, Artificial Sequence
  ENSG00000137288_2 (sequence is synthesized)
gagacaccagcttcagtggcctgtcgttggaagagtacaagctgatcctgtccacagacaccttggaagagcttaaggaaatagataaaggcatgtggaagaaactgcaggagaagtttg

SEQ ID NO: 335442 - DNA, 120 bp, Artificial Sequence
  ENSG00000137288_3 (sequence is synthesized)
cccccaagggtcctgaggaggatcataaggcctgagctcaggccttacctcgtgcacatacctaggtgtggagtcttgtacattgccatcgtcaataaaactgccccagtttccccttga

SEQ ID NO: 335443 - DNA, 120 bp, Artificial Sequence
  ENSG00000137288_4 (sequence is synthesized)
ccttacggtttgggaatctcctctagctttcccagaaaggaagcccttgctgctctaaagaaagtttcagcctgagaagggatggtgattgagctatctgctgtgactgctgctcagggt

SEQ ID NO: 335444 - DNA, 120 bp, Artificial Sequence
  ENSG00000137288_5 (sequence is synthesized)
cattgccacgggagcccccgcccctctggcacgggtctggtgtctcctggcaagatactcaggctcccttttgttgtaggagctcctgggaggaagccaaaaatagcagtaaatactgaa

SEQ ID NO: 335445 - DNA, 120 bp, Artificial Sequence
  ENSG00000137288_6 (sequence is synthesized)
aagggcatcctgttgcaaacagaaagcagtagggaggtgtgaggccgagagaggcaaaaagcctgcttggccctcatccccactgactcagagaaggatggaccttaggcctctatccct

SEQ ID NO: 335446 - DNA, 120 bp, Artificial Sequence
  ENSG00000137288_7 (sequence is synthesized)
gaccttgcaaaaacccacattgcccagttggcttaagggacagggaagctatagacaggccttggccaagcggggcctcagctgcagttggcttcagcactgtgggcaggttctgtaggt

SEQ ID NO: 335447 - DNA, 120 bp, Artificial Sequence
  ENSG00000137288_8 (sequence is synthesized)
ggccacaagtcagaggccctgctggctgaggacacacacagggtcacctcattattccatggaaccttggctcttactgatattgagcatccttctctctggaaccgtgagggacagggc

SEQ ID NO: 335448 - DNA, 120 bp, Artificial Sequence
  ENSG00000137288_9 (sequence is synthesized)
tgggcccacagcggccctggtgggtacaaagtggaagtgggttcttaacctcgtctgtgtctagactcctcaggatgttctgaaatgcataaaataaaatcgacaggactgccgtagaaa

SEQ ID NO: 335449 - DNA, 120 bp, Artificial Sequence
  ENSG00000137288_10 (sequence is synthesized)
tacctcgtgcacatacctaggcactgccagatgcagaagaggatgtctaggcaagagggccttaaactcccccatctccagtgatggggatcccctcaaaggacctacctggcagctgtc

SEQ ID NO: 335450 - DNA, 120 bp, Artificial Sequence
  ENSG00000137288_11 (sequence is synthesized)
aaattatctggcccaaagtgttggtagtgccaaggccaagaaaccctgctttggttcctgggtgtagggacgtgtatgttcttaaacaagagcccctcccgcctgcattgtggtggatga

SEQ ID NO: 335451 - DNA, 120 bp, Artificial Sequence
  ENSG00000137288_12 (sequence is synthesized)
tggctgccttttcattgagtgcgggctgtgtgccaagcgagttacctccatgcttttctttaatccttacaacttttgaggtacgtgtggttttttttttcttactttttcacctctccc

SEQ ID NO: 335452 - DNA, 120 bp, Artificial Sequence
  ENSG00000137288_13 (sequence is synthesized)
caagttgtctgcagatgtgtgtttttatcttcattttacagatgaggaacccgaagcgtagagggttaagtaatttgcttgaggggacccagagtgggagatgatgggctcggattcagg

SEQ ID NO: 335453 - DNA, 120 bp, Artificial Sequence
  ENSG00000137288_14 (sequence is synthesized)
cccaaggccatccccctcccagtgcctgctcaactccacagcatgtgctgagtccacacaccaggattcaaatccctgctccacttcccagctgtgcaacctgagcaagttacttcactg

SEQ ID NO: 335454 - DNA, 120 bp, Artificial Sequence
  ENSG00000137288_15 (sequence is synthesized)
cctcctgcctcagtttccacacctgaaaactggggacaggaagggctgtgtggagcaggccaaattttgcgatgaagcatctgggtctgtgggttgcacagcggacagcgcagggccatt

SEQ ID NO: 335455 - DNA, 120 bp, Artificial Sequence
  ENSG00000137288_16 (sequence is synthesized)
tctttgccctcatacggagcagggcaacgagcagcacatcccgctttgatgccgagggtgaggagagggcaggagaccactgacagcgtgctgggcacagagtctggcacacagtgctca

SEQ ID NO: 335456 - DNA, 120 bp, Artificial Sequence
  ENSG00000137288_17 (sequence is synthesized)
gtccccgcaagcggtcacttctgttacctgtttgatctgctcttcaggagctgggtctccacctttttcaggaacacactgtgtgaaaagcaagccatgcttgtgtcgggaaagcccagt

SEQ ID NO: 335457 - DNA, 120 bp, Artificial Sequence
  ENSG00000137288_18 (sequence is synthesized)
gtaggcaaatctcaggggaggacccttgagacaggatgtcactcagcgtatctcctgagagcctgagaggccaggccagcagggaggggctcttgttcctgtcttctgccagtgtgtcct

SEQ ID NO: 335458 - DNA, 120 bp, Artificial Sequence
  ENSG00000137288_19 (sequence is synthesized)
gttaatccccacagcccccgggggagtgcaggaaacacatccctttttaacggactagatttctattaatttatttaaggcaattaacatattagttctcaggccaaaggatttgtaaaa

SEQ ID NO: 335459 - DNA, 120 bp, Artificial Sequence
  ENSG00000137288_20 (sequence is synthesized)
caagcgcagctcagcccttgttgcctgggcgtacaactcttccccaggaagcctgggaagaggcaggtcctgggagcaagatcgtccatcatggagtcaccaggccacctggagccatgc

SEQ ID NO: 335460 - DNA, 120 bp, Artificial Sequence
  ENSG00000137288_21 (sequence is synthesized)
cgggggtggcatggacacgacagtgaggtctgcactggctacagcagatctgaggcacggagggagctgcacagccatgggcagggctgagcacagcacccttgaaataagttaaataac

SEQ ID NO: 335461 - DNA, 120 bp, Artificial Sequence
  ENSG00000137288_22 (sequence is synthesized)
aaagccctaaaatcactagtaacagcataactgccacctcccccagaggccggcagccgccaaaatgtagtgcttggagttaaaggggtgaccccactcttaactacccacaaggaggac

SEQ ID NO: 335462 - DNA, 120 bp, Artificial Sequence
  ENSG00000137288_23 (sequence is synthesized)
tacaaagagttgtcagttattgctttaaggaacaaaggtctctaggtaggatttatcttctgctaaggcattaaggtaaactgagtcccagtgaactttcaagtctttttaagggctcta

SEQ ID NO: 335463 - DNA, 120 bp, Artificial Sequence
  ENSG00000137288_24 (sequence is synthesized)
agcaggactgtcagctctgaggctccccctccatgctcttcaaagcctgggtgggtgtcagggtgtctggcagagtgggagtggaggctggccagctggctgggccacccaacccgaggg

SEQ ID NO: 335464 - DNA, 120 bp, Artificial Sequence
  ENSG00000137288_25 (sequence is synthesized)
agggggcagtgttcttcccagtcgcagtctccagtgatgagcatcccctgttggggccttcggtggctctcctcagcggctaatgcagttctggacatccacaaagcctaggcgttgcct

SEQ ID NO: 335465 - DNA, 120 bp, Artificial Sequence
  ENSG00000137288_26 (sequence is synthesized)
gcgtttccgctgctccgtcatctagggttaagcagatgccaacaggcctggtcaggccgcctggcaccttccctccatgggtgctgtggaagagcttggcacccgtcttcccctgtgggc

SEQ ID NO: 335466 - DNA, 120 bp, Artificial Sequence
  ENSG00000137288_27 (sequence is synthesized)
ccagctgctattcggcactggcggcgggccagggcccctcggggtgctttaaggatgtcgatgtcagcaccaaacccttgttctcaattagcgtgtcacaaaccctggatttgatgcagc

SEQ ID NO: 335467 - DNA, 120 bp, Artificial Sequence
  ENSG00000137288_28 (sequence is synthesized)
tgggaaaccagcccactaacagaggctgcctcatcttcatgcaggcactgccagatgcagaagaggatgtctaggcaagagggccttaaactcccccatctccagtgatggggatcccct

SEQ ID NO: 335468 - DNA, 120 bp, Artificial Sequence
  ENSG00000137288_29 (sequence is synthesized)
caaaggacctacctggcagctgtcagaggaaggggatgagagacagagggccccaccaccctgtactaaagtttccacttggccttgtctttagcggcccaaggcaggggttgtcaaccc

SEQ ID NO: 335469 - DNA, 120 bp, Artificial Sequence
  ENSG00000137288_30 (sequence is synthesized)
cagtctgacttgccatgcaggggagagtgggtttggcacctgccttctcatccaggcccagggccagaggccagtggggaagagggtgggtcaggaaggatgaaggcaggcagggactgc

SEQ ID NO: 335470 - DNA, 120 bp, Artificial Sequence
  ENSG00000137288_31 (sequence is synthesized)
ccagggatagaacccagggtgggcctgggatcaggcggggtgcacacctgctccttgagctcgttgagctgggcagtgaggtgggacaccagcttcatggtggagttgagcttgtcctgg

SEQ ID NO: 335471 - DNA, 120 bp, Artificial Sequence
  ENSG00000137288_32 (sequence is synthesized)
agaatccgaatctcattctgctccccctcgccctcattgctgacaagggacatggcccgcatccgggggaaccagtccaggttcttgttctgaaaaacatcaccagtgggttaagcaggc

SEQ ID NO: 335472 - DNA, 120 bp, Artificial Sequence
  ENSG00000137288_33 (sequence is synthesized)
gtgggcccggcctagaaaggcctcatttagaaaaacagtaatgtggggggaggcttctgccacacccttaacaaaactactcgtcagggatgtgtcatgggaaaatctgaattgacctgg

SEQ ID NO: 335473 - DNA, 120 bp, Artificial Sequence
  ENSG00000137288_34 (sequence is synthesized)
tcctccccggggccagagtgagctggcagtcaaccctcttgtcaaccctctgccaccgagacaggctgacttccgttaggcagcgtcggcagctgagtttgagtcctttgctggtatcag

SEQ ID NO: 335474 - DNA, 120 bp, Artificial Sequence
  ENSG00000137288_35 (sequence is synthesized)
caccatctgtttactctcataacaccccctgagaggtggaggaaggcctctgcacccagacagaccctggatctccttccttccttcctcccgcccgcctgcctgacaagcacgccccac

SEQ ID NO: 335475 - DNA, 120 bp, Artificial Sequence
  ENSG00000137288_36 (sequence is synthesized)
gccccgggaagacgcgagtcagacagatggcaaattgagggatcaggaggctccgctgaggagagctggcatctgacacgtgtctgggaggcaaagccacgtttcccaggacagaggagt

SEQ ID NO: 335476 - DNA, 120 bp, Artificial Sequence
  ENSG00000137288_37 (sequence is synthesized)
cggggggggagggggcaccaagcaattctcagcttccttgtagtaagctgtgaattctcagaccaacagataaacctgtacacaaagatcagtttgaaatacagactaaacgataaataa

SEQ ID NO: 335477 - DNA, 120 bp, Artificial Sequence
  ENSG00000137309_0 (sequence is synthesized)
ctttttaagctcccctgagccggtgctgcgctcctctaattgggactccgagccggggctatttctggcgctggcgcggctccaagaaggcatccgcatttgctaccagcggcggccgcg

SEQ ID NO: 335478 - DNA, 120 bp, Artificial Sequence
  ENSG00000137309_1 (sequence is synthesized)
gcggagccaggccggtcctcagcgcccagcaccgccgctcccggcaacccggagcgcgcaccgcaggccggcggccgagctcgcgcatcccagccatcactcttccacctgctccttaga

SEQ ID NO: 335479 - DNA, 120 bp, Artificial Sequence
  ENSG00000137309_2 (sequence is synthesized)
gaagggaagatgagtgagtcgagctcgaagtccagccagcccttggcctccaagcaggaaaaggacggcactgagaagcggggccggggcaggccgcgcaagcagcctccggtgagtccc

SEQ ID NO: 335480 - DNA, 120 bp, Artificial Sequence
  ENSG00000137309_3 (sequence is synthesized)
gggacagcgctggtagggagtcagaaggagcccagcgaagtgccaacacctaagagacctcggggccgaccaaagggaagcaaaaacaagggtgctgccaagacccggaaaaccaccaca

SEQ ID NO: 335481 - DNA, 120 bp, Artificial Sequence
  ENSG00000137309_4 (sequence is synthesized)
actccaggaaggaaaccaaggggcagacccaaaaaactggagaaggaggaagaggagggcatctcgcaggagtcctcggaggaggagcagtgacccatgcgtgccgcctgctcctcactg

SEQ ID NO: 335482 - DNA, 120 bp, Artificial Sequence
  ENSG00000137309_5 (sequence is synthesized)
gaggagcagcttccttctgggactggacagctttgctccgctcccaccgcccccaccccttccccaggcccaccatcaccaccgcctctggccgccacccccatcttccacctgtgccct

SEQ ID NO: 335483 - DNA, 120 bp, Artificial Sequence
  ENSG00000137309_6 (sequence is synthesized)
caccaccacactacacagcacaccagccgctgcagggctcccatgggctgagtggggagcagttttcccctggcctcagttcccagctccccccgcccacccacgcatacacacatgccc

SEQ ID NO: 335484 - DNA, 120 bp, Artificial Sequence
  ENSG00000137309_7 (sequence is synthesized)
tcctggacaaggctaacatcccacttagccgcaccctgcacctgctgcgtccccactcccttggtggtggggacattgctctctgggcttttggtttgggggcgccctctctgctccttc

SEQ ID NO: 335485 - DNA, 120 bp, Artificial Sequence
  ENSG00000137309_8 (sequence is synthesized)
actgttccctctggcttcccatagtggggcctgggagggttcccctggccttaaaaggggcccaagccccatctcatcctggcacgccctactccactgccctggcagcagcaggtgtgg

SEQ ID NO: 335486 - DNA, 120 bp, Artificial Sequence
  ENSG00000137309_9 (sequence is synthesized)
ccaatggaggggggtgctggcccccaggattcccccagccaaactgtctttgtcaccacgtggggctcacttttcatccttccccaacttccctagtccccgtactaggttggacagccc

SEQ ID NO: 335487 - DNA, 120 bp, Artificial Sequence
  ENSG00000137309_10 (sequence is synthesized)
ccttcggttacaggaaggcaggaggggtgagtcccctactccctcttcactgtggccacagcccccttgccctccgcctgggatctgagtacatattgtggtgatggagatgcagtcact

SEQ ID NO: 335488 - DNA, 120 bp, Artificial Sequence
  ENSG00000137309_11 (sequence is synthesized)
tattgtccaggtgaggcccaagagccctgtggccgccacctgaggtgggctggggctgctcccctaaccctactttgcttccgccactcagccatttccccctcctcagatggggcacca

SEQ ID NO: 335489 - DNA, 120 bp, Artificial Sequence
  ENSG00000137309_12 (sequence is synthesized)
ataacaaggagctcaccctgcccgctcccaacccccctcctgctcctccctgccccccaaggttctggttccatttttcctctgttcacaaactacctctggacagttgtgttgtttttt

SEQ ID NO: 335490 - DNA, 120 bp, Artificial Sequence
  ENSG00000137309_13 (sequence is synthesized)
gttcaatgttccattcttcgacatccgtcattgctgctgctaccagcgccaaatgttcatcctcattgcctcctgttctgcccacgatcccctcccccaagatactctttgtggggaaga

SEQ ID NO: 335491 - DNA, 120 bp, Artificial Sequence
  ENSG00000137309_14 (sequence is synthesized)
ggggctggggcatggcaggctgggtgaccgactaccccagtcccagggaaggtggggccctgcccctaggatgctgcagcagagtgagcaagggggcccaaatcgaccataaagggtgta

SEQ ID NO: 335492 - DNA, 120 bp, Artificial Sequence
  ENSG00000137309_15 (sequence is synthesized)
ggggccacctcctccccctgttctgttggggaggggtagccatgatttgtcccagcctggggctccctctctggtttcctatttgcagttacttgaataaaaaaaatatccttttctgga

SEQ ID NO: 335493 - DNA, 120 bp, Artificial Sequence
  ENSG00000137309_16 (sequence is synthesized)
ctttttaagctcccctgagccggtgctgcgctcctctaattgggactccgagccggggctatttctggcgctggcgcggctccaagaaggcgtgagttcgcggccgctccggtggcttct

SEQ ID NO: 335494 - DNA, 120 bp, Artificial Sequence
  ENSG00000137309_17 (sequence is synthesized)
tttttttatatctataatttaattaaattatttatttattgaggccgcgcacgggccgtgcccagcttcctgcccctcgccatccttcgggggagggggaatatttttgtccccccgcct

SEQ ID NO: 335495 - DNA, 120 bp, Artificial Sequence
  ENSG00000137309_18 (sequence is synthesized)
ggctgtgacacataaataccccgcgggggcctgggcggcgagcacgcggcggcggcggtctctgagcgcctctgctctctcccggtttcagatccgcatttgctaccagcggcggccgcg

SEQ ID NO: 335496 - DNA, 120 bp, Artificial Sequence
  ENSG00000137309_19 (sequence is synthesized)
ctttttaagctcccctgagccggtgctgcgctcctctaattgggactccgagccggggctatttctggcgctggcgcggctccaagaaggccatcccagccatcactcttccacctgctc

SEQ ID NO: 335497 - DNA, 120 bp, Artificial Sequence
  ENSG00000137309_20 (sequence is synthesized)
ggtccccagcagcaagaggtggggggaggcaccagatggtatgagagcttccagggagacccgccaagatctccaggcaggccgggccaggctctctgggattccggactggcttcgccc

SEQ ID NO: 335498 - DNA, 120 bp, Artificial Sequence
  ENSG00000137310_0 (sequence is synthesized)
aggaggggtaggcgctgcccgcgcgcagaggccgcgcccctcctggccccggcttcttggctgtcaaacagatgcagcaacgtcggctcctgccgaggagcccaaggggtcccgggatcc

SEQ ID NO: 335499 - DNA, 120 bp, Artificial Sequence
  ENSG00000137310_1 (sequence is synthesized)
gccgcacaggctggcactgcttgaagaggaggctactcggagactgcgccgcgcggattggaggctccccaaatattttgcgatctgaggatccagctcaagtgaggtgccataggacgt

SEQ ID NO: 335500 - DNA, 120 bp, Artificial Sequence
  ENSG00000137310_2 (sequence is synthesized)
gttcctgagtttgcattgcacggagaccttcctggaatttttcatttgcaagtcggcttaaccaattttgcattgagtcctaggctgcttgcactctgaatttgggctattcaggtagtg

SEQ ID NO: 335501 - DNA, 120 bp, Artificial Sequence
  ENSG00000137310_3 (sequence is synthesized)
tgctcaaagttgaaaccgcatacagcacaactcaagtttgcatcagactgggaagcgaacttaagccagcggtgcgtggcccaggagtgggaaaggaaatggatgcctgaagtggaagag

SEQ ID NO: 335502 - DNA, 120 bp, Artificial Sequence
  ENSG00000137310_4 (sequence is synthesized)
gtggtgcagagggggcaccgcccatgctgccctgcttccaactgctgcgcatagggggcggcaggggcggtgatctctacaccttccacccccccgccggggctggctgcacctatcgct

SEQ ID NO: 335503 - DNA, 120 bp, Artificial Sequence
  ENSG00000137310_5 (sequence is synthesized)
tgggccacagggccgacctgtgtgatgtggccctgcggccccagcaggagcctggcctcatctctgggatccacgccgaactgcatgccgagccccggggtgatgactggagggtcagcc

SEQ ID NO: 335504 - DNA, 120 bp, Artificial Sequence
  ENSG00000137310_6 (sequence is synthesized)
tggaagaccacagcagccaaggtactttggtcaataatgtccgactcccaagaggtcacaggctggaattgagtgatggagacctcctgacctttggccctgaagggcccccaggaacca

SEQ ID NO: 335505 - DNA, 120 bp, Artificial Sequence
  ENSG00000137310_7 (sequence is synthesized)
gcccctcggagttctacttcatgttccaacaagtacgagtcaagcctcaggactttgctgccattaccatcccacggtctaggggagaagcccgggttggggctggtttccggcctatgc

SEQ ID NO: 335506 - DNA, 120 bp, Artificial Sequence
  ENSG00000137310_8 (sequence is synthesized)
tgccctcccagggggctccacagcggcctctcagcaccttctcccctgcccccaaggccacactgatcctaaactccataggcagcctcagcaagctccggccccagcccctcaccttct

SEQ ID NO: 335507 - DNA, 120 bp, Artificial Sequence
  ENSG00000137310_9 (sequence is synthesized)
cccctagttggggtggaccaaagagcctgcctgttcccgccccacctggggaaatggggaccacgccttctgctccaccacaacgcaatcggaggaaatctgttcaccgagtgttggcgg

SEQ ID NO: 335508 - DNA, 120 bp, Artificial Sequence
  ENSG00000137310_10 (sequence is synthesized)
aactggatgatgagagtgagcctcctgagaacccgccaccggtccttatggagcccaggaagaaactccgtgtagacaaagccccactgactcccactggaaatcgacgtggccgtcctc

SEQ ID NO: 335509 - DNA, 120 bp, Artificial Sequence
  ENSG00000137310_11 (sequence is synthesized)
ggaagtacccagtgagcgctcccatggctccccctgcagttgggggcggggagccctgtgcagctccttgttgctgcctgccccaggaagagacagtggcctgggttcagtgtgatggct

SEQ ID NO: 335510 - DNA, 120 bp, Artificial Sequence
  ENSG00000137310_12 (sequence is synthesized)
tccaggctgccagggaggccgacttccgatgcccagggtgccgggctggcattcagacctaaggtccactgccaaggcaccatcggacacacctgcccatgagtagacacagcagcgagc

SEQ ID NO: 335511 - DNA, 120 bp, Artificial Sequence
  ENSG00000137310_13 (sequence is synthesized)
aaataggtctgataaataccccccttcccttccctccccaggagggaatgactacagggaagaaggatggattgatgtggactcattcagggcctggagcagaccctggtggccaagaca

SEQ ID NO: 335512 - DNA, 120 bp, Artificial Sequence
  ENSG00000137310_14 (sequence is synthesized)
gaagagatggtttcctgccaaagatattgccacctccaggaaattgccagtgagctggaagttcccactattacaagccataaggccatgttgccatggacaccagaatatctgtagtca

SEQ ID NO: 335513 - DNA, 120 bp, Artificial Sequence
  ENSG00000137310_15 (sequence is synthesized)
gagcacctatcagttgcaaaagccatgcctgcaaccgatggaaaatgtaagagggagttcttaaggttcttggtggcatcacccaaggcattctgggaaaacctagggcctggccccaaa

SEQ ID NO: 335514 - DNA, 120 bp, Artificial Sequence
  ENSG00000137310_16 (sequence is synthesized)
acttccctactctgtggctagtcctgctgccaacaaaatcgtagcgacctggcttttcacagctttgcttttatttccaagtcaaggacaagccgcttcattcactcctgggcatttact

SEQ ID NO: 335515 - DNA, 120 bp, Artificial Sequence
  ENSG00000137310_17 (sequence is synthesized)
cttcttgtgggtctgtgatattccttgctttccagggagaatgtgcttggcaaggtctggagaactaattcagaatcttaggggaaggggagagatggaaatacaaacctgcttactgga

SEQ ID NO: 335516 - DNA, 120 bp, Artificial Sequence
  ENSG00000137310_18 (sequence is synthesized)
aaggtgcaaatatatgggttgagctggaggtaggaatacaggtaattaaggtttctagtttaagggaaaacagatctattgccatttaaataaggtaactgggatttggttaagttcaca

SEQ ID NO: 335517 - DNA, 120 bp, Artificial Sequence
  ENSG00000137310_19 (sequence is synthesized)
aagatagcagaagatttatttacaggcttcacctgtactgtcagggcaagagaaagcctggtaaaccagctacagcagtttaccagtgtgatggctgtgacacagctccactccacgggt

SEQ ID NO: 335518 - DNA, 120 bp, Artificial Sequence
  ENSG00000137310_20 (sequence is synthesized)
ggacacagcagagggcaactgggctggcctggttcagtgtgaatcaaaccgcttaacccacacatggtacatgtgattttcttttgtgagccttacaccaagccaaactattgtcaaagc

SEQ ID NO: 335519 - DNA, 120 bp, Artificial Sequence
  ENSG00000137310_21 (sequence is synthesized)
atcatttctatagaaataaagccttatcttgacctgttctattaaaacctgccacacccgccctttcctacctagatttaatgagcccaagtttttaaaatggaagaaatgactctgggg

SEQ ID NO: 335520 - DNA, 120 bp, Artificial Sequence
  ENSG00000137310_22 (sequence is synthesized)
caaagacccctaatgaactagtggcagagccaggaataaaacttgagtaactaatgagtcacttatgggcagagtatgcaaaaaccttaagtggaaaccaaatagaccctggtatcaaga

SEQ ID NO: 335521 - DNA, 120 bp, Artificial Sequence
  ENSG00000137310_23 (sequence is synthesized)
aagcacaaagtattaatagaagtttctggttggggtgatctaggttcaacagaaataagatgatttctaagtataaagccatttaagaattccagagtagggtgggaaagcaaaaagcca

SEQ ID NO: 335522 - DNA, 120 bp, Artificial Sequence
  ENSG00000137310_24 (sequence is synthesized)
gctctgaacaggtaacagctacatggtgactgagtctatgggcaaaagttcttgcatcacaggcttttgggaactagcctatcacagggccctgtacaaataaacttggctgcaatccca

SEQ ID NO: 335523 - DNA, 120 bp, Artificial Sequence
  ENSG00000137310_25 (sequence is synthesized)
actgcgccgcgcggtggattcattgccctcggaggttcaaccagttatgagtgagggattggccagaagatcggggcgcaggcaagcaggagtgctctattaggataagcaagtttgaca

SEQ ID NO: 335524 - DNA, 120 bp, Artificial Sequence
  ENSG00000137310_26 (sequence is synthesized)
ggaagaagctactcttctccgaattacacagaggtgatgtgttcgtattgcacgtagacgtgtgtataacaggacctccttccccgcgccccgccaccccgacacacacaggagctgcct

SEQ ID NO: 335525 - DNA, 120 bp, Artificial Sequence
  ENSG00000137310_27 (sequence is synthesized)
caggctggaattgagtgatggagacctcctgacctttggccctgaagggcccccaggaaccagcccctcggagttctacttcatgttccaacaacctcagcaagctccggccccagcccc

SEQ ID NO: 335526 - DNA, 120 bp, Artificial Sequence
  ENSG00000137310_28 (sequence is synthesized)
acatccaagggatgcagagcatcgtgaaaggacagaaagagagaccctggcctcgagaacacctgtcaggttatgaagaggcatcctaattgatttttaaattcaagagatttatcgagc

SEQ ID NO: 335527 - DNA, 120 bp, Artificial Sequence
  ENSG00000137310_29 (sequence is synthesized)
accttctataagccagcggctatacaaagtggacaaagagccctgacatccagcatgacagaagtgctatttggcacttgttcttcaagttgcccacttggatctcttccaagtgcactt

SEQ ID NO: 335528 - DNA, 120 bp, Artificial Sequence
  ENSG00000137312_0 (sequence is synthesized)
ctgccgcagcaacggggtgcggcagggtggggaacgcgggagcggggccagctcccaggaaagctggtctgcgagcggcccctgcccggctcccaggtccctgcgcgaccccgcccttcc

SEQ ID NO: 335529 - DNA, 120 bp, Artificial Sequence
  ENSG00000137312_1 (sequence is synthesized)
ttcccgagaccccagccgggctgccgcccgcgtcccggaagctccagcctgaaccatgtttttcacttgtggcccaaatgaggccatggtggtctccgggttctgccgaagccccccagt

SEQ ID NO: 335530 - DNA, 120 bp, Artificial Sequence
  ENSG00000137312_2 (sequence is synthesized)
catggtggctggagggcgtgtctttgtcctgccctgcatccaacagatccagaggatctctctcaacacactgaccctcaatgtcaagagtgaaaaggtttacactcgccatggggtccc

SEQ ID NO: 335531 - DNA, 120 bp, Artificial Sequence
  ENSG00000137312_3 (sequence is synthesized)
catctcagtcactggcattgcccaggtaaaaatccaggggcagaacaaggagatgttggcggccgcctgtcagatgttcctggggaagacggaggctgagattgcccacattgccctgga

SEQ ID NO: 335532 - DNA, 120 bp, Artificial Sequence
  ENSG00000137312_4 (sequence is synthesized)
gacgttagagggccaccagagggccatcatggcccacatgactgtggaggagatctataaggacaggcagaaattctcagaacaggttttcaaagtggcctcctcagacctggtcaacat

SEQ ID NO: 335533 - DNA, 120 bp, Artificial Sequence
  ENSG00000137312_5 (sequence is synthesized)
gggcatcagtgtggttagctacactctgaaggacattcacgatgaccaggactatttgcactctttggggaaggctcgaacagctcaagtccaaaaagatgcacggattggagaagcaga

SEQ ID NO: 335534 - DNA, 120 bp, Artificial Sequence
  ENSG00000137312_6 (sequence is synthesized)
ggccaagagagatgctgggatccgggaagctaaagccaagcaggaaaaggtgtctgctcagtacctgagtgagatcgagatggccaaggcacagagagattacgaactgaagaaggccgc

SEQ ID NO: 335535 - DNA, 120 bp, Artificial Sequence
  ENSG00000137312_7 (sequence is synthesized)
gactaagcagcagattgaggagcagcgggtgcaggtgcaggtggtggagcgggcccagcaggtggcagtgcaggagcaggagatcgcccggcgggagaaggagctggaggcccgggtgcg

SEQ ID NO: 335536 - DNA, 120 bp, Artificial Sequence
  ENSG00000137312_8 (sequence is synthesized)
gaagccagcggaagcggagcgctacaagctggagcgcctagccgaggcagagaagtcccaactaattatgcaggcggaggcagaagccgcgtctgtgcggatgcgtggggaagctgaggc

SEQ ID NO: 335537 - DNA, 120 bp, Artificial Sequence
  ENSG00000137312_9 (sequence is synthesized)
ctttgccataggggcccgagcccgagccgaggctgagcagatggccaagaaggcagaagccttccagctgtaccaagaggctgctcagctggacatgctgctagagaagctgccccaggt

SEQ ID NO: 335538 - DNA, 120 bp, Artificial Sequence
  ENSG00000137312_10 (sequence is synthesized)
ggcagaggagatcagtggtcccttgacttcagccaataagatcacactggtgtccagcggcagtgggaccatgggggcagccaaagtgactggggaagtactggacattctaactcgcct

SEQ ID NO: 335539 - DNA, 120 bp, Artificial Sequence
  ENSG00000137312_11 (sequence is synthesized)
gccagagagtgtggaaagactcacaggcgtgagcatctcccaggtgaatcacaagcctttgagaacagcctgagccttcagccctcacagatgcccagcctcatagctgaagttgcctga

SEQ ID NO: 335540 - DNA, 120 bp, Artificial Sequence
  ENSG00000137312_12 (sequence is synthesized)
atgatcctcctgttgcatgtaacccactggcctccctgagcatgtccattgacagtgaggtcccacccctcatctctccttgccaaatagtttgtgccttgtcttgaagggggttgctcc

SEQ ID NO: 335541 - DNA, 120 bp, Artificial Sequence
  ENSG00000137312_13 (sequence is synthesized)
ccttgccaacctcacactgctatgattgccaactccagcggtcccatgtcagccttctgatgatcccactccaccccacctcaacttatttaacttcctaattaaatcagactgtttgag

SEQ ID NO: 335542 - DNA, 120 bp, Artificial Sequence
  ENSG00000137312_14 (sequence is synthesized)
cctgttgtctagaatattttcctgaccaagactgagggatgggctggaggttttcaactttgctacccaaataaattgctgtaagtaagtactaataaaacagaagcaactggaaattaa

SEQ ID NO: 335543 - DNA, 120 bp, Artificial Sequence
  ENSG00000137312_15 (sequence is synthesized)
ccccagaacccctgtgagtctggcctctgccccttctccctctccctaccaacttcccagcaccagacttctgccccttgatggccacgaactgcccagtttgattcccaccattccaag

SEQ ID NO: 335544 - DNA, 120 bp, Artificial Sequence
  ENSG00000137312_16 (sequence is synthesized)
gcccagactgcttcccctccagctcccagattctctcctgtgggttgctgtcccctcacccccgccagttcctcagtcttccacattcaagctctgccaccgttcctcactgccccacac

SEQ ID NO: 335545 - DNA, 120 bp, Artificial Sequence
  ENSG00000137312_17 (sequence is synthesized)
agggcgtgtctttgtcctgccctgcatccaacagatccagaggtaggcaagaagggaaccagggaagggggacctccgttttctctttttcctcctcttcttactgtctgtcccttcttt

SEQ ID NO: 335546 - DNA, 120 bp, Artificial Sequence
  ENSG00000137312_18 (sequence is synthesized)
tccccacagtccacttccccatcaccctctctcccagacattaagacatcttctggccacagtcttctcaacccttgcctgcagagaagttcctctgctagtctcatcttttccaggcac

SEQ ID NO: 335547 - DNA, 120 bp, Artificial Sequence
  ENSG00000137312_19 (sequence is synthesized)
cccaaggcacttgcctcctcctcctttctttccctgaaatggaagaagcatttcttagagggctctcccttctctctctgctttttctctgacttcatgagacccccaccacacctttcc

SEQ ID NO: 335548 - DNA, 120 bp, Artificial Sequence
  ENSG00000137312_20 (sequence is synthesized)
agggaaaagccttagcggacccatgggtgtagaagggacgggccgtggcggatgcagactgggagggcctgacgggaaagggaaaggatgggcccctgtggacgccacagcgcgccttcc

SEQ ID NO: 335549 - DNA, 120 bp, Artificial Sequence
  ENSG00000137312_21 (sequence is synthesized)
agagaagtaaatgtcccctccctgaccctgcctagctcacttgccacctaggcaccccaagatggagtgctgaagccttcaccacctggactcctatggatttcaggtttcaggagcgtc

SEQ ID NO: 335550 - DNA, 120 bp, Artificial Sequence
  ENSG00000137312_22 (sequence is synthesized)
tggggctgccgagaagcagggagagaggggaaaggtctgcaggcctctgggcgcgggggacctttatcaaagggagcggcgaggggaagggagggaccatacgcaggcggagaagagctc

SEQ ID NO: 335551 - DNA, 120 bp, Artificial Sequence
  ENSG00000137312_23 (sequence is synthesized)
tctataaggacaggcagaaattctcagaacaggttttcaaagtggcctcctcagacctggtcaacatgggcatcagtgtggttagctacactctgaaggacattcacgatgaccaggtaa

SEQ ID NO: 335552 - DNA, 120 bp, Artificial Sequence
  ENSG00000137312_24 (sequence is synthesized)
aactaggcaattgatccttccccacttccttgctcccatctcttaagccctccaaaggactaatttctacatctctcccacaggactatttgcactctttggggaaggctcgaacagctc

SEQ ID NO: 335553 - DNA, 120 bp, Artificial Sequence
  ENSG00000137331_0 (sequence is synthesized)
acttggccttacactccgctcggctcaccatgtgtcactctcgcagctgccacccgaccatgaccatcctgcaggccccgaccccggccccctccaccatcccgggaccccggcggggct

SEQ ID NO: 335554 - DNA, 120 bp, Artificial Sequence
  ENSG00000137331_1 (sequence is synthesized)
ccggtcctgagatcttcaccttcgaccctctcccggagcccgcagcggcccctgccgggcgccccagcgcctctcgcgggcaccgaaagcgcagccgcagggttctctaccctcgagtgg

SEQ ID NO: 335555 - DNA, 120 bp, Artificial Sequence
  ENSG00000137331_2 (sequence is synthesized)
tccggcgccagctgccagtcgaggaaccgaacccagccaaaaggcttctctttctgctgctcaccatcgtcttctgccagatcctgatggctgaagagggtgtgccggcgcccctgcctc

SEQ ID NO: 335556 - DNA, 120 bp, Artificial Sequence
  ENSG00000137331_3 (sequence is synthesized)
cagaggacgcccctaacgccgcatccctggcgcccacccctgtgtccgccgtcctcgagccctttaatctgacttcggagccctcggactacgctctggacctcagcactttcctccagc

SEQ ID NO: 335557 - DNA, 120 bp, Artificial Sequence
  ENSG00000137331_4 (sequence is synthesized)
aacacccggccgccttctaactgtgactccccgcactccccaaaaagaatccgaaaaaccacaaagaaacaccaggcgtacctggtgcgcgagagcgtatccccaactgggacttccgag

SEQ ID NO: 335558 - DNA, 120 bp, Artificial Sequence
  ENSG00000137331_5 (sequence is synthesized)
ccggtgcttgaggcgggaccgaggcgcacagagaccgaggcgcatagagaccgaggcacagcccagctggggctaggcccggtgggaaggagagcgtcgttaatttatttcttattgctc

SEQ ID NO: 335559 - DNA, 120 bp, Artificial Sequence
  ENSG00000137331_6 (sequence is synthesized)
ctaattaatatttatatgtatttatgtacgtcctcctaggtgatggagatgtgtacgtaatatttattttaacttatgcaagggtgtgagatgttccccctgctgtaaatgcaggtctct

SEQ ID NO: 335560 - DNA, 120 bp, Artificial Sequence
  ENSG00000137331_7 (sequence is synthesized)
tggtatttattgagctttgtgggactggtggaagcaggacacctggaactgcggcaaagtaggagaagaaatggggaggactcgggtgggggaggacgtcccggctgggatgaagtctgg

SEQ ID NO: 335561 - DNA, 120 bp, Artificial Sequence
  ENSG00000137331_8 (sequence is synthesized)
tggtgggtcgtaagtttaggaggtgactgcatcctccagcatctcaactccgtctgtctactgtgtgagacttcggcggaccattaggaatgagatccgtgagatccttccatcttcttg

SEQ ID NO: 335562 - DNA, 120 bp, Artificial Sequence
  ENSG00000137331_9 (sequence is synthesized)
aagtcgcctttagggtggctgcgaggtagagggttgggggttggtgggctgtcacggagcgactgtcgagatcgcctagtatgttctgtgaacacaaataaaattgatttactgtctgca

SEQ ID NO: 335563 - DNA, 120 bp, Artificial Sequence
  ENSG00000137337_0 (sequence is synthesized)
gaccgttactggtggcgcgcgcggggacttaaagtagatcatggaggacacccaggctattgactgggatgttgaagaagaggaggagacagagcaatccagtgaatccttgaggtgtaa

SEQ ID NO: 335564 - DNA, 120 bp, Artificial Sequence
  ENSG00000137337_1 (sequence is synthesized)
cgtggagccagtagggcggctacatatctttagtggtgcccatggaccagaaaaagatttcccactacacctcgggaagaatgtggtaggccgaatgcctgactgctctgtggccctgcc

SEQ ID NO: 335565 - DNA, 120 bp, Artificial Sequence
  ENSG00000137337_2 (sequence is synthesized)
ctttccatctatctccaaacaacatgcagagattgaaatcttagcctgggacaaggcacctatcctccgagactgtgggagccttaatggtactcaaatcctgagacctcctaaggtttt

SEQ ID NO: 335566 - DNA, 120 bp, Artificial Sequence
  ENSG00000137337_3 (sequence is synthesized)
gagccctggggtgagtcaccgtctgagggaccaggaattgattctctttgctgacttgctctgccagtaccatcgcctggatgtctctctgccctttgtctcccggggccctctgacagt

SEQ ID NO: 335567 - DNA, 120 bp, Artificial Sequence
  ENSG00000137337_4 (sequence is synthesized)
agaagagacacccagagtacagggagaaactcaaccccagaggcttctgttggctgaggactcggaggaggaagtagattttctttctgaaaggcgtatggtaaaaaaatcaaggaccac

SEQ ID NO: 335568 - DNA, 120 bp, Artificial Sequence
  ENSG00000137337_5 (sequence is synthesized)
atcttcctctgtgatagttccagagagtgatgaagaggggcattccccggtcctgggcggccttgggccgccttttgccttcaatttgaacagtgacacagatgtggaagaaggtcagca

SEQ ID NO: 335569 - DNA, 120 bp, Artificial Sequence
  ENSG00000137337_6 (sequence is synthesized)
accagccacagaggaggcctcctcagctgccagaagaggtgccactgtagaggcaaagcagtctgaagctgaagttgtaactgaaatccagcttgaaaaggatcagcctttagtgaagga

SEQ ID NO: 335570 - DNA, 120 bp, Artificial Sequence
  ENSG00000137337_7 (sequence is synthesized)
gagggacaatgatacaaaagtcaagaggggtgcagggaatggggtggttccagctggggtgattctggagaggagccaacctcctggagaggacagtgacacagatgtggatgatgacag

SEQ ID NO: 335571 - DNA, 120 bp, Artificial Sequence
  ENSG00000137337_8 (sequence is synthesized)
caggcctcctggaaggccagctgaggtccatttggaaagggctcagccttttggcttcatcgacagcgacactgatgcggaagaagagaggatcccagcaaccccagttgtcattcctat

SEQ ID NO: 335572 - DNA, 120 bp, Artificial Sequence
  ENSG00000137337_9 (sequence is synthesized)
gaagaagaggaagatcttccatggagtaggtacaaggggtcctggagcaccaggcctggcccatctgcaggagagccaggctggtagtgatacagatgtggaagaaggcaaggccccaca

SEQ ID NO: 335573 - DNA, 120 bp, Artificial Sequence
  ENSG00000137337_10 (sequence is synthesized)
ggctgtccctctggagaaaagccaagcttccatggttatcaacagcgatacagatgacgaggaagaagtctcagcagcgctgactttggcacatctgaaagagagccagcctgctatatg

SEQ ID NO: 335574 - DNA, 120 bp, Artificial Sequence
  ENSG00000137337_11 (sequence is synthesized)
gaacagagatgcagaagaggacatgccccaacgtgtggtccttctgcagcgaagccaaaccaccactgagagagacagtgacacagacgtggaggaggaagagctcccagtggaaaatag

SEQ ID NO: 335575 - DNA, 120 bp, Artificial Sequence
  ENSG00000137337_12 (sequence is synthesized)
agaagctgtcctcaaggatcacacaaagattagagcccttgttagagcacattcagaaaaggaccaacctccttttggggacagtgatgacagtgtggaagcagataagagctcacctgg

SEQ ID NO: 335576 - DNA, 120 bp, Artificial Sequence
  ENSG00000137337_13 (sequence is synthesized)
gatccacctggagagaagccaagcctccaccacagtggacatcaacacacaagtggagaaggaagtcccgccagggtcagccattatacatataaagaagcatcaggtgtctgtggaggg

SEQ ID NO: 335577 - DNA, 120 bp, Artificial Sequence
  ENSG00000137337_14 (sequence is synthesized)
gacaaatcaaacagatgtgaaagcagttgggggaccagcaaagctgcttgtggtatctctagaggaagcctggcctctgcatggggactgtgaaacagatgcagaggagggcacctccct

SEQ ID NO: 335578 - DNA, 120 bp, Artificial Sequence
  ENSG00000137337_15 (sequence is synthesized)
aacagcctcagtagttgcagatgtaagaaagagccagcttccagcagaaggggatgctggggcagagtgggctgcagctgttcttaagcaggagagagctcatgaggtgggggcccaggg

SEQ ID NO: 335579 - DNA, 120 bp, Artificial Sequence
  ENSG00000137337_16 (sequence is synthesized)
tgggccacctgtggcacaagtggagcaggacctccctatctcaagagagaacctcacagatctggtggtggacacagacactctaggggaatccacccagccacagagagagggagccca

SEQ ID NO: 335580 - DNA, 120 bp, Artificial Sequence
  ENSG00000137337_17 (sequence is synthesized)
ggtccccacaggaagggagagagaacaacatgtgggtgggaccaaggactctgaagacaactatggtgattctgaagatctggacctacaagctacccagtgctttctggagaatcaggg

SEQ ID NO: 335581 - DNA, 120 bp, Artificial Sequence
  ENSG00000137337_18 (sequence is synthesized)
cctggaagcagtccagagcatggaggatgaacctacccaggccttcatgttgactccaccccaagagcttggcccttcccattgcagcttccagacaacaggtaccctagatgaaccatg

SEQ ID NO: 335582 - DNA, 120 bp, Artificial Sequence
  ENSG00000137337_19 (sequence is synthesized)
ggaggtcctggctacacagccattctgtctgagagagtctgaggactctgagacccagccttttgacacgcaccttgaggcctatggaccttgcctgtctccacctagggcaataccagg

SEQ ID NO: 335583 - DNA, 120 bp, Artificial Sequence
  ENSG00000137337_20 (sequence is synthesized)
agaccaacatccagagagcccagttcacacagagccaatggggattcaaggcagagggaggcagactgtggataaagtcatgggtataccaaaagaaacagcagagagggtgggccctga

SEQ ID NO: 335584 - DNA, 120 bp, Artificial Sequence
  ENSG00000137337_21 (sequence is synthesized)
gagagggccattggagagagaaactgagaaactgctaccagaaagacagacagatgtgacaggagaggaagaattaaccaaggggaaacaggacagagaacaaaaacagttgttagctag

SEQ ID NO: 335585 - DNA, 120 bp, Artificial Sequence
  ENSG00000137337_22 (sequence is synthesized)
agacacccagagacaagaatctgacaaaaatggggaaagtgcaagtcctgaaagagatagggagagtttgaaggtagaaattgagacatctgaggaaatacaagagaaacaagtacagaa

SEQ ID NO: 335586 - DNA, 120 bp, Artificial Sequence
  ENSG00000137337_23 (sequence is synthesized)
gcagacccttccaagcaaagcatttgagagagaagtagagagaccagtagcaaacagagagtgcgatccagccgagttagaagagaaggtgcccaaagtgatcctggagagagatacaca

SEQ ID NO: 335587 - DNA, 120 bp, Artificial Sequence
  ENSG00000137337_24 (sequence is synthesized)
gagaggggagccagagggagggagccaggaccagaaagggcaggcctccagcccaacaccagagcctggggtgggggcgggggaccttccgggacctacctcagcccccgtaccttctgg

SEQ ID NO: 335588 - DNA, 120 bp, Artificial Sequence
  ENSG00000137337_25 (sequence is synthesized)
gagccagtcaggtggaaggggatccccagtgagccccaggaggcatcagaaaggcctcctgaattgcaagatgccacctgctgagaaggcttccaggatcagagctgctgagaaggtttc

SEQ ID NO: 335589 - DNA, 120 bp, Artificial Sequence
  ENSG00000137337_26 (sequence is synthesized)
caggggcgatcaggaatctccagatgcttgtctgcctcctacagtacctgaagccccagccccaccccaaaagccccttaactctcagagccagaaacatcttgcacctccgccccttct

SEQ ID NO: 335590 - DNA, 120 bp, Artificial Sequence
  ENSG00000137337_27 (sequence is synthesized)
ttctccccttttaccttctatcaagccaaccgttcgtaagaccaggcaagatgggagtcaggaagctccagaggctcccttgtcctcagagctggagcctttccacccaaagcctaaaat

SEQ ID NO: 335591 - DNA, 120 bp, Artificial Sequence
  ENSG00000137337_28 (sequence is synthesized)
tagaactcggaagtcctccagaatgacaccctttccagctacctctgctgcccctgagccccacccttccacctccacagcccagccagtcactcccaagcccacatctcaggccactag

SEQ ID NO: 335592 - DNA, 120 bp, Artificial Sequence
  ENSG00000137337_29 (sequence is synthesized)
caaataggtcctctgtcaagacccctgaaccagttgtccccacagcccctgagctccagccttccacctccacagaccagcctgtcacctctgagcccacatctcaggttactaggggaa

SEQ ID NO: 335593 - DNA, 120 bp, Artificial Sequence
  ENSG00000137337_30 (sequence is synthesized)
gaaaaagtagatcctctgtcaagacccctgaaacagttgtgcccacagcccttgagctccagccttccacctccaccgaccgacctgtcacctctgaacccacctctcaggctactaggg

SEQ ID NO: 335594 - DNA, 120 bp, Artificial Sequence
  ENSG00000137337_31 (sequence is synthesized)
gaagaaaaaatagatcctctgtcaagacccctgaaccagttgtccccacagcccctgagctccagccttccacctccacagaccagcctgtcacttctgagcccacatatcaggctacta

SEQ ID NO: 335595 - DNA, 120 bp, Artificial Sequence
  ENSG00000137337_32 (sequence is synthesized)
ggggaagaaaaaatagatcctctgtcaagacccctgaaccagttgtgcccacagcccctgagctccggccttccacctccacagaccgacctgtcacccccaagcccacatctcggacca

SEQ ID NO: 335596 - DNA, 120 bp, Artificial Sequence
  ENSG00000137337_33 (sequence is synthesized)
ctaggagcaggacaaatatgtcctctgtcaagacccctgaaacagttgtccccacagcccctgagctccagatttccacctccacagaccaacctgtcacccctaagcccacatctcgga

SEQ ID NO: 335597 - DNA, 120 bp, Artificial Sequence
  ENSG00000137337_34 (sequence is synthesized)
ccactaggagcaggacaaatatgtcctctgtgaagaaccctgaatcaactgtccctatagcccctgagctcccaccttccacctccacagagcagcctgtcacccctgagcccacatctc

SEQ ID NO: 335598 - DNA, 120 bp, Artificial Sequence
  ENSG00000137337_35 (sequence is synthesized)
gggctactaggggaagaaaaaatagatcctctggcaagacccctgaaacacttgtccccacagcccctaagctcgagccttccacttccacagaccaacctgtcactcctgagcccacat

SEQ ID NO: 335599 - DNA, 120 bp, Artificial Sequence
  ENSG00000137337_36 (sequence is synthesized)
ctcaggccaccaggggcaggacaaataggtcctctgtgaagacccctgaaacagttgtccccacagcccctgagctccagccttccacctccacagaccagcctgttacccctgagccta

SEQ ID NO: 335600 - DNA, 120 bp, Artificial Sequence
  ENSG00000137337_37 (sequence is synthesized)
cgtctcaggctactaggggaagaacagatagatcctctgtcaagactcctgaaacagttgtccccacagcccctgagctacaggcttccgcctccacagaccagcctgtcacctctgagc

SEQ ID NO: 335601 - DNA, 120 bp, Artificial Sequence
  ENSG00000137337_38 (sequence is synthesized)
ccacatctcggaccactaggggaagaaaaaatcggtcctctgtcaagacccctgaaacagttgtgcccgcagcccctgagctccagccttccacctccacagaccaacctgtcacccctg

SEQ ID NO: 335602 - DNA, 120 bp, Artificial Sequence
  ENSG00000137337_39 (sequence is synthesized)
agcccacatctcgggccactaggggcaggacaaataggtcctctgtcaagacccctgaatcaattgtccctatagcccctgagcttcagccttccacctccagaaaccagcttgtcaccc

SEQ ID NO: 335603 - DNA, 120 bp, Artificial Sequence
  ENSG00000137337_40 (sequence is synthesized)
ctgagcccacatctcgggccactaggtgcaggacaaataggtcctctgtcaagacccctgagccagttgtccccacagcccctgagccccatcctaccacctccacagaccagcctgtca

SEQ ID NO: 335604 - DNA, 120 bp, Artificial Sequence
  ENSG00000137337_41 (sequence is synthesized)
cccccaagctcacatctagggccactaggagaaagacaaataggtcctctgtcaagactcccaaaccagttgaaccagcagcctctgatcttgagccttttacccccacagaccagtccg

SEQ ID NO: 335605 - DNA, 120 bp, Artificial Sequence
  ENSG00000137337_42 (sequence is synthesized)
tcacccctgaggccatagctcagggtggtcagagcaaaacactgaggtcttccacagtaagagctatgccggttcctaccacccctgaattccaatctcctgtcaccacagaccagccta

SEQ ID NO: 335606 - DNA, 120 bp, Artificial Sequence
  ENSG00000137337_43 (sequence is synthesized)
tttcccctgagcctattactcaacccagttgcatcaagaggcagagagccgctgggaaccctggctccctcgcagctcccattgaccataagccttgctctgcacccttggaacctaaat

SEQ ID NO: 335607 - DNA, 120 bp, Artificial Sequence
  ENSG00000137337_44 (sequence is synthesized)
cccaggcctcaaggaaccaaagatggggagcagtgagagcagctgaatcccttacagccattcctgagcctgcctctccccagcttcttgagacaccaattcatgcctcccagatccaaa

SEQ ID NO: 335608 - DNA, 120 bp, Artificial Sequence
  ENSG00000137337_45 (sequence is synthesized)
aggtggaaccagcaggtagatctaggttcaccccggagctccagcctaaggcctctcaaagccgcaagaggtctttagctaccatggattcaccaccacatcaaaaacagccccaaagag

SEQ ID NO: 335609 - DNA, 120 bp, Artificial Sequence
  ENSG00000137337_46 (sequence is synthesized)
gggaagtctcccagaagacagtgattatcaaggaagaggaagaagatactgcagagaagccagggaaggaagaggatgtcgtgactccaaaaccaggcaagagaaagagagaccaggcag

SEQ ID NO: 335610 - DNA, 120 bp, Artificial Sequence
  ENSG00000137337_47 (sequence is synthesized)
aggaggagcccaacagaataccaagccgcagcctccgacggaccaaacttaaccaagaatcaacagcccccaaagtgctcttcacaggagtggtggatgctcggggagagcgggctgtgc

SEQ ID NO: 335611 - DNA, 120 bp, Artificial Sequence
  ENSG00000137337_48 (sequence is synthesized)
tggcactggggggaagtctggctggttcagcggcagaggcttcccacctggtcactgatcgcatccgccggacagtcaagttcctgtgtgccctggggcggggaatccccattctgtccc

SEQ ID NO: 335612 - DNA, 120 bp, Artificial Sequence
  ENSG00000137337_49 (sequence is synthesized)
tggactggctgcatcagtcccgcaaggctggtttcttcttacccccggatgaatatgtggtgaccgaccctgagcaagagaagaactttggctttagccttcaagacgcactgagcaggg

SEQ ID NO: 335613 - DNA, 120 bp, Artificial Sequence
  ENSG00000137337_50 (sequence is synthesized)
ctcgggagcgaaggctgctagagggctatgagatctatgtgacccctggagtccagccaccaccacctcagatgggagagattattagctgctgtggaggcacatacctacccagcatgc

SEQ ID NO: 335614 - DNA, 120 bp, Artificial Sequence
  ENSG00000137337_51 (sequence is synthesized)
ctcggtcctataagcctcagagagttgtgatcacatgccctcaggacttccctcattgctccattccactacgggttgggctgcccctcctctcgcctgagttcctgctgactggagtgc

SEQ ID NO: 335615 - DNA, 120 bp, Artificial Sequence
  ENSG00000137337_52 (sequence is synthesized)
tgaagcaggaagccaagccagaggcctttgtcctctcccctttggagatgtcatccacctgagaactccactacccttttccctcccagaccacgaattagaagatatgtggaagaaaga

SEQ ID NO: 335616 - DNA, 120 bp, Artificial Sequence
  ENSG00000137337_53 (sequence is synthesized)
actcagggcgttagaaaggattggggtatattgatacaacttgtcctggaacatgggtgggaccagaaatctttatgaataaatgaaaagataagggatttggaagccacaggttgtttt

SEQ ID NO: 335617 - DNA, 120 bp, Artificial Sequence
  ENSG00000137337_54 (sequence is synthesized)
ttgtttgtttgtttgtttttttaatggccattttattttatttgtatttatagttttttatttgtatagatttaggggatacaagatttcttacatgcatgtattaaatggccattttaa

SEQ ID NO: 335618 - DNA, 120 bp, Artificial Sequence
  ENSG00000137337_55 (sequence is synthesized)
aattagctagtttcatgctcagatgtcataagtggcagctatctttagccagactgttgcagttattgctcgatgccactcatggtgtcctacctcctatttggaaaccatctctatttt

SEQ ID NO: 335619 - DNA, 120 bp, Artificial Sequence
  ENSG00000137337_56 (sequence is synthesized)
tttcttactgagattcttactttggggtcaggaacttgaagggatgcttggagtgagtagatttgagggtccagttatggagtgctactaaaacattttcttctctcctggcctctggaa

SEQ ID NO: 335620 - DNA, 120 bp, Artificial Sequence
  ENSG00000137337_57 (sequence is synthesized)
gcatctttagctttgactttgggcaagtctctgtacttttctggccagcttttccaggatttataaaattagagcttcggcttgacctctgtgataaataaatattcactctgtgcctta

SEQ ID NO: 335621 - DNA, 120 bp, Artificial Sequence
  ENSG00000137337_58 (sequence is synthesized)
ggaccaaggactctgaagacaactatggtgattctgaagatctggacctacaagctacccagtgctttctggagaatcagggcctggaagtccagagcatggaggatgaacctacccagg

SEQ ID NO: 335622 - DNA, 120 bp, Artificial Sequence
  ENSG00000137337_59 (sequence is synthesized)
attaactgatctcagcagcctgggagacaccacctatttgaactctaagggggcggggctttgggtgtgcctccgctcgactggctgcggttgtgaaagacagcggcagaagccaatcag

SEQ ID NO: 335623 - DNA, 120 bp, Artificial Sequence
  ENSG00000137337_60 (sequence is synthesized)
acacagggagacgtcgggccacaagggaacccactgaggtggggaccaaagatggtggctctttgaattggagccaagcgtggtgggcacccgctgagttggcctgtcataaagacggag

SEQ ID NO: 335624 - DNA, 120 bp, Artificial Sequence
  ENSG00000137337_61 (sequence is synthesized)
tgtgggagccttaatgtaccatcgcctggatgtctctctgccctttgtctcccggggccctctgacagtagaagagacacccagagtacagggagaaactcaaccccagaggcttctgtt

SEQ ID NO: 335625 - DNA, 120 bp, Artificial Sequence
  ENSG00000137337_62 (sequence is synthesized)
gtaccttgggtgcgactgggcggaggtgacttggaagttcgcttctcggactgtaatactcatccttacctggcgccccgctccgagtttagatcatggaggacacccaggctattgact

SEQ ID NO: 335626 - DNA, 120 bp, Artificial Sequence
  ENSG00000137337_63 (sequence is synthesized)
gtaagtgaaggcagaggggaacccaaggtgatacacaggcctcgtgataatcaacccctgggcaaccagctgcttggaactcagccacctttgtgtttactttctgtctaggcctcctga

SEQ ID NO: 335627 - DNA, 120 bp, Artificial Sequence
  ENSG00000137338_0 (sequence is synthesized)
ccagctgctggaggcgccggcagcgcccgccagacccgccagcccagcggcccgggctctggggaaaccggcgctcccgacaggggagcaccgggcctctgagctccctcgggagccttt

SEQ ID NO: 335628 - DNA, 120 bp, Artificial Sequence
  ENSG00000137338_1 (sequence is synthesized)
gagcctttcacgaggtcagctacgtctttgttgtgcgcgttcctgaacttttggtccattaaccaacaattagacacgccggtattcagtgcctggcgcggtgctagatgctgggtgtaa

SEQ ID NO: 335629 - DNA, 120 bp, Artificial Sequence
  ENSG00000137338_2 (sequence is synthesized)
tctcagaaaaatacattcaggggcgcgcctgagggtgctggctgctggcatctcaggtgctttacgtgcattcgtgaagaagcccatcagtatttcttgaataccagatctctatttctg

SEQ ID NO: 335630 - DNA, 120 bp, Artificial Sequence
  ENSG00000137338_3 (sequence is synthesized)
aatatagaccccaagctaagtgaagctttagcctctaagctcaacatgtatgaagctttgccaggccctgctcctgaaaatgaagatggccttgtgaaagtgaaggaggaagatcccacc

SEQ ID NO: 335631 - DNA, 120 bp, Artificial Sequence
  ENSG00000137338_4 (sequence is synthesized)
tgggagcaggtgtgcaactcacaggagggcagctcccacactcaggagatttgccgcctgcgctttcggcacttctgctaccaggaggctcacggaccccaggaagctctggcccaactc

SEQ ID NO: 335632 - DNA, 120 bp, Artificial Sequence
  ENSG00000137338_5 (sequence is synthesized)
cgagaactttgtcatcaatggctgagaccggagatgcacaccaaggaacagataatggaactgctggtgctggagcagttcctgaccatcctgcccaaggagctccagccctgtgtgaag

SEQ ID NO: 335633 - DNA, 120 bp, Artificial Sequence
  ENSG00000137338_6 (sequence is synthesized)
acatatcctctggagagtggagaggaggcagtgacagtgctggagaatctagagacaggaagtggagacacaggacaacaggcctctgtctatattcagggacaggacatgcacccaatg

SEQ ID NO: 335634 - DNA, 120 bp, Artificial Sequence
  ENSG00000137338_7 (sequence is synthesized)
gtggcagaatatcaaggagtctctttggagtgtcagagcctccagctcctgcctgggataaccaccctgaagtgtgaacctccacagcgtcctcaagggaacccccaagaagtgagtggg

SEQ ID NO: 335635 - DNA, 120 bp, Artificial Sequence
  ENSG00000137338_8 (sequence is synthesized)
cctgttccccacggatcagctcatctccaggaaaaaaaccccagagacaaggctgtagtgcctgtgtttaacccagtcaggtcccagacattggtgaagactgaggaagaaacagcccag

SEQ ID NO: 335636 - DNA, 120 bp, Artificial Sequence
  ENSG00000137338_9 (sequence is synthesized)
gccgttgctgcagagaagtggtcacatctgagtctgactcggaggaacctctgtgggaactcagctcaggagacagttatgagcctcagtccgatgactgaagaaattgtaactaaagat

SEQ ID NO: 335637 - DNA, 120 bp, Artificial Sequence
  ENSG00000137338_10 (sequence is synthesized)
agattgtttaaagcaaagcaagaaacttctgaagaaatggaacaaagtggagaagcctcaggaaagcccaacagagagtgtgcaccccagattccttgtagtactcctattgctactgaa

SEQ ID NO: 335638 - DNA, 120 bp, Artificial Sequence
  ENSG00000137338_11 (sequence is synthesized)
aggacagttgcacatttgaacactctgaaggaccgtcacccaggtgatttgtgggcccgcatgcacatctcatccctggaatatgctgcaggagacattacccgaaaagggagaaaaaaa

SEQ ID NO: 335639 - DNA, 120 bp, Artificial Sequence
  ENSG00000137338_12 (sequence is synthesized)
agttaaaggtatcatgtttcccagaaaagagttggaccaaaagagacattaaacccaattttccaagctggtcagcactggattctggacttttgaatctcaagagcgaaaagttgaacc

SEQ ID NO: 335640 - DNA, 120 bp, Artificial Sequence
  ENSG00000137338_13 (sequence is synthesized)
cagtagagctttttgaattattttttgatgatgaaacattcaacttaattgtcaatgaaaccaataattatgcttctcagaaaaatgtcagcttggaagtcacagttcaggaaatgaggt

SEQ ID NO: 335641 - DNA, 120 bp, Artificial Sequence
  ENSG00000137338_14 (sequence is synthesized)
gtgtgtttggtgtcttacttttgagtggatttatgaggcatcctagaagggaaatgtattgggaagtctctgacaccgatcagaacctggttagagatgcaatcagaagggacagatttg

SEQ ID NO: 335642 - DNA, 120 bp, Artificial Sequence
  ENSG00000137338_15 (sequence is synthesized)
aattgattttctcaaacctgcactttgcagataatggccacctagatcaaaaagataagtttacaaagttgagacctctcataaaacaaatgaataaaaatttcctcttgtatgctcccc

SEQ ID NO: 335643 - DNA, 120 bp, Artificial Sequence
  ENSG00000137338_16 (sequence is synthesized)
tggaagaatactattgctttgataagtcaatgtgtgaatgctttgatagtgaccaattcctgaatggaaagcctattagaattggctataaaatttggtgtggtacaaccacacagggtt

SEQ ID NO: 335644 - DNA, 120 bp, Artificial Sequence
  ENSG00000137338_17 (sequence is synthesized)
atctggtttggtttgaaccctatcaagaagaatcaactatgaaggtagatgaggatcctgatcttgggttaggtggaaatctagtgatgaacttcgctgatgttcttttagagagaggtc

SEQ ID NO: 335645 - DNA, 120 bp, Artificial Sequence
  ENSG00000137338_18 (sequence is synthesized)
agtatccctatcacctgtgttttgatagcttctttacaagtgtcaaattgttgtcagccttgaaaaagaagggggtgagggcaacaggaacaattcgtgagaacaggaccgaaaaatgtc

SEQ ID NO: 335646 - DNA, 120 bp, Artificial Sequence
  ENSG00000137338_19 (sequence is synthesized)
cccttatgaatgtagaacatatgaaaaaaatgaagagagggtattttgatttccgaatagaagaaaacaatgagataattttgtgtcgttggtatggggatggcattatcagtctgtgct

SEQ ID NO: 335647 - DNA, 120 bp, Artificial Sequence
  ENSG00000137338_20 (sequence is synthesized)
ccaatgctgtgggcatagaaccagtcaatgaggtaagctgttgtgatgctgataacgaagaaatccctcagataagtcaaccatccatagtaaaagtgtatgatgaatgcaaggaaggtg

SEQ ID NO: 335648 - DNA, 120 bp, Artificial Sequence
  ENSG00000137338_21 (sequence is synthesized)
tagctaaaatggatcaaattatttcgaaatacagggtgaggataagaagcaagaaatggtactcaattttggtgagctacatgattgatgtagccatgaacaatgcatggcaactacaca

SEQ ID NO: 335649 - DNA, 120 bp, Artificial Sequence
  ENSG00000137338_22 (sequence is synthesized)
gagcctgtaacccaggtgcttctctagaccccttggattttcggagatttgttgcacatttctacttggaacacaatgctcatctgtcagattagggtacataaaatggacatagtgcag

SEQ ID NO: 335650 - DNA, 120 bp, Artificial Sequence
  ENSG00000137338_23 (sequence is synthesized)
gcagacattaataagacatagaaaaataataattatacatgctgttgtaccctcccaaagtaaatctgatatatgtaatgaagttattaaataatacttttaaaaatcagacatttatat

SEQ ID NO: 335651 - DNA, 120 bp, Artificial Sequence
  ENSG00000137338_24 (sequence is synthesized)
tttcaaagactattgtaacaagtaatgttaaaaattgtctgtgagaatgttgaactgtagtacctttctctatgtcaagttttgtgtcagacatgggaaatcatgtatttgttcaattga

SEQ ID NO: 335652 - DNA, 120 bp, Artificial Sequence
  ENSG00000137343_0 (sequence is synthesized)
atggagttcccgttcgatgtggacgcgctgttcccggagcggatcacggtgctggaccagcacctgaggcccccagcccgccgacccggaaccacaacgccggcccgtgttgatctacag

SEQ ID NO: 335653 - DNA, 120 bp, Artificial Sequence
  ENSG00000137343_1 (sequence is synthesized)
cagcaaattatgaccattatagatgaactgggcaaggcttctgccaaggcccagaatctttccgctcctatcactagtgcatcaaggatgcagagtaaccgccatgttgtttatattctc

SEQ ID NO: 335654 - DNA, 120 bp, Artificial Sequence
  ENSG00000137343_2 (sequence is synthesized)
aaagacagttcagcccgaccggctggaaaaggagccattattggtttcatcaaagttggatacaagaagctctttgtactggatgatcgtgaggctcataatgaggtagaaccactttgc

SEQ ID NO: 335655 - DNA, 120 bp, Artificial Sequence
  ENSG00000137343_3 (sequence is synthesized)
atcctggacttttacatccatgagtctgtgcaacgccatggccatgggcgagaactcttccagtatatgttgcagaaggagcgagtggaaccgcaccaactggcaattgaccgaccctca

SEQ ID NO: 335656 - DNA, 120 bp, Artificial Sequence
  ENSG00000137343_4 (sequence is synthesized)
cagaagctgctgaaattcctgaataagcactacaatctggagaccacagtcccacaggtgaacaactttgtgatctttgaaggcttctttgcccatcaacatcggccccctgctccctct

SEQ ID NO: 335657 - DNA, 120 bp, Artificial Sequence
  ENSG00000137343_5 (sequence is synthesized)
ctgagggcaactcgacactctcgtgctgctgcagtcgatcccacgcccgctgctccagcaaggaagctgccacccaagagagcagagggagacatcaagccatactcctctagtgaccga

SEQ ID NO: 335658 - DNA, 120 bp, Artificial Sequence
  ENSG00000137343_6 (sequence is synthesized)
gaatttctgaaggtagctgtggagcctccttggcccctaaacagggcccctcgccgcgccacacctccagcccacccacccccccgctccagcagcctgggaaactcaccagaacgaggt

SEQ ID NO: 335659 - DNA, 120 bp, Artificial Sequence
  ENSG00000137343_7 (sequence is synthesized)
cccctccgcccctttgtgccagagcaggagctgctgcgttccttgcgcctctgccccccacaccctaccgcccgccttctgttggctgctgaccctgggggcagcccagctcaacgtcgt

SEQ ID NO: 335660 - DNA, 120 bp, Artificial Sequence
  ENSG00000137343_8 (sequence is synthesized)
gcagggaacccctccctgagaacctcagacccactcttccattgcatcctgtaggacccagtggaacctgacagagcccataggattccctcttctactttcttagacagcagggatgtc

SEQ ID NO: 335661 - DNA, 120 bp, Artificial Sequence
  ENSG00000137343_9 (sequence is synthesized)
agggtctcaaactgcctaacactttgtagcttttcttaacacaaaagcaccccttctctcctaacttgggctctgaatactttcccaacaggaagtctgatctgttgccagacttcttgg

SEQ ID NO: 335662 - DNA, 120 bp, Artificial Sequence
  ENSG00000137343_10 (sequence is synthesized)
ttagatggctcatacatttatctagagaagcacactcttgcttgctgtcaaactttagaccaccatggaaggtctaagggcatcctgtgccagggaaactttttaaggaattttatctat

SEQ ID NO: 335663 - DNA, 120 bp, Artificial Sequence
  ENSG00000137343_11 (sequence is synthesized)
gggataaaccccatattccctctagtgtctactggtggctctaatactgctttgtgctgcctgccacacttgccctttgagcctgcgaatggccgctagtgagcaagctctgcttcagag

SEQ ID NO: 335664 - DNA, 120 bp, Artificial Sequence
  ENSG00000137343_12 (sequence is synthesized)
cagtctagttaggtagaacagggacttaccagcttcccaaagggatctactcaccattgccaaactcttcatttccacattttgtgtaggtgtcagggaaccccaaactggtgttgcttt

SEQ ID NO: 335665 - DNA, 120 bp, Artificial Sequence
  ENSG00000137343_13 (sequence is synthesized)
ggggtctctaaaggagattggctgacaccaccatttcccccagatccagattctctgagggaggttgtttcttgagagtagatccagagtgtcaaggatctgttagatcctggaatccct

SEQ ID NO: 335666 - DNA, 120 bp, Artificial Sequence
  ENSG00000137343_14 (sequence is synthesized)
tcttgcatccatccctccctggtagctaggtcccgatatactcctgtcttgtgagattgtcgagatgagatgggggaccactcttcctctgtccttcctctctcctttcctccatagcaa

SEQ ID NO: 335667 - DNA, 120 bp, Artificial Sequence
  ENSG00000137343_15 (sequence is synthesized)
ggacgaccttccctgctccatgcccagagtatagctagatcccttcccctccctaccctctgaatgtgtgctagatcaggtgccccactgtgtttcctgaaatccttgggagccggatct

SEQ ID NO: 335668 - DNA, 120 bp, Artificial Sequence
  ENSG00000137343_16 (sequence is synthesized)
ccccatctcccctactcactcttcccttttcttctctcagtgttgtctgaataaagtgtgaaatcttttgtgttttctaaattgacattttcaatgaaaaaaagaatcacaaaaaaaaaa

SEQ ID NO: 335669 - DNA, 120 bp, Artificial Sequence
  ENSG00000137343_17 (sequence is synthesized)
agggggactcccccaggtctggtagcccaaagctgctgctacagccgccatgggggggtgaattcctcatcccccaatacaggcaaccaagactccaagcagggagaacaggaaacaaag

SEQ ID NO: 335670 - DNA, 120 bp, Artificial Sequence
  ENSG00000137343_18 (sequence is synthesized)
aataggtctgccagtgaggagcaggccttgtcacaggatgggtctggggagaagcccatgcacacagctcctccacaggccccggccccgccagcccagtcctggacagtgggtggggac

SEQ ID NO: 335671 - DNA, 120 bp, Artificial Sequence
  ENSG00000137343_19 (sequence is synthesized)
atactcaacgccaggttcattcgaaacctgcaggaacgtcgcagcaccaggccttggtgaccgcagccccgtcaaacatcttcaaagtattatttctccctcactacaggaaagagccaa

SEQ ID NO: 335672 - DNA, 120 bp, Artificial Sequence
  ENSG00000137343_20 (sequence is synthesized)
agcccaaccctcataatagatggatacattcattcattcattcattcagcaggcttatcagattcaagtcatttgtatcttttaaccagaccaataaaagtatttatttttatcacaaga

SEQ ID NO: 335673 - DNA, 120 bp, Artificial Sequence
  ENSG00000137343_21 (sequence is synthesized)
gggtggcttggggggggtcctgaaacctttcaagaaaaatatttgtgcaagtgatctgggaaaaaaatgcagtgaaggagcagaataggaccttatatggagcctagggaccctggcttt

SEQ ID NO: 335674 - DNA, 120 bp, Artificial Sequence
  ENSG00000137343_22 (sequence is synthesized)
aatgtgagagttatgtggaatggtaggaagaacaccgagatccatcgagttgggggaacagagccttctaagattgggaaaatcttcgcttaatacttgctggggaaggggcagtgtctg

SEQ ID NO: 335675 - DNA, 120 bp, Artificial Sequence
  ENSG00000137343_23 (sequence is synthesized)
agtgggaagccactggcttgtgtgccaagagtccatcgcagcaggcagggagtgggcatttcctttatttctctccctttctcttcacctctgacttctctgtttttctctcccccgccc

SEQ ID NO: 335676 - DNA, 120 bp, Artificial Sequence
  ENSG00000137343_24 (sequence is synthesized)
cccgccatttcccatctcccttcctcccatccataacatccttccacagctcccttccccgctctgaggagagtcgatactaacagctaccctctccctgccctgggagacctggggtgg

SEQ ID NO: 335677 - DNA, 120 bp, Artificial Sequence
  ENSG00000137343_25 (sequence is synthesized)
gctgcagtcgatcccacgcccgctggtaaagcctgtattgaaggggtggaactgtagtgcagtgatggctacttactctagatgccacggggtacagtgccatctgtgggcaattttgga

SEQ ID NO: 335678 - DNA, 120 bp, Artificial Sequence
  ENSG00000137343_26 (sequence is synthesized)
gcacaatgggccatggagttcccgttcgatgtggacgcgctgttcccggagcggatcacggtgctggaccagcacctgaggcccccagcccgccgacccggaaccacaacgccggcccgg

SEQ ID NO: 335679 - DNA, 120 bp, Artificial Sequence
  ENSG00000137343_27 (sequence is synthesized)
tgacagctcaaacccaccctctggcccttttctcccggttcctctccaaacctggtccaggcaccacgcccccttctcactgactagtgatcgccccttttgatgtccaggcctgccttt

SEQ ID NO: 335680 - DNA, 120 bp, Artificial Sequence
  ENSG00000137343_28 (sequence is synthesized)
ttggtgacctctgaccctgggcctagtgggattgatcagcgcttggatctgtgacctttcaccccgggcccaaaatgtcccaatcaaaggatgtggttgacctggcctttctgcttcctc

SEQ ID NO: 335681 - DNA, 120 bp, Artificial Sequence
  ENSG00000137343_29 (sequence is synthesized)
ctggtacttccctttggaatacggattctctgagaggttttaaatttggacatagcactaatggttccagcttcatacccatcatgtgtcctacattaaaacctggcccgagaccttgaa

SEQ ID NO: 335682 - DNA, 120 bp, Artificial Sequence
  ENSG00000137364_0 (sequence is synthesized)
gtcattggtggcggaggcaatggccggcaaccagctgtaagcgaggcacggaagacatatgcttgtgagacaaaggtgtctctgaaactatggatggtacaagaacttcacttgacattg

SEQ ID NO: 335683 - DNA, 120 bp, Artificial Sequence
  ENSG00000137364_1 (sequence is synthesized)
aagagtactcggatactgaggtacagaaaaaccaagtactaactctggaagaatggcaagacaagtgggtgaacggcaagactgcttttcatcaggaacaaggacatcagctattaaaga

SEQ ID NO: 335684 - DNA, 120 bp, Artificial Sequence
  ENSG00000137364_2 (sequence is synthesized)
agcatttagatactttccttaaaggcaagagtggactgagggtattttttcctctttgcggaaaagcggttgagatgaaatggtttgcagaccggggacacagtgtagttggtgtggaaa

SEQ ID NO: 335685 - DNA, 120 bp, Artificial Sequence
  ENSG00000137364_3 (sequence is synthesized)
tcagtgaacttgggatacaagaattttttacagagcagaatctttcttactcagaagaaccaatcaccgaaattcctggaaccaaagtatttaagagttcttcggggaacatttcattgt

SEQ ID NO: 335686 - DNA, 120 bp, Artificial Sequence
  ENSG00000137364_4 (sequence is synthesized)
actgttgcagtatttttgatcttcccaggacaaatattggcaaatttgacatgatttgggatagaggagcattagttgccatcaatccaggtgatcgcaaatgctatgcagatacaatgt

SEQ ID NO: 335687 - DNA, 120 bp, Artificial Sequence
  ENSG00000137364_5 (sequence is synthesized)
tttccctcctgggaaagaagtttcagtatctcctgtgtgttctttcttatgatccaactaaacatccaggtccaccattttatgttccacatgctgaaattgaaaggttgtttggtaaaa

SEQ ID NO: 335688 - DNA, 120 bp, Artificial Sequence
  ENSG00000137364_6 (sequence is synthesized)
tatgcaatatacgttgtcttgagaaggttgatgcttttgaagaacgacataaaagttggggaattgactgtctttttgaaaagttatatctacttacagaaaagtaaatgagacatagat

SEQ ID NO: 335689 - DNA, 120 bp, Artificial Sequence
  ENSG00000137364_7 (sequence is synthesized)
aaaataaaatcacactgacatgtttttgaggaattgaaaattatgctaaagcctgaaaatgtaatggatgaatttttaaaattgtttataaatcatatgatagatctttactaaaaatgg

SEQ ID NO: 335690 - DNA, 120 bp, Artificial Sequence
  ENSG00000137364_8 (sequence is synthesized)
ctttttagtaaagccatttactttttctaaaaaagttttagaagaaaaagatgtaactaaacttttaaagtagctcctttggagaggagattatgatgtgaaagattatgcctatgtgtc

SEQ ID NO: 335691 - DNA, 120 bp, Artificial Sequence
  ENSG00000137364_9 (sequence is synthesized)
ttgcagattgcaagatattttaccaatcagcatgtgttacctgtacaattaaaaaaatatttcaaaatgcaatgcatattaaatataatacacacagaaaaactggcatttattttgttt

SEQ ID NO: 335692 - DNA, 77 bp, Artificial Sequence
  ENSG00000137364_10 (sequence is synthesized)
aaatataatacacacagaaaaactggcatttattttgttttatttttttgagatggagtttcgttcttgttgcccaa

SEQ ID NO: 335693 - DNA, 120 bp, Artificial Sequence
  ENSG00000137364_11 (sequence is synthesized)
caggcgtgagccactgcacctggcctgacattctttatgaaatttagaattgttgaagaactataacatttcagtagggttcaaggtggtcccaaaagttatataaaagattagttttta

SEQ ID NO: 335694 - DNA, 120 bp, Artificial Sequence
  ENSG00000137364_12 (sequence is synthesized)
ccttttcacatggtttctccatgtatataacagaatcaagaaacaaattttaattaaacaatctgtaacagaatcaagaaacaaatacattttaattaaacaatctatatggaacaaaca

SEQ ID NO: 335695 - DNA, 120 bp, Artificial Sequence
  ENSG00000137364_13 (sequence is synthesized)
ttcccaaattctaagaataaatttttctttaagttttctctgagtttggcaattgttgttttttataatttaatctgtttaaatcatcaggtcttataaaatataatgtacttagagctg

SEQ ID NO: 335696 - DNA, 120 bp, Artificial Sequence
  ENSG00000137364_14 (sequence is synthesized)
gattcatggctgtttattatgaaaggttagatttctcagttcttctttaaccacattttgttatatcagacagtcctctataactctgtactacccaacaactaaatggtttagattgtt

SEQ ID NO: 335697 - DNA, 120 bp, Artificial Sequence
  ENSG00000137364_15 (sequence is synthesized)
tagctcatgttaataggatggttgtgtattataaaaaacgagttacgtgtgtgtgtgcacgcatgcacgcacatgtgctggcttaaaggttgttaatgcaaggtttggggtcccctttaa

SEQ ID NO: 335698 - DNA, 120 bp, Artificial Sequence
  ENSG00000137364_16 (sequence is synthesized)
cactggtgaaagctacggtactctccccagagatatgtcttgtcagcctctctagttccccttggcctgcatgtacaaacttctaccctagaagctctctgccatcgatgtattctaata

SEQ ID NO: 335699 - DNA, 120 bp, Artificial Sequence
  ENSG00000137364_17 (sequence is synthesized)
gatttgtaaggctattaatttgaagcaactccttgctcacagtgattcttgcttctctgagacctgctcccagtcgatactgtgggcttcagaagccatgactccccaactctgcctgta

SEQ ID NO: 335700 - DNA, 120 bp, Artificial Sequence
  ENSG00000137364_18 (sequence is synthesized)
actccccaactctgcctgtatcaccggttgaatggacaactaacccgagctggaccaacacaattctctccagagacttttgattttacttttatgtagagacagggtctcactttgttg

SEQ ID NO: 335701 - DNA, 89 bp, Artificial Sequence
  ENSG00000137364_19 (sequence is synthesized)
gacagggtctcactttgttgcccacgctgatgttgaacttgacgtgaggcctcaagcagtcctcctgtcttggccattgcgctggccct

SEQ ID NO: 335702 - DNA, 88 bp, Artificial Sequence
  ENSG00000137364_20 (sequence is synthesized)
aagactctgtctcggcaagttgactgctgaaaggggaatctgtgtacgcctgggagctgtggggcagccacattccagcacatggatc

SEQ ID NO: 335703 - DNA, 120 bp, Artificial Sequence
  ENSG00000137364_21 (sequence is synthesized)
cctgggagctgtggggcagccacattccagcacatggatctgagaaacagaacgctgatctgcagaaagagatgagaaccaaagagaggccacctgcgtcctgggtccattttcatcctc

SEQ ID NO: 335704 - DNA, 120 bp, Artificial Sequence
  ENSG00000137364_22 (sequence is synthesized)
cctgaagcccagctgcccagggtggggagaaacaccctgtgtccatgggatagagtcctttccgcttgcagttgtgcccaaagaatcttaaatacaaatgagatatccttaggtagttga

SEQ ID NO: 335705 - DNA, 120 bp, Artificial Sequence
  ENSG00000137364_23 (sequence is synthesized)
tcatttatgtaatatgtgtcttcactggggaatactgacttcctaaaatctcaagatggaagatataccacatgtaaattattttagagcaattaaattgttttcaggattttccaaaaa

SEQ ID NO: 335706 - DNA, 120 bp, Artificial Sequence
  ENSG00000137392_0 (sequence is synthesized)
gtctcccgccacccacaccagctgtcccactcaccatggagaagatcctgatcctcctgcttgtcgccctctctgtggcctatgcagctcctggcccccgggggatcattatcaacctgg

SEQ ID NO: 335707 - DNA, 120 bp, Artificial Sequence
  ENSG00000137392_1 (sequence is synthesized)
agaacggtgagctctgcatgaatagtgcccagtgtaagagcaattgctgccagcattcaagtgcgctgggcctggcccgctgcacatccatggccagcgagaacagcgagtgctctgtca

SEQ ID NO: 335708 - DNA, 120 bp, Artificial Sequence
  ENSG00000137392_2 (sequence is synthesized)
agacaagaccatcgtgggctccatcaccaacaccaactttggcatctgccatgacgctggacgctccaagcagtgagactgcccacccactcccacacctagcccagaatgctgtaggcc

SEQ ID NO: 335709 - DNA, 120 bp, Artificial Sequence
  ENSG00000137392_3 (sequence is synthesized)
actaggcgcaggggcatctctcccctgctccagcgcatctcccgggctggccacctccttgaccagcatatctgttttctgattgcgctcttcacaattaaaggcctcctgcaaaccttt

SEQ ID NO: 335710 - DNA, 120 bp, Artificial Sequence
  ENSG00000137392_4 (sequence is synthesized)
cccatcaccacagctggctctgtctcccgccacccacaccagctgtcccactcaccatggagaagatcctgatcctcctgcttgtcgccctctctgtggcctatgcagctcctggccccc

SEQ ID NO: 335711 - DNA, 120 bp, Artificial Sequence
  ENSG00000137393_0 (sequence is synthesized)
gagctgtgccccacgctcccgctgcaacagtcccgggcatcgcagctgccagtcaaggctaggaggcggtcggggactccgcctcctcccgacccgtaggtctgggagcgcaagtcctgt

SEQ ID NO: 335712 - DNA, 120 bp, Artificial Sequence
  ENSG00000137393_1 (sequence is synthesized)
tgcagtcttgcaaagtgtaaagctgtcagccgcagagcacggaggaaagacggagagaatggaagagctcctgtccggtgtgccagcagcccggactggcggtgagcgcgagggaggcta

SEQ ID NO: 335713 - DNA, 120 bp, Artificial Sequence
  ENSG00000137393_2 (sequence is synthesized)
ctgagaagcccggcgacggaggaacgcaggtctgctgccagggattgaggagactgaagaatgctgaagacaggctgatgggctcagctggtaggctccactatctcgccatgactgctg

SEQ ID NO: 335714 - DNA, 120 bp, Artificial Sequence
  ENSG00000137393_3 (sequence is synthesized)
aaaatcccactcctggagacctggctccggcccccctcatcacttgcaaactctgcctgtgtgagcagtctctggacaagatgaccacactccaggaatgccagtgcatcttttgcacag

SEQ ID NO: 335715 - DNA, 120 bp, Artificial Sequence
  ENSG00000137393_4 (sequence is synthesized)
cttgcctgaaacagtacatgcagctggcaatccgagaaggatgtgggtctcccatcacttgccctgacatggtgtgcctaaaccacgggaccctgcaggaagctgagattgcctgtttgg

SEQ ID NO: 335716 - DNA, 120 bp, Artificial Sequence
  ENSG00000137393_5 (sequence is synthesized)
tacctgtggaccagtttcaactttatcagaggttaaaatttgaaagagaagttcatctggacccctaccgaacatggtgtcctgttgcagactgtcagacagtgtgccctgttgcctcga

SEQ ID NO: 335717 - DNA, 120 bp, Artificial Sequence
  ENSG00000137393_6 (sequence is synthesized)
gtgacccaggacagcctgtgctggtggaatgcccttcttgccacctgaaattctgctcgtgttgcaaggatgcttggcatgcagaggtctcctgtagagacagtcagcctattgtcctgc

SEQ ID NO: 335718 - DNA, 120 bp, Artificial Sequence
  ENSG00000137393_7 (sequence is synthesized)
caacagagcaccgagccctctttgggacagatgcagaagcccccattaagcagtgcccagtttgccgggtttatatcgaacgcaatgaaggctgcgctcagatgatgtgcaaaaactgca

SEQ ID NO: 335719 - DNA, 120 bp, Artificial Sequence
  ENSG00000137393_8 (sequence is synthesized)
agcatacattttgctggtactgcctccagaacttggataatgacattttcctcagacattatgacaaagggccatgcaggaataaacttggccactcaagagcatcagtgatgtggaacc

SEQ ID NO: 335720 - DNA, 120 bp, Artificial Sequence
  ENSG00000137393_9 (sequence is synthesized)
gaacacaggtggtggggattctcgtaggcttgggcatcattgccttggttacttcacccttgttactcctggcctccccatgtataatctgttgtgtctgcaagtcctgtcggggcaaga

SEQ ID NO: 335721 - DNA, 120 bp, Artificial Sequence
  ENSG00000137393_10 (sequence is synthesized)
agaaaaagcacgacccatccacaacctaaagatctctgtgttcatacgccccagatatgtgagttacatgagatggcacagtgataaagccccatttagtgaccttgcctccttctcctt

SEQ ID NO: 335722 - DNA, 120 bp, Artificial Sequence
  ENSG00000137393_11 (sequence is synthesized)
gccaactttgaaagtgcctccgtgtccagactttgaacttgcctgccagccttcagcatcaggaaaggccaagtcctgggtgtgagtgttcctgtgtaacaagaactgggctcaacggtc

SEQ ID NO: 335723 - DNA, 120 bp, Artificial Sequence
  ENSG00000137393_12 (sequence is synthesized)
cagctgtttctatggagctttggggttccttgagatgaatgaacatatcattttatcatccaaaggatctcactggactgttcaacttccagccaaattcaaggagcttgcgggaacatt

SEQ ID NO: 335724 - DNA, 120 bp, Artificial Sequence
  ENSG00000137393_13 (sequence is synthesized)
tgatataacaaatgtgttgtcattgttggcaacatacaagataaccaagaagctggagtctgttctgtgttgatttgactgccatgagaaacacaggggaaacctgatgaggagaaggat

SEQ ID NO: 335725 - DNA, 120 bp, Artificial Sequence
  ENSG00000137393_14 (sequence is synthesized)
aagactgcgtaaggagaaatcctcataggagctataaagcaggctgctgatctcagcagttgatatggtggttgtgcctctgctggctactgggtgtgctgtccccatgttcccgctgtg

SEQ ID NO: 335726 - DNA, 120 bp, Artificial Sequence
  ENSG00000137393_15 (sequence is synthesized)
atttggcagaaacacaataggcttctccttgtgtgatctcagcttcaagcaggtgaaactgctgtgcagagggagttgccccttcccagtaaaagagttgcagcctgttaaacaatgtgg

SEQ ID NO: 335727 - DNA, 120 bp, Artificial Sequence
  ENSG00000137393_16 (sequence is synthesized)
tctaatttagtgtctctcccttggcaaatgtaagttttctaagttggccaacttgtctcttacagccagtggctgtggtctacagaattgtttcatataaaatacgggtagagtggtaga

SEQ ID NO: 335728 - DNA, 120 bp, Artificial Sequence
  ENSG00000137393_17 (sequence is synthesized)
gtttcaaaactttcgtcatagatatctgggacctttctcaggatctgtgttcacacagccaatagatttggaatcaggcctaagagtacacatggagggtaaatattaaagtgcgtatta

SEQ ID NO: 335729 - DNA, 120 bp, Artificial Sequence
  ENSG00000137393_18 (sequence is synthesized)
tgtacatctagaatccatgtgacttgcagcctacctgtaatttctatccattgagcatgcatggatatacccaatagtacacacaaaataaatgtttacttaagagccattctatccttt

SEQ ID NO: 335730 - DNA, 120 bp, Artificial Sequence
  ENSG00000137393_19 (sequence is synthesized)
tgtgactgaaatggtttattgtaaatctgcctaaagattttttgcatattatatatgtgaattttggttgtaagttcataacttacccaagggtatagactcataactcttttaaaacag

SEQ ID NO: 335731 - DNA, 120 bp, Artificial Sequence
  ENSG00000137393_20 (sequence is synthesized)
ctgttaggacagtctgaatactttctgtttcaaggcactgataaaaccgcaacaaaaacatgtaagaaataaaatagaaatgctttatataatttagtttaaatttatgtatcacctcat

SEQ ID NO: 335732 - DNA, 120 bp, Artificial Sequence
  ENSG00000137393_21 (sequence is synthesized)
tgtgacttattttttccattataccattagtcagatttgaataacgaggttttgaaaggataaaaccttttctccaatgacaggattatataattgctattggcaatgtagcctggtgct

SEQ ID NO: 335733 - DNA, 120 bp, Artificial Sequence
  ENSG00000137393_22 (sequence is synthesized)
tcatgagacctatgctaaatgttactggagagttcttgaagccagggataccatatcaggaactattcaggatctatgatattttctgaggtaactgggtaatagaatatcaaattgctg

SEQ ID NO: 335734 - DNA, 120 bp, Artificial Sequence
  ENSG00000137393_23 (sequence is synthesized)
ctatctcggacctattgttaaaggatgatgctttgcctatgtaataggatatatcctaagtggggatgtgtatatttcaggaactttaattcacaagtatatattgatatctgatgtgtg

SEQ ID NO: 335735 - DNA, 120 bp, Artificial Sequence
  ENSG00000137393_24 (sequence is synthesized)
tatagtacatctgttggttatgtacattttaatttacatgttgtgtagaacatagatgagaactctgggaaaacttgggaatggcaaccaaccaaaatcatttttaatcatttattagaa

SEQ ID NO: 335736 - DNA, 120 bp, Artificial Sequence
  ENSG00000137393_25 (sequence is synthesized)
atttctcaatattgtgtctttttcttttgaaactctaaacacttcagaaaaaaacactatcagtgtagttcatgttagtataattatagatttacatatatttgaatagttaatttgctt

SEQ ID NO: 335737 - DNA, 120 bp, Artificial Sequence
  ENSG00000137393_26 (sequence is synthesized)
tgttttacacgtagcccactgcctcattataggtaaaaggcatttataactgctcaggggattacgagaactcaactgaaactgaatttttgtaacaagaatgttaatagtggcaaagtc

SEQ ID NO: 335738 - DNA, 120 bp, Artificial Sequence
  ENSG00000137393_27 (sequence is synthesized)
ctctgtcagtaaactctttaagcttggtgctgcaaagagtctttaaatgggggctgatttcaagtaacctaaaagactgtgttatcagaggaagaggtcccaaatttggagtaaagatgg

SEQ ID NO: 335739 - DNA, 120 bp, Artificial Sequence
  ENSG00000137393_28 (sequence is synthesized)
gagaaaataaatatgtgctatttccttggcgagttgagggaatttgccaccttacagagtttgtatcactgaattagctgcttttgtttttttttttttttttttgccagggctatggag

SEQ ID NO: 335740 - DNA, 120 bp, Artificial Sequence
  ENSG00000137393_29 (sequence is synthesized)
tgggggttgtttgtcaaactgattttcaataattggatttaattttttttaacattgaaaagtgcctgaaaaatggtaaattcttaaatgtgtgtgagattgtcagaatcaacaaaacta

SEQ ID NO: 335741 - DNA, 120 bp, Artificial Sequence
  ENSG00000137393_30 (sequence is synthesized)
ggttggttaaacatatctctggtacatcaaggggcatgatacaaaccagtctaaagactgtttataaaggagagagctggcgacttatttttatttttattttttggacagagtctccct

SEQ ID NO: 335742 - DNA, 120 bp, Artificial Sequence
  ENSG00000137393_31 (sequence is synthesized)
gtctccctttgtcacccaggccggagtgcagtggcatgatcatggttcacttcaacccctacctcctgggctcaagtgttcctctcaccttatcctcctgagcagctgggactacaggca

SEQ ID NO: 335743 - DNA, 120 bp, Artificial Sequence
  ENSG00000137393_32 (sequence is synthesized)
acaggtgtgtgtcactgtgcctgacagctgacagttttaactgacaactttgataacagaggctgctatttttgttttagataattggccagtgacagagtttacccttgcctcctttct

SEQ ID NO: 335744 - DNA, 120 bp, Artificial Sequence
  ENSG00000137393_33 (sequence is synthesized)
tggtctgccagctttgtcctttctgagtgattctctttctgtattgagaggaagtgtgggtctacatagggatgtttggatgctatggcaagaatctttttgtgtttggagtgtagtcca

SEQ ID NO: 335745 - DNA, 120 bp, Artificial Sequence
  ENSG00000137393_34 (sequence is synthesized)
tttgcaatagaaataaaaaaatccgtcaccaaattgtaacctggatgttatagcccagcatctagaaatcctatgaaacgtattagcacaatatcttgccattgtcccatctaggaaatt

SEQ ID NO: 335746 - DNA, 120 bp, Artificial Sequence
  ENSG00000137393_35 (sequence is synthesized)
ttttcttgttgtgaggtagggaagtgaggaggaaagccatgccgaagcaaatgttagaatcttaggcatcctatttgttcatgccatgggtatttgctttggacttggagtctgtacttt

SEQ ID NO: 335747 - DNA, 120 bp, Artificial Sequence
  ENSG00000137393_36 (sequence is synthesized)
gaaagaggcctttgaaaaacaaataattctgtgtgaattttcttgtagcgtgcttcatgaaaatatctacttatccaggtttgcaaatgtacatgttcatttgaatgtaaatcaccattt

SEQ ID NO: 335748 - DNA, 120 bp, Artificial Sequence
  ENSG00000137393_37 (sequence is synthesized)
cttggaaccccacgttttttcttaaaaattattctgaattaaatgtatatttctttagccttccctacacagtactaataaaagacttttctttctgttcatgaatggatgcctttatgt

SEQ ID NO: 335749 - DNA, 120 bp, Artificial Sequence
  ENSG00000137393_38 (sequence is synthesized)
gatatagagtcatgtgtgtatgtgtagctttaagggcaatttcagaaatgcattagatgaatgacattttataaagcgatcacaattgatatctacaggctattatgtctcatgttgatt

SEQ ID NO: 335750 - DNA, 120 bp, Artificial Sequence
  ENSG00000137393_39 (sequence is synthesized)
catgatccaggaagttttatgtatttaaaaaattgctatcgtgttatatttttccaatttttggagaagaaaatagctgtttaggctctctagccacaataaatgtaagcaggaaatcaa

SEQ ID NO: 335751 - DNA, 120 bp, Artificial Sequence
  ENSG00000137393_40 (sequence is synthesized)
tgtaaccaggtttgagggaggcatatctcatgtgactgggagaagccaatcatcatgcttatgaactacaagaggatctatactggtatattttcttggatttaataaagctttaacaat

SEQ ID NO: 335752 - DNA, 120 bp, Artificial Sequence
  ENSG00000137404_0 (sequence is synthesized)
atttgccattcttagcaactggccagtcaacaactcaactttataatgggaaaactagacgagctgagattcaacccacgtgagcggctgcagagccgctacccttaacagctctctctc

SEQ ID NO: 335753 - DNA, 120 bp, Artificial Sequence
  ENSG00000137404_1 (sequence is synthesized)
gggattctaacattcccttctgtgacggagagacagcaggccgggacacgcatcccaggacggatccacagctggatggggaaggctgcgccaggcgggccggaagcctggcggtggcgt

SEQ ID NO: 335754 - DNA, 120 bp, Artificial Sequence
  ENSG00000137404_2 (sequence is synthesized)
gcgtgcaggagccccgccctcctgggctggattcagccgggggcggggccgcgggcggggcctgtggcagcgggaatcccgaccccgcccctttccccacccctccatttctcgccatgg

SEQ ID NO: 335755 - DNA, 120 bp, Artificial Sequence
  ENSG00000137404_3 (sequence is synthesized)
tgcactgctcctgatccctgctgccctcgcctctttcatcctggcctttggcaccggagtggagttcgtgcgctttacctcccttcggccacttcttggagggatcccggagtctggtgg

SEQ ID NO: 335756 - DNA, 120 bp, Artificial Sequence
  ENSG00000137404_4 (sequence is synthesized)
tccggatgcccgccagggatggctggctgccctgcaggaccgcagcatccttgcccccctggcatgggatctggggctcctgcttctatttgttgggcagcacagcctcatggcagctga

SEQ ID NO: 335757 - DNA, 120 bp, Artificial Sequence
  ENSG00000137404_5 (sequence is synthesized)
aagagtgaaggcatggacatcccggtactttggggtccttcagaggtcactgtatgtggcctgcactgccctggccttgcagctggtgatgcggtactgggagcccatacccaaaggccc

SEQ ID NO: 335758 - DNA, 120 bp, Artificial Sequence
  ENSG00000137404_6 (sequence is synthesized)
tgtgttgtgggaggctcgggctgagccatgggccacctgggtgccgctcctctgctttgtgctccatgtcatctcctggctcctcatctttagcatccttctcgtctttgactatgctga

SEQ ID NO: 335759 - DNA, 120 bp, Artificial Sequence
  ENSG00000137404_7 (sequence is synthesized)
tctcagactcttctcccacctgcgccacccagtgtgtgtggagctgctgacagtgctgtgggtggtgcctaccctgggcacggaccgtctcctccttgctttcctccttaccctctacct

SEQ ID NO: 335760 - DNA, 120 bp, Artificial Sequence
  ENSG00000137404_8 (sequence is synthesized)
gggcctggctcacgggcttgatcagcaagacctccgctacctccgggcccagctacaaagaaaactccacctgctctctcggccccaggatggggaggcagagtgaggagctcactctgg

SEQ ID NO: 335761 - DNA, 120 bp, Artificial Sequence
  ENSG00000137404_9 (sequence is synthesized)
ttacaagccctgttcttcctctcccactgaattctaaatccttaacatccaggccctggctgcttcatgccagaggcccaaatccatggactgaaggagatgccccttctactacttgag

SEQ ID NO: 335762 - DNA, 120 bp, Artificial Sequence
  ENSG00000137404_10 (sequence is synthesized)
actttattctctgggtccagctccataccctaaattctgagtttcagccactgaactccaaggtccacttctcaccagcaaggaagagtggggtatggaagtcatctgtcccttcactgt

SEQ ID NO: 335763 - DNA, 120 bp, Artificial Sequence
  ENSG00000137404_11 (sequence is synthesized)
ttagagcatgacactctccccctcaacagcctcctgagaaggaaaggatctgccctgaccactcccctggcactgttacttgcctctgcgcctcaggggtccccttctgcaccgctggct

SEQ ID NO: 335764 - DNA, 120 bp, Artificial Sequence
  ENSG00000137404_12 (sequence is synthesized)
tccactccaagaaggtggaccagggtctgcaagttcaacggtcatagctgtccctccaggccccaaccttgcctcaccactcccggccctagtctctgcacctccttaggccctgcctct

SEQ ID NO: 335765 - DNA, 120 bp, Artificial Sequence
  ENSG00000137404_13 (sequence is synthesized)
gggctcagaccccaacctagtcaaggggattctcctgctcttaactcgatgacttggggctccctgctctcccgaggaagatgctctgcaggaaaataaaagtcagcctttttctacata

SEQ ID NO: 335766 - DNA, 120 bp, Artificial Sequence
  ENSG00000137404_14 (sequence is synthesized)
tgaaagcggccgagaagctacaggggagggagacctgagttctaaattaggaactcaaggattagagttttggagaggcgggagagtgaggactgagggagccgaaaagggcggtgaccg

SEQ ID NO: 335767 - DNA, 80 bp, Artificial Sequence
  ENSG00000137409_0 (sequence is synthesized)
cccggccccgccccctgacgccggtgagggggcgtggccccgtcacgtgacggggagtgacctcgccgccgggcgccatg

SEQ ID NO: 335768 - DNA, 120 bp, Artificial Sequence
  ENSG00000137409_1 (sequence is synthesized)
cttcggacccggaagtggcgccctgggctcgcggcggtgccgcggggatggcgggagccggagctggagccggagctcgcggcggagcggcggcgggggtcgaggctcgagctcgcgatc

SEQ ID NO: 335769 - DNA, 120 bp, Artificial Sequence
  ENSG00000137409_2 (sequence is synthesized)
gagctcgcgatccaccgcccgcgcaccgcgcacatcctcgccaccctcggcctgcggctcagccctcggcccgcaggatggatggcgggtcagggggcctggggtctggggacaacgccc

SEQ ID NO: 335770 - DNA, 120 bp, Artificial Sequence
  ENSG00000137409_3 (sequence is synthesized)
cgaccactgaggctcttttcgtggcactgggcgcgggcgtgacggcgctcagccatcccctgctctacgtgaagctgctcatccaggtgggtcatgagccgatgccccccacccttggga

SEQ ID NO: 335771 - DNA, 120 bp, Artificial Sequence
  ENSG00000137409_4 (sequence is synthesized)
ccaatgtgctggggaggaaggtcctctatctgccgagcttcttcacctacgccaagtacatcgtgcaagtggatggtaagatagggctgttccgaggcctgagtccccggctgatgtcca

SEQ ID NO: 335772 - DNA, 120 bp, Artificial Sequence
  ENSG00000137409_5 (sequence is synthesized)
acgccctctctactgtgactcggggtagcatgaagaaggttttccctccagatgagattgagcaggtttccaacaaggatgatatgaagacttccctgaagaaagttgtgaaggagacct

SEQ ID NO: 335773 - DNA, 120 bp, Artificial Sequence
  ENSG00000137409_6 (sequence is synthesized)
cctacgagatgatgatgcagtgtgtgtcccgcatgttggcccaccccctgcatgtcatctcaatgcgctgcatggtccagtttgtgggacgggaggccaagtacagtggtgtgctgagct

SEQ ID NO: 335774 - DNA, 120 bp, Artificial Sequence
  ENSG00000137409_7 (sequence is synthesized)
ccattgggaagattttcaaagaggaagggctgctgggattcttcgttggattaatccctcacctcctgggcgatgtggttttcttgtggggctgtaacctgctggcccacttcatcaatg

SEQ ID NO: 335775 - DNA, 120 bp, Artificial Sequence
  ENSG00000137409_8 (sequence is synthesized)
acctaccccttcctgctagttggcgacctcatggctgtgaacaactgcgggctgcaagctgggctccccccttactccccagtgttcaaatcctggattcactgctggaagtacctgagt

SEQ ID NO: 335776 - DNA, 120 bp, Artificial Sequence
  ENSG00000137409_9 (sequence is synthesized)
gtgcagggccagctcttccgaggctccagcctgcttttccgccgggtgtcatcaggatcatgctttgccctggagtaacctgaatcatctaaaaaacacggtctcaacctggccaccgtg

SEQ ID NO: 335777 - DNA, 120 bp, Artificial Sequence
  ENSG00000137409_10 (sequence is synthesized)
ggtgaggcctgaccaccttgggacacctgcaagacgactccaacccaacaacaaccagatgtgctccagcccagccgggcttcagttccatatttgccatgtgtctgtccagatgtgggg

SEQ ID NO: 335778 - DNA, 120 bp, Artificial Sequence
  ENSG00000137409_11 (sequence is synthesized)
ttgagcgggggtggggctgcacccagtggattgggtcacccggcagacctagggaaggtgaggcgaggtggggagttggcagaatccccatacctcgcagatttgctgagtctgtcttgt

SEQ ID NO: 335779 - DNA, 120 bp, Artificial Sequence
  ENSG00000137409_12 (sequence is synthesized)
gcagagggccagagaatggcttatgggggcccaggttggatggggaaaggctaatggggtcagaccccaccccgtctacccctccagtcagcccagcgcccatcctgcagctcagctggg

SEQ ID NO: 335780 - DNA, 120 bp, Artificial Sequence
  ENSG00000137409_13 (sequence is synthesized)
agcatcattctcctgctttgtacatagggtgtggtcccctggcacgtggccaccatcatgtctaggcctatgctaggaggcaaatggccaggctctgcctgtgtttttctcaacactact

SEQ ID NO: 335781 - DNA, 120 bp, Artificial Sequence
  ENSG00000137409_14 (sequence is synthesized)
tttctgatatgagggcagcacctgcctctgaatgggaaatcatgcaactactcagaatgtgtcctcctcatctaatgctcatctgtttaatggtgatgcctcgcgtacaggatctggtta

SEQ ID NO: 335782 - DNA, 120 bp, Artificial Sequence
  ENSG00000137409_15 (sequence is synthesized)
cctgtgcagttgtgaatacccagaggttgggcagatcagtgtctctagtcctacccagttttaaagttcatggtaagatttgacctcatctcccgcaaataaatgtattggtgatttgga

SEQ ID NO: 335783 - DNA, 120 bp, Artificial Sequence
  ENSG00000137409_16 (sequence is synthesized)
agcgtgagtgacaccccaggggggctgggaaacgaccagaatccaggttcccagttcagccaggccctggccatccggagctataccaagttcgtgatggggattgcagtgagcatgctg

SEQ ID NO: 335784 - DNA, 120 bp, Artificial Sequence
  ENSG00000137409_17 (sequence is synthesized)
aagtggtttcatggaattcaatattgtgaggagatacttggtatctataaggcatttaagttttcatcttacataatttcagaaaggatttgaggtggctaagtgtgggtttattttaag

SEQ ID NO: 335785 - DNA, 120 bp, Artificial Sequence
  ENSG00000137409_18 (sequence is synthesized)
attatacatcagacaagaccttttcttctttgagtcttaaagactcttaggataaggataagagaactctggcccaggtggcaggtggtaaagcccaagaactgcttctccttcaagtaa

SEQ ID NO: 335786 - DNA, 120 bp, Artificial Sequence
  ENSG00000137409_19 (sequence is synthesized)
catgggctgaaaattcgaggtctgtaaccagttgagctgagttcctgggttgttagggcggctggcattggaaaccgactcctccctcctgcaggacattcctgggcccaggagagcctg

SEQ ID NO: 335787 - DNA, 120 bp, Artificial Sequence
  ENSG00000137409_20 (sequence is synthesized)
tgggtggggctgggccacgtggggaactggcagcagtaccaaccttgggttctcgtgttctgtaccgaagctacctctccgtagctggagctcttgggcccagcagtcaggggtccaggc

SEQ ID NO: 335788 - DNA, 120 bp, Artificial Sequence
  ENSG00000137409_21 (sequence is synthesized)
atgcagtgtgtgtcccgcatgttggcccaccccctgcatgtcatctcaatgcgctgcatggtccagtttgtgggacgggaggccaagtacagctgtcctgcggggccaccatcccaggaa

SEQ ID NO: 335789 - DNA, 120 bp, Artificial Sequence
  ENSG00000137409_22 (sequence is synthesized)
atccctcttaccgggtctccttctcgggactcccttcagtccacttaccccgtttctgccccccaggccttctctgggcagtgactgtgagggctgacaggaaaggcatgtgcagcgtgc

SEQ ID NO: 335790 - DNA, 120 bp, Artificial Sequence
  ENSG00000137409_23 (sequence is synthesized)
ttgtgaggagctcagcacagagggtggggtgagggcatgtgttgctgaagtctgcatcctgaggtgcctgtggcaaaccactcttcccttctgtctcctcagttcagccaggccctggcc

SEQ ID NO: 335791 - DNA, 120 bp, Artificial Sequence
  ENSG00000137409_24 (sequence is synthesized)
aaacgaccagaatccaggttcccagttcagccaggccctggccatccggagctataccaagttcgtgatgggggtaagttgtgccagctgtccttccttcccactgccttgcggacccaa

SEQ ID NO: 335792 - DNA, 120 bp, Artificial Sequence
  ENSG00000137409_25 (sequence is synthesized)
ggccaaccctggtaatggctggaggcaggtcttggtacagggtgttggcgtggtgtgtccctgctccctgggccggggtgggtcactggcactcaggcctctctgggtttcagattgcag

SEQ ID NO: 335793 - DNA, 120 bp, Artificial Sequence
  ENSG00000137411_0 (sequence is synthesized)
gccccgcccccatgcgccgcgcggctccagggccacgttccagggtcgggtttggtggattcctcagtccctgccgccgcggggcgccctgggatagcggcggggcctcctggtgagcgc

SEQ ID NO: 335794 - DNA, 120 bp, Artificial Sequence
  ENSG00000137411_1 (sequence is synthesized)
gatagcggcggggcctcctggtgagcgcgcgccggggcggcctccgggaagtgggagacgctgcgggtcctgggcccaggccttgggatgggcgggaaggcttggccgcgccgggctgtg

SEQ ID NO: 335795 - DNA, 120 bp, Artificial Sequence
  ENSG00000137411_2 (sequence is synthesized)
ggcactgcaggaggcccctgtgcaggtggagatcgccgcggccctggcgggactccttgctggctcttgggcgcgctgatgcccatcatctccctgagtttctgagccctatctctcatg

SEQ ID NO: 335796 - DNA, 120 bp, Artificial Sequence
  ENSG00000137411_3 (sequence is synthesized)
tgtcagtggtcaccgccgaatccagacactccggccctgttccggaagagccctgatatccgtggctccatggcgctgtctgtcgataccatgcactctagctctcaaggaggaaaggtt

SEQ ID NO: 335797 - DNA, 120 bp, Artificial Sequence
  ENSG00000137411_4 (sequence is synthesized)
ttgtggaagggaatagagacttggaataacagacctgtgctaattagagacaggaaagatggaacaaggggagtgacccttctccacccccatatcctaatgtgctctctctctatccag

SEQ ID NO: 335798 - DNA, 120 bp, Artificial Sequence
  ENSG00000137411_5 (sequence is synthesized)
aacagatctcggcccctttccaaacactcctgatgcctcatttgcctctcgcctcttttcgaccaccattttgggggctgaggcactcacggggcctccccaggtttcactccgtttcta

SEQ ID NO: 335799 - DNA, 120 bp, Artificial Sequence
  ENSG00000137411_6 (sequence is synthesized)
cacagtcggagccccatggatctcccatctcccggaggaaccgtgaagccaaacagaagcgcctgcgagagaagcaggcgactctggaggctgagatagcaggggagagcaagtcacctg

SEQ ID NO: 335800 - DNA, 120 bp, Artificial Sequence
  ENSG00000137411_7 (sequence is synthesized)
cagaatccattaaggcctggaggcctaaggagttagtattgtatgaaatccctacgaaacccggtgaaaagaaagatgtctctgggcccctgcctcctgcatacagcccccgatatgttg

SEQ ID NO: 335801 - DNA, 120 bp, Artificial Sequence
  ENSG00000137411_8 (sequence is synthesized)
aggctgcctggtacccgtggtgggtacgagagggcttcttcaaaccagaatatcaggcccggctgccccaagctacaggggagaccttttccatgtgtatcccacctcccaatgtcactg

SEQ ID NO: 335802 - DNA, 120 bp, Artificial Sequence
  ENSG00000137411_9 (sequence is synthesized)
gctccctgcacattggccacgcactcacggtggccatacaggatgccctcgtgcgctggcaccggatgcgtggggatcaagtgctgtgggtccctggttcagatcatgcaggaattgcta

SEQ ID NO: 335803 - DNA, 120 bp, Artificial Sequence
  ENSG00000137411_10 (sequence is synthesized)
cacaagctgtggtggagaaacaactgtggaaggaacggggagtgaggagacatgagctgagccgggaggccttccttagggaggtgtggcagtggaaggaggcgaaaggtggagagatct

SEQ ID NO: 335804 - DNA, 120 bp, Artificial Sequence
  ENSG00000137411_11 (sequence is synthesized)
gtgagcagctgcgagctctgggtgcctccctggactgggatcgagagtgttttaccatggatgttggctcctcagtggctgtgactgaagcttttgtgcggctctacaaggcggggttgc

SEQ ID NO: 335805 - DNA, 120 bp, Artificial Sequence
  ENSG00000137411_12 (sequence is synthesized)
tgtaccggaaccatcagcttgtcaactggtcatgtgctttaagatcagccatctcggacattgaggtggagaaccggcccctgcctggccacacacagcttcgactgcctggctgcccca

SEQ ID NO: 335806 - DNA, 120 bp, Artificial Sequence
  ENSG00000137411_13 (sequence is synthesized)
cccccgtgtcttttggcctcctattttctgttgccttccccgtggatggagagcctgatgcagaggttgtggtaggaaccacaaggccagagacgctgcctggagatgtggctgtggccg

SEQ ID NO: 335807 - DNA, 120 bp, Artificial Sequence
  ENSG00000137411_14 (sequence is synthesized)
ttcatccagacgactcgcgatacacacatctacacgggcgacagcttcgtcaccccttgatggggcagcctcttcccctcatcacagactatgctgttcagccacatgtgggcacggggg

SEQ ID NO: 335808 - DNA, 120 bp, Artificial Sequence
  ENSG00000137411_15 (sequence is synthesized)
cagtgaaggtgactccagctcacagtcctgccgatgctgagatgggggcccgacatggcttgagccccttgaatgtcattgcggaggatgggaccatgacctccctctgcggggactggc

SEQ ID NO: 335809 - DNA, 120 bp, Artificial Sequence
  ENSG00000137411_16 (sequence is synthesized)
tctggggatgtgatagaatacctgctgaagaaccagtggtttgtccgctgccaggaaatgggggcccgagctgccaaggctgtggagtcgggggccctggagctcagtccctccttccac

SEQ ID NO: 335810 - DNA, 120 bp, Artificial Sequence
  ENSG00000137411_17 (sequence is synthesized)
cagaagaactggcagcactggttttcccatattggggactggtgtgtctcccggcagctgtggtggggccatcagattccagcctacctggttgtagaggaccatgcgcagggagaagag

SEQ ID NO: 335811 - DNA, 120 bp, Artificial Sequence
  ENSG00000137411_18 (sequence is synthesized)
gactgttgggtggttgggcggtcagaggctgaggccagagaggtagcagcggaactgacagggaggccaggggcagagctgaccctggagagggatcctgatgtcctagacacatggttt

SEQ ID NO: 335812 - DNA, 120 bp, Artificial Sequence
  ENSG00000137411_19 (sequence is synthesized)
tcttctgccctgttccccttttctgccctgggctggccccaagagaccccagaccttgctcgtttctaccccctgtcacttttggaaacgggcagcgaccttctgctgttctgggtgggc

SEQ ID NO: 335813 - DNA, 120 bp, Artificial Sequence
  ENSG00000137411_20 (sequence is synthesized)
cgcatggtcatgttggggacccagctcacagggcagctgcccttcagcaaggtgcttcttcatcccatggttcgggacaggcagggccggaagatgagcaagtccctggggaatgtgctg

SEQ ID NO: 335814 - DNA, 120 bp, Artificial Sequence
  ENSG00000137411_21 (sequence is synthesized)
gacccaagagacatcatcagtggggtggagatgcaggtgctgcaggaaaagctgagaagcggaaatttggaccctgcagagctggccattgtggctgcagcacagaaaaaggactttcct

SEQ ID NO: 335815 - DNA, 120 bp, Artificial Sequence
  ENSG00000137411_22 (sequence is synthesized)
cacgggatccctgagtgtgggacagatgccctgagattcacactctgctcccatggagttcaggcgggcgacttgcacctgtcagtctctgaggtccagagctgccgacatttctgcaac

SEQ ID NO: 335816 - DNA, 120 bp, Artificial Sequence
  ENSG00000137411_23 (sequence is synthesized)
aagatctggaatgctcttcgctttatcctcaatgctttaggggagaaatttgtgccacagcctgctgaggagctgtctccctcctccccgatggatgcctggatcctgagccgccttgcc

SEQ ID NO: 335817 - DNA, 120 bp, Artificial Sequence
  ENSG00000137411_24 (sequence is synthesized)
ctggctgcccaggagtgtgagcggggcttcctcacccgagagctctcgctcgtcactcatgccctgcaccacttctggcttcacaacctctgtgacgtctacctggaggctgtgaagccc

SEQ ID NO: 335818 - DNA, 120 bp, Artificial Sequence
  ENSG00000137411_25 (sequence is synthesized)
gtgctgtggcactcgccccgccccctggggccccctcaggtcctgttctcctgcgctgacctcggcctccgcctcctggccccactgatgcccttcctggctgaagagctctggcagagg

SEQ ID NO: 335819 - DNA, 120 bp, Artificial Sequence
  ENSG00000137411_26 (sequence is synthesized)
ctgccccccaggcctggttgcccccctgcccccagcatctcggttgccccctaccccagcgcctgcagcttggagcactggcgccagccagagctggagcggcgcttctcccgggtccaa

SEQ ID NO: 335820 - DNA, 120 bp, Artificial Sequence
  ENSG00000137411_27 (sequence is synthesized)
gaggtcgtgcaggtgctaagggctctccgagccacgtaccagctcaccaaagcccggccccgagtgctgctgcagagctcagagcctggggaccagggcctcttcgaggccttcttggag

SEQ ID NO: 335821 - DNA, 120 bp, Artificial Sequence
  ENSG00000137411_28 (sequence is synthesized)
cccctgggcaccctgggctactgtggggctgtgggcctgttacccccaggcgcagcagctccctccggctgggcccaggctccactcagtgacacggctcaagtctacatggagctgcag

SEQ ID NO: 335822 - DNA, 120 bp, Artificial Sequence
  ENSG00000137411_29 (sequence is synthesized)
ggcctggtggacccgcagatccagctacctctgttagccgcccgaaggtacaagttgcagaagcagcttgacagcctcacagccaggaccccatcagaaggggaggcagggactcagagg

SEQ ID NO: 335823 - DNA, 120 bp, Artificial Sequence
  ENSG00000137411_30 (sequence is synthesized)
caacaaaagctttcttccctccagctggaattgtcaaaactggacaaggcagcctctcacctccggcagctgatggatgagcctccagccccagggagcccggagctctaactcatcatc

SEQ ID NO: 335824 - DNA, 120 bp, Artificial Sequence
  ENSG00000137411_31 (sequence is synthesized)
cccatcagttttcctccctctcagacctgtctttgaggacaaacagatttgtcagctgtcagggtgcagtgggacgtcagagactatgtggtccatcgccttcattgtgtaaatgaggac

SEQ ID NO: 335825 - DNA, 120 bp, Artificial Sequence
  ENSG00000137411_32 (sequence is synthesized)
acagactggcttggtcgcagtgactgtggtgtccttgagatgctcacattactgcccggcctgcctcccacctggaagtctgggaatgaggagattgagataaacttttgaaatcccaaa

SEQ ID NO: 335826 - DNA, 120 bp, Artificial Sequence
  ENSG00000137411_33 (sequence is synthesized)
aaggtttgcagggtttgcaggagagaggaaggcaggctgagggaggagtgaggccagcaggtgtgacccttatagaggcagggccttcgacctgggtcgtgaattgcccccttccatccc

SEQ ID NO: 335827 - DNA, 120 bp, Artificial Sequence
  ENSG00000137411_34 (sequence is synthesized)
ctatgttggcagtgagaggtgaggatgatgaccagctgtaagtgtttaaatgtttatcttcagatgcagaggttgtggtaggaaccacaaggccagagacgctgcctggagatgtggctg

SEQ ID NO: 335828 - DNA, 120 bp, Artificial Sequence
  ENSG00000137411_35 (sequence is synthesized)
tggccgttcatccagacgactcgcgatacacagtaatacccagtgcgctcctgcactctggcccgccccgccaatggccttctcttctcttgggttttaaatggtggctctttctctctt

SEQ ID NO: 335829 - DNA, 120 bp, Artificial Sequence
  ENSG00000137411_36 (sequence is synthesized)
gcttctacttccttttcctgagacttctctcagtggttctgattggactccctcctcctcttatagtttttctgtagctcaggggttgacaaactggcccatggtcctaatccagcttgc

SEQ ID NO: 335830 - DNA, 120 bp, Artificial Sequence
  ENSG00000137411_37 (sequence is synthesized)
cacacccagctaattttttgtatttttacaaaaattagtaattaattttttttaagtaatgtaatttttaagtaatgttatttagtagagacggagtgtcactgtgttagccaggatagt

SEQ ID NO: 335831 - DNA, 120 bp, Artificial Sequence
  ENSG00000137411_38 (sequence is synthesized)
tgcttgcagcctttatattatctatggctgctattatataccctctccagctctgctgcagtggcataatagagtaattgtgctgagaatgaatttgtctctaggcccaaaagcctaaaa

SEQ ID NO: 335832 - DNA, 120 bp, Artificial Sequence
  ENSG00000137411_39 (sequence is synthesized)
tatctacattctggccccttaagagtttgctgaccttgctctagcttgctaccttccactttctaccttcttattcctggggttctcacgccccagcccagacccttccaaccctcacag

SEQ ID NO: 335833 - DNA, 120 bp, Artificial Sequence
  ENSG00000137411_40 (sequence is synthesized)
gtgtgtgtgtgtgtgtgtgtgtatttatatatatatatatattttctttctctttacttaccccaatttctcttgtctaaatctcaccttcttccactcgcccattcccacctttcaatt

SEQ ID NO: 335834 - DNA, 120 bp, Artificial Sequence
  ENSG00000137411_41 (sequence is synthesized)
tccactcgcccattcccacctttcaattcccatggaattaccctcattcttctgggtctgttatctcatgccatctctgtgaagcatccttggatttcccacaatatggctatccctcct

SEQ ID NO: 335835 - DNA, 120 bp, Artificial Sequence
  ENSG00000137411_42 (sequence is synthesized)
aaggcagagagctctggagttaataagttcccaattgtcccctcagttaggagaggagaggagacgagggagtctcagttcccctcttcctgggactggttttggcagtgcagcccaggc

SEQ ID NO: 335836 - DNA, 120 bp, Artificial Sequence
  ENSG00000137411_43 (sequence is synthesized)
actgttgcctgcctgtcacctggggagaggaggaggagggagacttctagaaatgtctgacaagtcggtgtcagaaggcagaggggaattttttcagtccctgtagttgctgagtttggc

SEQ ID NO: 335837 - DNA, 120 bp, Artificial Sequence
  ENSG00000137411_44 (sequence is synthesized)
ccatgggcaggctgcgtgctgagagaggcctgggagggactagcagcggtctttagaccaggggttctcacgctgtcctacgtccaaagcacctggagggcttgttgacggtggatcccc

SEQ ID NO: 335838 - DNA, 120 bp, Artificial Sequence
  ENSG00000137411_45 (sequence is synthesized)
cccgctccactgccaccccagagtggctcctttagcaggttggggtgggggtgggtggtgtaatgaatattcatttcttgtcccaagtggtgctgctgctgctggctgtggaccactgcc

SEQ ID NO: 335839 - DNA, 120 bp, Artificial Sequence
  ENSG00000137411_46 (sequence is synthesized)
ctagctcagccttttaaaaacctctgtcccctgttgataagcaaaaaactcaatgatttttttccctaaactacatgtttccctggaaatcctgtccctgtgtactgcagagaattgctg

SEQ ID NO: 335840 - DNA, 120 bp, Artificial Sequence
  ENSG00000137411_47 (sequence is synthesized)
tcctggagtccccttctttgtgctgagtgtgtcctgggactgtggatcatatcagaagtgctaagtgcttctgcctgtccctctctcccaggacccatggcctgccccactggcgggtag

SEQ ID NO: 335841 - DNA, 120 bp, Artificial Sequence
  ENSG00000137413_0 (sequence is synthesized)
acactacgccagaacaagatggccgacgcggcggccacagctggggccggtggctccggaacgagatcgggaagtaaacagtccactaaccctgccgataactatcatctggcccggagg

SEQ ID NO: 335842 - DNA, 120 bp, Artificial Sequence
  ENSG00000137413_1 (sequence is synthesized)
agaaccctgcaggtggttgtgagctccttgctgacagaggcagggtttgagagtgccgagaaagcatccgtggaaacgctgacagagatgctgcagagctacatttcagaaattgggaga

SEQ ID NO: 335843 - DNA, 120 bp, Artificial Sequence
  ENSG00000137413_2 (sequence is synthesized)
agtgccaagtcttactgtgagcacacagccaggacccagcccacactgtccgatatcgtggtcacacttgttgagatgggtttcaatgtggacactctccctgcttatgcaaaacggtct

SEQ ID NO: 335844 - DNA, 120 bp, Artificial Sequence
  ENSG00000137413_3 (sequence is synthesized)
cagaggatggtcatcactgctcctccggtgaccaatcagccagtgacccccaaggccctcactgcagggcagaaccgaccccacccgccgcacatccccagccattttcctgagttccct

SEQ ID NO: 335845 - DNA, 120 bp, Artificial Sequence
  ENSG00000137413_4 (sequence is synthesized)
gatccccacacctacatcaaaactccgacgtaccgtgagcccgtgtcagactaccaggtcctgcgggagaaggctgcatcccagaggcgcgatgtggagcgggcacttacccgtttcatg

SEQ ID NO: 335846 - DNA, 120 bp, Artificial Sequence
  ENSG00000137413_5 (sequence is synthesized)
gccaagacaggcgagactcagagtcttttcaaagatgacgtcagcacatttccattgattgctgccagacctttcaccatcccctacctgacagctcttcttccgtctgaactggagatg

SEQ ID NO: 335847 - DNA, 120 bp, Artificial Sequence
  ENSG00000137413_6 (sequence is synthesized)
caacaaatggaagagacagattcctcggagcaggatgaacagacagacacagagaaccttgctcttcatatcagcatggaggattctggagccgagaaggagaacacctctgtcctgcag

SEQ ID NO: 335848 - DNA, 120 bp, Artificial Sequence
  ENSG00000137413_7 (sequence is synthesized)
cagaacccctccttgtcgggtagccggaatggggaggagaacatcatcgataacccttatctgcggccggtgaagaagcccaagatccgcaggaagaagtccctctcctgagctgagaag

SEQ ID NO: 335849 - DNA, 120 bp, Artificial Sequence
  ENSG00000137413_8 (sequence is synthesized)
gaaacctggcttgtacaggggcgcagattccaccctcccggggagttaaagccactcaagggaagaagagggtgacctcctcatggccaagccgaggctgcagggtgtgatcggacatga

SEQ ID NO: 335850 - DNA, 120 bp, Artificial Sequence
  ENSG00000137413_9 (sequence is synthesized)
ttttcatggcaaaccgtcttattaagatgacctattttcactggatgtttgggttgaggaagatatgaacagaataatgagaatttttttttttattttgagatggagtcttactctatc

SEQ ID NO: 335851 - DNA, 77 bp, Artificial Sequence
  ENSG00000137413_10 (sequence is synthesized)
tcagctcactgcagtctcagcaaccctgggtgaggcaagcgccaccatgctggctaatttttgtattttgagtagag

SEQ ID NO: 335852 - DNA, 120 bp, Artificial Sequence
  ENSG00000137413_11 (sequence is synthesized)
agattacaggcgtgagccaccgcaccccaccagagactttcttaatcaatcaggctatgtggtggggcatagcagcagccagtgacttcgttcattatcacaggatttgattcctttgaa

SEQ ID NO: 335853 - DNA, 120 bp, Artificial Sequence
  ENSG00000137413_12 (sequence is synthesized)
tgaaactcaagagaccagggaaagtgacaggaaggaaagggctctttgctgctgtgcttattacaaggaagactgtttgtccagcgtgtatttcaggatatctggatcccttttattgac

SEQ ID NO: 335854 - DNA, 120 bp, Artificial Sequence
  ENSG00000137413_13 (sequence is synthesized)
tcacaatttgtggcaccactttctcatcccagaacttcattcttatttctctcctcatctggcctcccaagtgctccgttgagctgatgaaaagttctttgtactccctcaacgtgtcgg

SEQ ID NO: 335855 - DNA, 120 bp, Artificial Sequence
  ENSG00000137413_14 (sequence is synthesized)
aaacaggaggccacacagcacagctttgtttggggtgggcaggagtcaggagtcttgagcagatgcatcactgtgaagaagaacgacatgtcggggctgcacctgtcctcccgtcggcat

SEQ ID NO: 335856 - DNA, 120 bp, Artificial Sequence
  ENSG00000137413_15 (sequence is synthesized)
ttgacgaaagctccctgaagcggggcagcactctcctcctgagagatttaccatttattgcccctgtgaggaatgtgtgcttgggaactgccaagtcttaccccttctggaagaagaggt

SEQ ID NO: 335857 - DNA, 120 bp, Artificial Sequence
  ENSG00000137413_16 (sequence is synthesized)
aggttttctctgacaagagcctagagcgtcggctctattatgctgggacttgacagaggagccatggggtttaaacagtaggaaagaggggctacgcgcagtggctcacgcctgtaatcc

SEQ ID NO: 335858 - DNA, 120 bp, Artificial Sequence
  ENSG00000137413_17 (sequence is synthesized)
ccatttcaaaaaaataaaaaaaggataaagtaaacaataggaaaggatttggtggggtgagggtggggtgttgagggctgggcctcatcttgtattctgaaagctgagaaacggctggtc

SEQ ID NO: 335859 - DNA, 120 bp, Artificial Sequence
  ENSG00000137413_18 (sequence is synthesized)
agctggaaggctggtggatgggcaggagtgagccaagctgaggcgttctgcaagaagcaggtctgagtctgtccaaccaatttgtatcctgtggggagaacaacttcattcttaacatac

SEQ ID NO: 335860 - DNA, 120 bp, Artificial Sequence
  ENSG00000137413_19 (sequence is synthesized)
cctacaaaccagaaaacaagtttttaaggaagatgctgggcatgctgatagcttttctggtctcctaaggaagagtttttaaaactaaatccaaggaagaaaaatgtaacaacacgtgga

SEQ ID NO: 335861 - DNA, 120 bp, Artificial Sequence
  ENSG00000137413_20 (sequence is synthesized)
agtgaacactggatgaataagcttgtttcccaaattagaatcctaacgtccatatttagcttcatgtattcccctttggcttccacagttcaactccttttattttgagacagggtctcg

SEQ ID NO: 335862 - DNA, 120 bp, Artificial Sequence
  ENSG00000137413_21 (sequence is synthesized)
gacagggtctcgctgtgtcgccccagctggagtatagtggcactacctcggctcactgcaacctccactccccgggttcaagcaattctcagagtagctgggattacagatgcccgccac

SEQ ID NO: 335863 - DNA, 65 bp, Artificial Sequence
  ENSG00000137413_22 (sequence is synthesized)
gctgggattacagatgcccgccaccacatctggctaattttttttttttttttttagtagacacg

SEQ ID NO: 335864 - DNA, 120 bp, Artificial Sequence
  ENSG00000137413_23 (sequence is synthesized)
acagcaggctccatgttcttctggcctcactgtactgtgtaaggaaagagctgcttgtcaggaacggaagaggggacgctagtaaaaaaaaaaaaattggattccccaactggactaaat

SEQ ID NO: 335865 - DNA, 120 bp, Artificial Sequence
  ENSG00000137413_24 (sequence is synthesized)
aggagtttttcaggtttgtagtaacgtgaaactctcctagatcgaagcagttagactggcctatgtggccttctcagggtttgtgattcagttcttagcgattcttggcctgataagttt

SEQ ID NO: 335866 - DNA, 120 bp, Artificial Sequence
  ENSG00000137413_25 (sequence is synthesized)
atgaacacagccccacattcaagccgtggccaatcccagctgttctcactgctcttgggaggtgttgtcccagtcagtgtttctgcagcttccatttgttgttgttatccagtgtaagca

SEQ ID NO: 335867 - DNA, 120 bp, Artificial Sequence
  ENSG00000137413_26 (sequence is synthesized)
ccagtgtaagcacctgttgaatgcagatgtgctgagttagaggtgggatttggaaaagggctgctatttctgctgttgagatttcagaggctatactctttttttttcttttcttttttt

SEQ ID NO: 335868 - DNA, 64 bp, Artificial Sequence
  ENSG00000137413_27 (sequence is synthesized)
attacaggcacctaccacaattcgtggtctcgaacacctgacctcagatgatccacccacctcg

SEQ ID NO: 335869 - DNA, 120 bp, Artificial Sequence
  ENSG00000137413_28 (sequence is synthesized)
aggcatgagccaccgcgcctggcctcagaggctatactcttataattttgttctgaggggagacagggaaagggttagacaacttgaaacattgaccctgtataaaaatgcaaaattctc

SEQ ID NO: 335870 - DNA, 120 bp, Artificial Sequence
  ENSG00000137413_29 (sequence is synthesized)
tataaaaatgcaaaattctcaatgtgtatttataaatttctattttttataactttatgggacttcttagaggccaaaagtagtaaacatgcagattaaaaatgtttatgaaaatctcaa

SEQ ID NO: 335871 - DNA, 120 bp, Artificial Sequence
  ENSG00000137413_30 (sequence is synthesized)
taaaaattcataataaaaactttgtaaataaatagaactgtaagctttgaacttaatttgtgttcaaaagttaacagcaatgtggacaaataagtcaggcttagcccttgtgttggccta

SEQ ID NO: 335872 - DNA, 120 bp, Artificial Sequence
  ENSG00000137413_31 (sequence is synthesized)
agcacacctgggaacttagtaaaacttttattttggaaattttcaaatacaaaattagagagcaaaatatatgaacccctgtatatgcctcatcaagcttccacacttgtcagtagcttg

SEQ ID NO: 335873 - DNA, 120 bp, Artificial Sequence
  ENSG00000137413_32 (sequence is synthesized)
atgcctcatcaagcttccacacttgtcagtagcttgttgattctgtttcatctgtttctcccactttttgtcctttattttctttcctcctggagtgtgtgtgtgtgtgtgtgtgcgtgt

SEQ ID NO: 335874 - DNA, 120 bp, Artificial Sequence
  ENSG00000137413_33 (sequence is synthesized)
gtgtgtgtgcgtgtgagacagagtttcgcgctggagtgcaatggtgcaatcttggcccactgcaacttctgcctcccgggttcaaatgattctactgcctcagcttcctgagtagctggg

SEQ ID NO: 335875 - DNA, 78 bp, Artificial Sequence
  ENSG00000137413_34 (sequence is synthesized)
ggagtctcgctctgtcgcccaggctggattgcagtggattgtcaagattgcagtggtgcaatctcagctcaccgcaag

SEQ ID NO: 335876 - DNA, 120 bp, Artificial Sequence
  ENSG00000137413_35 (sequence is synthesized)
cctcaggtgatcacctgcctcagcctcctaaagtgctgaggttacaggcgtgagcccccgcgcctggctcttctggagtatttttaaatgcaaactccagacctgtgtcatttaatctaa

SEQ ID NO: 335877 - DNA, 120 bp, Artificial Sequence
  ENSG00000137413_36 (sequence is synthesized)
ccagacctgtgtcatttaatctaaatgtgtctatacgtatctctgattgatctttctttaaattttaattttggaataattatagattcacaagatgttgcaaaaaatgttgagagagat

SEQ ID NO: 335878 - DNA, 120 bp, Artificial Sequence
  ENSG00000137413_37 (sequence is synthesized)
cctatgtacccatcacccactttctcccagtggtagcatcttgcataactgtggtgcaatatcaaaacccttgcattcagtttcagtgtacaatgtagatggtatattagtacaatgcat

SEQ ID NO: 335879 - DNA, 120 bp, Artificial Sequence
  ENSG00000137413_38 (sequence is synthesized)
agagcttatttagttttcaccatgtgcacgtgtgtgttatgtgtgtgttgttccgtgcagtttcatcgtgtagatttgtgtaaccaccagcacacaaatggtgaagacacagaaccattg

SEQ ID NO: 335880 - DNA, 120 bp, Artificial Sequence
  ENSG00000137413_39 (sequence is synthesized)
catcagtacagttctccctcatgctgtctctttgcaatcacatccacctctctgctcttccacttctctcctggcagccactactctgttctctatctctaatgttattgaaagaatgtt

SEQ ID NO: 335881 - DNA, 90 bp, Artificial Sequence
  ENSG00000137413_40 (sequence is synthesized)
agtatgtgacatcgcctaggctggatggagtgcagtggagcgatcccagctcactgcaactcctccacctcccgggttcaagagattctc

SEQ ID NO: 335882 - DNA, 120 bp, Artificial Sequence
  ENSG00000137413_41 (sequence is synthesized)
cctcccaaagtgctaggattataggtatgacccaccgcacctggccgagtatgggactttttgacgttggctttttcagttctgcataattctcttgaggtccatctaggtggttgtgtg

SEQ ID NO: 335883 - DNA, 120 bp, Artificial Sequence
  ENSG00000137413_42 (sequence is synthesized)
tctgcataattctcttgaggtccatctaggtggttgtgtgtatcagtagttcctttctttttattgctgagtagcatggaggcaccatagtttaacacagtttctttaaccattcacgca

SEQ ID NO: 335884 - DNA, 120 bp, Artificial Sequence
  ENSG00000137413_43 (sequence is synthesized)
ttgagacaaaaaaagttcttaattctgcgaacatcaacttcctgtgcccaggtgcaagtgcgggggcagctggcccagggtagagctttaccatggaccctggcgctcctggaaaaaaat

SEQ ID NO: 335885 - DNA, 120 bp, Artificial Sequence
  ENSG00000137413_44 (sequence is synthesized)
tcaaggtatttttcctcctcttggagcgtgtggcctacctcatctccatttgattactagcttttctttttctcctttgttaaacagttatttaattttgaagagataatatatgtatac

SEQ ID NO: 335886 - DNA, 120 bp, Artificial Sequence
  ENSG00000137413_45 (sequence is synthesized)
agtataaaatttaaaagacagaaaaagatataagtgataacaaaatatcttcctcctcccctgtttcccagaggctcagacctcatccctggcagctgctattatgttactgtcaatatg

SEQ ID NO: 335887 - DNA, 120 bp, Artificial Sequence
  ENSG00000137413_46 (sequence is synthesized)
accttatgtattcttccagaagtattctgtgcatcaaatgcaaatacttatattttctacttctcagtgtattttttggtgatgttccatgtcagtaataaagagcttctctgtttcgtg

SEQ ID NO: 335888 - DNA, 120 bp, Artificial Sequence
  ENSG00000137413_47 (sequence is synthesized)
ggaagaagccagatacattctagagaattgtgagactttgccctaagctgccaagtgctccccaaggagatcggtcaccaggagagcagccacaaaggtcaagaaagacacacacggaag

SEQ ID NO: 335889 - DNA, 120 bp, Artificial Sequence
  ENSG00000137413_48 (sequence is synthesized)
caaacccaggctctgtgctccttccagcccttgctggtgcagatgctaccccacaagcttgtcagatcgcccaggtgacgggccaggcgcagccatcgggaaggtcattcagccaaccca

SEQ ID NO: 335890 - DNA, 120 bp, Artificial Sequence
  ENSG00000137413_49 (sequence is synthesized)
gaggatgtagaccctgtcctcaagaagtgcagggcgagttctgccgtgccctctgaaatactctccctcctctcagagccctccctcgagagcctgagtgcaccatgtcttgtggcctcg

SEQ ID NO: 335891 - DNA, 120 bp, Artificial Sequence
  ENSG00000137413_50 (sequence is synthesized)
gagtcaaccccaacatcagttctgtgccctgctttgtgatagtgtttgagaggatttaagaaacaaacttttttcttaagaggggagaaaaaaaattttttttaatgtaaaaagttgaga

SEQ ID NO: 335892 - DNA, 68 bp, Artificial Sequence
  ENSG00000137413_51 (sequence is synthesized)
aggggagaaaaaaaattttttttaatgtaaaaagttgagaaaagaaaacagcacaatgcgggtggatc

SEQ ID NO: 335893 - DNA, 120 bp, Artificial Sequence
  ENSG00000137413_52 (sequence is synthesized)
cttgttgtgggctctcttccaatgtttggggctacctacaatataatctttatttgggctagtctgattagcatgtgaaattcagtcaccaaaaggtaaaccatctttgagatattgctg

SEQ ID NO: 335894 - DNA, 120 bp, Artificial Sequence
  ENSG00000137413_53 (sequence is synthesized)
tgtttcttgtgttctagccccagaagggcaaatgatgctgcttggaaaaatgaaagtttttgttcttcttagattaagggttggtaaattgtggcctatgggccaaatgcagcctgcctc

SEQ ID NO: 335895 - DNA, 75 bp, Artificial Sequence
  ENSG00000137413_54 (sequence is synthesized)
gattctggagccgagaaggagaacacctctgtcctgcagcagaacccctccttgtcgggtagccggaatggggag

SEQ ID NO: 335896 - DNA, 120 bp, Artificial Sequence
  ENSG00000137413_55 (sequence is synthesized)
ttttatcttttgccctcctctcctcgcggtcacctcttgttactgttttcattttccctttcaatgaaatggtgtgaagatgggaggcacaagagagggatcctgttttttctgcgggac

SEQ ID NO: 335897 - DNA, 120 bp, Artificial Sequence
  ENSG00000137413_56 (sequence is synthesized)
acgtcttaatcccatcatgcgtgtttcttcagctatgtattctaataatctgctaaagtagaaagtaaaagacctgctattttatctcattgggactgtacgttttagagatcgggaagt

SEQ ID NO: 335898 - DNA, 120 bp, Artificial Sequence
  ENSG00000137413_57 (sequence is synthesized)
ctctggaactctggggtctggtcagggagtgtgtcctcagcttgtctggaggaggcctgcatccctcctgagctcttggaggtgcccaggaaccctgcttctcctcacagggcctggcca

SEQ ID NO: 335899 - DNA, 120 bp, Artificial Sequence
  ENSG00000137413_58 (sequence is synthesized)
tatagccagctccaacccaaagccctgcacagtgcctcacccactcccttctcctggtctctcctcaaaagaattttacatgattttaaaataataatagctttcatttacatagtgctt

SEQ ID NO: 335900 - DNA, 120 bp, Artificial Sequence
  ENSG00000137413_59 (sequence is synthesized)
acatttatatagcacttactatgtgcgatgtactaatttaagtactttatattaactcatataataaatggacacaacacaaaactcaaaaggtacaaaagaataaaacagttaaaaact

SEQ ID NO: 335901 - DNA, 82 bp, Artificial Sequence
  ENSG00000137413_60 (sequence is synthesized)
gcccagctaatttttgtatcttctgtagagacaagatacaagcagttcacccaggcatgggtacatactccagtatatgttt

SEQ ID NO: 335902 - DNA, 120 bp, Artificial Sequence
  ENSG00000137413_61 (sequence is synthesized)
cagttcacccaggcatgggtacatactccagtatatgtttgcttatttatgtgaatattataatgtaacattgtacaaaataatgtacattaaaagataatcttacccttttaaaatgtt

SEQ ID NO: 335903 - DNA, 120 bp, Artificial Sequence
  ENSG00000137413_62 (sequence is synthesized)
caggaaacctataaccttttctagcgggagcaattgcctctgctttttattttttgaaatcatagggtttttgtttgttttgttgttcttgtttgttttgttgttgttgttattttatag

SEQ ID NO: 335904 - DNA, 120 bp, Artificial Sequence
  ENSG00000137413_63 (sequence is synthesized)
ttgttgttgttattttatagagatggggacaggttttttgtctttctgtggtgctcaagctggtcttgaactcctagccttaagtagtctttgcaccttggcctcccagagtgctgggat

SEQ ID NO: 335905 - DNA, 120 bp, Artificial Sequence
  ENSG00000137413_64 (sequence is synthesized)
agcacggagtcagttcctactgactgtcacgtggcagagtccagtccaaaagcttgttgatgaaagagtggttcaaaactcagaatgtggccgggcacattggctcacacctgtaatccc

SEQ ID NO: 335906 - DNA, 120 bp, Artificial Sequence
  ENSG00000137414_0 (sequence is synthesized)
gttgacgcctgcggttgctgcggtggtgacggggctgttggggaggggccattgggggagggaaacggagcagtgacaggtatcccagagggtgctgctgaggcgacgatggccgagggg

SEQ ID NO: 335907 - DNA, 120 bp, Artificial Sequence
  ENSG00000137414_1 (sequence is synthesized)
cccgaggaagcccgaggccaccctcccgggcaggacgatggcggaggggaccacgagcccgtcccttccctgagaggccctcctaccaccgccgtcccatgcccccgcgacgacccccag

SEQ ID NO: 335908 - DNA, 120 bp, Artificial Sequence
  ENSG00000137414_2 (sequence is synthesized)
ccggcccacagccccgggcctcgcggctgccgccgcagccgacaaattggagccgccgcgcgagctcaggaagcgcggggaggcggcctccggctccggtgcagagctgcaggagcaggc

SEQ ID NO: 335909 - DNA, 120 bp, Artificial Sequence
  ENSG00000137414_3 (sequence is synthesized)
gcagagctgcaggagcaggcgggctgcgaggcgcccgaagccgcggcgccacgagagagaccagctcggctgagcgcccgcgagtactcccggcaagtgcacgagtggctgtggcagtcc

SEQ ID NO: 335910 - DNA, 120 bp, Artificial Sequence
  ENSG00000137414_4 (sequence is synthesized)
tactgcggctacctcacctggcacagcggcctggccgccttcccagcctactgcagcccccagccctccccgcagagcttcccttcgggcggcgctgcagtcccccaggccgcggcgccg

SEQ ID NO: 335911 - DNA, 120 bp, Artificial Sequence
  ENSG00000137414_5 (sequence is synthesized)
ccgcccccgcagctgggctattacaaccccttctacttcctgagccccggggccgcggggcctgacccgcggacagctgccggcatcagcacccctgctccagtcgcgggcctgggaccc

SEQ ID NO: 335912 - DNA, 120 bp, Artificial Sequence
  ENSG00000137414_6 (sequence is synthesized)
cgggctcctcacgtgcaggcgtcggtccgggccactccagtgacgagggtaggatccgcagccccttcgcgaagcccgagcgagaccgggcgacaggcaggcagagaatatgttattcca

SEQ ID NO: 335913 - DNA, 120 bp, Artificial Sequence
  ENSG00000137414_7 (sequence is synthesized)
tccttggcccacagatttatggcagagatggtggatttctttattctcttctttataaaagcaaccattgtcttaagcattatgcacctcagtgggataaaggatatctctaagtttgct

SEQ ID NO: 335914 - DNA, 120 bp, Artificial Sequence
  ENSG00000137414_8 (sequence is synthesized)
atgcattatataatagaagaaatagatgaagacacatcaatggaagacttgcagaaaatgatggttgtggcacttatatacagattattagtttgtttctatgagataatttgcatttgg

SEQ ID NO: 335915 - DNA, 120 bp, Artificial Sequence
  ENSG00000137414_9 (sequence is synthesized)
ggagcaggtggagctaccccagggaagttcctgctggggcttcgagttgtgacatgtgatacatcagtgcttattgcaccaagtcgggttttagtgattccttcctcaaatgttagcatt

SEQ ID NO: 335916 - DNA, 120 bp, Artificial Sequence
  ENSG00000137414_10 (sequence is synthesized)
acaacgtccactatccgagctttgatcaagaatttttcaattgcttcttttttccctgctttcatcacactgctgttttttcagcataatcgaacagcttatgacattgtagcaggaacc

SEQ ID NO: 335917 - DNA, 120 bp, Artificial Sequence
  ENSG00000137414_11 (sequence is synthesized)
attgtggtaaaaagaaatggggtcagatgatgccccccaaaaccctgatttccacacactaagactaaattatgtatcaaggccatcagtatccctgggttacactaattgatgatttag

SEQ ID NO: 335918 - DNA, 120 bp, Artificial Sequence
  ENSG00000137414_12 (sequence is synthesized)
aaattaaagcagtcactccagtgtgatgcaggtgactactctgaaagtattgattatacttgaatgccaaagaacttgtccagaagaaaaacctgttaaattcaagtattaaaattttta

SEQ ID NO: 335919 - DNA, 120 bp, Artificial Sequence
  ENSG00000137414_13 (sequence is synthesized)
gatcaaaaaggcaaatgattttataaacaatggacaatatatactttcttaagatctaaggtactttcttaagatctaagaatttgctgaaagcattttcagctttgaaatctccaaatg

SEQ ID NO: 335920 - DNA, 120 bp, Artificial Sequence
  ENSG00000137414_14 (sequence is synthesized)
aaactttaaaatttattttggtttatcccaaaataatggaaaatgtccagttgtgttttgtaaacacctatgtaactcatcttttagtttacacttcctggggaaattgtctttggtgtt

SEQ ID NO: 335921 - DNA, 120 bp, Artificial Sequence
  ENSG00000137414_15 (sequence is synthesized)
tagaggagggaatgagaacacaaattggataatccactgtctcccatcccaggaggtggtgagttggctacaagagaaagggacaagtgaggcaggcctagcagttcccttacctgaagt

SEQ ID NO: 335922 - DNA, 120 bp, Artificial Sequence
  ENSG00000137414_16 (sequence is synthesized)
tttcaaatccatactgcagttccctctcgtaatgatgtaactttacaactattcttaatgcttgaacatgtatttaggggcaagtttctcatgatgatgaaaaagtatcaagtcatattg

SEQ ID NO: 335923 - DNA, 120 bp, Artificial Sequence
  ENSG00000137414_17 (sequence is synthesized)
ctatgttaattggtttttttttttaaaaggtaagttagtgattactgttaatggtgggggagtaagttttcactgtaaattgaacttataatttatgtgcaagtgttttcagtgccctga

SEQ ID NO: 335924 - DNA, 120 bp, Artificial Sequence
  ENSG00000137414_18 (sequence is synthesized)
atcaaactataaatgtggggagaaatcacctccatcaaacagttgcatatttactgtaaaagtattcccagtatgtgtgcagcatgaagaaagtattagtgcttctcagtgttctcagtg

SEQ ID NO: 335925 - DNA, 120 bp, Artificial Sequence
  ENSG00000137414_19 (sequence is synthesized)
ttttatatagttctatgactgttgaaacatcaaggagttaaaaaaatcttaatatttcatgattaactctaagtactattaattaatagcttgcgaaatattagcaattttcccattatg

SEQ ID NO: 335926 - DNA, 120 bp, Artificial Sequence
  ENSG00000137414_20 (sequence is synthesized)
gactattctctctaaagcaagagagactagcattcccagacatcattctagggtctttaagctcattttgggtctgctaaagtttggggggaaatgttacgcaaagtgatactgtgtatg

SEQ ID NO: 335927 - DNA, 120 bp, Artificial Sequence
  ENSG00000137414_21 (sequence is synthesized)
ttgccattttgctttattcttctgttgaagcaaaattgtggggttttattatgtgtgtgtgcttttcctagatgtcccagttagctgtgctgagatatacctgtactatttatggtttaa

SEQ ID NO: 335928 - DNA, 120 bp, Artificial Sequence
  ENSG00000137414_22 (sequence is synthesized)
gttttgattcttaggtattttctccagctctgacattgttttccaaagacacactaaactgcattgcacagttcaaaatttgattacttaagggatcaatctaggtggtgttcttggtct

SEQ ID NO: 335929 - DNA, 120 bp, Artificial Sequence
  ENSG00000137414_23 (sequence is synthesized)
taaatttaacagcaaacacagcacatatctattatcactatattaattttcaaaggtttttctttgacgtttaaaactgtgacaacagatattcacatttgattatagaaacttaatgtc

SEQ ID NO: 335930 - DNA, 120 bp, Artificial Sequence
  ENSG00000137414_24 (sequence is synthesized)
tattaataattttagtacaaaatttcataaaccgtgtttttcaaaataagtttatgtcaaatccagcttcccagaaacactaataattaagtacatcaatgtactaaataaatcattcag

SEQ ID NO: 335931 - DNA, 120 bp, Artificial Sequence
  ENSG00000137414_25 (sequence is synthesized)
ttgcacccatggggaagattgtgttactgcccttcacagtgaaaaaaagaaaaatctttcatttttaaaattaggagatgttacgtaacttggcactttagtagtgtatacactagcatt

SEQ ID NO: 335932 - DNA, 120 bp, Artificial Sequence
  ENSG00000137414_26 (sequence is synthesized)
agtttatacaccacttttgccgctggggaattcaagttgaaatgtccctcaatcatataggtctggaatacatctttcattcataatttctgctcagataattgaatagtttgccatcga

SEQ ID NO: 335933 - DNA, 120 bp, Artificial Sequence
  ENSG00000137414_27 (sequence is synthesized)
gattattttcatttatactataaaacaaaagcaaactagtccagtttaattttttgtacttagaatattgcacattttctatatatgagttattcagattagtatctatgtaggttcagt

SEQ ID NO: 335934 - DNA, 120 bp, Artificial Sequence
  ENSG00000137414_28 (sequence is synthesized)
cagatccaaccatggattcgaggtattatactgtataaccctacaaaatacatagaagtattatttgccttcataatagaacccaagagtctgtttcaatttatgaattcagtatttgca

SEQ ID NO: 335935 - DNA, 120 bp, Artificial Sequence
  ENSG00000137414_29 (sequence is synthesized)
ccgagattttgattcccaaagtttggaaaaaaatgacaaaacaacgagggaagaaggaaccagaccttagtgccacatatttttctcttggggttgtaaggtagtctcctgctttccaga

SEQ ID NO: 335936 - DNA, 120 bp, Artificial Sequence
  ENSG00000137414_30 (sequence is synthesized)
acactttattatatttcacttatagacctgattttctgtgtcaaagtataattctcatgctgaagctgtagcctaaaaagccaaaagaaagttgtcttcattgtacaaacatattcatca

SEQ ID NO: 335937 - DNA, 120 bp, Artificial Sequence
  ENSG00000137414_31 (sequence is synthesized)
ctttaacaataagggaacaaaatttagtattcaagctgagtgagaatactgtttcaatgagcatgtccctaagataaaccagaattggcagttaatttaggcgtctagaaaatctcagtt

SEQ ID NO: 335938 - DNA, 120 bp, Artificial Sequence
  ENSG00000137414_32 (sequence is synthesized)
cccaccagtaaaattatcctgagtagctaatgcaccttgagaaaaatctggcatactgaataaataacattaacttgggagccaagagctgggtaagccttacctttagactactctgtg

SEQ ID NO: 335939 - DNA, 120 bp, Artificial Sequence
  ENSG00000137414_33 (sequence is synthesized)
actacagaaataaagccagcacttttggaactaataagccttcacttgtcagtatcataaagagtattgcccaactgaactttgctcccactggtttaatagttacttatttctgcctaa

SEQ ID NO: 335940 - DNA, 120 bp, Artificial Sequence
  ENSG00000137414_34 (sequence is synthesized)
gcactcaccttccgattttacccaagtatatatataggatagaaaaaaatgcattatatttgagagctacttcgcccaaattacaaaatgagtgtttttagattcaagtgacagtaaaag

SEQ ID NO: 335941 - DNA, 120 bp, Artificial Sequence
  ENSG00000137414_35 (sequence is synthesized)
gatttgttcccttcagtgacttgagtgttttagttatgcataagtatttctagcaaaggaagggtagaaaggaattgaaaattaatttacactagttgctacttgggaataaagggcttt

SEQ ID NO: 335942 - DNA, 120 bp, Artificial Sequence
  ENSG00000137414_36 (sequence is synthesized)
ttgaggggggtatggatattaaatgttttcgttatatacttatccctattaaaacaggcagttgtttctttgaatatgcctaaataacagtattcttaaaatctgacagacaagtaacat

SEQ ID NO: 335943 - DNA, 120 bp, Artificial Sequence
  ENSG00000137414_37 (sequence is synthesized)
gtcaattacttgatattccttgtctccagtaccacaggccactcttgacatcccatgtttgcctggataaagttcctcatttcaaacagtatacatacttctttgcagttcattatagta

SEQ ID NO: 335944 - DNA, 120 bp, Artificial Sequence
  ENSG00000137414_38 (sequence is synthesized)
aggcttaacctgtaaacagtatctgatggcccacctataaataaaattcagcattctatttttaataatttgtatgccaccaatttgtattatttgtctcaataaatacttagtcatcaa

SEQ ID NO: 335945 - DNA, 120 bp, Artificial Sequence
  ENSG00000137434_0 (sequence is synthesized)
cggttgcttaggggctgtagcgccggcagcgtgcattgttgtgggctgtgtactagtagggtaggagtttttgttcagggaccagcggaacgaggctttctgtcgttaataggtttctgg

SEQ ID NO: 335946 - DNA, 120 bp, Artificial Sequence
  ENSG00000137434_1 (sequence is synthesized)
gtaaatggcccaaccagagagttctgcagattttggcatagctcaacaaaataactattactgctactggcaaagtctcccctctgctattagagtgaagcaggagttccagcccagcca

SEQ ID NO: 335947 - DNA, 120 bp, Artificial Sequence
  ENSG00000137434_2 (sequence is synthesized)
tggtatgcgcgacagcacggctcttaccttctttctggctacagctatggctgtgcagtggatggaaatggaaaggactgtttttctgcgcatgagacccctgaacacacagctggaact

SEQ ID NO: 335948 - DNA, 120 bp, Artificial Sequence
  ENSG00000137434_3 (sequence is synthesized)
ctggttatgcctaaggaaaccacacctctagctgaaaaccaagatgaagacccactagaagatccacatcttcatttgaatattgaggaatcaaaccaagagtttatggtgaaaagtgaa

SEQ ID NO: 335949 - DNA, 120 bp, Artificial Sequence
  ENSG00000137434_4 (sequence is synthesized)
gaactctacgactccctcatgaattgccactggcagcctctggacacagttcactccgaaatcccagatgagaccccgaagtgaagcaaggtgttcattaaactccgcaattatcatact

SEQ ID NO: 335950 - DNA, 120 bp, Artificial Sequence
  ENSG00000137434_5 (sequence is synthesized)
ggccggttgcttaggggctgtagcgccggcagcgtgcattgttgtgggctgtgtactagtagggtaggagtttttgttcagggaccagcggaacgaggctttctgtcgttaataggctat

SEQ ID NO: 335951 - DNA, 120 bp, Artificial Sequence
  ENSG00000137434_6 (sequence is synthesized)
gattttccaagaagagaataagtaaagatgccacatgaggaggttctcactgcaaggagaaaaaaatcgggggcaagcaggcatatctcaggaagtctcccctctgctattagagtgaag

SEQ ID NO: 335952 - DNA, 120 bp, Artificial Sequence
  ENSG00000137434_7 (sequence is synthesized)
atctcaaactcccagatttaagcaattcactggtctcagcttcccaaagtgttggggttacagatccacatcttcatttgaatattgaggaatcaaaccaagagtttatggtgaaaagtg

SEQ ID NO: 335953 - DNA, 120 bp, Artificial Sequence
  ENSG00000137440_0 (sequence is synthesized)
gaatcattgcactccctactagagcggatgtgatgagggaaaaggagaactcagcactttccctgcaggaaccggctccctcggaggggcgtggctgggaggagctgtgagtaacgtgcc

SEQ ID NO: 335954 - DNA, 120 bp, Artificial Sequence
  ENSG00000137440_1 (sequence is synthesized)
acagtgttgtaaaaacccagtgagtgttataaaaacccagtcagcctggctcctgttgaatagtctaccccccttgcactctacctgacacagctgcagcctgcaattcactcgcactgc

SEQ ID NO: 335955 - DNA, 120 bp, Artificial Sequence
  ENSG00000137440_2 (sequence is synthesized)
ctgggattgcactggatccgtgtgctcagaacaaggtgaacgcccagctgcagccatgaagatctgtagcctcaccctgctctccttcctcctactggctgctcaggtgctcctggtgga

SEQ ID NO: 335956 - DNA, 120 bp, Artificial Sequence
  ENSG00000137440_3 (sequence is synthesized)
ggggaaaaaaaaagtgaagaatggacttcacagcaaagtggtctcagaacaaaaggacactctgggcaacacccagattaagcagaaaagcaggcccgggaacaaaggcaagtttgtcac

SEQ ID NO: 335957 - DNA, 120 bp, Artificial Sequence
  ENSG00000137440_4 (sequence is synthesized)
caaagaccaagccaactgcagatgggctgctactgagcaggaggagggcatctctctcaaggttgagtgcactcaattggaccatgaattttcctgtgtctttgctggcaatccaacctc

SEQ ID NO: 335958 - DNA, 120 bp, Artificial Sequence
  ENSG00000137440_5 (sequence is synthesized)
tggaaacaagttgcccggaatctgcgctcacagaaagacatctgtagatattccaagacagctgtgaaaaccagagtgtgcagaaaggattttccagaatccagtcttaagctagtcagc

SEQ ID NO: 335959 - DNA, 120 bp, Artificial Sequence
  ENSG00000137440_6 (sequence is synthesized)
tccactctatttgggaacacaaagcccaggaaggagaaaacagagatgtcccccagggagcacatcaaaggcaaagagaccaccccctctagcctagcagtgacccagaccatggccacc

SEQ ID NO: 335960 - DNA, 120 bp, Artificial Sequence
  ENSG00000137440_7 (sequence is synthesized)
aaagctcccgagtgtgtggaggacccagatatggcaaaccagaggaagactgccctggagttctgtggagagacttggagctctctctgcacattcttcctcagcatagtgcaggacacg

SEQ ID NO: 335961 - DNA, 120 bp, Artificial Sequence
  ENSG00000137440_8 (sequence is synthesized)
tcatgctaatgaggtcaaaagagaacgggttcccttaagagatgtcatgtcgtaagtccctctgtatactttaaagctctctacagtccccccaaaatatgaacttttgtgcttagtgag

SEQ ID NO: 335962 - DNA, 120 bp, Artificial Sequence
  ENSG00000137440_9 (sequence is synthesized)
tgcaacgaaatatttaaacaagttttgtattttttgcttttgtgttttggaatttgccttatttttcttggatgcgatgttcagaggctgtttcctgcagcatgtatttccatggcccac

SEQ ID NO: 335963 - DNA, 120 bp, Artificial Sequence
  ENSG00000137440_10 (sequence is synthesized)
acagctatgtgtttgagcagcgaagagtctttgagctgaatgagccagagtgataatttcagtgcaacgaactttctgctgaattaatggtaataaaactctgggtgtttttcagaaata

SEQ ID NO: 335964 - DNA, 120 bp, Artificial Sequence
  ENSG00000137441_0 (sequence is synthesized)
ctctctcctggtgcagagttgcaagcaagtttatcggagtatcgccatgaagttcgtcccctgcctcctgctggtgaccttgtcctgcctggggactttgggtcaggccccgaggcaaaa

SEQ ID NO: 335965 - DNA, 120 bp, Artificial Sequence
  ENSG00000137441_1 (sequence is synthesized)
gcaaggaagcactggggaggaattccatttccagactggagggagagattcctgcactatgcgtcccagcagcttggggcaaggtgctggagaagtctggcttcgtgtcgactgccgcaa

SEQ ID NO: 335966 - DNA, 120 bp, Artificial Sequence
  ENSG00000137441_2 (sequence is synthesized)
cacagaccagacctactggtgtgagtacagggggcagcccagcatgtgccaggctttcgctgctgaccccaaaccttactggaatcaagccctgcaggagctgaggcgccttcaccatgc

SEQ ID NO: 335967 - DNA, 120 bp, Artificial Sequence
  ENSG00000137441_3 (sequence is synthesized)
gtgccagggggccccggtgcttaggccatccgtgtgcagggaggctggaccccaggcccatatgcagcaggtgacttccagcctcaagggcagcccagagcccaaccagcagcctgaggc

SEQ ID NO: 335968 - DNA, 120 bp, Artificial Sequence
  ENSG00000137441_4 (sequence is synthesized)
gccacagtgaaactcacagaagcaacacagctgggaaaggactcgatggaagagctgggaaaagccaaacccaccacccgacccacagccaaacctacccagcctggacccaggcccgga

SEQ ID NO: 335969 - DNA, 120 bp, Artificial Sequence
  ENSG00000137441_5 (sequence is synthesized)
gggaatgaggaagcaaagaagaaggcctgggaacattgttggaaacccttccaggccctgtgcgcctttctcatcagcttcttccgagggtgacaggtgaaagacccctacagatctgac

SEQ ID NO: 335970 - DNA, 120 bp, Artificial Sequence
  ENSG00000137441_6 (sequence is synthesized)
ctctccctgacagacaaccatctctttttatattatgccgctttcaatccaacgttctcacactggaagaagagagtttctaatcagatgcaacggcccaaattcttgatctgcagcttc

SEQ ID NO: 335971 - DNA, 120 bp, Artificial Sequence
  ENSG00000137441_7 (sequence is synthesized)
tctgaagtttggaaaagaaaccttcctttctggagtttgcagagttcagcaatatgatagggaacaggtgctgatgggcccaagagtgacaagcatacacaactacttattatctgtaga

SEQ ID NO: 335972 - DNA, 120 bp, Artificial Sequence
  ENSG00000137441_8 (sequence is synthesized)
agttttgctttgttgatctgagccttctatgaaagtttaaatatgtaacgcattcatgaatttccagtgttcagtaaatagcagctatgtgtgtgcaaaataaaagaatgatttcagaaa

SEQ ID NO: 335973 - DNA, 120 bp, Artificial Sequence
  ENSG00000137449_0 (sequence is synthesized)
atgagggatttcgggtttggggtgctgcagaccgccccgctccgaagtagcagtcctgggcccctgttctgcggcgaggcgtatggtccttacgccgtggggtccgtcaacccgctgccc

SEQ ID NO: 335974 - DNA, 120 bp, Artificial Sequence
  ENSG00000137449_1 (sequence is synthesized)
gccctccgccacgcccttcggcccactgtcgccaccaccgttgcctgtcaccggcttcttagaggccgcctcccccttctccgtccccctcggcggcggcgcgggcagcccggccgccgc

SEQ ID NO: 335975 - DNA, 120 bp, Artificial Sequence
  ENSG00000137449_2 (sequence is synthesized)
tcctcttcctccccgttcctggcgcatcagcagaccatgcaggatgagctgcttctggggctgacacagcagccggcgcggccgctttcgggggcggcggccacggagaaactccccgac

SEQ ID NO: 335976 - DNA, 120 bp, Artificial Sequence
  ENSG00000137449_3 (sequence is synthesized)
caccaccccggcggcggcacgatcgcgggtgtgacccacctcctcccctcccaggacttcaaaccgagtctgcaccacccctcctcctcctccgcctcctcctgctgctgctgccgcacc

SEQ ID NO: 335977 - DNA, 120 bp, Artificial Sequence
  ENSG00000137449_4 (sequence is synthesized)
tcctccccgcaggacttcagtaagcggcagcagcagcagctgagcagccagaagaggaaagagttcagccctccccaccttccccaccctccggactcgaagccgccgccgccgcctccg

SEQ ID NO: 335978 - DNA, 120 bp, Artificial Sequence
  ENSG00000137449_5 (sequence is synthesized)
ccgctccactgccccggtcggttcagcccgccgccgccgccagccggcccgctcctccagccggcgcagctcgctcagcgccagcagcaacagccgccgcagcagttcagcctcctgcat

SEQ ID NO: 335979 - DNA, 120 bp, Artificial Sequence
  ENSG00000137449_6 (sequence is synthesized)
tcctgcatcagcagcacctctcgccgcaggacttcgccccgcggcagcgtccggcagacctgcccccgctcccgcagctccctccctcgccgcctgcagccccgcggcgccgccacggag

SEQ ID NO: 335980 - DNA, 120 bp, Artificial Sequence
  ENSG00000137449_7 (sequence is synthesized)
agccctcgcaagaccccagccgcgggcgagggcagcgccgccgagtcccccaatgcgggcttggcctcctcgacgccggtgaaccccgcgccgggctccatggagtcccccaaccaccct

SEQ ID NO: 335981 - DNA, 120 bp, Artificial Sequence
  ENSG00000137449_8 (sequence is synthesized)
ctgctcaacagtcccagtaacctcctgcccggaggtgcgcttggcgcgggcgccttcagcagcctgcagagcccggaccttccacacccgggcggcggcggcggcggcgggggcgggggg

SEQ ID NO: 335982 - DNA, 80 bp, Artificial Sequence
  ENSG00000137449_9 (sequence is synthesized)
cccccaggaggcggagggggaggcggctccgcgtcgccgccgccgctgcccggcttcggcaccccctggtcggtgcagac

SEQ ID NO: 335983 - DNA, 80 bp, Artificial Sequence
  ENSG00000137449_10 (sequence is synthesized)
gcccggctcgtctgccaccaccccgggcggcggcagcggcggctcgctcagcgccatgccgccgcccagccccgactcag

SEQ ID NO: 335984 - DNA, 120 bp, Artificial Sequence
  ENSG00000137449_11 (sequence is synthesized)
cccagccccgactcagagaacggcttctaccccgggctgccgtcgtccatgaacccggccttcttccctagcttctcgcccgtgtcgccgcacggctgcactgggctcagcgttccgacg

SEQ ID NO: 335985 - DNA, 120 bp, Artificial Sequence
  ENSG00000137449_12 (sequence is synthesized)
cggcggcggcggcttcggcggccccttctcggctaccgctgtgccccctccgccgccgcccgccatgaatatacctcaacagcagcccccgccgcccgcggcgccgcagcagccgcagag

SEQ ID NO: 335986 - DNA, 120 bp, Artificial Sequence
  ENSG00000137449_13 (sequence is synthesized)
ccgcagagccggaggtcgcccgtcagcccgcagctccagcagcagcaccaggcggcggccgccgccttcctgcagcagaggaactcctataaccaccaccagcctcttctgaaacagtct

SEQ ID NO: 335987 - DNA, 120 bp, Artificial Sequence
  ENSG00000137449_14 (sequence is synthesized)
ccctggagcaaccatcagagcagtggctggggcactggaagtatgtcctggggagcaatgcatggcagagatcatcgtagaaccggaaacatgggaatcccaggaactatgaatcagata

SEQ ID NO: 335988 - DNA, 120 bp, Artificial Sequence
  ENSG00000137449_15 (sequence is synthesized)
tctccattgaagaaaccgttttctggtaatgtcatagcaccaccgaaatttactcgctcaactccatcactgactccaaaatcttggattgaagataatgtgttcagaacagacaacaat

SEQ ID NO: 335989 - DNA, 120 bp, Artificial Sequence
  ENSG00000137449_16 (sequence is synthesized)
agtaatacactcttacccttacaggtgagatctagtttgcagttgccagcttggggctcagattcactccaagatagttggtgcactgcagccggaacatccagaatagaccaggatcga

SEQ ID NO: 335990 - DNA, 120 bp, Artificial Sequence
  ENSG00000137449_17 (sequence is synthesized)
agtagaatgtatgacagtttgaatatgcactctttggaaaattcccttatcgatattatgagagcagagcatgatcctcttaagggtcgattgagctatccacatccaggaactgacaat

SEQ ID NO: 335991 - DNA, 120 bp, Artificial Sequence
  ENSG00000137449_18 (sequence is synthesized)
ctgttgatgttaaatgcaaggagttatgggcgaagacgaggtcgttcttccctctttccaatagatgatggcttgcttgatgatggtcacagtgatcaagttggagttttaaattcaccc

SEQ ID NO: 335992 - DNA, 120 bp, Artificial Sequence
  ENSG00000137449_19 (sequence is synthesized)
acctgttattcagctcaccaaaatggagagcgaatagaacgcttctctcgaaaagtttttgttggtggtcttcctccagatattgatgaagatgaaataactgctagcttcagaagattt

SEQ ID NO: 335993 - DNA, 120 bp, Artificial Sequence
  ENSG00000137449_20 (sequence is synthesized)
gggcctttggtagtagattggcctcataaagcagaaagcaagtcctattttccaccaaaaggctatgcatttcttctctttcaagaagagagctcagttcaggcactcattgatgcttgt

SEQ ID NO: 335994 - DNA, 120 bp, Artificial Sequence
  ENSG00000137449_21 (sequence is synthesized)
attgaagaagatggaaaactctatctgtgtgtttctagccctactatcaaggacaaaccagttcaaatacgtccttggaatttaagtgatagtgattttgtaatggatggttctcagcct

SEQ ID NO: 335995 - DNA, 120 bp, Artificial Sequence
  ENSG00000137449_22 (sequence is synthesized)
ttggatccccgaaaaacaatttttgttggaggtgttcctaggccattaagggctgtggaacttgctatgatcatggaccggctgtatggtggagtttgttatgcaggaattgatacagat

SEQ ID NO: 335996 - DNA, 120 bp, Artificial Sequence
  ENSG00000137449_23 (sequence is synthesized)
cctgagctaaaatacccaaaaggtgctgggcgagttgctttctccaatcagcagagctatattgctgccattagtgctcggtttgttcagcttcagcatggtgatattgataaacgtgtg

SEQ ID NO: 335997 - DNA, 120 bp, Artificial Sequence
  ENSG00000137449_24 (sequence is synthesized)
gaggtaaagccatatgtgctagatgaccagatgtgtgatgaatgccagggcgcacgctgtggtggaaaatttgctccctttttttgtgccaatgtcacttgcctgcagtattactgtgag

SEQ ID NO: 335998 - DNA, 120 bp, Artificial Sequence
  ENSG00000137449_25 (sequence is synthesized)
ttttgttgggcaaatatccactctcgtgctggacgtgagttccataagccattggtaaaggaaggtgctgatcgcccacgtcagatccacttccgctggaactaagaatagcaaactggc

SEQ ID NO: 335999 - DNA, 120 bp, Artificial Sequence
  ENSG00000137449_26 (sequence is synthesized)
ctctgtttaacaaggaaagaaagggtgcatgtggcttactgtgtctgaagatactgacatgcagaagaaataagtgcattcttctgcttttcaccccagctatcaatacatgcatcttta

SEQ ID NO: 336000 - DNA, 120 bp, Artificial Sequence
  ENSG00000137449_27 (sequence is synthesized)
tcagcagccaaaacactacaagcctcttgtttttcaccaaaaccctacatctcaggcttactaatttttgtgatattttcatgttcaaataaaatgtttttttgtattttctccaagtta

SEQ ID NO: 336001 - DNA, 120 bp, Artificial Sequence
  ENSG00000137449_28 (sequence is synthesized)
tgttttgcgtaggggcaacacagtctgctgctatatagtgggggaagcgtgcacttatttctaaacatgggtttttaacttcaagatctgccccagtaatttaccaaaggtagcaaaata

SEQ ID NO: 336002 - DNA, 120 bp, Artificial Sequence
  ENSG00000137449_29 (sequence is synthesized)
atagtgaagatggaatatgtctgctacaaatgcttatttttattgttgctattttcagtgtatacataaactaaaaattagggttgatttttttgctctccattttgacttgcaagaaat

SEQ ID NO: 336003 - DNA, 120 bp, Artificial Sequence
  ENSG00000137449_30 (sequence is synthesized)
aatacctcaagataatctgatttattagctatttttaaacatttttaatcacaagctgtattagctttgctgctatataggtgttatgtgtaaatgccacctattaatacgggactgaaa

SEQ ID NO: 336004 - DNA, 120 bp, Artificial Sequence
  ENSG00000137449_31 (sequence is synthesized)
acgttagagacacactgcattgcagataaaatgcaggcagcacaatatggcctaaactgccatagttttagaatgtgaaaaaaatgcatgtttacttacctgtatacaccatatgcatgc

SEQ ID NO: 336005 - DNA, 120 bp, Artificial Sequence
  ENSG00000137449_32 (sequence is synthesized)
actagaattattaactaacgaggtgaggtattgcaaatgttcaaaaaagctctcttgaatctaggtagcatgaacaaattataaaatttgtttaaaaaagcaaacttgcatgcattattg

SEQ ID NO: 336006 - DNA, 120 bp, Artificial Sequence
  ENSG00000137449_33 (sequence is synthesized)
tgacttcaagtttaaaaaatcgtcttacatgtgtacaatatgcaaattagttttagattagagagtgcagccattttgtgatctggtcagtagtggaattcgattttatgcagactggat

SEQ ID NO: 336007 - DNA, 120 bp, Artificial Sequence
  ENSG00000137449_34 (sequence is synthesized)
gtaatatttgtaatccctgtgcaattttgtgacgtgcggttctaattcatgtgcagtgatatagtatagataaaagaatgagtaaaagaaaatacaagaattctaaagaaagttggtttt

SEQ ID NO: 336008 - DNA, 120 bp, Artificial Sequence
  ENSG00000137449_35 (sequence is synthesized)
agcccctttgatagtccatggttaagacatcctttataaaccaaagatggccagcacactgctaaccagtcaccaaatgtaagacccataagaaacccatatttaaaaatctgaattttt

SEQ ID NO: 336009 - DNA, 120 bp, Artificial Sequence
  ENSG00000137449_36 (sequence is synthesized)
tagaagaatgcaaaactttagtaaaccctaagtaaagtcaaaatggagaaggggaaatatacagatggctagttgcataaaattaaattttacctttataagacaatggtgaaatctggc

SEQ ID NO: 336010 - DNA, 120 bp, Artificial Sequence
  ENSG00000137449_37 (sequence is synthesized)
ttgaacttgcttatgtgtttaacctataaatattggggtcttctgtctaaactggggtcactgttgcatggaacattgttcttaatagttgagaattgcttttttgaaaattttcatgaa

SEQ ID NO: 336011 - DNA, 120 bp, Artificial Sequence
  ENSG00000137449_38 (sequence is synthesized)
ggaattttggtaatgactttgcttgcaggttttttggggtgttttgagaaagtggcatggaaacatgcagtagttaatgagtttctcttggtactgaacactattagaatatcattagtg

SEQ ID NO: 336012 - DNA, 120 bp, Artificial Sequence
  ENSG00000137449_39 (sequence is synthesized)
atattttttctctttagagcatttttaatgcaactagcccctatattttaatgtaagagttactctgcaatctaagcaaagcacccaacaatggtaaatgttttttaaaaatgcagaact

SEQ ID NO: 336013 - DNA, 120 bp, Artificial Sequence
  ENSG00000137449_40 (sequence is synthesized)
aagatttttgactctaaagagagaaaattacaagggtgttgccttatagcaaacccttgggacaatccttcatgtgagcaaagtgttgatcttaatattggttgtctgtggtgtgctttt

SEQ ID NO: 336014 - DNA, 120 bp, Artificial Sequence
  ENSG00000137449_41 (sequence is synthesized)
ttgtactgtaaaaatatgtggttcatgtctaactctgctgttttattgtggttgtggttcaagtttttaatgtttaaagttgatgctgttttcagaagagctttttactaatttatttgt

SEQ ID NO: 336015 - DNA, 120 bp, Artificial Sequence
  ENSG00000137449_42 (sequence is synthesized)
cagtgttccctatttgttacttaaccatgatcctccagattttttggagtattcttttctaaccttaaccctgccaaaccttgatccattttgacatttgttatgcactatttttatatc

SEQ ID NO: 336016 - DNA, 120 bp, Artificial Sequence
  ENSG00000137449_43 (sequence is synthesized)
tctgtgagagatttttccaacagtcagctattttatggcacactttttttgactgatgacatctcctttgctatacctcaatttttggaatttagagaagaaatcagtagttttgcaatg

SEQ ID NO: 336017 - DNA, 120 bp, Artificial Sequence
  ENSG00000137449_44 (sequence is synthesized)
ttgcaatgttaattatttagatatttaatttcgcagatttttaaactttattttcataatttctgcttaatgtttaaaattgaagagccttttcatgtattaaataatgaacacaaatta

SEQ ID NO: 336018 - DNA, 120 bp, Artificial Sequence
  ENSG00000137449_45 (sequence is synthesized)
aaataattggagatgttgaaaatcattttcccttcttaaacagaaataaatatttggaatgaaggggaatgtactagaacaccctttttgccacgggtaaaaataacagaaatgtatggt

SEQ ID NO: 336019 - DNA, 120 bp, Artificial Sequence
  ENSG00000137449_46 (sequence is synthesized)
ttgttttaccttcatttctgtacaagtaaagcttattagtctaatgttttgttcctttcccacctcacccctacctcttttgttttgttttgtttttgccctttatgtactacattctta

SEQ ID NO: 336020 - DNA, 120 bp, Artificial Sequence
  ENSG00000137449_47 (sequence is synthesized)
taaacactgtattggaggtttttttttaatttacagatcatatttattttactatttttgtagaaaattattaattttgattgtatttttgtattttaaaagcttcttcacttgtgttcc

SEQ ID NO: 336021 - DNA, 120 bp, Artificial Sequence
  ENSG00000137449_48 (sequence is synthesized)
cacttgtgttccctaaatattcatattgctgcccaaaagtatgactgtggaggaaaaaaaaatactttaaaaatccacactttttgttaagaaggaaacatttagcatttatatatttgt

SEQ ID NO: 336022 - DNA, 120 bp, Artificial Sequence
  ENSG00000137449_49 (sequence is synthesized)
gtatggaaaacacttgatattttatccctgttgcatctggctgcacagagcctctcctcaaagatgctacaaaacttgaatataacacattttggaaggctgactaacctcgattctgtg

SEQ ID NO: 336023 - DNA, 120 bp, Artificial Sequence
  ENSG00000137449_50 (sequence is synthesized)
ttgtgatgtgcaatactgtttctaatgtttgtataaaaaaaaacagtgtaaacctttttaatgcaaatttatttttttcattgcatattttgcagattttatccacagtgtcatttttta

SEQ ID NO: 336024 - DNA, 120 bp, Artificial Sequence
  ENSG00000137449_51 (sequence is synthesized)
ctgtcagaaaagataccccttttgtcattgcaactattttttaaatccagaaatctttgtactgatgtaaatgattgtagttattttggatagtgttttgctaacaaaaggagagacttt

SEQ ID NO: 336025 - DNA, 120 bp, Artificial Sequence
  ENSG00000137449_52 (sequence is synthesized)
tttgctaacaaaaggagagacttttttcatgcatatttctattttgtttttttgggttttattttattttaatagtagtaaaatacttggaataatttttcatattcttgtcattaatat

SEQ ID NO: 336026 - DNA, 120 bp, Artificial Sequence
  ENSG00000137449_53 (sequence is synthesized)
atataattttatgacactaattgctaaagtttattttatgttgaattatttttggagctgaaatctttgtaatattaaagcaactagtttctaattcccagtttctgtatagaatcgcac

SEQ ID NO: 336027 - DNA, 120 bp, Artificial Sequence
  ENSG00000137449_54 (sequence is synthesized)
aagtggtttatggagtgtttggattgtaattataaatggttctttgatatgcaaattaatattttcagttgattttattttatattcctaatggggtgttaaagccgttttttatttttt

SEQ ID NO: 336028 - DNA, 120 bp, Artificial Sequence
  ENSG00000137449_55 (sequence is synthesized)
tctaaataaaaagagaacccatgcttttatggacactaggtaaacaccttcagcttaaatttttcgttaaatattttagtttattttattgttatcttccaggtgtctaaatctccagtc

SEQ ID NO: 336029 - DNA, 120 bp, Artificial Sequence
  ENSG00000137449_56 (sequence is synthesized)
tgtctgttgtactggtaatttaactctgtaatggaatagtttgctgccaactatttatattaagtaatttttaaatatttgtaatattgttgactgactaataaactattaagttattgg

SEQ ID NO: 336030 - DNA, 120 bp, Artificial Sequence
  ENSG00000137449_57 (sequence is synthesized)
tacaccaatttgcttatcttactagtttttatatgaaagtgaaacctaagtagcacctatatccaatataaaactctcttacacatttattaatgagaatctttgtttttatgaaatgcc

SEQ ID NO: 336031 - DNA, 120 bp, Artificial Sequence
  ENSG00000137449_58 (sequence is synthesized)
tttggagcagagtactgactcttaaagagcaactcagttgcagagcagatgaattgagatacatgtgccttcttaaaaaggcattgaaatacctgagggaaaagcttattttctaagata

SEQ ID NO: 336032 - DNA, 120 bp, Artificial Sequence
  ENSG00000137460_0 (sequence is synthesized)
agtgctacacaagtttgatgtttgtgtcttcttctccaaggccaagaaattatctccataggaggcaacagtactatgcatgttatgaattgtgtctccttggtcagtgataaagaaaat

SEQ ID NO: 336033 - DNA, 120 bp, Artificial Sequence
  ENSG00000137460_1 (sequence is synthesized)
gggaatattgccacagcacctggattcatgattgggcagacacctcctccagcacctcctccacctcctcctccaccccctccatctccaccatgttcatgttcaagggaagagtgtcct

SEQ ID NO: 336034 - DNA, 120 bp, Artificial Sequence
  ENSG00000137460_2 (sequence is synthesized)
tcctcccctcctccacccccaccacctccacttcctggggagcctcccatcccacctcccccaccaggcctacccccaactactcacatgaacggctacagccaccttggtaagaaaaag

SEQ ID NO: 336035 - DNA, 120 bp, Artificial Sequence
  ENSG00000137460_3 (sequence is synthesized)
cggatgagaagctttttttggaaaactattccggaggagcaagttcgaggcaaaaccaacatctggaccttggcagccaggcaggaacatcactaccaaattgatacaaagaccattgag

SEQ ID NO: 336036 - DNA, 120 bp, Artificial Sequence
  ENSG00000137460_4 (sequence is synthesized)
gagctctttgggcagcaggaagacaccaccaagtcttcccttcctaggagaggaagaactttaaattcatccttcagagaagctcgagaagagattactattttggatgcaaaacggagc

SEQ ID NO: 336037 - DNA, 120 bp, Artificial Sequence
  ENSG00000137460_5 (sequence is synthesized)
atgaacattgggatatttcttaagcaatttaagaagtctcctcggtccattgtagaagatattcatcaaggaaaaagtgagcattatggatcagagaccttgcgagaatttcttaagttt

SEQ ID NO: 336038 - DNA, 120 bp, Artificial Sequence
  ENSG00000137460_6 (sequence is synthesized)
ttgccagagtcagaagaggtaaagaagttaaaagcgtttagtggcgacgtgtcgaagctgtctctggcagattcctttctgtatggcttaattcaggtgccaaactattcacttcggatt

SEQ ID NO: 336039 - DNA, 120 bp, Artificial Sequence
  ENSG00000137460_7 (sequence is synthesized)
gaagccatggtgctaaagaaggaatttctaccttcttgctcttctctatatacagatataacagttttaagaactgctataaaagaactgatgtcatgtgaagagctacattcaatatta

SEQ ID NO: 336040 - DNA, 120 bp, Artificial Sequence
  ENSG00000137460_8 (sequence is synthesized)
cacttggtgctccaggctgggaatatcatgaatgcaggagggtatgccggcaatgcagtaggatttaaactgtcttctttgctcaaattggcagacacaaaagcaaacaaacctgggatg

SEQ ID NO: 336041 - DNA, 120 bp, Artificial Sequence
  ENSG00000137460_9 (sequence is synthesized)
aatctcctgcactttgttgcacaggaagcccaaaagaaagataccattcttctaaacttttcagaaaaattgcatcatgttcagaagactgctagattatctctggagaacacggaggca

SEQ ID NO: 336042 - DNA, 120 bp, Artificial Sequence
  ENSG00000137460_10 (sequence is synthesized)
gaactgcacttgctgtttgtcaggacaaaatcactaaaagaaaacatccagcgggatggtgaactttgtcagcagatggaagattttcttcagtttgccatagaaaagctgagggaactg

SEQ ID NO: 336043 - DNA, 120 bp, Artificial Sequence
  ENSG00000137460_11 (sequence is synthesized)
gaatgctggaaacaagagctccaggatgaggcctacacccttatagattttttctgtgaagacaaaaaaaccatgaaactggatgaatgctttcagatatttagagatttctgtaccaaa

SEQ ID NO: 336044 - DNA, 120 bp, Artificial Sequence
  ENSG00000137460_12 (sequence is synthesized)
ttcaacaaagcagttaaggacaaccacgaccgggaggcgcaggagctgaggcagctgcagaggctgaaggagcaggagcagaagcagcgctcctgggcaactggggagctgggggcattt

SEQ ID NO: 336045 - DNA, 120 bp, Artificial Sequence
  ENSG00000137460_13 (sequence is synthesized)
ggccggagcagcagtgagaatgatgtggagctgctgaccaagaagggtgcagagggcctgctccctttcctgcaccccaggcccatcagcccctccagcccctcctaccggcccccgaac

SEQ ID NO: 336046 - DNA, 120 bp, Artificial Sequence
  ENSG00000137460_14 (sequence is synthesized)
acccgccgctcccgcctctccctgggtccctctgctgaccgggagctgctgaccttcttggagagctccaccggcagccctgaggagcccaataagttccacagcctgccccggagcagc

SEQ ID NO: 336047 - DNA, 120 bp, Artificial Sequence
  ENSG00000137460_15 (sequence is synthesized)
ccccggcaggcccggcccacgatagcctgcctggagcctgcagaagtgaggcaccaggactccagctttgcacacaaacctcaggcctcggggggccaggaggaggcccccaacccaccc

SEQ ID NO: 336048 - DNA, 120 bp, Artificial Sequence
  ENSG00000137460_16 (sequence is synthesized)
tcagcacaggcgcaccagcttgcagccgcccagcctgagaaccatgcctctgccttccccagagctcggcgccagggcgtcagtgtcctccgaaagaggtacagtgagccggtgagcctg

SEQ ID NO: 336049 - DNA, 120 bp, Artificial Sequence
  ENSG00000137460_17 (sequence is synthesized)
ggctcagcacagtcccctcctctctcgccattggctctgggaattaaggagcatgagctggtgacagggctggcccagttcaacctccagggttcccagggcatggaggagacctcccag

SEQ ID NO: 336050 - DNA, 120 bp, Artificial Sequence
  ENSG00000137460_18 (sequence is synthesized)
ctgactctgagtgacttcagcccgatggagctagagtctgtggggcataggggcccgcagtccctcagtgccagcagcagcagcctgacacccatgggcagagatgccctggggagtctc

SEQ ID NO: 336051 - DNA, 120 bp, Artificial Sequence
  ENSG00000137460_19 (sequence is synthesized)
agcccagcgctggaggatggcaaggctgcccccgatgagcctggaagtgcagctttgggatctgtgggtagcagcgaccctgagaacaaagatcctagacctctgttctgcatctcggac

SEQ ID NO: 336052 - DNA, 120 bp, Artificial Sequence
  ENSG00000137460_20 (sequence is synthesized)
accaccgactgctcactgaccctggactgctcagagggaaccgactccagacccagaggcggggacccggaggaaggcggggaaggggatggctccatgtcctctggggttggagaaatg

SEQ ID NO: 336053 - DNA, 120 bp, Artificial Sequence
  ENSG00000137460_21 (sequence is synthesized)
ggggacagccaagtctcctccaaccctacatccagcccccctggggaggctcctgcccccgtctctgtggatagtgagcccagctgcaagggcggcctgcccagggacaaacccaccaaa

SEQ ID NO: 336054 - DNA, 120 bp, Artificial Sequence
  ENSG00000137460_22 (sequence is synthesized)
aggaaagatgttgtagcaccaaagagaggctccctgaaagaggcgtctcccggggcctccaagcccgggagcgcccggcggagccagggggcagtggccaagtctgtgcggaccctgacc

SEQ ID NO: 336055 - DNA, 120 bp, Artificial Sequence
  ENSG00000137460_23 (sequence is synthesized)
gcctcagagaacgagagcatgcgcaaggtcatgcccatcaccaagtccagcagaggcgccggctggaggcgaccagagctgtcatcccgggggccctcccagaatccccccagcagcaca

SEQ ID NO: 336056 - DNA, 120 bp, Artificial Sequence
  ENSG00000137460_24 (sequence is synthesized)
gatactgtgtggtcacgccagaactccgtgcggagggcctccacaggcgccgaagagcagaggctgccgcgggggagcagcggctccagcagcacccgtccggggagggacgttcccctg

SEQ ID NO: 336057 - DNA, 120 bp, Artificial Sequence
  ENSG00000137460_25 (sequence is synthesized)
cagcccaggggttctttcaagaagcccagtgccaaaccactcaggaacctccccagacagaagcctgaggaaaataagacctgccgcgcccactccgagggccctgagagtcccaaagaa

SEQ ID NO: 336058 - DNA, 120 bp, Artificial Sequence
  ENSG00000137460_26 (sequence is synthesized)
gagcccaagaccccgtcagtgcccagcgtcccccacgaactaccccgtgtcccgagctttgcccggaacacagtggcctcctcctctcgaagcatgagaacagatcttcctcccgtggcc

SEQ ID NO: 336059 - DNA, 120 bp, Artificial Sequence
  ENSG00000137460_27 (sequence is synthesized)
aaagcccccggcatcactcggacagtgtcgcagcggcagctgagggtgaaaggggaccccgaggatgccgctcccaaggacagcagcactttgaggcgagccagcagtgcccgggccccc

SEQ ID NO: 336060 - DNA, 120 bp, Artificial Sequence
  ENSG00000137460_28 (sequence is synthesized)
aagaagcgcccagagtctgcggagggtcccagtgccaacacggaggcccctctgaaggccagaggggctggggaaagggcctccctccgtcggaaggactccagtcggaccacgctgggg

SEQ ID NO: 336061 - DNA, 120 bp, Artificial Sequence
  ENSG00000137460_29 (sequence is synthesized)
agaatcctcaatcccttacggaagtgatgggtgcctgtcctctcctgcctcctgggattcagacggtgaagactgacttctgggacgaggatggggaaagaggcagcatgtctttgttac

SEQ ID NO: 336062 - DNA, 120 bp, Artificial Sequence
  ENSG00000137460_30 (sequence is synthesized)
agataaagcagccactggtgccactgctagtgacgctgttgggatggcacagtccaggaggcctgtggactgcagcctgctgtgctgagccctgctgcagtccagcgtccagatggatgc

SEQ ID NO: 336063 - DNA, 120 bp, Artificial Sequence
  ENSG00000137460_31 (sequence is synthesized)
acgttcactactgtgacggccgcacctcccccatgcaccccaccctcccccaaagcccggatcccgagaaagatttagtaggagtgtaaagtgacattcttatgaaacaagtcaaaaaag

SEQ ID NO: 336064 - DNA, 120 bp, Artificial Sequence
  ENSG00000137460_32 (sequence is synthesized)
ttcttatgaaacaagtcaaaaaagtttttttcaggccagtttttatatatcaaagactttctttttaatataaaaattagctaggtgcagtggttcatgcctgtaatccagcactttggg

SEQ ID NO: 336065 - DNA, 120 bp, Artificial Sequence
  ENSG00000137460_33 (sequence is synthesized)
agttcgagaccagcctaggcaacatggagaaaccccgtctctatcagaaatacaaaatttagccgagtgtggtggcacatgcctgtggccccagccactctgaacgctgagatgggaagg

SEQ ID NO: 336066 - DNA, 86 bp, Artificial Sequence
  ENSG00000137460_34 (sequence is synthesized)
caaaacaaaacaaaaatgaaatgttctagttttggttccttttgcagagtgaaatgcctcccaggaaaaaaatacatatgtatttt

SEQ ID NO: 336067 - DNA, 120 bp, Artificial Sequence
  ENSG00000137460_35 (sequence is synthesized)
tttggttccttttgcagagtgaaatgcctcccaggaaaaaaatacatatgtatttttttgcgacagggtcgtgctcttgtctcccagactggactgcagtggcacaatcatagctcactg

SEQ ID NO: 336068 - DNA, 120 bp, Artificial Sequence
  ENSG00000137460_36 (sequence is synthesized)
ggactacaggcgtgcaccaccacgcctggttaattgtttttttttaatttatcttttgtagagatgggatctcactatgttgctcaggctgatctcgagctcctgggctcaagtgatcct

SEQ ID NO: 336069 - DNA, 64 bp, Artificial Sequence
  ENSG00000137460_37 (sequence is synthesized)
agtatatcctcagtatgaagatatttttatcttcctgtgttctctggcttcagagtttcacctg

SEQ ID NO: 336070 - DNA, 120 bp, Artificial Sequence
  ENSG00000137460_38 (sequence is synthesized)
ttttatcttcctgtgttctctggcttcagagtttcacctgcccacacagggtccgttgctggcaactggacttccccataagccttgggtatcctgtgatgggctgtgtctccctgaaga

SEQ ID NO: 336071 - DNA, 120 bp, Artificial Sequence
  ENSG00000137460_39 (sequence is synthesized)
ttgtctggcttgcccacttctccgtgcatgactctgggtgtgagtctgtctaggaacaggagggaaagttggactcagacagaaatcagatgcttccatgtattcagggcgcgcattgtg

SEQ ID NO: 336072 - DNA, 120 bp, Artificial Sequence
  ENSG00000137460_40 (sequence is synthesized)
agcagtggagtatgagccttgagggcctcatggttgcagggcaggcttccctgcagatgggtggcagcccctggtagaatgctggatttctctggaatctagaagtgccatattttagtg

SEQ ID NO: 336073 - DNA, 120 bp, Artificial Sequence
  ENSG00000137460_41 (sequence is synthesized)
gaaaggcatcagggctgtttgacagtgtgcgtctttccaatcccatgttcctccattcgtgtgtctgttataaaactgagtgaaggctgctatgacctgtgttcactctggttacaggga

SEQ ID NO: 336074 - DNA, 120 bp, Artificial Sequence
  ENSG00000137460_42 (sequence is synthesized)
ggtgcaaaccattctgtctcccagcctttcttctctctttgtgtgctcccagcacttccttcttttctaacatggcctggagagagtctctctctccttgtctctgtctcttaataatag

SEQ ID NO: 336075 - DNA, 120 bp, Artificial Sequence
  ENSG00000137460_43 (sequence is synthesized)
tttttaacgtggacatctcttccttggtacagtggtttttaaatactgagaagaaccaagtcaggttttttaaagcagactaaaagcatgaaattgctttcagaagaatgtatatcatcg

SEQ ID NO: 336076 - DNA, 120 bp, Artificial Sequence
  ENSG00000137460_44 (sequence is synthesized)
ggaaaagttcgggggcagagtgggggaatcaggctttattcaaaagaaacagttgaaaacatgggactttttctacccaatgcccatttcacgactcctctgagactaattgggaaacgg

SEQ ID NO: 336077 - DNA, 120 bp, Artificial Sequence
  ENSG00000137460_45 (sequence is synthesized)
ggaaattcttggaattttttttttaagaaacttttttgtgttttttttaattttaggtcacttattagtgaaacctcattttagatctgacattggtagatagatggatttaggcaaata

SEQ ID NO: 336078 - DNA, 120 bp, Artificial Sequence
  ENSG00000137460_46 (sequence is synthesized)
tgatgcgtttgtggggaatccacgtggttgacgttagaacctcccttctgcagactgttgcctgtcatctaagcgaattggaaatgctgagcttccataagtcagctgagttttaaaggt

SEQ ID NO: 336079 - DNA, 120 bp, Artificial Sequence
  ENSG00000137460_47 (sequence is synthesized)
aaacgttatggctgaaatagtaaagcacctgaccacaaaacctcttgtaaaaacagccctgagtaggtatttccagggctccacaaagttgcttatgggaatcctgagctgcttttcacc

SEQ ID NO: 336080 - DNA, 120 bp, Artificial Sequence
  ENSG00000137460_48 (sequence is synthesized)
atctcaagaagcctaagaagttatatatttaatcaggtagacaaaacagttcaaagcataaggtccatggtggtggaaaatggatgcaagtgattctaagtttgtggatttgtggatagc

SEQ ID NO: 336081 - DNA, 120 bp, Artificial Sequence
  ENSG00000137460_49 (sequence is synthesized)
agagggatcgggacctcttggaggaaccctgggtaccaagctcccaggcccttcctctatcatggatgctgggtgactttgggaagtcaccacctcttcccaagcctgtttcccatatca

SEQ ID NO: 336082 - DNA, 120 bp, Artificial Sequence
  ENSG00000137460_50 (sequence is synthesized)
cagatgtggggccatggcctcgatgatggtctccacaggtctttccacctctgtgagtccaagtcaggtcaatcagcaaggacccatctctgccctgggtcagctcctcagaaccaaccc

SEQ ID NO: 336083 - DNA, 120 bp, Artificial Sequence
  ENSG00000137460_51 (sequence is synthesized)
ccagcatctctaaagcaaaagcctcacctcaagggctgctcagaagagagcaccttcagcatgagttgttgctggaagatctaataagctgtgtttcctgggaagtggtgctttacttag

SEQ ID NO: 336084 - DNA, 120 bp, Artificial Sequence
  ENSG00000137460_52 (sequence is synthesized)
ccctgtggacaacttctctatgcatctgtgtgagcagatgatcattgtattaccttttatcggtagtaagcttggaaaaataatttaagaatacaatggagaaatgtaaataagtatcta

SEQ ID NO: 336085 - DNA, 120 bp, Artificial Sequence
  ENSG00000137460_53 (sequence is synthesized)
tgtaaatttgtttaaaataaactgaatgtatttaatggtccatttatatgttcttttatgtaacatgtagtttaataaagttcctgtttatgagagtcatgtttcatctcagcttcttcc

SEQ ID NO: 336086 - DNA, 120 bp, Artificial Sequence
  ENSG00000137462_0 (sequence is synthesized)
aagcactaatggactaagacaaaaagattccattatgaaagtgaaaaggcaaccgcagagtggcagaagcttttggagatgatgaatatgtttacttcctggattgcggtgatgatacca

SEQ ID NO: 336087 - DNA, 120 bp, Artificial Sequence
  ENSG00000137462_1 (sequence is synthesized)
tgagtgtatacatatgtgtgtatacataatgtatacaaattgtgttcattgattatgtacagtttctttgtataccaattataccttaataaagctaaggaaaaaaaaaagaaaatccag

SEQ ID NO: 336088 - DNA, 120 bp, Artificial Sequence
  ENSG00000137462_2 (sequence is synthesized)
aataaatatgcatggtatgacccatttatttaaaaaaaaaaagagggaatgcgaagcagtggttttggtgcgaacacaaaaattctggcttcaacagcatttaaattcccaaaccaagca

SEQ ID NO: 336089 - DNA, 120 bp, Artificial Sequence
  ENSG00000137462_3 (sequence is synthesized)
tgtttgtgttttaattctttgtggccataaattgtacagctcaggcctttatagtctctcagattctgtgaatgtggggaattagttttactcataaaaagttttgttcttggggataaa

SEQ ID NO: 336090 - DNA, 120 bp, Artificial Sequence
  ENSG00000137462_4 (sequence is synthesized)
ttttttaaaaaaatttttgtatagttagcacactgagaaaatacagacaaaggcatacagatgcaagaaatgaggtagctgaatagaccaaagaatgatatagggcccagaaggtaggca

SEQ ID NO: 336091 - DNA, 120 bp, Artificial Sequence
  ENSG00000137462_5 (sequence is synthesized)
aagagaaagttgttgggtttatggttacaagtaaactagcagttgtggtgcagatagttttatttcccccacattaatctgaacagcccatccagacttaaacactgctttttgcattta

SEQ ID NO: 336092 - DNA, 120 bp, Artificial Sequence
  ENSG00000137462_6 (sequence is synthesized)
cttctaggcaggaagacagggttctgatggtgtgagtctccttcaactcagcaaaccaccttggtctgcctcgagtttccaacacccctcctgcctgctagtgataggtgtgaggcaggt

SEQ ID NO: 336093 - DNA, 120 bp, Artificial Sequence
  ENSG00000137462_7 (sequence is synthesized)
tgatgaacatggaacttttttcttttggtcccaaagcatgctactcctggagtttcattcagtgaatgagaactatagtttggttctgtgagatctctatgaatcaaggcggccactgaa

SEQ ID NO: 336094 - DNA, 120 bp, Artificial Sequence
  ENSG00000137462_8 (sequence is synthesized)
gcggagaaaagaaatgcttaaatgttaagaaagtttgaagtgcagaaaaaggtgattgtaaatccatatggttaagcttagcccatttcttaaaaggcttgattgctcattcctccattc

SEQ ID NO: 336095 - DNA, 120 bp, Artificial Sequence
  ENSG00000137462_9 (sequence is synthesized)
attgatttactcactcttccaatccatgttattgagtcttgctctgtaattccggatggttgtgcttttaagtactgcatagtggttgtatgtctgtgttagcattgctgaatgtatcag

SEQ ID NO: 336096 - DNA, 120 bp, Artificial Sequence
  ENSG00000137462_10 (sequence is synthesized)
gttgtatgtctgtgttagcattgctgaatgtatcagggaattcatttttttatccccattcattcgttccattcatctgtttctctctctctctctctttgtgtgtgtgtgtgtgtgtgt

SEQ ID NO: 336097 - DNA, 120 bp, Artificial Sequence
  ENSG00000137462_11 (sequence is synthesized)
acatttctcaagaattagaattacgatatgctgtcaaacacaatgacttatttgaacctcttttatttgtaggttgaagcactggacaatgccacatactttgtggatggtgtgggtctt

SEQ ID NO: 336098 - DNA, 120 bp, Artificial Sequence
  ENSG00000137462_12 (sequence is synthesized)
gggggtcatcatcagcctctccaaggaagaatcctccaatcaggcttctctgtcttgtgaccgcaatggtatctgcaagggcagctcaggatctttaaactccattccctcagggctcac

SEQ ID NO: 336099 - DNA, 120 bp, Artificial Sequence
  ENSG00000137462_13 (sequence is synthesized)
agaagctgtaaaaagccttgacctgtccaacaacaggatcacctacattagcaacagtgacctacagaggtgtgtgaacctccaggctctggtgctgacatccaatggaattaacacaat

SEQ ID NO: 336100 - DNA, 120 bp, Artificial Sequence
  ENSG00000137462_14 (sequence is synthesized)
agaggaagattctttttcttccctgggcagtcttgaacatttagacttatcctataattacttatctaatttatcgtcttcctggttcaagcccctttcttctttaacattcttaaactt

SEQ ID NO: 336101 - DNA, 120 bp, Artificial Sequence
  ENSG00000137462_15 (sequence is synthesized)
actgggaaatccttacaaaaccctaggggaaacatctcttttttctcatctcacaaaattgcaaatcctgagagtgggaaatatggacaccttcactaagattcaaagaaaagattttgc

SEQ ID NO: 336102 - DNA, 120 bp, Artificial Sequence
  ENSG00000137462_16 (sequence is synthesized)
tggacttaccttccttgaggaacttgagattgatgcttcagatctacagagctatgagccaaaaagtttgaagtcaattcagaatgtaagtcatctgatccttcatatgaagcagcatat

SEQ ID NO: 336103 - DNA, 120 bp, Artificial Sequence
  ENSG00000137462_17 (sequence is synthesized)
tttactgctggagatttttgtagatgttacaagttccgtggaatgtttggaactgcgagatactgatttggacactttccatttttcagaactatccactggtgaaacaaattcattgat

SEQ ID NO: 336104 - DNA, 120 bp, Artificial Sequence
  ENSG00000137462_18 (sequence is synthesized)
taaaaagtttacatttagaaatgtgaaaatcaccgatgaaagtttgtttcaggttatgaaacttttgaatcagatttctggattgttagaattagagtttgatgactgtacccttaatgg

SEQ ID NO: 336105 - DNA, 120 bp, Artificial Sequence
  ENSG00000137462_19 (sequence is synthesized)
agttggtaattttagagcatctgataatgacagagttatagatccaggtaaagtggaaacgttaacaatccggaggctgcatattccaaggttttacttattttatgatctgagcacttt

SEQ ID NO: 336106 - DNA, 120 bp, Artificial Sequence
  ENSG00000137462_20 (sequence is synthesized)
atattcacttacagaaagagttaaaagaatcacagtagaaaacagtaaagtttttctggttccttgtttactttcacaacatttaaaatcattagaatacttggatctcagtgaaaattt

SEQ ID NO: 336107 - DNA, 120 bp, Artificial Sequence
  ENSG00000137462_21 (sequence is synthesized)
gatggttgaagaatacttgaaaaattcagcctgtgaggatgcctggccctctctacaaactttaattttaaggcaaaatcatttggcatcattggaaaaaaccggagagactttgctcac

SEQ ID NO: 336108 - DNA, 120 bp, Artificial Sequence
  ENSG00000137462_22 (sequence is synthesized)
tctgaaaaacttgactaacattgatatcagtaagaatagttttcattctatgcctgaaacttgtcagtggccagaaaagatgaaatatttgaacttatccagcacacgaatacacagtgt

SEQ ID NO: 336109 - DNA, 120 bp, Artificial Sequence
  ENSG00000137462_23 (sequence is synthesized)
aacaggctgcattcccaagacactggaaattttagatgttagcaacaacaatctcaatttattttctttgaatttgccgcaactcaaagaactttatatttccagaaataagttgatgac

SEQ ID NO: 336110 - DNA, 120 bp, Artificial Sequence
  ENSG00000137462_24 (sequence is synthesized)
tctaccagatgcctccctcttacccatgttactagtattgaaaatcagtaggaatgcaataactacgttttctaaggagcaacttgactcatttcacacactgaagactttggaagctgg

SEQ ID NO: 336111 - DNA, 120 bp, Artificial Sequence
  ENSG00000137462_25 (sequence is synthesized)
tggcaataacttcatttgctcctgtgaattcctctccttcactcaggagcagcaagcactggccaaagtcttgattgattggccagcaaattacctgtgtgactctccatcccatgtgcg

SEQ ID NO: 336112 - DNA, 120 bp, Artificial Sequence
  ENSG00000137462_26 (sequence is synthesized)
tggccagcaggttcaggatgtccgcctctcggtgtcggaatgtcacaggacagcactggtgtctggcatgtgctgtgctctgttcctgctgatcctgctcacgggggtcctgtgccaccg

SEQ ID NO: 336113 - DNA, 120 bp, Artificial Sequence
  ENSG00000137462_27 (sequence is synthesized)
tttccatggcctgtggtatatgaaaatgatgtgggcctggctccaggccaaaaggaagcccaggaaagctcccagcaggaacatctgctatgatgcatttgtttcttacagtgagcggga

SEQ ID NO: 336114 - DNA, 120 bp, Artificial Sequence
  ENSG00000137462_28 (sequence is synthesized)
tgcctactgggtggagaaccttatggtccaggagctggagaacttcaatccccccttcaagttgtgtcttcataagcgggacttcattcctggcaagtggatcattgacaatatcattga

SEQ ID NO: 336115 - DNA, 120 bp, Artificial Sequence
  ENSG00000137462_29 (sequence is synthesized)
ctccattgaaaagagccacaaaactgtctttgtgctttctgaaaactttgtgaagagtgagtggtgcaagtatgaactggacttctcccatttccgtctttttgatgagaacaatgatgc

SEQ ID NO: 336116 - DNA, 120 bp, Artificial Sequence
  ENSG00000137462_30 (sequence is synthesized)
tgccattctcattcttctggagcccattgagaaaaaagccattccccagcgcttctgcaagctgcggaagataatgaacaccaagacctacctggagtggcccatggacgaggctcagcg

SEQ ID NO: 336117 - DNA, 120 bp, Artificial Sequence
  ENSG00000137462_31 (sequence is synthesized)
ggaaggattttgggtaaatctgagagctgcgataaagtcctaggttcccatatttaagaccagtctttgtctagttgggatctttatgtcactagttatagttaagttcattcagacata

SEQ ID NO: 336118 - DNA, 120 bp, Artificial Sequence
  ENSG00000137462_32 (sequence is synthesized)
attatataaaaactacgtggatgtaccgtcatttgaggacttgcttactaaaactacaaaacttcaaattttgtctggggtgctgttttataaacatatgccagatttaaaaattggttt

SEQ ID NO: 336119 - DNA, 120 bp, Artificial Sequence
  ENSG00000137462_33 (sequence is synthesized)
ttggtttttcttttttctatgagataaccatgatcataagtctattactgatatctgaatatagtcccttggtatccaagggaattggttgcaggatcctcgtggatatcaaaattcata

SEQ ID NO: 336120 - DNA, 120 bp, Artificial Sequence
  ENSG00000137462_34 (sequence is synthesized)
ttggttgcaggatcctcgtggatatcaaaattcatagatgatcaagtcccttataagagtggcatagtatttgcatataacctgtgtacattctcctgtatactttaaatcatctctaga

SEQ ID NO: 336121 - DNA, 120 bp, Artificial Sequence
  ENSG00000137462_35 (sequence is synthesized)
ttcctagtcccgggcaggccggctcggaggcagcgagaaagcgcagccaggcggctgctcggcgttctctcaggtgactgctcggagttctcccagtgtttggtgttgcaagcaggatcc

SEQ ID NO: 336122 - DNA, 120 bp, Artificial Sequence
  ENSG00000137462_36 (sequence is synthesized)
aggccggctcggaggcagcgagaaagcgcagccaggcggctgctcggcgttctctcaggtgactgctcggagttctcccagtttctcttttaacagtgtttggtgttgcaagcaggatcc

SEQ ID NO: 336123 - DNA, 120 bp, Artificial Sequence
  ENSG00000137462_37 (sequence is synthesized)
aaaggagacctatagtgactcccaggagctcttagtgaccaagtgaaggtacctgtggggctcattgtgcccattgctctttcactgctttcaactggtagttgtgggttgaagcactgg

SEQ ID NO: 336124 - DNA, 120 bp, Artificial Sequence
  ENSG00000137462_38 (sequence is synthesized)
ggagaaaagaaatgcttaaatgttaagaaagtttgaagtgcagaaaaaggttgaagcactggacaatgccacatactttgtggatggtgtgggtcttgggggtcatcatcagcctctcca

SEQ ID NO: 336125 - DNA, 120 bp, Artificial Sequence
  ENSG00000137462_39 (sequence is synthesized)
agctcacggtcaagggcgggagcctgctgggaagcacggccgcgggggctcgctcggggccacctgcctggaactcagcgcgaggtccagagttccctccggctgcgcagcggcgcacgt

SEQ ID NO: 336126 - DNA, 120 bp, Artificial Sequence
  ENSG00000137462_40 (sequence is synthesized)
tatagtgactcccaggagctcttagtgaccaagtgaagctctctgactttatttgagcaattctttgatggattggctccagaattggattggattcagtgaagaaactgaaactggact

SEQ ID NO: 336127 - DNA, 120 bp, Artificial Sequence
  ENSG00000137462_41 (sequence is synthesized)
ggtgctctaggaggcctcaagtagataaggttactagaagacagggaatcctgggcttatctggatttaaggagtctacaactccatctgcaactccagccgatttcatttataagaatt

SEQ ID NO: 336128 - DNA, 120 bp, Artificial Sequence
  ENSG00000137462_42 (sequence is synthesized)
gaccaagaacctgtgcttttctagagaaatgtgtgagccttactaaaggtaacttagaattacaatggactgctgagaccagctcggtcgtggagaccctaacccagcagcgctagagga

SEQ ID NO: 336129 - DNA, 65 bp, Artificial Sequence
  ENSG00000137462_43 (sequence is synthesized)
ccctaacccagcagcgctagaggaatcaaagacacacacacagaaatgaacagagatttacccac

SEQ ID NO: 336130 - DNA, 64 bp, Artificial Sequence
  ENSG00000137462_44 (sequence is synthesized)
gaaacaaagggataggctctggctagatgtctgcagcaggaacacgtccttaaggcacagattg

SEQ ID NO: 336131 - DNA, 120 bp, Artificial Sequence
  ENSG00000137463_0 (sequence is synthesized)
agcctctctgtggaagggcagcctgcgcctgggtaccgaggctgctgcgcggcggacagcgggcgcgatgtatctccgcagggcggtctccaagactctggcgctgccgctgagggcgcc

SEQ ID NO: 336132 - DNA, 120 bp, Artificial Sequence
  ENSG00000137463_1 (sequence is synthesized)
ccccaaccccgcgccgctcggaaaggacgcatctctgcgccggatgtcatctaacagattccctggatcatctggatcaaatatgatttattatctggttgtaggcgtcacagtcagtgc

SEQ ID NO: 336133 - DNA, 120 bp, Artificial Sequence
  ENSG00000137463_2 (sequence is synthesized)
tggtggatattatgcttacaagacagtcacatcagaccaagccaaacacacagaacataaaacaaatttgaaagaaaaaacaaaagcagagatacatccatttcaaggtgaaaaggagaa

SEQ ID NO: 336134 - DNA, 120 bp, Artificial Sequence
  ENSG00000137463_3 (sequence is synthesized)
tgttgcggaaactgagaaagcaagttcagaagccccagaagaacttatagtggaagctgaggtggtagatgctgaagaaagtcccagtgctacagttgtggtcataaaagaggcatctgc

SEQ ID NO: 336135 - DNA, 120 bp, Artificial Sequence
  ENSG00000137463_4 (sequence is synthesized)
ctgtccaggtcacgtggaggctgctccggagaccacagcagtcagtgctgaaaccgggccagaggtcacagatgcagcggcgagggaaaccacggaagtaaaccctgaaacaaccccaga

SEQ ID NO: 336136 - DNA, 120 bp, Artificial Sequence
  ENSG00000137463_5 (sequence is synthesized)
agctgtcaccatcgataatgataaagatacaacaaagaacgaaacctctgatgaatatgctgaactagaagaagaaaattctccagctgagtcagagtcctctgctggagatgatttaca

SEQ ID NO: 336137 - DNA, 120 bp, Artificial Sequence
  ENSG00000137463_6 (sequence is synthesized)
ggaggaagccagtgttggctctgaggctgcttcggctcaaggctaatctccagccggtagacatttcagcaacaaatgccatagggtgtctgataagtgcttttgtgtttttagtacact

SEQ ID NO: 336138 - DNA, 120 bp, Artificial Sequence
  ENSG00000137463_7 (sequence is synthesized)
tagtttaaaaaaaaaaagacttattttctagaaaacgttaatgggtcttgaagatttttggcatccactgatagattttaggactgagagacttgagattgtacatttcttactactctt

SEQ ID NO: 336139 - DNA, 120 bp, Artificial Sequence
  ENSG00000137463_8 (sequence is synthesized)
ctactgtctgagatcagaatatgacattgcagtaaagagcttaaatagtttcatctttggtttttttttctagacacttttcttttatcccagtcatctctgaatttacattttatatta

SEQ ID NO: 336140 - DNA, 120 bp, Artificial Sequence
  ENSG00000137463_9 (sequence is synthesized)
aagaaattgagctatccatacaacctgtatttactttaatttcactatgctttcagcttactttattgtatgatatgtaggtctaaaatatagtttgagtcaaataaaattagaaaagct

SEQ ID NO: 336141 - DNA, 120 bp, Artificial Sequence
  ENSG00000137473_0 (sequence is synthesized)
ctctgtttccgtggagacgctctcggcgtcccctgtctccgctccggcggagccaggcttcggaatcactgagagaggagggggcagcgccaacgcccagcacctgccgccggtggggga

SEQ ID NO: 336142 - DNA, 120 bp, Artificial Sequence
  ENSG00000137473_1 (sequence is synthesized)
ctgacttcggcggaacggaaaactggagttgtttccctgggccagtgcaccgaggctgaagtctataagcctggagagaccatcagcagtaatctgcaaattccgaaatgaccaccctgc

SEQ ID NO: 336143 - DNA, 120 bp, Artificial Sequence
  ENSG00000137473_2 (sequence is synthesized)
ccccactgcccatgacacgcccgaagcttacagccttagccagacagaagctgccttgctcctccagaaaaattccaaggtctcaattgatcaaagaaaaagatgacatagatcattatc

SEQ ID NO: 336144 - DNA, 120 bp, Artificial Sequence
  ENSG00000137473_3 (sequence is synthesized)
tagaggtaaatttcaaaggattatcaaaagaggaagttgctgcttataggaactcctacaagaagaatatctgtgtggacatgctgcgagatggttatcataagtccttcaccgagctct

SEQ ID NO: 336145 - DNA, 120 bp, Artificial Sequence
  ENSG00000137473_4 (sequence is synthesized)
tcgctctgatggagcggtgggatgccctgagggaggctgcgagagtcaggtccctcttctggctgcagaagcccctggaggagcagcctgataaactggattacctgtaccattacctga

SEQ ID NO: 336146 - DNA, 120 bp, Artificial Sequence
  ENSG00000137473_5 (sequence is synthesized)
ccagggctgaggacgctgagaggaaagaatccttcgaagatgtacataataacttgtatgctctggcctgttacttcaataattctgaagacaagtgggtaaggaaccacttctatgaac

SEQ ID NO: 336147 - DNA, 120 bp, Artificial Sequence
  ENSG00000137473_6 (sequence is synthesized)
gatgttttaagattgctcagctgatcaaaattgactgtgggaagaaagaagccgaggcacacatgcatatgggtcttctctacgaggaagatggtcagcttctggaagctgctgagcatt

SEQ ID NO: 336148 - DNA, 120 bp, Artificial Sequence
  ENSG00000137473_7 (sequence is synthesized)
tctcagacaaaatgctagaaaataaagaatacaaacaggccatcaaaattctaataaaagcttctgaaatagccaaagaaggaagtgacaaaaagatggaagcggaagcctcttactact

SEQ ID NO: 336149 - DNA, 120 bp, Artificial Sequence
  ENSG00000137473_8 (sequence is synthesized)
tgggcttagcacacttagctgctgaggaatatgaaacagcattaacagtccttgacacttactgtaaaatctccacagacctggatgatgatctcagtctggggagaggctatgaagcca

SEQ ID NO: 336150 - DNA, 120 bp, Artificial Sequence
  ENSG00000137473_9 (sequence is synthesized)
tagccaaggtcctgcagagccaaggagagatgacagaagcaattaaatacttgaaaaaatttgtgaaaattgcaagaaacaattttcaaagcctagatttggtgagagcaagtacaatgc

SEQ ID NO: 336151 - DNA, 120 bp, Artificial Sequence
  ENSG00000137473_10 (sequence is synthesized)
ttggggacatctacaatgaaaaaggatactacaacaaagcttctgaatgctttcagcaagcttttgacacaacagtagagctaatgagcatgcctctgatggatgagacaaaagttcact

SEQ ID NO: 336152 - DNA, 120 bp, Artificial Sequence
  ENSG00000137473_11 (sequence is synthesized)
atggaatagcaaaagctcatcagatgatgcttacagtgaacaactatatagagtctgcagatctcaccagcctcaactacctgctgtcatggaaggagagcagaggtaacattgaacctg

SEQ ID NO: 336153 - DNA, 120 bp, Artificial Sequence
  ENSG00000137473_12 (sequence is synthesized)
atccagttactgaagagtttagaggatccacagtggaagctgtatctcaaaactcagaacgtttggaagaactcagtaggtttccaggtgatcaaaaaaatgaaacttaaagcagctttt

SEQ ID NO: 336154 - DNA, 120 bp, Artificial Sequence
  ENSG00000137473_13 (sequence is synthesized)
cacttaacatcaaagcaagaagaaatccatcatgtcaccttagacttcaatacttgtaataggagcatgttacagataatatagagttataataaaacggactatgactcttttcattgg

SEQ ID NO: 336155 - DNA, 120 bp, Artificial Sequence
  ENSG00000137473_14 (sequence is synthesized)
taatccaaaacatctaaatccatgaaaataaaatatattccaattcttagaaatatcagcaatcatccatgaaataaatgatttcctcttatccactattccacaagaaatagtgatacc

SEQ ID NO: 336156 - DNA, 120 bp, Artificial Sequence
  ENSG00000137473_15 (sequence is synthesized)
atgaaaccaaaataagaaaatattttctaatgagaaaataattacaagcttaagaaaatctttcatgctgaattcatgtaggaaaatatttgctaaaactctagggaaacttctcaacat

SEQ ID NO: 336157 - DNA, 120 bp, Artificial Sequence
  ENSG00000137473_16 (sequence is synthesized)
agataaaaggagtataagcaattaagcctaccatactgataagtcttgtttgaaacagttttctttacctgtgtaacagtatattttatgatacttttagctgatagcacataataaaac

SEQ ID NO: 336158 - DNA, 120 bp, Artificial Sequence
  ENSG00000137473_17 (sequence is synthesized)
tcaggcggccttttgatctttgtctcagcacccgatgatgccacactgtagcactgcccacttgctagcactggcggaggttcctgtgggtcctcctaacaggctgattcagcctgagct

SEQ ID NO: 336159 - DNA, 120 bp, Artificial Sequence
  ENSG00000137473_18 (sequence is synthesized)
cctggggctaagctcatttggtagcagccaaagagtccgaaatgaccaccctgcccccactgcccatgacacgcccgaagcttacagccttagccagacagaagctgccttgctcctcca

SEQ ID NO: 336160 - DNA, 120 bp, Artificial Sequence
  ENSG00000137473_19 (sequence is synthesized)
ctgaatgcttatcaggaatattaataacattaaacgaagttgttctcttcccgtaagattcatttaggatgcatattgtcaaactcatatttgagattaccaagactaattactagaatc

SEQ ID NO: 336161 - DNA, 120 bp, Artificial Sequence
  ENSG00000137473_20 (sequence is synthesized)
ttctgaattttataatagaatagggattatctgataacagaaataaactgtagaaagttgtatttaacctttggagaagagatttagacagtaaactctaagaattaaacatccacaagt

SEQ ID NO: 336162 - DNA, 120 bp, Artificial Sequence
  ENSG00000137473_21 (sequence is synthesized)
cacagggtgattgaatactgaatgcaaaacttgttctgaatgttagaaatcaccaagaatttcaaatccatatgttaaactttcaaaaagtggtttaagagatgcttttggggtatatcc

SEQ ID NO: 336163 - DNA, 120 bp, Artificial Sequence
  ENSG00000137473_22 (sequence is synthesized)
tgccttaagccatcaaacctgttattttgtgtgttatttttttctagaccaaagtttagaacttgtgtggagtcagcctataaatattaatgcaccatacctgaaaaaggaataagatac

SEQ ID NO: 336164 - DNA, 120 bp, Artificial Sequence
  ENSG00000137473_23 (sequence is synthesized)
agattgaaaagaagaggctttctggtgaagtctaagagtttagaggatccacagtggaagctgtatctcaaaactcagaacgtttggaagaactcagtaggtttccaggtgatcaaaaaa

SEQ ID NO: 336165 - DNA, 120 bp, Artificial Sequence
  ENSG00000137473_24 (sequence is synthesized)
tgtcttcaaataattctcacctcttagccttgcttcttatctggaatattttagcctccttcccaggatttgaattcctggtcgattcagtcaaggctaagtgaagagttgaacaattat

SEQ ID NO: 336166 - DNA, 120 bp, Artificial Sequence
  ENSG00000137474_0 (sequence is synthesized)
ggcaggagagagagggagagacaagagacacacacagagagacggcgaggaagggaaagacccagagggacgcctagaacgagacttggagccagacagaggaagaggggacgtgtgttt

SEQ ID NO: 336167 - DNA, 120 bp, Artificial Sequence
  ENSG00000137474_1 (sequence is synthesized)
gcagactggctgggcccgtgacccagcttcctgagtcctccgtgcaggtggcagctgtaccaggctggcaggtcactgagagtgggcagctgggccccagaactgtgcctggcccagtgg

SEQ ID NO: 336168 - DNA, 120 bp, Artificial Sequence
  ENSG00000137474_2 (sequence is synthesized)
gcagcaggagctcctgacttgggaccatggtgattcttcagcagggggaccatgtgtggatggacctgagattggggcaggagttcgacgtgcccatcggggcggtggtgaagctctgcg

SEQ ID NO: 336169 - DNA, 120 bp, Artificial Sequence
  ENSG00000137474_3 (sequence is synthesized)
actctgggcaggtccaggtggtggatgatgaagacaatgaacactggatctctccgcagaacgcaacgcacatcaagcctatgcaccccacgtcggtccacggcgtggaggacatgatcc

SEQ ID NO: 336170 - DNA, 120 bp, Artificial Sequence
  ENSG00000137474_4 (sequence is synthesized)
gcctgggggacctcaacgaggcgggcatcttgcgcaacctgcttatccgctaccgggaccacctcatctacacgtatacgggctccatcctggtggctgtgaacccctaccagctgctct

SEQ ID NO: 336171 - DNA, 120 bp, Artificial Sequence
  ENSG00000137474_5 (sequence is synthesized)
ccatctactcgccagagcacatccgccagtataccaacaagaagattggggagatgcccccccacatctttgccattgctgacaactgctacttcaacatgaaacgcaacagccgagacc

SEQ ID NO: 336172 - DNA, 120 bp, Artificial Sequence
  ENSG00000137474_6 (sequence is synthesized)
agtgctgcatcatcagtggggaatctggggccgggaagacggagagcacaaagctgatcctgcagttcctggcagccatcagtgggcagcactcgtggattgagcagcaggtcttggagg

SEQ ID NO: 336173 - DNA, 120 bp, Artificial Sequence
  ENSG00000137474_7 (sequence is synthesized)
ccacccccattctggaagcatttgggaatgccaagaccatccgcaatgacaactcaagccgtttcggaaagtacatcgacatccacttcaacaagcggggcgccatcgagggcgcgaaga

SEQ ID NO: 336174 - DNA, 120 bp, Artificial Sequence
  ENSG00000137474_8 (sequence is synthesized)
ttgagcagtacctgctggaaaagtcacgtgtctgtcgccaggccctggatgaaaggaactaccacgtgttctactgcatgctggagggtatgagtgaggatcagaagaagaagctgggct

SEQ ID NO: 336175 - DNA, 120 bp, Artificial Sequence
  ENSG00000137474_9 (sequence is synthesized)
tgggccaggcctctgactacaactacttggccatgggtaactgcataacctgtgagggccgggtggacagccaggagtacgccaacatccgctccgccatgaaggtgctcatgttcactg

SEQ ID NO: 336176 - DNA, 120 bp, Artificial Sequence
  ENSG00000137474_10 (sequence is synthesized)
acaccgagaactgggagatctcgaagctcctggctgccatcctgcacctgggcaacctgcagtatgaggcacgcacatttgaaaacctggatgcctgtgaggttctcttctccccatcgc

SEQ ID NO: 336177 - DNA, 120 bp, Artificial Sequence
  ENSG00000137474_11 (sequence is synthesized)
tggccacagctgcatccctgcttgaggtgaaccccccagacctgatgagctgcctgactagccgcaccctcatcacccgcggggagacggtgtccaccccactgagcagggaacaggcac

SEQ ID NO: 336178 - DNA, 120 bp, Artificial Sequence
  ENSG00000137474_12 (sequence is synthesized)
tggacgtgcgcgacgccttcgtaaaggggatctacgggcggctgttcgtgtggattgtggacaagatcaacgcagcaatttacaagcctccctcccaggatgtgaagaactctcgcaggt

SEQ ID NO: 336179 - DNA, 120 bp, Artificial Sequence
  ENSG00000137474_13 (sequence is synthesized)
ccatcggcctcctggacatctttgggtttgagaactttgctgtgaacagctttgagcagctctgcatcaacttcgccaatgagcacctgcagcagttctttgtgcggcacgtgttcaagc

SEQ ID NO: 336180 - DNA, 120 bp, Artificial Sequence
  ENSG00000137474_14 (sequence is synthesized)
tggagcaggaggaatatgacctggagagcattgactggctgcacatcgagttcactgacaaccaggatgccctggacatgattgccaacaagcccatgaacatcatctccctcatcgatg

SEQ ID NO: 336181 - DNA, 120 bp, Artificial Sequence
  ENSG00000137474_15 (sequence is synthesized)
aggagagcaagttccccaagggcacagacaccaccatgttacacaagctgaactcccagcacaagctcaacgccaactacatcccccccaagaacaaccatgagacccagtttggcatca

SEQ ID NO: 336182 - DNA, 120 bp, Artificial Sequence
  ENSG00000137474_16 (sequence is synthesized)
accattttgcaggcatcgtctactatgagacccaaggcttcctggagaagaaccgagacaccctgcatggggacattatccagctggtccactcctccaggaacaagttcatcaagcaga

SEQ ID NO: 336183 - DNA, 120 bp, Artificial Sequence
  ENSG00000137474_17 (sequence is synthesized)
tcttccaggccgatgtcgccatgggcgccgagaccaggaagcgctcgcccacacttagcagccagttcaagcggtcactggagctgctgatgcgcacgctgggtgcctgccagcccttct

SEQ ID NO: 336184 - DNA, 120 bp, Artificial Sequence
  ENSG00000137474_18 (sequence is synthesized)
ttgtgcgatgcatcaagcccaatgagttcaagaagcccatgctgttcgaccggcacctgtgcgtgcgccagctgcggtactcaggaatgatggagaccatccgaatccgccgagctggct

SEQ ID NO: 336185 - DNA, 120 bp, Artificial Sequence
  ENSG00000137474_19 (sequence is synthesized)
accccatccgctacagcttcgtagagtttgtggagcggtaccgtgtgctgctgccaggtgtgaagccggcctacaagcagggcgacctccgcgggacttgccagcgcatggctgaggctg

SEQ ID NO: 336186 - DNA, 120 bp, Artificial Sequence
  ENSG00000137474_20 (sequence is synthesized)
tgctgggcacccacgatgactggcagataggcaaaaccaagatctttctgaaggaccaccatgacatgctgctggaagtggagcgggacaaagccatcaccgacagagtcatcctccttc

SEQ ID NO: 336187 - DNA, 120 bp, Artificial Sequence
  ENSG00000137474_21 (sequence is synthesized)
agaaagtcatccggggattcaaagacaggtctaactttctgaagctgaagaacgctgccacactgatccagaggcactggcggggtcacaactgtaggaagaactacgggctgatgcgtc

SEQ ID NO: 336188 - DNA, 120 bp, Artificial Sequence
  ENSG00000137474_22 (sequence is synthesized)
tgggcttcctgcggctgcaggccctgcaccgctcccggaagctgcaccagcagtaccgcctggcccgccagcgcatcatccagttccaggcccgctgccgcgcctatctggtgcgcaagg

SEQ ID NO: 336189 - DNA, 120 bp, Artificial Sequence
  ENSG00000137474_23 (sequence is synthesized)
ccttccgccaccgcctctgggctgtgctcaccgtgcaggcctatgcccggggcatgatcgcccgcaggctgcaccaacgcctcagggctgagtatctgtggcgcctcgaggctgagaaaa

SEQ ID NO: 336190 - DNA, 120 bp, Artificial Sequence
  ENSG00000137474_24 (sequence is synthesized)
tgcggctggcggaggaagagaagcttcggaaggagatgagcgccaagaaggccaaggaggaggccgagcgcaagcatcaggagcgcctggcccagctggctcgtgaggacgctgagcggg

SEQ ID NO: 336191 - DNA, 120 bp, Artificial Sequence
  ENSG00000137474_25 (sequence is synthesized)
agctgaaggagaaggaggccgctcggcggaagaaggagctcctggagcagatggaaagggcccgccatgagcctgtcaatcactcagacatggtggacaagatgtttggcttcctgggga

SEQ ID NO: 336192 - DNA, 120 bp, Artificial Sequence
  ENSG00000137474_26 (sequence is synthesized)
cttcaggtggcctgccaggccaggagggccaggcacctagtggctttgaggacctggagcgagggcggagggagatggtggaggaggacctggatgcagccctgcccctgcctgacgagg

SEQ ID NO: 336193 - DNA, 120 bp, Artificial Sequence
  ENSG00000137474_27 (sequence is synthesized)
atgaggaggacctctctgagtataaatttgccaagttcgcggccacctacttccaggggacaaccacgcactcctacacccggcggccactcaaacagccactgctctaccatgacgacg

SEQ ID NO: 336194 - DNA, 120 bp, Artificial Sequence
  ENSG00000137474_28 (sequence is synthesized)
agggtgaccagctggcagccctggcggtctggatcaccatcctccgcttcatgggggacctccctgagcccaagtaccacacagccatgagtgatggcagtgagaagatccctgtgatga

SEQ ID NO: 336195 - DNA, 120 bp, Artificial Sequence
  ENSG00000137474_29 (sequence is synthesized)
ccaagatttatgagaccctgggcaagaagacgtacaagagggagctgcaggccctgcagggcgagggcgaggcccagctccccgagggccagaagaagagcagtgtgaggcacaagctgg

SEQ ID NO: 336196 - DNA, 120 bp, Artificial Sequence
  ENSG00000137474_30 (sequence is synthesized)
aaagaagtccaagctcacagaggaggtgaccaagaggctgcatgacggggagtccacagtgcagggcaacagcatgctggaggaccggcccacctccaacctggagaagctgcacttcat

SEQ ID NO: 336197 - DNA, 120 bp, Artificial Sequence
  ENSG00000137474_31 (sequence is synthesized)
catcggcaatggcatcctgcggccagcactccgggacgagatctactgccagatcagcaagcagctgacccacaacccctccaagagcagctatgcccggggctggattctcgtgtctct

SEQ ID NO: 336198 - DNA, 120 bp, Artificial Sequence
  ENSG00000137474_32 (sequence is synthesized)
ctgcgtgggctgtttcgccccctccgagaagtttgtcaagtacctgcggaacttcatccacgggggcccgcccggctacgccccgtactgtgaggagcgcctgagaaggacctttgtcaa

SEQ ID NO: 336199 - DNA, 120 bp, Artificial Sequence
  ENSG00000137474_33 (sequence is synthesized)
tgggacacggacacagccgcccagctggctggagctgcaggccaccaagtccaagaagccaatcatgttgcccgtgacattcatggatgggaccaccaagaccctgctgacggactcggc

SEQ ID NO: 336200 - DNA, 120 bp, Artificial Sequence
  ENSG00000137474_34 (sequence is synthesized)
aaccacggccaaggagctctgcaacgcgctggccgacaagatctctctcaaggaccggttcgggttctccctctacattgccctgtttgacaaggtgtcctccctgggcagcggcagtga

SEQ ID NO: 336201 - DNA, 120 bp, Artificial Sequence
  ENSG00000137474_35 (sequence is synthesized)
ccacgtcatggacgccatctcccagtgcgagcagtacgccaaggagcagggcgcccaggagcgcaacgccccctggaggctcttcttccgcaaagaggtcttcacgccctggcacagccc

SEQ ID NO: 336202 - DNA, 120 bp, Artificial Sequence
  ENSG00000137474_36 (sequence is synthesized)
ctccgaggacaacgtggccaccaacctcatctaccagcaggtggtgcgaggagtcaagtttggggagtacaggtgtgagaaggaggacgacctggctgagctggcctcccagcagtactt

SEQ ID NO: 336203 - DNA, 120 bp, Artificial Sequence
  ENSG00000137474_37 (sequence is synthesized)
tgtagactatggctctgagatgatcctggagcgcctcctgaacctcgtgcccacctacatccccgaccgcgagatcacgcccctgaagacgctggagaagtgggcccagctggccatcgc

SEQ ID NO: 336204 - DNA, 120 bp, Artificial Sequence
  ENSG00000137474_38 (sequence is synthesized)
cgcccacaagaaggggatttatgcccagaggagaactgatgcccagaaggtcaaagaggatgtggtcagttatgcccgcttcaagtggcccttgctcttctccaggttttatgaagccta

SEQ ID NO: 336205 - DNA, 120 bp, Artificial Sequence
  ENSG00000137474_39 (sequence is synthesized)
caaattctcaggccccagtctccccaagaacgacgtcatcgtggccgtcaactggacgggtgtgtactttgtggatgagcaggagcaggtacttctggagctgtccttcccagagatcat

SEQ ID NO: 336206 - DNA, 120 bp, Artificial Sequence
  ENSG00000137474_40 (sequence is synthesized)
ggccgtgtccagcagcaggggagcgaaaacgacggcccccagcttcacgctggccaccatcaagggggacgaatacaccttcacctccagcaatgctgaggacattcgtgacctggtggt

SEQ ID NO: 336207 - DNA, 120 bp, Artificial Sequence
  ENSG00000137474_41 (sequence is synthesized)
caccttcctagaggggctccggaagagatctaagtatgttgtggccctgcaggataaccccaaccccgcaggcgaggagtcaggcttcctcagctttgccaagggagacctcatcatcct

SEQ ID NO: 336208 - DNA, 120 bp, Artificial Sequence
  ENSG00000137474_42 (sequence is synthesized)
ggaccatgacacgggcgagcaggtcatgaactcgggctgggccaacggcatcaatgagaggaccaagcagcgtggggacttccccaccgacagtgtgtacgtcatgcccactgtcaccat

SEQ ID NO: 336209 - DNA, 120 bp, Artificial Sequence
  ENSG00000137474_43 (sequence is synthesized)
gccaccgcgggagattgtggccctggtcaccatgactcccgatcagaggcaggacgttgtccggctcttgcagctgcgaacggcggagcccgaggtgcgtgccaagccctacacgctgga

SEQ ID NO: 336210 - DNA, 120 bp, Artificial Sequence
  ENSG00000137474_44 (sequence is synthesized)
ggagttttcctatgactacttcaggcccccacccaagcacacgctgagccgtgtcatggtgtccaaggcccgaggcaaggaccggctgtggagccacacgcgggaaccgctcaagcaggc

SEQ ID NO: 336211 - DNA, 120 bp, Artificial Sequence
  ENSG00000137474_45 (sequence is synthesized)
gctgctcaagaagctcctgggcagtgaggagctctcgcaggaggcctgcctggccttcattgctgtgctcaagtacatgggcgactacccgtccaagaggacacgctccgtcaacgagct

SEQ ID NO: 336212 - DNA, 120 bp, Artificial Sequence
  ENSG00000137474_46 (sequence is synthesized)
caccgaccagatctttgagggtcccctgaaagccgagcccctgaaggacgaggcatatgtgcagatcctgaagcagctgaccgacaaccacatcaggtacagcgaggagcggggttggga

SEQ ID NO: 336213 - DNA, 120 bp, Artificial Sequence
  ENSG00000137474_47 (sequence is synthesized)
gctgctctggctgtgcacgggccttttcccacccagcaacatcctcctgccccacgtgcagcgcttcctgcagtcccgaaagcactgcccactcgccatcgactgcctgcaacggctcca

SEQ ID NO: 336214 - DNA, 120 bp, Artificial Sequence
  ENSG00000137474_48 (sequence is synthesized)
gaaagccctgagaaacgggtcccggaagtaccctccgcacctggtggaggtggaggccatccagcacaagaccacccagattttccacaaagtctacttccctgatgacactgacgaggc

SEQ ID NO: 336215 - DNA, 120 bp, Artificial Sequence
  ENSG00000137474_49 (sequence is synthesized)
cttcgaagtggagtccagcaccaaggccaaggacttctgccagaacatcgccaccaggctgctcctcaagtcctcagagggattcagcctctttgtcaaaattgcagacaaggtcctcag

SEQ ID NO: 336216 - DNA, 120 bp, Artificial Sequence
  ENSG00000137474_50 (sequence is synthesized)
cgttcctgagaatgacttcttctttgactttgttcgacacttgacagactggataaagaaagctcggcccatcaaggacggaattgtgccctcactcacctaccaggtgttcttcatgaa

SEQ ID NO: 336217 - DNA, 120 bp, Artificial Sequence
  ENSG00000137474_51 (sequence is synthesized)
gaagctgtggaccaccacggtgccagggaaggatcccatggccgattccatcttccactattaccaggagttgcccaagtatctccgaggctaccacaagtgcacgcgggaggaggtgct

SEQ ID NO: 336218 - DNA, 120 bp, Artificial Sequence
  ENSG00000137474_52 (sequence is synthesized)
gcagctgggggcgctgatctacagggtcaagttcgaggaggacaagtcctacttccccagcatccccaagctgctgcgggagctggtgccccaggaccttatccggcaggtctcacctga

SEQ ID NO: 336219 - DNA, 120 bp, Artificial Sequence
  ENSG00000137474_53 (sequence is synthesized)
tgactggaagcggtccatcgtcgcctacttcaacaagcacgcagggaagtccaaggaggaggccaagctggccttcctgaagctcatcttcaagtggcccacctttggctcagccttctt

SEQ ID NO: 336220 - DNA, 120 bp, Artificial Sequence
  ENSG00000137474_54 (sequence is synthesized)
cgagcaaactacggagccaaacttccctgagatcctcctaattgccatcaacaagtatggggtcagcctcatcgatcccaaaacgaaggatatcctcaccactcatcccttcaccaagat

SEQ ID NO: 336221 - DNA, 120 bp, Artificial Sequence
  ENSG00000137474_55 (sequence is synthesized)
ctccaactggagcagcggcaacacctacttccacatcaccattgggaacttggtgcgcgggagcaaactgctctgcgagacgtcactgggctacaagatggatgacctcctgacttccta

SEQ ID NO: 336222 - DNA, 120 bp, Artificial Sequence
  ENSG00000137474_56 (sequence is synthesized)
cattagccagatgctcacagccatgagcaaacagcggggctccaggagcggcaagtgaacagtcacggggaggtgctggttccatgcctgctctcgaggcagcagtgggttcaggcccat

SEQ ID NO: 336223 - DNA, 120 bp, Artificial Sequence
  ENSG00000137474_57 (sequence is synthesized)
cagctacccctgcagctggggaagacttatgccatcccggcagcgaggctgggctggccagccaccactgactataccaactgggcctctgatgttcttccagtgaggcatctctctggg

SEQ ID NO: 336224 - DNA, 120 bp, Artificial Sequence
  ENSG00000137474_58 (sequence is synthesized)
atgcagaacttccctccatccacccctctggcacctgggttggtctaatcctagtttgctgtggccttcccggttgtgagagcctgtgatccttagatgtgtctcctgtttcagaccagc

SEQ ID NO: 336225 - DNA, 120 bp, Artificial Sequence
  ENSG00000137474_59 (sequence is synthesized)
cccaccatgcaacttcctttgactttctgtgtaccactgggatagaggaatcaagaggacaatctagctctccatactttgaacaaccaaatgtgcattgaatactctgaaaccgaaggg

SEQ ID NO: 336226 - DNA, 120 bp, Artificial Sequence
  ENSG00000137474_60 (sequence is synthesized)
actggatctgcaggtgggatgagggagacagaccacttttctatattgcagtgtgaatgctgggcccctgctcaagtctaccctgatcacctcagggcataaagcatgtttcattctctg

SEQ ID NO: 336227 - DNA, 120 bp, Artificial Sequence
  ENSG00000137474_61 (sequence is synthesized)
ggggtctgaggggcacaacagaggcaggagtatggtgaggaggctggtgtgagaggatacgtatggtcttatcacacagctaggatgggaggccttttgaggagcttggctgtgcgagga

SEQ ID NO: 336228 - DNA, 120 bp, Artificial Sequence
  ENSG00000137474_62 (sequence is synthesized)
gaacaggtaggtagctggaggcaggtgcagggtccaggaggctttttaaagatgggaggcccttgggctgagagggaggacaaagcagaggatggcctgggggacccaggaagggatgtg

SEQ ID NO: 336229 - DNA, 120 bp, Artificial Sequence
  ENSG00000137474_63 (sequence is synthesized)
acctaagccgccgttgccatgggcccgcagcagatggcccggtttagggttccggggcgggcggcgcgcacgggattaggtgaattagggagccggagcagtgccgccgtcgccgtcgca

SEQ ID NO: 336230 - DNA, 120 bp, Artificial Sequence
  ENSG00000137474_64 (sequence is synthesized)
ctgccgggggaccatgtgtggatggacctgagattggggcaggagttcgacgtgcccatcggggcggtggtgaagctctgcgactctgggcaggtccaggtggtggatgatgaagacaat

SEQ ID NO: 336231 - DNA, 120 bp, Artificial Sequence
  ENSG00000137474_65 (sequence is synthesized)
cgtgtccagcagcagggagtgccgtgtctggctctcactgggctgctctgatcttggctgtgctgcgcctcactcaggctgggcaggactgaccccggcggggccctgttctccgtgttg

SEQ ID NO: 336232 - DNA, 120 bp, Artificial Sequence
  ENSG00000137474_66 (sequence is synthesized)
ttggtggctgagtggtgcctctgtcaacctagcaagagattaagccaagcaggcctgggtttggcttcgctgctagctagttggtggagttaggaccttggtggagttatttcatctttc

SEQ ID NO: 336233 - DNA, 120 bp, Artificial Sequence
  ENSG00000137474_67 (sequence is synthesized)
taagcctctgattccttgtctgtaaagggggaatcctaaaacaggcatcccttggagatattgcaggttcagttgaaggccacagaaataaatatcacaataaagagagctgcagaaata

SEQ ID NO: 336234 - DNA, 120 bp, Artificial Sequence
  ENSG00000137474_68 (sequence is synthesized)
cttgccggggctattcacccttgagcacctcggtttccccctgagcctgtgctaattggctctgcctgactcctcaggactgccgagaactcggccaggtgcggtggttcacacctgtaa

SEQ ID NO: 336235 - DNA, 120 bp, Artificial Sequence
  ENSG00000137474_69 (sequence is synthesized)
attcttcagcaggagaaaagctgggacttgccccacgttacacagccacactgaggcatgtgtcgtgtcacaaacgagatcttccattcaagggggaccatgtgtggatggacctgagat

SEQ ID NO: 336236 - DNA, 120 bp, Artificial Sequence
  ENSG00000137474_70 (sequence is synthesized)
gcttcctggagaagaaccgagacaccctgcatggggacattatccagctggtccactcctccaggaacaagttcatcaagcagatcttccaggccgatgtcgccatgtttctctgtggtt

SEQ ID NO: 336237 - DNA, 120 bp, Artificial Sequence
  ENSG00000137474_71 (sequence is synthesized)
tacaggtgtgagaagggctgagtgtgcagtggctgctcgatgggctggcttgtttctttgcatcacttcatgtgcccctgggcagagtccagctccatgccagtgccagagggatccagg

SEQ ID NO: 336238 - DNA, 120 bp, Artificial Sequence
  ENSG00000137474_72 (sequence is synthesized)
aaagcacagagactcctccctaggactgtgggaaagagccatggccttggacacctgccctggtgagggaaggagggcagcaccctcagccttgtcccagcttagcgtcttagctggggt

SEQ ID NO: 336239 - DNA, 120 bp, Artificial Sequence
  ENSG00000137474_73 (sequence is synthesized)
aagtcctggggacagagggaccagaagaagctcagcctggcagtggaggcagacatgtaaacaggctggggtaatggaggatggcctgtgttctgacactggggagccctcgcccaggtg

SEQ ID NO: 336240 - DNA, 120 bp, Artificial Sequence
  ENSG00000137474_74 (sequence is synthesized)
gcagagctcgggaggctctgccgggtgtgagaaggcctcttagaggaggtgatatctgagctttccaggcagaccctggaaagagtgctcctggcaggggtcccacatagacaaaggcct

SEQ ID NO: 336241 - DNA, 120 bp, Artificial Sequence
  ENSG00000137474_75 (sequence is synthesized)
ggaggtgtgagaactcaggtctgggaaggaaatccaagtagtgagggcaggaggcgagagtgggctgtggagagcagcagcttggcaagcaggtgagaggctgggtttcctgcaggggtg

SEQ ID NO: 336242 - DNA, 120 bp, Artificial Sequence
  ENSG00000137474_76 (sequence is synthesized)
tcagtaccacataggcaacaggagaggctgactttatcccagctggggccaggcttcattcctgtccccaaatgcttttcttgctctgggcccccatctgatgccttctcatcttttttt

SEQ ID NO: 336243 - DNA, 120 bp, Artificial Sequence
  ENSG00000137474_77 (sequence is synthesized)
agacccagacaggagtagccctttccttttgttaaatgccatgcccagctctgtgcccacaggagggtgtctggcacgggagggggctcagtataggaggcatagccagaggggcccggg

SEQ ID NO: 336244 - DNA, 120 bp, Artificial Sequence
  ENSG00000137474_78 (sequence is synthesized)
accaggtgggcacctctgcactctagttgccttcgtgcacagctagcgttgctgtactttggccctgaaagcagagacccactgaccttgccaggtgtggggcccgtaccagcctggcct

SEQ ID NO: 336245 - DNA, 120 bp, Artificial Sequence
  ENSG00000137474_79 (sequence is synthesized)
caaagggattcctgccaagaccactggagccccaagggatggcccaacccctgatccttgtatcttctgattcttcagcccttaggggcttgacagttcctcctctgagcttccgatccc

SEQ ID NO: 336246 - DNA, 120 bp, Artificial Sequence
  ENSG00000137474_80 (sequence is synthesized)
tacctgttcaggcccctccttcagtgcggggctatcctctgacttcgagattctgctgttgtaactgggtaattccaaggcctctgtgcaaacattttctagcataggcacctgcaggaa

SEQ ID NO: 336247 - DNA, 120 bp, Artificial Sequence
  ENSG00000137474_81 (sequence is synthesized)
tcccaactaaccccaagaagcaggcatgttgtccccatttgacagagggacaaagagactcaggccgcgtgctgtgattaggatcacacagctgatggaactggggtttgattccaggtc

SEQ ID NO: 336248 - DNA, 80 bp, Artificial Sequence
  ENSG00000137478_0 (sequence is synthesized)
cggcggcgcaggcggccgaccgggagcgcggacaacgcggctgcggctaacccgccgcccggccggctgagaccctcgcg

SEQ ID NO: 336249 - DNA, 120 bp, Artificial Sequence
  ENSG00000137478_1 (sequence is synthesized)
cctggggcccccgccccctcgccgtctccgcctccttcctcacacacccccgggccgcccgggccgcccgggccccaagccttcccggtgctcctccctcgtctcctcacactcgctctc

SEQ ID NO: 336250 - DNA, 120 bp, Artificial Sequence
  ENSG00000137478_2 (sequence is synthesized)
cctcgtctcctcacactcgctctctggctggggtccgcctgccgcccgctggcctgctccctccggggcaagtcttgcttcttaagcgctcctttcacacacgcgcgcgctcgctgggcc

SEQ ID NO: 336251 - DNA, 120 bp, Artificial Sequence
  ENSG00000137478_3 (sequence is synthesized)
gtcccctcctctccggccctcctcctcctcctggtccttgctaacgctgccgtcggggaggattgatgtcccttcagcatcatgcagccgccgccgaggaaggtgaaagttacacaagaa

SEQ ID NO: 336252 - DNA, 120 bp, Artificial Sequence
  ENSG00000137478_4 (sequence is synthesized)
ctgaaaaacattcaagttgagcagatgacaaaacttcaagccaaacatcaagcagaatgtgatttgcttgaagatatgaggacattcagtcagaagaaggctgctattgaaagagagtat

SEQ ID NO: 336253 - DNA, 120 bp, Artificial Sequence
  ENSG00000137478_5 (sequence is synthesized)
gcacagggtatgcagaagttggctagtcaatacctgaagagagattggcctggagtaaaagctgatgatcggaatgattacaggagcatgtatcccgtttggaaatcttttctcgaggga

SEQ ID NO: 336254 - DNA, 120 bp, Artificial Sequence
  ENSG00000137478_6 (sequence is synthesized)
acaatgcaggtagcccagtctcggatgaatatatgtgaaaactataaaaacttcatttctgagcctgcaaggacagtgagaagcttaaaagaacagcaactaaaaaggtgtgtggaccag

SEQ ID NO: 336255 - DNA, 120 bp, Artificial Sequence
  ENSG00000137478_7 (sequence is synthesized)
ttgacaaagatccaaactgaattacaagagacagtgaaagatttagctaaaggcaaaaagaaatactttgagactgaacagatggctcatgcagtacgagagaaagctgacatcgaggca

SEQ ID NO: 336256 - DNA, 120 bp, Artificial Sequence
  ENSG00000137478_8 (sequence is synthesized)
aaatctaaacttagtctttttcaatcaagaatcagtttacagaaggcaagtgtaaagttaaaagcccggcgatctgagtgtaattccaaagctacccacgcaaggaatgattatcttctt

SEQ ID NO: 336257 - DNA, 120 bp, Artificial Sequence
  ENSG00000137478_9 (sequence is synthesized)
accctagcggcagcaaatgcacatcaggatcgctactatcaaacagatttagttaacattatgaaggctcttgatggaaatgtgtatgatcatctcaaggattatttaatagccttcagc

SEQ ID NO: 336258 - DNA, 120 bp, Artificial Sequence
  ENSG00000137478_10 (sequence is synthesized)
cggactgagctagaaacatgccaagctgtgcagaacacattccagtttttattagaaaactccagcaaggtggtccgggactacaatcttcagctgtttttgcaagaaaacgctgtattt

SEQ ID NO: 336259 - DNA, 120 bp, Artificial Sequence
  ENSG00000137478_11 (sequence is synthesized)
cacaaaccccagcccttccagttccagccttgtgacagtgatactagccgacagttagaatcagaaactgggaccacagaggagcacagtctaaataaggaagctcgaaaatgggccaca

SEQ ID NO: 336260 - DNA, 120 bp, Artificial Sequence
  ENSG00000137478_12 (sequence is synthesized)
cgtgtggcacgtgagcataaaaacattgttcaccaacaacgggttctaaatgatctggagtgtcatggagctgctgtatcagaacaaagccgagcagagctagaacagaaaatagatgaa

SEQ ID NO: 336261 - DNA, 120 bp, Artificial Sequence
  ENSG00000137478_13 (sequence is synthesized)
gctagagaaaatattcgtaaagcagagataattaaattgaaagctgaagcccggttggacctgctaaagcagattggtgtttctgtggacacatggctaaagagtgccatgaaccaagta

SEQ ID NO: 336262 - DNA, 120 bp, Artificial Sequence
  ENSG00000137478_14 (sequence is synthesized)
atggaagaactggaaaatgagcgatgggcccgccctcctgcagtgaccagtaatggcactttacactcgcttaatgcagataccgaaagagaagaaggcgaagagtttgaagataacatg

SEQ ID NO: 336263 - DNA, 120 bp, Artificial Sequence
  ENSG00000137478_15 (sequence is synthesized)
gatgttttcgatgacagcagttccagcccttctggcaccttaagaaattatccactcacctgcaaagttgtttattcctacaaggcttctcaaccagatgagttgaccattgaggaacat

SEQ ID NO: 336264 - DNA, 120 bp, Artificial Sequence
  ENSG00000137478_16 (sequence is synthesized)
gaggtgttagaagtgattgaagatggagatatggaagactgggtaaaggctcgaaataaagttggccaagtgggttatgtgccagaaaagtacctacagtttcccacctcgaacagcctc

SEQ ID NO: 336265 - DNA, 120 bp, Artificial Sequence
  ENSG00000137478_17 (sequence is synthesized)
ctgagcatgctgcagtccctggccgctttggacagtcggtcacacacgtccagcaattccacggaagcagaactcgtttcaggcagcctcaacggagatgccagtgtatgttttgtgaaa

SEQ ID NO: 336266 - DNA, 120 bp, Artificial Sequence
  ENSG00000137478_18 (sequence is synthesized)
gcactttatgattatgagggccagacagatgatgagttatcttttcctgagggagcaataatccgtatcttgaacaaagaaaaccaagatgatgatggcttctgggaaggggaattcaat

SEQ ID NO: 336267 - DNA, 120 bp, Artificial Sequence
  ENSG00000137478_19 (sequence is synthesized)
gtggaagaactttcagcctcagaaaatggtgacactccatggatgagagagattcagatctctccttcccccaagccacacgcctccctgcctccactgccgttgtacgaccagcctccc

SEQ ID NO: 336268 - DNA, 120 bp, Artificial Sequence
  ENSG00000137478_20 (sequence is synthesized)
agcagcccctaccccagcccagataagaggagctccctgtactttccccggtctccttcagcaaacgaaaaaagccttcatgctgagtcaccaggattctcacaggcatcaaggcatact

SEQ ID NO: 336269 - DNA, 120 bp, Artificial Sequence
  ENSG00000137478_21 (sequence is synthesized)
cctgagacctcatatggcaaactgcgacctgtccgggcagctccccctccacctacacagaatcaccgaaggccagcagagaagattgaagatgtggaaatcacactggtgtgatgatgg

SEQ ID NO: 336270 - DNA, 120 bp, Artificial Sequence
  ENSG00000137478_22 (sequence is synthesized)
gcttgcccatccattactgctacaatcaaggccaggcttggagtttggccagtcttgttttttaggcacctttgcatgatgatgactcttgaacagagcaaaaaacaaggaggattatgt

SEQ ID NO: 336271 - DNA, 120 bp, Artificial Sequence
  ENSG00000137478_23 (sequence is synthesized)
gtgactgggtggcctggtagactcctcccacgttttgaatatttcgtgccttttttttttgttgtcattttctatgtcatttctcctaccatagcacaaatcctagcggaccctaggagc

SEQ ID NO: 336272 - DNA, 120 bp, Artificial Sequence
  ENSG00000137478_24 (sequence is synthesized)
aaagaggggggcagccctcatgcctaacagtggtctgtttttatatgagactcaagaacaggcctcattccagggcacagtccctaaattactgatcatgtgcactcgtacagtatatta

SEQ ID NO: 336273 - DNA, 120 bp, Artificial Sequence
  ENSG00000137478_25 (sequence is synthesized)
ctgtgaccacaaggatgtggcaaagattctcatctttcttcaagtggcttttgctcatctgattgagaattaatcagatcatgttggctacataaggaaacagaaggagggatttcagga

SEQ ID NO: 336274 - DNA, 120 bp, Artificial Sequence
  ENSG00000137478_26 (sequence is synthesized)
gaggctggctcctccccaaggttagtccccagactgagaaagtgaaaccttattgggaaaaattggactgccctgaatttagcaccaattgcattaacgcacatctcttccacaactaac

SEQ ID NO: 336275 - DNA, 120 bp, Artificial Sequence
  ENSG00000137478_27 (sequence is synthesized)
agacttaaaataacagtgtccttcgtattaatatctgtgccattcatttagaattagcagagctaatatggaggggctgaactagtagccacatcttgttcatcacatagactaatagaa

SEQ ID NO: 336276 - DNA, 120 bp, Artificial Sequence
  ENSG00000137478_28 (sequence is synthesized)
aggaggctgtggctaaagcagaaatggaacttccggatctgaaattagccaatataatgttcttttgtatttgggtatttttcatcttaatttttacagcatatactcttcttaccagta

SEQ ID NO: 336277 - DNA, 120 bp, Artificial Sequence
  ENSG00000137478_29 (sequence is synthesized)
tccttagaatccaaatgtctagataagttgaggacacatacctgcattgttgagcttctctactggggacgccccggcattattttattcccaagccagcagaccggcccagacagccag

SEQ ID NO: 336278 - DNA, 120 bp, Artificial Sequence
  ENSG00000137478_30 (sequence is synthesized)
gctgtggctggtccagaccaactgctatggtggaaaatgcagcttccaggtcccactaccctgacatttccgtggaaggaagaacctggtggctcgtggaggaaaccagctttctatgag

SEQ ID NO: 336279 - DNA, 120 bp, Artificial Sequence
  ENSG00000137478_31 (sequence is synthesized)
aaaggactgaaggattgcgcaccctgcacaagtacagattgaccaggaaaagacaagtgtcttctgtgtgtcacagggaaagccaggagtggccttctctgcaggccagcaagcctgcag

SEQ ID NO: 336280 - DNA, 120 bp, Artificial Sequence
  ENSG00000137478_32 (sequence is synthesized)
cagcaggtgcccccacgtcaggtgctgactgtctgctgtccgctcctgtagaaggtagggagcacaatacctagggactaagggatgttcgccggttgtggtttgttttttttttttttc

SEQ ID NO: 336281 - DNA, 120 bp, Artificial Sequence
  ENSG00000137478_33 (sequence is synthesized)
cttggttaagaaatcaaatttgcagaatttaatctacaagttgtattatgctttgaaaactccatccctcctaagaatcttaaaaaacttgaaatgctcgccaaatgtccccatgggatt

SEQ ID NO: 336282 - DNA, 120 bp, Artificial Sequence
  ENSG00000137478_34 (sequence is synthesized)
tttgaccaaaagtaaggtgataactgaagaaatttttagttctttgatcacttcagtgacaatacccattaatgaatcttctccatgatttggggttttttttcgttgttgttttttaca

SEQ ID NO: 336283 - DNA, 120 bp, Artificial Sequence
  ENSG00000137478_35 (sequence is synthesized)
cttcttaacctgttgatctatttgaggtcttttgtgtttatcaaacttattcttaagtttaaaaaagaaattaaaagggtggtttttttaagattttaaagtttgctaacatattaaaaa

SEQ ID NO: 336284 - DNA, 120 bp, Artificial Sequence
  ENSG00000137478_36 (sequence is synthesized)
tcttcaaatgcttattaaatagagcagttcttgccacccagtcttgtattctgtctttagctagccaaattgtccttgaatttgggttttccacaacctcaaagggttatttgaaatctt

SEQ ID NO: 336285 - DNA, 120 bp, Artificial Sequence
  ENSG00000137478_37 (sequence is synthesized)
ttgttgtattttaaaatattttttggaagagctgctaattttattttaaaaaacaaagttgtgaaaacatgcctcctttttaaaaaataacccctccatccaggatatggaatccagcac

SEQ ID NO: 336286 - DNA, 120 bp, Artificial Sequence
  ENSG00000137478_38 (sequence is synthesized)
cacagtgcacaggtcagggctcggagggagcctctgtgcagatgtgctttctttacagtggctgtaaaaagtttgtatttattatgtataaaatgttgaataataaaaaaaatggaatta

SEQ ID NO: 336287 - DNA, 120 bp, Artificial Sequence
  ENSG00000137478_39 (sequence is synthesized)
tgacagtgatactagtttaaaagccgcccaactggtggatattgagctctcccctgtcagtgctctgagaatgaccatagctgagagccgacagttagaatcagaaactgggaccacaga

SEQ ID NO: 336288 - DNA, 120 bp, Artificial Sequence
  ENSG00000137478_40 (sequence is synthesized)
tagtcaccgcctccccaccccaagggaaaacaaattaaggattgacgggtcctgcctcgtccccggctgaggggcgaggaggctgtcgtgctgtcttcagaaaagcgaggaccgggcccg

SEQ ID NO: 336289 - DNA, 120 bp, Artificial Sequence
  ENSG00000137478_41 (sequence is synthesized)
aagcagaatgtgatttgcttgaagatatgaggacattcagtcagaagaaggctgctattgaaagagagtatgcacagtattccattgtatggatataccacagtttatccattttcctgt

SEQ ID NO: 336290 - DNA, 120 bp, Artificial Sequence
  ENSG00000137478_42 (sequence is synthesized)
ggataaaaagcacaactttcctcctgtcctataatatgcttttctttatatggtcacgtttgtcctgcacagtagaaccctaaagttaatcattcatcagtgagtaaaaaaattacaact

SEQ ID NO: 336291 - DNA, 120 bp, Artificial Sequence
  ENSG00000137478_43 (sequence is synthesized)
actatcaaacagatttagttaacattatgaaggtgcggcaaacatttgttatctagtggttattgatgtagaagatacaagagtgatgtaagaaataaaataatgactcaaactgggaaa

SEQ ID NO: 336292 - DNA, 120 bp, Artificial Sequence
  ENSG00000137486_0 (sequence is synthesized)
gattttccagcctgggcgctgacgccgcggacctccctgcgaccgtcgcggaccatgggcgacaaagggacccgagtgttcaagaaggccagtccaaatggaaagctcaccgtctacctg

SEQ ID NO: 336293 - DNA, 120 bp, Artificial Sequence
  ENSG00000137486_1 (sequence is synthesized)
ggaaagcgggactttgtggaccacatcgacctcgtggaccctgtggatggtgtggtcctggtggatcctgagtatctcaaagagcggagagtctatgtgacgctgacctgcgccttccgc

SEQ ID NO: 336294 - DNA, 120 bp, Artificial Sequence
  ENSG00000137486_2 (sequence is synthesized)
tatggccgggaggacctggatgtcctgggcctgacctttcgcaaggacctgtttgtggccaacgtacagtcgttcccaccggcccccgaggacaagaagcccctgacgcggctgcaggaa

SEQ ID NO: 336295 - DNA, 120 bp, Artificial Sequence
  ENSG00000137486_3 (sequence is synthesized)
cgcctcatcaagaagctgggcgagcacgcttaccctttcacctttgagatccctccaaaccttccatgttctgtgacactgcagccggggcccgaagacacggggaaggcttgcggtgtg

SEQ ID NO: 336296 - DNA, 120 bp, Artificial Sequence
  ENSG00000137486_4 (sequence is synthesized)
gactatgaagtcaaagccttctgcgcggagaatttggaggagaagatccacaagcggaattctgtgcgtctggtcatccggaaggttcagtatgccccagagaggcctggcccccagccc

SEQ ID NO: 336297 - DNA, 120 bp, Artificial Sequence
  ENSG00000137486_5 (sequence is synthesized)
acagccgagaccaccaggcagttcctcatgtcggacaagcccttgcacctagaagcctctctggataaggagatctattaccatggagaacccatcagcgtcaacgtccacgtcaccaac

SEQ ID NO: 336298 - DNA, 120 bp, Artificial Sequence
  ENSG00000137486_6 (sequence is synthesized)
aacaccaacaagacggtgaagaagatcaagatctcagtgcgccagtatgcagacatctgccttttcaacacagctcagtacaagtgccctgttgccatggaagaggctgatgacactgtg

SEQ ID NO: 336299 - DNA, 120 bp, Artificial Sequence
  ENSG00000137486_7 (sequence is synthesized)
gcacccagctcgacgttctgcaaggtctacacactgacccccttcctagccaataaccgagagaagcggggcctcgccttggacgggaagctcaagcacgaagacacgaacttggcctct

SEQ ID NO: 336300 - DNA, 120 bp, Artificial Sequence
  ENSG00000137486_8 (sequence is synthesized)
agcaccctgttgagggaaggtgccaaccgtgagatcctggggatcattgtttcctacaaagtgaaagtgaagctggtggtgtctcggggcggcctgttgggagatcttgcatccagcgac

SEQ ID NO: 336301 - DNA, 120 bp, Artificial Sequence
  ENSG00000137486_9 (sequence is synthesized)
gtggccgtggaactgcccttcaccctaatgcaccccaagcccaaagaggaacccccgcatcgggaagttccagagaacgagacgccagtagataccaatctcatagaacttgacacaaat

SEQ ID NO: 336302 - DNA, 120 bp, Artificial Sequence
  ENSG00000137486_10 (sequence is synthesized)
gatgacgacattgtatttgaggactttgctcgccagagactgaaaggcatgaaggatgacaaggaggaagaggaggatggtaccggctctccacagctcaacaacagatagacgggccgg

SEQ ID NO: 336303 - DNA, 120 bp, Artificial Sequence
  ENSG00000137486_11 (sequence is synthesized)
ccctgcctccacgtggctccggctccactctcgtgcactcggatgcttactcgtcttcttcctgttctggtttcttttcccctttgttcttccagtttctaccagggggccccgtgggct

SEQ ID NO: 336304 - DNA, 120 bp, Artificial Sequence
  ENSG00000137486_12 (sequence is synthesized)
tccagatcacggtgatgaacctctggcctcaggattggccccacatcaccacgccaacaggaccacagcgcactggctccaccccatctctgccatctccactcccctccttttcatgct

SEQ ID NO: 336305 - DNA, 120 bp, Artificial Sequence
  ENSG00000137486_13 (sequence is synthesized)
gtctcccagaaaagctgccagggctctggccttggaattggacttgagatggggagcagacaggggaggatggggaatgtgggacacggtgtggtgggcatgagggcttggaggggtggg

SEQ ID NO: 336306 - DNA, 120 bp, Artificial Sequence
  ENSG00000137486_14 (sequence is synthesized)
gatgagggctcaagacacgagagaagatgtccacggtcccaggtggttaacaaagttctggcagctaaaagatgaccgcgttgaaggccacctccttctggctgggaggggcagaactgt

SEQ ID NO: 336307 - DNA, 120 bp, Artificial Sequence
  ENSG00000137486_15 (sequence is synthesized)
ggacagattctcaatgcctttttgaagttctgacccaccaaagaccttctgccttcaccctcctccccacctgatgtccctctgtgtctgatagtgatgttggtgaaagttcgtagaccc

SEQ ID NO: 336308 - DNA, 120 bp, Artificial Sequence
  ENSG00000137486_16 (sequence is synthesized)
caggagtagagaaaagcaactggactgactttcttaccagcagttacctagactgaggcaagctgtgtggactcacccaagtatatttcagtactgtcaggctgtgacatcttagctacc

SEQ ID NO: 336309 - DNA, 120 bp, Artificial Sequence
  ENSG00000137486_17 (sequence is synthesized)
ttgtatttcaagtgcatggccctgtctagagatatgcacagagagaaaagcagagggagggagggagggggtcttcagcaagcaccagcccccagcagagtgagctgaagctcctgagga

SEQ ID NO: 336310 - DNA, 120 bp, Artificial Sequence
  ENSG00000137486_18 (sequence is synthesized)
gggttcccgaaggggggcgctcagagatgggggcagggggcggggagaggagagtctgccttatgtcccttccttgtggacttcacatggtcatgcaggaagtgaggatgggtgtccagc

SEQ ID NO: 336311 - DNA, 120 bp, Artificial Sequence
  ENSG00000137486_19 (sequence is synthesized)
gggggccgaggccactagtatcctcctgcttccccctgccattctccagggctggactgaccctatggactgggagagagtgcctgaggccaccatgccacagtcaaagggggtcctatc

SEQ ID NO: 336312 - DNA, 120 bp, Artificial Sequence
  ENSG00000137486_20 (sequence is synthesized)
tcagaaggtggcagcatccactgagatatcctcacccgaagggaaggaggctgctgggtagcaaataagccccttcttttcttggtgagttgatgacctccaatagctcccagtgtcatg

SEQ ID NO: 336313 - DNA, 120 bp, Artificial Sequence
  ENSG00000137486_21 (sequence is synthesized)
ggtacccagtacgcattagctggtgttgggttgattgagacctggggcagttcctggggcaagaagccagatgggagatgagatagaaagtgttaggagttatcctctttgcctggcctt

SEQ ID NO: 336314 - DNA, 120 bp, Artificial Sequence
  ENSG00000137486_22 (sequence is synthesized)
tgagaataacttactgtgtgactttgggcaagttccttccccactctgggcctcagtttctcacttgggaaagcaaggagtttgaccagatgatcacaatgggccttcctagctctggcc

SEQ ID NO: 336315 - DNA, 120 bp, Artificial Sequence
  ENSG00000137486_23 (sequence is synthesized)
accaagaatttgtgaacattagagctcctggtctggtgggtagagccagagctgctgactggtctctctgcctccagaggggatttattggacctcagaggtggcagggccctatggagc

SEQ ID NO: 336316 - DNA, 120 bp, Artificial Sequence
  ENSG00000137486_24 (sequence is synthesized)
accaactgccctcaaccccaccctgtgcccaagactgggaagggattgatgtcaggctgtggccataggtagcatgagttgcccaaggagggacagagcatatctttgctgaggcttggc

SEQ ID NO: 336317 - DNA, 120 bp, Artificial Sequence
  ENSG00000137486_25 (sequence is synthesized)
tgaggggcttatgatagggcttgcagtacctcacagccccctgtgggcacagacaccctgaggtttacccaggcaaatatattgattagcaggacaagggctctctcctcagtttctgct

SEQ ID NO: 336318 - DNA, 120 bp, Artificial Sequence
  ENSG00000137486_26 (sequence is synthesized)
cccttccatctctctcccatacttgtctgaaaagggagacaaaaaatcttatacaagtggcatctcaatcctttccagtccagcacctcctggggcaggcagtgtgacttatttcctgtg

SEQ ID NO: 336319 - DNA, 120 bp, Artificial Sequence
  ENSG00000137486_27 (sequence is synthesized)
gtgaaatcacctgtttcacaagcctggcagcgcgacttctgagtctcatgaccactcaacccaagggacccctccccagaccagaaccaagtcagctgggggctgtcgtactaccctgtc

SEQ ID NO: 336320 - DNA, 120 bp, Artificial Sequence
  ENSG00000137486_28 (sequence is synthesized)
cagtcttgagggcctagttgcaggtcccccaggcatccagcccctcctagagcttgctgggcaggctgcacctcatctgggcaggcgcagagctgatgaaatgctggagcaatgcatggc

SEQ ID NO: 336321 - DNA, 120 bp, Artificial Sequence
  ENSG00000137486_29 (sequence is synthesized)
aaacatatgccctccagtgtcttctgaaacctttggggctgacacaagatcctttagtgtttgggatgacctctttcctgcagacttcttcccctatccctaactcatgcatggaaaacg

SEQ ID NO: 336322 - DNA, 120 bp, Artificial Sequence
  ENSG00000137486_30 (sequence is synthesized)
ctcaacatcacgctcacccttttgggtttagcccagtgttatttagcaaatttctccagctgcagggaaggatcagagcactatcttttttttttttttttctcctggagccaggactgc

SEQ ID NO: 336323 - DNA, 120 bp, Artificial Sequence
  ENSG00000137486_31 (sequence is synthesized)
acaaggcaatggccaaatttagttgaattcagcctaccatcctttgctgatgactcagctctatgccaagtactggagccacagagatgggtcagtcccagcccctgtcctcaggaagcc

SEQ ID NO: 336324 - DNA, 120 bp, Artificial Sequence
  ENSG00000137486_32 (sequence is synthesized)
catggtcagggaaacgttgtagggataagtaatagagggcagttgccttcagggctcctggtggctgctggtccctatggtgccttgatgtgaattagaagacggtgccctttccaggtg

SEQ ID NO: 336325 - DNA, 120 bp, Artificial Sequence
  ENSG00000137486_33 (sequence is synthesized)
gattcagacctacactagaacgcacagctttgggagtgacacacaggttggattttagcaccccttgccccttggccagaggtgccctgctgcacggccatacgctgcagcctcgaggga

SEQ ID NO: 336326 - DNA, 120 bp, Artificial Sequence
  ENSG00000137486_34 (sequence is synthesized)
cacacaggccaaagtgtttccttcagcctcttcctggagaggaagccgcaggtcatgtttccaagcttctggtcaactccaggcaccacctcccagcccccaaacatggccgagccagtg

SEQ ID NO: 336327 - DNA, 120 bp, Artificial Sequence
  ENSG00000137486_35 (sequence is synthesized)
cttctctgcagggcccctttcctttctggagtcagcctgcccaggtgataccttgaagtgaaactaggggtgggggagcctcactaggccccaggcaccatcccacagtactggcggttt

SEQ ID NO: 336328 - DNA, 120 bp, Artificial Sequence
  ENSG00000137486_36 (sequence is synthesized)
ctctgccaagtgtttggggcctgcactggccaagccatccgtcactgggactttgcagtgtgccctgtgggtggcgtgtggacaccggtccgggcaggaaggaaaagcatgccccggtga

SEQ ID NO: 336329 - DNA, 120 bp, Artificial Sequence
  ENSG00000137486_37 (sequence is synthesized)
aaacccaccgagcagagagccagcgggacctcctcagcattccacccaggggaagagttcagtccccatgaagataaggactgagttatttggctgcacctctcctcagcctcaaagctc

SEQ ID NO: 336330 - DNA, 120 bp, Artificial Sequence
  ENSG00000137486_38 (sequence is synthesized)
agacctgctagagtgggttcacctggctgttggttctgtgggagagttcctgacaagctggttcctacatggtgcagtgaaaggaactctgtcctggaagtccccaatgccgcctctcag

SEQ ID NO: 336331 - DNA, 120 bp, Artificial Sequence
  ENSG00000137486_39 (sequence is synthesized)
tcctgcctgtcaccaaccacctggggggcttgggcaagctactcaacctctggggctcaatttccctaactgtaaaatgggattgtaatcccttccctgcctgacgcaggaattgttatg

SEQ ID NO: 336332 - DNA, 120 bp, Artificial Sequence
  ENSG00000137486_40 (sequence is synthesized)
aggcccagatgagatgaaagtcagcggtcagggctctgtaagttgaaaatggctggatgtgtgtggccctgccactgcagggatggcccaaggtcacacagaaagtttgctgcaggagga

SEQ ID NO: 336333 - DNA, 120 bp, Artificial Sequence
  ENSG00000137486_41 (sequence is synthesized)
gccctccccaccagtcttcatcgcttgccctgcttctcacttaggcagatgtcaaccagaatgagatacagccaatttggctttgatgacccagctgagagggaaatttagatacaattc

SEQ ID NO: 336334 - DNA, 120 bp, Artificial Sequence
  ENSG00000137486_42 (sequence is synthesized)
aggaatatcatgcccaaaaatagtggtcccagcaaccaggacacagagggaagacctggatattgtcagtgattggtggagggggacatcttggaccctcctaggcctggtgtcacatct

SEQ ID NO: 336335 - DNA, 120 bp, Artificial Sequence
  ENSG00000137486_43 (sequence is synthesized)
cccatctctcagaccccacagaggccaaggggccttggctctgacccaggttaaagagagccaccagcccccaggctcagggagctgaaaccacccatccgcagaaatctaagggcaagg

SEQ ID NO: 336336 - DNA, 120 bp, Artificial Sequence
  ENSG00000137486_44 (sequence is synthesized)
agaaatagaaattgtctgttccttcccttcaaagtgtaaggcctcttccaggagcaactggagccaccacagcttctcagtgacattgggagggcttcgggcccaggaaaaacccaagcc

SEQ ID NO: 336337 - DNA, 120 bp, Artificial Sequence
  ENSG00000137486_45 (sequence is synthesized)
ttttgtcctgagagccgagccacagcggatgcagtggcgtcagcatcccagagcggcagcttctctcctgcctgtcactggggactggttgctctccacccatccaggaggaaggggtta

SEQ ID NO: 336338 - DNA, 120 bp, Artificial Sequence
  ENSG00000137486_46 (sequence is synthesized)
ggtcccagtcttacactcttatagggtctcatggacataggcctatgcctgttctgatatctataattttttaaactcaaaaggaccaaaacactcctgaaccctcatctatacggcctg

SEQ ID NO: 336339 - DNA, 120 bp, Artificial Sequence
  ENSG00000137486_47 (sequence is synthesized)
cactgggcttggtgtttcctcctggcccaggcagctccatctcttctgccattcctcctggacgaaagtggcaggaccccacctctaccacttccccacagggtcactgcacagcggctt

SEQ ID NO: 336340 - DNA, 120 bp, Artificial Sequence
  ENSG00000137486_48 (sequence is synthesized)
caaagacacgccctgttgaaggggaaacatcctccccccatcacactccaactcgtcaccccaaaagggaagtcaaagcacaggtccgtggggcctatggtttgtagacactgacacagt

SEQ ID NO: 336341 - DNA, 120 bp, Artificial Sequence
  ENSG00000137486_49 (sequence is synthesized)
ggttttcaaaccaggtgctgcggaacccctgatattccacagagctttgtcaggggatgctaaagtgggaagatgggagtggaggcaaaggataggtttccagccctcctcccatttccg

SEQ ID NO: 336342 - DNA, 120 bp, Artificial Sequence
  ENSG00000137486_50 (sequence is synthesized)
ccgccaccagaataactctgcttttatctgtcttgcctactgagatttcattttcaagctttctttgaagaagaacttcaaaccaccatctcgaggtttgatcttagaccagccagcaca

SEQ ID NO: 336343 - DNA, 120 bp, Artificial Sequence
  ENSG00000137486_51 (sequence is synthesized)
ggttctattcttgctgttcatgttggaatggctccagcgttccagtacaaagtgtctttgtgttggaacttgggtcacagacccaggcacaagcatttatacacacacacacacacacac

SEQ ID NO: 336344 - DNA, 120 bp, Artificial Sequence
  ENSG00000137486_52 (sequence is synthesized)
acacacacacacacacacacgtacatagttgatggtttttctagccaacccaccctgaagctctggccaaggtttgatttggacagggacctggtgctcagtggggatgggtcgtgaccc

SEQ ID NO: 336345 - DNA, 120 bp, Artificial Sequence
  ENSG00000137486_53 (sequence is synthesized)
tgatattggcccatgaagcatggggagctctggagcaaggaaacaggctcaatcccccactgaggacttgtgtctgcacccctatctggcaccccactttcctggcctaggcccaaggga

SEQ ID NO: 336346 - DNA, 120 bp, Artificial Sequence
  ENSG00000137486_54 (sequence is synthesized)
cacagcaggagaagcagtgtgataggagagaggctagggttaaattcatctttacacagcgccggatggatggaaatcttggctcacataaaagacagactcagggaggattttatgaca

SEQ ID NO: 336347 - DNA, 120 bp, Artificial Sequence
  ENSG00000137486_55 (sequence is synthesized)
aaagtccctcctttgagggcaggattcccccaggaatcctggacactttagtgagaactggaccagcccttggcacaaaaccctgcctgccctgtcccccactcccaccccccagggaat

SEQ ID NO: 336348 - DNA, 120 bp, Artificial Sequence
  ENSG00000137486_56 (sequence is synthesized)
tctaggtgaaaatgtgaagctcagggcacagcaagcgcatgacacgggtgtattacattcggtccgagtgtgtccttagtttccctgtgtgcaaaatggggctagtccaggctcttccca

SEQ ID NO: 336349 - DNA, 120 bp, Artificial Sequence
  ENSG00000137486_57 (sequence is synthesized)
cctcactgggacaattgcaagggtcataggagaggtgggtatgataggtggtcatatgaggtggtgagtatgagaggtgggtgcctcacaaactcggggtatggtcctgacctgcatggc

SEQ ID NO: 336350 - DNA, 120 bp, Artificial Sequence
  ENSG00000137486_58 (sequence is synthesized)
agatgagcagagcacttgggaacgagcataggaagtgccatcttcccgggcatctctgctcagtgttaaggtctagccacagacactgtgggacctgcctcttcctatggaatgggggcc

SEQ ID NO: 336351 - DNA, 120 bp, Artificial Sequence
  ENSG00000137486_59 (sequence is synthesized)
tgcatgggttgtgtcctggggcaggagtgagggatggctgggaagaatctccaggtctgtggcccttgtgttgagtgattattttgtgacactctcattcctggaccacctgccaggttt

SEQ ID NO: 336352 - DNA, 120 bp, Artificial Sequence
  ENSG00000137486_60 (sequence is synthesized)
atctgttatacctgtggcattcttattatgtcagacaagttattatagttcattcaactctaacaaatgaacaaaagaacaataaataggaggccattaaaggtcttttgtggcagagga

SEQ ID NO: 336353 - DNA, 120 bp, Artificial Sequence
  ENSG00000137486_61 (sequence is synthesized)
tctcggggcgggtgagtgctccagccaagcccaagaccccggagtgcagaggggagcgtcccaggtgcccacaggcccctgccccattctgcctgtttgcagcccttttagctgcatcca

SEQ ID NO: 336354 - DNA, 120 bp, Artificial Sequence
  ENSG00000137486_62 (sequence is synthesized)
gtcccctggggcccttggtctgatgggtgtatgggagtgtctgggctgcaatacatgagacaggacagtggtggatgtgacaggtggctcgttctgtcctcttcttgacagatccctcca

SEQ ID NO: 336355 - DNA, 120 bp, Artificial Sequence
  ENSG00000137486_63 (sequence is synthesized)
tgaagtcaaagccttctgcgcggagaatttggaggagaagatccacaagcggtgagtaggatgccagggtgtgggccgcctgctgggtgagggagggagacaggatgggcaaagtccaag

SEQ ID NO: 336356 - DNA, 84 bp, Artificial Sequence
  ENSG00000137486_64 (sequence is synthesized)
caaactcctagcctcaagcaatcctcctgtcagcctctcaagttgctgggattacaggcatgagcaactgtgcctgctgtggct

SEQ ID NO: 336357 - DNA, 90 bp, Artificial Sequence
  ENSG00000137486_65 (sequence is synthesized)
gctgtaattctttaaataaatgtgctttttagcactgtgctgcttgactaggataatcttttagaatatccgagattcagtcctgtttgt

SEQ ID NO: 336358 - DNA, 120 bp, Artificial Sequence
  ENSG00000137486_66 (sequence is synthesized)
ggataatcttttagaatatccgagattcagtcctgtttgtgcgtagaatgtagatgtgcctcttttgagtggcagtggtctccttgcccgagctgggctggcccaagtggtccgtgtgtc

SEQ ID NO: 336359 - DNA, 120 bp, Artificial Sequence
  ENSG00000137486_67 (sequence is synthesized)
tgggggacagaggttgggagagggagacttggagcaggctcagactagatattctgctgggctggagatcagggctggggttggctctggggagggccatctccacagctgcttcctttc

SEQ ID NO: 336360 - DNA, 120 bp, Artificial Sequence
  ENSG00000137486_68 (sequence is synthesized)
cccattggcttgactgaccagaatcacagggcactgggttggaaggaatcttagtggtcatttcagatagccaggttcaggtgtgagctgggagacacaatttctccttaacaaacctca

SEQ ID NO: 336361 - DNA, 120 bp, Artificial Sequence
  ENSG00000137486_69 (sequence is synthesized)
ccttgctcttccatcccacctgagtgacagggatctttacagagagcaaagcctgattacactgatacagggagtggcccccaagagagctgtctgaattactgatcacctgaattatag

SEQ ID NO: 336362 - DNA, 120 bp, Artificial Sequence
  ENSG00000137486_70 (sequence is synthesized)
gagcttttggagaaatgcagacttcatggctttcaaacttctacactagtgaggagggaactgctggccaagtgttgctaaggagaggtcctcaggagatcctattttgtaaacaaggtc

SEQ ID NO: 336363 - DNA, 120 bp, Artificial Sequence
  ENSG00000137486_71 (sequence is synthesized)
tccttgcagccagctggatgcacttatattccaaaaatgcatgtaccccaaacacagcagtttggcctccttctgtcacaagatggcagtgtggctcatcctaagaaatcttaaactaat

SEQ ID NO: 336364 - DNA, 120 bp, Artificial Sequence
  ENSG00000137486_72 (sequence is synthesized)
ttgacaggtgaaattcattcaattcaattcagttccatatcattcagcaaagatttcctcaacccaggcttgcgtccaggctggtgctgagtgccagagtcccagagaggaatcagatgt

SEQ ID NO: 336365 - DNA, 120 bp, Artificial Sequence
  ENSG00000137486_73 (sequence is synthesized)
ggtccctgaccttatcgttcctggcccggtagaaggttaagatccagattcttccactaaaatgttggcaaacccagtcttccaccagctccattctgaagcaatccccaaagcaaaagg

SEQ ID NO: 336366 - DNA, 120 bp, Artificial Sequence
  ENSG00000137486_74 (sequence is synthesized)
gaacagtctttgtgtctaggctaagctggtcccaccttggacaaccagtctctcttcagacagggcagcaggtacggggtcagcctcactctcccattcagtgatgggtctggaggctct

SEQ ID NO: 336367 - DNA, 120 bp, Artificial Sequence
  ENSG00000137486_75 (sequence is synthesized)
cctgggtggcgttggctgcaacaggaccaaagtgttctgaggacctacacctggcctcatgtaacccctggcaacctggaatcaaagtgcgatcatccccatttcacagatggggaaact

SEQ ID NO: 336368 - DNA, 120 bp, Artificial Sequence
  ENSG00000137486_76 (sequence is synthesized)
gggagagctgagcctgcggggctggccctggcctggctgctgctgcctgcagcccccagctcaggctccctccacctcacagtccactgctttggcgctgcttctgggctggcctcttca

SEQ ID NO: 336369 - DNA, 120 bp, Artificial Sequence
  ENSG00000137491_0 (sequence is synthesized)
agaaggagcaagtgacccagggagacaaacacttggagatacttggggctgagtttgagcaagactccctaacctgtgtctggacaagtctgatgtcctgtgtggcccaagaagaactga

SEQ ID NO: 336370 - DNA, 120 bp, Artificial Sequence
  ENSG00000137491_1 (sequence is synthesized)
ccccgtgtctggagctcccaccgttattgcatccctgctgtggctcacctgctgctgtctccaggagcccctgagaagatttgcttcctctcccctgctaagctccaggtcctgagatta

SEQ ID NO: 336371 - DNA, 120 bp, Artificial Sequence
  ENSG00000137491_2 (sequence is synthesized)
aattaggggctggagctcactgcactccagcagtcatgggacccaggatagggccagcgggtgaggtaccccaggtaccagacaaggaaaccaaagccacaatgggcacagaaaacacac

SEQ ID NO: 336372 - DNA, 120 bp, Artificial Sequence
  ENSG00000137491_3 (sequence is synthesized)
ctggaggcaaagccagcccagaccctcaggacgtgcggccaagtgtgttccataacatcaagctgttcgttctgtgccacagcctgctgcagctggcgcagctcatgatctccggctacc

SEQ ID NO: 336373 - DNA, 120 bp, Artificial Sequence
  ENSG00000137491_4 (sequence is synthesized)
taaagagctccatctccacagtggagaagcgcttcggcctctccagccagacgtcggggctgctggcctccttcaacgaggtggggaacacagccttgattgtgtttgtgagctattttg

SEQ ID NO: 336374 - DNA, 120 bp, Artificial Sequence
  ENSG00000137491_5 (sequence is synthesized)
gcagccgggtgcaccgaccccgaatgattggctatggggctatccttgtggccctggcgggcctgctcatgactctcccgcacttcatctcggagccataccgctacgacaacaccagcc

SEQ ID NO: 336375 - DNA, 120 bp, Artificial Sequence
  ENSG00000137491_6 (sequence is synthesized)
ctgaggatatgccacaggacttcaaggcttccctgtgcctgcccacaacctcggccccagcctcggccccctccaatggcaactgctcaagctacacagaaacccagcatctgagtgtgg

SEQ ID NO: 336376 - DNA, 120 bp, Artificial Sequence
  ENSG00000137491_7 (sequence is synthesized)
tggggatcatgttcgtggcacagaccctgctgggcgtgggcggggtgcccattcagccctttggcatctcctacatcgatgactttgcccacaacagcaactcgcccctctacctcggga

SEQ ID NO: 336377 - DNA, 120 bp, Artificial Sequence
  ENSG00000137491_8 (sequence is synthesized)
tcctgtttgcagtgaccatgatggggccaggcctggcctttgggctgggcagcctcatgctgcgcctttatgtggacattaaccagatgccagaaggtggtatcagcctgaccataaagg

SEQ ID NO: 336378 - DNA, 120 bp, Artificial Sequence
  ENSG00000137491_9 (sequence is synthesized)
acccccgatgggtgggtgcctggtggctgggtttcctcatcgctgccggtgcagtggccctggctgccatcccctacttcttcttccccaaggaaatgcccaaggaaaaacgtgagcttc

SEQ ID NO: 336379 - DNA, 120 bp, Artificial Sequence
  ENSG00000137491_10 (sequence is synthesized)
agtttcggcgaaaggtcttagcagtcacagactcacctgccaggaagggcaaggactctccctctaagcagagccctggggagtccacgaagaagcaggatggcctagtccagattgcac

SEQ ID NO: 336380 - DNA, 120 bp, Artificial Sequence
  ENSG00000137491_11 (sequence is synthesized)
caaacctgactgtgatccagttcattaaagtcttccccagggtgctgctgcagaccctacgccaccccatcttcctgctggtggtcctgtcccaggtatgcttgtcatccatggctgcgg

SEQ ID NO: 336381 - DNA, 120 bp, Artificial Sequence
  ENSG00000137491_12 (sequence is synthesized)
gcatggccaccttcctgcccaagttcctggagcgccagttttccatcacagcctcctacgccaacctgctcatcggctgcctctccttcccttcggtcatcgtgggcatcgtggtgggtg

SEQ ID NO: 336382 - DNA, 120 bp, Artificial Sequence
  ENSG00000137491_13 (sequence is synthesized)
gcgtcctggtcaagcggctccacctgggccctgtgggatgcggtgccctttgcctgctggggatgctgctgtgcctcttcttcagcctgccgctcttctttatcggctgctccagccacc

SEQ ID NO: 336383 - DNA, 120 bp, Artificial Sequence
  ENSG00000137491_14 (sequence is synthesized)
agattgcgggcatcacacaccagaccagtgcccaccctgggctggagctgtctccaagctgcatggaggcctgctcctgcccattggacggctttaaccctgtctgcgaccccagcactc

SEQ ID NO: 336384 - DNA, 120 bp, Artificial Sequence
  ENSG00000137491_15 (sequence is synthesized)
gtgtggaatacatcacaccctgccacgcaggctgctcaagctgggtggtccaggatgctctggacaacagccaggttttctacaccaactgcagctgcgtggtggagggcaaccccgtgc

SEQ ID NO: 336385 - DNA, 120 bp, Artificial Sequence
  ENSG00000137491_16 (sequence is synthesized)
tggcaggatcctgcgactcaacgtgcagccatctggtggtgcccttcctgctcctggtcagcctgggctcggccctggcctgtctcacccacacaccctccttcatgctcatcctaagag

SEQ ID NO: 336386 - DNA, 120 bp, Artificial Sequence
  ENSG00000137491_17 (sequence is synthesized)
gagtgaagaaagaagacaagactttggctgtgggcatccagttcatgttcctgaggattttggcctggatgcccagccccgtgatccacggcagcgccatcgacaccacctgtgtgcact

SEQ ID NO: 336387 - DNA, 120 bp, Artificial Sequence
  ENSG00000137491_18 (sequence is synthesized)
tccgaaaccggttcatcggcctccagttcttcttcaaaacaggttctgtgatctgcttcgccttagttttggctgtcctgaggcagcaggacaaagaggcaaggaccaaagagagcagat

SEQ ID NO: 336388 - DNA, 120 bp, Artificial Sequence
  ENSG00000137491_19 (sequence is synthesized)
ccagccctgccgtagagcagcaattgctagtgtcggggccagggaagaagccagaggattcccgagtgtgagctgtcttggggccccacctggccaagagtagcagccacagcagtacct

SEQ ID NO: 336389 - DNA, 120 bp, Artificial Sequence
  ENSG00000137491_20 (sequence is synthesized)
cctctgagtcctttgcccaagattgggtgtcaagagccctgtgttccattctggctcctccactaaattgctgtgtgacttcaggcaagacattgatcctctctcagcctttgcttgcta

SEQ ID NO: 336390 - DNA, 120 bp, Artificial Sequence
  ENSG00000137491_21 (sequence is synthesized)
gtctgaaccaaagagttgtttgggcatttgctgtgttggccatttctggagcaagagggtcttcttcctccttcccccagccagccagctgtcctggggccaggctttcctgggtggaaa

SEQ ID NO: 336391 - DNA, 120 bp, Artificial Sequence
  ENSG00000137491_22 (sequence is synthesized)
gaagtatacctttccctggggccctaggatagcaaagtgagccatagtgggccaggctgccctccatgctgggccccagcccaggtctgcactcgcctggatcaccttctttgagcctta

SEQ ID NO: 336392 - DNA, 120 bp, Artificial Sequence
  ENSG00000137491_23 (sequence is synthesized)
gccatctcctgtcaggtaggaatgaacttgccagccttcaggctcgttcagctatgaccatctgtgcggtcagggtacactcagctctcctccccaactccagcagcctttaagaagtgt

SEQ ID NO: 336393 - DNA, 120 bp, Artificial Sequence
  ENSG00000137491_24 (sequence is synthesized)
ccctttggcgccccctggaggcagagcactgagctggaccctgggtagactcccacagggaggacggagctggcctcaggagtgggacacccagacttggcagggccttcaagaggcctg

SEQ ID NO: 336394 - DNA, 120 bp, Artificial Sequence
  ENSG00000137491_25 (sequence is synthesized)
tgtgggggccccaggaatccttagctgaagcggggagactcactctccatctcaggaaattctagcccttgccctcagggagccacggttgagggtgaggcccaacacctgccttagggc

SEQ ID NO: 336395 - DNA, 120 bp, Artificial Sequence
  ENSG00000137491_26 (sequence is synthesized)
cctgggtgggcaagtctgggccctggggtagggagggagactcaggcccacacttgggtattttctaatttcagacaaacacacactcagcgcgcactcactgattcctacacattgcca

SEQ ID NO: 336396 - DNA, 120 bp, Artificial Sequence
  ENSG00000137491_27 (sequence is synthesized)
agatttcacacatgtgaccaggggccaccaaagtccctgtgacctttgtgactaggatcctaatttctctattttctcctgggtgcctgggtctgtgtcacctggggcagtgtggataat

SEQ ID NO: 336397 - DNA, 120 bp, Artificial Sequence
  ENSG00000137491_28 (sequence is synthesized)
gtttagttctgtgacactgttttttgggggtggcacctggttctccgatgcctgggctggtgtcaggcccaggactgtagtgctgggagcagtaaagctcagctctgtgtaatgagtgat

SEQ ID NO: 336398 - DNA, 120 bp, Artificial Sequence
  ENSG00000137491_29 (sequence is synthesized)
gctatggcttgctcgtgtcttatgatccaatccttttctacatcagcccttgttttgttttatggctagtcttatctggcctggttatttccttgcggggaggagagggtttgctaatct

SEQ ID NO: 336399 - DNA, 120 bp, Artificial Sequence
  ENSG00000137491_30 (sequence is synthesized)
gctcccagcccaacctattaccaccccacctcgctgggacctactgctcgggaggcagcagacagggagccaccagcagtggcttcctggccctgtgctgggggtggggggaagctgggg

SEQ ID NO: 336400 - DNA, 120 bp, Artificial Sequence
  ENSG00000137491_31 (sequence is synthesized)
gcacatgtggcccttgccttctgagcagctcccagtgccagggctttgagactttcccacatgataaaagaaaagggaggtacagaagttccaattccctttttattttgctggttggta

SEQ ID NO: 336401 - DNA, 120 bp, Artificial Sequence
  ENSG00000137491_32 (sequence is synthesized)
tctgtaaatgtttaataaatatctgagcatgtatctatcaacgccaagaatttcaaagtctccttcaacaatatgaggcttttaggatgtttatattccttcatccctcttgtttcccag

SEQ ID NO: 336402 - DNA, 120 bp, Artificial Sequence
  ENSG00000137491_33 (sequence is synthesized)
gttttgcagggaaaaaaagtctggaattatagatacagcttattattaaatttgttcttgcataatgtctcttctattacaaaaattctttcttcataaactgcattagaggtttgcaac

SEQ ID NO: 336403 - DNA, 120 bp, Artificial Sequence
  ENSG00000137491_34 (sequence is synthesized)
aaccacatcatttccattaacttagatttaggttttactggattcattgctcaccattattgcttgtatattacatcttttccaatctttatattctggtctaatttttgtttgagtgtc

SEQ ID NO: 336404 - DNA, 120 bp, Artificial Sequence
  ENSG00000137491_35 (sequence is synthesized)
ttcgtctactaatggtttcaaaaatggaataaggtcatgaggatttctgaatcctcacctgtccaaattgtcattcacattttatagaagaggaaactggctcagaaagcacaagtgact

SEQ ID NO: 336405 - DNA, 120 bp, Artificial Sequence
  ENSG00000137491_36 (sequence is synthesized)
atatctctaaaggataaagtactcccaggaaggctttgagccttggcagaaaaggctgggattgaagcttcagggagagccagaggtgaggctggagtgggagatcacctgaggcagggc

SEQ ID NO: 336406 - DNA, 120 bp, Artificial Sequence
  ENSG00000137491_37 (sequence is synthesized)
tgtctgcagctgccagggctggaggtgagaggcccagagggctccagctgtccaggccagccagccacttcaagggttgatgggactaatccctgcacacctgtctcccatctgaggccc

SEQ ID NO: 336407 - DNA, 120 bp, Artificial Sequence
  ENSG00000137491_38 (sequence is synthesized)
tgtgtggctggggcacatgagtctagaagctctggtctatgggaaagcaaagagaagcccaggcctcttggcttgggctggcttctatcgggtgcctgtgagccctggcagtccagatca

SEQ ID NO: 336408 - DNA, 120 bp, Artificial Sequence
  ENSG00000137491_39 (sequence is synthesized)
cttcgcagagtccttggctggaggttttcctcgctacctagggagtgagtgcaggctgggatcaaacactccagggggcaagcccggggacatggccagcctggggatgttttcttacag

SEQ ID NO: 336409 - DNA, 120 bp, Artificial Sequence
  ENSG00000137491_40 (sequence is synthesized)
ttggtgtgtagaatgtgggggaatgatgctctcctggctccctccctcttcttctctactttctctctgcttccctctccctgcccaccacctcagcccaggctcaacttgcacatagac

SEQ ID NO: 336410 - DNA, 120 bp, Artificial Sequence
  ENSG00000137491_41 (sequence is synthesized)
agcccttgaggtgcctgctcctcaagccgtctttgctcagccaacgggtcacgatctcggactcccagccagctctaccccaactggctgtggaacttgggcctctcacaagccttcccc

SEQ ID NO: 336411 - DNA, 120 bp, Artificial Sequence
  ENSG00000137491_42 (sequence is synthesized)
gtgggggtggggcaggggcaggtggataccaggaggtccttaaccacaggcagaacaaggaattccaaggacggagttcaagaaaggaggccacttgggtgtcctggcccccacaatatg

SEQ ID NO: 336412 - DNA, 120 bp, Artificial Sequence
  ENSG00000137491_43 (sequence is synthesized)
gccttaactgtgttcatcccatggcaacctactgaggcaaggttttctccccatcttgcagataagaaaattgaggctcagagaagttcaggagctggcccccatcacatagcaagtgtt

SEQ ID NO: 336413 - DNA, 120 bp, Artificial Sequence
  ENSG00000137491_44 (sequence is synthesized)
gggtggaatagtactggttccctggcccacagcccaggctcctacttgcccaggggagaggaggacatacctagggccctgtcctggcctctggaggtgagggcataatacctgcaatgg

SEQ ID NO: 336414 - DNA, 120 bp, Artificial Sequence
  ENSG00000137491_45 (sequence is synthesized)
atgagctgcaggaggtgcatctaggaaaccaaactgtgtcagtctggtgcatgactctgaatgctgcttcaaggctacatacaagtgcttattaggtgcccgctgtggacccaacccatg

SEQ ID NO: 336415 - DNA, 120 bp, Artificial Sequence
  ENSG00000137491_46 (sequence is synthesized)
ctgagcactgccttttgggccaagatctttgtggccctcgtcctaagaatgcctgctggccctgacaaattgtcacctgagttcaaagtcagggtctcctggggtgagggctgggataag

SEQ ID NO: 336416 - DNA, 78 bp, Artificial Sequence
  ENSG00000137491_47 (sequence is synthesized)
gttcaaagtcagggtctcctggggtgagggctgggataagaggactgagtgagaaaaaatttgctctgtctcccaggc

SEQ ID NO: 336417 - DNA, 72 bp, Artificial Sequence
  ENSG00000137491_48 (sequence is synthesized)
tgagaaaaacagtttttctattctctcactcaacaatcaacacagaagacttctgcaaccagaagtgtgggg

SEQ ID NO: 336418 - DNA, 120 bp, Artificial Sequence
  ENSG00000137491_49 (sequence is synthesized)
acaatcaacacagaagacttctgcaaccagaagtgtgggggtattttcccacacaccaggcactcaattaattctgcagtggaccctagccagtgtcccccaattctattctgacacaat

SEQ ID NO: 336419 - DNA, 120 bp, Artificial Sequence
  ENSG00000137491_50 (sequence is synthesized)
ctacctggagacagcatcagatcccacaggctgagtgctcagtcccacaagactttccctccacttcccatgccaaccacaagcctcaggctgttttaccaatgattctgactgaccagc

SEQ ID NO: 336420 - DNA, 120 bp, Artificial Sequence
  ENSG00000137491_51 (sequence is synthesized)
cgtatgctggggtttccacagccccatctttgagtttgctttatttgctagagtggctcacagagctcaggaaaacatctacttaatgtttatcggtttattataaaagatattacaaag

SEQ ID NO: 336421 - DNA, 120 bp, Artificial Sequence
  ENSG00000137491_52 (sequence is synthesized)
gatacagatgaagtgatgcatacggtgaggtatgggggaggagctttcatgccctccctggctgcatcctgcagggacctccatgtgttcagctatccggaagctcgccaaagcttcatt

SEQ ID NO: 336422 - DNA, 120 bp, Artificial Sequence
  ENSG00000137491_53 (sequence is synthesized)
atgtaggcatgattgattaaatcactggatattggcagtcacctcaaccttcagcccctctccccttgctggaggttggggctgaaagtcctaaccctctaatcctgccttggtccctct

SEQ ID NO: 336423 - DNA, 120 bp, Artificial Sequence
  ENSG00000137491_54 (sequence is synthesized)
ggtgaccaagccccagcctgaagctactaggggctgctcaccatcaatcaactcattagcatacaaaaagacacttttcactttgaacattccaagaattttaggagtgtatgccgggaa

SEQ ID NO: 336424 - DNA, 120 bp, Artificial Sequence
  ENSG00000137491_55 (sequence is synthesized)
gaccaaatacacatctcacaatatcacagggacctcagagcaagataatttccattttccttctcctgggattattttattcactatctactttctaggaaattagaagggaaatggagc

SEQ ID NO: 336425 - DNA, 120 bp, Artificial Sequence
  ENSG00000137491_56 (sequence is synthesized)
ctcttgcaaataccagaagacatgtagatctagaacacaagctggcctgggagagaaaatagaggaatcagatgcccaacaggcagcctgactaaaaggagttgagaacacagcctcagg

SEQ ID NO: 336426 - DNA, 120 bp, Artificial Sequence
  ENSG00000137491_57 (sequence is synthesized)
gctgcgtggatacaggccctgaccgctgtcagccatgagatcttggccaagttattgaatctgtctaagtgtcagtctccttatctgtaaaatggggctaatgtacacctcgctcatagg

SEQ ID NO: 336427 - DNA, 120 bp, Artificial Sequence
  ENSG00000137491_58 (sequence is synthesized)
agtgtctgactgtcccagctccaggtcttgccaactgtaggagtaaggggagaatttgatgggaccagtgggtggaggaagaggagtgatgtctgtgaccagaaacatacagaggtcagc

SEQ ID NO: 336428 - DNA, 120 bp, Artificial Sequence
  ENSG00000137491_59 (sequence is synthesized)
acaggaccctgatggtcagtgggtgtgttgtcttgtatatgggaccaggctctgcaggttgaaaaaggatggggtacgtccctgagcccccagcctagatcatcagatgggagagaggct

SEQ ID NO: 336429 - DNA, 120 bp, Artificial Sequence
  ENSG00000137491_60 (sequence is synthesized)
ggctctgggtggtgggagagaagggcataataagaacccttcaacgttgatgcatggcccttgggggctggaacccctccaacctcatgttgcccatgtctctgcttgttagaggagtga

SEQ ID NO: 336430 - DNA, 120 bp, Artificial Sequence
  ENSG00000137491_61 (sequence is synthesized)
agaaagaagacaagactttggctgtgggcatccagttcatgttcctgaggattttgggtaaagatcttgcttgggaccattggtggtggtgatggggtccagatgcccactgtgtgccag

SEQ ID NO: 336431 - DNA, 120 bp, Artificial Sequence
  ENSG00000137491_62 (sequence is synthesized)
gcctggggcacaggcatgagcggaattcaatccctgatcttagggctcacaagctcatggggtgacagacctggcccagctctcctagagcggggtatagaggcagagtctagacagccc

SEQ ID NO: 336432 - DNA, 120 bp, Artificial Sequence
  ENSG00000137491_63 (sequence is synthesized)
gtcaggaagccacctcggatgcaggggtggggcgggcttgagggccagacagccaagaggccccagtaacccagagcccctgaggggttgtacatgccagggagggggcagggtaggacg

SEQ ID NO: 336433 - DNA, 120 bp, Artificial Sequence
  ENSG00000137491_64 (sequence is synthesized)
aactgcagactgggaggttactaagtccttagcagctgagtacagaacacgatggaaatgaaaacatggtacaacagaggttacagccctctcctgacctgataaacttcatgatggagc

SEQ ID NO: 336434 - DNA, 120 bp, Artificial Sequence
  ENSG00000137491_65 (sequence is synthesized)
taaagatggtttgggaagtttctttgaatcacaagcagaactgtatgtgctgtctcctcctgtctggatctactcactacttgctaaagagaagaattttggtttgggataaatttatgt

SEQ ID NO: 336435 - DNA, 120 bp, Artificial Sequence
  ENSG00000137491_66 (sequence is synthesized)
aaacagccatatctctaaaggataaagtactcccaggaaggctttgagccttggcagaaaaggctgggattgaagcttcagggagagccagagggccagcgggtgaggtaccccaggtac

SEQ ID NO: 336436 - DNA, 120 bp, Artificial Sequence
  ENSG00000137491_67 (sequence is synthesized)
caggggcctccgagtctagaagagcaggctctgccacgtgctggtggtgtaatgccaaggaagactttctctgagcctcggtttcctcatctatagaatgtgtggctgtgaggatcaaag

SEQ ID NO: 336437 - DNA, 120 bp, Artificial Sequence
  ENSG00000137491_68 (sequence is synthesized)
agccatatctctaaaggataaagtactcccaggaaggctttgagccttggcagaaaaggctgggattgaagcttcagggagagccagaggtgaggctggagtgggagatcacctgaggca

SEQ ID NO: 336438 - DNA, 120 bp, Artificial Sequence
  ENSG00000137491_69 (sequence is synthesized)
atttgggcaaggccccacttgctcccagaagcccagcagggagagcttcataggccatggagacagacccagctgaggagcagctgcagggactccaggagaacgcagccatggcttggg

SEQ ID NO: 336439 - DNA, 120 bp, Artificial Sequence
  ENSG00000137491_70 (sequence is synthesized)
agagatgtttgaagaagctcaaaggcttgtaggattgagggggcctgtctccatacttgcccaccttcattgcaaggagctcactatcacgccatcatcgggcagccctgatgatgaaaa

SEQ ID NO: 336440 - DNA, 120 bp, Artificial Sequence
  ENSG00000137491_71 (sequence is synthesized)
tcctctgtgtggagctgaaatctctggccattgctctcggctacagggccgaggatgccccagctagtggcctaagggagggaagccaggccaaccctactggtcttctctcccaccagt

SEQ ID NO: 336441 - DNA, 120 bp, Artificial Sequence
  ENSG00000137491_72 (sequence is synthesized)
gtgagcctcaggagcacatgtttgctagaccctagctaactgactgccactctcataggagacattgagccaggggacctcggttcaaatcctagcagcaccactgaccttgggcaagtc

SEQ ID NO: 336442 - DNA, 120 bp, Artificial Sequence
  ENSG00000137491_73 (sequence is synthesized)
tcttagcctctctgaacctcagctttctcatctgtgagataatctctgtcctgtctgtctcctaaagctgtgatcagagtccagcgagatggtggagataaactgtaaagtgccatcaaa

SEQ ID NO: 336443 - DNA, 120 bp, Artificial Sequence
  ENSG00000137491_74 (sequence is synthesized)
cgtcgagctgtctgtcgctactacaataatgacctgctccgaaaccggtgagacctggtttgatggcttgtgggaagggtgctggaaatactctcagagtcccaggcaggataccagcag

SEQ ID NO: 336444 - DNA, 120 bp, Artificial Sequence
  ENSG00000137491_75 (sequence is synthesized)
ggaggggaggtttcatttaagtctacctgctaggtgacaggtgtcattatatattcagtgctgagctcaccagtccttcaagctaaacactgcccccctccttttatagatgaggaaagt

SEQ ID NO: 336445 - DNA, 120 bp, Artificial Sequence
  ENSG00000137491_76 (sequence is synthesized)
gacagttaaagcaagtagcccaaggtcacacagctaataacttgcagagctgggccttgaccacagagtctatgcaggaacttggggagaaacagaggagcagccatgctgcgagaggga

SEQ ID NO: 336446 - DNA, 120 bp, Artificial Sequence
  ENSG00000137491_77 (sequence is synthesized)
cttggggtgaagggctggggagaaagccctgtctaggacacaggaggcctgggtttcaggcccagctctgtctccctcatcatgggacttatcttgtctggggctcagtcttcccatctg

SEQ ID NO: 336447 - DNA, 120 bp, Artificial Sequence
  ENSG00000137491_78 (sequence is synthesized)
tacaaaggggaactcaaaggaacctgaaggcacagaggcggctggcctgggatggatgtggagaggacttgctagcagggctggggacagggagctggtcactttcagctctgaggaggt

SEQ ID NO: 336448 - DNA, 120 bp, Artificial Sequence
  ENSG00000137491_79 (sequence is synthesized)
gaggagggcacagtttctgtgggctgggactgtccacagggggcttcctagaaaaggaaaagtcaaacaagggctttgatagttaaacaggggagagggaatccgtttgttcttgtggca

SEQ ID NO: 336449 - DNA, 120 bp, Artificial Sequence
  ENSG00000137491_80 (sequence is synthesized)
ggtggcgcaatataaaattgcacttgtcaggccccctgagcccttgggctcggagagaggcagggccaggccaggccacagagcagagtccaggacagggcgatgaagatggccaggcct

SEQ ID NO: 336450 - DNA, 120 bp, Artificial Sequence
  ENSG00000137491_81 (sequence is synthesized)
ctgctcccacccagggctcctctgcagagcctctccccctcctccagggaagagccacagcagaggtcaatgtctccctgaggcctcagtatctctgatttcacaatgagtgatgactgc

SEQ ID NO: 336451 - DNA, 120 bp, Artificial Sequence
  ENSG00000137492_0 (sequence is synthesized)
gcattgtgggaaggaggcggcagcgtctcgggcgggcgggaggtgcaccagcggcggcggcggcggtaaatcctcccggccgctcacagcactgtggagccgcgtccccagcccggcctc

SEQ ID NO: 336452 - DNA, 80 bp, Artificial Sequence
  ENSG00000137492_1 (sequence is synthesized)
tgtggagccgcgtccccagcccggcctcggaccgcggcacccctcctggccctcgcggcttctagcccgcccgcccctcc

SEQ ID NO: 336453 - DNA, 120 bp, Artificial Sequence
  ENSG00000137492_2 (sequence is synthesized)
gactgccctgaggaggcggggaggggagggctgggccggccggcgggcgggcgacgatgccgaacttctgcgctgcccccaactgcacgcggaagagcacgcagtccgacttggccttct

SEQ ID NO: 336454 - DNA, 120 bp, Artificial Sequence
  ENSG00000137492_3 (sequence is synthesized)
tcaggttcccgcgggaccctgccagatgccagaagtgggtggagaactgtaggagagcagacttagaagataaaacacctgatcagctaaataaacattatcgattatgtgccaaacatt

SEQ ID NO: 336455 - DNA, 120 bp, Artificial Sequence
  ENSG00000137492_4 (sequence is synthesized)
ttgagacctctatgatctgtagaactagtccttataggacagttcttcgagataatgcaataccaacaatatttgatcttaccagtcatttgaacaacccacatagtagacacagaaaac

SEQ ID NO: 336456 - DNA, 120 bp, Artificial Sequence
  ENSG00000137492_5 (sequence is synthesized)
gaataaaagaactgagtgaagatgaaatcaggacactgaaacagaaaaaaattgatgaaacttctgagcaggaacaaaaacataaagaaaccaacaatagcaatgctcagaaccccagcg

SEQ ID NO: 336457 - DNA, 120 bp, Artificial Sequence
  ENSG00000137492_6 (sequence is synthesized)
aagaagagggtgaagggcaagatgaggacattttacctctaacccttgaagagaaggaaaacaaagaatacctaaaatctctatttgaaatcttgattctgatgggaaagcaaaacatac

SEQ ID NO: 336458 - DNA, 120 bp, Artificial Sequence
  ENSG00000137492_7 (sequence is synthesized)
ctctggatggacatgaggctgatgaaatcccagaaggtctctttactccagataactttcaggcactgctggagtgtcggataaattctggtgaagaggttctgagaaagcggtttgaga

SEQ ID NO: 336459 - DNA, 120 bp, Artificial Sequence
  ENSG00000137492_8 (sequence is synthesized)
caacagcagttaacacgttgttttgttcaaaaacacagcagaggcagatgctagagatctgtgagagctgtattcgagaagaaactctcagggaagtgagagactcacacttcttttcca

SEQ ID NO: 336460 - DNA, 120 bp, Artificial Sequence
  ENSG00000137492_9 (sequence is synthesized)
ttatcactgacgatgtagtggacatagcaggggaagagcacctacctgtgttggtgaggtttgttgatgaatctcataacctaagagaggaatttataggcttcctgccttatgaagccg

SEQ ID NO: 336461 - DNA, 120 bp, Artificial Sequence
  ENSG00000137492_10 (sequence is synthesized)
atgcagaaattttggctgtgaaatttcacactatgataactgagaagtggggattaaatatggagtattgtcgtggccaggcttacattgtctctagtggattttcttccaaaatgaaag

SEQ ID NO: 336462 - DNA, 120 bp, Artificial Sequence
  ENSG00000137492_11 (sequence is synthesized)
ttgttgcttctagacttttagagaaatatccccaagctatctacacactctgctcttcctgtgccttaaatatgtggttggcaaaatcagtacctgttatgggagtatctgttgcattag

SEQ ID NO: 336463 - DNA, 120 bp, Artificial Sequence
  ENSG00000137492_12 (sequence is synthesized)
gaacaattgaggaagtttgttcttttttccatcgatcaccacaactgcttttagaacttgacaacgtaatttctgttctttttcagaacagtaaagaaaggggtaaagaactgaaggaaa

SEQ ID NO: 336464 - DNA, 120 bp, Artificial Sequence
  ENSG00000137492_13 (sequence is synthesized)
tctgccattctcagtggacaggcaggcatgatgcttttgaaattttagtggaactcctgcaagcacttgttttatgtttagatggtataaatagtgacacaaatattagatggaataact

SEQ ID NO: 336465 - DNA, 120 bp, Artificial Sequence
  ENSG00000137492_14 (sequence is synthesized)
ccgagcatttgtactctgcagtgcagtgtcagattttgatttcattgttactattgttgttcttaaaaatgtcctatcttttacaagagcctttgggaaaaacctccaggggcaaacctc

SEQ ID NO: 336466 - DNA, 120 bp, Artificial Sequence
  ENSG00000137492_15 (sequence is synthesized)
tgatgtcttctttgcggccggtagcttgactgcagtactgcattcactcaacgaagtgatggaaaatattgaagtttatcatgaattttggtttgaggaagccacaaatttggcaaccaa

SEQ ID NO: 336467 - DNA, 120 bp, Artificial Sequence
  ENSG00000137492_16 (sequence is synthesized)
acttgatattcaaatgaaactccctgggaaattccgcagagctcaccagggtaacttggaatctcagctaacctctgagagttactataaagaaaccctaagtgtcccaacagtggagca

SEQ ID NO: 336468 - DNA, 120 bp, Artificial Sequence
  ENSG00000137492_17 (sequence is synthesized)
cattattcaggaacttaaagatatattctcagaacagcacctcaaagctcttaaatgcttatctctggtaccctcagtcatgggacaactcaaattcaatacgtcggaggaacaccatgc

SEQ ID NO: 336469 - DNA, 120 bp, Artificial Sequence
  ENSG00000137492_18 (sequence is synthesized)
tgacatgtatagaagtgacttacccaatcctgacacgctgtcagctgagcttcattgttggagaatcaaatggaaacacagggggaaagatatagagcttccgtccaccatctatgaagc

SEQ ID NO: 336470 - DNA, 120 bp, Artificial Sequence
  ENSG00000137492_19 (sequence is synthesized)
cctccacctgcctgacatcaagttttttcctaatgtgtatgcattgctgaaggtcctgtgtattcttcctgtgatgaaggttgagaatgagcggtatgaaaatggacgaaagcgtcttaa

SEQ ID NO: 336471 - DNA, 120 bp, Artificial Sequence
  ENSG00000137492_20 (sequence is synthesized)
agcatatttgaggaacactttgacagaccaaaggtcaagtaacttggctttgcttaacataaattttgatataaaacacgacctggatttaatggtggacacatatattaaactctatac

SEQ ID NO: 336472 - DNA, 120 bp, Artificial Sequence
  ENSG00000137492_21 (sequence is synthesized)
aagtaagtcagagcttcctacagataattccgaaactgtggaaaatacctaagagacttttaaaaataggctttcttatatttgatatttggaagaaaaagccgtaaggtgtatgtagac

SEQ ID NO: 336473 - DNA, 120 bp, Artificial Sequence
  ENSG00000137492_22 (sequence is synthesized)
cacttaatcactaaatatctttgcctataggactccattgaatacattagccattgataatctacctgtttaaatggcccctgtttgaactctcaagctttgaagacctacctgttcttc

SEQ ID NO: 336474 - DNA, 120 bp, Artificial Sequence
  ENSG00000137492_23 (sequence is synthesized)
cagaagagaacgttgaaagtgccatgtttccttttgcgtgatctctgttgatggcactctggaattgtttcagttaagtcattttagacatagcatttattatcactgtggatctctact

SEQ ID NO: 336475 - DNA, 120 bp, Artificial Sequence
  ENSG00000137492_24 (sequence is synthesized)
tgttgggtgttatgaattctttgaagaaatatattttgaagaggtgtgggaggaaggaatacattttataaaatgttgtagtgaagcccacaattgacctttgactaataggagttttaa

SEQ ID NO: 336476 - DNA, 120 bp, Artificial Sequence
  ENSG00000137492_25 (sequence is synthesized)
gtatgttaaaaatctatactggacagttacaagaaattaccggagaaaagcttgtgagctcaccaaacaaggatttcagtgtagattttgtctttcttgaacttaaagaaacaaatgaca

SEQ ID NO: 336477 - DNA, 120 bp, Artificial Sequence
  ENSG00000137492_26 (sequence is synthesized)
aagtttgaatggaaaagcctgctgttgttccacatctcgttgctgtttacattcctttgtggagcctacatcttcctaagctttttagcaggtatatgttgaacacttctgtttcatggt

SEQ ID NO: 336478 - DNA, 120 bp, Artificial Sequence
  ENSG00000137492_27 (sequence is synthesized)
tgagacagaatcagaggccatggatactgacaactgatttgtctgttttttttctctgtctttttccatgactcttatatactgcctcatcttgatttataagcaaaacctggaaaacct

SEQ ID NO: 336479 - DNA, 120 bp, Artificial Sequence
  ENSG00000137492_28 (sequence is synthesized)
acaaaataagtgttgtggtttatctagaaaaatatggaaaatattgctgttatttttggtgaagaaaatcaattttgtatagtttatttcaatctaaataaaatgtgaattttgtttaaa

SEQ ID NO: 336480 - DNA, 120 bp, Artificial Sequence
  ENSG00000137492_29 (sequence is synthesized)
ttatagacgtgagccaccggcctcctccatatgaatttgaaagtccttttgtcaagttctcctagaacttcttttgggattttcattataattgctttgaattgacatctttacaatatt

SEQ ID NO: 336481 - DNA, 120 bp, Artificial Sequence
  ENSG00000137492_30 (sequence is synthesized)
ttactagtttagtattactgttagtaaacgaatattactagtttactgttacagtataaactattgtaaagtattaactagttctatccatgaagagaaaaaaaatcccataaaatacct

SEQ ID NO: 336482 - DNA, 120 bp, Artificial Sequence
  ENSG00000137492_31 (sequence is synthesized)
atcccataaaatacctatcaaataacagcaatcattgacaaaactaaatactagttttttgaaaagaatattagaatacttttaggagtacagaaaacgaaaaattttgagagcttttgt

SEQ ID NO: 336483 - DNA, 120 bp, Artificial Sequence
  ENSG00000137492_32 (sequence is synthesized)
tacagttgtttaaatgagaatgtatgcattcttagatcacttcttaaatacattatggttcttactggtatagatgatatattctggttgaaattgtttccagcacttttgaagaacttc

SEQ ID NO: 336484 - DNA, 120 bp, Artificial Sequence
  ENSG00000137492_33 (sequence is synthesized)
tttttaagttaatcctagtaagtcttctgagtttttcctctgttactgattgtatcatctgcaaataaggagaaatttgtctctttcagttcttattattttaattttttctgttgcctg

SEQ ID NO: 336485 - DNA, 120 bp, Artificial Sequence
  ENSG00000137492_34 (sequence is synthesized)
tcttgtttagtcaagatccctggtactatgttgaacaattctagtaatgtcatacttgccttgccccattaagtataatgtttgctgttggtattgttagatagtttttatcaagttaag

SEQ ID NO: 336486 - DNA, 120 bp, Artificial Sequence
  ENSG00000137492_35 (sequence is synthesized)
gaaattcccttctactcccatattcagagttttgttgtttttttttaagatggggtctcactctgtcacccaagccagagtgcagtggggcagacactgctcactgcagcctccacctcc

SEQ ID NO: 336487 - DNA, 79 bp, Artificial Sequence
  ENSG00000137492_36 (sequence is synthesized)
tatttttttgtatttttttttatagatggagtcatgccatgttgcccagtttggtctcaaactcctgggctcaagcagt

SEQ ID NO: 336488 - DNA, 120 bp, Artificial Sequence
  ENSG00000137492_37 (sequence is synthesized)
ctcaaactcctgggctcaagcagtcctcttacctcagctccccaaagtgctgggattacaatagtgagccaccacgcctgacctatattctgtttttatatttaacttatcacatgcttt

SEQ ID NO: 336489 - DNA, 120 bp, Artificial Sequence
  ENSG00000137492_38 (sequence is synthesized)
catgctttcattgcatgtatttaatagacaagttcatttttttcattctttaatgcaataagtaatactaatggattttctgtgaaccatctgcatttctgtaatgaactctagttgact

SEQ ID NO: 336490 - DNA, 120 bp, Artificial Sequence
  ENSG00000137492_39 (sequence is synthesized)
gcaatatgtctatttgcttttatataccattggattcaattggtcaatattttatttaggattttacatttgtgaatcttggtctgtagccttcttttcatgtactcttattacccagtt

SEQ ID NO: 336491 - DNA, 120 bp, Artificial Sequence
  ENSG00000137492_40 (sequence is synthesized)
ataatatcaaggttctattggcctcataaaataagttgggtatcttttttttttttttctcctagaaaaatttgtgtaggtagatgttatctgctcttgaaagtaaggtagaacttggta

SEQ ID NO: 336492 - DNA, 120 bp, Artificial Sequence
  ENSG00000137492_41 (sequence is synthesized)
aaaccattagatggcttgcggtggatgagggaaagttttgattgccattctgctatctttattggttttctttctttcttgtgttttgttaatgtttctaaaagtttatgaaactttaat

SEQ ID NO: 336493 - DNA, 120 bp, Artificial Sequence
  ENSG00000137492_42 (sequence is synthesized)
aatcttttcaaagaaccagtagttttgtcagtgattgttgtacttatgaactattttattggtttttctttgattagggtgatttattttttgactctttttctagcttcttgaatgttt

SEQ ID NO: 336494 - DNA, 120 bp, Artificial Sequence
  ENSG00000137492_43 (sequence is synthesized)
agctcatatttatgtgtattcaaagctataaaagtctctcttaggtccattttagctataccctacaactttagacatatagtgttgtcatgtctggctgtaggtattttgtaatttctc

SEQ ID NO: 336495 - DNA, 120 bp, Artificial Sequence
  ENSG00000137492_44 (sequence is synthesized)
tattttgttaacataggattgtttttcttagtttccagatgtggaattatttttaattgctatatgatattttaaattttaaatgttattaagagatacgtagaggatacatatagtcta

SEQ ID NO: 336496 - DNA, 120 bp, Artificial Sequence
  ENSG00000137492_45 (sequence is synthesized)
tgtgatgttgattctttctgatttttttgcatccattattgctattcaagtctgtgccagcctgattcttgttcctttttaggtaatcttcttttctccctcaaagctttttagaaggtt

SEQ ID NO: 336497 - DNA, 120 bp, Artificial Sequence
  ENSG00000137492_46 (sequence is synthesized)
tctttatatttgacattttaaaatttgctaacctgtatctagatgtgagttttttttttatgtaccttaatttgtcatcttacaactgaggacttacaccttaaattctgagaaatcctt

SEQ ID NO: 336498 - DNA, 120 bp, Artificial Sequence
  ENSG00000137492_47 (sequence is synthesized)
agtttttatttttctttatgcattttcccctctatttgtttatttctattttcctgggacttagatgaatactgacacttacattacagtcctccatatcagctttcttcttggtgtcca

SEQ ID NO: 336499 - DNA, 120 bp, Artificial Sequence
  ENSG00000137492_48 (sequence is synthesized)
tggaggactgattccaggagcttccctcagagagcaaaatccacagatacttgattcccttatatacagtggtgtagtatttgcatataacttacacacatcctcccgtgactttaaatc

SEQ ID NO: 336500 - DNA, 120 bp, Artificial Sequence
  ENSG00000137492_49 (sequence is synthesized)
atttataatacctaatacaatgtagtgctatgtaaatagttgttctgttacattgtttagagaataatgacaagaacaaaaatctgtgtgttcagtatagacacaaccatccttttcttt

SEQ ID NO: 336501 - DNA, 60 bp, Artificial Sequence
  ENSG00000137492_50 (sequence is synthesized)
aatctgtgtgttcagtatagacacaaccatcgggtgcgatctcagctcaccgcaacctcc

SEQ ID NO: 336502 - DNA, 120 bp, Artificial Sequence
  ENSG00000137492_51 (sequence is synthesized)
attacagacgtgagccaccatgcccggcacaaccatccattttcaaataatacctagattatttatgatacttaatacatttatgtgtttgtaacacctactacaatgtaaatgctatgt

SEQ ID NO: 336503 - DNA, 120 bp, Artificial Sequence
  ENSG00000137492_52 (sequence is synthesized)
cctactacaatgtaaatgctatgtaaatagttatgctacgttatgtaggggaagaatgagaaaaaaagtctgtacatgttcaagatagatacaaccatccattttttccccagcattttc

SEQ ID NO: 336504 - DNA, 120 bp, Artificial Sequence
  ENSG00000137492_53 (sequence is synthesized)
aatgcatggttggttaaatccatagatatgaagtgtaatatgtatcaggatgaggagctcaatcacttgctgtcctgtagctatcatttccctgtagtctgtccctcagagagcctcaca

SEQ ID NO: 336505 - DNA, 120 bp, Artificial Sequence
  ENSG00000137492_54 (sequence is synthesized)
tatctcacagcaggcatactcttcctgacccaccatccttataaacgtgcagtccgtaggataaggaggggatgtccaggttgaccagcctgctgatgtttcttgttatcagcaccatgt

SEQ ID NO: 336506 - DNA, 120 bp, Artificial Sequence
  ENSG00000137492_55 (sequence is synthesized)
ccagtgctgcccaacaggcatcctgctgtcttcagctgtcactggcattgctgcttttctgccacagaaagtaacaggtggctcatgatttaagcattgtagagggttggaaggaaagta

SEQ ID NO: 336507 - DNA, 120 bp, Artificial Sequence
  ENSG00000137492_56 (sequence is synthesized)
ctgtgtatctcttccatgctggtactttcaccttctgcttctcagggatttctcatcacttttgtgttgagtcctgagattcagcaacctccttcttatgggacatctccagggttaaat

SEQ ID NO: 336508 - DNA, 120 bp, Artificial Sequence
  ENSG00000137492_57 (sequence is synthesized)
tgggaagtaagatgatttgtgtcctcttgaatttaactccaagtgccatggtgtatttttgtgcctttcattagccagtaaacacttataacccaaagttacgatgatttaggtagaaaa

SEQ ID NO: 336509 - DNA, 120 bp, Artificial Sequence
  ENSG00000137492_58 (sequence is synthesized)
taagcaaaatgatgtattcttttttccctaagactttgttataaccttggagtcattaacagcttattctggttttctcattgtctgtttgtttgaagaatgtgtactatataaagaatt

SEQ ID NO: 336510 - DNA, 120 bp, Artificial Sequence
  ENSG00000137492_59 (sequence is synthesized)
tatgctcttgaaagaattaaattgactcagaataggcatttgtatttgtgagtctaagatgatacactagaggtcagttttttaaagatgatttgtttttttctttttttttcttgacat

SEQ ID NO: 336511 - DNA, 120 bp, Artificial Sequence
  ENSG00000137492_60 (sequence is synthesized)
ggaaggacagtacagataaagtagctgggatgctgaattagaaacagatatgcaaaatgcaagtacattttatattttatgcctaccttcaattcagtttcttaatttataatagattgc

SEQ ID NO: 336512 - DNA, 120 bp, Artificial Sequence
  ENSG00000137492_61 (sequence is synthesized)
cagaagggcaaatgcaggcacagttggaaatagtagactgacctgaactgacatcaaattctgtaagtctctatactttagagctggagttgaaggaatattgtggaggtcattaacata

SEQ ID NO: 336513 - DNA, 120 bp, Artificial Sequence
  ENSG00000137494_0 (sequence is synthesized)
actcgtttccaaggcgacggccctgctgcctctccagccaagtggctggagtcgggaggctggaaagagactccgagaaagtaccagcggaaggcggccgccgctacggcgattcgcagg

SEQ ID NO: 336514 - DNA, 120 bp, Artificial Sequence
  ENSG00000137494_1 (sequence is synthesized)
gagtagcagacgaagacggtggccgccgcactagccaccacgtgtggaggataaacggtctacacggccattccggcgccgagtctagggaaagagttagcgacgacggggaaagaaaat

SEQ ID NO: 336515 - DNA, 120 bp, Artificial Sequence
  ENSG00000137494_2 (sequence is synthesized)
gtgaagagagcgaccgccgctccagggtcgctgcaggaagcctaagtgcagacgccggcttctcccgcagtgacttgagaagggtcagtgaaaacctcggccactgccgcagcgtctcta

SEQ ID NO: 336516 - DNA, 120 bp, Artificial Sequence
  ENSG00000137494_3 (sequence is synthesized)
gggagagagttaggggagatagtggccacagtcacagctgctcttgggagagagttaggggagacagcaccttctgcagcagcgacgtgaattttagtgaagttggaggccaccaaacta

SEQ ID NO: 336517 - DNA, 120 bp, Artificial Sequence
  ENSG00000137494_4 (sequence is synthesized)
ccgactccaggggaacagccagagaagaccgaggcctccgcctcagtggtccttgggagggagtcagtgacattcgggacccgcgaactagtgacttcggggatagagtcagtgacgatc

SEQ ID NO: 336518 - DNA, 120 bp, Artificial Sequence
  ENSG00000137494_5 (sequence is synthesized)
gcagtcgccgcttcagtggctcctgggagggagggagtgtcgaaggcggccacagcgttggtagttcttgggaggaagtaagtggagaccgcggctacgcagccagcgactcctctggtg

SEQ ID NO: 336519 - DNA, 120 bp, Artificial Sequence
  ENSG00000137494_6 (sequence is synthesized)
tgagcggcagtgaagacgccagctaccgcttcagtggcttttgggagagagaaagtgaagacgaaggtttccgctgcagcttctgggagagagcaagagaggaccttgggccccgtccta

SEQ ID NO: 336520 - DNA, 120 bp, Artificial Sequence
  ENSG00000137494_7 (sequence is synthesized)
gtgacgacggagaagagggccgctgccgctgcagtggctcgtgggtgagagcaagtgaagaccgccgcagcatcaggggcctggactcaactcctccccagagtcggaggtgttgcgcca

SEQ ID NO: 336521 - DNA, 120 bp, Artificial Sequence
  ENSG00000137494_8 (sequence is synthesized)
tgcccggggtggccaattcaggcccctccacttcctctagggagactgcaaacccctgttccaggaagaaggtgcattttggcagcatacatgatgcagtacgagctggagatgtaaagc

SEQ ID NO: 336522 - DNA, 120 bp, Artificial Sequence
  ENSG00000137494_9 (sequence is synthesized)
agctttcagaaatagtggtacgtggagccagcattaatgaacttgatgttctccataagtttacccctttacattgggcagcacattctggaagtttggagtgtcttcattggctgctct

SEQ ID NO: 336523 - DNA, 120 bp, Artificial Sequence
  ENSG00000137494_10 (sequence is synthesized)
ggcatggagctgatatcacacacgtaacaacgagaggttggacagcatctcacatagctgcaatcaggggtcaggatgcttgtgtacaggctcttataatgaatggagcaaatctgacag

SEQ ID NO: 336524 - DNA, 120 bp, Artificial Sequence
  ENSG00000137494_11 (sequence is synthesized)
cccaggatgaccggggatgcactcctttacatcttgctgcaactcatggacattctttcactttacaaataatgctccgaagtggagtggatcccagtgtgactgataagagagaatgga

SEQ ID NO: 336525 - DNA, 120 bp, Artificial Sequence
  ENSG00000137494_12 (sequence is synthesized)
gacctgtgcattatgcagcttttcatgggcggcttggctgcttgcaacttcttgttaaatggggttgtagcatagaagatgtggactacaatggaaaccttccagttcacttagcagcca

SEQ ID NO: 336526 - DNA, 120 bp, Artificial Sequence
  ENSG00000137494_13 (sequence is synthesized)
tttcaatgataatggagaaaatgtactggatttggcccagaggttcttcaagcagaacattttacagtttatccagggggctgagtatgaaggaaaagacctagaggatcaggaaacttt

SEQ ID NO: 336527 - DNA, 120 bp, Artificial Sequence
  ENSG00000137494_14 (sequence is synthesized)
agcatttccaggtcatgtggctgcctttaagggtgatttggggatgcttaagaaattagtggaagatggagtaatcaatattaatgagcgtgctgataatggatcaactcctatgcataa

SEQ ID NO: 336528 - DNA, 120 bp, Artificial Sequence
  ENSG00000137494_15 (sequence is synthesized)
agctgctggacaaggccacatagagtgtttgcagtggttaattaaaatgggagcagacagtaatattaccaacaaagcaggggagagacccagtgatgtggcaaagaggtttgcccattt

SEQ ID NO: 336529 - DNA, 120 bp, Artificial Sequence
  ENSG00000137494_16 (sequence is synthesized)
ggcagcagtgaagctgttagaggagctacagaaatatgatatagatgacgaaaatgaaattgatgaaaatgatgtgaaatattttataagacatggtgttgagggaagcactgatgccaa

SEQ ID NO: 336530 - DNA, 120 bp, Artificial Sequence
  ENSG00000137494_17 (sequence is synthesized)
ggatgatttatgtctgagtgacttggataaaacagatgccagaatgagagcttacaagaaaattgtagaattgagacacctcctggaaattgccgagagcaactataaacacttgggagg

SEQ ID NO: 336531 - DNA, 120 bp, Artificial Sequence
  ENSG00000137494_18 (sequence is synthesized)
cataacagaagaagatttaaagcagaagaaagaacagcttgagtctgaaaagaccatcaaagaactgcagggccagctggagtatgaacgactacgtagagaaaaattagaatgtcagct

SEQ ID NO: 336532 - DNA, 120 bp, Artificial Sequence
  ENSG00000137494_19 (sequence is synthesized)
tgatgaatatcgagcagaagttgatcaactcagggaaacactggaaaaaattcaagtcccaaactttgtggctatggttggtgtcctttttaatacatttatttttctcaagaagtatat

SEQ ID NO: 336533 - DNA, 120 bp, Artificial Sequence
  ENSG00000137494_20 (sequence is synthesized)
acaagagtggccaagagtacaagctttgggctggggctctttggacttgaatcctggctatagtcttttttgatttgggctactcatttaacctttttgtgcctcaactataaactggag

SEQ ID NO: 336534 - DNA, 77 bp, Artificial Sequence
  ENSG00000137494_21 (sequence is synthesized)
tactcatttaacctttttgtgcctcaactataaactggagatgataacttatactttctagagctgatgacaggatt

SEQ ID NO: 336535 - DNA, 120 bp, Artificial Sequence
  ENSG00000137494_22 (sequence is synthesized)
acatctgtctatctatcttcaaacagcagcctagttcataagtattattgttaacattgtaccatagaaggagaaaatgttttcataagtaatcaatcagaattctaagacagctagagg

SEQ ID NO: 336536 - DNA, 120 bp, Artificial Sequence
  ENSG00000137494_23 (sequence is synthesized)
atatgtatattttaatattctaaataaccaaaataaagtgctttgaatggaatccatattttctttccatagggaagtttcttcatcaatcatcatggatgaattaattctgtttgaggc

SEQ ID NO: 336537 - DNA, 120 bp, Artificial Sequence
  ENSG00000137494_24 (sequence is synthesized)
ttgtgtcacctcaaatctgatctattaatattatagaatcttcctggcttctttttattttgcacaaactagtcattggtctctttaataaccactttaaaaatattaaaataataaaac

SEQ ID NO: 336538 - DNA, 120 bp, Artificial Sequence
  ENSG00000137494_25 (sequence is synthesized)
atgtttgttgtatagtgttaaaaacaagatagatgttccttctgacactaagttccactctccagaggaagctattgttaacaatttagtacataccatattagacaaaattctatttat

SEQ ID NO: 336539 - DNA, 120 bp, Artificial Sequence
  ENSG00000137494_26 (sequence is synthesized)
ctgcaaacatgtatgtgtatttctatgcatatgcaaatataaccacttcctcagtttctctgggttttggtgtctcaccagtggttgattttccaagaaatataattaactataataatt

SEQ ID NO: 336540 - DNA, 120 bp, Artificial Sequence
  ENSG00000137494_27 (sequence is synthesized)
tgtgagtcaaacaaagagaagaggcgagtaaaaaaaaaggtttcttctggaggggtgtttgtgagaaggtactaatcagtgaaataactaaattgacctgctagatttttctctttcatt

SEQ ID NO: 336541 - DNA, 120 bp, Artificial Sequence
  ENSG00000137494_28 (sequence is synthesized)
aaaaaaattgatataaatgtgagtctatacaaactatctcagaattactctgatatgcttctgttccaattctgatggcagaaatgttatattaaagagatttagagattttttaaatga

SEQ ID NO: 336542 - DNA, 120 bp, Artificial Sequence
  ENSG00000137494_29 (sequence is synthesized)
tacctagggcagagtggataaggggatgaagagtgacgacagtgttatgctactggagcttccttcacatggaggaaagacgcattccctcttaatattttagaatattttaaatcttaa

SEQ ID NO: 336543 - DNA, 120 bp, Artificial Sequence
  ENSG00000137494_30 (sequence is synthesized)
cttgtttatgtctctctccttaagattgtcaattcaatgagaatgaaaccatgttcatctctgtgcacacagggactagcatgctgtttggcatatagcaggcagtcatattggttaact

SEQ ID NO: 336544 - DNA, 120 bp, Artificial Sequence
  ENSG00000137494_31 (sequence is synthesized)
gaacaaatgcagtatactttgttacagtggactttaatatatatggtaacttattaattgactcagtgaaaattaatctataatatactaagaactctcttaggcaatagagataaaaat

SEQ ID NO: 336545 - DNA, 120 bp, Artificial Sequence
  ENSG00000137494_32 (sequence is synthesized)
gaatcagaatgtaacaggataatgtcaaggtttttcttttgaaaacaaaccagcagttagatttttgaggaaaatatagttggaaagcctgactctcactcactggaccatatggaccaa

SEQ ID NO: 336546 - DNA, 120 bp, Artificial Sequence
  ENSG00000137494_33 (sequence is synthesized)
tctcttgactgctctatactgcagattccctgtttatagctaaacaaatgacaaggctattttgaataatgattgtcaaacttttatagctattaccaaggcattatgaactcaaaatgt

SEQ ID NO: 336547 - DNA, 120 bp, Artificial Sequence
  ENSG00000137494_34 (sequence is synthesized)
gcctctgattccttggcttggcatgctggacttacataatttggcacctacctacctgcatggcctcatctttctatatctttacactactgtccaggatcattttgtttttttctgaag

SEQ ID NO: 336548 - DNA, 120 bp, Artificial Sequence
  ENSG00000137494_35 (sequence is synthesized)
gaactaagaagttcttccggcaccagactgactgatatgtcaaaattaagtgtaactggcagaaacccagaggtattgacaacagggttcgtagaaggttcaaggaccaatcttgatgcc

SEQ ID NO: 336549 - DNA, 120 bp, Artificial Sequence
  ENSG00000137494_36 (sequence is synthesized)
caacattggttgtgggagcgacaaaaaaaacaaagcacatgctgcctactgacttctggaagttcctggtccacaacatcaaggagctggaagtgctgctgatgtgcaacagatcttact

SEQ ID NO: 336550 - DNA, 120 bp, Artificial Sequence
  ENSG00000137494_37 (sequence is synthesized)
gtgctgagatgtttcctccaagaactgcaaagccatcgtggaaagagctgcccagctgtccatcggagtcacaccaaccccaacgccaggctgcgcagtgaagaaaatgaatagacagct

SEQ ID NO: 336551 - DNA, 120 bp, Artificial Sequence
  ENSG00000137494_38 (sequence is synthesized)
catgtgcatgttttgtgtttaaataaaactgtaaaaactgcaaagaaaaaccaaaaaacaacaacaaaaaattattttgtgttaggcttccttcgctttttcagactgctttcaatttcc

SEQ ID NO: 336552 - DNA, 120 bp, Artificial Sequence
  ENSG00000137494_39 (sequence is synthesized)
catcatttcgtacgtttaaaggctatttggtttttttgtgtgtgtgatgtactagttcaaatcttttgcctattggctgttagagtgtgtctttttcttattgaatcataggagttcttt

SEQ ID NO: 336553 - DNA, 120 bp, Artificial Sequence
  ENSG00000137494_40 (sequence is synthesized)
atatattctagatacaagccctttgtcagttacgtttattaccaatatcttttcatgcaaatatctttctaatctttctacttcatggcttgctctttcattctttggtattttttgata

SEQ ID NO: 336554 - DNA, 83 bp, Artificial Sequence
  ENSG00000137494_41 (sequence is synthesized)
cttcatggcttgctctttcattctttggtattttttgataaatgaggttttaattattttttttttttgaaattgcagtctcg

SEQ ID NO: 336555 - DNA, 120 bp, Artificial Sequence
  ENSG00000137494_42 (sequence is synthesized)
ttacaggtgtgagccaccgcgcttggccagaggttttaattttaacgtagtccattttaataatctcttcctttgtagttagtcctttctgtactttccctattttgtgatcatgaagac

SEQ ID NO: 336556 - DNA, 120 bp, Artificial Sequence
  ENSG00000137494_43 (sequence is synthesized)
agtcctttctgtactttccctattttgtgatcatgaagacattcctttatgttatctgttagaaattttatttatctttcatatttatattcccaatcctcctagaactgacttttccgt

SEQ ID NO: 336557 - DNA, 120 bp, Artificial Sequence
  ENSG00000137494_44 (sequence is synthesized)
gtgtaatacaaggtaggggtcagttttatttttgtattgtcctttatcaaatatacttgatcatttttgttggtcttgtctggtcattaaaaaatccaattgtttctttaaacatgtatg

SEQ ID NO: 336558 - DNA, 120 bp, Artificial Sequence
  ENSG00000137494_45 (sequence is synthesized)
attattttatttataaccaggtagagtatttataataatatagatgttaagaaagaatgtggccttaggtctagactgcttgtgttcaaatcgctctcataaaattattttttattgata

SEQ ID NO: 336559 - DNA, 120 bp, Artificial Sequence
  ENSG00000137494_46 (sequence is synthesized)
aatgtacatatttttggtgtacatgtgataatttgatacattcatttgtatcaaatttgataatgtataaagatcaaatcaaggtaattggggtagccatcccttaaatatttcttttat

SEQ ID NO: 336560 - DNA, 120 bp, Artificial Sequence
  ENSG00000137494_47 (sequence is synthesized)
actaggaacatttgaattatttttttctagttatttttaaatacacaatagattatggttaactataatcaccctactgatctgtcaaacactagatcttatttcttctactcaattgta

SEQ ID NO: 336561 - DNA, 120 bp, Artificial Sequence
  ENSG00000137494_48 (sequence is synthesized)
tatttatacccattaatcaacttctgttcttgctctctccgtgctacccttctggcctttggtaatcgccaatcaatctactctctatcttcatgagaccagcgtattttagctcccaca

SEQ ID NO: 336562 - DNA, 120 bp, Artificial Sequence
  ENSG00000137494_49 (sequence is synthesized)
tatgaatgaaaacatataatatttgtctttctgtgcttgacttattttacttaacataatgacctccaattccatccatcttgtggcactgacagtatttcattcatttttgtgtgaatt

SEQ ID NO: 336563 - DNA, 120 bp, Artificial Sequence
  ENSG00000137494_50 (sequence is synthesized)
ttgtggcactgacagtatttcattcatttttgtgtgaattatatttcgttgtgaatatacattacattttctttatccattcatcactgatgtgcacttaggttgattccatattttggc

SEQ ID NO: 336564 - DNA, 120 bp, Artificial Sequence
  ENSG00000137494_51 (sequence is synthesized)
tagtgaagtcttttggtatgaactctttcaatttttgtgtatctgaaaatttattttgttctcattctttttactttgtattttgtaagtttttttttttaaagtaaaatttaaattgaa

SEQ ID NO: 336565 - DNA, 120 bp, Artificial Sequence
  ENSG00000137496_0 (sequence is synthesized)
ctccatggataactgcatgaccctgagagaaaacctccttagatttagcatcctaggttcctcacacgcctcaccctgaatcctggccctcccgcagccccagcgccatttgtcccatca

SEQ ID NO: 336566 - DNA, 120 bp, Artificial Sequence
  ENSG00000137496_1 (sequence is synthesized)
gtgacaagattcatattctgatgtagactctgttgccagagccagtgttgagccagtccgcctcttccccgggaagtgcctgcccttccctcctgttagggttggctctcgagcttgtgt

SEQ ID NO: 336567 - DNA, 120 bp, Artificial Sequence
  ENSG00000137496_2 (sequence is synthesized)
gccagttcctgggttggccgtgagagttctacagacaaggaggaagtgctctcggtgtatttcctgtggtgggttcacacgcagctagacacagctaacttgagtcttggagctcctaga

SEQ ID NO: 336568 - DNA, 120 bp, Artificial Sequence
  ENSG00000137496_3 (sequence is synthesized)
gggaagcttctggaaaggaaggctcttcaggacctcttaggagccaggtaggagtctgggactactagtgaacctagacctgtggctctggccagaggggctaggatgagagacagaggg

SEQ ID NO: 336569 - DNA, 120 bp, Artificial Sequence
  ENSG00000137496_4 (sequence is synthesized)
tgtgatggtgggtgctgggagatgtagccgaccttggggctggtggctgggggagtgggtagcctgggaaaggccaggatgtggacggactggtatggcattgagcctgaagtggtccaa

SEQ ID NO: 336570 - DNA, 120 bp, Artificial Sequence
  ENSG00000137496_5 (sequence is synthesized)
cttggggttccccagtgcctaggaaagttgtccccttgaatgtcagtgtgaaggtgaaggaggaagcagatgcctgttcatatggaaacaaagacctggctgtgaagaggggaggcggac

SEQ ID NO: 336571 - DNA, 120 bp, Artificial Sequence
  ENSG00000137496_6 (sequence is synthesized)
accaaagtcctgacacttgggcgggacagaattgatctgtgagagactcatctagttcataccctaggtgaccctgggggtggcatgggggtagattagagatcccagtctggtatcctc

SEQ ID NO: 336572 - DNA, 120 bp, Artificial Sequence
  ENSG00000137496_7 (sequence is synthesized)
tggagagtaggagtcccaggagctgaaggtttctggccactgaactttggctaaagcagaggtgtcacagctgctcaagattccctggttaaaaagtgaaagtgaaatagagggtcgggg

SEQ ID NO: 336573 - DNA, 120 bp, Artificial Sequence
  ENSG00000137496_8 (sequence is synthesized)
cagtgctttcccagaaggattgctcggcatcctgcccttcccagaagcagctctggtgctgaagagagcactgcctccctgtgtgactgggtgagtccatattctctctttgggtctcaa

SEQ ID NO: 336574 - DNA, 120 bp, Artificial Sequence
  ENSG00000137496_9 (sequence is synthesized)
ttttgccttccctaatgaaggggtaagattggactaggtaagcatcttacaaccatttgtggtcatgagagctggggtggggaaggattgtcacttgacccccccagctctgtttctaag

SEQ ID NO: 336575 - DNA, 120 bp, Artificial Sequence
  ENSG00000137496_10 (sequence is synthesized)
tgctgaaagagctccaggctatgctacgggaggagaagccagctactgaggaaaagccagctactgagaaaaagcgggagtggtttaccattctcctcccccacctttcaccagagaaga

SEQ ID NO: 336576 - DNA, 120 bp, Artificial Sequence
  ENSG00000137496_11 (sequence is synthesized)
ggacgttgtcacagataaagagccaggctcaccagctcctgacgcatgcatcatgaccatgagacacaactggacaccagacctcagccctttgtgggtcctgctcctgtgtgcccacgt

SEQ ID NO: 336577 - DNA, 120 bp, Artificial Sequence
  ENSG00000137496_12 (sequence is synthesized)
cgtcactctcctggtcagagccacacctgtctcgcagaccaccacagctgccactgcctcagttagaagcacaaaggacccctgcccctcccagcccccagtgttcccagcagctaagca

SEQ ID NO: 336578 - DNA, 120 bp, Artificial Sequence
  ENSG00000137496_13 (sequence is synthesized)
gtgtccagcattggaagtgacctggccagaggtggaagtgccactgaatggaacgctgagcttatcctgtgtggcctgcagccgcttccccaacttcagcatcctctactggctgggcaa

SEQ ID NO: 336579 - DNA, 120 bp, Artificial Sequence
  ENSG00000137496_14 (sequence is synthesized)
tggttccttcattgagcacctcccaggccgactgtgggaggggagcaccagccgggaacgtgggagcacaggtacgcagctgtgcaaggccttggtgctggagcagctgacccctgccct

SEQ ID NO: 336580 - DNA, 120 bp, Artificial Sequence
  ENSG00000137496_15 (sequence is synthesized)
gcacagcaccaacttctcctgtgtgctcgtggaccctgaacaggttgtccagcgtcacgtcgtcctggcccagctctgggtgaggagcccaaggagaggcctccaggaacaggaggagct

SEQ ID NO: 336581 - DNA, 120 bp, Artificial Sequence
  ENSG00000137496_16 (sequence is synthesized)
ctgcttccatatgtggggaggaaagggtgggctctgccagagcagcctgtgaactaatgcccagcattcctcaaggtcagccagacaaaaaggaacttaggtcttgggcagaggaggtgt

SEQ ID NO: 336582 - DNA, 120 bp, Artificial Sequence
  ENSG00000137496_17 (sequence is synthesized)
agcctggggcaaagtgatgagatgtccctcctttccttggcctgatccttgtctgccttcacttccctaggctgggctgagggcaaccttgccccccacccaagaagccctgccctccag

SEQ ID NO: 336583 - DNA, 120 bp, Artificial Sequence
  ENSG00000137496_18 (sequence is synthesized)
ccacagcagtccacagcagcagggttaagactcagcacagggccagcagcagcacaaccttgaccagagcttgggtcctacctgtctacctggagtgaacagtccctgactgcctgtagg

SEQ ID NO: 336584 - DNA, 120 bp, Artificial Sequence
  ENSG00000137496_19 (sequence is synthesized)
ctgcgtggatgcgcaacacaccccctccttctctgctttgggtcccttctctcaccaaattcaaactccattcccacctacctagaaaatcacagcctccttataatgcctcctcctcct

SEQ ID NO: 336585 - DNA, 120 bp, Artificial Sequence
  ENSG00000137496_20 (sequence is synthesized)
gccattctctctccacctatccattagccttcctaacgtcctactcctcacactgctctactgctcagaaaccaccaagactgttgatgccttagccttgcactccagggccctacctgc

SEQ ID NO: 336586 - DNA, 120 bp, Artificial Sequence
  ENSG00000137496_21 (sequence is synthesized)
atttcccacatgactttctggaagcctcccaactattcttgcttttcccagacagctcccactcccatgtctctgctcatttagtcccgtcttcctcaccgccccagcaggggaacgctc

SEQ ID NO: 336587 - DNA, 120 bp, Artificial Sequence
  ENSG00000137496_22 (sequence is synthesized)
aagcctggttgaaatgctgcctcttcagtgaagtcatcctctttcagctctggccgcattctgcagacttcctatcttcgtgctgtatgttttttttttcccccttcactctaatggact

SEQ ID NO: 336588 - DNA, 120 bp, Artificial Sequence
  ENSG00000137496_23 (sequence is synthesized)
gttccagggaagggatgggggcagcagctgcttcggatccacactgtatctgtgtcatccccacatgggtcctcataaaggattattcaatggaggcatcctgacatctgttcatttagg

SEQ ID NO: 336589 - DNA, 120 bp, Artificial Sequence
  ENSG00000137496_24 (sequence is synthesized)
cttcagttccactcccaggaactttgcctgtcccacgagggagtatgggagagagggactgccacacagaagctgaagacaacacctgcttcaggggaacacaggcgcttgaaaaagaaa

SEQ ID NO: 336590 - DNA, 120 bp, Artificial Sequence
  ENSG00000137496_25 (sequence is synthesized)
agagagaacagcccataatgctccccgggagcagaggccactaatggagagtgggaagagcctggaaagatgtggcctcaggaaaagggatgagagaaaggaggtggtatggaagactca

SEQ ID NO: 336591 - DNA, 120 bp, Artificial Sequence
  ENSG00000137496_26 (sequence is synthesized)
gcaggaacaaggtaggcttcaaagagcctatattcctctttttcccacaccgatcaagtcaactcagtactcacgggagaaaaatagactttatttacaagtaataacatttagaaaaga

SEQ ID NO: 336592 - DNA, 120 bp, Artificial Sequence
  ENSG00000137496_27 (sequence is synthesized)
tccatccccggcccttaaaaaccttcccatcactccaaatcccaccccagtgcaagtctggggaaggtagggtgtgagctgctgctgaaggctgtcccccaaccccactcctgagacata

SEQ ID NO: 336593 - DNA, 120 bp, Artificial Sequence
  ENSG00000137496_28 (sequence is synthesized)
gggcccatccgtcctgggaaagagcatcctctggcaggtgctcccaccaggtcagacccagtcctggacttcaagagtgagggcccctgctgggcccagccaccaggacagcaggaacca

SEQ ID NO: 336594 - DNA, 120 bp, Artificial Sequence
  ENSG00000137496_29 (sequence is synthesized)
gggcctactcctcttatggtcccttctagatccagaggctaagaggaagactggccaggcccaaggacccagccatcaaaaccagcctcaaatctggttgtgatggagaagtgactttgc

SEQ ID NO: 336595 - DNA, 120 bp, Artificial Sequence
  ENSG00000137496_30 (sequence is synthesized)
tttaagaaaaaaggaggcaaggtagggagagcgcccacactgtccatgctccaggccccctgggccagctccgagaaggcgccagtgaaggaccagggaccaggccagggtgcgggcagg

SEQ ID NO: 336596 - DNA, 120 bp, Artificial Sequence
  ENSG00000137496_31 (sequence is synthesized)
catcactgtctctaggggtttggctactgttggcctgggagctgagagaaggcactgagagggacagtaggcggaggaccaggtgaggtcagcatcggggacacaggtggggccactcac

SEQ ID NO: 336597 - DNA, 120 bp, Artificial Sequence
  ENSG00000137496_32 (sequence is synthesized)
tggtactggccctttagtgctttgcctgaaagagacacagtcacatggccagatgagaacttgcgatactagcctgcacccactggctgggaagatctcttcctgctcccacgcccctgt

SEQ ID NO: 336598 - DNA, 120 bp, Artificial Sequence
  ENSG00000137496_33 (sequence is synthesized)
ctggatcccctcccttgtgagccccagggttatcagttgctggctgtgcctgagcagctctgggtgctctccatgagaatggggccatctgtcttctctccttggagaggagctaccagg

SEQ ID NO: 336599 - DNA, 120 bp, Artificial Sequence
  ENSG00000137496_34 (sequence is synthesized)
agactgctactacatcttactcacctgccaaggcttggtggccaacacccagaggaacaaattaaggaccgggaattaattcccaggggctccctggtgcccaaaggacaagagcttcca

SEQ ID NO: 336600 - DNA, 120 bp, Artificial Sequence
  ENSG00000137497_0 (sequence is synthesized)
aagtacaggccggggtccggaagcggtgataccccttctctttcccagtggccctcaaacttccttttcccgggtccttaagcgggccccgccgacagaggccaatcagagggcagcgcg

SEQ ID NO: 336601 - DNA, 120 bp, Artificial Sequence
  ENSG00000137497_1 (sequence is synthesized)
agggggcggggccatagtttaaactaattgtgcgctcacagcgctggcgcgagcccacgaagaggtacgattccggagaatcgcgaggcagagcgggagcgcgcagccaggtggaaacta

SEQ ID NO: 336602 - DNA, 120 bp, Artificial Sequence
  ENSG00000137497_2 (sequence is synthesized)
attctaagccagactgctggagatcaccctgttctagtgtgtggaggcttccaccaggaggcgcattggagtgactgtctggcatcaccaagatgacactccacgccacccggggggctg

SEQ ID NO: 336603 - DNA, 120 bp, Artificial Sequence
  ENSG00000137497_3 (sequence is synthesized)
cactcctctcttgggtgaacagtctacacgtggctgaccctgtggaggctgtgctgcagctccaggactgcagcatcttcatcaagatcattgacagaatccatggcactgaagagggac

SEQ ID NO: 336604 - DNA, 120 bp, Artificial Sequence
  ENSG00000137497_4 (sequence is synthesized)
agcaaatcttgaagcagccggtgtcagagagactggactttgtgtgcagttttctgcagaaaaatcgaaaacatccctcttccccagaatgcctggtatctgcacagaaggtgctagagg

SEQ ID NO: 336605 - DNA, 120 bp, Artificial Sequence
  ENSG00000137497_5 (sequence is synthesized)
gatcagagctggaactggcgaagatgaccatgctgctcttataccactctaccatgagctccaaaagtcccagggactgggaacagtttgaatataaaattcaggctgagttggctgtca

SEQ ID NO: 336606 - DNA, 120 bp, Artificial Sequence
  ENSG00000137497_6 (sequence is synthesized)
ttcttaaatttgtgctggaccatgaggacgggctaaaccttaatgaggacctagagaacttcctacagaaagctcctgtgccttctacctgttctagcacattccctgaagagctctccc

SEQ ID NO: 336607 - DNA, 120 bp, Artificial Sequence
  ENSG00000137497_7 (sequence is synthesized)
cacctagccaccaggccaagagggagattcgcttcctagagctacagaaggttgcctcctcttccagtgggaacaactttctctcaggttctccagcttctcccatgggtgatatcctgc

SEQ ID NO: 336608 - DNA, 120 bp, Artificial Sequence
  ENSG00000137497_8 (sequence is synthesized)
agaccccacagttccagatgagacggctgaagaagcagcttgctgatgagagaagtaatagggatgagctggagctggagctagctgagaaccgcaagctcctcaccgagaaggatgcac

SEQ ID NO: 336609 - DNA, 120 bp, Artificial Sequence
  ENSG00000137497_9 (sequence is synthesized)
agatagccatgatgcagcagcgcattgaccgcctagccctgctgaatgagaagcaggcggccagcccactggagcccaaggagcttgaggagctgcgtgacaagaatgagagccttacca

SEQ ID NO: 336610 - DNA, 120 bp, Artificial Sequence
  ENSG00000137497_10 (sequence is synthesized)
tgcggctgcatgaaaccctgaagcagtgccaggacctgaagacagagaagagccagatggatcgcaaaatcaaccagctttcggaggagaatggagacctttcctttaagctgcgggagt

SEQ ID NO: 336611 - DNA, 120 bp, Artificial Sequence
  ENSG00000137497_11 (sequence is synthesized)
ttgccagtcatctgcagcagctacaggatgccctcaatgagctgacggaggagcacagcaaggccactcaggagtggctagagaagcaggcccagctggagaaggagctcagcgcagccc

SEQ ID NO: 336612 - DNA, 120 bp, Artificial Sequence
  ENSG00000137497_12 (sequence is synthesized)
tgcaggacaagaaatgccttgaagagaagaacgaaatccttcagggaaaactttcacagctggaagaacacttgtcccagctgcaggataacccaccccaggagaagggcgaggtgctgg

SEQ ID NO: 336613 - DNA, 120 bp, Artificial Sequence
  ENSG00000137497_13 (sequence is synthesized)
gtgatgtcttgcagctggaaaccttgaagcaagaggcagccactcttgctgcaaacaacacacagctccaagccagggtagagatgctggagactgagcgaggccagcaggaagccaagc

SEQ ID NO: 336614 - DNA, 120 bp, Artificial Sequence
  ENSG00000137497_14 (sequence is synthesized)
tgcttgctgagcggggccacttcgaagaagaaaagcagcagctgtctagcctgatcactgacctgcagagctccatctccaacctcagccaggccaaggaagagctggagcaggcctccc

SEQ ID NO: 336615 - DNA, 120 bp, Artificial Sequence
  ENSG00000137497_15 (sequence is synthesized)
aggctcatggggcccggttgactgcccaggtggcctctctgacctctgagctcaccacactcaatgccaccatccagcaacaggatcaagaactggctggcctgaagcagcaggccaaag

SEQ ID NO: 336616 - DNA, 120 bp, Artificial Sequence
  ENSG00000137497_16 (sequence is synthesized)
agaagcaggcccagctagcacagaccctccaacagcaagaacaggcctcccagggcctccgccaccaggtggagcagctaagcagtagcctgaagcagaaggagcagcagttgaaggagg

SEQ ID NO: 336617 - DNA, 120 bp, Artificial Sequence
  ENSG00000137497_17 (sequence is synthesized)
tagcggagaagcaggaggcaactaggcaggaccatgcccagcaactggccactgctgcagaggagcgagaggcctccttaagggagcgggatgcggctctcaagcagctggaggcactgg

SEQ ID NO: 336618 - DNA, 120 bp, Artificial Sequence
  ENSG00000137497_18 (sequence is synthesized)
agaaggagaaggctgccaagctggagattctgcagcagcaacttcaggtggctaatgaagcccgggacagtgcccagacctcagtgacacaggcccagcgggagaaggcagagctgagcc

SEQ ID NO: 336619 - DNA, 120 bp, Artificial Sequence
  ENSG00000137497_19 (sequence is synthesized)
ggaaggtggaggaactccaggcctgtgttgagacagcccgccaggaacagcatgaggcccaggcccaggttgcagagctagagttgcagctgcggtctgagcagcaaaaagcaactgaga

SEQ ID NO: 336620 - DNA, 120 bp, Artificial Sequence
  ENSG00000137497_20 (sequence is synthesized)
aagaaagggtggcccaggagaaggaccagctccaggagcagctccaggccctcaaagagtccttgaaggtcaccaagggcagccttgaagaggagaagcgcagggctgcagatgccctgg

SEQ ID NO: 336621 - DNA, 120 bp, Artificial Sequence
  ENSG00000137497_21 (sequence is synthesized)
aagagcagcagcgttgtatctctgagctgaaggcagagacccgaagcctggtggagcagcataagcgggaacgaaaggagctggaagaagagagggctgggcgcaaggggctggaggctc

SEQ ID NO: 336622 - DNA, 120 bp, Artificial Sequence
  ENSG00000137497_22 (sequence is synthesized)
gattacagcagcttggggaggcccatcaggctgagactgaagtcctgcggcgggagctggcagaggccatggctgcccagcacacagctgagagtgagtgtgagcagctcgtcaaagaag

SEQ ID NO: 336623 - DNA, 120 bp, Artificial Sequence
  ENSG00000137497_23 (sequence is synthesized)
tagctgcctggcgtgagcggtatgaggatagccagcaagaggaggcacagtatggcgccatgttccaggaacagctgatgactttgaaggaggaatgtgagaaggcccgccaggagctgc

SEQ ID NO: 336624 - DNA, 120 bp, Artificial Sequence
  ENSG00000137497_24 (sequence is synthesized)
aggaggcaaaggagaaggtggcaggcatagaatcccacagcgagctccagataagccggcagcagaacgaactagctgagctccatgccaacctggccagagcactccagcaggtccaag

SEQ ID NO: 336625 - DNA, 120 bp, Artificial Sequence
  ENSG00000137497_25 (sequence is synthesized)
agaaggaagtcagggcccagaagcttgcagatgacctctccactctgcaggaaaagatggctgccaccagcaaagaggtggcccgcttggagaccttggtgcgcaaggcaggtgagcagc

SEQ ID NO: 336626 - DNA, 120 bp, Artificial Sequence
  ENSG00000137497_26 (sequence is synthesized)
aggaaacagcctcccgggagttagtcaaggagcctgcgagggcaggagacagacagcccgagtggctggaagagcaacagggacgccagttctgcagcacacaggcagcgctgcaggcta

SEQ ID NO: 336627 - DNA, 120 bp, Artificial Sequence
  ENSG00000137497_27 (sequence is synthesized)
tggagcgggaggcagagcagatgggcaatgagctggaacggctgcgggccgcgctgatggagagccaggggcagcagcaggaggagcgtgggcagcaggaaagggaggtggcgcggctga

SEQ ID NO: 336628 - DNA, 120 bp, Artificial Sequence
  ENSG00000137497_28 (sequence is synthesized)
cccaggagcggggccgtgcccaggctgaccttgccctggagaaggcggccagagcagagcttgagatgcggctgcagaacgccctcaacgagcagcgtgtggagttcgctaccctgcaag

SEQ ID NO: 336629 - DNA, 120 bp, Artificial Sequence
  ENSG00000137497_29 (sequence is synthesized)
aggcactggctcatgccctgacggaaaaggaaggcaaggaccaggagttggccaagcttcgtggtctggaggcagcccagataaaagagctggaggaacttcggcaaaccgtgaagcaac

SEQ ID NO: 336630 - DNA, 120 bp, Artificial Sequence
  ENSG00000137497_30 (sequence is synthesized)
gaaaaggagcacgcatctggctcaggagcccaatctgaggctgctggcaggacagagccaacaggccccaagctggaggcactgcgggcagaggtgagcaagctggaacagcaatgccag

SEQ ID NO: 336631 - DNA, 120 bp, Artificial Sequence
  ENSG00000137497_31 (sequence is synthesized)
aagcagcaggagcaggctgacagcctggaacgcagcctcgaggctgagcgggcctcccgggctgagcgggacagtgctctggagactctgcagggccagttagaggagaaggcccaggag

SEQ ID NO: 336632 - DNA, 120 bp, Artificial Sequence
  ENSG00000137497_32 (sequence is synthesized)
ctagggcacagtcagagtgccttagcctcggcccaacgggagttggctgccttccgcaccaaggtacaagaccacagcaaggctgaagatgagtggaaggcccaggtggcccggggccgg

SEQ ID NO: 336633 - DNA, 120 bp, Artificial Sequence
  ENSG00000137497_33 (sequence is synthesized)
caagaggctgagaggaaaaatagcctcatcagcagcttggaggaggaggtgtccatcctgaatcgccaggtcctggagaaggagggggagagcaaggagttgaagcggctggtgatggcc

SEQ ID NO: 336634 - DNA, 120 bp, Artificial Sequence
  ENSG00000137497_34 (sequence is synthesized)
gagtcagagaagagccagaagctggaggagaggctgcgcctgctgcaggcagagacagccagcaacagtgccagagctgcagaacgcagctctgctctgcgggaggaggtgcagagcctc

SEQ ID NO: 336635 - DNA, 120 bp, Artificial Sequence
  ENSG00000137497_35 (sequence is synthesized)
cgggaggaggctgagaaacagcgggtggcttcagagaacctgcggcaggagctgacctcacaggctgagcgtgcggaggagctgggccaagaattgaaggcgtggcaggagaagttcttc

SEQ ID NO: 336636 - DNA, 120 bp, Artificial Sequence
  ENSG00000137497_36 (sequence is synthesized)
cagaaagagcaggccctctccaccctgcagctcgagcacaccagcacacaggccctggtgagtgagctgctgccagctaagcacctctgccagcagctgcaggccgagcaggccgctgcc

SEQ ID NO: 336637 - DNA, 120 bp, Artificial Sequence
  ENSG00000137497_37 (sequence is synthesized)
gagaaacgccaccgtgaggagctggagcagagcaagcaggccgctgggggactgcgggcagagctgctgcgggcccagcgggagcttggggagctgattcctctgcggcagaaggtggca

SEQ ID NO: 336638 - DNA, 120 bp, Artificial Sequence
  ENSG00000137497_38 (sequence is synthesized)
gagcaggagcgaacagctcagcagctgcgggcagagaaggccagctatgcagagcagctgagcatgctgaagaaggcgcatggcctgctggcagaggagaaccgggggctgggtgagcgg

SEQ ID NO: 336639 - DNA, 120 bp, Artificial Sequence
  ENSG00000137497_39 (sequence is synthesized)
gccaaccttggccggcagtttctggaagtggagttggaccaggcccgggagaagtatgtccaagagttggcagccgtacgtgctgatgctgagacccgtctggctgaggtgcagcgagaa

SEQ ID NO: 336640 - DNA, 120 bp, Artificial Sequence
  ENSG00000137497_40 (sequence is synthesized)
gcacagagcactgcccgggagctggaggtgatgactgccaagtatgagggtgccaaggtcaaggtcctggaggagaggcagcggttccaggaagagaggcagaaactcactgcccaggtg

SEQ ID NO: 336641 - DNA, 120 bp, Artificial Sequence
  ENSG00000137497_41 (sequence is synthesized)
gagcagctagaggtatttcagagagagcaaactaagcaggtggaagaactgagtaagaaactggctgactctgaccaagccagcaaggtgcagcagcagaagctgaaggctgtccaggct

SEQ ID NO: 336642 - DNA, 120 bp, Artificial Sequence
  ENSG00000137497_42 (sequence is synthesized)
cagggaggcgagagccagcaggaggcccagcgcctccaggcccagctgaatgaactgcaagcccagttgagccagaaggagcaggcagctgagcactataagctgcagatggagaaagcc

SEQ ID NO: 336643 - DNA, 120 bp, Artificial Sequence
  ENSG00000137497_43 (sequence is synthesized)
aaaacacattatgatgccaagaagcagcagaaccaagagctgcaggagcagctgcggagcctggagcagctgcagaaggaaaacaaagagctgcgagctgaagctgaacggctgggccat

SEQ ID NO: 336644 - DNA, 120 bp, Artificial Sequence
  ENSG00000137497_44 (sequence is synthesized)
gagctacagcaggctgggctgaagaccaaggaggctgaacagacctgccgccaccttactgcccaggtgcgcagcctggaggcacaggttgcccatgcagaccagcagcttcgagacctg

SEQ ID NO: 336645 - DNA, 120 bp, Artificial Sequence
  ENSG00000137497_45 (sequence is synthesized)
ggcaaattccaggtggcaactgatgctttaaagagccgtgagccccaggctaagccccagctggacttgagtattgacagcctggatctgagctgcgaggaggggaccccactcagtatc

SEQ ID NO: 336646 - DNA, 120 bp, Artificial Sequence
  ENSG00000137497_46 (sequence is synthesized)
accagcaagctgcctcgtacccagccagacggcaccagcgtccctggagaaccagcctcacctatctcccagcgcctgccccccaaggtagaatccctggagagtctctacttcactccc

SEQ ID NO: 336647 - DNA, 120 bp, Artificial Sequence
  ENSG00000137497_47 (sequence is synthesized)
atccctgctcggagtcaggcccccctggagagcagcctggactccctgggagacgtcttcctggactcgggtcgtaagacccgctccgctcgtcggcgcaccacgcagatcatcaacatc

SEQ ID NO: 336648 - DNA, 120 bp, Artificial Sequence
  ENSG00000137497_48 (sequence is synthesized)
accatgaccaagaagctagatgtggaagagccagacagcgccaactcatcgttctacagcacgcggtctgctcctgcttcccaggctagcctgcgagccacctcctctactcagtctcta

SEQ ID NO: 336649 - DNA, 120 bp, Artificial Sequence
  ENSG00000137497_49 (sequence is synthesized)
gctcgcctgggttctcccgattatggcaactcagccctgctcagcttgcctggctaccgccccaccactcgcagttctgctcgtcgttcccaggccggggtgtccagtggggcccctcca

SEQ ID NO: 336650 - DNA, 120 bp, Artificial Sequence
  ENSG00000137497_50 (sequence is synthesized)
ggaaggaacagcttctacatgggcacttgccaggatgagcctgagcagctggatgactggaaccgcattgcagagctgcagcagcgcaatcgagtgtgccccccacatctgaagacctgc

SEQ ID NO: 336651 - DNA, 120 bp, Artificial Sequence
  ENSG00000137497_51 (sequence is synthesized)
tatcccctggagtccaggccttccctgagcctgggcaccatcacagatgaggagatgaaaactggagacccccaagagaccctgcgccgagccagcatgcagccaatccagatagccgag

SEQ ID NO: 336652 - DNA, 120 bp, Artificial Sequence
  ENSG00000137497_52 (sequence is synthesized)
ggcactggcatcaccacccggcagcagcgcaaacgggtctccctagagccccaccagggccctggaactcctgagtctaagaaggccaccagctgtttcccacgccccatgactccccga

SEQ ID NO: 336653 - DNA, 120 bp, Artificial Sequence
  ENSG00000137497_53 (sequence is synthesized)
gaccgacatgaagggcgcaaacagagcactactgaggcccagaagaaagcagctccagcttctactaaacaggctgaccggcgccagtcgatggccttcagcatcctcaacacacccaag

SEQ ID NO: 336654 - DNA, 120 bp, Artificial Sequence
  ENSG00000137497_54 (sequence is synthesized)
aagctagggaacagccttctgcggcggggagcctcaaagaaggccctgtccaaggcttcccccaacactcgcagtggaacccgccgttctccgcgcattgccaccaccacagccagcgcc

SEQ ID NO: 336655 - DNA, 120 bp, Artificial Sequence
  ENSG00000137497_55 (sequence is synthesized)
gccactgctgccgccattggtgccacccctcgagccaagggcaaggcaaagcactaaagggccagtaccagtgagtggccccacctgtgtccccgatgctgacctcacctggtcctccgc

SEQ ID NO: 336656 - DNA, 120 bp, Artificial Sequence
  ENSG00000137497_56 (sequence is synthesized)
ctactgtccctctcagtgccttctctcagctcccaggccaacagtagccaaacccctagagacagtgatgcctgcccgcaccctggcctggtccctggtccttcactggcgccttctcgg

SEQ ID NO: 336657 - DNA, 120 bp, Artificial Sequence
  ENSG00000137497_57 (sequence is synthesized)
agctggcccagggggcctggagcatggacagtgtgggcgctctccctaccttgcctccttttttcttaaagcaaagtcacttctccatcacaaccagatttgaggctggttttgatggct

SEQ ID NO: 336658 - DNA, 120 bp, Artificial Sequence
  ENSG00000137497_58 (sequence is synthesized)
gggtccttgggcctggccagtcttcctcttagcctctggatctagaagggaccataagaggagtaggccctggttcctgctgtcctggtggctgggcccagcaggggccctcactcttga

SEQ ID NO: 336659 - DNA, 120 bp, Artificial Sequence
  ENSG00000137497_59 (sequence is synthesized)
agtccaggactgggtctgacctggtgggagcacctgccagaggatgctctttcccaggacggatgggccctatgtctcaggagtggggttgggggacagccttcagcagcagctcacacc

SEQ ID NO: 336660 - DNA, 120 bp, Artificial Sequence
  ENSG00000137497_60 (sequence is synthesized)
ctaccttccccagacttgcactggggtgggatttggagtgatgggaaggtttttaagggccggggatggatcttttctaaatgttattacttgtaaataaagtctatttttctcccgtga

SEQ ID NO: 336661 - DNA, 120 bp, Artificial Sequence
  ENSG00000137497_61 (sequence is synthesized)
tcagccttcagcctagtgggggaacttcaccctgtcacttcagagccttgtttcctcctgttctttcagttcttggatgtttttccctccccatggtcttctctcactcttaacctaggt

SEQ ID NO: 336662 - DNA, 120 bp, Artificial Sequence
  ENSG00000137497_62 (sequence is synthesized)
gtgttctccaggcttcctgacagtttagagttgagccattccagatggtgtaatatagcttcccgttcatctgtgctgcctccgtctcctctcggcccctttccacagagcttttttatg

SEQ ID NO: 336663 - DNA, 120 bp, Artificial Sequence
  ENSG00000137497_63 (sequence is synthesized)
tttgcaaatagggtggcagagtgccatcttttccagaagaaccccatgcctcaagtcccctcttcccacccaccacacagttccatctggataaatggtgtcctggtatctgtcacctgc

SEQ ID NO: 336664 - DNA, 120 bp, Artificial Sequence
  ENSG00000137497_64 (sequence is synthesized)
catgccacctagcaggcctagcccatgcttcacctcacctgacttgtttttctttgaacagcagatactggactttttaaaaatacagttatagcaattattgccattcatcatagaaag

SEQ ID NO: 336665 - DNA, 120 bp, Artificial Sequence
  ENSG00000137497_65 (sequence is synthesized)
ggatgtgagtgtctctcagatggggagtatctttctaagaaaggggtacagagcatggaattcttaggctacaggcaggcagcgtctcagggcgcattggagtgactgtctggcatcacc

SEQ ID NO: 336666 - DNA, 120 bp, Artificial Sequence
  ENSG00000137497_66 (sequence is synthesized)
gcacttctggctgtcagccaggaagatcgctcctgccaggcagactgagaagaaaaccaacaacttttcttttgtgtgtggggttactttccactggcccccccttcctcctctcctttc

SEQ ID NO: 336667 - DNA, 120 bp, Artificial Sequence
  ENSG00000137497_67 (sequence is synthesized)
gaaactaattctaagccagactgctggagatcaccctgttctagtgtgtggaggcttccaccaggagacagggtctctctctgtcacccagactggagtgcaatggcgggatctcagctc

SEQ ID NO: 336668 - DNA, 120 bp, Artificial Sequence
  ENSG00000137497_68 (sequence is synthesized)
agttggaagagttcttcaggctgtggcagccactgcccaccaacacacccaaatcaatcaagatgaatcccaggtggtgaggctgaagcagatggtttggtagctccagtctttttttag

SEQ ID NO: 336669 - DNA, 120 bp, Artificial Sequence
  ENSG00000137497_69 (sequence is synthesized)
gcagaaatgatgtattaaatcactacattgatttttttgttgttgttagcagttgtgggtttgaaaaaaggtaggcaggaagatggtgaaggggtcaagcctaggggctgttatcttgaa

SEQ ID NO: 336670 - DNA, 120 bp, Artificial Sequence
  ENSG00000137497_70 (sequence is synthesized)
tatatgcaaattaagctgattatattgtagtgccctgtaacctgttcctggaaacagtggtcttgaaaactcatcagttaaatgaggtgttagacagcctggtcaaaagattctgtgact

SEQ ID NO: 336671 - DNA, 120 bp, Artificial Sequence
  ENSG00000137497_71 (sequence is synthesized)
aagttactgtataatcatttgcaattctctttcttactctaaacattgttttcctcatttttatattgaaagagttaagagatgctaaaaattctagatctgaaaattggataagcctaa

SEQ ID NO: 336672 - DNA, 120 bp, Artificial Sequence
  ENSG00000137497_72 (sequence is synthesized)
gaaggtttgaggtagggaaatgtctattctaagctgtttgactactggacttggggtaggagtggaatttcttttttacttcctaaattatagttactttactctctacttatagtcaca

SEQ ID NO: 336673 - DNA, 120 bp, Artificial Sequence
  ENSG00000137497_73 (sequence is synthesized)
gctgggtgatcagacattaagtagctatttaatgagaagcaggcactggaagcttgctccagaaaaacaatcacaggacatgttggtcctgagagaagtcattccttggtaggacctatt

SEQ ID NO: 336674 - DNA, 120 bp, Artificial Sequence
  ENSG00000137497_74 (sequence is synthesized)
gtttgaaggaggtgggggtgaatttcatcaaaatggacagtgtggatattgtgattcagaggattgagagactttgtttcctgctgttattaatttcaagccttttttaaagggattctc

SEQ ID NO: 336675 - DNA, 120 bp, Artificial Sequence
  ENSG00000137497_75 (sequence is synthesized)
ctagtgattggtacagtgggattcatttagagaaaaagccttgtgtaccagttggaagttaatgcccaagagcagggccagttgctggaggacaaagtggcctaattagttgcttttcaa

SEQ ID NO: 336676 - DNA, 120 bp, Artificial Sequence
  ENSG00000137497_76 (sequence is synthesized)
tacttagatcctacaggctaccccaaagataaaataggctactttgtagctcagatcttccagcctagtgcctagcaagctcactaagaagaggaggtgacctgtagaatccacacctct

SEQ ID NO: 336677 - DNA, 120 bp, Artificial Sequence
  ENSG00000137497_77 (sequence is synthesized)
taatctccctatttctcttctttccctcattgccctttagttttaattaggattgtgtaaacatagtcatcttgccagtcctcttaaagtggcaggcccttggcattttctgctggtcac

SEQ ID NO: 336678 - DNA, 120 bp, Artificial Sequence
  ENSG00000137497_78 (sequence is synthesized)
gtcatttactcaggcagcatatttagtacctactgtgtgcaagcagtgtgctggagtggaaatgattttaaaatggtttctgccctccaggagtttagtaaaatgaaacaagtattacag

SEQ ID NO: 336679 - DNA, 120 bp, Artificial Sequence
  ENSG00000137497_79 (sequence is synthesized)
ctagcatccacccagggaggattgtaattaagtttgtagaggaacaagcaatatgggagcacatagaggaaagaacaattgttcctgatggtgggggcgataaggagagtttgggagaag

SEQ ID NO: 336680 - DNA, 120 bp, Artificial Sequence
  ENSG00000137497_80 (sequence is synthesized)
gcatttgagccaggttgtaaaggaagaataggagttcagtaggtttaggagacagggcatttaatggaggtcacaccatgggcaaaggcacacagcttggaaaatgcctggcatgtatgg

SEQ ID NO: 336681 - DNA, 120 bp, Artificial Sequence
  ENSG00000137497_81 (sequence is synthesized)
ggaaaatgtgcctgaggtagaggatattttagggaatgaactgaagatgaggctgggaaggaaatttgagggttggatcttagagaaccttaagcgttatgctaagaaatttggatttta

SEQ ID NO: 336682 - DNA, 120 bp, Artificial Sequence
  ENSG00000137497_82 (sequence is synthesized)
ttcttcatgtaattagctgttaagtgtttttgatttacagactaacatgacccaatctatgttatttaggtcctgtctattctttttttttttttttcttgagcagagtttcgctcttgt

SEQ ID NO: 336683 - DNA, 71 bp, Artificial Sequence
  ENSG00000137497_83 (sequence is synthesized)
tctttttttttttttttcttgagcagagtttcgctcttgttgcccaggctataggcgtgatctcggctcac

SEQ ID NO: 336684 - DNA, 120 bp, Artificial Sequence
  ENSG00000137497_84 (sequence is synthesized)
ccaccacgcccggcccggtcttgtctattcttaagtgtaaagtcttagaggttaggttgagagaaggtggtggtcctggttcttacagtacagtattaagtttgtcaggcatctcatgtt

SEQ ID NO: 336685 - DNA, 120 bp, Artificial Sequence
  ENSG00000137497_85 (sequence is synthesized)
tgagaacttgattcctcagttatatttactaaaacaactccaaaagcaagaaggcaggaagtggtcagagctgtgtccctttaaactgagctcactgacccaccaaagatgattttctta

SEQ ID NO: 336686 - DNA, 120 bp, Artificial Sequence
  ENSG00000137497_86 (sequence is synthesized)
ggcatatacattatgaacagtcttcttgctagtgggttgcttactactgataatcctttgtggataaaatttcacacaaggagcaggcttttcattatagggcagaaaccaaaaacattt

SEQ ID NO: 336687 - DNA, 120 bp, Artificial Sequence
  ENSG00000137497_87 (sequence is synthesized)
tttaagcctgattgaaaaatagtatatattcattctaggatatgtgaaaaacgcagagaagtataaggaagaaaactgaaatcacccgtaatcccactatctggagaaaactactgttct

SEQ ID NO: 336688 - DNA, 120 bp, Artificial Sequence
  ENSG00000137497_88 (sequence is synthesized)
tattttagcctattttctttcagtattttgtgcttgtatatttctggttttgcaatttccagatcatatattacctaaaattttatattctgcttttttccccatttaccattttttcat

SEQ ID NO: 336689 - DNA, 120 bp, Artificial Sequence
  ENSG00000137497_89 (sequence is synthesized)
tttatatatactcttcataaatatttgtagtggctgcataatagtctatcatataggatttttatatgctttcaggttttttcaaataataatggaatttttttcaaatcatttttgtaa

SEQ ID NO: 336690 - DNA, 120 bp, Artificial Sequence
  ENSG00000137497_90 (sequence is synthesized)
ttttgtaatagatataacaaataagtccccaaataagtctttaccctaattctgccctgcagaagtaaccattatttattaatagttttctgtgtatctttatatgaacattattatgca

SEQ ID NO: 336691 - DNA, 120 bp, Artificial Sequence
  ENSG00000137497_91 (sequence is synthesized)
agccaggtaaccggcgcgggcccgcgtttggcgtgcggcctgggcacccctgcgggtgctcaggcctaaaaggggtgctggagaggccgctgcgagcggaaggcctcctccataaccgag

SEQ ID NO: 336692 - DNA, 120 bp, Artificial Sequence
  ENSG00000137497_92 (sequence is synthesized)
ggatttagtgggtggccgtgtcccagagcagggcaggcggtgcccatggaaggtggcagggcgctttgtgtgcgcattggagtgactgtctggcatcaccaagatgacactccacgccac

SEQ ID NO: 336693 - DNA, 120 bp, Artificial Sequence
  ENSG00000137497_93 (sequence is synthesized)
ttttgttttcagccatgtaggagaagcagagtctacaagtccccgtgcctgcgtctgttaagggctgcagccagtgcctggcgtactcggtctcgtgccttggcccctcagcccctcccc

SEQ ID NO: 336694 - DNA, 120 bp, Artificial Sequence
  ENSG00000137497_94 (sequence is synthesized)
ataaatgctcagcggaacaggggattaggttctggcagcacagctgggattttggcggccattccacagccgacaatagcacgcagcacaggacagcgcaggcctgtactccagggccag

SEQ ID NO: 336695 - DNA, 120 bp, Artificial Sequence
  ENSG00000137497_95 (sequence is synthesized)
aatctgcctgggcttcttgtttgggtggcggagggggaggagcgggcacagcacggcatcctggccttgccacgcagaaggcgcattggagtgactgtctggcatcaccaagatgacact

SEQ ID NO: 336696 - DNA, 120 bp, Artificial Sequence
  ENSG00000137497_96 (sequence is synthesized)
aatgctggctgcttaaacggtgaccagtcttggtgcatgagcccggctgcagcttgcctccgccagctcctgttgtgaactgtttgtgaagggggcagggtcaagccatggaatccaggc

SEQ ID NO: 336697 - DNA, 120 bp, Artificial Sequence
  ENSG00000137497_97 (sequence is synthesized)
agatgtcagcatgtttttgttcagagaaggaaagcgtgtttgcctgcacgttgagctgtagagacagctcaggagagggcttcaccatttctgcgtgaggccgtgggcgcattggagtga

SEQ ID NO: 336698 - DNA, 120 bp, Artificial Sequence
  ENSG00000137497_98 (sequence is synthesized)
caggacaaggtaaccctctgctggggtcacagccacagtcttgaccacatgtgcaaagctgagtccagtttaccactgtgctcttctgggcctttgggtattaagttgctttctcttcaa

SEQ ID NO: 336699 - DNA, 120 bp, Artificial Sequence
  ENSG00000137497_99 (sequence is synthesized)
ggttcaatagtgtgctgtaattgaaagattgtgggcttcagtctagtacaccttttttttttaacttattttttttttccccagtcaatgccctcactttatagtacacctttcaatcct

SEQ ID NO: 336700 - DNA, 120 bp, Artificial Sequence
  ENSG00000137497_100 (sequence is synthesized)
atctctgctgttcacaagatgtggatcttggacaagttaatcagtctgtttttctaagcatcctttccctaaaatgggagtagtaacgagtagctgcctcatcacctattatgagaaaac

SEQ ID NO: 336701 - DNA, 120 bp, Artificial Sequence
  ENSG00000137497_101 (sequence is synthesized)
gtatgtaaagcacttcacacatcgtgtagtgtaaagtaagctctcagtgaaccagttgtgattgttactattggtaagaacccaatttggccacttactaataaccatgtagcccttgat

SEQ ID NO: 336702 - DNA, 120 bp, Artificial Sequence
  ENSG00000137497_102 (sequence is synthesized)
actaataaccatgtagcccttgatcaaggcacttagcatctgcttcaggttcttgctctgtaagaggaatggtagtagctgcctcccacataagctgggtgtggtgatgcatgcctgtag

SEQ ID NO: 336703 - DNA, 120 bp, Artificial Sequence
  ENSG00000137497_103 (sequence is synthesized)
gagagatggacagattattactgctgccttaaactctgggtggaaaacagagcgaagggggagtgtccggttgatcccagtttgtcaggcaggccactgcgcattggagtgactgtctgg

SEQ ID NO: 336704 - DNA, 120 bp, Artificial Sequence
  ENSG00000137497_104 (sequence is synthesized)
gatgaagcagaccagggaaaggacatgagcatggagtggggtgtggttaggagctgttcaggaagcttggtgattgggctcgccaagcaggacgacattggattatgcccacgttcatgg

SEQ ID NO: 336705 - DNA, 120 bp, Artificial Sequence
  ENSG00000137497_105 (sequence is synthesized)
cttgggggcctgagtggggggcgttcctattcactgaaatgggagatgcaggaggaagaacagagaagtgggcttagattgggacgtgtttgctgtgaagcagccatgggcatctggtgg

SEQ ID NO: 336706 - DNA, 120 bp, Artificial Sequence
  ENSG00000137497_106 (sequence is synthesized)
ggatgggacatctgggtctgggcattgccactatgaggagctattaggagaagccaggggagtggactgaaaggaaggcccaggtcaagtgctttccttggtacctctgaaaaatcagag

SEQ ID NO: 336707 - DNA, 120 bp, Artificial Sequence
  ENSG00000137497_107 (sequence is synthesized)
agatgggctgcttgacctcatctgcttgtagtaaggatgggaaatggtcactttcaaaaagggctggacaaaatgccttctagcgtgaaggactgtacctcagcaggtttcctttccata

SEQ ID NO: 336708 - DNA, 120 bp, Artificial Sequence
  ENSG00000137497_108 (sequence is synthesized)
ccccgttgacctggcctgcatggcttcccttctgcttgctgtctgatccacagaacgctggggttgcccaggataatgtgaggctgagctcactaagagtgggtgggttaggggaatgaa

SEQ ID NO: 336709 - DNA, 120 bp, Artificial Sequence
  ENSG00000137497_109 (sequence is synthesized)
cagactgctggagatcaccctgttctagtgtgtggaggcttccaccaggagacaggttctcactatgttgcccacgctggtctcaaattccttggctcaagtgatcctcccatcttggcc

SEQ ID NO: 336710 - DNA, 120 bp, Artificial Sequence
  ENSG00000137497_110 (sequence is synthesized)
gcgctcacagcgctggcgcgagcccacgaagaggtacgattccggagaatcgcgaggcagagcgggagcgcgcagccaggcgcattggagtgactgtctggcatcaccaagatgacactc

SEQ ID NO: 336711 - DNA, 120 bp, Artificial Sequence
  ENSG00000137497_111 (sequence is synthesized)
ctgctggagatcaccctgttctagtgtgtggaggcttccaccaggagctgtggcagaagcagtgtgaacaatgaatgcagaaatgctttgtatacatgaagacctatactgatgagaaag

SEQ ID NO: 336712 - DNA, 120 bp, Artificial Sequence
  ENSG00000137497_112 (sequence is synthesized)
agccttcctccctatgtctgtttatggagtgcctgctgtttatcaggctgtatcctagtgagataaataagatgtgatctaaatttattcttagagaagaataacgaaaaacgggtatta

SEQ ID NO: 336713 - DNA, 120 bp, Artificial Sequence
  ENSG00000137497_113 (sequence is synthesized)
taccagatatctatttagggcacagttggaataaaaagcaagtggtcaagaaaggcttcgtggaagctatcgctcctgctgagtcttgaaagcatccataggtgtgtgtgccaggttgac

SEQ ID NO: 336714 - DNA, 120 bp, Artificial Sequence
  ENSG00000137497_114 (sequence is synthesized)
tcagagagactggactttgtgtgcagttttctgcagagtaagcacctttcttatccagctatgaagaagctgcttcctcagctcgtgggattggagagtccagaggaactagttcatggg

SEQ ID NO: 336715 - DNA, 120 bp, Artificial Sequence
  ENSG00000137497_115 (sequence is synthesized)
tgtctggaggagaaaaatttcaaggctccccactctttaacacaaagatgaaaacagctggttcagatcccctgggtcttgtgatgccttcatcagttggtgtaagaagagtgtcccttc

SEQ ID NO: 336716 - DNA, 120 bp, Artificial Sequence
  ENSG00000137497_116 (sequence is synthesized)
ggctgtaattgaaaggtttaggagaaaaaaaaaggaaccttggaagaatttgaaactgaagagtacatggttaatttgcatcttaaaaagattattctaatagctagtatagaagttaag

SEQ ID NO: 336717 - DNA, 120 bp, Artificial Sequence
  ENSG00000137497_117 (sequence is synthesized)
actggaaaaatgtttttattaaacacttacatttacttattttgtgctagacataaagcactcatgacaattatacctgatttgtcccccaacaaccctctgaggtaggtttattctgtc

SEQ ID NO: 336718 - DNA, 120 bp, Artificial Sequence
  ENSG00000137497_118 (sequence is synthesized)
tcctttaacagatgaatctggggcatagaggggcagtcacttgcccaaggttccccagtggtagagctggggtttgaccctgggcagcctggcctgagttcttggcttgtcaccactcat

SEQ ID NO: 336719 - DNA, 120 bp, Artificial Sequence
  ENSG00000137500_0 (sequence is synthesized)
cagcggccgaaaacttcaggttccaggctgctgtgcggctaaatgcgactccatctcccccgacccaagcgcgtaatggccgctggctatcttgggggagccagctgttggactatgccc

SEQ ID NO: 336720 - DNA, 120 bp, Artificial Sequence
  ENSG00000137500_1 (sequence is synthesized)
cactgccaggaaacaggcgccggaaggttctctgacaagatctcgctttcctagggcggtgaaggcgttcaaaggtcgggaaggggcgctgggagaagcggggcagcgctgagccatgct

SEQ ID NO: 336721 - DNA, 120 bp, Artificial Sequence
  ENSG00000137500_2 (sequence is synthesized)
cgcgaactgtgggtctgtctgtgaagagacccagtttcgtgggaccacggtggcgcctgcgctgggaggtgagcttgtgacagagcgaaaactacaattcccagcattcctgtggtgcca

SEQ ID NO: 336722 - DNA, 120 bp, Artificial Sequence
  ENSG00000137500_3 (sequence is synthesized)
gaactaccttgcccgaaagcctgtgcgagatttaccccgtcttccgcctccctcccaccggaaaactctgaggacatgaatagtcgccaggcttggcggctctttctctcccaaggcaga

SEQ ID NO: 336723 - DNA, 120 bp, Artificial Sequence
  ENSG00000137500_4 (sequence is synthesized)
ggagatcgttgggtttcaaggccccgcgggcatttctcgccggccctgcggagagagttcttcactaccacaaccaaggagggatatgataggcggccagtggatataactcctttagaa

SEQ ID NO: 336724 - DNA, 120 bp, Artificial Sequence
  ENSG00000137500_5 (sequence is synthesized)
caaaggaaattaacttttgatacccatgcattggttcaggacttggaaactcatggatttgacaaaacacaagcagaaacaattgtatcagcgttaactgctttatcaaatgtcagcctg

SEQ ID NO: 336725 - DNA, 120 bp, Artificial Sequence
  ENSG00000137500_6 (sequence is synthesized)
gatactatctataaagagatggtcactcaagctcaacaggaaataacagtacaacagctaatggctcatttggatgctatcaggaaagacatggtcatcctagagaaaagtgaatttgca

SEQ ID NO: 336726 - DNA, 120 bp, Artificial Sequence
  ENSG00000137500_7 (sequence is synthesized)
aatctgagagcagagaatgagaaaatgaaaattgaattagaccaagttaagcaacaactaatgcatgaaaccagtcgaatcagagcagataataaactggatatcaacttagaaaggagc

SEQ ID NO: 336727 - DNA, 120 bp, Artificial Sequence
  ENSG00000137500_8 (sequence is synthesized)
agagtaacagatatgtttacagatcaagaaaagcaacttatggaaacaactacagaatttacaaaaaaggatactcaaaccaaaagtattatttcagagaccagtaataaaattgacgct

SEQ ID NO: 336728 - DNA, 120 bp, Artificial Sequence
  ENSG00000137500_9 (sequence is synthesized)
gaaattgcttccttaaaaacactgatggaatctaacaaacttgagacaattcgttatcttgcagcttcggtgtttacttgcctggcaatagcattgggattttatagattctggaagtag

SEQ ID NO: 336729 - DNA, 120 bp, Artificial Sequence
  ENSG00000137500_10 (sequence is synthesized)
tattaatgctcatcctgctgtggctgttggcttcttagaacaccaaaccgggagagatttactttgaacattgtcagttgcagcaaaaatttactacacaagattattcgaagtgtatac

SEQ ID NO: 336730 - DNA, 120 bp, Artificial Sequence
  ENSG00000137500_11 (sequence is synthesized)
ggactaaaagaggaagtgttttagaatgagaagagatactgtgtctttattgtgtgtgtgtgagtgcaggtgtgtgtctttattatattgaaaagctgtcactcagacctggtttgagat

SEQ ID NO: 336731 - DNA, 120 bp, Artificial Sequence
  ENSG00000137500_12 (sequence is synthesized)
agaagagcattttgtccttttgatagttaatagaaattgaaccagagttttcttatgtttgcttgaacagttgtgtaaatcatacaggattttgtgggtattggttgaatatttgtaaac

SEQ ID NO: 336732 - DNA, 120 bp, Artificial Sequence
  ENSG00000137500_13 (sequence is synthesized)
cattccctagcctacatatttattactgaattaactttcctgataaccattgcataattacatttttctataaaatgaaagattattacaacaaagttgtgtgggttttcaaagtgactt

SEQ ID NO: 336733 - DNA, 120 bp, Artificial Sequence
  ENSG00000137500_14 (sequence is synthesized)
caacaaagttgtgtgggttttcaaagtgacttaccatatagttggagattgatttctttttggtaatgaactaaaacaataaattttaaaatgataggccaggcgcggtggctcacacct

SEQ ID NO: 336734 - DNA, 120 bp, Artificial Sequence
  ENSG00000137500_15 (sequence is synthesized)
agcctgggtgacagagcaagactccattacctaaataaataaatgtgtgctttagtgcaaattacaacacttaatatgaaatctgtagagttgctaaatattgagctctgattattacat

SEQ ID NO: 336735 - DNA, 120 bp, Artificial Sequence
  ENSG00000137500_16 (sequence is synthesized)
gtattttttaaatatttgatactcaaaaaccagtttatccctgcttcttaatgtagtttaagttaacccatcttaaatttattacataaaacaaagcttttcttaatgacttcaattcag

SEQ ID NO: 336736 - DNA, 120 bp, Artificial Sequence
  ENSG00000137500_17 (sequence is synthesized)
tcagcaaacattgatatctagtacctactctcaagaaactcataggaaaatttaaattcgtattttgttttgttattagatatattttttcttacaaagtaatatctattagtaaatcat

SEQ ID NO: 336737 - DNA, 120 bp, Artificial Sequence
  ENSG00000137500_18 (sequence is synthesized)
aatttcaaagaaattttaaaatatccttttcatcttagttcttcagtcttacccagatcaagaagacaagaccagaaagtaaacattttgagttcataatgccttggtaatagctataaa

SEQ ID NO: 336738 - DNA, 120 bp, Artificial Sequence
  ENSG00000137500_19 (sequence is synthesized)
agtttgacaatcattattcaaaatagccttgtcatttgtttagctataaacagggaatctgcagtatagagcagtcaagagattggtccatatggtccagtgagtgagagtcaggctttc

SEQ ID NO: 336739 - DNA, 120 bp, Artificial Sequence
  ENSG00000137500_20 (sequence is synthesized)
caactatattttcctcaaaaatctaactgctggtttgttttcaaaagaaaaaccttgacattatcctgttacattctgattcatttttatctctattgcctaagagagttcttagtatat

SEQ ID NO: 336740 - DNA, 120 bp, Artificial Sequence
  ENSG00000137500_21 (sequence is synthesized)
tatagattaattttcactgagtcaattaataagttaccatatatattaaagtccactgtaacaaagtatactgcatttgttcagttaaccaatatgactgcctgctatatgccaaacagc

SEQ ID NO: 336741 - DNA, 120 bp, Artificial Sequence
  ENSG00000137500_22 (sequence is synthesized)
atgctagtccctgtgtgcacagagatgaacatggtttcattctcattgaattgacaatcttaaggagagagacataaacaagtaaattattggtttgttaagatttaaaatattctaaaa

SEQ ID NO: 336742 - DNA, 120 bp, Artificial Sequence
  ENSG00000137500_23 (sequence is synthesized)
tattaagagggaatgcgtctttcctccatgtgaaggaagctccagtagcataacactgtcgtcactcttcatccccttatccactctgccctaggtaaagtgacttgcccaattgtaaat

SEQ ID NO: 336743 - DNA, 120 bp, Artificial Sequence
  ENSG00000137500_24 (sequence is synthesized)
ctggaaggagaaacaaggtgcaattagcccacttcctccccactcctgtttgggaccagcccatctgaagagacattcattctgttctgcttctatgggatcaggctctgcctctgcagg

SEQ ID NO: 336744 - DNA, 120 bp, Artificial Sequence
  ENSG00000137500_25 (sequence is synthesized)
atgaggcctggcccagtagagcaatgcttgagacagggtaaatctgtccagttctagagttcagtgataagaagcttactggccttaagatgaaacccatattctcttgctgagcacagt

SEQ ID NO: 336745 - DNA, 120 bp, Artificial Sequence
  ENSG00000137500_26 (sequence is synthesized)
ggcacacatctatagtcctagctgcttgggaggctgcggcagcaggattgcttgagccaaggagttcatcaaggctaaagtgtaccatgatcatacctataaatagtcactgcactccag

SEQ ID NO: 336746 - DNA, 120 bp, Artificial Sequence
  ENSG00000137500_27 (sequence is synthesized)
cctggcaacacatgagaccctgtctcctaaaaaaaaacttctccaatagttttatcagcaaataaaggtgttttttaggcctctatattagtttattcattcttcatcttagttatattc

SEQ ID NO: 336747 - DNA, 120 bp, Artificial Sequence
  ENSG00000137500_28 (sequence is synthesized)
acaacccagaatggaaaggaggtatgccatttattggaccttctcaagccccaacaaataaatatacttattcccaggttatacagccactaaatattaaatagatctgcgttctttctc

SEQ ID NO: 336748 - DNA, 120 bp, Artificial Sequence
  ENSG00000137500_29 (sequence is synthesized)
attgtaggggtttagcaaacaaagtgctttgtatccaataacagaagaatagaaatatgcataccataccctgtccccattacttttagatcctatatcctttccatgaaacttcatttt

SEQ ID NO: 336749 - DNA, 120 bp, Artificial Sequence
  ENSG00000137500_30 (sequence is synthesized)
gatggtggttctggggttcaggtaaatttttgtttcagtgatggaaatatatgaaataaggatgagaggattgtgtttctatatgccttaaaactatacctctattccagcacttgcact

SEQ ID NO: 336750 - DNA, 120 bp, Artificial Sequence
  ENSG00000137500_31 (sequence is synthesized)
tcactatgaaacagcaattatacgtatctttttcctacactaaactacaagttctcagaaggcctctagacacatgtgaggtacttgttaaacgcctgtggaataaatgatactcataaa

SEQ ID NO: 336751 - DNA, 120 bp, Artificial Sequence
  ENSG00000137500_32 (sequence is synthesized)
tggtaagtgaattttttttctagctgttaatttcagaacaaatattcgttacaagatcattttttaaatatctttgctttctttaaagcatgaaaccagtcgaatcagagcagataataa

SEQ ID NO: 336752 - DNA, 120 bp, Artificial Sequence
  ENSG00000137500_33 (sequence is synthesized)
ccggaaaactctgaggacatgaatagtcgccaggcttggcggctctttctctcccaaggcagaggagatcgttgggtttcaaggccccgcgggcatttctcgccggccctgcggagagtt

SEQ ID NO: 336753 - DNA, 120 bp, Artificial Sequence
  ENSG00000137500_34 (sequence is synthesized)
tttaaaccgttttaaggttgtccacaaaataggcgaataggcacctcttatctctgttcaccttcttgaatcttcagtgccagagttcttcactaccacaaccaaggagggatatgatag

SEQ ID NO: 336754 - DNA, 120 bp, Artificial Sequence
  ENSG00000137500_35 (sequence is synthesized)
tgaggcaaggcgtcgtgtcatagatgcctgagtgctctctagggagacgatgcccgtggggtcgcgcctgctcgagcgaacgggaagagaaggtgccacgccctcctcccggattcacgc

SEQ ID NO: 336755 - DNA, 120 bp, Artificial Sequence
  ENSG00000137500_36 (sequence is synthesized)
cttgtgctgggcgacgccgctgcctgctgccccgacttgcccagctcgccccaaggggcgaggactgaggaaagcactgcctttctgttcttaaagcgaacctttgaaggcctgggcttc

SEQ ID NO: 336756 - DNA, 120 bp, Artificial Sequence
  ENSG00000137500_37 (sequence is synthesized)
gcgcccggcttctttctcagccgttgtttccgttttttggtgacaagaggctagtaatctcgtcaggagccaacgtaagagttcttcactaccacaaccaaggagggatatgataggcgg

SEQ ID NO: 336757 - DNA, 120 bp, Artificial Sequence
  ENSG00000137500_38 (sequence is synthesized)
tgcaatgggttcaaacatcctcctttaccttggaggagtttgttattaccgaccttgtgaagcctgcttctgtcaactcatcagtcattctcagtccagttttcttcttgccattgctgg

SEQ ID NO: 336758 - DNA, 80 bp, Artificial Sequence
  ENSG00000137500_39 (sequence is synthesized)
ctcatcagtcattctcagtccagttttcttcttgccattgctggcaaggagctgcaatcctctggaggagaagaggcact

SEQ ID NO: 336759 - DNA, 120 bp, Artificial Sequence
  ENSG00000137500_40 (sequence is synthesized)
tagtaaacaataagtttttagatttaaaaacatactatttgtttaaccatacctaatctttttctatataaatcatagtgctttgcatactgaagagaataagagttacattttatacat

SEQ ID NO: 336760 - DNA, 120 bp, Artificial Sequence
  ENSG00000137500_41 (sequence is synthesized)
ataaaaccacataaaacaaaatctttgagctatatatataaaatttgtatataatggtttcagagctgagagtaatacggcattttctattttatttaatcctgtactaaatgtctttgt

SEQ ID NO: 336761 - DNA, 120 bp, Artificial Sequence
  ENSG00000137500_42 (sequence is synthesized)
tcctagagaaaagtgaatttgcaaatctgagagcagagaatgaggtgatacaaattttaatttattacttataaaataactgatctcataataagcatcctacttaaggaataagttaat

SEQ ID NO: 336762 - DNA, 120 bp, Artificial Sequence
  ENSG00000137500_43 (sequence is synthesized)
actagtttcttttgaagatttttttccttatcaattctgtattagaaatccatagattgtccaaattttggtaatctagggtttcagatttttttaatcataatatagacttggtttaat

SEQ ID NO: 336763 - DNA, 120 bp, Artificial Sequence
  ENSG00000137500_44 (sequence is synthesized)
tgccttgtataactgcttttatgtgtaccagtttataagtttagacttttaaaaactacccttgtagagtctctggcttcctcatagctattatagttaaccagcacttttggggaacct

SEQ ID NO: 336764 - DNA, 120 bp, Artificial Sequence
  ENSG00000137500_45 (sequence is synthesized)
ggcaccaggtagatggtcgcccatgagccatgaccttgaagtaagaatcaagatttccacatagtgtgcttttttaaactaaattacttctataatagaaaataactattttttgggcca

SEQ ID NO: 336765 - DNA, 86 bp, Artificial Sequence
  ENSG00000137500_46 (sequence is synthesized)
aaattacttctataatagaaaataactattttttgggccaggcacagtagctcacacctgttaatcctgcactttgggaggctgag

SEQ ID NO: 336766 - DNA, 120 bp, Artificial Sequence
  ENSG00000137500_47 (sequence is synthesized)
cttcctctggaagctttgtcccagaggtgcagccgcctatatgaggatactcaaaccaaaagtattatttcagagaccagtaataaaattgacgctgaaattgcttccttaaaaacactg

SEQ ID NO: 336767 - DNA, 120 bp, Artificial Sequence
  ENSG00000137500_48 (sequence is synthesized)
gtggcctgatcaaattttgattttgtttttttaggtgctggcctcgagcccaggtttttggtagacagcatcataaatttcaggccacgtctgccttattctcactggaattctcagtac

SEQ ID NO: 336768 - DNA, 120 bp, Artificial Sequence
  ENSG00000137500_49 (sequence is synthesized)
atttcagtcacattgtagactttgggaaaataagtgaatactggaacccacaagtttccaacctgttggcacccctgttaacagggtgtcctgaagacatctaactttattcagagaaat

SEQ ID NO: 336769 - DNA, 120 bp, Artificial Sequence
  ENSG00000137501_0 (sequence is synthesized)
acgccgctctgcgttgacagtgccgggcgacacccgggccgtgccgccagcgtccgtcgggagagtgaaggctcgcaacgccttgcccgggggaaggtaacgcgccgcgcccggggctgc

SEQ ID NO: 336770 - DNA, 120 bp, Artificial Sequence
  ENSG00000137501_1 (sequence is synthesized)
gcggtttgcaccgccaggccgagggctgggggccagaagacaagagagacggcgaggcgcgctccctgcccggcagcgactcggaggtaggtgatgctctgatgctgctgcctcttatga

SEQ ID NO: 336771 - DNA, 120 bp, Artificial Sequence
  ENSG00000137501_2 (sequence is synthesized)
attgacgacaggtgcagagagagaataaactgtgtctaagactggaccagagagtgagtgtgctggaagccaccataggaacaagcgacctgtttggcaaggaatacagcatccttctga

SEQ ID NO: 336772 - DNA, 120 bp, Artificial Sequence
  ENSG00000137501_3 (sequence is synthesized)
gagcctcttctcgacactatcccacagaccaggacttcctcatgggaaagagcacttaggatcttgctatcagctgccctaaacttttgctgagccaaaataagactttgatgcagaact

SEQ ID NO: 336773 - DNA, 120 bp, Artificial Sequence
  ENSG00000137501_4 (sequence is synthesized)
gaacaagatatttcatttttgtgtgttttaatcttcctggttgcagtcttagttgttcagccctgagaattttgagccacatttgttgctattatttttgcatgcacttttcaaaatgat

SEQ ID NO: 336774 - DNA, 120 bp, Artificial Sequence
  ENSG00000137501_5 (sequence is synthesized)
tgacttaagcttcctgactgaagaggaacaagaggccatcatgaaggttttgcagcgggatgctgctctgaagagggccgaagaagagagagtcagacatttgcctgaaaaaattaagga

SEQ ID NO: 336775 - DNA, 120 bp, Artificial Sequence
  ENSG00000137501_6 (sequence is synthesized)
tgaccagcagctgaagaatatgagtggccaatggttttatgaagccaaggcaaaaaggcacagggacaaaatccatggcgcagatatcatcagagcatctatgagaaagaagaggcccca

SEQ ID NO: 336776 - DNA, 120 bp, Artificial Sequence
  ENSG00000137501_7 (sequence is synthesized)
gatagcagctgagcagagtaaagacagagaaaatggggcaaaggaaagctgggtgaataatgtcaacaaagatgctttccttcctccagagctggctggcgttgtagaagagccagaaga

SEQ ID NO: 336777 - DNA, 120 bp, Artificial Sequence
  ENSG00000137501_8 (sequence is synthesized)
agatgcagcaccagcaagcccgagttccagtgtggtaaatccagcttccagtgtgattgatatgtcccaggaaaacacaaggaaaccaaatgtgtctccagagaagaggaagaatccgtt

SEQ ID NO: 336778 - DNA, 120 bp, Artificial Sequence
  ENSG00000137501_9 (sequence is synthesized)
taatagctccaagttgccagaaggtcactcatcacaacaaactaaaaatgaacagtcaaaaaatggaagaactggtttatttcagacttcaaaagaggatgaattgtcagagtcaaaaga

SEQ ID NO: 336779 - DNA, 120 bp, Artificial Sequence
  ENSG00000137501_10 (sequence is synthesized)
aaagtcaactgtcgcagatacttcaatccaaaagttagagaaatcaaagcagactttgccaggcctttcaaatgggtcccaaatcaaggctccaatccccaaagccaggaagatgatcta

SEQ ID NO: 336780 - DNA, 120 bp, Artificial Sequence
  ENSG00000137501_11 (sequence is synthesized)
caaatcaactgatttaaacaaagatgataaccagtcttttcctagacaaaggacagactccctgaaagcgagaggggctccgagagggatcctcaagcgcaactccagttccagtagcac

SEQ ID NO: 336781 - DNA, 120 bp, Artificial Sequence
  ENSG00000137501_12 (sequence is synthesized)
agactcagaaacccttcgttataatcacaactttgaacccaaaagcaaaattgtgtcacctggcctaaccatccatgagagaatttctgagaaggagcattctttagaagacaactcttc

SEQ ID NO: 336782 - DNA, 120 bp, Artificial Sequence
  ENSG00000137501_13 (sequence is synthesized)
cccaaactccctggagccattaaagcatgtgagattctctgcagtgaaggatgagcttccacagagtcctgggctaatccatggtcgggaagtaggagaatttagtgttttagaatctga

SEQ ID NO: 336783 - DNA, 120 bp, Artificial Sequence
  ENSG00000137501_14 (sequence is synthesized)
cagattgaaaaatggaatggaagatgcaggggacacagaagagtttcagagtgaccctaagccttctcaatacagaaagccttcgctttttcatcaatcaacctcaagcccatatgtatc

SEQ ID NO: 336784 - DNA, 120 bp, Artificial Sequence
  ENSG00000137501_15 (sequence is synthesized)
aaaaagtgaaacacatcagccaatgacttctggttcttttccaattaatgggctgcattctcattcagaagttttaactgcaagaccacagtctatggagaattcaccaaccatcaatga

SEQ ID NO: 336785 - DNA, 120 bp, Artificial Sequence
  ENSG00000137501_16 (sequence is synthesized)
acccaaagataaatcatcagaattaacaaggcttgaatctgtattacccagaagccctgctgatgaactgtctcattgtgttgagcctgagccatctcaggtgccaggtggcagttctag

SEQ ID NO: 336786 - DNA, 120 bp, Artificial Sequence
  ENSG00000137501_17 (sequence is synthesized)
ttcatcagattcatcaaatcaagcaaaagtagataatcagccagaagaattagtgcgtagtgctgaagatgatgagaaaccagatcagaagccagttacaaatgaatgcgtaccaagaat

SEQ ID NO: 336787 - DNA, 120 bp, Artificial Sequence
  ENSG00000137501_18 (sequence is synthesized)
ttccacagtgcctacacaacctgataatccattttctcaccctgacaaactcaaaaggatgagcaagtctgttccagcatttctccaagatgaggtgagtggcagtgtgatgagtgttta

SEQ ID NO: 336788 - DNA, 120 bp, Artificial Sequence
  ENSG00000137501_19 (sequence is synthesized)
tagtggagactttggcaatctggaagttaaaggaaatattcagtttgcaattgaatatgtggagtcactgaaggagttgcatgtttttgtggcccagtgtaaggacttagcagcagcgga

SEQ ID NO: 336789 - DNA, 120 bp, Artificial Sequence
  ENSG00000137501_20 (sequence is synthesized)
tgtaaaaaaacagcgttcagacccatatgtaaaggcctatttgctaccagacaaaggcaaaatgggcaagaagaaaacactcgtagtgaagaaaaccttgaatcctgtgtataacgaaat

SEQ ID NO: 336790 - DNA, 120 bp, Artificial Sequence
  ENSG00000137501_21 (sequence is synthesized)
actgcggtataaaattgaaaaacaaatcttaaagacacagaaattgaacctgtccatttggcatcgggatacatttaagcgcaatagtttcctaggggaggtggaacttgatttggaaac

SEQ ID NO: 336791 - DNA, 120 bp, Artificial Sequence
  ENSG00000137501_22 (sequence is synthesized)
atgggactgggataacaaacagaataaacaattgagatggtaccctctgaagcggaagacagcaccagttgcccttgaagcagaaaacagaggtgaaatgaaactagctctccagtatgt

SEQ ID NO: 336792 - DNA, 120 bp, Artificial Sequence
  ENSG00000137501_23 (sequence is synthesized)
cccagagccagtccctggtaaaaagcttcctacaactggagaagtgcacatctgggtgaaggaatgccttgatctaccactgctaaggggaagtcatctaaattcttttgttaaatgtac

SEQ ID NO: 336793 - DNA, 120 bp, Artificial Sequence
  ENSG00000137501_24 (sequence is synthesized)
catccttccagatacaagtaggaaaagtcgccagaagacaagagctgtagggaaaaccaccaaccctatcttcaaccacactatggtgtatgatgggttcaggcctgaagatctgatgga

SEQ ID NO: 336794 - DNA, 120 bp, Artificial Sequence
  ENSG00000137501_25 (sequence is synthesized)
agcctgtgtagagcttactgtctgggaccattacaaattaaccaaccaatttttgggaggtcttcgtattggctttggaacaggtaaaagttatgggactgaagtggactggatggactc

SEQ ID NO: 336795 - DNA, 120 bp, Artificial Sequence
  ENSG00000137501_26 (sequence is synthesized)
tacttcagaggaagttgctctctgggagaagatggtaaactcccccaatacttggattgaagcaacactgcctctcagaatgcttttgattgccaagatttccaaatgagcccaaattcc

SEQ ID NO: 336796 - DNA, 120 bp, Artificial Sequence
  ENSG00000137501_27 (sequence is synthesized)
actggctcctccactgaaaactactaaaccggtggaatctgatcttgaaaatctgagtaggtggacaaatatcctcactttctatctattgcacctaaggaatactacacagcatgtaaa

SEQ ID NO: 336797 - DNA, 120 bp, Artificial Sequence
  ENSG00000137501_28 (sequence is synthesized)
agtcaatctgcatgtgcttctttgattacaaggcccaagggatttaaatataacaaaatgtgtaatttgtgactctaatattaaataagatatttgaacaagctaggaaaattgaatttc

SEQ ID NO: 336798 - DNA, 120 bp, Artificial Sequence
  ENSG00000137501_29 (sequence is synthesized)
tgctgctgcttcaaagaaaaagctgccccagagcattaaacatggggtattgttaagaagcaaaatgttcttgtttgccatcatgtgtttcacaccacaattctgtgccacagttaagag

SEQ ID NO: 336799 - DNA, 120 bp, Artificial Sequence
  ENSG00000137501_30 (sequence is synthesized)
ggtctggtacccttgcaggacctttgtaggttgtgggaaaaagtcgcagaaagatactcaaagtggagcagggaatggagacagacatcagtgatgataaaaaaaaaaatggaccttaag

SEQ ID NO: 336800 - DNA, 120 bp, Artificial Sequence
  ENSG00000137501_31 (sequence is synthesized)
aaactatttactctgtaatctctaataaaatatggaattccatattagggcaatgagactgaaactactggtgtttttctgccttgagaaaacaaacagttaaaacaagcctcaaatgta

SEQ ID NO: 336801 - DNA, 120 bp, Artificial Sequence
  ENSG00000137501_32 (sequence is synthesized)
ttttagtgccacccactggccataggtacaattcagttgttggcttgttttgacttaattctaaaataggtctcaagcctgtatttttatgagtttatttttttaaaaccctgcatatat

SEQ ID NO: 336802 - DNA, 120 bp, Artificial Sequence
  ENSG00000137501_33 (sequence is synthesized)
atgattgtttttcttataactttactatatgaaagcagcataagagtagtcacaaacatgttttgcaacaaagttttaattagaatgtaagttgctcagttatactgttcttcttatgta

SEQ ID NO: 336803 - DNA, 120 bp, Artificial Sequence
  ENSG00000137501_34 (sequence is synthesized)
cagttatactgttcttcttatgtatgtaaaattttcgtattttgtaaaaacccttagaataaattatcatttgatttaaattgtattagaaaattagcgtgacttctcattttaaataaa

SEQ ID NO: 336804 - DNA, 120 bp, Artificial Sequence
  ENSG00000137501_35 (sequence is synthesized)
tgttccagcatttctccaagatgagagtgatgacagagaaacagatacagcatcagaaagcagttaccagctcagcagacacaagaagagcccgagctctttaaccaatcttagcagctc

SEQ ID NO: 336805 - DNA, 120 bp, Artificial Sequence
  ENSG00000137501_36 (sequence is synthesized)
aaagttctagactggtttaaccgaagttcttattcagatgacaataagtcattcctccaacatccccgaggaatagagtccaaagaaaaaacagactcaaaatcacaggttgctgttgac

SEQ ID NO: 336806 - DNA, 120 bp, Artificial Sequence
  ENSG00000137501_37 (sequence is synthesized)
ttggtgacagatgacactactttaagagaaaatggctcaaagaccctatcacccagcaaaattgaattgaagcctgtgagatctgactcaccattccaagcagagggagatatgctggtt

SEQ ID NO: 336807 - DNA, 120 bp, Artificial Sequence
  ENSG00000137501_38 (sequence is synthesized)
tctgaaagttgccaagataataatgtgaatatcaaatccaaattcatgaatttgtcccaaaaaggcaccccaaaggaaggcccaggtatattgcaaccatttgaaagctatggcacccca

SEQ ID NO: 336808 - DNA, 120 bp, Artificial Sequence
  ENSG00000137501_39 (sequence is synthesized)
agtcaagggagtaaaaatatggactatagccaagattcaaaaagcccaggaaaagggaatggggcatctccttcaaatagtaactattcctacagtgttctcaaggaatctgatgcagaa

SEQ ID NO: 336809 - DNA, 120 bp, Artificial Sequence
  ENSG00000137501_40 (sequence is synthesized)
aaccaagttccatgcaacactaataatattggcaacttgggtgaagaagaacccaagtttcatgctcatgaagaaaatagaggacactcagaagtgaattttgactcttcaacagttgtc

SEQ ID NO: 336810 - DNA, 120 bp, Artificial Sequence
  ENSG00000137501_41 (sequence is synthesized)
aaagaaccaggtttgaaagataacatgaatgcagagagaaagagcaaagtaggaaatacctatatcctgaaagcctccttagagccagagaatattaagtcaacacctggggttgccaac

SEQ ID NO: 336811 - DNA, 120 bp, Artificial Sequence
  ENSG00000137501_42 (sequence is synthesized)
aatggctctccttggaagaagcctgaggtccaattccagcaagaagctggtgaggttcccaagaaccaagtgcagagagagaaatacaaaagagtgagtgacagaatatccttttgggaa

SEQ ID NO: 336812 - DNA, 120 bp, Artificial Sequence
  ENSG00000137501_43 (sequence is synthesized)
ggagagaaagctggtgctaagataactcatgaaaaacccacatcttcatgtagccaggaacaaccttctgctaaagcatatcagcctgtgaagaagtcacagggtgtatcatccatggac

SEQ ID NO: 336813 - DNA, 120 bp, Artificial Sequence
  ENSG00000137501_44 (sequence is synthesized)
agtttatctacagaccagagtgaatataatcaggccattcccaaacgagtggtcttagatgaggatgatcaagcatcccagctctccaattcttattcctcaaataaatctaaagagacc

SEQ ID NO: 336814 - DNA, 120 bp, Artificial Sequence
  ENSG00000137501_45 (sequence is synthesized)
aagccacaaatagcaggtccatccagatactatctttcagctgagcaatcagataaagtgtctctgtttcagaataagaaaaatgagcctataaaaagatcacaagtggcagacagtttg

SEQ ID NO: 336815 - DNA, 120 bp, Artificial Sequence
  ENSG00000137501_46 (sequence is synthesized)
ccttctagaagaaacattactttaccagcactgcaacctccctcaaatgtcgggagtgaacgacatgctccattggagaaagacagacctctagttcgtgaatcaaatgccaactttaaa

SEQ ID NO: 336816 - DNA, 120 bp, Artificial Sequence
  ENSG00000137501_47 (sequence is synthesized)
gttatgtccctaaaagaaagaatggatgaacccaatgcagaacaggtctataatccctctcagtttgagaatttgagaaagttttgggacttagaagctaattcaaacagtaaggataat

SEQ ID NO: 336817 - DNA, 120 bp, Artificial Sequence
  ENSG00000137501_48 (sequence is synthesized)
gacaagaatattaccaccacaagccaaaaaaattctgcaccttttaataggcagaaacacaaggaattcagcgacattaaattatcaggtaaaaatacccatgaagcagaggtgcttcta

SEQ ID NO: 336818 - DNA, 120 bp, Artificial Sequence
  ENSG00000137501_49 (sequence is synthesized)
agcccaaaaaaagttatggcaagagaggaaatggagaaattaaattcaaagggcatactccaggtgctaccagatgaaatcacatttcctttgagtccacttagaaagtatacttatcag

SEQ ID NO: 336819 - DNA, 120 bp, Artificial Sequence
  ENSG00000137501_50 (sequence is synthesized)
gaagaaaaggattactcagaacaagagattcaagaatccataataaaaaccaatgttttgtctaaagactgcaaagacacttttaatgacagcttgcagaaactgctttcagaaacctca

SEQ ID NO: 336820 - DNA, 120 bp, Artificial Sequence
  ENSG00000137501_51 (sequence is synthesized)
acaccagcaattcaaccctctggtggaaaagttcatggaaaacaagtgcttgaaccaagtgtttctgaaaataggacatggcctcaaaaaacagattttgctgatactgaggaagaagtc

SEQ ID NO: 336821 - DNA, 120 bp, Artificial Sequence
  ENSG00000137501_52 (sequence is synthesized)
aaaggacctgagaagatcattaatgagcatgttgacaaaacagtagttcatccaaaggttaaacggaactctttgactgctagtctagacaaactcctgaaggaagcaactggaacttca

SEQ ID NO: 336822 - DNA, 120 bp, Artificial Sequence
  ENSG00000137501_53 (sequence is synthesized)
ccctctcccttgcaagccaagttggcgcctgttatcactggaaccaactctaagctggaagaggggagattttttggaaaagggatagaacagagtcacaatacttcagctgataagaga

SEQ ID NO: 336823 - DNA, 120 bp, Artificial Sequence
  ENSG00000137501_54 (sequence is synthesized)
gaaatactagctccttttccagtgagagatgaaacttttggaaatacagctctcctcaagaaagctgaaagtggtgagtgccagctaagcacacagaatttgattcagatggctgcagaa

SEQ ID NO: 336824 - DNA, 120 bp, Artificial Sequence
  ENSG00000137501_55 (sequence is synthesized)
gattctcatccattggatccaacttcccagctttccagaaagggttcttttggggatgtggccagccctccccaagatatgctttttccccaggatgctcatcttgttccccaggctagg

SEQ ID NO: 336825 - DNA, 120 bp, Artificial Sequence
  ENSG00000137501_56 (sequence is synthesized)
gtacacccttctcaaacggaaatttcggagactgtagagaaagtcattcttccacccagacctgtattgaatgatgtaagtgctgcattacagaagctgtgtggagaagtatggttaagt

SEQ ID NO: 336826 - DNA, 120 bp, Artificial Sequence
  ENSG00000137501_57 (sequence is synthesized)
tatccagctggaagggaagtaggtcctggagaagtgaacccagaatttcctgaagcagtacagccagtatgtagccccctaaatcctccaggagtgatatcaccatgggctacgatggac

SEQ ID NO: 336827 - DNA, 120 bp, Artificial Sequence
  ENSG00000137501_58 (sequence is synthesized)
accatagttccagacaggaaggatttttattcctccaatgtagttcctgataaaactcatgaagttggatcttatttagctgcccaaatgtctccatcagaccagacgcttagctcattt

SEQ ID NO: 336828 - DNA, 120 bp, Artificial Sequence
  ENSG00000137501_59 (sequence is synthesized)
gcttccattgttgctcaatatggcaaaggcctccctcaggaagtggaagaaattgtgagggaaacaattgttcaacccaaatcagagttcctcgaattcagtgctggcttagaaaaacta

SEQ ID NO: 336829 - DNA, 120 bp, Artificial Sequence
  ENSG00000137501_60 (sequence is synthesized)
ctgaaggaagaaactgaaaccttcccctcaaaatatgaaagtgatacagggaatctttctccatcaaagttaataggtagtacagaggagcccaggcgagccacttctgaatgccatcct

SEQ ID NO: 336830 - DNA, 120 bp, Artificial Sequence
  ENSG00000137501_61 (sequence is synthesized)
gaggaattaaaagaaacagtagaaaaggccgaggctccgttaataactgagagtgcttttgatgctggttttgagaaacttcttaaagaaataactgaagctcctccttatcagccccag

SEQ ID NO: 336831 - DNA, 120 bp, Artificial Sequence
  ENSG00000137501_62 (sequence is synthesized)
gtgtcagtgagagaagaaactcacgagaaggagtcctcacagtcagagcagaccaggttcttggggacagtgccccatttttacagggcagcctcacagacctctgaaatgaaggataaa

SEQ ID NO: 336832 - DNA, 120 bp, Artificial Sequence
  ENSG00000137501_63 (sequence is synthesized)
agtaatggtttggaatctcaagtcaaccaatgtgataaaatgttgggaggagacgcacttgtgactgatttattggtagatttttgtggttccagaagtggagttgagatccctagaacc

SEQ ID NO: 336833 - DNA, 120 bp, Artificial Sequence
  ENSG00000137501_64 (sequence is synthesized)
ccacaactttatgtggctcatgaaatagggaccattaaaactgtaacccccccagaggacagggacagtgaaagtggggttgcagggggacaagggactcttcaggaacctggctttgga

SEQ ID NO: 336834 - DNA, 120 bp, Artificial Sequence
  ENSG00000137501_65 (sequence is synthesized)
gaggcttctgaagcaattagtgtgtccagaaataggcaacccattcctctcctgatgaacaaagaaaactctacaaaaacaagtaaagttgaattgactctagcatcgccatatatgaaa

SEQ ID NO: 336835 - DNA, 120 bp, Artificial Sequence
  ENSG00000137501_66 (sequence is synthesized)
caagagaaagaggaagaaaaagaaggtttctctgagtctgatttttcagatggaaacaccagttctaatgcagagagctggagaaatccttccagttcagaagaagaacccagtcctgtt

SEQ ID NO: 336836 - DNA, 120 bp, Artificial Sequence
  ENSG00000137501_67 (sequence is synthesized)
ggtttgcttttccagagtggggaagcaaatcagcttttatgaaagatggattttagctctttgaaacaagatgcttagaataagatgactttgcaatatttttgggactcgaaacctaac

SEQ ID NO: 336837 - DNA, 120 bp, Artificial Sequence
  ENSG00000137501_68 (sequence is synthesized)
atcataccctttacagaagaatagagaggctgttgcagccccgtgctttctcctgctgctggccgattgcttgctctgaactaaccctctaacccttgggagtctgtgtgcagcagtgat

SEQ ID NO: 336838 - DNA, 120 bp, Artificial Sequence
  ENSG00000137501_69 (sequence is synthesized)
gtgagctgcatccgggctgaaatgggagctcccgctatggcactggctcaaggagctaatctaaagagaaagtattttggggaagacatcttggttgcacccctcattgcatcttgacta

SEQ ID NO: 336839 - DNA, 120 bp, Artificial Sequence
  ENSG00000137501_70 (sequence is synthesized)
ccatttgttaatttcttctgaacagatcaagcaaaagtagataatcagccagaagaattagtgcgtagtgctgaagatgcagtgaaggtgctgaactttggcacatgacttgacaaattc

SEQ ID NO: 336840 - DNA, 120 bp, Artificial Sequence
  ENSG00000137501_71 (sequence is synthesized)
ttaagaactgcctaggaaagaagagagtccaggcttcagctcttgtgatttccacagtgcctacacaacctgataatccattttctcaccctgacaaactcaaaaggatgagcaagtctg

SEQ ID NO: 336841 - DNA, 120 bp, Artificial Sequence
  ENSG00000137501_72 (sequence is synthesized)
gaagagagtccaggcttcagctcttgtgagtatgtgctctctgtctgactactgcagatgaaacaagccttctgcccctaaggggtgttagtttccacagtgcctacacaacctgataat

SEQ ID NO: 336842 - DNA, 120 bp, Artificial Sequence
  ENSG00000137501_73 (sequence is synthesized)
ctcaagtctcagcatttagatctctctgggcacaactggtaaaatcttaaattcaaaggaaagagtcccagaacaagggtgggaaatcgtgcctctgcttatataaataactaaatatag

SEQ ID NO: 336843 - DNA, 120 bp, Artificial Sequence
  ENSG00000137501_74 (sequence is synthesized)
tcatttataacttatttggacctatgaaagaactgttagatttccacagtgcctacacaacctgataatccattttctcaccctgacaaactcaaaaggatgagcaagtctgttccagca

SEQ ID NO: 336844 - DNA, 120 bp, Artificial Sequence
  ENSG00000137501_75 (sequence is synthesized)
ataaaccctaggcactgggggtatgaagataatgatacacatgtctaccctcagggccacaatattttaaataataatttcccaacagtctttggatatgctaatagggcttaatgagga

SEQ ID NO: 336845 - DNA, 120 bp, Artificial Sequence
  ENSG00000137501_76 (sequence is synthesized)
aagcagctaaacggaggagccattagatagaaaaccaatgtgctgatggctaaaagtcagtgacatgtagtgggaaacctgaaactttgcttatgaggtcctcctgccagcagtgaaggt

SEQ ID NO: 336846 - DNA, 120 bp, Artificial Sequence
  ENSG00000137501_77 (sequence is synthesized)
agataaatcatcagaattaacaaggcttgaatctgtattacccagaagccctgctggtaagagagttgtcactactagattataaaaacttggtggggccgggcgcggtggctcacgcct

SEQ ID NO: 336847 - DNA, 120 bp, Artificial Sequence
  ENSG00000137501_78 (sequence is synthesized)
atgattaacagttctttaagcatgctcttttcttatttagaaaagtatttctatgttgcagatgaactgtctcattgtgttgagcctgagccatctcaggtgccaggtggcagttctaga

SEQ ID NO: 336848 - DNA, 120 bp, Artificial Sequence
  ENSG00000137501_79 (sequence is synthesized)
tttaaccattctaactttgccttgggatattgaaaattctgaatcagtgaggtatctaaataatttatattttcaaaaaataatgtttattttataattctgagtgtaaaacactatcag

SEQ ID NO: 336849 - DNA, 120 bp, Artificial Sequence
  ENSG00000137501_80 (sequence is synthesized)
aaaagtaatcctcatgctcactaaacaaacctactctaagacactcaacaaccagaacagttttattattgagttgtgtacaaaaatcttgactgtccagatgaaatagtttttcagcct

SEQ ID NO: 336850 - DNA, 120 bp, Artificial Sequence
  ENSG00000137501_81 (sequence is synthesized)
gcagtgtgttagtgatatatctcaaggagatgaaccaataaagtacagactttgtggtctgaagctctgttgtgaaaaaataagctaaaccaattcacactgacagtataatttgattca

SEQ ID NO: 336851 - DNA, 120 bp, Artificial Sequence
  ENSG00000137501_82 (sequence is synthesized)
agtgcagctccagttcaataaaaactaatgtttttaaaattaactttgttttgtatttggttcaactccttgctagttctctctctatataatttataaaaactgcatgttgctaatctc

SEQ ID NO: 336852 - DNA, 120 bp, Artificial Sequence
  ENSG00000137501_83 (sequence is synthesized)
atgatcctgtgcatgtggactactctgcctttaacttttttacaaaaacatgtttgttcatagattaaataaaagtatgttttcaacttaatgtctaatgttttctgacaattgtaagaa

SEQ ID NO: 336853 - DNA, 120 bp, Artificial Sequence
  ENSG00000137501_84 (sequence is synthesized)
gccagttacaaatgaatgcgtaccaagaatgaaggtgctgaactttggcacatgacttgacaaattcttaagaactgcctaggaaagaagagagtccaggcttcagctctttttccacag

SEQ ID NO: 336854 - DNA, 120 bp, Artificial Sequence
  ENSG00000137501_85 (sequence is synthesized)
tggatgaaagcaagatgaaaacctgtcagatgtattctgctgtctcagttgtgaaactgacatttgagctttactttcatgtctctttaatccttctgttaaaatggtatttattctcaa

SEQ ID NO: 336855 - DNA, 120 bp, Artificial Sequence
  ENSG00000137501_86 (sequence is synthesized)
cctgcacgctcccttccaaatactgatacccactctcacactagcctgccaagattccacttagcagctggtccccagttacatctcttcagttgacttcccaagcaagcctcccagagg

SEQ ID NO: 336856 - DNA, 85 bp, Artificial Sequence
  ENSG00000137501_87 (sequence is synthesized)
cttagcagcagcggatgtaaaaaaacagcgttcagacccgtggagtttcactgttgttgcccaggctggcacgatctcagctcac

SEQ ID NO: 336857 - DNA, 120 bp, Artificial Sequence
  ENSG00000137502_0 (sequence is synthesized)
gtttcataatctgttggctcaaatctgctgctgccacaccctgtgcctctcagggtccctgggtcctgttgcagttatcatatgcctcacctttaacctaaatgactctgcgaagtggct

SEQ ID NO: 336858 - DNA, 120 bp, Artificial Sequence
  ENSG00000137502_1 (sequence is synthesized)
gctatggaaggatttactgagtgcaaaatggattttcttccctgctctttggggcaaagctggctcagagattcttagctgcagggggaggggctggcaggcctgaaccgcagttggact

SEQ ID NO: 336859 - DNA, 120 bp, Artificial Sequence
  ENSG00000137502_2 (sequence is synthesized)
tagcagccaggggttttctggttttcattaaaattctctggctgtcttttgggatagctccattggatatgactgtgcactggagccggttgtgctgttctctcagctgtacacacccat

SEQ ID NO: 336860 - DNA, 120 bp, Artificial Sequence
  ENSG00000137502_3 (sequence is synthesized)
caaatcacagtgcccctgaggacgagagaaaattgaagctgtgtaaatgagtatggaagattatgatttcctgttcaaaattgttttaattggcaacgctggtgtggggaagacgtgcct

SEQ ID NO: 336861 - DNA, 120 bp, Artificial Sequence
  ENSG00000137502_4 (sequence is synthesized)
cgtccgaagattcactcagggtcttttccccccaggtcaaggagccacaattggagttgattttatgattaagacagtggagattaatggtgaaaaagtaaagctacagatctgggacac

SEQ ID NO: 336862 - DNA, 120 bp, Artificial Sequence
  ENSG00000137502_5 (sequence is synthesized)
gacattacctgtgaggaatccttccgttgccttcctgagtggctgcgggagatagaacaatatgccagcaacaaggtcatcactgtgttagtgggcaacaagattgacctggctgaaagg

SEQ ID NO: 336863 - DNA, 120 bp, Artificial Sequence
  ENSG00000137502_6 (sequence is synthesized)
agagaggtttcccagcagcgagctgaagaattctcagaagctcaggacatgtattatctggagacctcagccaaggaatctgataatgtggagaaactcttccttgacttagcatgccga

SEQ ID NO: 336864 - DNA, 120 bp, Artificial Sequence
  ENSG00000137502_7 (sequence is synthesized)
ctcatcagtgaagccagacagaacacacttgtgaacaatgtatcctcacccttacctggagaagggaaaagcatcagctatttgacttgttgtaatttcaactaaaggctgaggcacgga

SEQ ID NO: 336865 - DNA, 120 bp, Artificial Sequence
  ENSG00000137502_8 (sequence is synthesized)
gaagaaaaggaatcagcaactgccctgatgggccatgagatgctggggagatctggcgatgactgtggctcccgctctctgaccttctgactcctgtgggctcctgagcttacaaagcat

SEQ ID NO: 336866 - DNA, 120 bp, Artificial Sequence
  ENSG00000137502_9 (sequence is synthesized)
ggcaggccaagggcctcgaccacaggccagcattagcagaacatataatggtttcacccttttccagtctggagttggagcaaggagaaaattgcactaggcactccatgatctgcagag

SEQ ID NO: 336867 - DNA, 120 bp, Artificial Sequence
  ENSG00000137502_10 (sequence is synthesized)
catgttgcttttgtttttttaaaaagcaagtaaaagcgcattcctaaacagagtccggggggaaatgtactgtagggatccctcctgcacatcagtgggtgcatgtgggaactcttcttt

SEQ ID NO: 336868 - DNA, 120 bp, Artificial Sequence
  ENSG00000137502_11 (sequence is synthesized)
attgtgctacggtctctccaccccctgctgctgctgggcttgcgattgccgctcgctccagctgagctaagtgtagcagcagcaccagggcagggactgactccagcccttggactcagg

SEQ ID NO: 336869 - DNA, 120 bp, Artificial Sequence
  ENSG00000137502_12 (sequence is synthesized)
acatcgcagaccttcccttgcgtgcgtgactcattcgcacatccatttctgtttatgcctggggtggggagaaaaatcccaaaccagctgtgtaaatgagtatggaagattatgatttcc

SEQ ID NO: 336870 - DNA, 120 bp, Artificial Sequence
  ENSG00000137502_13 (sequence is synthesized)
aaagtgttatttctcttgtccacaggcactttcaagaactttgggatgtaaaaatgaaatgaaacctttacccatgaccaacagtaacaatcattgttttaataatatatacaagctcca

SEQ ID NO: 336871 - DNA, 120 bp, Artificial Sequence
  ENSG00000137502_14 (sequence is synthesized)
taactccttttggtgctaatgattccgctatttcacagaccaaacgttttagtacattaatgtccttaaatgtgttatatagaaataaaaaaatgggggaagtccatgaatcagcactct

SEQ ID NO: 336872 - DNA, 120 bp, Artificial Sequence
  ENSG00000137502_15 (sequence is synthesized)
ttctcaaagtctcattactacctttttaaaggtggatttttgggaaaagagaatacttttccttttatgttcccctctgaatctctaccactttcttgtctctccagccctttatgtaaa

SEQ ID NO: 336873 - DNA, 120 bp, Artificial Sequence
  ENSG00000137502_16 (sequence is synthesized)
tgaaaacgtttgcaaaatgaaaaaaataaacaaatggttgatgacattctaatataaaaacttagctctaacacattttgagtagtatgaggaaacagaccagatatgaccaaaatactg

SEQ ID NO: 336874 - DNA, 120 bp, Artificial Sequence
  ENSG00000137502_17 (sequence is synthesized)
tggattaatggactgtagtgcagggctcctagcagagcacagtccttgatagtaggtcacatcttttacttcctggtactctccatcttggacagaccaaggcttaggattttgtagatt

SEQ ID NO: 336875 - DNA, 120 bp, Artificial Sequence
  ENSG00000137502_18 (sequence is synthesized)
ttttagtatgataagtgagaatagcaacagatgaaaagtctcacgacccatttttatatcttcgatgataaccttagaaaaattctgctcgtggaagcagattgaactgtcatttatccc

SEQ ID NO: 336876 - DNA, 120 bp, Artificial Sequence
  ENSG00000137502_19 (sequence is synthesized)
ctccttcttgtaataatgttaccttcagacgcttaaccatatgttctttcttttttctttctcttttcctctctatttttctggtctctccttttcttcttccctccctccctccctcct

SEQ ID NO: 336877 - DNA, 120 bp, Artificial Sequence
  ENSG00000137502_20 (sequence is synthesized)
tccctcccatccttatatgcctgtgttactgcaaatctccaattcaaatggaggtgtatatgcctttacttagccaatttaaaaacaggactcaaaatgggagatgtgctgctgaatatg

SEQ ID NO: 336878 - DNA, 120 bp, Artificial Sequence
  ENSG00000137502_21 (sequence is synthesized)
tgtttctttttcttcagtgccatactttgatagcttccaatttgttcactgatataaatgcaaattgggaaaataattaaacctgtatgctgttgatgctgtcagatgtttctgtagctt

SEQ ID NO: 336879 - DNA, 120 bp, Artificial Sequence
  ENSG00000137502_22 (sequence is synthesized)
gctgcttagcataactgagggatgagtaatggaataaggatatgatgtgtaattccactgttgctgtagatggtgacaatctcagttctgatatgttgatgtttgaaagctatttaattg

SEQ ID NO: 336880 - DNA, 120 bp, Artificial Sequence
  ENSG00000137502_23 (sequence is synthesized)
taaagaaattagtcatgtagagacatgatgtggataaagcatttctggcatttctctagcaggttctagattgaccagtgtcttgcacatgagattatgcatattttttaaggggctgat

SEQ ID NO: 336881 - DNA, 120 bp, Artificial Sequence
  ENSG00000137502_24 (sequence is synthesized)
acttttggttggcctcactgtgtttttcctgatcctgtgggaaagagaaaggcatcccagaagtttgacttgtttttcttttagaatctgtctctgcaggaaagaaaagtcattttaata

SEQ ID NO: 336882 - DNA, 120 bp, Artificial Sequence
  ENSG00000137502_25 (sequence is synthesized)
aaaaccaaaataatttataataattgttgcctttccctccccatcctctccactaagccagcaactaaatgtattcagaaaacaagttaatcaaggagggcagaagaattttttttaaac

SEQ ID NO: 336883 - DNA, 120 bp, Artificial Sequence
  ENSG00000137502_26 (sequence is synthesized)
tgtaagaaaatgttcctaagtttagatttattacctgtcatttagggcaaaaatccagtgtccccagcacatgatgacccaactttgtctcacagttgcaagtgtgttgaaaataaagtt

SEQ ID NO: 336884 - DNA, 120 bp, Artificial Sequence
  ENSG00000137502_27 (sequence is synthesized)
gctttgtgaacttagaggaaatggctgtgttagattggactgatttagttgcaaaataataccttttagggtcacacttgtattattccctagggtttagccttctctatatacccttgg

SEQ ID NO: 336885 - DNA, 120 bp, Artificial Sequence
  ENSG00000137502_28 (sequence is synthesized)
ccagactcagaaggggattaaaaagctctggtcttggcctctatcttccttgttgctcctcccagcctttccataacttacccatccacagcccatcagcaggaacacatgagaatgtgg

SEQ ID NO: 336886 - DNA, 120 bp, Artificial Sequence
  ENSG00000137502_29 (sequence is synthesized)
gactttgtttctttttttcttagttgtatgaattccagattaggccttatggatacttgtctactaatatatctgaagtttgaaaacaatccctgacaatattgtaggtgcaataaatat

SEQ ID NO: 336887 - DNA, 120 bp, Artificial Sequence
  ENSG00000137502_30 (sequence is synthesized)
tagtcaaataaacatttaagtgccaaggtggggtggtagtggttgggggagctttttttgattaaacagaaattccttcaagtagaacttgagaaaggacactaaatacagtcatcttaa

SEQ ID NO: 336888 - DNA, 120 bp, Artificial Sequence
  ENSG00000137502_31 (sequence is synthesized)
cccaggccagaacctaaatttattggtttgcctaacagtcttattgtcatggcaatatttgctaagatgagccttctttagataaaaatgaactctcatttagtggtggatgaaaaaaga

SEQ ID NO: 336889 - DNA, 120 bp, Artificial Sequence
  ENSG00000137502_32 (sequence is synthesized)
gaaattgctttatcatatagtttaatttggctcggtctactaagaccaccagggttgatgtattcctccatttttggtgtgatctttttcttcattcaataaagttattaaatatatggc

SEQ ID NO: 336890 - DNA, 120 bp, Artificial Sequence
  ENSG00000137502_33 (sequence is synthesized)
aaaacttttttcagtttccagtgaaaatgcatgatactcatgtcatggagtcaggcttgggaaaatctatgaaataatagtttgctgataatgatattttcttatggctttgtatagact

SEQ ID NO: 336891 - DNA, 120 bp, Artificial Sequence
  ENSG00000137502_34 (sequence is synthesized)
acatcctcaaaggattttgtgcttctttgcccatagaaggctttttctccctttgtgtgcttttattaaatctgttgaattatattaatattttttgaatttacagggccaattatcttt

SEQ ID NO: 336892 - DNA, 120 bp, Artificial Sequence
  ENSG00000137502_35 (sequence is synthesized)
tttgatggattacttagattaggccatgggttcttcctggcctttctttttctcggtcttttaatcatttcacgtttttatctctccctgagtaaagtggcaagaaaactaaaaatgaaa

SEQ ID NO: 336893 - DNA, 120 bp, Artificial Sequence
  ENSG00000137502_36 (sequence is synthesized)
gttaaatgggttgatttgacaatgtgtcaagttctgatttagagtttataaggaaggtagaaacgattggccaaaataagatatttggatgaggattatttaagccgtttagatttggcc

SEQ ID NO: 336894 - DNA, 120 bp, Artificial Sequence
  ENSG00000137502_37 (sequence is synthesized)
agagacgccagatttagcaaaggactgggttcttatcttctttcattcatgaatatatgccttgggaggacactggtgattcccacagaattaggccaatgatttgccacattacccttt

SEQ ID NO: 336895 - DNA, 120 bp, Artificial Sequence
  ENSG00000137502_38 (sequence is synthesized)
aagctagcccataattccaccagatcccacaccaagtttcagttcatgactcatactgaataaacgtcagttgtaaatgatgtttgaattggtcttcctactaaagtgaaacatcttctt

SEQ ID NO: 336896 - DNA, 120 bp, Artificial Sequence
  ENSG00000137502_39 (sequence is synthesized)
ttaagccaagccacatgaatgaaatagcacaatcagaaaaaaatctttttttttttttttgcatatcaaaccaatggccttctccactaagccagcaactaaaggtattcagaaaacaag

SEQ ID NO: 336897 - DNA, 120 bp, Artificial Sequence
  ENSG00000137502_40 (sequence is synthesized)
ttaatcaaggtgggcagaactttttgaactgtgaggaaatgttcctaagtttagatttattacctgtcatttagggcaaaaatctaatgtcttttttatttcttaatcttgtagaactct

SEQ ID NO: 336898 - DNA, 120 bp, Artificial Sequence
  ENSG00000137502_41 (sequence is synthesized)
gtatttcatagtaatgagtacttagggatcattgctctattagcctctgggagagatcttctagagtttgccattcctttttttccaaaattttttgttgttgttgttgttgttttaact

SEQ ID NO: 336899 - DNA, 120 bp, Artificial Sequence
  ENSG00000137502_42 (sequence is synthesized)
gcaactggttacttttctcaaccatggtcctgacatgtttatactatgatacttttgagacttcgctaaagaattaaaagctgtgaaacaacatttgcttctcatccttcagacaaaatg

SEQ ID NO: 336900 - DNA, 120 bp, Artificial Sequence
  ENSG00000137502_43 (sequence is synthesized)
ggttaaacactaattttgggataagggagggatatgttttctttactttctttttggatttcatttctgtggcatgagcctatttgcgtttggaaggaaagatgccttcctttacattct

SEQ ID NO: 336901 - DNA, 120 bp, Artificial Sequence
  ENSG00000137502_44 (sequence is synthesized)
tcacactggtaattttttcatactgaattaagaaattatcatcccttcaaaacacatattaatatagcaacattagagtaagggagatggcatttcatctcctctcctcagtcccttgat

SEQ ID NO: 336902 - DNA, 120 bp, Artificial Sequence
  ENSG00000137502_45 (sequence is synthesized)
gttggaatgttattatcatttccaggagccatactttgaaattaaaaacaaattgaggcattaccagtctgatgaaggaattttaaatgcaagccatttaaagaatacttgaaggatttg

SEQ ID NO: 336903 - DNA, 120 bp, Artificial Sequence
  ENSG00000137502_46 (sequence is synthesized)
gggagacttaggttaggaaaaagaggggaatacaattagtgcattagaacaagatgctctgtggttcagaggggtggaatgaggcctactgaatgaggccgtagggacacagatttgggt

SEQ ID NO: 336904 - DNA, 120 bp, Artificial Sequence
  ENSG00000137502_47 (sequence is synthesized)
tccatgtcagggcgaccattctcaaaaagttggttcactatgggacagtctgcctcaggtaatagcctctgtcaagaggcaaagatgtggagaggatccaattggttggagattggagca

SEQ ID NO: 336905 - DNA, 120 bp, Artificial Sequence
  ENSG00000137502_48 (sequence is synthesized)
ggtgacctattaacctaaattccatgttgtatgtagtactttgcctctcataacatgttcaattaaatatctgttaattcatagctaatgatttttttaatggggcctcgttcttctgcc

SEQ ID NO: 336906 - DNA, 120 bp, Artificial Sequence
  ENSG00000137502_49 (sequence is synthesized)
acaagtgcatcccacctttatctttcagggaagaggttggttgcacgttgttaggccaagagactggccctccattatgccctatgctggacttgctttgtcggtccattcattgatgtc

SEQ ID NO: 336907 - DNA, 120 bp, Artificial Sequence
  ENSG00000137502_50 (sequence is synthesized)
ctgttgaatcaaaaggtattgttttagtagaagttacatgaagtatattcatttatcacttgctaaacataggccttgctctgtttaataaataatgggtgtctctttcaagattttagg

SEQ ID NO: 336908 - DNA, 120 bp, Artificial Sequence
  ENSG00000137502_51 (sequence is synthesized)
ataggcctttttaacagagcagaatcttctgttaaagttctcacaaacagaccaactcccaagagagatgggctggtgggtcactgacataaagcagtccacaagatctattttagaaaa

SEQ ID NO: 336909 - DNA, 120 bp, Artificial Sequence
  ENSG00000137502_52 (sequence is synthesized)
gtatcaatgacatttccttagttggtttgattctcttgagaatacatgagtttaaaagaactgaggtcaaattgctttatgtggaaagcaataaaaacaagtatttttgacttgcaaatt

SEQ ID NO: 336910 - DNA, 120 bp, Artificial Sequence
  ENSG00000137502_53 (sequence is synthesized)
agaggtaactgtaagcaatttttgctattgaagcctatggcccaaattattccacctgcaaaataactttcacccttgcaaggctgatagacggctcttcattggtctttttttatggtt

SEQ ID NO: 336911 - DNA, 120 bp, Artificial Sequence
  ENSG00000137502_54 (sequence is synthesized)
ttgttttgtttttttaagtcattggtcttaaatctgtatggtgacaaatctatttgagtttgattgagactttcttggactcctttggacaagaggtcagagcacaaaggctagtcacca

SEQ ID NO: 336912 - DNA, 120 bp, Artificial Sequence
  ENSG00000137502_55 (sequence is synthesized)
cttctttgacttcttgaggtatgagccaaaattttacttttccattgatttaaagcagaatttttggagatgctgtgttctagttcctgacggaatcggtggtggttgctgactttgaca

SEQ ID NO: 336913 - DNA, 120 bp, Artificial Sequence
  ENSG00000137502_56 (sequence is synthesized)
ctttggagagtgatgtggggagttatatagaaggggaaacactagtttaggtgtgaggagttctagtatgccacaaattagctgagactttagacgaagcacaatatttgagcatcaatc

SEQ ID NO: 336914 - DNA, 120 bp, Artificial Sequence
  ENSG00000137502_57 (sequence is synthesized)
ttctcatctatgagatagacctgtcaggattattgtgaaaattagatgagataagttgaaagtacagtgcttggtaaacagttagcactcaaatattagttctttttcactttaattaag

SEQ ID NO: 336915 - DNA, 120 bp, Artificial Sequence
  ENSG00000137502_58 (sequence is synthesized)
agcagactttgaatggtctgatgccaagtgtagatccttaagagacaaaacaaagaaactttcctggcttcaaagaaaagaactccatttctgaaagggtgccttaaaaggaattcattt

SEQ ID NO: 336916 - DNA, 120 bp, Artificial Sequence
  ENSG00000137502_59 (sequence is synthesized)
gtctgatccatccttttgcctttgggcattactactgtcaccctccatttctttacaaacttcaggcaaggtggtctctctctctctcccaataggcaattccagggttgtaaactcatt

SEQ ID NO: 336917 - DNA, 120 bp, Artificial Sequence
  ENSG00000137502_60 (sequence is synthesized)
atcaggaagcttaatcttagaactgaaatacctcacagagcaatttaaacctctttcttcttgttcctattcttcatgggaagaaaactgggttgatccctatcttctttttaaggagcc

SEQ ID NO: 336918 - DNA, 120 bp, Artificial Sequence
  ENSG00000137502_61 (sequence is synthesized)
acatttgccatttattattgctcttttgcctatttaaaaaaaataacagtcagaaaaaataatgattattaaaatgatagtcattatttacttagtgaatgtcaggataggtatttatta

SEQ ID NO: 336919 - DNA, 120 bp, Artificial Sequence
  ENSG00000137502_62 (sequence is synthesized)
ctcttagcttcttattggtatcagatgtagatcacggtcttactgttgattaactcttcagttatatatacatactttgattctttagttacataattgataacaaagtgtgcttctgaa

SEQ ID NO: 336920 - DNA, 120 bp, Artificial Sequence
  ENSG00000137502_63 (sequence is synthesized)
gaattattctggctgtatggctcttgtttcctccccttggtaaaaatggaggcatgaatctcggttttgtgatctgcttttaatttcatatatgacattatttgatgtacataattacca

SEQ ID NO: 336921 - DNA, 120 bp, Artificial Sequence
  ENSG00000137502_64 (sequence is synthesized)
acatccaaaagcgtttcttcccctttctacgtgtgcactaaattctaaaacaaaaattggaatacaaaatgcctaataaagaaaaaattcatgtacagaaaagcaaaagataatctactt

SEQ ID NO: 336922 - DNA, 120 bp, Artificial Sequence
  ENSG00000137502_65 (sequence is synthesized)
tgttaagataatttgtcactagctggttgaataatgcacagtttttgtttaaggttacacatttatgcctggattaaataacaatagtaaaacttgacaagtcttttgaaaaacagctgc

SEQ ID NO: 336923 - DNA, 120 bp, Artificial Sequence
  ENSG00000137502_66 (sequence is synthesized)
taaacatattgctttctggaatgtaatcattagcaacaaatattctcttattctatacaattgcagaatgctagtggaactttcttgtaggttatttgacaatgaatgttaattgattta

SEQ ID NO: 336924 - DNA, 120 bp, Artificial Sequence
  ENSG00000137502_67 (sequence is synthesized)
ttttttaaaaatgtaaaatcctcttatccctttaaggccggtttaggctttcatgtccctgtgatagaaaatttcaaatgctggcttctaatttctactcactgaagtgtcttccagaca

SEQ ID NO: 336925 - DNA, 120 bp, Artificial Sequence
  ENSG00000137502_68 (sequence is synthesized)
tccagacataccagatggttggagctcctttgatagtatataagggagctacataaatgtatttgaactaactcgtgagcaaaatttctgttttcagcaaaaaaaaaaaaaaaaagaaaa

SEQ ID NO: 336926 - DNA, 120 bp, Artificial Sequence
  ENSG00000137502_69 (sequence is synthesized)
actctgctcaaaatttcagataatacaggagtaaaaagaggtttttgataatctgaagggaaaagtgtgccccatatatcttgtacacacttttaatgcatgacttttagtatagagatg

SEQ ID NO: 336927 - DNA, 120 bp, Artificial Sequence
  ENSG00000137502_70 (sequence is synthesized)
aaataaaatgcaaaatatataattctggagatctcagcagctagttaaaatatttagagaagctgctttatgaagacttagagaatccttgatctcccccacatttcctatcactccatt

SEQ ID NO: 336928 - DNA, 120 bp, Artificial Sequence
  ENSG00000137502_71 (sequence is synthesized)
gaaacatggatctttaatattaatacatacatagttttaactaataaacaggttaatcactgagttttatgaactcgattcttgatatttggctattggttttaagcataggatatcagt

SEQ ID NO: 336929 - DNA, 120 bp, Artificial Sequence
  ENSG00000137502_72 (sequence is synthesized)
agcataggatatcagtattatttgtatacagcgttatataaaatctaaccaacttcaatataagaatagtacttgattttaaatgttaatatgcaaatattaacagtatactacatcata

SEQ ID NO: 336930 - DNA, 120 bp, Artificial Sequence
  ENSG00000137502_73 (sequence is synthesized)
attgatctttttacttaacaaaaagcctgttagaaatataacccactgatgacccgagtccaattagctgaaaaccttctgtagaaaggtgattgtatgaaaaattcaatcaacattaaa

SEQ ID NO: 336931 - DNA, 120 bp, Artificial Sequence
  ENSG00000137502_74 (sequence is synthesized)
aaagggaagtggggagggaatacaaacttgaacaaaatattcttaaatgaagttgcatctctttttaaaattaagatatcattcatgcaccatacggtttatcctattaaggtgtaaact

SEQ ID NO: 336932 - DNA, 120 bp, Artificial Sequence
  ENSG00000137502_75 (sequence is synthesized)
tcaatgtttttaatcatattcactaagttgtgcaacatcaccactccctaacttcagaacactttcatcacctccaaaagaaaccccataccatttgcaatcactcctcctcctccttcc

SEQ ID NO: 336933 - DNA, 120 bp, Artificial Sequence
  ENSG00000137502_76 (sequence is synthesized)
cccagcatccggcaaccactaatctactttctgtccctatgaatttgcctatcctggacatttcatatagtcaaacaacatgtggccttttgtgtctggcttctctaagtaagcataatg

SEQ ID NO: 336934 - DNA, 120 bp, Artificial Sequence
  ENSG00000137502_77 (sequence is synthesized)
tttttaaagctcatccatgttgtagcataaatcagtacattgttttcatgtttaaataatattccattgcatgtatatgccacattttatttgtccatttatcatttgatggacatttgg

SEQ ID NO: 336935 - DNA, 120 bp, Artificial Sequence
  ENSG00000137502_78 (sequence is synthesized)
gttttttccaccttttgattataataatgctgctgtgaacatttatgtaaaagttttttgtatgggtgtatgttttcacatctctcttaaaaacaattagtctgacaaatcaaatcaaat

SEQ ID NO: 336936 - DNA, 120 bp, Artificial Sequence
  ENSG00000137502_79 (sequence is synthesized)
catttatgtttatttacgtagaacctcttgcaatcctgtttggagagtgcaacttacgatcttagtttaattgatcaattaggagacctctgaataaagactaactccccaatacatcca

SEQ ID NO: 336937 - DNA, 120 bp, Artificial Sequence
  ENSG00000137502_80 (sequence is synthesized)
taagaatttttctatgagcctgtcatttagatgtgataagcaatcaatttcatgaagactgtttcagtcttgtagaaattgagttgccatcacatagaggatttcttgtcctctgcattg

SEQ ID NO: 336938 - DNA, 120 bp, Artificial Sequence
  ENSG00000137502_81 (sequence is synthesized)
tttaaaggacaactacaaatcatgctggataagagtactcattcaatcttttaggattcaatgaagtagcattttaaatatgtaagttattttatatattgtctgtcttttaaaattgga

SEQ ID NO: 336939 - DNA, 120 bp, Artificial Sequence
  ENSG00000137502_82 (sequence is synthesized)
ctttgcttcttgaaaaaagtttgtcaaatcaccaaaccatatgactgtccattcattgtagcctatgttttctattattaagaaataattcatactgagagtaaaagaaaaagaatgtat

SEQ ID NO: 336940 - DNA, 120 bp, Artificial Sequence
  ENSG00000137502_83 (sequence is synthesized)
tttgtgtgcaaaggatgaatgtattaaaaactttttatttgtaacaattttttaaaaaaactaaatggaaattgctttcccatgtacttgtatataaataaacatttcctgttgcccaca

SEQ ID NO: 336941 - DNA, 120 bp, Artificial Sequence
  ENSG00000137502_84 (sequence is synthesized)
actcctctcaacctttttgaggcggagagagggggctgggctgggaaggatgttggggagtgctcttggaaaatctgaggaaggcagaggtgggggactgcagtcctgtcacacacggcc

SEQ ID NO: 336942 - DNA, 120 bp, Artificial Sequence
  ENSG00000137502_85 (sequence is synthesized)
gttcccccggagagaaggctggtgcagcttgagctctgtgggcaagtctgactgggcctttctcacttttgcctgtgtttgccttgcagctgtgtaaatgagtatggaagattatgattt

SEQ ID NO: 336943 - DNA, 120 bp, Artificial Sequence
  ENSG00000137502_86 (sequence is synthesized)
tccaagaatatagtctttagctaataattcatgcagtcaaccttcagttcttctgcaattgaagagaaaatgaaataggtcctatcccatggtgacagtttagaaaaataaagtagaaaa

SEQ ID NO: 336944 - DNA, 120 bp, Artificial Sequence
  ENSG00000137502_87 (sequence is synthesized)
cattttctatcaatgtaggctctagggaagaagttggatggccatgaaagttatgtgagctgctaaaaatttaaaaagtctaattacaagatgaaaggaatggctgttctagaagaaaaa

SEQ ID NO: 336945 - DNA, 120 bp, Artificial Sequence
  ENSG00000137502_88 (sequence is synthesized)
tgtatcttttaagttgatatggaattcattattgaagcaattgtttattgcctaaaaggtggattttggtaattttttttcccttcctaacatttaggctgatttgagaaattctgtgtt

SEQ ID NO: 336946 - DNA, 120 bp, Artificial Sequence
  ENSG00000137502_89 (sequence is synthesized)
tcagaaagaatctgctaagggcaatgctgtagtttgtttcatcttgtaggagaataaaacctctatttagtatggggggaaagcacaaaacaacccttgattttctatcatgactgatat

SEQ ID NO: 336947 - DNA, 62 bp, Artificial Sequence
  ENSG00000137502_90 (sequence is synthesized)
actcattcgcacatccatttctgtttatgcctggggtggggagaaaaatcccaaaccaggtt

SEQ ID NO: 336948 - DNA, 120 bp, Artificial Sequence
  ENSG00000137502_91 (sequence is synthesized)
catcgtgtggcccagtctggttgtcaagatagatgctgtgtctagacagtcatctcccttgggaaatcacagttgcttaaaaaggaggcacgtggtctcctgttaagaatacaaaacagg

SEQ ID NO: 336949 - DNA, 120 bp, Artificial Sequence
  ENSG00000137502_92 (sequence is synthesized)
cctgtgagctgttgaggaagaggttgctgcttgaggttgcatgggcctatggagcagggcctggggaaagaagctgtctgcttctatactcatgtgagtctctggatcatggtggtggcc

SEQ ID NO: 336950 - DNA, 120 bp, Artificial Sequence
  ENSG00000137502_93 (sequence is synthesized)
cagagccagtgatactgtgcctccactgaagattgctgggaggaattgaaagctgtgtaaatgagtatggaagattatgatttcctgttcaaaattgttttaattggcaacgctggtgtg

SEQ ID NO: 336951 - DNA, 120 bp, Artificial Sequence
  ENSG00000137502_94 (sequence is synthesized)
tactgcagagacatccacaccaaatacagcagtgaatggggagctggagcactggaagataaaagcaggctacagatctgggacacagcaggtcaagagagatttcggtccattacccag

SEQ ID NO: 336952 - DNA, 120 bp, Artificial Sequence
  ENSG00000137504_0 (sequence is synthesized)
ggcgcggtcgagtcatcgcagggcctcaccgcttcgttctcccgtccctccccgcgccttggcgcggggggtcgactagccaagtgaggcgggaggcgactcggacctttccctgcattt

SEQ ID NO: 336953 - DNA, 120 bp, Artificial Sequence
  ENSG00000137504_1 (sequence is synthesized)
cgtttcggccagtgccgggggctacccgccctggggcctgggatccttggggcccgtgaggcccactcttagcggccggggcctaccgcggcccgccgctggccctcatgaggcatagcc

SEQ ID NO: 336954 - DNA, 120 bp, Artificial Sequence
  ENSG00000137504_2 (sequence is synthesized)
tgaccaagctgctggcagcctcgggcagcaactccccaacccgcagtgagagcccggagccggctgcaacttgttcgctgccctctgacctgacccgggctgcagcgggggaggaggaga

SEQ ID NO: 336955 - DNA, 120 bp, Artificial Sequence
  ENSG00000137504_3 (sequence is synthesized)
cggcggcggccggatctcccggccgcaagcagcagtttggcgacgaaggagagttggaagccgggagggggagccgcggcggcgtggccgtgcgcgcgccctcccccgaggagatggagg

SEQ ID NO: 336956 - DNA, 120 bp, Artificial Sequence
  ENSG00000137504_4 (sequence is synthesized)
aggaggcgatcgccagcctcccgggggaagagacggaggatatggactttctgtctgggctggaactggcggatctcctggaccccaggcaaccggactggcacctggaccccgggctta

SEQ ID NO: 336957 - DNA, 120 bp, Artificial Sequence
  ENSG00000137504_5 (sequence is synthesized)
gctcgccggggcctctctcctcgtctggcggaggctcggatagcggcggcctgtggagaggggacgatgacgatgaggccgcggctgctgaaatgcagcgcttctctgacctgctgcaaa

SEQ ID NO: 336958 - DNA, 120 bp, Artificial Sequence
  ENSG00000137504_6 (sequence is synthesized)
ggctgttaaacggtatcggaggctgcagcagcagcagtgacagtggcagcgccgaaaagaggcggagaaagtccccaggaggaggcggcggtggcggcagcggtaacgacaacaaccagg

SEQ ID NO: 336959 - DNA, 120 bp, Artificial Sequence
  ENSG00000137504_7 (sequence is synthesized)
cggcgacaaagagtccccggaaggcggcggcggccgctgcccgccttaatcgactgaagaagaaggagtacgtgatggggctggagagtcgagtccggggtctggcagccgagaaccagg

SEQ ID NO: 336960 - DNA, 120 bp, Artificial Sequence
  ENSG00000137504_8 (sequence is synthesized)
agctgcgggccgagaatcgggagctgggcaaacgcgtacaggcactgcaggaggagagtcgctacctacgggcagtcttagccaacgagactggactggctcgcttgctgagccggctga

SEQ ID NO: 336961 - DNA, 120 bp, Artificial Sequence
  ENSG00000137504_9 (sequence is synthesized)
gcggcgtgggactgcggctgaccacctcgctcttcagagactcgcccgccggtgaccacgactacgctctgccggtgggaaagcagaagcaggacctgctggaagaggacgactcggcgg

SEQ ID NO: 336962 - DNA, 120 bp, Artificial Sequence
  ENSG00000137504_10 (sequence is synthesized)
gaggagtctgtctccatgtggacaaggataaggtgtcggtggagttctgctcggcgtgcgcccggaaggcgtcgtcttctcttaaaatgtagggtcaagtaatctgctctttatccgcgt

SEQ ID NO: 336963 - DNA, 120 bp, Artificial Sequence
  ENSG00000137504_11 (sequence is synthesized)
ttacccctttcaactcccttacaccatgtcaaacttaccttagtgggacatcttcaccggacacatttcagaggagagaaaaaaagtaatattgaatcttaaagtgtttagctaaaagca

SEQ ID NO: 336964 - DNA, 120 bp, Artificial Sequence
  ENSG00000137504_12 (sequence is synthesized)
tgaatgtgacacagtaaccaactcctaatgataacatgtgactattaaatctctctgacagtttcttttttaggtgatttccttcctgccaggctccgttgtaggggttacagaacagtc

SEQ ID NO: 336965 - DNA, 120 bp, Artificial Sequence
  ENSG00000137504_13 (sequence is synthesized)
gttcccgcctcacaacctggtaaggatccatctcttcccgtaacgctcatgctctgctgctttgtctactttaatgggcaacatctcagtttgtgtgtgtgtgatttttttttttttttc

SEQ ID NO: 336966 - DNA, 120 bp, Artificial Sequence
  ENSG00000137504_14 (sequence is synthesized)
tgttttggaaggtgggagggaaatctaatttgggccctgtccaccctggaaacagacttgtgctggtcaagaatgtatttaagatgcctcttctggttgaaatagctattaatgtgtccc

SEQ ID NO: 336967 - DNA, 120 bp, Artificial Sequence
  ENSG00000137504_15 (sequence is synthesized)
cttattcagacttgcgtgtacctagctcttctgtccccagtgtggacatggccttggatgacatcggttccaactgtacactgaaacctgcttatagagagacagtttggagacagtgaa

SEQ ID NO: 336968 - DNA, 120 bp, Artificial Sequence
  ENSG00000137504_16 (sequence is synthesized)
gttgacagttaagtatttggggcatgcacaaatgtgatagttattttgctggaggtgacaggtatctcttaaatatcaacaatgccttttagttttcagtatgagatatagaaacagtct

SEQ ID NO: 336969 - DNA, 120 bp, Artificial Sequence
  ENSG00000137504_17 (sequence is synthesized)
ataatggagtaacattttaatgtctcaccattagagaagttggaaattaacatacatatgagactcctgcgttttagttaattggagaataagaatggctaatgtttctttgaggaccag

SEQ ID NO: 336970 - DNA, 120 bp, Artificial Sequence
  ENSG00000137504_18 (sequence is synthesized)
cagtgattaccctatcactgagattgaataaattgttgaacatctttatttttgttgtattaaaattttaggttaaatttatatatgtatgattagatattgaaggttgtgaaatgtgaa

SEQ ID NO: 336971 - DNA, 120 bp, Artificial Sequence
  ENSG00000137504_19 (sequence is synthesized)
tgaaaacgtgtaaagtgaggcttcacaaagaatcttattctctgtgtttcaaaagtatttgtcctattttaaaataattttttaaattgagtggttctggccacttaaatgacacgattg

SEQ ID NO: 336972 - DNA, 120 bp, Artificial Sequence
  ENSG00000137504_20 (sequence is synthesized)
gtactattttcctaaggtgggatttattcccttgaatctattaaccagttgtataaattgaattatggtgtccttcagtgtaagaggcattaagaaattctttgtgaaacatcactgctt

SEQ ID NO: 336973 - DNA, 120 bp, Artificial Sequence
  ENSG00000137504_21 (sequence is synthesized)
gataaagtatatacgtatttagcatccttgtttttctttgtgctaaagtggatacagctgttggggcagaagagacgggaccagctgctggccacatttcctgctttattttaaaaggta

SEQ ID NO: 336974 - DNA, 120 bp, Artificial Sequence
  ENSG00000137504_22 (sequence is synthesized)
gtataagaaatgaggaaaaagaggtaatatcagggcttctgctgttttttatttttaacatgttcataattaaaaagtattttccagcagtccaaagatgtaagttatcttacacataaa

SEQ ID NO: 336975 - DNA, 120 bp, Artificial Sequence
  ENSG00000137504_23 (sequence is synthesized)
atgttttattttgttatttggttatgaaaatggaatccttgttcttgcacaactgtaaatgttttgttgctagataatacgatttgagacctgaattggtctttggtttccagtgcatca

SEQ ID NO: 336976 - DNA, 120 bp, Artificial Sequence
  ENSG00000137504_24 (sequence is synthesized)
cagcatattttgtaaaatcatctactactgcacttgagcatgaatgggtagtagccaaactcacaaattggagtgatgaacctgcttatacctaagggcaggagcaagcccctcacaatg

SEQ ID NO: 336977 - DNA, 120 bp, Artificial Sequence
  ENSG00000137504_25 (sequence is synthesized)
atatacatatatatatatatatataaaccaaaagtagttggaaagattatttgaaatgactaatttgtgctatctttatgaaatatgttaaatgtagcttttttgaaacagaagccttga

SEQ ID NO: 336978 - DNA, 120 bp, Artificial Sequence
  ENSG00000137504_26 (sequence is synthesized)
aaatatgttaaatgtagcttttttgaaacagaagccttgaattgaaatttaactaatacttgaacattttgtatatatttctttgtatataattttgtgcagtaccaatgacaaaaatat

SEQ ID NO: 336979 - DNA, 120 bp, Artificial Sequence
  ENSG00000137504_27 (sequence is synthesized)
ggtgtcataataaaaccaggtttgttgatcttttagttatgggctcaaagaatttattcatctctaacatgatattggaaaataatggatgaaaataggaaaaatgattgttaatgctga

SEQ ID NO: 336980 - DNA, 120 bp, Artificial Sequence
  ENSG00000137504_28 (sequence is synthesized)
ctgtgggtcttaaaaggttctggaaagcagtaagttcatttttctaaaaactataacattctgttggagtattttcttccttacgtcaatacttttcctgcattatttgaaattgtgggc

SEQ ID NO: 336981 - DNA, 120 bp, Artificial Sequence
  ENSG00000137504_29 (sequence is synthesized)
tggggagaaacagtagtcaaagctttctgaattgagatactttgaaattccaagtgtagatttttagaatgtcattttataaatggcagtttttggaattacttgataagaacttttgaa

SEQ ID NO: 336982 - DNA, 120 bp, Artificial Sequence
  ENSG00000137504_30 (sequence is synthesized)
aatggaaggattagtatggcctatttttaaagctgctttgttaggttccttatgttttattaactgtcttttctcagtttccatttcatttttttttttctagttttggtgacttagtga

SEQ ID NO: 336983 - DNA, 120 bp, Artificial Sequence
  ENSG00000137504_31 (sequence is synthesized)
ttttgtcattttttacatcaacttcatggtcttgtttttacatggtaattgcatgtacttaggatctatctaataggggctttaaataaatttggtcatatttatgtgtaagcacatttt

SEQ ID NO: 336984 - DNA, 120 bp, Artificial Sequence
  ENSG00000137504_32 (sequence is synthesized)
actgtaaatgtttgggtttctgaatttaaacagatctgtttatttcagtatgtagtaaacaatatcttaaagtgtccgattcactacttgttaattaaaaaagttatgattaatgtgaaa

SEQ ID NO: 336985 - DNA, 120 bp, Artificial Sequence
  ENSG00000137504_33 (sequence is synthesized)
gctggccacatttcctgctttattttaaaagcttagcagtgtctgcaaaaacgaatcttttcctacaacctgttaactgactggactgttggtaacaaagtaattgtgagaaccatgtcg

SEQ ID NO: 336986 - DNA, 120 bp, Artificial Sequence
  ENSG00000137504_34 (sequence is synthesized)
gtcaaaaatttggcatctgctgaaaaaaatgaatgccattttcaagttcccaaattacttctatactgatttcactttccagaaatggagatatgaaaagattctctggaatccttgaaa

SEQ ID NO: 336987 - DNA, 120 bp, Artificial Sequence
  ENSG00000137504_35 (sequence is synthesized)
gacttaatagagatacatgagactaagttaatcttggaacaaaattatactttttttgtctttcatgggagtgatactcagttattgcatatctttacaaaattgtaacctttggagaat

SEQ ID NO: 336988 - DNA, 120 bp, Artificial Sequence
  ENSG00000137504_36 (sequence is synthesized)
tacagtatttcatcaagaaattagagtttttacataatcaagagcatattctatggaattaacatttagtggactagaattacataagcaggccatcagtgatcacaaggcatatgagtt

SEQ ID NO: 336989 - DNA, 120 bp, Artificial Sequence
  ENSG00000137504_37 (sequence is synthesized)
acaacctgtacgtccaagctcggctcatccatcccaaattgcggccccgtggtaatccttggggcctaagttttgcgcccagcctgcggggagaagtcccatgggcagaggccggacggt

SEQ ID NO: 336990 - DNA, 120 bp, Artificial Sequence
  ENSG00000137504_38 (sequence is synthesized)
gattagcacatggataaaggagatttctggaatataaaatggattgtttttgaaatttctaggtttggctctatttactgtaatggttgaaaacaatttagtatttgggtgacccttttg

SEQ ID NO: 336991 - DNA, 120 bp, Artificial Sequence
  ENSG00000137504_39 (sequence is synthesized)
tttttcttctaaatgtgcctctggtaaaatacagaactagactaaagatgtagctttttaatatttgtcttttgatggtggcaggagttcatacattaattgaactaacacatcatattt

SEQ ID NO: 336992 - DNA, 120 bp, Artificial Sequence
  ENSG00000137504_40 (sequence is synthesized)
tgacctactatttctatcatattgacttactgtttctgcacttctttgaccagacttatcttaaaaagtccacttttgttaaaatgtagtcacacctctgatataatccaacaagaagtg

SEQ ID NO: 336993 - DNA, 120 bp, Artificial Sequence
  ENSG00000137504_41 (sequence is synthesized)
agttctgaactataaagagtagtccttttaaatagatgcattgatttgtatatctttgaaaaagttgattatgattaaatgtgtgggtagttaattacaatttagggtaacaaccaggat

SEQ ID NO: 336994 - DNA, 120 bp, Artificial Sequence
  ENSG00000137504_42 (sequence is synthesized)
gtatggattcttgaggttttggcttcttgagctttctcttgagtacttgatactgttttctgaatattttgaggtttctaattaatggtatgctagtttctactgttttatataaaaatt

SEQ ID NO: 336995 - DNA, 120 bp, Artificial Sequence
  ENSG00000137504_43 (sequence is synthesized)
tatctagtgttgtataaggactttagtattgtggatgatgggagtggctttttgtggcatatggttgttttaattgaaatattttttcagtttattacaagtgtgaaaaaacactcaaaa

SEQ ID NO: 336996 - DNA, 120 bp, Artificial Sequence
  ENSG00000137507_0 (sequence is synthesized)
ggtggggcagctgagcggcctgctcctcctcgggccgtgaccccggggtctggcgcggggtgggacccgggggcgggtttgcgcaaaatgtgccgagactgcccgggagaggagctgcgg

SEQ ID NO: 336997 - DNA, 120 bp, Artificial Sequence
  ENSG00000137507_1 (sequence is synthesized)
ccgcgctgagccagagccatgagaccccagatcctgctgctcctggccctgctgaccctaggcctggctgcacaacaccaagacaaagtgccctgtaagatggtggacaagaaggtctcg

SEQ ID NO: 336998 - DNA, 120 bp, Artificial Sequence
  ENSG00000137507_2 (sequence is synthesized)
tgccaggttctgggcctgctccaggtcccctcggtgctcccgccagacactgagacccttgatctatctgggaaccagctgcggagtatcctggcctcacccctgggcttctacacagca

SEQ ID NO: 336999 - DNA, 120 bp, Artificial Sequence
  ENSG00000137507_3 (sequence is synthesized)
cttcgtcacctggacctgagcaccaatgagatcagcttcctccagccaggagccttccaggccctgacccacctggagcacctcagcctggctcacaaccggctggcgatggccactgcg

SEQ ID NO: 337000 - DNA, 120 bp, Artificial Sequence
  ENSG00000137507_4 (sequence is synthesized)
ctgagtgctggtggcctgggccccctgccacgcgtgacctccctggacctgtctgggaacagcctgtacagcggcctgctggagcggctgctgggggaggcacccagcctgcataccctc

SEQ ID NO: 337001 - DNA, 120 bp, Artificial Sequence
  ENSG00000137507_5 (sequence is synthesized)
tcactggcggagaacagtctgactcgcctcacccgccacaccttccgggacatgcctgcgctggagcagcttgacctgcatagcaacgtgctgatggacatcgaggatggcgccttcgag

SEQ ID NO: 337002 - DNA, 120 bp, Artificial Sequence
  ENSG00000137507_6 (sequence is synthesized)
ggtctgccccgcctgacccatctcaacctctccaggaattccctcacctgcatctccgacttcagcctccagcagctgcgggtgctagacctgagctgcaacagcatcgaggcctttcag

SEQ ID NO: 337003 - DNA, 120 bp, Artificial Sequence
  ENSG00000137507_7 (sequence is synthesized)
acggcctcccagccccaggctgagttccagctcacctggcttgacctgcgggagaacaaactgctccatttccccgacctggccgcgctcccgagactcatctacctgaacttgtccaac

SEQ ID NO: 337004 - DNA, 120 bp, Artificial Sequence
  ENSG00000137507_8 (sequence is synthesized)
aacctcatccggctccccacagggccaccccaggacagcaagggcatccacgcaccttccgagggctggtcagccctgcccctctcagcccccagcgggaatgccagcggccgccccctt

SEQ ID NO: 337005 - DNA, 120 bp, Artificial Sequence
  ENSG00000137507_9 (sequence is synthesized)
tcccagctcttgaatctggatttgagctacaatgagattgagctcatccccgacagctttcttgagcacctgacctccctgtgcttcctgaacctcagcagaaactgcttgcggaccttt

SEQ ID NO: 337006 - DNA, 120 bp, Artificial Sequence
  ENSG00000137507_10 (sequence is synthesized)
gaggcccggcgcttaggctccctgccctgcctgatgctccttgacttaagccacaatgccctggagacactggaactgggcgccagagccctggggtctctgcggacgctgctcctacag

SEQ ID NO: 337007 - DNA, 120 bp, Artificial Sequence
  ENSG00000137507_11 (sequence is synthesized)
ggcaatgccctgcgggacctgcccccatacacctttgccaatctggccagcctgcagcggctcaacctgcaggggaaccgagtcagcccctgtggggggccagatgagcctggcccctcc

SEQ ID NO: 337008 - DNA, 120 bp, Artificial Sequence
  ENSG00000137507_12 (sequence is synthesized)
ggctgtgtggccttctccggcatcacctccctccgcagcctgagcctggtggataatgagatagagctgctcagggcaggggccttcctccacaccccactgactgagctggacctttct

SEQ ID NO: 337009 - DNA, 120 bp, Artificial Sequence
  ENSG00000137507_13 (sequence is synthesized)
tccaatcctgggctggaggtggccacgggggccttgggaggcctggaggcctccttggaggtcctggcactgcagggcaacgggctgatggtcctgcaggtggacctgccctgcttcatc

SEQ ID NO: 337010 - DNA, 120 bp, Artificial Sequence
  ENSG00000137507_14 (sequence is synthesized)
tgcctcaagcggctcaatcttgccgagaaccgcctgagccaccttcccgcctggacacaggctgtgtcactggaggtgctggacctgcgaaacaacagcttcagcctcctgccaggcagt

SEQ ID NO: 337011 - DNA, 120 bp, Artificial Sequence
  ENSG00000137507_15 (sequence is synthesized)
gccatgggtggcctggagaccagcctccggcgcctctacctgcaggggaatccactcagctgctgcggcaatggctggctggcagcccagctgcaccagggccgtgtggacgtggacgcc

SEQ ID NO: 337012 - DNA, 120 bp, Artificial Sequence
  ENSG00000137507_16 (sequence is synthesized)
acccaggacctgatctgccgcttcagctcccaggaggaggtgtccctgagccacgtgcgtcccgaggactgtgagaaggggggactgaagaacatcaacctcatcatcatcctcaccttc

SEQ ID NO: 337013 - DNA, 120 bp, Artificial Sequence
  ENSG00000137507_17 (sequence is synthesized)
tctctgccatcctcctcaccacgctggccgcctgctgctgcgtccgccggcagaagtttaaccaacagtataaagcctaaagaagccgggagacactctaggtcagtgggggagcctgag

SEQ ID NO: 337014 - DNA, 120 bp, Artificial Sequence
  ENSG00000137507_18 (sequence is synthesized)
gtacagagaagagtgaggactgactcaaggtcacacagtgatccgggatcccagaactctggtctccaaattacagcccaggacacctttctctgccgcctgctgcatcagtgggtgacc

SEQ ID NO: 337015 - DNA, 120 bp, Artificial Sequence
  ENSG00000137507_19 (sequence is synthesized)
cccttcccgggctgcactttgggtccagctgtggaagccagaagttgggcggtttcagggacagccgagaataatgttgacctgtcagatcaacaaatcttcactgagcatgtattttgt

SEQ ID NO: 337016 - DNA, 120 bp, Artificial Sequence
  ENSG00000137507_20 (sequence is synthesized)
gccacaccctgctctgggcactgggaatgctgggaaatgagatacattcccgccctcaagaatctcccagtctggtaggagagagtgctgcagagccacgtggccgccacgcagtgtgct

SEQ ID NO: 337017 - DNA, 120 bp, Artificial Sequence
  ENSG00000137507_21 (sequence is synthesized)
tagggcctgaggtgtgaaagcccagggctccagagctcggcaggccccgctggtttggtgcggtgagtcctgccccggctgtgccagggtgagggagggccaagcccaggaggatttgtc

SEQ ID NO: 337018 - DNA, 120 bp, Artificial Sequence
  ENSG00000137507_22 (sequence is synthesized)
tgagacatttccaagcagactgtttgtcacgtcttctgagaatgactttcagtctctctgaaaatgaaaagcttaggaccagaagagagaattggagctgtacgagtgtgtctcggatct

SEQ ID NO: 337019 - DNA, 120 bp, Artificial Sequence
  ENSG00000137507_23 (sequence is synthesized)
ggtgttgttaggtgggccacggcggctccagcagggtctggttaaggggtccagcccagcactggaccattccgtctcctgctctggacttgccctctcccttcctggcactctcatgtt

SEQ ID NO: 337020 - DNA, 120 bp, Artificial Sequence
  ENSG00000137507_24 (sequence is synthesized)
gcataccctgaccccagtgctgctctaagcaccgtccctgcccagccccacttctccatcgcagccccaccttggctgctgagccaggagctaaaaccttagatatctggttctgttttg

SEQ ID NO: 337021 - DNA, 120 bp, Artificial Sequence
  ENSG00000137507_25 (sequence is synthesized)
cacccagcttggcagatgtggatttgaatccaagccttgtgtctgcccctatgtgacagctctatattttatccccgttttataaaagaggaaactgaagttctgaaaatctccttccag

SEQ ID NO: 337022 - DNA, 120 bp, Artificial Sequence
  ENSG00000137507_26 (sequence is synthesized)
ggccccagctaactaatgccataggtgagattcaaaccttcatccttctgtctccagggcctgatctttaccactgcaggggctgcaggccgttaagtggacaggaagtggccccacata

SEQ ID NO: 337023 - DNA, 120 bp, Artificial Sequence
  ENSG00000137507_27 (sequence is synthesized)
gcccgagcagggtctggaagcatcctgtgctgtgcacacctgctctctcctctctcccaggcaggcagctgcaggcgctctcctccttctctgcctgtttccctcctcccttcctttcca

SEQ ID NO: 337024 - DNA, 120 bp, Artificial Sequence
  ENSG00000137507_28 (sequence is synthesized)
ccctggtgtgggttctcctgttctctctgtgctcttgcattctctcattcccttttcctctattgagcagagcctggagtttgagactatggaatccaacctccccattgcacagatggg

SEQ ID NO: 337025 - DNA, 120 bp, Artificial Sequence
  ENSG00000137507_29 (sequence is synthesized)
gaaactgaggcttaggaagagaatgaaacttgtggagagcttatacagagcctctgggggaaaaaagagcccttatttgtggggtgagattgggggttggaccagagtgatgtcctctct

SEQ ID NO: 337026 - DNA, 120 bp, Artificial Sequence
  ENSG00000137507_30 (sequence is synthesized)
cagctatcacatcacaagataatgctggctccaaacttcctttctgtgcctcatcatgcaaggatcttttttccctcttacaaaaacaggtaaaaagcctcacccagatgacccccatcc

SEQ ID NO: 337027 - DNA, 120 bp, Artificial Sequence
  ENSG00000137507_31 (sequence is synthesized)
ctcataccatggagtcatgagctgtctgggaagaatggacgtgctgggaccaactcaagaccttgttttgctgtcttcatcatcttacctgtgcttggcccacagtctggctcatgatgt

SEQ ID NO: 337028 - DNA, 120 bp, Artificial Sequence
  ENSG00000137507_32 (sequence is synthesized)
gggctcagtaatgtgcgagaaagtgaaaatgccactctctccaccccattttacagaggagaacaccaaggcccagaggaagttaagggagagtcaatgggcagagccagggctaggccc

SEQ ID NO: 337029 - DNA, 120 bp, Artificial Sequence
  ENSG00000137507_33 (sequence is synthesized)
tggtggtgtgtggagcacccaggcagacccagtcctggttgggatcacacccacgggtgctactgcacgtaacactcctccttaggcctggaggccaaggtgtgggtccccacgcctgat

SEQ ID NO: 337030 - DNA, 120 bp, Artificial Sequence
  ENSG00000137507_34 (sequence is synthesized)
ctttgaaaacactacacagggctgctgtcacttcccagggcccaggcctcagcccaggcctcgggaccaactctttgtataacctacctgaatgtattaaaaactaattttggagaagca

SEQ ID NO: 337031 - DNA, 120 bp, Artificial Sequence
  ENSG00000137507_35 (sequence is synthesized)
gtccgcagcagctctcccaggaccccactctgccagtaagtcagctgaggccgagaggagggagagaggacctcagaggccagactgtgagctagtctgccctgctcctgcgtgtgaggg

SEQ ID NO: 337032 - DNA, 120 bp, Artificial Sequence
  ENSG00000137507_36 (sequence is synthesized)
gtcgttggcagggcttagggaaggagaccttgatttggtatagtgggaacatttgctttggagacagatgaactggattctgatcgtgaccctgctattttctccttgtgtgactttgga

SEQ ID NO: 337033 - DNA, 120 bp, Artificial Sequence
  ENSG00000137507_37 (sequence is synthesized)
ccgccttacacagagccatgagaccccagatcctgctgctcctggccctgctgaccctaggcctggctgcacaacaccaagacaaagtgccctgtaagatggtaaaaagcctcacccaga

SEQ ID NO: 337034 - DNA, 120 bp, Artificial Sequence
  ENSG00000137509_0 (sequence is synthesized)
acccgcactgcagtctccagcctgagccatgggccgccgagccctcctgctcctgcttctgtcttttctggcgccctgggccaccatagccctccggccggccttaagggccctcggcag

SEQ ID NO: 337035 - DNA, 120 bp, Artificial Sequence
  ENSG00000137509_1 (sequence is synthesized)
cctacacttgccaaccaaccccacatccctcccggctgtagccaagaactattcggttctctacttccaacagaaggttgatcattttggatttaatactgtgaaaacttttaatcagcg

SEQ ID NO: 337036 - DNA, 120 bp, Artificial Sequence
  ENSG00000137509_2 (sequence is synthesized)
gtacctagtagctgataaatactggaagaaaaatggtggatcaatacttttctacactggtaatgaaggggacattatctggttttgtaataacacggggttcatgtgggatgtggctga

SEQ ID NO: 337037 - DNA, 120 bp, Artificial Sequence
  ENSG00000137509_3 (sequence is synthesized)
ggaactgaaagctatgttggtgtttgctgaacatcgatactatggagagtctctcccctttggtgacaactcattcaaggattccagacacttgaatttcctgacatcagaacaagctct

SEQ ID NO: 337038 - DNA, 120 bp, Artificial Sequence
  ENSG00000137509_4 (sequence is synthesized)
ggctgattttgcagagttaatcaaacacttgaaaagaacaatcccaggagctgaaaatcaacctgtcattgccataggaggctcctatggtggcatgcttgccgcctggtttaggatgaa

SEQ ID NO: 337039 - DNA, 120 bp, Artificial Sequence
  ENSG00000137509_5 (sequence is synthesized)
atatcctcatatggtagttggagctcttgcagcttctgcccctatctggcagtttgaggatttagtaccttgtggtgtatttatgaagatcgtaactacagattttaggaaaagcggtcc

SEQ ID NO: 337040 - DNA, 120 bp, Artificial Sequence
  ENSG00000137509_6 (sequence is synthesized)
acattgttcagagagcatccacaggtcctgggatgccattaatcgactctcaaatactggcagtggtttgcagtggcttactggagcccttcacttatgcagcccattaacttctcagga

SEQ ID NO: 337041 - DNA, 120 bp, Artificial Sequence
  ENSG00000137509_7 (sequence is synthesized)
catccaacatttgaaagactggatctctgaaacctgggtgaatctggcaatggtggactatccttatgcctctaactttttacagcctttgcctgcttggcctatcaaggtagtgtgcca

SEQ ID NO: 337042 - DNA, 120 bp, Artificial Sequence
  ENSG00000137509_8 (sequence is synthesized)
gtatttgaaaaatcccaatgtatctgattcactgctgctgcagaatattttccaagctctgaatgtatattacaattattcgggccaggtgaaatgcctgaatatttcagagacagcaac

SEQ ID NO: 337043 - DNA, 120 bp, Artificial Sequence
  ENSG00000137509_9 (sequence is synthesized)
tagcagtctgggaacactgggttggagctatcaggcctgcacagaagtagtcatgcccttttgtactaatggtgtcgatgacatgtttgaacctcactcatggaacttaaaggaactttc

SEQ ID NO: 337044 - DNA, 120 bp, Artificial Sequence
  ENSG00000137509_10 (sequence is synthesized)
tgatgactgttttcaacagtggggtgtgagaccaaggccctcctggatcactactatgtatggaggcaaaaacattagttcacacacaaacattgttttcagcaatggtgaactagaccc

SEQ ID NO: 337045 - DNA, 120 bp, Artificial Sequence
  ENSG00000137509_11 (sequence is synthesized)
ctggtcaggaggtggagtaactaaggatatcacagacactctggttgcagtcaccatctcagagggggcccaccacttagatctccgcaccaagaatgccttggatcctatgtctgtgct

SEQ ID NO: 337046 - DNA, 120 bp, Artificial Sequence
  ENSG00000137509_12 (sequence is synthesized)
gttagcccgctccttggaagttagacatatgaagaattggatcagagatttctatgacagtgcgggaaagcagcactgagaaacttttgattgttttcaatttcttcttttatgttcaca

SEQ ID NO: 337047 - DNA, 120 bp, Artificial Sequence
  ENSG00000137509_13 (sequence is synthesized)
ccaccacattcccattcactttgattttctacatgtaattaccttcttttgtttatcattagatttgatggggccaaagttgagatagaatagagggtgatgacggtaagagcaagtgtc

SEQ ID NO: 337048 - DNA, 120 bp, Artificial Sequence
  ENSG00000137509_14 (sequence is synthesized)
tgatttcctgggttctcactgtctttgcaccacgtctaggaagaatcttcttgatagctctcccacaccatcagtggccctcataactggagtagagttcctggttgcttttcataagag

SEQ ID NO: 337049 - DNA, 120 bp, Artificial Sequence
  ENSG00000137509_15 (sequence is synthesized)
ggagagttactttctttgtatctctgcaagcagagatttctctttggttttgaggttgaagtgtctttggcccatttgtaagtccccatccctaccctacacaaagtaaaagcagaagat

SEQ ID NO: 337050 - DNA, 120 bp, Artificial Sequence
  ENSG00000137509_16 (sequence is synthesized)
agataaaaaatgatgtaattgcagctggtaggatgtctggtgccaatccaggaagtgagagccatttcttttgtaccggatttaatgactttgaactgtgctgtaaataaataatacagc

SEQ ID NO: 337051 - DNA, 120 bp, Artificial Sequence
  ENSG00000137509_17 (sequence is synthesized)
tggaccttatacctgtgtgttgcttctgaagctcacttcaactccggctgatggaaatgctgtgtgcactgggcttagctgtttttggaaagtcctttaattttttctcttccacttggc

SEQ ID NO: 337052 - DNA, 120 bp, Artificial Sequence
  ENSG00000137509_18 (sequence is synthesized)
agcttttcttagttctgggatgttggccactgtggtactgccagtaagaaatctggcctttttctgctccatttctctttgtttctaaggtcagttttaatttgtttgaattctgccagt

SEQ ID NO: 337053 - DNA, 120 bp, Artificial Sequence
  ENSG00000137509_19 (sequence is synthesized)
ttaggaaaatgactctgttttgtctttttaaatctgagcaagctttatgctgtagtcactaattatatttcagtaagaagcctttaaaaattgatgaatcagctattccaaaagtagaat

SEQ ID NO: 337054 - DNA, 120 bp, Artificial Sequence
  ENSG00000137509_20 (sequence is synthesized)
atagtaatattcagcttttaaatttttaaaattttattttctgatagttgttactgctgtcattaaaaccagaagtgttagacactaacaggcaggtgcacaagaacttttctgtatgac

SEQ ID NO: 337055 - DNA, 120 bp, Artificial Sequence
  ENSG00000137509_21 (sequence is synthesized)
ttccaaaagacaagctgactaattcatgcaggcagcatatttgacattaataaatggccaagccattcctatttccaaggggttggcttctttcaagcagttcttacactgagacctttc

SEQ ID NO: 337056 - DNA, 120 bp, Artificial Sequence
  ENSG00000137509_22 (sequence is synthesized)
ttcagagagcttttctaggataacaaatagggttggatcaaaacctttcagggacacagagagacagagagagagagactaacagtttctactctgttgaaagatttcttcctccttgtt

SEQ ID NO: 337057 - DNA, 120 bp, Artificial Sequence
  ENSG00000137509_23 (sequence is synthesized)
tcttttcattttctctcaataatttttttttcttcaccctgccttgggaacattttctgcttttaaaaaactgtaccttgagcttgatcatttttatggcattttttttttttaagggca

SEQ ID NO: 337058 - DNA, 120 bp, Artificial Sequence
  ENSG00000137509_24 (sequence is synthesized)
tatatagagttcattcttgggatggaaagctgaaatatttcctttactttccctggcatctgggagatacaggaaaatctttgtcttattttgggagccttcagttctcattgtaatgag

SEQ ID NO: 337059 - DNA, 120 bp, Artificial Sequence
  ENSG00000137509_25 (sequence is synthesized)
ttgtctatcaaagcatttggtaactattttgtttcagcatcacagaacaatcgatttgggtgggaatttaagggccaaaacaatactagtttttattctttgtcaactaagaaattaaat

SEQ ID NO: 337060 - DNA, 120 bp, Artificial Sequence
  ENSG00000137509_26 (sequence is synthesized)
aatgcagggtttatgggctcaatagaggatattcttacaatttattttacgattttagggtttttcccttgtgtagaatctttaaaatactttgccattttatttgatgttgattatttg

SEQ ID NO: 337061 - DNA, 120 bp, Artificial Sequence
  ENSG00000137509_27 (sequence is synthesized)
gatgagttacattattctgaagaaacaaactgcaaaaaatagaattttttggcaagcataattgtatcctattactgtatgcattttaggaatatagatagcagccttaattgaagtgag

SEQ ID NO: 337062 - DNA, 120 bp, Artificial Sequence
  ENSG00000137509_28 (sequence is synthesized)
tataattataatatgctaaggtttaattttaacatgaaaaagaattggagtgtcagataagccttattatttaaagcatccctctaataaaactgcactttttactgacagggaaagaga

SEQ ID NO: 337063 - DNA, 120 bp, Artificial Sequence
  ENSG00000137509_29 (sequence is synthesized)
ttactcagagccaatcagaagaaggcgccgcagagggtggagcttagcgaggaaatcctacaagcatctggaaacgaccattttcgtcaaactgcgggggttcatgtgggatgtggctga

SEQ ID NO: 337064 - DNA, 120 bp, Artificial Sequence
  ENSG00000137509_30 (sequence is synthesized)
gctcctcaagcgcggccagaatggacggcgaggccgaggaggcaccgagagcgagcgacgctgcgcgggctgccagcatgctgtcacctctcaatatgatcttataagaaagtagaggcc

SEQ ID NO: 337065 - DNA, 120 bp, Artificial Sequence
  ENSG00000137509_31 (sequence is synthesized)
gagggtggagcttagcgaggaaatcctacaagcatctggaaacgaccattttcgtcaaactgcgggtagagtctttctccccgacaggtggatcagtagtacagtccgtaaaattggttt

SEQ ID NO: 337066 - DNA, 120 bp, Artificial Sequence
  ENSG00000137509_32 (sequence is synthesized)
ttgtggaagtaagcaacagagattttgtctgttttgttgactgtggagtcccgtgcccaatcagtgcctgatatataataggcaatcagtaaacatttgtttacctgttaatagtctcat

SEQ ID NO: 337067 - DNA, 120 bp, Artificial Sequence
  ENSG00000137509_33 (sequence is synthesized)
tacagcaattctttttttattccacagttgctttttggggggagttttattgtctttcccaacttgtaggcattattttaccaatagtcattttcagttattttagtataaatccaaaag

SEQ ID NO: 337068 - DNA, 120 bp, Artificial Sequence
  ENSG00000137509_34 (sequence is synthesized)
ggagtccctgaggagctggttagtttaacataatttctcaggcaaattaattgttgccagtgactaagtgaagctccctgttgggggaattttacccaggcatctagatcctctcatgaa

SEQ ID NO: 337069 - DNA, 120 bp, Artificial Sequence
  ENSG00000137509_35 (sequence is synthesized)
tttttttttttttttttttgtagattttccaatgactggtttagctttcacatgtctaggaccaagaaattcaagtccatgtgcatcttaggtctctcagcaactccaaacactgttgct

SEQ ID NO: 337070 - DNA, 120 bp, Artificial Sequence
  ENSG00000137509_36 (sequence is synthesized)
tccaaacactgttgctaagccactaggctatttcagatgaccttttaaatcaaatgcagtttgcttattatgtggctgttgggatagcttctttgttttgcaaataatggagagtttcct

SEQ ID NO: 337071 - DNA, 120 bp, Artificial Sequence
  ENSG00000137509_37 (sequence is synthesized)
atctgggttgggcttgtcaatttggaataatgataaaggcgatttgttaatttaagagaatccaactccttatgtagtttactttaaaagtttacctggtagttgaaaactaaggcttct

SEQ ID NO: 337072 - DNA, 120 bp, Artificial Sequence
  ENSG00000137509_38 (sequence is synthesized)
taaaagtttacctggtagttgaaaactaaggcttctattttacatgagtgttcctttttgtttttaacaaaaccaaaaaagtacacttctggagtgtagttttttttttttttttttttt

SEQ ID NO: 337073 - DNA, 120 bp, Artificial Sequence
  ENSG00000137509_39 (sequence is synthesized)
accgtgcctggccagcgcaggcaattttagattgtattacaaacacacatatacttaatgtacctaaatgtttttttctcatataatttgtacatttacattttcatgattcatttacct

SEQ ID NO: 337074 - DNA, 120 bp, Artificial Sequence
  ENSG00000137509_40 (sequence is synthesized)
cttggtggtggtaatacttattatgcttacagagtatggtaataactataatgacatcgcacatttgtatagtatttatagtttatttattttcacatatattatttgacttgggtctca

SEQ ID NO: 337075 - DNA, 120 bp, Artificial Sequence
  ENSG00000137509_41 (sequence is synthesized)
cagtagttctctgagagaagggtactatctttcttaaaaaacatttttttctataatccagtgagaattgaggttcacaggggtcagtaacttacccaaagtcattcagctagtaaaaat

SEQ ID NO: 337076 - DNA, 120 bp, Artificial Sequence
  ENSG00000137509_42 (sequence is synthesized)
gtacaacgtagatctactgaattaattcattgttctttccactattaacacacagctgaaggttaatctctttatatttctattaatcatttatatcaacttttctttcccacgtaaaaa

SEQ ID NO: 337077 - DNA, 120 bp, Artificial Sequence
  ENSG00000137509_43 (sequence is synthesized)
gtaccaaagtgatttacaacatgtttatgaacttgcatacgtgtatttatagatgtctatgatgggcatccagtatgaggccacagacaactagacactttttaagttcattcagtaaat

SEQ ID NO: 337078 - DNA, 120 bp, Artificial Sequence
  ENSG00000137509_44 (sequence is synthesized)
tttttgggcctccttttctaagccaggtctgcttctaggaacttggagatgtagaaataaacaatatggacaaaaatctcggctctcatggagttctaatttgagagataggaaatgaaa

SEQ ID NO: 337079 - DNA, 120 bp, Artificial Sequence
  ENSG00000137509_45 (sequence is synthesized)
caagatagaacttataaatatgttagaaggatgtgagtgacaaggagaaaaaagtaaaccggggaaggggactataaaatgtcatagggagggaaaacagttgaaattttttattagagt

SEQ ID NO: 337080 - DNA, 120 bp, Artificial Sequence
  ENSG00000137509_46 (sequence is synthesized)
gaccagggaagacttcatcaaggggtgacttttaaaaaatgatatagaggaagtaaaggagctagccatgaggttggtggggtaagaggattaaccaaaggcaaaggccttgaaagagcc

SEQ ID NO: 337081 - DNA, 120 bp, Artificial Sequence
  ENSG00000137509_47 (sequence is synthesized)
ccagcatgttcttcttcacgtggagtaaggtcagtgtggctggagtggagttagtaagtgagagagtaatagaaggtgaaatcagggagggagcagagggcctgaatcatgtagaaactt

SEQ ID NO: 337082 - DNA, 120 bp, Artificial Sequence
  ENSG00000137509_48 (sequence is synthesized)
gttggttctagtaaggacttaggtttttactgtgaatgagatgggaaaacttggagcattttgagaaaaggaatgacattatctggttcaggttttaacaggatcaagttgcctgctcta

SEQ ID NO: 337083 - DNA, 120 bp, Artificial Sequence
  ENSG00000137509_49 (sequence is synthesized)
ttgatattaaattgtagggagacaagagtagaggcaggaagatcagttaaaaggctattatagtaactcaggctagagataatggtgacttggatcagggttgtgcagtggaggtaatac

SEQ ID NO: 337084 - DNA, 120 bp, Artificial Sequence
  ENSG00000137509_50 (sequence is synthesized)
aaaatggtcagattatggatatatttgaagatatagatgacaggatttgttgacagattgtgtgttaaacaatgagaaaattaaagagtgagaccaaaaagattaaagagtgacatcaaa

SEQ ID NO: 337085 - DNA, 120 bp, Artificial Sequence
  ENSG00000137509_51 (sequence is synthesized)
ctttttggcctgaacaatggaaaggatagacttcccactgacagagattggagaagatggcaggaggagctggttggcatttggggagcatcaggaactgccaagtgtctaatttgactt

SEQ ID NO: 337086 - DNA, 120 bp, Artificial Sequence
  ENSG00000137509_52 (sequence is synthesized)
ccatgtaaaaatgtcaagtacaccattgaactttggttctgaagtttaggggaacaatcctggctagatacattatttggtagtcatctgtatataggttgtacttatagctgagaaatt

SEQ ID NO: 337087 - DNA, 120 bp, Artificial Sequence
  ENSG00000137509_53 (sequence is synthesized)
ttttgatgattttgcaaattatgggaattattttcatgtatttgataatgtgggcttgaagactttttatttcaggctttgtaaccaataccagcaaaatggagtttgcattaaacaaat

SEQ ID NO: 337088 - DNA, 120 bp, Artificial Sequence
  ENSG00000137509_54 (sequence is synthesized)
atcaggacacacataaaatgttctagaagtgatttcaagtggtgggtatagatatgccgagaggtaccattcaaggggaaagtgatctaatacatgccatgggtggaatactcagatcca

SEQ ID NO: 337089 - DNA, 120 bp, Artificial Sequence
  ENSG00000137509_55 (sequence is synthesized)
ggtatttcagtgacagtttttttcctaaggaatctgtttcaatgagattaggtagatgagaggcagacctgggactggaaccaaagtgtgtctgatcccaaagcttatgcttttcttact

SEQ ID NO: 337090 - DNA, 120 bp, Artificial Sequence
  ENSG00000137509_56 (sequence is synthesized)
ttgcagcacacaagagagtgtaagctgtcgacttccaacagcagtcatggttccgctgaaatgcaacatagtgtaaaattaagcattggactagggtttttagaactgtgtttgaatctc

SEQ ID NO: 337091 - DNA, 120 bp, Artificial Sequence
  ENSG00000137509_57 (sequence is synthesized)
agatttgccaaatcaaatgattttggcaagccttttaacctctttgggcattagttttctcttttataaaagaattgtaattaaacctacttcatagggttgttacaatgaacaaatgtg

SEQ ID NO: 337092 - DNA, 120 bp, Artificial Sequence
  ENSG00000137509_58 (sequence is synthesized)
aaaggctttgtaaacacgaatgcaatctatgcataatatgttatactagggaaaaatttgatttaaatagcatcaagaataaaatgctttggaataaatttaacaaaagaagtgcaagat

SEQ ID NO: 337093 - DNA, 120 bp, Artificial Sequence
  ENSG00000137509_59 (sequence is synthesized)
atccacagattcaacgtgatctctgtcaaatttccagctggacttttttttaaaaaaatagaaattgacaaactgatcctgaaattcatataggaatatatgggacccagaatagccaaa

SEQ ID NO: 337094 - DNA, 120 bp, Artificial Sequence
  ENSG00000137509_60 (sequence is synthesized)
acaatcttgaaaaggaagaacgaacttgaagaactcacacttcctgatttcaaacttattacaaagctacagtcaatacagtgtgatactggcataaggatagacatatagacaagtgga

SEQ ID NO: 337095 - DNA, 120 bp, Artificial Sequence
  ENSG00000137509_61 (sequence is synthesized)
agagaatcgagtgtccagaagtcaaaccttatatgtatggcatattgatttttaacaaaagtggcaagacaattcattgagaaaagaatagttttttcaacaaatgatgctgggaaaact

SEQ ID NO: 337096 - DNA, 120 bp, Artificial Sequence
  ENSG00000137509_62 (sequence is synthesized)
ggagatccgcatgcagaagaatgaggttggctccctatttcatactataacaaaaaaatcaactcagaataggtcaaaggcttaaatataagagctaaaatgataaatctcatagaggaa

SEQ ID NO: 337097 - DNA, 120 bp, Artificial Sequence
  ENSG00000137509_63 (sequence is synthesized)
aacataggaacaaatcttcatgaccgtgggttagacaccagtttcttggataccataccataaacataaacaatgagaaaaaatagataaatcgacttcatgaaaatgaaaaacttgtgc

SEQ ID NO: 337098 - DNA, 120 bp, Artificial Sequence
  ENSG00000137509_64 (sequence is synthesized)
tgcaaatgatactatcaagaaagttagaagatagtctacaggatgggagaaaatatttgcaagtcatatatttgataagggacttgtatctagaatagataaggctttgtaaacaatacc

SEQ ID NO: 337099 - DNA, 120 bp, Artificial Sequence
  ENSG00000137509_65 (sequence is synthesized)
agcaaaacggagtttgcattaaacaaatattaggacacccataaaaatgttctataagtaatttccagtggtatgtgggtaaagatatgccaagagtgccatgcaaggggaaaatgatct

SEQ ID NO: 337100 - DNA, 120 bp, Artificial Sequence
  ENSG00000137509_66 (sequence is synthesized)
aatgcttgcaatgggctgagtacttagatccaggtatttcagtgccagttttttgcctaaggaatctgtttccatgagattaggcagatgagaggcagacctgaaattggaaccaaagtg

SEQ ID NO: 337101 - DNA, 120 bp, Artificial Sequence
  ENSG00000137509_67 (sequence is synthesized)
tgtctgatcccaaagctcatgcttttgttactctacaacacacaagttaagagagtgtgagctctcactcaaaaatagaaagatatataaccctagttaaaaaatgaacaaagatatgac

SEQ ID NO: 337102 - DNA, 120 bp, Artificial Sequence
  ENSG00000137509_68 (sequence is synthesized)
taggcattttcccaaagaagatataaaaatggccaatcagcacataagatgtttaaataccatcagtctcttgggaaatgcaaattaaaaccacagtgaaataccatttaatacttacta

SEQ ID NO: 337103 - DNA, 120 bp, Artificial Sequence
  ENSG00000137509_69 (sequence is synthesized)
gcttaggatgtctaaaatagacagataataataagtgttgaagatgtagagaaagtggaaccctcaaatgttgctactgggaatataaaatggtgtagtccctttggaaagtagtctggt

SEQ ID NO: 337104 - DNA, 120 bp, Artificial Sequence
  ENSG00000137509_70 (sequence is synthesized)
agctaattaataggttgttactatatatcctagaaattcctaagtatatgcctaagagaagtgaaatcatgcatccacacaaaaacttgtatgtgaatgttcaaaggagcagtactcatt

SEQ ID NO: 337105 - DNA, 120 bp, Artificial Sequence
  ENSG00000137509_71 (sequence is synthesized)
agccaaaaagtggaaacaatacaaacgtgcatcaaatgatgaagagataaataaaacatgatgtatccataaatgaaatattatttggcaataaaaaggaacatgtactgattcatgcca

SEQ ID NO: 337106 - DNA, 120 bp, Artificial Sequence
  ENSG00000137509_72 (sequence is synthesized)
caacatgggtgaaacttgaaaacattacgctgagtgaaagagaccagttacaaaagaccgcctactatttaattccatttgtatgaaatgtccagaataggcaaatctatagattcagaa

SEQ ID NO: 337107 - DNA, 120 bp, Artificial Sequence
  ENSG00000137509_73 (sequence is synthesized)
aatagattcatggtttcctgaggctgagagcaaggcaggaagatggggagtgactgctaatgagtatgggtttctatttggggtgacgaaagtgttctaaaatggattgtggtgctggtt

SEQ ID NO: 337108 - DNA, 120 bp, Artificial Sequence
  ENSG00000137509_74 (sequence is synthesized)
gcacaactctgagtatactaaaaaccatcgaattatgtgttttagatggacaaattctgtggtagatgaattatatctcaacaaaactgttcagaaatattattagggatgctgtctgtg

SEQ ID NO: 337109 - DNA, 120 bp, Artificial Sequence
  ENSG00000137509_75 (sequence is synthesized)
gttgtattggattttttactcagtgaaagtagatactcagtttcagtgactgattctctttacattattctgaattgtgttgtgtgaaccagctgagactaaaaacctagtagcatttcc

SEQ ID NO: 337110 - DNA, 120 bp, Artificial Sequence
  ENSG00000137509_76 (sequence is synthesized)
ttaactttaaagctaatgtaaaatgaagattttcgtgtaatgcccaaattttcggattccagatcctggtgacattttttagatctaccatcctgtttcccaaagtactgtactatatta

SEQ ID NO: 337111 - DNA, 120 bp, Artificial Sequence
  ENSG00000137509_77 (sequence is synthesized)
gataaaaaatgcagccttctcctttcctccctccctccctccctttcttctttcctccctttcccccttcttccctccctcgagaagacggagtttcaccatgttgcccaggcttgtttt

SEQ ID NO: 337112 - DNA, 89 bp, Artificial Sequence
  ENSG00000137509_78 (sequence is synthesized)
cgagaagacggagtttcaccatgttgcccaggcttgttttgaactcctgggcttaagcgattcaccatcttggcctcccaaagagcaat

SEQ ID NO: 337113 - DNA, 120 bp, Artificial Sequence
  ENSG00000137509_79 (sequence is synthesized)
cttgcattatataacttttgaataatgaaatcaggattgaaattcaggtttctaaatttcatatcccagtacagtctaggttgatttgtgggaacgcctccttcaattatctctggttct

SEQ ID NO: 337114 - DNA, 120 bp, Artificial Sequence
  ENSG00000137509_80 (sequence is synthesized)
ttttttgcacctggttgcatgaatattgcaaaactccagtatgaagtatctatccatatgataaattagatcctcagatcaaatcccccaggttacaagtttataattttaggtgttaaa

SEQ ID NO: 337115 - DNA, 120 bp, Artificial Sequence
  ENSG00000137509_81 (sequence is synthesized)
aatcacatttcagctgataacttctcaaatatttcagcataggctgctgtgcatgtagatagatatagtgaaataatgacataagatggaaaaatctcttccgtttgtcttggtgtttgg

SEQ ID NO: 337116 - DNA, 120 bp, Artificial Sequence
  ENSG00000137509_82 (sequence is synthesized)
cttggtgtttggtaatagatggagtctcactctgtcacccaagctagagtgcagtggtgtgatcatagcactggagcctggaactcctgactgaagcaatcctcccacctcagcttcctg

SEQ ID NO: 337117 - DNA, 120 bp, Artificial Sequence
  ENSG00000137509_83 (sequence is synthesized)
tttgactgttctgtcagcatgaaaactactaggtttcttcccagcttaaagagcaactttaaaggatgctgtaatttgttaattttggaatcacatttcagctgataacttctcaaatat

SEQ ID NO: 337118 - DNA, 120 bp, Artificial Sequence
  ENSG00000137509_84 (sequence is synthesized)
gtcgcaatggaattgcggtggccagggcagggtttggtggtgatgataatggtagggatattgggtgacctgaaggacaggtgggcttcgggggcgctatagataaagcatgggctacag

SEQ ID NO: 337119 - DNA, 120 bp, Artificial Sequence
  ENSG00000137509_85 (sequence is synthesized)
tttaccaactgagtgaccttgaagatgacttaacctaagaatcaggttttttttttcatgtaaaataatggacaatcatctatctgatagggttctttgaagattacatggtgtattggt

SEQ ID NO: 337120 - DNA, 120 bp, Artificial Sequence
  ENSG00000137509_86 (sequence is synthesized)
tggaaacccaaggcttaataattactagctgttgttgttgttagtattattcagctatgattccattgcctgttatttttctccaacattttattatgaaaagtttgaaacatatggaaa

SEQ ID NO: 337121 - DNA, 120 bp, Artificial Sequence
  ENSG00000137509_87 (sequence is synthesized)
agttaaaataattggacaatgaacactcatgaacctaacatctaaattcaataaataatattttattatatttgatttgtcacatatatattcacctatccatcacttcatctatctttt

SEQ ID NO: 337122 - DNA, 120 bp, Artificial Sequence
  ENSG00000137509_88 (sequence is synthesized)
aatttatcctattttaaaatgaattttaaagtaaattgcagacatcttcctcttaaatacttcagctttattatcattaacaagagttcaatatttgtgtatggttcttcttctggtggt

SEQ ID NO: 337123 - DNA, 120 bp, Artificial Sequence
  ENSG00000137509_89 (sequence is synthesized)
ggaggggtgaaatctagataccatgaaatacacaaattatatcatttttcatgtaaccctattaagatatagaatatttctgtacccaagaaagtttgcactggctctgtttagtcagtc

SEQ ID NO: 337124 - DNA, 120 bp, Artificial Sequence
  ENSG00000137509_90 (sequence is synthesized)
ctcacctttactcctaaccctgaatattgtctgatttttatagctaggattccaggcattttttataggatagtgataggaatatttgggagctggggagttgcagcatatgctttttat

SEQ ID NO: 337125 - DNA, 120 bp, Artificial Sequence
  ENSG00000137509_91 (sequence is synthesized)
cacacgacagatgctggaacttggtatagtttttccatacgagattttataaattttgcatttttataaaagtatagtaattcattcagcaaacatttacttaccagataccttgctaag

SEQ ID NO: 337126 - DNA, 120 bp, Artificial Sequence
  ENSG00000137509_92 (sequence is synthesized)
tactgagggagacattctgaaatcaagtgagtgaagtagagcattacaggggctgtgataaaaataggtacagggtataatggaggcaccaagaagggagaggtttaattcttcccaact

SEQ ID NO: 337127 - DNA, 120 bp, Artificial Sequence
  ENSG00000137509_93 (sequence is synthesized)
tggaaacataggcaaggatggccttgaagaggaggtaatatttgagttgagtgttgtaaaagatgagttggtgttcaaaggcattagtggagtgggagaggagttggaaaacagtgtttc

SEQ ID NO: 337128 - DNA, 120 bp, Artificial Sequence
  ENSG00000137509_94 (sequence is synthesized)
agggtgagaaagggcaaaggggaaggagcctggtgtggtggggaatggttttcctaggctggagcaaaggcagcaaagaggaagctaagatggtagatggagaggactttgcataccatg

SEQ ID NO: 337129 - DNA, 120 bp, Artificial Sequence
  ENSG00000137509_95 (sequence is synthesized)
aaatgacttcggtttatttctatagcctaaggagtaattgaagaggtttattcatttatggaggggattaaacccaagagagaaattaaacactgcagttagtagcttaagaatatttta

SEQ ID NO: 337130 - DNA, 120 bp, Artificial Sequence
  ENSG00000137509_96 (sequence is synthesized)
gagatgatgcgtgtgcctccctgcctcgtgatacactggcctgtagtgaaccttcaataaattgtcatggtagctgttattgccgttacgtaggatttgcggaaggcaggaggtgtcgca

SEQ ID NO: 337131 - DNA, 120 bp, Artificial Sequence
  ENSG00000137509_97 (sequence is synthesized)
ggagcttcgctgagcctcctgggcgtagggttcccgggaaagtgtggagtgagccgcagcgccctggggtctggcggggttgatcattttggatttaatactgtgaaaacttttaatcag

SEQ ID NO: 337132 - DNA, 120 bp, Artificial Sequence
  ENSG00000137509_98 (sequence is synthesized)
acacttcctcctttttaaagggctgacaaacaggcgtccttttctgagtctgtaactcaggcttaggatggtgagataatatgtaacagttaggttatgaaaaaaagcaggtgatttcca

SEQ ID NO: 337133 - DNA, 120 bp, Artificial Sequence
  ENSG00000137509_99 (sequence is synthesized)
attctgtctgggaccttgtacagttctgaaggatccatgggcagcgactaaatgccattttccgtgtcaattcaagtatcgttccttttaatttgtctttgggctttgcacactcagact

SEQ ID NO: 337134 - DNA, 120 bp, Artificial Sequence
  ENSG00000137509_100 (sequence is synthesized)
caatcgaatctcccgcgtccttttccgccggaagtaacgctttggctctgattactcagagccaatcagaagaaggcgccgcagagggtggagcttagcgaggaaatcctacaagcatct

SEQ ID NO: 337135 - DNA, 120 bp, Artificial Sequence
  ENSG00000137509_101 (sequence is synthesized)
agagggtggagcttagcgaggaaatcctacaagcatctggaaacgaccattttcgtcaaactgcgggtagagtctttctccccgacaggttgatcattttggatttaatactgtgaaaac

SEQ ID NO: 337136 - DNA, 120 bp, Artificial Sequence
  ENSG00000137509_102 (sequence is synthesized)
agattcccgttctgttattctgtgaaaccacagaggctgccttgtctcttttctccttttggtgtgactttcattttatgtgaaggccacagggtaacttaccctgtccagtgatttttc

SEQ ID NO: 337137 - DNA, 120 bp, Artificial Sequence
  ENSG00000137509_103 (sequence is synthesized)
cagtttccattctcttgtattataggcaggtagctgttcctgcctccactaggcactactctgacaggcactgtggcagaacttaaggtttgctggggtatctctgttctcgaaagtggt

SEQ ID NO: 337138 - DNA, 120 bp, Artificial Sequence
  ENSG00000137509_104 (sequence is synthesized)
agaccttcctttacataccaaaatgttccagtgcacattcactgctggacattaatttgttgagaggcagcatcacacagtggtcgagagtgaaggcttcagtcagatagacaaggtttg

SEQ ID NO: 337139 - DNA, 120 bp, Artificial Sequence
  ENSG00000137509_105 (sequence is synthesized)
aatgctgattttgccactttgctgtgtgactttaggggttcatgtgggatgtggctgaggaactgaaagctatgttggtgtttgctgaacatcgatactatggagagtctctcccctttg

SEQ ID NO: 337140 - DNA, 120 bp, Artificial Sequence
  ENSG00000137513_0 (sequence is synthesized)
gtagcgtgatgacgtaagcggcgttggcgtggtgtggtaggagtggttgcgcgtgttgcggcccgggttctgttcgtaggtttacaattgtcgcgggtagtggggcgccccagctgccaa

SEQ ID NO: 337141 - DNA, 120 bp, Artificial Sequence
  ENSG00000137513_1 (sequence is synthesized)
ctgcacgtggtttctttctggcgtttgcctagtgtcctgtccattccgccccgttgggaagtgggaagcggagaggttctgtggggacagagctgggagtcctgaaggagaaagcgcgca

SEQ ID NO: 337142 - DNA, 120 bp, Artificial Sequence
  ENSG00000137513_2 (sequence is synthesized)
gccgaggggctctggagtgccttagagcagagctgcggccgcggaaggggagcagctgagaaaggagggccgctgcaggcggggttcgaaccgtggggtctgggctgctcccgcggaggg

SEQ ID NO: 337143 - DNA, 120 bp, Artificial Sequence
  ENSG00000137513_3 (sequence is synthesized)
cctgggcggacgcgggatgctgggggtccgctgcctgctgcggtccgtgcgcttctgttcctccgcccccttccccaagcacaaaccttcagccaaactgagcgtgcgggacgctctcgg

SEQ ID NO: 337144 - DNA, 120 bp, Artificial Sequence
  ENSG00000137513_4 (sequence is synthesized)
ggctcagaacgcgagtggggagcgcattaagatccagggatggattcgttctgtccgatcccagaaggaagtcttgttcctgcatgtaaatgatgggtcatctttggaaagccttcaggt

SEQ ID NO: 337145 - DNA, 120 bp, Artificial Sequence
  ENSG00000137513_5 (sequence is synthesized)
tgttgcagattcaggccttgacagtagagaattaaattttgggagttctgtggaagtacaagggcagctgataaaaagtccatccaaaaggcaaaatgtggaactgaaggcagaaaaaat

SEQ ID NO: 337146 - DNA, 120 bp, Artificial Sequence
  ENSG00000137513_6 (sequence is synthesized)
taaagttattggaaattgtgatgccaaggatttccccatcaaatataaagagaggcatcctctggagtatctgcgacaatatcctcactttaggtgtaggactaacgttctgggttctat

SEQ ID NO: 337147 - DNA, 120 bp, Artificial Sequence
  ENSG00000137513_7 (sequence is synthesized)
attgaggattcgcagtgaagcgacagctgctattcattctttctttaaggacagtggctttgtacatattcatactccaataatcacatccaatgactctgagggagctggagaactttt

SEQ ID NO: 337148 - DNA, 120 bp, Artificial Sequence
  ENSG00000137513_8 (sequence is synthesized)
tcaacttgaaccttcaggcaaacttaaggtacctgaggagaatttcttcaatgttcctgctttcttaactgtctcaggacaacttcatctagaagtgatgtcaggagcttttactcaagt

SEQ ID NO: 337149 - DNA, 120 bp, Artificial Sequence
  ENSG00000137513_9 (sequence is synthesized)
gtttacctttggtccgaccttccgagctgaaaattctcagagccggaggcacctggcagagttttatatgatagaagcagagatttcttttgttgacagccttcaagatcttatgcaggt

SEQ ID NO: 337150 - DNA, 120 bp, Artificial Sequence
  ENSG00000137513_10 (sequence is synthesized)
atgctaaaaaacaactttttaatcatttcttatactgaagcagtggagatcttaaagcaagcatcccagaacttcacctttaccccagagtggggtgctgacctacggactgaacatgaa

SEQ ID NO: 337151 - DNA, 120 bp, Artificial Sequence
  ENSG00000137513_11 (sequence is synthesized)
aagtacctggtgaagcactgtggcaacatacctgtcttcgttattaattatccattaacactcaagcctttctacatgagggataatgaagatggccctcagcacacggttgctgctgtt

SEQ ID NO: 337152 - DNA, 120 bp, Artificial Sequence
  ENSG00000137513_12 (sequence is synthesized)
gatcttctggttcctggagttggggaactctttggaggaggcctcagagaagaacgataccatttcttagaggagcgcttagccagatcgggacttacagaagtctaccaatggtatctg

SEQ ID NO: 337153 - DNA, 120 bp, Artificial Sequence
  ENSG00000137513_13 (sequence is synthesized)
gaccttcgtcgatttggatctgtgccacatggaggttttgggatgggatttgaacgctacctgcagtgcatcttgggtgttgacaatatcaaagatgttatccctttcccaaggtttcct

SEQ ID NO: 337154 - DNA, 120 bp, Artificial Sequence
  ENSG00000137513_14 (sequence is synthesized)
cattcatgccttttatagctggaagattggttaaggaaaagcaccccccatggcagagacactgcacatgattgtgcatacagcagaatgcatgtttggattttagaaatgcagatttca

SEQ ID NO: 337155 - DNA, 120 bp, Artificial Sequence
  ENSG00000137513_15 (sequence is synthesized)
atatgtaattgttgtgccataagatatcatagaaaaaatataagtggttgtgattttcttagaaagttgagggtatttcacgtaaggatgagctcccgcaagaagaggtacttatagcaa

SEQ ID NO: 337156 - DNA, 120 bp, Artificial Sequence
  ENSG00000137513_16 (sequence is synthesized)
ggggactctcaaatccattacctcaattaagaaatgaagaaattgaattagtctcaaagtttcttttaaactctaaaacagaatgagataatgtattttacgttgtctataatcattaaa

SEQ ID NO: 337157 - DNA, 120 bp, Artificial Sequence
  ENSG00000137513_17 (sequence is synthesized)
tcactccctgtgtaatttgtgagaaccatctagtagctcgaaataaaataatgttgcatcttttctcccttgccatatactttgtgataaatccttatctcattttcagtacttcattaa

SEQ ID NO: 337158 - DNA, 120 bp, Artificial Sequence
  ENSG00000137513_18 (sequence is synthesized)
acattgcagaaaaaaatattccttaaggtcttaattgatttaaagaagtagctattctgaattgaaatctcctttcattgaactggatgaaaaaatcatgtttaataactgttgcttttc

SEQ ID NO: 337159 - DNA, 120 bp, Artificial Sequence
  ENSG00000137513_19 (sequence is synthesized)
ctgttgcttttcaattttcaaagctgttgagatattacattaagtatttcaactctttaatcactgttgttataatttgtttatatttgatgtttataatttgtctaataaaatagattt

SEQ ID NO: 337160 - DNA, 90 bp, Artificial Sequence
  ENSG00000137513_20 (sequence is synthesized)
agggtctagctctgtcacccagactggagcgcagtgatgtgatctcagatgactacaacctccatctcccaagagtagctgaaactatag

SEQ ID NO: 337161 - DNA, 120 bp, Artificial Sequence
  ENSG00000137513_21 (sequence is synthesized)
aatcctcctgcctcggcctccagagtagctgaaactataggcatgcaccaccacactctataattttttaagttttttgtgaagatgagtctcactgtattgcccaggctggtctcaaac

SEQ ID NO: 337162 - DNA, 120 bp, Artificial Sequence
  ENSG00000137513_22 (sequence is synthesized)
tgctgggattacaggcataagcctggtagatgttgttataataaatacttattttttgagtaggttcttgctttgtcacccatgattgtactgacacagtcatggcttgccgttgcagtg

SEQ ID NO: 337163 - DNA, 120 bp, Artificial Sequence
  ENSG00000137513_23 (sequence is synthesized)
gaaatgttgtgcattattacgaaaacaaaagatagaataccaaagtgtgtatcctattgtgattggaacatataaaattaagtatgcatattggtgaactaaaagaagttgatttgttga

SEQ ID NO: 337164 - DNA, 120 bp, Artificial Sequence
  ENSG00000137513_24 (sequence is synthesized)
tacatgttttactttcatttagtctgtgtgtgtatgtgtaatgaaaacgtaaaatgttttacgctcacattggaaatatttctcttccttagggatggattcgttctgtccgatcccaga

SEQ ID NO: 337165 - DNA, 120 bp, Artificial Sequence
  ENSG00000137522_0 (sequence is synthesized)
ggggcgagccgtgaagatggcggcagtggtggaggtggaggttggaggtggtgctgctggggaacgggagctggatgaggttgatatgtcagatctctctccagaagagcaatggagggt

SEQ ID NO: 337166 - DNA, 120 bp, Artificial Sequence
  ENSG00000137522_1 (sequence is synthesized)
cgagcacgcacgcatgcatgccaagcaccgtggccatgaagctatgcatgctgaaatggtcctcatcctcatcgcaaccttggtggtggcccagctgctcctggtgcagtggaagcagag

SEQ ID NO: 337167 - DNA, 120 bp, Artificial Sequence
  ENSG00000137522_2 (sequence is synthesized)
gcacccacgctcctacaatatggtgaccctctttcagatgtgggttgttcccctctatttcacagtgaagctgcactggtggaggttcctagtgatctggatcttgttctctgctgtcac

SEQ ID NO: 337168 - DNA, 120 bp, Artificial Sequence
  ENSG00000137522_3 (sequence is synthesized)
agcctttgttaccttccgagccacccgaaaacctctagtacagacaaccccaaggttggtttataagtggttcctgctaatctataaaatcagctatgccactggcattgttggctacat

SEQ ID NO: 337169 - DNA, 120 bp, Artificial Sequence
  ENSG00000137522_4 (sequence is synthesized)
ggctgtcatgtttaccctctttggtcttaacttattattcaagatcaaaccagaagatgccatggactttggcatctcccttctcttctatggcctctactatggagttctggaacggga

SEQ ID NO: 337170 - DNA, 120 bp, Artificial Sequence
  ENSG00000137522_5 (sequence is synthesized)
ctttgcagaaatgtgtgcagactacatggcatctaccatagggttctacagcgagtcgggcatgcctaccaaacatctttcagacagtgtgtgtgctgtgtgtgggcagcagatctttgt

SEQ ID NO: 337171 - DNA, 120 bp, Artificial Sequence
  ENSG00000137522_6 (sequence is synthesized)
ggacgtcagtgaagaggggatcattgagaacacgtataggctgtcctgcaatcatgtcttccacgagttctgcatccgtggctggtgcatcgtgggaaagaagcaaacgtgtccctactg

SEQ ID NO: 337172 - DNA, 120 bp, Artificial Sequence
  ENSG00000137522_7 (sequence is synthesized)
caaagagaaggtagacctcaagaggatgttcagcaatccctgggagaggcctcacgtcatgtatgggcaactgctggactggcttcgatacttggtagcctggcagcctgtcatcattgg

SEQ ID NO: 337173 - DNA, 120 bp, Artificial Sequence
  ENSG00000137522_8 (sequence is synthesized)
tgtagtccaaggcatcaactacatcctgggcctggaatagtgatgaagagcatcagtggaaaacccaccccacacgccatggacctcagggcactctcctccctgcccacaaagacctcc

SEQ ID NO: 337174 - DNA, 120 bp, Artificial Sequence
  ENSG00000137522_9 (sequence is synthesized)
ggtgggaaagactcaaaggggtgcttgggccactcaggacccctctggctgtgtcggactggggagggatatgatggagagccagccagtggggctgtcagcagtggggggctttttaaa

SEQ ID NO: 337175 - DNA, 120 bp, Artificial Sequence
  ENSG00000137522_10 (sequence is synthesized)
agaaaactattttgatgaatatatttaaaaaacctttttttattgtggagcataggaattgcccccctccaggcttcaccctccctgcctaagcagggtgggggcagagccatgacattt

SEQ ID NO: 337176 - DNA, 120 bp, Artificial Sequence
  ENSG00000137522_11 (sequence is synthesized)
ttggtttaaaggagccttctcatctctggccgagaacactgctgggctcccaggtagctgaaggcctcagcccacccactcccttcttccctgtgtggggctcaagcctggtgcacttag

SEQ ID NO: 337177 - DNA, 120 bp, Artificial Sequence
  ENSG00000137522_12 (sequence is synthesized)
tatagaagagctaacgtactcaggcttgtgccacgggtgagcactgaggccccaggtgtcctccctcccccactgtctgggacacaggacaggtgttgcgtctgactctgtctccccctg

SEQ ID NO: 337178 - DNA, 120 bp, Artificial Sequence
  ENSG00000137522_13 (sequence is synthesized)
tccaagagctataggctggttgaggcaagtggaaccttatcagtgacttggccaacaagggaagccttggggcctcagaattcattgaagatttgttttgggacaactggaagaatcagc

SEQ ID NO: 337179 - DNA, 120 bp, Artificial Sequence
  ENSG00000137522_14 (sequence is synthesized)
accatggatactcgcccgtgggcagggctgtggtcagccaagaatagaggtcatatagttgggccatggggcaattgttggcagccatgactgacggccccttgtgcaagctcattcttc

SEQ ID NO: 337180 - DNA, 120 bp, Artificial Sequence
  ENSG00000137522_15 (sequence is synthesized)
agctcattcttcagtggatccttcagtggagtggtgacacgtgccagcggtcactctgccacatcacttccttcttgaaagcctaagagtgcgtatgcgtgtgtgtgtgtgtgtgtgtgt

SEQ ID NO: 337181 - DNA, 120 bp, Artificial Sequence
  ENSG00000137522_16 (sequence is synthesized)
gaagaatatgacagatgtcagcttctccctgtgtcagatgatatgtccttgaagctggcaggggattcccagtccagggaatatccctacatgatttttgtcattcatgggtcctccctg

SEQ ID NO: 337182 - DNA, 120 bp, Artificial Sequence
  ENSG00000137522_17 (sequence is synthesized)
ggcctgacaacgggagtggtgggtgggtgagaacaggttctgagagggggcttctaggaaggccccagccctagtcctaggcgacttgaataaagtgggaggtcaaacatgggccttcgg

SEQ ID NO: 337183 - DNA, 120 bp, Artificial Sequence
  ENSG00000137522_18 (sequence is synthesized)
cattgggtttctagggaatatggctcagtagggcctgccccttcaagggcagcaagaacgaagcaggatgttgtcactcccgtctgaataaagctccatgagctgggttggaaagctgaa

SEQ ID NO: 337184 - DNA, 120 bp, Artificial Sequence
  ENSG00000137522_19 (sequence is synthesized)
gccctgtgctgagtgctggggatacagagctggataagacatggtccctgccctcaaggagtactctgtttaatggaggagatggacaagaaagctcctgttgcagtgcagttggttggt

SEQ ID NO: 337185 - DNA, 120 bp, Artificial Sequence
  ENSG00000137522_20 (sequence is synthesized)
ttgcagaaatgtgtgcagactacatggcatctaccataggggtaagttcatccgggttcttaaatactgcttcttgacacctccaaattgctcaagttgatgtcacttgtttaatggaag

SEQ ID NO: 337186 - DNA, 120 bp, Artificial Sequence
  ENSG00000137522_21 (sequence is synthesized)
gtctccattttgccccataacagtcttgtgagatagggatcattatccttacttcacatgtgaggaaacaggttcagacacagggacttgcccaacattacagagctgataaagagcgaa

SEQ ID NO: 337187 - DNA, 120 bp, Artificial Sequence
  ENSG00000137522_22 (sequence is synthesized)
ggcaggatttgaacctttcaaagactgtctggggctggagtgccgccctggctctcaccatttcccttgaccagcggtgctcagcttccacgagttctgcatccgtggctggtgcatcgt

SEQ ID NO: 337188 - DNA, 70 bp, Artificial Sequence
  ENSG00000137522_23 (sequence is synthesized)
tttttacaacctattctgaagaaaatggtgaccctctttcagatgtgggttgttcccctctatttcacag

SEQ ID NO: 337189 - DNA, 120 bp, Artificial Sequence
  ENSG00000137522_24 (sequence is synthesized)
gtgggaagagcccaggttttccgaagctaatgggttggaatgcatgggaggagcataggtttagactgaaaaaattcctggttttgtctgccaaaattatttggcatggggcctctctaa

SEQ ID NO: 337190 - DNA, 120 bp, Artificial Sequence
  ENSG00000137522_25 (sequence is synthesized)
aacaagctgattggtagaacccctcccctatttatcgattaaaaacctcaaatatttctgtatagcttactttatggtttcaaggtatttttatattaaaggcaaacaaaaataagcaaa

SEQ ID NO: 337191 - DNA, 120 bp, Artificial Sequence
  ENSG00000137547_0 (sequence is synthesized)
gagcagctcagggcgcccttgaaagttcttggatctgcgggttatggccggtcccttgcagggcggtggggcccgggccctggacctactccggggcctgccgcgtgtgagcctggccaa

SEQ ID NO: 337192 - DNA, 120 bp, Artificial Sequence
  ENSG00000137547_1 (sequence is synthesized)
cttaaagccgaatcccggctccaagaaaccggagagaagaccaagaggtcggagaagaggtagaaaatgtggcagaggccataaaggagaaaggcaaagaggaacccggccccgcttggg

SEQ ID NO: 337193 - DNA, 120 bp, Artificial Sequence
  ENSG00000137547_2 (sequence is synthesized)
ctttgagggaggccagactccattttacatccgaatcccaaaatacgggtttaacgaaggacatagtttcagacgccagtataagcctttgagtctcaatagactgcagtatcttattga

SEQ ID NO: 337194 - DNA, 120 bp, Artificial Sequence
  ENSG00000137547_3 (sequence is synthesized)
tttgggtcgtgttgatcctagtcaacctattgacttaacccagcttgtcaatgggagaggtgtgaccatccagccacttaaaagggattatggtgtccagctggttgaggagggtgctga

SEQ ID NO: 337195 - DNA, 120 bp, Artificial Sequence
  ENSG00000137547_4 (sequence is synthesized)
cacctttacggcaaaagttaatattgaagtacagttggcttcagaactagctattgctgccattgaaaaaaatggtggtgttgttactacagccttctatgatccaagaagtctggacat

SEQ ID NO: 337196 - DNA, 120 bp, Artificial Sequence
  ENSG00000137547_5 (sequence is synthesized)
tgtatgcaaacctgttccattctttcttcgtggacaacccattccaaaaagaatgcttccaccagaagaactggtaccatattacactgatgcaaagaaccgtgggtacctggcggatcc

SEQ ID NO: 337197 - DNA, 120 bp, Artificial Sequence
  ENSG00000137547_6 (sequence is synthesized)
tgccaaatttcctgaagcacgacttgaactcgccaggaagtatggttatatcttacctgatatcactaaagatgaactcttcaaaatgctctgtactaggaaggatccaaggcagatttt

SEQ ID NO: 337198 - DNA, 120 bp, Artificial Sequence
  ENSG00000137547_7 (sequence is synthesized)
ctaaaacctacagatgaaaatctccttaagtattatacctcatgaattcccgtccaaggaagcagagttgttaaagagtactggaataggggctgaaggatctatattcccttattgcat

SEQ ID NO: 337199 - DNA, 120 bp, Artificial Sequence
  ENSG00000137547_8 (sequence is synthesized)
tttccttatgtataattttccagatggtgatgttacttttcagtgtactcatatgtctcattttcatctaaaattaaatggcaggaaacaaggactgcatagagaaactgagtctgtgtg

SEQ ID NO: 337200 - DNA, 120 bp, Artificial Sequence
  ENSG00000137547_9 (sequence is synthesized)
ggttctgtctcaaagatacaaactccctgatagtctatggaaggaaaatgacaactattttagaatatttctagtttgttttttcagtgatcttttcatccaggccttgttactgttaca

SEQ ID NO: 337201 - DNA, 120 bp, Artificial Sequence
  ENSG00000137547_10 (sequence is synthesized)
gatcagaatgaaatgcacaagtggaatgggattgacctgtaggcctgctctgccgagatgagagcagatggaatgagttggtgacccctcttaatctgtagcctcagggaaacacggcta

SEQ ID NO: 337202 - DNA, 120 bp, Artificial Sequence
  ENSG00000137547_11 (sequence is synthesized)
cccaatgccaagatggtaaaccctcaactcgaagagtaagatcaggacgtatgcttaaggtgtaaggctgaggagtagctggtaggcagtatgtttgccagtgacattgaaggtgagaga

SEQ ID NO: 337203 - DNA, 120 bp, Artificial Sequence
  ENSG00000137547_12 (sequence is synthesized)
gagaaacaaaaattacaaatgaatttattttctcaattctgtggtagaagtgttacaggcaggcctttgttcttagagctcccaagatggtggtggccactcccaagatggcagcaagcc

SEQ ID NO: 337204 - DNA, 82 bp, Artificial Sequence
  ENSG00000137547_13 (sequence is synthesized)
agaatggaaccttgggccatgtggtcagtgttatagctctagtagaagtcatgggtcacggaagagaactgtggaacccagt

SEQ ID NO: 337205 - DNA, 120 bp, Artificial Sequence
  ENSG00000137558_0 (sequence is synthesized)
agcagcattcaaaccttgcagagctttgctctcagagagtttgtaaaaagacacactcctcttacaagagttcatgctaccacatagcaaagaaccttaaatttttggaagaacaatata

SEQ ID NO: 337206 - DNA, 120 bp, Artificial Sequence
  ENSG00000137558_1 (sequence is synthesized)
ttcattttggcattgtgcagagcaaagtaaactcggtggcctcttcttctccacccctcaaaatgatagcaatctctgccgtcagcagtgcactcctgttctcccttctctgtgaagcaa

SEQ ID NO: 337207 - DNA, 120 bp, Artificial Sequence
  ENSG00000137558_2 (sequence is synthesized)
gtaccgtcgtcctactcaattccactgactcatccccgccaaccaataatttcactgatattgaagcagctctgaaagcacaattagattcagcggatatccccaaagccaggcggaagc

SEQ ID NO: 337208 - DNA, 120 bp, Artificial Sequence
  ENSG00000137558_3 (sequence is synthesized)
gctacatttcgcagaatgacatgatcgccattcttgattatcataatcaagttcggggcaaagtgttcccaccggcagcaaatatggaatatatggtttgggatgaaaatcttgcaaaat

SEQ ID NO: 337209 - DNA, 120 bp, Artificial Sequence
  ENSG00000137558_4 (sequence is synthesized)
cggcagaggcttgggcggctacttgcatttgggaccatggaccttcttacttactgagatttttgggccaaaatctatctgtacgcactggaagatatcgctctattctccagttggtca

SEQ ID NO: 337210 - DNA, 120 bp, Artificial Sequence
  ENSG00000137558_5 (sequence is synthesized)
agccatggtatgatgaagtgaaagattatgcttttccatatccccaggattgcaaccccagatgtcctatgagatgttttggtcccatgtgcacacattatacgcagatggtttgggcca

SEQ ID NO: 337211 - DNA, 120 bp, Artificial Sequence
  ENSG00000137558_6 (sequence is synthesized)
cttccaatcggataggatgcgcaattcatacttgccaaaacatgaatgtttggggatctgtgtggcgacgtgcagtttacttggtatgcaactatgccccaaagggcaattggattggag

SEQ ID NO: 337212 - DNA, 120 bp, Artificial Sequence
  ENSG00000137558_7 (sequence is synthesized)
aagcaccatataaagtaggggtaccatgttcatcttgtcctccaagttatgggggatcttgtactgacaatctgtgttttccaggagttacgtcaaactacctgtactggtttaaataag

SEQ ID NO: 337213 - DNA, 120 bp, Artificial Sequence
  ENSG00000137558_8 (sequence is synthesized)
tttaccttttcctccaggaaatataatgatttctgggaacatgggcatgtatatatatatatggagagagaattttgcacatattatacatattttgtgctaatcttgttttcctcttag

SEQ ID NO: 337214 - DNA, 120 bp, Artificial Sequence
  ENSG00000137558_9 (sequence is synthesized)
tattcctttgtataaattagtgtttgtctagcatgtttgtttaatcctttgaaatatttgaaacatcaatttctattttctgacctctaagcctaaattaagatattgtatatgtaatga

SEQ ID NO: 337215 - DNA, 120 bp, Artificial Sequence
  ENSG00000137558_10 (sequence is synthesized)
tgacatagttgatgcatccaatcctaaaacttacattccaaaggaattatatcattatgttcctaaggagtaaatatatatttgacctgtaagtgtgtgtatgtatacatatacatatgt

SEQ ID NO: 337216 - DNA, 120 bp, Artificial Sequence
  ENSG00000137558_11 (sequence is synthesized)
atgtgtatggatttatatatgcacacaaacatataatatgtgatgtaacatgtagatgataatatgattcagtagtcaacttgagggaaatttttaaaaaactattctcaattatatacg

SEQ ID NO: 337217 - DNA, 120 bp, Artificial Sequence
  ENSG00000137558_12 (sequence is synthesized)
aggtgatgggacttcttaacacacatttctataatacccatgaaatgataatttgtaaaataacacttagtgatatctggaaataataattcaattaagcaaccacgaatttcaccctgg

SEQ ID NO: 337218 - DNA, 120 bp, Artificial Sequence
  ENSG00000137558_13 (sequence is synthesized)
agatattttttcttatttgagtccaccaaaggataatgccaacttatataagttctcaaatcatgccttccgcttagtctcattttattcattcagtcgtcatgagttgagtgcttacta

SEQ ID NO: 337219 - DNA, 120 bp, Artificial Sequence
  ENSG00000137558_14 (sequence is synthesized)
catgcaaggcactctgctagttatattctaataatgcagagataattagacatggttcccgccctcaagaagctcacaaaagtattcaggaaataatgcagactagtgattttgctataa

SEQ ID NO: 337220 - DNA, 120 bp, Artificial Sequence
  ENSG00000137558_15 (sequence is synthesized)
aattatttttgaaggaagcagacacagcagtatttacctgtaggtggagcaagtaataagccatgctgtgcaatatatacataaagcttctgcttctcatgggaatttagttacagtgct

SEQ ID NO: 337221 - DNA, 120 bp, Artificial Sequence
  ENSG00000137558_16 (sequence is synthesized)
tggaatgagaaggggaaggaaagaattaacaaatgccaagatttctggagcagattgtacagctgtgactttggaaaacagaaagtaagaccctcagaaaaccaatgaagtctaagagaa

SEQ ID NO: 337222 - DNA, 120 bp, Artificial Sequence
  ENSG00000137558_17 (sequence is synthesized)
ataaaatttagtggacaggtatgaaaagtgtaattgcgcctaactaccagatggagagcttcagaatgggctatccttagagtctagtacatcttgaggcctctcagcaggagacaaagg

SEQ ID NO: 337223 - DNA, 120 bp, Artificial Sequence
  ENSG00000137558_18 (sequence is synthesized)
attccaaaaagagatgtggaggtgctgagggcacctctatctctttgttgtttagtctgtcattgaatcaatctacttatcatcttgggtctttgagtattgtatgaaagatccttcgtg

SEQ ID NO: 337224 - DNA, 120 bp, Artificial Sequence
  ENSG00000137558_19 (sequence is synthesized)
cacaccacacacagtcatgattttgttaaagtagccttcttcagatgcttttctaagggctagttaccaactttatttctgtgtttctgtagaagaaacattttcagttcttcattgagt

SEQ ID NO: 337225 - DNA, 120 bp, Artificial Sequence
  ENSG00000137558_20 (sequence is synthesized)
ttgattatggaaatccattcaaagtcactatgaaaattttactcatgtagtttggaaatgcaacattttcctatcatgaaatctctttcagagaggagaatacaacatcttagtccagac

SEQ ID NO: 337226 - DNA, 120 bp, Artificial Sequence
  ENSG00000137558_21 (sequence is synthesized)
atttaacatactgcatttcaagtacatgtgtgtgtgttttattcaggttgtgtaatgctcccgtagaattatagaacaattaaatatggttagttccagagtgcaaattacagaaggaag

SEQ ID NO: 337227 - DNA, 120 bp, Artificial Sequence
  ENSG00000137558_22 (sequence is synthesized)
ctacttgtttaaaattccatacacgtttgcagtttcttgtacacatttggatactttgaaagatgacagattgttaaatccattcaatggtaaagaaactcaccatctggagattgagtc

SEQ ID NO: 337228 - DNA, 120 bp, Artificial Sequence
  ENSG00000137558_23 (sequence is synthesized)
tacttgttaatgaatgactagcccaattatccttataaattgaatatggtgaccaaatgctttgatatcatactactctgcctttgtgggcacatatgtagacactactaaaaataaata

SEQ ID NO: 337229 - DNA, 120 bp, Artificial Sequence
  ENSG00000137558_24 (sequence is synthesized)
tttttggagattaaaatggagaatagaagtaattacattatttaggtcttaatccaacttttttctaatatatctaaacaattgaaagggaagcttattcatggaatattggcttgattt

SEQ ID NO: 337230 - DNA, 120 bp, Artificial Sequence
  ENSG00000137558_25 (sequence is synthesized)
atctagaaagtttttccttcttcaattttactatattcattctacaggaacagcaataagtactattaaacagaagatggctacactaagttccaattttgttgctgaattgcttctgtg

SEQ ID NO: 337231 - DNA, 120 bp, Artificial Sequence
  ENSG00000137558_26 (sequence is synthesized)
agttcacttttcagttctaaggaagaataatatttgctacatatttcacaggggttcttatgaaggtaaatttaccagattaataaaaatttatgaatattaaaattatcattaataata

SEQ ID NO: 337232 - DNA, 120 bp, Artificial Sequence
  ENSG00000137558_27 (sequence is synthesized)
taaaacacttatttgagattaaattaaatttttcatgagcccctctttggcaggaactctgtttaattctttgtatttatcccagcttcttaaatggtggctgtaacataataaatgttt

SEQ ID NO: 337233 - DNA, 120 bp, Artificial Sequence
  ENSG00000137558_28 (sequence is synthesized)
gaatggatttttagaattaactaagaagccaaaaatggcaacaatttacagaaatcccacctttccatgcttaagacaaaaatgtcttaaatataaagctgtgattatatcaaaaatcca

SEQ ID NO: 337234 - DNA, 120 bp, Artificial Sequence
  ENSG00000137558_29 (sequence is synthesized)
gataaatcatcaaatatatcagattaagaccagggtttacacacttaggcaatagtcctttccaaaccatgacaaaaactacaagtttatttataatttaacaactcagctgaaaatata

SEQ ID NO: 337235 - DNA, 120 bp, Artificial Sequence
  ENSG00000137558_30 (sequence is synthesized)
acgggtatatttgttattctaactctattttttaaagttaataatataaagtggccatgtaaaatattttattttccaggctaaagcaaatgaaagtttgctggtatcaacacagcctgc

SEQ ID NO: 337236 - DNA, 120 bp, Artificial Sequence
  ENSG00000137558_31 (sequence is synthesized)
catatttttcacagcatgcaacaatggtgctaggatagctatttcttactgtaattgccagaggcagaaatggtctgggtataagctatttcataaaagcagctttaaattgtcagtatt

SEQ ID NO: 337237 - DNA, 120 bp, Artificial Sequence
  ENSG00000137558_32 (sequence is synthesized)
aaggttttcatgtggaaaggtgtcattcaaaaaaaaagtaattggcatacatattccacatcatcgatcctctctgtggtgttaatttttttatatgaccagtagaaaaattttaatatt

SEQ ID NO: 337238 - DNA, 120 bp, Artificial Sequence
  ENSG00000137558_33 (sequence is synthesized)
ctcacaatataggttttggggcttccatatcatcaaaagactgaaaaattataattttagaattaaactgatggatttcattatagaattatctgtgagttgtgtagacacagtcttaat

SEQ ID NO: 337239 - DNA, 120 bp, Artificial Sequence
  ENSG00000137558_34 (sequence is synthesized)
gtttctggttatgacagataagtttgctcaaaaaatgtggatgaagccattattgttattattgttattgcttctgttcagttgtctaagtatcatcccttctgtggcccatcacgcagc

SEQ ID NO: 337240 - DNA, 120 bp, Artificial Sequence
  ENSG00000137558_35 (sequence is synthesized)
agagttgccctacaaatttcatttggcagcgccataacattcatttaaaaagtttatgaaaacattcatttgaaagttccatgcagctttagcacagagttgaccaaacactggcgtaag

SEQ ID NO: 337241 - DNA, 120 bp, Artificial Sequence
  ENSG00000137558_36 (sequence is synthesized)
ttcaatttacacagaatatttgaattgaaacaatagaaatttttctcataatatatacctatgtgaaaccaacttatctgcataattaaatctaatacatatttaagccagtttaagtgc

SEQ ID NO: 337242 - DNA, 120 bp, Artificial Sequence
  ENSG00000137558_37 (sequence is synthesized)
tttgtgttgatgccatgcttatcaaatacatgcacaagctaaacataatttgaatgggtctatgaaggaaaaataatgcttagactttggtgtaggttcttcctgtgtagccatataccc

SEQ ID NO: 337243 - DNA, 120 bp, Artificial Sequence
  ENSG00000137558_38 (sequence is synthesized)
aggctctgcagtatcgaaggatgcaaatgttgacatagatggaagctcttacctaccaaagtgtttaggaaggataaagttacatttgtcttaatttctaacattatctttgcttttatg

SEQ ID NO: 337244 - DNA, 120 bp, Artificial Sequence
  ENSG00000137558_39 (sequence is synthesized)
tttcataaaaatttgtcattatttatgctggtgaaacgtataatcacatccaattatttgaacacatgcaaaataattttttaaattatgttattgtttaaatttgacttatgggagatc

SEQ ID NO: 337245 - DNA, 120 bp, Artificial Sequence
  ENSG00000137558_40 (sequence is synthesized)
agtcaaaaacttagaaggtttaacacttcactgattaatggtgctgaaaacacgttacaattaccacatatccttgctataagttttgaagtttcttagcaattaaagtttttttattca

SEQ ID NO: 337246 - DNA, 120 bp, Artificial Sequence
  ENSG00000137558_41 (sequence is synthesized)
gtgtgaactgtcagtatctattctggtgctaaatgtatggtgctaaatgaattgttagtgttgatggctttagtaatgctccttttattcattgctaaatttagtgttatccatttgatt

SEQ ID NO: 337247 - DNA, 120 bp, Artificial Sequence
  ENSG00000137558_42 (sequence is synthesized)
cctgattcagaaatatcaataaaatcctatgttaaattaatctttaccaaaaacaggcaagttaactctgttgttttaattcaacagtccaacattatttaggtgttacagagtgtaaat

SEQ ID NO: 337248 - DNA, 120 bp, Artificial Sequence
  ENSG00000137558_43 (sequence is synthesized)
atatttctttgggagttattttctttttaaaatctttttatagcttggcaatgtccaaagtcaaatatcacctaaactggttagattacttctacagctaataatattgcaggcactggc

SEQ ID NO: 337249 - DNA, 120 bp, Artificial Sequence
  ENSG00000137558_44 (sequence is synthesized)
gccctctggtggttatgaagacaaattcttaatggctacttgacctacagcaaaagccatttctgtaccataaaaatttgttgtgcaatattagaattatcatatgtttcctacatctga

SEQ ID NO: 337250 - DNA, 120 bp, Artificial Sequence
  ENSG00000137558_45 (sequence is synthesized)
cagcacctaaaatgtttgataatattaacatgtatctaagaggaaaaaagagttaatatattctggcacccactttcctagtaatgttttccatgattttccagttctgaggcacttatt

SEQ ID NO: 337251 - DNA, 120 bp, Artificial Sequence
  ENSG00000137558_46 (sequence is synthesized)
tttttctgaattaattaggtattggtaaaatatatttttaaatttagttagctttataaacacaattagaattacaattaattaacagaggtataattgtctcactttcagaagtgatca

SEQ ID NO: 337252 - DNA, 120 bp, Artificial Sequence
  ENSG00000137558_47 (sequence is synthesized)
cagaagtgatcatttatttttatttagcacaggtcataagaaaaatatatagaaaaataatcaatttcatatataaaaggattatttctccacctttaattattggcctatcatttgtta

SEQ ID NO: 337253 - DNA, 120 bp, Artificial Sequence
  ENSG00000137558_48 (sequence is synthesized)
gtgttatttggtcatattattgaactaatgtattattccattcaaagtctttctagatttaaaaatgtatgcaaaagcttaggattatatcatgtgtaactattatagataacatcctaa

SEQ ID NO: 337254 - DNA, 120 bp, Artificial Sequence
  ENSG00000137558_49 (sequence is synthesized)
accttcagtttagatatataattgactgggtgtaatctcttttgtaatctgttttgacagatttcttaaattatgttagcataatcaaggaagatttaccttgaagcactttccaaattg

SEQ ID NO: 337255 - DNA, 120 bp, Artificial Sequence
  ENSG00000137558_50 (sequence is synthesized)
atactttcaaacttattttaaagcagtagaaccttttctatgaactaaatcacatgcaaaactccaacctgtagtatacataaaatggacttacttattcctctcaccttctccagtgcc

SEQ ID NO: 337256 - DNA, 120 bp, Artificial Sequence
  ENSG00000137558_51 (sequence is synthesized)
taggaatattcttctctgagccctaggattgattctatcacacagagcaacattaatctaaatggtttagctccctcttttttctctaaaaacaatcagctaataaaaaaaaaatttgag

SEQ ID NO: 337257 - DNA, 120 bp, Artificial Sequence
  ENSG00000137558_52 (sequence is synthesized)
ggcctaaattatttcaatggttgtttgaaatattcagttcagtttgtacctgttagcagtctttcagtttgggggagaattaaatactgtgctaagctggtgcttggatacatattacag

SEQ ID NO: 337258 - DNA, 120 bp, Artificial Sequence
  ENSG00000137558_53 (sequence is synthesized)
catcttgtgttttatttgacaaacagaattttggtgccataatattttgagaattagagaagattgtgatgcatatatataaacactatttttaaaaaatatctaaatatgtctcacata

SEQ ID NO: 337259 - DNA, 120 bp, Artificial Sequence
  ENSG00000137558_54 (sequence is synthesized)
tttatataatcctcaaatatactgtaccattttagatattttttaaacagattaatttggagaagttttattcattacctaattctgtggcaaaaatggtgcctctgatgttgtgatata

SEQ ID NO: 337260 - DNA, 120 bp, Artificial Sequence
  ENSG00000137558_55 (sequence is synthesized)
gtattgtcagtgtgtacatatataaaacctgtgtaaacctctgtccttatgaaccataacaaatgtagctttttaaagtccattgtattgttttttctttcaataaaagagtataattaa

SEQ ID NO: 337261 - DNA, 120 bp, Artificial Sequence
  ENSG00000137558_56 (sequence is synthesized)
tcacttggtgtgtctatatgtctggcagacattatcagcacattctctgttgttacctgtgattcattttttcttcactctccaggtgaatttcaattgctgaaaatttcccactgaaaa

SEQ ID NO: 337262 - DNA, 120 bp, Artificial Sequence
  ENSG00000137558_57 (sequence is synthesized)
tatgcagtaatatattttgtggttcagacatttggggcaaatggttcacattcattttagggttagtggtcatgctgtttatttttctctgctatacaaagttcctcttaggggtctgcc

SEQ ID NO: 337263 - DNA, 120 bp, Artificial Sequence
  ENSG00000137558_58 (sequence is synthesized)
tcatgacactaaaaaatgaatagagattctactgtaggttatctcctaggcttgagttcaacatttgtttggatttttgaagaaagtcaaatcaagcaatgctcccaaatgatgtctttg

SEQ ID NO: 337264 - DNA, 120 bp, Artificial Sequence
  ENSG00000137561_0 (sequence is synthesized)
gggtagctgcggccgcagcagcggcggcgggcatggcagaggcgcgatcccagccctcggcggggccgcagctcaacgcgctaccggaccactctccgttgctgcagccgggcctggcgg

SEQ ID NO: 337265 - DNA, 120 bp, Artificial Sequence
  ENSG00000137561_1 (sequence is synthesized)
cgctgcggcgccgggcccgggaagctggcgtcccgctcgcgccgctgccgctcaccgactccttcctgctgcggttcctgcgcgcccgggatttcgatctggacctggcctggcggttac

SEQ ID NO: 337266 - DNA, 120 bp, Artificial Sequence
  ENSG00000137561_2 (sequence is synthesized)
taaaaaactattataagtggagagcagaatgtccagaaataagtgcagatctacaccctagaagtattattggcctcctaaaggctggctaccatggagtcctgagatccagggatccca

SEQ ID NO: 337267 - DNA, 120 bp, Artificial Sequence
  ENSG00000137561_3 (sequence is synthesized)
ctggcagcaaagttcttatttacagaatcgcacactgggaccccaaagtttttacagcttatgacgtatttcgagtaagtctaatcacatccgagcttattgtacaggaggtagaaactc

SEQ ID NO: 337268 - DNA, 120 bp, Artificial Sequence
  ENSG00000137561_4 (sequence is synthesized)
agcggaatggaatcaaggctatctttgatctggaaggttggcagttttctcatgcttttcaaatcactccatccgtagccaagaagattgctgctgtacttacggattcatttccattga

SEQ ID NO: 337269 - DNA, 120 bp, Artificial Sequence
  ENSG00000137561_5 (sequence is synthesized)
aagttcgtggcatccatttgataaatgaaccagtaattttccatgctgtcttttccatgatcaaaccattcctgactgaaaaaattaaggaacggattcacatgcatgggaacaactaca

SEQ ID NO: 337270 - DNA, 120 bp, Artificial Sequence
  ENSG00000137561_6 (sequence is synthesized)
aacaaagcttgcttcagcatttcccagacattcttcctctggaatatggtggtgaagaattctccatggaggacatttgtcaggaatggacaaattttataatgaagtctgaagattatc

SEQ ID NO: 337271 - DNA, 120 bp, Artificial Sequence
  ENSG00000137561_7 (sequence is synthesized)
tcagcagcatttctgagagcattcaatgagaagttatgtcatgtgaatggcttcctaactaaaaatacatgagtgatatccaacctggttaaatgaatgaaagaaaaggagcaaatcttt

SEQ ID NO: 337272 - DNA, 120 bp, Artificial Sequence
  ENSG00000137561_8 (sequence is synthesized)
taaactaatgcttgcctgaactttaaaaatgtagaaatcttctgacatgagcaacacaggtgtttggaaagattttttactttttaaatgcttttttctctacttttgaagtaattaaat

SEQ ID NO: 337273 - DNA, 120 bp, Artificial Sequence
  ENSG00000137561_9 (sequence is synthesized)
gtcagtacattttaagagcataaaaatcggcgattttgtacttgaagagaacatgaaagttattgctaaagtagctgctcatgtgcatctttgtatgtttctagaaagttatattttaaa

SEQ ID NO: 337274 - DNA, 120 bp, Artificial Sequence
  ENSG00000137561_10 (sequence is synthesized)
gattaaattataattcattataattaaaatctgaatagagttttatggttattcctgtggaccagcaagacatttcatctcagggaaattttattttagtatattaacacgatagaaact

SEQ ID NO: 337275 - DNA, 120 bp, Artificial Sequence
  ENSG00000137561_11 (sequence is synthesized)
ctctgtcgcccaggctagagtgcagtagtgagatctcagctcactgcaacctctgctaggattacatgtgcacaccaccactcctggctaagttttgtattttatatagagatggggttt

SEQ ID NO: 337276 - DNA, 120 bp, Artificial Sequence
  ENSG00000137561_12 (sequence is synthesized)
ttttgtattttatatagagatggggttttgccacgttggccaagctggtctcaaactcctgaactcaagtaatttgcctgcttcggcctcccagagtcctgggattacagtcgtgagcca

SEQ ID NO: 337277 - DNA, 120 bp, Artificial Sequence
  ENSG00000137561_13 (sequence is synthesized)
tcgcgcctggccgtgatagaaactttcagctgaggagtctatatgccatactactctatgtggcatctttaggtctctgtgaaatcatgttgatgtaattgattaacaaaaataatttag

SEQ ID NO: 337278 - DNA, 120 bp, Artificial Sequence
  ENSG00000137561_14 (sequence is synthesized)
aaaatacgtcaggcacagttgatggcttctcaatatctgctttgcatttttaaacaaatcaagaatgtaattttaacttttgcttatggtcattcttatgactacacggaaagggatgga

SEQ ID NO: 337279 - DNA, 120 bp, Artificial Sequence
  ENSG00000137561_15 (sequence is synthesized)
atcatacttacttgtcttatacatggactgtttttagttaacaataacgtaactacacaaaggaaaggaaatgtttacattttaaaaaattactgtcaattacatctggtatttttcaga

SEQ ID NO: 337280 - DNA, 120 bp, Artificial Sequence
  ENSG00000137561_16 (sequence is synthesized)
ttatgcataaaataatatgagtttgactattgtatcagaatattttaatcaaatcctgcaatttatattaacttaaaaaaacatctggtaaagactgggtgtggcagctcacacctgtaa

SEQ ID NO: 337281 - DNA, 120 bp, Artificial Sequence
  ENSG00000137561_17 (sequence is synthesized)
tcccagcactttgggaggccgaggctggatggatgattgcttgagcgcaggagttctagaccagcctgggcaatacagggagaccctgtctctatttcaaaaataaataaataggccccg

SEQ ID NO: 337282 - DNA, 80 bp, Artificial Sequence
  ENSG00000137561_18 (sequence is synthesized)
ataaataaccggtaaagatgtactgtttctactgcagtttataatatttcatttattaagaaagatatcatctcagcttt

SEQ ID NO: 337283 - DNA, 120 bp, Artificial Sequence
  ENSG00000137561_19 (sequence is synthesized)
tcatttattaagaaagatatcatctcagctttcaaattcaacatagccctcaatttatgacataagttttatacttagtattttataatttcttaattttgttataaacttgaaaatgta

SEQ ID NO: 337284 - DNA, 120 bp, Artificial Sequence
  ENSG00000137561_20 (sequence is synthesized)
gaatatggggtccaaaatctgttgaacatttgttcagctagttaggtttcaacattaatcatatacattaatagtatctttatgtaaggatatgtgaagggtgtttttctttataagaaa

SEQ ID NO: 337285 - DNA, 120 bp, Artificial Sequence
  ENSG00000137563_0 (sequence is synthesized)
gcagagcttttgaaaggcggcgggaggcggcgagcgccatggccagtccgggctgcctgctgtgcgtgctgggcctgctactctgcggggcggcgagcctcgagctgtctagaccccacg

SEQ ID NO: 337286 - DNA, 120 bp, Artificial Sequence
  ENSG00000137563_1 (sequence is synthesized)
gcgacaccgccaagaagcccatcatcggaatattaatgcaaaaatgccgtaataaagtcatgaaaaactatggaagatactatattgctgcgtcctatgtaaagtacttggagtctgcag

SEQ ID NO: 337287 - DNA, 120 bp, Artificial Sequence
  ENSG00000137563_2 (sequence is synthesized)
gtgcgagagttgtaccagtaaggctggatcttacagagaaagactatgaaatacttttcaaatctattaatggaatccttttccctggaggaagtgttgacctcagacgctcagattatg

SEQ ID NO: 337288 - DNA, 120 bp, Artificial Sequence
  ENSG00000137563_3 (sequence is synthesized)
ctaaagtggccaaaatattttataacttgtccatacagagttttgatgatggagactattttcctgtgtggggcacatgccttggatttgaagagctttcactgctgattagtggagagt

SEQ ID NO: 337289 - DNA, 120 bp, Artificial Sequence
  ENSG00000137563_4 (sequence is synthesized)
gcttattaactgccacagatactgttgacgtggcaatgccgctgaacttcactggaggtcaattgcacagcagaatgttccagaattttcctactgagttgttgctgtcattagcagtag

SEQ ID NO: 337290 - DNA, 120 bp, Artificial Sequence
  ENSG00000137563_5 (sequence is synthesized)
ttacaatgaatgaaaagttaaagaagtttttcaatgtcttaactacaaatacagatggcaagattgagtttatttcaacaatggaaggatataagtatccagtatatggtgtccagtggc

SEQ ID NO: 337291 - DNA, 120 bp, Artificial Sequence
  ENSG00000137563_6 (sequence is synthesized)
atccagagaaagcaccttatgagtggaagaatttggatggcatttcccatgcacctaatgctgtgaaaaccgcattttatttagcagagttttttgttaatgaagctcggaaaaacaacc

SEQ ID NO: 337292 - DNA, 120 bp, Artificial Sequence
  ENSG00000137563_7 (sequence is synthesized)
atcattttaaatctgaatctgaagaggagaaagcattgatttatcagttcagtccaatttatactggaaatatttcttcatttcagcaatgttacatatttgattgaaagtcttcaattt

SEQ ID NO: 337293 - DNA, 120 bp, Artificial Sequence
  ENSG00000137563_8 (sequence is synthesized)
gttaacagagcaaatttgaataattccatgattaaactgttagaataacttgctactcatggcaagattaggaagtcacagattcttttctataatgtgcctggctctgattcttcattc

SEQ ID NO: 337294 - DNA, 120 bp, Artificial Sequence
  ENSG00000137563_9 (sequence is synthesized)
tgtatgtgactatttatataacattagataattaaatagtgagacataaatagagtgtttttcatggaaaagccttcttatatctgaagattgaaaaaaataaatttactgaaatacaaa

SEQ ID NO: 337295 - DNA, 120 bp, Artificial Sequence
  ENSG00000137563_10 (sequence is synthesized)
agaaatcatataaatattatacatgtttctatgtaactgtcttagagtggtatagtattagtgttctgagttcttttataggatttattttcttgggagatgcaaaagtccttcaaaaga

SEQ ID NO: 337296 - DNA, 120 bp, Artificial Sequence
  ENSG00000137563_11 (sequence is synthesized)
aagagacccactgcggaagaaacttgtatcaccaataaaatgtgcatctgacttttggacagggatagattcctcagctcagcttctactttgctatgagtatctcgaaaagcaaatcgt

SEQ ID NO: 337297 - DNA, 120 bp, Artificial Sequence
  ENSG00000137563_12 (sequence is synthesized)
cctacagattgtaaaaggttgctaatcagtgaaatacgttacagggaattttcacattgattatgaatggaaattattttgtgtctgagagaatatgtacaattttaccttgtctgataa

SEQ ID NO: 337298 - DNA, 120 bp, Artificial Sequence
  ENSG00000137563_13 (sequence is synthesized)
tttgaagaaaattgcccttatctgaacttttgcctacccttttgctctataaatgttttgtaagttctataggtttaactttaaagaataatacaaatgttaaataatgtgaaagcccta

SEQ ID NO: 337299 - DNA, 120 bp, Artificial Sequence
  ENSG00000137563_14 (sequence is synthesized)
tcattttttaagcagatggtaatgctcccttcaaaattacccttagcctcatcatacctttaattttgaggtgcctgttcttggctgctcccgcctattttccatgtgcttcatctaatc

SEQ ID NO: 337300 - DNA, 120 bp, Artificial Sequence
  ENSG00000137563_15 (sequence is synthesized)
agagccatgctttaaggagtttgtcatataggagggacagtcaggttttgctgcatgaaaggagtttggggttagacataccgtatttggtcataggcagctttttaaatactaagttaa

SEQ ID NO: 337301 - DNA, 120 bp, Artificial Sequence
  ENSG00000137563_16 (sequence is synthesized)
tgagttaatggaaagagagaatgctaatgagtcttcactaagccacttttaattgttggattttctgcttggatttgtggtagatattctcccacacagatgcttatatgttttctacca

SEQ ID NO: 337302 - DNA, 120 bp, Artificial Sequence
  ENSG00000137563_17 (sequence is synthesized)
gactgtgatcttcctaacagcaaaagccactcatgtttgtctctccagaatccttttccctggaggaagtgttgacctcagacgctcagattatgctaaagtggccaaaatattttataa

SEQ ID NO: 337303 - DNA, 120 bp, Artificial Sequence
  ENSG00000137563_18 (sequence is synthesized)
caatggaagttttcctgggtattttcctgaatggggtggtgaagaagaaaagtaaaagaataaagggggcaaggatgaagaaagaaatgaagaaaatgacttctgtttctagcaatattg

SEQ ID NO: 337304 - DNA, 120 bp, Artificial Sequence
  ENSG00000137563_19 (sequence is synthesized)
cagattaaataccttgacagactttcctccagccaacaacaaaataaatgtgggtgatagagaaaaacatagtaaatacgttgatgaattggcaaagaaataaagatactcaggtccaaa

SEQ ID NO: 337305 - DNA, 120 bp, Artificial Sequence
  ENSG00000137571_0 (sequence is synthesized)
attcactgatttctcttcggctggacggaggctgcctcctcacgcggctcccaactattcccgtagctcagtgcccccctcccgccgctctactcagccaggcagacagactgacagact

SEQ ID NO: 337306 - DNA, 120 bp, Artificial Sequence
  ENSG00000137571_1 (sequence is synthesized)
cgctagtcggcagcttcactcccgagggtgccgcgagcccaggcggcgaacacccggtacccctggcgcagcgaggtgggatgctgtacggacagcagcgctaagtgcccccccaccccc

SEQ ID NO: 337307 - DNA, 120 bp, Artificial Sequence
  ENSG00000137571_2 (sequence is synthesized)
ccgcgggcccagcggcggcggcggcggcggcggcggaggggatgagcccgggacgcgcgaggcgcctgcctcaagctaccgcccggagagggacgccgagtagggctcatcgcagtaccg

SEQ ID NO: 337308 - DNA, 120 bp, Artificial Sequence
  ENSG00000137571_3 (sequence is synthesized)
cgagtagggctcatcgcagtaccgcgcggacccctgccccctgtggcacgcggctgcggagccttgaagccgtgtctgtgatcaggatgcactgggcgcctcgcagctggtgaggatgcc

SEQ ID NO: 337309 - DNA, 120 bp, Artificial Sequence
  ENSG00000137571_4 (sequence is synthesized)
ctgctgcgcggccctgcgcccccagccccagtcccaggtgggcaagactgactgggcccggcttcggcccctcgtgccggtggatgaaacgtgccggagtgcttgggtgccatcagctat

SEQ ID NO: 337310 - DNA, 120 bp, Artificial Sequence
  ENSG00000137571_5 (sequence is synthesized)
caaatctgaattctaagcgccatggacgaaggcactggactgcagcccggggcgggagagcagctggaggcgccggccactgcagaagctgtccaagagaggtgcgagccggagaccctc

SEQ ID NO: 337311 - DNA, 120 bp, Artificial Sequence
  ENSG00000137571_6 (sequence is synthesized)
aggtctaagagtttaccggtcctcagcagcgcctcctgccggccaagcctcagtcccactagtggagacgccaacccggcctttggctgtgtggattcttcgggccaccaggagttgaag

SEQ ID NO: 337312 - DNA, 120 bp, Artificial Sequence
  ENSG00000137571_7 (sequence is synthesized)
caaggcccgaacccgttggcccccagtccctctgccccgtccacttcggcggggctcggggactgtaaccacagggtggacctcagcaaaaccttctcggtgtcctccgccttggccatg

SEQ ID NO: 337313 - DNA, 120 bp, Artificial Sequence
  ENSG00000137571_8 (sequence is synthesized)
ctccaggagagaaggtgcctctacgtggtcctcacggattcccgttgcttcctggtgtgcatgtgctttctgaccttcatccaggcgttaatggtctctgggtacctgagcagcgtaatt

SEQ ID NO: 337314 - DNA, 120 bp, Artificial Sequence
  ENSG00000137571_9 (sequence is synthesized)
accaccattgaaaggcgctacagtctgaagagttccgagtcggggctgctggtcagctgctttgacatcgggaacctggtggtggtggtgttcgtcagctacttcggcggccggggtcgg

SEQ ID NO: 337315 - DNA, 120 bp, Artificial Sequence
  ENSG00000137571_10 (sequence is synthesized)
cggcccctgtggctggccgtgggtggactcctcatcgccttcggggcagccctcttcgccttacctcacttcatctcgcccccctaccagatccaagagttgaacgcctcggcccccaac

SEQ ID NO: 337316 - DNA, 120 bp, Artificial Sequence
  ENSG00000137571_11 (sequence is synthesized)
gacggcctgtgtcagggtggcaactccaccgccactttggagcctccggcctgtccgaaggactcgggaggaaataatcactgggtctacgtggctttattcatttgcgcgcagattctc

SEQ ID NO: 337317 - DNA, 120 bp, Artificial Sequence
  ENSG00000137571_12 (sequence is synthesized)
attggaatgggctccacacctatttataccctgggaccaacctacttagatgacaatgtcaagaaagaaaactcctccttgtacctagccatcatgtatgtcatgggagcacttggccct

SEQ ID NO: 337318 - DNA, 120 bp, Artificial Sequence
  ENSG00000137571_13 (sequence is synthesized)
gcagtgggatatttattaggtggacttcttattggtttttatgttgatcccagaaatcctgttcaccttgaccagaatgaccctcgtttcattggaaactggtggagtggattcctcctt

SEQ ID NO: 337319 - DNA, 120 bp, Artificial Sequence
  ENSG00000137571_14 (sequence is synthesized)
tgtgccattgcaatgtttcttgtgatattcccaatgtttactttcccaaaaaagcttccacctcgacacaagaaaaagaaaaagaaaaaattttctgttgatgctgttagtgatgacgat

SEQ ID NO: 337320 - DNA, 120 bp, Artificial Sequence
  ENSG00000137571_15 (sequence is synthesized)
gttctgaaggagaaatcaaacaacagtgaacaagcggacaaaaaagtttcttcgatgggatttggaaaggatgtcagagacctaccaagagcagctgtcaggatcttaagcaacatgaca

SEQ ID NO: 337321 - DNA, 120 bp, Artificial Sequence
  ENSG00000137571_16 (sequence is synthesized)
ttcctttttgtgagtttgtcatacacagctgagagtgccattgtaactgctttcattaccttcattcccaagttcatcgagtcacagtttggtatcccagcctccaatgccagcatctac

SEQ ID NO: 337322 - DNA, 120 bp, Artificial Sequence
  ENSG00000137571_17 (sequence is synthesized)
actggggttattatcgtccccagtgctggtgttggtattgtcctcggaggctacattataaaaaaattgaaacttggtgccagagaatctgcaaaactagcaatgatctgcagtggtgtg

SEQ ID NO: 337323 - DNA, 120 bp, Artificial Sequence
  ENSG00000137571_18 (sequence is synthesized)
tctttactatgtttttcaaccctatttattgttggatgtgaaagcattaatctagggggcataaacatcccttatacaacaggaccttctctcaccatgccccataggaatctgacagga

SEQ ID NO: 337324 - DNA, 120 bp, Artificial Sequence
  ENSG00000137571_19 (sequence is synthesized)
agctgcaacgttaattgtggttgtaaaatacacgagtatgagccagtctgtggatcagatggaattacatactttaacccttgtctggctggctgtgttaatagtggtaatcttagcact

SEQ ID NO: 337325 - DNA, 120 bp, Artificial Sequence
  ENSG00000137571_20 (sequence is synthesized)
gggatacggaattatacagaatgcacctgtgtccaaagtcgccaagtgatcactccacccaccgtgggacagcgaagtcagctccgtgtggttattgtcaagacttatctcaatgagaac

SEQ ID NO: 337326 - DNA, 120 bp, Artificial Sequence
  ENSG00000137571_21 (sequence is synthesized)
ggctatgctgtgtctgggaaatgtaaacggacctgcaatactcttatcccattcttagtttttcttttcatagtcaccttcatcacagcatgtgcccaaccatcagctatcatagtaaca

SEQ ID NO: 337327 - DNA, 120 bp, Artificial Sequence
  ENSG00000137571_22 (sequence is synthesized)
ctcaggtccgtagaagatgaggagagaccttttgcactgggaatgcagtttgttttgttgcgaacacttgcatacattcctactccaatctactttggagcagtcattgacaccacctgc

SEQ ID NO: 337328 - DNA, 120 bp, Artificial Sequence
  ENSG00000137571_23 (sequence is synthesized)
atgctctggcaacaggaatgtggtgtgcagggttcttgctgggagtacaacgtgacgtcgtttcgttttgtgtattttggtttggctgccggcctcaaattcgttgggtttatttttatt

SEQ ID NO: 337329 - DNA, 120 bp, Artificial Sequence
  ENSG00000137571_24 (sequence is synthesized)
tttctggcctggtactccataaaatacaaggaggatggactgcagaggcggaggcagagagaatttcccctgagcaccgtgagtgagagagtgggacaccccgacaatgcccggactaga

SEQ ID NO: 337330 - DNA, 120 bp, Artificial Sequence
  ENSG00000137571_25 (sequence is synthesized)
tcttgcccagctttcagcacccagggagaattccacgaagagactggcctgcaaaaagggatccagtgcgcagcacagacctacccggggcccttcccagaagcaataagttcctctgcg

SEQ ID NO: 337331 - DNA, 120 bp, Artificial Sequence
  ENSG00000137571_26 (sequence is synthesized)
gacccggggctggaagagagccccgctgccttggagccgccctcctgaagcttgaaaatggaagaatttagttttgttggttgaattgaaaatggcgacttgagaaacaactgtgccttc

SEQ ID NO: 337332 - DNA, 120 bp, Artificial Sequence
  ENSG00000137571_27 (sequence is synthesized)
ttttctttctttcttttttttaacctctacagacacaatcctcaaaccaacaaaactcagtatacacagccgctattcattgagggctggatacctcaacaagactgagagcctttcccc

SEQ ID NO: 337333 - DNA, 120 bp, Artificial Sequence
  ENSG00000137571_28 (sequence is synthesized)
gcttctctccaagaaggagacgttcagctagatttgttcccatttccgttgtgttaattcaaagctcatgctcccctacggtacaggctgaggtacacggttagcaaaaccatgggaagg

SEQ ID NO: 337334 - DNA, 120 bp, Artificial Sequence
  ENSG00000137571_29 (sequence is synthesized)
ggaatggcggtgcatatcattaactaacactccaaacaaaggtgagcttgcccaggacttggcatttccaaatcaaagtttttagatatgaacacctactgtgagttctgctacaaagca

SEQ ID NO: 337335 - DNA, 120 bp, Artificial Sequence
  ENSG00000137571_30 (sequence is synthesized)
caaatgaatttgtctcaactatgcaatttgattggaaaaatgtatgtgcagcatgttacatttactttcacggaataaagcagatatgtttctgaaaagaggaagctgaactttccatcc

SEQ ID NO: 337336 - DNA, 120 bp, Artificial Sequence
  ENSG00000137571_31 (sequence is synthesized)
agtactgttgatagcattttaagccatagcagttataaatcaggtagagtttttcaaatgcttcagaggaaccataggcatagtgtgatagaaggaacagctacttcaggtcgtaggaca

SEQ ID NO: 337337 - DNA, 120 bp, Artificial Sequence
  ENSG00000137571_32 (sequence is synthesized)
cattctctttcagtctgcctgccccatcctaagataaagaggctgctgaatcataaatctgatagcttaaatataaactccagtattcttttgtaaggagcattaaaactagtgtgctaa

SEQ ID NO: 337338 - DNA, 120 bp, Artificial Sequence
  ENSG00000137571_33 (sequence is synthesized)
acaatatggctagaaactgtaatttgaaatgcataatagggaaagaaaatgacagctttctcatccaagaaaattgttgcagaaattttctttagctctacgggcccacaaagtcactgg

SEQ ID NO: 337339 - DNA, 120 bp, Artificial Sequence
  ENSG00000137571_34 (sequence is synthesized)
gaaaagtcccacctgagtattttagttacatcttgaaagcactggcaaatctgtgtggttttctttttttctggacagaaaattgctgtggttgctcctgaaaatgcatacttatatcag

SEQ ID NO: 337340 - DNA, 120 bp, Artificial Sequence
  ENSG00000137571_35 (sequence is synthesized)
gaaatctgtgcctgggatatgaaaatcacttagaatacaggaggagggagatctgtgttctggaacagaatatgatcttaagtaattgttgaaaattatgtaaaataaaccagtccatcc

SEQ ID NO: 337341 - DNA, 120 bp, Artificial Sequence
  ENSG00000137571_36 (sequence is synthesized)
gaaagaaccctactttatcagagatagaatcgttttacactaccctttgattcccccttactgtaagtttctggcagtgattctgagagaggatttttctgttcctaaatgcactttggg

SEQ ID NO: 337342 - DNA, 120 bp, Artificial Sequence
  ENSG00000137571_37 (sequence is synthesized)
cggattgacagcaagttagctcaggggttctggctgccagggagtgtaagggccaaatgctgatataattgtgaactttttctgccaaggagcctatggtcatggagggctaattaggga

SEQ ID NO: 337343 - DNA, 120 bp, Artificial Sequence
  ENSG00000137571_38 (sequence is synthesized)
aatgtttttctcttctggtttacccttatccccagaagagatgtgattgacagactgttccatgattcaggcttctgctctccaaccttgcttgactgcacaggtggaattgtgcaaata

SEQ ID NO: 337344 - DNA, 120 bp, Artificial Sequence
  ENSG00000137571_39 (sequence is synthesized)
ctcctgggtataaggctgtttccctctcttcctaggaatgacattggtcaaacagttctcttggttgcatacagtttgtgttaacactgttagactgaacaatgtctacaaggggtggag

SEQ ID NO: 337345 - DNA, 120 bp, Artificial Sequence
  ENSG00000137571_40 (sequence is synthesized)
ctagtggtctcaggggctaaggacttccctctggttcctgggcttggctctcggggaggtgaggattcttgcttggttaagactgtaattgcactggtaattgtcagactctggccaatg

SEQ ID NO: 337346 - DNA, 120 bp, Artificial Sequence
  ENSG00000137571_41 (sequence is synthesized)
tggcatatattggaagtattcaaaaaatcttgctgattaagaaaaccttgctgattgaactagtgtctcctttggggcctcagggttcccctttaccctctatgggagagctctgatcct

SEQ ID NO: 337347 - DNA, 120 bp, Artificial Sequence
  ENSG00000137571_42 (sequence is synthesized)
ttaaaggagaaattttcctttggtgtgggagttaaagatatgtagattggagaggtgtggtgttttcttaattttcttctgatcattaagatactgcattgagagaattttggtgggatt

SEQ ID NO: 337348 - DNA, 120 bp, Artificial Sequence
  ENSG00000137571_43 (sequence is synthesized)
ggcactttttctggtagctaagattgctggactcagcacggagtagttagagagcccccttactccctttgctgccatgaacagtcatccagtttggcgatcactgatcaggtgccaggt

SEQ ID NO: 337349 - DNA, 120 bp, Artificial Sequence
  ENSG00000137571_44 (sequence is synthesized)
atcttcaggtgtcatattacctgattaccatctgccactccataaaatcctttgggatgattgggccagaactcaaagaaatgggcctgaaatgtgcaccacagtgttaatattgtactt

SEQ ID NO: 337350 - DNA, 120 bp, Artificial Sequence
  ENSG00000137571_45 (sequence is synthesized)
cctcaagtatctgctccttataaatagcaggtatttcattaatgtgttgttggtgaatgtagactaagtagtaaaaatcatgagaaaataaagctttggaatatgtaccaattaagagtg

SEQ ID NO: 337351 - DNA, 120 bp, Artificial Sequence
  ENSG00000137571_46 (sequence is synthesized)
gttcacaaaatacttggggctatggtagcatcactggaatattacatagccaactgaagtgactgttttgtagatgataccatttaattgtatatatagggtcttatatgtttcttaata

SEQ ID NO: 337352 - DNA, 120 bp, Artificial Sequence
  ENSG00000137571_47 (sequence is synthesized)
aattgatcccattactttatagtcacagctcctattagaagttttaatgaagactctccatgagcttaggcttcaaattacttgttttggaaaaggtcatcttgtcctttataaactgta

SEQ ID NO: 337353 - DNA, 120 bp, Artificial Sequence
  ENSG00000137571_48 (sequence is synthesized)
aattcatatattatttagctttaatatgcaaatacaatatccttgagttcatcctattaatttagaaactcccaggaggtaagatgggtggttggagcgcattctttggttattttcatt

SEQ ID NO: 337354 - DNA, 120 bp, Artificial Sequence
  ENSG00000137571_49 (sequence is synthesized)
agcattaagtccttattctttataggtggatttaattcttgaaaatattcaaaagtaattcagagtcaaggtgttggggatggagagaaaggaggaacagagaggaaaaaaattagcatt

SEQ ID NO: 337355 - DNA, 120 bp, Artificial Sequence
  ENSG00000137571_50 (sequence is synthesized)
tgttgagtgttgacgatttgtagagcattttgacaagcacttaatatacatcatcattcattttgatcctcttaattaccttgcaaagatttgattctttttttttttttgagacagagt

SEQ ID NO: 337356 - DNA, 75 bp, Artificial Sequence
  ENSG00000137571_51 (sequence is synthesized)
tttcagtctcctgaggaactgggattaaggtgtgtgccaccacacccagctattttttttctatttttagtagag

SEQ ID NO: 337357 - DNA, 65 bp, Artificial Sequence
  ENSG00000137571_52 (sequence is synthesized)
tcctgtttcagtctcctgaggaactgggattaaggtgtgtgccaccacacccagctatttttttt

SEQ ID NO: 337358 - DNA, 120 bp, Artificial Sequence
  ENSG00000137571_53 (sequence is synthesized)
caggcatgagccaccatgcccggctgattttattatttttttaaaaaacatatgaaaccaagactcagagaagtaaaataactcatttaggatcatacagaatggtaaagtcaggattca

SEQ ID NO: 337359 - DNA, 120 bp, Artificial Sequence
  ENSG00000137571_54 (sequence is synthesized)
aggattcagacatagatttctctcactccattattcattttttacactacgcaatgtatacaatagcttttggttaacaaaggcaaggtgactataaaatcgtgagattaaagcatttca

SEQ ID NO: 337360 - DNA, 120 bp, Artificial Sequence
  ENSG00000137571_55 (sequence is synthesized)
attttttgatatattaccgtttatgaagagtagagaggtttttttgtgtaaataaaaaaaactgtaggaaacatctgtaggaaatatcaagatttaatgtttaactagattttcaaggta

SEQ ID NO: 337361 - DNA, 120 bp, Artificial Sequence
  ENSG00000137571_56 (sequence is synthesized)
aatttacatttatttagctaagtgttatattaaagttatttgtcataacatacctcaaatatttatttatagttcatatttaatacagaacaaatctagtcttcgtgttaacatcgggtc

SEQ ID NO: 337362 - DNA, 120 bp, Artificial Sequence
  ENSG00000137571_57 (sequence is synthesized)
tcggcagagtttctgaaatgaaacattatgaagaaaggtagttcagatttgttgaatctgagctttagggatttcaagtgtatttttttttattttcctctttcagaatattaacatctc

SEQ ID NO: 337363 - DNA, 120 bp, Artificial Sequence
  ENSG00000137571_58 (sequence is synthesized)
tattagttttttgatgaatatgagttttaagattcctaataagggttttaagtgaacacacataaaatacatatcaaaccactgatcccgattgttccctttagtcgctgtgacattgtt

SEQ ID NO: 337364 - DNA, 120 bp, Artificial Sequence
  ENSG00000137571_59 (sequence is synthesized)
acctttagtggcatgcacttggaaatgtcagccttcagagaagggggagttacatggagtaaggcctcatggatgtcatggtggtcctccatgttcaccaaccaccaagaaaattcttct

SEQ ID NO: 337365 - DNA, 120 bp, Artificial Sequence
  ENSG00000137571_60 (sequence is synthesized)
tcagtccacaattccagcttgcgctctttggtgcacttggagccagaaagtgtctttttggccctgttttgtagaaaccgtgcatgtaccaaagagaaactttagagtttggatggagct

SEQ ID NO: 337366 - DNA, 120 bp, Artificial Sequence
  ENSG00000137571_61 (sequence is synthesized)
gaagcattgatgggaattccctagtgcacccaggagcaggaggcaagcccaagcctcgggtggtagccaattatattttgtgatcgtgtatgtacttaaaacatcagagatgacacagca

SEQ ID NO: 337367 - DNA, 120 bp, Artificial Sequence
  ENSG00000137571_62 (sequence is synthesized)
catgaatataactattgatatgtaggtgcatactgagtattctaagtagcagatagataccaaaatactgtataatcccagaattgcctaaactgcaggtttgctagttctctgttatac

SEQ ID NO: 337368 - DNA, 120 bp, Artificial Sequence
  ENSG00000137571_63 (sequence is synthesized)
agaccagtaggtagcctttccacacatttgtgttttctcttccataataagagagtgctgcggctggcaggcaaaggtagttgcctcatgcactttatctttttgtctttttctcttctt

SEQ ID NO: 337369 - DNA, 120 bp, Artificial Sequence
  ENSG00000137571_64 (sequence is synthesized)
catcttttgggatgctgctggctgtatctgtcccaaacttcttgttgcattagaatcagatctgtgtatgtttgaggaggttttattttaaagacttcagttttactcagctctaggaag

SEQ ID NO: 337370 - DNA, 120 bp, Artificial Sequence
  ENSG00000137571_65 (sequence is synthesized)
ggtcaaatacaacaacaacaacaaaaaacagaaaacaaaaaaccctccctaggtgtttgcttttgcaacattaaaaaaaatgccttggtgctaaaaagtatttaatgacgcatgttcacc

SEQ ID NO: 337371 - DNA, 120 bp, Artificial Sequence
  ENSG00000137571_66 (sequence is synthesized)
actaaaaagcgccactgaattcacagtatttcactgctaagtggctgcatgtactttgtgtttggaaatctgaagaattttccagaaaacaagcatccattactctcatttcaacagtta

SEQ ID NO: 337372 - DNA, 120 bp, Artificial Sequence
  ENSG00000137571_67 (sequence is synthesized)
ctccatctatgctgcaaaaatgaagcgtgaaaggggggatacttttctatggaatactcagtgcttttgatatttattttagcaagaataatcagatgccaaaaataatttcagagaaag

SEQ ID NO: 337373 - DNA, 120 bp, Artificial Sequence
  ENSG00000137571_68 (sequence is synthesized)
gtagaaaaaatatttcaggtaaccttttcttatttcttctccaaaaagattacacccatgtaaggtatttttaacactggggttttgaaggtgttatcttttctggtatcctatcactac

SEQ ID NO: 337374 - DNA, 120 bp, Artificial Sequence
  ENSG00000137571_69 (sequence is synthesized)
atgttaaaattgaaggagaaaatattattgaaactaaagtaattgcagggacacattaaaccaaaggggtgaacaaaagaggtttaaagtttgtatctagaaatgaaaaataagaatcat

SEQ ID NO: 337375 - DNA, 120 bp, Artificial Sequence
  ENSG00000137571_70 (sequence is synthesized)
tggtaagactagtaccgattattggcaattggtaattgataattggtaagagtagtaccaaataatgggcatttttcttaaaatacatacctctaccccaaaccccaaatgttaatttag

SEQ ID NO: 337376 - DNA, 120 bp, Artificial Sequence
  ENSG00000137571_71 (sequence is synthesized)
aatcctgaaacaggcaagtcaggctctgactcttttgtttaaggaaatgtaatactgtgtcaactaaactggcattaggttcttagtggagtgtgtgtttgtgtgtgtgtgtgtgtgttt

SEQ ID NO: 337377 - DNA, 120 bp, Artificial Sequence
  ENSG00000137571_72 (sequence is synthesized)
tgtgtagaggtatgtttgtgatgaaaggttttgcactgttgcataaagaagtttgattttgtgatttttaaaatgatattcatttggagactttttaaggtaatttaaaagatgtataat

SEQ ID NO: 337378 - DNA, 120 bp, Artificial Sequence
  ENSG00000137571_73 (sequence is synthesized)
ttccgtgtgtttaatgaaatctgttgtcgatgtactaatcttggtttacagcatcttgaatacttgattattgaaaattaagaaaaaagttaaaaatgaataaagtgtgttggactgaaa

SEQ ID NO: 337379 - DNA, 120 bp, Artificial Sequence
  ENSG00000137571_74 (sequence is synthesized)
agacaatgagggagagtctccgccgaccgcctgctgcttattgttccgggactggagactgcagccggctgctgcctagtcctccggggctccgctcctgactagctcctccgtccctct

SEQ ID NO: 337380 - DNA, 120 bp, Artificial Sequence
  ENSG00000137571_75 (sequence is synthesized)
gcgtgcgcccagccggctccgtgggctcctcgcgcgctctctgacagcgtgccgggatctctttgtttggttgtggcttccctagctctcggcaaagcagacggattttcggtttcgttt

SEQ ID NO: 337381 - DNA, 120 bp, Artificial Sequence
  ENSG00000137571_76 (sequence is synthesized)
cgtgtcgtgtctgcacgatggaggtgcaaagccctgtggtgtttgtgcatctgcagtcagcctcatacccctccctccaagctgttctccctgtgtgtgctctgtgtgctctgcctctcc

SEQ ID NO: 337382 - DNA, 120 bp, Artificial Sequence
  ENSG00000137571_77 (sequence is synthesized)
ggtgggcccagtgtaatcaaaggaaagacggaagcaggagggcaagaatcaaagaaggagattcgatgattaaagcacaggttggagtgttgtgccttgaagatggaggaaggggctgcg

SEQ ID NO: 337383 - DNA, 120 bp, Artificial Sequence
  ENSG00000137571_78 (sequence is synthesized)
ttccttttagaaaaattgggacagggaatacattgtgtgtctgtgaaaaagtttcctttgttcttttgggcattttctattttgagtaatggagtaggagtacggaaaggctgcagttag

SEQ ID NO: 337384 - DNA, 120 bp, Artificial Sequence
  ENSG00000137573_0 (sequence is synthesized)
aggttacttgactgggagttctcagacctccagtttcagccctgccctcagcctccaatccgtaagagacacccagccccagcaattggattgggcagcccgtcttgacacaccactgtg

SEQ ID NO: 337385 - DNA, 120 bp, Artificial Sequence
  ENSG00000137573_1 (sequence is synthesized)
ctgagtgcttgaggacgtgtttcaacagatggttggggttagtgtgtgtcatcacattcgagtggggattaagagaaggaaggctgccttgctggagctgtgtggtcttctccaagtgag

SEQ ID NO: 337386 - DNA, 120 bp, Artificial Sequence
  ENSG00000137573_2 (sequence is synthesized)
agtcgcaggcaatagaactactttgcttttggaggaaaaggaggaattcattttcagcagacacaagaaaagcagtttttttttcagggattcttcacttctcttgaacaaggaactcac

SEQ ID NO: 337387 - DNA, 120 bp, Artificial Sequence
  ENSG00000137573_3 (sequence is synthesized)
tcagagactaacacaaaggaagtaatttcttacctggtcattatttagtctacaataagttcatccttcttcagtgtgaccagtaaattcttcccatactcttgaagagagcataattgg

SEQ ID NO: 337388 - DNA, 120 bp, Artificial Sequence
  ENSG00000137573_4 (sequence is synthesized)
aatggagaggtgctgacggccacccaccatcatctaaagaagataaacttggcaaatgacatgcaggttcttcaaggcagaataattgcagaaaatcttcaaaggaccctatctgcagat

SEQ ID NO: 337389 - DNA, 120 bp, Artificial Sequence
  ENSG00000137573_5 (sequence is synthesized)
gttctgaatacctctgagaatagagattgattattcaaccaggatacctaattcaagaactccagaaatcaggagacggagacattttgtcagttttgcaacattggaccaaatacaatg

SEQ ID NO: 337390 - DNA, 120 bp, Artificial Sequence
  ENSG00000137573_6 (sequence is synthesized)
aagtattcttgctgtgctctggttttggctgtcctgggcacagaattgctgggaagcctctgttcgactgtcagatccccgaggttcagaggacggatacagcaggaacgaaaaaacatc

SEQ ID NO: 337391 - DNA, 120 bp, Artificial Sequence
  ENSG00000137573_7 (sequence is synthesized)
cgacccaacattattcttgtgcttaccgatgatcaagatgtggagctggggtccctgcaagtcatgaacaaaacgagaaagattatggaacatgggggggccaccttcatcaatgccttt

SEQ ID NO: 337392 - DNA, 120 bp, Artificial Sequence
  ENSG00000137573_8 (sequence is synthesized)
gtgactacacccatgtgctgcccgtcacggtcctccatgctcaccgggaagtatgtgcacaatcacaatgtctacaccaacaacgagaactgctcttccccctcgtggcaggccatgcat

SEQ ID NO: 337393 - DNA, 120 bp, Artificial Sequence
  ENSG00000137573_9 (sequence is synthesized)
gagcctcggacttttgctgtatatcttaacaacactggctacagaacagccttttttggaaaatacctcaatgaatataatggcagctacatcccccctgggtggcgagaatggcttgga

SEQ ID NO: 337394 - DNA, 120 bp, Artificial Sequence
  ENSG00000137573_10 (sequence is synthesized)
ttaatcaagaattctcgcttctataattacactgtttgtcgcaatggcatcaaagaaaagcatggatttgattatgcaaaggactacttcacagacttaatcactaacgagagcattaat

SEQ ID NO: 337395 - DNA, 120 bp, Artificial Sequence
  ENSG00000137573_11 (sequence is synthesized)
tacttcaaaatgtctaagagaatgtatccccataggcccgttatgatggtgatcagccacgctgcgccccacggccccgaggactcagccccacagttttctaaactgtaccccaatgct

SEQ ID NO: 337396 - DNA, 120 bp, Artificial Sequence
  ENSG00000137573_12 (sequence is synthesized)
tcccaacacataactcctagttataactatgcaccaaatatggataaacactggattatgcagtacacaggaccaatgctgcccatccacatggaatttacaaacattctacagcgcaaa

SEQ ID NO: 337397 - DNA, 120 bp, Artificial Sequence
  ENSG00000137573_13 (sequence is synthesized)
aggctccagactttgatgtcagtggatgattctgtggagaggctgtataacatgctcgtggagacgggggagctggagaatacttacatcatttacaccgccgaccatggttaccatatt

SEQ ID NO: 337398 - DNA, 120 bp, Artificial Sequence
  ENSG00000137573_14 (sequence is synthesized)
gggcagtttggactggtcaaggggaaatccatgccatatgactttgatattcgtgtgcctttttttattcgtggtccaagtgtagaaccaggatcaatagtcccacagatcgttctcaac

SEQ ID NO: 337399 - DNA, 120 bp, Artificial Sequence
  ENSG00000137573_15 (sequence is synthesized)
attgacttggcccccacgatcctggatattgctgggctcgacacacctcctgatgtggacggcaagtctgtcctcaaacttctggacccagaaaagccaggtaacaggtttcgaacaaac

SEQ ID NO: 337400 - DNA, 120 bp, Artificial Sequence
  ENSG00000137573_16 (sequence is synthesized)
aagaaggccaaaatttggcgtgatacattcctagtggaaagaggcaaatttctacgtaagaaggaagaatccagcaagaatatccaacagtcaaatcacttgcccaaatatgaacgggtc

SEQ ID NO: 337401 - DNA, 120 bp, Artificial Sequence
  ENSG00000137573_17 (sequence is synthesized)
aaagaactatgccagcaggccaggtaccagacagcctgtgaacaaccggggcagaagtggcaatgcattgaggatacatctggcaagcttcgaattcacaagtgtaaaggacccagtgac

SEQ ID NO: 337402 - DNA, 120 bp, Artificial Sequence
  ENSG00000137573_18 (sequence is synthesized)
ctgctcacagtccggcagagcacgcggaacctctacgctcgcggcttccatgacaaagacaaagagtgcagttgtagggagtctggttaccgtgccagcagaagccaaagaaagagtcaa

SEQ ID NO: 337403 - DNA, 120 bp, Artificial Sequence
  ENSG00000137573_19 (sequence is synthesized)
cggcaattcttgagaaaccaggggactccaaagtacaagcccagatttgtccatactcggcagacacgttccttgtccgtcgaatttgaaggtgaaatatatgacataaatctggaagaa

SEQ ID NO: 337404 - DNA, 120 bp, Artificial Sequence
  ENSG00000137573_20 (sequence is synthesized)
gaagaagaattgcaagtgttgcaaccaagaaacattgctaagcgtcatgatgaaggccacaaggggccaagagatctccaggcttccagtggtggcaacaggggcaggatgctggcagat

SEQ ID NO: 337405 - DNA, 120 bp, Artificial Sequence
  ENSG00000137573_21 (sequence is synthesized)
agcagcaacgccgtgggcccacctaccactgtccgagtgacacacaagtgttttattcttcccaatgactctatccattgtgagagagaactgtaccaatcggccagagcgtggaaggac

SEQ ID NO: 337406 - DNA, 120 bp, Artificial Sequence
  ENSG00000137573_22 (sequence is synthesized)
cataaggcatacattgacaaagagattgaagctctgcaagataaaattaagaatttaagagaagtgagaggacatctgaagagaaggaagcctgaggaatgtagctgcagtaaacaaagc

SEQ ID NO: 337407 - DNA, 120 bp, Artificial Sequence
  ENSG00000137573_23 (sequence is synthesized)
ctgctcaggaagtagatagcaaactgcaacttttcaaggagaacaaccgtaggaggaagaaggagaggaaggagaagagacggcagaggaagggggaagagtgcagcctgcctggcctca

SEQ ID NO: 337408 - DNA, 120 bp, Artificial Sequence
  ENSG00000137573_24 (sequence is synthesized)
cttgcttcacgcatgacaacaaccactggcagacagccccgttctggaacctgggatctttctgtgcttgcacgagttctaacaataacacctactggtgtttgcgtacagttaatgaga

SEQ ID NO: 337409 - DNA, 120 bp, Artificial Sequence
  ENSG00000137573_25 (sequence is synthesized)
cgcataattttcttttctgtgagtttgctactggctttttggagtattttgatatgaatacagatccttatcagctcacaaatacagtgcacacggtagaacgaggcattttgaatcagc

SEQ ID NO: 337410 - DNA, 120 bp, Artificial Sequence
  ENSG00000137573_26 (sequence is synthesized)
tacacgtacaactaatggagctcagaagctgtcaaggatataagcagtgcaacccaagacctaagaatcttgatgttggaaataaagatggaggaagctatgacctacacagaggacagt

SEQ ID NO: 337411 - DNA, 120 bp, Artificial Sequence
  ENSG00000137573_27 (sequence is synthesized)
tatgggatggatgggaaggttaatcagccccgtctcactgcagacatcaactggcaaggcctagaggagctacacagtgtgaatgaaaacatctatgagtacagacaaaactacagactt

SEQ ID NO: 337412 - DNA, 120 bp, Artificial Sequence
  ENSG00000137573_28 (sequence is synthesized)
agtctggtggactggactaattacttgaaggatttagatagagtatttgcactgctgaagagtcactatgagcaaaataaaacaaataagactcaaactgctcaaagtgacgggttcttg

SEQ ID NO: 337413 - DNA, 120 bp, Artificial Sequence
  ENSG00000137573_29 (sequence is synthesized)
gttgtctctgctgagcacgctgtgtcaatggagatggcctctgctgactcagatgaagacccaaggcataaggttgggaaaacacctcatttgaccttgccagctgaccttcaaaccctg

SEQ ID NO: 337414 - DNA, 120 bp, Artificial Sequence
  ENSG00000137573_30 (sequence is synthesized)
catttgaaccgaccaacattaagtccagagagtaaacttgaatggaataacgacattccagaagttaatcatttgaattctgaacactggagaaaaaccgaaaaatggacggggcatgaa

SEQ ID NO: 337415 - DNA, 120 bp, Artificial Sequence
  ENSG00000137573_31 (sequence is synthesized)
gagactaatcatctggaaaccgatttcagtggcgatggcatgacagagctagagctcgggcccagccccaggctgcagcccattcgcaggcacccgaaagaacttccccagtatggtggt

SEQ ID NO: 337416 - DNA, 120 bp, Artificial Sequence
  ENSG00000137573_32 (sequence is synthesized)
cctggaaaggacatttttgaagatcaactatatcttcctgtgcattccgatggaatttcagttcatcagatgttcaccatggccaccgcagaacaccgaagtaattccagcatagcgggg

SEQ ID NO: 337417 - DNA, 120 bp, Artificial Sequence
  ENSG00000137573_33 (sequence is synthesized)
aagatgttgaccaaggtggagaagaatcacgaaaaggagaagtcacagcacctagaaggcagcgcctcctcttcactctcctctgattagatgaaactgttaccttaccctaaacacagt

SEQ ID NO: 337418 - DNA, 120 bp, Artificial Sequence
  ENSG00000137573_34 (sequence is synthesized)
atttctttttaacttttttatttgtaaactaataaaggtaatcacagccaccaacattccaagctaccctgggtacctttgtgcagtagaagctagtgagcatgtgagcaagcggtgtgc

SEQ ID NO: 337419 - DNA, 120 bp, Artificial Sequence
  ENSG00000137573_35 (sequence is synthesized)
acacggagactcatcgttataatttactatctgccaagagtagaaagaaaggctggggatatttgggttggcttggttttgattttttgcttgtttgtttgttttgtactaaaacagtat

SEQ ID NO: 337420 - DNA, 120 bp, Artificial Sequence
  ENSG00000137573_36 (sequence is synthesized)
tatcttttgaatatcgtagggacataagtatatacatgttatccaatcaagatggctagaatggtgcctttctgagtgtctaaaacttgacacccctggtaaatctttcaacacacttcc

SEQ ID NO: 337421 - DNA, 120 bp, Artificial Sequence
  ENSG00000137573_37 (sequence is synthesized)
actgcctgcgtaatgaagttttgattcatttttaaccactggaatttttcaatgccgtcattttcagttagatgattttgcactttgagattaaaatgccatgtctatttgattagtctt

SEQ ID NO: 337422 - DNA, 120 bp, Artificial Sequence
  ENSG00000137573_38 (sequence is synthesized)
atttttttatttttacaggcttatcagtctcactgttggctgtcattgtgacaaagtcaaataaacccccaaggacgacacacagtatggatcacatattgtttgacattaagcttttgc

SEQ ID NO: 337423 - DNA, 120 bp, Artificial Sequence
  ENSG00000137573_39 (sequence is synthesized)
cagaaaatgttgcatgtgttttacctcgacttgctaaaatcgattagcagaaaggcatggctaataatgttggtggtgaaaataaataaataagtaaacaaaatgaagattgcctgctct

SEQ ID NO: 337424 - DNA, 120 bp, Artificial Sequence
  ENSG00000137573_40 (sequence is synthesized)
ctctgtgcctagcctcaaagcgttcatcatacatcatacctttaagattgctatattttgggttattttcttgacaggagaaaaagatctaaagatcttttattttcatcttttttggtt

SEQ ID NO: 337425 - DNA, 120 bp, Artificial Sequence
  ENSG00000137573_41 (sequence is synthesized)
ttcttggcatgactaagaagcttaaatgttgataaaatatgactagttttgaatttacaccaagaacttctcaataaaagaaaatcatgaatgctccacaatttcaacataccacaagag

SEQ ID NO: 337426 - DNA, 120 bp, Artificial Sequence
  ENSG00000137573_42 (sequence is synthesized)
aagttaatttcttaacattgtgttctatgattatttgtaagaccttcaccaagttctgatatcttttaaagacatagttcaaaattgcttttgaaaatctgtattcttgaaaatatcctt

SEQ ID NO: 337427 - DNA, 120 bp, Artificial Sequence
  ENSG00000137573_43 (sequence is synthesized)
gttgtgtattaggtttttaaataccagctaaaggattacctcactgagtcatcagtaccctcctattcagctccccaagatgatgtgtttttgcttaccctaagagaggttttcttctta

SEQ ID NO: 337428 - DNA, 120 bp, Artificial Sequence
  ENSG00000137573_44 (sequence is synthesized)
taattcaagtgcttagataaattatgttttctttaagtgtttatggtaaactcttttaaagaaaatttaatatgttatagctgaatctttttggtaactttaaatctttatcatagactc

SEQ ID NO: 337429 - DNA, 120 bp, Artificial Sequence
  ENSG00000137573_45 (sequence is synthesized)
atagactctgtacatatgttcaaattagctgcttgcctgatgtgtgtatcatcggtgggatgacagaacaaacatatttatgatcatgaataatgtgctttgtaaaaagatttcaagtta

SEQ ID NO: 337430 - DNA, 120 bp, Artificial Sequence
  ENSG00000137573_46 (sequence is synthesized)
ttaggaagcatactctgttttttaatcatgtataatattccatgatacttttatagaacaattctggcttcaggaaagtctagaagcaatatttcttcaaataaaaggtgtttaaacttt

SEQ ID NO: 337431 - DNA, 120 bp, Artificial Sequence
  ENSG00000137573_47 (sequence is synthesized)
gcagaccgtcgctaatgaatcttggggccggtgtcgggccggggcggcttgatcggcaactaggaaaccccaggcgcagaggccaggagcgagggcagcgaggatcagaggccaggcctt

SEQ ID NO: 337432 - DNA, 120 bp, Artificial Sequence
  ENSG00000137573_48 (sequence is synthesized)
cccggctgccggcgctcctcggaggtcagggcagatgaggaacatgactctcccccttcggaggaggaaggaagtcccgctgccaccttatctctgctcctctgcctcctccctgttccc

SEQ ID NO: 337433 - DNA, 120 bp, Artificial Sequence
  ENSG00000137573_49 (sequence is synthesized)
ttcagatggaggaattctacaggtacaggtgctccttgacttacgatggggtgacatcccaataaacccatcataagttgaaaataagccttttttggaaaatacctcaatgaatataat

SEQ ID NO: 337434 - DNA, 120 bp, Artificial Sequence
  ENSG00000137573_50 (sequence is synthesized)
ttgtgatgagcctctcacacctggccattccaatggaacagacagggtacctgcttttttcagtggcttgtgttccagctgacagctccagggcctgtttgaataattcgaagacaatcc

SEQ ID NO: 337435 - DNA, 120 bp, Artificial Sequence
  ENSG00000137573_51 (sequence is synthesized)
ttagttaggaaagcaagctttaattatcactggggaacagaaggccgcatcttcgaggaatttggcagacctcagcagggggcaaccacaggcctttggcaaaagatcacttttcaacaa

SEQ ID NO: 337436 - DNA, 120 bp, Artificial Sequence
  ENSG00000137573_52 (sequence is synthesized)
tctgtcttcctttaaaaggcacatgcacactctgtccctgctgcctgctgagatcccacctgggacctcatccccagagctgggggtcatctcccatatcaagaaattaagaaaaataag

SEQ ID NO: 337437 - DNA, 120 bp, Artificial Sequence
  ENSG00000137573_53 (sequence is synthesized)
ggggggcaggaaaggacagctttgacaacagtccctgaactttcccttttaatataagccagatttaacgtatgtcattctgtaaatccgggagtccaatttgaggcttgtaatttgctg

SEQ ID NO: 337438 - DNA, 78 bp, Artificial Sequence
  ENSG00000137573_54 (sequence is synthesized)
aacaatgcaaaaaccgtaattacgtttgcaccaacctaatagttgtttctaaaaaaattttgctgggccaggcacatc

SEQ ID NO: 337439 - DNA, 120 bp, Artificial Sequence
  ENSG00000137573_55 (sequence is synthesized)
acttgagcccaggagttctagtccagcctgggtaacatagagagaccccatctcttaaaaaatacttgttaggcagcacatttctgaaattcaagaaaggtcagcaaatttggaacatgt

SEQ ID NO: 337440 - DNA, 120 bp, Artificial Sequence
  ENSG00000137573_56 (sequence is synthesized)
gcccttttgtaaacagaagagtagatgagttgattataaatgggacatctcttctgcatacattctacaagttaaccagagggctatgtggtataaaagatgtttgtggtcacagcctag

SEQ ID NO: 337441 - DNA, 120 bp, Artificial Sequence
  ENSG00000137573_57 (sequence is synthesized)
ctcaggctagagtgttgcagagaccatcccaaatcctccaggctgggctcaaggcttctctaaacccttctttgttgcaaaatcccatcttttcatgcttcattggtgacatgtggccat

SEQ ID NO: 337442 - DNA, 120 bp, Artificial Sequence
  ENSG00000137573_58 (sequence is synthesized)
ctgccacatagaacaagtgagagtactagttccatatctttattaaataaccatttttcttttgtacaaagaataaatagaaattctgatatttttcttctcatacttccgtcactcacc

SEQ ID NO: 337443 - DNA, 120 bp, Artificial Sequence
  ENSG00000137573_59 (sequence is synthesized)
cctctttggaaaccactgcataacagagctaaggggaggataaactaatgtgcctgaaattttactttagtcttcagcctataagagatcactatcttttttcccattttcacctagttt

SEQ ID NO: 337444 - DNA, 120 bp, Artificial Sequence
  ENSG00000137573_60 (sequence is synthesized)
cacagcaaatttacctacggggggaaaggtattattattcttaacatgaaaccacaatatttataagaaagaaattgtgaactttaaagtgtaaagataagggaacactggaatggcaag

SEQ ID NO: 337445 - DNA, 120 bp, Artificial Sequence
  ENSG00000137573_61 (sequence is synthesized)
gtcaaggatataagcagtgcaacccaagacctaagaatcttgatgttggaaataaagatggaggaagctatgacctacacaggtattcacacttttttattcttctcaacagcttcttcc

SEQ ID NO: 337446 - DNA, 120 bp, Artificial Sequence
  ENSG00000137573_62 (sequence is synthesized)
actaatttctgtttcttaccgtgttgcacagagcaaagctgggggtgcatgcttgttctaacagcattctccactatgttttgtcattgatcacagaactgtcattttgcttttaaatca

SEQ ID NO: 337447 - DNA, 120 bp, Artificial Sequence
  ENSG00000137573_63 (sequence is synthesized)
gctcactgtcccatcaagatgttccagagcatttactcactcccatgcttgtttgcttgttggatgatgcttttaagcatggaatgatgtgaaggaaaaaaaacagaatggcctttggga

SEQ ID NO: 337448 - DNA, 120 bp, Artificial Sequence
  ENSG00000137573_64 (sequence is synthesized)
agcacacgggatatcccttccagagaagcgaaaaataatggaggttgaggagatctgaaatgtgcactcggtacaaacctgtaggaaactatgtctacgttttctaaaatatgaatctaa

SEQ ID NO: 337449 - DNA, 120 bp, Artificial Sequence
  ENSG00000137573_65 (sequence is synthesized)
gggacttggacatgctactgtttaactgctgtcgggattcttcacttctcttgaacaaggaactcactcagagactaacacaaaggaagtaatttcttacctggtcattatttagtctac

SEQ ID NO: 337450 - DNA, 120 bp, Artificial Sequence
  ENSG00000137573_66 (sequence is synthesized)
gctatctgtgccttaccagtctcaccaacaataagcctggtgactgacaatcgagagggggctctgtccacgtaggtgccggcacaagctgaggacatgagtgggacagaggaaccagcc

SEQ ID NO: 337451 - DNA, 120 bp, Artificial Sequence
  ENSG00000137573_67 (sequence is synthesized)
ttgcacggaggaagcaccttttccttctggtgattgattgatgggggacagtgaggaggttttcagagactggaaaaaattgtcccagtcacttactatgaagtctttgtcagcagaaaa

SEQ ID NO: 337452 - DNA, 120 bp, Artificial Sequence
  ENSG00000137573_68 (sequence is synthesized)
ggtactcagtatcacacgcaggaccctatctgcagatgttctgaatacctctgagaatagagattgattattcaaccaggatacctaattcaaggtattagctctcgtcagaaagctttt

SEQ ID NO: 337453 - DNA, 120 bp, Artificial Sequence
  ENSG00000137573_69 (sequence is synthesized)
acatttgagctctgtgttggaaattctattttggcaatgaattgaaataggaaaagttggaatgagaataaaggacaaaagtgaatttgcaaaataatcaagtgcttaaaaaactaccca

SEQ ID NO: 337454 - DNA, 120 bp, Artificial Sequence
  ENSG00000137573_70 (sequence is synthesized)
gcacttgtgagggtttgctatttctgactcatgtgcaaccctgtctctgccagcttatgtgccaatactgacttatttgtagccctttctctgcaactgtgcttggagtttggatttcat

SEQ ID NO: 337455 - DNA, 120 bp, Artificial Sequence
  ENSG00000137573_71 (sequence is synthesized)
gaatgttgctgttcctggtaccctgttcggcccctctaacctccagagctatggtctcagatgcttccttttagagagaaggtcattagtccaccaagaagccaaatgacaacaggaaag

SEQ ID NO: 337456 - DNA, 120 bp, Artificial Sequence
  ENSG00000137574_0 (sequence is synthesized)
acttccggcggcagcgtccgggctagttcccggcgcgagcggccgcgggccagtttctatctcctcatccagggcttgcgggcgaggcctgttttaagtctccagtaaccgagcggaggc

SEQ ID NO: 337457 - DNA, 120 bp, Artificial Sequence
  ENSG00000137574_1 (sequence is synthesized)
ccggcaggcgcgacccgggctgcgtacgtcagagctgcctccgaagtggtaaaatgtgctgcgagaagtggagccgcgtggcggaaatgtttctcttcattgaggagcgggaggattgta

SEQ ID NO: 337458 - DNA, 120 bp, Artificial Sequence
  ENSG00000137574_2 (sequence is synthesized)
agatactgtgcctttgctccagggcatttgtggaggatcgaaaattgtacaatttgggattaaaaggctattacatcagagacagtggcaacaattcaggagaccaggcgacagaagaag

SEQ ID NO: 337459 - DNA, 120 bp, Artificial Sequence
  ENSG00000137574_3 (sequence is synthesized)
aggaaggtggttattcctgtggtactgcagaatcacatgacagcaaaggcataggcctggatgaaagtgaacttgattctgaggctgaactcatgagaagtatgggattgccacttcaat

SEQ ID NO: 337460 - DNA, 120 bp, Artificial Sequence
  ENSG00000137574_4 (sequence is synthesized)
ttggtaggataactgcacataaggattttgaggtatctatgaatactagaaataaagttaaaataaaaaagaaaaaacatcaaaagaaatacttagatgaaattgtgcaagaatcttgga

SEQ ID NO: 337461 - DNA, 120 bp, Artificial Sequence
  ENSG00000137574_5 (sequence is synthesized)
gaaaagaatatgaagaagacgacattttggcttcagatgatccatcttcaattgaacagtatgagaacaccagaacatatgaacttcaaagcaaaaaagatactgagacagaaaatcctc

SEQ ID NO: 337462 - DNA, 120 bp, Artificial Sequence
  ENSG00000137574_6 (sequence is synthesized)
cagttgaaaacacattatctccaaagctagaaattacagagaaatgggaaaagtattggaatgaatatggaggaggactattgtggcaaagttggcaagaaaaacatccgggtcaagcac

SEQ ID NO: 337463 - DNA, 120 bp, Artificial Sequence
  ENSG00000137574_7 (sequence is synthesized)
tatcttctgaaccttggaactttcctgatacaaaggaagaatgggagcaacattatagtcaactttattggtattatttggaacaatttcagtattgggaagctcagggttggacttttg

SEQ ID NO: 337464 - DNA, 120 bp, Artificial Sequence
  ENSG00000137574_8 (sequence is synthesized)
atgcctcgcaaagctgtgatacagatacttacacatctaaaacagaagctgatgacaagaacgatgaaaaatgcatgaaagttgacttagtatcttttccatcttcacctattatggttg

SEQ ID NO: 337465 - DNA, 120 bp, Artificial Sequence
  ENSG00000137574_9 (sequence is synthesized)
ataatgatagctctggtacaagtgataaggatcatagtgaaatacttgatggaattagtaacataaaactgaattcagaggaagtaacacagagccaattagattcctgtacaagtcatg

SEQ ID NO: 337466 - DNA, 120 bp, Artificial Sequence
  ENSG00000137574_10 (sequence is synthesized)
atggtcatcaacagctaagtgaagttagtagcaaaagagagtgccctgcttccggccaaagtgaaccacgtaatggaggaaccaatgaggaaagcaactcatcggggaatacaaacacag

SEQ ID NO: 337467 - DNA, 120 bp, Artificial Sequence
  ENSG00000137574_11 (sequence is synthesized)
acccaccagctgaggattcacagaagtcttcaggagcaaacacaagcaaagacagaccacatgccagtggtactgatggagatgaaagtgaggaagacccacctgagcataagccaagca

SEQ ID NO: 337468 - DNA, 120 bp, Artificial Sequence
  ENSG00000137574_12 (sequence is synthesized)
aactgaagaggagccatgaactggacattgatgaaaacccagcttcagactttgatgacagtggttcccttctaggattcaagtatggctcaggacaaaaatatggtggaatcccaaatt

SEQ ID NO: 337469 - DNA, 120 bp, Artificial Sequence
  ENSG00000137574_13 (sequence is synthesized)
tcagtcatcggcaggtcaggtatttagagaagaatgtgaagcttaagtctaagtacctagacatgcgcagacaaataaagatgaaaaacaaacacatcttctttaccaaagagtcagaaa

SEQ ID NO: 337470 - DNA, 120 bp, Artificial Sequence
  ENSG00000137574_14 (sequence is synthesized)
aaccatttttcaagaaaagcaaaattctgagtaaggtagaaaaattcctcacatgggttaataaaccaatggatgaagaagcatcacaggaatcatcttctcatgacaatgtgcacgacg

SEQ ID NO: 337471 - DNA, 120 bp, Artificial Sequence
  ENSG00000137574_15 (sequence is synthesized)
cttccacaagtagtgattcagaggaacaagacatgtctgttaaaaaaggtgatgacctactggagactaataatccagaacctgaaaagtgtcagagcgtatcttcagctggtgaacttg

SEQ ID NO: 337472 - DNA, 120 bp, Artificial Sequence
  ENSG00000137574_16 (sequence is synthesized)
aaacagaaaactatgaaagagacagcttgctagcaactgttccagatgagcaggattgtgttactcaagaagtgccagactcccgccaggcagaaactgaagctgaagtgaaaaagaaga

SEQ ID NO: 337473 - DNA, 120 bp, Artificial Sequence
  ENSG00000137574_17 (sequence is synthesized)
agaacaagaagaagaacaaaaaggtgaatggtctgcctcctgaaatagctgctgttcctgagctggcaaaatactgggcccagaggtacaggctcttctcccgttttgatgatgggatta

SEQ ID NO: 337474 - DNA, 120 bp, Artificial Sequence
  ENSG00000137574_18 (sequence is synthesized)
gaagattgctgaacacattgctggccgtgttagtcagtccttcaagtgtgacgttgtagtagacgcattctgtggagttggaggaaataccattcagtttgccttaacaggaatgagagt

SEQ ID NO: 337475 - DNA, 120 bp, Artificial Sequence
  ENSG00000137574_19 (sequence is synthesized)
gattgccattgatatcgatcctgttaagattgcccttgctcgcaataatgcagaagtttatgggatagcagataagatagagttcatctgtggagatttcttgctgctggcttctttttt

SEQ ID NO: 337476 - DNA, 120 bp, Artificial Sequence
  ENSG00000137574_20 (sequence is synthesized)
aaaggctgatgttgtgttcctcagcccaccttggggagggccagactatgccactgcagagacctttgacattagaacaatgatgtctcctgatggctttgaaattttcagactttctaa

SEQ ID NO: 337477 - DNA, 120 bp, Artificial Sequence
  ENSG00000137574_21 (sequence is synthesized)
gaagatcactaataatattgtttattttcttccaagaaatgctgatattgaccaggtggcatccttagctgggcctggagggcaagtggaaatagaacagaacttccttaacaacaaatt

SEQ ID NO: 337478 - DNA, 120 bp, Artificial Sequence
  ENSG00000137574_22 (sequence is synthesized)
gaagacaatcactgcatattttggtgacctaattcgaagaccagcctctgaaacctaactatgcagcagtgcgaggacaaaagatcatggagtggtcaaaatattcagatgagacatttg

SEQ ID NO: 337479 - DNA, 120 bp, Artificial Sequence
  ENSG00000137574_23 (sequence is synthesized)
gcatgtcttcctttattcactgatattttctacccatggtcttatatcaccgtatgaaatggaaacttacaggacttaaatatcagtgaaatattttgagatctttgaataattccttta

SEQ ID NO: 337480 - DNA, 120 bp, Artificial Sequence
  ENSG00000137574_24 (sequence is synthesized)
ttgaataattcctttagaggaattatacaaaattaatatatatgagtcctttgtaatttatttttttttgagacaggatctcacttttaccgcccaggctggagtgcagtgccatgatca

SEQ ID NO: 337481 - DNA, 120 bp, Artificial Sequence
  ENSG00000137574_25 (sequence is synthesized)
tcactgcaggttcagccttctgagttcaagcaatccttctgtctcagtctcctcagtagctggggctttaggtgggcactgccacaccgtactaatttttgtattttttgtagagacgag

SEQ ID NO: 337482 - DNA, 120 bp, Artificial Sequence
  ENSG00000137574_26 (sequence is synthesized)
caggctggtgtcaaactcctgggctcagtcagtccccccatctcaccctccccaagtgctggaattacaggcgtgagctactgtgcccagccttacggacatccttttgaattatctttt

SEQ ID NO: 337483 - DNA, 120 bp, Artificial Sequence
  ENSG00000137574_27 (sequence is synthesized)
tttttcactcatagaatatgaatacatttatttagactttttctagaactttcctgttttcatgtctttgcttcatctggaattggcttaacacccttttataaagtttgtgtttgtaaa

SEQ ID NO: 337484 - DNA, 120 bp, Artificial Sequence
  ENSG00000137574_28 (sequence is synthesized)
atttccattgtgacatcaatacgcaatatattttgtaatataggagtttctatttttttattaaaatggcaatgaaagcaagagggatatgtgttgcttaattattcatctaaaaagttt

SEQ ID NO: 337485 - DNA, 120 bp, Artificial Sequence
  ENSG00000137574_29 (sequence is synthesized)
gttcagtcatttttacaagtaggcaaaaaaatagtgacatacaacacttgtccattgaaggttagacctgggacttctatattttaataatatgagcgtgttaaacattaaacagaacat

SEQ ID NO: 337486 - DNA, 120 bp, Artificial Sequence
  ENSG00000137574_30 (sequence is synthesized)
gatactggctgggataagattagagaattgaaacaaatttggggaatttccaataaatactagaaaattagactagaaaaatagctgttatataaataactttgttggaatatgctaatt

SEQ ID NO: 337487 - DNA, 120 bp, Artificial Sequence
  ENSG00000137574_31 (sequence is synthesized)
ttagtgtcttgaaagtttacaatttatctgattgctctgcagtacagtagcaactgagctgatcaataaaggtgaaattactttttcattaattcgcaatttcaaaatctgtccaaatgt

SEQ ID NO: 337488 - DNA, 68 bp, Artificial Sequence
  ENSG00000137574_32 (sequence is synthesized)
ctttttcattaattcgcaatttcaaaatctgtccaaatgttcttggtttttaaactttatgtagcatt

SEQ ID NO: 337489 - DNA, 61 bp, Artificial Sequence
  ENSG00000137574_33 (sequence is synthesized)
gcacctgccaccacatccagctaattttttatatttttagtagcacctcagcctcccgtag

SEQ ID NO: 337490 - DNA, 120 bp, Artificial Sequence
  ENSG00000137574_34 (sequence is synthesized)
aggcgtgagccaccgcgcctggctttatgtagcattcttaaagtcactagggagatggcaggtgaagtaaaggcagatttccaaaatcactaattttttttagttttttgtcacttaacc

SEQ ID NO: 337491 - DNA, 120 bp, Artificial Sequence
  ENSG00000137574_35 (sequence is synthesized)
ccaaaatcactaattttttttagttttttgtcacttaacctttcttgcatatacttctttccacagctcattttcttacttgtatattaataaagctaactcatcttcctgaatatacat

SEQ ID NO: 337492 - DNA, 120 bp, Artificial Sequence
  ENSG00000137574_36 (sequence is synthesized)
gattttacatgagaagagcaggaagcttaggcttggttagctaaaactaagatattgctgcccactaatcacacagggataaaactaatagactgttaagattgtcagtactcaatagga

SEQ ID NO: 337493 - DNA, 120 bp, Artificial Sequence
  ENSG00000137575_0 (sequence is synthesized)
agtgaccggaggcggcggcggcgagcggttccttgtgggctagaagaatcctgcaaaaatgtctctctatccatctctcgaagacttgaaggtagacaaagtaattcaggctcaaactgc

SEQ ID NO: 337494 - DNA, 120 bp, Artificial Sequence
  ENSG00000137575_1 (sequence is synthesized)
tttttctgcaaaccctgccaatccagcaattttgtcagaagcttctgctcctatccctcacgatggaaatctctatcccagactgtatccagagctctctcaatacatggggctgagttt

SEQ ID NO: 337495 - DNA, 120 bp, Artificial Sequence
  ENSG00000137575_2 (sequence is synthesized)
aaatgaagaagaaatacgtgcaaatgtggccgtggtttctggtgcaccacttcaggggcagttggtagcaagaccttccagtataaactatatggtggctcctgtaactggtaatgatgt

SEQ ID NO: 337496 - DNA, 120 bp, Artificial Sequence
  ENSG00000137575_3 (sequence is synthesized)
tggaattcgtagagcagaaattaagcaagggattcgtgaagtcattttgtgtaaggatcaagatggaaaaattggactcaggcttaaatcaatagataatggtatatttgttcagctagt

SEQ ID NO: 337497 - DNA, 120 bp, Artificial Sequence
  ENSG00000137575_4 (sequence is synthesized)
ccaggctaattctccagcctcattggttggtctgagatttggggaccaagtacttcagatcaatggtgaaaactgtgcaggatggagctctgataaagcgcacaaggtgctcaaacaggc

SEQ ID NO: 337498 - DNA, 120 bp, Artificial Sequence
  ENSG00000137575_5 (sequence is synthesized)
ttttggagagaagattaccatgaccattcgtgacaggccctttgaacggacgattaccatgcataaggatagcactggacatgttggttttatctttaaaaatggaaaaataacatccat

SEQ ID NO: 337499 - DNA, 120 bp, Artificial Sequence
  ENSG00000137575_6 (sequence is synthesized)
agtgaaagatagctctgcagccagaaatggtcttctcacggaacataacatctgtgaaatcaatggacagaatgtcattggattgaaggactctcaaattgcagacatactgtcaacatc

SEQ ID NO: 337500 - DNA, 120 bp, Artificial Sequence
  ENSG00000137575_7 (sequence is synthesized)
tgggactgtagttactattacaatcatgcctgcttttatctttgaacatattattaagcggatggcaccaagcattatgaaaagcctaatggaccacaccattcctgaggtttaaaattc

SEQ ID NO: 337501 - DNA, 120 bp, Artificial Sequence
  ENSG00000137575_8 (sequence is synthesized)
gtttccttctttggcaacttctgtattatgcacgtgaagccttcccggagccagcgagcatatgctgcatgaggacctttctatcttacattatggctgggaatcttactctttcatctg

SEQ ID NO: 337502 - DNA, 120 bp, Artificial Sequence
  ENSG00000137575_9 (sequence is synthesized)
ataccttgttcagatttcaaaatagttgtagccttatcctggttttacagatgtgaaactttcaagagatttactgactttcctagaatagtttctctactggaaacctgatgcttttat

SEQ ID NO: 337503 - DNA, 120 bp, Artificial Sequence
  ENSG00000137575_10 (sequence is synthesized)
aagccattgtgattaggatgactgttacaggcttagctttgtgtgaaaaccagtcacctttctcctaggtaatgagtagtgctgttcatattactttagttctatagcatacttgcatct

SEQ ID NO: 337504 - DNA, 120 bp, Artificial Sequence
  ENSG00000137575_11 (sequence is synthesized)
ttaacatgctatcatagtacatttagaatgattgcctttgattttttttttaaattctgtgtgtgtgtgtgtaaaatgccaattaagaacactggtttcattccatgtaagcattaaaca

SEQ ID NO: 337505 - DNA, 120 bp, Artificial Sequence
  ENSG00000137575_12 (sequence is synthesized)
gtgtatgtaggtttcaagagattgtgatgattcttaaattttaactaccttcacttaatatgcttgaactgtcgccttaactatgttaagcatctagactaaaagccaaaatataattat

SEQ ID NO: 337506 - DNA, 120 bp, Artificial Sequence
  ENSG00000137575_13 (sequence is synthesized)
tgctgcctttctaaaaacccaaaatgtagttctctattaacctgaaatgtacactagcccagaacagtttaatggtacttactgagctatagcatagctgcttagttgtttttgagattt

SEQ ID NO: 337507 - DNA, 120 bp, Artificial Sequence
  ENSG00000137575_14 (sequence is synthesized)
tttagtcaacacataatggaaacttctttcttctaaaagttgccagtgccacttttaagaagtgaatcactatatgtgatgtaaaagttattacactaaacaggataaacttttgactcc

SEQ ID NO: 337508 - DNA, 120 bp, Artificial Sequence
  ENSG00000137575_15 (sequence is synthesized)
ccttttgttcatttgtggattaagtggtataatacttaattttggcatttgactcttaagattatgtaacctagctactttgggatggtcttagaatatttttctgataacttgttcctt

SEQ ID NO: 337509 - DNA, 120 bp, Artificial Sequence
  ENSG00000137575_16 (sequence is synthesized)
ttcctgactcctccttgcaaacaaaatgatagttgacactttatcctgatttttttcttctttttggtttatgtctattctaattaaatatgtataaataaagttacattttagtctgtc

SEQ ID NO: 337510 - DNA, 120 bp, Artificial Sequence
  ENSG00000137575_17 (sequence is synthesized)
ggcgcgcaccgctctcttacactcgggcctcagaagtccgtgccagtgaccggaggcggcggcggcgagcggttccttgtgggctagaatcctgcaaaaatgtctctctatccatctctc

SEQ ID NO: 337511 - DNA, 120 bp, Artificial Sequence
  ENSG00000137575_18 (sequence is synthesized)
ttttagaaaatgtctgtcttttgactgtatttaggtggcgctgttttcatattgacttaggtgggagatggggaacgtggggcctgaactcttggtctggccagtcaccggaattatttg

SEQ ID NO: 337512 - DNA, 120 bp, Artificial Sequence
  ENSG00000137575_19 (sequence is synthesized)
gtgagctgcgatgcacacagtagtgagtgggtggcacggggcccgcgggcacgaacagccgaagagcggagaagactgggagcataaccgctgggcagcgggcagcggacagcgggcggc

SEQ ID NO: 337513 - DNA, 120 bp, Artificial Sequence
  ENSG00000137575_20 (sequence is synthesized)
atgaaccgccccactttgccggatacctggagctgcaggaacgacccacacccaggcctctttacccctaccgccccgttaccttggggacgggatcacccgacccggcgccgtgcgact

SEQ ID NO: 337514 - DNA, 120 bp, Artificial Sequence
  ENSG00000137575_21 (sequence is synthesized)
ccgtgccagtgaccggaggcggcggcggcgagcggttccttgtgggctaggtgcccaggagccactgagaacagaagacttgttgctgctctagaggacctatggtagggcagacagagg

SEQ ID NO: 337515 - DNA, 120 bp, Artificial Sequence
  ENSG00000137575_22 (sequence is synthesized)
atgatacagctcagcagcttgtccctacgtgtggcatgaaaggtgttggagagagaatagtggagtatgtgtccaacattccagcacttcagagagctacccccaagggactggcttctg

SEQ ID NO: 337516 - DNA, 120 bp, Artificial Sequence
  ENSG00000137575_23 (sequence is synthesized)
tttcacctgacttggagcacaggcaggagtggacatactctaaaagcccactgatgggaaagggcaccaggttggaggcctctgaaaacaagagagctgggtggcttgcagcagctccag

SEQ ID NO: 337517 - DNA, 120 bp, Artificial Sequence
  ENSG00000137575_24 (sequence is synthesized)
agaacctgaagtaccacagacagatagcacagggagcaaaagattatgagatcctgaaaaaggaaacgaacaagttcatcttgagaatttatacacactggtcgagaagaagcatcctca

SEQ ID NO: 337518 - DNA, 120 bp, Artificial Sequence
  ENSG00000137575_25 (sequence is synthesized)
ggaaaggttcaaaaggcatgcagaatctctagtcaggccgatcagtgaggatctttctctgtacagagccagaccacaaagactgggaggggtgatattttttcaaatgcttggatccca

SEQ ID NO: 337519 - DNA, 120 bp, Artificial Sequence
  ENSG00000137575_26 (sequence is synthesized)
acatgatgttaaaagacacacaaagaaatagggaaacatggcacaatcaaagagtcaaaatatccaggaacctactttaaggaaacacagatatcttcattatctcagaaggaattcaga

SEQ ID NO: 337520 - DNA, 120 bp, Artificial Sequence
  ENSG00000137575_27 (sequence is synthesized)
ctaaccaccataaacatgttcagtgacccaaggaaaatgctgcatgaacaaaatggtatcaacatagagattgaaaacgtaaaaaggaaccaaacaaacattgtaacagatgcaatatgc

SEQ ID NO: 337521 - DNA, 120 bp, Artificial Sequence
  ENSG00000137575_28 (sequence is synthesized)
ttctttgaccaaattgaaagatttactagaggagtttagcagcagtgtttttcaaggagaagaattagtgaacttgaagccaggtcatttgaaattatccagtcagagaagcaaaaagaa

SEQ ID NO: 337522 - DNA, 120 bp, Artificial Sequence
  ENSG00000137575_29 (sequence is synthesized)
aaaaaataaaaaaagaatgaagacagcctagagtactaatgggacagcatcaattttatcaatgtagattgtatggaagttccatatgttggaaagagaaaggagcaaaaagcttatttg

SEQ ID NO: 337523 - DNA, 120 bp, Artificial Sequence
  ENSG00000137575_30 (sequence is synthesized)
aagaaatactggccaaaacttcccaaactgaaggaaggcagtggacatccagattcaagaagccaaatggactccagagtagaacaatccgaagacatctacatggaaacacactgtaat

SEQ ID NO: 337524 - DNA, 120 bp, Artificial Sequence
  ENSG00000137575_31 (sequence is synthesized)
caaattgtcaaagaattttgaaagcagcaggataagaacaacttgtcatatacaaaggagattctgtgggactctaagtggatttcttagcagaaaccttgcaggtcagaaagaagtggg

SEQ ID NO: 337525 - DNA, 120 bp, Artificial Sequence
  ENSG00000137575_32 (sequence is synthesized)
atgatatagtcaaactgctggaagaaaaactgccagcaaagtactgtatgtggcaaaacttttctttaaaagtaaaagagaaataagattctcaaaatctgagagagttcatcaccacta

SEQ ID NO: 337526 - DNA, 120 bp, Artificial Sequence
  ENSG00000137575_33 (sequence is synthesized)
tatctgacttaaacgccaatgggagtctgttaaatggaaacaaaagtatgttcaacatgaaagtataaaattaaatgataaagctatggacaaatagagacctgcatattattgtaatgg

SEQ ID NO: 337527 - DNA, 120 bp, Artificial Sequence
  ENSG00000137575_34 (sequence is synthesized)
aataatttgaaatggaaatgctttaattataatagtgcatctgtagttgagaatattttaaatctactaacttaaatgttttcaattggggatgttctattttgcagaggcatagttggg

SEQ ID NO: 337528 - DNA, 120 bp, Artificial Sequence
  ENSG00000137575_35 (sequence is synthesized)
acttctgaccacattactttgaaagatgtttcttttctgaatattctaactggaatacatttcactggcctacatatattatagtttgtataatagaattgtggcaattaaatagagcag

SEQ ID NO: 337529 - DNA, 120 bp, Artificial Sequence
  ENSG00000137575_36 (sequence is synthesized)
gatttgcagatttcctttggaaaatgtattgctgatgtgtttgaaattaaactttcttacataaatcttcattgttttagtttctttttggaagtactggatttagcttataaattatat

SEQ ID NO: 337530 - DNA, 120 bp, Artificial Sequence
  ENSG00000137575_37 (sequence is synthesized)
actcgggcctcagaagtccgtgccagtgaccggaggcggcggcggcgagcggttccttgtgggctagaagaatcctgcaaaaatgtctctctatccatctctcgaagacttgaaggctca

SEQ ID NO: 337531 - DNA, 120 bp, Artificial Sequence
  ENSG00000137575_38 (sequence is synthesized)
gggctttcagagtttgtgagtatattattttgttgcagaaaatgatcaaatgttattgatgagccttatagtcttgcagttgtgtggtgcagatttttcttacattgtttttaaagcatt

SEQ ID NO: 337532 - DNA, 120 bp, Artificial Sequence
  ENSG00000137601_0 (sequence is synthesized)
gtgacgcgccggccgctctcccttagtccgcattcgctccagggttttgggaccctaggttgcggagtccttaccctaccctggcctctcgagcagttgtccccataactcggaatctag

SEQ ID NO: 337533 - DNA, 120 bp, Artificial Sequence
  ENSG00000137601_1 (sequence is synthesized)
agccgctgttgcgaggcaggagcacgtggcagtcaagtagcttcccagtcccgaacgccgcccgtccccaccccgccgtggccactagcaacgacctctgtgaagttggagaggcggtaa

SEQ ID NO: 337534 - DNA, 120 bp, Artificial Sequence
  ENSG00000137601_2 (sequence is synthesized)
cggaggcactccccctgctgcaccccgccgtttctacggggctcagaaaccagtttgtttgtttcgtcggggtagtgtcgacctgtcttacgggcgtcgcccgagacaggacggagtcaa

SEQ ID NO: 337535 - DNA, 120 bp, Artificial Sequence
  ENSG00000137601_3 (sequence is synthesized)
acccgtggtatcaactgaagacgagtgtcaggtgtggagagtctcagtgccccctttcagtctggactgtgagctgctgctggttagacagtcttggtttctctttcaggatgtcatttt

SEQ ID NO: 337536 - DNA, 120 bp, Artificial Sequence
  ENSG00000137601_4 (sequence is synthesized)
caaaatgcgggatggtacctctgctttattaagccccgtaggaagactgccacacctagactgatgcttattagtcatcaccgttattcctactaacgtcctgtgtcactgagtttttta

SEQ ID NO: 337537 - DNA, 120 bp, Artificial Sequence
  ENSG00000137601_5 (sequence is synthesized)
aatgtctagcatatctgtaaagatgccttagaaaaagaatcatggagaagtatgttagactacagaagattggagaaggttcatttggaaaagccattcttgttaaatctacagaagatg

SEQ ID NO: 337538 - DNA, 120 bp, Artificial Sequence
  ENSG00000137601_6 (sequence is synthesized)
gcagacagtatgttatcaaggaaattaacatctcaagaatgtccagtaaagaaagagaagaatcaaggagagaagttgcagtattggcaaacatgaagcatccaaatattgtccagtata

SEQ ID NO: 337539 - DNA, 120 bp, Artificial Sequence
  ENSG00000137601_7 (sequence is synthesized)
gagaatcatttgaagaaaatggctctctctacatagtaatggattactgtgagggaggggatctgtttaagcgaataaatgctcagaaaggcgttttgtttcaagaggatcagattttgg

SEQ ID NO: 337540 - DNA, 120 bp, Artificial Sequence
  ENSG00000137601_8 (sequence is synthesized)
actggtttgtacagatatgtttggccctgaaacatgtacatgatagaaaaattcttcatcgagacattaaatctcagaacatatttttaactaaagatggaacagtacaacttggagatt

SEQ ID NO: 337541 - DNA, 120 bp, Artificial Sequence
  ENSG00000137601_9 (sequence is synthesized)
ttggaattgctagagttcttaatagtactgtagagctggctcgaacttgcatagggaccccatactacttgtcacctgaaatctgtgaaaacaaaccttacaataataaaagtgacattt

SEQ ID NO: 337542 - DNA, 120 bp, Artificial Sequence
  ENSG00000137601_10 (sequence is synthesized)
gggctctggggtgtgtcctttatgagctgtgtacacttaaacatgcttttgaagctggcagtatgaaaaacctggtactgaagataatatctggatcttttccacctgtgtctttgcatt

SEQ ID NO: 337543 - DNA, 120 bp, Artificial Sequence
  ENSG00000137601_11 (sequence is synthesized)
attcctatgatctccgcagtttggtgtctcagttatttaaaagaaatcctagggatagaccatcagtcaactccatattggagaaaggttttatagccaaacgcattgaaaagtttctct

SEQ ID NO: 337544 - DNA, 120 bp, Artificial Sequence
  ENSG00000137601_12 (sequence is synthesized)
ctcctcagcttattgcagaagaattttgtctaaaaacattttcgaagtttggatcacagcctataccagctaaaagaccagcttcaggacaaaactcgatttctgttatgcctgctcaga

SEQ ID NO: 337545 - DNA, 120 bp, Artificial Sequence
  ENSG00000137601_13 (sequence is synthesized)
aaattacaaagcctgccgctaaatatggaatacctttagcatataagaaatatggagataaaaaattacacgaaaagaaaccactgcaaaaacataaacaggcccatcaaactccagaga

SEQ ID NO: 337546 - DNA, 120 bp, Artificial Sequence
  ENSG00000137601_14 (sequence is synthesized)
agagagtgaatactggagaagaaaggaggaaaatatctgaggaagcagcaagaaagagaaggctggaatttattgaaaaagaaaagaaacaaaaggatcagattattagtttaatgaagg

SEQ ID NO: 337547 - DNA, 120 bp, Artificial Sequence
  ENSG00000137601_15 (sequence is synthesized)
ctgaacaaatgaaaaggcaagaaaaggaaaggttggaaagaataaatagggccagggaacaaggatggagaaatgtgctaagtgctggtggaagtggtgaagtaaaggctccttttctgg

SEQ ID NO: 337548 - DNA, 120 bp, Artificial Sequence
  ENSG00000137601_16 (sequence is synthesized)
gcagtggagggactatagctccatcatctttttcttctcgaggacagtatgaacattaccatgccatttttgaccaaatgcagcaacaaagagcagaagataatgaagctaaatggaaaa

SEQ ID NO: 337549 - DNA, 120 bp, Artificial Sequence
  ENSG00000137601_17 (sequence is synthesized)
gagaaatatatggtcgaggtcttccagaaagaggaattctgcctggagttcgtccaggatttccttatggggctgcaggtcatcaccattttcctgatgctgatgatattagaaaaactt

SEQ ID NO: 337550 - DNA, 120 bp, Artificial Sequence
  ENSG00000137601_18 (sequence is synthesized)
tgaaaagattgaaggcggtgtctaaacaagccaatgcaaacaggcaaaaagggcagctagctgtagaaagagctaaacaagtagaagagttcctgcagcgaaaacgggaagctatgcaga

SEQ ID NO: 337551 - DNA, 120 bp, Artificial Sequence
  ENSG00000137601_19 (sequence is synthesized)
ataaagctcgagccgaaggacatatggtttatctggcaagactgaggcaaataagactacagaatttcaatgagcgccaacagattaaagccaaacttcgtggtgaaaagaaagaagcta

SEQ ID NO: 337552 - DNA, 120 bp, Artificial Sequence
  ENSG00000137601_20 (sequence is synthesized)
atcattctgaaggacaagaaggaagtgaagaggctgacatgaggcgcaaaaaaatcgaatcactgaaggcccatgcaaatgcacgtgctgctgtactaaaagaacaactagaacgaaaga

SEQ ID NO: 337553 - DNA, 120 bp, Artificial Sequence
  ENSG00000137601_21 (sequence is synthesized)
gaaaggaggcttatgagagagaaaaaaaagtgtgggaagagcatttggtggctaaaggagttaagagttctgatgtttctccacctttgggacagcatgaaacaggtggctctccatcaa

SEQ ID NO: 337554 - DNA, 120 bp, Artificial Sequence
  ENSG00000137601_22 (sequence is synthesized)
agcaacagatgagatctgttatttctgtaacttcagctttgaaagaagttggcgtggacagtagtttaactgatacccgggaaacttcagaagagatgcaaaagaccaacaatgctattt

SEQ ID NO: 337555 - DNA, 120 bp, Artificial Sequence
  ENSG00000137601_23 (sequence is synthesized)
aatacttcgtagattaaatgaaaatcttaaagctcaagaagatgaaaaaggaaagcagaatctctctgatacttttgagataaatgttcatgaagatgccaaagagcatgaaaaagaaaa

SEQ ID NO: 337556 - DNA, 120 bp, Artificial Sequence
  ENSG00000137601_24 (sequence is synthesized)
atcagtttcatctgatcgcaagaagtgggaggcaggaggtcaacttgtgattcctctggatgagttaacactagatacatccttctctacaactgaaagacatacagtgggagaagttat

SEQ ID NO: 337557 - DNA, 120 bp, Artificial Sequence
  ENSG00000137601_25 (sequence is synthesized)
taaattaggtcctaatggatctccaagaagagcctgggggaaaagtccgacagattctgttctaaagatacttggagaagctgaactacaacttcagacagaactattagaaaatacaac

SEQ ID NO: 337558 - DNA, 120 bp, Artificial Sequence
  ENSG00000137601_26 (sequence is synthesized)
tattagaagtgagatttctcccgaaggggaaaagtacaaacccttaattactggagaaaaaaaagtacaatgtatttcacatgaaataaacccatcagctattgttgattctcctgttga

SEQ ID NO: 337559 - DNA, 120 bp, Artificial Sequence
  ENSG00000137601_27 (sequence is synthesized)
gacaaaaagtcccgagttcagtgaggcatctccacagatgtcattgaaactggaaggaaatttagaagaacctgatgatttggaaacagaaattctacaagagccaagtggaacaaacaa

SEQ ID NO: 337560 - DNA, 120 bp, Artificial Sequence
  ENSG00000137601_28 (sequence is synthesized)
agatgagagcttgccatgcactattactgatgtgtggattagtgaggaaaaagaaacaaaggaaactcagtcggcagataggatcaccattcaggaaaatgaagtttctgaagatggagt

SEQ ID NO: 337561 - DNA, 120 bp, Artificial Sequence
  ENSG00000137601_29 (sequence is synthesized)
ctcgagtactgtggaccaacttagtgacattcatatagagcctggaaccaatgattctcagcactctaaatgtgatgtagataagtctgtgcaaccggaaccatttttccataaggtggt

SEQ ID NO: 337562 - DNA, 120 bp, Artificial Sequence
  ENSG00000137601_30 (sequence is synthesized)
tcattctgaacacttgaacttagtccctcaagttcaatcagttcagtgttcaccagaagaatcctttgcatttcgatctcactcgcatttaccaccaaaaaataaaaacaagaattcctt

SEQ ID NO: 337563 - DNA, 120 bp, Artificial Sequence
  ENSG00000137601_31 (sequence is synthesized)
gctgattggactttcaactggtctgtttgatgcaaacaacccaaagatgttaaggacatgttcacttccagatctctcaaagctgttcagaacccttatggatgttcccaccgtaggaga

SEQ ID NO: 337564 - DNA, 120 bp, Artificial Sequence
  ENSG00000137601_32 (sequence is synthesized)
tgttcgtcaagacaatcttgaaatagatgaaattgaagatgaaaacattaaagaaggaccttctgattctgaagacattgtgtttgaagaaactgacacagatttacaagagctgcaggc

SEQ ID NO: 337565 - DNA, 120 bp, Artificial Sequence
  ENSG00000137601_33 (sequence is synthesized)
ctcgatggaacagttacttagggaacaacctggtgaagaatacagtgaagaagaagagtcagtcttgaagaacagtgatgtggagccaactgcaaatgggacagatgtggcagatgaaga

SEQ ID NO: 337566 - DNA, 120 bp, Artificial Sequence
  ENSG00000137601_34 (sequence is synthesized)
tgacaatcccagcagtgaaagtgccctgaacgaagaatggcactcagataacagtgatggtgaaattgctagtgaatgtgaatgcgatagtgtctttaaccatttagaggaactgagact

SEQ ID NO: 337567 - DNA, 120 bp, Artificial Sequence
  ENSG00000137601_35 (sequence is synthesized)
tcatctggagcaggaaatgggctttgaaaaattctttgaggtttatgagaaaataaaggctattcatgaagatgaagatgaaaatattgaaatttgttcaaaaatagttcaaaatatttt

SEQ ID NO: 337568 - DNA, 120 bp, Artificial Sequence
  ENSG00000137601_36 (sequence is synthesized)
gggaaatgaacatcagcatctttatgccaagattcttcatttagtcatggcagatggagcctaccaagaagataatgatgaataatcctcaaaatgttttttaatcctcaactatatgaa

SEQ ID NO: 337569 - DNA, 120 bp, Artificial Sequence
  ENSG00000137601_37 (sequence is synthesized)
agcatttgaatttggcttatcagaataacaagcttcagtgggaaatacagcaattatttatttaaaaaatcagatttaagatggactttcttattgcatgaaaaagatggagaaacatgc

SEQ ID NO: 337570 - DNA, 120 bp, Artificial Sequence
  ENSG00000137601_38 (sequence is synthesized)
catttttcagtgaagattctaatattttatctattttgttcattgaattccatggttaaatctcataaaatatatactttattaaatcatccaaccaaagcataggaaacattgacccag

SEQ ID NO: 337571 - DNA, 120 bp, Artificial Sequence
  ENSG00000137601_39 (sequence is synthesized)
aacctgacttaatggttttgaagatttactatgcaatagggtaactttgagtttcagcaaatgtctttaggttgaaggaattacctatgtcatgaaggacctgtctgtggtttttcaatg

SEQ ID NO: 337572 - DNA, 120 bp, Artificial Sequence
  ENSG00000137601_40 (sequence is synthesized)
gagtctttaagcatgatcttttttctgtctagtacttgttttcattctggccagcagttctacattaaatcaccttgtcaagggctctgtttacatctatacattttgaagatgaaattt

SEQ ID NO: 337573 - DNA, 120 bp, Artificial Sequence
  ENSG00000137601_41 (sequence is synthesized)
ttagccttaaagtttatattctcaagtccttttacaatcagtgtgtctcctgaactagcacacaggctgtagaaacagtcttagaaatcattgaaagatttgattatgaaagaatagcaa

SEQ ID NO: 337574 - DNA, 120 bp, Artificial Sequence
  ENSG00000137601_42 (sequence is synthesized)
aattatatttcttgacatataaaaagttggtttaatgcctttatttctctttaaggaccagaaccaggaatactatatcgaaaaattagtctgtggatttaacactgacttagcatatag

SEQ ID NO: 337575 - DNA, 120 bp, Artificial Sequence
  ENSG00000137601_43 (sequence is synthesized)
cttaaagttgctcttttggtttttaacttcctccatacataagcttcaaggacaataagatgttaaaaaggaggaaataattatttttattttgacactgtgacagttttggtaactagg

SEQ ID NO: 337576 - DNA, 120 bp, Artificial Sequence
  ENSG00000137601_44 (sequence is synthesized)
atcctagggagggaaatgtttgcctgttgaacttctttctgttatgagaggatttagttaggtcattaagatgttgatcacacagcttcaatcacaatatgccaagtataacctggtttc

SEQ ID NO: 337577 - DNA, 120 bp, Artificial Sequence
  ENSG00000137601_45 (sequence is synthesized)
gttagaggtgtctacagtccagatgttcttcgtaataaaagcaaagtttttgaacctctgagtccaaagcaggctggttggcataatatgtaatttgaaaaataaaatcttatcttgcag

SEQ ID NO: 337578 - DNA, 120 bp, Artificial Sequence
  ENSG00000137601_46 (sequence is synthesized)
ttttatgatattgctattaaatttttattatctacctgaagtatatcaattgtcttttatttattattttacttttctcaatagaaggcttttacatcaagctgataatacttttgttgg

SEQ ID NO: 337579 - DNA, 120 bp, Artificial Sequence
  ENSG00000137601_47 (sequence is synthesized)
tcaagctgataatacttttgttggttttgtacctgatgatttctttcttcataatggaagaaaatgaattcaatattttaattctttacaatcctgaaagatgggcatgattttggggag

SEQ ID NO: 337580 - DNA, 120 bp, Artificial Sequence
  ENSG00000137601_48 (sequence is synthesized)
gttgtgtattaattcttaaactattacaactattagaaaagggtataatatggtagaaaaaaattgttttagccatatttcaaaagatgttatatatgtgcaggaataaggatgatcaat

SEQ ID NO: 337581 - DNA, 120 bp, Artificial Sequence
  ENSG00000137601_49 (sequence is synthesized)
aagatttgtgccatctccagtcgattagcagtgtgtgactctggagtgttgttatggaaagattatgccagtgaggaaaagggctatttttcagtaaggtctattataagtgttggaatt

SEQ ID NO: 337582 - DNA, 120 bp, Artificial Sequence
  ENSG00000137601_50 (sequence is synthesized)
atccatgtgtgtaattttgtcgtttgtcatacatagcttagtacctacactttgtggatgttttctccattgttcacatatgatgttttttgcctcttgggtacaataattttctgaggt

SEQ ID NO: 337583 - DNA, 120 bp, Artificial Sequence
  ENSG00000137601_51 (sequence is synthesized)
tatttaaaggaacatgtgataacattctgccaacataattataacattttatcacccacttcctttaaataaatcaggatataaatctaaattgaatcacactttatgcagaaccccagt

SEQ ID NO: 337584 - DNA, 120 bp, Artificial Sequence
  ENSG00000137601_52 (sequence is synthesized)
gcatttttcgcccttttcttcatcacttcaaagcctacttttctctttgttgtcttagcatgctttctcttcaccttcatctctgatttataactctttgtgatcctgttcatcatatta

SEQ ID NO: 337585 - DNA, 120 bp, Artificial Sequence
  ENSG00000137601_53 (sequence is synthesized)
tttcttttcttccattgaattaataatggtaactgattaatatgtacttgagcagagataaatgattgaggtaaatataaattaacgtttatatacacattataaattatatacagaagc

SEQ ID NO: 337586 - DNA, 120 bp, Artificial Sequence
  ENSG00000137601_54 (sequence is synthesized)
ctgatatatgaagcatctattttttgagaaaggaaggttacagacttacacatatgcatattttttatgaatagtgagacaaattttgtgggaggcttttattctccagaattattgatc

SEQ ID NO: 337587 - DNA, 120 bp, Artificial Sequence
  ENSG00000137601_55 (sequence is synthesized)
tttctagtatatatattgtttaattagtaaactttatttttagagcgatttggggttcacagcaaaatggagtggaaagtacagagagttcctatgtaccccttcctcacacatgcacaa

SEQ ID NO: 337588 - DNA, 120 bp, Artificial Sequence
  ENSG00000137601_56 (sequence is synthesized)
agagttcctatgtaccccttcctcacacatgcacaacctctgtattgacatcctcatttgagtgataacgtttgttatgatcaaacatcgatccattatcacccaaagtccatagtttac

SEQ ID NO: 337589 - DNA, 120 bp, Artificial Sequence
  ENSG00000137601_57 (sequence is synthesized)
ttttgacgaatgtataattataggtatccaccactgtaatatcatacaaaataatgtgactgccttcaaaatcccctgtgctccacctccctccaacctccctcccaactcttggcaacc

SEQ ID NO: 337590 - DNA, 120 bp, Artificial Sequence
  ENSG00000137601_58 (sequence is synthesized)
actggttgctttactgccttcatagttttagcttttctagaatatcatatacttggaatcatatagtatgtggcctttcacactggcttttctcacttactaatatgcatttaaggtgcc

SEQ ID NO: 337591 - DNA, 120 bp, Artificial Sequence
  ENSG00000137601_59 (sequence is synthesized)
taatatgcatttaaggtgcctccgtatatcttcatagtttcataccttatttcttcttaacactaatatcccattgtatttatgtagcatactttttttttttttttttggtaatttttt

SEQ ID NO: 337592 - DNA, 120 bp, Artificial Sequence
  ENSG00000137601_60 (sequence is synthesized)
tctatccccaggctggagtgcaatggcatgatcatggctcacttgcagccttgacctctggggcttaagtgaccctcccacctcagcctcctgaacagctgggactacaggtgcttgcca

SEQ ID NO: 337593 - DNA, 73 bp, Artificial Sequence
  ENSG00000137601_61 (sequence is synthesized)
cctcagcctcctgaacagctgggactacaggtgcttgccaccatgtgtggctgattttttaaattttttgtag

SEQ ID NO: 337594 - DNA, 120 bp, Artificial Sequence
  ENSG00000137601_62 (sequence is synthesized)
tacaagcatgagccaccatgcccagccagaatggatgtactacactttatccattattctactgaaggacatcttggttgcttttaagttatggcaattatgaataaagcttctacaaac

SEQ ID NO: 337595 - DNA, 120 bp, Artificial Sequence
  ENSG00000137601_63 (sequence is synthesized)
tataggattacttttattaagttaccaaggaatgtcctccttctgtgttttaccagtcctctaaaactgagaagccttacaggagtcataaaaagtcattaagtaaatatattaagtaat

SEQ ID NO: 337596 - DNA, 120 bp, Artificial Sequence
  ENSG00000137601_64 (sequence is synthesized)
ataattagtgtaataaaaagcgagtgacattataaatgaaataacttttgagcaacctaagcagagccatttgtttttgtgcataaatgaaataaatacctatgacattcttgataaaaa

SEQ ID NO: 337597 - DNA, 120 bp, Artificial Sequence
  ENSG00000137628_0 (sequence is synthesized)
gccgagtcctaggccaggtctggggtaacctggaacttccacctgggctctgcgctaggtctctgtttcactccctccccgcggggcgcgcagctcgcgggtctttggacaccaccggtc

SEQ ID NO: 337598 - DNA, 120 bp, Artificial Sequence
  ENSG00000137628_1 (sequence is synthesized)
ctgagtccgcggactgccattttcattaagaactgccacttagaggtaccaaaataaagggtatttgctacctttaatacttgccagttcaggttggaggcacaggcagcagcaagaatg

SEQ ID NO: 337599 - DNA, 120 bp, Artificial Sequence
  ENSG00000137628_2 (sequence is synthesized)
gaaagaaatgttcttacaacattttcacaggaaatgtcccagttaattttgaatgaaatgccaaaagctgaatattccagtttattcaatgattttgttgaatctgaattttttttgatt

SEQ ID NO: 337600 - DNA, 120 bp, Artificial Sequence
  ENSG00000137628_3 (sequence is synthesized)
gatggggattcattacttatcacatgtatctgtgagatatcatttaagcctgggcagaacctccatttcttctatctggttgaacgctatcttgtggatcttattagcaaaggaggacaa

SEQ ID NO: 337601 - DNA, 120 bp, Artificial Sequence
  ENSG00000137628_4 (sequence is synthesized)
ttcaccatagttttcttcaaggatgccgagtatgcgtatttcaacttccctgaacttctttctttgagaactgctttaattcttcatcttcagaagaataccaccattgatgttcgaaca

SEQ ID NO: 337602 - DNA, 120 bp, Artificial Sequence
  ENSG00000137628_5 (sequence is synthesized)
acattttcgagatgcttatcaaaagagtggggaagtttcttggaagagagttacccatatttcctgatagttgcagacgaaggcctgaacgatctacaaacacagcttttcaacttttta

SEQ ID NO: 337603 - DNA, 120 bp, Artificial Sequence
  ENSG00000137628_6 (sequence is synthesized)
atcattcattcttgggcaaggaaggtcaacgttgtactttcctcagggcaagaatctgatgttctttgcctttatgcataccttcttccaagcatgtacagacaccagattttttcctgg

SEQ ID NO: 337604 - DNA, 120 bp, Artificial Sequence
  ENSG00000137628_7 (sequence is synthesized)
aagaataagcagaacattaaagatgcttatacaaccctgcttaaccagttggaaagatttaagctttcagcattagcacctctttttggaagtttaaaatggaataatattacggaagag

SEQ ID NO: 337605 - DNA, 120 bp, Artificial Sequence
  ENSG00000137628_8 (sequence is synthesized)
gcacacaagactgtatctctgcttacacaagtctggccagaaggatctgacattcggcgtgtcttttgtgttacttcatgctcattatctttgagaatgtaccatcgctttttaggaaac

SEQ ID NO: 337606 - DNA, 120 bp, Artificial Sequence
  ENSG00000137628_9 (sequence is synthesized)
agagagccctcctctggtcaggaaactgagatccaacaggtgaacagtaattgcttaaccctgcaggagatggaagatttgtgtaaactgcattgtctcactgtggtttttctactccat

SEQ ID NO: 337607 - DNA, 120 bp, Artificial Sequence
  ENSG00000137628_10 (sequence is synthesized)
ctgcctctttctcaaagagcttgtgctagagtcatcacttcccattgggctgaggacatgaagcctttattacaaatgaaaaagtggtgtgaatatttcatcttaagaaatatacatact

SEQ ID NO: 337608 - DNA, 120 bp, Artificial Sequence
  ENSG00000137628_11 (sequence is synthesized)
tttgaattttggaatctgaatttaattcacctttctgacttaaatgatgagcttttgttgaagaatattgctttttactatgaaaatgaaaatgtaaaaggcctacatttgaatttggga

SEQ ID NO: 337609 - DNA, 120 bp, Artificial Sequence
  ENSG00000137628_12 (sequence is synthesized)
gataccattatgaaagattatgaatatctctggaataccgtatcaaagttggtcagagactttgaggttggacagccatttcctctgagaacaacaaaagtttgttttcttgaaaagaaa

SEQ ID NO: 337610 - DNA, 120 bp, Artificial Sequence
  ENSG00000137628_13 (sequence is synthesized)
ccatcaccaatcaaagacagctccaatgaaatggtgcccaatttgggttttattccaacgtcatcttttgtggttgataaatttgctggagatattttgaaagatttgccttttctaaag

SEQ ID NO: 337611 - DNA, 120 bp, Artificial Sequence
  ENSG00000137628_14 (sequence is synthesized)
agtgatgatcctattgttacttcactggttaaacaaaaggaatttgatgaacttgtgcactggcattctcataaacccctgagtgatgattatgacaggtccaggtgtcagtttgatgaa

SEQ ID NO: 337612 - DNA, 120 bp, Artificial Sequence
  ENSG00000137628_15 (sequence is synthesized)
aaatctagagaccctcgtgttcttagatctgtgcaaaagtatcatgttttccaacggttttatgggaattcattagaaacagtctcttcgaaaatcatcgtgactcaaactattaagtca

SEQ ID NO: 337613 - DNA, 120 bp, Artificial Sequence
  ENSG00000137628_16 (sequence is synthesized)
aagaaggattttagtgggcccaagagcaaaaaggcacacgagaccaaggctgaaataattgctagagagaataagaaaaggttatttgccagggaagaacaaaaggaagagcaaaagtgg

SEQ ID NO: 337614 - DNA, 120 bp, Artificial Sequence
  ENSG00000137628_17 (sequence is synthesized)
aatgctttgtcattttctattgaagagcaattgaaagaaaatttacactctggaataaagagcctggaagattttttgaaatcctgtaaaagtagctgtgtgaaacttcaggttgaaatg

SEQ ID NO: 337615 - DNA, 120 bp, Artificial Sequence
  ENSG00000137628_18 (sequence is synthesized)
gtggggttaactgcttgcttgaaagcctggaaagaacattgccgaagtgaagaaggtaaaaccacgaaagatttaagtatagctgttcaggtgatgaaaaggatccactccttgatggaa

SEQ ID NO: 337616 - DNA, 120 bp, Artificial Sequence
  ENSG00000137628_19 (sequence is synthesized)
aaatactcagaacttttacaagaagatgatcggcaactcatagccagatgccttaagtatttaggatttgatgagttggcaagttctttacatccagcccaggatgcagaaaatgatgta

SEQ ID NO: 337617 - DNA, 120 bp, Artificial Sequence
  ENSG00000137628_20 (sequence is synthesized)
aaagtgaagaaaaggaataaatattcagttggcattgggccagctcggttccaactgcaatacatgggccattatttgatacgagatgagagaaaagacccagatcccagggtccaggat

SEQ ID NO: 337618 - DNA, 120 bp, Artificial Sequence
  ENSG00000137628_21 (sequence is synthesized)
tttattcccgacacatggcagcgagagctccttgatgttgtggataagaatgagtcagcagtgattgttgccccaacgtcctcaggcaaaacctatgcctcctactactgtatggagaaa

SEQ ID NO: 337619 - DNA, 120 bp, Artificial Sequence
  ENSG00000137628_22 (sequence is synthesized)
gtgctgaaggagagcgacgacggggtggtcgtgtacgttgcacccacaaaggcccttgttaatcaagtggcagcaactgttcagaatcgttttacgaaaaatctgccaagtggtgaagtt

SEQ ID NO: 337620 - DNA, 120 bp, Artificial Sequence
  ENSG00000137628_23 (sequence is synthesized)
ctctgtggtgttttcaccagggagtatcgtcatgatgccttaaactgtcaggtacttattacagtgcctgcctgctttgaaattctgctgcttgctcctcatcgccaaaactgggtgaaa

SEQ ID NO: 337621 - DNA, 120 bp, Artificial Sequence
  ENSG00000137628_24 (sequence is synthesized)
aagatcagatatgttatatttgatgaggttcattgtcttggtggagaaattggagcagaaatctgggaacatctccttgtcatgatccgatgtccctttttggctctttcagctaccata

SEQ ID NO: 337622 - DNA, 120 bp, Artificial Sequence
  ENSG00000137628_25 (sequence is synthesized)
ctcaccgagtggctacaatcggtaaaatggtactggaaacaagaagacaaaataattgaaaataataccgcttctaaaagacatgtgggtcgtcaggccggctttcccaaagactacttg

SEQ ID NO: 337623 - DNA, 120 bp, Artificial Sequence
  ENSG00000137628_26 (sequence is synthesized)
caagtaaaacaatcgtataaagttagacttgtgctctatggagagaggtataatgatctagagaagcatgtatgttcaataaaacatggtgacattcattttgatcattttcacccatgt

SEQ ID NO: 337624 - DNA, 120 bp, Artificial Sequence
  ENSG00000137628_27 (sequence is synthesized)
gctgcactaacaacagatcatattgaaaggtatggattccctcctgatcttaccctttcacctcgagaaagcatccagctgtatgatgccatgtttcaaatttggaaaagttggcctcgg

SEQ ID NO: 337625 - DNA, 120 bp, Artificial Sequence
  ENSG00000137628_28 (sequence is synthesized)
gcccaggaactgtgcccagaaaacttcattcattttaacaataaattagtcattaaaaagatggatgctaggaaatatgaagagagtctaaaggcagaattaacaagttggattaaaaat

SEQ ID NO: 337626 - DNA, 120 bp, Artificial Sequence
  ENSG00000137628_29 (sequence is synthesized)
ggcaacgtagagcaggccagaatggtacttcagaatcttagtcctgaagcagatttgagtccagaaaacatgatcaccatgtttccacttctagttgaaaaactaaggaaaatggagaag

SEQ ID NO: 337627 - DNA, 120 bp, Artificial Sequence
  ENSG00000137628_30 (sequence is synthesized)
ttacctgcactattttttttattcaagttaggagctgtagaaaacgcagctgaaagtgtgagcactttcctaaagaaaaagcaggagacaaaaaggcctcccaaagctgataaagaagcc

SEQ ID NO: 337628 - DNA, 120 bp, Artificial Sequence
  ENSG00000137628_31 (sequence is synthesized)
catgtcatggctaacaaacttcgaaaagttaaaaaatccatagagaaacaaaagatcatagatgaaaagagccagaaaaaaaccagaaatgtggatcaaagcctaatacatgaagctgaa

SEQ ID NO: 337629 - DNA, 120 bp, Artificial Sequence
  ENSG00000137628_32 (sequence is synthesized)
catgataatctagtgaagtgtctagagaagaacctggaaatcccacaggactgcacatatgctgatcaaaaagcagtggacactgagactttgcagaaggtatttggtcgagtaaaattt

SEQ ID NO: 337630 - DNA, 120 bp, Artificial Sequence
  ENSG00000137628_33 (sequence is synthesized)
gaaagaaaaggtgaagaattgaaagccttggcagaaaggggtattggatatcatcacagtgctatgagtttcaaagaaaaacaattagttgaaatcctctttagaaaaggatatcttagg

SEQ ID NO: 337631 - DNA, 120 bp, Artificial Sequence
  ENSG00000137628_34 (sequence is synthesized)
gtggtgacagctactggaacacttgctttaggtgtcaacatgccttgtaaatctgtggtttttgctcaaaactcagtctatctggatgcgttgaattatagacagatgtctggccgtgct

SEQ ID NO: 337632 - DNA, 120 bp, Artificial Sequence
  ENSG00000137628_35 (sequence is synthesized)
ggaagaagaggtcaagacctgatgggagatgtatatttctttgatattccattccccaaaataggaaaactcataaaatccaatgttcctgagctgagaggacacttccctctcagcata

SEQ ID NO: 337633 - DNA, 120 bp, Artificial Sequence
  ENSG00000137628_36 (sequence is synthesized)
accctggtcctgcgactcatgctgctggcttccaagggagatgacccagaggatgccaaggcaaaggtgctatcagtgctaaagcattcattgctgtccttcaagcaacccagagtcatg

SEQ ID NO: 337634 - DNA, 120 bp, Artificial Sequence
  ENSG00000137628_37 (sequence is synthesized)
gacatgttaaaactttacttcctgttttctttgcagttcctggtgaaagagggctatttagatcaagaaggtaatcctatggggtttgctggacttgtatcacatttgcattatcatgaa

SEQ ID NO: 337635 - DNA, 120 bp, Artificial Sequence
  ENSG00000137628_38 (sequence is synthesized)
ccttctaatcttgtttttgtcagttttcttgtaaatggactcttccatgatctctgtcagccaaccaggaaaggctcaaaacatttttctcaagacgttatggaaaagctagtattagta

SEQ ID NO: 337636 - DNA, 120 bp, Artificial Sequence
  ENSG00000137628_39 (sequence is synthesized)
ttggcacatctctttggaagaagatattttccaccaaagttccaagatgcacacttcgagttttatcaatcaaaggtgttccttgatgatctccctgaggattttagtgatgctttagat

SEQ ID NO: 337637 - DNA, 120 bp, Artificial Sequence
  ENSG00000137628_40 (sequence is synthesized)
gaatataacatgaaaattatggaggactttaccactttcctacgaattgtttccaaactggctgatatgaatcaggaatatcaactcccattgtcaaaaatcaaattcacaggtaaagaa

SEQ ID NO: 337638 - DNA, 120 bp, Artificial Sequence
  ENSG00000137628_41 (sequence is synthesized)
tgtgaagactctcaactcgtatctcatttgatgagctgcaaggaaggaagagtagcaatttcaccatttgtttgtctgtctgggaactttgatgatgatttgcttcgactagaaactcca

SEQ ID NO: 337639 - DNA, 120 bp, Artificial Sequence
  ENSG00000137628_42 (sequence is synthesized)
aaccatgttactctaggcacaatcggtgtcaatcgctctcaggctccagtgctgttgtcacagaaatttgataaccgaggaaggaaaatgtcgcttaatgcctatgcactggatttctac

SEQ ID NO: 337640 - DNA, 120 bp, Artificial Sequence
  ENSG00000137628_43 (sequence is synthesized)
aaacatggttccttgataggattagtccaggataacaggatgaatgaaggagatgcttattatttgttgaaggattttgcactcaccattaaatctatcagtgtttccttgcgtgagcta

SEQ ID NO: 337641 - DNA, 120 bp, Artificial Sequence
  ENSG00000137628_44 (sequence is synthesized)
tgtgaaaatgaagacgacaacgttgtcttagcctttgaacaactgagtacaactttttgggaaaagttaaacaaagtctaaaaacaaagtctatgcaaaccacttaaaaataattccata

SEQ ID NO: 337642 - DNA, 120 bp, Artificial Sequence
  ENSG00000137628_45 (sequence is synthesized)
gtagtttttcaggtcacgtttttgattcttatgcttcttgccagaaatacattatgataaagtggaaatacattacgatgaagtggaaagagcaaacactttggaatcaaacagagttgc

SEQ ID NO: 337643 - DNA, 120 bp, Artificial Sequence
  ENSG00000137628_46 (sequence is synthesized)
aatcaaacctgccatgttctgtcatgaatactcacaaattatttagtatacctgaatcttggtttctttttataactgagtaataatggttacatctcaggtagtttgaggattgactaa

SEQ ID NO: 337644 - DNA, 120 bp, Artificial Sequence
  ENSG00000137628_47 (sequence is synthesized)
aaaaatgcgagaatgttgtatgtgactgaataacaatttttactctgcgaagccaaagtaaatataatattatcagtaactttatccccagtgtcagtatttataaaatgtttattaagg

SEQ ID NO: 337645 - DNA, 120 bp, Artificial Sequence
  ENSG00000137628_48 (sequence is synthesized)
ctagaaaaaatgaatacaatatcctgaaggtgaaatatattctcttcaattagcataaatatgatttacataagttagctatacagctattgagatagtactttctagtaaacttaaact

SEQ ID NO: 337646 - DNA, 120 bp, Artificial Sequence
  ENSG00000137628_49 (sequence is synthesized)
actttttaaacatacattttgtgatgatttaacaaaaatatagagaatgatttgctttattgtaattgtatataagtgactggaaaagcacaaagaaataaagtgggttcgatctgttta

SEQ ID NO: 337647 - DNA, 120 bp, Artificial Sequence
  ENSG00000137628_50 (sequence is synthesized)
atggcagaagggacaggggagatctctgtggtctcttttataacagcattaatcccattcatgagggttcttccttcatgacctaatcatctcccagaggatttgcctccagataccatc

SEQ ID NO: 337648 - DNA, 120 bp, Artificial Sequence
  ENSG00000137628_51 (sequence is synthesized)
acagatcattagctattaatggagtaactggaaagcaatagaactgctacagtgtgctgtgaccccagatgacttctgcaaaggtcatgctgttgtatgagtcttcttaagatgtctaga

SEQ ID NO: 337649 - DNA, 120 bp, Artificial Sequence
  ENSG00000137628_52 (sequence is synthesized)
cttttgtggcaggaatgcagaatgaacataaagacttagattgaaaggtatggattccctcctgatcttaccctttcacctcgagaaagcatccagctgtatgatgccatgtttcaaatt

SEQ ID NO: 337650 - DNA, 120 bp, Artificial Sequence
  ENSG00000137628_53 (sequence is synthesized)
agttttatcaatcaaaggtaaactgtgtgattctgataaaatttagtaatgtaaaaccactaaatagatcttacctaaaatgacttagcagctgtagaattttaattcaaagggcagttc

SEQ ID NO: 337651 - DNA, 120 bp, Artificial Sequence
  ENSG00000137628_54 (sequence is synthesized)
atttgttttatagaataatttgttctttttgtaatcagtgtgatatttaatctgtaattgatgtctccctctgtaaatctaccaaaaagttaaagtctttgtgaaaaaaaagaggataaa

SEQ ID NO: 337652 - DNA, 120 bp, Artificial Sequence
  ENSG00000137628_55 (sequence is synthesized)
tcaccattaaatctatcaggtgtgttatatatttaaatattgattttagattttttaataatttatttataatttgaaaaatgttgagctgttactataagccaggtacatgaaggtgcc

SEQ ID NO: 337653 - DNA, 120 bp, Artificial Sequence
  ENSG00000137634_0 (sequence is synthesized)
acttctgtcttagctgaaacaagcagaaggttgtgaatccatgctaaaggtaaacaaactgcaacttatatctgcaatttattttggtatagacaagaggtatgccagtagcacactggt

SEQ ID NO: 337654 - DNA, 120 bp, Artificial Sequence
  ENSG00000137634_1 (sequence is synthesized)
ggcttcagaagaaattctcaacacctagctcgccagagagtctatgtatgggattgaacaatctgtaaactaaaggatcctaatcatgaaaataagtatgataaattataagtcactatt

SEQ ID NO: 337655 - DNA, 120 bp, Artificial Sequence
  ENSG00000137634_2 (sequence is synthesized)
ggcactgttgtttatattagcctcctggatcatttttacagttttccagaactccacaaaggtttggtctgctctaaacttatccatctccctccattactggaacaactccacaaagtc

SEQ ID NO: 337656 - DNA, 120 bp, Artificial Sequence
  ENSG00000137634_3 (sequence is synthesized)
cttattccctaaaacaccactgatatcattaaagccactaacagagactgaactcagaataaaggaaatcatagagaaactagatcagcagatcccacccagacctttcacccacgtgaa

SEQ ID NO: 337657 - DNA, 120 bp, Artificial Sequence
  ENSG00000137634_4 (sequence is synthesized)
caccaccaccagcgccacacatagcacagccaccatcctcaaccctcgagatacgtactgcaggggagaccagctgcacatcctgctggaggtgagggaccacttgggacgcaggaagca

SEQ ID NO: 337658 - DNA, 120 bp, Artificial Sequence
  ENSG00000137634_5 (sequence is synthesized)
atatggcggggatttcctgagggccaggatgtcttccccagcgctgatggcaggtgcttcaggaaaggtgactgacttcaacaacggcacctacctggtcagcttcactctgttctggga

SEQ ID NO: 337659 - DNA, 120 bp, Artificial Sequence
  ENSG00000137634_6 (sequence is synthesized)
gggccaggtctctctgtctctgctgctcatccaccccagtgaaggggtgtcagctctctggagtgcaaggaaccaaggctatgacagggtgatcttcactggccagtttgtcaatggcac

SEQ ID NO: 337660 - DNA, 120 bp, Artificial Sequence
  ENSG00000137634_7 (sequence is synthesized)
ttcccaagtccactctgaatgtggcctgatcctaaacacaaatgctgaattgtgccagtacctggacaacagagaccaagaaggcttctactgtgtgaggcctcaacacatgccctgtgc

SEQ ID NO: 337661 - DNA, 120 bp, Artificial Sequence
  ENSG00000137634_8 (sequence is synthesized)
tgcactcactcacatgtattctaagaacaagaaagtttcttatcttagcaaacaagaaaagagcctctttgaaaggtcaaatgtgggtgtagagattatggaaaaattcaatacaattag

SEQ ID NO: 337662 - DNA, 120 bp, Artificial Sequence
  ENSG00000137634_9 (sequence is synthesized)
tgcaatgaaagagaaatgcaagtttggaatgacatccacaatccccagtgggcatgtctggagaaacacatggaatcctgtctcctgtagtttggctacagtcaaaatgaaggaatgcct

SEQ ID NO: 337663 - DNA, 120 bp, Artificial Sequence
  ENSG00000137634_10 (sequence is synthesized)
gagaggaaaactcatatacctaatgggagattccacgatccgccagtggatggaatacttcaaagccagtatcaacacactgaagtcagtggatctgcatgaatctggaaaattgcaaca

SEQ ID NO: 337664 - DNA, 120 bp, Artificial Sequence
  ENSG00000137634_11 (sequence is synthesized)
ccagcttgctgtggatttggataggaacatcaacatccagtggcaaaaatattgttatcccttgataggatcaatgacctattcagtcaaagagatggagtacctcacccgggccattga

SEQ ID NO: 337665 - DNA, 120 bp, Artificial Sequence
  ENSG00000137634_12 (sequence is synthesized)
cagaactggaggagaaaaaaatactgtcattgttatttccctgggccagcatttcagaccctttcccattgatgtttttatccgaagggccctcaatgtccacaaagccattcagcatct

SEQ ID NO: 337666 - DNA, 120 bp, Artificial Sequence
  ENSG00000137634_13 (sequence is synthesized)
tcttctgagaagcccagacactatggttatcatcaaaacagaaaacatcagggagatgtacaatgatgcagaaagatttagtgactttcatggttacattcaatatctcatcataaagga

SEQ ID NO: 337667 - DNA, 120 bp, Artificial Sequence
  ENSG00000137634_14 (sequence is synthesized)
cattttccaggatctcagtgtgagtatcattgatgcctgggatataacaattgcatatggcacaaataatgtacacccacctcaacatgtagtcggaaatcagattaatatattattaaa

SEQ ID NO: 337668 - DNA, 120 bp, Artificial Sequence
  ENSG00000137634_15 (sequence is synthesized)
ctatatttgttaaataacacaaaagtctgaaattcattcacttaagtaaaaaaatttattgactgtctactagcaggccagatgctgtgtttggctctgaattcccaactagcaagagca

SEQ ID NO: 337669 - DNA, 120 bp, Artificial Sequence
  ENSG00000137634_16 (sequence is synthesized)
gagaatctacattatggctgatccataagccaccaattcagctaaatgagatgtttctaatctgggcttccacttaaaaataaaactaaaaatactcatgaaaagagcctacccttcttg

SEQ ID NO: 337670 - DNA, 120 bp, Artificial Sequence
  ENSG00000137634_17 (sequence is synthesized)
atcagagccatacccctcttcaccaatgggaagtcaagacacctatgggtaaaagttctctctgatgcatgaaaactcagagtgataaagtaattttaaaataaaaatttggagaaagca

SEQ ID NO: 337671 - DNA, 120 bp, Artificial Sequence
  ENSG00000137642_0 (sequence is synthesized)
agtagcgttcgcccgaacatggcgacacggagcagcaggagggagtcgcgactcccgttcctattcaccctggtcgcactgctgccgcccggagctctctgcgaagtctggacgcagagg

SEQ ID NO: 337672 - DNA, 120 bp, Artificial Sequence
  ENSG00000137642_1 (sequence is synthesized)
gcgaagtctggacgcagaggctgcacggcggcagcgcgcccttgccccaggaccggggcttcctcgtggtgcagggcgacccgcgcgagctgcggctgtgggcgcgcggggatgccaggg

SEQ ID NO: 337673 - DNA, 120 bp, Artificial Sequence
  ENSG00000137642_2 (sequence is synthesized)
aagccgctccggaggaaacggagcgctgccctgcagcccgagcccatcaaggtgtacggacaggttagtctgaatgattcccacaatcagatggtggtgcactgggctggagagaaaagc

SEQ ID NO: 337674 - DNA, 120 bp, Artificial Sequence
  ENSG00000137642_3 (sequence is synthesized)
aacgtgatcgtggccttggcccgagatagcctggcattggcgaggcccaagagcagtgatgtgtacgtgtcttacgactatggaaaatcattcaagaaaatttcagacaagttaaacttt

SEQ ID NO: 337675 - DNA, 120 bp, Artificial Sequence
  ENSG00000137642_4 (sequence is synthesized)
ggcttgggaaataggagtgaagctgttatcgcccagttctaccacagccctgcggacaacaagcggtacatctttgcagacgcttatgcccagtacctctggatcacgtttgacttctgc

SEQ ID NO: 337676 - DNA, 120 bp, Artificial Sequence
  ENSG00000137642_5 (sequence is synthesized)
aacactcttcaaggcttttccatcccatttcgggcagctgatctcctcctacacagtaaggcctccaaccttctcttgggctttgacaggtcccaccccaacaagcagctgtggaagtca

SEQ ID NO: 337677 - DNA, 120 bp, Artificial Sequence
  ENSG00000137642_6 (sequence is synthesized)
gatgactttggccagacctggatcatgattcaggaacatgtcaagtccttttcttggggaattgatccctatgacaaaccaaataccatctacattgaacgacatgaaccctctggctac

SEQ ID NO: 337678 - DNA, 120 bp, Artificial Sequence
  ENSG00000137642_7 (sequence is synthesized)
tccactgtcttccgaagtacagatttcttccagtcccgggaaaaccaggaagtgatccttgaggaagtgagagattttcagcttcgggacaagtacatgtttgctacaaaggtggtgcat

SEQ ID NO: 337679 - DNA, 120 bp, Artificial Sequence
  ENSG00000137642_8 (sequence is synthesized)
ctcttgggcagtgaacagcagtcttctgtccagctctgggtctcctttggccggaagcccatgagagcagcccagtttgtcacaagacatcctattaatgaatattacatcgcagatgcc

SEQ ID NO: 337680 - DNA, 120 bp, Artificial Sequence
  ENSG00000137642_9 (sequence is synthesized)
tccgaggaccaggtgtttgtgtgtgtcagccacagtaacaaccgcaccaatttatacatctcagaggcagaggggctgaagttctccctgtccttggagaacgtgctctattacagccca

SEQ ID NO: 337681 - DNA, 120 bp, Artificial Sequence
  ENSG00000137642_10 (sequence is synthesized)
ggaggggccggcagtgacaccttggtgaggtattttgcaaatgaaccatttgctgacttccaccgagtggaaggattgcaaggagtctacattgctactctgattaatggttctatgaat

SEQ ID NO: 337682 - DNA, 120 bp, Artificial Sequence
  ENSG00000137642_11 (sequence is synthesized)
gaggagaacatgagatcggtcatcacctttgacaaagggggaacctgggagtttcttcaggctccagccttcacgggatatggagagaaaatcaattgtgagctttcccagggctgttcc

SEQ ID NO: 337683 - DNA, 120 bp, Artificial Sequence
  ENSG00000137642_12 (sequence is synthesized)
cttcatctggctcagcgcctcagtcagctcctcaacctccagctccggagaatgcccatcctgtccaaggagtcggctccaggcctcatcatcgccactggctcagtgggaaagaacttg

SEQ ID NO: 337684 - DNA, 120 bp, Artificial Sequence
  ENSG00000137642_13 (sequence is synthesized)
gctagcaagacaaacgtgtacatctctagcagtgctggagccaggtggcgagaggcacttcctggacctcactactacacatggggagaccacggcggaatcatcacggccattgcccag

SEQ ID NO: 337685 - DNA, 120 bp, Artificial Sequence
  ENSG00000137642_14 (sequence is synthesized)
ggcatggaaaccaacgagctaaaatacagtaccaatgaaggggagacctggaaaacattcatcttctctgagaagccagtgtttgtgtatggcctcctcacagaacctggggagaagagc

SEQ ID NO: 337686 - DNA, 120 bp, Artificial Sequence
  ENSG00000137642_15 (sequence is synthesized)
actgtcttcaccatctttggctcgaacaaagagaatgtccacagctggctgatcctccaggtcaatgccacggatgccttgggagttccctgcacagagaatgactacaagctgtggtca

SEQ ID NO: 337687 - DNA, 120 bp, Artificial Sequence
  ENSG00000137642_16 (sequence is synthesized)
ccatctgatgagcgggggaatgagtgtttgctgggacacaagactgttttcaaacggcggaccccccatgccacatgcttcaatggagaggactttgacaggccggtggtcgtgtccaac

SEQ ID NO: 337688 - DNA, 120 bp, Artificial Sequence
  ENSG00000137642_17 (sequence is synthesized)
tgctcctgcacccgggaggactatgagtgtgacttcggtttcaagatgagtgaagatttgtcattagaggtttgtgttccagatccggaattttctggaaagtcatactcccctcctgtg

SEQ ID NO: 337689 - DNA, 120 bp, Artificial Sequence
  ENSG00000137642_18 (sequence is synthesized)
ccttgccctgtgggttctacttacaggagaacgagaggctaccggaagatttctggggacacttgtagcggaggagatgttgaagcgcgactggaaggagagctggtcccctgtcccctg

SEQ ID NO: 337690 - DNA, 120 bp, Artificial Sequence
  ENSG00000137642_19 (sequence is synthesized)
gcagaagagaacgagttcattctgtatgctgtgaggaaatccatctaccgctatgacctggcctcgggagccaccgagcagttgcctctcaccgggctacgggcagcagtggccctggac

SEQ ID NO: 337691 - DNA, 120 bp, Artificial Sequence
  ENSG00000137642_20 (sequence is synthesized)
tttgactatgagcacaactgtttgtattggtccgacctggccttggacgtcatccagcgcctctgtttgaatggaagcacagggcaagaggtgatcatcaattctggcctggagacagta

SEQ ID NO: 337692 - DNA, 120 bp, Artificial Sequence
  ENSG00000137642_21 (sequence is synthesized)
gaagctttggcttttgaacccctcagccagctgctttactgggtagatgcaggcttcaaaaagattgaggtagctaatccagatggcgacttccgactcacaatcgtcaattcctctgtg

SEQ ID NO: 337693 - DNA, 120 bp, Artificial Sequence
  ENSG00000137642_22 (sequence is synthesized)
cttgatcgtcccagggctctggtcctcgtgccccaagagggggtgatgttctggacagactggggagacctgaagcctgggatttatcggagcaatatggatggttctgctgcctatcac

SEQ ID NO: 337694 - DNA, 120 bp, Artificial Sequence
  ENSG00000137642_23 (sequence is synthesized)
ctggtgtctgaggatgtgaagtggcccaatggcatctctgtggacgaccagtggatttactggacggatgcctacctggagtgcatagagcggatcacgttcagtggccagcagcgctct

SEQ ID NO: 337695 - DNA, 120 bp, Artificial Sequence
  ENSG00000137642_24 (sequence is synthesized)
gtcattctggacaacctcccgcacccctatgccattgctgtctttaagaatgaaatctactgggatgactggtcacagctcagcatattccgagcttccaaatacagtgggtcccagatg

SEQ ID NO: 337696 - DNA, 120 bp, Artificial Sequence
  ENSG00000137642_25 (sequence is synthesized)
gagattctggcaaaccagctcacggggctcatggacatgaagattttctacaaggggaagaacactggaagcaatgcctgtgtgcccaggccatgcagcctgctgtgcctgcccaaggcc

SEQ ID NO: 337697 - DNA, 120 bp, Artificial Sequence
  ENSG00000137642_26 (sequence is synthesized)
aacaacagtagaagctgcaggtgtccagaggatgtgtccagcagtgtgcttccatcaggggacctgatgtgtgactgccctcagggctatcagctcaagaacaatacctgtgtcaaacaa

SEQ ID NO: 337698 - DNA, 120 bp, Artificial Sequence
  ENSG00000137642_27 (sequence is synthesized)
gagaacacctgtcttcgcaaccagtatcgctgcagcaacgggaactgtatcaacagcatttggtggtgtgactttgacaacgactgtggagacatgagcgatgagagaaactgccctacc

SEQ ID NO: 337699 - DNA, 120 bp, Artificial Sequence
  ENSG00000137642_28 (sequence is synthesized)
accatctgtgacctggacacccagtttcgttgccaggagtctgggacttgtatcccactgtcctataaatgtgaccttgaggatgactgtggagacaacagtgatgaaagtcattgtgaa

SEQ ID NO: 337700 - DNA, 120 bp, Artificial Sequence
  ENSG00000137642_29 (sequence is synthesized)
atgcaccagtgccggagtgacgagtacaactgcagttccggcatgtgcatccgctcctcctgggtatgtgacggggacaacgactgcagggactggtctgatgaagccaactgtaccgcc

SEQ ID NO: 337701 - DNA, 120 bp, Artificial Sequence
  ENSG00000137642_30 (sequence is synthesized)
atctatcacacctgtgaggcctccaacttccagtgccgaaacgggcactgcatcccccagcggtgggcgtgtgacggggatacggactgccaggatggttccgatgaggatccagtcaac

SEQ ID NO: 337702 - DNA, 120 bp, Artificial Sequence
  ENSG00000137642_31 (sequence is synthesized)
tgtgagaagaagtgcaatggattccgctgcccaaacggcacttgcatcccatccagcaaacattgtgatggtctgcgtgattgctctgatggctccgatgaacagcactgcgagcccctc

SEQ ID NO: 337703 - DNA, 120 bp, Artificial Sequence
  ENSG00000137642_32 (sequence is synthesized)
tgtacgcacttcatggactttgtgtgtaagaaccgccagcagtgcctgttccactccatggtctgtgacggaatcatccagtgccgcgacgggtccgatgaggatgcggcgtttgcagga

SEQ ID NO: 337704 - DNA, 120 bp, Artificial Sequence
  ENSG00000137642_33 (sequence is synthesized)
tgctcccaagatcctgagttccacaaggtatgtgatgagttcggtttccagtgtcagaatggagtgtgcatcagtttgatttggaagtgcgacgggatggatgattgcggcgattattct

SEQ ID NO: 337705 - DNA, 120 bp, Artificial Sequence
  ENSG00000137642_34 (sequence is synthesized)
gatgaagccaactgcgaaaaccccacagaagccccaaactgctcccgctacttccagtttcggtgtgagaatggccactgcatccccaacagatggaaatgtgacagggagaacgactgt

SEQ ID NO: 337706 - DNA, 120 bp, Artificial Sequence
  ENSG00000137642_35 (sequence is synthesized)
ggggactggtctgatgagaaggattgtggagattcacatattcttcccttctcgactcctgggccctccacgtgtctgcccaattactaccgctgcagcagtgggacctgcgtgatggac

SEQ ID NO: 337707 - DNA, 120 bp, Artificial Sequence
  ENSG00000137642_36 (sequence is synthesized)
acctgggtgtgcgacgggtaccgagattgtgcagatggctctgacgaggaagcctgccccttgcttgcaaacgtcactgctgcctccactcccacccaacttgggcgatgtgaccgattt

SEQ ID NO: 337708 - DNA, 120 bp, Artificial Sequence
  ENSG00000137642_37 (sequence is synthesized)
gagttcgaatgccaccaaccgaagacgtgtattcccaactggaagcgctgtgacggccaccaagattgccaggatggccgggacgaggccaattgccccacacacagcaccttgacttgc

SEQ ID NO: 337709 - DNA, 120 bp, Artificial Sequence
  ENSG00000137642_38 (sequence is synthesized)
atgagcagggagttccagtgcgaggacggggaggcctgcattgtgctctcggagcgctgcgacggcttcctggactgctcggacgagagcgatgaaaaggcctgcagtgatgagttgact

SEQ ID NO: 337710 - DNA, 120 bp, Artificial Sequence
  ENSG00000137642_39 (sequence is synthesized)
gtgtacaaagtacagaatcttcagtggacagctgacttctctggggatgtgactttgacctggatgaggcccaaaaaaatgccctctgcttcttgtgtatataatgtctactacagggtg

SEQ ID NO: 337711 - DNA, 120 bp, Artificial Sequence
  ENSG00000137642_40 (sequence is synthesized)
gttggagagagcatatggaagactctggagacccacagcaataagacaaacactgtattaaaagtcttgaaaccagataccacgtatcaggttaaagtacaggttcagtgtctcagcaag

SEQ ID NO: 337712 - DNA, 120 bp, Artificial Sequence
  ENSG00000137642_41 (sequence is synthesized)
gcacacaacaccaatgactttgtgaccctgaggaccccagagggattgccagatgcccctcgaaatctccagctgtcactccccagggaagcagaaggtgtgattgtaggccactgggct

SEQ ID NO: 337713 - DNA, 120 bp, Artificial Sequence
  ENSG00000137642_42 (sequence is synthesized)
cctcccatccacacccatggcctcatccgtgagtacattgtagaatacagcaggagtggttccaagatgtgggcctcccagagggctgctagtaactttacagaaatcaagaacttattg

SEQ ID NO: 337714 - DNA, 120 bp, Artificial Sequence
  ENSG00000137642_43 (sequence is synthesized)
gtcaacactctatacaccgtcagagtggctgcggtgactagtcgtggaataggaaactggagcgattctaaatccattaccaccataaaaggaaaagtgatcccaccaccagatatccac

SEQ ID NO: 337715 - DNA, 120 bp, Artificial Sequence
  ENSG00000137642_44 (sequence is synthesized)
attgacagctatggtgaaaattatctaagcttcaccctgaccatggagagtgatatcaaggtgaatggctatgtggtgaaccttttctgggcatttgacacccacaagcaagagaggaga

SEQ ID NO: 337716 - DNA, 120 bp, Artificial Sequence
  ENSG00000137642_45 (sequence is synthesized)
tatgagatttctgcctgggccaagactgacttgggggatagccctctggcatttgagcatgttatgaccagaggggttcgcccacctgcacctagcctcaaggccaaagccatcaaccag

SEQ ID NO: 337717 - DNA, 120 bp, Artificial Sequence
  ENSG00000137642_46 (sequence is synthesized)
actgcagtggaatgtacctggaccggcccccggaatgtggtttatggtattttctatgccacgtcctttcttgacctctatcgcaacccgaagagcttgactacttcactccacaacaag

SEQ ID NO: 337718 - DNA, 120 bp, Artificial Sequence
  ENSG00000137642_47 (sequence is synthesized)
acggtcattgtcagtaaggatgagcagtatttgtttctggtccgtgtagtggtaccctaccaggggccatcctctgactacgttgtagtgaagatgatcccggacagcaggcttccaccc

SEQ ID NO: 337719 - DNA, 120 bp, Artificial Sequence
  ENSG00000137642_48 (sequence is synthesized)
cgtcacctgcatgtggttcatacgggcaaaacctccgtggtcatcaagtgggaatcaccgtatgactctcctgaccaggacttgttgtatgcagttgcagtcaaagatctcataagaaag

SEQ ID NO: 337720 - DNA, 120 bp, Artificial Sequence
  ENSG00000137642_49 (sequence is synthesized)
actgacaggagctacaaagtaaaatcccgtaacagcactgtggaatacacccttaacaagttggagcctggcgggaaataccacatcattgtccaactggggaacatgagcaaagattcc

SEQ ID NO: 337721 - DNA, 120 bp, Artificial Sequence
  ENSG00000137642_50 (sequence is synthesized)
agcataaaaattaccacagtttcattatcagcacctgatgccttaaaaatcataacagaaaatgatcatgttcttctgttttggaaaagcctggctttaaaggaaaagcattttaatgaa

SEQ ID NO: 337722 - DNA, 120 bp, Artificial Sequence
  ENSG00000137642_51 (sequence is synthesized)
agcaggggctatgagatacacatgtttgatagtgccatgaatatcacagcttaccttgggaatactactgacaatttctttaaaatttccaacctgaagatgggtcataattacacgttc

SEQ ID NO: 337723 - DNA, 120 bp, Artificial Sequence
  ENSG00000137642_52 (sequence is synthesized)
accgtccaagcaagatgcctttttggcaaccagatctgtggggagcctgccatcctgctgtacgatgagctggggtctggtgcagatgcatctgcaacgcaggctgccagatctacggat

SEQ ID NO: 337724 - DNA, 120 bp, Artificial Sequence
  ENSG00000137642_53 (sequence is synthesized)
gttgctgctgtggtggtgcccatcttattcctgatactgctgagcctgggggtggggtttgccatcctgtacacgaagcaccggaggctgcagagcagcttcaccgccttcgccaacagc

SEQ ID NO: 337725 - DNA, 120 bp, Artificial Sequence
  ENSG00000137642_54 (sequence is synthesized)
cactacagctccaggctggggtccgcaatcttctcctctggggatgacctgggggaagatgatgaagatgcccctatgataactggattttcagatgacgtccccatggtgatagcctga

SEQ ID NO: 337726 - DNA, 120 bp, Artificial Sequence
  ENSG00000137642_55 (sequence is synthesized)
aagagctttcctcactagaaaccaaatggtgtaaatattttatttgataaagatagttgatggtttattttaaaagatgcactttgagttgcaatatgttatttttatatgggccaaaaa

SEQ ID NO: 337727 - DNA, 120 bp, Artificial Sequence
  ENSG00000137642_56 (sequence is synthesized)
aaacaaaaaaaaaaaaaaggaaagaaaggaatgaataaactttgtagtaatcaactgtgaacttcaaaccaggttgattttagtaacccaattgctttgatttgacattaatgtagtctt

SEQ ID NO: 337728 - DNA, 120 bp, Artificial Sequence
  ENSG00000137642_57 (sequence is synthesized)
tcttacagggctgtgcttgctgggcatgcttttacgtctgtgagataatttcggttcagtaaattggccaatctttttatttttctaagacacagaaatgtatttaataaaaacctcgag

SEQ ID NO: 337729 - DNA, 120 bp, Artificial Sequence
  ENSG00000137642_58 (sequence is synthesized)
agagtgatgggtggaaccccttctccttgaaagtgtgtacagatattccattttgtttggatatagtttataggaaagtgtgtggatgtattatggcggaaggtttctttatgttatttt

SEQ ID NO: 337730 - DNA, 120 bp, Artificial Sequence
  ENSG00000137642_59 (sequence is synthesized)
gttaatttattgggactctgtgtaaggccaggctttagtggtcattagacaccacatgtgttatgagccccttacccatagggttgggggtgggaagagaagcatatttttttgccattc

SEQ ID NO: 337731 - DNA, 120 bp, Artificial Sequence
  ENSG00000137642_60 (sequence is synthesized)
cggaagcaatccatttttattcacttgtgtgtcatgtaatggtctttggcaggagagagcactgagtcattgctggagttcagttcaacagagctgcagcttgggaagccctgtaagccc

SEQ ID NO: 337732 - DNA, 120 bp, Artificial Sequence
  ENSG00000137642_61 (sequence is synthesized)
acagcttcctctcttatattaattgatggaattttactgtatgtgcctctgtacaagatgtagctttgagagctacaaaatgataacactgctttattacacactggtttcattgtcatt

SEQ ID NO: 337733 - DNA, 120 bp, Artificial Sequence
  ENSG00000137642_62 (sequence is synthesized)
gcaaaaacttaccctggttgtgggggagagttctagatctgtgccatgatccatacactggctaatagagtacataatttttccattttccattttttgtttttacttactactgaagga

SEQ ID NO: 337734 - DNA, 120 bp, Artificial Sequence
  ENSG00000137642_63 (sequence is synthesized)
tctcagatgtaaaattatgtatttggtttgagatggccacttattgtccttaaaaatccatactgatatatgcagtcattttgaattggacagtgccttctctttttttttctcctcttc

SEQ ID NO: 337735 - DNA, 120 bp, Artificial Sequence
  ENSG00000137642_64 (sequence is synthesized)
ttccatctccctcacccatgcccccacccaatctaaagagacagtgctgtacattctcatagagatagagaagatctaaaaagttgagactactcaatccagttaacaacagcaggagca

SEQ ID NO: 337736 - DNA, 120 bp, Artificial Sequence
  ENSG00000137642_65 (sequence is synthesized)
ctagagtttgttcatttattctctctgtaaaacaagctgtgctttttttcttctgcctttaaaatgccacccgtgtattcaaaccatggccacttgatacttatgtagaatccatcgtgg

SEQ ID NO: 337737 - DNA, 120 bp, Artificial Sequence
  ENSG00000137642_66 (sequence is synthesized)
gctgatgcaagccctttatttaggcttagtgttgtgggcaccaatgtcgagcatcgttgtgacttgtgctgtatgattctcactgaagaatttcctttcagccaagaagcagtgaggtct

SEQ ID NO: 337738 - DNA, 120 bp, Artificial Sequence
  ENSG00000137642_67 (sequence is synthesized)
gggaatattccaaagtcatgtctctgaatatgtgtccttgacgtgcaagctttgtaaaaccccatccccgcttaggtgcgaggcatcaccttctcacaagtgtttagtttcttttaacca

SEQ ID NO: 337739 - DNA, 120 bp, Artificial Sequence
  ENSG00000137642_68 (sequence is synthesized)
caagtatcattcttgggtgataatatagtttcattctacttagggattgtttagaaaacaaagaaagagccaattaaattttttagtttttgaaatttttatttatatgtatacttagat

SEQ ID NO: 337740 - DNA, 120 bp, Artificial Sequence
  ENSG00000137642_69 (sequence is synthesized)
gagtattttaagctgtcgacctttagtttgccatacgggtaggactgtatttcatgttaacaactggtggtaatgataagccttcttctagcgtattttctcttctttcctgtcactttc

SEQ ID NO: 337741 - DNA, 120 bp, Artificial Sequence
  ENSG00000137642_70 (sequence is synthesized)
ctaagtttttttttttaaagactggaattttttttggctttatcttgtcttaccgtagagatttgttcaaaactctaagccctaccacctcccctttaataagctctttaaatagttgaa

SEQ ID NO: 337742 - DNA, 120 bp, Artificial Sequence
  ENSG00000137642_71 (sequence is synthesized)
tcattaacaacctggtgggaggcaagtcatttaattgaaccactaggaagtgtattttcttttctttttctgccaactttttggtggcatttgtaaaagctgatataaaaggctctgaga

SEQ ID NO: 337743 - DNA, 120 bp, Artificial Sequence
  ENSG00000137642_72 (sequence is synthesized)
tgttattttcagttattccataggcaagcctttttacagagcatatgtctccagttggcagcttgagatatttccgagcatccggttctagctaccagtgcctcccaatgcttagtgcac

SEQ ID NO: 337744 - DNA, 120 bp, Artificial Sequence
  ENSG00000137642_73 (sequence is synthesized)
agtactgtagactggccatcacccctctccttggaaaatgccactgtgctgtttgaaaaaaagcagccttttagggctagagtattttatataaacagaagagctaagttcctgaagact

SEQ ID NO: 337745 - DNA, 120 bp, Artificial Sequence
  ENSG00000137642_74 (sequence is synthesized)
aagctagatagctgcagctatatgtaaattgtatatttttatgaacttttgaagcacacactcctgtttccctctgtgtagctttgtggggatttcatgtatatatgctgtctgaaagaa

SEQ ID NO: 337746 - DNA, 120 bp, Artificial Sequence
  ENSG00000137642_75 (sequence is synthesized)
tccagaggttggagtgccaatagaaaatgaaaacaaatgccttgtactacaggcagcctctgaaggtgaccacataactgtcttcactgtgaccaatcggagtccctgcttgcttgtgaa

SEQ ID NO: 337747 - DNA, 120 bp, Artificial Sequence
  ENSG00000137642_76 (sequence is synthesized)
gaaggggcttttgtaccttgttggagatgccacctcagaagttcacactgtgcaggaaaaaggttttattctctcctggcatacattagaatgtcagatgcttgcatccatgtggaccac

SEQ ID NO: 337748 - DNA, 120 bp, Artificial Sequence
  ENSG00000137642_77 (sequence is synthesized)
gatgggcctctaaaaattggtgggcagggggtttgcttatgagttttctctggaaaccgattttactcctggatgtattgaatgccccttgagctttatgagatacgagtccacatggat

SEQ ID NO: 337749 - DNA, 120 bp, Artificial Sequence
  ENSG00000137642_78 (sequence is synthesized)
aaaatgttagagagtggagttctacagaggattccaggaagaggccatgtctgtgcagtcctagttccagacaggtgagaagctccaggaactactggctaccttgacaagctgggtaaa

SEQ ID NO: 337750 - DNA, 120 bp, Artificial Sequence
  ENSG00000137642_79 (sequence is synthesized)
tagttatcattctgggtaactggttgaaactctgacttttggacaagtaattcctggggttctgtctttggtagcatcaccagggatatttgggtgggacagacagaagacacacagctg

SEQ ID NO: 337751 - DNA, 120 bp, Artificial Sequence
  ENSG00000137642_80 (sequence is synthesized)
cctgttctctcctgcccatcatgtttggcccactagatgaagctgtactcagcaatttagggaatgtaacccttctcagaactggccattttcaggggaagcttgggagagcaatagtat

SEQ ID NO: 337752 - DNA, 120 bp, Artificial Sequence
  ENSG00000137642_81 (sequence is synthesized)
ggtgagccccttagagatgagcgcctactccttcttggcgaatgctgccttcagatgcttaccaagtggtcactgcatctagtaagattatatttccagtacacttccttagggcagaaa

SEQ ID NO: 337753 - DNA, 120 bp, Artificial Sequence
  ENSG00000137642_82 (sequence is synthesized)
caccatcctatcaggtttggtcagtcccttcttcatgaagggagtcatggggaattcctgaaaattttcttccttctgcagacagttggatgagtcccttagagaaggcatccagagaca

SEQ ID NO: 337754 - DNA, 120 bp, Artificial Sequence
  ENSG00000137642_83 (sequence is synthesized)
taactaaactgaatatcatcccatattgattttaggaattgactctaaaactctgtgcagaatcttgtgttgggattgtatcttgacattcctgttgtgttatttttcttaactggagtg

SEQ ID NO: 337755 - DNA, 120 bp, Artificial Sequence
  ENSG00000137642_84 (sequence is synthesized)
tgtgctgcctttcaggtacaatttttgtgtaataaaagccagtgcattaagtttatatagactactttctatgcaagactgagatatggaatagataggaagagatatgtactgctgggt

SEQ ID NO: 337756 - DNA, 120 bp, Artificial Sequence
  ENSG00000137642_85 (sequence is synthesized)
acatggacagtaagtgtgttttcagatggagtaccagcaccgaaaatgggttgagggaggatgggttgtatgtatgtttctgcccactaattttgagcagccatattatgaattaaatcg

SEQ ID NO: 337757 - DNA, 120 bp, Artificial Sequence
  ENSG00000137642_86 (sequence is synthesized)
tcacagccaagtaataacccaagaatggtatgagtttcatgtgtaatagctcaaatggaataagcatgaatgctggagtggaccattatcctcaaatattctatgtcacttctcatttaa

SEQ ID NO: 337758 - DNA, 120 bp, Artificial Sequence
  ENSG00000137642_87 (sequence is synthesized)
agactcttgttatgaactattagaaactttaggcaaaatcaaaagtatttgcggcaaaataaaggcctattctactcttatttaaagtgaaacactgtatacttgtttctctccaaagcg

SEQ ID NO: 337759 - DNA, 120 bp, Artificial Sequence
  ENSG00000137642_88 (sequence is synthesized)
aaattaagtatttataatttcaattgcctcgataagtttccaagtcactgaaatctgctgaaggttttactgtattgttgcacaactttaagataatttttgtctcaatgtcaacttttt

SEQ ID NO: 337760 - DNA, 120 bp, Artificial Sequence
  ENSG00000137642_89 (sequence is synthesized)
tcactgaataaaaatttaactgggtcaagaaaacacctctttgaaaatccactgtctctgtgtgtctcgagctgttctttagagcgcaataaagatggctgacgcagtctccaaacccca

SEQ ID NO: 337761 - DNA, 120 bp, Artificial Sequence
  ENSG00000137642_90 (sequence is synthesized)
acagaaagtcccgagttatgtttcctccgttttgggagctcagcactgattttactctctctgactgagcatctcacggtgatcagctcatgcagacctctcggcactccttttctcaaa

SEQ ID NO: 337762 - DNA, 120 bp, Artificial Sequence
  ENSG00000137642_91 (sequence is synthesized)
ccacaggctgtgtctgtaggagtcctctgtttcttgaaagttctacttcctggcctcctctatcactgcttcctaaccttcttcccatcatagcaagcatagaaaataatatatgtggag

SEQ ID NO: 337763 - DNA, 120 bp, Artificial Sequence
  ENSG00000137642_92 (sequence is synthesized)
agcactgggatgaatggacaaggatgctgttgtcaagaggcaagcagctctaagggtctgagggtctcagaatctcagcccacctgtaacccatttgcagcacactgactggaagctgtt

SEQ ID NO: 337764 - DNA, 120 bp, Artificial Sequence
  ENSG00000137642_93 (sequence is synthesized)
atgtgtctggaaagtttactaacgtaaaacatctcatcccttgccagtcctgccagttgaataaagggttacccttcatgggactgacttggcagggggtcgtttgaacagttcctagca

SEQ ID NO: 337765 - DNA, 120 bp, Artificial Sequence
  ENSG00000137642_94 (sequence is synthesized)
atgatgttagctctgttccctttccttgtcagtttcctttcttgcctaataagccggcacctggactgccttgtgtgaatggggcggcttctttgcttctgccgttggaggcaacaggag

SEQ ID NO: 337766 - DNA, 120 bp, Artificial Sequence
  ENSG00000137642_95 (sequence is synthesized)
tggacccatcagcataccctgcgatagtcactgagtgtcggtccacacttggtgacacaggattataccgggcgtcacaaggggacagctgttagtctgggaagctgtcctcaaaatgct

SEQ ID NO: 337767 - DNA, 120 bp, Artificial Sequence
  ENSG00000137642_96 (sequence is synthesized)
taaactcctcccagatccttttcctcagagcactttgggttcagaagagaaagcagacactgaagttcactgtgctagtgtagggtatagataactcaaactggggaacccaaactaccc

SEQ ID NO: 337768 - DNA, 120 bp, Artificial Sequence
  ENSG00000137642_97 (sequence is synthesized)
acttagcttttgagtaggtaataagagtcttctcctgagaagctttgttttcctaatttggctacgttcaaacgaccactaaaataaatgtgaggatccatcgatgggtagaaggtggcc

SEQ ID NO: 337769 - DNA, 120 bp, Artificial Sequence
  ENSG00000137642_98 (sequence is synthesized)
ctaggtttcacagctgattatggtggctgcctggctatggcattgaccttctcagctagagggttgtggtagggttgaggggtgggtagagtggtgggatatggggtcaggtgaaaatgt

SEQ ID NO: 337770 - DNA, 120 bp, Artificial Sequence
  ENSG00000137642_99 (sequence is synthesized)
gttggaactcaccaaggcctgactgttttgtctctaggggaagatgatgaagatgcccctatgataactggattttcagatgacgtccccatggtgatagcctgaaagagctttcctcac

SEQ ID NO: 337771 - DNA, 120 bp, Artificial Sequence
  ENSG00000137642_100 (sequence is synthesized)
gggctctgcgtttccatcaagctcccaagagatgtggatgctgcttatctgcacattcgccctttgagcagcaaggcttagaacagagaagacagtcatttccttagaaaggtgtgtgct

SEQ ID NO: 337772 - DNA, 120 bp, Artificial Sequence
  ENSG00000137642_101 (sequence is synthesized)
ttatttgagtaatttacttattgatactgctttgtccagatcatcatgccctggaaactggggcttacatggttctagctcctctttcagaccacttgaaaattgtcccatgagtcagag

SEQ ID NO: 337773 - DNA, 120 bp, Artificial Sequence
  ENSG00000137642_102 (sequence is synthesized)
gaaggaacagcgcattgtgactagaagttggggcaggtttcgcagatgggtcaggtcagggaaataggcaggcatggagggggcatgtctgtagcagaagctgagtagccatctttggca

SEQ ID NO: 337774 - DNA, 120 bp, Artificial Sequence
  ENSG00000137642_103 (sequence is synthesized)
agtctgatctggctgaagacaggatgcaagtcactggttatactgagcagaagttttcagcacagtaggcgccccaaagcttgccacttgacccttgagagcttctcgctgtcctttccg

SEQ ID NO: 337775 - DNA, 120 bp, Artificial Sequence
  ENSG00000137642_104 (sequence is synthesized)
tatatcttttttctaaaatcagaataatgccataggtagtattgtatcctgcccttttcacttcacataaaattgtgagaattttccagtgtcatcaaatatttttgaaacaacctttag

SEQ ID NO: 337776 - DNA, 120 bp, Artificial Sequence
  ENSG00000137642_105 (sequence is synthesized)
tgcctgcacagtagttgatggaatgcacattatttaattattatcctgttactagacaatcaaattacattcagttttttcctgctgtaacactgtgatggggatccttgttaaacacac

SEQ ID NO: 337777 - DNA, 120 bp, Artificial Sequence
  ENSG00000137642_106 (sequence is synthesized)
ttttgagtctttctctgacttcatgggataactggattgaagggtatgatttccaaggttcttgttatacaaggccaaatggcttccaggagcgttgtaccaactcctatccgcggatgg

SEQ ID NO: 337778 - DNA, 120 bp, Artificial Sequence
  ENSG00000137642_107 (sequence is synthesized)
gcagctttaaagaaattacccagtgcttgtgcagtgtgttacgtaccgtcatcatcagtacataaacgttgaatgaatttgtcatctaatgacagtcctacagcacatgggactcattta

SEQ ID NO: 337779 - DNA, 120 bp, Artificial Sequence
  ENSG00000137642_108 (sequence is synthesized)
agtcaagagattactatttttttttaaaaaagtgcatgtaccaagacacgttcttgactaacacccccaacttcctcctggaatctccttttcctgttttcacagttggcaatctgacag

SEQ ID NO: 337780 - DNA, 120 bp, Artificial Sequence
  ENSG00000137642_109 (sequence is synthesized)
aaacaaaaaacaaaaaaaacgaacggctagatctagtgaagctaaaataccaggactagggtggttccttcccccatgaagaacaacttgagtcttcacatgtaattattctgcctcagc

SEQ ID NO: 337781 - DNA, 120 bp, Artificial Sequence
  ENSG00000137642_110 (sequence is synthesized)
ctggtgcctttttatccttaaccatataattaaatggttcacagctacagtgcaaataaagagttggtgttaacagaatatgtatgccctgtaattttcagctttattggatttcctggt

SEQ ID NO: 337782 - DNA, 120 bp, Artificial Sequence
  ENSG00000137642_111 (sequence is synthesized)
gctaagcgctaatgctgaggcgctcacagtggaagaacaaccttcttgtgggagagttggataccttggaaacatattcactttccatccacctaagatcttcctcttccagcaccgcca

SEQ ID NO: 337783 - DNA, 120 bp, Artificial Sequence
  ENSG00000137642_112 (sequence is synthesized)
tcccctctactggccctctgcatagccgacttcatcattgttacctgtgcccatgtggttcctcaagctgagatccgctttccatagtgttccttcttatctgtccctcctcacagcctc

SEQ ID NO: 337784 - DNA, 120 bp, Artificial Sequence
  ENSG00000137642_113 (sequence is synthesized)
tccattgatgaatttgtgttgggacaagttgggacaagcaaccttcagagtctttctgccatttacttaactgccatttagtgtcatgaccttggcttcagaatgggttgatataagaaa

SEQ ID NO: 337785 - DNA, 84 bp, Artificial Sequence
  ENSG00000137642_114 (sequence is synthesized)
tctgtctgtgggcttatatgcttcttgtcttgtagtctttgatcttgaaaatatttttgttcgttgtcccatatttaacgatct

SEQ ID NO: 337786 - DNA, 120 bp, Artificial Sequence
  ENSG00000137642_115 (sequence is synthesized)
ttgaaaatatttttgttcgttgtcccatatttaacgatcttcagatcaaatctttttatgagctcaggacttggaaaaggtagtctttcctgatgggtggatgtattttctgtagttaga

SEQ ID NO: 337787 - DNA, 120 bp, Artificial Sequence
  ENSG00000137642_116 (sequence is synthesized)
atccttaatttccatggcctaattatctttccagtgtttcctctttctacctttattaattggttctcgtccttttattcttcattcacttttttgtttcattgaatctataaattaaat

SEQ ID NO: 337788 - DNA, 120 bp, Artificial Sequence
  ENSG00000137642_117 (sequence is synthesized)
atggtctcgtttgtttttagaagtaggtggagtacaactaaatattagctaatggtagcacaagtagaacctgtttaaaatttttaaaaaacaacctgttcactgtaagaatgagatacc

SEQ ID NO: 337789 - DNA, 120 bp, Artificial Sequence
  ENSG00000137642_118 (sequence is synthesized)
caaggaaagaacaggaaagaggtgtatttttaatcctgccttttgtatttagtgtgccccatgactagctgttcatctaacatgcttcttggttctcggcaggtgaatggctatgtggtg

SEQ ID NO: 337790 - DNA, 120 bp, Artificial Sequence
  ENSG00000137642_119 (sequence is synthesized)
cctgtgcagacccctcccggccacctttatggaaccaaggttgtcaggcagaagggctcttggccaacatcttgccccttcacgttcaccttccccttggaagtggggtgggggagggag

SEQ ID NO: 337791 - DNA, 120 bp, Artificial Sequence
  ENSG00000137642_120 (sequence is synthesized)
ggcactccttcctggagctcccagccttcattgtgccgacttcctcttcactgctccagccgcacacacccccttcattaaccactgcacagttggaataggttggaacatattaaataa

SEQ ID NO: 337792 - DNA, 120 bp, Artificial Sequence
  ENSG00000137642_121 (sequence is synthesized)
gatgttgctagagtttttttttttttctggcaaggaaataatgaaagaaatgtaaatacagacacgaatattgaattgttagattaggtttgcaagaaacaattgttctctggcccatct

SEQ ID NO: 337793 - DNA, 120 bp, Artificial Sequence
  ENSG00000137642_122 (sequence is synthesized)
tgatgaataccctgtcagggtgaatgcctggggagtgacagagctttctagtgaagcagagacctggcctgcgccacctctcccgacaccagggagcaaccctgagcctgttgaggctcc

SEQ ID NO: 337794 - DNA, 120 bp, Artificial Sequence
  ENSG00000137642_123 (sequence is synthesized)
tcatggagacctagactgagggaagtccagtctgtttcctttgccaaaaactgattcctaggtttcattttcaagttcagacttaccctgggatttttaacatgaaaagtctaccgtttt

SEQ ID NO: 337795 - DNA, 120 bp, Artificial Sequence
  ENSG00000137642_124 (sequence is synthesized)
caaggagactggcccctaccccagcaggatgggacgtggggcatggctttgccctagagccctggtggtacaaatctattagtgaatcatcacagagcctgtttgtttaagtcaatagga

SEQ ID NO: 337796 - DNA, 120 bp, Artificial Sequence
  ENSG00000137642_125 (sequence is synthesized)
aggggccatgtttgttaggttataaatgccgaaacggctttgcaaataactttaaaaaatgttaaatgtatatggaaagttgtttttctccctcactctctttttcacttaagtgaaaaa

SEQ ID NO: 337797 - DNA, 120 bp, Artificial Sequence
  ENSG00000137642_126 (sequence is synthesized)
agttcagagtgactttggtgccaagtagggggaaataattgcaatctcgttaattagtggtctgatttcacatcctcttatgtaaggcaagcaagtggtcttaagtaataatgctaatga

SEQ ID NO: 337798 - DNA, 120 bp, Artificial Sequence
  ENSG00000137642_127 (sequence is synthesized)
aatcaatgttgataccccaacaaaggtctcccttccaagagattatctaaataaccaacaaggcagtgattaggagtctaatgtaattaccatatttgcatgcacaaggcccttggtcta

SEQ ID NO: 337799 - DNA, 120 bp, Artificial Sequence
  ENSG00000137642_128 (sequence is synthesized)
tcagctcatggcaagtagtggggaagcaatcaggcatcacgcacatgcagaaacgtctcacaccagacaggcagtttgtgtagctgtggctatcgcccagctttttttggtgggtggggc

SEQ ID NO: 337800 - DNA, 120 bp, Artificial Sequence
  ENSG00000137642_129 (sequence is synthesized)
atttagagaaaatattatacaaaccctttcaaatgactttcagtatgaccggaaaatggagaaacgtagtttagaaaaacatcacacaactttcttctccccaacacacgcacatttttg

SEQ ID NO: 337801 - DNA, 120 bp, Artificial Sequence
  ENSG00000137642_130 (sequence is synthesized)
ggtgtctctgtagtgctttagatagagtctttttggggtgactgagtgtctttttcctcctagtattgagcatttcttctaatgcagacatacaaagggatttccaaaggccatcatgcg

SEQ ID NO: 337802 - DNA, 120 bp, Artificial Sequence
  ENSG00000137642_131 (sequence is synthesized)
cagccctttgtgagtagtcaaaatatctaaaatagaaggagtccttccttctcaccaaagctgaagatgattttgtgcatgttcacttacggggttttaaagaaagcaccatgctgactc

SEQ ID NO: 337803 - DNA, 120 bp, Artificial Sequence
  ENSG00000137642_132 (sequence is synthesized)
ttgttattctcccagtggcactggcaaactgtgtgtaggtggttttttatcttgtactagagctgatattagtaataactgatggcttgccaagggcaggacactctagagtgttcactg

SEQ ID NO: 337804 - DNA, 120 bp, Artificial Sequence
  ENSG00000137642_133 (sequence is synthesized)
ctttgcgtacatcagctcatctaattgaacagtcagaacaactacaagaaaggataaggaactggaatgaggttatgtcacttgtcccaggccacacaatcagtaagtgacagagctggc

SEQ ID NO: 337805 - DNA, 120 bp, Artificial Sequence
  ENSG00000137642_134 (sequence is synthesized)
cctggaacctgatctgcctgactccaaagcctgtgctcttaaccactgtgctccacgcttctctctgggctgagacacatgcggcctactggaccgccctgcttgccgggggtggcgggc

SEQ ID NO: 337806 - DNA, 120 bp, Artificial Sequence
  ENSG00000137642_135 (sequence is synthesized)
tcagcatcttgcacgagtgcctcatgagggcagagatctggtctgtttttctctactctatcacgggcatctagtagagactaaggaaataattgatgattgagtgaatcgaagcagtta

SEQ ID NO: 337807 - DNA, 120 bp, Artificial Sequence
  ENSG00000137642_136 (sequence is synthesized)
aatgaagggttctggcatactttgggagatggactacaactcattttccagagtggttttcctgaccttagccttgacactggggacttgcatttctggacttccaggtattaaaaccag

SEQ ID NO: 337808 - DNA, 120 bp, Artificial Sequence
  ENSG00000137642_137 (sequence is synthesized)
atggacactgtggcatgcaataggactggaagattttactttaacctaagcctgtgaggaataggctctgggtcatggagagtcactatctagtcccctctaaaatctggagcctttgag

SEQ ID NO: 337809 - DNA, 120 bp, Artificial Sequence
  ENSG00000137642_138 (sequence is synthesized)
atcagggcccaaggcggccaaacgtagtgccaccagatggtctttggagctgaatgcttgcaggtattagagaaagcctgctgaattcacactctcctagaatttttattgttgtatctc

SEQ ID NO: 337810 - DNA, 120 bp, Artificial Sequence
  ENSG00000137642_139 (sequence is synthesized)
ttctctctacaaagtctgtttcaaaacactgaccacacataccaagaagggatgttggaagagcaaccaaatacatgtaccttgaattccgaaggcacaagtcacaactgcatttgaaaa

SEQ ID NO: 337811 - DNA, 120 bp, Artificial Sequence
  ENSG00000137642_140 (sequence is synthesized)
tctcagtggatggttggttctctttaacttcttttctgtgattttgatgaatctcagctgcttgcatatatttgggctaggatttgtacagaaggcagctgtgtgccacatccaaaaagt

SEQ ID NO: 337812 - DNA, 120 bp, Artificial Sequence
  ENSG00000137642_141 (sequence is synthesized)
gtttgttgtaaaatatctgtgacatagtatcataataacgttttaagataaaggacaaagacagcagaggcatcagccagacgcgccaggttaattggtgaatgtagtggattagtaatg

SEQ ID NO: 337813 - DNA, 120 bp, Artificial Sequence
  ENSG00000137642_142 (sequence is synthesized)
acaatgagaaaagccaccattccctgagcacttcttatacactaagcaccatgctattgttgctcgtgaatggatcccttattaatccttatgaatcctatgagataagtatccttatcc

SEQ ID NO: 337814 - DNA, 120 bp, Artificial Sequence
  ENSG00000137642_143 (sequence is synthesized)
tcattgtgtagctgaggaaatgggtttggagtggattgtgacttgtccctggttgccatgattataattcaagtcagctttaccatatgcagcactcgcactgttttgctctgtgttggc

SEQ ID NO: 337815 - DNA, 120 bp, Artificial Sequence
  ENSG00000137642_144 (sequence is synthesized)
acacatctcttttgccaccaaatcttatctgctcctttgagtctctcttgcccagtctatagaaggggcatatgtgtggagagtctaatatgcaagttgttgtttaaataatattttctg

SEQ ID NO: 337816 - DNA, 120 bp, Artificial Sequence
  ENSG00000137642_145 (sequence is synthesized)
ataatattgatccattgagctcttttagatcatgctgggccaagcactgtcagccatctggtgggaagaccttccagatgacaagcatggcgctcattggttgaactgagaggggtcttt

SEQ ID NO: 337817 - DNA, 120 bp, Artificial Sequence
  ENSG00000137642_146 (sequence is synthesized)
tccttggccacttctccttgccccctcgactcttagcttgagctccagtctttttgagagcaccagtggtttctagttgtttagttggccatatgtgacgctatattggaaaggaagaga

SEQ ID NO: 337818 - DNA, 120 bp, Artificial Sequence
  ENSG00000137642_147 (sequence is synthesized)
aagagagtatcagttgagtgctaggcatcacacatacattattttagttaaccttcccagctctgtgaaatgcagataacatctctaggctccaggaagatcagtaacttgcctaggtta

SEQ ID NO: 337819 - DNA, 120 bp, Artificial Sequence
  ENSG00000137642_148 (sequence is synthesized)
cacagatgccagaacaggaattcgaactcaagtttgccagcttccagaggccacattctttccattttgccacacgcacgtttaccatttacgatttactccattgtcagccttccgaaa

SEQ ID NO: 337820 - DNA, 120 bp, Artificial Sequence
  ENSG00000137642_149 (sequence is synthesized)
ggacttgagattggtgggactttgttagtgccaatcaagatgccactcgcagtgaatgatccctgttcctttaagaaccaggctgaagctgggctgttttgggacctttacaaaatggaa

SEQ ID NO: 337821 - DNA, 120 bp, Artificial Sequence
  ENSG00000137642_150 (sequence is synthesized)
cttttctgcctgacctaattgccaggatagccgactgagccaagatagttttgtgttcaccaagcaactgtggaccaaccttagcttcaggaaaacagtggtaaaaaaagatcgatgagg

SEQ ID NO: 337822 - DNA, 120 bp, Artificial Sequence
  ENSG00000137642_151 (sequence is synthesized)
aacactgccaaagaaataccctttcttccccgactgaaagatggctttgtccgttgagttgaaaactattaagtcctgccttcctcacttttcatcacgtggcttctgtttttgaattcc

SEQ ID NO: 337823 - DNA, 120 bp, Artificial Sequence
  ENSG00000137642_152 (sequence is synthesized)
aaagtatggtttgcaaccagtagcatctgcatctccttggaacttgttagaaatgtagaatctctgacctcaccccagacctacagagtcagaatctgcatgctaataagcccccaggtc

SEQ ID NO: 337824 - DNA, 120 bp, Artificial Sequence
  ENSG00000137642_153 (sequence is synthesized)
ctgtgtgctccacaatgcatttgaggagcactcatgtggaatgcagacttgcccctttcctttctggcattctcatctctgaaccaggtcgtggagtagttgcggttgaattaactagaa

SEQ ID NO: 337825 - DNA, 120 bp, Artificial Sequence
  ENSG00000137642_154 (sequence is synthesized)
cacaatgctttgcctcagtaggaattctcttagccaccctgtgcctcctcagccacctgtttctttcaccagcccctgcaaaagcaaacttatctgaatattaaccgaaatcaaatatag

SEQ ID NO: 337826 - DNA, 120 bp, Artificial Sequence
  ENSG00000137642_155 (sequence is synthesized)
taagggaaatctactccccaaaagggaaaagaatattgcctcttctgacaacccattatacatgatttctagattagccgctgctcagagctgtgccagtcactggcctccctcagcaga

SEQ ID NO: 337827 - DNA, 120 bp, Artificial Sequence
  ENSG00000137648_0 (sequence is synthesized)
actcctggaatacacagagagaggcagcagcttgctcagcggacaaggatgctgggcgtgagggaccaaggcctgccctgcactcgggcctcctccagccagtgctgaccagggacttct

SEQ ID NO: 337828 - DNA, 120 bp, Artificial Sequence
  ENSG00000137648_1 (sequence is synthesized)
gacctgctggccagccaggacctgtgtggggaggccctcctgctgccttggggtgacaatctcagctccaggctacagggagaccgggaggatcacagagccagcatgttacaggatcct

SEQ ID NO: 337829 - DNA, 120 bp, Artificial Sequence
  ENSG00000137648_2 (sequence is synthesized)
gacagtgatcaacctctgaacagcctcgatgtcaaacccctgcgcaaaccccgtatccccatggagaccttcagaaaggtggggatccccatcatcatagcactactgagcctggcgagt

SEQ ID NO: 337830 - DNA, 120 bp, Artificial Sequence
  ENSG00000137648_3 (sequence is synthesized)
atcatcattgtggttgtcctcatcaaggtgattctggataaatactacttcctctgcgggcagcctctccacttcatcccgaggaagcagctgtgtgacggagagctggactgtcccttg

SEQ ID NO: 337831 - DNA, 120 bp, Artificial Sequence
  ENSG00000137648_4 (sequence is synthesized)
ggggaggacgaggagcactgtgtcaagagcttccccgaagggcctgcagtggcagtccgcctctccaaggaccgatccacactgcaggtgctggactcggccacagggaactggttctct

SEQ ID NO: 337832 - DNA, 120 bp, Artificial Sequence
  ENSG00000137648_5 (sequence is synthesized)
gcctgtttcgacaacttcacagaagctctcgctgagacagcctgtaggcagatgggctacagcagcaaacccactttcagagctgtggagattggcccagaccaggatctggatgttgtt

SEQ ID NO: 337833 - DNA, 120 bp, Artificial Sequence
  ENSG00000137648_6 (sequence is synthesized)
gaaatcacagaaaacagccaggagcttcgcatgcggaactcaagtgggccctgtctctcaggctccctggtctccctgcactgtcttgcctgtgggaagagcctgaagaccccccgtgtg

SEQ ID NO: 337834 - DNA, 120 bp, Artificial Sequence
  ENSG00000137648_7 (sequence is synthesized)
gtgggtgtggaggaggcctctgtggattcttggccttggcaggtcagcatccagtacgacaaacagcacgtctgtggagggagcatcctggacccccactgggtcctcacggcagcccac

SEQ ID NO: 337835 - DNA, 120 bp, Artificial Sequence
  ENSG00000137648_8 (sequence is synthesized)
tgcttcaggaaacataccgatgtgttcaactggaaggtgcgggcaggctcagacaaactgggcagcttcccatccctggctgtggccaagatcatcatcattgaattcaaccccatgtac

SEQ ID NO: 337836 - DNA, 120 bp, Artificial Sequence
  ENSG00000137648_9 (sequence is synthesized)
cccaaagacaatgacatcgccctcatgaagctgcagttcccactcactttctcaggcacagtcaggcccatctgtctgcccttctttgatgaggagctcactccagccaccccactctgg

SEQ ID NO: 337837 - DNA, 120 bp, Artificial Sequence
  ENSG00000137648_10 (sequence is synthesized)
atcattggatggggctttacgaagcagaatggagggaagatgtctgacatactgctgcaggcgtcagtccaggtcattgacagcacacggtgcaatgcagacgatgcgtaccagggggaa

SEQ ID NO: 337838 - DNA, 120 bp, Artificial Sequence
  ENSG00000137648_11 (sequence is synthesized)
gtcaccgagaagatgatgtgtgcaggcatcccggaagggggtgtggacacctgccagggtgacagtggtgggcccctgatgtaccaatctgaccagtggcatgtggtgggcatcgttagt

SEQ ID NO: 337839 - DNA, 120 bp, Artificial Sequence
  ENSG00000137648_12 (sequence is synthesized)
tggggctatggctgcgggggcccgagcaccccaggagtatacaccaaggtctcagcctatctcaactggatctacaatgtctggaaggctgagctgtaatgctgctgcccctttgcagtg

SEQ ID NO: 337840 - DNA, 120 bp, Artificial Sequence
  ENSG00000137648_13 (sequence is synthesized)
ctgggagccgcttccttcctgccctgcccacctggggatcccccaaagtcagacacagagcaagagtccccttgggtacacccctctgcccacagcctcagcatttcttggagcagcaaa

SEQ ID NO: 337841 - DNA, 120 bp, Artificial Sequence
  ENSG00000137648_14 (sequence is synthesized)
gggcctcaattcctataagagaccctcgcagcccagaggcgcccagaggaagtcagcagccctagctcggccacacttggtgctcccagcatcccagggagagacacagcccactgaaca

SEQ ID NO: 337842 - DNA, 120 bp, Artificial Sequence
  ENSG00000137648_15 (sequence is synthesized)
aggtctcaggggtattgctaagccaagaaggaactttcccacactactgaatggaagcaggctgtcttgtaaaagcccagatcactgtgggctggagaggagaaggaaagggtctgcgcc

SEQ ID NO: 337843 - DNA, 120 bp, Artificial Sequence
  ENSG00000137648_16 (sequence is synthesized)
agccctgtccgtcttcacccatccccaagcctactagagcaagaaaccagttgtaatataaaatgcactgccctactgttggtatgactaccgttacctactgttgtcattgttattaca

SEQ ID NO: 337844 - DNA, 120 bp, Artificial Sequence
  ENSG00000137648_17 (sequence is synthesized)
gctatggccactattattaaagagctgtgtaacatctctggcataggctagctggaatgcttgataagaactgagctgggatgattgaactttcattctttggcttggggagaaaagaag

SEQ ID NO: 337845 - DNA, 120 bp, Artificial Sequence
  ENSG00000137648_18 (sequence is synthesized)
tcctggggaagcaattgagtctcaaagtagaggcaggggaaaaaagagttagggagaccagatctgctgagtggcagcaagagtgagctgcagattacagaaaccagggtgagcaagttt

SEQ ID NO: 337846 - DNA, 120 bp, Artificial Sequence
  ENSG00000137648_19 (sequence is synthesized)
gagtcccacacagggccttctccctttgcctctttccctccctccctgcctgtgataatcagccaggagccagggataacctatgacttgggaaagagatgagttaggcagtcaagggtg

SEQ ID NO: 337847 - DNA, 120 bp, Artificial Sequence
  ENSG00000137648_20 (sequence is synthesized)
acattcaatcagggatccacaagtggctggaaagaaatgctggtcctgtgtcctaactttttccgcctggagagccctcagtgtggcttcttacatttaaaaaacaaaaaggatcagctg

SEQ ID NO: 337848 - DNA, 120 bp, Artificial Sequence
  ENSG00000137648_21 (sequence is synthesized)
ccaggtgtgaggcagtccccaagctgagttgtgaggatgtaagcatgaataagtccctgcactcaaaatggtcaaagaattaaaccccatggacttttttggcatctgtatgaaagcttg

SEQ ID NO: 337849 - DNA, 120 bp, Artificial Sequence
  ENSG00000137648_22 (sequence is synthesized)
aaatagaaacccagaaaacaaaacaaaataaaacaaaaccatcagaactgtgagtggaaactaaggtgatgatctgggagcaatacactaaaatcttgggtcgagacctatatgaaggct

SEQ ID NO: 337850 - DNA, 120 bp, Artificial Sequence
  ENSG00000137648_23 (sequence is synthesized)
ggcagtggagctaaacctggacacactgaagacaagggagctgaaccagggctcctacatgaagcagggataactgatggcagtaaatgtggtctcaaattgcagatggtctggaggaaa

SEQ ID NO: 337851 - DNA, 120 bp, Artificial Sequence
  ENSG00000137648_24 (sequence is synthesized)
atttcccaaatttagagcctcaggattcccaaagatcctccaaatatgagctcacaatcaaagatcagagacgttgaaaaataaaaaacaccttaagtgggcagcataaaaaacagctaa

SEQ ID NO: 337852 - DNA, 120 bp, Artificial Sequence
  ENSG00000137648_25 (sequence is synthesized)
tttagaaccccaaaggcttcagatgtcagaatattagagacttatgataataagcaatatttgcagagtatttgtatgtgccagacactattgtaagtgcttcatcatgtactgattcat

SEQ ID NO: 337853 - DNA, 120 bp, Artificial Sequence
  ENSG00000137648_26 (sequence is synthesized)
ttaatactcacagaaatctgtgagatgggtattattcttatcctcactctatggattaaaaaaactaaggcacaaagtggttaagctccttgcctgagattatagactgtaagttgaacg

SEQ ID NO: 337854 - DNA, 120 bp, Artificial Sequence
  ENSG00000137648_27 (sequence is synthesized)
tgagcacttggaatacagagttcatgctgtaaactaccacactatagggcctccaatatgataatttataaaatatttgaataaaaaatgaatactagttccacattttaaaatcatgtt

SEQ ID NO: 337855 - DNA, 120 bp, Artificial Sequence
  ENSG00000137648_28 (sequence is synthesized)
taactgtggtcaaatgcacataacacaagttgccatcttcaccatttttaggtgtatagttcagtggtgttatgtacattcacactattgtgcagtcatcaccaccatccatctccagaa

SEQ ID NO: 337856 - DNA, 120 bp, Artificial Sequence
  ENSG00000137648_29 (sequence is synthesized)
cagaaactcagtacccatcaaacaactctccatttccccctcctcccaatctctggcaaccaccattgtgctttcagtctctgtgaactggattactctgggtacctcatttaagtgaag

SEQ ID NO: 337857 - DNA, 120 bp, Artificial Sequence
  ENSG00000137648_30 (sequence is synthesized)
tcatgcagtattggtctttttgtacttgttttatttcacttcacattgtgtcttcaagtttcacccatgttgtagcatgtgtcagaatttcttccctttttagactaaataatattctat

SEQ ID NO: 337858 - DNA, 120 bp, Artificial Sequence
  ENSG00000137648_31 (sequence is synthesized)
tgtttatacgaacattcaggttacttctatcttttggctattgtgaattatgctgctgtgaacatgggtgtacaagtatctctttgaggccctgctttcaattctcttgggtatattccc

SEQ ID NO: 337859 - DNA, 120 bp, Artificial Sequence
  ENSG00000137648_32 (sequence is synthesized)
agaagtggaattgctggatcatatggtaattctattttgaattttttgaggaactgatatattgctttccatagagactgcaccattttacattcccatcaacagtttgcaggagttact

SEQ ID NO: 337860 - DNA, 120 bp, Artificial Sequence
  ENSG00000137648_33 (sequence is synthesized)
atttctccatatcccccctaacacttgctattttctgttaaaaatggatatcttaataatcaagcaaaaataacaggcagatttgaaaaagaactgaatacagcttttagaaataaaaac

SEQ ID NO: 337861 - DNA, 120 bp, Artificial Sequence
  ENSG00000137648_34 (sequence is synthesized)
tataattataaaaataaaaaactaagtggatggggtaaataacaattaaaacaccaattaagagagaacaaatgaactggaagataaattgaagaagtgactaggcttaacagcagagag

SEQ ID NO: 337862 - DNA, 120 bp, Artificial Sequence
  ENSG00000137648_35 (sequence is synthesized)
agataaggagattaaaaatatgaaaacaaggccaggagcaatgaagcctagaatggtaaattctaacatatccagaatcccagaaagagagaatcaagacaatgagagagagacagtacc

SEQ ID NO: 337863 - DNA, 120 bp, Artificial Sequence
  ENSG00000137648_36 (sequence is synthesized)
aaagagataagagctgagaatgttccagaattgataaaaggtgtgaatccacagaacatacaccaccatagtgtacacgcatacaaccaaggtggaaaaattagaataaatccacaccta

SEQ ID NO: 337864 - DNA, 120 bp, Artificial Sequence
  ENSG00000137648_37 (sequence is synthesized)
tgtacattataatgaaactgcagaacaccaaagacaaaaagaaactccttatagcagcagagagaaaacccagaccacccacagtaccacaaatctaccacaattagactgacaacaggc

SEQ ID NO: 337865 - DNA, 120 bp, Artificial Sequence
  ENSG00000137648_38 (sequence is synthesized)
tttcccacagcaataaaggagctagaagtcagtggaagtatatctccagcatgccaaaagataacaatcaatcagggattgtgaaccctacaaaactatctttcaagaataaaggcattt

SEQ ID NO: 337866 - DNA, 120 bp, Artificial Sequence
  ENSG00000137648_39 (sequence is synthesized)
tcaagaaaacaaaaacagactttaccatcaacaaaccttctctaaaagaatatataaagcatttactttaggaagaaggaaaatgatcctaaaaggaagaaccaagaagcaagtagcaat

SEQ ID NO: 337867 - DNA, 88 bp, Artificial Sequence
  ENSG00000137648_40 (sequence is synthesized)
aaatgatcctaaaaggaagaaccaagaagcaagtagcaatagtgaggcaattgtgaaaatgtaggtaagtctaaacacactctgtcta

SEQ ID NO: 337868 - DNA, 66 bp, Artificial Sequence
  ENSG00000137648_41 (sequence is synthesized)
attacatgcacatgccaccatatcggtctcaaactcccgacctcaagtgatccccccgcctcggcc

SEQ ID NO: 337869 - DNA, 120 bp, Artificial Sequence
  ENSG00000137648_42 (sequence is synthesized)
tattaaaataacaataatatttattttgtgggttaattttttttgaaacagatattgaatttattggttggctatgagtagaaaaatacatcagtaaagaaaaaagaccctgtatataaa

SEQ ID NO: 337870 - DNA, 120 bp, Artificial Sequence
  ENSG00000137648_43 (sequence is synthesized)
tataatactagctagttaaaatttgaccaagaagtttccattgtgggttaatttttaaaggcctaactgaaatatggagtaaccacagcatgcagcatgtaaattaaaggggatagctgg

SEQ ID NO: 337871 - DNA, 120 bp, Artificial Sequence
  ENSG00000137648_44 (sequence is synthesized)
tttaggtcctagagagatgagaaaacccagaggctgcatgccctacaggaagccttgcatatcatgggcactcaatgtgtgatgatgggaggaagagagggagggaaggaaaggatagtc

SEQ ID NO: 337872 - DNA, 120 bp, Artificial Sequence
  ENSG00000137648_45 (sequence is synthesized)
agataaaagtgtaccaatagatgagtgggtggatggatggatgcagacaagcagagagatttcaaatgtctctttcacattcgaagatgatgttactggcctggcatggtggctcacgct

SEQ ID NO: 337873 - DNA, 120 bp, Artificial Sequence
  ENSG00000137648_46 (sequence is synthesized)
taagccactcgcgcctggccctcaccaccaccaccaaagtgctaagtgccatgagtgacatccagtcacccgtccatccatcactcagcaaacattccaggattcattccagaagtagga

SEQ ID NO: 337874 - DNA, 120 bp, Artificial Sequence
  ENSG00000137648_47 (sequence is synthesized)
ggcctggactctggggaaacaggaccaacaaacctaaaatccccaaagcaatgattctccaattcattcattcagtcactcttatcctttcagtaaaactgtacgtacctgccatgtgcc

SEQ ID NO: 337875 - DNA, 120 bp, Artificial Sequence
  ENSG00000137648_48 (sequence is synthesized)
aggccctaggctggatgctgggctataacactaattaagacagctgaagtccctggtgtcatggagttcacattggccagaggcattttcatgaaaaatggcagtgcttgcctgatttcc

SEQ ID NO: 337876 - DNA, 120 bp, Artificial Sequence
  ENSG00000137648_49 (sequence is synthesized)
aagggaagaaaactaagttaataaatagaatgatcccaaatttaaggaggtatttttcttccattacattttcttaaaccattaatatctactcctgatagcctactggatcagcaaaac

SEQ ID NO: 337877 - DNA, 120 bp, Artificial Sequence
  ENSG00000137648_50 (sequence is synthesized)
gtaagtcctgggtgcaggaccacagggcaggagatgcccttgtatgagggagcagcttccagaagtaatgggaaggaggaccacccttcagagaaacccatcctggaggaccaagcacca

SEQ ID NO: 337878 - DNA, 120 bp, Artificial Sequence
  ENSG00000137648_51 (sequence is synthesized)
tttctgtttctagactgagtaattctttattctcatgtaggacatcatctctaagggaaggggctaatgagatggttgatcactcagagagtttagctggagaggatggaaaagaaccca

SEQ ID NO: 337879 - DNA, 120 bp, Artificial Sequence
  ENSG00000137648_52 (sequence is synthesized)
tacattcagttgcagattgagatagcctatctctggcaggcctcagatttcttcaggattctaacagactggacccagagactaggccaaacaaacaaacaaacaaaaactctactaggc

SEQ ID NO: 337880 - DNA, 120 bp, Artificial Sequence
  ENSG00000137648_53 (sequence is synthesized)
agacatcaccaaccaatcacagaactctctcccatggatccctaatacagcctcaaagtccttttcagtaaatgctccaggcagccattacaaatcaatcagaattatttgcctttctct

SEQ ID NO: 337881 - DNA, 120 bp, Artificial Sequence
  ENSG00000137648_54 (sequence is synthesized)
tctctgctcaacgggcttctgctgctctctactttccatagggggcaacttccattaccctctagaaagcacaccccaccaccttcatttcaaggagagtgaggaactcatgcccagcac

SEQ ID NO: 337882 - DNA, 120 bp, Artificial Sequence
  ENSG00000137648_55 (sequence is synthesized)
ctgctattctcccctcttcctgcagccacggagcccagcctcgctgcagccagccctgcctccccactgtagtccagtcaactgctgcatcagccgttcctggcacagcaggctgagcct

SEQ ID NO: 337883 - DNA, 120 bp, Artificial Sequence
  ENSG00000137648_56 (sequence is synthesized)
tgattatgaaacctgggtgtctccaggggttcttaagatgataggctcctggaatttctgtccttttggagctcagtaaggcaccaaaccacctgagtcttgtgcttcacaaaatcaaag

SEQ ID NO: 337884 - DNA, 120 bp, Artificial Sequence
  ENSG00000137648_57 (sequence is synthesized)
ttcatcagaatcattcattgggatggaattggtgaacagaagttaactttcctgggaatgtccatttccaccatattccgtccttctaggtctcagacttctctactttctttcctctct

SEQ ID NO: 337885 - DNA, 120 bp, Artificial Sequence
  ENSG00000137648_58 (sequence is synthesized)
tctttcctctctctagatcggaggcccttcttgtcctagaaccataggcatttcaagatgtgggagaccctagggatcatctagtccacgcatcttttttttttttttttgacagagtct

SEQ ID NO: 337886 - DNA, 70 bp, Artificial Sequence
  ENSG00000137648_59 (sequence is synthesized)
ctccacctcccaggttcaagtgattcttcagctaatttttatatttttgtagagaccgagtttcaccatg

SEQ ID NO: 337887 - DNA, 120 bp, Artificial Sequence
  ENSG00000137648_60 (sequence is synthesized)
agccactgcacccagccccgtgcatctttttatagagggggaaactgaggcttggagagacccagaaaaagaatatgacctgcccaaggccacacatcaaactagtgccagagccaggga

SEQ ID NO: 337888 - DNA, 120 bp, Artificial Sequence
  ENSG00000137648_61 (sequence is synthesized)
cagaacctagatcatgaggactcttaaaatgcactctagtcctcccaggtctgagacttgggtccttccaggaagtgccagcattcctgcctgagaatgtgccaatccaccagtattgcc

SEQ ID NO: 337889 - DNA, 120 bp, Artificial Sequence
  ENSG00000137648_62 (sequence is synthesized)
aatgactcagccctccatggagagcttctactaacattactagcatagttagggatggaaggaaaagatttagaagaggcagattcagtaaaggaacaatcagagagatggaattaatca

SEQ ID NO: 337890 - DNA, 120 bp, Artificial Sequence
  ENSG00000137648_63 (sequence is synthesized)
aggaaggcttcctggaggaggaaaaacttcaacccaaggtttgaaagtagcaagcatggattagcagggagaaagagggagagtggtccagttgagagaaacgtttgtctggattcatat

SEQ ID NO: 337891 - DNA, 120 bp, Artificial Sequence
  ENSG00000137648_64 (sequence is synthesized)
gaagacagatctagtcctgttctattaaatatctctaagggggccaaaaacatacccccgctatcaaagtcagaccagatgctttgtttggagaacgaaatatccacattccaactccct

SEQ ID NO: 337892 - DNA, 120 bp, Artificial Sequence
  ENSG00000137648_65 (sequence is synthesized)
ccctaacatttctccagggctctgggttctggatttggattccccacccaagaaagcaagttacatcagcaatgcactgagggttgagtcctgggatgccaagggtcggttctttattgt

SEQ ID NO: 337893 - DNA, 120 bp, Artificial Sequence
  ENSG00000137648_66 (sequence is synthesized)
atagcaaagcaggccccatcttcactgactaagaccatctccactccctggccactccccaccaagcattctctgccactctttctcctgaaagtgggggccaactctaccatcttgttc

SEQ ID NO: 337894 - DNA, 120 bp, Artificial Sequence
  ENSG00000137648_67 (sequence is synthesized)
gccaggagcttcgcatgcggaactcaagtgggtaagtgaggggacaccttctggcctacagaaggcccccacatggacgctgctcttcaggttgcaaccagctcacctggaaccccaagc

SEQ ID NO: 337895 - DNA, 120 bp, Artificial Sequence
  ENSG00000137648_68 (sequence is synthesized)
agccaggggaatgtaagcagacatcaggaagaactcctagccagatggatcattcaatgccaagagctatagactcacattttggagaggttttctgtgttgacttgtttttaatacaat

SEQ ID NO: 337896 - DNA, 120 bp, Artificial Sequence
  ENSG00000137648_69 (sequence is synthesized)
ggacagctggacaaagtgtgttgtcctactcagagccagagggatggataatgtgacctttccatcaatctggatagtaaatagtttttgctactgctgtaggttttctaataaattgcc

SEQ ID NO: 337897 - DNA, 120 bp, Artificial Sequence
  ENSG00000137648_70 (sequence is synthesized)
caataggcaagattccaaagtcactttgtccttccctaccacttacccagccagagctccccaccttcttgatgctccagggaagaggctccatggcccttgtgggtggcctgttcctga

SEQ ID NO: 337898 - DNA, 120 bp, Artificial Sequence
  ENSG00000137648_71 (sequence is synthesized)
gcctcgccaccctgtgttagagcagagcatccagatgaaatctgtcacactgtggcaaagtggctcagagaggaggctggcttcctagcattcagggacgttgctgagggccgcttattc

SEQ ID NO: 337899 - DNA, 120 bp, Artificial Sequence
  ENSG00000137648_72 (sequence is synthesized)
accgaaaataaatcttgaaaaggacagggctggtagcagaatgatcctttacctaaaattctatcaaaatcccattcttccatttggaaagcccacagtgtcacagactctgttccgggc

SEQ ID NO: 337900 - DNA, 120 bp, Artificial Sequence
  ENSG00000137648_73 (sequence is synthesized)
tctgtcctcttccctcttgggtcccaggagcccaggctgggctttgaagcaggcagggcccagcacacagtaggtactcagcagtgggggtgttgaatccaatcaaacggaagtgtcaat

SEQ ID NO: 337901 - DNA, 120 bp, Artificial Sequence
  ENSG00000137648_74 (sequence is synthesized)
gcaggaaatgcaatggatgtcaatgcagtctccaaatgttccccactgtgcagcttccacattcccgaggtattgggaggggacttgaattaacagcttcgggaggcctgagtccctgcc

SEQ ID NO: 337902 - DNA, 120 bp, Artificial Sequence
  ENSG00000137648_75 (sequence is synthesized)
aggctcaggcccaagtctgtgtgctaccaagtagcaaaactgagcctggaactcacacatgcgtgtctgagagcccagcactatcgccaggaaaacccagcgtctccctgctcaagcctg

SEQ ID NO: 337903 - DNA, 120 bp, Artificial Sequence
  ENSG00000137656_0 (sequence is synthesized)
gtctctctgcccccgccgctgccatggcggcagctccgccgctttccaaggccgagtatctgaagcgttacttgtccggggcagatgccggcgtcgaccggggatctgagtccggtcgca

SEQ ID NO: 337904 - DNA, 120 bp, Artificial Sequence
  ENSG00000137656_1 (sequence is synthesized)
agcgtcgcaaaaagcggccgaagcctggcggggccggcggcaagggaatgcggattgtggatgatgatgtgagctggacagctatctccacaaccaaactagaaaaggaggaagaggaag

SEQ ID NO: 337905 - DNA, 120 bp, Artificial Sequence
  ENSG00000137656_2 (sequence is synthesized)
atgatggagatttgcctgtggtggcagagtttgtggatgagcggccagaagaggtaaagcagatggaggcctttcgttccagtgccaaatggaagcttctgggaggccacaacgaagacc

SEQ ID NO: 337906 - DNA, 120 bp, Artificial Sequence
  ENSG00000137656_3 (sequence is synthesized)
taccctcaaacagacattttcgtcacgataccccggattcatctcctaggagggtccgtcatggtaccccagatccatctcctaggaaggaccgtcatgacaccccggatccatctccta

SEQ ID NO: 337907 - DNA, 120 bp, Artificial Sequence
  ENSG00000137656_4 (sequence is synthesized)
ggagggcccgtcatgacaccccggatccttctcccctcagaggggctcgtcatgactcagacacatctcctcccaggaggatccgtcatgactcctcagacacttcacccccaaggaggg

SEQ ID NO: 337908 - DNA, 120 bp, Artificial Sequence
  ENSG00000137656_5 (sequence is synthesized)
cccgtcatgattctccagatccttctcccccaaggaggcctcagcataattcttcaggtgcatctcctaggagagtccgtcatgattcaccagatccctctcctcctaggcgagcccgtc

SEQ ID NO: 337909 - DNA, 120 bp, Artificial Sequence
  ENSG00000137656_6 (sequence is synthesized)
atggttcctcagatatctcttcccccagaagggtccataacaactcccctgacacatctaggaggactcttggctcttcagacacacagcaactcagaagggcccgtcatgactcccctg

SEQ ID NO: 337910 - DNA, 120 bp, Artificial Sequence
  ENSG00000137656_7 (sequence is synthesized)
atttggctcctaatgtcacttattccctgcccagaaccaaaagtggtaaagccccagaaagagcctctagcaagacttctccacattggaaggagtcaggagcctcccatttgtcattcc

SEQ ID NO: 337911 - DNA, 120 bp, Artificial Sequence
  ENSG00000137656_8 (sequence is synthesized)
caaagaacagcaaatatgagtatgaccctgacatctctcctccacgaaaaaagcaagcaaaatcccattttggagacaagaagcagcttgattccaaaggtgactgccagaaagcaactg

SEQ ID NO: 337912 - DNA, 120 bp, Artificial Sequence
  ENSG00000137656_9 (sequence is synthesized)
agtccagggcaccaggattctgattcagatctgtcacctccacggaatagacctagacaccggagctctgattctgacctctctccaccaaggaggagacagaggaccaaatcttctgat

SEQ ID NO: 337913 - DNA, 120 bp, Artificial Sequence
  ENSG00000137656_10 (sequence is synthesized)
tctgacctgtccccgcctcgaaggagtcagcctcctggaaagaaggctgcacacatgtattctggggctaaaactgggttggtgttaactgacatacagcgagaacagcaggagctcaag

SEQ ID NO: 337914 - DNA, 120 bp, Artificial Sequence
  ENSG00000137656_11 (sequence is synthesized)
gaacaggatcaagaaaccatggcatttgaagctgaatttcaatatgctgaaaccgtatttcgagataagtctggtcgtaagaggaatttgaaactcgaacgtttagagcaaaggaggaaa

SEQ ID NO: 337915 - DNA, 120 bp, Artificial Sequence
  ENSG00000137656_12 (sequence is synthesized)
gcagaaaaggactcagagagagatgagctgtatgcccagtggggaaaagggcttgcccagagccggcaacagcaacaaaatgtggaggatgcaatgaaagagatgcaaaagcctctggcc

SEQ ID NO: 337916 - DNA, 120 bp, Artificial Sequence
  ENSG00000137656_13 (sequence is synthesized)
cgctatattgatgacgaagatctggataggatgctaagagaacaggaaagagagggggaccctatggccaacttcatcaagaagaataaggccaaggagaacaagaataaaaaagtgaga

SEQ ID NO: 337917 - DNA, 120 bp, Artificial Sequence
  ENSG00000137656_14 (sequence is synthesized)
cctcgctacagtggtccagcacctcctcccaacagatttaatatctggcctggatatcgctgggacggagtggacagatccaatggatttgaacagaagcgctttgccaggcttgccagc

SEQ ID NO: 337918 - DNA, 120 bp, Artificial Sequence
  ENSG00000137656_15 (sequence is synthesized)
aagaaggcagtggaggaacttgcctacaaatggagtgttgaggatatgtaactttcctgaggctgtgggggtggctgggctgtggtagtgggcataggcagcgagatatccagtggtaac

SEQ ID NO: 337919 - DNA, 120 bp, Artificial Sequence
  ENSG00000137656_16 (sequence is synthesized)
agttgtctgtgctaataattggagcccacacagaccagcaacttgttgaatgccagttttgaccacagaagaatattcgagacctgatgtttggactgaggtacctgtacttcttgggtg

SEQ ID NO: 337920 - DNA, 120 bp, Artificial Sequence
  ENSG00000137656_17 (sequence is synthesized)
tgacagcaccggctgttgctggctttcagaggaagcattgatttctcattgaccagggtttgttcttggtagggtttttctttttcttttttaaataaacatgtatttatttttttaaaa

SEQ ID NO: 337921 - DNA, 120 bp, Artificial Sequence
  ENSG00000137672_0 (sequence is synthesized)
ataccgcctcctgaaagttgtggctacaggacaggctttggctgctttctagaacgtcgctcggatccctttaaaggtggggatcttgacggagagtgcgggggatgaaggcgggagctg

SEQ ID NO: 337922 - DNA, 120 bp, Artificial Sequence
  ENSG00000137672_1 (sequence is synthesized)
agggctggagagtctctgttgacatagtaactcttcagctccgtctcccttgctctccgctcttacgcttcgctaccaccagcggccccgcctgtgccctctctgcccgggcgccccaga

SEQ ID NO: 337923 - DNA, 120 bp, Artificial Sequence
  ENSG00000137672_2 (sequence is synthesized)
cgcatcctcgcggggtctcctcggcctgacctgctcaggtcaagatcctctttgcacccccttaagtggtgacttttccccgggccagtgggcgagccacttgcggcgggcgtctgcacc

SEQ ID NO: 337924 - DNA, 120 bp, Artificial Sequence
  ENSG00000137672_3 (sequence is synthesized)
ccctgcttcaccgtcgtcccctgggcaccggtctgcccaggtccagttcggccgctgacgcgaaccctccgcaccgggtccccgctggaactgcccactcggctcccccgggagcggggc

SEQ ID NO: 337925 - DNA, 120 bp, Artificial Sequence
  ENSG00000137672_4 (sequence is synthesized)
ccaggccagtcgggcgttcccgccatgagccagagcccggcgttcgggccccggaggggcagttctccccggggcgctgccggagccgctgcgcggcgcaacgagagccaggactatctg

SEQ ID NO: 337926 - DNA, 120 bp, Artificial Sequence
  ENSG00000137672_5 (sequence is synthesized)
ctcatggactcggagctgggagaagacggctgcccgcaagccccgctgccttgctacggctactacccctgcttccggggatctgacaacagactggctcaccggcggcagacagttctc

SEQ ID NO: 337927 - DNA, 120 bp, Artificial Sequence
  ENSG00000137672_6 (sequence is synthesized)
cgtgagaaggggagaaggttagctaatcgaggaccagcatacatgtttagtgatcgctccacaagcctatctatagaggaggaacgctttttggatgcagctgaatatggtaacatccca

SEQ ID NO: 337928 - DNA, 120 bp, Artificial Sequence
  ENSG00000137672_7 (sequence is synthesized)
gtggtgcggaagatgttagaagaatgccactcactcaacgttaactgtgtggattacatgggccagaatgccctacagttggcagtggccaatgagcatctggaaattacagaacttctt

SEQ ID NO: 337929 - DNA, 120 bp, Artificial Sequence
  ENSG00000137672_8 (sequence is synthesized)
ctcaagaaagaaaacctctctcgagttggggatgctttgcttctagctattagtaaaggttatgttcggattgtggaagcaattctcagtcatccggcttttgctgaaggcaagaggtta

SEQ ID NO: 337930 - DNA, 120 bp, Artificial Sequence
  ENSG00000137672_9 (sequence is synthesized)
gcaaccagccctagccagtctgaactccagcaagatgatttttatgcctatgatgaagatgggacacggttctcccatgatgtgactccaatcattctggctgcccactgccaggaatat

SEQ ID NO: 337931 - DNA, 120 bp, Artificial Sequence
  ENSG00000137672_10 (sequence is synthesized)
gaaattgtgcataccctcctgcggaagggtgctaggattgaacggcctcatgattatttctgcaagtgcaatgactgcaaccagaaacagaagcatgactcgtttagccactccagatct

SEQ ID NO: 337932 - DNA, 120 bp, Artificial Sequence
  ENSG00000137672_11 (sequence is synthesized)
aggattaatgcctataaaggcctggcaagtccggcttacctgtcattgtctagtgaagatccagtcatgacggctttagaacttagcaatgaactggcagttctggccaatattgagaaa

SEQ ID NO: 337933 - DNA, 120 bp, Artificial Sequence
  ENSG00000137672_12 (sequence is synthesized)
gagttcaagaatgactacaaaaaactgtcaatgcagtgcaaagactttgttgttggactccttgatctgtgcagaaacactgaagaagtcgaggccattctgaatggggatgttgaaacg

SEQ ID NO: 337934 - DNA, 120 bp, Artificial Sequence
  ENSG00000137672_13 (sequence is synthesized)
ctccagagtggtgatcacggtcgcccaaatctcagccgtttaaaacttgccattaaatatgaagtaaaaaaatttgtagctcatccaaactgccaacagcaacttctctccatttggtat

SEQ ID NO: 337935 - DNA, 120 bp, Artificial Sequence
  ENSG00000137672_14 (sequence is synthesized)
gagaatctttctggtttacgacagcagacaatggcggtcaagttccttgtggtccttgctgttgccattggactgcccttcctggctctcatttactggtttgctccatgcagcaagatg

SEQ ID NO: 337936 - DNA, 120 bp, Artificial Sequence
  ENSG00000137672_15 (sequence is synthesized)
gggaagataatgcgtggaccattcatgaagtttgtagcacacgcagcctccttcaccatttttctgggactgctagtcatgaatgcagctgacagatttgaaggcacaaaactccttcct

SEQ ID NO: 337937 - DNA, 120 bp, Artificial Sequence
  ENSG00000137672_16 (sequence is synthesized)
aatgaaaccagcacagataatgcaaaacagctgttcaggatgaaaacatcctgcttctcatggatggagatgctcattatatcctgggtaataggcatgatatgggctgaatgtaaagaa

SEQ ID NO: 337938 - DNA, 120 bp, Artificial Sequence
  ENSG00000137672_17 (sequence is synthesized)
atctggactcagggccccaaggaatatttgtttgagttgtggaacatgcttgattttggtatgttagcaattttcgcagcatcattcattgcgagattcatggcattttggcatgcttcc

SEQ ID NO: 337939 - DNA, 120 bp, Artificial Sequence
  ENSG00000137672_18 (sequence is synthesized)
aaagcccagagcatcattgacgcaaatgatactttgaaggacttgacgaaagtaacattgggagacaatgtgaaatactacaatttggccaggataaagtgggacccctctgatcctcaa

SEQ ID NO: 337940 - DNA, 120 bp, Artificial Sequence
  ENSG00000137672_19 (sequence is synthesized)
aggtctttatgcaattgctgtagttttaagtttctctaggatagcttatattttaccagcaaatgaaagctttggacctctgcagatatcacttggaagaacagtcaaagacatcttcaa

SEQ ID NO: 337941 - DNA, 120 bp, Artificial Sequence
  ENSG00000137672_20 (sequence is synthesized)
gttcatggtcatattcattatggtgtttgtggcctttatgattggaatgttcaatctctactcctactacattggtgcaaaacaaaatgaagccttcacaacagttgaagagagttttaa

SEQ ID NO: 337942 - DNA, 120 bp, Artificial Sequence
  ENSG00000137672_21 (sequence is synthesized)
gacactgttctgggctatatttggactttctgaagtgaaatcagtggtcatcaactataaccacaaattcattgaaaacattggttacgttctttatggagtctataatgttacgatggt

SEQ ID NO: 337943 - DNA, 120 bp, Artificial Sequence
  ENSG00000137672_22 (sequence is synthesized)
cattgttttgctaaatatgttaattgccatgatcaacagttcattccaggaaattgaggatgacgctgatgtggagtggaaatttgcaagggccaaactctggttttcctactttgagga

SEQ ID NO: 337944 - DNA, 120 bp, Artificial Sequence
  ENSG00000137672_23 (sequence is synthesized)
gggcagaacacttcctgtacccttcaatctggtgccgagtccaaagtccctgttttatctcttactgaagcttaaaaaatggatttctgagctgttccagggccataaaaaaggtttcca

SEQ ID NO: 337945 - DNA, 120 bp, Artificial Sequence
  ENSG00000137672_24 (sequence is synthesized)
ggaagatgcagagatgaacaagataaatgaagaaaagaaacttggaattttaggaagtcatgaagacctttcaaaattatcacttgacaaaaaacaggttgggcacaataaacaaccaag

SEQ ID NO: 337946 - DNA, 120 bp, Artificial Sequence
  ENSG00000137672_25 (sequence is synthesized)
tataaggagctcagaagatttccatctaaatagtttcaataatcctccaagacaatatcagaaaataatgaaaaggctcattaaaagatatgtactgcaggcccagatagataaggagag

SEQ ID NO: 337947 - DNA, 120 bp, Artificial Sequence
  ENSG00000137672_26 (sequence is synthesized)
tgatgaagtgaacgaaggggaactgaaggaaattaagcaggacatctcaagtctccgctatgaactccttgaagaaaaatctcagaatacagaagacctagcagaacttattagagaact

SEQ ID NO: 337948 - DNA, 120 bp, Artificial Sequence
  ENSG00000137672_27 (sequence is synthesized)
tggagagaaattatccatggaaccaaatcaagaggaaaccaatagataatgcgaagacttccttagaaattcatatttatttgtccacttgaagccatattattttctgatttattttct

SEQ ID NO: 337949 - DNA, 120 bp, Artificial Sequence
  ENSG00000137672_28 (sequence is synthesized)
taagtgccaatgggcccaccttttaaacaagaaaacgttaaataacttgggccatcctatcatctggagccctagtatctaatttttttggtgattaaactccattgttcagggtaaagg

SEQ ID NO: 337950 - DNA, 120 bp, Artificial Sequence
  ENSG00000137672_29 (sequence is synthesized)
ctgtagataatgaggaaaattatgcccagttgtttggtgcttgttttataaactgctttcttggatataactaactcttgtgatgatgtcattgccatgtagtgtctgcctgaaaatggg

SEQ ID NO: 337951 - DNA, 120 bp, Artificial Sequence
  ENSG00000137672_30 (sequence is synthesized)
tcccagcggacaggggctgacccacgttactccccatgcggtttttcctctgaagtttatttcaggttccttcttgcctgctctgtggatcccctgctggggactcccagctctgaaatt

SEQ ID NO: 337952 - DNA, 120 bp, Artificial Sequence
  ENSG00000137672_31 (sequence is synthesized)
tgggaaaaagtagcccatgggcctttagaatgctttaatcctttctttagaatgctgtttaaacaccatttaccctacttatccctcaatgcacatgattgataccgttcatacaaaatg

SEQ ID NO: 337953 - DNA, 120 bp, Artificial Sequence
  ENSG00000137672_32 (sequence is synthesized)
gtcttacatctatgtaaaattttctgattcatctatttgaaaacattacacttaacaatgaaaaaagtttttcctccactgaaccctggaaacatggtccagttttgtgtgtgtgcgtgt

SEQ ID NO: 337954 - DNA, 120 bp, Artificial Sequence
  ENSG00000137672_33 (sequence is synthesized)
gtgtaaatgtgtacacacagacataaagtacttgccctagtttgtggctaatgtggacacacaaaagctctttatgttataaatttttattgtcactaaaaaattttactgtctaaataa

SEQ ID NO: 337955 - DNA, 120 bp, Artificial Sequence
  ENSG00000137672_34 (sequence is synthesized)
gtaccttttattggagaaaaatcaaaaccccaaacaaacactgtggttgtttggttccattatagcacaattttgtgccatttctgggagcatttacagatgaatccccacacttagcca

SEQ ID NO: 337956 - DNA, 120 bp, Artificial Sequence
  ENSG00000137672_35 (sequence is synthesized)
ttgaatgtaaaggggaaaaataaggtgagaatttgtaaatacttatctgttattttcaatatgttctatccttctacccaaatatataaaacaggaatttgcattcatgtgcatttacca

SEQ ID NO: 337957 - DNA, 120 bp, Artificial Sequence
  ENSG00000137672_36 (sequence is synthesized)
agaggttgttgttgttacttactgatcatgtgaagtggtgtcttaaacaactaaaagcgatgaaggttcatatgtttactcaaagaccattggcattcagaggatgctggacattaactg

SEQ ID NO: 337958 - DNA, 120 bp, Artificial Sequence
  ENSG00000137672_37 (sequence is synthesized)
gaactgctacttccaattcaataatgggagatttcaaatgcaaatctttaacttcatcttaaagatgaaatggttgcagaaaatctgtttagctccaactttggcttaatttaaatcaaa

SEQ ID NO: 337959 - DNA, 120 bp, Artificial Sequence
  ENSG00000137672_38 (sequence is synthesized)
gaacatttatgtaaccagatcagaaaatacagctgaaaatttatattcagtgattttgtatttgtggatactacttatggaaaagttacttggtgatacataaagatcgattttcaaata

SEQ ID NO: 337960 - DNA, 120 bp, Artificial Sequence
  ENSG00000137672_39 (sequence is synthesized)
ctttttttgaaactgaattctgctccaccacagtcttaccctggtgtttctgcaggatccacatcagaccctgcttcaggtgtggatgtcttagttaatcaggtggcactgttgatcccc

SEQ ID NO: 337961 - DNA, 120 bp, Artificial Sequence
  ENSG00000137672_40 (sequence is synthesized)
catcaatggacttctgagatcaccaccattatttcctcaatttgtttgactctttctctaccatgcattcatctgtgagaaggttaacgcgtgattctcatgacaacgtgattggcagcc

SEQ ID NO: 337962 - DNA, 120 bp, Artificial Sequence
  ENSG00000137672_41 (sequence is synthesized)
taacaaactgaacacacctaaaatgtcactgatttgtcttggaagacagaatactaagcaagataaatggcactatacatatagataatttgtgtatgtaagactattagttcattagat

SEQ ID NO: 337963 - DNA, 76 bp, Artificial Sequence
  ENSG00000137672_42 (sequence is synthesized)
aagcccgtttacattattttggttcttgttggtgctaaataaggataaagggttgatattgttagattaagctggg

SEQ ID NO: 337964 - DNA, 120 bp, Artificial Sequence
  ENSG00000137672_43 (sequence is synthesized)
cagatctgcactagtagtggcagttagtccggttcaattgctaaaaaagaccctcaggatccaattcctaaacctattaaatttcttgttatttagtgactttatcacagaggggcttag

SEQ ID NO: 337965 - DNA, 120 bp, Artificial Sequence
  ENSG00000137672_44 (sequence is synthesized)
acgatttcaatgcagccctgtcggagccggggatctgacaacagactggctcaccggcggcagacagttctccgtgagaaggggagaaggttagctaatcgaggaccagcatacatgttt

SEQ ID NO: 337966 - DNA, 120 bp, Artificial Sequence
  ENSG00000137673_0 (sequence is synthesized)
accaaatcaaccataggtccaagaacaattgtctctggacggcagctatgcgactcaccgtgctgtgtgctgtgtgcctgctgcctggcagcctggccctgccgctgcctcaggaggcgg

SEQ ID NO: 337967 - DNA, 120 bp, Artificial Sequence
  ENSG00000137673_1 (sequence is synthesized)
gaggcatgagtgagctacagtgggaacaggctcaggactatctcaagagattttatctctatgactcagaaacaaaaaatgccaacagtttagaagccaaactcaaggagatgcaaaaat

SEQ ID NO: 337968 - DNA, 120 bp, Artificial Sequence
  ENSG00000137673_2 (sequence is synthesized)
tctttggcctacctataactggaatgttaaactcccgcgtcatagaaataatgcagaagcccagatgtggagtgccagatgttgcagaatactcactatttccaaatagcccaaaatgga

SEQ ID NO: 337969 - DNA, 120 bp, Artificial Sequence
  ENSG00000137673_3 (sequence is synthesized)
cttccaaagtggtcacctacaggatcgtatcatatactcgagacttaccgcatattacagtggatcgattagtgtcaaaggctttaaacatgtggggcaaagagatccccctgcatttca

SEQ ID NO: 337970 - DNA, 120 bp, Artificial Sequence
  ENSG00000137673_4 (sequence is synthesized)
ttgcgcgaggagctcatggggactcctacccatttgatgggccaggaaacacgctggctcatgcctttgcgcctgggacaggtctcggaggagatgctcacttcgatgaggatgaacgct

SEQ ID NO: 337971 - DNA, 120 bp, Artificial Sequence
  ENSG00000137673_5 (sequence is synthesized)
ggacggatggtagcagtctagggattaacttcctgtatgctgcaactcatgaacttggccattctttgggtatgggacattcctctgatcctaatgcagtgatgtatccaacctatggaa

SEQ ID NO: 337972 - DNA, 120 bp, Artificial Sequence
  ENSG00000137673_6 (sequence is synthesized)
atggagatccccaaaattttaaactttcccaggatgatattaaaggcattcagaaactatatggaaagagaagtaattcaagaaagaaatagaaacttcaggcagaacatccattcattc

SEQ ID NO: 337973 - DNA, 120 bp, Artificial Sequence
  ENSG00000137673_7 (sequence is synthesized)
attcattggattgtatatcattgttgcacaatcagaattgataagcactgttcctccactccatttagcaattatgtcacccttttttattgcagttggtttttgaatgtctttcactcc

SEQ ID NO: 337974 - DNA, 120 bp, Artificial Sequence
  ENSG00000137673_8 (sequence is synthesized)
ttttaaggataaactcctttatggtgtgactgtgtcttattcatctatacttgcagtgggtagatgtcaataaatgttacatacacaaataaataaaatgtttattccatggtaaattta

SEQ ID NO: 337975 - DNA, 120 bp, Artificial Sequence
  ENSG00000137673_9 (sequence is synthesized)
gttaaataattatattaatttataataagtattgagcccttgctaagtgccaaacactgtactatatgcctgaaatgcattatttcatgtaatatactcataatgctacacacagaagat

SEQ ID NO: 337976 - DNA, 120 bp, Artificial Sequence
  ENSG00000137673_10 (sequence is synthesized)
ggacactcaggctatggagtcaagcaccactgatccaatttgctgtacgtctaccaattactctgtgtcattgggcaagttattgaatttctctgagcctcagtttcctcctctgtggaa

SEQ ID NO: 337977 - DNA, 120 bp, Artificial Sequence
  ENSG00000137673_11 (sequence is synthesized)
tggaaatataaatagttcccacatcaaggagtctttaaattaaatgagataatgcttatacagtgcttggaatgtattaataattaattaaattatagctctttcttcatatttccaaaa

SEQ ID NO: 337978 - DNA, 120 bp, Artificial Sequence
  ENSG00000137673_12 (sequence is synthesized)
aatacatgccccaaatggaaaagaaagagaagtagaaactatgatatttgagaagtatatgcaattctggaattattcactattttccagaaagaaccaactccatgatttagtatatca

SEQ ID NO: 337979 - DNA, 120 bp, Artificial Sequence
  ENSG00000137673_13 (sequence is synthesized)
tatttatcattttacatagtaggatattataggcacatgagagaactaatggagaagagctctggcataaataatcccaattagagacaatttttttaaggctaccaactggccctaaaa

SEQ ID NO: 337980 - DNA, 120 bp, Artificial Sequence
  ENSG00000137673_14 (sequence is synthesized)
tcagtgctcttttcttatgaagattaaaatcctttaatgagatatgattggtagatagatagttaatagatagatttagcaatattattataatttttataatctggtaatatagagcca

SEQ ID NO: 337981 - DNA, 120 bp, Artificial Sequence
  ENSG00000137673_15 (sequence is synthesized)
ctttttatagcagcagttggcaaactatgatgcatgagccaaatccagcccaccttctgtttttgtaaataaagttttactggaacacagtcaggctccttcatttccctattacctatg

SEQ ID NO: 337982 - DNA, 120 bp, Artificial Sequence
  ENSG00000137673_16 (sequence is synthesized)
actgtttgggctcaggctgcaactgtgacagagatcacaaagcttaaacacttgttatctgaccctttacagaaaaagtttgccaacccctgttttgtaacgtgaattattatttatata

SEQ ID NO: 337983 - DNA, 120 bp, Artificial Sequence
  ENSG00000137673_17 (sequence is synthesized)
tacagtcatgcactgcttaacaatgggaatacactctgagaatgagaactttggcaatcttgtcactgtgctaacatcatagaatacacttacacaaacccaggtgatacagcccactat

SEQ ID NO: 337984 - DNA, 120 bp, Artificial Sequence
  ENSG00000137674_0 (sequence is synthesized)
ctactgtgaggggatgaaggtgctccctgcatctggccttgctgtcttcctcatcatggctttgaagttttccactgcagccccctccctagttgcagcctcccccaggacctggaggaa

SEQ ID NO: 337985 - DNA, 120 bp, Artificial Sequence
  ENSG00000137674_1 (sequence is synthesized)
caactaccgcctcgcacaggcgtatcttgacaaatattacacaaataaagaaggacaccagattggtgagatggttgcaagaggaagcaattccatgataaggaagattaaggagctaca

SEQ ID NO: 337986 - DNA, 120 bp, Artificial Sequence
  ENSG00000137674_2 (sequence is synthesized)
agcgttctttggcctccaagtcaccgggaagttagaccagaccacaatgaacgtgatcaagaagcctcgctgtggagttcctgatgtggccaattatcgcctcttccctggtgaacccaa

SEQ ID NO: 337987 - DNA, 120 bp, Artificial Sequence
  ENSG00000137674_3 (sequence is synthesized)
atggaaaaaaaatactttgacatacagaatatctaaatacacaccttccatgagttctgtcgaggtggacaaagcagtggagatggccttgcaggcctggagtagcgccgtccctctgag

SEQ ID NO: 337988 - DNA, 120 bp, Artificial Sequence
  ENSG00000137674_4 (sequence is synthesized)
ctttgtcagaataaactcaggagaagcggatattatgatatcttttgaaaatggagatcacggggattcctatccattcgatgggcctcgggggactctagcccatgcatttgctcctgg

SEQ ID NO: 337989 - DNA, 120 bp, Artificial Sequence
  ENSG00000137674_5 (sequence is synthesized)
agaaggcctgggaggagatacacatttcgacaatgctgagaagtggactatgggaacgaatggttttaatttgtttaccgttgctgctcatgaatttggccatgccctgggcctggccca

SEQ ID NO: 337990 - DNA, 120 bp, Artificial Sequence
  ENSG00000137674_6 (sequence is synthesized)
ttccacagacccatcagcactgatgtacccaacttataagtacaagaatccctatggattccacctccccaaagatgatgtgaaagggatccaggcattatacggacctcggaaagtatt

SEQ ID NO: 337991 - DNA, 120 bp, Artificial Sequence
  ENSG00000137674_7 (sequence is synthesized)
cctggggaagcccactctgccccatgccccccatcacaagccatccatccctgacctctgtgactccagctcatcctttgacgctgtgacaatgctggggaaggagctcctgctcttcaa

SEQ ID NO: 337992 - DNA, 120 bp, Artificial Sequence
  ENSG00000137674_8 (sequence is synthesized)
aggaattcggcccagcactattaccagctccttcccccagctcatgtccaatgtggatgcagcttacgaagtggctgagaggggcactgcttacttcttcaaaggtccccactactggat

SEQ ID NO: 337993 - DNA, 120 bp, Artificial Sequence
  ENSG00000137674_9 (sequence is synthesized)
aacaagaggattccaaatgcaaggtcctcctcggactatttatgactttggatttccaaggcacgtgcagcaaatagatgctgctgtctacctcagggagccacagaagacccttttctt

SEQ ID NO: 337994 - DNA, 120 bp, Artificial Sequence
  ENSG00000137674_10 (sequence is synthesized)
tgtgggagatgaatactacagctacgacgaaaggaaaaggaaaatggaaaaagactatccaaagaatactgaagaagaattttcaggagtaaatggccaaatcgatgctgctgtagaatt

SEQ ID NO: 337995 - DNA, 120 bp, Artificial Sequence
  ENSG00000137674_11 (sequence is synthesized)
aaatggctacatttacttcttttcaggaccaaaaacatacaagtatgacacagagaaggaagatgtggttagtgtggtgaaatctagttcctggattggttgctaaatagaaaagcctag

SEQ ID NO: 337996 - DNA, 120 bp, Artificial Sequence
  ENSG00000137674_12 (sequence is synthesized)
tcttctcaagcaatgaggatgactacaagcagcctctaactggatcttaaggactaaagcagaatgtaggagagggattcttccaaaggccttcaaatcaaattagaattcactgagaat

SEQ ID NO: 337997 - DNA, 120 bp, Artificial Sequence
  ENSG00000137674_13 (sequence is synthesized)
aataatacttccaatttttttcatagttgtataatcagaatttcaatccacattagaaaagtttttatatgggcaactttatgcgaaatccaaatcaacacaatgcactctgcagttaga

SEQ ID NO: 337998 - DNA, 120 bp, Artificial Sequence
  ENSG00000137674_14 (sequence is synthesized)
caccattattttttcttacctaatatactgaagcagattgatccgtttgatttttatttccaggaggaagactagtggtggattccatgacatatattgtaattcttttcataggaaatg

SEQ ID NO: 337999 - DNA, 120 bp, Artificial Sequence
  ENSG00000137674_15 (sequence is synthesized)
tcattacagtatgaattataattatttacaagcaatggcttttgtggccatcatttggccatcatttgttataataaatataaatttcccaatttttacttaaaagacatcacaacaaaa

SEQ ID NO: 338000 - DNA, 120 bp, Artificial Sequence
  ENSG00000137674_16 (sequence is synthesized)
aatgggaagcgattcctgtgggccaccgagaagggctgagctcaaacacttgcctttggaggtccttgtgccctggaaagtcactgccttcggatggccactgtcactcagccaggaggc

SEQ ID NO: 338001 - DNA, 120 bp, Artificial Sequence
  ENSG00000137674_17 (sequence is synthesized)
aaagcacatattttggcacagctattatgacacagatatcaaagaagttctataataaaataataatctttagaagacttactatgtgccaagcactctgctacctgctttacaggaatt

SEQ ID NO: 338002 - DNA, 120 bp, Artificial Sequence
  ENSG00000137674_18 (sequence is synthesized)
taacaaagtattttttaaaaagcaaaatttacccagaatcccaccacctggagtgtatcagtctgcaggagctgctataaccaagtaccatagaccaggtggcttagacaacagaaatgt

SEQ ID NO: 338003 - DNA, 120 bp, Artificial Sequence
  ENSG00000137674_19 (sequence is synthesized)
attcctcacagttttggagggtaagaagttcaagatcaaggtactgcaaggattttctggagacggcaggttcacttgcggacaggaattcggcccagcactattaccagctccttcccc

SEQ ID NO: 338004 - DNA, 120 bp, Artificial Sequence
  ENSG00000137674_20 (sequence is synthesized)
agtgtacttacacaaacctagatggtattgcttactacccacttaggctatatggtataccctgttgctcctatagctcctacagacctatacaacatgatactgtactgaatactgtag

SEQ ID NO: 338005 - DNA, 120 bp, Artificial Sequence
  ENSG00000137675_0 (sequence is synthesized)
attattttctaaattctgtgctaacagaaccggcttcagctgaagaaagagaggaatgaagcgccttctgcttctgtttttgttctttataacattttcttctgcatttcccttagtccg

SEQ ID NO: 338006 - DNA, 120 bp, Artificial Sequence
  ENSG00000137675_1 (sequence is synthesized)
gatgacggaaaatgaagaaaatatgcaactggctcaggcatatctcaaccagttctactctcttgaaatagaagggaatcatcttgttcaaagcaagaataggagtctcatagatgacaa

SEQ ID NO: 338007 - DNA, 120 bp, Artificial Sequence
  ENSG00000137675_2 (sequence is synthesized)
aattcgggaaatgcaagcattttttggattgacagtgactggaaaactggactcaaacacccttgagatcatgaagacacccaggtgtggggtgcctgatgtgggccagtatggctacac

SEQ ID NO: 338008 - DNA, 120 bp, Artificial Sequence
  ENSG00000137675_3 (sequence is synthesized)
cctccctgggtggagaaaatacaacctcacctacagaataataaactatactccggatatggcacgagctgctgtggatgaggctatccaagaaggtttagaagtgtggagcaaagtcac

SEQ ID NO: 338009 - DNA, 120 bp, Artificial Sequence
  ENSG00000137675_4 (sequence is synthesized)
tccactaaaattcaccaagatttcaaaggggattgcagacatcatgattgcctttaggactcgagtccatggtcggtgtcctcgctattttgatggtcccttgggagtgcttggccatgc

SEQ ID NO: 338010 - DNA, 120 bp, Artificial Sequence
  ENSG00000137675_5 (sequence is synthesized)
ctttcctcctggtccgggtctgggtggtgacactcattttgatgaggatgaaaactggaccaaggatggagcaggattcaacttgtttcttgtggctgctcatgaatttggtcatgcact

SEQ ID NO: 338011 - DNA, 120 bp, Artificial Sequence
  ENSG00000137675_6 (sequence is synthesized)
ggggctctctcactccaatgatcaaacagccttgatgttcccaaattatgtctccctggatcccagaaaatacccactttctcaggatgatatcaatggaatccagtccatctatggagg

SEQ ID NO: 338012 - DNA, 120 bp, Artificial Sequence
  ENSG00000137675_7 (sequence is synthesized)
atcacaactttccgcagagaagtaatgttctttaaaggcaggcacctatggaggatctattatgatatcacggatgttgagtttgaattaattgcttcattctggccatctctgccagct

SEQ ID NO: 338013 - DNA, 120 bp, Artificial Sequence
  ENSG00000137675_8 (sequence is synthesized)
gatctgcaagctgcatacgagaaccccagagataagattctggtttttaaagatgaaaacttctggatgatcagaggatatgctgtcttgccagattatcccaaatccatccatacatta

SEQ ID NO: 338014 - DNA, 120 bp, Artificial Sequence
  ENSG00000137675_9 (sequence is synthesized)
ggttttccaggacgtgtgaagaaaatagatgcagccgtctgtgataagaccacaagaaaaacctacttctttgtgggcatttggtgctggaggtttgatgaaatgacccaaaccatggac

SEQ ID NO: 338015 - DNA, 120 bp, Artificial Sequence
  ENSG00000137675_10 (sequence is synthesized)
aaagggttcccgcagagagtggtaaaacactttcctggaatcagtatccgtgttgatgctgctttccagtacaaaggattcttctttttcagccgtggatcaaagcaatttgaatacgac

SEQ ID NO: 338016 - DNA, 120 bp, Artificial Sequence
  ENSG00000137675_11 (sequence is synthesized)
attaagacaaagaatattacccgaatcatgagaactaatacttggtttcaatgcaaagaaccaaagaactcctcatttggttttgatatcaacaaggaaaaagcacattcaggaggcata

SEQ ID NO: 338017 - DNA, 120 bp, Artificial Sequence
  ENSG00000137675_12 (sequence is synthesized)
aagatattgtatcataagagtttaagcttgtttatttttggtattgttcatttgctgaaaaacacttctatttatcaataaattcatagacctaaaataaacctcaacaggtcttttaat

SEQ ID NO: 338018 - DNA, 120 bp, Artificial Sequence
  ENSG00000137675_13 (sequence is synthesized)
ataaattctgcttcaaaatagaataaaaccattctttaacaacaagttgctggtcctagttctaaatatccaaattcaatggccattttgagctgcctgattcttttaataggaagttat

SEQ ID NO: 338019 - DNA, 120 bp, Artificial Sequence
  ENSG00000137675_14 (sequence is synthesized)
tatgtagaaacaaaaatctctgactgtactttaagcctatttcatgctttgtggacttggagaagacatgtcttataactgaatactgaaacatttattaaaccaatctttagcattcta

SEQ ID NO: 338020 - DNA, 120 bp, Artificial Sequence
  ENSG00000137691_0 (sequence is synthesized)
aaacggcccaggcatccacccagccgagagcacgatggctactggggagctcggggacttgggtggctactacttcaggttcttgcctcagaaaaccttccagtctctgagctctaagga

SEQ ID NO: 338021 - DNA, 120 bp, Artificial Sequence
  ENSG00000137691_1 (sequence is synthesized)
gatcaccagccggctccgccagtggtccatgctgggcagaatcaaggcgcaggcgttcggctttgaccagacctttcagtcctatcggaaggatgatttcgttatggcttttttcaaaga

SEQ ID NO: 338022 - DNA, 120 bp, Artificial Sequence
  ENSG00000137691_2 (sequence is synthesized)
cccaaatgttattcccaatttgaagttactttcagattcttctggacaatggatcatattaggaactgaagtgaaaaaaattgaagctataaatgttccttgcacacagctttcaatgtc

SEQ ID NO: 338023 - DNA, 120 bp, Artificial Sequence
  ENSG00000137691_3 (sequence is synthesized)
attttttcatcggttatatgatgaagatattgtacgagacagtggacatattgttaaatgtttagattctttttgtgatccatttctcatttctgatgagttacgaagagttttgctagt

SEQ ID NO: 338024 - DNA, 120 bp, Artificial Sequence
  ENSG00000137691_4 (sequence is synthesized)
ggaagactcagaaaaatatgaaatattcagccaaccagatagagaagagttcctgttttgtcttttcaaacatctttgccttggtggagccctttgtcaatatgaggatgtgattagccc

SEQ ID NO: 338025 - DNA, 120 bp, Artificial Sequence
  ENSG00000137691_5 (sequence is synthesized)
atatctggaaacaacaaagcttatctataaggatctggtgagtgttcgaaagaatcctcaaaccaagaaaatacagattacctcttctgtctttaaagtttcagcttatgattctgctgg

SEQ ID NO: 338026 - DNA, 120 bp, Artificial Sequence
  ENSG00000137691_6 (sequence is synthesized)
tatgtgctatccttcagcaaagaatcatgaacagacattttcttactttattgtggatcctatcaggcgtcaccttcatgttttataccactgttatggtgtgggagacatgtcttaatg

SEQ ID NO: 338027 - DNA, 120 bp, Artificial Sequence
  ENSG00000137691_7 (sequence is synthesized)
ttctttcagattatgtacctctactattttgtatttatcatttttctatcttaatactaacttatagataaacatatactttgcaaattaattcaagaaaaatgtaaggagcctacttag

SEQ ID NO: 338028 - DNA, 120 bp, Artificial Sequence
  ENSG00000137691_8 (sequence is synthesized)
agcagaagaaagcaaacaccaagatgcctttttaaaaatttgtgtggaatactaaccggggatcaaatttcatccataataaaatctataccaaaaaagttgtggaatttttacagaaag

SEQ ID NO: 338029 - DNA, 120 bp, Artificial Sequence
  ENSG00000137691_9 (sequence is synthesized)
tgcattgtgattcaagtgaatcctcaattttccatgtattttaatttataagctaattaattatggattgaaaatgtagcagaaaactaaacatgtctaccactgatcattaatatgaat

SEQ ID NO: 338030 - DNA, 120 bp, Artificial Sequence
  ENSG00000137691_10 (sequence is synthesized)
tgttagtttatttaacttgtttcatttaattacatttcttcattgcacaagcgtttacatctgtaaagctaggcaaagcataacaattcttttgcttcatttgttccacttataagcctc

SEQ ID NO: 338031 - DNA, 61 bp, Artificial Sequence
  ENSG00000137691_11 (sequence is synthesized)
taacaattcttttgcttcatttgttccacttataagcctcagtaaagaagtaacgttctgg

SEQ ID NO: 338032 - DNA, 88 bp, Artificial Sequence
  ENSG00000137691_12 (sequence is synthesized)
ggttctgaaagtggttgtaaactcttgtatcacataataaattaaaactgcagctgtcccacggctaatacaagagctacatgtaaac

SEQ ID NO: 338033 - DNA, 120 bp, Artificial Sequence
  ENSG00000137691_13 (sequence is synthesized)
tgcagctgtcccacggctaatacaagagctacatgtaaacagagaaagttgcctgatggcattagtaagtcgttcaaagagtgagaagcaggttatcttagtactgttccttatttcatt

SEQ ID NO: 338034 - DNA, 120 bp, Artificial Sequence
  ENSG00000137691_14 (sequence is synthesized)
catagaatgaatgtataacctagattgtttttggtttattttgatggcaaaaatcattgacatatatcccatgggtcatgggaagcctgtaagaaatgttgaggtttgaggaggagcaag

SEQ ID NO: 338035 - DNA, 120 bp, Artificial Sequence
  ENSG00000137691_15 (sequence is synthesized)
tttgaaagatgtgtttctgtgttgtgggataaagacgataatcttggacttgaacctggatttgaatctggaatgcagctggcaatttgggtatagagctcaggagaaagagtatgtttt

SEQ ID NO: 338036 - DNA, 120 bp, Artificial Sequence
  ENSG00000137691_16 (sequence is synthesized)
acttctaatacctaacacaatgacttggcatattaaatgtttattgaatgaataactactttctagatatcctcataatacccatagatttttttaaattacataaaaacataaaatcaa

SEQ ID NO: 338037 - DNA, 120 bp, Artificial Sequence
  ENSG00000137691_17 (sequence is synthesized)
acgatggctactggggagctcggggacttgggtggctactacttcaggttcttgcctcagaaaaccttccagtctctgagctctaaggagatcaccagccggctccgccagtggtgagga

SEQ ID NO: 338038 - DNA, 120 bp, Artificial Sequence
  ENSG00000137691_18 (sequence is synthesized)
accgaggcacagggagagaagaggcccttggtcttcgcggctgtggaggcgcaggccgggcgtcgaggggcccgcgcgggtcggcgccattctgagtgaaccctgaggcttcctgagtga

SEQ ID NO: 338039 - DNA, 120 bp, Artificial Sequence
  ENSG00000137691_19 (sequence is synthesized)
accccgaaccacccgggaagggcggatgctgtgggtgggatcggttatcggtgcgctctgagagggtgccagcccccagatgatttctttttcctcctctgccccaggtccatgctgggc

SEQ ID NO: 338040 - DNA, 120 bp, Artificial Sequence
  ENSG00000137691_20 (sequence is synthesized)
taattactttttattaatagagttgttacaactggagttaacaatcaggacaatgttatgcctaggagaaaagacaatgttatttagagttttgttaaaattaaaagttgatagagtatg

SEQ ID NO: 338041 - DNA, 120 bp, Artificial Sequence
  ENSG00000137692_0 (sequence is synthesized)
gcttgctgtgactggtggagctgccgcgctgtccgcgttatctcctcccggtgagaacgaaccgcagtgtccaccggcgaggagccagccctgtcccggtcagagaaagacgacgaggat

SEQ ID NO: 338042 - DNA, 120 bp, Artificial Sequence
  ENSG00000137692_1 (sequence is synthesized)
acctgggagcgggcggcggccgggctgggccgcgccggtgcgggctggcgactctgctcctccgcttgctgctgtctctgggaactgggtgccagcgctgaggggcttccagcggacagg

SEQ ID NO: 338043 - DNA, 120 bp, Artificial Sequence
  ENSG00000137692_2 (sequence is synthesized)
gacccccttccccggctcccctgcccaccctgccggggagggcggaagatgccggtgaagaagaagagaaaatcccctggggtggcagcagcagtagcggaagacggaggcctcaaaaag

SEQ ID NO: 338044 - DNA, 120 bp, Artificial Sequence
  ENSG00000137692_3 (sequence is synthesized)
tgtaaaatctccagctattgcagatcccaaccccctgctagactaataagtggagaggaacatttttcaagcaagaagtgcctggcttggttttatgaatatgcaggtcctgatgaagtt

SEQ ID NO: 338045 - DNA, 120 bp, Artificial Sequence
  ENSG00000137692_4 (sequence is synthesized)
gtagggccagaaggaatggaaaaattttgtgaagacattggtgttgaacctgaaaatattattatgttagttttagcgtggaaattggaggctgaaagcatgggattttttaccaaggaa

SEQ ID NO: 338046 - DNA, 120 bp, Artificial Sequence
  ENSG00000137692_5 (sequence is synthesized)
gaatggttaaagggaatgacttcattacagtgtgactgcacagaaaagttacaaaacaaatttgactttttgcgctcacagttgaatgatatttcgtcatttaagaatatctacagatat

SEQ ID NO: 338047 - DNA, 120 bp, Artificial Sequence
  ENSG00000137692_6 (sequence is synthesized)
gcctttgattttgcaagggataaagatcagagaagccttgatattgatactgctaaatctatgttagctcttctgcttgggaggacatggccactgttttcagtattttaccagtacctg

SEQ ID NO: 338048 - DNA, 120 bp, Artificial Sequence
  ENSG00000137692_7 (sequence is synthesized)
gagcaatcaaagtatcgtgttatgaacaaagatcaatggtacaatgtattagaattcagcagaacagtccatgctgatcttagtaactatgatgaagatggtgcttggcctgttcttctt

SEQ ID NO: 338049 - DNA, 120 bp, Artificial Sequence
  ENSG00000137692_8 (sequence is synthesized)
gatgaatttgttgagtggcaaaaagtccgtcagacatcatagcaagaactatgtgaagaaaatgcaaacctttcaattcccacgtgtatacaagctaatgtgatgagggggaaaaaaatc

SEQ ID NO: 338050 - DNA, 120 bp, Artificial Sequence
  ENSG00000137692_9 (sequence is synthesized)
caacgggtgcattttcattcatatgaaagacttctcatagtacttttttttcctttttttaaaggaggtttttcttgttacatgtgatgggcattgagccacacctcttcttagactgaa

SEQ ID NO: 338051 - DNA, 120 bp, Artificial Sequence
  ENSG00000137692_10 (sequence is synthesized)
tattgaagtttttgttttgagttatgtttataacatttatttcagaacaataaagattcagatttgtgacaaaggccttaaagtgaagatgtcccttgagtgtcagagtggtatttattt

SEQ ID NO: 338052 - DNA, 120 bp, Artificial Sequence
  ENSG00000137692_11 (sequence is synthesized)
ttgtaaatttgaattttttgatttttgaggttccaattcaccgtgaatttacagaattttcaagattttaaacagtcttaatatttggcaacatagtctgctgatggtatggctcattat

SEQ ID NO: 338053 - DNA, 120 bp, Artificial Sequence
  ENSG00000137692_12 (sequence is synthesized)
agtcatctctgcacaatttggaagactgttggccttgacttctgggataatgatttgctgatgcagctaataaacatttctaggtattggaaaaatgctcctacttttagctctgggttt

SEQ ID NO: 338054 - DNA, 120 bp, Artificial Sequence
  ENSG00000137692_13 (sequence is synthesized)
ctataaaagctgccaaggtcttatgcagatgtcttatctcagagagcttagaattggaaagattatgtccagttgttttgttttctaaaaaagttgtattattaagttgtatcatcatta

SEQ ID NO: 338055 - DNA, 120 bp, Artificial Sequence
  ENSG00000137692_14 (sequence is synthesized)
ttattgttgataatagcatatttatatttttaactgtcattatatagggaattttgtttaaagcactttttttttttttttttgccttaagagaacgttagctgtgatatggatttaatt

SEQ ID NO: 338056 - DNA, 120 bp, Artificial Sequence
  ENSG00000137692_15 (sequence is synthesized)
aagatacacataggaaaagaagacaatagaataaggaatcatgagagaactctgggtataattaattgtgcacaactcaatagagccatttacgttggtagtattgcagcttgctaatta

SEQ ID NO: 338057 - DNA, 120 bp, Artificial Sequence
  ENSG00000137692_16 (sequence is synthesized)
tcacaattttctgcctgttggtaatcaagtgtcttgaggaaagggaaggctttcctaattcatgtaaaaggcacttttgtactagcagcaggcctgtttgtacattccttttcaaaccat

SEQ ID NO: 338058 - DNA, 120 bp, Artificial Sequence
  ENSG00000137692_17 (sequence is synthesized)
ccagtatcccagtgatatgaaaactttgttcatattcatagcccagtcacaacttcagaaacatttctagtgtcattgtttgagtagagagaagtaaagaggttatttttccataataag

SEQ ID NO: 338059 - DNA, 120 bp, Artificial Sequence
  ENSG00000137692_18 (sequence is synthesized)
ggagtgtttctattaggatttaaggtaaaggttgatttttcagtggtgaatttgtttaaagaatgatttctccatattgattacctaagagaatgacattttaaagtgttttattgtttg

SEQ ID NO: 338060 - DNA, 120 bp, Artificial Sequence
  ENSG00000137692_19 (sequence is synthesized)
ctttttagttaatcagctgggaaaaaaatgattgccactgttttacttgccttcttaataagattactttgtacagttttctgaaacacccataatagtgggagacagttttcctaaatg

SEQ ID NO: 338061 - DNA, 120 bp, Artificial Sequence
  ENSG00000137692_20 (sequence is synthesized)
tcttatagaaaaggataatacagaatgctcctcttaagtattagaatcactgagttatgaactgagcataccagtggtgttaggatttaatattatgaatgatgttttaatatcaaattt

SEQ ID NO: 338062 - DNA, 120 bp, Artificial Sequence
  ENSG00000137692_21 (sequence is synthesized)
attataaggaaagcatttagatttgtagacctttaaatttataatttagttgactcttcaaggcacatctgaactgaagaacatatccacttttgttaaattccaaaacatataagcaaa

SEQ ID NO: 338063 - DNA, 120 bp, Artificial Sequence
  ENSG00000137692_22 (sequence is synthesized)
atcttataaattgtccatttgtaacctgaactaatggtaatatctttttcatcttcagtatttgagtaaaatagggaacacttaaagcttatagatgacatgttttttaaaaggtatatt

SEQ ID NO: 338064 - DNA, 120 bp, Artificial Sequence
  ENSG00000137692_23 (sequence is synthesized)
tatgaaagcacaggcatccttggtatacgcaggagattgataccaggacccttgtgtatacccaaatctgtgcatacttaagtcctacagtcatccctgtggaacctgcctgtataaaaa

SEQ ID NO: 338065 - DNA, 120 bp, Artificial Sequence
  ENSG00000137692_24 (sequence is synthesized)
gtcagccctccccgtgtatgtaggtgtcgcatcccgggaatactgtattttcaatccatgtttggtttaaaaaaatctgcgtataagcagacccacacagttcaaactcatgctgttcaa

SEQ ID NO: 338066 - DNA, 120 bp, Artificial Sequence
  ENSG00000137692_25 (sequence is synthesized)
gggtcaacagtatttactttgcatacttatccaaagatacctttaagactttttgagtctgaaaatgaaatttactttattttttcccttaaagtcaactgtcctatcctaccctagcca

SEQ ID NO: 338067 - DNA, 120 bp, Artificial Sequence
  ENSG00000137692_26 (sequence is synthesized)
tactttggagtccagtaccactgaggccacgcttgctttactctattgctccatctatttctcttaccttcttaaagttataacatttgcctactttgaaggcaaatttactctgcctaa

SEQ ID NO: 338068 - DNA, 120 bp, Artificial Sequence
  ENSG00000137692_27 (sequence is synthesized)
ttcatcagtcagggtgtgggctgtgtcccttcctgtctttcctttgttaattttgaatagcatttaatttactgggaaatttatgatcaaaaatgttaagtgatataaacaatacaatat

SEQ ID NO: 338069 - DNA, 120 bp, Artificial Sequence
  ENSG00000137692_28 (sequence is synthesized)
taaggaccctgcagtataaaaaagtctaactgttgtggttccttttttgactagttagctttaagtgccttcccacgaaccctgttgtaaaattttcagaactacttccctttgtacagg

SEQ ID NO: 338070 - DNA, 120 bp, Artificial Sequence
  ENSG00000137692_29 (sequence is synthesized)
atgaaataccgtatggtgctttataacatggagttgagttgtttctataagaatattatacaaatgtaatactactgggagaaagtagagccagatgttgattggacagattgcaacccc

SEQ ID NO: 338071 - DNA, 120 bp, Artificial Sequence
  ENSG00000137692_30 (sequence is synthesized)
cccacccccccactcctcggggccaataattcttaataaggtatgatgttaatacctctaggaaattgccagggattcaggtgacagtgtgtgatgaaaacggtgtattgtgtgctggcc

SEQ ID NO: 338072 - DNA, 120 bp, Artificial Sequence
  ENSG00000137692_31 (sequence is synthesized)
tgactgcattaccatgtttgtcttctattgtctaatgatttcttatttcttaaatgctgctgataaaattattgatataatacatttttgacagtagtagcatttttgtgtataatgtat

SEQ ID NO: 338073 - DNA, 120 bp, Artificial Sequence
  ENSG00000137692_32 (sequence is synthesized)
agattttattggtttttactcagaagcactctagattagtgtttcttgaactgcaatttgaagccttctttgggaatgttagattgaggagtatttctcttaaatacaaatgccttttca

SEQ ID NO: 338074 - DNA, 120 bp, Artificial Sequence
  ENSG00000137692_33 (sequence is synthesized)
tctagcaaaccaaaaattatatcttaatattgaatgccatcactcggggtcggggtgggagtaaattctgagataactccagagttttcaaggcatacaaggtatgtggaatagcacaga

SEQ ID NO: 338075 - DNA, 120 bp, Artificial Sequence
  ENSG00000137692_34 (sequence is synthesized)
ttcagaatacatgatacatacgtataaaatgaaacatttcactttgaagtatttcttcaacaaaacatgtcctgtctgcctacttgctaatgtgaaattatgaaaggatttattgaaata

SEQ ID NO: 338076 - DNA, 120 bp, Artificial Sequence
  ENSG00000137692_35 (sequence is synthesized)
tatgttcagtttgaggtgtaattggtaagaatgccaggtgttgttcttctgccctcttaaagaagtgtacttaaaactattgtgataattcatctctgataaaactttgttctggccttc

SEQ ID NO: 338077 - DNA, 120 bp, Artificial Sequence
  ENSG00000137692_36 (sequence is synthesized)
aaggctcttacagcttaatgttttaaatgtctaaggcatcaaataaattgagggcattttaataaaaaaaaaaaaggaaaactaaatgcctttctttgttaaagcaaaaggccaaaaata

SEQ ID NO: 338078 - DNA, 120 bp, Artificial Sequence
  ENSG00000137692_37 (sequence is synthesized)
aaaaataaaattaaaaccccccccaaaaaaacccaaaagtcttactcctaaagaagaattcttacctctaaggaggaatccttccctcttgaggaaataccactttttgagtgacattag

SEQ ID NO: 338079 - DNA, 120 bp, Artificial Sequence
  ENSG00000137692_38 (sequence is synthesized)
aaatcatcacaaggaaacatttcaaagaaaggatcatttttttttcaggagaaagaggaataacaatttcattaacttcctcaataggaaaggctagtctgaattattaaatattctgga

SEQ ID NO: 338080 - DNA, 120 bp, Artificial Sequence
  ENSG00000137692_39 (sequence is synthesized)
ttatatctttttttaatgatatagttttattacttcaggaatatttggtaagaaccaggtaaacctattgtttaagatttgttcttttttgttaatagacctatgattagtatggtggaa

SEQ ID NO: 338081 - DNA, 120 bp, Artificial Sequence
  ENSG00000137692_40 (sequence is synthesized)
gcccaaaaagcagtctaatttttatgataaacttacagactgtggaaagatgaatttctgccccaaaccttggataagttgtcattaatttaattgtagagatttttctagtgaacttgt

SEQ ID NO: 338082 - DNA, 120 bp, Artificial Sequence
  ENSG00000137692_41 (sequence is synthesized)
acttcactggaacaaatctttagatcttttaaagcacaatttatttatgtttttaaaaacagtcttaaaactgatcgatcatacatttgctgtgtccaccttacaatcttttacattcta

SEQ ID NO: 338083 - DNA, 120 bp, Artificial Sequence
  ENSG00000137692_42 (sequence is synthesized)
ttagtacagatagtgtttcctttgctccttttcctgaccagttgttattggtgtgaccattttctttttaggatcgatgaaacattttgctgtgtatgctgtgtcatgtattagaacctc

SEQ ID NO: 338084 - DNA, 120 bp, Artificial Sequence
  ENSG00000137692_43 (sequence is synthesized)
ttataatatggctcatttttacatggtttctgatttaccatgtgttaaatattccttaaaatacatctagtaacactatatagtaaggttagattttaacctaagtattgaatcttgtct

SEQ ID NO: 338085 - DNA, 120 bp, Artificial Sequence
  ENSG00000137692_44 (sequence is synthesized)
tataatgccaattttattggagctttgttgcatttatttttggctctatggtccataaatgggagttaatagcaaacgttttattaaaaatgtcttagctttcccccaaattatatcatt

SEQ ID NO: 338086 - DNA, 120 bp, Artificial Sequence
  ENSG00000137692_45 (sequence is synthesized)
ttttagaagttttatccttctggggtgtttttggctttctgagctttaagatattaatgaattttttccacatacttcatgggtttggttttaagtatgaggttaaaattgtggatttta

SEQ ID NO: 338087 - DNA, 120 bp, Artificial Sequence
  ENSG00000137692_46 (sequence is synthesized)
aaaagctaataaatacttgaagtgaatatatagagagagccagatttccccaaaactctgtgagctgtgtgtgttttgtgtagaatattagccataattaacttttcccttttttttttt

SEQ ID NO: 338088 - DNA, 120 bp, Artificial Sequence
  ENSG00000137692_47 (sequence is synthesized)
ggattacaggtgtgagccaccactcctgggaaataattaactttttcacatagaaaatagatcacagataaaagctcctcacatattttgaaggtcaaaaaaaaatttgctgttgctaac

SEQ ID NO: 338089 - DNA, 120 bp, Artificial Sequence
  ENSG00000137692_48 (sequence is synthesized)
ggtcaaaaaaaaatttgctgttgctaacaattgcctttgaaccatgaaagaggaaaaactaactttatttgagcaacttgtcatttgagacttaaactaacttatcaaacttagcagaat

SEQ ID NO: 338090 - DNA, 120 bp, Artificial Sequence
  ENSG00000137692_49 (sequence is synthesized)
taacttgtgagtattgacttaagtgaagttagtttatatactttactattctgtcatgcaaataaaatggcttagagcaagttcatacacagttacttttatctacaaatgtagaaatct

SEQ ID NO: 338091 - DNA, 120 bp, Artificial Sequence
  ENSG00000137692_50 (sequence is synthesized)
acctgagtttgattttctttttgtgacattcctgttaatgtcacttttaaacaagccacttaacctatgtcattttcagtttcttctgtaaaatggcgataatgatacctaccagtattg

SEQ ID NO: 338092 - DNA, 120 bp, Artificial Sequence
  ENSG00000137692_51 (sequence is synthesized)
ttacgaagttcaaataggccctatccacagcacttagtaggtgttaaatgaatgcgtcttgttacttgaacaagaagtggttagttatgatagtttatttttttctgacaaatttactgt

SEQ ID NO: 338093 - DNA, 120 bp, Artificial Sequence
  ENSG00000137692_52 (sequence is synthesized)
cttttataaaaagaaatagctaggatttcctgtgttatcctgccatttttataatcaaacaaaattattaatattctccttagactaaatcattaatttaacaaatctcaagcatctact

SEQ ID NO: 338094 - DNA, 120 bp, Artificial Sequence
  ENSG00000137692_53 (sequence is synthesized)
atatgccaagaagtattctaggcctgaatatattgcagggcacgaagcaagacagtaatttcgaacctttatgggatttttattttaattggttagtaaaatagtttatcatttggtgac

SEQ ID NO: 338095 - DNA, 120 bp, Artificial Sequence
  ENSG00000137692_54 (sequence is synthesized)
aaggttatatggggaaagtaagttgaggaaggggcccagagagtgtgtgaggataggattactattaagtagcatgtacactgatatgtgacattgagcagaggcctgaggaggtgaatg

SEQ ID NO: 338096 - DNA, 120 bp, Artificial Sequence
  ENSG00000137692_55 (sequence is synthesized)
gttgtgcagtgtggatatctgggaggagagcattccaggcagaaggaatattacatgctaaggccctgagctggtacagagtgtaaagaaacagtaaagagatcagtgtgactgtagtga

SEQ ID NO: 338097 - DNA, 120 bp, Artificial Sequence
  ENSG00000137692_56 (sequence is synthesized)
acaataatagcattttagggagaattagaaaatgaactgagagagattgggagtaataatcctgcctgattgtaggtaattacgtagggcattatagccctttctcaagagtaggacttt

SEQ ID NO: 338098 - DNA, 120 bp, Artificial Sequence
  ENSG00000137692_57 (sequence is synthesized)
actgagtgagctagcaagcaattaggattcagatcaaagcaaggatggaagcaggtagtagtaggaagataatatggtaaatccaggtgacaaatggtacaatttgagattaagagtaat

SEQ ID NO: 338099 - DNA, 120 bp, Artificial Sequence
  ENSG00000137692_58 (sequence is synthesized)
ggaaataataagtggtcagattctgaatgtattttggtggtagcaccaaaaggatatgctgatagaatggatgtgaggtatgaaaaaaagaatgatcaaggtttttggcttgaagaatga

SEQ ID NO: 338100 - DNA, 120 bp, Artificial Sequence
  ENSG00000137692_59 (sequence is synthesized)
agtgggcattaataagatggcgaagactcagaggagcaggcttaagcgggtagattgagagtttacttttggatatgttatggtagacttgtctgtcagacgtccaaaggaaaatgtaga

SEQ ID NO: 338101 - DNA, 120 bp, Artificial Sequence
  ENSG00000137692_60 (sequence is synthesized)
gtgggcagttggatatttgaacctggaaaagtagaggtctgggctggagataaatatatttggaagtcatcagtgtgtaatcttattttaagtcaggacatggatgaaaccacttagaga

SEQ ID NO: 338102 - DNA, 120 bp, Artificial Sequence
  ENSG00000137692_61 (sequence is synthesized)
gtaagtgtagccagaggatagaacttaattgaagacatatgatcgatgaaattcaaggccaacttttgtgatttttcaaatagaaataaaatgttaacattttctaccacacatatacaa

SEQ ID NO: 338103 - DNA, 120 bp, Artificial Sequence
  ENSG00000137692_62 (sequence is synthesized)
accattactttctatagtgttgtagaagcactaagatttaaaaagcaagattgataatagttgccaaatatgtaaacaaatggcaaattaaattgaggagggagtgtcactttattcttg

SEQ ID NO: 338104 - DNA, 120 bp, Artificial Sequence
  ENSG00000137692_63 (sequence is synthesized)
gaataaagtttttgttttgaagtaatacagttttttatattaagaataacaacatctggagtgctagtttctttttctcattgttggaaattgctattccaattcaatttgacagtttta

SEQ ID NO: 338105 - DNA, 120 bp, Artificial Sequence
  ENSG00000137692_64 (sequence is synthesized)
gcactagagggcaggcttgcttctagattgtgaagagttctacatgaattaatatagccaaacagcgcaggttgaacatccttaacttgaaaatctgaaattcaaaatgcttcaaaatcc

SEQ ID NO: 338106 - DNA, 120 bp, Artificial Sequence
  ENSG00000137692_65 (sequence is synthesized)
aaaactttttgagtgttgacatgatgccacaagtggaaaattccacacctgacctcatatgatgggtcacagtcaaaatgcaggtgtacaacagtttactctgttcccaagagaaaaata

SEQ ID NO: 338107 - DNA, 120 bp, Artificial Sequence
  ENSG00000137692_66 (sequence is synthesized)
ataaatgaatttcatgtttagacttgggtcccatccccaaggtatcttattatgaatatgcaaatattcaaagatcaaaaaaaagaaatctaaaacacttccggtcccaagcattttgga

SEQ ID NO: 338108 - DNA, 120 bp, Artificial Sequence
  ENSG00000137692_67 (sequence is synthesized)
aaaagaaatctaaaacacttccggtcccaagcattttggataagagatattcaacctgcacctacattcaatctcaattaatgaatgcagttgtttcttatgtgacaggtttgccatcta

SEQ ID NO: 338109 - DNA, 120 bp, Artificial Sequence
  ENSG00000137692_68 (sequence is synthesized)
ctatgtttttttctagtgctaggaaagcataaaataaggctaattgattttagtacatctaggactggcagttgacgctaatatacatttgaatataaatgtatatttatattccaagga

SEQ ID NO: 338110 - DNA, 120 bp, Artificial Sequence
  ENSG00000137692_69 (sequence is synthesized)
gtttccaaggaaactcaagtgtagcttaattatactcagatttgatatagagggtcttccaccacatatatgaatattaaagccagtcagaagaaatcctggacatgaaaacattttttc

SEQ ID NO: 338111 - DNA, 120 bp, Artificial Sequence
  ENSG00000137692_70 (sequence is synthesized)
aggaaataattaactatgtgctgggtattattatatgagcgtggctacaaagatgaataaaatatagtccctgcctaaataagctttgttgtagcatcttacagcacttaatatcttgtg

SEQ ID NO: 338112 - DNA, 120 bp, Artificial Sequence
  ENSG00000137692_71 (sequence is synthesized)
ctgtatctatttaaatgtctttttcccttcaataatagaaatcctgactcacttatttttggtgcctccaagtgcccatcacacaattcagtttacagtgtttgaacatgtgaataatga

SEQ ID NO: 338113 - DNA, 120 bp, Artificial Sequence
  ENSG00000137692_72 (sequence is synthesized)
gagagagaaaaataagaaaacggtcagggaattggggcctttgaaaaaacttattttcacatttttacccttagagagatgcttttcctattaacacgtctaaagattatggagacaatt

SEQ ID NO: 338114 - DNA, 120 bp, Artificial Sequence
  ENSG00000137692_73 (sequence is synthesized)
ctaaccttctatctttgctcccactacttcttcaagcagactttaaccccattcctcaagagcagttattggcagccatagagagtgggaggtcaagccttttttagtcattggagtaaa

SEQ ID NO: 338115 - DNA, 120 bp, Artificial Sequence
  ENSG00000137692_74 (sequence is synthesized)
caggagacatagatgtggaaattgggaggttctctctatctggcttacgtcagtttgagaagtttgacatgaaatggaaccttctggaatgaggttctttttcctgcttttcacctggaa

SEQ ID NO: 338116 - DNA, 120 bp, Artificial Sequence
  ENSG00000137692_75 (sequence is synthesized)
agttttcccatacatggtcctcttgcacccctagtccttttagggtacctatttctgtgtgctagttctttcatttccttgtctgtaacatgaggataataatagtccttatctaatagc

SEQ ID NO: 338117 - DNA, 120 bp, Artificial Sequence
  ENSG00000137692_76 (sequence is synthesized)
attattttgaggatgaaatgaaatacaggcagtaaatattagttactctttgctatctggaaaaacatcaattgaacctcataggatggacttgtgttcaataagtgttatatatagtag

SEQ ID NO: 338118 - DNA, 120 bp, Artificial Sequence
  ENSG00000137692_77 (sequence is synthesized)
agtcaaatggaaaaattgaaccactcagatacatttttttcattgatacataatagatgtatttatttggggggtacatgtgataatatgatatattcatataattaaaattcattgata

SEQ ID NO: 338119 - DNA, 120 bp, Artificial Sequence
  ENSG00000137692_78 (sequence is synthesized)
catgatgtatttatttgggggtacatgtgatagtatgatatattcatataattaaaattcattgatacataatgtatttatttggggggtacatgtgatagtatgatatattcatataat

SEQ ID NO: 338120 - DNA, 120 bp, Artificial Sequence
  ENSG00000137692_79 (sequence is synthesized)
taaatgaagataattgggatatccatcaccttaaatatttatgttttctttacactaggaacattcgaattctctttagctattttgaaatgtacaatagtttagtgttaatagatcagt

SEQ ID NO: 338121 - DNA, 120 bp, Artificial Sequence
  ENSG00000137692_80 (sequence is synthesized)
catcctactgatatatcgaacaccaggtcttatttcttctgtctacatagacatatttagaaatgcaaatctcttaggaaattaatctgtaatgtcaatgatgcacactgatttgtatta

SEQ ID NO: 338122 - DNA, 120 bp, Artificial Sequence
  ENSG00000137692_81 (sequence is synthesized)
cttgctttctttgtaggcagtatagtgaaatggttcattaaatggatgctaaatatgactaaatgatcaatttacagtgtagttggcaccaagtaataaatgctcagtaacatagctact

SEQ ID NO: 338123 - DNA, 120 bp, Artificial Sequence
  ENSG00000137692_82 (sequence is synthesized)
atggctgtctttaaaagtggattggtttgacttcataggaaggactctatttttaaaaaagagaaatattaaaaaataaaaagccaaaattctatgatgtcttattacattgagtctctt

SEQ ID NO: 338124 - DNA, 120 bp, Artificial Sequence
  ENSG00000137692_83 (sequence is synthesized)
aaatcagtttttttttaattaagtagcaggaccctattgcaaaataagttttacctagaagcacagtatttaaaacagaaagctaaaatactctggttaagtgggaagctccctgtcttc

SEQ ID NO: 338125 - DNA, 120 bp, Artificial Sequence
  ENSG00000137692_84 (sequence is synthesized)
ctcgctgctagtattatttctgaaaaacctcaaaggaactccttgctctctgaatagcaggttttaaaaaccactacttgcacatttgcaccttgacatcaaacatgtgaacaaagtaat

SEQ ID NO: 338126 - DNA, 120 bp, Artificial Sequence
  ENSG00000137692_85 (sequence is synthesized)
agagtgagaaaactgaatttctatttaggaatttctattttattctctctataaaaagccaagaagtggttggtgtttggaataacatgaaaaatattccaagtatctttggaaatactt

SEQ ID NO: 338127 - DNA, 120 bp, Artificial Sequence
  ENSG00000137692_86 (sequence is synthesized)
acactagaactataaggtttatgataattctatcttagattcattatctagagctggtctaaaaaaggatgatatgtaagaactaccaagagagacttggagtagatacaagaatgaagg

SEQ ID NO: 338128 - DNA, 120 bp, Artificial Sequence
  ENSG00000137692_87 (sequence is synthesized)
aatgaatcaatatccaataaatatccataggcccaggctttgctatgccctcttattacacaggataaaacagtgtagttgttagtttctacctttgaagattatgatccttaaaaagga

SEQ ID NO: 338129 - DNA, 120 bp, Artificial Sequence
  ENSG00000137692_88 (sequence is synthesized)
aacagctctgtgaacagagaccatgttattcataggtgttcctcacttgtttccaccacataataggtatttaatgaatgaaaaaattcacgtctctctttgatcctagactgcaagtta

SEQ ID NO: 338130 - DNA, 120 bp, Artificial Sequence
  ENSG00000137692_89 (sequence is synthesized)
cttaaaagaaatggaccgtattttacttatctctcatggcctgcaaattgagtttgcttactgaattaatgaatgaatgaccaattgtacacatatgtctgtaaaacgtttacatatcca

SEQ ID NO: 338131 - DNA, 120 bp, Artificial Sequence
  ENSG00000137692_90 (sequence is synthesized)
cattcccattagactgagattcttgagggcagaaaccatgtcttcagctctcagcatggtgcctgactcatggtaggttgtcaaaagcatttgcagaactgaataaaacttacgtttaag

SEQ ID NO: 338132 - DNA, 120 bp, Artificial Sequence
  ENSG00000137692_91 (sequence is synthesized)
tagtactggagcagtctcacataaccgggcacagtgtcttctaaatagacactaaaattatttcataattaaagacagatctcactaagcattttctgagttagtgccagttgaataata

SEQ ID NO: 338133 - DNA, 120 bp, Artificial Sequence
  ENSG00000137692_92 (sequence is synthesized)
tgacaataagctataggagttcagaggagagtgagttctgtggactgaaatagtcaaagtggattttcagagcagatgagacgcgatgaaggctggggctactttggtgttttaagaaca

SEQ ID NO: 338134 - DNA, 120 bp, Artificial Sequence
  ENSG00000137692_93 (sequence is synthesized)
ttaattaggcagcaggaaaatctgaggacagggagactagtaaggaaggctggaaagagccctgggtttggagttcagagatctgtgttcagagtcctttgcttcttagtgactatgtga

SEQ ID NO: 338135 - DNA, 120 bp, Artificial Sequence
  ENSG00000137692_94 (sequence is synthesized)
ccttgagaagataacttgagctccctttttcctcttctgtgaggtagaggtaagattgatgtgcatattgatattgtacttaaaagtgtttgtaaaatgctaagtaaaacctaatgctat

SEQ ID NO: 338136 - DNA, 120 bp, Artificial Sequence
  ENSG00000137692_95 (sequence is synthesized)
gctttgaatgtagtgggttccaaatatttgtttaatgacaaagaataaatgatattgactaatgaaaataatggagccactggaatgtcacctcctgcatctgccagtaaacctgttaac

SEQ ID NO: 338137 - DNA, 120 bp, Artificial Sequence
  ENSG00000137692_96 (sequence is synthesized)
acaggggtggcgggggggggggggaagtaaatatgtgaagccaccaaatctcatgatcaggagaaaaactttggaactcccatgagactccaaagttatgtcacaggtgaataagtcatg

SEQ ID NO: 338138 - DNA, 120 bp, Artificial Sequence
  ENSG00000137692_97 (sequence is synthesized)
aacttttcatgctgatatcatttctaaggttgctgccttgtcagaagaagcaaaccacaagataaaccatgcagaaaatctttttttaaaaaagtttcctgaaggatggatggttcattt

SEQ ID NO: 338139 - DNA, 120 bp, Artificial Sequence
  ENSG00000137692_98 (sequence is synthesized)
gttctgcttgtcactttacttactaatgagtcatttttttccttaaccagtaatttgttttaaatttggtcataagatggtatgttgactagtccaatgttacaaaataattggaaaaaa

SEQ ID NO: 338140 - DNA, 120 bp, Artificial Sequence
  ENSG00000137692_99 (sequence is synthesized)
gatgacagaccaccaactgaataagggaaatctggttcttgaacttccaatgtatgaattggtgatggtaagcttagtctttatgatgtaagattggatttattggaacttctttatgtc

SEQ ID NO: 338141 - DNA, 120 bp, Artificial Sequence
  ENSG00000137692_100 (sequence is synthesized)
cagaagttgcagcacctttctttgtctctggaatgcccaagatctctactgcatcctgtagacatggagggtttccccccttattctgggtctgattatttttaaagaaacaccctttcc

SEQ ID NO: 338142 - DNA, 120 bp, Artificial Sequence
  ENSG00000137692_101 (sequence is synthesized)
ttacccatcatggagacactactaaccttgtatatacttttattagagtgctgataacaccatattacagtagcatacttacatatctgttttcttaactgtgagctccttgagagcagg

SEQ ID NO: 338143 - DNA, 120 bp, Artificial Sequence
  ENSG00000137692_102 (sequence is synthesized)
gactgtgtgtttttgcttttatttcaccagtactcagaactatccacagtatagaaaagcactcaataaatggaataaatgaaaatgaatagataaataaatgatttcacttgtataaga

SEQ ID NO: 338144 - DNA, 120 bp, Artificial Sequence
  ENSG00000137692_103 (sequence is synthesized)
gaggcccctttgatcgagctaggctgtaggtgccgaacaccgcgagtctccgcgcccgacccgacctcgtgttcgagtgtgtgcacgctggcgtttatggagagactagaagagccgccc

SEQ ID NO: 338145 - DNA, 120 bp, Artificial Sequence
  ENSG00000137692_104 (sequence is synthesized)
attattatgttagttttagcgtggaaattggaggctgaaagcatgggattttttaccaaggaagaatggttaaagggaatgacttcattacagctttctataactgaattggctttcctt

SEQ ID NO: 338146 - DNA, 120 bp, Artificial Sequence
  ENSG00000137692_105 (sequence is synthesized)
ctagccattttgtgtgactgcacagaaaagttacaaaacaaatttgactttttgcgctcacagttgaatgatatttcgtcatttaagaatatctacagatatgcctttgattttgcaagg

SEQ ID NO: 338147 - DNA, 120 bp, Artificial Sequence
  ENSG00000137692_106 (sequence is synthesized)
aagcttccctcctccctcctttgctggacaactggaggaaaaggagtcgggcccggcctgccgggctggggctggagacagatcccaaccccctgctagactaataagtggagaggaaca

SEQ ID NO: 338148 - DNA, 120 bp, Artificial Sequence
  ENSG00000137693_0 (sequence is synthesized)
ctcagtcgggcgcagccgccgccagggaaaagaaagggaggaaggaaggaacaagaaaaggaaataaagagaaaggggaggcggggaaaggcaacgagctgtccggcctccgtcaaggga

SEQ ID NO: 338149 - DNA, 120 bp, Artificial Sequence
  ENSG00000137693_1 (sequence is synthesized)
gttggagggaaaaagttctcaggcgccgcaggtccgagtgcctcgcagcccctcccgaggcgcagccgccagaccagtggagccggggcgcagggcgggggcggaggcgccggggcgggg

SEQ ID NO: 338150 - DNA, 80 bp, Artificial Sequence
  ENSG00000137693_2 (sequence is synthesized)
ggacagcgccgcccggcccgcagccgtcgccgcttctccacctcggcccgtggagccggggcgtccgggcgtagccctcg

SEQ ID NO: 338151 - DNA, 120 bp, Artificial Sequence
  ENSG00000137693_3 (sequence is synthesized)
gcgtagccctcgctcgcctgggtcagggggtgcgcgtcgggggaggcagaagccatggatcccgggcagcagccgccgcctcaaccggccccccagggccaagggcagccgccttcgcag

SEQ ID NO: 338152 - DNA, 120 bp, Artificial Sequence
  ENSG00000137693_4 (sequence is synthesized)
gccgtccggacccgggcaaccggcacccgcggcgacccaggcggcgccgcaggcaccccccgccgggcatcagatcgtgcacgtccgcggggactcggagaccgacctggaggcgctctt

SEQ ID NO: 338153 - DNA, 120 bp, Artificial Sequence
  ENSG00000137693_5 (sequence is synthesized)
gcgctcttcaacgccgtcatgaaccccaagacggccaacgtgccccagaccgtgcccatgaggctccggaagctgcccgactccttcttcaagccgccggagcccaaatcccactcccga

SEQ ID NO: 338154 - DNA, 120 bp, Artificial Sequence
  ENSG00000137693_6 (sequence is synthesized)
caggccagtactgatgcaggcactgcaggagccctgactccacagcatgttcgagctcattcctctccagcttctctgcagttgggagctgtttctcctgggacactgacccccactgga

SEQ ID NO: 338155 - DNA, 120 bp, Artificial Sequence
  ENSG00000137693_7 (sequence is synthesized)
gtagtctctggcccagcagctacacccacagctcagcatcttcgacagtcttcttttgagatacctgatgatgtacctctgccagcaggttgggagatggcaaagacatcttctggtcag

SEQ ID NO: 338156 - DNA, 120 bp, Artificial Sequence
  ENSG00000137693_8 (sequence is synthesized)
agatacttcttaaatcacatcgatcagacaacaacatggcaggaccccaggaaggccatgctgtcccagatgaacgtcacagcccccaccagtccaccagtgcagcagaatatgatgaac

SEQ ID NO: 338157 - DNA, 120 bp, Artificial Sequence
  ENSG00000137693_9 (sequence is synthesized)
tcggcttcaggtcctcttcctgatggatgggaacaagccatgactcaggatggagaaatttactatataaaccataagaacaagaccacctcttggctagacccaaggcttgaccctcgt

SEQ ID NO: 338158 - DNA, 120 bp, Artificial Sequence
  ENSG00000137693_10 (sequence is synthesized)
tttgccatgaaccagagaatcagtcagagtgctccagtgaaacagccaccacccctggctccccagagcccacagggaggcgtcatgggtggcagcaactccaaccagcagcaacagatg

SEQ ID NO: 338159 - DNA, 120 bp, Artificial Sequence
  ENSG00000137693_11 (sequence is synthesized)
cgactgcagcaactgcagatggagaaggagaggctgcggctgaaacagcaagaactgcttcggcaggcaatgcggaatatcaatcccagcacagcaaattctccaaaatgtcaggagtta

SEQ ID NO: 338160 - DNA, 120 bp, Artificial Sequence
  ENSG00000137693_12 (sequence is synthesized)
gccctgcgtagccagttaccaacactggagcaggatggtgggactcaaaatccagtgtcttctcccgggatgtctcaggaattgagaacaatgacgaccaatagctcagatcctttcctt

SEQ ID NO: 338161 - DNA, 120 bp, Artificial Sequence
  ENSG00000137693_13 (sequence is synthesized)
aacagtggcacctatcactctcgagatgagagtacagacagtggactaagcatgagcagctacagtgtccctcgaaccccagatgacttcctgaacagtgtggatgagatggatacaggt

SEQ ID NO: 338162 - DNA, 120 bp, Artificial Sequence
  ENSG00000137693_14 (sequence is synthesized)
gatactatcaaccaaagcaccctgccctcacagcagaaccgtttcccagactaccttgaagccattcctgggacaaatgtggaccttggaacactggaaggagatggaatgaacatagaa

SEQ ID NO: 338163 - DNA, 120 bp, Artificial Sequence
  ENSG00000137693_15 (sequence is synthesized)
ggagaggagctgatgccaagtctgcaggaagctttgagttctgacatccttaatgacatggagtctgttttggctgccaccaagctagataaagaaagctttcttacatggttatagagc

SEQ ID NO: 338164 - DNA, 120 bp, Artificial Sequence
  ENSG00000137693_16 (sequence is synthesized)
cctcaggcagactgaattctaaatctgtgaaggatctaaggagacacatgcaccggaaatttccataagccagttgcagttttcaggctaatacagaaaaagatgaacaaacgtccagca

SEQ ID NO: 338165 - DNA, 120 bp, Artificial Sequence
  ENSG00000137693_17 (sequence is synthesized)
agatactttaatcctctattttgctcttccttgtccattgctgctgttaatgtattgctgacctctttcacagttggctctaaagaatcaaaagaaaaaaactttttatttcttttgcta

SEQ ID NO: 338166 - DNA, 120 bp, Artificial Sequence
  ENSG00000137693_18 (sequence is synthesized)
ttaaaactactgttcattttgggggctgggggaagtgagcctgtttggatgatggatgccattccttttgcccagttaaatgttcaccaatcattttaactaaatactcagacttagaag

SEQ ID NO: 338167 - DNA, 120 bp, Artificial Sequence
  ENSG00000137693_19 (sequence is synthesized)
tcagatgcttcatgtcacagcatttagtttgttcaacagttgtttcttcagcttcctttgtccagtggaaaaacatgatttactggtctgacaagccaaaaatgttatatctgatattaa

SEQ ID NO: 338168 - DNA, 120 bp, Artificial Sequence
  ENSG00000137693_20 (sequence is synthesized)
atacttaatgctgatttgaagagatagctgaaaccaaggctgaagactgttttactttcagtattttcttttcctcctagtgctatcattagtcacataatgaccttgattttattttag

SEQ ID NO: 338169 - DNA, 120 bp, Artificial Sequence
  ENSG00000137693_21 (sequence is synthesized)
gagcttataaggcatgagacaatttccatataaatatattaattattgccacatactctaatatagattttggtggataattttgtgggtgtgcattttgttctgttttgttgggttttt

SEQ ID NO: 338170 - DNA, 120 bp, Artificial Sequence
  ENSG00000137693_22 (sequence is synthesized)
gttttttttgtttttggcagggtcggtgggggggttggttggttggttggttttgtcggaacctaggcaaatgaccatattagtgaatctgttaatagttgtagcttgggatggttattg

SEQ ID NO: 338171 - DNA, 120 bp, Artificial Sequence
  ENSG00000137693_23 (sequence is synthesized)
tagttgttttggtaaaatcttcatttcctggttttttttaccaccttatttaaatctcgattatctgctctctcttttatatacatacacacacccaaacataacatttataatagtgtg

SEQ ID NO: 338172 - DNA, 120 bp, Artificial Sequence
  ENSG00000137693_24 (sequence is synthesized)
gtagtggaatgtatccttttttaggtttccctgctttccagttaatttttaaaatggtagcgctttgtatgcatttagaatacatgactagtagtttatatttcactggtagtttaaatc

SEQ ID NO: 338173 - DNA, 120 bp, Artificial Sequence
  ENSG00000137693_25 (sequence is synthesized)
tggttggggcagtctgcagatgtttgaagtagtttagtgttctagaaagagctattactgtggatagtgcctaggggagtgctccacgccctctgggcatacggtagatattatctgatg

SEQ ID NO: 338174 - DNA, 120 bp, Artificial Sequence
  ENSG00000137693_26 (sequence is synthesized)
aattggaaaggagcaaaccagaaatggctttattttctcccttggactaatttttaagtctcgattggaattcagtgagtaggttcataatgtgcatgacagaaataagctttatagtgg

SEQ ID NO: 338175 - DNA, 120 bp, Artificial Sequence
  ENSG00000137693_27 (sequence is synthesized)
tttaccttcatttagctttggaagttttctttgccttagttttggaagtaaattctagtttgtagttctcatttgtaatgaacacattaacgactagattaaaatattgccttcaagatt

SEQ ID NO: 338176 - DNA, 120 bp, Artificial Sequence
  ENSG00000137693_28 (sequence is synthesized)
gttcttacttacaagacttgctcctacttctatgctgaaaattgaccctggatagaatactataaggttttgagttagctggaaaagtgatcagattaataaatgtatattggtagttga

SEQ ID NO: 338177 - DNA, 120 bp, Artificial Sequence
  ENSG00000137693_29 (sequence is synthesized)
atttagcaaagaaatagagataatcatgattatacctttatttttacaggaagagatgatgtaactagagtatgtgtctacaggagtaataatggtttccaaagagtattttttaaagga

SEQ ID NO: 338178 - DNA, 120 bp, Artificial Sequence
  ENSG00000137693_30 (sequence is synthesized)
acaaaacgagcatgaattaactcttcaatataagctatgaagtaatagttggttgtgaattaaagtggcaccagctagcacctctgtgttttaagggtctttcaatgtttctagaataag

SEQ ID NO: 338179 - DNA, 120 bp, Artificial Sequence
  ENSG00000137693_31 (sequence is synthesized)
cccttattttcaagggttcataacaggcataaaatctcttctcctggcaaaagctgctatgaaaagcctcagcttgggaagatagatttttttccccccaattacaaaatctaagtattt

SEQ ID NO: 338180 - DNA, 120 bp, Artificial Sequence
  ENSG00000137693_32 (sequence is synthesized)
tggcccttcaatttggaggagggcaaaagttggaagtaagaagttttattttaagtactttcagtgctcaaaaaaatgcaatcactgtgttgtatataatagttcataggttgatcactc

SEQ ID NO: 338181 - DNA, 120 bp, Artificial Sequence
  ENSG00000137693_33 (sequence is synthesized)
ataataattgactctaaggcttttattaagaaaacagcagaaagattaaatcttgaattaagtctggggggaaatggccactgcagatggagttttagagtagtaatgaaattctaccta

SEQ ID NO: 338182 - DNA, 120 bp, Artificial Sequence
  ENSG00000137693_34 (sequence is synthesized)
gaatgcaaaattgggtatatgaattacatagcatgttgttgggattttttttaatgtgcagaagatcaaagctacttggaaggagtgcctataatttgccagtagccacagattaagatt

SEQ ID NO: 338183 - DNA, 120 bp, Artificial Sequence
  ENSG00000137693_35 (sequence is synthesized)
atatcttatatatcagcagattagctttagcttagggggagggtgggaaagtttggggggggggttgtgaagatttagggggaccttgatagagaactttataaacttctttctctttaa

SEQ ID NO: 338184 - DNA, 120 bp, Artificial Sequence
  ENSG00000137693_36 (sequence is synthesized)
taaagacttgtcttacaccgtgctgccattaaaggcagctgttctagagtttcagtcacctaagtacacccacaaaacaatatgaatatggagatcttcctttacccctcaactttaatt

SEQ ID NO: 338185 - DNA, 120 bp, Artificial Sequence
  ENSG00000137693_37 (sequence is synthesized)
tgcccagttatacctcagtgttgtagcagtactgtgatacctggcacagtgctttgatcttacgatgccctctgtactgacctgaaggagacctaagagtcctttccctttttgagtttg

SEQ ID NO: 338186 - DNA, 120 bp, Artificial Sequence
  ENSG00000137693_38 (sequence is synthesized)
aatcatagccttgatgtggtctcttgttttatgtccttgttcctaatgtaaaagtgcttaactgcttcttggttgtattgggtagcattgggataagattttaactgggtattcttgaat

SEQ ID NO: 338187 - DNA, 120 bp, Artificial Sequence
  ENSG00000137693_39 (sequence is synthesized)
tgcttttacaataaaccaattttataatctttaaatttatcaactttttacatttgtgttattttcagtcagggcttcttagatctacttatggttgatggagcacattgatttggagtt

SEQ ID NO: 338188 - DNA, 120 bp, Artificial Sequence
  ENSG00000137693_40 (sequence is synthesized)
tcagatcttccaaagcactatttgttgtaataacttttctaaatgtagtgcctttaaaggaaaaatgaacacagggaagtgactttgctacaaataatgttgctgtgttaagtattcata

SEQ ID NO: 338189 - DNA, 120 bp, Artificial Sequence
  ENSG00000137693_41 (sequence is synthesized)
ttaaatacatgccttctatatggaacatggcagaaagactgaaaaataacagtaattaattgtgtaattcagaattcataccaatcagtgttgaaactcaaacattgcaaaagtgggtgg

SEQ ID NO: 338190 - DNA, 120 bp, Artificial Sequence
  ENSG00000137693_42 (sequence is synthesized)
caatattcagtgcttaacacttttctagcgttggtacatctgagaaatgagtgctcaggtggattttatcctcgcaagcatgttgttataagaattgtgggtgtgcctatcataacaatt

SEQ ID NO: 338191 - DNA, 120 bp, Artificial Sequence
  ENSG00000137693_43 (sequence is synthesized)
gttttctgtatcttgaaaaagtattctccacattttaaatgttttatattagagaattctttaatgcacacttgtcaaatatatatatatagtaccaatgttacctttttattttttgtt

SEQ ID NO: 338192 - DNA, 120 bp, Artificial Sequence
  ENSG00000137693_44 (sequence is synthesized)
ttagatgtaagagcatgctcatatgttaggtacttacataaattgttacattattttttcttatgtaatacctttttgtttgtttatgtggttcaaatatattctttccttaaactcttc

SEQ ID NO: 338193 - DNA, 120 bp, Artificial Sequence
  ENSG00000137693_45 (sequence is synthesized)
atctcaaaacctttttagatgcttttggttgctaattttttttgtaaatatacttcggaaagcacatttaaataaaatcgcattgctttatagtattaaaaaatgaccctgcccacccaa

SEQ ID NO: 338194 - DNA, 120 bp, Artificial Sequence
  ENSG00000137693_46 (sequence is synthesized)
tttagggctcctcaggttggggtgggggaatgtcataatggccgactaaccagaatcacttgttcctttcacattttgggagaaacacagtgattgtttttaaaatgtttttttttttta

SEQ ID NO: 338195 - DNA, 120 bp, Artificial Sequence
  ENSG00000137693_47 (sequence is synthesized)
gctgcaataataatcaggctgtcatgcaacacctcagaccaggagtaccagcttttgtcagtgacctgatgtctgcttgtgcttaggttctgagagtgatgagtaccatcttatgcctgg

SEQ ID NO: 338196 - DNA, 120 bp, Artificial Sequence
  ENSG00000137693_48 (sequence is synthesized)
gtgttgtagtgtttcccatcctaaggaggaacatgtcaccccagaaatggcccagtgaaagcattttgccccctcttctgtctctctcgaaaaataaatgtttttttttcttcattcaga

SEQ ID NO: 338197 - DNA, 120 bp, Artificial Sequence
  ENSG00000137693_49 (sequence is synthesized)
ctgcaatgtagttagcccactcgggatgtaacttgagtggaaagaagagttaccgcccccactcccattccctctcctatttgcaggcctgttgtatagtctcctgtcggagaccaaagg

SEQ ID NO: 338198 - DNA, 120 bp, Artificial Sequence
  ENSG00000137699_0 (sequence is synthesized)
actccctgccgagacgcctgccagaaaggtcacctatcctgaaccccagcaagcctgaaacagctcagccaagcaccctgcgatggaagctgcagatgcctccaggagcaacgggtcgag

SEQ ID NO: 338199 - DNA, 120 bp, Artificial Sequence
  ENSG00000137699_1 (sequence is synthesized)
cccagaagccagggatgcccggagcccgtcgggccccagtggcagcctggagaatggcaccaaggctgacggcaaggatgccaagaccaccaacgggcacggcggggaggcagctgaggg

SEQ ID NO: 338200 - DNA, 120 bp, Artificial Sequence
  ENSG00000137699_2 (sequence is synthesized)
caagagcctgggcagcgccctgaagccaggggaaggtaggagcgccctgttcgcgggcaatgagtggcggcgacccatcatccagtttgtcgagtccggggacgacaagaactccaacta

SEQ ID NO: 338201 - DNA, 120 bp, Artificial Sequence
  ENSG00000137699_3 (sequence is synthesized)
cttcagcatggactctatggaaggcaagaggtcgccgtacgcagggctccagctgggggctgccaagaagccacccgttacctttgccgaaaagggcgagctgcgcaagtccattttctc

SEQ ID NO: 338202 - DNA, 120 bp, Artificial Sequence
  ENSG00000137699_4 (sequence is synthesized)
ggagtcccggaagcccacggtgtccatcatggagcccggggagacccggcggaacagctacccccgggccgacacgggccttttttcacggtccaagtccggctccgaggaggtgctgtg

SEQ ID NO: 338203 - DNA, 120 bp, Artificial Sequence
  ENSG00000137699_5 (sequence is synthesized)
cgactcctgcatcggcaacaagcagaaggcggtcaagtcctgcctggtgtgccaggcctccttctgcgagctgcatctcaagccccacctggagggcgccgccttccgagaccaccagct

SEQ ID NO: 338204 - DNA, 120 bp, Artificial Sequence
  ENSG00000137699_6 (sequence is synthesized)
gctcgagcccatccgggactttgaggcccgcaagtgtcccgtgcatggcaagacgatggagctcttctgccagaccgaccagacctgcatctgctacctttgcatgttccaggagcacaa

SEQ ID NO: 338205 - DNA, 120 bp, Artificial Sequence
  ENSG00000137699_7 (sequence is synthesized)
gaatcatagcaccgtgacagtggaggaggccaaggccgagaaggagacggagctgtcattgcaaaaggagcagctgcagctcaagatcattgagattgaggatgaagctgagaagtggca

SEQ ID NO: 338206 - DNA, 120 bp, Artificial Sequence
  ENSG00000137699_8 (sequence is synthesized)
gaaggagaaggaccgcatcaagagcttcaccaccaatgagaaggccatcctggagcagaacttccgggacctggtgcgggacctggagaagcaaaaggaggaagtgagggctgcgctgga

SEQ ID NO: 338207 - DNA, 120 bp, Artificial Sequence
  ENSG00000137699_9 (sequence is synthesized)
gcagcgggagcaggatgctgtggaccaagtgaaggtgatcatggatgctctggatgagagagccaaggtgctgcatgaggacaagcagacccgggagcagctgcatagcatcagcgactc

SEQ ID NO: 338208 - DNA, 120 bp, Artificial Sequence
  ENSG00000137699_10 (sequence is synthesized)
tgtgttgtttctgcaggaatttggtgcattgatgagcaattactctctccccccacccctgcccacctatcatgtcctgctggagggggagggcctgggacagtcactaggcaacttcaa

SEQ ID NO: 338209 - DNA, 120 bp, Artificial Sequence
  ENSG00000137699_11 (sequence is synthesized)
ggacgacctgctcaatgtatgcatgcgccacgttgagaagatgtgcaaggcggacctgagccgtaacttcattgagaggaaccacatggagaacggtggtgaccatcgctatgtgaacaa

SEQ ID NO: 338210 - DNA, 120 bp, Artificial Sequence
  ENSG00000137699_12 (sequence is synthesized)
cagccctcgtctcctggccgcttcaccaaggagaccacccagaagaatttcaacaatctctatggcaccaaaggtaactacacctcccgggtctgggagtactcctccagcattcagaac

SEQ ID NO: 338211 - DNA, 120 bp, Artificial Sequence
  ENSG00000137699_13 (sequence is synthesized)
tctgacaatgacctgcccgtcgtccaaggcagctcctccttctccctgaaaggctatccctccctcatgcggagccaaagccccaaggcccagccccagacttggaaatctggcaagcag

SEQ ID NO: 338212 - DNA, 120 bp, Artificial Sequence
  ENSG00000137699_14 (sequence is synthesized)
actatgctgtctcactaccggccattctacgtcaacaaaggcaacgggattgggtccaacgaagccccatgagctcctggcggaaggaacgaggcgccacacccctgctcttcctcctga

SEQ ID NO: 338213 - DNA, 120 bp, Artificial Sequence
  ENSG00000137699_15 (sequence is synthesized)
ccctgctgctcttgccttctaagctactgtgcttgtctgggtgggagggagcctggtcctgcacctgccctctgcagccctctgccagcctcttgggggcagttccggcctctccgactt

SEQ ID NO: 338214 - DNA, 120 bp, Artificial Sequence
  ENSG00000137699_16 (sequence is synthesized)
ccccactggccacactccattcagactcctttcctgccttgtgacctcagatggtcaccatcattcctgtgctcagaggccaacccatcacaggggtgagataggttggggcctgcccta

SEQ ID NO: 338215 - DNA, 120 bp, Artificial Sequence
  ENSG00000137699_17 (sequence is synthesized)
acccgccagcctcctcctctcgggctggatctgggggctagcagtgagtacccgcatggtatcagcctgcctctcccgcccacgccctgctgtctccaggcctatagacgtttctctcca

SEQ ID NO: 338216 - DNA, 120 bp, Artificial Sequence
  ENSG00000137699_18 (sequence is synthesized)
aggccctatcccccaatgttgtcagcagatgcctggacagcacagccacccatctcccattcacatggcccacctcctgcttcccagaggactggccctacgtgctctctctcgtcctac

SEQ ID NO: 338217 - DNA, 120 bp, Artificial Sequence
  ENSG00000137699_19 (sequence is synthesized)
ctatcaatgcccagcatggcagaacctgcagcccttggccactgcagatggaaacctctcagtgtcttgacatcaccctacccaggcggtgggtctccaccacagccactttgagtctgt

SEQ ID NO: 338218 - DNA, 120 bp, Artificial Sequence
  ENSG00000137699_20 (sequence is synthesized)
ggtccctggagggtggcttctcctgactggcaggatgaccttagccaagatattcctctgttccctctgctgagataaagaattcccttaacatgatataatccacccatgcaaatagct

SEQ ID NO: 338219 - DNA, 120 bp, Artificial Sequence
  ENSG00000137699_21 (sequence is synthesized)
actggcccagctaccatttaccatttgcctacagaatttcattcagtctacactttggcattctctctggcgatggagtgtggctgggctgaccgcaaaaggtgccttacacactgcccc

SEQ ID NO: 338220 - DNA, 120 bp, Artificial Sequence
  ENSG00000137699_22 (sequence is synthesized)
caccctcagccgttgccccatcagaggctgcctcctccttctgattaccccccatgttgcatatcagggtgctcaaggattggagaggagacaaaaccaggagcagcacagtggggacat

SEQ ID NO: 338221 - DNA, 120 bp, Artificial Sequence
  ENSG00000137699_23 (sequence is synthesized)
ctcccgtctcaacagccccaggcctatgggggctctggaaggatgggccagcttgcaggggttggggagggagacatccagcttgggctttcccctttggaataaaccattggtctgtca

SEQ ID NO: 338222 - DNA, 120 bp, Artificial Sequence
  ENSG00000137699_24 (sequence is synthesized)
gagacactccctgggctgggctgggctgagctgggctggatccccttcctttctcttcccattgtccccaggtccactgaaaagggcaagcaccctgtaaatgagtttccctcctgctct

SEQ ID NO: 338223 - DNA, 120 bp, Artificial Sequence
  ENSG00000137699_25 (sequence is synthesized)
tgctgggtggaggagataggcagaggtttagcccttaaaaagacatggctaggatatccagccctagtggcctgagaatacagcaagatggtatttaacttactgctagatccttggcga

SEQ ID NO: 338224 - DNA, 120 bp, Artificial Sequence
  ENSG00000137699_26 (sequence is synthesized)
gaaattcagaacaggaggacacaagggcaggggaatgctgaggccaaggccttctcccaccacctgcctcctgcgggagtgattccacagtgcagagggagagccatttggaggtccggc

SEQ ID NO: 338225 - DNA, 120 bp, Artificial Sequence
  ENSG00000137699_27 (sequence is synthesized)
acccgctctgcccatgcctatgcttcaggctctgtgagaaggctggactccttctggaacttcaggaccttggatgctcccctcctctgctcctgcctcccttcccccagccctggggtg

SEQ ID NO: 338226 - DNA, 120 bp, Artificial Sequence
  ENSG00000137699_28 (sequence is synthesized)
ctgggaaaaccccttatcagttcaccaccttgggacaggccactgcagagttttccaaaccactgggtcgcagtgggctgtctaaaaataatcccggctatccctccctcatgcggagcc

SEQ ID NO: 338227 - DNA, 120 bp, Artificial Sequence
  ENSG00000137699_29 (sequence is synthesized)
gagaaattgggcctggcattttgagtgacttctgagattatctgaatctcacactttgctgacctctttttggagggcattgcctgtggcctggcccagagaggatgggcaggtgttttc

SEQ ID NO: 338228 - DNA, 120 bp, Artificial Sequence
  ENSG00000137699_30 (sequence is synthesized)
ggcctctccaagtttatgctgatgctctctgcacggttactaacagagtccttctactctcaaaagcatgccaatttgggtgataaattagttgattgacttatgtcagacccaaaggac

SEQ ID NO: 338229 - DNA, 120 bp, Artificial Sequence
  ENSG00000137699_31 (sequence is synthesized)
ccacccacccacccttcctcaggccgtttggactaggatacagggattctaaccctcctcctcctttgaacttgctgccaaagttatgcaactataggaagagacctccagagcagggac

SEQ ID NO: 338230 - DNA, 120 bp, Artificial Sequence
  ENSG00000137699_32 (sequence is synthesized)
atcctgggcactggctccacaaatgcctcctctctgtgggttgtccatcaaactcagagactggtttcgttcagatctacatctaattgccgggcccagcccagcagctgtgtggatgct

SEQ ID NO: 338231 - DNA, 120 bp, Artificial Sequence
  ENSG00000137699_33 (sequence is synthesized)
gccactagtatgggccagattccaaactggtggctttgcagactctagcagacgtgacctagaactgcagccatgcctggagggaggacttgcctgtcatcatggccatgctgagcagtg

SEQ ID NO: 338232 - DNA, 120 bp, Artificial Sequence
  ENSG00000137699_34 (sequence is synthesized)
ctgagcccagaggctggacttggcctgttgagctgggctggggacggtgggacacagtgtctctgtgactcaccagctcccttgaagtcagctcttcttctgagtcatgctgtcccctca

SEQ ID NO: 338233 - DNA, 120 bp, Artificial Sequence
  ENSG00000137699_35 (sequence is synthesized)
gaggtcaactgaatcatctcacagaaaacctctgaacctgagaaacaacatcgtcaagtccttttccacccagtccctttagggcctgaagcctgggcactttccccaaggccccacccg

SEQ ID NO: 338234 - DNA, 120 bp, Artificial Sequence
  ENSG00000137699_36 (sequence is synthesized)
gtgtcccaggcgttgcacggggccttgagagtacagccttgttaatgactgctagacgtgaataccccaaaggaaaggacccctgattgctctccagacacagcatatgattctttgggg

SEQ ID NO: 338235 - DNA, 120 bp, Artificial Sequence
  ENSG00000137699_37 (sequence is synthesized)
gaggagaagggggtgagggggataaaagtgtgcagaagggttggggttcaggaggccatttgtgcaccttggcgatggcaatatcacatggtgtccctgtgaaatgtgggggacattcaa

SEQ ID NO: 338236 - DNA, 120 bp, Artificial Sequence
  ENSG00000137699_38 (sequence is synthesized)
tcacacacaaggacagataagccatttcagcaagacaatcatttggcttcaaacggcactcagatcccgaaatcctccttctaatgacaatagtgatgatgctaatggtgatggtgacag

SEQ ID NO: 338237 - DNA, 120 bp, Artificial Sequence
  ENSG00000137699_39 (sequence is synthesized)
ctgacaatgattgagtgctcgctcgatgccgggcatttcactgagcttctcacgcacattaccttattttccctgtggggtgtactgcattttacaggcgagaaggctgaggctcagaga

SEQ ID NO: 338238 - DNA, 120 bp, Artificial Sequence
  ENSG00000137699_40 (sequence is synthesized)
gctgttcagtctcccatgccctctcatctgagaagctgcggctggcggtggctgcagaagtggggttgaggagtgtgataatcatcgtccctggggtacaaactcggcagggcagcccct

SEQ ID NO: 338239 - DNA, 120 bp, Artificial Sequence
  ENSG00000137699_41 (sequence is synthesized)
ccggtgaggtccggccaggcctgggggatggcctagactggggtggggtgagccttgcagaaactgttcaggctcctggccgctcactgtcccatttctaggtcacaatgctggccacgg

SEQ ID NO: 338240 - DNA, 120 bp, Artificial Sequence
  ENSG00000137699_42 (sequence is synthesized)
cctctgtacaggtgtggccctgcgtcctgtacgaggtgtgtggcgaggtggcaagcaggagcagggatgggcactgctgattcagtagcccacacctgtgcctggggccgtgggggcggc

SEQ ID NO: 338241 - DNA, 120 bp, Artificial Sequence
  ENSG00000137699_43 (sequence is synthesized)
tcctctgcctctgtgttgttttttcgtgtggctgctgggagtgtgtctgctctaggaggtggtggccggtgagtcagacagtggagtgaccatccactcctccccgatgctagcctgccc

SEQ ID NO: 338242 - DNA, 120 bp, Artificial Sequence
  ENSG00000137699_44 (sequence is synthesized)
accagaccagggactcgtccacaccctcaaaggcccctgcgctaagagacaccaggccacttcatcctggactctgtggggcacagggctgggctaacacctaggagggcatttgtttat

SEQ ID NO: 338243 - DNA, 120 bp, Artificial Sequence
  ENSG00000137699_45 (sequence is synthesized)
tctttgagtatctgctgtgcaccaggacactgataggcgcaggtggtgaccatcgctatgtgaacaactacacgaacagcttcgggggtgagtggagtgcaccggacaccatgaagagat

SEQ ID NO: 338244 - DNA, 120 bp, Artificial Sequence
  ENSG00000137699_46 (sequence is synthesized)
cctggctgcgagtgtgccccctgagtggagccgctccctggttctctggttctcttccatctcctccccctgacttctccaatcctggctctttctctgcagacggagctgtcattgcaa

SEQ ID NO: 338245 - DNA, 120 bp, Artificial Sequence
  ENSG00000137699_47 (sequence is synthesized)
agtgaagcctgcccacttgtgaagacggagactccccgctccccggatgagaagcaagtgcgtcagagggaagcagcccaactggttgctgagttgtggaaaataagctgggggagaaaa

SEQ ID NO: 338246 - DNA, 120 bp, Artificial Sequence
  ENSG00000137699_48 (sequence is synthesized)
ctgggccacatcagcgtttcccagggcttgtttcaccgctctctagtctctaactacacgctgcaacaacagctctcagtggtcaggaccgggggacatgccataccccctgcactcgac

SEQ ID NO: 338247 - DNA, 120 bp, Artificial Sequence
  ENSG00000137699_49 (sequence is synthesized)
ctctctgatcctcaggatgctgcttctcctactgcagagtttatttaactcccagcgttggctggctctagggtcctgtggccatggggcacctgccagcatcctgcagatccaatcctg

SEQ ID NO: 338248 - DNA, 120 bp, Artificial Sequence
  ENSG00000137699_50 (sequence is synthesized)
caggcgcccctttgggaaaggcaggaccagacgaccctaagtccccccaaggctgatcctcttttcctgcactctgtcccccgcctgcctgtggtgctcccagcactctgacaaggcaga

SEQ ID NO: 338249 - DNA, 120 bp, Artificial Sequence
  ENSG00000137699_51 (sequence is synthesized)
gtgattgacgcctcctgtcccctggggttgggggcatcctgagggggcaggcttgaaccagactctggctatgggccccagaccctcatgtatctcctgaaagatcccagggacagctct

SEQ ID NO: 338250 - DNA, 120 bp, Artificial Sequence
  ENSG00000137699_52 (sequence is synthesized)
aatggctgtggtgggagtaaccctgtctctcttctggcaccccaaacatctggcctggaagtcaagatcagcacattgggtgggctcaggagagggaaaggggctatgcagggcagagag

SEQ ID NO: 338251 - DNA, 120 bp, Artificial Sequence
  ENSG00000137699_53 (sequence is synthesized)
catcactcagttgtcccttccggcccagggtcctatactatacccaggacagggattcttggagctgccggcaagagggaggagacaggactatgggtggagggtcccagcctgcaggag

SEQ ID NO: 338252 - DNA, 120 bp, Artificial Sequence
  ENSG00000137699_54 (sequence is synthesized)
ccccgggcatgtcttagctctgatccgggcctggggagctccaggacttgccttggcctgtttggcttctagcaggcgcctttctgctctctgctcaagcctggcccacagagcacctgg

SEQ ID NO: 338253 - DNA, 120 bp, Artificial Sequence
  ENSG00000137699_55 (sequence is synthesized)
caggggaggtggccgctctcaggtgtgattcagagcagcccccagaatgaggtgtgggtccttttggcccctctgggaccagcgctgtgccactaatgcctctctctctcccagcaggca

SEQ ID NO: 338254 - DNA, 120 bp, Artificial Sequence
  ENSG00000137699_56 (sequence is synthesized)
tcccttctccccagagctccctggagagggatgcatgccccacctgccaccccagcatactctctatctggacttctgcctgctgcacaaggcgggtgtcttgggccaccctgaccccac

SEQ ID NO: 338255 - DNA, 120 bp, Artificial Sequence
  ENSG00000137699_57 (sequence is synthesized)
ccctgtttccattctcccctctctcatggctggcatgggattttctttctgggaactgagagatgaggcctgaattacccctcttaatctccactcaggatccctggaacccccctttcc

SEQ ID NO: 338256 - DNA, 120 bp, Artificial Sequence
  ENSG00000137699_58 (sequence is synthesized)
aaggctgctcccaccctcagatgcaggaagagacccaggttctttgctctgtctcctccccctcctccttgctcagtgccaacctgggaagggccaacccaactggcagcctggcggtgc

SEQ ID NO: 338257 - DNA, 120 bp, Artificial Sequence
  ENSG00000137699_59 (sequence is synthesized)
tcatcatgagcctgacctgctcatcctcgcttagagcagggcaggagaggggctttcccgagacagaccgcatgcagcctctcactggacagagatctggcccaggacagaccctgctta

SEQ ID NO: 338258 - DNA, 120 bp, Artificial Sequence
  ENSG00000137699_60 (sequence is synthesized)
tttcttgagggcctcagcatccaggtcatggcctgtgtcttcccaggcgtccctgcaggctgatggctgacactgagagtgccttcactgtgctgtgaaccagagctcctttcaggtctg

SEQ ID NO: 338259 - DNA, 120 bp, Artificial Sequence
  ENSG00000137699_61 (sequence is synthesized)
cttagactagcatctttgcaaccaagctcagagagcgcacctgctccaggcctcttgggcttgccatcctaaccctgggtggcggccacaatgacagattcctgcacctctctaggccct

SEQ ID NO: 338260 - DNA, 120 bp, Artificial Sequence
  ENSG00000137699_62 (sequence is synthesized)
agtctctggctagtgaaacaggggaggggccacaaagccagggagaaaaaaacatgaatttgggttttggatttccggcactctgtcccccgcctgcctgcggtgctccccagcacctgg

SEQ ID NO: 338261 - DNA, 120 bp, Artificial Sequence
  ENSG00000137699_63 (sequence is synthesized)
tttgctgcttatgagctgtgcaactcaggcagactgctgagctcatagatacggggccaggctcagtgaggagacatctacaaagtcccttccacagtgcttggcacaagtggggctccg

SEQ ID NO: 338262 - DNA, 120 bp, Artificial Sequence
  ENSG00000137699_64 (sequence is synthesized)
tgaatgggaagcatcgtccaaacagcacaggggagtccaagtgagcgcctcctgccgggaaactctggcaggccatgcttatgcgtggcgctcctgggctctgggaaggggagggcccgt

SEQ ID NO: 338263 - DNA, 120 bp, Artificial Sequence
  ENSG00000137699_65 (sequence is synthesized)
ggtgtaaacctccggggtgggtgagtggaaatccctgcagagcagtgtgatgctgcgctggatgtgggggcaacactcccctgctgcctggtccagcccacctggccggctcctcctcct

SEQ ID NO: 338264 - DNA, 120 bp, Artificial Sequence
  ENSG00000137699_66 (sequence is synthesized)
tctgtctgctttgctgcctcctccctttggccagcctccccaggattttcggttgcggcaccctggctgctgcacgcgtgttcagacggctgcatttggtaatgggctggatgatgcttg

SEQ ID NO: 338265 - DNA, 120 bp, Artificial Sequence
  ENSG00000137699_67 (sequence is synthesized)
gtggtcactttggagaaggcagctgtgctgctctgggcccgggcacccctgaccaccagcgctgctccctttgacctgaatctcttgtcttcccaggctatccctccctcatgcggagcc

SEQ ID NO: 338266 - DNA, 120 bp, Artificial Sequence
  ENSG00000137699_68 (sequence is synthesized)
ggatggctctttgcagacaccttctccaccaagagctcaggaaccgagtgaatgctgggcagggcgtcatattctctgagaggtggtgaccatcgctatgtgaacaactacacgaacagc

SEQ ID NO: 338267 - DNA, 120 bp, Artificial Sequence
  ENSG00000137699_69 (sequence is synthesized)
ctgcttctcttacttcctgagtctcaatttccttatctgtctcagggggatacaaccacaattgatgtatggatcaaataagaaatgggcattaatagcaccttgtaaaggtggtgacca

SEQ ID NO: 338268 - DNA, 120 bp, Artificial Sequence
  ENSG00000137699_70 (sequence is synthesized)
gtgggccaggccccagccggccagcctgcctcctccctgcctggggtgctgtgcctttgggcaagttctgggagtgccggccccagcacccctctcctcagaacccctacctggcctcgc

SEQ ID NO: 338269 - DNA, 120 bp, Artificial Sequence
  ENSG00000137699_71 (sequence is synthesized)
cctggccctgtccctcctgtctctcccttccatccatggaccaggccctggggtgccatcgagtgccctgacaggctcctgcgggtctctcctgctctgtaggagactgagggcccagtg

SEQ ID NO: 338270 - DNA, 120 bp, Artificial Sequence
  ENSG00000137699_72 (sequence is synthesized)
tgagcctcctgcaggttgtgggagggggtggagggaacagcagcacccactatgatgccaccccgagggcctagggcctggggcatcttgggcaggcctcagtacctgtatctgaagaga

SEQ ID NO: 338271 - DNA, 120 bp, Artificial Sequence
  ENSG00000137699_73 (sequence is synthesized)
ggggaggttgtgctcacatgctgggagacttcccagctctgcactgtgagtcagtctatgatgtctgtgatggaagaaacaggttcccccggcatccctgcccaagcactgtgggtagcc

SEQ ID NO: 338272 - DNA, 120 bp, Artificial Sequence
  ENSG00000137699_74 (sequence is synthesized)
cgaggacaggagggacaggaaatctgccctctgggagctcccaggctcagggtggagttggggggagaacaggaagcaatcaccaaggagatgaaagaaacaaggcccctaaagggactg

SEQ ID NO: 338273 - DNA, 120 bp, Artificial Sequence
  ENSG00000137699_75 (sequence is synthesized)
tgaggcaggagaattgcttgaacccaaaagacggaggttgcagtgagctgagattcagcctgggtaacagagtgagactcgcctcaaaaaaaaaaaaaagaaagaaagaaataccaccat

SEQ ID NO: 338274 - DNA, 120 bp, Artificial Sequence
  ENSG00000137699_76 (sequence is synthesized)
ggctgaccccaaattctatagtaattccttgcatttctttagtgtgttcactcccagtctttgcagtttgtgtccctctcataaaccctatgaggtaaacagatgcacccactttagagg

SEQ ID NO: 338275 - DNA, 120 bp, Artificial Sequence
  ENSG00000137699_77 (sequence is synthesized)
tgggagtcgtggagtcacacatctgaacgctagtgccatcagggatgttagcatccagtggcttttagttgaaccttttcatgttacagaagaaacaaacatccagtgaggaagagtggg

SEQ ID NO: 338276 - DNA, 120 bp, Artificial Sequence
  ENSG00000137699_78 (sequence is synthesized)
ccaggaggtgtcagttccctgagagacagggccaaaggcagtgtacccttgagtctcactaccggccattctacgtcaacaaaggcaacgggattgggtccaacgaagccccatgagctc

SEQ ID NO: 338277 - DNA, 120 bp, Artificial Sequence
  ENSG00000137700_0 (sequence is synthesized)
gcttgcgcagccttcgctagccccgccccgtcctattcgggctcccgcctctgttcagttccagagacaattcatgggtcttggggccaccgaggcgctgtccctgaccaccagcacgag

SEQ ID NO: 338278 - DNA, 120 bp, Artificial Sequence
  ENSG00000137700_1 (sequence is synthesized)
acccctttctatcgcgccagtcctgtggtctccgcacctctccagctcctgcacccccggcccccgtggttcccagccgcacagtagcgtgtcctgggtagcgtgaggacccacggggct

SEQ ID NO: 338279 - DNA, 120 bp, Artificial Sequence
  ENSG00000137700_2 (sequence is synthesized)
gggcaggacactgggtccccttggagcctccccaggcttaatgattgtccagaaggcggctataaagggagcctgggaggctgggtggaggagggagcagaaaaaacccaactcagcaga

SEQ ID NO: 338280 - DNA, 120 bp, Artificial Sequence
  ENSG00000137700_3 (sequence is synthesized)
tctgggaactgtgagagcggcaagcaggaactgtggtcagaggctgtgcgtcttggctggtagggcctgctcttttctaccatggcagcccagggctatggctattatcgcactgtgatc

SEQ ID NO: 338281 - DNA, 120 bp, Artificial Sequence
  ENSG00000137700_4 (sequence is synthesized)
ttctcagccatgtttgggggctacagcctgtattacttcaatcgcaagaccttctcctttgtcatgccatcattggtggaagagatccctttggacaaggatgatttggggttcatcacc

SEQ ID NO: 338282 - DNA, 120 bp, Artificial Sequence
  ENSG00000137700_5 (sequence is synthesized)
agcagccagtcggcagcttatgctatcagcaagtttgtcagtggggtgctgtctgaccagatgagtgctcgctggctcttctcttctgggctgctcctggttggcctggtcaacatattc

SEQ ID NO: 338283 - DNA, 120 bp, Artificial Sequence
  ENSG00000137700_6 (sequence is synthesized)
tttgcctggagctccacagtacctgtctttgctgccctctggttccttaatggcctggcccaggggctgggctggcccccatgtgggaaggtcctgcggaagtggtttgagccatctcag

SEQ ID NO: 338284 - DNA, 120 bp, Artificial Sequence
  ENSG00000137700_7 (sequence is synthesized)
tttggcacttggtgggccatcctgtcaaccagcatgaacctggctggagggctgggccctatcctggcaaccatccttgcccagagctacagctggcgcagcacgctggccctatctggg

SEQ ID NO: 338285 - DNA, 120 bp, Artificial Sequence
  ENSG00000137700_8 (sequence is synthesized)
gcactgtgggtggttgtctccttcctctgtctcctgctcatccacaatgaacctgctgatgttggactccgcaacctggaccccatgccctctgagggcaagaagggctccttgaaggag

SEQ ID NO: 338286 - DNA, 120 bp, Artificial Sequence
  ENSG00000137700_9 (sequence is synthesized)
taaagacctgctgtactgactggggccagttcttccttatccaggagaaaggacagtcagcccttgtaggtagctcctacatgagtgccctggaagttgggggccttgtaggcagcatcg

SEQ ID NO: 338287 - DNA, 120 bp, Artificial Sequence
  ENSG00000137700_10 (sequence is synthesized)
cagctggctacctgtcagaccgggccatggcaaaggcgggactgtccaactacgggaaccctcgccatggcctgttgctgttcatgatggctggcatgacagtgtccatgtacctcttcc

SEQ ID NO: 338288 - DNA, 120 bp, Artificial Sequence
  ENSG00000137700_11 (sequence is synthesized)
gggtaacagtgaccagtgactcccccaaggatgttgctttctggactctggctcttcaccctctcgcggagctcacaggctttacagagcatgagctctggatcctggtattgggagctg

SEQ ID NO: 338289 - DNA, 120 bp, Artificial Sequence
  ENSG00000137700_12 (sequence is synthesized)
tatttggtttctcctcgtatggccccattgccctgtttggagtcatagccaacgagagtgcccctcccaacttgtgtggcacctcccacgccattgtgggactcatggccaatgtgggcg

SEQ ID NO: 338290 - DNA, 120 bp, Artificial Sequence
  ENSG00000137700_13 (sequence is synthesized)
gctttctggctgggctgcccttcagcaccattgccaagcactacagttggagcacagccttctgggtggctgaagtgatttgtgcggccagcacggctgccttcttcctcctacgaaaca

SEQ ID NO: 338291 - DNA, 120 bp, Artificial Sequence
  ENSG00000137700_14 (sequence is synthesized)
tccgcaccaagatgggccgagtgtccaagaaggctgagtgaagagagtccaggttccggagcaccatcccacggtggccttccccctgcacgctctgcggggagaaaaggaggggcctgc

SEQ ID NO: 338292 - DNA, 120 bp, Artificial Sequence
  ENSG00000137700_15 (sequence is synthesized)
ctggctagccctgaacctttcactttccatttctgcgccttttctgtcacccgggtggcgctggaagttatcagtggctagtgaggtcccagctccctgatcctatgctctatttaaaag

SEQ ID NO: 338293 - DNA, 120 bp, Artificial Sequence
  ENSG00000137700_16 (sequence is synthesized)
ataacctttggccttagactccgttagctcctatttcctgccttcagacaaacaggaaacttctgcagtcaggaaggctcctgtacccttcttcttttcctaggccctgtcctgcccgca

SEQ ID NO: 338294 - DNA, 120 bp, Artificial Sequence
  ENSG00000137700_17 (sequence is synthesized)
tcctaccccatccccacctgaagtgaggctatccctgcagctgcagggcactaatgacccttgacttctgctgggtcctaagtcctctcagcagtgggtgactgctgttgccaatacctc

SEQ ID NO: 338295 - DNA, 120 bp, Artificial Sequence
  ENSG00000137700_18 (sequence is synthesized)
agactccagggaaagagaggaggccatcattctcactgtaccactaggcgcagttggatataggtgggaagaaaaggtgacttgttatagaagattaaaactagatttgatactgaacac

SEQ ID NO: 338296 - DNA, 120 bp, Artificial Sequence
  ENSG00000137700_19 (sequence is synthesized)
aggtgccacgagcccgccgcctcttcgccgcccgccgcctctcctcctctcccgcccgccgcctggccctcccctaccaggctgagcctctgggtgccagaagcgcggggcctccgggag

SEQ ID NO: 338297 - DNA, 120 bp, Artificial Sequence
  ENSG00000137700_20 (sequence is synthesized)
ggagaatacgtgcggtcgcccgctccgcgtgcgcctacgccttctgctccagttgctttcccaattgagcggaaaagccggggcatgttgccggggccctgggcgggacggttgtgccct

SEQ ID NO: 338298 - DNA, 120 bp, Artificial Sequence
  ENSG00000137700_21 (sequence is synthesized)
tagatggactcctttaaaactcatgcctcctctgccttcacctgaacattgaatagttcaatgattattttagagataaagctattgggttgtggacagattaaataacttgatggaggg

SEQ ID NO: 338299 - DNA, 120 bp, Artificial Sequence
  ENSG00000137700_22 (sequence is synthesized)
agcaggttcctgagcagttcctggccagctcctattgcttgtcaagatattttaggaggctgagagtggtgggatcaggtggcagaggaggaaactgccctgccaaacagaagcgccctc

SEQ ID NO: 338300 - DNA, 120 bp, Artificial Sequence
  ENSG00000137700_23 (sequence is synthesized)
tccctcttccctgtaatgtgagcttctggggctgccccatctgaccccaccctcaacatgggcagtaggctggacacctacgtgtcgccctctgccccacagtggtttgagccatctcag

SEQ ID NO: 338301 - DNA, 120 bp, Artificial Sequence
  ENSG00000137700_24 (sequence is synthesized)
aaggagcaggaaccaatgcaggggatgcaaattcaggccttgcttccatttatcctctttattcgttccttgaggccgggcgctactcaggcagctatggccagtcacctatgggaaccc

SEQ ID NO: 338302 - DNA, 120 bp, Artificial Sequence
  ENSG00000137700_25 (sequence is synthesized)
tgtacctctccaggtttaagccattgtgggacaaccccaatgtgtaacaccctcccacccttcccttccctcttcccaccacaactccctactgcaggtagctcctacatgagtgccctg

SEQ ID NO: 338303 - DNA, 120 bp, Artificial Sequence
  ENSG00000137700_26 (sequence is synthesized)
cccgcctctgttcaggtaggaggcggtatgcgggggaggggagtcacctgagggcggggatctcaggtcttggggagccattgttggcgaaccccaacttccgatacgacccggagctgt

SEQ ID NO: 338304 - DNA, 120 bp, Artificial Sequence
  ENSG00000137700_27 (sequence is synthesized)
ctctgcttgcggcccctgccaacgtcccacaggttggaaaccagaccctgcagcccccagctagcccgaaggaagcccagactgacgtcgcagggtaatggggacccagaggtagctctg

SEQ ID NO: 338305 - DNA, 120 bp, Artificial Sequence
  ENSG00000137700_28 (sequence is synthesized)
tggggccccatcaggacctcagcccttagcggggctttctgtgtgacaccgtgggacctgaactggggaggtcccccttgcacagaattacaaggggcaactgtaggaaacaattaaatc

SEQ ID NO: 338306 - DNA, 120 bp, Artificial Sequence
  ENSG00000137700_29 (sequence is synthesized)
tattatgtgctaagtattgagagttccacggattgaggccctctctagaaggcttagaagtggggtagccggggtatgtgtctgactttgtgttttggtgcggtggtggtgagtgggtgt

SEQ ID NO: 338307 - DNA, 120 bp, Artificial Sequence
  ENSG00000137700_30 (sequence is synthesized)
agaaactaatagtgccaagtgcagtgcctgtcaactagtaagttaataaaccttccgtgaatgaatgagaaggttctgtgactgagggagcagggctagagagggcatctctgctcatcc

SEQ ID NO: 338308 - DNA, 120 bp, Artificial Sequence
  ENSG00000137700_31 (sequence is synthesized)
cacccctgcctcccctgggctcaggcagacaaaagtaattaggttgaacctttaatcaaagctggtttcacaggcaagcagacatgatagaggaggtaaaggcagaaatcctggggacac

SEQ ID NO: 338309 - DNA, 120 bp, Artificial Sequence
  ENSG00000137700_32 (sequence is synthesized)
cagaaccagccagacacactgggtgtttgtgtacaggcatgtggtgtgggtggattgtctgcacagtagaggccaggggccagtctgcatatgccagataaagaagctctgagatccatg

SEQ ID NO: 338310 - DNA, 120 bp, Artificial Sequence
  ENSG00000137700_33 (sequence is synthesized)
gacatgggtgcctgcggggctaaggagggctgcttatttgacgtgtgtgtgcatgccctggaggcactgtttattccgagagtgtttgaggggcttctgagcatggttttcacacctgtg

SEQ ID NO: 338311 - DNA, 120 bp, Artificial Sequence
  ENSG00000137700_34 (sequence is synthesized)
tgggtgcatgtggaggcttcagggtgagtgctggctactgacactgtgagcactgggaactaaaaagttggcacaacgacttcatgtggcctggcatgctacccttcaggagggacaagg

SEQ ID NO: 338312 - DNA, 120 bp, Artificial Sequence
  ENSG00000137700_35 (sequence is synthesized)
tccctgactccaatcctgagccctttgccccatgttgggtggtggagcaacagaactgctagaggcccgggactggcatccagagtgaggtgggaaatcccatatgcaaatcccagggag

SEQ ID NO: 338313 - DNA, 120 bp, Artificial Sequence
  ENSG00000137700_36 (sequence is synthesized)
ggggaactgccacgtcctgctccctttttgttccctgacaactgtagctgagaatcatgggtcagtctggggctagtgccgatggtgaggcaggagaagtggccgaagtagtagggcccc

SEQ ID NO: 338314 - DNA, 120 bp, Artificial Sequence
  ENSG00000137700_37 (sequence is synthesized)
atgagtgtcagattgcagcacaggctcctcctgttcctctgggaagtaacctgtctcaccccactgggcacccctgcacacctgaccccatgccttctttcattgctcctgtgtttctcc

SEQ ID NO: 338315 - DNA, 120 bp, Artificial Sequence
  ENSG00000137700_38 (sequence is synthesized)
tacctgtcagaccgggccatggcaaaggtgagcgggcagaagggacaggaaggagaagggtccctttcagtcttcacggcgtggctgggacaggcactggagagatgggagtcccagggc

SEQ ID NO: 338316 - DNA, 120 bp, Artificial Sequence
  ENSG00000137700_39 (sequence is synthesized)
acaggcaggttggcatctgctggtttagaccgggtgaagagggaatgattccaggctggtcttagctttcctacggttgtggaagtaaggctcttgggtagagttttaactgatgtgaag

SEQ ID NO: 338317 - DNA, 120 bp, Artificial Sequence
  ENSG00000137700_40 (sequence is synthesized)
gacagccagaatatttcttagcttagctgtaggttgctccacagccccaggaaaatgggctgggaacagactaggtgccctccccagcacgtgtcctagtcctgcctgacgggggaggag

SEQ ID NO: 338318 - DNA, 120 bp, Artificial Sequence
  ENSG00000137700_41 (sequence is synthesized)
gggatgttgtagagtttggcctcagaatgtaatgagcaggtcccagggcctcccagagctgcccagggccaagaactgtggtgggattgccaaagacccgtcagcagaggccctgctgtg

SEQ ID NO: 338319 - DNA, 120 bp, Artificial Sequence
  ENSG00000137700_42 (sequence is synthesized)
tcagagtccaggggtgggtgttctctgccctgttctgaggacgtgacattgccgggactgtatccataggcgggactgtccaactacgggaaccctcgccatggcctgttgctgttcatg

SEQ ID NO: 338320 - DNA, 120 bp, Artificial Sequence
  ENSG00000137700_43 (sequence is synthesized)
atggctggcatgacagtgtccatgtacctcttccgggtaacagtgaccagtgactcccccaaggtaattaagaaaggcctggctcacggcagggcacaaggagagaacgcaagggccact

SEQ ID NO: 338321 - DNA, 120 bp, Artificial Sequence
  ENSG00000137700_44 (sequence is synthesized)
gactctgtctccctctcctggcttcagcctgggccaatcttttcttcgcctctcagatacccttttcagttctgattggaccgttcctctgtgtctgggttctcctcctccactctgggc

SEQ ID NO: 338322 - DNA, 120 bp, Artificial Sequence
  ENSG00000137700_45 (sequence is synthesized)
ctggttttcttttcttccctgtgctcctctaggatgttgctttctggactctggctcttcaccctctcgcggagctcacaggctttacagagcatgaggtgccttaaagatatctctggt

SEQ ID NO: 338323 - DNA, 120 bp, Artificial Sequence
  ENSG00000137700_46 (sequence is synthesized)
ttttctcctggtctgtctcacctttgtcctacccttctgccttacccctagccaatccagtttgtgtaaatcctgaggacagcctctagctcagagggatgacttctgtacctcctttcc

SEQ ID NO: 338324 - DNA, 120 bp, Artificial Sequence
  ENSG00000137700_47 (sequence is synthesized)
ttgcccacctaggtccctgggtttgctcaatgtggcatctcctactctagctctgtattgtcagttgtgttggggagtggaaggaaaagaatcacttacttactgtccttttatgactac

SEQ ID NO: 338325 - DNA, 120 bp, Artificial Sequence
  ENSG00000137700_48 (sequence is synthesized)
tgtttgtttctggggaccaagccttcttcttgctttggcaggggtgggtaggcaggtcggctttccgactctgaatgccactccactctgcccttggcagctctggatcctggtattggg

SEQ ID NO: 338326 - DNA, 120 bp, Artificial Sequence
  ENSG00000137707_0 (sequence is synthesized)
cctgaagggcctccaagggagacgcctagaagatggaggcccagattcttgagacgtttctctttctgatctagcaggagggacaaagagctcctccactccctcattccccaagaaggc

SEQ ID NO: 338327 - DNA, 120 bp, Artificial Sequence
  ENSG00000137707_1 (sequence is synthesized)
ccccagcctacccagtttccgtgaccattccgccctgggaaagcggcttcccagacctccttatctatttttcttgaatcatgagagatgaaattgcaacaacagttttctttgtcacaa

SEQ ID NO: 338328 - DNA, 120 bp, Artificial Sequence
  ENSG00000137707_2 (sequence is synthesized)
gattggtgaaaaaacatgataaactaagtaaacagcaaatagaagactttgcagaaaagctgatgacgatcttgtttgaaacatacagaagtcactggcactctgattgcccttctaaag

SEQ ID NO: 338329 - DNA, 120 bp, Artificial Sequence
  ENSG00000137707_3 (sequence is synthesized)
ggcaagccttcaggtgcatcaggataaacaacaatcagaataaagatcccattctagaaagggcatgtgtggaaagtaatgtagatttttctcacctgggacttccgaaggagatgacca

SEQ ID NO: 338330 - DNA, 120 bp, Artificial Sequence
  ENSG00000137707_4 (sequence is synthesized)
agttgcttcttttaaaggcagatgggaggaatgggaactatatcaacaaatcagttatgccgttagtagagcctcatcagacgtttcctctggcacttcctgcgatgaagaaagttgtag

SEQ ID NO: 338331 - DNA, 120 bp, Artificial Sequence
  ENSG00000137707_5 (sequence is synthesized)
caaggaacctcgtgtcattcctaaagtcagcaatccgaagagtatttatcaggttgaaaacttgaaacagccctttcaatcttggttacaaatcccccgcaaaaagaatgtggtggacgg

SEQ ID NO: 338332 - DNA, 120 bp, Artificial Sequence
  ENSG00000137707_6 (sequence is synthesized)
ccgtgttggcctcctgggaaacacttaccatggctcgcagaagcatcctaagtgttacaggcctgctatgcaccggctggacagaattttataacccacatctgggaatgaatttgcagc

SEQ ID NO: 338333 - DNA, 120 bp, Artificial Sequence
  ENSG00000137707_7 (sequence is synthesized)
acctggtagaagaaggcaccttggaaggcactgccttgggcttccatggcaggaagatgagaagaaatcttcagggtgatttctggagcctgaaaagaataaaaaacaaaaccaaaccta

SEQ ID NO: 338334 - DNA, 120 bp, Artificial Sequence
  ENSG00000137707_8 (sequence is synthesized)
aatccgaagagtatttatcaggtcaagagtgttccagttcttttctatactttttttctatctaattctaaaaagaatgcactcattatgaaaacaaagaagcaaaaaaacatggaaaga

SEQ ID NO: 338335 - DNA, 120 bp, Artificial Sequence
  ENSG00000137707_9 (sequence is synthesized)
acaaaactgtagatttttaaaagccagactcttaatattttggcaaaactttttctgtctccttcactgcacaatgtattccctacacttggctgagcttttaggatccacataatcttt

SEQ ID NO: 338336 - DNA, 120 bp, Artificial Sequence
  ENSG00000137707_10 (sequence is synthesized)
tattgtcctatttcttcatacagtatttgaagatacacaggtttccttccacttaaattcctacagaatcaaagattaagattagtgggatttttttttctgtcaattgaaaataccacg

SEQ ID NO: 338337 - DNA, 120 bp, Artificial Sequence
  ENSG00000137707_11 (sequence is synthesized)
gcatttatagaaaatttggatataggaaaggtcaaaggcctataaattctgccactagagcagtttttctcagctatttttttcttctttttaaaccataacccattcaaaatatgtata

SEQ ID NO: 338338 - DNA, 120 bp, Artificial Sequence
  ENSG00000137707_12 (sequence is synthesized)
tttacatttaaaaagtttcatgaaacagtgcttatctttactaggagcaatgctcccaatgctcccaatacttccaattaaattcatttgatttcaagtatctaaattgatttcatgacc

SEQ ID NO: 338339 - DNA, 120 bp, Artificial Sequence
  ENSG00000137707_13 (sequence is synthesized)
cacaatttgaaaaacactgatctagagagaatttgttaacactatatgtatatatttgtttgtatgttctcttaatcacctatgtattaaatgttaaagcaattaaaattttaatattca

SEQ ID NO: 338340 - DNA, 120 bp, Artificial Sequence
  ENSG00000137707_14 (sequence is synthesized)
cagtttccgtgaccattccgccctgggaaagcggcttcccagttgaagtcacgaggagttctccaagaaaggtctgctggctgattcttcattgacctaccagtccctgctatcaaggac

SEQ ID NO: 338341 - DNA, 120 bp, Artificial Sequence
  ENSG00000137709_0 (sequence is synthesized)
gccgagtgttgcccgggccggagcagcggagcgcgcgacagtggcggcgacggctccggcagcggctcccgcggcggcggcggccgggaactggaggaaggagaccctggcttcgcaggg

SEQ ID NO: 338342 - DNA, 120 bp, Artificial Sequence
  ENSG00000137709_1 (sequence is synthesized)
gagaccctggcttcgcaggggccccggctggggcagaggcgaggggcctgggggggcgctggctttggccccgcctggggcaggatggtgaatctggagtccatgcacacagatatcaag

SEQ ID NO: 338343 - DNA, 120 bp, Artificial Sequence
  ENSG00000137709_2 (sequence is synthesized)
atgagtggggatgtagccgattccacggatgctcgcagcactctcagccaggtggagccaggaaatgatcgaaatggcctagatttcaacaggcagattaaaaccgaagatctcagtgac

SEQ ID NO: 338344 - DNA, 120 bp, Artificial Sequence
  ENSG00000137709_3 (sequence is synthesized)
tccctgcagcagaccctctcccatcggccatgccacctgagtcaaggacctgccatgatgtccggaaaccaaatgtctgggctaaatgccagcccatgtcaggacatggcttccctccat

SEQ ID NO: 338345 - DNA, 120 bp, Artificial Sequence
  ENSG00000137709_4 (sequence is synthesized)
ccgctccagcagcttgtgctggttcccggccacttacagtctgtatcccagttcctgctatctcagacccagcctgggcagcaaggtctgcagccaaatctcctcccctttccacagcaa

SEQ ID NO: 338346 - DNA, 120 bp, Artificial Sequence
  ENSG00000137709_5 (sequence is synthesized)
caaagcggtctcctcctcccacagactgggccgggactggcatcccaggcatttgggcaccctgggctgccaggatcctctttagaaccccacctggaagcatcccagcatctcccagtg

SEQ ID NO: 338347 - DNA, 120 bp, Artificial Sequence
  ENSG00000137709_6 (sequence is synthesized)
cccaagcatctacccagctctggaggggccgatgagcccagtgacctcgaggagctggagaagtttgccaagaccttcaagcagaggcgcattaagctgggcttcacacagggagatgtg

SEQ ID NO: 338348 - DNA, 120 bp, Artificial Sequence
  ENSG00000137709_7 (sequence is synthesized)
gggctggcgatgggaaagctgtatggcaacgacttcagccagaccaccatctcacgatttgaggccctcaacctgagcttcaagaacatgtgcaagctcaagcccctgctggagaagtgg

SEQ ID NO: 338349 - DNA, 120 bp, Artificial Sequence
  ENSG00000137709_8 (sequence is synthesized)
ctgaatgatgcagagtcctctccgtcagacccctcagtgagcacgcccagctcctaccccagcctcagtgaagtatttggtaggaagagaaagaaacggaccagcatcgagaccaacatc

SEQ ID NO: 338350 - DNA, 120 bp, Artificial Sequence
  ENSG00000137709_9 (sequence is synthesized)
cgcctgactctggagaagaggtttcaagataacccaaaacccagctcggaggagatctccatgattgcagagcagttgtccatggagaaggaggtggtgagggtctggttctgcaaccga

SEQ ID NO: 338351 - DNA, 120 bp, Artificial Sequence
  ENSG00000137709_10 (sequence is synthesized)
cgccaaaaggagaagcgaatcaactgccctgtggccacacccatcaaaccacctgtctacaactcccggctggtatctccctcagggtctctgggccccctctctgtccctcctgtccac

SEQ ID NO: 338352 - DNA, 120 bp, Artificial Sequence
  ENSG00000137709_11 (sequence is synthesized)
agtaccatgcctggaacagtaacgtcatcctgttcccctgggaacaacagcaggccttcatctcctggctcaggactccacgccagcagccccactgcatctcaaaataactccaaagca

SEQ ID NO: 338353 - DNA, 120 bp, Artificial Sequence
  ENSG00000137709_12 (sequence is synthesized)
ccactgagaccaaaaagtttctcctactccagctggccctgtattccccctggaaggaagggaatcatgccttctatatacagacagattgccttcagaagagtggaagaaaatctccac

SEQ ID NO: 338354 - DNA, 120 bp, Artificial Sequence
  ENSG00000137709_13 (sequence is synthesized)
tatcaatgaacccagactcttgtcttcttcaagagcaagggcctccggagatccaaactgtgattgaaccaagtgcagactcctaatgctcttgaaatacacagcccctcctaggagctt

SEQ ID NO: 338355 - DNA, 120 bp, Artificial Sequence
  ENSG00000137709_14 (sequence is synthesized)
accattttcaccttccttgcctatgcccttgccttctagttccaaatattttagccagcttcactgtggcaatagtctttcagagaaaagacttcttgctgttattctccaactcatccg

SEQ ID NO: 338356 - DNA, 120 bp, Artificial Sequence
  ENSG00000137709_15 (sequence is synthesized)
tgggcttctggggacagccatttggctggggtgccaaacaccagaaggggagataatagttttgactctgaacttggccacaacccctgaactgatcccaaaatctgtgaaaagatttga

SEQ ID NO: 338357 - DNA, 120 bp, Artificial Sequence
  ENSG00000137709_16 (sequence is synthesized)
atctgatatctccaccaaagccttgatgttttctctgtacagctaagttttctgatggaatcttcatctcaccccattttctttttaacctcgcccccttttctacaatcaaatccattc

SEQ ID NO: 338358 - DNA, 120 bp, Artificial Sequence
  ENSG00000137709_17 (sequence is synthesized)
attattgcgccctccaggtcccctcctttttgcagaaggtgtaaaagagctgcccttggtgggtgccctgggcatgttgcaacgcctgctggtgcccttctgtctgtccacgtctgccta

SEQ ID NO: 338359 - DNA, 120 bp, Artificial Sequence
  ENSG00000137709_18 (sequence is synthesized)
gggctcaggagtgcttgttctttcccttcctccctgtgtttctctttatcctgtcccctctcctttctcctggcagcagaaaaggaagaacacaagagcaaacacacaacaatgatggtg

SEQ ID NO: 338360 - DNA, 120 bp, Artificial Sequence
  ENSG00000137709_19 (sequence is synthesized)
gcaaagtacctgtatatagccctttcccattttttgcattatgttcttaactccttaatgtggaattttccagcaaaatgtttaactcaggtgtgatttttgaaaatgtctctgtaatat

SEQ ID NO: 338361 - DNA, 120 bp, Artificial Sequence
  ENSG00000137709_20 (sequence is synthesized)
tctctgtaatattttatcttctttaaaaaaaagggggggaaataccaaagtgtgaaatactgtgctaccttccagagttcccacatgggctgggatttttttttctttttcttttttttt

SEQ ID NO: 338362 - DNA, 78 bp, Artificial Sequence
  ENSG00000137709_21 (sequence is synthesized)
tcttggctcactgcatgctctgccagggattacaggcgcccaccaccaaaaattagcccagctaatttttgtattttt

SEQ ID NO: 338363 - DNA, 120 bp, Artificial Sequence
  ENSG00000137709_22 (sequence is synthesized)
acaggtgtgagccaccgcgcctggcctgggctgggaatctttgttgacttctttgggaacattatctctagagtctgcttttttgtgggccagtttgtagagatgtaacatgaagccatt

SEQ ID NO: 338364 - DNA, 120 bp, Artificial Sequence
  ENSG00000137709_23 (sequence is synthesized)
catgaagccattccagaaatggtaacttaaaaaaaaaaagactacatgtctaggaaactgttgagattcaaaggaatctcactgttcctaaataaatgtgtatagtgattatgaaaagta

SEQ ID NO: 338365 - DNA, 120 bp, Artificial Sequence
  ENSG00000137709_24 (sequence is synthesized)
ccttagtttccaaggcacctcagaatattatggtgatgaatgagaccctatttgaatttttaagtgtttattttggttaaaaaataaacatcatactcctggaatggaaaagggaaggta

SEQ ID NO: 338366 - DNA, 120 bp, Artificial Sequence
  ENSG00000137709_25 (sequence is synthesized)
acagtttaatttgttttcagaagactggagagcgacatgaaaatggcccaggcttataaccacctaggtcagtgtatgatgcagtggtggaaagacacttccaaatttggagtcagaaaa

SEQ ID NO: 338367 - DNA, 120 bp, Artificial Sequence
  ENSG00000137709_26 (sequence is synthesized)
atttactggtttctttaaaaagtcacttactaactgtgtgttttggggaaagttacctaacctctctgagcttccatttcctcttctgaaaaaatgggataatagcaaggctctgcctca

SEQ ID NO: 338368 - DNA, 120 bp, Artificial Sequence
  ENSG00000137709_27 (sequence is synthesized)
tgagattattgagagtcacttgaaataatgcatgtgaaaaggctgtatccatttcaaccgccatgtcagaattgccattagtacccaagcctctcaactcccagttctggattccttgta

SEQ ID NO: 338369 - DNA, 120 bp, Artificial Sequence
  ENSG00000137709_28 (sequence is synthesized)
agagctttcttgcctatgtattttaataatgaacaatgaagccctgactttttgaaactgaagagcataaaggtcaacatcagcagatgctgtatgtacattgtgacccagaacagccta

SEQ ID NO: 338370 - DNA, 120 bp, Artificial Sequence
  ENSG00000137709_29 (sequence is synthesized)
gggaaaacagagaccccaaagtgctgttgagtgacaagcgattgggatgaccaaccccattgtctgctttggtggtttgatggccccactcctgctgggagagtgagccaccaaccaggc

SEQ ID NO: 338371 - DNA, 120 bp, Artificial Sequence
  ENSG00000137709_30 (sequence is synthesized)
agagtccctcatgtaccgttttcctggggaggatggagaagccggtataatacatactgcccaagggagtttccagaggctcagccctggactttccctcctctctcagccctctctccc

SEQ ID NO: 338372 - DNA, 120 bp, Artificial Sequence
  ENSG00000137709_31 (sequence is synthesized)
aagtataaaatgtcctggtcagccacatgcctctggctaaggcccactgccctttagagccgtatggtcgtatctgcttggtctggcatcctcgcagatttgattgggcctctgtagcca

SEQ ID NO: 338373 - DNA, 120 bp, Artificial Sequence
  ENSG00000137709_32 (sequence is synthesized)
taacccagctacttctcctgcagggaaagccaaaatcctcagccctagcttgaattctcagcagccaccctgcatcctttcccttcttggttttcttcagctctggtaatcagatcccag

SEQ ID NO: 338374 - DNA, 120 bp, Artificial Sequence
  ENSG00000137709_33 (sequence is synthesized)
agtagatcgtcttgaccctccttagcctctacgcctctccagacaggcgggcaggtggaaggactggtttggggactgctgtttacatgtctgtttatccctgtatctgatttgcctcca

SEQ ID NO: 338375 - DNA, 120 bp, Artificial Sequence
  ENSG00000137709_34 (sequence is synthesized)
cctgtatgtggcaatgcctggcagtgctaggagggcctctccatgggacttgaggtgggtggagggacctgatcaggtggcagggggtggggacagtgatcgtggtgccaaagttgtagc

SEQ ID NO: 338376 - DNA, 120 bp, Artificial Sequence
  ENSG00000137709_35 (sequence is synthesized)
acatgtgtttcaaatagcctggattttatttgtctgttcctttgtccctcccctttcacccaggtctgcagccaaatctcctcccctttccacagcaacaaagcggtctcctcctcccac

SEQ ID NO: 338377 - DNA, 120 bp, Artificial Sequence
  ENSG00000137709_36 (sequence is synthesized)
agactgggccgggactggcatcccaggtaaacaaccccattcttcctgtttcctctaggaatgtctcagctctcactgagtttaactcactggtttccccctacccctttaacagggcac

SEQ ID NO: 338378 - DNA, 120 bp, Artificial Sequence
  ENSG00000137709_37 (sequence is synthesized)
taacccctctggggagaggggatagcagggaactatccattggcacaggggaaatccaagctacagcaagtggggggacaatttaccaagtgtcactggtggggccacagttagaatcca

SEQ ID NO: 338379 - DNA, 120 bp, Artificial Sequence
  ENSG00000137709_38 (sequence is synthesized)
agcattgctcctctgagagccaggctcagctcacttctcaggcataccaagatggccacgaaccctacctaggtgctctcaagccccaagagggagactagaatactacagacctgatgt

SEQ ID NO: 338380 - DNA, 120 bp, Artificial Sequence
  ENSG00000137709_39 (sequence is synthesized)
cccagaccacaaagccagtgtctttcacctctgggccactattccagattgcctcctgcagtgggcacgtatataggccagtgggctgaggtctgggagaggggttgtttgcagagctgc

SEQ ID NO: 338381 - DNA, 120 bp, Artificial Sequence
  ENSG00000137709_40 (sequence is synthesized)
catggttccacacagcaccttttttccaactaggaaaaaggcacctcttctggccaggtgcagtctcatgccaaggtggacagattggcgacagcagcatgagctgtatcttagctgcca

SEQ ID NO: 338382 - DNA, 120 bp, Artificial Sequence
  ENSG00000137709_41 (sequence is synthesized)
ttcctcccctgatctgggtgcccctgtacagttaataacctgcacagctgcatgagatggctctgcacagatggttgggcagaatggttgggaatgactgcagagatctctgtgctaaga

SEQ ID NO: 338383 - DNA, 120 bp, Artificial Sequence
  ENSG00000137709_42 (sequence is synthesized)
tccccatggctcaccaagagcccggccttcagagagggctgaggccactaaaagtacctggaggggaagctcgccatctagtggttgaaatggggacaccagcatcataagctgctcttc

SEQ ID NO: 338384 - DNA, 120 bp, Artificial Sequence
  ENSG00000137709_43 (sequence is synthesized)
cgcctcctcctggctgccctctccagaatctcatagccatgggcttacagctggaagagatcttagaatcttcaagatcaactctcatctcttatcatattttggcatggagagactggt

SEQ ID NO: 338385 - DNA, 120 bp, Artificial Sequence
  ENSG00000137709_44 (sequence is synthesized)
agcagagagaccacatagaagattatgaagatcatccaggggaggggtcataaaggattggcttagagttgtggcaataagaagaggggatgattgaggagatgctttgggaagttgaat

SEQ ID NO: 338386 - DNA, 120 bp, Artificial Sequence
  ENSG00000137709_45 (sequence is synthesized)
cagtgcagtttgccagtggattggagatgaaaggaggagggagaaggtctagcagagagccccataagtctttgtcaaatgaaagaacaaatgatttaatgaaaaggaaggttcaaagag

SEQ ID NO: 338387 - DNA, 120 bp, Artificial Sequence
  ENSG00000137709_46 (sequence is synthesized)
gactggggctttgtcctgagggtctggtctatgccacactctcctcacacaccctctccctgcaaactaagaccaaattcatgatggtttcagactaaaagacccttcactgggggaaag

SEQ ID NO: 338388 - DNA, 120 bp, Artificial Sequence
  ENSG00000137709_47 (sequence is synthesized)
actcctaaacttctctctagaggtccttttaccttcttcatcataaggatacctatctgaatggtaaacccaaatatcccagaggagaagaagtaatgtttagtctacaaaaagtaaatc

SEQ ID NO: 338389 - DNA, 120 bp, Artificial Sequence
  ENSG00000137709_48 (sequence is synthesized)
aaaaaggagagaagaggtggatttagccctttgagctagctggccacagtgcctggacccctaggcccagattccactctatccttgtggaatgatagatgtccttaagatcggattcat

SEQ ID NO: 338390 - DNA, 120 bp, Artificial Sequence
  ENSG00000137709_49 (sequence is synthesized)
tcctgaccccaaataggcacagcatggttctaggtttaagggtacgttttcctatgaaaataagctcaagaaataatatttggctgggcacggtggctcatacttgtagtcccagcactt

SEQ ID NO: 338391 - DNA, 120 bp, Artificial Sequence
  ENSG00000137709_50 (sequence is synthesized)
tgagaccagcttgggcaacatggtgaagccctgtctctaaaaaaacaaaagttagccaggtgtggtggcacacgcctgtagccccagctgttcaggagcctgaggcaggagaatgactta

SEQ ID NO: 338392 - DNA, 120 bp, Artificial Sequence
  ENSG00000137709_51 (sequence is synthesized)
gccccagctgttcaggagcctgaggcaggagaatgacttaagcccaggaggttgacgctgcagtgagcagtgattgtgccactacactctagcctgggtgacagagtgagatcctgattc

SEQ ID NO: 338393 - DNA, 120 bp, Artificial Sequence
  ENSG00000137709_52 (sequence is synthesized)
accttagagggaggagacttggaaaggagccgagcatgggtgagcactcaaagattcaggctggctgtgtgatcgatgctaggaccatgcaggatgtgggcaaacaagaggaggaggctg

SEQ ID NO: 338394 - DNA, 120 bp, Artificial Sequence
  ENSG00000137710_0 (sequence is synthesized)
atattgcggagctgtctgcggtggcggcggcgcctctcgtctcccgcgggccagcgctcgcaccaccgcttctccctccctgtcgcagccgcgccgccgcgcagcgccccagccacacgc

SEQ ID NO: 338395 - DNA, 120 bp, Artificial Sequence
  ENSG00000137710_1 (sequence is synthesized)
cggcgggcagaagccgcccgctctccggaaagtgataacagaattcattgaagtggagaatttttaaagaaggtaacaaaaagagaaagaaaatgccgaaaccaatcaacgtaagagtaa

SEQ ID NO: 338396 - DNA, 120 bp, Artificial Sequence
  ENSG00000137710_2 (sequence is synthesized)
ctacaatggatgctgagctggaatttgccattcagcccaatacaactggcaaacaactttttgaccaggtggtgaaaacagttggtttgcgtgaggtctggttttttgggctgcagtatg

SEQ ID NO: 338397 - DNA, 120 bp, Artificial Sequence
  ENSG00000137710_3 (sequence is synthesized)
tagacagcaaaggttattctacatggcttaaactaaataaaaaggtaacacagcaggatgttaaaaaagagaatcctttacagttcaagtttagagctaaattctttcctgaagatgttt

SEQ ID NO: 338398 - DNA, 120 bp, Artificial Sequence
  ENSG00000137710_4 (sequence is synthesized)
ctgaggaattaattcaagaaataacccagagactcttcttcttgcaagttaaagaagccatcttaaatgatgagatatattgcccgccagaaactgcagttcttttggcttcctatgctg

SEQ ID NO: 338399 - DNA, 120 bp, Artificial Sequence
  ENSG00000137710_5 (sequence is synthesized)
tccaagccaagtatggagattacaataaagagattcataagccaggctacctggctaatgatagactcctaccccagcgtgtattggaacaacacaaactaacaaaagaacagtgggaag

SEQ ID NO: 338400 - DNA, 120 bp, Artificial Sequence
  ENSG00000137710_6 (sequence is synthesized)
aaagaatacagaactggcatgaagaacatagaggaatgttaagggaggattctatgatggaatacctgaagattgcacaagatctagaaatgtatggagtcaactattttgaaataaaaa

SEQ ID NO: 338401 - DNA, 120 bp, Artificial Sequence
  ENSG00000137710_7 (sequence is synthesized)
ataaaaaaggaactgaattgtggctaggtgttgatgctttgggtctgaatatttatgagcatgacgacaagttaacacctaaaattggttttccctggagtgaaatcagaaatatttcat

SEQ ID NO: 338402 - DNA, 120 bp, Artificial Sequence
  ENSG00000137710_8 (sequence is synthesized)
ttaatgacaaaaaatttgttataaagccaatcgacaaaaaggcacctgattttgtgttttatgcacctcgtctgagaatcaataagcggattttggccttatgtatgggaaaccatgaac

SEQ ID NO: 338403 - DNA, 120 bp, Artificial Sequence
  ENSG00000137710_9 (sequence is synthesized)
tatacatgcgaagaaggaagcctgatactattgaagtacaacagatgaaggctcaggctagggaggagaaacatcagaagcagttggaaagggcacaattagagaatgaaaagaagaaaa

SEQ ID NO: 338404 - DNA, 120 bp, Artificial Sequence
  ENSG00000137710_10 (sequence is synthesized)
gagaaatagcagaaaaggaaaaggaaagaatagaacgtgaaaaggaagagctaatggaacgtctaaaacaaattgaagagcagacaattaaagctcagaaagaactagaagaacagactc

SEQ ID NO: 338405 - DNA, 120 bp, Artificial Sequence
  ENSG00000137710_11 (sequence is synthesized)
gaaaagctctagaactggatcaagaacgaaaacgagcaaaagaagaagcagaacgacttgaaaaggagcgtcgagctgctgaagaggcaaagtctgccatagcaaaacaagctgccgacc

SEQ ID NO: 338406 - DNA, 120 bp, Artificial Sequence
  ENSG00000137710_12 (sequence is synthesized)
agatgaagaatcaggagcagctagcagcagaacttgctgaattcactgccaagattgcacttctagaggaagccaagaagaaaaaggaagaggaagctactgagtggcaacacaaagctt

SEQ ID NO: 338407 - DNA, 120 bp, Artificial Sequence
  ENSG00000137710_13 (sequence is synthesized)
ttgcagcccaggaagacttggaaaagaccaaagaagagttaaaaactgtgatgtctgccccccctccacctccaccaccaccagtcattcctccaacagaaaacgaacatgatgaacacg

SEQ ID NO: 338408 - DNA, 120 bp, Artificial Sequence
  ENSG00000137710_14 (sequence is synthesized)
atgagaataatgctgaagctagtgctgaattatcaaatgaaggggtaatgaaccatagaagcgaggaagaacgtgtaaccgaaacacagaaaaatgagcgtgttaagaagcaacttcagg

SEQ ID NO: 338409 - DNA, 120 bp, Artificial Sequence
  ENSG00000137710_15 (sequence is synthesized)
cattaagttcagaattagcccaagccagagatgaaaccaagaaaacacaaaatgatgttcttcatgctgagaatgttaaagcaggccgtgataagtacaagactctgcgacagattcgac

SEQ ID NO: 338410 - DNA, 120 bp, Artificial Sequence
  ENSG00000137710_16 (sequence is synthesized)
aaggcaatacaaagcagcgtatcgatgagtttgaagcaatgtgagagctgttattttgcatatatgttcttcataagctgaaccaccaacagagaaaagcaggcctttgcagatatgatg

SEQ ID NO: 338411 - DNA, 120 bp, Artificial Sequence
  ENSG00000137710_17 (sequence is synthesized)
gaatgcatcccaccttgccaaagcacttacaccagtttgactgtgctagctaaaagacaaatttaaggggagctcttcaacattaaggcagtatgatatcatgcttggttttcttttttc

SEQ ID NO: 338412 - DNA, 120 bp, Artificial Sequence
  ENSG00000137710_18 (sequence is synthesized)
tttttttttctgttgaagattaacactaattatcacgtctgacaaatgtgtatgtgtggtttcagttctgtgtacattttaaaggataatggtgaacattttaatgggtttcccttgccc

SEQ ID NO: 338413 - DNA, 120 bp, Artificial Sequence
  ENSG00000137710_19 (sequence is synthesized)
tttccatatttaacctatttccacattctctctcactcacattttctcagtgtgcccttctcttatctgccatgtccatagccataattccaccatcatacagatcaggcagtgtttaaa

SEQ ID NO: 338414 - DNA, 120 bp, Artificial Sequence
  ENSG00000137710_20 (sequence is synthesized)
atgatggtaggtagcacagtggacagtctttgatcatcatgtagaatatggctatgaatcaggaaagagattagaacatttaataatgtatgtacagctggtgcttagtttttttttaat

SEQ ID NO: 338415 - DNA, 120 bp, Artificial Sequence
  ENSG00000137710_21 (sequence is synthesized)
ctaaatttaattaccttattggatatttgatatttggttatttaatcacagtcatctttaacagcttacactgattggtgttttatctcctgtgatcctttgatggctttttttgcctac

SEQ ID NO: 338416 - DNA, 120 bp, Artificial Sequence
  ENSG00000137710_22 (sequence is synthesized)
catttcacagaggtttagacagcagtagtagctccctaggagagtttactgatgaaacagcctctgcaagattttaaaagttttgttcttttatagactgatttagaaaaacaaatgatt

SEQ ID NO: 338417 - DNA, 120 bp, Artificial Sequence
  ENSG00000137710_23 (sequence is synthesized)
agttaaaaaaagaaaatatacatttgttggtaactaatgttattttttaaaacctggaccttttctggaagggcagcatataaaaacatcagtcccgaggaggggacaacaatactacct

SEQ ID NO: 338418 - DNA, 120 bp, Artificial Sequence
  ENSG00000137710_24 (sequence is synthesized)
cactactacatctgtgatgactggttgttcaaacacaatggagtgtgtaaggtatatgttttataattcataaccatagcctcgatcatcaagaaatactttcgaaatttcattttcctt

SEQ ID NO: 338419 - DNA, 120 bp, Artificial Sequence
  ENSG00000137710_25 (sequence is synthesized)
cagaatatcttaagagtgctaaatttttaactgcctttttgtcgagtcaaactgtgggattctgatttgtattaaaattgtaagctcctcactggtatactatcatcctggaggggtgtt

SEQ ID NO: 338420 - DNA, 86 bp, Artificial Sequence
  ENSG00000137710_26 (sequence is synthesized)
tgtgtgtgtatgagagagagaaatgctaaccttgtagcatgtgaagaatgtctgtaccttgatacgatagttacataatcagtata

SEQ ID NO: 338421 - DNA, 120 bp, Artificial Sequence
  ENSG00000137710_27 (sequence is synthesized)
aatgtctgtaccttgatacgatagttacataatcagtatatttggtttctagatcactgtgcttattttgtttcaatctctgactaaaaatacttaaatttggtttgttaattcttattt

SEQ ID NO: 338422 - DNA, 120 bp, Artificial Sequence
  ENSG00000137710_28 (sequence is synthesized)
tagaaattataattttagtttatattaatttcggttatagcttactgaagaaatctttccagttagaaggaggttctaatattcacatgttctaatactttgtttattgtaaaacagcta

SEQ ID NO: 338423 - DNA, 120 bp, Artificial Sequence
  ENSG00000137710_29 (sequence is synthesized)
aatttggagatacgtaaagccttgttttctctgtgtggttcagctactttccatttggtattacacagtcaaatttacatttatctattaaaattgccattttattaaacattttcatgc

SEQ ID NO: 338424 - DNA, 120 bp, Artificial Sequence
  ENSG00000137710_30 (sequence is synthesized)
acagtagattcaagttgtgtctgaaaatatctcttgtgcttttttgattttgctgactttaaaaggattaatctgggcagacattatgtaaaagaaaggttgcgtttaatatattttttg

SEQ ID NO: 338425 - DNA, 120 bp, Artificial Sequence
  ENSG00000137710_31 (sequence is synthesized)
aactttgtaggacaaaacatagctggttaaccttgaagtgactgttgtaccatggttgtgcacatgcttcagaatcctatggaagagaatattcctacttgcagtacatcaaaggaatgg

SEQ ID NO: 338426 - DNA, 120 bp, Artificial Sequence
  ENSG00000137710_32 (sequence is synthesized)
atggtggaccctactattcatgttttgagacataaatgttcactttaaagcaattgcataatagataaaaacctgaactttcattggatttttgttaattttcctcattttgaattatgt

SEQ ID NO: 338427 - DNA, 120 bp, Artificial Sequence
  ENSG00000137710_33 (sequence is synthesized)
gcactaccatagctacatcagtttgatacagtattgaaaaattatcagttatattttgctgtttatgatctatttgtagattaggattaaaatggatttaatccatttttaaggctgtgt

SEQ ID NO: 338428 - DNA, 120 bp, Artificial Sequence
  ENSG00000137710_34 (sequence is synthesized)
gaatttttctaaacaagaaccatttgcaatatggatttcttagagattaaaccaattataacttattagcagtcgcgagcacatgttcatatagtcaatgtaaaaatacactaatgagta

SEQ ID NO: 338429 - DNA, 120 bp, Artificial Sequence
  ENSG00000137710_35 (sequence is synthesized)
tttggtaaatcccagtaggcttttaccattagcataattttgtgttgtacaattaagttacaattacatctctaattttggataatattcattggttaacaataaagtgacaaaagctca

SEQ ID NO: 338430 - DNA, 120 bp, Artificial Sequence
  ENSG00000137710_36 (sequence is synthesized)
gcagcgtatcgatgagtttgaagcaatgtggggacccaaactgtatgcattgttccagatgcgctcttgccaaagcagcataaagcaaatgtaacccttaggaagaaggctccctccctc

SEQ ID NO: 338431 - DNA, 120 bp, Artificial Sequence
  ENSG00000137710_37 (sequence is synthesized)
actagggctacaaagaatgctagagtggagacaagagtccagactctgaaataacctcctttggacacagaagctaccactgttgcttatcagacgcagcgggccctgggtttttctggg

SEQ ID NO: 338432 - DNA, 120 bp, Artificial Sequence
  ENSG00000137710_38 (sequence is synthesized)
gccttaagcagtgaaccctggtcagctggcctgagtcccaacccaagcccatcaccacaagcctcaagacaggaagatctcagtgaaacctttcctctaatccaagtgacatcattgtcg

SEQ ID NO: 338433 - DNA, 120 bp, Artificial Sequence
  ENSG00000137710_39 (sequence is synthesized)
caggtgtttgtacatgaaagcagagtgatgaaggtgtgtgggtccacggaagaagtaaaaatacagcactagttcatatttttcctagtctctccctgttcccaggtaaagttatagcat

SEQ ID NO: 338434 - DNA, 120 bp, Artificial Sequence
  ENSG00000137710_40 (sequence is synthesized)
tggctactgacttatgggaagctttaggataaggacatacctggtgttctgaatgtgtatatcccccaaagtctgcaatctcagctggaactggatggaccagtattccattacccaggg

SEQ ID NO: 338435 - DNA, 120 bp, Artificial Sequence
  ENSG00000137710_41 (sequence is synthesized)
ccctggctcatggttctctcctcttctcagtttactgttggatttccctttcttgctattctctttctctccagacccctctcaattgcctttcctaaagacagaccttagcaagatggg

SEQ ID NO: 338436 - DNA, 120 bp, Artificial Sequence
  ENSG00000137710_42 (sequence is synthesized)
ccaggacttgggacttcgcacagcaccctgcagtcccaagccagcatctactgcaccccatcttcaggactctatcccccaaacatgctggaaggcatcagcttatgagaacccactttt

SEQ ID NO: 338437 - DNA, 120 bp, Artificial Sequence
  ENSG00000137710_43 (sequence is synthesized)
ttctgcatgactagcttgtaaggaagaatctatggacaggatttccaagaatttcccactttttcaaaaaatgtatgtgacttatatttggcttcaatccaagagcaaactcagtggtga

SEQ ID NO: 338438 - DNA, 120 bp, Artificial Sequence
  ENSG00000137710_44 (sequence is synthesized)
acagctccatttctgtgcacatgttggtggaatctgcagaaatcgatgcaacatttctttcctgtctgggctgtttgtataattgtatataaatgtagcaataaatatattctaacatca

SEQ ID NO: 338439 - DNA, 120 bp, Artificial Sequence
  ENSG00000137710_45 (sequence is synthesized)
tccgctaccagagtttctgattcagcatgtcagcagtggggcccaagaatttgcatttcagacaagttcccaagtgaaactgaggctgctggactggagaccacactgaagacccaagga

SEQ ID NO: 338440 - DNA, 120 bp, Artificial Sequence
  ENSG00000137710_46 (sequence is synthesized)
acacttggctaagagaaggcattctgttattgttccctcaaactccagaagaacccaatgttctcaaggctgtctgagtcagctgggcctcctttgctaacctggggctggcaaacagtc

SEQ ID NO: 338441 - DNA, 120 bp, Artificial Sequence
  ENSG00000137710_47 (sequence is synthesized)
ctcggtcagcatgagtaattcttacaaatcaatatcctcttctagcccacggccttggggagaaacaaatgattatggattatcctcatttctgttctatgcagaaagcaagatgagtca

SEQ ID NO: 338442 - DNA, 120 bp, Artificial Sequence
  ENSG00000137710_48 (sequence is synthesized)
acagcagctgtacatcagccctgaaattgctattttaaaacagagtttgagacatgctcagttctccttggataaaaccttgtacagcactgtgcacaaataaagactttttaataatga

SEQ ID NO: 338443 - DNA, 120 bp, Artificial Sequence
  ENSG00000137710_49 (sequence is synthesized)
gcttggtacaaattctaacacaggcaggtgcttaataagtgagatgtattggaacaacacaaactaacaaaagaacagtgggaagaaagaatacagaactggcatgaagaacatagagga

SEQ ID NO: 338444 - DNA, 120 bp, Artificial Sequence
  ENSG00000137710_50 (sequence is synthesized)
agccacacgccggcgggcagaagccgcccgctctccggattgcccagactggttttgaactcccggccccaagccatcttcctgccttggtctcccaaagtgttgagattacaggcatga

SEQ ID NO: 338445 - DNA, 120 bp, Artificial Sequence
  ENSG00000137710_51 (sequence is synthesized)
agcccagagactgtttctaatagaaacggtagatacttttggaatacattaaagctgtctcgaaataacttaactgttacttaaagtattaaaaaagcatatatattactcaagaaagtg

SEQ ID NO: 338446 - DNA, 120 bp, Artificial Sequence
  ENSG00000137710_52 (sequence is synthesized)
tgaagaaaatagttcttggaatgacatcttccatctaatgtctgaaactaatgtaagggagaagaaaggtgagagtgaagaaatcagaagctgtacatgaatactgagattgctgacaaa

SEQ ID NO: 338447 - DNA, 120 bp, Artificial Sequence
  ENSG00000137710_53 (sequence is synthesized)
gcaactgaatgcttaatcatcgcatctaaaacaagttgagacatctacctacatcaatccatctccccaagctagacttttaagacaacagaaagctctatcaaatcttatcattttata

SEQ ID NO: 338448 - DNA, 120 bp, Artificial Sequence
  ENSG00000137710_54 (sequence is synthesized)
gcacctgggtacgacagtgacatcttaagaaacttaagactttgacaagggtgggtttatcagagccctcggccattggcaaagttcttgtagccctgatactgccactggggctgcttc

SEQ ID NO: 338449 - DNA, 120 bp, Artificial Sequence
  ENSG00000137710_55 (sequence is synthesized)
caacattcaaagaagctcaagactcccagtgatgacgggtcttttcccgcagtctcctctggattctcttcccaactagagctgcaactgcggaagttccactgcagcttctgcctcccc

SEQ ID NO: 338450 - DNA, 120 bp, Artificial Sequence
  ENSG00000137710_56 (sequence is synthesized)
acttgaggatcactttgatggatttgtttatttaaggacaacctgagattgcaagatgaaggaaaagagggagaagaaaccagctgcctggaagactgaccctctgagatgctctggagc

SEQ ID NO: 338451 - DNA, 120 bp, Artificial Sequence
  ENSG00000137710_57 (sequence is synthesized)
cgtgcagttgttctcactggcagatcagtcctgtccctccaataaaagagagggtgatcttggtgtgagatgttctcttttgaagtgtgatcaaagctttgagctcagggattgcttagc

SEQ ID NO: 338452 - DNA, 120 bp, Artificial Sequence
  ENSG00000137710_58 (sequence is synthesized)
aaggtggaattctttctttctcttgagagtttaaatgacctctgtaattgataggcatcgtagtcacaaaatgaagttttgaagtggagaagataaaaggtcactaccttggaaaatagt

SEQ ID NO: 338453 - DNA, 120 bp, Artificial Sequence
  ENSG00000137710_59 (sequence is synthesized)
gagaatttctttcctttggtgttgccttcatttcacacttgataattctgtaaggttctgattgtcaccctgcagcagtttccatatgactcagaaaaagcccccaggctcttgctaccc

SEQ ID NO: 338454 - DNA, 120 bp, Artificial Sequence
  ENSG00000137710_60 (sequence is synthesized)
gggcaacagagcgagaccctgtctcaagaaaacaaagaggtatatatgtatttacatgtgtgctaacttttagaaattgaacagatttgatttcttgctactattttagcttcttttgat

SEQ ID NO: 338455 - DNA, 120 bp, Artificial Sequence
  ENSG00000137710_61 (sequence is synthesized)
caccttggccttccaaagtgctgggactaaagatgtgaggcaccatgtccagctcttgctctgccttttaatatccacgtgtccttagatcaacgtaagagtaactacaatggatgctga

SEQ ID NO: 338456 - DNA, 120 bp, Artificial Sequence
  ENSG00000137710_62 (sequence is synthesized)
gcctgggtgacagaacgagactctgtctgaaaaaaaaaaaaggaggaatgatactacctgttaatgatactacctgttaggattattggggtattaaatgagatgatttgacaaagtgcc

SEQ ID NO: 338457 - DNA, 120 bp, Artificial Sequence
  ENSG00000137710_63 (sequence is synthesized)
tgccatttaaagtatatagcattagataaatattttatcttttgtggactttaacaaatagtttattgatggaaattttttaaaaaagcttttaagttacacattttaagttcctgctac

SEQ ID NO: 338458 - DNA, 120 bp, Artificial Sequence
  ENSG00000137710_64 (sequence is synthesized)
tgaaagcaggattaactagtctgtagaataatagtaattttttaattttgtctccttagctcattacctaaaggacttattgtaaataagctatttaagatcttaagaaatactgtattt

SEQ ID NO: 338459 - DNA, 120 bp, Artificial Sequence
  ENSG00000137710_65 (sequence is synthesized)
ttttaaatggaaggctaagaaaaacataaacagcctaagcatgtgcattaaaactttgttgacttataagattattcaaaatatgttattttaattttggaattatattgtttactttag

SEQ ID NO: 338460 - DNA, 120 bp, Artificial Sequence
  ENSG00000137713_0 (sequence is synthesized)
agcagcaggaggagaaagaacatggcgggcgcatcagagctcgggaccggcccaggagcagcgggtggagatggagatgattcgctatacccgatcgcggttttaatcgacgagctccgc

SEQ ID NO: 338461 - DNA, 120 bp, Artificial Sequence
  ENSG00000137713_1 (sequence is synthesized)
aatgaagacgtgcagctccgactcaacagtattaagaagttatcaacaattgccctagcacttggagtagaaaggacccgaagtgaattgttgccatttcttacagatacaatttatgat

SEQ ID NO: 338462 - DNA, 120 bp, Artificial Sequence
  ENSG00000137713_2 (sequence is synthesized)
gaagatgaggtactattagctcttgctgagcagctgggaaatttcactggcctagtgggaggtcctgactttgcccactgtctgctgcctcctttggaaaatctggcaactgtggaagag

SEQ ID NO: 338463 - DNA, 120 bp, Artificial Sequence
  ENSG00000137713_3 (sequence is synthesized)
actgttgttcgtgacaaggctgtggagtccctgagacagatctcccaggagcatactcctgttgctctggaagcttattttgtacctctggtgaaacgcttagcaagtggggattggttc

SEQ ID NO: 338464 - DNA, 120 bp, Artificial Sequence
  ENSG00000137713_4 (sequence is synthesized)
acctctcgcacatctgcatgtggtttgttcagcgtttgctatcccagggcatcaaatgctgttaaagcagaaatcagacagcaattccgttccttgtgctcagatgacacaccaatggta

SEQ ID NO: 338465 - DNA, 120 bp, Artificial Sequence
  ENSG00000137713_5 (sequence is synthesized)
cgacgtgctgctgcttccaaattgggtgaatttgcaaaagttttggaattagacagtgtgaaaagtgaaattgttccactgttcactagtctagcttcagatgaacaggattcagtgcgc

SEQ ID NO: 338466 - DNA, 120 bp, Artificial Sequence
  ENSG00000137713_6 (sequence is synthesized)
ctccttgctgtggaagcttgtgtcagtattgcccagttattgtctcaggatgaccttgagactttggtgatgcctacacttcgacaagcagcagaagataaatcttggcgcgttcgctat

SEQ ID NO: 338467 - DNA, 120 bp, Artificial Sequence
  ENSG00000137713_7 (sequence is synthesized)
atggtggctgacagattttcagagctccagaaagccatgggtcctaaaatcaccctaaatgacctcatccccgcctttcagaacctacttaaagactgtgaagctgaagtccgggcagct

SEQ ID NO: 338468 - DNA, 120 bp, Artificial Sequence
  ENSG00000137713_8 (sequence is synthesized)
gaagatagagagaccataattatgaatcaaattctgccttatataaaggaattagtatccgataccaatcaacatgtcaaatcggctctagcttctgtaattatgggattgtctactatt

SEQ ID NO: 338469 - DNA, 120 bp, Artificial Sequence
  ENSG00000137713_9 (sequence is synthesized)
ttgggcaaagaaaataccattgaacatcttctacctcttttcttagctcagttaaaggatgagtgtcctgacgttcgtttgaatatcatctccaatttggattgtgtaaatgaagtgatt

SEQ ID NO: 338470 - DNA, 120 bp, Artificial Sequence
  ENSG00000137713_10 (sequence is synthesized)
ggaatccgtcagctctctcagtctctccttcctgccatagtggagctggcagaagatgccaaatggagggtccgcctggccatcattgagtatatgccgctgctggcaggccagctgggt

SEQ ID NO: 338471 - DNA, 120 bp, Artificial Sequence
  ENSG00000137713_11 (sequence is synthesized)
gtggaattctttgatgaaaagctgaattctttatgtatggcttggctcgtggaccatgtatacgccatccgagaagctgccaccaacaacctcatgaaactagttcagaagtttggtaca

SEQ ID NO: 338472 - DNA, 120 bp, Artificial Sequence
  ENSG00000137713_12 (sequence is synthesized)
gagtgggcccaaaatactattgttcccaaagtgttagtaatggcaaatgatcctaattacttgcatagaatgaccactttattctgcattaatgcactgtctgaggcctgtggtcaggaa

SEQ ID NO: 338473 - DNA, 120 bp, Artificial Sequence
  ENSG00000137713_13 (sequence is synthesized)
ataactactaagcaaatgctgcccatcgtattaaaaatggcaggagaccaagtagcaaatgttcgcttcaatgtggccaaatctctacaaaagattggaccaattctagataccaatgct

SEQ ID NO: 338474 - DNA, 120 bp, Artificial Sequence
  ENSG00000137713_14 (sequence is synthesized)
ttacagggagaagtgaagccagtactacagaagttaggtcaagatgaagacatggatgtcaaatactttgcacaggaagctataagtgtggtggcacaaaggctgaggaagctagaattt

SEQ ID NO: 338475 - DNA, 120 bp, Artificial Sequence
  ENSG00000137713_15 (sequence is synthesized)
cctgtgaaggacagtggagaacccagtgtccctcgggctgacaagaaccacttcccaagacccacagtgcctggagaggacatggggaagggaccagtgtatcagttgcgtggagatact

SEQ ID NO: 338476 - DNA, 120 bp, Artificial Sequence
  ENSG00000137713_16 (sequence is synthesized)
agagacacacttgcccagctgggaattgcagagctagtgcatttctcccaaagcacagactaataccccagatttaaaaaaagaacataaaaaataaagtaccacacatattgcactttt

SEQ ID NO: 338477 - DNA, 120 bp, Artificial Sequence
  ENSG00000137713_17 (sequence is synthesized)
ttgtcacaaatttctagtcaatgtgttcttaactgggtggagaaagaatggaaaaccttcaagatctcatccaagcaaatggcaacaacttagaagaaatcatttagtgacttaattctt

SEQ ID NO: 338478 - DNA, 120 bp, Artificial Sequence
  ENSG00000137713_18 (sequence is synthesized)
tctaaagatgaaatgggattgttttttactcgtcttccttgttaaatcattatttaagccgttcttattgaccaattcctgacacttgattgtctcctaatgctttatccatcaccacct

SEQ ID NO: 338479 - DNA, 120 bp, Artificial Sequence
  ENSG00000137713_19 (sequence is synthesized)
gacaaagcctggaagggtgtggacccagacgtggagtggagtgattctcttgacgtttacatatatctctgtgtctctccatcattccaaagctaaatgtacatgtttagaataacttat

SEQ ID NO: 338480 - DNA, 120 bp, Artificial Sequence
  ENSG00000137713_20 (sequence is synthesized)
tttataaactcttcgggagacatgttgagatttgaccgtaatgaaagccacattttcctgaattatgatggtctgcattagtctcatgtgaaaggggaatgtggaagctcagggttaatg

SEQ ID NO: 338481 - DNA, 120 bp, Artificial Sequence
  ENSG00000137713_21 (sequence is synthesized)
tagtggttgttttggtttttatttgctcaattttgtctgtactcatgtcattcagaaacctgaagtgtggctgcatcttgctgctaatgtgtgatgttgacgcctaactgaatttgaaca

SEQ ID NO: 338482 - DNA, 120 bp, Artificial Sequence
  ENSG00000137713_22 (sequence is synthesized)
gctcaccactgtgcctacatttaaaaatacttctctctcttttctaaaaagctttaactgtagtgcctcctaataagcagtatgtttgtttcattgtgagattgcagttctgtatttcga

SEQ ID NO: 338483 - DNA, 120 bp, Artificial Sequence
  ENSG00000137713_23 (sequence is synthesized)
atgagtctaagaaccacagggataatactgtgcagatttcctgttctttacctggctctgcttccagcagtattgacacctagtccttgctgcattgtacagtagcttttcaaactgcag

SEQ ID NO: 338484 - DNA, 120 bp, Artificial Sequence
  ENSG00000137713_24 (sequence is synthesized)
ggagtcttatcatttgaagtgtttgcttttctacttttacagtaaaacctcattaattctgaaatttaagataatgagttaagctgaagagtttactgaagcaaattaatagtgaggaag

SEQ ID NO: 338485 - DNA, 120 bp, Artificial Sequence
  ENSG00000137713_25 (sequence is synthesized)
gcaaattaatagtgaggaagcctatttgaactacttaaacagtattaaagccctttttaaaaagcacctatttgggatcatttgaggtcaagaattcgagatcagcctgaccaacatggt

SEQ ID NO: 338486 - DNA, 120 bp, Artificial Sequence
  ENSG00000137713_26 (sequence is synthesized)
cactgcactctagcctgggccatagagcgagagtccatctcaaaaaaaaacaactatttttcacataatcaaactcaccttgtctcatgacttttggttaagggggttttcccatagttt

SEQ ID NO: 338487 - DNA, 120 bp, Artificial Sequence
  ENSG00000137713_27 (sequence is synthesized)
atttttctctcagtgcatcttgctatgaggtttgcttgttacccttttggtttttgaattgttgattttgttcacaacctcttttaaatctaacaagtcctgttctgtttagtgaaggcc

SEQ ID NO: 338488 - DNA, 120 bp, Artificial Sequence
  ENSG00000137713_28 (sequence is synthesized)
caaagactcctctaagactttgtatatttgttacataaaaccaagttttactaaatactttaaaatttgtcctacattcgaaaaatagaaattgtaaatcagaggttatctgtctgcatt

SEQ ID NO: 338489 - DNA, 120 bp, Artificial Sequence
  ENSG00000137713_29 (sequence is synthesized)
ttaaactgccaaattaccttatagtaagtttctattttatgactttgggccaagaattaagtattttcctaagcacaaatctttttctatattctcattttaatatcttatgctattatt

SEQ ID NO: 338490 - DNA, 120 bp, Artificial Sequence
  ENSG00000137713_30 (sequence is synthesized)
ctgtaaacattttaattttagtttcatgagtctttattttttgttacctgcaagttatgttcttcttcattgaatttcatatttgagagacatttgtcttcatgaagcagatttgcactg

SEQ ID NO: 338491 - DNA, 120 bp, Artificial Sequence
  ENSG00000137713_31 (sequence is synthesized)
gaaccattgctttactctggttggaaatgccattgttttggggacagacttttaaaatgcccttgtgtctcccagtgaggagccctaagcattgacttctctaccctaaaactgtttgag

SEQ ID NO: 338492 - DNA, 120 bp, Artificial Sequence
  ENSG00000137713_32 (sequence is synthesized)
agagggagagtgggccctggctttctcaagcatgggtcgggggttcagcggggcctctgtcttttgtggtgacccctcaggggtttcattgtttccttctgacttaagcaatagagagag

SEQ ID NO: 338493 - DNA, 120 bp, Artificial Sequence
  ENSG00000137713_33 (sequence is synthesized)
aatttgttttggtactcttcagaggaattgtgctttggctcataacttggccatgttctccatgaattagttctcctatttttttttttaactaccttaaacttaagggaaaagttctcc

SEQ ID NO: 338494 - DNA, 120 bp, Artificial Sequence
  ENSG00000137713_34 (sequence is synthesized)
tatcttgatttcactggaatataggctttaggagctctgtaaggctggtatttttgtctgttttatcttctactgtatcgccagtgcctggaacagtgtctggtgcacataataggtgct

SEQ ID NO: 338495 - DNA, 120 bp, Artificial Sequence
  ENSG00000137713_35 (sequence is synthesized)
caataaaaatgtgttcaatggatgaatttctaaaatatcctccaatgtgtgcatggaacaaataatcaaaagaaccagactgtgtcttattctcccactgacagaaagattttcctgctt

SEQ ID NO: 338496 - DNA, 120 bp, Artificial Sequence
  ENSG00000137713_36 (sequence is synthesized)
tcaggaaacaagctttatgtggcccttttctggtcccctggcttagactacagttctgtgtggatttgtctgattgcttcagacatgtaatgttgtttttcatccttggcagcttacatc

SEQ ID NO: 338497 - DNA, 78 bp, Artificial Sequence
  ENSG00000137713_37 (sequence is synthesized)
acctatgccaataaaaatgtctcagcaacagtggaattcaccttggtgtttctctctgtaatttgtgtggggtttacc

SEQ ID NO: 338498 - DNA, 120 bp, Artificial Sequence
  ENSG00000137713_38 (sequence is synthesized)
caccttggtgtttctctctgtaatttgtgtggggtttacccctcacaggtttaagagaccaggtcttgtttctctctctgtgctaccaagaagatgtgaacctgaggatgcatcttgttt

SEQ ID NO: 338499 - DNA, 120 bp, Artificial Sequence
  ENSG00000137713_39 (sequence is synthesized)
cataagaaggaaggcaggtgaatatgtggtttctaacgaggtcttgttgaaataacgggctgccctcagctcacagaaataccacagctcagccactgtgatgcagagccccaggggtct

SEQ ID NO: 338500 - DNA, 120 bp, Artificial Sequence
  ENSG00000137713_40 (sequence is synthesized)
ttgccagacaacttgtcctgactcaacagagacggcagcctgacctttgagctggcttgtccaggcattcaggttgcttgcgtagacttccagggaagcaagcctgtccttcctgacccg

SEQ ID NO: 338501 - DNA, 120 bp, Artificial Sequence
  ENSG00000137713_41 (sequence is synthesized)
gcggttaacctggtgcacttttgttcctttgttaactgttgtgttgtcactaaactgaaaggctggggcttgcccttagacgtcacattggctctgtccctgtggcgatggcagggcagg

SEQ ID NO: 338502 - DNA, 120 bp, Artificial Sequence
  ENSG00000137713_42 (sequence is synthesized)
gtggccaaacaggtcaggtgcttgttctgtcctcttgccttttacttaaattcctctgacttttaaaaatggtgacactcttatcgtaaagcttcttatttttctccactgcttggatat

SEQ ID NO: 338503 - DNA, 120 bp, Artificial Sequence
  ENSG00000137713_43 (sequence is synthesized)
gaaactgtagagggagaggccctgttgcccagtgttctcctggtttagcagctgaggtgactgcagtctgatgtgatgtaactgtttccctttgattctccagtattcctgtttccatcc

SEQ ID NO: 338504 - DNA, 120 bp, Artificial Sequence
  ENSG00000137713_44 (sequence is synthesized)
agttccttactctcctctttcctcttccctcgcatgtctccctccagtcctctgtacctagaatagtctcactgtcccccgtttgcctccacgagcctgctgtttccaggaaattacata

SEQ ID NO: 338505 - DNA, 120 bp, Artificial Sequence
  ENSG00000137713_45 (sequence is synthesized)
acgttcagttgggatggaaatcttccggaggacgaatagagtttaattactcattgcgtcggaaagccaagccatttctgtctccagagttgttctcttaaactgatatgagttctgaaa

SEQ ID NO: 338506 - DNA, 120 bp, Artificial Sequence
  ENSG00000137713_46 (sequence is synthesized)
acctctctagtaaccttgcttcggaccccctgaggcgtccgcccggagccttgcccttcccgggcggttgtcggggaacccgcttcccgcctgggcgccccatccgggccgtgaggtggc

SEQ ID NO: 338507 - DNA, 120 bp, Artificial Sequence
  ENSG00000137713_47 (sequence is synthesized)
cgcgtctcttgggcgagggagcaggagaagcgcggtgccaggccgagacggggctggagcggctgaggggcgcaggatgcccagaagccctttgaagtgcccctggatcccttcatctcg

SEQ ID NO: 338508 - DNA, 120 bp, Artificial Sequence
  ENSG00000137713_48 (sequence is synthesized)
tgagggacattcagtctccatgccgagcccagggaccagtgtatcagttgcgtggagatactagagacacacttgcccagctgggaattgcagagctagtgcatttctcccaaagcacag

SEQ ID NO: 338509 - DNA, 120 bp, Artificial Sequence
  ENSG00000137713_49 (sequence is synthesized)
agtggggagtaattagctaaaattaagttcagggattttcactttacttaagatctgggtttgcttaaagaaaataatttagcaactatttttgaggatgtccactatgacttttatatt

SEQ ID NO: 338510 - DNA, 120 bp, Artificial Sequence
  ENSG00000137713_50 (sequence is synthesized)
taagctctgtaaatgtgtagatccttgtctgaagctgattttgctgagaatttctttagacattattttgtgtatttgtcaagtttataaatgtctttatttttttactttaaattttaa

SEQ ID NO: 338511 - DNA, 120 bp, Artificial Sequence
  ENSG00000137713_51 (sequence is synthesized)
caattaccattaaccatatacaccaaaaaggatttctatggcccattagactgtctttcacagataatacttttgaatgtcagtgctttacagggagaagtgaagccagtactacagaag

SEQ ID NO: 338512 - DNA, 120 bp, Artificial Sequence
  ENSG00000137713_52 (sequence is synthesized)
acagaagtcgtgtctttgggttggccgcaccatatgttatcactgtgtgagctgaaagtaaccatttggtatgatgcagctaacattctggttacgtgtaccacctcccttcagtcactt

SEQ ID NO: 338513 - DNA, 120 bp, Artificial Sequence
  ENSG00000137714_0 (sequence is synthesized)
acgcggaacctcggcgcggtgcttccagcagggtctctccgccactccagccccgcgcccctcgccgcggccctcgggcgtctgcgccgcagctgccgcccccgcctctttggagtctct

SEQ ID NO: 338514 - DNA, 120 bp, Artificial Sequence
  ENSG00000137714_1 (sequence is synthesized)
gagtctctcgcggcctcaaagcgcggcctgcgtcgcttccggcagttcccgaccgcgggcgatggctgccgctgggggcgcccggctgctgcgcgccgcttctgctgtcctcggcggccc

SEQ ID NO: 338515 - DNA, 120 bp, Artificial Sequence
  ENSG00000137714_2 (sequence is synthesized)
gctgcaccacgctgggtcccgcgctggatccagcggcctgctgaggaaccgggggccgggcgggagcgcggaggcgagccggtcgctgagcgtgtcggcgcgggcccggagcagctcaga

SEQ ID NO: 338516 - DNA, 120 bp, Artificial Sequence
  ENSG00000137714_3 (sequence is synthesized)
cagaagataaaataacagtccactttataaaccgtgatggtgaaacattaacaaccaaaggaaaagttggtgattctctgctagatgttgtggttgaaaataatctagatattgatggct

SEQ ID NO: 338517 - DNA, 120 bp, Artificial Sequence
  ENSG00000137714_4 (sequence is synthesized)
ttggtgcatgtgagggaaccctggcttgttcaacctgtcacctcatctttgaagatcacatatatgagaagttagatgcaatcactgatgaggagaatgacatgctcgatctggcatatg

SEQ ID NO: 338518 - DNA, 120 bp, Artificial Sequence
  ENSG00000137714_5 (sequence is synthesized)
gactaacagacagatcacggttgggctgccaaatctgtttgacaaaatctatggacaatatgactgttcgagtgcctgaaacagtggctgatgccagacaatccattgatgtgggcaaga

SEQ ID NO: 338519 - DNA, 120 bp, Artificial Sequence
  ENSG00000137714_6 (sequence is synthesized)
cctcctgaactagaacaaataggaatattttcatggaattttacctatttttataattattatttcttaaagtgattaaatgagaacatggatgagtggacttcatattatgactagctt

SEQ ID NO: 338520 - DNA, 120 bp, Artificial Sequence
  ENSG00000137714_7 (sequence is synthesized)
tactattttaattcaccttgcataactactgaattttgtcattcttgaaagtatgcaatttttattttggttatattacaaaaatgtcaatcaaatattaaaaaatagttaatgtgatag

SEQ ID NO: 338521 - DNA, 120 bp, Artificial Sequence
  ENSG00000137714_8 (sequence is synthesized)
aaaaaccttacatatttttttcttatgtttgtttagcgactttagcaaaatgttttcatataatctcatctgtttacctagaagataggttaaggaaatatattattattcctgtttgat

SEQ ID NO: 338522 - DNA, 120 bp, Artificial Sequence
  ENSG00000137714_9 (sequence is synthesized)
gtgggtgaaggcagagatctaacctggcttgtttagggccataccactaattagaaaatctgtgctagaacctgtgtcttattcctataagctatgtgttcagactgaaactggagaaat

SEQ ID NO: 338523 - DNA, 120 bp, Artificial Sequence
  ENSG00000137714_10 (sequence is synthesized)
tatgactattttatttatagtagtagttaaatctgaatgtgtatggacaaaaatatttaattgctcagtaaactgcttaacttcaaagatagttattgaccttataaataaatatttcaa

SEQ ID NO: 338524 - DNA, 120 bp, Artificial Sequence
  ENSG00000137714_11 (sequence is synthesized)
aattttgattcggaagactaagtctggacgtagacattataatgctatcaaagaagtttgatctctgttttgactaaactagaggaaaaatgattggatgtgtttattcttttctaagca

SEQ ID NO: 338525 - DNA, 120 bp, Artificial Sequence
  ENSG00000137714_12 (sequence is synthesized)
gaatggtttaactttgtactctttgaaaaataatgctgatttataaatctctgcctataacagaatggaaaccttatgaatgaattgtgtttctctgtcctgagctggagaagggaatga

SEQ ID NO: 338526 - DNA, 120 bp, Artificial Sequence
  ENSG00000137714_13 (sequence is synthesized)
caggtggcgccattctctcacgcaaggatggggctgcagggtgagcagcgtgggctgcagtgtgtcagtcccaggagtgagggagtggcaagcaccacagattaccacgtatgtgtggaa

SEQ ID NO: 338527 - DNA, 120 bp, Artificial Sequence
  ENSG00000137714_14 (sequence is synthesized)
gacattcgtactcttatctttactataaataaattcataaaagttaacaaaggggtacacagtatggtctttggaaatataataaaacatcaactaacttggactaattgtgaggaagag

SEQ ID NO: 338528 - DNA, 120 bp, Artificial Sequence
  ENSG00000137714_15 (sequence is synthesized)
cagaacaaattagtagaaagaggttataagacaattgagttagcttcatgtgtattattgcagcttgatcatttatataaatatttgtctagtacaatgcttgacatacagcattgtgtt

SEQ ID NO: 338529 - DNA, 120 bp, Artificial Sequence
  ENSG00000137714_16 (sequence is synthesized)
atgcccattggggacacagaggtgaacaagacaaggaatgccatcagggaattcaccttttattaggaaaatataaaatatgtatgtatgtgcagataatttgcttgaactaaactgact

SEQ ID NO: 338530 - DNA, 120 bp, Artificial Sequence
  ENSG00000137714_17 (sequence is synthesized)
agttctgctaaataagattttaaactaattcatatgtaaaaagtgattaggaagaacttgaagtatcatttgatgcttaataactattgagtagttttttttttttttttttggtggggg

SEQ ID NO: 338531 - DNA, 89 bp, Artificial Sequence
  ENSG00000137714_18 (sequence is synthesized)
taactattgagtagttttttttttttttttttggtggggggagcgggggacagggtcttactctgtcactcaggccagagtacaatagt

SEQ ID NO: 338532 - DNA, 87 bp, Artificial Sequence
  ENSG00000137714_19 (sequence is synthesized)
caggcacgctagggacagggttttaccacgttgcccaggctggtcttgaacttttgagctcgagtgatccacccacctcagcctccc

SEQ ID NO: 338533 - DNA, 120 bp, Artificial Sequence
  ENSG00000137714_20 (sequence is synthesized)
gggattacagatgtgagccaccgtgcttggccataactattgaatgctttctatgtggagagtgcttgtcttaattttctgttgctataatagaataacacagactgggtaatttataaa

SEQ ID NO: 338534 - DNA, 120 bp, Artificial Sequence
  ENSG00000137714_21 (sequence is synthesized)
ctgggtaatttataaagaaaagagatttatttggatcatggttctggaggctgggaggtccaagagcatggtaccagcatctgcttggcatctggtgacagctttcttgctgcatcatta

SEQ ID NO: 338535 - DNA, 120 bp, Artificial Sequence
  ENSG00000137714_22 (sequence is synthesized)
catggtggaagggcaagagaatgcgagtgagagcaagagggcaaaatgattatccttttatcaggagcccacttctgacataactaacccacacctgagataacggcattaatccattca

SEQ ID NO: 338536 - DNA, 120 bp, Artificial Sequence
  ENSG00000137714_23 (sequence is synthesized)
tgaggtctctgctcttaaaggagatcacctcttaaaggacccacctttcaatgccattacactggcaatttaatttcaagatgagttttggaggggacattcaaaccatagcagtgctat

SEQ ID NO: 338537 - DNA, 120 bp, Artificial Sequence
  ENSG00000137714_24 (sequence is synthesized)
aattttaaagtacttcaaagccaatttattctcttaattagcttcattattcttgtctttgtgtgtggattacctaaactctccttccagagctactttaatgattatattcaaccaaag

SEQ ID NO: 338538 - DNA, 120 bp, Artificial Sequence
  ENSG00000137714_25 (sequence is synthesized)
attcaaccaaagcactctaaaatttagagtataaattgtcttatatttcaaattagaaaagttcaaatgaagtttaattgtgttattttataaaaccttctaaaattattaaatggagga

SEQ ID NO: 338539 - DNA, 120 bp, Artificial Sequence
  ENSG00000137720_0 (sequence is synthesized)
cttttttcacctcgtctgaaatggctgcctcccagtgtctctgctgctcaaaatttctcttccagagacagaacctcgcctgtttcctcacaaacccacactgtggcagccttgttaatg

SEQ ID NO: 338540 - DNA, 120 bp, Artificial Sequence
  ENSG00000137720_1 (sequence is synthesized)
cagatggccatggtgaagtgtggacagattggaataatatgtccaagtttttccagtatggatggcgatgcaccactaatgagaatacctattcaaaccgtaccctgatgggcaactgga

SEQ ID NO: 338541 - DNA, 120 bp, Artificial Sequence
  ENSG00000137720_2 (sequence is synthesized)
accaggaaagatatgacctgaggaatatcgtgcagcccaaacccttgccttcccagtttggacactactttgaaacaacatatgatacaagctacaacaacaaaatgccactttcaacac

SEQ ID NO: 338542 - DNA, 120 bp, Artificial Sequence
  ENSG00000137720_3 (sequence is synthesized)
atagatttaagcgagagcctcactggttcccaggacatcaacctgaactggatcctccccgatacaaatgcacagaaaagtcaacttacatgaatagctattcaaagccttaaattgggc

SEQ ID NO: 338543 - DNA, 120 bp, Artificial Sequence
  ENSG00000137720_4 (sequence is synthesized)
atcactcaggatgtgtataagatcttaatattgactagtttcacatccaggtttctaagaaatgataagatacttcacttttccagagtgaaatgtaggagggagcacattctaagtaca

SEQ ID NO: 338544 - DNA, 120 bp, Artificial Sequence
  ENSG00000137720_5 (sequence is synthesized)
gctaaaaatttagctcactgtaacacagtttcactctctgaataaataaagcaaaaaacacagtaaatattctttatccctttttttgttgttgttttaaccaagatttaaatgtcaaat

SEQ ID NO: 338545 - DNA, 120 bp, Artificial Sequence
  ENSG00000137720_6 (sequence is synthesized)
tttgttgttgttttaaccaagatttaaatgtcaaatttaatacagcaactcagttctacatttggggtgttgtagaagggccttaaaaagaattattttaggccaggcacggtggctcat

SEQ ID NO: 338546 - DNA, 120 bp, Artificial Sequence
  ENSG00000137720_7 (sequence is synthesized)
aaaaagaattatttctctgaagtctacaaccactgtggtcttcccttccttctgtcgtagcaagacctcagaatctagcataacttaggctaggtttggctagatgctttctgggtataa

SEQ ID NO: 338547 - DNA, 120 bp, Artificial Sequence
  ENSG00000137720_8 (sequence is synthesized)
tcttgaggactacaaaaacaaacgtaactttttaaaattattatggagaattttacgtaaaacaaaagtagacaggctagtctaatgaactcccatgtatcattacccagcatcaactat

SEQ ID NO: 338548 - DNA, 120 bp, Artificial Sequence
  ENSG00000137720_9 (sequence is synthesized)
ctatttatgactaatcttacctacttctactttgtcttattgaattaattttggagcagatcttagaaatagaatttaatctataaaaatcttggtgggctgggtgcggtggctcatgcc

SEQ ID NO: 338549 - DNA, 75 bp, Artificial Sequence
  ENSG00000137720_10 (sequence is synthesized)
aaaagaaaagaaaaagaaaaaaaaaatcttggtatactggctgggcacagtggctcacacgctgggagttcaaaa

SEQ ID NO: 338550 - DNA, 120 bp, Artificial Sequence
  ENSG00000137720_11 (sequence is synthesized)
agcaagaccccatctctaccaaaaaaaatttttttaaagatttcagtatatttctcaaaaagataaggactgtcaattgtctactcccccccaacaaaggtcactaaggaaacctgttga

SEQ ID NO: 338551 - DNA, 120 bp, Artificial Sequence
  ENSG00000137720_12 (sequence is synthesized)
ctactcccccccaacaaaggtcactaaggaaacctgttgactaaacaaagctcattaaacctattgtagtgtagcaaaggagaccatcaacttgacacagagtcttggtaatgattcaaa

SEQ ID NO: 338552 - DNA, 120 bp, Artificial Sequence
  ENSG00000137720_13 (sequence is synthesized)
gggaggatgttagagtaaggtatttataaggatttgagataagggtccaactggtttaaaatgagtcaaaatagggaactagtagagactgagaaagggttgtgaatagcttaggtttgg

SEQ ID NO: 338553 - DNA, 120 bp, Artificial Sequence
  ENSG00000137720_14 (sequence is synthesized)
taaacttaggaaatcaacagtcttaattttaatatggttaaactgattagtatttcctatttttttatctactgtgtaagaagacactataatatatgggcattactgagagatactgcc

SEQ ID NO: 338554 - DNA, 120 bp, Artificial Sequence
  ENSG00000137720_15 (sequence is synthesized)
catatgttgtcctcgtaagcaaggagatattttttatctcccatatattacctctcaaacctttgttactttagtttcgagatatagatccagaatttatgttgttactcagtagtgagg

SEQ ID NO: 338555 - DNA, 120 bp, Artificial Sequence
  ENSG00000137720_16 (sequence is synthesized)
aagtttcttttttttttctaaatggctatcaagttgtcccaccattagttattgaaaagaccataattttttcactcctattcaatgccatttttattgtaaataaactatgtacatgta

SEQ ID NO: 338556 - DNA, 120 bp, Artificial Sequence
  ENSG00000137720_17 (sequence is synthesized)
gtctcttggggtctggatcaggaccccttccggtaacaagaacatgctgtatttggttctctgttctgttgtaagccattttaacagactgaatcttactctgaaaacggtggaaagcca

SEQ ID NO: 338557 - DNA, 120 bp, Artificial Sequence
  ENSG00000137720_18 (sequence is synthesized)
ctgaaagattttaaataagaagatgatacaattatactttcactttgaaaaattctcctttcctgtggagaaaggtttggagaggaacaaggctgatggcatggcaggataaaacaagag

SEQ ID NO: 338558 - DNA, 120 bp, Artificial Sequence
  ENSG00000137720_19 (sequence is synthesized)
gcaactgcaataatggagacaaagctgacagtgatttgaattgaaatttggcaatgggaatggagggtggcagtctgattcaaaaatcaacaagacttagtgactggatgaaaattaaag

SEQ ID NO: 338559 - DNA, 120 bp, Artificial Sequence
  ENSG00000137720_20 (sequence is synthesized)
acaagtcagagtcaaagataagccccaggcttctggcttggacaactgagtggatggtgatgtctgtcattccagccctagagacagttacacctagatctccagtatgagtaccaggcc

SEQ ID NO: 338560 - DNA, 120 bp, Artificial Sequence
  ENSG00000137720_21 (sequence is synthesized)
cattggactttgtggcaccagctactctggtcatcatgttgtttggtaacatcagtgcatgcatctgtcttcacaaaggcagatggtatgagggtagttacctgggatgtcatccttcaa

SEQ ID NO: 338561 - DNA, 120 bp, Artificial Sequence
  ENSG00000137720_22 (sequence is synthesized)
aagccaggtttgttgacatctttaaagaacatggaacagccaagtaaggatttctgtgactctcataagaaatcttcaaagagctcaacctactcagcatcaagttactcttcttcagga

SEQ ID NO: 338562 - DNA, 120 bp, Artificial Sequence
  ENSG00000137720_23 (sequence is synthesized)
gtttcgcagaggggcgggctcgctacctcgctcgcgcaggcactgcagattctcccaggccagtggatcccgagccaactcggccgggcgctggaggcaggtggcgagacagaacctcgc

SEQ ID NO: 338563 - DNA, 120 bp, Artificial Sequence
  ENSG00000137726_0 (sequence is synthesized)
agccagcccgactcctaggaggaggggaggcgggaaagcagctcaagcctcacccaccgccctgcccccagccccgccactcccaggctcctcgggactcggcgggtcctcctgggagtc

SEQ ID NO: 338564 - DNA, 120 bp, Artificial Sequence
  ENSG00000137726_1 (sequence is synthesized)
tcggaggggaccggctgtgcagagaacttcagccaaagcatctgagacgggaagcagaaaaaggagggacagtttggagaagaaaaacgcagctgtgtgtttgggccttgacgtggctgt

SEQ ID NO: 338565 - DNA, 120 bp, Artificial Sequence
  ENSG00000137726_2 (sequence is synthesized)
ggatgcagtcgttctgacccctggtggccgagaggtgaagtgcagtggcggctgcttgctcaaggccggaggaagacgccatggagttggtgctggtcttcctctgcagcctgctggccc

SEQ ID NO: 338566 - DNA, 120 bp, Artificial Sequence
  ENSG00000137726_3 (sequence is synthesized)
ccatggtcctggccagtgcagctgaaaaggagaaggaaatggacccttttcattatgattaccagaccctgaggattgggggactggtgttcgctgtggtcctcttctcggttgggatcc

SEQ ID NO: 338567 - DNA, 120 bp, Artificial Sequence
  ENSG00000137726_4 (sequence is synthesized)
tccttatcctaagtcgcaggtgcaagtgcagtttcaatcagaagccccgggccccaggagatgaggaagcccaggtggagaacctcatcaccgccaatgcaacagagccccagaaagcag

SEQ ID NO: 338568 - DNA, 120 bp, Artificial Sequence
  ENSG00000137726_5 (sequence is synthesized)
agaactgaagtgcagccatcaggtggaagcctctggaacctgaggcggctgcttgaacctttggatgcaaatgtcgatgcttaagaaaaccggccacttcagcaacagccctttccccag

SEQ ID NO: 338569 - DNA, 120 bp, Artificial Sequence
  ENSG00000137726_6 (sequence is synthesized)
gagaagccaagaacttgtgtgtcccccaccctatcccctctaacaccattcctccacctgatgatgcaactaacacttgcctccccactgcagcctgcggtcctgcccacctcccgtgat

SEQ ID NO: 338570 - DNA, 120 bp, Artificial Sequence
  ENSG00000137726_7 (sequence is synthesized)
gtgtgtgtgtgtgtgtgtgtgtgtgactgtgtgtgtttgctaactgtggtctttgtggctacttgtttgtggatggtattgtgtttgttagtgaactgtggactcgctttcccaggcagg

SEQ ID NO: 338571 - DNA, 120 bp, Artificial Sequence
  ENSG00000137726_8 (sequence is synthesized)
acatggccatctgctcctccctgcccccgtggccctccatcaccttctgctcctaggaggctgcttgttgcccgagaccagccccctcccctgatttagggatgcgtagggtaagagcac

SEQ ID NO: 338572 - DNA, 120 bp, Artificial Sequence
  ENSG00000137726_9 (sequence is synthesized)
gggcagtggtcttcagtcgtcttgggacctgggaaggtttgcagcactttgtcatcattcttcatggactcctttcactcctttaacaaaaaccttgcttccttatcccacctgatccca

SEQ ID NO: 338573 - DNA, 120 bp, Artificial Sequence
  ENSG00000137726_10 (sequence is synthesized)
gtctgaaggtctcttagcaactggagatacaaagcaaggagctggtgagcccagcgttgacgtcaggcaggctatgcccttccgtggttaatttcttcccaggggcttccacgaggagtc

SEQ ID NO: 338574 - DNA, 120 bp, Artificial Sequence
  ENSG00000137726_11 (sequence is synthesized)
cccatctgccccgccccttcacagagcgcccggggattccaggcccagggcttctactctgcccctggggaatgtgtcccctgcatatcttctcagcaataactccatgggctctgggac

SEQ ID NO: 338575 - DNA, 120 bp, Artificial Sequence
  ENSG00000137726_12 (sequence is synthesized)
cctaccccttccaaccttccctgcttctgagacttcaatctacagcccagctcatccagatgcagactacagtccctgcaattgggtctctggcaggcaatagttgaaggactcctgttc

SEQ ID NO: 338576 - DNA, 120 bp, Artificial Sequence
  ENSG00000137726_13 (sequence is synthesized)
cgttggggccagcacaccgggatggatggagggagagcagaggcctttgcttctctgcctacgtccccttagatgggcagcagaggcaactcccgcatcctttgctctgcctgtcagtgg

SEQ ID NO: 338577 - DNA, 120 bp, Artificial Sequence
  ENSG00000137726_14 (sequence is synthesized)
tcagagcggtgagcgaggtgggttggagactcagcaggctccgtgcagcccttgggaacagtgagaggttgaaggtcataacgagagtgggaactcaacccagatcccgcccctcctgtc

SEQ ID NO: 338578 - DNA, 120 bp, Artificial Sequence
  ENSG00000137726_15 (sequence is synthesized)
ctctgtgttcccgcggaaaccaaccaaaccgtgcgctgtgacccattgctgttctctgtatcgtgatctatcctcaacaacaacagaaaaaaggaataaaatatcctttgtttcctagtg

SEQ ID NO: 338579 - DNA, 120 bp, Artificial Sequence
  ENSG00000137726_16 (sequence is synthesized)
agtctcctcctcgactcctctctggaacattgctggctgggcggggcgggcaatcatttcaagttaggtgatttaacaataattgatgcttaattgtttatttgatgggcatttaaaatg

SEQ ID NO: 338580 - DNA, 120 bp, Artificial Sequence
  ENSG00000137726_17 (sequence is synthesized)
caaattgagggaactggttgcattttccactgatggatctgtggcctctggtcgacccaaagcacttgttttaaaaggcagctttaaaagcccttgatggttgtttgtttgctctgaggc

SEQ ID NO: 338581 - DNA, 120 bp, Artificial Sequence
  ENSG00000137726_18 (sequence is synthesized)
atgctccaagtcgcgtcacaggcagggttgccgagccaggatttatttacatcttcacattcaaagttcgtcatcatgaattttgactcttggggactgggctgaggacggggtggtact

SEQ ID NO: 338582 - DNA, 120 bp, Artificial Sequence
  ENSG00000137726_19 (sequence is synthesized)
aagcctcacccaccgccctgcccccagccccgccactcccaggctcctcgggactcggcgggtcctcctgggagtctcggaggggaccggctgtgcaggtttgggccttgacgtggctgt

SEQ ID NO: 338583 - DNA, 120 bp, Artificial Sequence
  ENSG00000137726_20 (sequence is synthesized)
aaccgaaaagcaacagctgatggcaaatccgctccggcgcttgcacgcctcctcggcggcagtctcctgttgcttctcggagcttgactgccctttggaaaaatctctccgcccctcgag

SEQ ID NO: 338584 - DNA, 120 bp, Artificial Sequence
  ENSG00000137726_21 (sequence is synthesized)
aggagagaggagcagaggacgcgcgcgagcacagagcgggaggacggacagggagaggaggagagggggtctgcgcgcggccgctacccagaagccagcggacggcagcacggagtgggc

SEQ ID NO: 338585 - DNA, 120 bp, Artificial Sequence
  ENSG00000137726_22 (sequence is synthesized)
gggctagcttttgcagtgggcacagcttttattatgggccctgccctgaggagccttcaggagtctgaaaggggctgtgagagagaccaggactagaaacacccgaagtgtcccacacac

SEQ ID NO: 338586 - DNA, 120 bp, Artificial Sequence
  ENSG00000137726_23 (sequence is synthesized)
atgactcagagcctcactgagtttcgatgccttcactgacctcggcccttagggttcccctaaccccctaactggcaggcccgccctaccgtgcacctctaggcatctctgtttaatggg

SEQ ID NO: 338587 - DNA, 120 bp, Artificial Sequence
  ENSG00000137726_24 (sequence is synthesized)
tgtggctcaggaagggactgttgccagcaacagagccccagaaagcagagaactgaagtgcagccatcaggtggaagcctctggaacctgaggcggctgcttgaacctttggatgcaaat

SEQ ID NO: 338588 - DNA, 120 bp, Artificial Sequence
  ENSG00000137726_25 (sequence is synthesized)
agagacccctctgtggctcaggaagggactgttgccaggtgcatggccagccagacatgctcccgcagtgccaggagagtgggtctccagggcctctgcagcattgccccctcactccac

SEQ ID NO: 338589 - DNA, 120 bp, Artificial Sequence
  ENSG00000137726_26 (sequence is synthesized)
caaacaggctactactagtgtcacctgctatttacagagcatctgcttgtgccaggcacagaccccatatcatttaatgggcacacagccctgaaataggcatcattgtccccattttgt

SEQ ID NO: 338590 - DNA, 120 bp, Artificial Sequence
  ENSG00000137726_27 (sequence is synthesized)
aaccgagggactgagagaggttaccaggttcctgtaagcagcaagtagcagggccaggattgaacccagatcgttctgactcgaaatcccatgcccgtcacctctttgctcccccagagt

SEQ ID NO: 338591 - DNA, 120 bp, Artificial Sequence
  ENSG00000137726_28 (sequence is synthesized)
tacactataatccattctggttttctttccagcaacagagccccagaaagcagagaactgaagtgcagccatcaggtggaaggtgagatgctcagtgcctggattggcccctgttgccat

SEQ ID NO: 338592 - DNA, 120 bp, Artificial Sequence
  ENSG00000137726_29 (sequence is synthesized)
aacatgggagaattagagttagtgaaatgctcctaatctcaaagtagcataaagataatggctttccgtggtgactcagaaagtactttagggccacttgtttttttaaacaccttatta

SEQ ID NO: 338593 - DNA, 120 bp, Artificial Sequence
  ENSG00000137726_30 (sequence is synthesized)
tgaaacttcccaaccctaaccaaaagtagagcaaatagtatatgatccttccctctccacatttaagggcactgattttagtatctatttccattgttcatcgtagggggcacaggagag

SEQ ID NO: 338594 - DNA, 120 bp, Artificial Sequence
  ENSG00000137726_31 (sequence is synthesized)
tagtaactggcaaatgctgtacagttttcagagtgccaccacacacacagactcactcgagtctgccagaaaaagaggatgggacaggtggggtttagcccattttataggtgaaaccaa

SEQ ID NO: 338595 - DNA, 120 bp, Artificial Sequence
  ENSG00000137726_32 (sequence is synthesized)
gatgagagggaatagccccgtggagagtgacagcccggactgtgaactcaggcctttgcggctgtggttcagcgccactgctcccctctgtcctgtgcgtctcgctttatgacatgccct

SEQ ID NO: 338596 - DNA, 120 bp, Artificial Sequence
  ENSG00000137726_33 (sequence is synthesized)
ccctgctcctctggaattcctttgtggagactgaggtctgtgaggcaaggttagatatttgggaaccagtttgtgtagctttctttctcttgaccaactgtttgtttttgcagcagctga

SEQ ID NO: 338597 - DNA, 120 bp, Artificial Sequence
  ENSG00000137726_34 (sequence is synthesized)
cagacgccatggagttggtgctggtcttcctctgcagcctgctggcccccatggtcctggccagtgcagctgaaaaggagaaggaaatggacccttttcattatggtgagcgatggcaac

SEQ ID NO: 338598 - DNA, 120 bp, Artificial Sequence
  ENSG00000137726_35 (sequence is synthesized)
cctgggtgcaggggtcagggggaatgcagccctgcctggcaggaggggtagggggaacagacaccctctccctggccccttcctctctcacccttggttcctttggcagattaccagacc

SEQ ID NO: 338599 - DNA, 120 bp, Artificial Sequence
  ENSG00000137726_36 (sequence is synthesized)
gatcctccttatcctaagtaagtttgttcttttgctcactctgttaagagcaatgactgaggctgctaagcaggtggggacagtgtgagagcctggttggtccctctcctggagaggaaa

SEQ ID NO: 338600 - DNA, 120 bp, Artificial Sequence
  ENSG00000137726_37 (sequence is synthesized)
ggaggctgcctgccctccgtgttatcttcacgacccagtagagtgctgggcacatagtaagtgctcagtaaaacagtgacacgggaacaaagaaaatgtcatatgacaatgagcatagat

SEQ ID NO: 338601 - DNA, 120 bp, Artificial Sequence
  ENSG00000137726_38 (sequence is synthesized)
agtgaccgtgctgggggcaatcagggtcttggactggacggatgtccaggggttcaggccactgccagtttcaccccacatggaaaacagcacccagccttgggctttcctggttcagga

SEQ ID NO: 338602 - DNA, 120 bp, Artificial Sequence
  ENSG00000137726_39 (sequence is synthesized)
aaagcctctctgtctcctctctggctcttaaccatgctcctttaagcccaggagtgagatgtgtgtcctgccattgaaatctatccctgggtgccacctcttggccctgcctcctgcttc

SEQ ID NO: 338603 - DNA, 120 bp, Artificial Sequence
  ENSG00000137726_40 (sequence is synthesized)
gcatcctctggggaagcagaggctggggtgctgaggctcgtggaaccagccttcaaactccttttgtagaatcaaaccacctttctggaggattctgaaccaaagcctgtgggaagagct

SEQ ID NO: 338604 - DNA, 120 bp, Artificial Sequence
  ENSG00000137726_41 (sequence is synthesized)
gacttggggacttttgagacgccatggagttggtgctggtcttcctctgcagcctgctggcccccatggtcctggccagtgcagctgaaaaggagaaggaaatggacccttttcattatg

SEQ ID NO: 338605 - DNA, 120 bp, Artificial Sequence
  ENSG00000137727_0 (sequence is synthesized)
gaggcgcgtgtccgtgcactagaggcccccgtgcgtgacacaggccgatgagctcctgcgggctgcacccacgcggagtcacagaccgaaaagcccgcggtgtcgagcgcaggcggaggt

SEQ ID NO: 338606 - DNA, 120 bp, Artificial Sequence
  ENSG00000137727_1 (sequence is synthesized)
gcgcggcgagcacccggagctcggctccctgcctgagcacggcagccgcgcctccgcccgcgcgtcctcgcccctccggccggcagcccgcggacatgatcgtgtagcctcctcctgggc

SEQ ID NO: 338607 - DNA, 120 bp, Artificial Sequence
  ENSG00000137727_2 (sequence is synthesized)
cgtgtagcctcctcctgggctgggatttgtttgaagattttcttcatggaagcgatgtccccccagcaggagactctagggggacagccggggcgctcctcttccctgacaggagtgtct

SEQ ID NO: 338608 - DNA, 120 bp, Artificial Sequence
  ENSG00000137727_3 (sequence is synthesized)
cggctcgcgggaggcagctgcaccaagaagaaaatgaaaacactagcagaaaggaggaggagcgctccatctcttatcctggataaagccctacaaaaacggcctactaccagggacagt

SEQ ID NO: 338609 - DNA, 120 bp, Artificial Sequence
  ENSG00000137727_4 (sequence is synthesized)
ccttctgctagtgttgacacatgcacatttctgtcatcattagtgtgctccaataggactctgctgattgatggccgggcagaactcaaaagaggcctccagaggcaggagcggcatctt

SEQ ID NO: 338610 - DNA, 120 bp, Artificial Sequence
  ENSG00000137727_5 (sequence is synthesized)
ttcctattcaatgatctgtttgttgtggccaaaatcaaatataacaataactttaagataaaaaataaaattaaattaactgatatgtggacagcaagctgtgtggatgaagtgggagaa

SEQ ID NO: 338611 - DNA, 120 bp, Artificial Sequence
  ENSG00000137727_6 (sequence is synthesized)
ggcaacaccaatgccatgaaatcctttgttttgggctggcccacagtgaactttgtggccactttcagttctccagaacaaaaggacaaatggctctctctccttcagagatacatcaat

SEQ ID NO: 338612 - DNA, 120 bp, Artificial Sequence
  ENSG00000137727_7 (sequence is synthesized)
ctagagaaagaaaaggactacccgaagagcattcccctcaaaatcttcgccaaggacattgggaattgtgcctactctaaaactataacagtaatgaattcagatacagcgaatgaagtt

SEQ ID NO: 338613 - DNA, 120 bp, Artificial Sequence
  ENSG00000137727_8 (sequence is synthesized)
atcaacatgtcattaccaatgctagggataactggctctgagagagattaccagttgtgggtcaattctggcaaagaagaggctccatacccactcattgggcatgaatatccatatgga

SEQ ID NO: 338614 - DNA, 120 bp, Artificial Sequence
  ENSG00000137727_9 (sequence is synthesized)
attaaaatgagccatcttcgagactctgcactcctgacaccgggatcaaaggactctaccacccctttcaacctccaggagcccttccttatggaacagctcccccgagagatgcagtgc

SEQ ID NO: 338615 - DNA, 120 bp, Artificial Sequence
  ENSG00000137727_10 (sequence is synthesized)
cagttcatcctgaagcccagccgcctggctgcagcccagcaactgagtgattcaggtcataagacatttaaaaggagaagatctatcataaactgggccttctggcgaggttctagcact

SEQ ID NO: 338616 - DNA, 120 bp, Artificial Sequence
  ENSG00000137727_11 (sequence is synthesized)
cacctggacaacttgccctcatcgccaacatcacctatgccaggacagctctttggaatttctctgccaaatatttgtgagaatgacaatctgcccaaacctgtcttggatatgcttttc

SEQ ID NO: 338617 - DNA, 120 bp, Artificial Sequence
  ENSG00000137727_12 (sequence is synthesized)
tttcttaatcaaaaaggacctctcaccaaaggtatcttcaggcaatcagccaatgtgaaatcctgcagagaactaaaagagaaattgaattctggagtcgaagtacacctagactgtgaa

SEQ ID NO: 338618 - DNA, 120 bp, Artificial Sequence
  ENSG00000137727_13 (sequence is synthesized)
tctatttttgtgatagcatctgtcttaaaggattttctgcgaaatattccaggaagtattttttcatcagatctctatgatcactgggtctctgtaatggatcaaggaaatgatgaagag

SEQ ID NO: 338619 - DNA, 120 bp, Artificial Sequence
  ENSG00000137727_14 (sequence is synthesized)
aaaataaatactgttcaaaggctattagaccagcttccgagagccaatgttgttctcctaaggtatctttttggggtgttacacaacattgagcaacattcctcatccaatcagatgact

SEQ ID NO: 338620 - DNA, 120 bp, Artificial Sequence
  ENSG00000137727_15 (sequence is synthesized)
gcatttaatttagctgtgtgtgtcgctccaagtattctttggcctcctgcttcctccagcccagaactagaaaacgaatttacaaaaaaggtttccctgcttatacaatttctgattgag

SEQ ID NO: 338621 - DNA, 120 bp, Artificial Sequence
  ENSG00000137727_16 (sequence is synthesized)
aattgccttaggatatttggagaagaaatcacttccctcttcagagaggtttcagtgagatgtgacactagagagaatgcctcagatatttcttgctttcaactgaatgactcctcctat

SEQ ID NO: 338622 - DNA, 120 bp, Artificial Sequence
  ENSG00000137727_17 (sequence is synthesized)
gacagcttggaaaatgagctaaatgaggatgttgatgcaccatgcagtgacttggtaaagaaacttggccaggggagcagaagcatggactctgtcttaaccctcagtgactatgatctt

SEQ ID NO: 338623 - DNA, 120 bp, Artificial Sequence
  ENSG00000137727_18 (sequence is synthesized)
gaccagcccgaggtggaaggccttttaaccctaagcgactttgacttggcccattctaaagatgaagatgttcaaatgaaacggcctcttgaatccaagccggtgaacattttagtgtac

SEQ ID NO: 338624 - DNA, 120 bp, Artificial Sequence
  ENSG00000137727_19 (sequence is synthesized)
acaaagatcccactgcgggatcatgccagggccccatctgccatgtgcacacccagctacctgtccacagctgcagcaaatgctgcaaaaagcctgaggcgacaccggcgttgctcagag

SEQ ID NO: 338625 - DNA, 120 bp, Artificial Sequence
  ENSG00000137727_20 (sequence is synthesized)
cccagcatcgactatctggattcaaagctttcctacctcagggagttttatcagaaaaagctacgcaagtccagctgtgatgcaattctttctcaaaaagatgaagactatctgaagcag

SEQ ID NO: 338626 - DNA, 120 bp, Artificial Sequence
  ENSG00000137727_21 (sequence is synthesized)
aatcaacccctccaggaggaaggaaagacatgttttaaacagagtttagtcacaggcactgatgtcagcaagaaaaatgccactactcaaaacactaagaagaaaagcttgtctggtagt

SEQ ID NO: 338627 - DNA, 120 bp, Artificial Sequence
  ENSG00000137727_22 (sequence is synthesized)
gaaggaaatcacgtgaaacttttccctaagtctaagccagtggccatttctgtggcatcttatagtcctatgtcctcacaggatcattccaagaaccagccctttgatgtgaatacatct

SEQ ID NO: 338628 - DNA, 120 bp, Artificial Sequence
  ENSG00000137727_23 (sequence is synthesized)
ggatactccccaccacacacagcagatgccctcaagggtccaaggacacatcggcgctgctcagagcccaacatagaagaccagaaccgcaagctgacctatctcaggggaatttattca

SEQ ID NO: 338629 - DNA, 120 bp, Artificial Sequence
  ENSG00000137727_24 (sequence is synthesized)
aagaaacaacataaaaccagctgtgaagctggtctcttgcatggagaggaggattatctcaaacggcataagtctttgcaaatggaggggcagaagctcattaatcagagtttagtcatg

SEQ ID NO: 338630 - DNA, 120 bp, Artificial Sequence
  ENSG00000137727_25 (sequence is synthesized)
ctttgcccaaggaccagctattccagcttatcctccccaggcacttccccatccggctcatcagtaagctcccaagacagtgctttttctcagatttctgaacactctgtgtttacaccc

SEQ ID NO: 338631 - DNA, 120 bp, Artificial Sequence
  ENSG00000137727_26 (sequence is synthesized)
actgagacttcctctccaatagattgcacttttcaggctcagagaaaacgggaagacctttctcctgactttagcaatgccagccatgtttccggaatgcccggtccctcatcagggcag

SEQ ID NO: 338632 - DNA, 120 bp, Artificial Sequence
  ENSG00000137727_27 (sequence is synthesized)
gcttgcagccgcccagcctatacaaagaaggacaccatggagtggcattcacaaatgcattctgtaactcttcatcccagcacatggttgagaaatggtgtggccagtttgaaaaactgg

SEQ ID NO: 338633 - DNA, 120 bp, Artificial Sequence
  ENSG00000137727_28 (sequence is synthesized)
tccctcaaaaagaaagcaaaggcagccagaccagaggaagagaaaatagcttctccaaaaggacccttagagccacccccacatgcttctggtgttccagaagccaactcactgcaagag

SEQ ID NO: 338634 - DNA, 120 bp, Artificial Sequence
  ENSG00000137727_29 (sequence is synthesized)
gaacaaaaagacttgcccttaagggcagctgaaggactgtcccctgtgcagtcagcccaaaggtgtagttcttctcccttccaggactcagagagacactgtagctctccattcagcctg

SEQ ID NO: 338635 - DNA, 120 bp, Artificial Sequence
  ENSG00000137727_30 (sequence is synthesized)
gtggagagcagacttaagctgtgcatgaagtcacatgaggaaatagagcctggtagtcagagctcttctggttctctgccttgggaaagagcctcagccagctcttggactctagaggat

SEQ ID NO: 338636 - DNA, 120 bp, Artificial Sequence
  ENSG00000137727_31 (sequence is synthesized)
gcgaccagcccagactcagggcctacagtggtctgcgacattgaggacaggtatttaaccaaagacatttaagcatagtaagaatctgatgtccacaagaacaggaactgggttaataat

SEQ ID NO: 338637 - DNA, 120 bp, Artificial Sequence
  ENSG00000137727_32 (sequence is synthesized)
aatagacaataattattatgacccctttgtataagatacctgggagaggtagcataaggattatcattgctaatacttaggacaacgaaataattctctttattgagactacttgacaaa

SEQ ID NO: 338638 - DNA, 120 bp, Artificial Sequence
  ENSG00000137727_33 (sequence is synthesized)
tactttatgctaaaaattttgtcacctaagtgtttgggaggctttttcttattaaaggttgggattggtcctgtcatgtggttttagagatactaacagagggctagagaaagcatcttc

SEQ ID NO: 338639 - DNA, 120 bp, Artificial Sequence
  ENSG00000137727_34 (sequence is synthesized)
tgcagaggaagcacttatgggaacagtctgtgagattgatgtcctgagaagaccaagatatcaggaatgaggaataggggcctgaggagagaggggaagggtacagagaaaccatctaca

SEQ ID NO: 338640 - DNA, 120 bp, Artificial Sequence
  ENSG00000137727_35 (sequence is synthesized)
ttccatggaatgtttttaataagtaggcaagaaaaatgccactaatcaaagcattaagtgtgtccagtaatgaagaacatcatataaaatctttccctaaatctaagccagtggccattt

SEQ ID NO: 338641 - DNA, 120 bp, Artificial Sequence
  ENSG00000137727_36 (sequence is synthesized)
ttgtgggatcttactaatcacgtgtccttacagaatcattccaagaaccagcccattgctacagctagagtggagaaaaacagagtgactcaaaagccatgggtaccatgatatcagttt

SEQ ID NO: 338642 - DNA, 120 bp, Artificial Sequence
  ENSG00000137727_37 (sequence is synthesized)
tgttggttgtatttgtcggtttgttttttcattcatgttgaagtgctttgcaaggcttcaggaaacagagttgtgaggagaaagaagaaaatggctgcccatttcagtaccctttcaaag

SEQ ID NO: 338643 - DNA, 120 bp, Artificial Sequence
  ENSG00000137727_38 (sequence is synthesized)
gtatctctgcctaggaacattcttcagaaatgcaacttcttctatttagaaggtgacctcctgacagcgttcactctcaatatggaggaaaagaccacaacaactgtcctttctcaatta

SEQ ID NO: 338644 - DNA, 120 bp, Artificial Sequence
  ENSG00000137727_39 (sequence is synthesized)
cacaaatgctgttaaaatgtgatcaaaccatggcatcactttgctgaaatgtttctgcacagtcctgcctcttagattacagtcagccagaaaaacatacttataaatcatcccttttct

SEQ ID NO: 338645 - DNA, 120 bp, Artificial Sequence
  ENSG00000137727_40 (sequence is synthesized)
gatttttgtagtttggcaattgagagagcaatattgaggttggccggttataaggagtcccacaatagaatacccaacaaagtggctgccaggccttctcagacagccatttgctttggg

SEQ ID NO: 338646 - DNA, 120 bp, Artificial Sequence
  ENSG00000137727_41 (sequence is synthesized)
ttttgcttccagacgttgttccatatttttgccccaaatgtttcatggcttataccccattggtttattttatatccatggacctttctttctctgctttcttgacttaaaggttgcagc

SEQ ID NO: 338647 - DNA, 120 bp, Artificial Sequence
  ENSG00000137727_42 (sequence is synthesized)
agtacatctcgtcacctaggaatagattatcaggccttgccaactagtatgcagggatggcactaaaaatggatgtgcatcttctttcacattaactactaacctataagaagttgctct

SEQ ID NO: 338648 - DNA, 120 bp, Artificial Sequence
  ENSG00000137727_43 (sequence is synthesized)
gagcccatttatttaaactctttagttcaccatcagatggacctttctctcacaagctagcttattccaaattatttgtcttattaatcaccagaaaatggtcatatcaaatgttctttc

SEQ ID NO: 338649 - DNA, 120 bp, Artificial Sequence
  ENSG00000137727_44 (sequence is synthesized)
ttttttgttctaaaggttgcattttcagttataggggaaaaaatattttctctaagatagaagaagttatttcagtattagctataggtgctacctacctcttggggacatggccctgtt

SEQ ID NO: 338650 - DNA, 120 bp, Artificial Sequence
  ENSG00000137727_45 (sequence is synthesized)
tgcgctaaccattacaatgatcttttagaactctgtatccaaagagctacttcgtgacactggccatctgagtcacagatgtgaagtcgatttcactttataactaaccagtcctacata

SEQ ID NO: 338651 - DNA, 120 bp, Artificial Sequence
  ENSG00000137727_46 (sequence is synthesized)
ttaagacttctaagtgtccatatgcatcttttttggtataatatataaagtcagcagggactcccctttcccttagggcatactactgtcagtcagaactgcaagatgtgaatgaagctc

SEQ ID NO: 338652 - DNA, 120 bp, Artificial Sequence
  ENSG00000137727_47 (sequence is synthesized)
ttaacggcttggagtgtctttctggaagaaattgccttttttttttttttcatgttagcaggtaaaaaatcattcacccaatttgaagcatagaagaaaatagttgctgaggttttttaa

SEQ ID NO: 338653 - DNA, 120 bp, Artificial Sequence
  ENSG00000137727_48 (sequence is synthesized)
taaccattcctactatctgtgttcccttagatactcctgtaattcttaatgtgaatagtttgttaatattgctgtaaagtattatattgtatgatttgaagacagactatatgtcatttt

SEQ ID NO: 338654 - DNA, 120 bp, Artificial Sequence
  ENSG00000137727_49 (sequence is synthesized)
tactccatcaatctataatatattagactgatgctttatctaaaatgctttgagtttgtataatatatcttgacaaattttactaccatatgttatgtaataaatgtgtatttttgtact

SEQ ID NO: 338655 - DNA, 120 bp, Artificial Sequence
  ENSG00000137727_50 (sequence is synthesized)
tacttgcagaaactgctgctaacttttaaagttgtttggttttcaaggcactgataatggatatgtatgaagtccatgctgtctgttaaataaaatgccattctgcagaattaaccatcc

SEQ ID NO: 338656 - DNA, 120 bp, Artificial Sequence
  ENSG00000137727_51 (sequence is synthesized)
acagcagcgcgctaggcggacgccgcgggaatttgacgctcgaggctcgcggcccctaatgagagtcccagaacacttcccgcccttgacggccagcggcagcgccgccgcctcccgcag

SEQ ID NO: 338657 - DNA, 120 bp, Artificial Sequence
  ENSG00000137727_52 (sequence is synthesized)
agcgcccgcttctccgtttctagagccttagtctctcctcgagcgacctcgcagcctccctcccgtctccatccgccgccggttctgcagcccggctcctccctcagtctaggcgcgcgg

SEQ ID NO: 338658 - DNA, 120 bp, Artificial Sequence
  ENSG00000137727_53 (sequence is synthesized)
gctgtagtgggcgatcgcctttccccgacccctcgccgtgcccctgggcctcccgaagtggcctgggcgagcactgactgccctttggcggtgtcagccccaaagtcagggccggcgatg

SEQ ID NO: 338659 - DNA, 120 bp, Artificial Sequence
  ENSG00000137727_54 (sequence is synthesized)
gtagccttctcaatagcttagccaaatttcggcgtcctcgctctgtctgcattttccttcattgctctttcacgtttggaatgcccccgtctctgcagcctgcagacagcggaaaccgcg

SEQ ID NO: 338660 - DNA, 120 bp, Artificial Sequence
  ENSG00000137727_55 (sequence is synthesized)
ggtgcaaatgtgcaggggccgctgacatgaccggctgcagaagcccactcagggttacccgaacaggctagcgttcgggattgcacaagagccaaatttgcctgtgaaataaagatagta

SEQ ID NO: 338661 - DNA, 120 bp, Artificial Sequence
  ENSG00000137727_56 (sequence is synthesized)
gttttctgcccccacattcttggaaatgctctacatttttggaaacacctacagtcaaaatgagctttaagcagagcttttgaccttagcagtatcttctgcagacctgtgtcaggctct

SEQ ID NO: 338662 - DNA, 120 bp, Artificial Sequence
  ENSG00000137727_57 (sequence is synthesized)
cacctcccaaaggattggaatgcaccagagctaggggtcgagacaaggccccagcctgtatctcaggctgaaacgtgaaaaccaagttaaggaaaatatggtgaagaagattcttgcata

SEQ ID NO: 338663 - DNA, 120 bp, Artificial Sequence
  ENSG00000137727_58 (sequence is synthesized)
ttgaggacagaaactgctgctaacttttaaagttgtttggttttcaaggcactgataatggatatgtatgaagtccatgctgtctgttaaataaaatgccattctgcagaattaaccatc

SEQ ID NO: 338664 - DNA, 120 bp, Artificial Sequence
  ENSG00000137731_0 (sequence is synthesized)
agacactctccaaaaagcagagacagcaggaagaggggagtggaggcagcccattcacctggggaaatgactgggttgtcgatggacggtggcggcagccccaagggggacgtggacccg

SEQ ID NO: 338665 - DNA, 120 bp, Artificial Sequence
  ENSG00000137731_1 (sequence is synthesized)
ttctactatgactatgagaccgttcgcaatgggggcctgatcttcgctggactggccttcatcgtggggctcctcatcctcctcagcagaagattccgctgtgggggcaataagaagcgc

SEQ ID NO: 338666 - DNA, 120 bp, Artificial Sequence
  ENSG00000137731_2 (sequence is synthesized)
tccctgggctttagacctttgtccccgtcactgccagcgcttgggctgaaggaagctccagactcaatgtgacccccaggtggcatcgccaactcctgcctcgtgccacctcatgcttat

SEQ ID NO: 338667 - DNA, 120 bp, Artificial Sequence
  ENSG00000137731_3 (sequence is synthesized)
aataaagccggcgtcagagaccgctgcttccctcacctgcctgcctgtctccctcctctgtcaccaccagcctctccaagctcaagtacaaatacagccgggtctcatttgttttttcaa

SEQ ID NO: 338668 - DNA, 120 bp, Artificial Sequence
  ENSG00000137731_4 (sequence is synthesized)
gccactctccatccaggccccaggcaagcagcacctccctgctctcctgcactcctggacacaaccagcagctcctgccatggacaggtggtacctgggcggcagccccaagggggacgt

SEQ ID NO: 338669 - DNA, 120 bp, Artificial Sequence
  ENSG00000137731_5 (sequence is synthesized)
tccggactacatggaacctctctgggttggcttctcaaccgatttcagagttgtgagctgagaaagaacagcaggagagaggccacagttattcaggggactcctgccttgctgggggct

SEQ ID NO: 338670 - DNA, 120 bp, Artificial Sequence
  ENSG00000137731_6 (sequence is synthesized)
tccgcagcccctgaccaaccatcctggtgtcactgctgagacagcagcctgaacaagggcaatgggaccccagagactgcatctgtacaggcggagccccagggctttagaccctttgct

SEQ ID NO: 338671 - DNA, 120 bp, Artificial Sequence
  ENSG00000137731_7 (sequence is synthesized)
ttctactatggtaagcctgggcccctgcgcacccttcctgagccctcaggaccccttccaccaagcagcggcctctcccagccccaggtccatgctctgtgccccttatctcccctggtt

SEQ ID NO: 338672 - DNA, 120 bp, Artificial Sequence
  ENSG00000137731_8 (sequence is synthesized)
accacgggctgctgcgggcaggctgcggagagagacagctgctgggagagaccacccatcccgctcctcttgccctctctttccggagactatgagaccgttcgcaatgggggcctgatc

SEQ ID NO: 338673 - DNA, 120 bp, Artificial Sequence
  ENSG00000137731_9 (sequence is synthesized)
ttcgctggactggccttcatcgtggggctcctcatcctcctcagtaagtggggtggcctccagggaaggggtgctgaccagggcacctctcttctcaaggccgctgagcaggctggcttt

SEQ ID NO: 338674 - DNA, 120 bp, Artificial Sequence
  ENSG00000137731_10 (sequence is synthesized)
cgggagttgccaagggaggggtgagcctccccaccacgccccccactgcaggatgtgggaatgggtgcccggtggggtgccaggctcgctgggagcacagtgtgaggttcctgcttgctc

SEQ ID NO: 338675 - DNA, 120 bp, Artificial Sequence
  ENSG00000137731_11 (sequence is synthesized)
aagtgcaccctccagtgggcccgggaggagccgcagaagtgagagcaaacccacggggtaactgggtaaccggagggccagacagggggactaggccccccgctgctaaccatggtccca

SEQ ID NO: 338676 - DNA, 120 bp, Artificial Sequence
  ENSG00000137731_12 (sequence is synthesized)
ttgttaaatagggatgatcccacctgcctcacaagattagggctagcatccaaagacatggcagtcaggacagcgctctgagaacggtccagtgcagactcggagtgttctgggggagac

SEQ ID NO: 338677 - DNA, 120 bp, Artificial Sequence
  ENSG00000137731_13 (sequence is synthesized)
aaagagagttatgtatcctcaagccccgaggggcacacagcaggagcttaataactgcacattgacttgttttggtccaacccaaagaaaaatacacagaaaacacaacccatggaaaga

SEQ ID NO: 338678 - DNA, 120 bp, Artificial Sequence
  ENSG00000137731_14 (sequence is synthesized)
agatacagcaagcacacctgtgggctctggacttctaatgcacgtgtgccactgccaccccaccccaaggctcgggccacagtcctgcgggtctccccattttcccgtgttgcccatggc

SEQ ID NO: 338679 - DNA, 120 bp, Artificial Sequence
  ENSG00000137731_15 (sequence is synthesized)
agctctctctacgtgtgccactgccagcccaccccaaggctcgggccacagtcctgcaggtctccccattttcacatgttgcccgtggcagctcccggagggcagtgccgggtggcagct

SEQ ID NO: 338680 - DNA, 120 bp, Artificial Sequence
  ENSG00000137731_16 (sequence is synthesized)
gatcacataggcacaggaggcaggtggcctaagcaaggggctccactttggagttgctgccatccttctccaggtgttcatcgggcagctgtgctgggggcaccatgatggcccagtctc

SEQ ID NO: 338681 - DNA, 120 bp, Artificial Sequence
  ENSG00000137731_17 (sequence is synthesized)
tgctgctactctcgatatgccaacagaccaccgtggatctgctccagtaaatatttgctgactgactgactgacttaggttcttaaatgcctatggtccagccttatataaagagagaga

SEQ ID NO: 338682 - DNA, 90 bp, Artificial Sequence
  ENSG00000137731_18 (sequence is synthesized)
gccggcatattaggaggccaaggcaggaggatctcttgagaccaggagtttaagaccagcctggtcaatacagtgagacccgatctatac

SEQ ID NO: 338683 - DNA, 120 bp, Artificial Sequence
  ENSG00000137731_19 (sequence is synthesized)
agccgtaacagcaggtatgctaggagggcctggggaaggtgcggggagggcagggcaggcttgggagcaacagggaagaattctggctcctggactcggtaaataagaattttagggtcg

SEQ ID NO: 338684 - DNA, 120 bp, Artificial Sequence
  ENSG00000137731_20 (sequence is synthesized)
ccatgccccctttgctgtgagtccaaggccatggccatgcagggaggcctctgggaccttctgcactcaggaaggagcccaactttcctctccctcccttcactcagaggcctcgaaggc

SEQ ID NO: 338685 - DNA, 120 bp, Artificial Sequence
  ENSG00000137731_21 (sequence is synthesized)
tggagggattgtgggattctggcaccacctagcgtctggcttcctcatctgggcctgcaagcttttgagggaggagaggggagaactggcaggagaaccaagctacaggaccaggaaatg

SEQ ID NO: 338686 - DNA, 120 bp, Artificial Sequence
  ENSG00000137731_22 (sequence is synthesized)
aacagggtgtgtttgggggccagaggcaggatagacctcactccacttgggaattaagctctttgtcttaatccactgcccccagtccctgataaccaccaactctcctagaaacacaga

SEQ ID NO: 338687 - DNA, 120 bp, Artificial Sequence
  ENSG00000137731_23 (sequence is synthesized)
aggcttgagcagggaagggtccttagagagcaaaacagaccgtcttcaatttacagaaggggaaaccgaggctctaagagaggccgtggcttatccagagtgacatggccagcctgagtc

SEQ ID NO: 338688 - DNA, 120 bp, Artificial Sequence
  ENSG00000137731_24 (sequence is synthesized)
ggagccagaggtaaactgcaggtctctggctccccttccagagctcttcccaccacacgaacatccaaaggacgggaagcggttggtggggcagggaggtggactacccactgactgcct

SEQ ID NO: 338689 - DNA, 120 bp, Artificial Sequence
  ENSG00000137731_25 (sequence is synthesized)
gtgggtttggagagtgaaggggaaacagagaaggcctggggttgtggggagaaactccagaggagaccaggagccaggcaggggaaggccaggtgacttacaactcagcaccaagtcctt

SEQ ID NO: 338690 - DNA, 120 bp, Artificial Sequence
  ENSG00000137731_26 (sequence is synthesized)
gtgacaccccactccaaatgtggactcattggtgtaggccaaacccttaaatggaattcagttttctttgcaggagatagaggcacacacttgagctctccctcgagggtgggagaaatg

SEQ ID NO: 338691 - DNA, 120 bp, Artificial Sequence
  ENSG00000137731_27 (sequence is synthesized)
aacttgaatggggcaggtctagccaggggggctttcaggaggagggaggctcccaaagcctcttggatgcagcagcaaggcaaacaggaagagggggtattcagacctgtggcccacccc

SEQ ID NO: 338692 - DNA, 120 bp, Artificial Sequence
  ENSG00000137731_28 (sequence is synthesized)
aggagaagtaagagcactggagaagaatcacgtttctagaatgttctagaatgttccatacagaggacaatccagcctgccaccctcagagggaaattccacctgctctggatgagtcac

SEQ ID NO: 338693 - DNA, 120 bp, Artificial Sequence
  ENSG00000137731_29 (sequence is synthesized)
ttcccttcgctgaccctgcctcaaggcctccctccttgtgaaatgtgaggctttatcaggtctgaacctgaggggcttttcaaaccaccacgtacccagatttccccagcccggttgaat

SEQ ID NO: 338694 - DNA, 120 bp, Artificial Sequence
  ENSG00000137731_30 (sequence is synthesized)
atgaggtttggggggtggcctctgcaggcggaggcttaacgagccccatggccccaggtggtgttcagaggcctgggacctgcttcctaaccaggactcttgtgaacatttcccttctct

SEQ ID NO: 338695 - DNA, 120 bp, Artificial Sequence
  ENSG00000137731_31 (sequence is synthesized)
tgggtgaattactcttaatcagacaactccgaccatgacagtcttcgtctgaggccgcaattccctttctgaccaccagagggagcacgtggcttgcgccgaatcccctccagctgtgtg

SEQ ID NO: 338696 - DNA, 120 bp, Artificial Sequence
  ENSG00000137731_32 (sequence is synthesized)
ttttcaactcaatctttccaagggcctttgccgggaggaggggctcctggctcctgaatggtccgcccggtgccgtgatttcctaggaaagccctcagctcttctcattccgcttgttca

SEQ ID NO: 338697 - DNA, 120 bp, Artificial Sequence
  ENSG00000137731_33 (sequence is synthesized)
gtaagtggcaagcatacctagacatcttctgagcccagcagacagaattttggtttaaggagaacctgggtagtataatgacacataatatttttttatatataggcatcacagtctatg

SEQ ID NO: 338698 - DNA, 120 bp, Artificial Sequence
  ENSG00000137731_34 (sequence is synthesized)
aattgtactgattcatctcatctcaagaagatggtattttagatgtatgtgtatatatttgaagccaaaactgtttattttgtgtaattttttgtgcctattagtttctgaatatctgtg

SEQ ID NO: 338699 - DNA, 120 bp, Artificial Sequence
  ENSG00000137731_35 (sequence is synthesized)
cataaaagcttctgtttctctgcctgcacacatttgtgggtacacactatacacctatgtggggtaggaggggggaatgggcatatttgtttgcatttaccttgtgtttggtcctaggaa

SEQ ID NO: 338700 - DNA, 120 bp, Artificial Sequence
  ENSG00000137731_36 (sequence is synthesized)
gggatcttggtgatcattccagcccagctctttcacctcaatggtgaagaaactgaggtccagaaaggcaaggtgacttgtcacaggtaacacagctggctatggagacagaggtgacac

SEQ ID NO: 338701 - DNA, 120 bp, Artificial Sequence
  ENSG00000137731_37 (sequence is synthesized)
aagaacctaggatttctgatttgtagatgagaactctttctataatattaaaatcaattataaattttggggagggaagcagggagatccttgttttttcctcccccaactgataagtaa

SEQ ID NO: 338702 - DNA, 120 bp, Artificial Sequence
  ENSG00000137731_38 (sequence is synthesized)
gtactaagaaggtcaatcttgaattagctatataataccaaaagttaagtttttcacacagacctggttcagtattgattccttttatgaaaaccctgtttatactcaagttgtcaaaga

SEQ ID NO: 338703 - DNA, 120 bp, Artificial Sequence
  ENSG00000137731_39 (sequence is synthesized)
attccagagggcatatgaagccattgttaaaataattttatgcctttgtttttgaagaaaagtatccaaaatatataagcttattgtttgagttaaacaataaaaacatctgctgtttct

SEQ ID NO: 338704 - DNA, 120 bp, Artificial Sequence
  ENSG00000137731_40 (sequence is synthesized)
agacactctccaaaaagcagagacagcaggaagaggggagtggaggcagcccattcacctggggaaatgactgggttgtcgatggacggtggtgagtgtgctggtgtgcgtgcccgggcg

SEQ ID NO: 338705 - DNA, 120 bp, Artificial Sequence
  ENSG00000137731_41 (sequence is synthesized)
tgtgcaatgctgggtggctctgattggcctgcctttgtggggtcagctggaccctactcttccctctcctgccacctcagccttccagagtacccagcccctcttcctgtcggcctcctc

SEQ ID NO: 338706 - DNA, 120 bp, Artificial Sequence
  ENSG00000137731_42 (sequence is synthesized)
tctaagaaaatttgcaacttaaaggaggaccctgctttaaccccaaagaaagatagcttgagtggcagaaaggcagcagatagaagctggagagctgagcgttcctcctcggcctcctgg

SEQ ID NO: 338707 - DNA, 120 bp, Artificial Sequence
  ENSG00000137731_43 (sequence is synthesized)
cacacacccgccctgagttcaatgcatcttgctagaccgtctgaacttgggcgggaggcagacggcgtccatctggctggggaaggagcaggcccctctggtcagccttcctaggctgga

SEQ ID NO: 338708 - DNA, 120 bp, Artificial Sequence
  ENSG00000137745_0 (sequence is synthesized)
aacagtccccaggcatcaccattcaagatgcatccaggggtcctggctgccttcctcttcttgagctggactcattgtcgggccctgccccttcccagtggtggtgatgaagatgatttg

SEQ ID NO: 338709 - DNA, 120 bp, Artificial Sequence
  ENSG00000137745_1 (sequence is synthesized)
tctgaggaagacctccagtttgcagagcgctacctgagatcatactaccatcctacaaatctcgcgggaatcctgaaggagaatgcagcaagctccatgactgagaggctccgagaaatg

SEQ ID NO: 338710 - DNA, 120 bp, Artificial Sequence
  ENSG00000137745_2 (sequence is synthesized)
cagtctttcttcggcttagaggtgactggcaaacttgacgataacaccttagatgtcatgaaaaagccaagatgcggggttcctgatgtgggtgaatacaatgttttccctcgaactctt

SEQ ID NO: 338711 - DNA, 120 bp, Artificial Sequence
  ENSG00000137745_3 (sequence is synthesized)
aaatggtccaaaatgaatttaacctacagaattgtgaattacacccctgatatgactcattctgaagtcgaaaaggcattcaaaaaagccttcaaagtttggtccgatgtaactcctctg

SEQ ID NO: 338712 - DNA, 120 bp, Artificial Sequence
  ENSG00000137745_4 (sequence is synthesized)
aattttaccagacttcacgatggcattgctgacatcatgatctcttttggaattaaggagcatggcgacttctacccatttgatgggccctctggcctgctggctcatgcttttcctcct

SEQ ID NO: 338713 - DNA, 120 bp, Artificial Sequence
  ENSG00000137745_5 (sequence is synthesized)
gggccaaattatggaggagatgcccattttgatgatgatgaaacctggacaagtagttccaaaggctacaacttgtttcttgttgctgcgcatgagttcggccactccttaggtcttgac

SEQ ID NO: 338714 - DNA, 120 bp, Artificial Sequence
  ENSG00000137745_6 (sequence is synthesized)
cactccaaggaccctggagcactcatgtttcctatctacacctacaccggcaaaagccactttatgcttcctgatgacgatgtacaagggatccagtctctctatggtccaggagatgaa

SEQ ID NO: 338715 - DNA, 120 bp, Artificial Sequence
  ENSG00000137745_7 (sequence is synthesized)
gaccccaaccctaaacatccaaaaacgccagacaaatgtgacccttccttatcccttgatgccattaccagtctccgaggagaaacaatgatctttaaagacagattcttctggcgcctg

SEQ ID NO: 338716 - DNA, 120 bp, Artificial Sequence
  ENSG00000137745_8 (sequence is synthesized)
catcctcagcaggttgatgcggagctgtttttaacgaaatcattttggccagaacttcccaaccgtattgatgctgcatatgagcacccttctcatgacctcatcttcatcttcagaggt

SEQ ID NO: 338717 - DNA, 120 bp, Artificial Sequence
  ENSG00000137745_9 (sequence is synthesized)
agaaaattttgggctcttaatggttatgacattctggaaggttatcccaaaaaaatatctgaactgggtcttccaaaagaagttaagaagataagtgcagctgttcactttgaggataca

SEQ ID NO: 338718 - DNA, 120 bp, Artificial Sequence
  ENSG00000137745_10 (sequence is synthesized)
ggcaagactctcctgttctcaggaaaccaggtctggagatatgatgatactaaccatattatggataaagactatccgagactaatagaagaagacttcccaggaattggtgataaagta

SEQ ID NO: 338719 - DNA, 120 bp, Artificial Sequence
  ENSG00000137745_11 (sequence is synthesized)
taaccgtattgttcgcgtcatgccagcaaattccattttgtggtgttaagtgtctttttaaaaattgttatttaaatcctgaagagcatttggggtaatacttccagaagtgcggggtag

SEQ ID NO: 338720 - DNA, 120 bp, Artificial Sequence
  ENSG00000137745_12 (sequence is synthesized)
gggaagaagagctatcaggagaaagcttggttctgtgaacaagcttcagtaagttatctttgaatatgtagtatctatatgactatgcgtggctggaaccacattgaagaatgttagagt

SEQ ID NO: 338721 - DNA, 120 bp, Artificial Sequence
  ENSG00000137745_13 (sequence is synthesized)
aatgaaatggaggatctctaaagagcatctgattcttgttgctgtacaaaagcaatggttgatgatacttcccacaccacaaatgggacacatggtctgtcaatgagagcataatttaaa

SEQ ID NO: 338722 - DNA, 120 bp, Artificial Sequence
  ENSG00000137745_14 (sequence is synthesized)
aatatatttataaggaaattttacaagggcataaagtaaatacatgcatataatgaataaatcattcttactaaaaagtataaaatagtatgaaaatggaaatttgggagagccatacat

SEQ ID NO: 338723 - DNA, 120 bp, Artificial Sequence
  ENSG00000137745_15 (sequence is synthesized)
aaaagaaataaaccaaaggaaaatgtctgtaataatagactgtaacttccaaataaataattttcattttgcactgaggatattcagatgtatgtgcccttcttcacacagacactaacg

SEQ ID NO: 338724 - DNA, 120 bp, Artificial Sequence
  ENSG00000137745_16 (sequence is synthesized)
aaatatcaaagtcattaaagacaggagacaaaagagcagtggtaagaatagtagatgtggcctttgaattctgtttaattttcacttttggcaatgactcaaagtctgctctcatataag

SEQ ID NO: 338725 - DNA, 120 bp, Artificial Sequence
  ENSG00000137745_17 (sequence is synthesized)
acaaatattcctttgcatattataaaggataaagaaggatgatgtctttttattaaaatatttcaggttcttcagaagtcacacattacaaagttaaaattgttatcaaaatagtctaag

SEQ ID NO: 338726 - DNA, 120 bp, Artificial Sequence
  ENSG00000137745_18 (sequence is synthesized)
gccatggcatccctttttcataaattatttgattatttaagactaaaagttgcattttaaccctattttacctagctaattatttaattgtccagtttgtcttggatatataggctattt

SEQ ID NO: 338727 - DNA, 120 bp, Artificial Sequence
  ENSG00000137745_19 (sequence is synthesized)
tctaaagacttgtatagcatgaaataaaatatatcttataaagtggaagtatgtatattaaaaaagagacatccaaatttttttttaaagcagtctactagattgtgatcccttgagata

SEQ ID NO: 338728 - DNA, 120 bp, Artificial Sequence
  ENSG00000137745_20 (sequence is synthesized)
tggaaggatgcctttttttctctgcatttaaaaaaatcccccagcacttcccacagtgcctattgatacttggggagggtgcttggcacttattgaatatatgatcggccatcaagggaa

SEQ ID NO: 338729 - DNA, 120 bp, Artificial Sequence
  ENSG00000137745_21 (sequence is synthesized)
gaactattgtgctcagagacactgttgataaaaactcaggcaaagaaaatgaaatgcatatttgcaaagtgtattaggaagtgtttatgttgtttataataaaaatatattttcaacaga

SEQ ID NO: 338730 - DNA, 120 bp, Artificial Sequence
  ENSG00000137747_0 (sequence is synthesized)
aactcctttaccctacatgcctgagaagccagggaccaagatggatcttctcctcgacatcagctaagcctggaggactcttcccctcagagaccatggagagggacagccacgggaatg

SEQ ID NO: 338731 - DNA, 120 bp, Artificial Sequence
  ENSG00000137747_1 (sequence is synthesized)
catctccagcaagaacaccttcagctggagcatctccagcccaggcatctccagctgggacacctccaggccgggcatctccagcccaggcatctccagcccaggcatctccagctggga

SEQ ID NO: 338732 - DNA, 120 bp, Artificial Sequence
  ENSG00000137747_2 (sequence is synthesized)
cacctccgggccgggcatctccagcccaggcatctccagctggtacacctccaggccgggcatctccaggccgggcatctccagcccaggcatctccagcccaggcatctccagcccggg

SEQ ID NO: 338733 - DNA, 120 bp, Artificial Sequence
  ENSG00000137747_3 (sequence is synthesized)
catctccggctctggcatcactttccaggtcctcatccggcaggtcatcatccgccaggtcagcctcggtgacaacctccccaaccagagtgtaccttgttagagcaacaccagtggggg

SEQ ID NO: 338734 - DNA, 120 bp, Artificial Sequence
  ENSG00000137747_4 (sequence is synthesized)
ctgtacccatccgatcatctcctgccaggtcagcaccagcaaccagggccaccagggagagcccaggtacgagcctgcccaagttcacctggcgggagggccagaagcagctaccgctca

SEQ ID NO: 338735 - DNA, 120 bp, Artificial Sequence
  ENSG00000137747_5 (sequence is synthesized)
tcgggtgcgtgctcctcctcattgccctggtggtttcgctcatcatcctcttccagttctggcagggccacacagggatcaggtacaaggagcagagggagagctgtcccaagcacgctg

SEQ ID NO: 338736 - DNA, 120 bp, Artificial Sequence
  ENSG00000137747_6 (sequence is synthesized)
ttcgctgtgacggggtggtggactgcaagctgaagagtgacgagctgggctgcgtgaggtttgactgggacaagtctctgcttaaaatctactctgggtcctcccatcagtggcttccca

SEQ ID NO: 338737 - DNA, 120 bp, Artificial Sequence
  ENSG00000137747_7 (sequence is synthesized)
tctgtagcagcaactggaatgactcctactcagagaagacctgccagcagctgggtttcgagagtgctcaccggacaaccgaggttgcccacagggattttgccaacagcttctcaatct

SEQ ID NO: 338738 - DNA, 120 bp, Artificial Sequence
  ENSG00000137747_8 (sequence is synthesized)
tgagatacaactccaccatccaggaaagcctccacaggtctgaatgcccttcccagcggtatatctctctccagtgttcccactgcggactgagggccatgaccgggcggatcgtgggag

SEQ ID NO: 338739 - DNA, 120 bp, Artificial Sequence
  ENSG00000137747_9 (sequence is synthesized)
gggcgctggcctcggatagcaagtggccttggcaagtgagtctgcacttcggcaccacccacatctgtggaggcacgctcattgacgcccagtgggtgctcactgccgcccactgcttct

SEQ ID NO: 338740 - DNA, 120 bp, Artificial Sequence
  ENSG00000137747_10 (sequence is synthesized)
tcgtgacccgggagaaggtcctggagggctggaaggtgtacgcgggcaccagcaacctgcaccagttgcctgaggcagcctccattgccgagatcatcatcaacagcaattacaccgatg

SEQ ID NO: 338741 - DNA, 120 bp, Artificial Sequence
  ENSG00000137747_11 (sequence is synthesized)
aggaggacgactatgacatcgccctcatgcggctgtccaagcccctgaccctgtccgctcacatccaccctgcttgcctccccatgcatggacagacctttagcctcaatgagacctgct

SEQ ID NO: 338742 - DNA, 120 bp, Artificial Sequence
  ENSG00000137747_12 (sequence is synthesized)
ggatcacaggctttggcaagaccagggagacagatgacaagacatcccccttcctccgggaggtgcaggtcaatctcatcgacttcaagaaatgcaatgactacttggtctatgacagtt

SEQ ID NO: 338743 - DNA, 120 bp, Artificial Sequence
  ENSG00000137747_13 (sequence is synthesized)
accttaccccaaggatgatgtgtgctggggaccttcgtgggggcagagactcctgccagggagacagcggggggcctcttgtctgtgagcagaacaaccgctggtacctggcaggtgtca

SEQ ID NO: 338744 - DNA, 120 bp, Artificial Sequence
  ENSG00000137747_14 (sequence is synthesized)
tggtgtgtacaccaaagtgacagaagttcttccctggatttacagcaagatggagagcgaggtgcgattcagaaaatcctaaccagctggcctgctgctctgcacagcaccggctgctgt

SEQ ID NO: 338745 - DNA, 120 bp, Artificial Sequence
  ENSG00000137747_15 (sequence is synthesized)
ctgtgaagactctggccatggtgactggccatgtgtggcatcatctgggctaatggccaccgggcaccatcggactcccacctccactgtctgctgcctctgtgtgtgtgtgtgtgtgtg

SEQ ID NO: 338746 - DNA, 120 bp, Artificial Sequence
  ENSG00000137747_16 (sequence is synthesized)
tgtgtgtgcatatgtgtgcattgccactctcccaagtttttcagaaaccagcagagctgtcaactcttctcaaaatcccaggctggaaattacctggagacaagagttgagtaccgtgga

SEQ ID NO: 338747 - DNA, 120 bp, Artificial Sequence
  ENSG00000137747_17 (sequence is synthesized)
tgttcctacaggagtgtccatagatggatggaggaggtggagcccagagcccaaggaagagctgggaattcttgcttctctgaccctcacttacagactagcccagtgtgggcagatgcc

SEQ ID NO: 338748 - DNA, 120 bp, Artificial Sequence
  ENSG00000137747_18 (sequence is synthesized)
agcggcccaggtggcgccattgctgtcctgggatggatcgtgggttttggtggatgcagcttcccagggcctggaccgtcttcggtgaaaagctgctcccgttggctttatgagcatcaa

SEQ ID NO: 338749 - DNA, 120 bp, Artificial Sequence
  ENSG00000137747_19 (sequence is synthesized)
gtcctcacccagaccccctgctggtgccgtggatgtcaccagtcggactgtgctgtggctaaccaggctgacaactgagatgaggattcactgtactcatttggtcacaagctgctgggg

SEQ ID NO: 338750 - DNA, 120 bp, Artificial Sequence
  ENSG00000137747_20 (sequence is synthesized)
cgggttttattttattttatttttatatttaagaaatgaaaatacgggtatttttaaagattctccaaaaagtccagaagccttgacagctggcatcaatcagcccaagacccccagggg

SEQ ID NO: 338751 - DNA, 120 bp, Artificial Sequence
  ENSG00000137747_21 (sequence is synthesized)
attcatgggaaatgtcgtattttagagtcctacagaatatttctggcctcaaggaactggatgaagagactggacaaagtccccaggatgggcatcccccaagtcactacagcatctgga

SEQ ID NO: 338752 - DNA, 120 bp, Artificial Sequence
  ENSG00000137747_22 (sequence is synthesized)
gcccctaggagatactcagggaagcaaatccttgtttgggctggcaagcaaatccgacacgacgaggtccacaaactgtttctgcatcccagggctctgacgaaggcgttaagaaacaga

SEQ ID NO: 338753 - DNA, 120 bp, Artificial Sequence
  ENSG00000137747_23 (sequence is synthesized)
tgctgttcccgcgtaggctcccaggggccccagggaggtccaggtggactgcctctctcattcccagtagctgtcctgggactttgggatttcttctcagctttctccacctttcagttt

SEQ ID NO: 338754 - DNA, 120 bp, Artificial Sequence
  ENSG00000137747_24 (sequence is synthesized)
ctcagttgtttcagaaacatagcaatgacataaaaactgctatggagagaaagctaacatggtcccatgccttccaggcagccctgctgaaggatctaagttggccctgttcctgcaaat

SEQ ID NO: 338755 - DNA, 120 bp, Artificial Sequence
  ENSG00000137747_25 (sequence is synthesized)
catcaacgtgcctggactcgccagctaaaagcctgggccttccccagccttttttctggggcacctattcctctgccagtcctgctcccctcaccttccttgggcccgtcagagtctttt

SEQ ID NO: 338756 - DNA, 120 bp, Artificial Sequence
  ENSG00000137747_26 (sequence is synthesized)
gtggtgctgtgcttctcagaggcaggatccaagcagatcagcccagcctagcccagctcaggcaggccatggccgctcaagggaaagactgccccagaagagcaagctggagaggctggg

SEQ ID NO: 338757 - DNA, 120 bp, Artificial Sequence
  ENSG00000137747_27 (sequence is synthesized)
caggggctgatggggctgggtacactggggaatgttagcaagactgggaaggaggccacattcctgtctgcagcagccgccagcgatggtcttcagcaataaaagttgtgtgacctgaga

SEQ ID NO: 338758 - DNA, 120 bp, Artificial Sequence
  ENSG00000137747_28 (sequence is synthesized)
tgggcagatgttctcccagaagtatttttttgtgtaaggttgcaatggactttgaaaacgtttcagtttctgcagaggattttgtgatagtttttgttatcaagcatttatgcatgggaa

SEQ ID NO: 338759 - DNA, 120 bp, Artificial Sequence
  ENSG00000137747_29 (sequence is synthesized)
tccgctcttcatggcctttcccagctctgtttgttttagtctttttgattttctttttgttgttgttgttgtctttttttaaaaacacaagtgactccattttaactctgacaactttca

SEQ ID NO: 338760 - DNA, 120 bp, Artificial Sequence
  ENSG00000137747_30 (sequence is synthesized)
cagctgtcaccagaatgctccctgagaactaccattctttccctttcccacttaaaatatttcatcagaacctcactactatcataaaagagtataaagtaataaaataataaaaagtta

SEQ ID NO: 338761 - DNA, 120 bp, Artificial Sequence
  ENSG00000137747_31 (sequence is synthesized)
tgcagcaggacactgcacccagcaggctgggaacttcctcaggtggggaccctggaggagcacccaggttgtaggcagaggtcccctcagcgtccccatattcggggggtgttctggaca

SEQ ID NO: 338762 - DNA, 120 bp, Artificial Sequence
  ENSG00000137747_32 (sequence is synthesized)
gggtcaaatgtgatgcctggggtcaatcccagctgtctgtgtttctttccctgcttttcttccctcagaacagagctcagcgggttgaaaaagggtggacctacaggccaggcaggcagt

SEQ ID NO: 338763 - DNA, 120 bp, Artificial Sequence
  ENSG00000137747_33 (sequence is synthesized)
acatcgccctcatgcggctgtccaagcccctgaccctgtccggtgagggaatctgcactccccgctctcctgccccccagccccagcaccctctgcagccctcgcacttgtcagcatctg

SEQ ID NO: 338764 - DNA, 120 bp, Artificial Sequence
  ENSG00000137747_34 (sequence is synthesized)
tcaactcatatccgggccccaaagcttctgcagggcagaagtcaaagactcttaaagatccttacatggaacacttctgttttataattagggaaactgaagcccaagggttataaataa

SEQ ID NO: 338765 - DNA, 120 bp, Artificial Sequence
  ENSG00000137747_35 (sequence is synthesized)
gtttgctccaaatgacacatctcacattacaaattgatgacggagtcagggcttgggtactgatcttaatcaatagattgaattctttcactggtattaactgagcacctaggggccaaa

SEQ ID NO: 338766 - DNA, 120 bp, Artificial Sequence
  ENSG00000137747_36 (sequence is synthesized)
cgctatggtaggcatttcacacatatgatttcatttactcttcacaaccaaccctgtggagcaggcactattattaacttcatttgacatatgaggaaatggagctttacagagagataa

SEQ ID NO: 338767 - DNA, 120 bp, Artificial Sequence
  ENSG00000137747_37 (sequence is synthesized)
ttacctgaggccacaagtaataggtggtagctctgggattggaaccaggtcgatctgattcccaagcagtgctctccccacctggctctagactggcaaattgcttaccctgcagtcgag

SEQ ID NO: 338768 - DNA, 120 bp, Artificial Sequence
  ENSG00000137747_38 (sequence is synthesized)
aacttaagctgagtacacattcaaacaactaattgctacaacgttgttgctaaggaccaaaggaggctacacaaaggaaatgctgcagaggttctcagaagatcactgtggacaggggac

SEQ ID NO: 338769 - DNA, 120 bp, Artificial Sequence
  ENSG00000137747_39 (sequence is synthesized)
gtcaaagaagacttcattcattcattcattcattcactcatcattcatccattcactcatttgttcacttatcaaatactatatggccagccctatagtacagttgcaaatagaaataaa

SEQ ID NO: 338770 - DNA, 120 bp, Artificial Sequence
  ENSG00000137747_40 (sequence is synthesized)
atacaccaagacgaccagtagaggccaattatacgatgttttcggggagcagggagctatggtggcataggcgggagcaactaatcatcctggcaggctaggggaagctcagcagaggaa

SEQ ID NO: 338771 - DNA, 120 bp, Artificial Sequence
  ENSG00000137747_41 (sequence is synthesized)
ggatagccaaggtgggtcccgaaaagattggagaagacaggtaatgggggctcagggaggaccctgaagaatggagccagagccctctggcataagcatctgtaaaggtgggagagggag

SEQ ID NO: 338772 - DNA, 120 bp, Artificial Sequence
  ENSG00000137747_42 (sequence is synthesized)
gaggagtaccgggatttctggaagcctcggaggactctctggttagtccagccattctcgtgctctgagcctgtgagctggtgtttcctcgcacattaattatggaggcggtgtctatca

SEQ ID NO: 338773 - DNA, 120 bp, Artificial Sequence
  ENSG00000137747_43 (sequence is synthesized)
ttggattgtggccagtgtcgtgtgggagtaaagggcagaggggcagcactcctccaagggaggtgtttggcacaggggttcaagtcaggaacagtgtcttagccagcaggcctgcttcag

SEQ ID NO: 338774 - DNA, 120 bp, Artificial Sequence
  ENSG00000137752_0 (sequence is synthesized)
ctttaatgggaagaaaaataaagacatgcatatgcatgcacagtgagtatttcccaatacatgtacaggccctgccaaaaaggaaggcgaagcatactttcagtttcagtcacacaagaa

SEQ ID NO: 338775 - DNA, 120 bp, Artificial Sequence
  ENSG00000137752_1 (sequence is synthesized)
gggaggagagaaaagccatggccgacaaggtcctgaaggagaagagaaagctgtttatccgttccatgggtgaaggtacaataaatggcttactggatgaattattacagacaagggtgc

SEQ ID NO: 338776 - DNA, 120 bp, Artificial Sequence
  ENSG00000137752_2 (sequence is synthesized)
tgaacaaggaagagatggagaaagtaaaacgtgaaaatgctacagttatggataagacccgagctttgattgactccgttattccgaaaggggcacaggcatgccaaatttgcatcacat

SEQ ID NO: 338777 - DNA, 120 bp, Artificial Sequence
  ENSG00000137752_3 (sequence is synthesized)
acatttgtgaagaagacagttacctggcagggacgctgggactctcagcagatcaaacatctggaaattaccttaatatgcaagactctcaaggagtactttcttcctttccagctcctc

SEQ ID NO: 338778 - DNA, 120 bp, Artificial Sequence
  ENSG00000137752_4 (sequence is synthesized)
aggcagtgcaggacaacccagctatgcccacatcctcaggctcagaagggaatgtcaagctttgctccctagaagaagctcaaaggatatggaaacaaaagtcggcagagatttatccaa

SEQ ID NO: 338779 - DNA, 120 bp, Artificial Sequence
  ENSG00000137752_5 (sequence is synthesized)
taatggacaagtcaagccgcacacgtcttgctctcattatctgcaatgaagaatttgacagtattcctagaagaactggagctgaggttgacatcacaggcatgacaatgctgctacaaa

SEQ ID NO: 338780 - DNA, 120 bp, Artificial Sequence
  ENSG00000137752_6 (sequence is synthesized)
tgcttcggacatgactacagagctggaggcatttgcacaccgcccagagcacaagacctctgacagcacgttcctggtgttcatgtctcatggtattcgggaaggcatttgtgggaagaa

SEQ ID NO: 338781 - DNA, 120 bp, Artificial Sequence
  ENSG00000137752_7 (sequence is synthesized)
acactctgagcaagtcccagatatactacaactcaatgcaatctttaacatgttgaataccaagaactgcccaagtttgaaggacaaaccgaaggtgatcatcatccaggcctgccgtgg

SEQ ID NO: 338782 - DNA, 120 bp, Artificial Sequence
  ENSG00000137752_8 (sequence is synthesized)
tgacagccctggtgtggtgtggtttaaagattcagtaggagtttctggaaacctatctttaccaactacagaagagtttgaggatgatgctattaagaaagcccacatagagaaggattt

SEQ ID NO: 338783 - DNA, 120 bp, Artificial Sequence
  ENSG00000137752_9 (sequence is synthesized)
tatcgctttctgctcttccacaccagataatgtttcttggagacatcccacaatgggctctgtttttattggaagactcattgaacatatgcaagaatatgcctgttcctgtgatgtgga

SEQ ID NO: 338784 - DNA, 120 bp, Artificial Sequence
  ENSG00000137752_10 (sequence is synthesized)
ggaaattttccgcaaggttcgattttcatttgagcagccagatggtagagcgcagatgcccaccactgaaagagtgactttgacaagatgtttctacctcttcccaggacattaaaataa

SEQ ID NO: 338785 - DNA, 120 bp, Artificial Sequence
  ENSG00000137752_11 (sequence is synthesized)
ggaaactgtatgaatgtctgtgggcaggaagtgaagagatccttctgtaaaggtttttggaattatgtctgctgaataataaacttttttgaaataataaatctggtagaaaaatgaaaa

SEQ ID NO: 338786 - DNA, 120 bp, Artificial Sequence
  ENSG00000137752_12 (sequence is synthesized)
aggtacatgtgtatggtcgggagtgtgggaaggttgaggaaagggtactgaaagtccatttgagtcaagaactctaggtttacaggctgagaatccttaatccaaaaatttgaattttga

SEQ ID NO: 338787 - DNA, 120 bp, Artificial Sequence
  ENSG00000137752_13 (sequence is synthesized)
aatgctctaaaatccaacactgtgtgagcgcccacatgatattcaaaggaaatgtttattgaaacatttcaaattataggtttttggattagggatgctaaaccagtaagtatacagctg

SEQ ID NO: 338788 - DNA, 120 bp, Artificial Sequence
  ENSG00000137752_14 (sequence is synthesized)
aattccaatatacaaaaatatctgaaatttgaaatacttctggtagcatgcattttggataagggataatcaagccatatacagaaaatactgaagtaatgcctttcttctggtcagtgc

SEQ ID NO: 338789 - DNA, 120 bp, Artificial Sequence
  ENSG00000137752_15 (sequence is synthesized)
agagcacgttgctcttctcccaaagtttttcatttagaccccttttgagattcatctgatattggcctagaagtggccgtaagactacaaaccctcacttttggatgtttctctccttca

SEQ ID NO: 338790 - DNA, 120 bp, Artificial Sequence
  ENSG00000137752_16 (sequence is synthesized)
cctcagcagggtatatttaaacatagcatgtggtctttccttttaaaattgtgtatgttcccattggtggtataactttataacttgcatgtctttaacaaaattctttcctatgttttt

SEQ ID NO: 338791 - DNA, 120 bp, Artificial Sequence
  ENSG00000137752_17 (sequence is synthesized)
ttttttaattatttctttttctcataggaagtgaagagatccttctgtaaaggtttttggaattatgtctgctgaataataaacttttttgaaataataaatctggtagaaaaatgaaaa

SEQ ID NO: 338792 - DNA, 120 bp, Artificial Sequence
  ENSG00000137752_18 (sequence is synthesized)
tgccatgctcagaacccaaggatagagtggggtgaaagaaacacttcaggcagttctgaaatgcagtggcttattcttagagccaacctcattgagcagttctggagaatcatacttctg

SEQ ID NO: 338793 - DNA, 120 bp, Artificial Sequence
  ENSG00000137752_19 (sequence is synthesized)
ccccttacataaaggatttctatatcctagaatcccaggtttatagaaagaggtccaaattggatccacttccggggtaaataacatcagtgatgacagctattgaatgcttattaagaa

SEQ ID NO: 338794 - DNA, 120 bp, Artificial Sequence
  ENSG00000137752_20 (sequence is synthesized)
tgggcattgttctaagcattttgcacatgataatatataatttttaaccttaaacacaacccattttagagatcaagaagctgagacgggattgttaaatatttttcccaaagaaaaaca

SEQ ID NO: 338795 - DNA, 120 bp, Artificial Sequence
  ENSG00000137752_21 (sequence is synthesized)
atcagaaattggaacaatcagttttagaattcagtcatttttgcttcaaagcttgtgcatctttcaaaatcctacctatcaagaacaacgaagtcagaagctcagctgccatctgggcat

SEQ ID NO: 338796 - DNA, 120 bp, Artificial Sequence
  ENSG00000137752_22 (sequence is synthesized)
ttgcaatgtccatgcatactcttgaagcagcattcaattctgttcccccttttcaatgtatggttcatggggtttggtatcttgataggactaaggaaggggaagctgtcataaaccagg

SEQ ID NO: 338797 - DNA, 120 bp, Artificial Sequence
  ENSG00000137752_23 (sequence is synthesized)
aagggaaatatttaattggaaagaacaaggctgttcattcaaattgcatttcctacagatttatccaataatggacaagtcaagccgcacacgtcttgctctcattatctgcaatgaaga

SEQ ID NO: 338798 - DNA, 120 bp, Artificial Sequence
  ENSG00000137752_24 (sequence is synthesized)
aattggaagcatagaaagcagatccagacaagtttatcttccaataatgctcttctttccaaaagagttttggagttctttggagagtggacaaacccaggagcctaatccaatctatta

SEQ ID NO: 338799 - DNA, 120 bp, Artificial Sequence
  ENSG00000137752_25 (sequence is synthesized)
agacccacagccttgagaaaacaatcatttagtttcaccccgctcctgccctgcagagacaaatgaatggactctaatttacctgtgtctctcatggctattagatccagcagcagattt

SEQ ID NO: 338800 - DNA, 120 bp, Artificial Sequence
  ENSG00000137752_26 (sequence is synthesized)
atactttcagtttcagtcacacaagaagggaggagagaaaagccatggccgacaaggtcctgaaggagaagagaaagctgtttatccgttccatgggtgaagataatgtttcttggagac

SEQ ID NO: 338801 - DNA, 120 bp, Artificial Sequence
  ENSG00000137752_27 (sequence is synthesized)
attaacttaaatcacagtcagtaataccactttgggaatgcacatttagatatttcatttccaaatcccaatcactcccctctaccccattccgccttttccttatttgctactaaattt

SEQ ID NO: 338802 - DNA, 120 bp, Artificial Sequence
  ENSG00000137752_28 (sequence is synthesized)
tgtgatgtggaggaaattttccgcaaggaagtgaagagatccttctgtaaaggtttttggaattatgtctgctgaataataaacttttttgaaataataaatctggtagaaaaatgaaaa

SEQ ID NO: 338803 - DNA, 120 bp, Artificial Sequence
  ENSG00000137752_29 (sequence is synthesized)
ggaggagagaaaagccatggccgggactgatgtggaaatggtaaactcagtcttcaggtcactccatgcacatgtatggagactattgagggaaacaagtaggacagcaatacagtaaga

SEQ ID NO: 338804 - DNA, 120 bp, Artificial Sequence
  ENSG00000137752_30 (sequence is synthesized)
agagggattacccaactgtgaggagggggacatttcactgatgaaatctaaatgaggtcactttctgttgattacatgagaggaatatgaggctgttttcatgatgtgagaaatccttgt

SEQ ID NO: 338805 - DNA, 120 bp, Artificial Sequence
  ENSG00000137752_31 (sequence is synthesized)
gccctgaggagggtcattcaatgcttacatacatatatggttatacttgttgcagatggaagtactttttgtttttgtcacttattttgctatatttgttgtagttttttggcataactc

SEQ ID NO: 338806 - DNA, 120 bp, Artificial Sequence
  ENSG00000137757_0 (sequence is synthesized)
agtgctgtacaaagagacagaggctgttagctatggctgaagacagtggcaaaaaaaaaaggcgtaagaattttgaagctatgttcaaaggtatccttcagagtggattggataacttcg

SEQ ID NO: 338807 - DNA, 120 bp, Artificial Sequence
  ENSG00000137757_1 (sequence is synthesized)
tgataaaccacatgctaaagaacaacgtggctggacaaacatctatccagaccctagtacctaatacggatcaaaagtcgaccagtgtaaaaaaagacaaccacaaaaaaaaaacagtta

SEQ ID NO: 338808 - DNA, 120 bp, Artificial Sequence
  ENSG00000137757_2 (sequence is synthesized)
agatgttggaatacctgggcaaagatgttcttcatggtgtttttaattatttggcaaaacacgatgttctgacattgaaggaagaggaaaagaaaaaatattatgataccaaaattgaag

SEQ ID NO: 338809 - DNA, 120 bp, Artificial Sequence
  ENSG00000137757_3 (sequence is synthesized)
acaaggccctgatcttggtagactctttgcgaaagaatcgcgtggctcatcaaatgtttacccaaacacttctcaatatggaccaaaagatcaccagtgtaaaacctcttctgcaaatcg

SEQ ID NO: 338810 - DNA, 120 bp, Artificial Sequence
  ENSG00000137757_4 (sequence is synthesized)
aggctggaccacctgagtcagcagaatctacaaatatactcaaactttgtcctcgtgaagaattcctgagactgtgtaaaaaaaatcatgatgagatctatccaataaaaaagagagagg

SEQ ID NO: 338811 - DNA, 120 bp, Artificial Sequence
  ENSG00000137757_5 (sequence is synthesized)
accgcagacgcctggctctcatcatatgcaatacaaagtttgatcacctgcctgcaaggaatggggctcactatgacatcgtggggatgaaaaggctgcttcaaggcctgggctacactg

SEQ ID NO: 338812 - DNA, 120 bp, Artificial Sequence
  ENSG00000137757_6 (sequence is synthesized)
acgaaaagaatctcacagccagggatatggagtcagtgctgagggcatttgctgccagaccagagcacaagtcctctgacagcacgttcttggtactcatgtctcatggcatcctagagg

SEQ ID NO: 338813 - DNA, 120 bp, Artificial Sequence
  ENSG00000137757_7 (sequence is synthesized)
gaatctgcggaactgcgcataaaaagaaaaaaccggatgtgctgctttatgacaccatcttccagatattcaacaaccgcaactgcctcagtctaaaggacaaacccaaggtcatcattg

SEQ ID NO: 338814 - DNA, 120 bp, Artificial Sequence
  ENSG00000137757_8 (sequence is synthesized)
tccaggcctgcagaggtgaaaaacatggggaactctgggtcagagactctccagcatccttggcactcatctcttcacagtcatctgagaacctggaggcagattctgtttgcaagatcc

SEQ ID NO: 338815 - DNA, 120 bp, Artificial Sequence
  ENSG00000137757_9 (sequence is synthesized)
acgaggagaaggacttcattgctttctgttcttcaacaccacataacgtgtcctggagagaccgcacaaggggctccatcttcattacggaactcatcacatgcttccagaaatattctt

SEQ ID NO: 338816 - DNA, 120 bp, Artificial Sequence
  ENSG00000137757_10 (sequence is synthesized)
gctgctgccacctaatggaaatatttcggaaggtacagaaatcatttgaagttccacaggctaaagcccagatgcccaccatagaacgagcaaccttgacaagagatttctacctctttc

SEQ ID NO: 338817 - DNA, 120 bp, Artificial Sequence
  ENSG00000137757_11 (sequence is synthesized)
ctggcaattgaaaatgaaaccacaggcagcccagccctcctctgtcaacatcaaagagcacatttaccagtatagcttgcatagtcaatatttggtatttcaataaaagtaaagactgta

SEQ ID NO: 338818 - DNA, 120 bp, Artificial Sequence
  ENSG00000137757_12 (sequence is synthesized)
ctgaaaggaaaccacaggcagcccagccctcctctgtcaacatcaaagagcacatttaccagtatagcttgcatagtcaatatttggtatttcaataaaagtaaagactgtatcttttta

SEQ ID NO: 338819 - DNA, 120 bp, Artificial Sequence
  ENSG00000137757_13 (sequence is synthesized)
gttagctatggctgagctttgtctaaagcaagggcaaaactctttaagctgtgcccagagttgaaggagtctttatatttctgatagaagacagtggcaaaaaaaaaaggcgtaagaatt

SEQ ID NO: 338820 - DNA, 120 bp, Artificial Sequence
  ENSG00000137760_0 (sequence is synthesized)
gccttgccagctagggctgagaacctagggaaaggggatggatcccagaggcgcccttggtgcagtctgagtcttcctgtgctcttatttgagcaatccctgcgactcctggacctctgt

SEQ ID NO: 338821 - DNA, 120 bp, Artificial Sequence
  ENSG00000137760_1 (sequence is synthesized)
gtttgctcatgtgaaatattaaaaattctgtagtgcagtcatcccttgttctccatgacatactgcaaagttgctgttccacagatgaagatcttgaaatggaatggctctaaaatagct

SEQ ID NO: 338822 - DNA, 120 bp, Artificial Sequence
  ENSG00000137760_2 (sequence is synthesized)
cctttgaagggcctcagatattctttgttttgttaagccattttgatctgctgcttctgaaaatcaacacctagatcaggccagcatttctaattaacaagctggattattattattatt

SEQ ID NO: 338823 - DNA, 120 bp, Artificial Sequence
  ENSG00000137760_3 (sequence is synthesized)
ttttttacctctcatctctctgctatgctgccagccagcctgcctgcctcactggccttacatcctatttgctatggacagcaaccatcaaagtaattacaaactcagtaaaactgagaa

SEQ ID NO: 338824 - DNA, 120 bp, Artificial Sequence
  ENSG00000137760_4 (sequence is synthesized)
gaagttcttaaggaaacagattaaagccaagcatactttgctgagacatgaaggcattgagacagtatcctatgccactcagagcctggttgttgccaatggtggtttgggtaatggtgt

SEQ ID NO: 338825 - DNA, 120 bp, Artificial Sequence
  ENSG00000137760_5 (sequence is synthesized)
gagtcggaaccagctgctcccggttttagagaaatgtggactggtggatgctctcttaatgccacctaacaagccgtactcatttgcaagatacagaactacagaagaatctaagagagc

SEQ ID NO: 338826 - DNA, 120 bp, Artificial Sequence
  ENSG00000137760_6 (sequence is synthesized)
ctatgttaccctcaatggaaaagaagtagtggatgatttaggacaaaagatcactctgtatttgaattttgtggaaaaagtgcagtggaaggagttgaggcctcaagccttaccaccagg

SEQ ID NO: 338827 - DNA, 120 bp, Artificial Sequence
  ENSG00000137760_7 (sequence is synthesized)
actcatggtagtagaagaaataatttcttctgaggaggagaaaatgcttttggaaagtgttgattggacagaagatacagacaatcaaaactctcaaaaatccttaaaacacagaagagt

SEQ ID NO: 338828 - DNA, 120 bp, Artificial Sequence
  ENSG00000137760_8 (sequence is synthesized)
aaagcattttggttatgagttccactatgagaacaacaatgtagataaagataagccattatctgggggtcttcctgacatttgtgaaagctttttggagaaatggttgaggaaaggtta

SEQ ID NO: 338829 - DNA, 120 bp, Artificial Sequence
  ENSG00000137760_9 (sequence is synthesized)
cattaaacataaacctgatcaaatgaccataaatcagtatgaacctgggcaaggaattcccgctcatattgatacacattccgcttttgaggatgagatcgtttctctcagtttggggtc

SEQ ID NO: 338830 - DNA, 120 bp, Artificial Sequence
  ENSG00000137760_10 (sequence is synthesized)
agatacctttggacccatggaatcacgtgcagaaaatttgatactgttcaagcatctgagagtcttaaaagtggaattatcaccagtgatgttggagacttaactttaagcaagagggga

SEQ ID NO: 338831 - DNA, 120 bp, Artificial Sequence
  ENSG00000137760_11 (sequence is synthesized)
ctacgaacatcatttacatttaggaaagtgaggcaaacaccttgtaactgtagttacccgttggtctgtgatagccagaggaaagagactcccccctcatttccagagagtgataaagaa

SEQ ID NO: 338832 - DNA, 120 bp, Artificial Sequence
  ENSG00000137760_12 (sequence is synthesized)
gcctcacggctggagcaagagtacgtccatcaggtttatgaagagattgctgggcacttcagcagcacaagacataccccttggccgcacattgtggagtttttgaaggctttgccaagt

SEQ ID NO: 338833 - DNA, 120 bp, Artificial Sequence
  ENSG00000137760_13 (sequence is synthesized)
ggttcaatagtggctgatattggatgtggtaatggaaagtatcttggcatcaataaggagttatatatgattggttgtgatcgtagccaaaaccttgtggacatttgtagagagaggcaa

SEQ ID NO: 338834 - DNA, 120 bp, Artificial Sequence
  ENSG00000137760_14 (sequence is synthesized)
tttcaggcttttgtctgtgatgcattggcagtaccagtccgcagtgggtcttgtgatgcctgcatctccattgctgttattcatcattttgcaacagcagagcgtagagtggcagctctc

SEQ ID NO: 338835 - DNA, 120 bp, Artificial Sequence
  ENSG00000137760_15 (sequence is synthesized)
caagaaattgttcgactcctgagaccaggtgggaaggcactcatttatgtctgggcaatggaacaagaatataataagcagaagtccaagtatcttagaggaaacagaaatagccaagga

SEQ ID NO: 338836 - DNA, 120 bp, Artificial Sequence
  ENSG00000137760_16 (sequence is synthesized)
aagaaagaggagatgaacagtgatacctcagtgcagaggtcacttgtggagcaaatgcgtgacatgggcagtcgagactcggcatcttctgtcccccgcattaatgactctcaggaagga

SEQ ID NO: 338837 - DNA, 120 bp, Artificial Sequence
  ENSG00000137760_17 (sequence is synthesized)
ggatgtaattcaaggcaagtttctaattccaagctgcctgttcatgttaacaggacttctttttattctcaagatgtactggttccctggcaccttaagggaaatcctgataaaggcaaa

SEQ ID NO: 338838 - DNA, 120 bp, Artificial Sequence
  ENSG00000137760_18 (sequence is synthesized)
cctgttgagccatttggtcccataggatcccaggacccaagtcctgtgtttcatcgttactaccatgtgttccgtgagggagaactggaaggtgcctgcaggactgtgagtgatgtcaga

SEQ ID NO: 338839 - DNA, 120 bp, Artificial Sequence
  ENSG00000137760_19 (sequence is synthesized)
attctgcaaagctactacgatcaaggaaactggtgtgtgattcttcaaaaggcctgattatttacctgaacacatcatatataaagaagaaatgctcacttaaaaaaaaagagagaataa

SEQ ID NO: 338840 - DNA, 120 bp, Artificial Sequence
  ENSG00000137760_20 (sequence is synthesized)
aaatgtagtgcagttttctccaacatggccgcgcccaggggagatggcgtgcaagtatccgctgcggtgttctggtgctagagtggagaggctggcaaagaagaaggcacacgcatggtg

SEQ ID NO: 338841 - DNA, 120 bp, Artificial Sequence
  ENSG00000137760_21 (sequence is synthesized)
aagtagggattcattaggagacattcaaatgtctcctgttggctgacatcacagatgtggtgttggctcctcctacttccctaggagaggtggtttctaaaagtgattgaagcagtttgt

SEQ ID NO: 338842 - DNA, 120 bp, Artificial Sequence
  ENSG00000137760_22 (sequence is synthesized)
gcagtgtttgtaattcttgggtaagagcccaggattttgaagataatagttttttagtaaagtgctactaaatgtagtaaatcatgtaggattttagggatgtaattatatgttaataca

SEQ ID NO: 338843 - DNA, 120 bp, Artificial Sequence
  ENSG00000137760_23 (sequence is synthesized)
gaaaatagtcctggtcaatagaaaattgtctgaagttttacctatgatttttagctctgtaaaatcatagacaataaccattctatttccatgcctgactagcccagggctggacgtata

SEQ ID NO: 338844 - DNA, 120 bp, Artificial Sequence
  ENSG00000137760_24 (sequence is synthesized)
gcgggtgtccaataacgtttagtcaatcagataatacccagaacttagtaggagtttcattcaaaaactattttttgaacccaaccatgtaccagttactattttaagtactgataatga

SEQ ID NO: 338845 - DNA, 120 bp, Artificial Sequence
  ENSG00000137760_25 (sequence is synthesized)
agcagtgaataagaaagagcaaagctcttgcccttatggtgcttacattctagacggggagacagacagcaggcaaatcaataaatagatactatgtgccagatagtgataaatgccatg

SEQ ID NO: 338846 - DNA, 120 bp, Artificial Sequence
  ENSG00000137760_26 (sequence is synthesized)
aaaaacataaaatgagagacgattcaccttggagcaaaagattacttttaagtgactgaaataactactaatcctgactaatttattatcaagagttaattggtattccaaattcattga

SEQ ID NO: 338847 - DNA, 120 bp, Artificial Sequence
  ENSG00000137760_27 (sequence is synthesized)
gcagggtgctaaaaacaacccaaatgtgctcctttaactcctttgtttaaatgacaaaagttagaatgtggtcactcagacctaactgtgcccttagagccaaagctgtggtgtcattat

SEQ ID NO: 338848 - DNA, 120 bp, Artificial Sequence
  ENSG00000137760_28 (sequence is synthesized)
tggttatttctagttgattcatagtttgtcccaatccaggttcaatcgggttatttttaagatctgtacaatattgcataatagtaacccagttaacttaccacttaggttagatttcct

SEQ ID NO: 338849 - DNA, 120 bp, Artificial Sequence
  ENSG00000137760_29 (sequence is synthesized)
ggaggaacaaaggtagaaattcaaccataggtcaaattatcacatagaaggaaaaggctttttttcaaagaaaaaattttttgaacactttactcccagtatgcattacttttgtagtag

SEQ ID NO: 338850 - DNA, 120 bp, Artificial Sequence
  ENSG00000137760_30 (sequence is synthesized)
taatgcttaagactgttttaaagaaaaattgctttctgtttaattaatgtttactgttattaatgctagtgatacttaatcttgaagcatcaagttttcagaaacctatagtgatcaata

SEQ ID NO: 338851 - DNA, 120 bp, Artificial Sequence
  ENSG00000137760_31 (sequence is synthesized)
atgggtctcagatgagaggatgattatttttttcatggaatttcagtccaacatcctggtgtactggtccctctgggatgaatttataaggctcatgatataggaaaaggaatatagggc

SEQ ID NO: 338852 - DNA, 120 bp, Artificial Sequence
  ENSG00000137760_32 (sequence is synthesized)
taaaaatagttttatttctgatataaattctggtacttgacaccaaagtttgaagtcaagtcatgccaataaattttaacatccaaatgaaatagatgattttctatgaagatgaaaaat

SEQ ID NO: 338853 - DNA, 120 bp, Artificial Sequence
  ENSG00000137760_33 (sequence is synthesized)
accaaaattgactcaagaagggagagaaaatggaagatgttgaaaaatagcataggaattcagaactgggctctagaatcagatttcctgagagttgaattctagatctgccatttatta

SEQ ID NO: 338854 - DNA, 120 bp, Artificial Sequence
  ENSG00000137760_34 (sequence is synthesized)
gctgtgggattttgggcaaatttcttgactttctgtgcttcagttttcttagctgtaaaattggaagagttgttatgaaaattcactgaaagtatatttgtatacatcataggatagtgt

SEQ ID NO: 338855 - DNA, 120 bp, Artificial Sequence
  ENSG00000137760_35 (sequence is synthesized)
aagaatatagtatggctttgagaaatgttcattattattactcccagaggagttttaggtattaagtgatgccaaatataatttgttaattgtataataaaaatctatattcttactgac

SEQ ID NO: 338856 - DNA, 120 bp, Artificial Sequence
  ENSG00000137760_36 (sequence is synthesized)
gtagtgcagttttctccaacatggccgcgcccaggggagatggcgtgcaagtatccgctgcggtgttctggtgctagagtggagaggctggcaaagaagaaggcacacgcatgtttgcta

SEQ ID NO: 338857 - DNA, 120 bp, Artificial Sequence
  ENSG00000137764_0 (sequence is synthesized)
ctaccgccgtcgccgccgccgcagccgccgccagtccgcgcggcctcgggtggccggagctcagcctgcgcgcgccgcgccctgtgtctccgggtggggcagaagactcgccccttgaac

SEQ ID NO: 338858 - DNA, 120 bp, Artificial Sequence
  ENSG00000137764_1 (sequence is synthesized)
gggcagaagactcgccccttgaacctcccgcggggactctccgtggtgtggcggccctggggctctttcttaatagccccggactgagtcccctccagtcgaggaccctctcctagtcca

SEQ ID NO: 338859 - DNA, 120 bp, Artificial Sequence
  ENSG00000137764_2 (sequence is synthesized)
ctgacgagcggtggacacctgccgctgtatctcccccaaaccgagtccttgccctgctgcctcctcatacccacacggcggcagagaccttcaccatagcgttcgctcaactccagaacc

SEQ ID NO: 338860 - DNA, 120 bp, Artificial Sequence
  ENSG00000137764_3 (sequence is synthesized)
ttccgacctccgctagttcctgcgggcctttgcccgcttcccggtgcaccctccccgggagacacctcagacccccgacagcctgggcaggctcggtgcctgcgggtgcgttcctgatca

SEQ ID NO: 338861 - DNA, 120 bp, Artificial Sequence
  ENSG00000137764_4 (sequence is synthesized)
cccctcccctcttccctccccctcatcctccattcccttgttttcaccctctgtcctctgcccgtcactccccttgtcacctcttggagccccctcctaaccagcggccagtgggtttcc

SEQ ID NO: 338862 - DNA, 120 bp, Artificial Sequence
  ENSG00000137764_5 (sequence is synthesized)
cataccccaggatgtgagcctctttaacctgtaatgctgtggctagcccttggcccctttcctgccatggagaaccaggtgctggtaattcgcatcaagatcccaaatagtggcgcggtg

SEQ ID NO: 338863 - DNA, 120 bp, Artificial Sequence
  ENSG00000137764_6 (sequence is synthesized)
gactggacagtgcactccgggccgcagttactcttcagggatgtgctggatgtgataggccaggttctgcctgaagcaacaactacagcatttgaatatgaagatgaagatggtgatcga

SEQ ID NO: 338864 - DNA, 120 bp, Artificial Sequence
  ENSG00000137764_7 (sequence is synthesized)
attacagtgagaagtgatgaggaaatgaaggcaatgctgtcatattattattccacagtaatggaacagcaagtaaatggacagttaatagagcctctgcagatatttccaagagcctgc

SEQ ID NO: 338865 - DNA, 120 bp, Artificial Sequence
  ENSG00000137764_8 (sequence is synthesized)
aagcctcctggggaacggaacatacatggcctgaaggtgaatactcgggccggaccctctcaacacagcagcccagcagtctcagattcacttccaagcaatagcttaaagaagtcttct

SEQ ID NO: 338866 - DNA, 120 bp, Artificial Sequence
  ENSG00000137764_9 (sequence is synthesized)
ctcttggtcatggcaacggaggcacagtctacaaagcatatcatgtcccgagtgggaaaatattagctgtaaaggtcatactactagatattacactggaacttcagaagcaaattatgt

SEQ ID NO: 338867 - DNA, 120 bp, Artificial Sequence
  ENSG00000137764_10 (sequence is synthesized)
ctgaattggaaattctttataagtgcgattcatcatatatcattggattttatggagcattttttgtagaaaacaggatttcaatatgtacagaattcatggatgggggatctttggatg

SEQ ID NO: 338868 - DNA, 120 bp, Artificial Sequence
  ENSG00000137764_11 (sequence is synthesized)
tatataggaaaatgccagaacatgtccttggaagaattgcagtagcagttgttaaaggccttacttatttgtggagtttaaagattttacatagagacgtgaagccctccaatatgctag

SEQ ID NO: 338869 - DNA, 120 bp, Artificial Sequence
  ENSG00000137764_12 (sequence is synthesized)
taaacacaagaggacaggttaagctgtgtgattttggagttagcactcagctggtgaattctatagccaagacgtatgttggaacaaatgcttatatggcgcctgaaaggatttcagggg

SEQ ID NO: 338870 - DNA, 120 bp, Artificial Sequence
  ENSG00000137764_13 (sequence is synthesized)
agcagtatggaattcattctgatgtctggagcttaggaatctcttttatggagcttgctcttgggaggtttccatatcctcagattcagaaaaaccagggatctttaatgcctctccagc

SEQ ID NO: 338871 - DNA, 120 bp, Artificial Sequence
  ENSG00000137764_14 (sequence is synthesized)
ttctgcagtgcattgttgatgaggattcgcccgtccttccagttggagagttctcggagccatttgtacatttcatcactcagtgtatgcgaaaacagccaaaagaaaggccagcacctg

SEQ ID NO: 338872 - DNA, 120 bp, Artificial Sequence
  ENSG00000137764_15 (sequence is synthesized)
aagaattgatgggccacccgttcatcgtgcagttcaatgatggaaatgccgccgtggtgtccatgtgggtgtgccgggcgctggaggagaggcggagccagcaggggcccccgtgaggct

SEQ ID NO: 338873 - DNA, 120 bp, Artificial Sequence
  ENSG00000137764_16 (sequence is synthesized)
gccgcagggcactgaaagcccaggaccagtaaccaaggagaacaacccacccgtcgcccttctccgtatgctgcctgcgccagaagagctttgctgggccctggcttccctgccctcgcc

SEQ ID NO: 338874 - DNA, 120 bp, Artificial Sequence
  ENSG00000137764_17 (sequence is synthesized)
ttcacctctgtcagcaggtggccttgcctggggagccccatgtgtggcccaccccaccaggccatccccataccttctggtttgaaggcgctgacactggcagagaggtaaagggtgggg

SEQ ID NO: 338875 - DNA, 120 bp, Artificial Sequence
  ENSG00000137764_18 (sequence is synthesized)
cattgagaatggaggctcccagggtccctgcccacttctgttttcctaatgtttttctctataaagggtcaggcccgtcagcatcactgatgggaataaaagtattaatgctttgtgaca

SEQ ID NO: 338876 - DNA, 120 bp, Artificial Sequence
  ENSG00000137764_19 (sequence is synthesized)
accacaaaagcacctgcagaaactatggattatcaatttatttattagtaattagtcatggtaatgagaaatcaagttgtgttttgaggttgattttttaaaacagctttattgatatat

SEQ ID NO: 338877 - DNA, 120 bp, Artificial Sequence
  ENSG00000137764_20 (sequence is synthesized)
aatttgcatgccataaaattcatctactcaattcagtgatttttagtaagtttataaagttgtgcaaccataaccataatccagttttagaacattttcatcaccccaaaaaagtgtcct

SEQ ID NO: 338878 - DNA, 120 bp, Artificial Sequence
  ENSG00000137764_21 (sequence is synthesized)
atgcaaacctttaactgcctgtattagattaggtaccattagaaataatagaacctcctgagcatcaatgtttttataagagtttgctgttgttgattaatcttgctatattttattgca

SEQ ID NO: 338879 - DNA, 120 bp, Artificial Sequence
  ENSG00000137764_22 (sequence is synthesized)
ttaatgattttttctttccactccactgtaaagatattgcatagaggctaatactttttcctctcttcttttccattgcagcctctccagcttctgcagtgcattgttgatgaggattcg

SEQ ID NO: 338880 - DNA, 120 bp, Artificial Sequence
  ENSG00000137764_23 (sequence is synthesized)
gagcccgtttacaaacatgccatgccctcaatgtaaatgatacatgccattaactcggcagctccgtgagaccttatggctctccctgcatccttttggagacaggagggacttcggggc

SEQ ID NO: 338881 - DNA, 120 bp, Artificial Sequence
  ENSG00000137764_24 (sequence is synthesized)
cttgggcagatggggcagcaaagctgaagaaattgtttaaattatgtaaacgttatttacacaaagggtcataagcatacttcagagcctttttcctgatttaataaactgctgaaagtc

SEQ ID NO: 338882 - DNA, 120 bp, Artificial Sequence
  ENSG00000137764_25 (sequence is synthesized)
gaattgcagtagcaaccagcccacccaacatcacaacatagtcacacgcttatgtgctccaacctgttctagtttcatgtgtttgcagggaccttggtattcttgttgactcgtaaaatt

SEQ ID NO: 338883 - DNA, 120 bp, Artificial Sequence
  ENSG00000137764_26 (sequence is synthesized)
tccaacttcttctgaaaaaaaaatgctgttttttgttttgtttttacattttgtagttatgattagcatatgattagcaaatacttaaaaagtctgagttgttaaagcagtctatgagaa

SEQ ID NO: 338884 - DNA, 120 bp, Artificial Sequence
  ENSG00000137764_27 (sequence is synthesized)
aatattaatttattaagaacaaagtagtattagtaaagattttttgcagtctttttatgttcttggtttttaattttttcatcaactacatctagaaatttattccctttgtgatttaaa

SEQ ID NO: 338885 - DNA, 120 bp, Artificial Sequence
  ENSG00000137764_28 (sequence is synthesized)
ttgtgatttaaagcagttttcccatattcttgtattttctatatgcactaatatactgatgaaatatataaactaaactaacattactataatgttctcataagttccatatttcacatt

SEQ ID NO: 338886 - DNA, 120 bp, Artificial Sequence
  ENSG00000137764_29 (sequence is synthesized)
ggttaaacagtgtctaagagaagtcatggggtggtgtgatagtaaacaattgctaaactaaaggcacgatgataacttcagtggtttaatgcagaacaaagtgattgtaccatgtaccat

SEQ ID NO: 338887 - DNA, 120 bp, Artificial Sequence
  ENSG00000137764_30 (sequence is synthesized)
actggaagcacggcacatttcagaaagcttcctagaagtgctggtatctaagttaagttttgatgaatgggttagatttggagggcagtgttccaacaggagcagcagcatgtacagagg

SEQ ID NO: 338888 - DNA, 120 bp, Artificial Sequence
  ENSG00000137764_31 (sequence is synthesized)
gcagactcctgtgatctgttctccaggtttacttcatctcttcatcaagaaaaggcaagaaccaagagacacgtcagcatctctggcttggaaccttaaactttaaagtcacgtggaacc

SEQ ID NO: 338889 - DNA, 120 bp, Artificial Sequence
  ENSG00000137764_32 (sequence is synthesized)
atgccagaagcaggttgtagtcaccgagtcagccataactgagtgtctcggacctgaagtcagcagttgagggctccagtcactgtgcatcaaatagctgggagaccctgggcaagtcag

SEQ ID NO: 338890 - DNA, 120 bp, Artificial Sequence
  ENSG00000137764_33 (sequence is synthesized)
tcggtctctctgggccttgtcttttgtctgaatcatcagggactggctgaactatggaggctgacctgaccctcaaaggatgtgataggccaggttctgcctgaagcaacaactacagca

SEQ ID NO: 338891 - DNA, 120 bp, Artificial Sequence
  ENSG00000137764_34 (sequence is synthesized)
attcccactttgggtcttgggagccacttttcaatcatttctctctgctaattttggtgtcaccctcatttctttttaaacgattcattttgagcaaatttgtaaatggccctgatgtgt

SEQ ID NO: 338892 - DNA, 120 bp, Artificial Sequence
  ENSG00000137764_35 (sequence is synthesized)
aaactgaatcacctgcagggtctgacgcctgcatggaatgatgagggaaatttaattttccaagcaaagtgtgaagtgtgtgccactccagcaaataaacgaagtcatccatgacagctt

SEQ ID NO: 338893 - DNA, 120 bp, Artificial Sequence
  ENSG00000137764_36 (sequence is synthesized)
gtgatgaattgccgtatttatactgtatattttaatagcctcacactaatttaaattgagcacagagtaaattataattcagtcacttgactgcttatatttaacttgacaactcatcct

SEQ ID NO: 338894 - DNA, 120 bp, Artificial Sequence
  ENSG00000137764_37 (sequence is synthesized)
tatttgtcctggaggtgtagtggagagcagtggaaatgcaccaaggagatgagggatgcatgctcaaggcagaatgtacatattgagggccagagctagagatgaattttgatggaggac

SEQ ID NO: 338895 - DNA, 120 bp, Artificial Sequence
  ENSG00000137764_38 (sequence is synthesized)
gaagttgcagccactctgctaagtgccctgcttggaaaggctgtgggctccctgctgagaaatactgcgagcggctttgtcagccggctgcctggtgccagttctgctgcagcctgggag

SEQ ID NO: 338896 - DNA, 120 bp, Artificial Sequence
  ENSG00000137764_39 (sequence is synthesized)
ggacactgtggcagagctcctggagagaaatgaggtttgcaggccattggagttggactggacatgatggagggtcactttccccagagcgatgtgataggccaggttctgcctgaagca

SEQ ID NO: 338897 - DNA, 120 bp, Artificial Sequence
  ENSG00000137764_40 (sequence is synthesized)
cagtatggaattcattctgatgtctggagcttaggaatctcttttatggagcctctccagcttctgcagtgcattgttgatgaggattcgcccgtccttccagttggagagttctcggag

SEQ ID NO: 338898 - DNA, 120 bp, Artificial Sequence
  ENSG00000137766_0 (sequence is synthesized)
atggtggctaattttttcaagagcttgattttaccttacattcataagctttgcaaaggaatgtttacaaagaaattgggaaatacaaacaaaaacaaagagtatcgtcagcagaaaaag

SEQ ID NO: 338899 - DNA, 120 bp, Artificial Sequence
  ENSG00000137766_1 (sequence is synthesized)
gatcaagacttccccactgctggccagaccaaatcccccaaattttcttacacttttaaaagcactgtaaagaagattgcaaagtgttcatccactcacaacttatccactgaggaagac

SEQ ID NO: 338900 - DNA, 120 bp, Artificial Sequence
  ENSG00000137766_2 (sequence is synthesized)
gaggccagtaaagagttttccctctcaccaacattcagttaccgagtagctattgccaatggcctacaaaagaatgctaaagtaaccaacagtgataatgaggatctgcttcaagagctc

SEQ ID NO: 338901 - DNA, 120 bp, Artificial Sequence
  ENSG00000137766_3 (sequence is synthesized)
tcttcaatcgagagttcctactcagaatcattaaatgaactaaggagtagcacagaaaaccaggcacaatcaacacacacaatgccagttagacgcaacagaaagagttcaagcagcctt

SEQ ID NO: 338902 - DNA, 120 bp, Artificial Sequence
  ENSG00000137766_4 (sequence is synthesized)
gcaccctctgagggcagctctgacggggagcgtactctacatggcttaaaactgggagctttacgaaaactgagaaaatggaaaaagagtcaagaatgtgtctcctcagactcagagtta

SEQ ID NO: 338903 - DNA, 120 bp, Artificial Sequence
  ENSG00000137766_5 (sequence is synthesized)
agcaccatgaaaaaatcctggggaataagaagtaagtctttggacagaactgtccgaaacccaaagacaaatgccctggagccagggttcagttcctctggctgcattagccaaacacat

SEQ ID NO: 338904 - DNA, 120 bp, Artificial Sequence
  ENSG00000137766_6 (sequence is synthesized)
gatgtcatggaaatgatctttaaggaacttcagggaataagtcagattgaaacagaactttctgaactacgagggcacgtcaatgctctcaagcactccatcgatgagatctccagcagt

SEQ ID NO: 338905 - DNA, 120 bp, Artificial Sequence
  ENSG00000137766_7 (sequence is synthesized)
gtggaggttgtacaaagtgaaattgagcagttgcgcacagggtttgtccagtctcggagggaaactagagacatccatgattatattaagcacttaggtcatatgggtagcaaggcaagc

SEQ ID NO: 338906 - DNA, 120 bp, Artificial Sequence
  ENSG00000137766_8 (sequence is synthesized)
ctgagatttttaaatgtgactgaagaaagatttgaatatgttgaaagcgtggtgtaccaaattctaatagataaaatgggtttttcagatgcaccaaatgctattaaaattgaatttgct

SEQ ID NO: 338907 - DNA, 120 bp, Artificial Sequence
  ENSG00000137766_9 (sequence is synthesized)
cagaggataggacaccagagagactgcccaaatgcaaagcctcgacccatacttgtgtactttgaaacccctcaacaaagggattctgtcttaaaaaagtcatataaactcaaaggaaca

SEQ ID NO: 338908 - DNA, 120 bp, Artificial Sequence
  ENSG00000137766_10 (sequence is synthesized)
ggcattggaatctcaacagatattctaactcatgacatcagagaaagaaaagagaaagggataccatcctcccagacatatgagagcatggctataaagttgtctactccagagccaaaa

SEQ ID NO: 338909 - DNA, 120 bp, Artificial Sequence
  ENSG00000137766_11 (sequence is synthesized)
atcaagaagaacaattggcagtcacctgatgacagtgatgaagatcttgaatctgacctcaatagaaacagttacgctgtgctttccaagtcagagcttctaacaaagggaagtacttcc

SEQ ID NO: 338910 - DNA, 120 bp, Artificial Sequence
  ENSG00000137766_12 (sequence is synthesized)
aagccaagctcaaaatcacacagtgctagatccaagaataaaactgctaatagcagcagaatttcaaataaatcagattatgataaaatctcctcacagttgccagaatcagatatcttg

SEQ ID NO: 338911 - DNA, 120 bp, Artificial Sequence
  ENSG00000137766_13 (sequence is synthesized)
gaaaagcaaaccacaacccattatgcagatgcaacacctctctggcactcacagagtgattttttcactgctaaacttagtcgttctgaatcagatttttccaaattgtgtcagtcttac

SEQ ID NO: 338912 - DNA, 120 bp, Artificial Sequence
  ENSG00000137766_14 (sequence is synthesized)
tcagaagatttttcagaaaatcagtttttcactagaactaatggaagctctctcctgtcatcttcggaccgggagctatggcagaggaaacaggaaggaacagcgaccctgtatgacagt

SEQ ID NO: 338913 - DNA, 120 bp, Artificial Sequence
  ENSG00000137766_15 (sequence is synthesized)
cccaaggaccagcatttgaatggaggtgttcagggtatccaagggcagactgaaactgaaaacacagaaactgtggatagtggaatgagtaatggcatggtgtgtgcatctggagaccgg

SEQ ID NO: 338914 - DNA, 120 bp, Artificial Sequence
  ENSG00000137766_16 (sequence is synthesized)
agtcattacagtgattctcagctctctttacatgaggatctttctccatggaaggaatggaatcaaggagctgatttaggcttggattcatccacccaggaaggttttgattatgaaaca

SEQ ID NO: 338915 - DNA, 120 bp, Artificial Sequence
  ENSG00000137766_17 (sequence is synthesized)
aacagtctttttgaccaacagcttgatgtttacaataaagacctagaatacttgggaaagtgccacagtgatcttcaagatgactcagagagctacgacttaactcaagatgacaattct

SEQ ID NO: 338916 - DNA, 120 bp, Artificial Sequence
  ENSG00000137766_18 (sequence is synthesized)
tctccatgccctggcttggataatgaaccacaaggccagtgggttggccaatatgattcttatcagggagctaattctaatgagctataccaaaatcaaaaccagttgtccatgatgtat

SEQ ID NO: 338917 - DNA, 120 bp, Artificial Sequence
  ENSG00000137766_19 (sequence is synthesized)
cgaagtcaaagtgaattgcaaagtgatgattcagaggatgccccacccaaatcatggcatagtcgattaagcattgacctttctgataagactttcagcttcccaaaatttggatctaca

SEQ ID NO: 338918 - DNA, 120 bp, Artificial Sequence
  ENSG00000137766_20 (sequence is synthesized)
ctgcagagggctaaatcagccttggaagtagtatggaacaaaagcacacagagtctgagtgggtatgaggacagtggctcttcattaatggggagatttcggacattatctcaatcaact

SEQ ID NO: 338919 - DNA, 120 bp, Artificial Sequence
  ENSG00000137766_21 (sequence is synthesized)
gcaaatgagtcaagtaccacacttgactctgatgtctacacggagccctattactataaagcagaggatgaggaagattatactgaaccagtggctgacaatgaaacagattatgttgaa

SEQ ID NO: 338920 - DNA, 120 bp, Artificial Sequence
  ENSG00000137766_22 (sequence is synthesized)
gtcatggaacaagtccttgctaaactagaaaacaggactagtattactgaaacagatgaacaaatgcaagcatatgatcacctttcatatgaaacaccttatgaaaccccacaagatgag

SEQ ID NO: 338921 - DNA, 120 bp, Artificial Sequence
  ENSG00000137766_23 (sequence is synthesized)
ggttatgatggtccagcagatgatatggttagtgaagaggggttagaacccttaaatgaaacatcagctgagatggaaataagagaagatgaaaaccaaaacattcctgaacagccagtg

SEQ ID NO: 338922 - DNA, 120 bp, Artificial Sequence
  ENSG00000137766_24 (sequence is synthesized)
gagatcacaaagccaaagagaattcgtccttctttcaaagaagcagctttaagggcctataaaaagcaaatggcagagttggaagagaagatcttggctggagatagcagttctgtggat

SEQ ID NO: 338923 - DNA, 120 bp, Artificial Sequence
  ENSG00000137766_25 (sequence is synthesized)
gaaaaggctcgaatagtaagtggcaatgatttggatgcttccaaattttctgcactccaggtgtgtggtggggctggaggtggactttatggtattgacagcatgccggatcttcgcaga

SEQ ID NO: 338924 - DNA, 120 bp, Artificial Sequence
  ENSG00000137766_26 (sequence is synthesized)
aaaaaaactttgcctattgtccgagatgtggccatgaccctggctgcccggaaatctggactctccctggctatggtgattaggacatccctaaataatgaggaactgaaaatgcacgtc

SEQ ID NO: 338925 - DNA, 120 bp, Artificial Sequence
  ENSG00000137766_27 (sequence is synthesized)
ttcaagaagaccttgcaggcactgatctaccctatgtcttctaccatcccacacaattttgaggtctggacggctaccacacccacctactgttatgagtgtgaagggctcctgtggggc

SEQ ID NO: 338926 - DNA, 120 bp, Artificial Sequence
  ENSG00000137766_28 (sequence is synthesized)
attgcaaggcaaggcatgaagtgtctggagtgtggagtgaaatgccacgaaaagtgtcaggacctgctaaacgctgactgcttgcagagagcagcagaaaagagttctaaacatggtgcc

SEQ ID NO: 338927 - DNA, 120 bp, Artificial Sequence
  ENSG00000137766_29 (sequence is synthesized)
gaagacaagactcagaccattattacagcaatgaaagaaagaatgaagatcagggagaaaaaccggccagaagtatttgaagtaatccaggaaatgtttcagatttctaaagaagatttt

SEQ ID NO: 338928 - DNA, 120 bp, Artificial Sequence
  ENSG00000137766_30 (sequence is synthesized)
gtgcagtttacaaaggcggccaaacagagtgtactggatgggacatctaagtggtctgcaaaaataaccattacagtggtttctgcacagggtctacaggcaaaagataaaacagggtct

SEQ ID NO: 338929 - DNA, 120 bp, Artificial Sequence
  ENSG00000137766_31 (sequence is synthesized)
agtgatccatatgttacagttcaagttggaaagaacaaaagaagaacaaaaaccatttttggaaatttgaatccagtatgggatgagaagttttattttgagtgtcataactccacagat

SEQ ID NO: 338930 - DNA, 120 bp, Artificial Sequence
  ENSG00000137766_32 (sequence is synthesized)
cgaatcaaagtcagagtatgggatgaagatgatgatattaaatccagagtcaagcaacatttcaaaaaggagtcagatgattttctgggacaaacaattgtagaagtgaggaccttgagt

SEQ ID NO: 338931 - DNA, 120 bp, Artificial Sequence
  ENSG00000137766_33 (sequence is synthesized)
ggagaaatggatgtctggtacaacttagagaaaaggacagataagtcagctgtatctggggccatacgattgaaaatcaatgtggagataaaaggagaagagaaggttgctccatatcat

SEQ ID NO: 338932 - DNA, 120 bp, Artificial Sequence
  ENSG00000137766_34 (sequence is synthesized)
attcaatatacatgtttacatgagaatctgttccattacttgactgaagtgaaatctaatggtggagtgaaaatcccagaagtcaaaggggatgaagcctggaaggttttctttgatgat

SEQ ID NO: 338933 - DNA, 120 bp, Artificial Sequence
  ENSG00000137766_35 (sequence is synthesized)
gcttcccaagaaatagttgatgaatttgctatgcgttatggaattgaatccatttatcaagctatgacgcacttttcatgtctgtcttctaaatacatgtgccccggtgtccctgccgtc

SEQ ID NO: 338934 - DNA, 120 bp, Artificial Sequence
  ENSG00000137766_36 (sequence is synthesized)
atgagcaccttgctggctaatataaatgctttttatgctcacacaacagtttcaacaaacatacaggtttctgcctcagatcgatttgctgctaccaactttggtagggaaaaattcata

SEQ ID NO: 338935 - DNA, 120 bp, Artificial Sequence
  ENSG00000137766_37 (sequence is synthesized)
aaactactggaccagttacataactctttgaggattgatctgtcaaagtatagggaaaactttcctgcaagcaatactgaaagactgcaagacctgaaatcaactgttgacctgttaaca

SEQ ID NO: 338936 - DNA, 120 bp, Artificial Sequence
  ENSG00000137766_38 (sequence is synthesized)
agtatcaccttttttaggatgaaggttctggagctgcaaagccccccaaaagcgagcatggtggtgaaggactgtgtaagggcttgcctggattctacatacaagtatatttttgacaac

SEQ ID NO: 338937 - DNA, 120 bp, Artificial Sequence
  ENSG00000137766_39 (sequence is synthesized)
tgccatgaactctactcccagctaacagacccgagtaagaaacaggatattcctcgtgaagatcagggaccaaccaccaagaatttggatttttggccccaacttattacactgatggtt

SEQ ID NO: 338938 - DNA, 120 bp, Artificial Sequence
  ENSG00000137766_40 (sequence is synthesized)
actattattgatgaggataaaactgcctacacacctgtcctgaatcagtttcctcaagagctgaacatgggaaaaataagtgccgaaattatgtggactctttttgctctggatatgaaa

SEQ ID NO: 338939 - DNA, 120 bp, Artificial Sequence
  ENSG00000137766_41 (sequence is synthesized)
tatgcattagaagaacatgaaaatcagcggttatgcaagagcaccgattatatgaatttgcatttcaaagttaaatggttttataatgaatatgtgcgtgaacttcctgccttcaaggat

SEQ ID NO: 338940 - DNA, 120 bp, Artificial Sequence
  ENSG00000137766_42 (sequence is synthesized)
gctgttcctgaatactccttgtggtttgaaccttttgtcatgcaatggctagatgaaaacgaagatgtgtcaatggaattccttcatggagcactgggaagagacaaaaaagatggattc

SEQ ID NO: 338941 - DNA, 120 bp, Artificial Sequence
  ENSG00000137766_43 (sequence is synthesized)
cagcagacatctgagcatgctctcttttcttgctccgtggttgatgtctttgctcagctgaatcagagctttgaaattattaagaaactggaatgccctaatcctgaagcattatctcac

SEQ ID NO: 338942 - DNA, 120 bp, Artificial Sequence
  ENSG00000137766_44 (sequence is synthesized)
ttaatgagaagatttgcaaagactatcaataaagtgctgctccagtatgctgcaattgtatcaagtgatttcagttcacattgtgataaggaaaatgtgccctgtatcttgatgaacaat

SEQ ID NO: 338943 - DNA, 120 bp, Artificial Sequence
  ENSG00000137766_45 (sequence is synthesized)
attcaacaattgcgggtccagctggaaaaaatgtttgaatccatgggagggaaggagctagattctgaagctagtactattctaaaagaacttcaggttaagctcagtggggtcctggat

SEQ ID NO: 338944 - DNA, 120 bp, Artificial Sequence
  ENSG00000137766_46 (sequence is synthesized)
gagctcagcgtcacttatggtgaaagtttccaggttataattgaagagtgtataaaacagatgagtttcgaactaaatcaaatgagagcaaatggaaacaccacatctaataagaacagt

SEQ ID NO: 338945 - DNA, 120 bp, Artificial Sequence
  ENSG00000137766_47 (sequence is synthesized)
gcagcaatggatgcagagattgtgttaagatctcttatggattttttggacaaaacattaagtctctcagcaaaaatctgtgagaaaacagtcctaaagcgagttttaaaagagttatgg

SEQ ID NO: 338946 - DNA, 120 bp, Artificial Sequence
  ENSG00000137766_48 (sequence is synthesized)
aagctagttctcaacaaaatagaaaaacaaattgttcttcctcctctgacagatcaaacaggaccccagatgattttcattgcagctaaagatcttggacaattatccaaactgaaggag

SEQ ID NO: 338947 - DNA, 120 bp, Artificial Sequence
  ENSG00000137766_49 (sequence is synthesized)
cacatgattcgagaggatgccaggggtctgacgccaagacaatgcgctataatggaggtagtcctggctaccatcaagcaatactttcatgcaggaggaaatggcctgaaaaagaatttc

SEQ ID NO: 338948 - DNA, 120 bp, Artificial Sequence
  ENSG00000137766_50 (sequence is synthesized)
ttggagaaaagcccagatcttcagtctctgagatatgctctcagtctttatacccaaactactgatgccttgataaagaaattcatagatactcaaacctcacagagtcgttcctccaaa

SEQ ID NO: 338949 - DNA, 120 bp, Artificial Sequence
  ENSG00000137766_51 (sequence is synthesized)
gatgccgtgggtcagatatctgttcatgtggacatcactgccaccccaggaacgggagatcataaagtcactgtaaaagtgattgctattaatgacctaaactggcagaccacagcaatg

SEQ ID NO: 338950 - DNA, 120 bp, Artificial Sequence
  ENSG00000137766_52 (sequence is synthesized)
ttccgcccctttgtggaagtttgtatactgggacccaaccttggagacaagaagagaaaacaaggcacaaaaacaaaaagcaacacatggtcaccaaagtacaatgaaacatttcagttc

SEQ ID NO: 338951 - DNA, 120 bp, Artificial Sequence
  ENSG00000137766_53 (sequence is synthesized)
tacagaacatagcagaaaagggaagctatggggcatggtatcctcttctgaaaaatatctctatggatgaaactggtttgactatccttagaatactctctcagaggaccagtgatgatg

SEQ ID NO: 338952 - DNA, 120 bp, Artificial Sequence
  ENSG00000137766_54 (sequence is synthesized)
tggctaaagaatttgtaagacttaaatctgaaacaagatctactgaagagagtgcttgaaacaaacactgcaagctaaatacataactataattgtttgactactgcatgcatgtgcaaa

SEQ ID NO: 338953 - DNA, 120 bp, Artificial Sequence
  ENSG00000137766_55 (sequence is synthesized)
tacatgggaatgtttagttcactacatttcaatgtttgccagtactcatgtacgatgtctacaaggtatgtaaaaaacctgctgaacttttataccaattctggtctttgggaaatcagt

SEQ ID NO: 338954 - DNA, 120 bp, Artificial Sequence
  ENSG00000137766_56 (sequence is synthesized)
gttccatgaagtgccaaaattatgatgtaaagtgaaatatcaagaacaccttttaacatgtttattttgtttctttacccatttcacattcattaaacataatttttaaaaactagtctt

SEQ ID NO: 338955 - DNA, 120 bp, Artificial Sequence
  ENSG00000137766_57 (sequence is synthesized)
ttgagtttgcccatcagttgtctttgttaaatgagattatattgcccatagatcagaaaacatttattactcaatttccattttatttacttacctcattatagatgtcttacaaatacc

SEQ ID NO: 338956 - DNA, 120 bp, Artificial Sequence
  ENSG00000137766_58 (sequence is synthesized)
cttttctaccataactagaaatgcagtcacttctagaaagcatttgtaattttatagtcgcagatattgtgatttttgcatacacattaaaatagaaaaggtgggaaatattttctgctg

SEQ ID NO: 338957 - DNA, 120 bp, Artificial Sequence
  ENSG00000137766_59 (sequence is synthesized)
accagtttccaacctttctgaaatatcactgtgaagaaatgctgttaaagcaaacttacataaagcaatgctagagtttgttaacaatgtttgatatatattgacaaaactttgttctct

SEQ ID NO: 338958 - DNA, 120 bp, Artificial Sequence
  ENSG00000137766_60 (sequence is synthesized)
aaaactgccaagatcacatcacatttgtaaaaatggtaagttaatgcatttgtcatatagtgttatgtcttggctttaccatatttcattctttaaaaagtcattaatggtttagaaatg

SEQ ID NO: 338959 - DNA, 120 bp, Artificial Sequence
  ENSG00000137766_61 (sequence is synthesized)
ggatggaaagtttactgaaaatacctgtaagtaactatattgttaatatcttccctctgacagttatgactctataatcagttcaatgctttatttttaaaaatattcaatgattagtat

SEQ ID NO: 338960 - DNA, 120 bp, Artificial Sequence
  ENSG00000137766_62 (sequence is synthesized)
tgaatgcagcattactatatattgtactgatgccaaaagtcatgttttcatccacttagtgaaaaaatagtaaaattaagtcggaagaaattgcttaaaattttgtaatttgtatttata

SEQ ID NO: 338961 - DNA, 120 bp, Artificial Sequence
  ENSG00000137766_63 (sequence is synthesized)
agccccaaatgcatcaaatgcagtaggagaacaatgtaatacagcttggtacctaaaaatatagctaagttggtttttgaatataaaacagtttatgaatatgtgcattttctgtattgt

SEQ ID NO: 338962 - DNA, 120 bp, Artificial Sequence
  ENSG00000137766_64 (sequence is synthesized)
tatgatttgactttttagagtctatgccaaaatatatggctgtaaaacagtactttgtaattataacttatggtcataactgttagtggactacttacagaagcagaaacaagagcctgt

SEQ ID NO: 338963 - DNA, 120 bp, Artificial Sequence
  ENSG00000137766_65 (sequence is synthesized)
tatgattgtgctttgtgaacaagctgatctaatacgttaagtacagaagtgcttagtatcatgactgtcagaaccattctgcaactgagtatgaaatcacagaccagtgaggtgagctaa

SEQ ID NO: 338964 - DNA, 120 bp, Artificial Sequence
  ENSG00000137766_66 (sequence is synthesized)
ttcatgttaaactgttaggccactgctttgttaatgactcctctaaatgcatagtgtgatgcgatcctctggcatatgctttaataaatggatgtatattgagcacatgcagcattgtat

SEQ ID NO: 338965 - DNA, 120 bp, Artificial Sequence
  ENSG00000137766_67 (sequence is synthesized)
tgtatcttctgcctttttatttcatttatgcaatatcatctcatttaggaataaaaactccaggctcttttgaccatatgtaatagtcttcatattatttggttctaacatctcattaaa

SEQ ID NO: 338966 - DNA, 120 bp, Artificial Sequence
  ENSG00000137766_68 (sequence is synthesized)
aaaaataacagatgctggcgaggttgtgaagaaaaatgtttgtttgtttatacactgctggtgggagtgtaaattacttcaattattgtagaaagcagtgtggtgattcctcaaagacct

SEQ ID NO: 338967 - DNA, 120 bp, Artificial Sequence
  ENSG00000137766_69 (sequence is synthesized)
attgtagaaagcagtgtggtgattcctcaaagacctacaaacagaattaccattcgactaagcaatcccattactgagtacacagccaaaggaatatcaaacaaacattctaccataaac

SEQ ID NO: 338968 - DNA, 120 bp, Artificial Sequence
  ENSG00000137766_70 (sequence is synthesized)
ccataaacacatatgcacgtatatgtccactgcagcactattcacaatagcaaacacatggaaccatcctaaatgcccatcaacagtagaccagataaagaaaatgtggtacatatacac

SEQ ID NO: 338969 - DNA, 120 bp, Artificial Sequence
  ENSG00000137766_71 (sequence is synthesized)
actatgcaggcataaaaagaatgagaccatgtccttcacagtgacatggatggagctggaggccattacctgaagcaaactaacacaggaatagaaaacgaaatactacatgtttgttat

SEQ ID NO: 338970 - DNA, 120 bp, Artificial Sequence
  ENSG00000137766_72 (sequence is synthesized)
cacaagtggaagctaaacgatgaggacacatggacactaagggggcaacaacagacactgtggcctacttgagggtaggaggagggaaaagataagaaaaagtatctgtcacgctacgaa

SEQ ID NO: 338971 - DNA, 120 bp, Artificial Sequence
  ENSG00000137766_73 (sequence is synthesized)
gcttactacctgggtgacaaaataatctacaccaaaacccccgtgacacacaatttacctacgtaataaacctggacatgaacccctgaatctaaaataaaagtttttaaaaaaaagttc

SEQ ID NO: 338972 - DNA, 120 bp, Artificial Sequence
  ENSG00000137766_74 (sequence is synthesized)
agatgttaaaattcattccacaggtggtgtgttcatggaaaccactgtatattgtaatgacgaggaaaataaggatgaactaatgtatctacctatatattgctaaataccgtttagtcc

SEQ ID NO: 338973 - DNA, 120 bp, Artificial Sequence
  ENSG00000137766_75 (sequence is synthesized)
catgaacaaaattcaacatgcaacatggttaaaaatctcacatgataaaagttttcatcaattacttgaaaaattcattctagatttatgttataaatattttacagaacattgacttaa

SEQ ID NO: 338974 - DNA, 120 bp, Artificial Sequence
  ENSG00000137766_76 (sequence is synthesized)
gctctttaggagcacatattaatgtcataatacatgatacatttgagtaaaaggcagttaggatttgcattgatcactttaaattgagcaaggtattttttccctgacatgtttaattgc

SEQ ID NO: 338975 - DNA, 120 bp, Artificial Sequence
  ENSG00000137766_77 (sequence is synthesized)
atccaattattctgtcttttacaatgtatacaatatatatcaaagcctaatagtggcagggtgaattaagtctatttatgactatcataaagtacaggtactaattttgaaatgattata

SEQ ID NO: 338976 - DNA, 120 bp, Artificial Sequence
  ENSG00000137766_78 (sequence is synthesized)
aattctgtagactctgttttcctctcaaagcacaagtattcccgttgtcttcagaacaaagcctgttatatttacttacccaaattagtagtcactctaaggttcccagtgatctctgtc

SEQ ID NO: 338977 - DNA, 120 bp, Artificial Sequence
  ENSG00000137766_79 (sequence is synthesized)
aattgagtgttgcactaatgtgtgtagcaatttattcatcttattctagataaaacacacaaaggcaaagctctgttgcttgtctatggataaacctcacattacaggtctttaaagata

SEQ ID NO: 338978 - DNA, 120 bp, Artificial Sequence
  ENSG00000137766_80 (sequence is synthesized)
cacgtgtaaatcaaatttagcaaacacaaagtatttaaacccagagtggagtatttgctattcgaaggaatttgaatgcattaagtaatcagatgtccccactacaacctgcgctaattt

SEQ ID NO: 338979 - DNA, 120 bp, Artificial Sequence
  ENSG00000137766_81 (sequence is synthesized)
atctacttctaggataatttataacttgaatttatcttaaatgaggcacatttataaatgacaattctaacttaatgtcttttatttggtcttttttaaaaacaatgcgtgaaacaagat

SEQ ID NO: 338980 - DNA, 120 bp, Artificial Sequence
  ENSG00000137766_82 (sequence is synthesized)
tttctccttttaatttctctacattacataaagatatgactatactagctagcccctttatggactactatagcagctttaatctttatgctcaaataataaatgatcatacttatacat

SEQ ID NO: 338981 - DNA, 120 bp, Artificial Sequence
  ENSG00000137766_83 (sequence is synthesized)
gactcagggaatatccttgaataaatgtctaattccacctacttagaaaaattcttgggcacacaggcaagagactgccctcccctgtggaatgaattttaactcccctgatgttacctg

SEQ ID NO: 338982 - DNA, 120 bp, Artificial Sequence
  ENSG00000137766_84 (sequence is synthesized)
tgtttatactcaagtcctttgtttgaaatagttgcccctttgctcttttgactccccaggcctccactgatcactcttctctgtggttcaggcttctgcagtgtgatttttagaataaaa

SEQ ID NO: 338983 - DNA, 120 bp, Artificial Sequence
  ENSG00000137766_85 (sequence is synthesized)
aactaggatatgtgatatgaaggagaatcaattccaatttgcgaatgttaaataatatatatttaaaagtgctcatgttttttcacatcatgacaactttgaaatcaggatacatatata

SEQ ID NO: 338984 - DNA, 120 bp, Artificial Sequence
  ENSG00000137766_86 (sequence is synthesized)
atcctttggcatgttatggtttaattggtgatttttttctcccttattagtacatgtttcttcttataatgaatgacttccaggcatcaataagcatatttattaaaaagtatatataaa

SEQ ID NO: 338985 - DNA, 120 bp, Artificial Sequence
  ENSG00000137766_87 (sequence is synthesized)
caggcatcaataagcatatttattaaaaagtatatataaatcgatgaaaataaagtaatgcttagttgtctattttaaaacatagtttggctaggcacagtggctcacaactgtaatccc

SEQ ID NO: 338986 - DNA, 120 bp, Artificial Sequence
  ENSG00000137766_88 (sequence is synthesized)
tttgagcttagaagttcgagaccagcctagtcaacgtggcaaagccccatctctacaaaaaaatacaaaaatgagtcaggcctggtggcatgtgactgtagtcccagctacttgagaggc

SEQ ID NO: 338987 - DNA, 68 bp, Artificial Sequence
  ENSG00000137766_89 (sequence is synthesized)
gagccaagatatgcatattttttaatttgcatatactaaaattctctcttttggcatacatttctgtg

SEQ ID NO: 338988 - DNA, 120 bp, Artificial Sequence
  ENSG00000137766_90 (sequence is synthesized)
atactaaaattctctcttttggcatacatttctgtgttatgacaaatgcgtagtcatgtattaatcacaacagtcaagatatgggacaattccctcatacctcaaaattccacgttacca

SEQ ID NO: 338989 - DNA, 120 bp, Artificial Sequence
  ENSG00000137766_91 (sequence is synthesized)
ctttatagacaaacacttttcctactatcaaccctctgcagcactggttcattttagtccctcacgttttgtgtattccagaatgtcatataaacggaactatacagtatatattctttt

SEQ ID NO: 338990 - DNA, 120 bp, Artificial Sequence
  ENSG00000137766_92 (sequence is synthesized)
gagcctgtataatttcacttagcacaatgcaccagagattcatctacattgtggcatgtataaattattacctagttttttttgttgaatagtactgcactgtatgaacattaaaaagat

SEQ ID NO: 338991 - DNA, 120 bp, Artificial Sequence
  ENSG00000137766_93 (sequence is synthesized)
ttcattcaccacttactacacttaccttgtttggcaatattatgaacaaagcttttataaacattcacatacaggattttgtgtatacttgtttttatttttcttgggtgattatctatt

SEQ ID NO: 338992 - DNA, 120 bp, Artificial Sequence
  ENSG00000137766_94 (sequence is synthesized)
agagtgtgatttctaggtcttatgataagtatatctttaacttcataaggaactttcaaacttttttgaaagtagttgtaaaattttacatttccagaagcaatgtatgagagtttcagt

SEQ ID NO: 338993 - DNA, 120 bp, Artificial Sequence
  ENSG00000137766_95 (sequence is synthesized)
tgctctgcatctttgcaagcactgggtatcgtcagttctttattttagttcttcttctgatatacacaaaatagcatctcaacatgcctttaatttgtattcatctgaggactaataaca

SEQ ID NO: 338994 - DNA, 120 bp, Artificial Sequence
  ENSG00000137766_96 (sequence is synthesized)
ttgagtatctctgtgtgtgcttatttgacatccatatattttgtttagtgaagtatctgcaaatcttttgcccatttatttaatgagttgtttattgttgagtttggggacatattttca

SEQ ID NO: 338995 - DNA, 120 bp, Artificial Sequence
  ENSG00000137766_97 (sequence is synthesized)
tattccatatacaaaccctttgtcagatatgaaatgtgcaactatttcatcccagtccgtggctagtcttttcatttttataacaacctctttaagagaacaaaaggttttcacttccat

SEQ ID NO: 338996 - DNA, 120 bp, Artificial Sequence
  ENSG00000137766_98 (sequence is synthesized)
caagtcgaatttgatgaaatcattttttctcttttatagatcatagctttgctaccataagaattacttgcctcactcaaggccaaaaagatttttttctcctatgttttcatatggaaa

SEQ ID NO: 338997 - DNA, 120 bp, Artificial Sequence
  ENSG00000137766_99 (sequence is synthesized)
ttttatactttggggtattacaatttggcctatgaaccgttttgaggttaatagagggtgtaaagtttgagttaaggttcatctataattattaaattacaattgagtaattaattagaa

SEQ ID NO: 338998 - DNA, 120 bp, Artificial Sequence
  ENSG00000137766_100 (sequence is synthesized)
actaattttcataggcatgtccaattgttccagcaccacacaattcattgaaaatactacagttatcacttggaattacctttgtaccttcatcataaatcaattgaccaaatgtgtgtg

SEQ ID NO: 338999 - DNA, 120 bp, Artificial Sequence
  ENSG00000137766_101 (sequence is synthesized)
agtccatttctgacatctctagtctgttccattgatctgactctataccttatcaccaatgtgacactgtagcaattactgtagctttatactgtcttgaactcaggtagtaagagttct

SEQ ID NO: 339000 - DNA, 120 bp, Artificial Sequence
  ENSG00000137766_102 (sequence is synthesized)
ttgaactcaggtagtaagagttctccatgttcttctcttcaaaacagtggagtattctactacttctcactctctataaaaattttaacagccagccaggcacggtggctcacgcctgta

SEQ ID NO: 339001 - DNA, 120 bp, Artificial Sequence
  ENSG00000137766_103 (sequence is synthesized)
aataacagcctactgggattttgactgagaacttattaaatccatacaccaatttacaaacaaccgatgtcttaacaatattgaatcttcaattcgtgggcacagtatatgtctccactt

SEQ ID NO: 339002 - DNA, 120 bp, Artificial Sequence
  ENSG00000137766_104 (sequence is synthesized)
atttacatcttcattgatttattactgtcttatggttttcagcatacaaatcctaccaaggatttcttctgtatgtgtacaagagtataaatgttactttgagaataaaattcaaaatcc

SEQ ID NO: 339003 - DNA, 120 bp, Artificial Sequence
  ENSG00000137766_105 (sequence is synthesized)
gggaagataggctgaggaagctctggcattcaggcgtctcccagcgatgaagctgtgtcccacacagttagttgtcagtgcggtggtgaaggccacacctggcagtggctacagtgcgtc

SEQ ID NO: 339004 - DNA, 120 bp, Artificial Sequence
  ENSG00000137766_106 (sequence is synthesized)
tcctgtgagcaggggctgtagctcaccctctcggagctacgccgtgctacggcggcaggagagggagcccgggcgctctcggtggaggaggctggggatcgcagtgccggtgctgcattc

SEQ ID NO: 339005 - DNA, 120 bp, Artificial Sequence
  ENSG00000137766_107 (sequence is synthesized)
agaaaagactcagccgcagccggcgatgtgtgaagttcccagcacgcactcagcccggctgctcctcaccctcaaatgttgatgagcctgggcgctcctcaacacacgggagagatccca

SEQ ID NO: 339006 - DNA, 120 bp, Artificial Sequence
  ENSG00000137766_108 (sequence is synthesized)
ttttgctttctgggagaaagagatgagaaatgagccgcggaaggtatttggcaatgagaagagtgaaaggcagtttcttgccagcagctaagttgtagaattgcttcggaggctacccgg

SEQ ID NO: 339007 - DNA, 120 bp, Artificial Sequence
  ENSG00000137766_109 (sequence is synthesized)
gagtgcgatagaattgacaagaaaagaacagacaccgttgcagaccaaggcatgcctgattgcacgagtcggatccctgggacgcagcttccactcctgttctaactatttgtgattgaa

SEQ ID NO: 339008 - DNA, 120 bp, Artificial Sequence
  ENSG00000137766_110 (sequence is synthesized)
aaaaggaaacgagactagaaacacaattgcaagtggtgttcctaaaaggaaaacacatacactccaaaaggaggggaagaacaacccagttggcgtgcacatttttttttaaaggagaat

SEQ ID NO: 339009 - DNA, 120 bp, Artificial Sequence
  ENSG00000137766_111 (sequence is synthesized)
tcctcagacactacatggagttatgtggaaatgagagagattcatgaaacccctcctccaggaaagaatgtctttcacagatggagctttgcttctggtttgcacaggacagcgacaatg

SEQ ID NO: 339010 - DNA, 120 bp, Artificial Sequence
  ENSG00000137766_112 (sequence is synthesized)
tggcagagccatgcctgcccttcctgctctttccagtgattcacagaacttctgaacagtgatgcttgccttggattttcaggttttcatcctgatacttgtttacttttctggggcaga

SEQ ID NO: 339011 - DNA, 120 bp, Artificial Sequence
  ENSG00000137766_113 (sequence is synthesized)
gaaatctgattaagataacacctaaagaagagaaggtccatccataggttggctgagttcttatttctgaaataatctctggaggaacttttaagaatcctgaaagattcaactatttta

SEQ ID NO: 339012 - DNA, 120 bp, Artificial Sequence
  ENSG00000137766_114 (sequence is synthesized)
gggtccagctggaaaaaatgtttgaatccatgggagggaaggagaagaaggaaggagaaagattcttttatgagctagattctgaagctagtactattctaaaagaacttcaggttaagc

SEQ ID NO: 339013 - DNA, 120 bp, Artificial Sequence
  ENSG00000137766_115 (sequence is synthesized)
accaatcttcataagcagccatggagggctcagctactgacacctcctcagagaagatttccctcaccgcattatctgtagtagctcccaggaataaacttattttaatctgctgcgtaa

SEQ ID NO: 339014 - DNA, 120 bp, Artificial Sequence
  ENSG00000137767_0 (sequence is synthesized)
agtccaggccttgagacccagaagggagcgaaggtttttgctgcgccaacgcagtgaccgaaggctccgctcacgcccggcctgatcctgcctgaagatggtgccactggtggctgtggt

SEQ ID NO: 339015 - DNA, 120 bp, Artificial Sequence
  ENSG00000137767_1 (sequence is synthesized)
atcagggccccgtgcccagctctttgcctgcctgctcaggctgggcactcagcaggtcggcccccttcagctgcacaccggggccagccatgcggccaggaaccattatgaggtgctggt

SEQ ID NO: 339016 - DNA, 120 bp, Artificial Sequence
  ENSG00000137767_2 (sequence is synthesized)
gctgggtgggggcagtggcggaatcaccatggctgcccgcatgaagaggaaagtgggtgcagagaatgtggccattgttgagcccagtgagagacatttctaccagccaatctggacact

SEQ ID NO: 339017 - DNA, 120 bp, Artificial Sequence
  ENSG00000137767_3 (sequence is synthesized)
ggtgggtgctggtgccaaacaattgtcctcatctggtcgtcccacggcaagtgtgattccatctggtgtagaatggatcaaagctagagtgactgagttgaacccagacaagaactgcat

SEQ ID NO: 339018 - DNA, 120 bp, Artificial Sequence
  ENSG00000137767_4 (sequence is synthesized)
tcacacagatgacgacgagaagatctcctaccgatatcttattattgctctcggaatccagctggactatgagaagattaaaggcctacctgaaggtttcgctcatcccaaaatagggtc

SEQ ID NO: 339019 - DNA, 120 bp, Artificial Sequence
  ENSG00000137767_5 (sequence is synthesized)
gaattattcagttaagactgtagagaagacatggaaagctctgcaggacttcaaagagggcaatgccatcttcaccttcccaaatactccagtgaagtgtgctggagcccctcagaagat

SEQ ID NO: 339020 - DNA, 120 bp, Artificial Sequence
  ENSG00000137767_6 (sequence is synthesized)
catgtacttatcagaagcctacttcaggaagacagggaagcgatccaaggccaatatcattttcaacacttctcttggagccattttcggggttaagaagtatgcagatgccctgcagga

SEQ ID NO: 339021 - DNA, 120 bp, Artificial Sequence
  ENSG00000137767_7 (sequence is synthesized)
cactgttaactacaagaaaaacctcattgaagtccgagccgataaacaagaggctgtatttgagaacctggacaaaccaggagagacccaagtgatttcatatgaaatgcttcatgtcac

SEQ ID NO: 339022 - DNA, 120 bp, Artificial Sequence
  ENSG00000137767_8 (sequence is synthesized)
acctccaatgagcccaccagatgtcctcaagaccagtcctgtggctgatgctgctggttgggtggatgtggataaagaaactctgcaacacaggaggtacccaaatgtgtttgggattgg

SEQ ID NO: 339023 - DNA, 120 bp, Artificial Sequence
  ENSG00000137767_9 (sequence is synthesized)
ggactgcaccaaccttcctacgtcaaagaccgctgctgcagtagctgcccagtcaggaatacttgataggacaatttctgtaattatgaagaatcaaacaccaacaaagaagtatgatgg

SEQ ID NO: 339024 - DNA, 120 bp, Artificial Sequence
  ENSG00000137767_10 (sequence is synthesized)
ctacacatcatgtccactggtgaccggctacaaccgtgtgattcttgctgagtttgactacaaagcagagccgctagaaaccttcccctttgatcaaagcaaagagcgcctttccatgta

SEQ ID NO: 339025 - DNA, 120 bp, Artificial Sequence
  ENSG00000137767_11 (sequence is synthesized)
tctcatgaaagctgacctgatgcctttcctgtattggaatatgatgctaaggggttactggggaggaccagcgtttctgcgcaagttgtttcatctaggtatgagttaaggatggctcag

SEQ ID NO: 339026 - DNA, 120 bp, Artificial Sequence
  ENSG00000137767_12 (sequence is synthesized)
cacttgctcatcttggatggcttctgggccaaaactgcagtcactgaatgaccaagagcagcacgaaggacttggaacctatccttgtaaagagttccttgatgggtaatggtgaccaaa

SEQ ID NO: 339027 - DNA, 120 bp, Artificial Sequence
  ENSG00000137767_13 (sequence is synthesized)
tgcctcccttttcagtacctttgaacagcaaccatgtgggctactcatgatgggcttgattctttgggaataataaaatgaaataatacttttattttctgaataaaagtttgtcactga

SEQ ID NO: 339028 - DNA, 120 bp, Artificial Sequence
  ENSG00000137767_14 (sequence is synthesized)
ttttctcttgccgccaccatgtaagaagcgcctttcgcctccctccatgattctgaggcctccccagccacatggtacttgtatgcctagacagcgggcacagggcttgctggacacaga

SEQ ID NO: 339029 - DNA, 120 bp, Artificial Sequence
  ENSG00000137767_15 (sequence is synthesized)
ttatcagaagcctacttcaggaaggtatgcttcctttctggggacagagatgagcagggcggacagtgctaattcactgattgcaagaattccattttatctctattgtaatcccttttt

SEQ ID NO: 339030 - DNA, 120 bp, Artificial Sequence
  ENSG00000137767_16 (sequence is synthesized)
tatctcggaatttttattacatgtgtacaaaattagttaactggaagtttataaaatataaaagaggagaaaatcactcatgatccaattgctttaataaagctgcagttttcaatttga

SEQ ID NO: 339031 - DNA, 120 bp, Artificial Sequence
  ENSG00000137767_17 (sequence is synthesized)
agtactggaggatcagcctctttgctctgatcttcctcctgagccttccctttcttgtgataaggatccctttcactgttccattctctatttccacccattcctgttgccagcccttcc

SEQ ID NO: 339032 - DNA, 120 bp, Artificial Sequence
  ENSG00000137767_18 (sequence is synthesized)
tgcccacgtgtctgcaaatcttcccagagccctgatttggatttattttccttctcccggatgttcttgaattggggtgtgttcctcttagtgctagctcctcctatcacttcttcttcc

SEQ ID NO: 339033 - DNA, 120 bp, Artificial Sequence
  ENSG00000137767_19 (sequence is synthesized)
tgatttttttcaacagtgtatgcctagacagcgggcacagggcttgctggacacagaaggcaaggactcagagaatatccaccagatgaaagaatgactgcatgagtaacctgatcctgc

SEQ ID NO: 339034 - DNA, 120 bp, Artificial Sequence
  ENSG00000137767_20 (sequence is synthesized)
gcagggagttttcccatgttccaggaggcagccagcttgtaactagcaagcattgctatgtttgtatttctgatacattttctaaaagagatcgcagaacaaagggtcctgactcaccaa

SEQ ID NO: 339035 - DNA, 120 bp, Artificial Sequence
  ENSG00000137767_21 (sequence is synthesized)
gttggcacccaggggcggaagcgtcaggtggcctcggtgtcctccgcctgtgcgccccagcctgcggggccgcccttcagggcgcgcaaggggcgagtctgtccagccggcagcacccca

SEQ ID NO: 339036 - DNA, 120 bp, Artificial Sequence
  ENSG00000137767_22 (sequence is synthesized)
aagctgacctgatgcctttcctgtattggaatatgatgctaaggtaagtgcactgcctggttcctggatgaggaaagggatttgtagcacatctccacccaaaggggatgcagcctcttt

SEQ ID NO: 339037 - DNA, 120 bp, Artificial Sequence
  ENSG00000137767_23 (sequence is synthesized)
tcttcattattagcagtgaccaagtgttctgtcttccatgctctaggccctcttttgctgctggataaataataatagtaaatcactttcacataccaagtactctatcatctgctacct

SEQ ID NO: 339038 - DNA, 120 bp, Artificial Sequence
  ENSG00000137770_0 (sequence is synthesized)
gcagcaggtcggtaggcgggaaatggcgactggctgaaggagctggttctgttgctgctgcggggtaagcgggaaagacaccacacattgcgcagtcgggaccatcgccggagcctgagg

SEQ ID NO: 339039 - DNA, 120 bp, Artificial Sequence
  ENSG00000137770_1 (sequence is synthesized)
acacttctctgtcgtcacagttagttttacatgtggcacccataaaagatgaggctgagaacacggaaagcttctcagcagtcaaatcaaatccaaacacaacgcactgccagagcaaag

SEQ ID NO: 339040 - DNA, 120 bp, Artificial Sequence
  ENSG00000137770_2 (sequence is synthesized)
aggaaatattcagaggttgatgatagcctgccttcaggaggagaaaaaccatcgaagaatgaaaccggcttgttgtcttcaattaaaaaatttattaaaggaagcacacctaaggaagag

SEQ ID NO: 339041 - DNA, 120 bp, Artificial Sequence
  ENSG00000137770_3 (sequence is synthesized)
agagaaaatccttcaaaacggagtagaattgaacgtgatatagataacaatttgatcacgtcaacaccaagagcaggagaaaaacctaacaaacagatatctcgagtaagacggaaaagt

SEQ ID NO: 339042 - DNA, 120 bp, Artificial Sequence
  ENSG00000137770_4 (sequence is synthesized)
caagtaaatggagaagctggtagttatgaaatgacaaatcaacatgtaaaacaaaatggaaaattagaagataatccttcctctggcagtcctccaaggactactttgttggggaccata

SEQ ID NO: 339043 - DNA, 120 bp, Artificial Sequence
  ENSG00000137770_5 (sequence is synthesized)
ttttcacctgtcttcaactttttttcaccagcaaataaaaatggaacgtcaggatcagattctccaggacaggctgtggaagctgaagaaatagtaaaacaacttgatatggaacaggtg

SEQ ID NO: 339044 - DNA, 120 bp, Artificial Sequence
  ENSG00000137770_6 (sequence is synthesized)
gatgagatcactaccagtactactacatcaactaatggagcagcttactcaaatcaagcagttcaagtgagaccatcactaaacaatggtttagaagaagcagaagaaacagttaatcgt

SEQ ID NO: 339045 - DNA, 120 bp, Artificial Sequence
  ENSG00000137770_7 (sequence is synthesized)
gatatcccaccccttacagcaccagtaactccagatagtggttattcatcagcccacgcggaggccacctatgaagaagactgggaagtatttgacccctattatttcatcaaacatgtc

SEQ ID NO: 339046 - DNA, 120 bp, Artificial Sequence
  ENSG00000137770_8 (sequence is synthesized)
ccgccactgacagaagaacaactaaataggaaacctgctcttccgttgaaaacaagaagcacaccggaattctccctagttttagacttggatgaaacactagtgcattgtagtctaaat

SEQ ID NO: 339047 - DNA, 120 bp, Artificial Sequence
  ENSG00000137770_9 (sequence is synthesized)
gagctagaagatgcagcacttacttttccagtccttttccaagatgtcatttatcaggtttatgtgagattaagaccatttttcagggaattcctggaacgaatgtctcagatgtatgag

SEQ ID NO: 339048 - DNA, 120 bp, Artificial Sequence
  ENSG00000137770_10 (sequence is synthesized)
atcattctttttactgcttctaagaaggtgtatgcagacaagttactgaacatactagaccctaaaaagcaactggtcaggcaccggcttttccgtgaacattgtgtttgtgtacaagga

SEQ ID NO: 339049 - DNA, 120 bp, Artificial Sequence
  ENSG00000137770_11 (sequence is synthesized)
aactatataaaggacttaaatattcttggaagagatctttcaaaaactataataattgacaactcaccacaagcctttgcatatcagctttctaatggaatccctatagaaagttggttt

SEQ ID NO: 339050 - DNA, 120 bp, Artificial Sequence
  ENSG00000137770_12 (sequence is synthesized)
atggataaaaatgacaatgaactcctaaaattgattccattcctggagaagcttgtagaactgaatgaagatgttcgaccacacatcagagacagatttcgcttgcatgatttgctgccc

SEQ ID NO: 339051 - DNA, 120 bp, Artificial Sequence
  ENSG00000137770_13 (sequence is synthesized)
ccagattaagtacaaagacttgtcaaatcactgaagggggagagaatgcaggacccttttggactaagacaaaaacattgccattactgttgaaattttgcatttttgtaccccgtcttg

SEQ ID NO: 339052 - DNA, 120 bp, Artificial Sequence
  ENSG00000137770_14 (sequence is synthesized)
cttttcttatctttggtgcccaataataattaagggttacagaaagagactttatctatctcagatcgaatacatatagtaggtaggctaaaacagaagagtctttagaactagtgcaac

SEQ ID NO: 339053 - DNA, 120 bp, Artificial Sequence
  ENSG00000137770_15 (sequence is synthesized)
tccagtgaaattttttatgtacaggacatctgcagtttataaagaattctgtttctgccaccagcagtttgacctgtagtcacacaggattttatgataataacagagatgaaaatggac

SEQ ID NO: 339054 - DNA, 120 bp, Artificial Sequence
  ENSG00000137770_16 (sequence is synthesized)
ttttattttctctctgtttggtgctctaagtgggtttgtagccacttttctgttactttatgattctcatttcaacaggaatggccagtaaaagttgttttatttttcctgttaaggttt

SEQ ID NO: 339055 - DNA, 120 bp, Artificial Sequence
  ENSG00000137770_17 (sequence is synthesized)
ataacctttttacatttttgacctgtattagattagaatttcattatgcattccttttagttgaggcgcttcatagttttctggagatagtcaatttttagttttttattatacatttga

SEQ ID NO: 339056 - DNA, 120 bp, Artificial Sequence
  ENSG00000137770_18 (sequence is synthesized)
atggccgttttcctgctttgtctgcctgcacattgtatatttgtttaaaaatattctctacttttagtctatgtaagtttcatttagaaagacatgcatttatattttgtttctgtaata

SEQ ID NO: 339057 - DNA, 120 bp, Artificial Sequence
  ENSG00000137770_19 (sequence is synthesized)
ttctactgtaggtgaaatcttttcaaaaatcaagagactgggtagataagaatatatgaatgactaatatacaaaagatttaaaccattgtgatggcgtatattctcaaatggtaatatc

SEQ ID NO: 339058 - DNA, 120 bp, Artificial Sequence
  ENSG00000137770_20 (sequence is synthesized)
ttgcaatggcacacagatttaatggataaaggtatacctcagacttcactgtgctcacaaatctttgaggagaaagtttggtcacctgtttggcttgatttagttactgctgcctttggt

SEQ ID NO: 339059 - DNA, 120 bp, Artificial Sequence
  ENSG00000137770_21 (sequence is synthesized)
tttctccaggaatgaagtattcagcacagtgactcagtatttttagttattttgcatgggctggtagtacctctgttatgctctcagttacaatcaatttaaaactgtataacagtcttg

SEQ ID NO: 339060 - DNA, 120 bp, Artificial Sequence
  ENSG00000137770_22 (sequence is synthesized)
gtacctaacagtagctatgcataatcctgtggcacagtacactcccaagccaccaatgcagttaatatgctctcatagtggtttttctatgctatatgaaaatagtcttcaagccttggt

SEQ ID NO: 339061 - DNA, 120 bp, Artificial Sequence
  ENSG00000137770_23 (sequence is synthesized)
tctctaatgcagctaccacaagaggttgatatttttatagtggcgtgtaatctccttttcgggaggctttttatggaaggtagaatttgtaaaagttcgtatgctttgcctctcaactgc

SEQ ID NO: 339062 - DNA, 120 bp, Artificial Sequence
  ENSG00000137770_24 (sequence is synthesized)
attaacatgccacaggctcagactgtttttgtgtaaaggatgtcaaagaacggcactttttctaaagagaagtttgatattttgtatgcttgttaagaaagtacagtattggaaattaaa

SEQ ID NO: 339063 - DNA, 120 bp, Artificial Sequence
  ENSG00000137770_25 (sequence is synthesized)
ggtggacaactgataattgaggagtatgtcaattaattttttatgtatattacctgtttacttgtacaacttactgtacaaattacatgcagcttcattttcaaatgaatccttaaaata

SEQ ID NO: 339064 - DNA, 120 bp, Artificial Sequence
  ENSG00000137770_26 (sequence is synthesized)
tgtattaatgaagattttaacttttcatcaggttgagtgttttcttactatattatctgttgtgtatgtagttagcatattgtgtcactgaactgtttaaaaatctagcatgtagagcaa

SEQ ID NO: 339065 - DNA, 120 bp, Artificial Sequence
  ENSG00000137770_27 (sequence is synthesized)
gcctgttttgtggaaaatccttattcattaaaaaaataatcatggcagattttctgcaaaaaaaaaacaaaagcatttgcaattcagaatactgatttttttaattttatttaaagaaag

SEQ ID NO: 339066 - DNA, 120 bp, Artificial Sequence
  ENSG00000137770_28 (sequence is synthesized)
gtattttgcttgcaggaaaaaaatactacagattcattttaatgagaatctttgaaatgtatttatctttagggcatctgggcatctttatgctgtttgtcttctgtctttcttgaaata

SEQ ID NO: 339067 - DNA, 120 bp, Artificial Sequence
  ENSG00000137770_29 (sequence is synthesized)
aaatgtacatacgttacctttacatatgctcttgctcaaaattgtgaacctagttacatttctccctgctcccttcctttttatgctcaaacagcgaaacccaaaacttaaaagatctga

SEQ ID NO: 339068 - DNA, 120 bp, Artificial Sequence
  ENSG00000137770_30 (sequence is synthesized)
actttcagcatgcattctgattgctgaaagatttcctgatttagtgcattctcaaaagggctttcccataatctaaagggaaatgtaagcacctatactcttgtgcctgtgggcacttca

SEQ ID NO: 339069 - DNA, 120 bp, Artificial Sequence
  ENSG00000137770_31 (sequence is synthesized)
ataataaaaaccaactttttaaactaatcatcttttatcaatgataaagttgttttcagtcccacactaggagagttcctttaagtcagctgatcaagcataagatacttccgtaaagaa

SEQ ID NO: 339070 - DNA, 120 bp, Artificial Sequence
  ENSG00000137770_32 (sequence is synthesized)
actaagaaaattttttatggcttgagaaaattccttgaggccaaattaatatatttttctttgttattttatttgagtcattttaaatttgttaatacaaaatttaagataatttacaga

SEQ ID NO: 339071 - DNA, 120 bp, Artificial Sequence
  ENSG00000137770_33 (sequence is synthesized)
cagagacaatttatccagcttccttctaccttaatacaatgttttgtcttcccattatcctctcttttctttatctgttggtagatgtaaaaaacttccatttagttaatcggaggtgtg

SEQ ID NO: 339072 - DNA, 120 bp, Artificial Sequence
  ENSG00000137770_34 (sequence is synthesized)
tattttttaaattgaaatgtgcccagccccttcagctcacacaggaaacatgaactcttaaaaaactgactagtaaatgcaggagaggtggatacctgatgagacacagcgaaagtgacc

SEQ ID NO: 339073 - DNA, 120 bp, Artificial Sequence
  ENSG00000137770_35 (sequence is synthesized)
tgtatacacattacaactctggagtacatattaaagtcgtgctatttccagtggtaaatgtctgacttttaagacattcttttaaatatttgtatcattgttaggatgttttaatcagtt

SEQ ID NO: 339074 - DNA, 120 bp, Artificial Sequence
  ENSG00000137770_36 (sequence is synthesized)
gttttttaattccatgtaatatatgtagccctcatcagatttatatcaccatatttctccttgtgtcctaagagaattgatgacaattcgtaaccataaattgttttatattagctagta

SEQ ID NO: 339075 - DNA, 120 bp, Artificial Sequence
  ENSG00000137770_37 (sequence is synthesized)
tgtatatttatttttacccaatggctttatctgtttcccaaaatttgtttgggatttgttgaaagcattgtgtaacttctataaacggctattttcttgtaactgtcagtgaaatgaatg

SEQ ID NO: 339076 - DNA, 120 bp, Artificial Sequence
  ENSG00000137770_38 (sequence is synthesized)
tgtacattgttttcttgtatttctctgggttgttttttgtttttttttccaagggttaacatagaatgttttttttaaaaaattatctttggccaatgactttttcatctagatcttact

SEQ ID NO: 339077 - DNA, 120 bp, Artificial Sequence
  ENSG00000137770_39 (sequence is synthesized)
ttcattcaaccttctaaagaagttcgtttctcattgttttgttctgtcaacttgcctgaaaaacagagacttcatctcatcaatgaagaaagcatttcattattcctacagatctttcct

SEQ ID NO: 339078 - DNA, 120 bp, Artificial Sequence
  ENSG00000137770_40 (sequence is synthesized)
gcgagcacagaattcttcataaggaccagatctcttccatgtctgtgtcaatcacataaagctaaaatgtaaaggacattgaagcctttatttaattgtactaatatgatggtgttatat

SEQ ID NO: 339079 - DNA, 120 bp, Artificial Sequence
  ENSG00000137770_41 (sequence is synthesized)
actacatcattagctagttaaggttttctgacctgacttctctttgtcttcctaggtatttatttgttatcttttaatcttgtgtatctaaattaacttagttaatagttacccaccgaa

SEQ ID NO: 339080 - DNA, 120 bp, Artificial Sequence
  ENSG00000137770_42 (sequence is synthesized)
taactatgccaagcaactagtaaagaatgtttattttatttccccttataggggaagagtggactgggaacaaaaatgtatgggccaaaaggccttagggttgtcattcattgactttct

SEQ ID NO: 339081 - DNA, 120 bp, Artificial Sequence
  ENSG00000137770_43 (sequence is synthesized)
tattcctctcatgagctataattgagtatagtatttttttagtgctgatgtcattacttctcatgtcttcccctgagttgaaagcctacgacaaacatgtataaaatacatttaagaatt

SEQ ID NO: 339082 - DNA, 120 bp, Artificial Sequence
  ENSG00000137770_44 (sequence is synthesized)
ttcagaatatgaaccacaaaactcagtatcttatatttaaatgctacttaagttattattggaatccaagtctcactaactagggtacatttttataaaatgtttctctgtatcttgaat

SEQ ID NO: 339083 - DNA, 120 bp, Artificial Sequence
  ENSG00000137770_45 (sequence is synthesized)
tgaaattacttgcccagaggcaagagttctggggatataacatgatttgagatcttttttaaaaaagggtggggcggcgggggagagagcgacaagtttatactagtttatgcttttgat

SEQ ID NO: 339084 - DNA, 120 bp, Artificial Sequence
  ENSG00000137770_46 (sequence is synthesized)
attagtattttaagatacatcagttgatcccgaaacctgaccattagaattactctgaggagcttttaaaatagattcctggagcctacccctggaaaattgtctcgctggatctcgaga

SEQ ID NO: 339085 - DNA, 90 bp, Artificial Sequence
  ENSG00000137770_47 (sequence is synthesized)
aaagctctcctggtgattctaatagccagtattgggtaatcaatgttttagctaaatgtgacactggtttgagagtaggcaacaaaatta

SEQ ID NO: 339086 - DNA, 120 bp, Artificial Sequence
  ENSG00000137770_48 (sequence is synthesized)
gctaaatgtgacactggtttgagagtaggcaacaaaattaaagttcaccagacatctctttgtggtagagtttttttttttttaaactgggaccagatttcacagagcttattcaagata

SEQ ID NO: 339087 - DNA, 120 bp, Artificial Sequence
  ENSG00000137770_49 (sequence is synthesized)
catggaggaataataaagaagattaaggctactgctcattatcatttttgtctttcatattttttaagggtttgcatttctaggacttggaatagttgaccatatacatagctaaaggac

SEQ ID NO: 339088 - DNA, 120 bp, Artificial Sequence
  ENSG00000137770_50 (sequence is synthesized)
atgtccctgaatgagaccattatatatattatctgtaaaatatttcactatttttttattttataaatctttgtagaaataagcaatgaaatactactttcatcttttgaaatgggattt

SEQ ID NO: 339089 - DNA, 120 bp, Artificial Sequence
  ENSG00000137770_51 (sequence is synthesized)
ttcaaggcagtgtccttttggcattaaggtaggggggagttaatattctctctgccttgtttccacgtgaatcaatattaaagtcatggacattttaaaatctcaatttaatttcttctt

SEQ ID NO: 339090 - DNA, 120 bp, Artificial Sequence
  ENSG00000137770_52 (sequence is synthesized)
atttactatgcagtatagccgtgaacaagtaatgtagatttagttttctcatcttcaaatgccctgatcaccctacctcacagggttgttgtggggataaataaaacttttatggaagca

SEQ ID NO: 339091 - DNA, 120 bp, Artificial Sequence
  ENSG00000137770_53 (sequence is synthesized)
gccgccgctgcttccaatctcagtcctcctcctcttccagggccgtctgccgggatctcctccccttctaaacctggtcctccagcggctctggcgccttgttttacatgtggcacccat

SEQ ID NO: 339092 - DNA, 120 bp, Artificial Sequence
  ENSG00000137770_54 (sequence is synthesized)
agtcctcctcctcttccagggccgtctgccgggatctcctccccttctaaacctggtcctccagcggctctggcgccttggtaggcatgcactctttggcgcctcgtacgtccactgtgc

SEQ ID NO: 339093 - DNA, 120 bp, Artificial Sequence
  ENSG00000137770_55 (sequence is synthesized)
ggagccgctcctgtctggactttcccctgggaacagaaagggagctcacttcccgccagcttcacctcttaggttgcggcctgcgttgtgatttctggggttagatttcactttgctacc

SEQ ID NO: 339094 - DNA, 120 bp, Artificial Sequence
  ENSG00000137770_56 (sequence is synthesized)
tgcagcacttacttttccagtccttttccaagatgtcatttatcagtttctgttcctgcagatccaccaattcaagactctaggtcatctcactccctcttccatcccgaagatgacttc

SEQ ID NO: 339095 - DNA, 120 bp, Artificial Sequence
  ENSG00000137770_57 (sequence is synthesized)
aaaagacatttttcacttagctcttgagctgaaccacctcctcaatgaccttcctctgtctccatcaagaactggagctcagttttttgaagatgtaatagaactactcagcccaaatgt

SEQ ID NO: 339096 - DNA, 120 bp, Artificial Sequence
  ENSG00000137770_58 (sequence is synthesized)
ggctgattgaagacaaaaagaagatacctcatatgtttcaccacagtgcagccaaacgtaactgtgttgtccaactcctcattctgtaaagcttggcaggggcatctgatttttgactct

SEQ ID NO: 339097 - DNA, 120 bp, Artificial Sequence
  ENSG00000137770_59 (sequence is synthesized)
gttcaccaataagactttagccagtcagtggctttctgaagatcagtaaaatcaacaaactttgggtcagctgtccagaaatcagattgtggtaagcactcaaggacagataggatccct

SEQ ID NO: 339098 - DNA, 120 bp, Artificial Sequence
  ENSG00000137770_60 (sequence is synthesized)
ttaaatattcttggaagagatctttcaaaaactataataattgacaactcaccacaagcctttgcatatcaggtaaaatataagtaaaagaggatttaattacttatttattgttttagc

SEQ ID NO: 339099 - DNA, 120 bp, Artificial Sequence
  ENSG00000137770_61 (sequence is synthesized)
ggctaaccactgacttactgtgtgaccttgggcaagtcacttgacctccttgttcctcagtcaaccatctggaaaattggttaaaaagcaggacctcgctgacaaccagatgctgcatct

SEQ ID NO: 339100 - DNA, 120 bp, Artificial Sequence
  ENSG00000137770_62 (sequence is synthesized)
atttggtttaatgttctgaaatattttcttagactattttgtcaatatatttgtaccctttgttaatatttctttgacgtataactacaaatgtagatgagtcatccttccttccttttg

SEQ ID NO: 339101 - DNA, 79 bp, Artificial Sequence
  ENSG00000137770_63 (sequence is synthesized)
gtagatgagtcatccttccgaagcagtttcactcttgttgcccaaactggagtggagtgcaatggcgtgatcttggctc

SEQ ID NO: 339102 - DNA, 87 bp, Artificial Sequence
  ENSG00000137770_64 (sequence is synthesized)
cctgatgagtcatcctttcaaggtatattttagattatgaatatgtccatgtgatatgatttcttttttcttttttttgttttcctt

SEQ ID NO: 339103 - DNA, 64 bp, Artificial Sequence
  ENSG00000137770_65 (sequence is synthesized)
agtcatcctttcaaggtatattttagattatgaatatgtccatgtgatatgagtcgcccaggct

SEQ ID NO: 339104 - DNA, 120 bp, Artificial Sequence
  ENSG00000137770_66 (sequence is synthesized)
tcactgcagcctccacctcccgggttcgtgattctcctgcctccacctccttagtagctggcactacaggtgcgcgccactatgccgtgctaatttttttgtattattagtagagacggg

SEQ ID NO: 339105 - DNA, 81 bp, Artificial Sequence
  ENSG00000137770_67 (sequence is synthesized)
taccacacccagccccatgtgataggatttcttagatttgcttcacaataagccagtccagaatagggatgatgcaaagtg

SEQ ID NO: 339106 - DNA, 120 bp, Artificial Sequence
  ENSG00000137770_68 (sequence is synthesized)
ttcacaataagccagtccagaatagggatgatgcaaagtggattggagtataaactagatttgtcctgtgtttcaaaatgtctataataaaaagaaaacaagtgaaaagctgtatatgat

SEQ ID NO: 339107 - DNA, 120 bp, Artificial Sequence
  ENSG00000137770_69 (sequence is synthesized)
actaagttatatttaggtccttacttttatttgtttacatttaaaaatgtcttttaagaatttcatcttggttcctagttaaaattatatcaattatcctccatctcatatacaacattt

SEQ ID NO: 339108 - DNA, 120 bp, Artificial Sequence
  ENSG00000137770_70 (sequence is synthesized)
agcctaaattttaaaacattttatcccagagattattcaccataaaataaatatggcttgcattcttgtttttaggctcctcttcaatgaaataccattaatttgttaagtttctactat

SEQ ID NO: 339109 - DNA, 120 bp, Artificial Sequence
  ENSG00000137770_71 (sequence is synthesized)
atttcaagttatcatcctactcgatgggaatagaataatgaatgggagatatggtcactgtatttaaggggaaaaaaaagtataggcttttctatattctctttagattggcagtgtccc

SEQ ID NO: 339110 - DNA, 120 bp, Artificial Sequence
  ENSG00000137770_72 (sequence is synthesized)
atcattcacagtgcctacctagcattgtactaattgtaactatttcttgaaggaataatggaatattttatttatattaatgatccttataaaatgtattttaatggaactttcttgttt

SEQ ID NO: 339111 - DNA, 120 bp, Artificial Sequence
  ENSG00000137770_73 (sequence is synthesized)
agttttatatactctgagaagaaatgacactgaaaaaccaataggcttcaatttatttccttatcctctgtctcttgcactattgagttgtcaaagaaaagtctggtgacattacttttc

SEQ ID NO: 339112 - DNA, 120 bp, Artificial Sequence
  ENSG00000137770_74 (sequence is synthesized)
agatcagtgtttacttaataaatctttgtttattttttaactttttccaaactaggtaaaatataagtaaaagaggatttaattacttatttattgttttagctttctaatggaatccct

SEQ ID NO: 339113 - DNA, 120 bp, Artificial Sequence
  ENSG00000137776_0 (sequence is synthesized)
attgtgcgcagcgctgcgcggcgccggcggccgccgaggcctgggtggaagttggcgctgctgccgccgccctgcagcccactcgctgcctcggcagcgcgctgctcttctaagatggct

SEQ ID NO: 339114 - DNA, 120 bp, Artificial Sequence
  ENSG00000137776_1 (sequence is synthesized)
gccgctaccggtgcggtggcagcctcggccgcctcgggtcaggcggaaggtaaaaagatcaccgatctgcgggtcatcgatctgaagtccgagctgaagcggcggaacttagacatcacc

SEQ ID NO: 339115 - DNA, 120 bp, Artificial Sequence
  ENSG00000137776_2 (sequence is synthesized)
ggagtcaagaccgtgctcatctcccgactcaagcaggctattgaagaggaaggaggcgatccagataatattgaattaactgtttcaactgatactccaaacaagaaaccaactaaaggc

SEQ ID NO: 339116 - DNA, 120 bp, Artificial Sequence
  ENSG00000137776_3 (sequence is synthesized)
aaaggtaaaaaacatgaagcagatgagttgagtggagatgcttctgtggaagatgatgcttttatcaaggactgtgaattggagaatcaagaggcacatgagcaagatggaaatgatgaa

SEQ ID NO: 339117 - DNA, 120 bp, Artificial Sequence
  ENSG00000137776_4 (sequence is synthesized)
ctaaaggactctgaagaatttggtgaaaatgaagaagaaaatgtgcattccaaggagttactctctgcagaagaaaacaagagagctcatgaattaatagaggcagaaggaatagaagat

SEQ ID NO: 339118 - DNA, 120 bp, Artificial Sequence
  ENSG00000137776_5 (sequence is synthesized)
atagaaaaagaggacatcgaaagtcaggaaattgaagctcaagaaggtgaagatgatacctttctaacagcccaagatggtgaggaagaagaaaatgagaaagatatagcaggttctggt

SEQ ID NO: 339119 - DNA, 120 bp, Artificial Sequence
  ENSG00000137776_6 (sequence is synthesized)
gatggtacacaagaagtatctaaacctcttccttcagaagggagcctagctgaggctgatcacacagctcatgaagagatggaagctcatacgactgtgaaagaagctgaggatgacaac

SEQ ID NO: 339120 - DNA, 120 bp, Artificial Sequence
  ENSG00000137776_7 (sequence is synthesized)
atctcggtcacaatccaggctgaagatgccatcactctggattttgatggtgatgacctcctagaaacaggtaaaaatgtgaaaattacagattctgaagcaagtaagccaaaagatggg

SEQ ID NO: 339121 - DNA, 120 bp, Artificial Sequence
  ENSG00000137776_8 (sequence is synthesized)
caggacgccattgcacagagcccggagaaggaaagcaaggattatgagatgaatgcgaaccataaagatggtaagaaggaagactgcgtgaagggtgaccctgtcgagaaggaagccaga

SEQ ID NO: 339122 - DNA, 120 bp, Artificial Sequence
  ENSG00000137776_9 (sequence is synthesized)
gaaagttctaagaaagcagaatctggagacaaagaaaaggatactttgaagaaagggccctcgtctactggggcctctggtcaagcaaagagctcttcaaaggaatctaaagacagcaag

SEQ ID NO: 339123 - DNA, 120 bp, Artificial Sequence
  ENSG00000137776_10 (sequence is synthesized)
acatcatctaaagatgacaaaggaagtacaagtagtactagtggtagcagtggaagctcaactaaaaatatctgggttagtggactttcatctaataccaaagctgctgatttgaagaac

SEQ ID NO: 339124 - DNA, 120 bp, Artificial Sequence
  ENSG00000137776_11 (sequence is synthesized)
ctctttggcaaatatggaaaggttctgagtgcaaaagtagttacaaatgctcgaagtcctggggcaaaatgctatggcattgtaactatgtcttcaagcacagaggtgtccaggtgtatt

SEQ ID NO: 339125 - DNA, 120 bp, Artificial Sequence
  ENSG00000137776_12 (sequence is synthesized)
gcacatcttcatcgcactgagctgcatggacagctgatttctgttgaaaaagtaaaaggtgatccctctaagaaagaaatgaagaaagaaaatgatgaaaagagtagttcaagaagttct

SEQ ID NO: 339126 - DNA, 120 bp, Artificial Sequence
  ENSG00000137776_13 (sequence is synthesized)
ggagataaaaaaaatacgagtgatagaagtagcaagacacaagcctctgtcaaaaaagaagagaaaagatcgtctgagaaatctgaaaaaaaagaaagcaaggatactaagaaaatagaa

SEQ ID NO: 339127 - DNA, 120 bp, Artificial Sequence
  ENSG00000137776_14 (sequence is synthesized)
ggtaaagatgagaagaatgataatggagcaagtggccaaacatcagaatcgattaaaaaaagtgaagaaaagaagcgaataagttccaagagtccaggacatatggtaatactagaccaa

SEQ ID NO: 339128 - DNA, 120 bp, Artificial Sequence
  ENSG00000137776_15 (sequence is synthesized)
actaaaggagatcattgtagaccatcaagaagaggaagatatgagaaaattcatggaagaagtaaggaaaaggagagagctagtctagataaaaaaagagataaagactacagaaggaaa

SEQ ID NO: 339129 - DNA, 120 bp, Artificial Sequence
  ENSG00000137776_16 (sequence is synthesized)
gagatcttgccttttgaaaagatgaaggaacaaaggttgagagaacatttagttcgttttgaaaggctgcgacgagcaatggaacttcgaagacgaagagagattgcagagagagagcgt

SEQ ID NO: 339130 - DNA, 120 bp, Artificial Sequence
  ENSG00000137776_17 (sequence is synthesized)
aaaaactagagagagagagaatggaacgcgaacgcttggaaagggaacgcattcgtattgaacaggaacgtcgtaaggaagctgaacggattgctcgagaaagagaggaactcagaaggc

SEQ ID NO: 339131 - DNA, 120 bp, Artificial Sequence
  ENSG00000137776_18 (sequence is synthesized)
aacaacagcagcttcgttatgaacaagaaaaaaggaattccttgaaacgcccacgtgatgtagatcataggcgagatgatccttactggagcgagaataaaaagttgtctctagatacag

SEQ ID NO: 339132 - DNA, 120 bp, Artificial Sequence
  ENSG00000137776_19 (sequence is synthesized)
atgcacgatttggccatggatccgactactctcgccaacagaacagatttaatgactttgatcaccgagagaggggcaggtttcctgagagttcagcagtacagtcttcatcttttgaaa

SEQ ID NO: 339133 - DNA, 120 bp, Artificial Sequence
  ENSG00000137776_20 (sequence is synthesized)
ggcgggatcgctttgttggtcaaagtgaggggaaaaaagcacgacctactgcacgaagggaagatccaagcttcgaaagatatcccaaaaatttcagtgactccagaagaaatgagcctc

SEQ ID NO: 339134 - DNA, 120 bp, Artificial Sequence
  ENSG00000137776_21 (sequence is synthesized)
caccaccaagaaatgaacttagagaatcagacaggcgagaagtacgaggggagcgagacgaaaggagaacggtgattattcatgacaggcctgatatcactcatcctagacatcctcgag

SEQ ID NO: 339135 - DNA, 120 bp, Artificial Sequence
  ENSG00000137776_22 (sequence is synthesized)
aggcagggcccaatccttccagacccaccagctggaaaagtgaaggaagcatgtccactgacaaacgggaaacaagagttgaaaggccagaacgatctgggagagaagtatcagggcaca

SEQ ID NO: 339136 - DNA, 120 bp, Artificial Sequence
  ENSG00000137776_23 (sequence is synthesized)
gtgtgagaggcgctccccctgggaatcgtagcagcgcttcggggtacgggagcagagagggagacagaggagtcatcacagaccgaggaggtggatcacagcactatcctgaggagcgac

SEQ ID NO: 339137 - DNA, 120 bp, Artificial Sequence
  ENSG00000137776_24 (sequence is synthesized)
atgtggttgaacgccatggacgggacacaagcggaccaaggaaagagtggcatggtccaccctctcaagggcctagctatcatgatacgaggcgaatgggtgacggccgggcaggagcag

SEQ ID NO: 339138 - DNA, 120 bp, Artificial Sequence
  ENSG00000137776_25 (sequence is synthesized)
gcatgataacccaacattcaagtaacgcatccccaattaatagaattgtacaaatcagtggcaattccatgccaagaggaagtggctccggatttaagccatttaagggtggacctccgc

SEQ ID NO: 339139 - DNA, 120 bp, Artificial Sequence
  ENSG00000137776_26 (sequence is synthesized)
gacgattctgaaaatgagctctctgccaaggttttaagataatttattgaaatctcctgtaaactttacttgactacttatgaagaggacctctgacttgcttgagagttctgtcagact

SEQ ID NO: 339140 - DNA, 120 bp, Artificial Sequence
  ENSG00000137776_27 (sequence is synthesized)
tttctttttaaaaatttaacatgattgcttttctcaattttggagaagatgtttaaatagttctgttgtaacttttaatagttttgtgtatcattcaactttttttcttgcagcaccgag

SEQ ID NO: 339141 - DNA, 120 bp, Artificial Sequence
  ENSG00000137776_28 (sequence is synthesized)
gcacatttgaaaagatggaattgaagtcgttttgtttaacgctgtgtgaatataaagagtagtttgcagctgtgtggtagtggtttaatttgcagccttagctctgtggtgtctggctct

SEQ ID NO: 339142 - DNA, 120 bp, Artificial Sequence
  ENSG00000137776_29 (sequence is synthesized)
agagttacttctttttaccaagcattttcagcctccattttgaaggctgtctacacttaagaagtcttagctgtctaatttttagagaataagattgttcattgcatttctgagtattat

SEQ ID NO: 339143 - DNA, 120 bp, Artificial Sequence
  ENSG00000137776_30 (sequence is synthesized)
gtaacctatttttgcagaaggtactgttacattaagtgcatctgtgtatcctggtttaaaaaaatgtaatcttttttgaaataaaccttcatattctgtatagttgctaaagtgttgaga

SEQ ID NO: 339144 - DNA, 120 bp, Artificial Sequence
  ENSG00000137776_31 (sequence is synthesized)
acctttttaattgtaaaatgagaaccgattttcagtttagtgtagcagcacacttgttcaggtttgcatggtatgaaaccaaatagattcatgaaaccttggccatgaggtttgtttcac

SEQ ID NO: 339145 - DNA, 120 bp, Artificial Sequence
  ENSG00000137776_32 (sequence is synthesized)
aaggttcttagaccgagttgtgcaggtaagtgcacttttaggtaatctgcactgtttgtttgatggataaattccatctctgggaattgtgtgggtattaatgtttccatgttcccaact

SEQ ID NO: 339146 - DNA, 120 bp, Artificial Sequence
  ENSG00000137776_33 (sequence is synthesized)
atgttgagaagtggaaaaaaacccaggttctagatgggtgaatcagttgggttttgtaaatacttgtatgtggggaagacattgttgtctttttgtgaaaataaaaatccacacctggaa

SEQ ID NO: 339147 - DNA, 120 bp, Artificial Sequence
  ENSG00000137776_34 (sequence is synthesized)
ctctagcgacatggctaattttttttggcataaaaaatatagtctgaatattaagcattgatttagtacccatggtatcgcagatattatacagaacacaaggcaaatgataatcaggtg

SEQ ID NO: 339148 - DNA, 120 bp, Artificial Sequence
  ENSG00000137776_35 (sequence is synthesized)
taagcataaaagcattctcacgttaccccgatattttataaagcaaagctattgtatacccttttacttaggaaattgaagctcaagaaggtgaagatgatacctttctaacagcccaag

SEQ ID NO: 339149 - DNA, 120 bp, Artificial Sequence
  ENSG00000137776_36 (sequence is synthesized)
ttatgtaaaaagcactccttatttgaaatcttatttttgaaattagtttattttcaaatttatccatttagtgaattaagttagcatcttgattttattttccaattggttttaattttc

SEQ ID NO: 339150 - DNA, 120 bp, Artificial Sequence
  ENSG00000137776_37 (sequence is synthesized)
ttttgaacactaaagatatattgcaacttaatagtacatatcagttactgtagtgaacaatgctattttttatttaacccaattttaattttatttttaaaataacttctggtatacggt

SEQ ID NO: 339151 - DNA, 120 bp, Artificial Sequence
  ENSG00000137776_38 (sequence is synthesized)
attcctaaatgactgcttcctagttgtctctattcagtgcagtggtagactataaattattaaaactgaacagcaaaagtctgagacatgtaattgatttttttaccctcttcaacttag

SEQ ID NO: 339152 - DNA, 120 bp, Artificial Sequence
  ENSG00000137776_39 (sequence is synthesized)
aactcatacaataggaaatgtacatacgttcagattttttcccctcactagtcatgttgtctgtttgatttcaataatagtaaactcacaggattttgatatagtaacgtcatactatca

SEQ ID NO: 339153 - DNA, 120 bp, Artificial Sequence
  ENSG00000137776_40 (sequence is synthesized)
ttaagcaaggcaaataaaaagcctagaagcagtgatgaaatgaagctactgactgaaaatctcacatgcccgaagcctttctgttttgggggaatgcaagacatctttgaaaacggtaat

SEQ ID NO: 339154 - DNA, 120 bp, Artificial Sequence
  ENSG00000137776_41 (sequence is synthesized)
tgcagactgactggacaggatgaagactggaaataaccaatttcctgaacgtcacggagcaggagcatctttggagccttctgtaccagttttccctacgaatccggactactcaagcat

SEQ ID NO: 339155 - DNA, 120 bp, Artificial Sequence
  ENSG00000137776_42 (sequence is synthesized)
agcttcgttatgaacaagaaaaaaggaattccttgaaacgcccacgtgatgtagatcatagcaaatatttctcttcaaggcgagatgatccttactggagcgagaataaaaagttgtctc

SEQ ID NO: 339156 - DNA, 120 bp, Artificial Sequence
  ENSG00000137776_43 (sequence is synthesized)
tagtgctactctttgctatttccctctggcagtctgccttcttgggtcaaggaagaaaagttactgttgccaggctttgggtgacttgtagcccttaagattcggctgaagctgattaga

SEQ ID NO: 339157 - DNA, 120 bp, Artificial Sequence
  ENSG00000137776_44 (sequence is synthesized)
tatgtaattcaacaattaagtctttgctagtttgtactcctgatgtgttatgtcttgagtttactagccctgttatgtccacagttctaacatgtggtatgtatgactccaagtaaatgt

SEQ ID NO: 339158 - DNA, 120 bp, Artificial Sequence
  ENSG00000137776_45 (sequence is synthesized)
aagatcactctacattaagggggtggcttcaagaacatgtacagtaattagtgtcttatgatcctgcctataatatttttgaccgtcataagttacttttaaaaattttcaagatcttca

SEQ ID NO: 339159 - DNA, 120 bp, Artificial Sequence
  ENSG00000137776_46 (sequence is synthesized)
gaccgtcataagttacttttaaaaattttcaagatcttcataataatgcagtgtgttctactgattgcattgtcgaatgtcagcatatatttggtttttttgttgttttttgttttttgt

SEQ ID NO: 339160 - DNA, 120 bp, Artificial Sequence
  ENSG00000137776_47 (sequence is synthesized)
tcagaaaatctagatcttcaggcatcttggggaaaatcagtgcaagaatcctcagggagtcatttgttcaaataacctaatctaggcctttggaattgttaatttgtatgaatagcacta

SEQ ID NO: 339161 - DNA, 120 bp, Artificial Sequence
  ENSG00000137776_48 (sequence is synthesized)
tcatctaaagatgacaaaggtaaagaatttttttccctatttatttcagtgttgacattgtgtattttcattaaaaagtagtagttgcgcggtgttttctttgacatttagtccttaaaa

SEQ ID NO: 339162 - DNA, 120 bp, Artificial Sequence
  ENSG00000137776_49 (sequence is synthesized)
attttattgacagactagaaacttgagatggtctttatataaactgtggaattatatatattacagaaaactgattgatgtgttactgtttactttgtaaactggtaatggggtacgtta

SEQ ID NO: 339163 - DNA, 120 bp, Artificial Sequence
  ENSG00000137776_50 (sequence is synthesized)
aaaacccattagctagggaacacttacctggtgtgttctaagggactgtgttgaatattaatagatactttcttacattataatttcagaactattttatcttttgttactcatttataa

SEQ ID NO: 339164 - DNA, 120 bp, Artificial Sequence
  ENSG00000137776_51 (sequence is synthesized)
ctactgtgtatcaccacaacctttttcctgttctgtctttaaataatacttgtgtgtatttgtggagtctagtgttcttttttcttttttttaaattcttgtaagtttcaaagtgcaata

SEQ ID NO: 339165 - DNA, 120 bp, Artificial Sequence
  ENSG00000137776_52 (sequence is synthesized)
tttagttgctttctgatactgagaaatctctggttatctcatgcccatgagctgtagtttcatcttgtacatgtgctgtgtttacttgaaaaatacttaatttctagaaaaggattttaa

SEQ ID NO: 339166 - DNA, 120 bp, Artificial Sequence
  ENSG00000137776_53 (sequence is synthesized)
gggaaaataaaacattcaggtactgcaaagcttttaaatacctcctaaatgtgtaaaggagaattgtatgcatcctccatagtttattttaaatcgttagaaatcataaggatgtgattt

SEQ ID NO: 339167 - DNA, 120 bp, Artificial Sequence
  ENSG00000137776_54 (sequence is synthesized)
atgaattggttggtcttgcttaaaagaatgtgaaatatagaaattgttccttttaattgcttgtatactgtttctcttaaagtgagtaaaaattattttccaaataaagtcaagtgaatg

SEQ ID NO: 339168 - DNA, 120 bp, Artificial Sequence
  ENSG00000137776_55 (sequence is synthesized)
aagatgatgcttttatcaaggtgtaaattaccaaaaacgtttggtggatagcccacactactttgcctctagttgtaccaaattttcttaccattaaaaggactgtgaattggagaatca

SEQ ID NO: 339169 - DNA, 120 bp, Artificial Sequence
  ENSG00000137776_56 (sequence is synthesized)
ccctttaggctaagactagagaattagaaagtacaggctcccatcactggaataaaagtcatgatcaacagggatgggaaggattacagtactggggtagacccagtgcactagcaagtg

SEQ ID NO: 339170 - DNA, 120 bp, Artificial Sequence
  ENSG00000137776_57 (sequence is synthesized)
ggaacagtctgtgtttctttccctgtctacctttctgatgccaaatgtttttcattatgactggaaatacattgtcatagtaggcttcaataataattaaacagattttgaacattctta

SEQ ID NO: 339171 - DNA, 120 bp, Artificial Sequence
  ENSG00000137776_58 (sequence is synthesized)
taaagtgttaattactcaggttaagatgcttattttaagcctagtattttgcatcatgaattttgtgctttttgttgaacaatggtcactgaagtatgtaggttaaagataaagacctat

SEQ ID NO: 339172 - DNA, 120 bp, Artificial Sequence
  ENSG00000137776_59 (sequence is synthesized)
gtaatattgacaacgtttaatattgtcaatctcattaactctcataattgagaaatatagtaaataactttttctttagttaaatgagatacaaaagctaaaattaataatctctccagg

SEQ ID NO: 339173 - DNA, 120 bp, Artificial Sequence
  ENSG00000137776_60 (sequence is synthesized)
cctttaggtagaaagctggccaggggaatagctacgagacaattgatatacatgttagttcctggatgagatatcacagggaaggatattggtaatttgttttttatctgccattgcatt

SEQ ID NO: 339174 - DNA, 120 bp, Artificial Sequence
  ENSG00000137776_61 (sequence is synthesized)
gcacacaaccaacactttatcctttccataaaagtcattatagtttctgagagactgaattgcaactactgaaaaccctagatctgcctgaacatttccctgtatcaacccgtagtctcc

SEQ ID NO: 339175 - DNA, 120 bp, Artificial Sequence
  ENSG00000137801_0 (sequence is synthesized)
agccgctgcgcccgagctggcctgcgagttcagggctcctgtcgctctccaggagcaacctctactccggacgcacaggcattccccgcgcccctccagccctcgccgccctcgccaccg

SEQ ID NO: 339176 - DNA, 120 bp, Artificial Sequence
  ENSG00000137801_1 (sequence is synthesized)
ctcccggccgccgcgctccggtacacacaggatccctgctgggcaccaacagctccaccatggggctggcctggggactaggcgtcctgttcctgatgcatgtgtgtggcaccaaccgca

SEQ ID NO: 339177 - DNA, 120 bp, Artificial Sequence
  ENSG00000137801_2 (sequence is synthesized)
ttccagagtctggcggagacaacagcgtgtttgacatctttgaactcaccggggccgcccgcaaggggtctgggcgccgactggtgaagggccccgacccttccagcccagctttccgca

SEQ ID NO: 339178 - DNA, 120 bp, Artificial Sequence
  ENSG00000137801_3 (sequence is synthesized)
tcgaggatgccaacctgatcccccctgtgcctgatgacaagttccaagacctggtggatgctgtgcgggcagaaaagggtttcctccttctggcatccctgaggcagatgaagaagaccc

SEQ ID NO: 339179 - DNA, 120 bp, Artificial Sequence
  ENSG00000137801_4 (sequence is synthesized)
ggggcacgctgctggccctggagcggaaagaccactctggccaggtcttcagcgtggtgtccaatggcaaggcgggcaccctggacctcagcctgaccgtccaaggaaagcagcacgtgg

SEQ ID NO: 339180 - DNA, 120 bp, Artificial Sequence
  ENSG00000137801_5 (sequence is synthesized)
tgtctgtggaagaagctctcctggcaaccggccagtggaagagcatcaccctgtttgtgcaggaagacagggcccagctgtacatcgactgtgaaaagatggagaatgctgagttggacg

SEQ ID NO: 339181 - DNA, 120 bp, Artificial Sequence
  ENSG00000137801_6 (sequence is synthesized)
tccccatccaaagcgtcttcaccagagacctggccagcatcgccagactccgcatcgcaaaggggggcgtcaatgacaatttccagggggtgctgcagaatgtgaggtttgtctttggaa

SEQ ID NO: 339182 - DNA, 120 bp, Artificial Sequence
  ENSG00000137801_7 (sequence is synthesized)
ccacaccagaagacatcctcaggaacaaaggctgctccagctctaccagtgtcctcctcacccttgacaacaacgtggtgaatggttccagccctgccatccgcactaactacattggcc

SEQ ID NO: 339183 - DNA, 120 bp, Artificial Sequence
  ENSG00000137801_8 (sequence is synthesized)
acaagacaaaggacttgcaagccatctgcggcatctcctgtgatgagctgtccagcatggtcctggaactcaggggcctgcgcaccattgtgaccacgctgcaggacagcatccgcaaag

SEQ ID NO: 339184 - DNA, 120 bp, Artificial Sequence
  ENSG00000137801_9 (sequence is synthesized)
tgactgaagagaacaaagagttggccaatgagctgaggcggcctcccctatgctatcacaacggagttcagtacagaaataacgaggaatggactgttgatagctgcactgagtgtcact

SEQ ID NO: 339185 - DNA, 120 bp, Artificial Sequence
  ENSG00000137801_10 (sequence is synthesized)
gtcagaactcagttaccatctgcaaaaaggtgtcctgccccatcatgccctgctccaatgccacagttcctgatggagaatgctgtcctcgctgttggcccagcgactctgcggacgatg

SEQ ID NO: 339186 - DNA, 120 bp, Artificial Sequence
  ENSG00000137801_11 (sequence is synthesized)
gctggtctccatggtccgagtggacctcctgttctacgagctgtggcaatggaattcagcagcgcggccgctcctgcgatagcctcaacaaccgatgtgagggctcctcggtccagacac

SEQ ID NO: 339187 - DNA, 120 bp, Artificial Sequence
  ENSG00000137801_12 (sequence is synthesized)
ggacctgccacattcaggagtgtgacaagagatttaaacaggatggtggctggagccactggtccccgtggtcatcttgttctgtgacatgtggtgatggtgtgatcacaaggatccggc

SEQ ID NO: 339188 - DNA, 120 bp, Artificial Sequence
  ENSG00000137801_13 (sequence is synthesized)
tctgcaactctcccagcccccagatgaacgggaaaccctgtgaaggcgaagcgcgggagaccaaagcctgcaagaaagacgcctgccccatcaatggaggctggggtccttggtcaccat

SEQ ID NO: 339189 - DNA, 120 bp, Artificial Sequence
  ENSG00000137801_14 (sequence is synthesized)
gggacatctgttctgtcacctgtggaggaggggtacagaaacgtagtcgtctctgcaacaaccccacaccccagtttggaggcaaggactgcgttggtgatgtaacagaaaaccagatct

SEQ ID NO: 339190 - DNA, 120 bp, Artificial Sequence
  ENSG00000137801_15 (sequence is synthesized)
gcaacaagcaggactgtccaattgatggatgcctgtccaatccctgctttgccggcgtgaagtgtactagctaccctgatggcagctggaaatgtggtgcttgtccccctggttacagtg

SEQ ID NO: 339191 - DNA, 120 bp, Artificial Sequence
  ENSG00000137801_16 (sequence is synthesized)
gaaatggcatccagtgcacagatgttgatgagtgcaaagaagtgcctgatgcctgcttcaaccacaatggagagcaccggtgtgagaacacggaccccggctacaactgcctgccctgcc

SEQ ID NO: 339192 - DNA, 120 bp, Artificial Sequence
  ENSG00000137801_17 (sequence is synthesized)
ccccacgcttcaccggctcacagcccttcggccagggtgtcgaacatgccacggccaacaaacaggtgtgcaagccccgtaacccctgcacggatgggacccacgactgcaacaagaacg

SEQ ID NO: 339193 - DNA, 120 bp, Artificial Sequence
  ENSG00000137801_18 (sequence is synthesized)
ccaagtgcaactacctgggccactatagcgaccccatgtaccgctgcgagtgcaagcctggctacgctggcaatggcatcatctgcggggaggacacagacctggatggctggcccaatg

SEQ ID NO: 339194 - DNA, 120 bp, Artificial Sequence
  ENSG00000137801_19 (sequence is synthesized)
agaacctggtgtgcgtggccaatgcgacttaccactgcaaaaaggataattgccccaaccttcccaactcagggcaggaagactatgacaaggatggaattggtgatgcctgtgatgatg

SEQ ID NO: 339195 - DNA, 120 bp, Artificial Sequence
  ENSG00000137801_20 (sequence is synthesized)
acgatgacaatgataaaattccagatgacagggacaactgtccattccattacaacccagctcagtatgactatgacagagatgatgtgggagaccgctgtgacaactgtccctacaacc

SEQ ID NO: 339196 - DNA, 120 bp, Artificial Sequence
  ENSG00000137801_21 (sequence is synthesized)
acaacccagatcaggcagacacagacaacaatggggaaggagacgcctgtgctgcagacattgatggagacggtatcctcaatgaacgggacaactgccagtacgtctacaatgtggacc

SEQ ID NO: 339197 - DNA, 120 bp, Artificial Sequence
  ENSG00000137801_22 (sequence is synthesized)
agagagacactgatatggatggggttggagatcagtgtgacaattgccccttggaacacaatccggatcagctggactctgactcagaccgcattggagatacctgtgacaacaatcagg

SEQ ID NO: 339198 - DNA, 120 bp, Artificial Sequence
  ENSG00000137801_23 (sequence is synthesized)
atattgatgaagatggccaccagaacaatctggacaactgtccctatgtgcccaatgccaaccaggctgaccatgacaaagatggcaagggagatgcctgtgaccacgatgatgacaacg

SEQ ID NO: 339199 - DNA, 120 bp, Artificial Sequence
  ENSG00000137801_24 (sequence is synthesized)
atggcattcctgatgacaaggacaactgcagactcgtgcccaatcccgaccagaaggactctgacggcgatggtcgaggtgatgcctgcaaagatgattttgaccatgacagtgtgccag

SEQ ID NO: 339200 - DNA, 120 bp, Artificial Sequence
  ENSG00000137801_25 (sequence is synthesized)
acatcgatgacatctgtcctgagaatgttgacatcagtgagaccgatttccgccgattccagatgattcctctggaccccaaagggacatcccaaaatgaccctaactgggttgtacgcc

SEQ ID NO: 339201 - DNA, 120 bp, Artificial Sequence
  ENSG00000137801_26 (sequence is synthesized)
atcagggtaaagaactcgtccagactgtcaactgtgatcctggactcgctgtaggttatgatgagtttaatgctgtggacttcagtggcaccttcttcatcaacaccgaaagggacgatg

SEQ ID NO: 339202 - DNA, 120 bp, Artificial Sequence
  ENSG00000137801_27 (sequence is synthesized)
actatgctggatttgtctttggctaccagtccagcagccgcttttatgttgtgatgtggaagcaagtcacccagtcctactgggacaccaaccccacgagggctcagggatactcgggcc

SEQ ID NO: 339203 - DNA, 120 bp, Artificial Sequence
  ENSG00000137801_28 (sequence is synthesized)
tttctgtgaaagttgtaaactccaccacagggcctggcgagcacctgcggaacgccctgtggcacacaggaaacacccctggccaggtgcgcaccctgtggcatgaccctcgtcacatag

SEQ ID NO: 339204 - DNA, 120 bp, Artificial Sequence
  ENSG00000137801_29 (sequence is synthesized)
gctggaaagatttcaccgcctacagatggcgtctcagccacaggccaaagacgggtttcattagagtggtgatgtatgaagggaagaaaatcatggctgactcaggacccatctatgata

SEQ ID NO: 339205 - DNA, 120 bp, Artificial Sequence
  ENSG00000137801_30 (sequence is synthesized)
aaacctatgctggtggtagactagggttgtttgtcttctctcaagaaatggtgttcttctctgacctgaaatacgaatgtagagatccctaatcatcaaattgttgattgaaagactgat

SEQ ID NO: 339206 - DNA, 120 bp, Artificial Sequence
  ENSG00000137801_31 (sequence is synthesized)
cataaaccaatgctggtattgcaccttctggaactatgggcttgagaaaacccccaggatcacttctccttggcttccttcttttctgtgcttgcatcagtgtggactcctagaacgtgc

SEQ ID NO: 339207 - DNA, 120 bp, Artificial Sequence
  ENSG00000137801_32 (sequence is synthesized)
agcatctacttgcttcagttgggaaggtgcccattccactctgcctttgtcacagagcagggtgctattgtgaggccatctctgagcagtggactcaaaagcattttcaggcatgtcaga

SEQ ID NO: 339208 - DNA, 120 bp, Artificial Sequence
  ENSG00000137801_33 (sequence is synthesized)
gaagggaggactcactagaattagcaaacaaaaccaccctgacatcctccttcaggaacacggggagcagaggccaaagcactaaggggagggcgcatacccgagacgattgtatgaaga

SEQ ID NO: 339209 - DNA, 120 bp, Artificial Sequence
  ENSG00000137801_34 (sequence is synthesized)
aaatatggaggaactgttacatgttcggtactaagtcattttcaggggattgaaagactattgctggatttcatgatgctgactggcgttagctgattaacccatgtaaataggcactta

SEQ ID NO: 339210 - DNA, 120 bp, Artificial Sequence
  ENSG00000137801_35 (sequence is synthesized)
aatagaagcaggaaagggagacaaagactggcttctggacttcctccctgatccccacccttactcatcacctgcagtggccagaattagggaatcagaatcaaaccagtgtaaggcagt

SEQ ID NO: 339211 - DNA, 120 bp, Artificial Sequence
  ENSG00000137801_36 (sequence is synthesized)
gctggctgccattgcctggtcacattgaaattggtggcttcattctagatgtagcttgtgcagatgtagcaggaaaataggaaaacctaccatctcagtgagcaccagctgcctcccaaa

SEQ ID NO: 339212 - DNA, 120 bp, Artificial Sequence
  ENSG00000137801_37 (sequence is synthesized)
ggaggggcagccgtgcttatatttttatggttacaatggcacaaaattattatcaacctaactaaaacattccttttctcttttttcctgaattatcatggagttttctaattctctctt

SEQ ID NO: 339213 - DNA, 120 bp, Artificial Sequence
  ENSG00000137801_38 (sequence is synthesized)
ttggaatgtagattttttttaaatgctttacgatgtaaaatatttattttttacttattctggaagatctggctgaaggattattcatggaacaggaagaagcgtaaagactatccatgt

SEQ ID NO: 339214 - DNA, 120 bp, Artificial Sequence
  ENSG00000137801_39 (sequence is synthesized)
catctttgttgagagtcttcgtgactgtaagattgtaaatacagattatttattaactctgttctgcctggaaatttaggcttcatacggaaagtgtttgagagcaagtagttgacattt

SEQ ID NO: 339215 - DNA, 120 bp, Artificial Sequence
  ENSG00000137801_40 (sequence is synthesized)
atcagcaaatctcttgcaagaacagcacaaggaaaatcagtctaataagctgctctgccccttgtgctcagagtggatgttatgggattctttttttctctgttttatcttttcaagtgg

SEQ ID NO: 339216 - DNA, 120 bp, Artificial Sequence
  ENSG00000137801_41 (sequence is synthesized)
aattagttggttatccatttgcaaatgttttaaattgcaaagaaagccatgaggtcttcaatactgttttaccccatcccttgtgcatatttccagggagaaggaaagcatatacacttt

SEQ ID NO: 339217 - DNA, 120 bp, Artificial Sequence
  ENSG00000137801_42 (sequence is synthesized)
tttctttcatttttccaaaagagaaaaaaatgacaaaaggtgaaacttacatacaaatattacctcatttgttgtgtgactgagtaaagaatttttggatcaagcggaaagagtttaagt

SEQ ID NO: 339218 - DNA, 120 bp, Artificial Sequence
  ENSG00000137801_43 (sequence is synthesized)
gtctaacaaacttaaagctactgtagtacctaaaaagtcagtgttgtacatagcataaaaactctgcagagaagtattcccaataaggaaatagcattgaaatgttaaatacaatttctg

SEQ ID NO: 339219 - DNA, 120 bp, Artificial Sequence
  ENSG00000137801_44 (sequence is synthesized)
aaagttatgttttttttctatcatctggtataccattgctttatttttataaattattttctcattgccattggaatagatatctcagattgtgtagatatgctatttaaataatttatc

SEQ ID NO: 339220 - DNA, 120 bp, Artificial Sequence
  ENSG00000137801_45 (sequence is synthesized)
gatatgctatttaaataatttatcaggaaatactgcctgtagagttagtatttctatttttatataatgtttgcacactgaattgaagaattgttggttttttcttttttttgttttgtt

SEQ ID NO: 339221 - DNA, 120 bp, Artificial Sequence
  ENSG00000137801_46 (sequence is synthesized)
tgacctcccatttttactatttgccaatacctttttctaggaatgtgcttttttttgtacacatttttatccattttacattctaaagcagtgtaagttgtatattactgtttcttatgt

SEQ ID NO: 339222 - DNA, 120 bp, Artificial Sequence
  ENSG00000137801_47 (sequence is synthesized)
acaaggaacaacaataaatcatatggaaatttatatttatacttactgtatccatgcttatttgttctctactggctttatgtcatgaagtatatgcgtaaataccattcataaatcaat

SEQ ID NO: 339223 - DNA, 120 bp, Artificial Sequence
  ENSG00000137801_48 (sequence is synthesized)
atagcatatacaaaaataaattacagtaagtcatagcaacattcacagtttgtatgtgattgagaaagactgagttgctcaggcctaggcttagaatttgctgcgtttgtggaataaaag

SEQ ID NO: 339224 - DNA, 120 bp, Artificial Sequence
  ENSG00000137801_49 (sequence is synthesized)
aacaaaatgatacattagcctgccatatcaaaaacatataaaagagaaattatccctaagtcaagggcccccataagaataaaatttcttattaaggtcattagatgtcattgaatcctt

SEQ ID NO: 339225 - DNA, 120 bp, Artificial Sequence
  ENSG00000137801_50 (sequence is synthesized)
ttcaaagtgcagtatgaaaacaaagggaaaaacactgaagcacacgcaactctcacagcgacattttctgacccacgaatgatgccttgggtgggcaacacgattgcatgttgtggagac

SEQ ID NO: 339226 - DNA, 120 bp, Artificial Sequence
  ENSG00000137801_51 (sequence is synthesized)
acttcggaagtaaatgtggatgagggaggagctgtccttgcaatgttgagccaagcattacagatacctcctcttgaagaaggaataataagtttaatcaaaaaagaagactaaaaaatg

SEQ ID NO: 339227 - DNA, 120 bp, Artificial Sequence
  ENSG00000137801_52 (sequence is synthesized)
taaaatttggaaggaatccataaatgcgtgtgtgtctaaatacaaattatcatgtgaagaaaaggcccaagtgtaccaataagcagaccttgatttttggatgggctaattatgaatgtg

SEQ ID NO: 339228 - DNA, 120 bp, Artificial Sequence
  ENSG00000137801_53 (sequence is synthesized)
gaatactgaccagttaatttccagttttaatgaaaacagatcaaagaagaaattttatgagtaggttaaaggtctggctttgaggtctattaaacactagaaaggactggctgggtgaga

SEQ ID NO: 339229 - DNA, 120 bp, Artificial Sequence
  ENSG00000137801_54 (sequence is synthesized)
taaaatcttccttgttgattttcactctcattctataaatactcatctttctgagtagccatgatcacatacaaatgtaaattgccaaatcattttatagtaccaaggtgaagaagcagg

SEQ ID NO: 339230 - DNA, 120 bp, Artificial Sequence
  ENSG00000137801_55 (sequence is synthesized)
aactagaaagtgttgataatagctgtggagttaggaaaactgatgtgaaggaaataattctttgaaatggcaaagaattaaataccatcattcattatcagaagagttcaacgtttgaag

SEQ ID NO: 339231 - DNA, 120 bp, Artificial Sequence
  ENSG00000137801_56 (sequence is synthesized)
tgctgggagataattctaattcattcttggatagtgaagcaaaactgattgaaaataccaagataagacagaaaaagtgactggaaagaggagcttttcttccaggcatgttccagtttc

SEQ ID NO: 339232 - DNA, 120 bp, Artificial Sequence
  ENSG00000137801_57 (sequence is synthesized)
accctaagactgaccttcaaataatcaggttgtactgaaataaaggacttgttaaaaattaaaattatgtcatcgagatgatagcttttttcctcctccaacagtttattgtcatgtgtt

SEQ ID NO: 339233 - DNA, 120 bp, Artificial Sequence
  ENSG00000137801_58 (sequence is synthesized)
gtgggagagctcgagtgaagagcaataaactccaggtcttataagaatgtacatacaataaaggtggtgccagcagtttttttttttctaaagagtcacatgtagaaaagcctccagtat

SEQ ID NO: 339234 - DNA, 120 bp, Artificial Sequence
  ENSG00000137801_59 (sequence is synthesized)
cacatgtagaaaagcctccagtattaagctcctgaattcattccttaaataaattggctctctctctcttctataatttctttttctttttatttttgagatgaagtcttgctctgtcgc

SEQ ID NO: 339235 - DNA, 69 bp, Artificial Sequence
  ENSG00000137801_60 (sequence is synthesized)
ttctagcctggctaattctgtatttttagtaaagacggggtttcaccttgttccggacaaacactaagc

SEQ ID NO: 339236 - DNA, 120 bp, Artificial Sequence
  ENSG00000137801_61 (sequence is synthesized)
taaagacggggtttcaccttgttccggacaaacactaagccctaaagggaaatccaaaataaaaacatctatttttaataacactttctatctaaatcagggtgactttttaaaaaaaat

SEQ ID NO: 339237 - DNA, 120 bp, Artificial Sequence
  ENSG00000137801_62 (sequence is synthesized)
ccggaagctttttgttgaattacgttacagacttagttaccagtccttgttagagttaccttcagttgacatgctgtgaatggtcccacctcttttatggcagaattcattacttaaaat

SEQ ID NO: 339238 - DNA, 120 bp, Artificial Sequence
  ENSG00000137801_63 (sequence is synthesized)
aactctattttcttcccccttacctaaataacagaaaggctcactatgtcccaaatatcattggcagaagcaaactataaagtcataagccctttgcagtgcaagtctagaaataatttt

SEQ ID NO: 339239 - DNA, 120 bp, Artificial Sequence
  ENSG00000137801_64 (sequence is synthesized)
cgctgcaagggtgagcatgggcagcagctctgcccagctggttgcctggcatctgcagcctgcagttcagtgggtcatagagcaggaaggttacctactagagaaacaaacagaagcaaa

SEQ ID NO: 339240 - DNA, 120 bp, Artificial Sequence
  ENSG00000137801_65 (sequence is synthesized)
gtcctgcaggctcagcaacttcttttaatgaaaaacaaactcaccctcttccccagcattctttccatgtgtcagagaagcagaggtttcttgaacgggcttaggagagtctatgacaag

SEQ ID NO: 339241 - DNA, 120 bp, Artificial Sequence
  ENSG00000137801_66 (sequence is synthesized)
ctcccggccgccgcgctccggtacacacagcaaacgcggggtcaaagagggatggtcccggccctgtccccatgcccagccccgtttctgcgcaccgtccctccctgcctagctgatctc

SEQ ID NO: 339242 - DNA, 120 bp, Artificial Sequence
  ENSG00000137801_67 (sequence is synthesized)
tttcattaggtacgatcatactgattcactttcacttacagtcacactgagggacaaaaagacaaaaagtattaaatagcattgtcactaaacaagattttttttccctgcagagtggtg

SEQ ID NO: 339243 - DNA, 120 bp, Artificial Sequence
  ENSG00000137801_68 (sequence is synthesized)
tatcggttccctataccctataatatcttacactgtgttaagtgcccagcatggcagtatggcagcttagaccaaccatttactgtgactgtctctctctccttgtctcagatggatgcc

SEQ ID NO: 339244 - DNA, 120 bp, Artificial Sequence
  ENSG00000137801_69 (sequence is synthesized)
gagagagcttatgggtgcctgactagcactggggatgctgtgctttgaccaagactctgaccagggagtcttagaaagttcccagcatcaccagctgcagcattgaactctgctttgtaa

SEQ ID NO: 339245 - DNA, 120 bp, Artificial Sequence
  ENSG00000137801_70 (sequence is synthesized)
ccctcctctctgtctgctttatatgtgtgctcagtggcacacaacaaatatgagaggacttggaaaaattccccattgcagccctctaacttagatcagctcagtacctttcaagcattg

SEQ ID NO: 339246 - DNA, 120 bp, Artificial Sequence
  ENSG00000137801_71 (sequence is synthesized)
attgactttgggcacactatgaactgagatgatgggattatattctacatctcactaacttctaacccacagggatccatttttttaactatgtccttttaacttttgtagtgatcgttt

SEQ ID NO: 339247 - DNA, 120 bp, Artificial Sequence
  ENSG00000137801_72 (sequence is synthesized)
tacactgagtgatcaattagcctatccactaggtagaaagtattgctgattttcacagttttagacatattatgcacatggtttgaggcttgagctgttttcaaggacaacattgttaag

SEQ ID NO: 339248 - DNA, 120 bp, Artificial Sequence
  ENSG00000137802_0 (sequence is synthesized)
gagccgatcgtgccaccatagctcctgctgctgcctctaccgctgcggctaccgcggcggagctgaaattgccgaacgcgatgcccgagggcgctgtgagcggggtggccttagctcgcc

SEQ ID NO: 339249 - DNA, 120 bp, Artificial Sequence
  ENSG00000137802_1 (sequence is synthesized)
gaggctggtcagtgagagggcatactgggaagccctctggagtgggaagacagtgccgctgttgagacaagacccaggactgggccggggactgtcccaaagggtttctcgtcataatgg

SEQ ID NO: 339250 - DNA, 120 bp, Artificial Sequence
  ENSG00000137802_2 (sequence is synthesized)
ctgtggaagggtcaaccattaccagccggatcaagaatctgttgagatctccatccatcaaactgcgcaggagtaaggcaggaaaccgacgagaggacctcagctccaaggtgaccttgg

SEQ ID NO: 339251 - DNA, 120 bp, Artificial Sequence
  ENSG00000137802_3 (sequence is synthesized)
agaaggtgctgggaattacagtgtctggaggcagaggacttgcctgtgacccccgatcaggtttagttgcttacccagcagggtgtgtggttgtgttgttcaatccccggaaacacaaac

SEQ ID NO: 339252 - DNA, 120 bp, Artificial Sequence
  ENSG00000137802_4 (sequence is synthesized)
agcaccacatcctcaacagttccaggaaaaccatcactgcccttgccttctcccctgatggcaagtacttggtcactggagagagtgggcacatgcctgccgtgcgggtttgggacgtgg

SEQ ID NO: 339253 - DNA, 120 bp, Artificial Sequence
  ENSG00000137802_5 (sequence is synthesized)
cagagcacagccaggtggccgagctgcaggagcacaagtatggtgtggcttgtgtggccttctctcctagcgccaagtacattgtctctgtgggctaccagcatgacatgatcgtcaacg

SEQ ID NO: 339254 - DNA, 120 bp, Artificial Sequence
  ENSG00000137802_6 (sequence is synthesized)
tgtgggcctggaagaaaaacattgtggtggcctccaacaaggtgtccagtcgggtgacagcagtgtccttctctgaggattgcagctactttgtcactgcaggcaaccgacacatcaaat

SEQ ID NO: 339255 - DNA, 120 bp, Artificial Sequence
  ENSG00000137802_7 (sequence is synthesized)
tctggtatctcgatgacagcaagacctcaaaggtgaatgccactgtgcccttgctgggccgctcagggctgctgggagagctacggaacaacctattcactgatgtggcctgtggcagag

SEQ ID NO: 339256 - DNA, 120 bp, Artificial Sequence
  ENSG00000137802_8 (sequence is synthesized)
gaaaaaaggcggacagtaccttctgcatcacgtcctcagggctgctgtgcgagttcagtgatcgaaggcttttggacaagtgggtggagctgaggaccacagtggcccactgcatctctg

SEQ ID NO: 339257 - DNA, 120 bp, Artificial Sequence
  ENSG00000137802_9 (sequence is synthesized)
tgagccaagactacatcttctgtggctgtgctgatggcaccgtgcgccttttcaacccctctaacctgcacttccttagcaccttgccccgaccccatgctctggggacagacattgcta

SEQ ID NO: 339258 - DNA, 120 bp, Artificial Sequence
  ENSG00000137802_10 (sequence is synthesized)
gcgtcaccgaggccagtcgcctcttctctggagtggcgaatgccaggtatccagacaccattgccttgacctttgatcctactaatcagtggctgtcttgtgtgtacaacgatcatagca

SEQ ID NO: 339259 - DNA, 120 bp, Artificial Sequence
  ENSG00000137802_11 (sequence is synthesized)
tttatgtttgggatgtgagggaccccaagaaagtgggcaaggtgtactcggctctgtatcattcttcctgcgtctggagtgtggaggtctaccccgaggtgaaggatagtaaccaggcct

SEQ ID NO: 339260 - DNA, 120 bp, Artificial Sequence
  ENSG00000137802_12 (sequence is synthesized)
gcctgccccccagttcctttattacctgctcctcagacaacaccatccgcctgtggaacacagagagctccggggtgcatggctccaccctccaccgaaacatcctcagcagtgacctca

SEQ ID NO: 339261 - DNA, 120 bp, Artificial Sequence
  ENSG00000137802_13 (sequence is synthesized)
ttaaaatcatctatgtggatgggaacacccaggccctgctggacacagagctgcctggaggagacaaagctgatgcatccctgttggatccccgcgtgggcatccgctcggtgtgtgtca

SEQ ID NO: 339262 - DNA, 120 bp, Artificial Sequence
  ENSG00000137802_14 (sequence is synthesized)
gccccaatggacagcatctagcatcaggggaccgtatgggcacacttagggtgcacgaacttcagtccctgagtgagatgctgaaggtggaggcccatgactctgagattctgtgcctgg

SEQ ID NO: 339263 - DNA, 120 bp, Artificial Sequence
  ENSG00000137802_15 (sequence is synthesized)
agtattctaagccagacacaggtctgaaactgctagcatcggcgagccgggaccggctgatccatgtgctggatgccgggcgggagtacagcctacagcagacgctggacgaacactcat

SEQ ID NO: 339264 - DNA, 120 bp, Artificial Sequence
  ENSG00000137802_16 (sequence is synthesized)
cctccatcactgctgttaagtttgcagccagtgatgggcaagtccgcatgatcagctgtggagcagacaagagcatctacttccgcactgcgcagaagtctggagatggagtgcagttca

SEQ ID NO: 339265 - DNA, 120 bp, Artificial Sequence
  ENSG00000137802_17 (sequence is synthesized)
cacggacacaccacgtggtgcggaagacgaccctctatgacatggatgtggagcccagctggaagtacacggctatcggctgccaggaccgaaatattcggatatttaacatcagcagtg

SEQ ID NO: 339266 - DNA, 120 bp, Artificial Sequence
  ENSG00000137802_18 (sequence is synthesized)
gaaagcagaagaagctgtttaaagggtcacagggtgaggacggcacactcattaaggtgcagacagacccctcagggatctacattgccaccagctgttctgacaagaatctctccattt

SEQ ID NO: 339267 - DNA, 120 bp, Artificial Sequence
  ENSG00000137802_19 (sequence is synthesized)
ttgacttctcctcaggcgagtgcgtggccaccatgtttggccactcagagattgtcactggcatgaaatttagtaatgattgtaaacatctcatctctgtgtctggggacagctgcatat

SEQ ID NO: 339268 - DNA, 120 bp, Artificial Sequence
  ENSG00000137802_20 (sequence is synthesized)
ttgtgtggcgcctgagctctgagatgaccatcagcatgaggcagcgtctggccgagttgcgccagcgtcagcggggcggcaagcagcaaggaccatcctctccccaaagggcttctggac

SEQ ID NO: 339269 - DNA, 120 bp, Artificial Sequence
  ENSG00000137802_21 (sequence is synthesized)
ccaaccggcaccaggccccatcaatgctgtctcctggaccggctctctcatcagacagtgacaaggagggagaagatgaggggactgaagaagaacttccagcactgcccgtccttgcca

SEQ ID NO: 339270 - DNA, 120 bp, Artificial Sequence
  ENSG00000137802_22 (sequence is synthesized)
agagtaccaagaaggcactggcctcggtccccagcccagctttgccccgaagcctgtcccactgggagatgagtcgggcacaggagtccgtggggttcctggacccagctcctgcagcca

SEQ ID NO: 339271 - DNA, 120 bp, Artificial Sequence
  ENSG00000137802_23 (sequence is synthesized)
acccaggacccagaagaagagggcgctgggttcagccaggtgtggaactgagcgttagatccatgctggatctgcggcagctggaaacactggccccaagcctgcaggaccctagccagg

SEQ ID NO: 339272 - DNA, 120 bp, Artificial Sequence
  ENSG00000137802_24 (sequence is synthesized)
actcgctggccatcatcccatctggtcccaggaagcatgggcaggaggcccttgagacttcactcactagccagaatgaaaagccccctcggcctcaggcttcccaaccttgttcctatc

SEQ ID NO: 339273 - DNA, 120 bp, Artificial Sequence
  ENSG00000137802_25 (sequence is synthesized)
cccatattatccgattattgtcacaagaggaaggggtctttgcccaagatctggaacctgcacccattgaagatggtattgtctacccggagccgagtgacaaccccaccatggatacca

SEQ ID NO: 339274 - DNA, 120 bp, Artificial Sequence
  ENSG00000137802_26 (sequence is synthesized)
gtgagttccaagtgcaggctccagcccggggaactctgggaagagtgtacccaggcagcaggagctcagaaaagcacagccctgacagtgcctgctctgtggattacagcagcagctgcc

SEQ ID NO: 339275 - DNA, 120 bp, Artificial Sequence
  ENSG00000137802_27 (sequence is synthesized)
tttccagcccggagcaccccactgaagactctgagagcacggagcccctcagtgtggatggcatctcctcagaccttgaagagccagctgagggtgatgaagaagaggaagaagaggagg

SEQ ID NO: 339276 - DNA, 120 bp, Artificial Sequence
  ENSG00000137802_28 (sequence is synthesized)
gaggcatgggcccctatgggctacaggagggcagcccccagactccagaccaggagcagtttctaaaacagcactttgagactctggccagtggagctgctccaggggccccagtgcagg

SEQ ID NO: 339277 - DNA, 120 bp, Artificial Sequence
  ENSG00000137802_29 (sequence is synthesized)
tgatgtcgagaccagcccaggtgccacaggcatctggtgagcagccgagaggcaatggtgccaatccccctggagcacccccggaggtggaaccgtcctctggcaaccccagcccccagc

SEQ ID NO: 339278 - DNA, 120 bp, Artificial Sequence
  ENSG00000137802_30 (sequence is synthesized)
aggcagcctctgtgctgttgccacgatgccgtctcaaccctgacagcagctgggctcccaagagagtggccacagccagccccttttctggactccagaaggcccagtctgtgcacagtc

SEQ ID NO: 339279 - DNA, 120 bp, Artificial Sequence
  ENSG00000137802_31 (sequence is synthesized)
tggtgccacaggaaagacatgaggccagtctgcaggccccttcaccaggcgcactgctgtctcgggagatcgaagctcaggatggtctgggctccctgcccccagctgatggccgtccgt

SEQ ID NO: 339280 - DNA, 120 bp, Artificial Sequence
  ENSG00000137802_32 (sequence is synthesized)
ctcggcctcactcctatcagaaccccaccaccagttccatggccaagatatcccgcagtatctctgttggggagaacctgggcctggtggctgaacctcaagctcatgcccccatccgag

SEQ ID NO: 339281 - DNA, 120 bp, Artificial Sequence
  ENSG00000137802_33 (sequence is synthesized)
tctcaccactcagcaagctggccctgcccagccgggctcacctggtcctggacatccccaaaccactgcctgaccgtcctaccctggctgcattctctcctgtcaccaaaggccgggccc

SEQ ID NO: 339282 - DNA, 120 bp, Artificial Sequence
  ENSG00000137802_34 (sequence is synthesized)
ctggcgaggcagaaaagcctggcttcccggtgggcctaggaaaagctcacagtacaactgagagatgggcctgtttgggggagggcaccactcccaagcctaggacagagtgccaggctc

SEQ ID NO: 339283 - DNA, 120 bp, Artificial Sequence
  ENSG00000137802_35 (sequence is synthesized)
atcctgggcccagcagcccctgtgcccagcaactgccagtcagcagcctcttccaaggccctgaaaacttgcagcccccaccccctgagaagactcccaaccccatggaatgcaccaagc

SEQ ID NO: 339284 - DNA, 120 bp, Artificial Sequence
  ENSG00000137802_36 (sequence is synthesized)
caggggcagccctgagccaggactcagagccagcggtgagcctggagcagtgtgagcagctggtggcagagctccgcggcagcgtgcgccaggcagtgcggctctaccactcggtggctg

SEQ ID NO: 339285 - DNA, 120 bp, Artificial Sequence
  ENSG00000137802_37 (sequence is synthesized)
gctgcaagatgccctcagcagagcaaagtcggattgcccagctcctcagagacaccttctcttcagtgcgacaggagctggaagctgtggctggggcagtgctgtccagcccaggcagca

SEQ ID NO: 339286 - DNA, 120 bp, Artificial Sequence
  ENSG00000137802_38 (sequence is synthesized)
gccctggggctgtgggagccgagcagacacaggccctgctggagcaatactcagaactgttgcttcgagccgtggaacggcgtatggaacgcaaactctgagttctggaagcctgtccca

SEQ ID NO: 339287 - DNA, 120 bp, Artificial Sequence
  ENSG00000137802_39 (sequence is synthesized)
agtgaatgaatgctccagcgattccaaactgcagcccctctgcccctcaccaaaacctgcggggctgcttggagtggaaagcagggagcagtgttcagaggcaaagcagccttcccagcc

SEQ ID NO: 339288 - DNA, 120 bp, Artificial Sequence
  ENSG00000137802_40 (sequence is synthesized)
gctcctcgtggggggcctgtatttattaatttatttccctgactgttgcctcacttccttggaactcctgcctccacagcccctccagtggcagggacaggtcttgggtctttgtcatct

SEQ ID NO: 339289 - DNA, 120 bp, Artificial Sequence
  ENSG00000137802_41 (sequence is synthesized)
tggtgctgtgagaggtaggagggcagcctgccccatctaggaatctgggaagggctggccctctcttagaagccatttgaaattactgcagggattagctccctgtggtggagcatacac

SEQ ID NO: 339290 - DNA, 120 bp, Artificial Sequence
  ENSG00000137802_42 (sequence is synthesized)
agggtactctggggtcgaggtgagaggtgatgtggtattcagtgcccgtcagccaactgtgggccttcacctctacctgcacttcccctctcacaccagctgcactcccgtggctgccag

SEQ ID NO: 339291 - DNA, 120 bp, Artificial Sequence
  ENSG00000137802_43 (sequence is synthesized)
agcagggtggttttccccaatacctggagctcagaaaggcagagccatctggccctccagggtgtccccagccatcaggagacttgagttggtatttggacctgagcccgcacattccac

SEQ ID NO: 339292 - DNA, 120 bp, Artificial Sequence
  ENSG00000137802_44 (sequence is synthesized)
tcccattctccctccaagaggggcccagcattgtatttccctgtgaccccttactctcctggccagaacttgagccagctgtgggatgttgctgcaggacagtaagccctcacctgggca

SEQ ID NO: 339293 - DNA, 120 bp, Artificial Sequence
  ENSG00000137802_45 (sequence is synthesized)
aacatgaagctctggcctcctttcctcagccccttgttcttccctgtcctccaccctggaccccagccggctgctggagcccagaggccaccttctccctgcatcctgaatgatgcttag

SEQ ID NO: 339294 - DNA, 120 bp, Artificial Sequence
  ENSG00000137802_46 (sequence is synthesized)
tcagaagcctgtgttggaacatccctcgtttacggggcgctggcctacctcctgaggacctcagccacagatgagatcacacgcatgcacgtgcacacatgtacacacacacacctacct

SEQ ID NO: 339295 - DNA, 120 bp, Artificial Sequence
  ENSG00000137802_47 (sequence is synthesized)
gcacagcacgctgttgagtgttggttgctagagtatctggctggctgctgtgtgcctggtttcctcacatcctgcctcagcttcaccaccctggcttatgtggaacacctatcagggagc

SEQ ID NO: 339296 - DNA, 120 bp, Artificial Sequence
  ENSG00000137802_48 (sequence is synthesized)
agaaaaggggtgcagtacactaagtgaacccagattctggattcttggtgtccacagcctagctgatacgagatagcccataggacacctggtttaggtagaaggagcctcctcaaaggc

SEQ ID NO: 339297 - DNA, 120 bp, Artificial Sequence
  ENSG00000137802_49 (sequence is synthesized)
agtgctgggcacccacgggtgtgctggatactggagtttgagaggagggaggtgctggggccaaaggagacactagaaaagtggtagatgggacaggtaagtggcagaggtgaggggata

SEQ ID NO: 339298 - DNA, 120 bp, Artificial Sequence
  ENSG00000137802_50 (sequence is synthesized)
agttagaatgtaaaagggcagtaattaggggtgagggaaaggagataggggaccctaggaggtagagtgggaccatgtcgtgaggcagttgaagagttgaggaaaggtttttctgggccc

SEQ ID NO: 339299 - DNA, 120 bp, Artificial Sequence
  ENSG00000137802_51 (sequence is synthesized)
tactgctcccctctgctgcaggtaagtcagagcagctttaccacagcttcaggccacgagagccccttcacccgccctgctgcgccataggcagaggcttataaagaaatgggttctggg

SEQ ID NO: 339300 - DNA, 120 bp, Artificial Sequence
  ENSG00000137802_52 (sequence is synthesized)
cgccattgcactccaacctaggtgacaaagctacacgccatctcaaaaaaaaaaaagaaaaagggttacaaaaggttcccagctccggggcatcagcctgagtgcgcttgagctgctcca

SEQ ID NO: 339301 - DNA, 120 bp, Artificial Sequence
  ENSG00000137802_53 (sequence is synthesized)
aacctggcccttccccactcctctagcatcgccacccgcatggccctggaactcccgcggcggcgggggcgggcccgtgcctgctgtgccccgacttcccacaccagccgcgcccaccgc

SEQ ID NO: 339302 - DNA, 120 bp, Artificial Sequence
  ENSG00000137802_54 (sequence is synthesized)
aggtgggactcaggttcgccctctgggccaggtccttcacgaggagggagctacccttcgccagaagtttgtgagaatgtggccgcccttttcctgccctctgccccatgtgggtggggg

SEQ ID NO: 339303 - DNA, 120 bp, Artificial Sequence
  ENSG00000137802_55 (sequence is synthesized)
gcctcgtggcccggccggcgccccgtccccttctgcatgtctgaggccaccggcaaccgccgccccactccagatttgcccccgccttgttttgaaagccccttatttataacttttata

SEQ ID NO: 339304 - DNA, 120 bp, Artificial Sequence
  ENSG00000137802_56 (sequence is synthesized)
ctttgtgcaggtcgcggcgcttcctgcctcatcctcggctgcatggggcgggggcgctgtttttaacgtgcccgtttgtactgatgtatgaacttgtcaataaacacaattgtttgttaa

SEQ ID NO: 339305 - DNA, 120 bp, Artificial Sequence
  ENSG00000137802_57 (sequence is synthesized)
gtaggaaaactggtgaaatttgaataaggtctctaattaatagtattataccaacataaatttcctagttttgataattgcactatcgttatgtaagatgttcacattagggaaagctgg

SEQ ID NO: 339306 - DNA, 120 bp, Artificial Sequence
  ENSG00000137802_58 (sequence is synthesized)
aaaaaaaaaaaagaaaaggaaaaaaacagtggagcccttctgagctctttctacccagctccctctgccgggtgactggaagtcctgggtggcctggagggctcctgggggagctgtggt

SEQ ID NO: 339307 - DNA, 120 bp, Artificial Sequence
  ENSG00000137802_59 (sequence is synthesized)
agagcgagctctggaggatagggagtgggggagggaggctcccgtggcagaacgagttgtgggctacggcgagccccgccgcgtccccgccggcgctagcgcaggtgtccaggcctgcgg

SEQ ID NO: 339308 - DNA, 120 bp, Artificial Sequence
  ENSG00000137802_60 (sequence is synthesized)
aaatccctggtggtctcggcggcctcctcccttggacactacagttgccatgggaacagttgggcattaacgggaaccagatcgtccacgagaccaactggggcccatcccatccatctc

SEQ ID NO: 339309 - DNA, 120 bp, Artificial Sequence
  ENSG00000137802_61 (sequence is synthesized)
gccagttaaacgcctctggcgggcgtgggcctggcatttcttcgtggcttaggattttccccccctttttcgtgagcctttccttccgacgttgtaagaaactgtgcagggctagaaggt

SEQ ID NO: 339310 - DNA, 120 bp, Artificial Sequence
  ENSG00000137802_62 (sequence is synthesized)
ggtgaggtgctgaagctgggagtagccaccaaggcccctggcagggcctgcccagcccaacccaggagactctgccccacttgggcctctctctgcattcccagcagtcatgcagaagtt

SEQ ID NO: 339311 - DNA, 120 bp, Artificial Sequence
  ENSG00000137802_63 (sequence is synthesized)
ttggatgagccagatgctgtctgggctgaggagtaggcccaaagagcaaggaggtgctggaggcgtcccctgtactctcctagggcccagtttccaggggcaggctctggggtggatggg

SEQ ID NO: 339312 - DNA, 120 bp, Artificial Sequence
  ENSG00000137802_64 (sequence is synthesized)
ctgtggggccccgcttcaccctcagtgcccccatccccacagctattgcaccttgttactgggaactggtccctaggccttggccttccagccttcatttggctgtgctctgtggtccaa

SEQ ID NO: 339313 - DNA, 120 bp, Artificial Sequence
  ENSG00000137802_65 (sequence is synthesized)
ggtttttctgagactgtggggtgagagcagtgtgagctgaggaaactgaggcatcactgtggccacacagggtatgggctgatggggccagggctccagggttgggtggcgggggggggg

SEQ ID NO: 339314 - DNA, 120 bp, Artificial Sequence
  ENSG00000137802_66 (sequence is synthesized)
tgttgcaagtacagacccgcccactcaggtacagaggccccctaccccccagcagcagctctggctctcctcgcctcccagggctgctgccctctcctctccagtgttctgtctctccat

SEQ ID NO: 339315 - DNA, 120 bp, Artificial Sequence
  ENSG00000137802_67 (sequence is synthesized)
gcgcggggtgttttgcactcccagttttgggctaactggcctttccccagccctatctggctttgtgcttgttctctcctagtgccctggtgctatgagtttctcgccattttggcaggg

SEQ ID NO: 339316 - DNA, 120 bp, Artificial Sequence
  ENSG00000137802_68 (sequence is synthesized)
tgtggtcagagggccagcatttagtgcctgcaatttgcccttctcccctccttgcctacctgagaggagggtcccagggtataggctgtggctgggggtctcaaggaggcaaaatctggg

SEQ ID NO: 339317 - DNA, 120 bp, Artificial Sequence
  ENSG00000137802_69 (sequence is synthesized)
gcaagggcttggtttttgccccaattcatgatttctctgaccttggtaggggccccagtgcaggtcccagagaggtcagagtctcggagtatctcttcacgattcctgttgcaagtacag

SEQ ID NO: 339318 - DNA, 120 bp, Artificial Sequence
  ENSG00000137802_70 (sequence is synthesized)
gaactagtgcccagggcttcagactaggggctggtcccttgtgcatacgggagatcccaggagaacgaagcttgggggagctagagcttggcccatttccagcccttggtgatctgtata

SEQ ID NO: 339319 - DNA, 120 bp, Artificial Sequence
  ENSG00000137802_71 (sequence is synthesized)
actgcctcctctctgctctttctgtctctttcccctgctttcctcttccgctcagaacatagacagcttcacagtaagtggtgcctgcaccttcctctctttctcatgctatttctttct

SEQ ID NO: 339320 - DNA, 120 bp, Artificial Sequence
  ENSG00000137802_72 (sequence is synthesized)
cttcactgggcttttcctactggatcctctggtgcctagaagaatcctcggttcctaatccctggctggacagggctgaggggctcagaacagggcagctgggcggcttttcccttgccc

SEQ ID NO: 339321 - DNA, 120 bp, Artificial Sequence
  ENSG00000137802_73 (sequence is synthesized)
ctgccttggccggtccctcctcttggcaggtggctgttgatgggtggggaggagagaagactgagtgggcaggtggccttgctgagctgagccactctgcccacagaccacagtggccca

SEQ ID NO: 339322 - DNA, 120 bp, Artificial Sequence
  ENSG00000137802_74 (sequence is synthesized)
ctgatggcaagtacttggtcactggagaggtgagtgaggaagagggctggcagtactgtaaagagggcaggtgtcctggcctccgcagagagctgcggtcctaggcctgctgtcactttg

SEQ ID NO: 339323 - DNA, 120 bp, Artificial Sequence
  ENSG00000137802_75 (sequence is synthesized)
atccagaagctcacatcagcaactggagcccagcctggcttctcgatgtctgtccttcagcttccccttgaatgagtgcacaccgcatccttactcacctccacctcttctccaagggga

SEQ ID NO: 339324 - DNA, 120 bp, Artificial Sequence
  ENSG00000137802_76 (sequence is synthesized)
gggttggcccccaggatactcagggcttaccccccagctaccactgcctcatctgtcacctctgctctgttaacatccctttgtgtgttcccagaatgaaaagccccctcggcctcaggc

SEQ ID NO: 339325 - DNA, 120 bp, Artificial Sequence
  ENSG00000137802_77 (sequence is synthesized)
agttcccagagagtgctgatcctgctggtgaaggaagcgtgctttggaaaccactgccttaactattccttacccccgggggccccctgctgggctcaggaggaacgcttctgtcctggc

SEQ ID NO: 339326 - DNA, 120 bp, Artificial Sequence
  ENSG00000137802_78 (sequence is synthesized)
ggcgtagtcttactaggggcagaaatagacctgagtggtagtggctctcaatgccggctgcccatcagaaccattcagggagctttgaacaacctgaagtacagacggccacccagagat

SEQ ID NO: 339327 - DNA, 120 bp, Artificial Sequence
  ENSG00000137804_0 (sequence is synthesized)
gtggcgccagggatttgaaccgcgctgacgaagtttggtgatccatcttccgagtatcgccgggatttcgaatcgcgatgatcatcccctctctagaggagctggactccctcaagtaca

SEQ ID NO: 339328 - DNA, 120 bp, Artificial Sequence
  ENSG00000137804_1 (sequence is synthesized)
gtgacctgcagaacttagccaagagtctgggtctccgggccaacctgagggcaaccaagttgttaaaagccttgaaaggctacattaaacatgaggcaagaaaaggaaatgagaatcagg

SEQ ID NO: 339329 - DNA, 120 bp, Artificial Sequence
  ENSG00000137804_2 (sequence is synthesized)
atgaaagtcaaacttctgcatcctcttgtgatgagactgagatacagatcagcaaccaggaagaagctgagagacagccacttggccatgtcaccaaaacaaggagaaggtgcaagactg

SEQ ID NO: 339330 - DNA, 120 bp, Artificial Sequence
  ENSG00000137804_3 (sequence is synthesized)
tccgtgtggaccctgactcacagcagaatcattcagagataaaaataagtaatcccactgaattccagaatcatgaaaagcaggaaagccaggatctcagagctactgcaaaagttcctt

SEQ ID NO: 339331 - DNA, 120 bp, Artificial Sequence
  ENSG00000137804_4 (sequence is synthesized)
ctccaccagacgagcaccaagaagctgagaatgctgtttcctcaggtaacagagattcaaaggtaccttcagaaggaaagaaatctctctacacagatgagtcatccaaacctggaaaaa

SEQ ID NO: 339332 - DNA, 120 bp, Artificial Sequence
  ENSG00000137804_5 (sequence is synthesized)
ataaaagaactgcaatcactactccaaactttaagaagcttcatgaagctcattttaaggaaatggagtccattgatcaatatattgagagaaaaaagaaacattttgaagaacacaatt

SEQ ID NO: 339333 - DNA, 120 bp, Artificial Sequence
  ENSG00000137804_6 (sequence is synthesized)
ccatgaatgaactgaagcagcagcccatcaataagggaggggtcaggactccagtacctccaagaggaagactctctgtggcttctactcccatcagccaacgacgctcgcaaggccggt

SEQ ID NO: 339334 - DNA, 120 bp, Artificial Sequence
  ENSG00000137804_7 (sequence is synthesized)
cttgtggccctgcaagtcagagtaccttgggtctgaaggggtcactcaagcgctctgctatctctgcagctaaaacgggtgtcaggttttcagctgctactaaagataatgagcataagc

SEQ ID NO: 339335 - DNA, 120 bp, Artificial Sequence
  ENSG00000137804_8 (sequence is synthesized)
gttcactgaccaagactccagccagaaagtctgcacatgtgaccgtgtctgggggcaccccaaaaggcgaggctgtgcttgggacacacaaattaaagaccatcacggggaattctgctg

SEQ ID NO: 339336 - DNA, 120 bp, Artificial Sequence
  ENSG00000137804_9 (sequence is synthesized)
ctatgaaccacacaaaggaaagctaaaaccatgggggcaatctaaagaaaataattatctaaatcaacatgtcaacagaattaacttctacaagaaaacttacaaacaaccccatctcca

SEQ ID NO: 339337 - DNA, 120 bp, Artificial Sequence
  ENSG00000137804_10 (sequence is synthesized)
gacaaaggaagagcaacggaagaaacgcgagcaagaacgaaaggagaagaaagcaaaggttttgggaatgcgaaggggcctcattttggctgaagattaataattttttaacatcttgta

SEQ ID NO: 339338 - DNA, 120 bp, Artificial Sequence
  ENSG00000137804_11 (sequence is synthesized)
aatattcctgtattctcaacttttttccttttgtaaattttttttttttgctgtcatccccactttagtcacgagatctttttctgctaactgttcatagtctgtgtagtgtccatgggt

SEQ ID NO: 339339 - DNA, 120 bp, Artificial Sequence
  ENSG00000137804_12 (sequence is synthesized)
tcttcatgtgctatgatctctgaaaagacgttatcaccttaaagctcaaattctttgggatggtttttacttaagtccattaacaattcaggtttctaacgagacccatcctaaaattct

SEQ ID NO: 339340 - DNA, 120 bp, Artificial Sequence
  ENSG00000137804_13 (sequence is synthesized)
gtttctagatttttaatgtcaagttcccaagttccccctgctggttctaatattaacagaactgcagtcttctgctagccaatagcatttacctgatggcagctagttatgcaagcttca

SEQ ID NO: 339341 - DNA, 120 bp, Artificial Sequence
  ENSG00000137804_14 (sequence is synthesized)
ggagaatttgaacaataacaagaatagggtaagctgggatagaaaggccacctcttcactctctatagaatatagtaacctttatgaaacggggccatatagtttggttatgacatcaat

SEQ ID NO: 339342 - DNA, 120 bp, Artificial Sequence
  ENSG00000137804_15 (sequence is synthesized)
attttacctaggtgaaattgtttaggcttatgtaccttcgttcaaatatcctcatgtaattgccatctgtcactcactatattcacaaaaataaaactctacaactcattctaacattgc

SEQ ID NO: 339343 - DNA, 120 bp, Artificial Sequence
  ENSG00000137804_16 (sequence is synthesized)
attcacaaaaataaaactctacaactcattctaacattgcttacttaaaagctacatagccctatcgaaatgcgaggattaatgctttaatgcttttagagacagggtctcactgtgttg

SEQ ID NO: 339344 - DNA, 120 bp, Artificial Sequence
  ENSG00000137804_17 (sequence is synthesized)
cattttatggaaaagactaggctttgcttagtatcatgtccatgtttccttcacctcagtggagcttctgagttttatactgctcaagatcgtcataaataaaattttttctcattgtca

SEQ ID NO: 339345 - DNA, 120 bp, Artificial Sequence
  ENSG00000137804_18 (sequence is synthesized)
gcgttacaggccctttggcgcctgcgtattcgtgaagtgtgaaaaaagcgcgcctctgttgggacgggaaatcagcctttctattggtcagggttagaaaccccgcctttgaggcatttt

SEQ ID NO: 339346 - DNA, 120 bp, Artificial Sequence
  ENSG00000137804_19 (sequence is synthesized)
gagcgcctctgcccggccgcgaccctgcctgggaggtggttctccgccacccggtggagaaagcgggaacaccctctcgggctagcctctgcctttcccgaacgcttcactgcactcact

SEQ ID NO: 339347 - DNA, 120 bp, Artificial Sequence
  ENSG00000137804_20 (sequence is synthesized)
gctagcctctgcctttcccgaacgcttcactgcactcactggagaagaccacggccccgagggaccgcgacaggtcccaggcgaggtgcaccgagtcggcgagcactgcgtgacactgtg

SEQ ID NO: 339348 - DNA, 120 bp, Artificial Sequence
  ENSG00000137804_21 (sequence is synthesized)
cgcactggaacacagcgcacctctcaggctgcagccaagacggcagctgcgggccggcggctggctcctcagcccccagccctgcggggccgagcggcgaggaccccttcaccacctgcg

SEQ ID NO: 339349 - DNA, 120 bp, Artificial Sequence
  ENSG00000137804_22 (sequence is synthesized)
tatcccactccatggaggtcgtaaaagaagcttggtcaatcgccctctcagtgccaccacaaaagtccccccggggcggcgttgcacaacgtgagcgatgccgcagcggctgagccgcca

SEQ ID NO: 339350 - DNA, 120 bp, Artificial Sequence
  ENSG00000137804_23 (sequence is synthesized)
tcttcccgcagccggcgccttcctttcgaatacacgccaggccccgccccaagcacagctcctgcgtcctcattggacatcatgggcaatccaagcactggagtccgagtccgcgcactc

SEQ ID NO: 339351 - DNA, 120 bp, Artificial Sequence
  ENSG00000137804_24 (sequence is synthesized)
attggcatacttttatggagatttctttttaaattcccatgtgatgtcatgtgtttgtaaggttactgtgtgctgtaagctccatgaaagcccagacccaagtccagctgctcatcactg

SEQ ID NO: 339352 - DNA, 120 bp, Artificial Sequence
  ENSG00000137806_0 (sequence is synthesized)
atacgggtaaagtggcttctgggcggaaggtacactataggctcggggaggtaagcggcggcaggccggcggttggtgtgtcccgggtgtggggaggcgacagagccctggcacttgagg

SEQ ID NO: 339353 - DNA, 120 bp, Artificial Sequence
  ENSG00000137806_1 (sequence is synthesized)
gttgagggggcctccccagcgcggcgaaccgtctagcctccggaggccaggccgtgagtgcgggaggtatacgccaaggcggaagaattttgccactcactacctgtgtgacctcgggta

SEQ ID NO: 339354 - DNA, 120 bp, Artificial Sequence
  ENSG00000137806_2 (sequence is synthesized)
aattagccttggaacgtcagtttcttcgtctctataattgaaataataatagtacctctctcaggattgttgtgagccgtcagtgaaacacttagagcagtttctggcacatggtagaat

SEQ ID NO: 339355 - DNA, 120 bp, Artificial Sequence
  ENSG00000137806_3 (sequence is synthesized)
tgggctatttgctgaagcttcttggtggcccttgctagcccaggaagaaacttacattttgatttttttgtaccatggctttggttcacaaattgctgcgtggtacttattttctcagaa

SEQ ID NO: 339356 - DNA, 120 bp, Artificial Sequence
  ENSG00000137806_4 (sequence is synthesized)
aattctctaagccaacttctgccttgtatccatttttgggtattcgctttgcagagtattccagtagtcttcagaaaccagtggcttctcctggcaaagcctcctcacagaggaagactg

SEQ ID NO: 339357 - DNA, 120 bp, Artificial Sequence
  ENSG00000137806_5 (sequence is synthesized)
aaggggatttgcaaggagatcaccagaaagaagttgctttggatataacttcttctgaggagaagcctgatgttagtttcgataaagcaattagagatgaagcaatataccattttaggc

SEQ ID NO: 339358 - DNA, 120 bp, Artificial Sequence
  ENSG00000137806_6 (sequence is synthesized)
aacaagccaaggttgtctggcaattccgggggaaagaagatttggataagtggacagtgacttctgataagacgattggaggcagaagtgaagtgtttttgaaaatgggcaagaataacc

SEQ ID NO: 339359 - DNA, 120 bp, Artificial Sequence
  ENSG00000137806_7 (sequence is synthesized)
aaagtgcactgctatatggaactctgagctctgaggcgcctcaggacggggagtctacccgaagtgggtactgtgcaatgatatccaggattccaaggggtgcttttgagaggaagatgt

SEQ ID NO: 339360 - DNA, 120 bp, Artificial Sequence
  ENSG00000137806_8 (sequence is synthesized)
cttacgattggtcccagttcaatactctgtatctccgtgtacgtggggatggtcggccttggatggtgaatatcaaggaggacacagatttcttccagaggacgaatcagatgtatagtt

SEQ ID NO: 339361 - DNA, 120 bp, Artificial Sequence
  ENSG00000137806_9 (sequence is synthesized)
acttcatgttcacccgcgggggaccctactggcaggaggtcaagattcctttttccaaatttttcttctctaatcgaggaagaatccgggatgttcagcatgagcttccgcttgataaga

SEQ ID NO: 339362 - DNA, 120 bp, Artificial Sequence
  ENSG00000137806_10 (sequence is synthesized)
tctcttctataggattcaccttggctgataaagtggatggtccattcttcctggagatagattttattggcgtgtttactgatccagctcatacagaagaatttgcctatgaaaattctc

SEQ ID NO: 339363 - DNA, 120 bp, Artificial Sequence
  ENSG00000137806_11 (sequence is synthesized)
cagagcttaacccaaggctttttaaataaagatcatatggtagttttgttttactaatctaagggtactagcatctacaatgatatagacaaaataaaatatttctttaatggcatccaa

SEQ ID NO: 339364 - DNA, 120 bp, Artificial Sequence
  ENSG00000137807_0 (sequence is synthesized)
ttccgcggaggtcctgcctctccctgcggacgggcgctgattggcccgtttgaaatgcgccaggcgggagctcacctgggctcttagcgtcgccgccggcttcgcagagcaccgcgcctt

SEQ ID NO: 339365 - DNA, 120 bp, Artificial Sequence
  ENSG00000137807_1 (sequence is synthesized)
agccgcgaagttctagttcttgctgccggtcctaacgtcccgcagtcttcgccagccagccgtcccgcatgcgcgtttgggcggcgtggagcctgctgccatgaagtcagcgagagctaa

SEQ ID NO: 339366 - DNA, 120 bp, Artificial Sequence
  ENSG00000137807_2 (sequence is synthesized)
gacaccccggaaacctaccgtgaaaaaagggtcccaaacgaaccttaaagacccagttggggtatactgtagggtgcgcccactgggctttcctgatcaagagtgttgcatagaagtgat

SEQ ID NO: 339367 - DNA, 120 bp, Artificial Sequence
  ENSG00000137807_3 (sequence is synthesized)
caataatacaactgttcagcttcatactcctgagggctacagactcaaccgaaatggagactataaggagactcagtattcatttaaacaagtatttggcactcacaccacccagaagga

SEQ ID NO: 339368 - DNA, 120 bp, Artificial Sequence
  ENSG00000137807_4 (sequence is synthesized)
actctttgatgttgtggctaatcccttggtcaatgacctcattcatggcaaaaatggtcttctttttacatatggtgtgacgggaagtggaaaaactcacacaatgactggttctccagg

SEQ ID NO: 339369 - DNA, 120 bp, Artificial Sequence
  ENSG00000137807_5 (sequence is synthesized)
ggaaggagggctgcttcctcgttgtttggacatgatctttaacagtatagggtcatttcaagctaaacgatatgttttcaaatctaatgataggaatagtatggatatacagtgtgaggt

SEQ ID NO: 339370 - DNA, 120 bp, Artificial Sequence
  ENSG00000137807_6 (sequence is synthesized)
tgatgccttattagaacgtcagaaaagagaagctatgcccaatccaaagacttcttctagcaaacgacaagtagatccagagtttgcagatatgataactgtacaagaattctgcaaagc

SEQ ID NO: 339371 - DNA, 120 bp, Artificial Sequence
  ENSG00000137807_7 (sequence is synthesized)
agaagaggttgatgaagatagtgtctatggtgtatttgtctcttatattgaaatatataataattacatatatgatctattggaagaggtgccgtttgatcccataaaacccaaacctcc

SEQ ID NO: 339372 - DNA, 120 bp, Artificial Sequence
  ENSG00000137807_8 (sequence is synthesized)
acaatctaaattgcttcgtgaagataagaaccataacatgtatgttgcaggatgtacagaagttgaagtgaaatctactgaggaggcttttgaagttttctggagaggccagaaaaagag

SEQ ID NO: 339373 - DNA, 120 bp, Artificial Sequence
  ENSG00000137807_9 (sequence is synthesized)
acgtattgctaatacccatttgaatcgtgagtccagccgttcccatagcgtgttcaacattaaattagttcaggctcccttggatgcagatggagacaatgtcttacaggaaaaagaaca

SEQ ID NO: 339374 - DNA, 120 bp, Artificial Sequence
  ENSG00000137807_10 (sequence is synthesized)
aatcactataagtcagttgtccttggtagatcttgctggaagtgaaagaactaaccggaccagagcagaagggaacagattacgtgaagctggtaatattaatcagtcactaatgacgct

SEQ ID NO: 339375 - DNA, 120 bp, Artificial Sequence
  ENSG00000137807_11 (sequence is synthesized)
aagaacatgtatggatgtcctaagagagaaccaaatgtatggaactaacaagatggttccatatcgagattcaaagttaacccatctgttcaagaactactttgatggggaaggaaaagt

SEQ ID NO: 339376 - DNA, 120 bp, Artificial Sequence
  ENSG00000137807_12 (sequence is synthesized)
gcggatgatcgtgtgtgtgaaccccaaggctgaagattatgaagaaaacttgcaagtcatgagatttgcggaagtgactcaagaagttgaagtagcaagacctgtagacaaggcaatatg

SEQ ID NO: 339377 - DNA, 120 bp, Artificial Sequence
  ENSG00000137807_13 (sequence is synthesized)
tggtttaacgcctgggaggagatacagaaaccagcctcgaggtccagttggaaatgaaccattggttactgacgtggttttgcagagttttccacctttgccatcatgcgaaattttgga

SEQ ID NO: 339378 - DNA, 120 bp, Artificial Sequence
  ENSG00000137807_14 (sequence is synthesized)
tatcaacgatgagcagacacttccaaggctgattgaagccttagagaaacgacataacttacgacaaatgatgattgatgagtttaacaaacaatctaatgcttttaaagctttgttaca

SEQ ID NO: 339379 - DNA, 120 bp, Artificial Sequence
  ENSG00000137807_15 (sequence is synthesized)
atttgacaatgctgttttaagtaaagaaaaccacatgcaagggaaactaaatgaaaaggagaagatgatctcaggacagaaattggaaatagaacgactggaaaagaaaaacaaaacttt

SEQ ID NO: 339380 - DNA, 120 bp, Artificial Sequence
  ENSG00000137807_16 (sequence is synthesized)
agaatataagattgagattttagagaaaacaactactatctatgaggaagataaacgcaatttgcaacaggaacttgaaactcagaaccagaaacttcagcgacagttttctgacaaacg

SEQ ID NO: 339381 - DNA, 120 bp, Artificial Sequence
  ENSG00000137807_17 (sequence is synthesized)
cagattagaagccaggttgcaaggcatggtgacagaaacgacaatgaagtgggagaaagaatgtgagcgtagagtggcagccaaacagctggagatgcagaataaactctgggttaaaga

SEQ ID NO: 339382 - DNA, 120 bp, Artificial Sequence
  ENSG00000137807_18 (sequence is synthesized)
tgaaaagctgaaacaactgaaggctattgttaccgaacctaaaactgagaagccagagagaccctctcgggagcgagatcgagaaaaagttactcaaagatctgtttctccatcacctgt

SEQ ID NO: 339383 - DNA, 120 bp, Artificial Sequence
  ENSG00000137807_19 (sequence is synthesized)
gcctctttctagtaactatattgctcagatttccaacggccagcaactcatgagccagccacagctacataggcgctctaactcttgcagcagcatttctgtagcttcctgtatttcgga

SEQ ID NO: 339384 - DNA, 120 bp, Artificial Sequence
  ENSG00000137807_20 (sequence is synthesized)
atgggagcagaaaattcctacgtacaacacacctctcaaagtcacatctattgcaaggcgtaggcagcaggagccaggacaaagcaaaacttgtatcgtgtcagacagaaggcgagggat

SEQ ID NO: 339385 - DNA, 120 bp, Artificial Sequence
  ENSG00000137807_21 (sequence is synthesized)
gtactggactgaaggcagggaggtggttcctacattcagaaatgagatagaaatagaagaggatcattgcggcaggttactctttcaacctgatcagaacgcaccaccaattcgtctccg

SEQ ID NO: 339386 - DNA, 120 bp, Artificial Sequence
  ENSG00000137807_22 (sequence is synthesized)
acacagacgatcacgctctgcaggagacagatgggtagatcataagcccgcctctaacatgcaaactgaaacagtcatgcagccacatgtccctcatgccatcacagtatctgttgcaaa

SEQ ID NO: 339387 - DNA, 120 bp, Artificial Sequence
  ENSG00000137807_23 (sequence is synthesized)
tgaaaaggcactagctaagtgtgagaagtacatgctgacccaccaggaactagcctccgatggggagattgaaactaaactaattaagggtgatatttataaaacaaggggtggtggaca

SEQ ID NO: 339388 - DNA, 120 bp, Artificial Sequence
  ENSG00000137807_24 (sequence is synthesized)
atctgttcagtttactgatattgagactttaaagcaagaatcaccaaatggtagtcgaaaacgaagatcttccacagtagcacctgcccaaccagatggtgcagagtctgaatggaccga

SEQ ID NO: 339389 - DNA, 120 bp, Artificial Sequence
  ENSG00000137807_25 (sequence is synthesized)
tgtagaaacaaggtgttctgtggctgtggagatgagagcaggatcccagctgggacctggatatcagcatcacgcacaacccaagcgcaaaaagccatgaactgacagtcccagtactga

SEQ ID NO: 339390 - DNA, 120 bp, Artificial Sequence
  ENSG00000137807_26 (sequence is synthesized)
aagaacattttcatttgtgtggatgatttctcgaaagccatgccagaagcagtcttccaggtcatcttgtagaactccagctttgttgaaaatcacggacctcagctacatcatacactg

SEQ ID NO: 339391 - DNA, 120 bp, Artificial Sequence
  ENSG00000137807_27 (sequence is synthesized)
acccagagcaaagctttccctatggttccaaagacaactagtattcaacaaaccttgtatagtatatgttttgccatatttaatattaatagcagaggaagactccttttttcatcactg

SEQ ID NO: 339392 - DNA, 120 bp, Artificial Sequence
  ENSG00000137807_28 (sequence is synthesized)
actgtatgaattttttataatgtttttttaaaatatatttcatgtatacttataaactaattcacacaagtgtttgtcttagatgattaaggaagactatatctagatcatgtctgattt

SEQ ID NO: 339393 - DNA, 120 bp, Artificial Sequence
  ENSG00000137807_29 (sequence is synthesized)
ttgtgacttctccagccctggtctgaatttcttaaggttttataaacaaatgctgctatttattagctgcaagaatgcactttagaactatttgacaattcagactttcaaaataaagat

SEQ ID NO: 339394 - DNA, 120 bp, Artificial Sequence
  ENSG00000137807_30 (sequence is synthesized)
gtaaatgactggccaataataaccattttaggaaggtgttttgaattctgtatgtatatattcactttctgacatttagatatgccaaaagaattaaaatcaaaagcactaagaaataca

SEQ ID NO: 339395 - DNA, 120 bp, Artificial Sequence
  ENSG00000137807_31 (sequence is synthesized)
tatcacctagagttgctactaagtttgatggcaattttttttgacttattagaaagcatgtataatgaaatgactgagttcaggtttgaccaatgatttctctgttgtcctaggccagaa

SEQ ID NO: 339396 - DNA, 120 bp, Artificial Sequence
  ENSG00000137807_32 (sequence is synthesized)
gttgtagtatgtggagtttttctggttctaactctatccttaatttttggaattagagtaatccagccaacatggcaaaaacctgtctcgagtaaaattggaaaaatcagccaggcatgg

SEQ ID NO: 339397 - DNA, 120 bp, Artificial Sequence
  ENSG00000137807_33 (sequence is synthesized)
tgctctttgaaaatgctgaggtataatctcacattgccagtgcaccatgtaggcctattcctagaataacaagaatccacttcatcaggaactcccttgcaagtgttattcctgaggaga

SEQ ID NO: 339398 - DNA, 120 bp, Artificial Sequence
  ENSG00000137807_34 (sequence is synthesized)
gtatgagccactgcacccagccctgctttcagttttacaaacaggagatgttcataaaattctaaagataattcattgcttcaaactataactatggcatatatgtgacatattattttc

SEQ ID NO: 339399 - DNA, 120 bp, Artificial Sequence
  ENSG00000137807_35 (sequence is synthesized)
tttcttaggctgaatgtgcttaatttagcattcccaggtttacatgacatttgactggaagcaacttgtttgtttttgaggcagggtctcattctattgcccaggctggagtgcagtggt

SEQ ID NO: 339400 - DNA, 120 bp, Artificial Sequence
  ENSG00000137807_36 (sequence is synthesized)
tgtttgttttgttttgttttgtttttgttgagtctgggtttcaccatgttgcctaggctgaacttgaacttctgagttcaagtgattcctccacctcggccttccaaagtgctgattaca

SEQ ID NO: 339401 - DNA, 120 bp, Artificial Sequence
  ENSG00000137807_37 (sequence is synthesized)
ggcatgtaccaccatgcctggcctagcaactagtcttttattgtgtgatagagactgatttgacactgtattatttatttgtttcttggaacctgtatgaaatgtttgggggaaaaatta

SEQ ID NO: 339402 - DNA, 120 bp, Artificial Sequence
  ENSG00000137807_38 (sequence is synthesized)
gttggtatattgtagccattactgtatttgaacttttcatgaagttctattatgagattttaaaatcttaactgaaagcactcagaagtatttcacatttctttaatcattttattcata

SEQ ID NO: 339403 - DNA, 120 bp, Artificial Sequence
  ENSG00000137807_39 (sequence is synthesized)
tggttcttattatacctatgttcttaggattgttttctgttttgtttagaagcctagaaaatgtgtagggctttcattgatcttattgaagattttaacagagttgtggacataatagat

SEQ ID NO: 339404 - DNA, 120 bp, Artificial Sequence
  ENSG00000137807_40 (sequence is synthesized)
gacttgcagcattaccagaattttttcttttatcctttattgaaagggaaactcccagatagaatgtgtaacatacaagttggtgttaaagatgtttgttggttttgtgtttaaatgcaa

SEQ ID NO: 339405 - DNA, 120 bp, Artificial Sequence
  ENSG00000137807_41 (sequence is synthesized)
agatcatgtttaaattacttgaataaaatatttagctttggaaaggtttgctatgatactgtcatcaactaatgtagccaaacctgctgcacttctaataatacccttaaattaattctg

SEQ ID NO: 339406 - DNA, 120 bp, Artificial Sequence
  ENSG00000137807_42 (sequence is synthesized)
agtgctgggattatagctgtgagccaccatgcccggctgggatcatttacttttaaaatggacttataacgtatacaattgaacttttctttttttagacgacaagtagatccagagttt

SEQ ID NO: 339407 - DNA, 120 bp, Artificial Sequence
  ENSG00000137807_43 (sequence is synthesized)
aattttaatatttgcggaagtgactcaagaagttgaagtagcaagacctgtagacaaggcaatatgtggtttaacgcctgggaggagatacagaaaccagcctcgaggtccagttggaaa

SEQ ID NO: 339408 - DNA, 120 bp, Artificial Sequence
  ENSG00000137807_44 (sequence is synthesized)
ctcttctgataaaacttttttgatatttatatatttgatttatgtttggtgttgaatccatatttaatttgttagggtggtgctaaacttgccttttttgagctggctaattgttagtgt

SEQ ID NO: 339409 - DNA, 120 bp, Artificial Sequence
  ENSG00000137807_45 (sequence is synthesized)
atatttctctggagtattatacgttatatatatattataaaatatatataattttcattagaagaataacatgtcatgtcacttggcgttttagtcctagtcttaaatgaagataccagc

SEQ ID NO: 339410 - DNA, 120 bp, Artificial Sequence
  ENSG00000137807_46 (sequence is synthesized)
cttccacagtagcacctgcccaaccagatggtgcagagtctgaatggaccgatgtagaaacaagggtaggggaaaaattaaatatttgtctgcctactaaaattaggtttgtcatgtttt

SEQ ID NO: 339411 - DNA, 120 bp, Artificial Sequence
  ENSG00000137807_47 (sequence is synthesized)
ccttagccaccaactctctttgcaaacttatctaaaatgagataagttacctggatgacctaaagacctttctggctcacaacatttgtggcctgtgccagaaataaattacgagtgact

SEQ ID NO: 339412 - DNA, 120 bp, Artificial Sequence
  ENSG00000137807_48 (sequence is synthesized)
ggtgttttaacgtaagagtctttgctgaactagaaagcaatattgcatttcacctaggtgtggagcctgctaaataactgtgttttatagactattgagaggagctgatctttttcctct

SEQ ID NO: 339413 - DNA, 120 bp, Artificial Sequence
  ENSG00000137807_49 (sequence is synthesized)
tgtcattttcctctcagtgttctgtggctgtggagatgagagcaggatcccagctgggacctggatatcagcatcacgcacaacccaagcgcaaaaagccatgaactgacagtcccagta

SEQ ID NO: 339414 - DNA, 80 bp, Artificial Sequence
  ENSG00000137809_0 (sequence is synthesized)
agtgcaggctgcaggcgccgcgccgaggaggctgccgctctggcttgccgccccccgccgccgctgcacaccggacccag

SEQ ID NO: 339415 - DNA, 120 bp, Artificial Sequence
  ENSG00000137809_1 (sequence is synthesized)
ggtggcctgggcgctcagcctgtggccagggttcacggacaccttcaacatggacaccaggaagccccgggtcatccctggctccaggaccgccttctttggctacacagtgcagcagca

SEQ ID NO: 339416 - DNA, 120 bp, Artificial Sequence
  ENSG00000137809_2 (sequence is synthesized)
cgacatcagtggcaataagtggctggtcgtgggcgccccactggaaaccaatggctaccagaagacgggagacgtgtacaagtgtccagtgatccacgggaactgcaccaaactcaacct

SEQ ID NO: 339417 - DNA, 120 bp, Artificial Sequence
  ENSG00000137809_3 (sequence is synthesized)
gggaagggtcaccctgtccaacgtgtccgagcggaaagacaacatgcgcctcggccttagtctcgccaccaaccccaaggacaacagcttcctggcctgcagccccctctggtctcatga

SEQ ID NO: 339418 - DNA, 120 bp, Artificial Sequence
  ENSG00000137809_4 (sequence is synthesized)
gtgtgggagctcctactacaccacagggatgtgttcaagagtcaactccaacttcaggttctccaagaccgtggccccagctctccaaaggtgccagacctacatggacatcgtcattgt

SEQ ID NO: 339419 - DNA, 120 bp, Artificial Sequence
  ENSG00000137809_5 (sequence is synthesized)
cctggatggctccaacagcatctacccctgggtggaggttcagcacttcctcatcaacatcctgaaaaagttttacattggcccagggcagatccaggttggagttgtgcagtatggcga

SEQ ID NO: 339420 - DNA, 120 bp, Artificial Sequence
  ENSG00000137809_6 (sequence is synthesized)
agatgtggtgcatgagtttcacctcaacgactacaggtctgtaaaagatgtggtggaagctgccagccacattgagcagagaggaggaacagagacccggacggcatttggcattgaatt

SEQ ID NO: 339421 - DNA, 120 bp, Artificial Sequence
  ENSG00000137809_7 (sequence is synthesized)
tgcacgctcagaggctttccagaagggtggaaggaaaggagccaagaaggtgatgattgtcatcacagatggggagtcccacgacagcccagacctggagaaggtgatccagcaaagcga

SEQ ID NO: 339422 - DNA, 120 bp, Artificial Sequence
  ENSG00000137809_8 (sequence is synthesized)
aagagacaacgtaacaagatatgcggtggccgtcctgggctactacaaccgcagggggatcaatccagaaacttttctaaatgaaatcaaatacatcgccagtgaccctgatgacaagca

SEQ ID NO: 339423 - DNA, 120 bp, Artificial Sequence
  ENSG00000137809_9 (sequence is synthesized)
cttcttcaatgtcactgatgaggctgccttgaaggacattgtcgatgccctgggggacagaatcttcagcctggaaggcaccaacaagaacgagacctcctttgggctggagatgtcaca

SEQ ID NO: 339424 - DNA, 120 bp, Artificial Sequence
  ENSG00000137809_10 (sequence is synthesized)
gacgggcttttcctcgcacgtggtggaggatggggttctgctgggagccgtcggtgcctatgactggaatggagctgtgctaaaggagacgagtgccgggaaggtcattcctctccgcga

SEQ ID NO: 339425 - DNA, 120 bp, Artificial Sequence
  ENSG00000137809_11 (sequence is synthesized)
gtcctacctgaaagagttccccgaggagctcaagaaccatggtgcatacctggggtacacagtcacatcggtcgtgtcctccaggcaggggcgggtgtacgtggccggagccccccggtt

SEQ ID NO: 339426 - DNA, 120 bp, Artificial Sequence
  ENSG00000137809_12 (sequence is synthesized)
caaccacacgggcaaggtcatcctgttcaccatgcacaacaaccggagcctcaccatccaccaggctatgcggggccagcagataggctcttactttgggagtgaaatcacctcggtgga

SEQ ID NO: 339427 - DNA, 120 bp, Artificial Sequence
  ENSG00000137809_13 (sequence is synthesized)
catcgacggcgacggcgtgactgatgtcctgctggtgggcgcacccatgtacttcaacgagggccgtgagcgaggcaaggtgtacgtctatgagctgagacagaacctgtttgtttataa

SEQ ID NO: 339428 - DNA, 120 bp, Artificial Sequence
  ENSG00000137809_14 (sequence is synthesized)
cggaacgctaaaggattcacacagttaccagaatgcccgatttgggtcctccattgcctcagttcgagacctcaaccaggattcctacaatgacgtggtggtgggagcccccctggagga

SEQ ID NO: 339429 - DNA, 120 bp, Artificial Sequence
  ENSG00000137809_15 (sequence is synthesized)
caaccacgcaggagccatctacatcttccacggcttccgaggcagcatcctgaagacacctaagcagagaatcacagcctcagagctggctaccggcctccagtattttggctgcagcat

SEQ ID NO: 339430 - DNA, 120 bp, Artificial Sequence
  ENSG00000137809_16 (sequence is synthesized)
ccacgggcaattggacctcaatgaggatgggctcatcgacctggcagtgggagcccttggcaacgctgtgattctgtggtcccgcccagtggttcagatcaatgccagcctccactttga

SEQ ID NO: 339431 - DNA, 120 bp, Artificial Sequence
  ENSG00000137809_17 (sequence is synthesized)
gccatccaagatcaacatcttccacagagactgcaagcgcagtggcagggatgccacctgcctggccgccttcctctgcttcacgcccatcttcctggcaccccatttccaaacaacaac

SEQ ID NO: 339432 - DNA, 120 bp, Artificial Sequence
  ENSG00000137809_18 (sequence is synthesized)
tgttggcatcagatacaacgccaccatggatgagaggcggtatacaccgagggcccacctggacgagggcggggaccgattcaccaacagagccgtactgctctcctccggccaggagct

SEQ ID NO: 339433 - DNA, 120 bp, Artificial Sequence
  ENSG00000137809_19 (sequence is synthesized)
ctgtgagcggatcaacttccatgtcctggacactgctgactacgtgaagccagtgaccttctcagtcgagtattccctggaggaccctgaccatggccccatgctggacgacggctggcc

SEQ ID NO: 339434 - DNA, 120 bp, Artificial Sequence
  ENSG00000137809_20 (sequence is synthesized)
caccactctcagagtctcggtgcccttctggaacggctgcaatgaggatgagcactgtgtccctgaccttgtgttggatgcccggagtgacctgcccacggccatggagtactgccagag

SEQ ID NO: 339435 - DNA, 120 bp, Artificial Sequence
  ENSG00000137809_21 (sequence is synthesized)
ggtgctgaggaagcctgcgcaggactgctccgcatacacgctgtccttcgacaccacagtcttcatcatagagagcacacgccagcgagtggcggtggaggccacactggagaacagggg

SEQ ID NO: 339436 - DNA, 120 bp, Artificial Sequence
  ENSG00000137809_22 (sequence is synthesized)
cgagaacgcctacagcacggtcctaaatatctcgcagtcagcaaacctgcagtttgccagcttgatccagaaggaggactcagacggtagcattgagtgtgtgaacgaggagaggaggct

SEQ ID NO: 339437 - DNA, 120 bp, Artificial Sequence
  ENSG00000137809_23 (sequence is synthesized)
ccagaagcaagtctgcaacgtcagctatcccttcttccgggccaaggccaaggtggctttccgtcttgattttgagttcagcaaatccatcttcctacaccacctggagatcgagctcgc

SEQ ID NO: 339438 - DNA, 120 bp, Artificial Sequence
  ENSG00000137809_24 (sequence is synthesized)
tgcaggcagtgacagtaatgagcgggacagcaccaaggaagacaacgtggcccccttacgcttccacctcaaatacgaggctgacgtcctcttcaccaggagcagcagcctgagccacta

SEQ ID NO: 339439 - DNA, 120 bp, Artificial Sequence
  ENSG00000137809_25 (sequence is synthesized)
cgaggtcaagcccaacagctcgctggagagatacgatggtatcgggcctcccttcagctgcatcttcaggatccagaacttgggcttgttccccatccacgggatgatgatgaagatcac

SEQ ID NO: 339440 - DNA, 120 bp, Artificial Sequence
  ENSG00000137809_26 (sequence is synthesized)
cattcccatcgccaccaggagcggcaaccgcctactgaagctgagggacttcctcacggacgaggcgaacacgtcctgtaacatctggggcaatagcactgagtaccggcccaccccagt

SEQ ID NO: 339441 - DNA, 120 bp, Artificial Sequence
  ENSG00000137809_27 (sequence is synthesized)
ggaggaagacttgcgtcgtgctccacagctgaatcacagcaactctgatgtcgtctccatcaactgcaatatacggctggtccccaaccaggaaatcaatttccatctactggggaacct

SEQ ID NO: 339442 - DNA, 120 bp, Artificial Sequence
  ENSG00000137809_28 (sequence is synthesized)
gtggttgaggtccctaaaagcactcaagtacaaatccatgaaaatcatggtcaacgcagccttgcagaggcagttccacagccccttcatcttccgtgaggaggatcccagccgccagat

SEQ ID NO: 339443 - DNA, 120 bp, Artificial Sequence
  ENSG00000137809_29 (sequence is synthesized)
cgtgtttgagatctccaagcaagaggactggcaggtccccatctggatcattgtaggcagcaccctggggggcctcctactgctggccctgctggtcctggcactgtggaagctcggctt

SEQ ID NO: 339444 - DNA, 120 bp, Artificial Sequence
  ENSG00000137809_30 (sequence is synthesized)
ctttagaagtgccaggcgcaggagggagcctggtctggaccccacccccaaagtgctggagtgaggctccagaggagactttgagttgatgggggccaggacaccagtccaggtagtgtt

SEQ ID NO: 339445 - DNA, 120 bp, Artificial Sequence
  ENSG00000137809_31 (sequence is synthesized)
gagacccaggcctgtggccccaccgagctggagcggagaggaagccagctggctttgcacttgacctcatctcccgagcaatggcgcctgctccctccagaatggaactcaagctggttt

SEQ ID NO: 339446 - DNA, 120 bp, Artificial Sequence
  ENSG00000137809_32 (sequence is synthesized)
taagtggaactgccctactgggagactgggacacctttaacacagacccctagggatttaaagggacacccctacacacacccaggcccatgccaaggcctccctcaggctctgtggagg

SEQ ID NO: 339447 - DNA, 120 bp, Artificial Sequence
  ENSG00000137809_33 (sequence is synthesized)
gcatttgctgccccagctactaaggtgctaggaattcgtaatcatccccatcctccagagaaacccagggaggaagactgtaaatacgaacccaatctgcacactccaggcctctagttc

SEQ ID NO: 339448 - DNA, 120 bp, Artificial Sequence
  ENSG00000137809_34 (sequence is synthesized)
cagaaggatccaagacaaaacagatctgaattctgcccttttctctcacccatcccacccctccattggctcccaagtcacacccactcccttccccatagataggcccctggggctccc

SEQ ID NO: 339449 - DNA, 120 bp, Artificial Sequence
  ENSG00000137809_35 (sequence is synthesized)
gaagaatgaacccaagagcaagggcttgatggtgacagctgcaagccagggatgaagaaagactctgagatgtggagactgatggccaggcaagtgggaccaggatactggacgctgtcc

SEQ ID NO: 339450 - DNA, 120 bp, Artificial Sequence
  ENSG00000137809_36 (sequence is synthesized)
tgagatgagaggtagccgggctctgcacccacgtgcattcacattgaccgcaactcacacattcccccaccagctgcagccccttgctctcagctgccaaccctcccgggtcacttttgt

SEQ ID NO: 339451 - DNA, 120 bp, Artificial Sequence
  ENSG00000137809_37 (sequence is synthesized)
tcccaggtacctcatgggaagcatgtggatgacacaatccctggggctgtgcattcccacgtcttcttgctgcagcctgcccctagacatggacgcaccggcctggctgcagctgggcag

SEQ ID NO: 339452 - DNA, 79 bp, Artificial Sequence
  ENSG00000137809_38 (sequence is synthesized)
ccctagacatggacgcaccggcctggctgcagctgggcagcaggggtaggggtagggagcctcccctccctgtatcacc

SEQ ID NO: 339453 - DNA, 120 bp, Artificial Sequence
  ENSG00000137809_39 (sequence is synthesized)
tccctcatgcccgccagtgcacagggaagggcttggccagcgctgttgaggggtcccctctggaatgcactgaataaagcacgtgcaaggactcccggagcctgtgcagccttggtggca

SEQ ID NO: 339454 - DNA, 120 bp, Artificial Sequence
  ENSG00000137809_40 (sequence is synthesized)
aatatctcatctgccggcccccaggacaagtggtatgaccagtgataatgccccaaggacaaggggcgtgcctggcgcccagtggagtaatttatgccttagtcttgttttgaggtagaa

SEQ ID NO: 339455 - DNA, 120 bp, Artificial Sequence
  ENSG00000137809_41 (sequence is synthesized)
atgcaagggggacacatgaaaggcatcagtccccctgtgcatagtacgacctttactgtcgtatttttgaaaaattaaaaatacagtgtttaaaaacaaccaagcactgacatcccattc

SEQ ID NO: 339456 - DNA, 120 bp, Artificial Sequence
  ENSG00000137809_42 (sequence is synthesized)
ccaccatttgctgcccacaacatgccctcctagtggctgcctggcctccgtgtgacgtctccagtggtggagcgctccctctcccaagatcacccttccatctatggccagtgtggacgg

SEQ ID NO: 339457 - DNA, 120 bp, Artificial Sequence
  ENSG00000137809_43 (sequence is synthesized)
ttaggacctaaatgtttcactgtagcttctgcccttggttccagctcttccctctcacgcctcccagacttctccaggccggtttcattgttaaccgtcttacactctgacatcagccaa

SEQ ID NO: 339458 - DNA, 120 bp, Artificial Sequence
  ENSG00000137809_44 (sequence is synthesized)
ggcgtctccattctgttcttgtgccattcatgtcttggattcccagtaagtagaaccttggaaataatttgatcttgtttttgcataaatgaggacactcagaaccaggaagagccctag

SEQ ID NO: 339459 - DNA, 120 bp, Artificial Sequence
  ENSG00000137809_45 (sequence is synthesized)
gctcccacagcaaaaccaaaactaaacccaggactgctatttcccaagccagattctgttattcgagcccagccttagaagggcttgatgtggagcaaaaggtgaaaatggtgaaactaa

SEQ ID NO: 339460 - DNA, 120 bp, Artificial Sequence
  ENSG00000137809_46 (sequence is synthesized)
aatttgagtatcaaaacccattgccttctaatagaatcagaaggaaatgttgctaaatcatattccatttccgtcatcactcttatgaatggggtaacctggctaaatgagaattaatga

SEQ ID NO: 339461 - DNA, 120 bp, Artificial Sequence
  ENSG00000137809_47 (sequence is synthesized)
acccacactcataagttttcattgacttagcaccaagtcgtccatcaaatatcatcagatctgagaatgctcttatggatatctgatttttagaggctggcattcatatttttaaaaact

SEQ ID NO: 339462 - DNA, 120 bp, Artificial Sequence
  ENSG00000137809_48 (sequence is synthesized)
gccacctgtgaccacactgcaggccaaacagaatgtacctgctggtcagatgcagcccagaggtcactgaattgcaacctctggactctcggtcagaggcaagcagcccttattccagaa

SEQ ID NO: 339463 - DNA, 120 bp, Artificial Sequence
  ENSG00000137809_49 (sequence is synthesized)
ctccacagtccttcacacccttccccagacctacaccaagaccaactaagtggtcaaaaggtggacaaactgagagttgtatcaaggcccttagcctctcaatttgttatcaagtttccc

SEQ ID NO: 339464 - DNA, 120 bp, Artificial Sequence
  ENSG00000137809_50 (sequence is synthesized)
tttctgaatctatttaccctgaagtataaatacccaagatgagccttaagagtgcctggtagagcaaacaaagatgcatcttatagggagcaaagtctatgctaacgcagtgtttctcaa

SEQ ID NO: 339465 - DNA, 120 bp, Artificial Sequence
  ENSG00000137809_51 (sequence is synthesized)
tcctggctgcacctttgaaccacgggagctttaaaagtgaccactgcaagggccctacccactatggatcccaatttcattggttgggagaggggccaagtttgtttccaacttccccag

SEQ ID NO: 339466 - DNA, 120 bp, Artificial Sequence
  ENSG00000137809_52 (sequence is synthesized)
atgactctaatggctgagagttgcaatcaacaggtaagtgaatatccaggctgtaagatgaagaaagagggggttgtgcccaagcccactgtgcctcataaagcagatgatctctgcagc

SEQ ID NO: 339467 - DNA, 120 bp, Artificial Sequence
  ENSG00000137809_53 (sequence is synthesized)
gctgcgcttctcaaagagtggtcccaggactgcctcagtcagaccacagactcctaagttcctcctcagacttcatggatccaagctctgtgaggtaattctaagcacattaaacttgta

SEQ ID NO: 339468 - DNA, 120 bp, Artificial Sequence
  ENSG00000137809_54 (sequence is synthesized)
gaacagccatctggatttaatattacataatagctataatattctgctattctctaatcttcaatgtcagtttcttaaactgtcaggcctgtctttagatgcccttcaactgtgctgggg

SEQ ID NO: 339469 - DNA, 120 bp, Artificial Sequence
  ENSG00000137809_55 (sequence is synthesized)
actatcttgatggcagccagcaaagaaaatcagcaaaaaccccagtggagtttctgggttttacttttgttaaggaaggtgatggtttcttgacatgacaggtatctaggtggaaagggc

SEQ ID NO: 339470 - DNA, 120 bp, Artificial Sequence
  ENSG00000137809_56 (sequence is synthesized)
aaagtgctaatgcaaacacaatggagacactatggaatagctctgcctagggacatgtggaagagcttctaggagacagtgtggacctttccatccctagaggtcttcacaagataaatt

SEQ ID NO: 339471 - DNA, 120 bp, Artificial Sequence
  ENSG00000137809_57 (sequence is synthesized)
cctacctccgtcagtattcaaaaggttttagcatcaatactgtctgagaataagacattagacttgagtcagtcccctggcttcaatcccaggatgccaagcagcctctaatggagaccg

SEQ ID NO: 339472 - DNA, 120 bp, Artificial Sequence
  ENSG00000137809_58 (sequence is synthesized)
ctggcttaatcgtgctcctttcctggcataacaactcactgcacccatgcctcaccaccacgaagcagtctcctcaccacccaaatgtgccttgggtgacttaaatacagccattagtat

SEQ ID NO: 339473 - DNA, 120 bp, Artificial Sequence
  ENSG00000137809_59 (sequence is synthesized)
gaatggtcccctgtttttattcaacaccacaccagtctttgcttttaccttcggctaatgtggttccagccttttatcctgcactccttcttataatttaaaaaaaaaaaaaactcccct

SEQ ID NO: 339474 - DNA, 120 bp, Artificial Sequence
  ENSG00000137809_60 (sequence is synthesized)
actatctttatgttaatattaacatcaactaggttcttctcaaaggacagccaggcctaactggccacgttaaaatctgcacagtgcttttgtgtcactgtctattctattagtttcaac

SEQ ID NO: 339475 - DNA, 120 bp, Artificial Sequence
  ENSG00000137809_61 (sequence is synthesized)
atcatgctaaaataggacagcatgttccaaaactgaaactgaaacaggaacggagccttgctgatttagcatgaggagggaattgtaagccttgcacctggacactaaaacttttcaata

SEQ ID NO: 339476 - DNA, 120 bp, Artificial Sequence
  ENSG00000137809_62 (sequence is synthesized)
agatgtatgctaagccgtacctagcaaacttaccaggtccaaagtagagtacaagcagaaagttatttttaaaggatgggcactatccttgagggacttaccctttctaatcagctttgc

SEQ ID NO: 339477 - DNA, 89 bp, Artificial Sequence
  ENSG00000137809_63 (sequence is synthesized)
gagacagtcggcaccatcacagctcacggcagcctctgcctcccgggctcaagcaatcccacctcagtttcccaagtagctgggactac

SEQ ID NO: 339478 - DNA, 120 bp, Artificial Sequence
  ENSG00000137809_64 (sequence is synthesized)
aaaaaagatgtgcaacaacttagtgatgtgtctgaaatgttttcagaaggtggcccaagtcagagtcaaaaaatttttttatttggaaaattagaggaaatacagaaaatcaaatttcaa

SEQ ID NO: 339479 - DNA, 120 bp, Artificial Sequence
  ENSG00000137809_65 (sequence is synthesized)
ggaaaattagaggaaatacagaaaatcaaatttcaaatagatgcatctaaatggagaacaagcttatcaaggacagagtccatctttcttatttttatttttgagacagggtcttgctct

SEQ ID NO: 339480 - DNA, 75 bp, Artificial Sequence
  ENSG00000137809_66 (sequence is synthesized)
ctctgtcacccaggctagagtgcagcggcacaatcacagctccctgcagcctcgacctcctggacttcatgcacc

SEQ ID NO: 339481 - DNA, 120 bp, Artificial Sequence
  ENSG00000137809_67 (sequence is synthesized)
gggggtctcactttgttgcccacactggtctctcttatttttgtatgcatatctgtggtgcagtgcctgaaatacagtaggtgttcaataagcgccaacatgcaagagtatcttgccatt

SEQ ID NO: 339482 - DNA, 120 bp, Artificial Sequence
  ENSG00000137809_68 (sequence is synthesized)
gattaaggcaaaagcaaaaccccagtccgcccctctgatggactgagcacaccaaatttctaaagcacaggcaaattagaaaatataattttgtctaaacttgccaacaagctaaggttt

SEQ ID NO: 339483 - DNA, 120 bp, Artificial Sequence
  ENSG00000137809_69 (sequence is synthesized)
tgtgaaccacctaaaatttgcctctctcatactgaaattttctaggtcaagtatctgaaggaatacactactgccagtattttctttggtgatctgtcatatacagcagacattacttga

SEQ ID NO: 339484 - DNA, 120 bp, Artificial Sequence
  ENSG00000137809_70 (sequence is synthesized)
aacaaagaaaaaaatgttttaaaacctgtctggatgatttccgcagtctcactaggttattgcagccagggagtgacctagcagagatctgaaggtgagcttccctagtactggcatctc

SEQ ID NO: 339485 - DNA, 120 bp, Artificial Sequence
  ENSG00000137809_71 (sequence is synthesized)
acagtgaaagagcactgttcagtgggtcaagagacccagagcctactctcagttacgacacacatagtccttgtgtggcctttctgggcttgtgtcctgaactataaaatgagagggtgg

SEQ ID NO: 339486 - DNA, 120 bp, Artificial Sequence
  ENSG00000137809_72 (sequence is synthesized)
cactaaatgtttttttcagatctctatagaggctggaatggccacagagaatctaaatttgaaaacaaacatgtcctgagggtgtgctccaataccaccctttaatactctcctgagatg

SEQ ID NO: 339487 - DNA, 120 bp, Artificial Sequence
  ENSG00000137809_73 (sequence is synthesized)
tgaaggctggaaatgagaatgccatattattgttacttgcaaacgattagtgtatctgggacatccaaaagaagtaactgaaaatttatttctttaaaaacaaaaaaaaccattacagtg

SEQ ID NO: 339488 - DNA, 120 bp, Artificial Sequence
  ENSG00000137809_74 (sequence is synthesized)
caaaaaaaaccattacagtgcttttgtaaaaacattaatatttagaagtacgtagtggtaataaaaggaaaatagttgtaagaccttcattaaaaagaaaaacctaaaaaaaaaaacaaa

SEQ ID NO: 339489 - DNA, 120 bp, Artificial Sequence
  ENSG00000137809_75 (sequence is synthesized)
gtatgatttacctaaccagacatagctttcttttggataaaaaaaaaaaaaaaaaaaaagctcagaagtgcagaactgtacagatgtccctaaatctattaattcaatgctaaacgaaat

SEQ ID NO: 339490 - DNA, 120 bp, Artificial Sequence
  ENSG00000137809_76 (sequence is synthesized)
aatctcttaacatgataaaattacaccaaacttcatctggaaaaataaacacgtaataatgaaaaaagttagccactcccacctccccacttaaaaaagacaaatgaagaaatactagtc

SEQ ID NO: 339491 - DNA, 65 bp, Artificial Sequence
  ENSG00000137809_77 (sequence is synthesized)
acctccccacttaaaaaagacaaatgaagaaatactagtccaggaggactgcttgaacccaggag

SEQ ID NO: 339492 - DNA, 120 bp, Artificial Sequence
  ENSG00000137809_78 (sequence is synthesized)
agcctgggtgacagaatgaaaccctgtctcaaaaaacaaacaaacaaaaaccaaacaaattataggaaaatcaacattttaaaccaaagaagagaaggagaaagaagggaagggaagcca

SEQ ID NO: 339493 - DNA, 120 bp, Artificial Sequence
  ENSG00000137809_79 (sequence is synthesized)
ggagaaagaagggaagggaagccataaaagtgtctttttcaaatagatcatgggggaaaaaaaaaaaaagtatgacttggaatagagacagccttacaagcaggatctaaaactcagaat

SEQ ID NO: 339494 - DNA, 120 bp, Artificial Sequence
  ENSG00000137809_80 (sequence is synthesized)
ccatttttttaaattgtgataaatttgactatagaaaaatgtaaactttggatacaaaagtaccatatttaaagtaaataagctacaactattacatgacagagaaaatgtcctcaaact

SEQ ID NO: 339495 - DNA, 120 bp, Artificial Sequence
  ENSG00000137809_81 (sequence is synthesized)
tctaaggaacttctaacaagtagaaaaaaaacacacacaaccccaaagcaaacaccaatagtcaataaatatatgaaagtgttcaatgttactcataataaaggcatacaaatcaaacca

SEQ ID NO: 339496 - DNA, 120 bp, Artificial Sequence
  ENSG00000137809_82 (sequence is synthesized)
gaacagggccttgaaaaaacaatgaaagagactccaagatcagtttttctccattagacctgaaaccaaaggaactagtacacattgcagcaagagagagttcagttagacccaaagaag

SEQ ID NO: 339497 - DNA, 120 bp, Artificial Sequence
  ENSG00000137809_83 (sequence is synthesized)
atccctcaccccctcacccctcagatagaagtctgtcttgggtcgtggaggatgggagtgggcctcaggccattggacctcgatcctctctgaggtcccctcactgactggggatctgca

SEQ ID NO: 339498 - DNA, 120 bp, Artificial Sequence
  ENSG00000137809_84 (sequence is synthesized)
ctttattttctccagcaggggctggggtgcagtgagttctccctaccctccaaacccccttcctgggtcctgcctcttccaggcctccccagctgcccctaggaattatggccctgcgtg

SEQ ID NO: 339499 - DNA, 120 bp, Artificial Sequence
  ENSG00000137809_85 (sequence is synthesized)
attgaatctgctcagctagccctgaacctaccccatcactggcccatcctctggcactgccaagccatgcaccgggccaagcaacgcctgctgaggacacggtgccaaagatcagcctgt

SEQ ID NO: 339500 - DNA, 120 bp, Artificial Sequence
  ENSG00000137812_0 (sequence is synthesized)
aagcaatcgaaagaagatggccgctcccacgattgtgggggaggtctccactggggaggggcagaggaaattcggtcgaaaaagagataaagctgaaggaaataaaattggcacggagtc

SEQ ID NO: 339501 - DNA, 120 bp, Artificial Sequence
  ENSG00000137812_1 (sequence is synthesized)
tgggaaagtagtttccctaaaggagtcttagaaatagggttggtctggaacctaaggggcggagccgacgcgtagagccgctttgcgcgtgcgcatcacctaggcggttagatttgaata

SEQ ID NO: 339502 - DNA, 120 bp, Artificial Sequence
  ENSG00000137812_2 (sequence is synthesized)
cttcactgaggcgagccgggcgttgtgagcggactgctagaggcggctgtctgtttccgctctaaggaaactcagagcgtgtggaccccaaacaagtctgcgcaaaatttgtcgaggagg

SEQ ID NO: 339503 - DNA, 120 bp, Artificial Sequence
  ENSG00000137812_3 (sequence is synthesized)
tttgccgcggcagaaaagttttcttcaaaaatggatggggtgtcttcagaggctaatgaagaaaatgacaatatagagagacctgttagaagacggcattcttcaatattgaaaccccca

SEQ ID NO: 339504 - DNA, 120 bp, Artificial Sequence
  ENSG00000137812_4 (sequence is synthesized)
aggagtcctcttcaggacctcagaggtgggaatgaaagagttcaggaatccaatgctttgagaaataagaaaaactctcgtcgagtcagctttgcagatactataaaggtattccagacg

SEQ ID NO: 339505 - DNA, 120 bp, Artificial Sequence
  ENSG00000137812_5 (sequence is synthesized)
ctataaaggtattccagacggagtctcatatgaaaatagtgagaaagtcagaaatggaaggctgcagtgcaatggtgccatctcagctgcaacttctgcctcctgggtttaagcgattct

SEQ ID NO: 339506 - DNA, 120 bp, Artificial Sequence
  ENSG00000137812_6 (sequence is synthesized)
acagaaacaggagaaaatcttcttttgatacagaataagaaattagaagataattactgtgaaattactgggatgaacacattgctttctgctcccattcatacccagatgcaacagaag

SEQ ID NO: 339507 - DNA, 120 bp, Artificial Sequence
  ENSG00000137812_7 (sequence is synthesized)
gagttttcaattatagaacatacccgtgaaaggaaacatgcaaatgaccagacagtcattttttcagatgaaaaccagatggacctgacatcaagtcacactgtaatgattaccaaaggc

SEQ ID NO: 339508 - DNA, 120 bp, Artificial Sequence
  ENSG00000137812_8 (sequence is synthesized)
cttttagataatcccataagtgaaaagtccaccaagatagataccacatcatttctagctaatttaaagcttcacaccgaggactcaagaatgaaaaaagaagtaaatttttccgtggat

SEQ ID NO: 339509 - DNA, 120 bp, Artificial Sequence
  ENSG00000137812_9 (sequence is synthesized)
caaaacacttcttcagaaaataaaatagatttcaatgacttcataaaaagattgaaaacaggaaaatgtagtgcttttcctgatgtgcctgataaagaaaattttgagatacctatttat

SEQ ID NO: 339510 - DNA, 120 bp, Artificial Sequence
  ENSG00000137812_10 (sequence is synthesized)
tccaaggaaccgaacagtgcctcttctacacatcaaatgcatgtatctcttaaggaagatgaaaataacagtaatattactaggctctttagagaaaaagatgatgggatgaatttcacc

SEQ ID NO: 339511 - DNA, 120 bp, Artificial Sequence
  ENSG00000137812_11 (sequence is synthesized)
cagtgtcatacagccaatattcagacattgattcccacatccagtgagaccaactcacgggaatctaaaggtaatgatattacaatttatggcaatgactttatggacttgacatttaac

SEQ ID NO: 339512 - DNA, 120 bp, Artificial Sequence
  ENSG00000137812_12 (sequence is synthesized)
cacactttgcagatcttacctgcaacaggtaatttttctgaaatagaaaatcaaactcagaatgccatggatgtaacaacaggttatggaactaaagcttcaggaaataaaacagttttt

SEQ ID NO: 339513 - DNA, 120 bp, Artificial Sequence
  ENSG00000137812_13 (sequence is synthesized)
aagagtaaacaaaatactgcttttcaagacctttccataaactctgcagacaaaatacatattaccagaagtcatattatgggggcagaaactcacatagtctcacagacttgtaatcag

SEQ ID NO: 339514 - DNA, 120 bp, Artificial Sequence
  ENSG00000137812_14 (sequence is synthesized)
gatgccagaatattagccatgaccccagaatctatatattctaatccatctattcaaggttgtaagactgttttctattctagttgtaatgatgccatggaaatgaccaaatgtctctca

SEQ ID NO: 339515 - DNA, 120 bp, Artificial Sequence
  ENSG00000137812_15 (sequence is synthesized)
aatatgagagaggagaaaaatttgctaaagcatgacagtaattatgctaaaatgtattgcaatccagatgctatgtcttctctcacagagaaaactatttattccggagaggagaacatg

SEQ ID NO: 339516 - DNA, 120 bp, Artificial Sequence
  ENSG00000137812_16 (sequence is synthesized)
gacattaccaagagtcatacagttgcaatagataatcaaatttttaaacaagatcaatcaaatgtgcaaatagcagctgcaccaacacccgaaaaagaaatgatgctccaaaatcttatg

SEQ ID NO: 339517 - DNA, 120 bp, Artificial Sequence
  ENSG00000137812_17 (sequence is synthesized)
accacatcagaagatgggaaaatgaatgtaaattgtaactcagttcctcatgtatctaaggaaagaatacagcagagcctgtcaaatcctttgtctatttcattgactgatagaaagact

SEQ ID NO: 339518 - DNA, 120 bp, Artificial Sequence
  ENSG00000137812_18 (sequence is synthesized)
gaactcttatcaggtgaaaatatggatttgactgaaagtcacacaagtaacttaggaagtcaggttcctcttgcagcttataatctagcaccggagagtaccagtgaatctcactctcag

SEQ ID NO: 339519 - DNA, 120 bp, Artificial Sequence
  ENSG00000137812_19 (sequence is synthesized)
agcaaaagctcttcagatgaatgtgaagaaattaccaaaagtcgtaatgaaccatttcagcgatcagacataatagccaaaaacagcttaaccgacacctggaacaaagacaaagattgg

SEQ ID NO: 339520 - DNA, 120 bp, Artificial Sequence
  ENSG00000137812_20 (sequence is synthesized)
gttttgaagattttgccctaccttgataaagattctcctcagtcagctgattgtaatcaggagatagcaacaagccataatatagtctactgtggtggagttcttgataaacaaataact

SEQ ID NO: 339521 - DNA, 120 bp, Artificial Sequence
  ENSG00000137812_21 (sequence is synthesized)
aatagaaatacagtatcatgggaacaatctttgttttctaccacaaagccattattttcatcaggacagttctctatgaaaaatcatgatactgctataagtagtcatacagtgaaatct

SEQ ID NO: 339522 - DNA, 120 bp, Artificial Sequence
  ENSG00000137812_22 (sequence is synthesized)
gtactaggccagaattctaaactggctgagccactgaggaaaagtttaagcaatcccacacctgactattgccatgacaagatgattatatgttcagaggaagagcaaaatatggatcta

SEQ ID NO: 339523 - DNA, 120 bp, Artificial Sequence
  ENSG00000137812_23 (sequence is synthesized)
acaaagagccacactgtcgtcattggatttggtccttctgaactacaagaacttggtaaaactaatttagaacacactactggccagctaacaacaatgaacagacagatagctgtaaaa

SEQ ID NO: 339524 - DNA, 120 bp, Artificial Sequence
  ENSG00000137812_24 (sequence is synthesized)
gttgaaaaatgtggtaaaagtcccatagaaaaaagtggagtgcttaaatctaactgtattatggatgtgttagaggacgaaagtgtacagaaacctaaatttccaaaggaaaagcaaaat

SEQ ID NO: 339525 - DNA, 120 bp, Artificial Sequence
  ENSG00000137812_25 (sequence is synthesized)
gtcaaaatttggggaaggaaaagtgttggtggaccaaaaattgataagactattgtattttcagaagacgataagaatgatatggatatcactaagagttatacaatagaaataaaccat

SEQ ID NO: 339526 - DNA, 120 bp, Artificial Sequence
  ENSG00000137812_26 (sequence is synthesized)
agacctttattagagaaacgtgattgtcatttggtgccattggcaggaacttctgaaactattttatatacatgtaggcaggatgacatggagatcactagaagtcacacaactgcctta

SEQ ID NO: 339527 - DNA, 120 bp, Artificial Sequence
  ENSG00000137812_27 (sequence is synthesized)
gaatgtaaaactgtctcaccagatgaaataactactaggcctatggacaaaactgtagtgtttgtagataatcatgttgaactagaaatgacagagtcccatactgttttcattgactac

SEQ ID NO: 339528 - DNA, 120 bp, Artificial Sequence
  ENSG00000137812_28 (sequence is synthesized)
caagaaaaggaaagaacagacagacctaactttgaactatcccaaaggaaaagcctaggaacaccaacagtgatatgtactcctactgaggagagtgttttctttccaggaaatggtgaa

SEQ ID NO: 339529 - DNA, 120 bp, Artificial Sequence
  ENSG00000137812_29 (sequence is synthesized)
agtgaccgtctagtagcaaatgacagccagctaacccctctggaggaatggtctaataataggggccctgtagaggtagctgataacatggaattgtctaaatcagccacttgcaaaaac

SEQ ID NO: 339530 - DNA, 120 bp, Artificial Sequence
  ENSG00000137812_30 (sequence is synthesized)
atcaaagatgtacaaagtcctggatttctgaatgaacctctatcaagcaaaagtcagagaagaaaaagccttaagctaaaaaatgacaagaccattgtattttcagagaatcataaaaat

SEQ ID NO: 339531 - DNA, 120 bp, Artificial Sequence
  ENSG00000137812_31 (sequence is synthesized)
gatatggatattacccagagttgtatggtggaaatagataacgaaagtgccctggaggataaagaggacttccatttggcaggggcttctaaaactattttgtattcatgtgggcaggat

SEQ ID NO: 339532 - DNA, 120 bp, Artificial Sequence
  ENSG00000137812_32 (sequence is synthesized)
gacatggagatcactaggagtcacacaactgccttagaatgtaaaactctcctgccaaatgaaatagctattaggcccatggacaaaaccgtattgttcacagataattacagtgatctg

SEQ ID NO: 339533 - DNA, 120 bp, Artificial Sequence
  ENSG00000137812_33 (sequence is synthesized)
gaagtcaccgattcccatactgttttcattgactgtcaagccacagagaaaatacttgaagaaaaccctaaatttggaataggaaaaggaaaaaacttgggtgtttcctttcctaaggat

SEQ ID NO: 339534 - DNA, 120 bp, Artificial Sequence
  ENSG00000137812_34 (sequence is synthesized)
aatagctgtgttcaagaaatcgctgaaaaacaagcactggctgtaggaaacaaaatagttcttcacaccgagcaaaagcaacaactctttgctgctactaatagaactactaatgaaatc

SEQ ID NO: 339535 - DNA, 120 bp, Artificial Sequence
  ENSG00000137812_35 (sequence is synthesized)
atcaaatttcatagtgctgctatggatgaaaaggtcatagggaaagttgtagaccaggcctgtacattggaaaaagcgcaagttgaaagctgtcagttaaataatagagatagaagaaat

SEQ ID NO: 339536 - DNA, 120 bp, Artificial Sequence
  ENSG00000137812_36 (sequence is synthesized)
gtggactttacaagtagtcatgcaactgctgtttgtggatccagtgataattattcctgtttaccaaatgttatttcctgtactgataatttggagggtagtgccatgctcttatgtgat

SEQ ID NO: 339537 - DNA, 120 bp, Artificial Sequence
  ENSG00000137812_37 (sequence is synthesized)
aaagatgaggaaaaagccaattattgcccagtgcaaaatgatcttgcttatgcaaatgattttgccagtgaatattacttggaatctgagggacagcctctctctgctccttgtcctttg

SEQ ID NO: 339538 - DNA, 120 bp, Artificial Sequence
  ENSG00000137812_38 (sequence is synthesized)
ttagagaaggaagaagttattcaaaccagtaccaaaggacagttagactgtgttataacactgcacaaagatcaagatctgattaaggatccacgaaatctattggctaatcaaacttta

SEQ ID NO: 339539 - DNA, 120 bp, Artificial Sequence
  ENSG00000137812_39 (sequence is synthesized)
gacatttatgttattcctcagcctcatttctcaaccgaccaacctccattacctaaaaaaggacagagtagtatcaataaagaagaagtaatactgtctaaagctggaaataagagttta

SEQ ID NO: 339540 - DNA, 120 bp, Artificial Sequence
  ENSG00000137812_40 (sequence is synthesized)
aatattatagaaaattcctctgcacccatatgtgaaaacaagcccaaaatactcaatagtgaggaatggtttgctgcagcctgtaaaaaagaactgaaggaaaatattcaaacaactaac

SEQ ID NO: 339541 - DNA, 120 bp, Artificial Sequence
  ENSG00000137812_41 (sequence is synthesized)
tataatacagctctagatttccacagtaactcagacgtaactaagcaagtcattcaaactcatgtcaatgctggagaagcaccagatcctgtaattacatctaatgttccatgttttcat

SEQ ID NO: 339542 - DNA, 120 bp, Artificial Sequence
  ENSG00000137812_42 (sequence is synthesized)
agtatcaaaccaaatctgaataatttgaatggaaaaactggagagtttttagcctttcaaactgttcatctaccaccccttccagagcaattacttgaattaggaaataaggcacacaat

SEQ ID NO: 339543 - DNA, 120 bp, Artificial Sequence
  ENSG00000137812_43 (sequence is synthesized)
gatatgcatatagtgcaagctacagaaatacataatattaacataatctccagcaatgctaaagatagtagagatgaggaaaataaaaagtctcataatggagctgaaaccacctctcta

SEQ ID NO: 339544 - DNA, 120 bp, Artificial Sequence
  ENSG00000137812_44 (sequence is synthesized)
ccgccaaagacagtttttaaagataaagtaaggagatgttctttgggaatctttttgcctagattgcccaacaagagaaattgtagtgtcactggtattgatgacctggaacagattcca

SEQ ID NO: 339545 - DNA, 120 bp, Artificial Sequence
  ENSG00000137812_45 (sequence is synthesized)
gcagacacaactgatataaatcacttagaaactcagccggtctctagcaaagattcaggcattggatctgttgcaggtaaactgaacctaagtccttctcaatatataaatgaggaaaat

SEQ ID NO: 339546 - DNA, 120 bp, Artificial Sequence
  ENSG00000137812_46 (sequence is synthesized)
cttcctgtatatcctgatgagatcaattcttcagactctattaacatagaaactgaggaaaaggccttgattgagacataccaaaaagagatttcaccatatgaaaataaaatgggaaaa

SEQ ID NO: 339547 - DNA, 120 bp, Artificial Sequence
  ENSG00000137812_47 (sequence is synthesized)
acttgcaatagccaaaaaagaacgtgggtacaagaagaagaagatattcataaggagaaaaaaatcagaaaaaatgagattaagtttagtgatacgacacaagatcgggagatttttgat

SEQ ID NO: 339548 - DNA, 120 bp, Artificial Sequence
  ENSG00000137812_48 (sequence is synthesized)
caccatactgaagaggatatagataaaagtgctaacagtgtattgataaaaaacctgagcaggaccccatctagttgcagcagctctctggattcaatcaaggctgatgggacctctctg

SEQ ID NO: 339549 - DNA, 120 bp, Artificial Sequence
  ENSG00000137812_49 (sequence is synthesized)
gacttcagcacttaccgcagtagtcaaatggaatcacagtttctcagagatactatttgtgaagagagcttgagggagaaactccaagatgggagaataacaataagggagttctttata

SEQ ID NO: 339550 - DNA, 120 bp, Artificial Sequence
  ENSG00000137812_50 (sequence is synthesized)
cttctccaggtccacatcttgatacagaaaccccgacagagcaatctcccaggcaattttactgtaaacacaccacctactccagaagacctgatgttaagtcaatatgtttaccgaccc

SEQ ID NO: 339551 - DNA, 120 bp, Artificial Sequence
  ENSG00000137812_51 (sequence is synthesized)
aagatacagatttatagagaagattgtgaggctcgtcgccaaaagattgaagaattaaagctttctgcatcgaaccaagataagctgttggttgatataaataagaacctgtgggaaaaa

SEQ ID NO: 339552 - DNA, 120 bp, Artificial Sequence
  ENSG00000137812_52 (sequence is synthesized)
atgagacactgctctgacaaagagctgaaggcctttggaatttatcttaacaaaataaagtcatgttttaccaagatgactaaagtcttcactcaccaaggaaaagtggctctgtatggc

SEQ ID NO: 339553 - DNA, 120 bp, Artificial Sequence
  ENSG00000137812_53 (sequence is synthesized)
aagctggtgcagtcagctcagaatgagagggagaaacttcaaataaagatagatgagatggataaaatacttaagaagatcgataactgcctcactgagatggaaacagaaactaagaat

SEQ ID NO: 339554 - DNA, 120 bp, Artificial Sequence
  ENSG00000137812_54 (sequence is synthesized)
ttggaggatgaagagaaaaacaatcctgtggaagaatgggattctgaaatgagagctgcagaaaaagaattggaacagctgaaaactgaagaagaggagcttcaaagaaatctcttagaa

SEQ ID NO: 339555 - DNA, 120 bp, Artificial Sequence
  ENSG00000137812_55 (sequence is synthesized)
ctggaggtacaaaaagagcagacccttgctcaaatagactttatgcaaaaacaaagaaatagaactgaagagctactggatcagttgagcttgtctgagtgggatgtcgttgagtggagt

SEQ ID NO: 339556 - DNA, 120 bp, Artificial Sequence
  ENSG00000137812_56 (sequence is synthesized)
gatgatcaagctgtattcacctttgtttatgacacgatacaactcaccatcacctttgaagagtcagttgttggtttccctttcctggacaagcgttataggaagattgttgatgtcaat

SEQ ID NO: 339557 - DNA, 120 bp, Artificial Sequence
  ENSG00000137812_57 (sequence is synthesized)
tttcaatctctgttagatgaggatcaagctcctccttcctcccttttagttcataagcttattttccagtacgttgaagaaaaggaatcctggaagaagacatgtacaacccagcatcag

SEQ ID NO: 339558 - DNA, 120 bp, Artificial Sequence
  ENSG00000137812_58 (sequence is synthesized)
ttacccaagatgcttgaagaattctcactggtagtgcaccattgcagactccttggagaggagattgagtatttaaagagatggggaccaaattataacctaatgaacatagatattaat

SEQ ID NO: 339559 - DNA, 120 bp, Artificial Sequence
  ENSG00000137812_59 (sequence is synthesized)
aataatgaattgagacttttattctctagctccgcagcatttgcaaagtttgaaataactttgtttctctcagcctattatccatctgtaccattaccttccaccattcagaatcacgtt

SEQ ID NO: 339560 - DNA, 120 bp, Artificial Sequence
  ENSG00000137812_60 (sequence is synthesized)
gggaacactagccaagatgatattgctaccattctatctaaagtgccactggagaacaactacctgaagaatgtagtcaagcaaatttaccaagatctgtttcaggactgccatttctac

SEQ ID NO: 339561 - DNA, 120 bp, Artificial Sequence
  ENSG00000137812_61 (sequence is synthesized)
cactagacccttggaccaccattggaacaaccaagcagaatgtacttgatattatttcagggtcccattgctgttcagcctttgtttttacgtcattacaagctgagtaaaattccttct

SEQ ID NO: 339562 - DNA, 120 bp, Artificial Sequence
  ENSG00000137812_62 (sequence is synthesized)
gatgatgttatagttaatctgtatgttttttatatctctgcagaatgatggtgatgaagtctggatggtaggcctcatagcctactatcaacttactcatctttgtaccaaaggtttaag

SEQ ID NO: 339563 - DNA, 120 bp, Artificial Sequence
  ENSG00000137812_63 (sequence is synthesized)
taataggacacttaggaaaaatgtctcctaactaaactagtgctttctgctttagtacaagccctaaggattaacttaagtataagaagtgttatcactgacaagaacattagccatttt

SEQ ID NO: 339564 - DNA, 120 bp, Artificial Sequence
  ENSG00000137812_64 (sequence is synthesized)
cccataactagatagagctatgattttttaggttgcctggcttctgcctagcagatatttctggagtagaaatgtatctgtctacaaactattatcctttttctccgttactaaaatgct

SEQ ID NO: 339565 - DNA, 89 bp, Artificial Sequence
  ENSG00000137812_65 (sequence is synthesized)
tactaaaatgctattaagagaaagtaccagcagtttgggaggccaaaatgggtgaatagcctgagtccaggaattcaagaccagcctgg

SEQ ID NO: 339566 - DNA, 81 bp, Artificial Sequence
  ENSG00000137812_66 (sequence is synthesized)
gcaaaaccccacctctacaaaaaatacgaaagttagccagtcatggtggcttgcgcctgtggtcccagctacttaggagct

SEQ ID NO: 339567 - DNA, 120 bp, Artificial Sequence
  ENSG00000137812_67 (sequence is synthesized)
gagcaagaccctgtctcaaaaaaacaaaaagagagaaagcaatagcactcagctattgaaatggttgccatctttttttgaaggccttgctttttattctatggtgtctattatgttttc

SEQ ID NO: 339568 - DNA, 79 bp, Artificial Sequence
  ENSG00000137812_68 (sequence is synthesized)
aatagcactcagctattgaaatggttgccatctttttttgaaggccttgctttttattctatggtgtctattatgtttt

SEQ ID NO: 339569 - DNA, 76 bp, Artificial Sequence
  ENSG00000137812_69 (sequence is synthesized)
cctgcctcggctgttttcttaataagtatagtttttctagggaaagttaattcatttttgtctagtacatatatgt

SEQ ID NO: 339570 - DNA, 120 bp, Artificial Sequence
  ENSG00000137812_70 (sequence is synthesized)
ctagggaaagttaattcatttttgtctagtacatatatgtaaatatattaatgttgtttttgtgtttgtgatgtagtaaggagatgtacatagaaattcattgaggtatatagatactca

SEQ ID NO: 339571 - DNA, 120 bp, Artificial Sequence
  ENSG00000137812_71 (sequence is synthesized)
tctgtctaggcagttcccaattttctgaagaatgttttacagcaaaattttctattttcttttattaaatagtgacacgtcaaacaatgtcacatccaaaacactagtttcatcaatttc

SEQ ID NO: 339572 - DNA, 120 bp, Artificial Sequence
  ENSG00000137812_72 (sequence is synthesized)
tagcagtaataatagacttgctgtaagtattgttttctgatgccatacccttgtcatacatattattaaatgaccaatattatgtatgaagtagacaaaaaaatttactcaaacttcatt

SEQ ID NO: 339573 - DNA, 120 bp, Artificial Sequence
  ENSG00000137812_73 (sequence is synthesized)
caaatcctaattgtgataatttttgttttatatttaattataaaccaaaatacatttgcatttttaagctaatttgtctcaaaattttgctttatatttttggatcaggttaaagtcctg

SEQ ID NO: 339574 - DNA, 120 bp, Artificial Sequence
  ENSG00000137812_74 (sequence is synthesized)
tggatcccctgaatgttattgtccctcttgattggtttttacttctgagctatacgtcaaaagacacataagcttcaaaagtcaagacaaacctcatttgccataaaaatcaagatatag

SEQ ID NO: 339575 - DNA, 120 bp, Artificial Sequence
  ENSG00000137812_75 (sequence is synthesized)
atgttctgttccgtaaactccttgaaaaacattttaaagtcatcaatatgatctgtttcccatgaaacttaagttagctttcttattggagttatttcttttctgtaagtctgaaaagta

SEQ ID NO: 339576 - DNA, 120 bp, Artificial Sequence
  ENSG00000137812_76 (sequence is synthesized)
gagattttgttttacgcattttagtaacctgcaacaaccaactctaaaaaagatttggcttgtaatgacggtctctgcttttttgggtttggagtacacaattgtaatatttacttagtt

SEQ ID NO: 339577 - DNA, 120 bp, Artificial Sequence
  ENSG00000137812_77 (sequence is synthesized)
atttgtgtttttctttgttcaaggtattgactagtttcataaattttttgaaagtttttctttcattggttggaaagcagattacattttgcactattaaaataagtttattactttaaa

SEQ ID NO: 339578 - DNA, 120 bp, Artificial Sequence
  ENSG00000137812_78 (sequence is synthesized)
ttttgttttgttttcttaaattgtgggtattctcaaattttaatcttagtctcgggtaggcagaaaataattatttccacttagagggctggagaaatattcttatgtagaaccttcaga

SEQ ID NO: 339579 - DNA, 120 bp, Artificial Sequence
  ENSG00000137812_79 (sequence is synthesized)
aattaattgactaacagctagacttcaaagcaatttaaagtgacaaatagtcacaaaaaaattaaatggaaaattgtacaaaaagtagccaaagttaaaattgtataatttcaaaaattt

SEQ ID NO: 339580 - DNA, 120 bp, Artificial Sequence
  ENSG00000137812_80 (sequence is synthesized)
caaaaggtatgtatactgtcacctctagtgatttgtcaatttggctttatataagaatctctagggaggttatatatagcttgaaaagtcatcttcagtgttgttatatttggggagtaa

SEQ ID NO: 339581 - DNA, 120 bp, Artificial Sequence
  ENSG00000137812_81 (sequence is synthesized)
aaaaaaaaaaaaaatagaaaccatcagactagaacttctgaacttcctactaccaaagaaacaatctgtcgtttaataaattgtttttgattgaattattctttttttccttactttgtt

SEQ ID NO: 339582 - DNA, 120 bp, Artificial Sequence
  ENSG00000137812_82 (sequence is synthesized)
ggcaggaatccaatgctttgagaaataagaaaaactctcgtcgagtcagctttgcagatactataaaggtattccagacggagtctcatatgaaaatagtgagaaagtcagaaatggaag

SEQ ID NO: 339583 - DNA, 120 bp, Artificial Sequence
  ENSG00000137812_83 (sequence is synthesized)
ggttgcctggcttctgcctagcagatatttctggagtagaaatgtatctgtctacaaactattatcctttttctccgttactaaaatgctattaagagaaagtaggccaccacacccagc

SEQ ID NO: 339584 - DNA, 120 bp, Artificial Sequence
  ENSG00000137814_0 (sequence is synthesized)
actcttggcgccttcgcggaaggtgcgtccgagccatggccgctgccaacccgtgggacccggcgtccgcgcctaacggcgctgggctagtgctaggccacttcatagcttcggggatgg

SEQ ID NO: 339585 - DNA, 120 bp, Artificial Sequence
  ENSG00000137814_1 (sequence is synthesized)
tcaatcaggagatgttaaacatgtctaagaaaacagtttcttgttttgtgaacttcaccagactacagcagatcacaaatattcaagctgaaatctaccagaaaaacctggaaattgaac

SEQ ID NO: 339586 - DNA, 120 bp, Artificial Sequence
  ENSG00000137814_2 (sequence is synthesized)
tcctgaaactagaaaaagatacagcagatgttgttcatcctttctttttggctcagaagtgtcatactctgcaaagcatgaataatcatttggaagcagtgctgaaagagaagagatccc

SEQ ID NO: 339587 - DNA, 120 bp, Artificial Sequence
  ENSG00000137814_3 (sequence is synthesized)
ttaggcaaagactgttgaaacccatgtgccaggaaaacttacctattgaagctgtttatcacagatatatggtacatttgctggagttggctgtgactttcattgagagattagaaaccc

SEQ ID NO: 339588 - DNA, 120 bp, Artificial Sequence
  ENSG00000137814_4 (sequence is synthesized)
accttgaaacaattagaaatattcctcatttagctgcaaatctaaagaaaatgaaccaggctttagcaaagatggatatattggtgactgagacagaagaactggcagagaatatactca

SEQ ID NO: 339589 - DNA, 120 bp, Artificial Sequence
  ENSG00000137814_5 (sequence is synthesized)
agtggcgtaaacaacaaaacgaagtttcgtcttgtatccccaaaatattagctgaagaaagttatctttataaacatgatattataatgcctcctttaccttttacttctaaagttcatg

SEQ ID NO: 339590 - DNA, 120 bp, Artificial Sequence
  ENSG00000137814_6 (sequence is synthesized)
tccaaactattaatgccaagtagtcatcaactttatttttgcttaattatgtgtagtcatatgaagtctatttctagttgactgtaacatgggtattaatagtctttgctgctggtaata

SEQ ID NO: 339591 - DNA, 120 bp, Artificial Sequence
  ENSG00000137814_7 (sequence is synthesized)
ctgaaagaacctgctttatattggagtatcaagatctcaggttcattaagaccaaactgacttttcctttgtttttcatatatttttattctacctttcagtaaaactagagaagctaaa

SEQ ID NO: 339592 - DNA, 120 bp, Artificial Sequence
  ENSG00000137814_8 (sequence is synthesized)
aaatagccatgacaatttattaatataagtgaattaaccatttctcaggtgggaaattctctttttttaaaaatgtgtgtttatcgtctggtgtggtggctcacacctgtaatcctaaca

SEQ ID NO: 339593 - DNA, 81 bp, Artificial Sequence
  ENSG00000137814_9 (sequence is synthesized)
gaggcgggcagatcacttaatcccatatctacaaaataaacaaaaaattagccgaccatggtggtgcatgcctgtagtccc

SEQ ID NO: 339594 - DNA, 120 bp, Artificial Sequence
  ENSG00000137814_10 (sequence is synthesized)
gtagtcccagctattcgggaggctgaggtaagaggatcacctaagcctgtgaggtcatggttgcaatgagtcatgatcacgccactgcgctacagcctgggcgacacagtaagaccctgt

SEQ ID NO: 339595 - DNA, 62 bp, Artificial Sequence
  ENSG00000137814_11 (sequence is synthesized)
tcacgccactgcgctacagcctgggcgacacagtaagaccctgtctcaaaaaaaagaagtgt

SEQ ID NO: 339596 - DNA, 75 bp, Artificial Sequence
  ENSG00000137814_12 (sequence is synthesized)
accacaacatggtgaaaccccatctctggtagaaatataaaaaattaaccgggcatggtggtggacgcctgtaat

SEQ ID NO: 339597 - DNA, 76 bp, Artificial Sequence
  ENSG00000137814_13 (sequence is synthesized)
aggttgcagtaagccaagatcgtgcctctgcactccaacctgggtgatggagcaagactccatctccaaaaaaaat

SEQ ID NO: 339598 - DNA, 120 bp, Artificial Sequence
  ENSG00000137814_14 (sequence is synthesized)
tatgatgattattcctgtgggaatgtcactaagtatgcagaaaagagtaacacagccagcctgacttatcctttgaaaggcctgattataaggtttgtcctcagctgttgcatctgggaa

SEQ ID NO: 339599 - DNA, 120 bp, Artificial Sequence
  ENSG00000137814_15 (sequence is synthesized)
cttagatatcagaaggtatcttagtctgttctgctgtcataacagaattacacaaactaagtattttataatgaacagaagtttatttggttgacaggtgtggaggctaggcagtccaag

SEQ ID NO: 339600 - DNA, 120 bp, Artificial Sequence
  ENSG00000137814_16 (sequence is synthesized)
aacatggtgccagcatctagtgagggtcttgccatggcagaaggcaccacatggcaagtgagcatgagaaagatatatgggtctaaacttagccttttatcatgagcccactcccaagat

SEQ ID NO: 339601 - DNA, 120 bp, Artificial Sequence
  ENSG00000137814_17 (sequence is synthesized)
agcagcactaattcattaatgagggcaaagccctccttacctaattactttttaaaggtctcataacacttttacaatgtcaattaaatttccaacacttgaactttgggggacatattt

SEQ ID NO: 339602 - DNA, 120 bp, Artificial Sequence
  ENSG00000137814_18 (sequence is synthesized)
aaaccttaacaggagggctccactcactgaaaagagtcgttcatggtagctaacctgtggtttgtgctgaaaacctgctttcttcctgggagtctagaattttggtacatggtaggtaga

SEQ ID NO: 339603 - DNA, 120 bp, Artificial Sequence
  ENSG00000137814_19 (sequence is synthesized)
aggtacctacgtgaccagcccccagtaaaaaccctgggcactgtatctctaacaagtttccctggtaaacaacatttctcacatgttgtcacaattcagttgctggtggaatgaaacaac

SEQ ID NO: 339604 - DNA, 120 bp, Artificial Sequence
  ENSG00000137814_20 (sequence is synthesized)
agatatgtgtgactccactgttagaggactctggaagcttatacctggtttcccccagactttgcctctgtaccttttctctttgctgttttgcttcatatgcttttgctgtaataaatc

SEQ ID NO: 339605 - DNA, 120 bp, Artificial Sequence
  ENSG00000137814_21 (sequence is synthesized)
atagctgtgtgatgatatgctgagtcttgtgaattctcctagcaaatcatggaacctggaggtagtcttggagaccctggcatacaaagcagttcctaagtgtttactggtagctgtagg

SEQ ID NO: 339606 - DNA, 120 bp, Artificial Sequence
  ENSG00000137814_22 (sequence is synthesized)
aataggcaaagaagaaacagcaaagaaaaaggcacactgtggtataactttggaggtttaccttgcaaaatgctcagatattttacctatcagaggttattgtgcatataatagagagtg

SEQ ID NO: 339607 - DNA, 120 bp, Artificial Sequence
  ENSG00000137814_23 (sequence is synthesized)
atatactaacaactgcctcaggatatactctttttaatcagtattgtaactaaccttggcttattttacttttagacttggggttctattttgctttaaaacatgtacatcagttttgtt

SEQ ID NO: 339608 - DNA, 120 bp, Artificial Sequence
  ENSG00000137814_24 (sequence is synthesized)
tctttcctttttttttttttttttttaaagacaggatctcactctgtcacccaggttgctgagagtgtggtgtggcccaatcttgacctcactgcagccttgacctctcaggctcaagtg

SEQ ID NO: 339609 - DNA, 73 bp, Artificial Sequence
  ENSG00000137814_25 (sequence is synthesized)
tagctgggactatcagagttttgccatgttgttgaggctggtcttgaactcctgggttcaaacgaccctcccg

SEQ ID NO: 339610 - DNA, 120 bp, Artificial Sequence
  ENSG00000137814_26 (sequence is synthesized)
gaggctggtcttgaactcctgggttcaaacgaccctcccgcctcagcctccgaaagtgctgggagtacaggtgttagccactgcgcctggcctcattgtactccttaacacaagaagact

SEQ ID NO: 339611 - DNA, 120 bp, Artificial Sequence
  ENSG00000137814_27 (sequence is synthesized)
tcaacaatgataagtagttgtttataaggaagcaggatcattaccaaaataaatcctgctaaaacaacaggaatcatgttttaaagcctagtttgctaatttttgctagtaggataagag

SEQ ID NO: 339612 - DNA, 120 bp, Artificial Sequence
  ENSG00000137814_28 (sequence is synthesized)
tgatcgtaatatctcgaacattacatagacacttaaaacctttagttgtatttcatcaaaaatctgttcataccccacgttggtttcaaaacatactatgctttttcttcgtgttatttc

SEQ ID NO: 339613 - DNA, 120 bp, Artificial Sequence
  ENSG00000137814_29 (sequence is synthesized)
ctatattcatttttgtgtgtatgtgtatgtcacaaatattgatatgcctggttgtttatttttgttttctattatgcctttttcaaaatataaaaataaacttgtaatttctaactaaaa

SEQ ID NO: 339614 - DNA, 120 bp, Artificial Sequence
  ENSG00000137814_30 (sequence is synthesized)
tttactttttgttttgcagttactttgtagcagaattcataaaacaattagtgattgtatttgttaacattattaatggtgatatattaaatcagaaagaaaatctttgcttttaaacca

SEQ ID NO: 339615 - DNA, 120 bp, Artificial Sequence
  ENSG00000137814_31 (sequence is synthesized)
ttatacctatggcaaaaaggaagaacttggccatcgtgttttgggaattataaattatgagtttaatgaaagaaattagatccataacatgtaacaataaaaactgtttgtatgtgaagt

SEQ ID NO: 339616 - DNA, 85 bp, Artificial Sequence
  ENSG00000137814_32 (sequence is synthesized)
gagatgaatggcctcaattctcccgtttcagtctcccaaaacactgcgattacagctcagaagtgtcatactctgcaaagcatga

SEQ ID NO: 339617 - DNA, 120 bp, Artificial Sequence
  ENSG00000137815_0 (sequence is synthesized)
tcgcctttgtgtgggtcgagcagcggcggcggcggcggcagtggcggtcccactggcaggcgggcaagaggggagtccgggcggcggccggcgtgggagccgggggaccaccatggtaaa

SEQ ID NO: 339618 - DNA, 120 bp, Artificial Sequence
  ENSG00000137815_1 (sequence is synthesized)
cgggggaccaccatggtaaagaagcggaaaggccgcgtcgtgatcgactcggacacagaggacagcggcagcgacgagaacctggatcaggagctcttgtccctggcaaagcgaaagcgc

SEQ ID NO: 339619 - DNA, 120 bp, Artificial Sequence
  ENSG00000137815_2 (sequence is synthesized)
agtgactctgaggagaaggagccgcctgtgagtcagcctgcagcctcgtcagactcggagacgtctgacagtgacgatgagtggacatttgggagcaataaaaataagaagaaaggaaaa

SEQ ID NO: 339620 - DNA, 120 bp, Artificial Sequence
  ENSG00000137815_3 (sequence is synthesized)
gccagaaaaatagagaagaaaggaaccatgaagaaacaggccaacaaaactgcctcctcaggcagttcagacaaagacagttcagctgagagctcagcccctgaggaaggtgaagtgtca

SEQ ID NO: 339621 - DNA, 120 bp, Artificial Sequence
  ENSG00000137815_4 (sequence is synthesized)
gactctgacagcaacagctcctcttccagttcagattcagactcttcctcagaagatgaagagttccatgatggctatggagaagacctcatgggagatgaggaagacagggcccgtctg

SEQ ID NO: 339622 - DNA, 120 bp, Artificial Sequence
  ENSG00000137815_5 (sequence is synthesized)
gaacagatgacagagaaagagagagagcaagaactgttcaatcgcatagagaagagggaggtgttgaaaagaagatttgaaatcaagaaaaaactaaaaacagccaaaaagaaagaaaag

SEQ ID NO: 339623 - DNA, 120 bp, Artificial Sequence
  ENSG00000137815_6 (sequence is synthesized)
aaagaaaagaagaaaaagcaagaagaggagcaagaaaagaaaaaactgacacagattcaagaatctcaggtaacatcccacaacaaggaacggcgttccaagcgggatgagaaactagac

SEQ ID NO: 339624 - DNA, 120 bp, Artificial Sequence
  ENSG00000137815_7 (sequence is synthesized)
aagaaatctcaagccatggaggagctaaaagcagagcgagaaaaacgaaagaacagaacagctgagctccttgccaaaaaacagccattaaaaaccagtgaggtctactctgatgatgaa

SEQ ID NO: 339625 - DNA, 120 bp, Artificial Sequence
  ENSG00000137815_8 (sequence is synthesized)
gaggaggaagaggatgacaaatccagtgaaaagtcagaccgctcatcacgaacatcatcgtctgatgaagaagaggagaaagaagagatccctcccaaatcccaaccagtttccttacct

SEQ ID NO: 339626 - DNA, 120 bp, Artificial Sequence
  ENSG00000137815_9 (sequence is synthesized)
gaagaattgaatcgggttcgattatcacggcataagctagaacgctggtgtcacatgcccttctttgctaaaactgtcacaggatgttttgtgcggattggcatcggaaaccacaacagc

SEQ ID NO: 339627 - DNA, 120 bp, Artificial Sequence
  ENSG00000137815_10 (sequence is synthesized)
aaaccagtttaccgggtcgctgagattacgggtgttgtggaaactgccaaagtttaccaactaggtggcaccagaacaaacaaagggctgcaactacggcatggcaatgaccaacgcgtg

SEQ ID NO: 339628 - DNA, 120 bp, Artificial Sequence
  ENSG00000137815_11 (sequence is synthesized)
ttccgtttagagtttgtctcaaaccaagaattcaccgaaagtgagtttatgaagtggaaagaagcgatgttctctgctggcatgcagttgcccactctagatgaaatcaataaaaaggaa

SEQ ID NO: 339629 - DNA, 120 bp, Artificial Sequence
  ENSG00000137815_12 (sequence is synthesized)
ttatctattaaagaagctcttaattataaattcaatgatcaggacattgaagagattgtaaaagagaaagaaaggttcagaaaagctccacccaactacgctatgaagaagactcagcta

SEQ ID NO: 339630 - DNA, 120 bp, Artificial Sequence
  ENSG00000137815_13 (sequence is synthesized)
ctgaaggaaaaggccatggctgaggacctgggggatcaggacaaggccaaacaaatccaagatcaactgaatgagctggaggaacgggcagaggccctggaccgccagcggaccaagaac

SEQ ID NO: 339631 - DNA, 120 bp, Artificial Sequence
  ENSG00000137815_14 (sequence is synthesized)
atatccgctatcagttacatcaaccagcggaaccgggagtggaacattgtagagtctgagaaggcccttgtggctgaaagtcacaacatgaaaaaccaacagatggatccctttactcgg

SEQ ID NO: 339632 - DNA, 120 bp, Artificial Sequence
  ENSG00000137815_15 (sequence is synthesized)
cggcagtgcaagcctaccatcgtttctaattccagagacccagctgttcaagctgccatcttggcccagctgaatgcaaaatacggttctggagtgttaccagatgctccaaaggaaatg

SEQ ID NO: 339633 - DNA, 120 bp, Artificial Sequence
  ENSG00000137815_16 (sequence is synthesized)
agcaagggtcaaggcaaagataaagatttgaattctaagtcagccagtgacctctcagaagatctgttcaaagtacacgattttgatgtgaagattgacttacaagttcccagctcagag

SEQ ID NO: 339634 - DNA, 120 bp, Artificial Sequence
  ENSG00000137815_17 (sequence is synthesized)
tcaaaggctttagccatcacctccaaggctccgccagccaaggatggggctccaaggagatctctgaacttggaagactacaaaaaacgacgagggcttatttgagcacacccagcctgc

SEQ ID NO: 339635 - DNA, 120 bp, Artificial Sequence
  ENSG00000137815_18 (sequence is synthesized)
tgcttctgaccctgcatgccccatcgcagcgtcccacctttcctcctttcctttgatttagcctctttgggctggagcagctgttgaactgggaagagactctaaactgccagtcatctg

SEQ ID NO: 339636 - DNA, 120 bp, Artificial Sequence
  ENSG00000137815_19 (sequence is synthesized)
taatataaaccatttgctgtatagacctcctttgtctgcacaccatctcccaccagcctcccctcccccagggccccacccagtgtgggcctgggctctcttgggctttatccatgtctt

SEQ ID NO: 339637 - DNA, 120 bp, Artificial Sequence
  ENSG00000137815_20 (sequence is synthesized)
ggggcaatagcagcagcaccaggcggtctcctctacagactgccttggcccacccattgaacattcggcacgtgaccttgtggggggagcggggattgggcacctgcgatcctctttcct

SEQ ID NO: 339638 - DNA, 120 bp, Artificial Sequence
  ENSG00000137815_21 (sequence is synthesized)
ctcttcatctttctcttctgcccttctttttggaagaaggggtttcaaaaccagtttagtttccaaaaagtgtacatttgtggggggggggggtctaatttgagagcgagagtgtgtatg

SEQ ID NO: 339639 - DNA, 120 bp, Artificial Sequence
  ENSG00000137815_22 (sequence is synthesized)
tgtgtgtgtgtaagtgtgtggatttttttatcatttttttaaaatgcagtactctttgtatcagtctgtcatgggtctatagctgtttcagatttttttcagctgtacttgagcatctga

SEQ ID NO: 339640 - DNA, 120 bp, Artificial Sequence
  ENSG00000137815_23 (sequence is synthesized)
aactgcaagaaagaaactcattaaatgtgattcttcttactaaacaggcctgactgctgtagctgtgtaacttccccattcccacctactcttcccatcctttcccaactttggagaaaa

SEQ ID NO: 339641 - DNA, 120 bp, Artificial Sequence
  ENSG00000137815_24 (sequence is synthesized)
ctccccagtttagccccctgacctgcaggctgtgtcctggcaggtgtgggagggaagcccatggccaggtaccagggagggcagtgaatgtcttgctcttcccatgggtacagcccacag

SEQ ID NO: 339642 - DNA, 120 bp, Artificial Sequence
  ENSG00000137815_25 (sequence is synthesized)
cttcttggctgaacgtagaacttctttttctcacccagtataccagcctcttcctggtgattctgttttgctgctttggcaagaactacattttgtttttaagagaaatttctgaatatg

SEQ ID NO: 339643 - DNA, 74 bp, Artificial Sequence
  ENSG00000137815_26 (sequence is synthesized)
aagaactacattttgtttttaagagaaatttctgaatatgaatgtggagagcaaacacaaaaagatttaggtta

SEQ ID NO: 339644 - DNA, 88 bp, Artificial Sequence
  ENSG00000137815_27 (sequence is synthesized)
cctcaaaaagatttaggttgcaaatgtttcaagcatgtgcagttttgtgtgtgtgtatacatatatatggtcagcatatatattgtgc

SEQ ID NO: 339645 - DNA, 120 bp, Artificial Sequence
  ENSG00000137815_28 (sequence is synthesized)
gtgtgtgtatacatatatatggtcagcatatatattgtgcagctagggcgaagccagcagaggtgtgtgtatgtctttatgaaatgtttgaaaagagataaactgactgcttgataatca

SEQ ID NO: 339646 - DNA, 120 bp, Artificial Sequence
  ENSG00000137815_29 (sequence is synthesized)
ctctcaggtgtaaagctccaagtgtaaataaaagtggcatttaacaaatctttcagaacaaagtacagctgactatatataccaagagctaagctaaaggaacagctgagagctccgatc

SEQ ID NO: 339647 - DNA, 120 bp, Artificial Sequence
  ENSG00000137815_30 (sequence is synthesized)
tccacgagagactaatctaaaagctctgctttgtacttcctcaccctgctttcgtacaaggaagggggacgatgggaaatcatggacttgtaagttgtatttaaacataaaaatgaactt

SEQ ID NO: 339648 - DNA, 120 bp, Artificial Sequence
  ENSG00000137815_31 (sequence is synthesized)
ggtaacttctgggtttagtagagcctcagtgtcgctttaacttagtttactttttttttatttttaaagcagcaatggatggttttaaaggagtattatgattgtaaaattgctaaatat

SEQ ID NO: 339649 - DNA, 120 bp, Artificial Sequence
  ENSG00000137815_32 (sequence is synthesized)
gactgtaacacagctttgtggtagctgtgacacagttcacttgggcaaaggagtggtgatggactcgttaaaatcatatatacttgaatagtccattgaccgaaactctttatagactat

SEQ ID NO: 339650 - DNA, 120 bp, Artificial Sequence
  ENSG00000137815_33 (sequence is synthesized)
tgtgtaaatgtggaatcacagactgttaacattgcctggacttcagcagagtcctggagctgctgggacctctcctatcatgatgaacttggacttttttttttgatttctggttttaaa

SEQ ID NO: 339651 - DNA, 120 bp, Artificial Sequence
  ENSG00000137815_34 (sequence is synthesized)
aaacataaaattatagaatccagataattcgctggagtcattctgatccaccatgtagatctgtatttagtatcatttggatttggagaagtgttgattacattatggctgtgtaataaa

SEQ ID NO: 339652 - DNA, 120 bp, Artificial Sequence
  ENSG00000137815_35 (sequence is synthesized)
atttttattaaaactgcatcacactgtagccactttgccaccacctccccacatgtagccgctgaaacccccacgagatgccaatgcacacagcagggagaaaagccaaccaaagaagac

SEQ ID NO: 339653 - DNA, 120 bp, Artificial Sequence
  ENSG00000137815_36 (sequence is synthesized)
cgaagggtatctttccacccgagtagcctctgtagtgattgggaccaagactaaggacttgtctccaatctcagctgaggcagtgcctctgaaccaagatcttggtcaggcattaagaca

SEQ ID NO: 339654 - DNA, 120 bp, Artificial Sequence
  ENSG00000137815_37 (sequence is synthesized)
ctggctttgtcctaccaactaggatttcttggtggttcacactatttcttgtgctggggaattccctcattgggcccctcctccctccacagtgtggtttcagtgttgaagggtgcagca

SEQ ID NO: 339655 - DNA, 120 bp, Artificial Sequence
  ENSG00000137815_38 (sequence is synthesized)
cccaaggttgtttttatgcattttttcagttccttccaagaagcaaaaaggccagtgtccatctgcctagttcataatgtttataggtctgtttgtctgtcttgcttctggcaggtgtag

SEQ ID NO: 339656 - DNA, 120 bp, Artificial Sequence
  ENSG00000137815_39 (sequence is synthesized)
ggaaagtctactgcctgccactcccttcaaaaagaatgtttttgcttttgtgaagtcctgacttgccactcaaactgtaccaatattgtaaataaatgttatgccattttaacaaaggga

SEQ ID NO: 339657 - DNA, 120 bp, Artificial Sequence
  ENSG00000137815_40 (sequence is synthesized)
agcctcctgagtagctgggactacagtggacatttgggagcaataaaaataagaagaaaggaaaagccagaaaaatagagaagaaaggaaccatgaagaaacaggccaacaaaactgcct

SEQ ID NO: 339658 - DNA, 120 bp, Artificial Sequence
  ENSG00000137815_41 (sequence is synthesized)
gagctattttgtaaccatgtggacagaacctagagctgcctgcctgtgggtgagttgggacaccaaggattaaggcagagccaagaacagaaagaagccagacttctgacaccatctgtg

SEQ ID NO: 339659 - DNA, 120 bp, Artificial Sequence
  ENSG00000137815_42 (sequence is synthesized)
gaagttaaaaataatgttttcttagctgggatttgcttgtctgaagctcttgggtctggatacttccttttttatcttgctataggacatatcggtagtgaaaacgtggcatggatttat

SEQ ID NO: 339660 - DNA, 120 bp, Artificial Sequence
  ENSG00000137815_43 (sequence is synthesized)
aaaaacctagtgactgatcctcctgtatcagggtgggtttacagtgcagcagacattagtaatgtgtcccttagctagggcctggctgggctgggcttggctttcaagcttgtaattgcc

SEQ ID NO: 339661 - DNA, 120 bp, Artificial Sequence
  ENSG00000137817_0 (sequence is synthesized)
caacagaaaccaagcagcaacagcccttggaaagaggctaaatttttcttgacttctgcagcaacaaagaccgtgaaaagttggcacttctggcctaacgctgccgtcatcctacccctc

SEQ ID NO: 339662 - DNA, 120 bp, Artificial Sequence
  ENSG00000137817_1 (sequence is synthesized)
accccagggcaacccaggctggacatttagtgcctccctctttattcctctgtgatcatccagatcagcacttgactgtttattttcaaatctcacgaacctcaccccaagatcttcaca

SEQ ID NO: 339663 - DNA, 120 bp, Artificial Sequence
  ENSG00000137817_2 (sequence is synthesized)
ttctggatctcagctgctcttgaaggacagtgacttgttaccaccgcaacagcagagcctgccatccccaacagatcaccagttgtccctgacatcgtgccctaccttgtctccctttgt

SEQ ID NO: 339664 - DNA, 120 bp, Artificial Sequence
  ENSG00000137817_3 (sequence is synthesized)
ggtctcctaaatgcccatctcgttggccttggttcggctagtggtatggaggggtgctgcctagcactgacctgagagtgtgtgtgacccactgacccaatggacatcaaaggccagttc

SEQ ID NO: 339665 - DNA, 120 bp, Artificial Sequence
  ENSG00000137817_4 (sequence is synthesized)
tggaatgatgacgactcggagggagataatgaatcagaggaatttctctatggcgttcaggggagctgtgcagctgacctgtatcgacacccacagcttgatgcagacattgaagccgtg

SEQ ID NO: 339666 - DNA, 120 bp, Artificial Sequence
  ENSG00000137817_5 (sequence is synthesized)
aaggagatctacagtgagaactctgtatccatcagagaatatggaactatcgatgacgtggacattgacctccacatcaacatcagcttcctcgatgaggaagtctctacagcctggaag

SEQ ID NO: 339667 - DNA, 120 bp, Artificial Sequence
  ENSG00000137817_6 (sequence is synthesized)
gtcctccggacagaacctattgtgttgaggctgcgattttctctctcccagtacctagatggaccagaaccatccattgaggttttccagccatcaaataaggaaggatttgggctgggt

SEQ ID NO: 339668 - DNA, 120 bp, Artificial Sequence
  ENSG00000137817_7 (sequence is synthesized)
cttcagttgaaaaagatcctgggtatgtttacatcccaacaatggaaacatctgagcaatgatttcttgaagacccagcaggagaagaggcacagttggttcaaggcaagtggtaccatc

SEQ ID NO: 339669 - DNA, 120 bp, Artificial Sequence
  ENSG00000137817_8 (sequence is synthesized)
aagaagttccgagctggcctcagcatcttttcacccatccccaagtctcccagtttccctatcatacaggactccatgctgaaaggcaaactaggtgtaccagagcttcgggttgggcgc

SEQ ID NO: 339670 - DNA, 120 bp, Artificial Sequence
  ENSG00000137817_9 (sequence is synthesized)
ctcatgaaccgttccatctcctgtaccatgaagaaccccaaagtggaagtgtttggctaccctcccagcccccaggcaggtctcctgtgccctcagcacgtgggcctccctcccccagca

SEQ ID NO: 339671 - DNA, 120 bp, Artificial Sequence
  ENSG00000137817_10 (sequence is synthesized)
aatgagtactgtgtggtgtgtgatgagcagcatgtcttccaaaatggatctatgctgaagccagctgtctgtactcgtgaactatgcgttttctccttctacacactgggcgtcatgtct

SEQ ID NO: 339672 - DNA, 120 bp, Artificial Sequence
  ENSG00000137817_11 (sequence is synthesized)
ggagctgcagaggaggtggccactggagcagaggtggtggatctgctggtggccatgtgtagggcagctttagagtcccctagaaagagcatcatctttgagccttatccctctgtggtg

SEQ ID NO: 339673 - DNA, 120 bp, Artificial Sequence
  ENSG00000137817_12 (sequence is synthesized)
gaccccactgatcccaagactctggcctttaaccctaagaagaagaattatgagcggcttcagaaagctctggatagtgtgatgtctattcgggagatgacccagggctcatatttggaa

SEQ ID NO: 339674 - DNA, 120 bp, Artificial Sequence
  ENSG00000137817_13 (sequence is synthesized)
atcaagaaacagatggacaagttggatcccctggcccatcctctcctgcagtggatcatctctagcaacaggtcacacattgtcaaactacctctcagcaggctgaagttcatgcacacc

SEQ ID NO: 339675 - DNA, 120 bp, Artificial Sequence
  ENSG00000137817_14 (sequence is synthesized)
tcacaccagttcctcctgctgagcagccctcctgccaaggaggctcggttccggaccgccaagaagctctatggcagcacctttgccttccatgggtcccacattgagaactggcattcg

SEQ ID NO: 339676 - DNA, 120 bp, Artificial Sequence
  ENSG00000137817_15 (sequence is synthesized)
atcctgcgcaatgggctggtcaatgcatcctacaccaaactgcagctgcatggagcagcctatggcaaaggcatctacctgagccccatctccagtatttcctttggatactcaggaatg

SEQ ID NO: 339677 - DNA, 120 bp, Artificial Sequence
  ENSG00000137817_16 (sequence is synthesized)
ggaaaaggacagcacaggatgccctccaaggatgagctggtccagagatacaacaggatgaataccatcccccagacccgatccattcagtcacggttcctgcagagtcggaatctaaac

SEQ ID NO: 339678 - DNA, 120 bp, Artificial Sequence
  ENSG00000137817_17 (sequence is synthesized)
tgtatagcactttgtgaagtgattacatctaaggacctccagaagcatgggaacatctgggtgtgccctgtgtccgaccatgtctgcacaagattcttctttgtatatgaggatggtcag

SEQ ID NO: 339679 - DNA, 120 bp, Artificial Sequence
  ENSG00000137817_18 (sequence is synthesized)
gtgggcgatgccaacattaatactcaggaccccaagatacagaaggaaatcatgcgtgtgatcggaactcaggtttacacaaactgagggggccccagccctcgtaccacccctgttacc

SEQ ID NO: 339680 - DNA, 120 bp, Artificial Sequence
  ENSG00000137817_19 (sequence is synthesized)
ccaggatccatctgccctcataaaagtgttcaggtacagcagctgaggctgccctgaggaatcaaggggccattaccaaggggcaggaaaaggatatgtaagaggtggccttcatggtag

SEQ ID NO: 339681 - DNA, 120 bp, Artificial Sequence
  ENSG00000137817_20 (sequence is synthesized)
agcttgacccaagaactactccacattcggatggcccagactgactccatcccctgactttccctttgacttcaccctgtttgtaaataaaacaataaaatggaaggtgctgtggactgg

SEQ ID NO: 339682 - DNA, 80 bp, Artificial Sequence
  ENSG00000137817_21 (sequence is synthesized)
gtcccgggccgctcgtcccgtcggctgcggccgcgcgcggcccggggtcgccgtgagtactcgccaggctggcctgtgtg

SEQ ID NO: 339683 - DNA, 120 bp, Artificial Sequence
  ENSG00000137817_22 (sequence is synthesized)
tcaccctttcttggtattttcccttctacccttttggaagatagagtggctatttgaagttaaaggaaagggaaggggcacagaaacagtattacttggtgtgtttgtgtagtgggtttt

SEQ ID NO: 339684 - DNA, 120 bp, Artificial Sequence
  ENSG00000137817_23 (sequence is synthesized)
cttggggagggagaggagagttaagtactttaaaggatagaaagaaaataatgagacaagagagtttaggtgtgcttgggaactgtcttaggtaatgatcctggaagaggccagcttgta

SEQ ID NO: 339685 - DNA, 120 bp, Artificial Sequence
  ENSG00000137817_24 (sequence is synthesized)
ctggaacccagatatgcttaggagtcaaccttgacattgaagtcatttgcatttctttcctactggctaccagagcctctcagtcatcatactgagacttcagaaggccaaaattcccta

SEQ ID NO: 339686 - DNA, 120 bp, Artificial Sequence
  ENSG00000137817_25 (sequence is synthesized)
gatgttttcctctgtcccactaagagctagtttatggatatgatcatatcaggaagagactgagactctcacaaagggtgacatgaaaggtgtaaagggatcagggcttcagttattcta

SEQ ID NO: 339687 - DNA, 120 bp, Artificial Sequence
  ENSG00000137817_26 (sequence is synthesized)
tatttcccaatctttgtgggaatctgttcctcaccatatcatcccacgcctttccatgggataatagggacctaacaaagcatgatatccttatttctcaccactaggacatcaaaggcc

SEQ ID NO: 339688 - DNA, 120 bp, Artificial Sequence
  ENSG00000137817_27 (sequence is synthesized)
gtgatgtctattcgggagatgacccaggggtggggcagccacatggagcggtgaccatcctttgactcaaggctgtccctcaccagacttccccacccctcgtctgcaatctctgcatga

SEQ ID NO: 339689 - DNA, 120 bp, Artificial Sequence
  ENSG00000137817_28 (sequence is synthesized)
cacacacacacatcttgcatgcctgtgactgtatccatgtgcatgtccatcactaggtgtacctgtccatcttcatgtcctgtgtgggtgagaatgggtgggaatggcagtcttgggagt

SEQ ID NO: 339690 - DNA, 120 bp, Artificial Sequence
  ENSG00000137817_29 (sequence is synthesized)
agaactggaagccatatttggggtcagtgataaatttgttgattttcagatgaatttattgaatttgaaatgtcaggataatgggcaaataaaaatactgaaccagcagttgaggattta

SEQ ID NO: 339691 - DNA, 120 bp, Artificial Sequence
  ENSG00000137817_30 (sequence is synthesized)
caggtaagaaatattctgtggccaccttgactctatttacattgcctccatttgtgaatacatgatttgtgctgtctgttcctccctcattatggatacttggtctgtgtcagctctctc

SEQ ID NO: 339692 - DNA, 120 bp, Artificial Sequence
  ENSG00000137817_31 (sequence is synthesized)
ggaatttgtcatgtaggccaggagtcttgttcccgagtgctgtatttggagcacatattcttcatctctgtctttcctagaccatcagcagacagtggaggaagtctctacagcctggaa

SEQ ID NO: 339693 - DNA, 120 bp, Artificial Sequence
  ENSG00000137817_32 (sequence is synthesized)
atctctgttgacctctcgtctttcttcatcacttaaccgattacataaagatatcatagacacctttcatctccctctctcaaagggtaattgattatagatacaaaatgcagttgaatt

SEQ ID NO: 339694 - DNA, 120 bp, Artificial Sequence
  ENSG00000137817_33 (sequence is synthesized)
ttactattggagttagagatcatctaatttaatcccttattactttacagataagaaagctgatatacagaaaagttaaatgattttcttatggtcacacagctatgagtagcagagata

SEQ ID NO: 339695 - DNA, 120 bp, Artificial Sequence
  ENSG00000137817_34 (sequence is synthesized)
gggctgcaatccaggtctcctaatttctaggccattgttgttatcactatatgatacggtttggctgtgtctccacccagatctcatcttgaattcccatgtgttgtggaagggacccag

SEQ ID NO: 339696 - DNA, 68 bp, Artificial Sequence
  ENSG00000137817_35 (sequence is synthesized)
atctcatcttgaattcccatgtgttgtggaagggacccagcgggaggtaactgaatcatgggggcagg

SEQ ID NO: 339697 - DNA, 88 bp, Artificial Sequence
  ENSG00000137817_36 (sequence is synthesized)
gttcttgtcctataagggggagttttgctgcacaagctctctctttggctgccaccatccatttaagatgtgacttgctcctccttgc

SEQ ID NO: 339698 - DNA, 90 bp, Artificial Sequence
  ENSG00000137817_37 (sequence is synthesized)
tttttcctgtataaattaccaagtcttgggtatgtctttatcagtagtgtgaaaatggactaatacactatattagactgacagagtagg

SEQ ID NO: 339699 - DNA, 120 bp, Artificial Sequence
  ENSG00000137817_38 (sequence is synthesized)
gaaaatggactaatacactatattagactgacagagtaggccttgcttgaatgacgggtctctgagggccctatagatatgtgagtatgtataatgggatgttgggggaaatgtgtgcaa

SEQ ID NO: 339700 - DNA, 120 bp, Artificial Sequence
  ENSG00000137817_39 (sequence is synthesized)
atgttccacttactgtagttactccagcatttgaccaactgtcttgtatgttttcttctacgctattctgctctggttttctgttttttctttctcacactatctttagcctaatggcat

SEQ ID NO: 339701 - DNA, 120 bp, Artificial Sequence
  ENSG00000137817_40 (sequence is synthesized)
tgagtgccctctggaagtgagggttggtgtaaatagcgttcatatatctagttccagtgacttggctataaagttcaggttgaaataggggacagtgaaaaaggaggtgatatactccat

SEQ ID NO: 339702 - DNA, 120 bp, Artificial Sequence
  ENSG00000137817_41 (sequence is synthesized)
ctgtttgtttagtcttgtttagggacttctgataagtgcatactctggacacagaacatctagggattattctagccaccatgatctcaggttctgggctcaggaaatggacaatcattg

SEQ ID NO: 339703 - DNA, 120 bp, Artificial Sequence
  ENSG00000137817_42 (sequence is synthesized)
gatcagtgtggaaaggatagtgtacaacaggattgagttgggacaagatttgggttatatcataagggccatctctaagacctgccagagaaatcagattgttctttattatcttttatg

SEQ ID NO: 339704 - DNA, 120 bp, Artificial Sequence
  ENSG00000137817_43 (sequence is synthesized)
tgcctcctctggagtataacctgaatgggaattttactttttgtcactgacatacccagtttgagagaaggtcatgatgtttgggtggagagctgaacctagttaaggctaatggggaag

SEQ ID NO: 339705 - DNA, 120 bp, Artificial Sequence
  ENSG00000137817_44 (sequence is synthesized)
gtgaaaacaggggttatgagtacctgtcctgtaaaaggaagaaatgggcaattcaagccttgaggctcttggtgtcctgagttttgttcaggccctacctaaatctgtcacgagacttga

SEQ ID NO: 339706 - DNA, 120 bp, Artificial Sequence
  ENSG00000137817_45 (sequence is synthesized)
atcagtctatttctacaccatggctatgagaaaaccaagaactgatcagagtggagttaatagtaatagaaagttccagggtagagtggtgagagtgcttatgacctataatgatagcat

SEQ ID NO: 339707 - DNA, 120 bp, Artificial Sequence
  ENSG00000137817_46 (sequence is synthesized)
catctccatcttcatctctctccctggtggacacacacaggcacgtgtgtccacacatgggtagacatttttatccctaactgtggtaagattgggcctatgataaagctgagtacagag

SEQ ID NO: 339708 - DNA, 120 bp, Artificial Sequence
  ENSG00000137817_47 (sequence is synthesized)
acttaacgtcctatcctcaaaccaaaaagagtgaggagtgggagcacacaagcacattttcatatctaaataagaaaagtccaagttgagtctataaatgttataaacgggtaaggaagg

SEQ ID NO: 339709 - DNA, 120 bp, Artificial Sequence
  ENSG00000137817_48 (sequence is synthesized)
tagagagtttatggatttagataatgtggaaactagaaggaatgggcacttctttctcaagcctgggaagactgtttgaagtaggattcttcaagttagttgccattgtgatttcctgta

SEQ ID NO: 339710 - DNA, 120 bp, Artificial Sequence
  ENSG00000137817_49 (sequence is synthesized)
caaaattattcatcacttaactgctgatgcttttctcttgaatgactggtcaggtttttaatgtaactttgagactagagcaaatctgacttgttctgcttgcttcctttccattcattt

SEQ ID NO: 339711 - DNA, 120 bp, Artificial Sequence
  ENSG00000137817_50 (sequence is synthesized)
tactcatccaggcacttgacaccaaggtattgatgtcccactctcctgggcccctcattcctggctgatttcatgtgctgctcccctatcttagaaccctgcagtggttccctaatgttc

SEQ ID NO: 339712 - DNA, 120 bp, Artificial Sequence
  ENSG00000137817_51 (sequence is synthesized)
tgaggatagactttagttgccttaacatggcctgcaaagccggcttgatctgatcctagcttgcctcttctacatcatttctcaccactcctctgcaattcactattctctatgcaacta

SEQ ID NO: 339713 - DNA, 120 bp, Artificial Sequence
  ENSG00000137817_52 (sequence is synthesized)
acacacactaccttatctttccttcaggccttctgtatcctattacttcttcccagacacttccccgctgtttatttaattaactcttcctaatcctgcagttctcagtctagctgtcac

SEQ ID NO: 339714 - DNA, 120 bp, Artificial Sequence
  ENSG00000137817_53 (sequence is synthesized)
cacatgacttctttaaactcttaggctaggctagttgccctcctctaggctcacaccatgctctataatctgcatcacaaccccttaccatgctgtgttgttaattacttgttcttgctt

SEQ ID NO: 339715 - DNA, 120 bp, Artificial Sequence
  ENSG00000137817_54 (sequence is synthesized)
gtaatttccagcagactaaattctgtgggggaaaataatcttctttgttttattctctgctgttttgatgagcatctagctcagtgctgggacatagtaggcactttcgtaaatttttga

SEQ ID NO: 339716 - DNA, 120 bp, Artificial Sequence
  ENSG00000137817_55 (sequence is synthesized)
attctcccaaaggcagaggaagactggcttgttcagaaaggatagcttaaatacataattattctatcctttttatttttttctgtttcttcccaggatcatctctagcaacaggtcaca

SEQ ID NO: 339717 - DNA, 120 bp, Artificial Sequence
  ENSG00000137817_56 (sequence is synthesized)
ctgccggccccaacctccggcgaggggactccctcccggcctacaggcaacctgggttgcccttcctgcttgttcctcccaaccactcggggcgctaaatgcaacacttgactgtttatt

SEQ ID NO: 339718 - DNA, 120 bp, Artificial Sequence
  ENSG00000137818_0 (sequence is synthesized)
cccctttcctcagctgccgccaaggtgctcggtccttccgaggaagctaaggctgcgttggggtgaggccctcacttcatccggcgactagcaccgcgtccggcagcgccagccctacac

SEQ ID NO: 339719 - DNA, 120 bp, Artificial Sequence
  ENSG00000137818_1 (sequence is synthesized)
tcgcccgcgccatggcctctgtctccgagctcgcctgcatctactcggccctcattctgcacgacgatgaggtgacagtcacggaggataagatcaatgccctcattaaagcagccggtg

SEQ ID NO: 339720 - DNA, 120 bp, Artificial Sequence
  ENSG00000137818_2 (sequence is synthesized)
taaatgttgagcctttttggcctggcttgtttgcaaaggccctggccaacgtcaacattgggagcctcatctgcaatgtaggggccggtggacctgctccagcagctggtgctgcaccag

SEQ ID NO: 339721 - DNA, 120 bp, Artificial Sequence
  ENSG00000137818_3 (sequence is synthesized)
caggaggtcctgccccctccactgctgctgctccagctgaggagaagaaagtggaagcaaagaaagaagaatccgaggagtctgatgatgacatgggctttggtctttttgactaaacct

SEQ ID NO: 339722 - DNA, 120 bp, Artificial Sequence
  ENSG00000137818_4 (sequence is synthesized)
atgttggctttcagcctattctgccatgacacaggctggattttccctgccaccattgccggatgtgagatttagacaatcctgatgctaacaagaaggcacctcatggtacagtgttga

SEQ ID NO: 339723 - DNA, 120 bp, Artificial Sequence
  ENSG00000137818_5 (sequence is synthesized)
aaactgcactggggtggcaggaggaaggatcagagcagatgctttgtccaggttacctgtgtaaacttgatgattataaggtgtgtcccctacactgggggtggagggtaatacagacca

SEQ ID NO: 339724 - DNA, 120 bp, Artificial Sequence
  ENSG00000137818_6 (sequence is synthesized)
gctttagaaagcctcctgggtatttaccctatacaaccctgcctaagaacgaactttgacgtatgctgaatgttgactgctacatcccaaggttgtaaaaaaacaagacttagctatgta

SEQ ID NO: 339725 - DNA, 120 bp, Artificial Sequence
  ENSG00000137818_7 (sequence is synthesized)
atgtctcaccaaatgtttgggagttttatggtaacactgaaggagtgcagaaagtttacttaatagtttattaaggtctccagttacacaaagtggaaaaaaaaaaagattcaaacctgt

SEQ ID NO: 339726 - DNA, 120 bp, Artificial Sequence
  ENSG00000137818_8 (sequence is synthesized)
gttccaaaaactaagagctttttttgtttgccaattaataataccatgaatggaattttcaacttttcaggcttggatttatataataaaccgtgggtattgtgtgttcagagcagctaa

SEQ ID NO: 339727 - DNA, 120 bp, Artificial Sequence
  ENSG00000137818_9 (sequence is synthesized)
cggtgagtgcgggcgcgggccggcggccgggctgcctgtgggcggtgactttcggctctccatgcggttcccggctccaggccgttcgactgagcacttccggccggggccaggccgcga

SEQ ID NO: 339728 - DNA, 120 bp, Artificial Sequence
  ENSG00000137818_10 (sequence is synthesized)
acacaggccgcatagggcgggcgctcctcggggctggggcctctctccgggcaggtcctgggcccccgggaccacgtgcgggcccagcgggcatggagtgcgcttgaggctgggcgctcc

SEQ ID NO: 339729 - DNA, 120 bp, Artificial Sequence
  ENSG00000137818_11 (sequence is synthesized)
ggctccaagagccttcgtgtagaaaagctcttccgcagtgcttgggcaccctgacccgtgcctcgtctctctcagggacacttactcggacctctttcggtgtaattgccttgaattccc

SEQ ID NO: 339730 - DNA, 120 bp, Artificial Sequence
  ENSG00000137818_12 (sequence is synthesized)
agtgatgggctcgcctcattgcagggcgcctggcacacatctcttttgcttgtgatagaatatttgagctggttaaacatgttatgtacacttattgagtgacgtgcagcattttggaga

SEQ ID NO: 339731 - DNA, 120 bp, Artificial Sequence
  ENSG00000137818_13 (sequence is synthesized)
aaatgttgagcctttttggcctggcttgtttgcaaaggtaaggtgatggtggcaaagtgattgtggtaaggcctgctgatttacgagggcagttgtacatgctaaagtacccccagcggt

SEQ ID NO: 339732 - DNA, 120 bp, Artificial Sequence
  ENSG00000137818_14 (sequence is synthesized)
gccataacgccccacatgccgctggatctcctaggtgtttttcgttgcatgtatatctctaggagctaataagatttcagcttgtcaagtcttacgtttccttatcagactctggtttcc

SEQ ID NO: 339733 - DNA, 120 bp, Artificial Sequence
  ENSG00000137818_15 (sequence is synthesized)
cttttgctctgaaaccatggttaaaaaaaatgtgaatcaggtcatttattcccaaaaagggtcactcgggagataggtactacgcatgttaagttgcaagcaaattctttttctttttct

SEQ ID NO: 339734 - DNA, 120 bp, Artificial Sequence
  ENSG00000137818_16 (sequence is synthesized)
ctgagattacaggcttgagccaccgctcccggcccgcaagcaaattctttcagtaaattcttgcattaaacctatggtttgatggacatttgggtttagcggacttcattgacacagtag

SEQ ID NO: 339735 - DNA, 120 bp, Artificial Sequence
  ENSG00000137818_17 (sequence is synthesized)
aaagaggttcctggtcatggagcttgcactggctattttccattgtacaggttacttaatctctgtcaagtgaagctaatagcatctaactccagggttgtgacctctaaagagttttga

SEQ ID NO: 339736 - DNA, 120 bp, Artificial Sequence
  ENSG00000137818_18 (sequence is synthesized)
aagattgaaaacattgtacctatgtcatatttaacaagccccttttgaagtcctatatttgtttagtagactgaaaatttgaattcactgttaagaggagacatggaactgtggaaagaa

SEQ ID NO: 339737 - DNA, 120 bp, Artificial Sequence
  ENSG00000137818_19 (sequence is synthesized)
tattcatttgagtgtttcaggaagtttggattttttttttaccaacatattatttgtaaaaggagggaaatcagctgcctcaggaggttcttaacatataggaatgtaattatcagattc

SEQ ID NO: 339738 - DNA, 120 bp, Artificial Sequence
  ENSG00000137818_20 (sequence is synthesized)
aaagctgaacagtagtgcgttgccctgtaacctaagtcttggctgttagcaaagaaaagccagtgtctggggtattggttccaggaccttccactaataacaaaatcccaggatgttcca

SEQ ID NO: 339739 - DNA, 120 bp, Artificial Sequence
  ENSG00000137818_21 (sequence is synthesized)
cctatgcacatcctcctgtatactttagaagtctacatgtttggtacacatgcttatttttccactgttgaatccatggatgtggaactcactgtatatagtgttaggggttgatcactg

SEQ ID NO: 339740 - DNA, 120 bp, Artificial Sequence
  ENSG00000137818_22 (sequence is synthesized)
tgtatatagtgttaggggttgatcactgtaacctggaatgggggatacttttcgtttttggctgcgtgagtgcttaacaaggacagaactgggcgtttacctatgcatgcacatgtattg

SEQ ID NO: 339741 - DNA, 120 bp, Artificial Sequence
  ENSG00000137819_0 (sequence is synthesized)
tgctgtcctctttcagggaagcggcacagcaccagctaggcagagacgccccaggccatgttagagctttgagtgaggcctggtaacagggaggcgctgtcacctactggccttgccaat

SEQ ID NO: 339742 - DNA, 120 bp, Artificial Sequence
  ENSG00000137819_1 (sequence is synthesized)
ccagctccaagatgctgagcctgaagctccccaggctgtttagcatagaccagataccccaggtgttccatgagcaaggcatcctgttcggctaccgccatccacagagttctgccactg

SEQ ID NO: 339743 - DNA, 120 bp, Artificial Sequence
  ENSG00000137819_2 (sequence is synthesized)
cctgcatcctcagccttttccaaatgaccaatgagactctcaacatttggactcacttgctgcccttctggttctttgcatggaggtttgtgactgcactgtatatgacagacatcaaga

SEQ ID NO: 339744 - DNA, 120 bp, Artificial Sequence
  ENSG00000137819_3 (sequence is synthesized)
atgacagctactcctggcccatgcttgtgtacatgtgcaccagctgcgtgtacccacttgtgtccagctgtgcgcacaccttcagctctatgtccaagaatgcccggcacatttgctact

SEQ ID NO: 339745 - DNA, 120 bp, Artificial Sequence
  ENSG00000137819_4 (sequence is synthesized)
tcctggactatggtgccgtcaacctcttcagcctgggctcagccattgcctactctgcatacacgttcccggatgcgctcatgtgcaccactttccatgactactacgtggccctggctg

SEQ ID NO: 339746 - DNA, 120 bp, Artificial Sequence
  ENSG00000137819_5 (sequence is synthesized)
tactgaacaccatcctcagcacaggcctctcctgctactccaggtttcttgaaatccagaagcccagactctgtaaggtgattcgtgtcctcgcctttgcttatccgtacacctgggact

SEQ ID NO: 339747 - DNA, 120 bp, Artificial Sequence
  ENSG00000137819_6 (sequence is synthesized)
ccctccccatcttctacaggctattcctgttcccaggggagagtgcacaaaatgaagccacctcgtaccaccagaagcacatgatcatgaccctcctggcctctttcttgtactctgcac

SEQ ID NO: 339748 - DNA, 120 bp, Artificial Sequence
  ENSG00000137819_7 (sequence is synthesized)
atctgccagaacgcctagcccctggacgctttgactacatcggtcacagtcaccagctgtttcacgtgtgtgtgatcctggccacgcacatgcagatggaagccatacttctggacaaga

SEQ ID NO: 339749 - DNA, 120 bp, Artificial Sequence
  ENSG00000137819_8 (sequence is synthesized)
ctctgaggaaggaatggctcctggccacctccaagcccttctctttctctcagatagctggagccatacttctgtgcatcatcttcagcctcagcaacataatttatttctcagctgctc

SEQ ID NO: 339750 - DNA, 120 bp, Artificial Sequence
  ENSG00000137819_9 (sequence is synthesized)
tgtatcggattcccaagccagaattacataaaaaagaaacatgactcagaccataagcttttcatgccagatgtcaacattaagctgcaacatcctaaccaccataagccggaggtggtt

SEQ ID NO: 339751 - DNA, 120 bp, Artificial Sequence
  ENSG00000137819_10 (sequence is synthesized)
acagcttatcatggcctaaaatattcataatggttggtgtcttttgaatgaattcatgtcaaaaatgttattcagctggggaaatttctctaaatgtacactgattctgtgtgtgtgatt

SEQ ID NO: 339752 - DNA, 120 bp, Artificial Sequence
  ENSG00000137819_11 (sequence is synthesized)
ttaaaaggagaatatggttcaagcaagtccttgttaaggcaaactattgatatttcattaattttaaatttacttaaaatgtggttttaaattctatttaaacatttggattaagcatat

SEQ ID NO: 339753 - DNA, 120 bp, Artificial Sequence
  ENSG00000137819_12 (sequence is synthesized)
tactctggagctttgtattattctttaaaaatgaatcttgcttcatttgatgaatttcatgtcacaaagcttctctcaagagctctcgtagtggcctgtcaaccactttcggagaatgag

SEQ ID NO: 339754 - DNA, 120 bp, Artificial Sequence
  ENSG00000137819_13 (sequence is synthesized)
ccaggtcagtcactgggaggacctgtgaaagaaagttggtcactgagtgccttggggactggcaaaacattccagaatgaagagagctgtctggggagagcccttcttcccttctccacc

SEQ ID NO: 339755 - DNA, 120 bp, Artificial Sequence
  ENSG00000137819_14 (sequence is synthesized)
tagtgaagggagaacagaaggggagtcctctcttcccacaagtccattctgccttcaaagtgtaagttctcatgtcattatggatttggagtttgtcagtttttttcttaaaagtccaca

SEQ ID NO: 339756 - DNA, 120 bp, Artificial Sequence
  ENSG00000137819_15 (sequence is synthesized)
gcggggtgtcatgtgttctgttatgttctgttttctggttgccagtttgatctgcaaagtatttttcagtgcaggtaaaatgtgttaaaccataagagttgactgagttaatcccaattg

SEQ ID NO: 339757 - DNA, 120 bp, Artificial Sequence
  ENSG00000137819_16 (sequence is synthesized)
gttgtgctcatatgccaccttttaaaccaatggaaattgctatatttggggatgtcatacatttgatattgcttcagcatttcaaatatgttgcaaaatttagtatccatatgcataaga

SEQ ID NO: 339758 - DNA, 120 bp, Artificial Sequence
  ENSG00000137819_17 (sequence is synthesized)
agttaatcaccttgccagtggggtggtcacatatagtgttctcaagctttactgtgaatcagaaacatccagtaagcttgtgacaaatgcagactcctagggaaaaccagggggttctgc

SEQ ID NO: 339759 - DNA, 120 bp, Artificial Sequence
  ENSG00000137819_18 (sequence is synthesized)
ttcactaggttaaatgtaggttttgtagaggagatctgcactggagcaagtctcccagatgattctaatacaggagggccagaggccaaacttgaagaactgctggtgttacatgttcca

SEQ ID NO: 339760 - DNA, 120 bp, Artificial Sequence
  ENSG00000137819_19 (sequence is synthesized)
aaaggcattagacctatcagctttgtttcgcctgatctcaagttttagcaactcaccaactaaggcgtaacctcattttatgttccagcgttttctactctgaatagttctaaaacactg

SEQ ID NO: 339761 - DNA, 120 bp, Artificial Sequence
  ENSG00000137819_20 (sequence is synthesized)
actgattaaagttcagtatttcatggtgttttcagggaacacagaaatgcggatgcaaaacaacttttgacagaggcccatcaaacccagatctgcacttggtaatgacttaggggggct

SEQ ID NO: 339762 - DNA, 120 bp, Artificial Sequence
  ENSG00000137819_21 (sequence is synthesized)
tcctcacaatgcaggatcctctttgctgactcaggaatactccatattttagactactgcctctaccattaactagcccagacatttgaatggccttgtaaacagctcactgtctaatac

SEQ ID NO: 339763 - DNA, 120 bp, Artificial Sequence
  ENSG00000137819_22 (sequence is synthesized)
tcgaaggacaagtaacaatttatattggatgagagtggtcaagaaatatgatttcgttagttttattatctgtttacttcctctggggaaggcagactgataaaattatatgggctggta

SEQ ID NO: 339764 - DNA, 120 bp, Artificial Sequence
  ENSG00000137819_23 (sequence is synthesized)
aatttttggtacattaattgcaagctgcatgacaaaatttgtttttctggcaacaatctgacattattagtggaattccacaccaacagggcttgtgagcttccatttcatcttactgta

SEQ ID NO: 339765 - DNA, 120 bp, Artificial Sequence
  ENSG00000137819_24 (sequence is synthesized)
acttcaattttatggcaaaaaaaggtacaaagtttaaatacccctttctagtaatgccaaagacatacagtgttttacattctctcctttataggtaacaaaataatgtttagctcagta

SEQ ID NO: 339766 - DNA, 120 bp, Artificial Sequence
  ENSG00000137819_25 (sequence is synthesized)
agtactgaaataatgagtgaccaatttgaaggatttttagattatttaatctttgcttatgttgctttttcacatgcttaatgatggaaatgaaatgttaaatcaacaaaataagatcca

SEQ ID NO: 339767 - DNA, 120 bp, Artificial Sequence
  ENSG00000137819_26 (sequence is synthesized)
gtgtttcataacatttttataagtttggtaaactttagtcccattatatacttttggggacagtgttataaatcagaattttacgacagtttgcagaacactgatttgaaagcttcctat

SEQ ID NO: 339768 - DNA, 120 bp, Artificial Sequence
  ENSG00000137819_27 (sequence is synthesized)
gcaaaatgagaaggggttcaaatatattaattatcattaagtattaaataataggcattagatgtctaatgtgagtataatttcatccaagccatctcagaaagtctaaaaggttggcag

SEQ ID NO: 339769 - DNA, 120 bp, Artificial Sequence
  ENSG00000137819_28 (sequence is synthesized)
ggggtcagctgaagacctcactggagtgggtcttaatttttaaaaagtgtctcactacatttaagacatgtgacacattcccattggtaacaattgctcaccatggcattgtctcaaaaa

SEQ ID NO: 339770 - DNA, 120 bp, Artificial Sequence
  ENSG00000137819_29 (sequence is synthesized)
agactatggtggggagggtggcacattcctaatgggatgtacctctccccactccccttgcttgagaagcactactcaaaaatttaccagaccttacaactgtgataaaacttgaatgtg

SEQ ID NO: 339771 - DNA, 120 bp, Artificial Sequence
  ENSG00000137819_30 (sequence is synthesized)
tatgatgaataaggccattcagttaactttacctccctttacccattgaaggggttccttttccattgctcagtttttagaaaataattctcatcttttttctaaagaaatgaatttgtg

SEQ ID NO: 339772 - DNA, 120 bp, Artificial Sequence
  ENSG00000137819_31 (sequence is synthesized)
gctggtctgaaggtagtgagttagctcaattgattgttcgcagtcagttatagatcaagctccttgttctactcttcccctcttctcactactgcacttgactagtcttaaaacaaagaa

SEQ ID NO: 339773 - DNA, 75 bp, Artificial Sequence
  ENSG00000137819_32 (sequence is synthesized)
ctgcttgggcccaagaattcaggaccagtctgggcaacagagccagacactgtctctataaaaaaaagttaaaac

SEQ ID NO: 339774 - DNA, 88 bp, Artificial Sequence
  ENSG00000137819_33 (sequence is synthesized)
gaggactgcttgggcccaagaattcaggaccagtctgggcaacagagccagacactgtctctataaaaaaaagttaaaactagctggt

SEQ ID NO: 339775 - DNA, 120 bp, Artificial Sequence
  ENSG00000137819_34 (sequence is synthesized)
gtggagggtgatgtgggaggattgcttgaacccaggagttggatgctgcagtgagctatgattgcgccattgcgctccagactgggcaacagggcaagaccctgcctcaaaaaaaaaaaa

SEQ ID NO: 339776 - DNA, 120 bp, Artificial Sequence
  ENSG00000137819_35 (sequence is synthesized)
tagaggtcttctgagtataaagtggtttaaatatttggtctgctgaagtctttctggaagtgttgttccccctgctgccccgcccagtagaaacttgctcatatgagaggttctgaggta

SEQ ID NO: 339777 - DNA, 120 bp, Artificial Sequence
  ENSG00000137819_36 (sequence is synthesized)
ggtgcggtgtagtagaatggcattgtcagatatgttcaagaaacccttcatttgacactattttgtaccttatggtaccctttaacattttttaattaaaaaaaatattttttgagacag

SEQ ID NO: 339778 - DNA, 120 bp, Artificial Sequence
  ENSG00000137819_37 (sequence is synthesized)
gcatgccaccaagcctggctaactttttgtagagatagggttttgccatgctgcccaggctggcttagaattcctgaattcaagtgatttgtctgcctcaggctcccaaagtgctgggat

SEQ ID NO: 339779 - DNA, 120 bp, Artificial Sequence
  ENSG00000137819_38 (sequence is synthesized)
tacaggcatgagccacactgcacccagtccatgctaccctttttatatgaaacacctattaacacggtacaacaacacttcaaaacatattatttgaatttcggcctctgattttctagt

SEQ ID NO: 339780 - DNA, 120 bp, Artificial Sequence
  ENSG00000137819_39 (sequence is synthesized)
caacaatccattaaggcaaagacctgtttccaaactcagatgttctccaacttacactaatgtctggttttcttgaactatgtgagagaaaaaaataaacagaatttatttattatcata

SEQ ID NO: 339781 - DNA, 120 bp, Artificial Sequence
  ENSG00000137819_40 (sequence is synthesized)
atgggtaggcgcggcgacccgcagggccaggtgcagggcccgcgagtccggggtcgccgcagcccgggaggagtgtctggtctccggcctgcctgtgctgtccccgcgccctgtccactg

SEQ ID NO: 339782 - DNA, 120 bp, Artificial Sequence
  ENSG00000137819_41 (sequence is synthesized)
gactcccgagacccttggaacccaggacaccattggagaaactgggcattttaccaaggatttgactggaatggcatgcttcctttaaagatgaaagttgacttttagagccaattaaag

SEQ ID NO: 339783 - DNA, 120 bp, Artificial Sequence
  ENSG00000137819_42 (sequence is synthesized)
ttaatttggttatgttttatctaccacactgcaaatatgttaattcaccatgagaaacagatccctgtacacatgtgtatcagtaaatcattcaatgaatagttagtgcttaggatgtat

SEQ ID NO: 339784 - DNA, 120 bp, Artificial Sequence
  ENSG00000137819_43 (sequence is synthesized)
agcttaacaagaccatggcctctggacccgcgatcagctcgctgtgtggtcctgagcagccacccaacatctctgggccttggattcctacctggcctttcttctggatgcatcattttt

SEQ ID NO: 339785 - DNA, 120 bp, Artificial Sequence
  ENSG00000137819_44 (sequence is synthesized)
gcctttaggtatctggaccattcccccccatggatgataaagtctttgcttcacaccctcaggattaccttaaaggcctgaaaagaacagaggaggagtctgaggaggtgaattccagcc

SEQ ID NO: 339786 - DNA, 120 bp, Artificial Sequence
  ENSG00000137819_45 (sequence is synthesized)
gtgctcttgcaggctggctgggcagtgtgctggggaggagagggagcctctggctgggcctcctccaccgggcctggtgtgctgggaacaccccgcattgtcccaaggcctcagatttga

SEQ ID NO: 339787 - DNA, 120 bp, Artificial Sequence
  ENSG00000137819_46 (sequence is synthesized)
cccgtgggtacacgcgggtgaagggagtgtgtgacagagggaagagacattgggtgtgccactgggatgacctttaaggcatggactggggtaagatttgaggggaaatcccaaaagtgc

SEQ ID NO: 339788 - DNA, 120 bp, Artificial Sequence
  ENSG00000137819_47 (sequence is synthesized)
ctcagtccttcctgctccctgctccggtgcctgatatgatagcatttaccttcatctccggtcttggagactttccaggtcttccaggagccctggttaaaatgtcactagtttgagcaa

SEQ ID NO: 339789 - DNA, 120 bp, Artificial Sequence
  ENSG00000137821_0 (sequence is synthesized)
aatactcccgctctgtttttatgaggctgggaaaatagaacgaggaagtggtgacgcactgggctctcacgaatacaactagaagctgcaacgactgtgtggctctatcgattcgggaga

SEQ ID NO: 339790 - DNA, 120 bp, Artificial Sequence
  ENSG00000137821_1 (sequence is synthesized)
ggtccagaccggaaatggtcgtttccatggtaaccctgagcaggttgcctgggagatgacctctttcgggtctctttgaatctccgctgtagcgtcacctggaaggcagatctaacagag

SEQ ID NO: 339791 - DNA, 120 bp, Artificial Sequence
  ENSG00000137821_2 (sequence is synthesized)
aacctggactgtctcctatcatgattcccgggaaatatcgctctgtttctggccgggctgcgaacaacgtgaactgcgggcttcatctggttattcaaacatcatcgcttcctgaaaaaa

SEQ ID NO: 339792 - DNA, 120 bp, Artificial Sequence
  ENSG00000137821_3 (sequence is synthesized)
acaaagttgaattcaagctaaataaagacacatcgtcattccccggtagacttttacaacatgaccttgaaagaaactactcaagtaggcaaggtgatcatattaatttggtgagctcat

SEQ ID NO: 339793 - DNA, 120 bp, Artificial Sequence
  ENSG00000137821_4 (sequence is synthesized)
cattgtcatcatttcctattcttcaacgttcttctgaagagaaaattctttactcagacaggttgagcctagaaagacaaaagctgaccgtatgtcctatcatcaatggggaagaccacc

SEQ ID NO: 339794 - DNA, 120 bp, Artificial Sequence
  ENSG00000137821_5 (sequence is synthesized)
ttcgtttgttgaactttcaacacaattttataactcggatacaaaatatttctaatctacagaagttaatatcgttggatttatatgataaccagattgaagaaattagtgggctttcga

SEQ ID NO: 339795 - DNA, 120 bp, Artificial Sequence
  ENSG00000137821_6 (sequence is synthesized)
ctctgagatgtcttcgtgtccttctgttggggaaaaacagaatcaagaaaatctcaaatctggagaatctaaaaagcttagatgtcttggatcttcatggaaatcagattaccaaaattg

SEQ ID NO: 339796 - DNA, 120 bp, Artificial Sequence
  ENSG00000137821_7 (sequence is synthesized)
aaaatattaatcatttgtgtgagttgagagttttaaatcttgccaggaactttttaagtcatgttgataatcttaatgggctggattcactaactgaacttaacttgcgacacaatcaaa

SEQ ID NO: 339797 - DNA, 120 bp, Artificial Sequence
  ENSG00000137821_8 (sequence is synthesized)
tcactttcgtgagagatgtggataatttgccctgcctccaacatctctttctcagctttaacaatatatctagttttgacagtgtttcctgccttgctgactcttcttccctctcggaca

SEQ ID NO: 339798 - DNA, 120 bp, Artificial Sequence
  ENSG00000137821_9 (sequence is synthesized)
tcacctttgatggcaatcccatagctcaagagtcatggtacaaacacactgtccttcagaatatgatgcagctgcgccagctagatatgaagagaatcacggaagaagaaaggcgtatgg

SEQ ID NO: 339799 - DNA, 120 bp, Artificial Sequence
  ENSG00000137821_10 (sequence is synthesized)
catctgttttagccaaaaaagaggaagagaagaagcgggaaagtcataaacaatctttgcttaaggagaagaaaaggttaacaattaacaacgtagctcgacagtgggacttgcaacaac

SEQ ID NO: 339800 - DNA, 120 bp, Artificial Sequence
  ENSG00000137821_11 (sequence is synthesized)
atgaagatagaaaagattctgactctcctcaggacccctgtcagattgatggaagcaccctctctgcattcccagaggaaacagggcctctagactcaggactcaacaatgctttacaag

SEQ ID NO: 339801 - DNA, 120 bp, Artificial Sequence
  ENSG00000137821_12 (sequence is synthesized)
gtttatctgtcatagacacataccttgttgaagtggacggggatacactttccctatatggctcaggagcactggaatctctggataggaattggagtgttcaaacagcaggaatgatca

SEQ ID NO: 339802 - DNA, 120 bp, Artificial Sequence
  ENSG00000137821_13 (sequence is synthesized)
caacagtctccttcactttcatagaatttgatgaaatcgtccaagtgcttcctaaactgaagattaagtttcctaattctctgcaccttaaattcaaggaaacaaatcttgtaatgctgc

SEQ ID NO: 339803 - DNA, 120 bp, Artificial Sequence
  ENSG00000137821_14 (sequence is synthesized)
agcaatttaacgcactagcccaactccgtcgtattgaccagttgacaattgatcctcaaggaaatccagttgtcaattttacactctggaaatactatgtactgtttaggctaagccatt

SEQ ID NO: 339804 - DNA, 120 bp, Artificial Sequence
  ENSG00000137821_15 (sequence is synthesized)
tcagtatgcagaaaataaatggaacagaggtgacacagaatgatatgataatggctgaaaggctctttggaatcctagcacatgtagcatcttctgagttaccccagtatcgtctgattt

SEQ ID NO: 339805 - DNA, 120 bp, Artificial Sequence
  ENSG00000137821_16 (sequence is synthesized)
ccattctgggtgatgccaggaaaaagcaatttcggtatctactagaatccaaaggaaaaaaacctggtattatcaacgaagaaaataatgacagcaaaagacttgtaggagaaaacacaa

SEQ ID NO: 339806 - DNA, 120 bp, Artificial Sequence
  ENSG00000137821_17 (sequence is synthesized)
atcgtgctacattaaattatactacaagagacttttataatgaaaagctagaggaaataaaggaaaagaagaaattctgtaaaacatatatagaagaccttgtgaaggaagccacagaaa

SEQ ID NO: 339807 - DNA, 120 bp, Artificial Sequence
  ENSG00000137821_18 (sequence is synthesized)
tcaacatgaaaaatgaggctttgcagaagctttggccacagatgttcattgagcttgttagggatgcagtcatagaaattcgcaataaaaattcctatatgaagctctgcctacagcaga

SEQ ID NO: 339808 - DNA, 120 bp, Artificial Sequence
  ENSG00000137821_19 (sequence is synthesized)
taacagaccaaaaataaaaatggcctttagttacagttgattttggcagttttattttttgaaggttgaaaatatgcaggttatacatgttaaaacaacaacaacactatcctataaact

SEQ ID NO: 339809 - DNA, 120 bp, Artificial Sequence
  ENSG00000137821_20 (sequence is synthesized)
agaaagactagtataaaagcattattgcccactgttctcatagctaaaagttaagaaggaaggaaggaaagcaggagaaaggaaggattaattgcctgtatgtgaggaccaaacaacctt

SEQ ID NO: 339810 - DNA, 120 bp, Artificial Sequence
  ENSG00000137821_21 (sequence is synthesized)
tgggaactaaacagttttcagagatggcgtggcactgcatccttggttcttgctttgattggtgccctgctatagcccaaagcacgtagtatttgctgatgattcagcatgagctgcatc

SEQ ID NO: 339811 - DNA, 120 bp, Artificial Sequence
  ENSG00000137821_22 (sequence is synthesized)
tacctacttttagctgataattttcagttatttccctttttattttatgtcatgatttcaaagccaaaaatatgttctttttatgagtgaagaataaacttactaacaaattagtcaaaa

SEQ ID NO: 339812 - DNA, 120 bp, Artificial Sequence
  ENSG00000137821_23 (sequence is synthesized)
aaatgcctggaagccacaaatatgctttccatctctatggatttgccaatgtggtattttgtgtcagttttctttcacttggcatgatgttttcaaggttgaattcaagctaaataaaga

SEQ ID NO: 339813 - DNA, 120 bp, Artificial Sequence
  ENSG00000137821_24 (sequence is synthesized)
cacatcgtcattccccggtagacttttacaacatgaccttgaaagaaactactcaagtaggcaagtctgctagattgaaagctacataatggcaaggacaccatctaacaaacagcctat

SEQ ID NO: 339814 - DNA, 120 bp, Artificial Sequence
  ENSG00000137821_25 (sequence is synthesized)
aaaccttagaggggtgtcatatactttgtggaccctaactacgaactatatgggctggaaatgaaaactgccacgaggtccttatcagcatttggagattcttccattaagacaccttca

SEQ ID NO: 339815 - DNA, 120 bp, Artificial Sequence
  ENSG00000137821_26 (sequence is synthesized)
ctcctcctccctgcgctgctccccaggagccagtggacacaagcagagggatacaaatttcgcgcgggcagcgctgaggtgggccgtaaagaggaacggaccggaagtggtggtggttat

SEQ ID NO: 339816 - DNA, 120 bp, Artificial Sequence
  ENSG00000137821_27 (sequence is synthesized)
acccattaagcagttacttcccattccctgcttcccttaaatgcctggaagccacaaatatgctttccatctctatggatttgccaatgtggtattttgtgtcagttttctttcacttgg

SEQ ID NO: 339817 - DNA, 120 bp, Artificial Sequence
  ENSG00000137821_28 (sequence is synthesized)
catgatgttttcaaggttcatccacattgtaccatgtgtatcagttattatatgtttttttaatttatcttcactgcttggtgttaaatttgtctccaaatatttttttctttaataatg

SEQ ID NO: 339818 - DNA, 120 bp, Artificial Sequence
  ENSG00000137821_29 (sequence is synthesized)
ttttcacactgccagacccagaagttgagtgggagacctgtttctttagaaggcaacgtcctgggtcccaggaaataaaggaaaagaagaaattctgtaaaacatatatagaagaccttg

SEQ ID NO: 339819 - DNA, 120 bp, Artificial Sequence
  ENSG00000137821_30 (sequence is synthesized)
actcccttctcagttccacacctgacttgcccttagcaggcgtgggacccaggccagtagcatgagctgagtgcagcctgccagggtgggtaggcaaaatgagcccagcgggccagagca

SEQ ID NO: 339820 - DNA, 120 bp, Artificial Sequence
  ENSG00000137821_31 (sequence is synthesized)
aaacttgggcaaaggtaccactggccacagaggtttctggtcagaaaaatgacaccccaaagatcctgtaacattatatgtacatgcatattccatgattcaagtcctcttgttttaaac

SEQ ID NO: 339821 - DNA, 120 bp, Artificial Sequence
  ENSG00000137821_32 (sequence is synthesized)
aatgttcaccattttgtaccctcactaaacatcttccatccttattaatggaacagctttccattaattaaaaaaaaattaacctcatcttctactgggaatcctagttccttgactctt

SEQ ID NO: 339822 - DNA, 120 bp, Artificial Sequence
  ENSG00000137821_33 (sequence is synthesized)
tccattcagactcgactgctctcaagatcttgcagtttaaatagaattaataagggtaacttgatgtcattcctttcccttgccttttctgtcagagggcagacttgctttgttaaaaca

SEQ ID NO: 339823 - DNA, 120 bp, Artificial Sequence
  ENSG00000137821_34 (sequence is synthesized)
tgatgagcttatgccttgggatcacagtatgtttctatttggcaggtagtatgtagccttcacagaacctgggacagactgggcacgtaaagttgcccaatggactcattgactatttga

SEQ ID NO: 339824 - DNA, 120 bp, Artificial Sequence
  ENSG00000137821_35 (sequence is synthesized)
gtttacgtcaagtgtttactatggtcaaattgtaaaatatgatcttttagctaatgttcacaagttacgtgacttcatgttatctacagcataggaaattgaaaatagatttttaaatgt

SEQ ID NO: 339825 - DNA, 120 bp, Artificial Sequence
  ENSG00000137821_36 (sequence is synthesized)
ctacatataaacttgccactaaatctagtgacttcgaatattttatttttagggtttttagaacatgtatatttcaggtttttgcctgctaatcacccttctcctattttctttaacaga

SEQ ID NO: 339826 - DNA, 120 bp, Artificial Sequence
  ENSG00000137821_37 (sequence is synthesized)
agtgctttttaccttgcgagtggtgcagcttgttctgcggatgtactgaaaccctcccatttaatctgcagtggaggagagtggagctcactgtccagtagaaatcagtgatgtagcaat

SEQ ID NO: 339827 - DNA, 120 bp, Artificial Sequence
  ENSG00000137821_38 (sequence is synthesized)
attctctaattgttctgccttcagtatctcctgcttatcctctccaggtcacattggtgttaacgtaaaaatggtcaaatttgggggcactggctaggattctgcaaattcctcacatca

SEQ ID NO: 339828 - DNA, 120 bp, Artificial Sequence
  ENSG00000137821_39 (sequence is synthesized)
gggaattagaaaccattttacatataattattttaaaagggttttcttaagaaaacttgctgaaattagaaattaagatggaaaagttgaaaatataaatcttactataacattctccaa

SEQ ID NO: 339829 - DNA, 120 bp, Artificial Sequence
  ENSG00000137821_40 (sequence is synthesized)
attaaaacatgcttcatagggcatttcatattttttatagggaaaagtctagatttcttaatatagtctatgatgtcttttgcccacttcatctcttttatctcatgccatcaaccatgt

SEQ ID NO: 339830 - DNA, 120 bp, Artificial Sequence
  ENSG00000137821_41 (sequence is synthesized)
ttttaactgtgaagagaatttatcattagggactcccacctccttcacctgtctcattgagatgtttatttagacctgaatggcaaatgtcgaaagcctgaggtgaactgcgggcttcat

SEQ ID NO: 339831 - DNA, 120 bp, Artificial Sequence
  ENSG00000137821_42 (sequence is synthesized)
agcaagtgtccgctgtacctggcctgctaccacctaaagactgagcgcagccagcaggactgggaaaggcagggcgatgatggcagtgaaggatggagtctcactctgtcgcctaggctg

SEQ ID NO: 339832 - DNA, 120 bp, Artificial Sequence
  ENSG00000137821_43 (sequence is synthesized)
tgttgggattacaggagtgagccacctcgcccagccaacttgacataacttttaaagatggattgccaagctgagacaaaagctgaccgtatgtcctatcatcaatggggaagaccacct

SEQ ID NO: 339833 - DNA, 120 bp, Artificial Sequence
  ENSG00000137821_44 (sequence is synthesized)
ggtgcagccatcacctctatctagttccagaattttttcatcattccaaatggaatccctgtacccattaagcagttacttcccattccctgcttcccttaaatgcctggaagccacaaa

SEQ ID NO: 339834 - DNA, 120 bp, Artificial Sequence
  ENSG00000137821_45 (sequence is synthesized)
agtaggcaagattttaccaagaatataaagaatgtaaaatgaggtccatcacccaaggagcttgtagatttatttgggaagacaagggctacatatctgtggctgaacttacaaagaaag

SEQ ID NO: 339835 - DNA, 120 bp, Artificial Sequence
  ENSG00000137821_46 (sequence is synthesized)
agatgatgcgaggtttacatctgctatccaaaactactttttgtgtatttcctatgcatctcatccacaacaaatgtgacagaactatatgggctggaaatgaaaactgccacgaggtcc

SEQ ID NO: 339836 - DNA, 120 bp, Artificial Sequence
  ENSG00000137821_47 (sequence is synthesized)
agatgtcttcgtgtccttctgttggggaaaaacaggggaaattggagaagtcacaaaccttattaccattggctctgtgattcctgagcagtaagcaattacaaaaagaatcaagaaaat

SEQ ID NO: 339837 - DNA, 120 bp, Artificial Sequence
  ENSG00000137821_48 (sequence is synthesized)
agcaagtgtccgctgtacctggcctgctaccacctaaagactgagcgcagccagcaggactgggaaaggcagggcgatgatggcagtgaagggtgaactgcgggcttcatctggttattc

SEQ ID NO: 339838 - DNA, 120 bp, Artificial Sequence
  ENSG00000137821_49 (sequence is synthesized)
agcaagatgatgcaaacataaaggtctggtgggaaaggctgtgtgaaaatgggaatcccccagggcggaggaagtaaagcagcaagtcctctatccgtctcaaattaccttgaaatccca

SEQ ID NO: 339839 - DNA, 120 bp, Artificial Sequence
  ENSG00000137821_50 (sequence is synthesized)
gatgccccattcttctaggaatgcattctcagggaaccacaggaggtcctgggaatcactatgggcagagaatatgcaaatgagtcaaaactgggataggaagaaaatgttttgtcttag

SEQ ID NO: 339840 - DNA, 120 bp, Artificial Sequence
  ENSG00000137821_51 (sequence is synthesized)
cctgaatgactataaaatgctgttacaaagcagtaaatctgcttctctgaaagatgtttccttccattgttagctctcaaatgctcttttaatagacatgcatgtgtacctgtgtctcag

SEQ ID NO: 339841 - DNA, 120 bp, Artificial Sequence
  ENSG00000137821_52 (sequence is synthesized)
aagtattagggatgcatgagtgaagggttctaatttttaaaatttcatttgaagatcaaattcatgctggtgagaagggtagtaggagcctattaccatagctagagatgatgccacttc

SEQ ID NO: 339842 - DNA, 120 bp, Artificial Sequence
  ENSG00000137821_53 (sequence is synthesized)
agaaaaacaatcttagtcaataaataggaatttttcggtttgcttagattttacctagcagctattatgtcagcaggaccaccaggatatgggaaaacaggactagaagatgtacgacag

SEQ ID NO: 339843 - DNA, 120 bp, Artificial Sequence
  ENSG00000137821_54 (sequence is synthesized)
caaagacatgcagagacatgcagagacacctggaaggaagctaggtaagctgctattgcggttctgagaaagacccacatccttaagatctcttgattactcttctcccaaaaggcgtgc

SEQ ID NO: 339844 - DNA, 90 bp, Artificial Sequence
  ENSG00000137821_55 (sequence is synthesized)
ccttaagatctcttgattactcttctcccaaaaggcgtgcttaactttaacaggttaccatttttctgatcatagccttaaaaggctgtc

SEQ ID NO: 339845 - DNA, 120 bp, Artificial Sequence
  ENSG00000137821_56 (sequence is synthesized)
ctgtcctggttttttcatcttggcacttaggccatcagcttactagtgtgtaacctcagtttcctcctgatagcacacacttcgtaagatagtcatgagaatcaaaagaaacaatgcatg

SEQ ID NO: 339846 - DNA, 120 bp, Artificial Sequence
  ENSG00000137821_57 (sequence is synthesized)
taaagcatttctcatcatgcctggcacacagcaaacacccaatacgttgagctttaattattactcttttggctgtaggttgaacaatagggttggtgccctaggacagaggagctatta

SEQ ID NO: 339847 - DNA, 120 bp, Artificial Sequence
  ENSG00000137821_58 (sequence is synthesized)
gcattgctttctgatcctttagcctctccaaactgaaacatatggaccatttctcatctggctagtaaacacttatctctcctgggcttatatcttgtttggtatagaaatgagatccca

SEQ ID NO: 339848 - DNA, 120 bp, Artificial Sequence
  ENSG00000137821_59 (sequence is synthesized)
gcttgaaggtgatgttgagaggagaaccaagagtatattgtctgtgggattctggcagattggaaagatgtaagaacttgtgactctttgggagtctgggtaactgttcccactctaggc

SEQ ID NO: 339849 - DNA, 120 bp, Artificial Sequence
  ENSG00000137821_60 (sequence is synthesized)
tttgcagatgaatggacctagctgtttagtaatctgtccagcttcctgcatgtctgttctcccctaaccctcccatccctgctgctaaagagacttgacactcacatgctttcttggccc

SEQ ID NO: 339850 - DNA, 120 bp, Artificial Sequence
  ENSG00000137821_61 (sequence is synthesized)
agtcaccctgggaatcttaggaacactaagtcagcactcaatgaaatggcagcaagccatcccagccactgctggctctatgcagacctgcttcaggcctggtaatagggtctctctctt

SEQ ID NO: 339851 - DNA, 120 bp, Artificial Sequence
  ENSG00000137821_62 (sequence is synthesized)
gttcctgaaaccaagcctctttattcctcagctttggtctctgcttccttcctacctgagttccctttcgctcctacctgctcccactaccccatactgatttctacttcttgaatcctt

SEQ ID NO: 339852 - DNA, 120 bp, Artificial Sequence
  ENSG00000137821_63 (sequence is synthesized)
actttgtcgggtctcaaacgtcgaatggcgatcctcccatctagttctacactccaaactcattttgcgttctgaagttccttggtgaagataatccccagataaaaagacaaggagacc

SEQ ID NO: 339853 - DNA, 120 bp, Artificial Sequence
  ENSG00000137821_64 (sequence is synthesized)
tgggtctgctgggttagggatcaagtgagggtcctatgttgtaagtgagtggtgatctagggaacaaattgccatttcttcttggaattttccagggttttcagggaaggggaagagatg

SEQ ID NO: 339854 - DNA, 120 bp, Artificial Sequence
  ENSG00000137821_65 (sequence is synthesized)
caaatcccatagtctgagactctctaggctagtgtgtgctgaagaattgctttttttcaaaagggatctcacgcagaaacactattgcatttgcctcaaaagcagaaacatttagtaccc

SEQ ID NO: 339855 - DNA, 120 bp, Artificial Sequence
  ENSG00000137821_66 (sequence is synthesized)
ccatttagggagatactgtacccgatgttctggtacagcagctggatggtgaagtgtgctgctacacctgaggatggttaccaagtgtgcaggtggacctgaggcttgttaactgtgctg

SEQ ID NO: 339856 - DNA, 120 bp, Artificial Sequence
  ENSG00000137821_67 (sequence is synthesized)
ctgagtcagaggatggtgctggtatcagctcctcacttcctgagcttcattccactgaaggcctggcatgtaagacagtgcaaccctaccatgctcctgatctattcctgattgggcaag

SEQ ID NO: 339857 - DNA, 120 bp, Artificial Sequence
  ENSG00000137821_68 (sequence is synthesized)
gaatgcactgggattcatattctcttcaatgagtaatcatcataacaacaaagattcattgagcaatgtcttgcactattataagctctttgtatacattctcatttaatctcctaacac

SEQ ID NO: 339858 - DNA, 120 bp, Artificial Sequence
  ENSG00000137821_69 (sequence is synthesized)
tgcgatatatatatgatagcaatcccatttgaacactagaaaactgaggcatagagaggatgaaaaaaaacgtaactaagggtatttcaaccaataaatagtagacagtacccacattca

SEQ ID NO: 339859 - DNA, 120 bp, Artificial Sequence
  ENSG00000137821_70 (sequence is synthesized)
ctgttagtcttaaggatctggcatctgggaagaattttgatgtccatggtcgttcctaatccactttcatgttttgtcattatgctgaggaatagcaaataaaagatgagaatttctcaa

SEQ ID NO: 339860 - DNA, 120 bp, Artificial Sequence
  ENSG00000137821_71 (sequence is synthesized)
ctgtgtctacatgtgaagcatatcgtagacattatgtgcggtataaatactaacaaatgtataagtacacatgtacaatattgtgtattatttaaggatatacatattaaagtgtaaaat

SEQ ID NO: 339861 - DNA, 120 bp, Artificial Sequence
  ENSG00000137821_72 (sequence is synthesized)
attggcagctggattcattgcaataatgtgtagagaatcaacttcaggagggggcaataattaaattagggggaccagttgggaaggtactgcattattctaggcaagagataattgtga

SEQ ID NO: 339862 - DNA, 120 bp, Artificial Sequence
  ENSG00000137821_73 (sequence is synthesized)
cttggatcaaggtgatagcggcagaggcgtcagaaagtagttggatcttgggtatattttaaagatgaagcaacaagatttactgacagaactggatatggagtatgagaaacagtagtc

SEQ ID NO: 339863 - DNA, 120 bp, Artificial Sequence
  ENSG00000137821_74 (sequence is synthesized)
aatgatggccacaaggtttttggcttgaactaccgaaaagattgagttgccatcaactgagatgagagcaatctgtgaatggaacatctgctgggaggaaggatcaggaattccgtctta

SEQ ID NO: 339864 - DNA, 120 bp, Artificial Sequence
  ENSG00000137821_75 (sequence is synthesized)
tggaatacacaatgcatctcaacatgtacaatatatacaagatataccacacatctcagcatatgttgagatggttgttaaatatccaagtgcaggtgttaagtaggtgtgaatatgagt

SEQ ID NO: 339865 - DNA, 120 bp, Artificial Sequence
  ENSG00000137821_76 (sequence is synthesized)
tgggagttgagaagtatagattgggctagaattatagaatttggagtcattggcgtatagcagtacttgtttatgctatctttatatttaagagaataaacctatcacttgctaaataag

SEQ ID NO: 339866 - DNA, 120 bp, Artificial Sequence
  ENSG00000137822_0 (sequence is synthesized)
ccgggcgggagtagctggtggaccccgttgagctgccgaacttccgggactcccccgcgaccccttcccagcttcccgtccgctccgccgcagcgattgtctcggtgggttgattcggca

SEQ ID NO: 339867 - DNA, 120 bp, Artificial Sequence
  ENSG00000137822_1 (sequence is synthesized)
caaaccgcccgacccaggggccggtgcgcgtgtggaaggggaagcactcccctcgtggtcgcctggaggtgcgctggaggagggggtgacataaccagggactcgaggtccgccgtggga

SEQ ID NO: 339868 - DNA, 120 bp, Artificial Sequence
  ENSG00000137822_2 (sequence is synthesized)
atgatccacgaactgctcttggctctgagcgggtaccctgggtccattttcacctggaacaagcggagtggcctgcaggtatcgcaggacttccctttcctccaccccagtgagaccagt

SEQ ID NO: 339869 - DNA, 120 bp, Artificial Sequence
  ENSG00000137822_3 (sequence is synthesized)
gtcctgaatcgactctgccggctcggcacagactatattcgcttcactgagttcattgaacagtacacgggccatgtgcaacagcaggatcaccatccatctcaacagggccaaggtggg

SEQ ID NO: 339870 - DNA, 120 bp, Artificial Sequence
  ENSG00000137822_4 (sequence is synthesized)
ttacatggaatctacctgcgggccttctgcacagggctggattctgttttgcagccttatcgccaagcactgcttgatttggaacaagagttcctgggtgatccccatctctccatatca

SEQ ID NO: 339871 - DNA, 120 bp, Artificial Sequence
  ENSG00000137822_5 (sequence is synthesized)
catgtcaactacttcctagaccagttccagcttctttttccctctgtgatggttgtagtagaacaaattaaaagtcaaaagattcatggttgtcaaatcctggaaacagtctacaaacac

SEQ ID NO: 339872 - DNA, 120 bp, Artificial Sequence
  ENSG00000137822_6 (sequence is synthesized)
agctgtggggggttgcctcctgttcgaagtgcactggaaaaaatcctggccgtttgtcatggggtcatgtataaacagctctcagcctggatgctccatggactcctcttggaccagcat

SEQ ID NO: 339873 - DNA, 120 bp, Artificial Sequence
  ENSG00000137822_7 (sequence is synthesized)
gaagaattctttatcaaacaggggccatcttctggtaatgtcagtgcccagccagaagaggacgaggaggatctgggcattgggggactgacaggaaaacaactgagagaactgcaggac

SEQ ID NO: 339874 - DNA, 120 bp, Artificial Sequence
  ENSG00000137822_8 (sequence is synthesized)
ttgcgcctgattgaggaagagaacatgctggcaccatctctgaagcagttttccctacgagtggagattttgccatcctacattccagtgagggttgctgaaaaaatcctatttgttgga

SEQ ID NO: 339875 - DNA, 120 bp, Artificial Sequence
  ENSG00000137822_9 (sequence is synthesized)
gaatctgtccagatgtttgagaatcaaaatgtgaacctgactagaaaaggatccattttgaaaaaccaggaagacacttttgctgcagagctgcaccgtctcaagcagcagccactcttc

SEQ ID NO: 339876 - DNA, 120 bp, Artificial Sequence
  ENSG00000137822_10 (sequence is synthesized)
agcttggtggactttgaacaggtggtggatcgcattcgcagcactgtggctgagcatctctggaagttgatggtagaagaatccgatttactgggtcagctgaagatcattaaagacttt

SEQ ID NO: 339877 - DNA, 120 bp, Artificial Sequence
  ENSG00000137822_11 (sequence is synthesized)
taccttctgggacgtggagaactgtttcaggccttcattgacacagctcaacacatgttgaaaacaccacccactgcagtaactgagcatgatgtgaatgtggcctttcaacagtcagca

SEQ ID NO: 339878 - DNA, 120 bp, Artificial Sequence
  ENSG00000137822_12 (sequence is synthesized)
cacaaggtattgctagatgatgacaaccttctccctctgttgcacttgacaatcgagtatcacggaaaggagcacaaagatgctactcaggcaagagaagggccttctcgggaaacttct

SEQ ID NO: 339879 - DNA, 120 bp, Artificial Sequence
  ENSG00000137822_13 (sequence is synthesized)
ccccgggaagcccctgcatctggctgggcagccctaggtctttcctacaaagtacagtggccactacatattctcttcaccccagctgtcctggaaaagtacaatgttgtttttaagtac

SEQ ID NO: 339880 - DNA, 120 bp, Artificial Sequence
  ENSG00000137822_14 (sequence is synthesized)
ttactgagtgtgcgccgggtgcaagctgagctgcagcactgctgggccctacaaatgcagcgcaagcacctcaagtcgaaccagactgatgcaatcaagtggcgcctaagaaatcacatg

SEQ ID NO: 339881 - DNA, 120 bp, Artificial Sequence
  ENSG00000137822_15 (sequence is synthesized)
gcatttttggtggataatcttcagtactatctccaggtagatgtgttggagtctcagttctcccagctgcttcatcagatcaattctacccgagactttgaaagcatccgattggctcat

SEQ ID NO: 339882 - DNA, 120 bp, Artificial Sequence
  ENSG00000137822_16 (sequence is synthesized)
gaccacttcctgagcaatttgctggctcaatcctttatcctattgaaacctgtgtttcactgcctgaatgaaatcctagatctctgtcacagtttttgttcgctggtcagtcagaaccta

SEQ ID NO: 339883 - DNA, 120 bp, Artificial Sequence
  ENSG00000137822_17 (sequence is synthesized)
ggcccactggatgagcgtggagccgcccagctgagcattctcgtgaagggctttagccgccagtcttcactcctgttcaagattctctccagtgttcggaatcatcagatcaactcagat

SEQ ID NO: 339884 - DNA, 120 bp, Artificial Sequence
  ENSG00000137822_18 (sequence is synthesized)
ttggctcaactactgttacgactagattataacaaatactatacccaggctggtggaactctgggcagtttcgggatgtgaaaatttctggctcataaattgaaataacagccacgttcc

SEQ ID NO: 339885 - DNA, 120 bp, Artificial Sequence
  ENSG00000137822_19 (sequence is synthesized)
caaggttgtaacagaagattcaaaacatcccattctagccacacacaaataaatatctgcggcttagtgataggactctaccttttctcctagaagcagttactgaacatccaggagtac

SEQ ID NO: 339886 - DNA, 120 bp, Artificial Sequence
  ENSG00000137822_20 (sequence is synthesized)
aactccttcccatcattcccatgtggaagggtctctcccatcaaggagaacatgtggcatctctgatcctttacattgagaacatttgttggatatgttcatttattcaatagtcattta

SEQ ID NO: 339887 - DNA, 120 bp, Artificial Sequence
  ENSG00000137822_21 (sequence is synthesized)
ttgagcacctactacgtaccttggtactgttcaagctgtgggagatacagcggtaaacaaacaatatagagcagaaagttaaatattttatggttcatatgtgaaaaagtaattatgttt

SEQ ID NO: 339888 - DNA, 120 bp, Artificial Sequence
  ENSG00000137822_22 (sequence is synthesized)
ataaatagactaactgctggatgttaccaccaagtaagaaagcaacaggtaagataggctttctctctccctataccaagtaatttatacctacacagattgggcaattctagctaatga

SEQ ID NO: 339889 - DNA, 61 bp, Artificial Sequence
  ENSG00000137822_23 (sequence is synthesized)
agcctctccaagaaaaaggtccttaagaaaaaattgagatcaagttgttagatttttaaat

SEQ ID NO: 339890 - DNA, 120 bp, Artificial Sequence
  ENSG00000137822_24 (sequence is synthesized)
agaaaaaattgagatcaagttgttagatttttaaatactgaagattgcaggcccaattacccatcttacacaaaccataggggttgaagttatcttaatatggcccagccatcactggta

SEQ ID NO: 339891 - DNA, 120 bp, Artificial Sequence
  ENSG00000137822_25 (sequence is synthesized)
atcaatattcatatcagtgtaagtaaaaagaaatattcactgaacaacgccctccaaactgaaaaagaatgcagtgttctggcatcaggttatagtcactgcatctggttttcatcacta

SEQ ID NO: 339892 - DNA, 120 bp, Artificial Sequence
  ENSG00000137822_26 (sequence is synthesized)
tctctggagcaggagctggcaaactatggcctgctgtctgtttttgtacagttttactgaaacacagccatgcccatttgtttactcattgtctatggttgctttcatgccctcacagca

SEQ ID NO: 339893 - DNA, 120 bp, Artificial Sequence
  ENSG00000137822_27 (sequence is synthesized)
aaggcgagtagttgtgatggatcaaatggcccacaaagcctgaaatatttactctttgaccctttacagaaaaaaaccttgttgacccctgctttagagaatgagaagccatgcagggat

SEQ ID NO: 339894 - DNA, 120 bp, Artificial Sequence
  ENSG00000137822_28 (sequence is synthesized)
cagtgatgccagaggaagggaaggaactgcttccagctattgtgacaataataataataataatattgggtctttgactagaacgtgtaacatttccaggtgttctcacttgtgcttccc

SEQ ID NO: 339895 - DNA, 120 bp, Artificial Sequence
  ENSG00000137822_29 (sequence is synthesized)
atgtttatcttacggaaggtcattccatcaagcttatggtcactgtcccttcatggcagttggtcctttcgttctccctttagctctaagagttggggagtacccacaggtgagctgtga

SEQ ID NO: 339896 - DNA, 120 bp, Artificial Sequence
  ENSG00000137822_30 (sequence is synthesized)
tctcagctcagagagagagcatgaggtcttttttaactgtcaggaaacagagctgtgcccaattccactcaacttttggcacaactgttaatctgggccttcacctaccttaaactgagt

SEQ ID NO: 339897 - DNA, 120 bp, Artificial Sequence
  ENSG00000137822_31 (sequence is synthesized)
ttctgcaagcatagcattttagacaccctggaataaccttttgggaatgatgccacagaataaagttcactcttaacttttcaatttccttggccagctgtcctccgtaagtgaataagc

SEQ ID NO: 339898 - DNA, 120 bp, Artificial Sequence
  ENSG00000137822_32 (sequence is synthesized)
ctgttgaaagactcagagaaagtactatgtcttgtcatttgttctgagattaagctcaaaaaaacagatgaagaaatcccagttactacaaccaaagagattcaacatttattttatcat

SEQ ID NO: 339899 - DNA, 120 bp, Artificial Sequence
  ENSG00000137822_33 (sequence is synthesized)
aaaagttcagcaaataaaactatatacaagatccatgcaaggaatccagttacacacaagacacatttaaaacctggttaaaacacaatctccacgatagcagggaataaaaccagtaag

SEQ ID NO: 339900 - DNA, 120 bp, Artificial Sequence
  ENSG00000137822_34 (sequence is synthesized)
accaagtatctttagtgagaaacataatcgtgtttatattttggatgctgcttgaatccaattctctccccaacaatgaggcactggatcacccactcttgtgacaccacaggcagctgc

SEQ ID NO: 339901 - DNA, 120 bp, Artificial Sequence
  ENSG00000137822_35 (sequence is synthesized)
aatgcttcagcacacttcagcaccgaggctgggcatgaggggtccgtcaccaccacatcaaatacccctaaagcaatatctgcaaggagcaagggaaagtgaagaaggaaaggacactca

SEQ ID NO: 339902 - DNA, 120 bp, Artificial Sequence
  ENSG00000137822_36 (sequence is synthesized)
acttagccctccattagaaagagagatttgattctaaccaatacatcccactctgcacaaaccaaagccctattatgtcaaacacactgctactgatcatgaccaaaggcagagttataa

SEQ ID NO: 339903 - DNA, 120 bp, Artificial Sequence
  ENSG00000137822_37 (sequence is synthesized)
tcactatgtgctgaccttgtagaaatatttaacaaatatacgtccagtgcttcacttatgttgactcacctcttgaaggtggtacttttcttctctaagaaacatggatacggtcaacct

SEQ ID NO: 339904 - DNA, 120 bp, Artificial Sequence
  ENSG00000137822_38 (sequence is synthesized)
attaggcctgagccttggaccacaaggcctaacacctacaggtctaaggagatccctggaacaaagacactacacacactctttcaggtacctttgttatgggcacttgaatggtgctgc

SEQ ID NO: 339905 - DNA, 120 bp, Artificial Sequence
  ENSG00000137822_39 (sequence is synthesized)
ttcacagaggctgcaccaccagtcatgaggatctcagaccagagctccaggaagttctgctgttggtctgataccaagagtaccttcagattctggaaaggattttcacggggttgccta

SEQ ID NO: 339906 - DNA, 120 bp, Artificial Sequence
  ENSG00000137822_40 (sequence is synthesized)
tgaaggagacaggaaaggaccttagcatgacaagtaatatccaacaaactgcctttctgcaaagggactcatgtacatctgaatgctttcaaaaataaatgccccatcagacatagtgtc

SEQ ID NO: 339907 - DNA, 88 bp, Artificial Sequence
  ENSG00000137822_41 (sequence is synthesized)
tggatctcttgggcctggaccccatctctacaaaagacaacaaaaaaattagctgggtgtggtggcgagtgcctgtagtcccagcagc

SEQ ID NO: 339908 - DNA, 120 bp, Artificial Sequence
  ENSG00000137822_42 (sequence is synthesized)
ttagctgggtgtggtggcgagtgcctgtagtcccagcagcttgggaggctgaggtagggggatcacttcagcctgggaggttgaggctgcagtaagtcgtcactgcgccactgtactcca

SEQ ID NO: 339909 - DNA, 120 bp, Artificial Sequence
  ENSG00000137822_43 (sequence is synthesized)
gcctaggtgacagagcaagacttcatcttaaaaaactaagccctatattagggtcccccttctcttccttctttctatgaatgatctgtattccttgcattcctggctttctaatttcca

SEQ ID NO: 339910 - DNA, 120 bp, Artificial Sequence
  ENSG00000137822_44 (sequence is synthesized)
tgtttgttctggggctgagaataatccaaatcatgctcctgagcctatatatttttaatgcttgcttaaaacttagttctctgactttacaggttgagaatattgaacctatatacaaat

SEQ ID NO: 339911 - DNA, 120 bp, Artificial Sequence
  ENSG00000137822_45 (sequence is synthesized)
cttcacacatttgcaaaaggttcctagccaatgtaacctagggaaataaactagataaactcctgaagtcatttcaaacccactcaaatttatcccacagacattccaatttctagaaag

SEQ ID NO: 339912 - DNA, 120 bp, Artificial Sequence
  ENSG00000137822_46 (sequence is synthesized)
ctttactctctcacctagattctcttccctccaaagcttgctgtcctcctgcctatacaattctggatgggcttcaaatacttaccagtccagaattctttgctcctcaaggctgtaccc

SEQ ID NO: 339913 - DNA, 120 bp, Artificial Sequence
  ENSG00000137822_47 (sequence is synthesized)
agctggcaacagataattacggtagttctggagctggttggcatggcaactatcatggacccagacatgagacacacaaggaatcccactggcaaggcacaggaagtacttccgggttcg

SEQ ID NO: 339914 - DNA, 120 bp, Artificial Sequence
  ENSG00000137822_48 (sequence is synthesized)
acaatgctgatccgcaattagaagacactggtaagctgtgttacactgcaagaaaagaagcagagccaatgggtttggtgacttctgtggaaagctcctaagcagcagccataatgagcc

SEQ ID NO: 339915 - DNA, 120 bp, Artificial Sequence
  ENSG00000137822_49 (sequence is synthesized)
atgaagagcagatctgaagactcccaactactacccaaaatgtgatttagtctatcctgcccaaggccactcttctcactggaaggcccaagtaatttccatagatgttctctctgcctc

SEQ ID NO: 339916 - DNA, 120 bp, Artificial Sequence
  ENSG00000137822_50 (sequence is synthesized)
acctgcagcatactgaggacctaaatcctcaacggacaaccaaaacctatgaactcagcctttcaggctaaaaatcagcaaccctaataggggtttctactactaaacataaacatcaat

SEQ ID NO: 339917 - DNA, 120 bp, Artificial Sequence
  ENSG00000137822_51 (sequence is synthesized)
cttcttttgtcccagcaacagaaccatagccattaactaacccaaggtcctaccttctcttccctatacacaacaaaaattctatttcatgcaaaaacattttggcagtttctcagttcc

SEQ ID NO: 339918 - DNA, 120 bp, Artificial Sequence
  ENSG00000137822_52 (sequence is synthesized)
tgaaatctctggctactttatccaggttccccaacccctcccaggcctcttctcaacacagcaagttggctcttatcattgccactatattaggttacacaaagaaactcctcacctggg

SEQ ID NO: 339919 - DNA, 120 bp, Artificial Sequence
  ENSG00000137822_53 (sequence is synthesized)
cttcattgaaatcttcaaggatatagccagctcctgctcgaagctgggattctgtatactgcttgttgaaaggaggaatttccaaaaattctatattaaaaaaaaaaaccaagataataa

SEQ ID NO: 339920 - DNA, 87 bp, Artificial Sequence
  ENSG00000137822_54 (sequence is synthesized)
aagcagtccagagcctgagcaggaggatcccttaagcccaggatttcaaatccatcctgggcaacatagtaagacccccatctcata

SEQ ID NO: 339921 - DNA, 120 bp, Artificial Sequence
  ENSG00000137822_55 (sequence is synthesized)
agagccatggccagggttgtaggggtgagggaggttaacgcgaacaagggtcttattccattgccattagcttaaagcagttgaaactccagaaggaaacgatcaaaatagtaaacccac

SEQ ID NO: 339922 - DNA, 120 bp, Artificial Sequence
  ENSG00000137822_56 (sequence is synthesized)
cttcaggctgaaaaaaaaaaatcccctttcttccctattaagaaactataggaaaaactcattatgacaggatctaggtcttccaggctctctttctaaatcttccacgagagtcactgc

SEQ ID NO: 339923 - DNA, 120 bp, Artificial Sequence
  ENSG00000137822_57 (sequence is synthesized)
aaaaaaagaaaaaagaaaaaaaagaaactgcctctctctgccatcctcttcctatctgcagcgaacctccacatcaaattgccttaggatgctggatcttgactgttctgtggtattgcc

SEQ ID NO: 339924 - DNA, 120 bp, Artificial Sequence
  ENSG00000137822_58 (sequence is synthesized)
tcttgactgttctgtggtattgccattttatcttaagttgaactatttagaaacaaaagcatttcccaagttgattttttttcccttacatttgattacatacccttctaattattctct

SEQ ID NO: 339925 - DNA, 120 bp, Artificial Sequence
  ENSG00000137822_59 (sequence is synthesized)
gcctggctaatttttgtacttttagtagaaatggggtttcagcgtgttagccaggatggtctcgaactcctaaccttgtgatccgcccacctcagcctccttaagtcctgggatttacag

SEQ ID NO: 339926 - DNA, 120 bp, Artificial Sequence
  ENSG00000137822_60 (sequence is synthesized)
atccgcccacctcagcctccttaagtcctgggatttacaggcatgagccaccacgcctgggctattttctcacaatttatgacttgtcccagaagttgttaattttgatgaaatccagtt

SEQ ID NO: 339927 - DNA, 120 bp, Artificial Sequence
  ENSG00000137822_61 (sequence is synthesized)
taccttttgtttttcttttatggatcatgtttttggtgttatgtctaagaactctgcctaactcaaggatactaagattttctcttctcttttcttccagaaattttatagttttcagtt

SEQ ID NO: 339928 - DNA, 120 bp, Artificial Sequence
  ENSG00000137822_62 (sequence is synthesized)
ttatacccaggtctatgattgatatgcttggacctgtgtccccgccaaaatttcttgagttgtaggggcgtggtgggagatgattggttcgtggagcagtttctcatgaatggtttagcg

SEQ ID NO: 339929 - DNA, 120 bp, Artificial Sequence
  ENSG00000137822_63 (sequence is synthesized)
ccattccccttggtactgtcctcacgatagtaagttctcatgagatctggctgtttaaatgtgtgcagcacctcccccttgctctctcttgctcctattcctgccatgtgagacgccttt

SEQ ID NO: 339930 - DNA, 120 bp, Artificial Sequence
  ENSG00000137822_64 (sequence is synthesized)
gattgtaagtttcctgaggcctccctagaagccaagctgaagccaccgtgcttcctgtgcagcctgcagaactgtgagcaactcaacctcttttcttcattaattacccagtctaaggta

SEQ ID NO: 339931 - DNA, 120 bp, Artificial Sequence
  ENSG00000137822_65 (sequence is synthesized)
cagtctaaggtattctttacagcagtgtgagaatggaataatacattgattgttttgagtaaatttttctatgtggggcaaggtatagtcttcttttaatacattgctggatttgtatgg

SEQ ID NO: 339932 - DNA, 120 bp, Artificial Sequence
  ENSG00000137822_66 (sequence is synthesized)
aaccattctttgcaggagttctcactgtaatgaaatttgtccctgttttgttggttgttttcatagcatctctggaagttgatggtagaagaatccgatttactgggtcagctgaaggta

SEQ ID NO: 339933 - DNA, 120 bp, Artificial Sequence
  ENSG00000137822_67 (sequence is synthesized)
atggcttagctgttgtaattcttacggtgatgctggtaggcagtgacttgcattctctgatgtttcctgagagcactggttgcctatacccagacttccagagtcaactcatttgttctt

SEQ ID NO: 339934 - DNA, 120 bp, Artificial Sequence
  ENSG00000137822_68 (sequence is synthesized)
atccaagtgagcaaactatacctaatgccacaaatctacgataatacaaagatttgggagtgtacttttttctggcatatatatataattatgttgctattgaataaataatgccaaata

SEQ ID NO: 339935 - DNA, 120 bp, Artificial Sequence
  ENSG00000137822_69 (sequence is synthesized)
cacaccagtcatcctgctatgcggaactaagtatgcctctttgaaatgccaaatgcctgtatcttttgtagcttgggctcaaattgatgaaattagaaattactgtatacatgtaattcc

SEQ ID NO: 339936 - DNA, 120 bp, Artificial Sequence
  ENSG00000137822_70 (sequence is synthesized)
ttcccttaggcagtttgagttgacaggatacgaaaccatcattaagcaattattcaagtccattttaaaacattttttaagaatgtgtaaagcggcggggcatggtggctcatgcctgta

SEQ ID NO: 339937 - DNA, 60 bp, Artificial Sequence
  ENSG00000137822_71 (sequence is synthesized)
gaagaaaaaaaaaataataggtgtggtggctcgcgcctgtaatcccagctacttgggagg

SEQ ID NO: 339938 - DNA, 120 bp, Artificial Sequence
  ENSG00000137822_72 (sequence is synthesized)
agagcaagattctgtcttgggggagcagataaaaaaaaaaagaatgtgtaaagcaaaactaaaaaggcatgttaaacgggacctaagatgtctttgaatttctgaaatacagggtgtggt

SEQ ID NO: 339939 - DNA, 120 bp, Artificial Sequence
  ENSG00000137822_73 (sequence is synthesized)
gagcagctacagatgaaagaattatgtgcttaaaccctcaggagttaaagaaactcaaaattcttgctgacaatacagaaaaaccaatgaaaagcatatagagttcaccttcttagaaat

SEQ ID NO: 339940 - DNA, 120 bp, Artificial Sequence
  ENSG00000137822_74 (sequence is synthesized)
cttttggaccaggatggatcagtcatttgaaagttcttttcatagacaactagagtagtgtttctctctcgatctatgtatgtgtttctgtaagtacatatatgtctccttcgtggcagt

SEQ ID NO: 339941 - DNA, 120 bp, Artificial Sequence
  ENSG00000137822_75 (sequence is synthesized)
tattttcaactttggctgcacattggaatcatcgggactctttaaaaaaatctaggtgacagagcacttaaattagaatccctgtaatagtgggacccaggtactaattttttttaaagc

SEQ ID NO: 339942 - DNA, 120 bp, Artificial Sequence
  ENSG00000137822_76 (sequence is synthesized)
tcacaagctagttccaattccaggataaagaacaggaagactgaaatgatctctggtagtttctaatggaacggttatgcctcctctgacatgagctggttgttattcctcagtgtgcta

SEQ ID NO: 339943 - DNA, 120 bp, Artificial Sequence
  ENSG00000137822_77 (sequence is synthesized)
cagcacagctgttacagactttttaaaaatgttctggtgtttagggctatttctgctgtaccaggaagagtaagatatatattaatagatgccactccagagggctggctgaaaacaacc

SEQ ID NO: 339944 - DNA, 120 bp, Artificial Sequence
  ENSG00000137822_78 (sequence is synthesized)
aagaactactgtgatgggtagatgctgtccttatgtggcatagatgtatccatagggaaaagcagaataacagagcaggtcatcatcattaaatatttattgagtgcttactgtatgcaa

SEQ ID NO: 339945 - DNA, 120 bp, Artificial Sequence
  ENSG00000137822_79 (sequence is synthesized)
ggcactggggatacaaagaggtataattcatggctctgcccttaaggagctcacaatctagttggaaaaacaagacatatatatatatatacatacaaaaatcagtaacaacacagaggc

SEQ ID NO: 339946 - DNA, 120 bp, Artificial Sequence
  ENSG00000137822_80 (sequence is synthesized)
ctgaacaattgccaagtggacaacagtacagataataaagaagcaagaaacgagggttcactaaaggctatagtggggaagggagtgcttcactgagagagtgggacttgaactggtatt

SEQ ID NO: 339947 - DNA, 120 bp, Artificial Sequence
  ENSG00000137822_81 (sequence is synthesized)
aaaaacaagagcatcccgggcaaagggaacaacactcacagctcagaggcaggaagacactctgcgggtctaagaaatgaagagttaaatgtggctagattggaggtttggtgcagggct

SEQ ID NO: 339948 - DNA, 120 bp, Artificial Sequence
  ENSG00000137822_82 (sequence is synthesized)
aagagagtaatactcgcttagccaggaaaggatgcatttgttttacgcattttgtgcgtctgaggggctggcaggccttgcacgtggcagtgtctatcctgtcagatttgggaggtcagc

SEQ ID NO: 339949 - DNA, 120 bp, Artificial Sequence
  ENSG00000137822_83 (sequence is synthesized)
tattaattagatcagctattaatcagactgttctcctaacactttaacttcatggatgtaccttccttcctttcctaatgccaactctgtttcccgggtaggtgtttcactgcctgaatg

SEQ ID NO: 339950 - DNA, 120 bp, Artificial Sequence
  ENSG00000137824_0 (sequence is synthesized)
tgttatcatagtccataaaatcggtctttttagttgccacaattataagaagttgcatacaattacaagagtaaaacagaattataagacagcacgttaggtttaagatttatggccggg

SEQ ID NO: 339951 - DNA, 120 bp, Artificial Sequence
  ENSG00000137824_1 (sequence is synthesized)
tgcggcggctcacgcactttgggagcccgaggcgggcggatcgcactttgagagaccaggagagcgggacccagtctctacaaaataaaaataaaaataaaatgtggggagagcgtgacg

SEQ ID NO: 339952 - DNA, 120 bp, Artificial Sequence
  ENSG00000137824_2 (sequence is synthesized)
ttttccaggtacagaggggaggtccaggcagaagcgcaggtagaaagtgtgaatatgctgagcgtattccgggagcagcaagttaagccggtgtgaccggagggaaatggaggcctggct

SEQ ID NO: 339953 - DNA, 120 bp, Artificial Sequence
  ENSG00000137824_3 (sequence is synthesized)
gccggacggtgagggtgactgcgcgagcgtccgcccaagaagtctccctgccttcccgcctttcccctgtcttgggccccttcttgctttcctttcgcgctctgtgctgactccgcccct

SEQ ID NO: 339954 - DNA, 120 bp, Artificial Sequence
  ENSG00000137824_4 (sequence is synthesized)
ccggcggcgcccgtggccccgcccctgagggaaacagacaaggggcggggccggcgcggtcatctctctgcgccttcccgcagggcgccgagcacctggcgccgcctgcctgacgtcacg

SEQ ID NO: 339955 - DNA, 120 bp, Artificial Sequence
  ENSG00000137824_5 (sequence is synthesized)
gtcactgacagcgtgagcccgcggcggctgctgccatggtggctggcggccgggtaagggtctgagtggatctcctgccaggccagagcgccttcgggggccgcggcggaaggccaggag

SEQ ID NO: 339956 - DNA, 120 bp, Artificial Sequence
  ENSG00000137824_6 (sequence is synthesized)
tttgcagccagggcgccgggtttgtggtctgcagtgtcgtgaggctgaggtgggggttgaaggcccagaagccggactctgtgacccgggtcggggggtgtactggaggggcggctacgt

SEQ ID NO: 339957 - DNA, 120 bp, Artificial Sequence
  ENSG00000137824_7 (sequence is synthesized)
ccaggctgggtgagaagagaggcagtggggcccaggaggctggaggaagccttagggttcagactggggtgcacgtagtcgagagctcagggtttgggcaaggggatacctgccggggtt

SEQ ID NO: 339958 - DNA, 120 bp, Artificial Sequence
  ENSG00000137824_8 (sequence is synthesized)
cagccttgagggtgggtttaccgggttcacgaatctctctctctccttacccccgcccgcccgcccgcctgcctgctcccggtgacttctgctggccgcaggtgcagcatgtctagactg

SEQ ID NO: 339959 - DNA, 120 bp, Artificial Sequence
  ENSG00000137824_9 (sequence is synthesized)
ggagccctgggtggtgcccgtgccgggctgggactgttgctgggtaccgccgccggccttggattcctgtgcctcctttacagccagcgatggaaacggacccagcgtcatggccgcagc

SEQ ID NO: 339960 - DNA, 120 bp, Artificial Sequence
  ENSG00000137824_10 (sequence is synthesized)
cagagcctgcccaactccctggactatacgcagacttcagatcccggacgccacgtgatgctcctgcgggctgtcccaggtggggctggagatgcctcagtgctgcccagccttccacgg

SEQ ID NO: 339961 - DNA, 120 bp, Artificial Sequence
  ENSG00000137824_11 (sequence is synthesized)
gaaggacaggagaaggtgctggaccgcctggactttgtgctgaccagccttgtggcgctgcggcgggaggtggaggagctgagaagcagcctgcgagggcttgcgggggagattgttggg

SEQ ID NO: 339962 - DNA, 120 bp, Artificial Sequence
  ENSG00000137824_12 (sequence is synthesized)
gaggtccgatgccacatggaagagaaccagagagtggctcggcggcgaaggtttccgtttgtccgggagaggagtgactccactggctccagctctgtctacttcacggcctcctcggga

SEQ ID NO: 339963 - DNA, 120 bp, Artificial Sequence
  ENSG00000137824_13 (sequence is synthesized)
gagagtgaagggggttacacaacagccaatgcggagtctgacaatgagcgggactctgacaaagaaagtgaggacggggaagatgaagtgagctgtgagactgtgaagatggggagaaag

SEQ ID NO: 339964 - DNA, 120 bp, Artificial Sequence
  ENSG00000137824_14 (sequence is synthesized)
gattctcttgacttggaggaagaggcagcttcaggtgcctccagtgccctggaggctggaggttcctcaggcttggaggatgtgctgcccctcctgcagcaggccgacgagctgcacagg

SEQ ID NO: 339965 - DNA, 120 bp, Artificial Sequence
  ENSG00000137824_15 (sequence is synthesized)
ggtgatgagcaaggcaagcgggagggcttccagctgctgctcaacaacaagctggtgtatggaagccggcaggactttctctggcgcctggcccgagcctacagtgacatgtgtgagctc

SEQ ID NO: 339966 - DNA, 120 bp, Artificial Sequence
  ENSG00000137824_16 (sequence is synthesized)
actgaggaggtgagcgagaagaagtcatatgccctagatggaaaagaagaagcagaggctgctctggagaagggggatgagagtgctgactgtcacctgtggtatgcggtgctttgtggt

SEQ ID NO: 339967 - DNA, 120 bp, Artificial Sequence
  ENSG00000137824_17 (sequence is synthesized)
cagctggctgagcatgagagcatccagaggcgcatccagagtggctttagcttcaaggagcatgtggacaaagccattgctctccagccagaaaaccccatggctcactttcttcttggc

SEQ ID NO: 339968 - DNA, 120 bp, Artificial Sequence
  ENSG00000137824_18 (sequence is synthesized)
aggtggtgctatcaggtctctcacctgagctggctagaaaaaaaaactgctacagccttgcttgaaagccctctcagtgccactgtggaagatgccctccagagcttcctaaaggctgaa

SEQ ID NO: 339969 - DNA, 120 bp, Artificial Sequence
  ENSG00000137824_19 (sequence is synthesized)
gaactacagccaggattttccaaagcaggaagggtatatatttccaagtgctacagagaactagggaaaaactctgaagctagatggtggatgaagttggccctggagctgccagatgtc

SEQ ID NO: 339970 - DNA, 120 bp, Artificial Sequence
  ENSG00000137824_20 (sequence is synthesized)
acgaaggaggatttggctatccagaaggacctggaagaactggaagtcattttacgagactaaccacgtttcactggccttcatgacttgatgccactatttaaggtgggggggcgggga

SEQ ID NO: 339971 - DNA, 120 bp, Artificial Sequence
  ENSG00000137824_21 (sequence is synthesized)
ggcttttttccttagaccttgctgagatcaggaaaccacacaaatctgtctcctgggtctgactgctacccactaccactccccattagttaatttattctaacctctaacctaatctag

SEQ ID NO: 339972 - DNA, 120 bp, Artificial Sequence
  ENSG00000137824_22 (sequence is synthesized)
aattggggcagtactcatggcttccgtttctgttgttctctcccttgagtaatctcttaaaaaaatcaagattcacacctgccccaggattacacatgggtagagcctgcaagacctgag

SEQ ID NO: 339973 - DNA, 120 bp, Artificial Sequence
  ENSG00000137824_23 (sequence is synthesized)
accttccaattgctggtgaggtggatgaacttcaaagctataggaacaaagcacataacttgtcactttaatctttttcactgactaataggactcagtacatatagtcttaagatcata

SEQ ID NO: 339974 - DNA, 120 bp, Artificial Sequence
  ENSG00000137824_24 (sequence is synthesized)
ccttacctaccaaggtaaaaagagggatcagagtggcccacagacattgctttcttatcacctatcatgtgaattctacctgtattcctgggctggaccacttgataacttccagtgtcc

SEQ ID NO: 339975 - DNA, 120 bp, Artificial Sequence
  ENSG00000137824_25 (sequence is synthesized)
tggcagcttttggaatgacagcagtggtatggggtttatgatgctataaaacaatgtctgaaaagttgcctagaatatattttgttacaaacttgaaataaaccaaatttgatgttatca

SEQ ID NO: 339976 - DNA, 120 bp, Artificial Sequence
  ENSG00000137824_26 (sequence is synthesized)
tttattaggctgcaaaaacatcagccctttttgtggtctcatgtgaggcaaagttctgtcagcttacctgggccacggctaactcatatcctggggtctggttccagcacctgagtttta

SEQ ID NO: 339977 - DNA, 120 bp, Artificial Sequence
  ENSG00000137824_27 (sequence is synthesized)
gtgaaaatgttcctttcctttcccaccgccacccttgctttccatgtctccaccctcagactgtgagctaagtgagaggctgtgtttctccatctgttgctgaaacttttgtctctgcaa

SEQ ID NO: 339978 - DNA, 120 bp, Artificial Sequence
  ENSG00000137824_28 (sequence is synthesized)
gggttcttctcagaggccaggtaactgtttcttgggtgtcactgcttccctgggcttccaaggatgaacagctattcctgaggaacagctgtttggattaaacatggaaatgagcctcta

SEQ ID NO: 339979 - DNA, 120 bp, Artificial Sequence
  ENSG00000137824_29 (sequence is synthesized)
gaagtatctgataccccccggatacttagcatatacatgaaaaagcaacttgggctggttactcatcgaatgtcaactgtgctgctaggaacaatgctggggggatggggaagtaagact

SEQ ID NO: 339980 - DNA, 120 bp, Artificial Sequence
  ENSG00000137824_30 (sequence is synthesized)
ttgtttctgaagacagatgatgggaagctggctggctggttccctttgggaggggggatgtgggggagaaggcatatataggaggtctttcttcctctggttctgttggtttccaagtaa

SEQ ID NO: 339981 - DNA, 120 bp, Artificial Sequence
  ENSG00000137824_31 (sequence is synthesized)
catcagaaattcctagaatatcccctcccaatgtgactatcctaagaaattgcttcccaagtcccagtgatacacctgtatgcttaaaggctaatgagacccacttttttgtctgcccag

SEQ ID NO: 339982 - DNA, 120 bp, Artificial Sequence
  ENSG00000137824_32 (sequence is synthesized)
aagataagtagtatagtcaggtctcatacttttatgctgattgttttcatgcttttcaagtttttattaatgcctgtggctgtactccttatgagtgtaggagagatttactgtgtaaga

SEQ ID NO: 339983 - DNA, 120 bp, Artificial Sequence
  ENSG00000137824_33 (sequence is synthesized)
gagatttactgtggtgaacccagctttttttatacctagaatactttggagacttgtaagcctaccattatctactaaagaatactaattggggccagaggtccgtaaagaatggggatt

SEQ ID NO: 339984 - DNA, 120 bp, Artificial Sequence
  ENSG00000137824_34 (sequence is synthesized)
acgtacagatgaaaattaggtattttcagctctagttgagggtacagggataggggacaatgcaactaggctgtggttggggcatccattccttgcagtgatggtactcagcccttgtcc

SEQ ID NO: 339985 - DNA, 120 bp, Artificial Sequence
  ENSG00000137824_35 (sequence is synthesized)
ccccgtttgaccctattttcaatatatccccaaagatttaaagaaaaaaaaccttttaaaacctcttatacacaccttgatctttttgtggcaggtctctcacctgagctggctagaaaa

SEQ ID NO: 339986 - DNA, 120 bp, Artificial Sequence
  ENSG00000137824_36 (sequence is synthesized)
aaaaactgctacagccttgcttgaaagccctctcagtgccactgtggaagatgccctccagagcttcctaaaggtatgagaggggcaggtggcaggcaaaaacaccagggtaaccttgtt

SEQ ID NO: 339987 - DNA, 120 bp, Artificial Sequence
  ENSG00000137824_37 (sequence is synthesized)
ttttcctaaggacattattgagacccttaatgggaggggttttcctagtcgggggcaattttgtgtttgcctgttctatgggaaaaccagaatcacttgcacagcttatcaaaaatatag

SEQ ID NO: 339988 - DNA, 120 bp, Artificial Sequence
  ENSG00000137824_38 (sequence is synthesized)
cccaggctgaagaactacagccaggattttccaaagcaggaagggtatatatttccaaggtaaactcatttgtctacttcaacatagatctgggaactcctgaaagtacacagtatcagg

SEQ ID NO: 339989 - DNA, 120 bp, Artificial Sequence
  ENSG00000137824_39 (sequence is synthesized)
gggggaaggccaaggcccccattctccacagttgaggaaaaaggggcctcacccgtttctgtctggtctgcagtatggaagccggcaggactttctctggcgcctggcccgagcctacag

SEQ ID NO: 339990 - DNA, 120 bp, Artificial Sequence
  ENSG00000137824_40 (sequence is synthesized)
attactgcttaagagtagagtggcagtctctgctcagagggagccttgggtctctggcccactgtgggaactcctgtcctccggagtgcacaggaccaaagggccttttcaaaggtccct

SEQ ID NO: 339991 - DNA, 80 bp, Artificial Sequence
  ENSG00000137825_0 (sequence is synthesized)
cccggcgcgccgcgggctggtgggctcagcggcggcgccggcactgggaaatgaccctgcccgggggcccaacgggcatg

SEQ ID NO: 339992 - DNA, 80 bp, Artificial Sequence
  ENSG00000137825_1 (sequence is synthesized)
ctggagcgggccccgcgccggagtgtcggggagctgcgcctgctcttcgaggcgcgctgtgcggcggtcgctgcggccgc

SEQ ID NO: 339993 - DNA, 120 bp, Artificial Sequence
  ENSG00000137825_2 (sequence is synthesized)
gggggacaggtccccaacgggcttccgcgggctcccccggccccggtgatccctcagctgaccgtgacagccgaggagcccgacgtgcccccgaccagccctgggccgccggagcgggag

SEQ ID NO: 339994 - DNA, 120 bp, Artificial Sequence
  ENSG00000137825_3 (sequence is synthesized)
agggactgcctcccggcagcgggctcttcgcacctgcagcagccgcgccgcctttccacctcgtcggtctcctccactggctcctcgtcgctgctcgaggactcggaggacgacctgctg

SEQ ID NO: 339995 - DNA, 120 bp, Artificial Sequence
  ENSG00000137825_4 (sequence is synthesized)
agcgacagtgagagccggagccgcggcaacgtgcagctggaagcgggcgaggacgtgggtcagaaaaaccactggcagaagatccggaccatggtcaatctgccggtcataagccctttc

SEQ ID NO: 339996 - DNA, 120 bp, Artificial Sequence
  ENSG00000137825_5 (sequence is synthesized)
aagaagcgctacgcctgggtgcagctggcagggcacactgggagttttaaggcggcgggcaccagcgggctgatcctgaagcgctgctcggagccggagcgctactgcctggcgcggctg

SEQ ID NO: 339997 - DNA, 120 bp, Artificial Sequence
  ENSG00000137825_6 (sequence is synthesized)
atggctgacgcgctgcgcggctgcgtgcctgccttccacggcgtggtggagcgcgacggcgaaagctacctgcagctgcaggacctgctcgatggcttcgacggaccttgtgtgctcgac

SEQ ID NO: 339998 - DNA, 120 bp, Artificial Sequence
  ENSG00000137825_7 (sequence is synthesized)
tagaggaggagctgaccaaggcccgtgagcggcccaagctgcggaaggacatgtacaagaaaatgctggcggtggatcctgaagctcccacggaggaggagcacgcgcagcgcgccgtca

SEQ ID NO: 339999 - DNA, 120 bp, Artificial Sequence
  ENSG00000137825_8 (sequence is synthesized)
ccaagccgcgctacatgcagtggcgggaaggcatcagctccagcaccaccctcggcttccgcatcgagggcatcaagaaagcggacggctcctgcagcaccgacttcaagactacgcgaa

SEQ ID NO: 340000 - DNA, 120 bp, Artificial Sequence
  ENSG00000137825_9 (sequence is synthesized)
gccgagagcaggtgcttcgcgtctttgaagagtttgtgcaaggagatgaggaagtgctgaggcggtatctgaaccgcctgcagcagatccgggacaccctggaggtatccgagttcttca

SEQ ID NO: 340001 - DNA, 120 bp, Artificial Sequence
  ENSG00000137825_10 (sequence is synthesized)
ggaggcacgaggtgatcggcagctcgctcctctttgtgcacgatcactgccatcgcgccggcgtgtggctcatcgacttcggcaagaccacgcccctccccgatggccagatcctggacc

SEQ ID NO: 340002 - DNA, 120 bp, Artificial Sequence
  ENSG00000137825_11 (sequence is synthesized)
accggcggccctgggaggagggcaaccgcgaggacggctatttgctggggctggacaatctcattggcatcctggccagcctggctgagagatgaggctggactcctgtccccgcgggcc

SEQ ID NO: 340003 - DNA, 120 bp, Artificial Sequence
  ENSG00000137825_12 (sequence is synthesized)
gctcacctgacatgtggacctgcagctttgtccccactgtgcatgccggcttgagactggagccccgcggtgcagggcagttcaccgggtcctgcaggaccaggtgccagccactaaggg

SEQ ID NO: 340004 - DNA, 120 bp, Artificial Sequence
  ENSG00000137825_13 (sequence is synthesized)
ggggcaccgccgatgccaggggttttgcccacccgggccccagcgttcccagagccaaatgacactaacttatagaaggggagggggcaaagggcttcttcctcaggccagctcttctga

SEQ ID NO: 340005 - DNA, 120 bp, Artificial Sequence
  ENSG00000137825_14 (sequence is synthesized)
ggaggctctgccctctccagaggtgccagaccgcggattttatttagcaagcccagaccttccggtctaacgtctcacaccacgacggactccccttcctaataaaactcaaagacaaga

SEQ ID NO: 340006 - DNA, 120 bp, Artificial Sequence
  ENSG00000137825_15 (sequence is synthesized)
tgaggtgttggggagcctgaagccgaggactgcccctgtcatctggcccagtgccctcggctgtgtccccaccatggccctcaccgcgctggctcgcaactgctctacgctccttccctt

SEQ ID NO: 340007 - DNA, 120 bp, Artificial Sequence
  ENSG00000137825_16 (sequence is synthesized)
ggggccttcaactctgctcaggagctcgggccggagaaaggccccgagacttgaagcccttgcccgggagggatgaacacgcaaaggaacccgaggaacgggcagccgcgccgcctttcc

SEQ ID NO: 340008 - DNA, 120 bp, Artificial Sequence
  ENSG00000137831_0 (sequence is synthesized)
gtcgacgtctgctgcccggggcccgcaggtggcaggcaggtggggctggtacagcccgcgccgcctctgctgcagccgctgccgtctactccttgcgcgctggcactccgcagcctttaa

SEQ ID NO: 340009 - DNA, 120 bp, Artificial Sequence
  ENSG00000137831_1 (sequence is synthesized)
ggttcgcgcgggggccaggcaagagttagccatgaagagcctcaagtcccgcctgaggaggcaggacgtgcccggccccgcgtcgtctggcgccgccgccgccagcgcgcatgcagcaga

SEQ ID NO: 340010 - DNA, 120 bp, Artificial Sequence
  ENSG00000137831_2 (sequence is synthesized)
ttggaataaatatgatgaccgattgatgaaagcagcagaaaggggggatgtagaaaaagtgacctcaatccttgctaaaaagggggtcaatccaggcaaactagatgtggaaggcagatc

SEQ ID NO: 340011 - DNA, 120 bp, Artificial Sequence
  ENSG00000137831_3 (sequence is synthesized)
tgtcttccatgttgtgacctcaaaggggaatcttgagtgtttgaatgccatccttatacatggagttgatattacaaccagtgacactgcagggagaaatgctcttcacctggctgctaa

SEQ ID NO: 340012 - DNA, 120 bp, Artificial Sequence
  ENSG00000137831_4 (sequence is synthesized)
gtatggacatgcattgtgcctacaaaaacttctacagtacaattgtcccactgagcatgcagacctgcagggaagaactgcacttcacgatgccgcaatggcagattgtccttctagcat

SEQ ID NO: 340013 - DNA, 120 bp, Artificial Sequence
  ENSG00000137831_5 (sequence is synthesized)
acagctgctttgtgaccatggggcctctgtgaatgccaaagatgtagacgggcggacaccacttgttctggctactcagatgagtaggccaacaatatgtcaactgctgatagatagagg

SEQ ID NO: 340014 - DNA, 120 bp, Artificial Sequence
  ENSG00000137831_6 (sequence is synthesized)
agcggatgttaattccagagacaaacaaaacagaactgccctcatgctaggttgcgaatatggttgcagagatgcagtagaagtcttaattaaaaatggtgctgatataagcttgctgga

SEQ ID NO: 340015 - DNA, 120 bp, Artificial Sequence
  ENSG00000137831_7 (sequence is synthesized)
tgcgcttggccatgatagttcttactatgcaagaattggtgacaatctggacattctaaccttgttgaagactgcatcggaaaataccaacaaagggagagaactttggaagaaagggcc

SEQ ID NO: 340016 - DNA, 120 bp, Artificial Sequence
  ENSG00000137831_8 (sequence is synthesized)
atctttgcaacagcgaaatttgacacacatgcaagatgaagtaaatgtgaagtcacatcagagggagcatcaaaatattcaggatttggagattgaaaatgaagatttgaaagagaggtt

SEQ ID NO: 340017 - DNA, 120 bp, Artificial Sequence
  ENSG00000137831_9 (sequence is synthesized)
gagaaaaattcagcaagaacaaagaatacttttggataaagtcaatggtttacagttacagctgaatgaggaagttatggttgctgatgatctggaaagcgagagagaaaagctgaagtc

SEQ ID NO: 340018 - DNA, 120 bp, Artificial Sequence
  ENSG00000137831_10 (sequence is synthesized)
ccttttggcagctaaagaaaagcaacatgaagaaagcttaaggactattgaggctctgaaaaatagatttaaatattttgagagtgatcatttaggatcaggaagtcatttcagtaaccg

SEQ ID NO: 340019 - DNA, 120 bp, Artificial Sequence
  ENSG00000137831_11 (sequence is synthesized)
aaaagaagatatgcttcttaaacaaggtcagatgtatatggcagactcacagtgtacttccccaggtataccagcccatatgcaaagcagatctatgttaagacctctggaactatcttt

SEQ ID NO: 340020 - DNA, 120 bp, Artificial Sequence
  ENSG00000137831_12 (sequence is synthesized)
acccagtcaaacgtcatactctgaaaatgaaattttaaagaaagagttagaagcaatgcgaactttctgtgagtcagcaaaacaagaccgactgaagctccaaaatgaactggcacacaa

SEQ ID NO: 340021 - DNA, 120 bp, Artificial Sequence
  ENSG00000137831_13 (sequence is synthesized)
agtggcagaatgcaaagctttagcattagaatgtgaaagggtcaaggaggattcagatgaacagataaagcaattagaagatgcattaaaagatgtgcagaagaggatgtatgagtcaga

SEQ ID NO: 340022 - DNA, 120 bp, Artificial Sequence
  ENSG00000137831_14 (sequence is synthesized)
aggtaaagttaaacaaatgcagacccattttcttgcccttaaagaacacttaacaagtgaagcagcctcagggaatcacagactaaccgaggaactgaaggatcagttgaaagacttgaa

SEQ ID NO: 340023 - DNA, 120 bp, Artificial Sequence
  ENSG00000137831_15 (sequence is synthesized)
agtaaaatatgaaggtgcttcagcagaagtggggaaattaagaaaccaaatcaaacaaaatgagatgatagtagaagagtttaagagggatgaaggcaagctgatagaagaaaataagcg

SEQ ID NO: 340024 - DNA, 120 bp, Artificial Sequence
  ENSG00000137831_16 (sequence is synthesized)
attacagaaggaacttagtatgtgtgaaatggagcgagagaagaaaggaagaaaggtcacagagatggaaggccaggcaaaagaattgtcagcgaagttggccctttccattccagctga

SEQ ID NO: 340025 - DNA, 120 bp, Artificial Sequence
  ENSG00000137831_17 (sequence is synthesized)
aaaatttgaaaacatgaagagctcattatcaaatgaagtgaatgagaaagcaaaaaaattagtagaaatggaaagagaacatgaaaaatcacttagtgaaattagacagttaaagagaga

SEQ ID NO: 340026 - DNA, 120 bp, Artificial Sequence
  ENSG00000137831_18 (sequence is synthesized)
acttgagaatgttaaggccaagcttgctcagcacgtcaaaccagaggaacatgaacaggttaagagcagattagaacagaaatcaggagaacttgggaagaagatcactgagttaacatt

SEQ ID NO: 340027 - DNA, 120 bp, Artificial Sequence
  ENSG00000137831_19 (sequence is synthesized)
gaaaaatcagacactacaaaaggaaattgaaaaagtttatttggataataagctcctcaaggagcaagcacataacttaacaattgaaatgaaaaatcattatgttcctttaaaagtaag

SEQ ID NO: 340028 - DNA, 120 bp, Artificial Sequence
  ENSG00000137831_20 (sequence is synthesized)
tgaagacatgaaaaagtcacatgatgcaattattgatgatcttaatagaaagcttttagatgtaacacaaaaatatacagaaaagaagttggaaatggagaaattgctactggaaaatga

SEQ ID NO: 340029 - DNA, 120 bp, Artificial Sequence
  ENSG00000137831_21 (sequence is synthesized)
cagcttaagtaaggatgtaagccgcctagaaactgtgtttgtacctcctgagaaacatgaaaaagagataatagctctgaaatccaatattgttgaacttaagaaacagctgtctgaact

SEQ ID NO: 340030 - DNA, 120 bp, Artificial Sequence
  ENSG00000137831_22 (sequence is synthesized)
taagaaaaaatgtggtgaagaccaggagaaaatacacgctctcacatctgaaaacactaacttgaagaagatgatgagtaatcagtatgtgccagttaaaacccatgaagaggttaaaat

SEQ ID NO: 340031 - DNA, 120 bp, Artificial Sequence
  ENSG00000137831_23 (sequence is synthesized)
gacactgaatgacacgttagccaaaactaacagagaattattagatgtgaagaaaaaatttgaagatataaatcaggaatttgtaaaaataaaagataagaatgaaatattaaaaagaaa

SEQ ID NO: 340032 - DNA, 120 bp, Artificial Sequence
  ENSG00000137831_24 (sequence is synthesized)
cctggaaaacactcagaaccaaataaaagctgagtacatcagcctggcagagcacgaggcaaagatgagctcgctaagtcagagcatgagaaaggtgcaggatagtaatgctgaaatctt

SEQ ID NO: 340033 - DNA, 120 bp, Artificial Sequence
  ENSG00000137831_25 (sequence is synthesized)
ggccaactacagaaaaggccaagaagagattgtgacactgcatgccgaaattaaagcccagaagaaggagctcgacacaatacaagaatgcattaaggtaaaatacgccccaattgtcag

SEQ ID NO: 340034 - DNA, 120 bp, Artificial Sequence
  ENSG00000137831_26 (sequence is synthesized)
ctttgaggagtgcgagagaaaatttaaagcaacagagaaagaactaaaagaccagttatcagagcagacacaaaagtatagtgtcagtgaagaagaagtcaagaaaaacaagcaagagaa

SEQ ID NO: 340035 - DNA, 120 bp, Artificial Sequence
  ENSG00000137831_27 (sequence is synthesized)
tgacaagttaaagaaggagatttttacccttcagaaagatttgagagataagacagttctcattgagaagtctcatgaaatggaaagagcattaagcagaaaaacagacgagctaaacaa

SEQ ID NO: 340036 - DNA, 120 bp, Artificial Sequence
  ENSG00000137831_28 (sequence is synthesized)
gaaaatgccaaacagacttctgagatacttgcagtgcaaaatcttttgcaaaaacaacatgttccattggaacaggttgaggctctgaaaaaatctcttaatggcacaattgaaaatcta

SEQ ID NO: 340037 - DNA, 120 bp, Artificial Sequence
  ENSG00000137831_29 (sequence is synthesized)
aaggaagaactgaagagtatgcaaaggtgttacgagaaagagcagcagacagtgaccaaactgcatcaattgttggagaatcaaaagaactcttctgtacccctggcagagcatttgcag

SEQ ID NO: 340038 - DNA, 120 bp, Artificial Sequence
  ENSG00000137831_30 (sequence is synthesized)
attaaagaagcatttgagaaagaagttggaatcataaaagccagcttgagagaaaaggaagaagaaagccaaaacaaaatggaagaagtctccaaacttcagtcggaggttcagaatact

SEQ ID NO: 340039 - DNA, 120 bp, Artificial Sequence
  ENSG00000137831_31 (sequence is synthesized)
aaacaagcattaaaaaaattagagactagagaggtagttgacttgtctaaatataaagcaacaaaaagtgatttggagacacagatttctagcttaaatgaaaaattggccaatctgaat

SEQ ID NO: 340040 - DNA, 120 bp, Artificial Sequence
  ENSG00000137831_32 (sequence is synthesized)
agaaagtatgaggaagtatgtgaggaagttttgcatgccaaaaagaaggaaatatctgcaaaagatgagaaggaattactgcatttcagcattgagcaagaaattaaggatcagaaggaa

SEQ ID NO: 340041 - DNA, 120 bp, Artificial Sequence
  ENSG00000137831_33 (sequence is synthesized)
cgatgtgataagtccttaacaacaatcacagagttacaaagaagaatacaagaatctgctaaacaaatagaagcaaaagataataagataactgaactgcttaatgatgtggaaagatta

SEQ ID NO: 340042 - DNA, 120 bp, Artificial Sequence
  ENSG00000137831_34 (sequence is synthesized)
aaacaggcactcaatggcctttcccaactcacctacacaagtgggaaccccaccaagaggcagagccagctgattgacactctgcagcaccaagtgaaatctctggagcaacagctggcc

SEQ ID NO: 340043 - DNA, 120 bp, Artificial Sequence
  ENSG00000137831_35 (sequence is synthesized)
gatgctgacagacagcaccaagaagtaattgcaatttatcggacacaccttcttagtgctgcacagggtcacatggatgaagatgttcaggaggctctgctccagatcatacaaatgcgg

SEQ ID NO: 340044 - DNA, 120 bp, Artificial Sequence
  ENSG00000137831_36 (sequence is synthesized)
caggggcttgtgtgctagccgttagcactgactgccagtatctgttttatcttgctggtgctgaacattctttgtgcaactccatggtctttctgggccttactgtgctggtataattaa

SEQ ID NO: 340045 - DNA, 120 bp, Artificial Sequence
  ENSG00000137831_37 (sequence is synthesized)
aaatatattttgttctattggtaggtttttttttaaaattagatgaatatgttagtctttttcaatatcagtttgaatcttattttctgtatgtgttaattttacaaataggcaaacaac

SEQ ID NO: 340046 - DNA, 120 bp, Artificial Sequence
  ENSG00000137831_38 (sequence is synthesized)
caacataactttgccctggattgactacatatttttaaaccttcaagtccctaataaaacatgagccatctgagtgagtccatatgaagcgaggttaggctgaaataattgcttaaagat

SEQ ID NO: 340047 - DNA, 120 bp, Artificial Sequence
  ENSG00000137831_39 (sequence is synthesized)
gtctttcagagaaattaatttggttggtggccacttttaggtggatcaaaagacctttcagatcctcagaaccttgagacataatacagttgtgaggaatgtgttgtaacttggctggcc

SEQ ID NO: 340048 - DNA, 120 bp, Artificial Sequence
  ENSG00000137831_40 (sequence is synthesized)
aagttacatgttacagtatctttactgaggtaacttcattagtgtctttggccttttttgtaggtatagatattttttctttttacactaataacttttatgccttttaaaataaattta

SEQ ID NO: 340049 - DNA, 120 bp, Artificial Sequence
  ENSG00000137831_41 (sequence is synthesized)
ttttcataaatggtttgcagtgctaaattacatttagattaagaacaggcaggggtggaatatatcaggaatttataataaaattgccttaatctctacaacagtatcttaatttttact

SEQ ID NO: 340050 - DNA, 120 bp, Artificial Sequence
  ENSG00000137831_42 (sequence is synthesized)
tgcggtgactattcttgccacaatattggagaataatgatagatgatatactagatttttcaaagtgtgaaaacctttagactttttttagcaattagtttgacattcgctactatagta

SEQ ID NO: 340051 - DNA, 120 bp, Artificial Sequence
  ENSG00000137831_43 (sequence is synthesized)
accaagcactcattatatatgcatcctccaaatgtttcatgcttatttataggaaagttatattaatgagattaataatgtgaaatacagttttcctgcaaaattagcattagagaattg

SEQ ID NO: 340052 - DNA, 120 bp, Artificial Sequence
  ENSG00000137831_44 (sequence is synthesized)
attttagataacagatttttaaagttttagagaaaagtacagtaatacagtaaactgaaagagtatatagatagcaataaaataacataagtggacatgtttatagtaaatactctgaag

SEQ ID NO: 340053 - DNA, 120 bp, Artificial Sequence
  ENSG00000137831_45 (sequence is synthesized)
taaacaaccgtttttattaactgcatctcattagggaaagtttatatgtcttgttattttttattaacattttatttaccattcagagtgaaaattactaatttgagtattaacaaataa

SEQ ID NO: 340054 - DNA, 120 bp, Artificial Sequence
  ENSG00000137831_46 (sequence is synthesized)
ctgaataaatggatcattacagttaggttttctcaaattgcaaaatttgccttagcaattatctttgaacatcccgaaccagatttttaaatcccatttttgtttaatagggtaaaaata

SEQ ID NO: 340055 - DNA, 120 bp, Artificial Sequence
  ENSG00000137831_47 (sequence is synthesized)
ccatcaaaatgacttctcataccaaagaataagccatcatattttttcggtgttgaaacaacattgaaagtcagaattggatttgtttttaattctttatacggtttacataagcaatat

SEQ ID NO: 340056 - DNA, 120 bp, Artificial Sequence
  ENSG00000137831_48 (sequence is synthesized)
ctgtctctttaattattatgattaatgtcgtccttcagcatgagttctgtttcacaagttttgggccacctatttcaataaaaaataaaatataaattaaaaaagttgccgggggtggtg

SEQ ID NO: 340057 - DNA, 120 bp, Artificial Sequence
  ENSG00000137831_49 (sequence is synthesized)
cttgggcaatagcaagactccatctcaaaataaaataaaataaaacttagagcaaagtttaaaactgagtattcatattaagtgttttattttccatattagagatgggaagggaacctt

SEQ ID NO: 340058 - DNA, 120 bp, Artificial Sequence
  ENSG00000137831_50 (sequence is synthesized)
atgtgtattttattttgttttcaaccatcaataaagttttctctagaatattgttttgaacatccttgtaaaagatttgcgagttaaactattttatttactgtctgtgagagcattggg

SEQ ID NO: 340059 - DNA, 120 bp, Artificial Sequence
  ENSG00000137831_51 (sequence is synthesized)
agtaggaaacgatggactccaaagtacaagggagaatacccattttcattcagctatctggagtaaaatatcaagtacttccttcaactaatcttgtctcattcactcaccttttgatat

SEQ ID NO: 340060 - DNA, 120 bp, Artificial Sequence
  ENSG00000137831_52 (sequence is synthesized)
cgaaggcagaaattgcgtttacaacactgaagaccaaagctttttaattagtaaacaagcggaacatagataatggacaatgctggccactgccattctgtgttcagaaagactatgaga

SEQ ID NO: 340061 - DNA, 120 bp, Artificial Sequence
  ENSG00000137831_53 (sequence is synthesized)
cctgaacatatggccaagaggaaagaagagtgacgttgtctaagatgtaatgagtgctctctgagagaatcactcaattcctattggagtgcaatccttacttgagaactttattactct

SEQ ID NO: 340062 - DNA, 120 bp, Artificial Sequence
  ENSG00000137831_54 (sequence is synthesized)
tgttctgtgtagttttttttttttgtcacttccccatcagaaaagcatattctttttgatagagggtcagtgttataaataattgtcttttgaaataaaatcaaatattcatgcattgaa

SEQ ID NO: 340063 - DNA, 120 bp, Artificial Sequence
  ENSG00000137831_55 (sequence is synthesized)
atcatgcactgcagcgtctgtgttgcagtgttgaggcagcaggatgcagagtgctgttcaagttttccagtggggtccctcaaagggacaactttgaaagatagctagcttccaaagaat

SEQ ID NO: 340064 - DNA, 120 bp, Artificial Sequence
  ENSG00000137831_56 (sequence is synthesized)
aagaaatagatagagttactgtacctgacttggggctgctcttaatcaagttctgcattgcaaggaagataatattcgagcgttatgaaggcggagaaggatcctgaagacgaagaaaat

SEQ ID NO: 340065 - DNA, 120 bp, Artificial Sequence
  ENSG00000137831_57 (sequence is synthesized)
atcgttagagatccaagctaagtgtagcacagcatgtgagggactgagtcacttgtcaggagtttgtctgagagtttgctttgtgagcttacagagatttgtaacttaatgcaaagtagt

SEQ ID NO: 340066 - DNA, 120 bp, Artificial Sequence
  ENSG00000137831_58 (sequence is synthesized)
aagttgagttcttttagtagttggcaatgcagtgctttatagcccaacttttgttatgcatttattacaaattctttttaaaattttgtgactttagttaaaataaatccttaataatat

SEQ ID NO: 340067 - DNA, 120 bp, Artificial Sequence
  ENSG00000137831_59 (sequence is synthesized)
tttaaaatttgttattatttagtatttttaaataagttatacttgatttatttaaaacatagtcttaaaggtcctttccattttggagttttaaatagaaacactgccaccttgtgttat

SEQ ID NO: 340068 - DNA, 120 bp, Artificial Sequence
  ENSG00000137831_60 (sequence is synthesized)
ttgaatttgaattataaatctcttatttatagtgtgaccttgggctgcttatttaaagtcttcaaacttgttgcctctttggcaaaactggggtgattgtctctttctccacatagttat

SEQ ID NO: 340069 - DNA, 120 bp, Artificial Sequence
  ENSG00000137831_61 (sequence is synthesized)
gagtatctgggactatgcttttaattatgcactaatacacattgaaatgctaagtaaaacggcccagtcacatgtaaattgttgctgatgtttccctatttcatagaattgtttgagtta

SEQ ID NO: 340070 - DNA, 120 bp, Artificial Sequence
  ENSG00000137831_62 (sequence is synthesized)
ttttttaatagaagaaaggttttttgttttgtttcttttttagtgtttattttttaacactgtaggcctacagattaaggatggcaaattgtggatttggatcttatccaaagagtatag

SEQ ID NO: 340071 - DNA, 120 bp, Artificial Sequence
  ENSG00000137831_63 (sequence is synthesized)
tgtccctttaataattggaaatatttgtttattgtttattatgttcatgaccctgtgctaagtgggataaagaaagtatgccattcctgtccccaaggagttctgggtagttagagaggc

SEQ ID NO: 340072 - DNA, 120 bp, Artificial Sequence
  ENSG00000137831_64 (sequence is synthesized)
aaaatacagattcataaaaagtaaaaatcacaagatgagagatgtcaaatgtagaactgagaatgcagattctaagtgataggggtttccaggaaggaaagattagtggtgtggtagaag

SEQ ID NO: 340073 - DNA, 120 bp, Artificial Sequence
  ENSG00000137831_65 (sequence is synthesized)
ctagtttttaaagaagggagtacctggcttgaacttgtaacgtagatgctattttggtaggtgaaaggaaagtagaggctcttccatctaaagaaaatagtgtaaaagaagcgtggagat

SEQ ID NO: 340074 - DNA, 120 bp, Artificial Sequence
  ENSG00000137831_66 (sequence is synthesized)
ggaatacaagtggcatggccagagggcagtaaaagccctgcctgtagagtagtccctctcttatccactgagggtatgttccaagatccccagtggatgcctgaaaccatggataggacc

SEQ ID NO: 340075 - DNA, 120 bp, Artificial Sequence
  ENSG00000137831_67 (sequence is synthesized)
tgctgaatgaaccctatataagctatgttttccccccagatatacatacctgtgataaagagtaatttataaattgggcacagtaagagattaataacaacataataaaatagaacaatt

SEQ ID NO: 340076 - DNA, 120 bp, Artificial Sequence
  ENSG00000137831_68 (sequence is synthesized)
tgtattataccatgggcaacagaaatagagaaagtgaaactgctcatcgcaaaactgccaataagaggggactgctgtatttgaaagttaatgtttgaagccaaactgtggaagtcattg

SEQ ID NO: 340077 - DNA, 120 bp, Artificial Sequence
  ENSG00000137831_69 (sequence is synthesized)
agaaccaaactgatgaatttggattctctcatgtatgtaaagaagtgtcactcaaggtttttgagccaaaagtgatgtgaggaaataggtaccttagtctcagaggcatggtaaggaata

SEQ ID NO: 340078 - DNA, 120 bp, Artificial Sequence
  ENSG00000137831_70 (sequence is synthesized)
tagtgtggagatagtaagacaggatgggaagcgtttgcaataatccagacatgtgataagtgtcttcagaagttcatggcactagatatgaactaaagcaataatttgatgttgcttagg

SEQ ID NO: 340079 - DNA, 120 bp, Artificial Sequence
  ENSG00000137831_71 (sequence is synthesized)
gaaagtagcattactgtcattagccacacattctttacagaagtttatattgttacgttttgaaattctgcatctggtaggtccaaggtagtttgttgttagaagtagcaggatcgcctt

SEQ ID NO: 340080 - DNA, 120 bp, Artificial Sequence
  ENSG00000137831_72 (sequence is synthesized)
tcagtaaccgtaagtataaaagtatggattatcattacagttcacctagttcaagtaaagaagaatgtttattcttacttgtttaactatacaggaataactgtacaagatattcctgct

SEQ ID NO: 340081 - DNA, 120 bp, Artificial Sequence
  ENSG00000137831_73 (sequence is synthesized)
gctaaacttcatcagcacatggaactaggaagacgttaagatgactattgtaacttctaacatattctgataattactgaagctctgattctccttagctacctgtattttaaaattgta

SEQ ID NO: 340082 - DNA, 120 bp, Artificial Sequence
  ENSG00000137831_74 (sequence is synthesized)
tattgtatgaattaccaaatttgccttgttgattagtagacatagacatttgtcttgtgatatttagggttcatttttttatggaaagaacataaacatagttttctaatttggagaaat

SEQ ID NO: 340083 - DNA, 120 bp, Artificial Sequence
  ENSG00000137831_75 (sequence is synthesized)
cggtcttaatgcaagtaggcattttaaaattacatttatgaattatttttagaccctacataatcttttttattctgcaatgttaaacagtttctctagaaaatctgtttttgtttccta

SEQ ID NO: 340084 - DNA, 120 bp, Artificial Sequence
  ENSG00000137831_76 (sequence is synthesized)
ctattaaactattctctcctacaacagtaatatttatgctataaatttaaatcatcatttttgttttgattgattataagatatatgttttattatcatgtagcctagtttaagagtcct

SEQ ID NO: 340085 - DNA, 120 bp, Artificial Sequence
  ENSG00000137831_77 (sequence is synthesized)
tacttctgtttatagaaataataaggggaaaatgggtattttagaatgaggatacttttgtgttgtacctcttgcttctcttttatttgaataataaaggaaataacatcaaattaatgt

SEQ ID NO: 340086 - DNA, 120 bp, Artificial Sequence
  ENSG00000137831_78 (sequence is synthesized)
taaccttgttgaagactgcatcggaaaataccaacaaagggagagaactttggaagaaagggccatctttgcaacaggctttcagcttttctctagtgagaggaacctaagcatttgcaa

SEQ ID NO: 340087 - DNA, 120 bp, Artificial Sequence
  ENSG00000137831_79 (sequence is synthesized)
accctgaagagaaagtaatcaggtaccttgagcaattctgatcatcatcctgtgtcatttttgtacctctcacctgaatctgaaagctacattttttaaaaattttgctttaagttctga

SEQ ID NO: 340088 - DNA, 120 bp, Artificial Sequence
  ENSG00000137831_80 (sequence is synthesized)
tgttttccttttcaatccatctgaattaatatgttcatatatgggtcatgtctgttgacacttttccatctggagcaactgttccagccttcttccctgtgcctcatataacctaagtgt

SEQ ID NO: 340089 - DNA, 120 bp, Artificial Sequence
  ENSG00000137831_81 (sequence is synthesized)
gagtagagtgaaaaaaaatgtacactgctatgactgtactagccatctcacacagaatcagagaaaaatgatttctgaaatatatagatatttaaaataaaaagaattattgaatattaa

SEQ ID NO: 340090 - DNA, 120 bp, Artificial Sequence
  ENSG00000137831_82 (sequence is synthesized)
tattcatacctcaattttctggtgtataaagataaagcttctgtctccaaaaaggaatgatttctgtacaaagatgttcattgtacatgataagtgaataatatatttctcctacaacat

SEQ ID NO: 340091 - DNA, 120 bp, Artificial Sequence
  ENSG00000137831_83 (sequence is synthesized)
gaaacaattttcacaaatgtgtctttttagaggaagtgtaaattattctcatgctattgtggtaatgagaacatggttaaaaaacaacaacaacagccaccacaaaaaaaccaccctgaa

SEQ ID NO: 340092 - DNA, 120 bp, Artificial Sequence
  ENSG00000137834_0 (sequence is synthesized)
atatgatgggaggcagccaatgactccgcggcgctcctccgggggccctcagtgtgcgtttgaggagaacaaaaaagagagagagagccgagcgggggagcgatcgagggagctgagccg

SEQ ID NO: 340093 - DNA, 120 bp, Artificial Sequence
  ENSG00000137834_1 (sequence is synthesized)
agagaaagagccgccgggcgctgcctcgccagacctcgctgggaccccggggccaccgggaggcacttttgtggaggggggagggggggcgacctcggcagcctcggcgcacgaagcgtc

SEQ ID NO: 340094 - DNA, 120 bp, Artificial Sequence
  ENSG00000137834_2 (sequence is synthesized)
cgagggcagcgtggggcgggctgcgacctctgcatcggtggactgcatttttaattaaggattcccagcagctctttgggatttttacagcttccactcatgtgttgacacccgcgtcca

SEQ ID NO: 340095 - DNA, 120 bp, Artificial Sequence
  ENSG00000137834_3 (sequence is synthesized)
ggagaaactcgctccaagtgcatctagcgcctgggacctgagacggcgttggcctttcgtgcatgcaaatccagggatttaggttttgtttgggatttccttttctttctttcctttttt

SEQ ID NO: 340096 - DNA, 120 bp, Artificial Sequence
  ENSG00000137834_4 (sequence is synthesized)
ttttctttttgcagggagtaagaagggagctgggggtatcaacaagcctgcctttcggatcctgcgggaaaagcccatgtagttaagcgctttggtttaaaaaaaaggcaaggtaaaggc

SEQ ID NO: 340097 - DNA, 120 bp, Artificial Sequence
  ENSG00000137834_5 (sequence is synthesized)
agggctttccagacacatttaggggttcgcgcgagcgctttgtgctcatggaccagccgcacaacttttgaaggctcgccggcccatgtggggtctttctggcggcgcgccgcctgcagc

SEQ ID NO: 340098 - DNA, 120 bp, Artificial Sequence
  ENSG00000137834_6 (sequence is synthesized)
ccccctaaagcgcgggggctggagttgttgagcagccccgccgctgtggtccatgtagccgctggccgcgcgcggactgcggctcggcgtgcgcgtgttcccggccgtcccgcctcggcg

SEQ ID NO: 340099 - DNA, 120 bp, Artificial Sequence
  ENSG00000137834_7 (sequence is synthesized)
agctccctcatgttgtcgccctgcggcgccccttcgacgacaggctgtgcgcggtctgcacggcgctccgcggcggagcttcatgtggggctgcgacccgcgcagccggcgcctcgctga

SEQ ID NO: 340100 - DNA, 120 bp, Artificial Sequence
  ENSG00000137834_8 (sequence is synthesized)
gggaacggacccccggtaaccggagaccgcctcccccccacccctggcgccaaaggatatcgtatgttcaggtccaaacgctcggggctggtgcggcgactttggcgaagtcgtgtggtc

SEQ ID NO: 340101 - DNA, 120 bp, Artificial Sequence
  ENSG00000137834_9 (sequence is synthesized)
agtcgtgtggtccccgaccgggaggaaggcggcagcggcggcggcggtggcggcgacgaggatgggagcttgggcagccgagctgagccggccccgcgggcaagagagggcggaggctgc

SEQ ID NO: 340102 - DNA, 80 bp, Artificial Sequence
  ENSG00000137834_10 (sequence is synthesized)
gaggctgcggccgctccgaagtccgcccggtagccccgcggcggccccgggacgcagtgggacagcgaggcgcccagggc

SEQ ID NO: 340103 - DNA, 120 bp, Artificial Sequence
  ENSG00000137834_11 (sequence is synthesized)
gctgggagctccctgctggacgtggcggagccgggaggcccgggctggctgcccgagagtgactgcgagacggtgacctgctgtctcttttcggagcgggacgccgccggcgcgccccgg

SEQ ID NO: 340104 - DNA, 120 bp, Artificial Sequence
  ENSG00000137834_12 (sequence is synthesized)
gacgccagcgaccccctggccggggcggccctggagccggcgggcggcgggcggagtcgcgaagcgcgctcgcggctgctgctgctggagcaggaactcaaaaccgtcacgtactcgctg

SEQ ID NO: 340105 - DNA, 120 bp, Artificial Sequence
  ENSG00000137834_13 (sequence is synthesized)
actcgctgctgaagcggctcaaggagcgctcgctggacacgctgctggaggcggtggagtcccgcggcggcgtgccgggcggctgcgtgctggtgccgcgcgccgacctccgcctgggcg

SEQ ID NO: 340106 - DNA, 120 bp, Artificial Sequence
  ENSG00000137834_14 (sequence is synthesized)
gcgccgccgcagctgctgctcggccgcctctttcgctggcccgacctgcagcacgccgtggagctgaagcccctgtgcggctgccacagcttcgccgccgccgccgacggccctaccgtg

SEQ ID NO: 340107 - DNA, 120 bp, Artificial Sequence
  ENSG00000137834_15 (sequence is synthesized)
tccacattgtcttacactgaaacggaggctaccaactccctcatcactgctccgggtgaattctcagacgccagcatgtctccggacgccaccaagccgagccactggtgcagcgtggcg

SEQ ID NO: 340108 - DNA, 120 bp, Artificial Sequence
  ENSG00000137834_16 (sequence is synthesized)
tactgggagcaccggacgcgcgtgggccgcctctatgcggtgtacgaccaggccgtcagcatcttctacgacctacctcagggcagcggcttctgcctgggccagctcaacctggagcag

SEQ ID NO: 340109 - DNA, 120 bp, Artificial Sequence
  ENSG00000137834_17 (sequence is synthesized)
cgcagcgagtcggtgcggcgaacgcgcagcaagatcggcttcggcatcctgctcagcaaggagcccgacggcgtgtgggcctacaaccgcggcgagcaccccatcttcgtcaactccccg

SEQ ID NO: 340110 - DNA, 120 bp, Artificial Sequence
  ENSG00000137834_18 (sequence is synthesized)
acgctggacgcgcccggcggccgcgccctggtcgtgcgcaaggtgccccccggctactccatcaaggtgttcgacttcgagcgctcgggcctgcagcacgcgcccgagcccgacgccgcc

SEQ ID NO: 340111 - DNA, 120 bp, Artificial Sequence
  ENSG00000137834_19 (sequence is synthesized)
gacggcccctacgaccccaacagcgtccgcatcagcttcgccaagggctgggggccctgctactcccggcagttcatcacctcctgcccctgctggctggagatcctcctcaacaacccc

SEQ ID NO: 340112 - DNA, 120 bp, Artificial Sequence
  ENSG00000137834_20 (sequence is synthesized)
agatagtggcggccccggcgggaggggcgggtgggaggccgcggccaccgccacctgccggcctcgagaggggccgatgcccagagacacagcccccacggacaaaaccccccagatatc

SEQ ID NO: 340113 - DNA, 120 bp, Artificial Sequence
  ENSG00000137834_21 (sequence is synthesized)
aaaccccccagatatcatctacctagatttaatataaagttttatatattatatggaaatatatattatacttgtaattatggagtcatttttacaatgtaattatttatgtatggtgca

SEQ ID NO: 340114 - DNA, 120 bp, Artificial Sequence
  ENSG00000137834_22 (sequence is synthesized)
aaaacaagaaagacgcactttggcttataattctttcaatacagatatattttctttctcttcctccttcctcttccttactttttatatatatatataaagaaaatgatacagcagagc

SEQ ID NO: 340115 - DNA, 120 bp, Artificial Sequence
  ENSG00000137834_23 (sequence is synthesized)
taggtggaaaagcctgggtttggtgtatggtttttgagatattaatgcccagacaaaaagctaataccagtcactcgataataaagtattcgcattatagttttttttaaactgtcttct

SEQ ID NO: 340116 - DNA, 120 bp, Artificial Sequence
  ENSG00000137834_24 (sequence is synthesized)
ttttacaaagaggggcaggtagggcttcagcggatttctgacccatcatgtaccttgaaacttgacctcagttttcaagttttacttttattggataaagacagaacaaattgaaaaggg

SEQ ID NO: 340117 - DNA, 120 bp, Artificial Sequence
  ENSG00000137834_25 (sequence is synthesized)
aggaaagtcacatttactcttaagtaaaccagagaaagttctgttgttccttcctgcccatggctatggggtgtccagtggatagggatggcggtggggaaaagaatacactggccattt

SEQ ID NO: 340118 - DNA, 120 bp, Artificial Sequence
  ENSG00000137834_26 (sequence is synthesized)
atcctggacaagctcttccagtctgatggaggaggttcatgccctagcctagaaaggcccaggtccatgccccccatctttgagttatgagcaagctaaaagaagacactatttctcacc

SEQ ID NO: 340119 - DNA, 120 bp, Artificial Sequence
  ENSG00000137834_27 (sequence is synthesized)
attttgtggaaatggcctggggaacaaagactgaaatgggccttgagcccacctgctaccttgcagagaaccatctcgagccccgtagatctttttaggacctccacaggctatttccca

SEQ ID NO: 340120 - DNA, 120 bp, Artificial Sequence
  ENSG00000137834_28 (sequence is synthesized)
ccccccagccaaaaatagctcagaatctgcccatccagggctgtattaatgatttatgtaaaggcagatggtttatttctactttgtgaaagggaaaagttgaggttctggaaggttaaa

SEQ ID NO: 340121 - DNA, 120 bp, Artificial Sequence
  ENSG00000137834_29 (sequence is synthesized)
tgatttgctcatgagacaaaatcaaggttagaagttacatggaattgtaggaccagagccatatcattagatcagctttctgaagaatattctcaaaaaaagaaagtctccttggccaga

SEQ ID NO: 340122 - DNA, 120 bp, Artificial Sequence
  ENSG00000137834_30 (sequence is synthesized)
taactaagaggaatgtttcattgtatatcttttttcttggagatttatattaacatattaagtgctctgagaagtcctgtgtattatctcttgctgcataataaattatccccaaactta

SEQ ID NO: 340123 - DNA, 120 bp, Artificial Sequence
  ENSG00000137834_31 (sequence is synthesized)
tccctcatcactgctccgggtgaattctcagcagcagatgctgggataggaagccgagggaaccgtggtttggagtcctctgtcccctgcagttagaagctggtcatagggacccctaca

SEQ ID NO: 340124 - DNA, 120 bp, Artificial Sequence
  ENSG00000137834_32 (sequence is synthesized)
aggtctgtggggccctttgggagcatggctggtggcatggtggcctggtggcatgctggctgggactgacagcccctcaggctggggctgcataccttgtgggcatgtctggatggctgt

SEQ ID NO: 340125 - DNA, 120 bp, Artificial Sequence
  ENSG00000137834_33 (sequence is synthesized)
gtgtctccatctgagacattcttccctcaccccacatccatgccatggtagcagtcgccaaaatcatagccatttattgagtgtatgctatggccggcactccacttggccgctttatat

SEQ ID NO: 340126 - DNA, 120 bp, Artificial Sequence
  ENSG00000137834_34 (sequence is synthesized)
gcattctcttgggacagccatgggctgtttgtctccagggtttgtgctcttcatcactgttttgtcccccacttttctgcaagggccaaatgtaccttcaataaatgtatttcccctaaa

SEQ ID NO: 340127 - DNA, 120 bp, Artificial Sequence
  ENSG00000137834_35 (sequence is synthesized)
gctgcaacccctaccacttcagccggctctgcgggcccggtgagcgcgctgcgccggccgggggggccccgggtccccgtccccatccccttccgtgcccttctctctgtgacactgcgg

SEQ ID NO: 340128 - DNA, 120 bp, Artificial Sequence
  ENSG00000137834_36 (sequence is synthesized)
gtcggcgcagctgcgggtgctcccccgggtgcccttggagcgtgggagccaccaggggaggcgcctcagaccggccgaggggagtgggtgtcccagcacacacatcaagtggcaacttta

SEQ ID NO: 340129 - DNA, 120 bp, Artificial Sequence
  ENSG00000137834_37 (sequence is synthesized)
tctcaaggctccggtaaacttaaaagggtacatgtcgtagttttctctgtgcagtttcagggacatgatgtaggctccaacttcataggcagtgaaaggggagggcaggccaaggagaga

SEQ ID NO: 340130 - DNA, 120 bp, Artificial Sequence
  ENSG00000137834_38 (sequence is synthesized)
ccaaagaagtaggtgctatttcctcctacctcaattccggaatctaccccagtctgtgcccaggcttctagcatttgtatgcacgtgcccttacccacactgtgcttttctatgtccaag

SEQ ID NO: 340131 - DNA, 120 bp, Artificial Sequence
  ENSG00000137834_39 (sequence is synthesized)
tagctgtaagttgtgaaattgggtgtacacaaatcatagctagaatcaaaagtgttcgtcaaatgtccaatttgtgcctttgcatactttcgacaaagctttgcagggtaacccctctct

SEQ ID NO: 340132 - DNA, 120 bp, Artificial Sequence
  ENSG00000137834_40 (sequence is synthesized)
ggagtaaagagcaccctctttattccccacataatatcattccccacatcccttgggtgtcaagtgccagggtcttccatagtccttctcaagttttgtgttcagcttttgtatagagtt

SEQ ID NO: 340133 - DNA, 120 bp, Artificial Sequence
  ENSG00000137834_41 (sequence is synthesized)
tagggtcttggaggcatccgtgagtagatgaagaagccagatactggattacctctgagaactgccccccttctttgttctcctcttgggatttcctgcacacgccccaccctcagcctt

SEQ ID NO: 340134 - DNA, 120 bp, Artificial Sequence
  ENSG00000137834_42 (sequence is synthesized)
gcttacctggccaggccctggtgctcaggtgcagacaggcagaggccccagcaggtcaggaggctccagcaggccaggagcttgcagctgccttgctctgacctctgtcttgtggggaac

SEQ ID NO: 340135 - DNA, 120 bp, Artificial Sequence
  ENSG00000137834_43 (sequence is synthesized)
acacactttagcctgtagctagcctctgagggatgtatgggaatccattagctggcactggggttttgcaggggtgggactggcagggagtcacaggctcttgagcctgggagggctctg

SEQ ID NO: 340136 - DNA, 120 bp, Artificial Sequence
  ENSG00000137834_44 (sequence is synthesized)
aatccctccattctggcttccctggggagagtcagcacccaggctgggagcacagagagggtcaggttgtaggtctcctgactctgtgtggaaggggaaagtgggtctaggatggtgcat

SEQ ID NO: 340137 - DNA, 120 bp, Artificial Sequence
  ENSG00000137834_45 (sequence is synthesized)
ttgtcctaggtgttttgtttgagtgtggagtagtgtctggagaggaaaggaagtttcccctcagtgatgattcctgcatagagggcattgatgggggcaggtggggaggggaagtgttga

SEQ ID NO: 340138 - DNA, 120 bp, Artificial Sequence
  ENSG00000137834_46 (sequence is synthesized)
tgaggcaccctactcccctcatggtcactccagtcccaatttaggagctatgagcagcccctgatctgtggctcatgccaggctttctatgtactcttttccccttactgacagctttcc

SEQ ID NO: 340139 - DNA, 120 bp, Artificial Sequence
  ENSG00000137834_47 (sequence is synthesized)
ctggaagtgactttctcccctctgccaactgactccccactgcctctggggaaggagaccagtatttatggttgtcttgttcctggtgatttttttttttttaaagtaggtcccttccac

SEQ ID NO: 340140 - DNA, 120 bp, Artificial Sequence
  ENSG00000137834_48 (sequence is synthesized)
acttcagtgtgcagcagatgtttgttgagcaattactttgggccaggcactgtgctgggtgctgtggctaacagagtggaaatatgagtaggatctatgccctcaagaaacataatccca

SEQ ID NO: 340141 - DNA, 120 bp, Artificial Sequence
  ENSG00000137834_49 (sequence is synthesized)
ccagggatttatgggggagagatgggggaagaagggaagtgtgcagggccaggtcattgggtgtgaactaccagaaggctgtgggtgtgtatgtaataggatggcatgcaggagctccac

SEQ ID NO: 340142 - DNA, 120 bp, Artificial Sequence
  ENSG00000137834_50 (sequence is synthesized)
agctccaacctggagccggaccttggaggatgggtcagaggagagggagccagccgggtcagaggagagggagccagccagctcagagtcaaggtgccaggcacgttcaggtggttgggc

SEQ ID NO: 340143 - DNA, 120 bp, Artificial Sequence
  ENSG00000137834_51 (sequence is synthesized)
agggaggggaggagtgaaaaagttggagacgatggacaggaccactcctgctactactcctgggactaggagttggcttgggtgttggtttgcatttggtaggtttggagaggtacaggt

SEQ ID NO: 340144 - DNA, 120 bp, Artificial Sequence
  ENSG00000137834_52 (sequence is synthesized)
caagagatacctggcaagctgcagtagaacagttcttgaccatggacctggtcccaggctctgcccagctagtaacgtgcagcttgactttggatgagttacctcccttctcagccaccg

SEQ ID NO: 340145 - DNA, 120 bp, Artificial Sequence
  ENSG00000137834_53 (sequence is synthesized)
tgctggtcagtgggggtggctctaggaatattctccccatctaaatctggactaagccttgggacttgattcccctccttctcccagaaggaggcgctgttgccagggctgcagcacccc

SEQ ID NO: 340146 - DNA, 120 bp, Artificial Sequence
  ENSG00000137834_54 (sequence is synthesized)
aagtctcctcccttttctttgctagctgctagcctgtggggcccccattcagccaccctggggacagctgggaggaccgatggtccgggaagagtttccagtatgtgccaggttgatcct

SEQ ID NO: 340147 - DNA, 120 bp, Artificial Sequence
  ENSG00000137834_55 (sequence is synthesized)
cttgcccctggcctgagagctgggggagccctgggctgcccacccgcctccaccgcttggccgccagcttggctcccgtaactgggcgggcgcatagctggggctcagcggtgcgcgtcc

SEQ ID NO: 340148 - DNA, 120 bp, Artificial Sequence
  ENSG00000137834_56 (sequence is synthesized)
tgataaggagactgcgccttccagggctctgggaagagggccggggcaccgggcagacagatgcgcgcacacacatagcgcaggcacaccgctagcgagcaaagtacactggaacaccgg

SEQ ID NO: 340149 - DNA, 120 bp, Artificial Sequence
  ENSG00000137834_57 (sequence is synthesized)
cactgagggactcccacctggcagcagtcacctccgcaccttcaccgaccactgcagggagccccggtgacagaagaccccttcctgggcagtgtggacccctgctgttcagagcccact

SEQ ID NO: 340150 - DNA, 120 bp, Artificial Sequence
  ENSG00000137834_58 (sequence is synthesized)
ctccatcaacttgagttgtggccttggggctagtttcctctttgggcttcttttcctatatctaaagtaaagggttggagggaatctgcacaatctgagggctgatgtgcagattccagg

SEQ ID NO: 340151 - DNA, 120 bp, Artificial Sequence
  ENSG00000137834_59 (sequence is synthesized)
ccacacaggcctccgtcccctcccccactctgccccaggcttgtctcggaaactggggtcctcaggaggggacccacctcttctgggcatgggctaggggcctcctggcctcccagcccg

SEQ ID NO: 340152 - DNA, 120 bp, Artificial Sequence
  ENSG00000137834_60 (sequence is synthesized)
tgggagtcaggcccaactctgcctcccccttgggtgtctttctgtcccaggaaaagccagttcgctgagctcggtgggtgcctatgtggacggaaatgtggagaaatactttaatcacag

SEQ ID NO: 340153 - DNA, 120 bp, Artificial Sequence
  ENSG00000137834_61 (sequence is synthesized)
ctctaacctgtgtttatagagctcctttctcctgaaagtatccattaacttcggaataaatctcctgctctttgcttccccactttttttttttctgtaattatattcagtaaattacta

SEQ ID NO: 340154 - DNA, 120 bp, Artificial Sequence
  ENSG00000137834_62 (sequence is synthesized)
ttatccaaattgcgcccggggaagagagacagagcgagagagagagaacttctaaacgactggaggaggccgcctaggaaaacacagggttcccaggccaggactataggaattagaatg

SEQ ID NO: 340155 - DNA, 120 bp, Artificial Sequence
  ENSG00000137834_63 (sequence is synthesized)
ggctagaaagttttccttttatttggcctggcattatccctttgaaatgagatcaatttcaagttgggcttccaagcccccgccctgcccggctcagcggcccctagccctgcttgtctg

SEQ ID NO: 340156 - DNA, 120 bp, Artificial Sequence
  ENSG00000137834_64 (sequence is synthesized)
ctcctcctagctcctcctggaggtgaggaaggggtgataatgtgcagtttgcctcttgctggcgccagccggccgcgctgtttatctggctgccaggggaatctgggcaattaggctcag

SEQ ID NO: 340157 - DNA, 120 bp, Artificial Sequence
  ENSG00000137834_65 (sequence is synthesized)
gcggccttaaagtgccaggagctccttttctgcgtctcccatcatggggcttagggttgagtcttcaggttctgggggcaggaaggacgggcactcaggaggccccctccccatccacag

SEQ ID NO: 340158 - DNA, 120 bp, Artificial Sequence
  ENSG00000137834_66 (sequence is synthesized)
cccctctttgggaggggggaaacttggcaacccgggaggcatgtggatcttttcctaagcaagatgctgagctggaaagatgggggtgtaaggtaatgtcccaaactgaaactttgccag

SEQ ID NO: 340159 - DNA, 120 bp, Artificial Sequence
  ENSG00000137834_67 (sequence is synthesized)
gcactgggagaggctgtgaactcttttctggctttagaatttaggtctagatcccaaaaggctaagtaccccctgggggctaaccagaggcatgcctgggctgagctgaaccttctggtg

SEQ ID NO: 340160 - DNA, 120 bp, Artificial Sequence
  ENSG00000137834_68 (sequence is synthesized)
cactggcccctggctgactgctcttctgcaggaagttggaggagattcctgaagttgattcctcaggctggatgtccaagggggttggagtttctgatgtctttctgtctccctctcttt

SEQ ID NO: 340161 - DNA, 120 bp, Artificial Sequence
  ENSG00000137834_69 (sequence is synthesized)
tctttctctccctaccaggtccacttctttcagaggggcctgcggtgctctaaaagttctcctgttaaagtttagagcaaattggttattattttaaaatcaataaaacttttaaaagta

SEQ ID NO: 340162 - DNA, 120 bp, Artificial Sequence
  ENSG00000137841_0 (sequence is synthesized)
agaagcagtgaccacaggcccccatggcaggcagggcgggtgggaggagggtgatttacaaggcagatgggcctctggctacagctcagtcctgcactcagccagggccaccccaggggc

SEQ ID NO: 340163 - DNA, 120 bp, Artificial Sequence
  ENSG00000137841_1 (sequence is synthesized)
tataagagcaactagatttctggagcagctcggggatgggtgccatttgagcccagcttggctccccctcctggctggcctccttcctgcccttctgcctgcctgtgtctgctgagattc

SEQ ID NO: 340164 - DNA, 120 bp, Artificial Sequence
  ENSG00000137841_2 (sequence is synthesized)
tgcaaagaggaacgcttggcaccatgtctctgctcaaccctgtcctgctgccccccaaggtgaaggcctatctgagccaaggggagcgcttcatcaaatgggatgatgaaactacagttg

SEQ ID NO: 340165 - DNA, 120 bp, Artificial Sequence
  ENSG00000137841_3 (sequence is synthesized)
cctctccagttatcctccgtgtggatcctaagggctactacttatactggacgtatcaaagtaaggagatggagtttctggatatcaccagcatccgggatactcgctttgggaagtttg

SEQ ID NO: 340166 - DNA, 120 bp, Artificial Sequence
  ENSG00000137841_4 (sequence is synthesized)
ccaagatgcccaagagccagaagctccgggacgtcttcaacatggactttcctgataacagtttcctgctgaagacactcacggtggtgtccggcccggacatggtggacctcaccttcc

SEQ ID NO: 340167 - DNA, 120 bp, Artificial Sequence
  ENSG00000137841_5 (sequence is synthesized)
acaacttcgtctcctacaaggagaacgtgggcaaggcctgggctgaggacgtactggccctagtcaaacatccgctgacggccaacgcctcccgcagcaccttcctggacaagatccttg

SEQ ID NO: 340168 - DNA, 120 bp, Artificial Sequence
  ENSG00000137841_6 (sequence is synthesized)
tgaagctcaagatgcagctcaactctgaagggaagattccggtgaagaactttttccagatgtttcctgctgaccgcaagcgggtggaagctgctctcagtgcctgccacctccccaaag

SEQ ID NO: 340169 - DNA, 120 bp, Artificial Sequence
  ENSG00000137841_7 (sequence is synthesized)
gcaaaaatgacgccatcaatcctgaggacttcccagaacctgtctacaagagtttcctcatgagcctctgtcctcggccagaaatagatgagatcttcacttcttaccatgctaaggcca

SEQ ID NO: 340170 - DNA, 120 bp, Artificial Sequence
  ENSG00000137841_8 (sequence is synthesized)
aaccctacatgacgaaggagcacctgaccaaattcatcaaccagaaacagcgggactcccggcttaactccctgctgttcccgccagcacggcctgaccaggtgcagggcctcatcgaca

SEQ ID NO: 340171 - DNA, 120 bp, Artificial Sequence
  ENSG00000137841_9 (sequence is synthesized)
agtatgagcccagtggcatcaatgcacagaggggccagctgtcacctgaaggcatggtctggtttctctgtgggccagagaacagcgtgctggcccaggacaagctgctgctccaccacg

SEQ ID NO: 340172 - DNA, 120 bp, Artificial Sequence
  ENSG00000137841_10 (sequence is synthesized)
acatgacgcagccactcaatcattacttcatcaactcgtcccacaacacctacctgacagccggccagttctcaggcctctcctcggctgagatgtaccgccaggtgctgctctctggct

SEQ ID NO: 340173 - DNA, 120 bp, Artificial Sequence
  ENSG00000137841_11 (sequence is synthesized)
gccgttgcgtggagctagactgctggaaggggaaaccccctgacgaggagcccattatcacccatggcttcaccatgaccacagacatcttcttcaaagaagcaattgaggctattgcag

SEQ ID NO: 340174 - DNA, 120 bp, Artificial Sequence
  ENSG00000137841_12 (sequence is synthesized)
aaagcgcctttaagacctccccctatcccatcatcctgtcgtttgagaaccatgtggactcaccccgccagcaggctaagatggctgagtattgccggacgatctttggggatatgctgc

SEQ ID NO: 340175 - DNA, 120 bp, Artificial Sequence
  ENSG00000137841_13 (sequence is synthesized)
tcacagagcccctggaaaagttcccactaaaaccaggtgtccccctgcccagccctgaggatctcaggggcaagatcctcatcaagaacaagaagaaccagttttctggccccacctcct

SEQ ID NO: 340176 - DNA, 120 bp, Artificial Sequence
  ENSG00000137841_14 (sequence is synthesized)
ccagtaaggatactggtggggaggctgagggcagcagcccacccagtgcccctgcaggtgagggcacagtgtgggctggcgaggaagggactgagctggaggaggaggaggtggaagagg

SEQ ID NO: 340177 - DNA, 120 bp, Artificial Sequence
  ENSG00000137841_15 (sequence is synthesized)
aagaggaggaggagtcaggaaacctggatgaagaagagattaagaagatgcagtcggatgagggcacagcgggcctggaagtgacggcttatgaggagatgtccagcctagtcaattaca

SEQ ID NO: 340178 - DNA, 120 bp, Artificial Sequence
  ENSG00000137841_16 (sequence is synthesized)
tccagcccaccaagttcgtctcctttgagttctctgcccaaaagaaccgaagttatgtcatctcgtccttcacagagctcaaggcatatgacctgctctccaaggcctcggtgcagtttg

SEQ ID NO: 340179 - DNA, 120 bp, Artificial Sequence
  ENSG00000137841_17 (sequence is synthesized)
tggactacaacaagcgccagatgagccgcatttaccccaagggaacccgcatggactcctccaactacatgccccagatgttctggaatgctggatgccagatggttgccctcaacttcc

SEQ ID NO: 340180 - DNA, 120 bp, Artificial Sequence
  ENSG00000137841_18 (sequence is synthesized)
agacgatggacttgcccatgcagcagaacatggcagtatttgagttcaacgggcagagcggctacctcctcaagcatgagttcatgcgccggccggacaagcagttcaaccccttctcag

SEQ ID NO: 340181 - DNA, 120 bp, Artificial Sequence
  ENSG00000137841_19 (sequence is synthesized)
agaacgcagcgtgcgcacctatgtagaagtggagctgtttggccttcctggggaccccaagaggcgctatcgaactaagctgtcacccagtactaactccatcaatcctgtctggaagga

SEQ ID NO: 340182 - DNA, 120 bp, Artificial Sequence
  ENSG00000137841_20 (sequence is synthesized)
ggagccctttgtctttgagaagatcttgatgcctgagctggcctccctcagagtggctgtgatggaggaaggcaacaagtttcttggacaccgcatcatccccatcaatgccctaaattc

SEQ ID NO: 340183 - DNA, 120 bp, Artificial Sequence
  ENSG00000137841_21 (sequence is synthesized)
tgggtaccaccacctgtgcctgcacagtgagagcaacatgcccctcaccatgcctgcgctcttcatcttcctggagatgaaggactacatacctggtgcttgggcagatctcactgtggc

SEQ ID NO: 340184 - DNA, 120 bp, Artificial Sequence
  ENSG00000137841_22 (sequence is synthesized)
cctcgccaaccccattaagttcttcagtgcccatgacacgaagtctgtgaagctcaaggaggccatgggaggtctgcctgagaagcccttcccactggcgagtccagttgccagccaggt

SEQ ID NO: 340185 - DNA, 120 bp, Artificial Sequence
  ENSG00000137841_23 (sequence is synthesized)
caatggggcgttggccccaacgagcaatgggtcaccagcagccagggccggggccagggaagaggctatgaaagaagctgcggagccgcggaccgccagcctggaggagctccgggagct

SEQ ID NO: 340186 - DNA, 120 bp, Artificial Sequence
  ENSG00000137841_24 (sequence is synthesized)
aaagggcgtggtgaagctgcagcggcggcacgagaaggagctgcgagagttggagcggcgcggagcgcggcgctgggaggagctgctgcagcggggcgcggcgcagctggcggagctcgg

SEQ ID NO: 340187 - DNA, 120 bp, Artificial Sequence
  ENSG00000137841_25 (sequence is synthesized)
ccgggcgtggggggcgtcggggcctgcaagctcggtcccggcaagggctctcgcaagaagaggagcctgccccgcgaggagagcgccggagccgcgccgggcgagggccctgagggcgtg

SEQ ID NO: 340188 - DNA, 120 bp, Artificial Sequence
  ENSG00000137841_26 (sequence is synthesized)
cgtggacgggcgcgtgcgggagctgaaagacaggctggagctggagctgctgcggcagggcgaggagcagtacgagtgcgttctgaagcgcaaggagcagcacgtggccgagcaaatctc

SEQ ID NO: 340189 - DNA, 120 bp, Artificial Sequence
  ENSG00000137841_27 (sequence is synthesized)
caaaatgatggagctggccagagagaaacaggcggcagagctgaaggccctgaaggagacgtcggagaacgacaccaaagagatgaagaaaaagctggagacaaagagactggagcggat

SEQ ID NO: 340190 - DNA, 120 bp, Artificial Sequence
  ENSG00000137841_28 (sequence is synthesized)
ccagggcatgaccaaagtcaccacagacaagatggcccaggagaggttgaagagagagattaacaactcccacatccaggaagtagtgcaggtgatcaagcagatgacggagaacttgga

SEQ ID NO: 340191 - DNA, 120 bp, Artificial Sequence
  ENSG00000137841_29 (sequence is synthesized)
gaggcaccaggagaagctggaggagaagcaggcggcttgcctggaacagatacgggagatggaaaagcagttccagaaggaggcgctggcagagtacgaggccaggatgaagggtctgga

SEQ ID NO: 340192 - DNA, 120 bp, Artificial Sequence
  ENSG00000137841_30 (sequence is synthesized)
ggcagaggtgaaggagtcggtgagggcctgcctcaggacctgctttccctccgaggccaaggacaagcctgagagggcctgcgagtgccccccagagctgtgtgagcaggacccactcat

SEQ ID NO: 340193 - DNA, 120 bp, Artificial Sequence
  ENSG00000137841_31 (sequence is synthesized)
agcaaaggcagatgcccaggagagccgcctctgatgcccccatcccactgggacatttagcaaggaggttcagccccttctctgggatgtggttctattcccccaggaaaaaggagcccc

SEQ ID NO: 340194 - DNA, 120 bp, Artificial Sequence
  ENSG00000137841_32 (sequence is synthesized)
agccttctgaggctgtgggaacctgtggctgccttggacgctgcagccccctcctcaacggccaggccagagtctgagacaggacccaggcaccctcacggcagggcctctctggggcct

SEQ ID NO: 340195 - DNA, 120 bp, Artificial Sequence
  ENSG00000137841_33 (sequence is synthesized)
agaagtcttctcaagctgacttcctacctccccctccatctctagataagtgtcatatatttgttgagggcaaaagactatggactggaaggcagaaagtgggatcctggccccactctg

SEQ ID NO: 340196 - DNA, 120 bp, Artificial Sequence
  ENSG00000137841_34 (sequence is synthesized)
cctttcctattgagcaaccagctctgggctcagtttcctcacctggagggttggacccactcacctccactctagccccgaaccctcctgccccaggcttccaggccccatcaggcctgc

SEQ ID NO: 340197 - DNA, 120 bp, Artificial Sequence
  ENSG00000137841_35 (sequence is synthesized)
cctgagttggccttgtccactccttgaggcagatcctggcactacctcacagctccctggggacggccactccctggctgagggccctcccctcccctctgcctgtccggaacgggaggc

SEQ ID NO: 340198 - DNA, 120 bp, Artificial Sequence
  ENSG00000137841_36 (sequence is synthesized)
tgaaatggaaaagctgccttggccctgcttggctgagtcacaaggggcagtgggctcttgggtgctgttccaccctgaccctggctcacccctcttcctaggcctgggggcaggcagttc

SEQ ID NO: 340199 - DNA, 120 bp, Artificial Sequence
  ENSG00000137841_37 (sequence is synthesized)
ctaccatgtacccctctcaggctgcctgcctgacaaggtcagcatcatttgctctcctgaatttatgaggtttatttatttttctctttcctactcctattaaagaacctcgtcccagtg

SEQ ID NO: 340200 - DNA, 120 bp, Artificial Sequence
  ENSG00000137841_38 (sequence is synthesized)
agggccgagtcccaggctcggggagagagggctgtcaagccaccttcctgacctgctctccctacacagaagcccttcccactggcgagtccagttgccagccaggtcaatggggcgttg

SEQ ID NO: 340201 - DNA, 120 bp, Artificial Sequence
  ENSG00000137841_39 (sequence is synthesized)
actctgccaggtgcctcacatgagctgtcttgtataatcttttacagtccagtgagacaggtgctgctatccttatcttacaaattttaaaaactacctaatgttaaggaatttgcccaa

SEQ ID NO: 340202 - DNA, 120 bp, Artificial Sequence
  ENSG00000137841_40 (sequence is synthesized)
agtcttacaactagttagctgggattacagctggattctgacccagcttgcctgtctgtgttgtcctgattctctgccatccactcccacccagatgacggagaacttggagaggcacca

SEQ ID NO: 340203 - DNA, 120 bp, Artificial Sequence
  ENSG00000137841_41 (sequence is synthesized)
ggcctatctttaaaaggcccgagagccctctcctgcccacaactccatcttttcatccaaggactgtgttgcactcctgaccctcggctccctttggagagatggaccgagcctttgcct

SEQ ID NO: 340204 - DNA, 120 bp, Artificial Sequence
  ENSG00000137841_42 (sequence is synthesized)
cctgtggaggcccctgccttagtgagcctccgccctgcccgtcctactgtgctggctcctgaaggtaagtcacaggtgctgcttctgctgagctggggggacaggccgggccagccgcag

SEQ ID NO: 340205 - DNA, 120 bp, Artificial Sequence
  ENSG00000137841_43 (sequence is synthesized)
gcggcgcagctggcggagctcgggccaccgggcgtggggggcgtcggggcctgcaagctcggtcccggcaagggctctcgcaagaagagcaaatctccaaaatgatggagctggccagag

SEQ ID NO: 340206 - DNA, 120 bp, Artificial Sequence
  ENSG00000137841_44 (sequence is synthesized)
agaaacaggcggcagagctgaaggccctgaaggagacgtcggagaagtacgactgcctccctcccacacctgcttcgcctcccagcaagggctcagccgcacaaaacagctccttcatgc

SEQ ID NO: 340207 - DNA, 120 bp, Artificial Sequence
  ENSG00000137841_45 (sequence is synthesized)
ttgcctggaacagatacgggagatggaaaagcaggtaacaggttcactactgggacccccagcagaactgaatgggttccgggttgtaaaggggccttgccccagggagctgccagtgag

SEQ ID NO: 340208 - DNA, 120 bp, Artificial Sequence
  ENSG00000137841_46 (sequence is synthesized)
agggtaggggaagggggccatcatccttcactgtggggtcccgaggccctttcaaatgaggcagctctgcagatctccgcctggttaggatcccctttcctgagaggctcctgatgggct

SEQ ID NO: 340209 - DNA, 120 bp, Artificial Sequence
  ENSG00000137841_47 (sequence is synthesized)
agtaaggtgagaaaacccttgtgtgccatggccctggactcctgcttatcattgaggccagacagccccctggctgcaccaaggtggaggcatggatgctggggagtacagaatggcctg

SEQ ID NO: 340210 - DNA, 120 bp, Artificial Sequence
  ENSG00000137841_48 (sequence is synthesized)
aacgagcaatgggtcaccaggtatgagcttcggtccgcacacctactgggggcacctccacctctgcacccacaggcacttccctttaaaaaatttcacctagggaaagtgcggggcagg

SEQ ID NO: 340211 - DNA, 120 bp, Artificial Sequence
  ENSG00000137841_49 (sequence is synthesized)
gggcacatactgcgactcccagggggcggtgtggaggaggcgaacggagccaaggggccccccagagcacctgacagcccagcccgtggctcttgcagcagccagggccggggccaggga

SEQ ID NO: 340212 - DNA, 120 bp, Artificial Sequence
  ENSG00000137841_50 (sequence is synthesized)
agaggctatgaaagaagctgcgggtaaggcctgctgagcccggtgatctcggggatgagcctggggcgggtccggggctccttgggggttggacgggcaggacggcctggccggtgttgc

SEQ ID NO: 340213 - DNA, 120 bp, Artificial Sequence
  ENSG00000137841_51 (sequence is synthesized)
tcccagcctccctgacctcctggcccctgatctgggtcatcaagggcacaaaaggatgcataatagggttggtgctgagcggctgaaccccatccccgcttttgctccccgcagaccccg

SEQ ID NO: 340214 - DNA, 120 bp, Artificial Sequence
  ENSG00000137841_52 (sequence is synthesized)
gccaagatgcagacttctgctctgtacagaaaagcatttttccctgtctttttagttaaataattaatttttaattacaagttgtaagcagggtcaccccatgaagcaacttgtgtgaat

SEQ ID NO: 340215 - DNA, 120 bp, Artificial Sequence
  ENSG00000137841_53 (sequence is synthesized)
tacaaaaaggagccctctgggctgatatggccctgagctaggcttcaagcctggccaatggagcgaatctcagcccctgtccctgcttggccagtgctcttgtgtgggtcccagcctata

SEQ ID NO: 340216 - DNA, 120 bp, Artificial Sequence
  ENSG00000137841_54 (sequence is synthesized)
ccccatggagtattttctcctggtaagaatttggaacgttataaataaataaaaccacgacccccattgatcacctgcccacatgaatcccaggaggagcatttaccccacagccacagc

SEQ ID NO: 340217 - DNA, 120 bp, Artificial Sequence
  ENSG00000137841_55 (sequence is synthesized)
tctgcagagttggtgactccttgatgcagtcagtcacagggatccaaatgtggcgttggggagaggtaggaatgggctcctgcggctcccctacagccagcaacacttacctgtggtcag

SEQ ID NO: 340218 - DNA, 120 bp, Artificial Sequence
  ENSG00000137841_56 (sequence is synthesized)
cacacatccaccctccctctctcctgctgcctgagctcctcccttggctaagtcctccttatctatctgctttccttgtgtctcagtagaggctactgacccaactttgcttggagctga

SEQ ID NO: 340219 - DNA, 120 bp, Artificial Sequence
  ENSG00000137841_57 (sequence is synthesized)
agctccagagacagggaggggtttggggagatccagttagactctcctgctcagaccctctgctccaaactaagactgatgttggccttccagtgtgattctgaaagacatttaatgttt

SEQ ID NO: 340220 - DNA, 120 bp, Artificial Sequence
  ENSG00000137841_58 (sequence is synthesized)
tttttggggggggaaggaatgcaaaggtgcagaatccctgaataccacaaatgtacttttcatttctatttctatagatttgcctattctggtggtaaagtaaatgaaatcataaatata

SEQ ID NO: 340221 - DNA, 120 bp, Artificial Sequence
  ENSG00000137841_59 (sequence is synthesized)
ggagaagcaggcggcttgcctggaacagatacgggagatggaaaagcaggaaaaaggagccccagccttctgaggctgtgggaacctgtggctgccttggacgctgcagccccctcctca

SEQ ID NO: 340222 - DNA, 120 bp, Artificial Sequence
  ENSG00000137841_60 (sequence is synthesized)
tgtcttcttaagaggtggaacgtctcgcacccagaaccgagattctgtctctctcttacccgctgccggcaacaaaatgtgcggctcatgaaaagtctcagtaaattctgcagctgataa

SEQ ID NO: 340223 - DNA, 120 bp, Artificial Sequence
  ENSG00000137841_61 (sequence is synthesized)
ccaccgggcgtggggggcgtcggggcctgcaagctcggtcccggcaagggctctcgcaagaagaggtaaggctcgtggcggtgccctgccctctgcagcgcgggtggcgcaggatctcag

SEQ ID NO: 340224 - DNA, 120 bp, Artificial Sequence
  ENSG00000137841_62 (sequence is synthesized)
tgaggctgtgggaacctgtggctgcctgcctgacaaggtcagcatcatttgctctcctgaatttatgaggtttatttatttttctctttcctactcctattaaagaacctcgtcccagtg

SEQ ID NO: 340225 - DNA, 120 bp, Artificial Sequence
  ENSG00000137842_0 (sequence is synthesized)
acttgcgcggccagagaggggcaggtgctgggcggcggctgacgggcgcagcaccctaggcccagtgtctggctccagccccgcatccggcgccggccccgcatccagctctggccctgc

SEQ ID NO: 340226 - DNA, 120 bp, Artificial Sequence
  ENSG00000137842_1 (sequence is synthesized)
gacaatagagtccggaagtgcaggcaaagcggctcccgggagcgccgcgcggtcctgcgcgggatcagcgagggccgcgccccggcgggcgggcggcatggctgcagtgctggctctcag

SEQ ID NO: 340227 - DNA, 120 bp, Artificial Sequence
  ENSG00000137842_2 (sequence is synthesized)
catggctgcagtgctggctctcagggtggtcgcggggttggcggccgcagcgctggtggccatgctcttggagcactacggcctggcgggccagccctcgccgctgccgcgccccgcgcc

SEQ ID NO: 340228 - DNA, 120 bp, Artificial Sequence
  ENSG00000137842_3 (sequence is synthesized)
agggcccggagacagcaacatcttctggggcctgcagatatccgacattcacctgagcaggtttcgagatccaggcagagcggtagacttagagaaattctgttctgaaactattgacat

SEQ ID NO: 340229 - DNA, 120 bp, Artificial Sequence
  ENSG00000137842_4 (sequence is synthesized)
cattcaaccagctctcgtcctagcaacaggagacctgacagatgccaaaacaaaggaacagttgggatccaggcagcatgaggtagaatggcaaacctaccagggtattctgaagaagac

SEQ ID NO: 340230 - DNA, 120 bp, Artificial Sequence
  ENSG00000137842_5 (sequence is synthesized)
aagagtcatggaaaaaaccaagtggctggatatcaaaggaaatcatgatgcattcaatattccaagtctggacagcatcaagaattattacaggaaatattctgctgtacgtagagatgg

SEQ ID NO: 340231 - DNA, 120 bp, Artificial Sequence
  ENSG00000137842_6 (sequence is synthesized)
ctctttccattatgtccacagtactccctttggcaactattcgttcatctgtgtagatgccactgtaaatccagggcctaagagaccctataatttctttggaattttagataagaaaaa

SEQ ID NO: 340232 - DNA, 120 bp, Artificial Sequence
  ENSG00000137842_7 (sequence is synthesized)
gatggaggagctcttattactggccaaggaaagcagtcggagcaaccatacaatttggtttggacactttacaacatccactattctttctccatcaccaggaatccggtcaataatgag

SEQ ID NO: 340233 - DNA, 120 bp, Artificial Sequence
  ENSG00000137842_8 (sequence is synthesized)
ttcggctatagcttatttgtgtggacatctccatacacttggtggactgatgcctgttttgcacactcgtcacttccagggcactttggaacttgaggtgggagactggaaggataatag

SEQ ID NO: 340234 - DNA, 120 bp, Artificial Sequence
  ENSG00000137842_9 (sequence is synthesized)
gaggtaccggatttttgcttttgatcacgacctctttagctttgcagatttgatctttgggaagtggcctgtggttcttatcaccaatcctaaatcactcctttatagttgtggtgaaca

SEQ ID NO: 340235 - DNA, 120 bp, Artificial Sequence
  ENSG00000137842_10 (sequence is synthesized)
tgaaccactagaaagacttcttcactcaacacacatcagagtcttggccttttccttatcctccattacttctgtcacagttaagattgatggagttcatttaggccaggctgttcatgt

SEQ ID NO: 340236 - DNA, 120 bp, Artificial Sequence
  ENSG00000137842_11 (sequence is synthesized)
gtaatcgtccaggattctgctggaagaagtaagagtgttcaccacatattttctgttcaagagaataatcatctcagttttgatcccctggcatcatttattctccgtactgatcactac

SEQ ID NO: 340237 - DNA, 120 bp, Artificial Sequence
  ENSG00000137842_12 (sequence is synthesized)
atcatggcccgggtcctttttgtgctgattgtgctgagccagctcaccattctcattatttttagatatcgaggatacccagagcttaaagaaccttcagggtttataaatctgacctca

SEQ ID NO: 340238 - DNA, 120 bp, Artificial Sequence
  ENSG00000137842_13 (sequence is synthesized)
ttttctcttcatgtcttgagcaaaataaacatcttctactattctgtgttgttgttgaccctgtatacagtgctgggtccatggttttttggtgaaatcattgatggcaaatttggttgc

SEQ ID NO: 340239 - DNA, 120 bp, Artificial Sequence
  ENSG00000137842_14 (sequence is synthesized)
tgcttttcctttgggatatttgttaatggacatttcctacaaggcagcataacatttataattggaattctccagctggcgttttttaacatccccttgatggcttacatgtgttggagc

SEQ ID NO: 340240 - DNA, 120 bp, Artificial Sequence
  ENSG00000137842_15 (sequence is synthesized)
ttgctgcagcggtgctttggtcacaacttcaggtctcatctccatcaaagaaaatacttgaaaattatgcctgttcacctacttatgctactgctgtacatctggcaggtttattcctgc

SEQ ID NO: 340241 - DNA, 120 bp, Artificial Sequence
  ENSG00000137842_16 (sequence is synthesized)
tactttctttatgcaacatacggcaccctagcttttttattctcccctttgcggacctggttgacactgctgacacctgttctcattcgttatgtgtggacactgaactccaccaagttt

SEQ ID NO: 340242 - DNA, 120 bp, Artificial Sequence
  ENSG00000137842_17 (sequence is synthesized)
ggaatcttcatggtgcagttaaaaagccacctgagctcctgaaggccatgtctcaccactggcagctgggcagaagcccagcctctgtgtctgtagcccaggcctctaccccagtagcag

SEQ ID NO: 340243 - DNA, 120 bp, Artificial Sequence
  ENSG00000137842_18 (sequence is synthesized)
gtggagggccaggattggtgggtgagctttagggagcagctgctcgtttggagtcctggacgttggagggattacccactactgatacctgcagaatggactgcagaaaagtctcaaaaa

SEQ ID NO: 340244 - DNA, 120 bp, Artificial Sequence
  ENSG00000137842_19 (sequence is synthesized)
taatgcctttattccttccctccctaaggaggcaaagagttgatttacctttgtgaagagaaaacccttatctaggacatccacagggtagaggttgggtgtgtgtacgggagtgtctga

SEQ ID NO: 340245 - DNA, 120 bp, Artificial Sequence
  ENSG00000137842_20 (sequence is synthesized)
ggcccagtgtgttttttagggttaccccatgtaaagcacttaccgctgtgcttggaattcagcagctgtcaaaggtgcaatttcaggggcagggaacctttgaggatctgggcccgaccc

SEQ ID NO: 340246 - DNA, 120 bp, Artificial Sequence
  ENSG00000137842_21 (sequence is synthesized)
tcactacccctgagatattagttcccaggcctgttttcccacaggattgtgggctctctgcttccttagtcggaagtgttttcaactaatcaaataaatgaatgaatgatgaataagaaa

SEQ ID NO: 340247 - DNA, 120 bp, Artificial Sequence
  ENSG00000137842_22 (sequence is synthesized)
gtgagccatgatcgcgccactgcattcctgcctgggggatagagaccctgtctgagaagtgaaggaaaggggaatggtagagggaaggggaagagaaagaaaagaaaacctatggaggta

SEQ ID NO: 340248 - DNA, 120 bp, Artificial Sequence
  ENSG00000137842_23 (sequence is synthesized)
cgttaataatcagaaggggccagaggaagccacctgacacatttgtgagacaatttaaaaggcgttctcatacattctcactttgatacaacaaccctgcaaagtgcgcacggaaggtgt

SEQ ID NO: 340249 - DNA, 120 bp, Artificial Sequence
  ENSG00000137842_24 (sequence is synthesized)
atctcactacaccaagaattctaggtacttagtatgccctcactaaatctgcaaatgattgataaatactgttccactggattttgatttctttttgaacatttaatggactccctaaaa

SEQ ID NO: 340250 - DNA, 120 bp, Artificial Sequence
  ENSG00000137842_25 (sequence is synthesized)
gagccgtcttacttctgaacttggtgaacttgtatttggttattgaatgagtttgcatgagtctttggggacaatgggagaaaaactttgaaatttcatcagtttatccattgtggatct

SEQ ID NO: 340251 - DNA, 120 bp, Artificial Sequence
  ENSG00000137842_26 (sequence is synthesized)
agtttagtatatttctgtcagatcagcaaatctcgttttcaaaggaaggtaaaatctagcgtattagggaaggaattttaaagcattgtctttttattacactaacaccctcctgtcttc

SEQ ID NO: 340252 - DNA, 120 bp, Artificial Sequence
  ENSG00000137842_27 (sequence is synthesized)
caacatagcaagaccccatctctaaaataaatttaaatattagccaggcgtagtggtgtgtgcctatagtcctgcagctgtatcaggaagatcacttgaccacagaagatgaaagctgca

SEQ ID NO: 340253 - DNA, 120 bp, Artificial Sequence
  ENSG00000137842_28 (sequence is synthesized)
tatcaggaagatcacttgaccacagaagatgaaagctgcagtgagctagctatgattgcaccactgcacgccagcctggacaacagagagaaaccttgaaaaacaacaacaacaacaaca

SEQ ID NO: 340254 - DNA, 120 bp, Artificial Sequence
  ENSG00000137842_29 (sequence is synthesized)
acaacaataacaacaacaacaaagtgtagttattagaaacctattcttattttaatttagaacattataaatatttccatgtacatgaaagttacttttcttctgtggttattactagga

SEQ ID NO: 340255 - DNA, 120 bp, Artificial Sequence
  ENSG00000137842_30 (sequence is synthesized)
cgtaaaatattttaaagaggtttattctaagccaatatgaatgaccatggcccagggaaaacacaaactcaagaagccttgagtaaatggtcctgaggcagttggattacagttgggatt

SEQ ID NO: 340256 - DNA, 120 bp, Artificial Sequence
  ENSG00000137842_31 (sequence is synthesized)
tctcacagtcattttgctctctcccacaagtgcacagattatctctgccacagaatgggggaagggtggtgtaggcaatgaagtactgtgttgtctacgctttttagtgcctctttcctt

SEQ ID NO: 340257 - DNA, 120 bp, Artificial Sequence
  ENSG00000137842_32 (sequence is synthesized)
gtgattatgtagttgatatacaaagtaatgactgtgggccttcaagaagaggttaaaatacattcattatattaacgagtgcatcttagaaagatttctttcaaaaagtagttgaagttt

SEQ ID NO: 340258 - DNA, 120 bp, Artificial Sequence
  ENSG00000137842_33 (sequence is synthesized)
ttttgctttaaggagtaaatctcaatcatctggaaatttaacttctgtggaatacctctttacatcttaaaggaaatgttaatgcattatattgaggttattattgcaatggaattttca

SEQ ID NO: 340259 - DNA, 120 bp, Artificial Sequence
  ENSG00000137842_34 (sequence is synthesized)
aaaatgtgagtgtgctttttttgtttctagaatctataagacacatatctgttctaggtatagtgtctactaagacaatttcacaatccaaaaaatagttggttagcaaggatatcaagt

SEQ ID NO: 340260 - DNA, 120 bp, Artificial Sequence
  ENSG00000137842_35 (sequence is synthesized)
gagactagcaaagagggaaggctatgaaataaaatgcttatagatggctagtctcatatctctgctttattcctataaatgtatctcatgatatatgtaatcagaattatagttatttaa

SEQ ID NO: 340261 - DNA, 120 bp, Artificial Sequence
  ENSG00000137842_36 (sequence is synthesized)
gccagatacaataaagacaagagtttttttcccccttcaggaacctagattttccaacttagattgtaaaattataaagtgggacatttacatatactaaaggtcacatctctgaaatac

SEQ ID NO: 340262 - DNA, 120 bp, Artificial Sequence
  ENSG00000137843_0 (sequence is synthesized)
gtgccgtccccctgctggggacagcagctgggtccagcagagagctggctgggggcttgacaggagtttatcctaactgatgctgggtgggcgcaggccctgagatgggcgtcagggaga

SEQ ID NO: 340263 - DNA, 120 bp, Artificial Sequence
  ENSG00000137843_1 (sequence is synthesized)
ggggacgccagacacacggcctgagcagggtgaggagcagctgccagccccggcaggcccaggccctgtctgggtgcacaggacagagacacagcaagatgcccagggagtgccgcttcc

SEQ ID NO: 340264 - DNA, 120 bp, Artificial Sequence
  ENSG00000137843_2 (sequence is synthesized)
tgggctagagacaagcaccagcctgcagtggagaacgcaggaccccgctgcccagaaggagcagccacggcctgcggaggactggcccagcaaggtcccaggtcttccctctcctcagcg

SEQ ID NO: 340265 - DNA, 120 bp, Artificial Sequence
  ENSG00000137843_3 (sequence is synthesized)
cctaagagagaggcccagtgcgggtgaggagtcgcgaggaagaggcggaaggcgccggaaggcaccatgttccgcaagaaaaagaagaaacgccctgagatctcagcgccacagaacttc

SEQ ID NO: 340266 - DNA, 120 bp, Artificial Sequence
  ENSG00000137843_4 (sequence is synthesized)
cagcaccgtgtccacacctccttcgaccccaaagaaggcaagtttgtgggcctccccccacaatggcagaacatcctggacacactgcggcgccccaagcccgtggtggacccttcgcga

SEQ ID NO: 340267 - DNA, 120 bp, Artificial Sequence
  ENSG00000137843_5 (sequence is synthesized)
atcacacgggtgcagctccagcccatgaagacagtggtgcggggcagcgcgatgcctgtggatggctacatctcggggctgctcaacgacatccagaagttgtcagtcatcagctccaac

SEQ ID NO: 340268 - DNA, 120 bp, Artificial Sequence
  ENSG00000137843_6 (sequence is synthesized)
accctgcgtggccgcagccccaccagccggcggcgggcacagtccctggggctgctgggggatgagcactgggccaccgacccagacatgtacctccagagcccccagtctgagcgcact

SEQ ID NO: 340269 - DNA, 120 bp, Artificial Sequence
  ENSG00000137843_7 (sequence is synthesized)
gacccccacggcctctacctcagctgcaacgggggcacaccagcaggccacaagcagatgccgtggcccgagccacagagcccacgggtcctgcccaatgggctggctgcaaaggcacag

SEQ ID NO: 340270 - DNA, 120 bp, Artificial Sequence
  ENSG00000137843_8 (sequence is synthesized)
tccctgggccccgccgagtttcagggtgcctcgcagcgctgtctgcagctgggtgcctgcctgcagagctccccaccaggagcctcgccccccacgggcaccaataggcatggaatgaag

SEQ ID NO: 340271 - DNA, 120 bp, Artificial Sequence
  ENSG00000137843_9 (sequence is synthesized)
gctgccaagcatggctctgaggaggcccggccacagtcctgcctggtgggctcagccacaggcaggccaggtggggaaggcagccctagccctaagacccgggagagcagcctgaagcgc

SEQ ID NO: 340272 - DNA, 120 bp, Artificial Sequence
  ENSG00000137843_10 (sequence is synthesized)
aggctattccgaagcatgttcctgtccactgctgccacagcccctccaagcagcagcaagccaggccctccaccacagagcaagcccaactcctctttccgaccgccgcagaaagacaac

SEQ ID NO: 340273 - DNA, 120 bp, Artificial Sequence
  ENSG00000137843_11 (sequence is synthesized)
cccccaagcctggtggccaaggcccagtccttgccctcggaccagccggtggggaccttcagccctctgaccacttcggataccagcagcccccagaagtccctccgcacagccccggcc

SEQ ID NO: 340274 - DNA, 120 bp, Artificial Sequence
  ENSG00000137843_12 (sequence is synthesized)
acaggccagcttccaggccggtcttccccagcgggatccccccgcacctggcacgcccagatcagcaccagcaacctgtacctgccccaggaccccacggttgccaagggtgccctggct

SEQ ID NO: 340275 - DNA, 120 bp, Artificial Sequence
  ENSG00000137843_13 (sequence is synthesized)
ggtgaggacacaggtgttgtgacacatgagcagttcaaggctgcgctcaggatggtggtggaccagggtgacccccggctgctgctggacagctacgtgaagattggcgagggctccacc

SEQ ID NO: 340276 - DNA, 120 bp, Artificial Sequence
  ENSG00000137843_14 (sequence is synthesized)
ggcatcgtctgcttggcccgggagaagcactcgggccgccaggtggccgtcaagatgatggacctcaggaagcagcagcgcagggagctgctcttcaacgaggtggtgatcatgcgggac

SEQ ID NO: 340277 - DNA, 120 bp, Artificial Sequence
  ENSG00000137843_15 (sequence is synthesized)
taccagcacttcaacgtggtggagatgtacaagagctacctggtgggcgaggagctgtgggtgctcatggagttcctgcagggaggagccctcacagacatcgtctcccaagtcaggctg

SEQ ID NO: 340278 - DNA, 120 bp, Artificial Sequence
  ENSG00000137843_16 (sequence is synthesized)
gtgaggctgtgctgcaggccctggcctacctgcatgctcagggtgtcatccaccgggacatcaagagtgactccatcctgctgaccctcgatggcagggtgaagctctcggacttcggat

SEQ ID NO: 340279 - DNA, 120 bp, Artificial Sequence
  ENSG00000137843_17 (sequence is synthesized)
tctgtgctcagatcagcaaagacgtccctaagaggaagtccctggtgggaaccccctactggatggctcctgaagtgatctccaggtctttgtatgccactgaggtggatatctggtctc

SEQ ID NO: 340280 - DNA, 120 bp, Artificial Sequence
  ENSG00000137843_18 (sequence is synthesized)
tgggcatcatggtgattgagatggtagatggggagccaccgtacttcagtgactccccagtgcaagccatgaagaggctccgggacagccccccacccaagctgaaaaactctcacaagg

SEQ ID NO: 340281 - DNA, 120 bp, Artificial Sequence
  ENSG00000137843_19 (sequence is synthesized)
tctccccagtgctgcgagacttcctggagcggatgctggtgcgggacccccaagagagagccacagcccaggagctcctagaccaccccttcctgctgcagacagggctacctgagtgcc

SEQ ID NO: 340282 - DNA, 120 bp, Artificial Sequence
  ENSG00000137843_20 (sequence is synthesized)
tggtgcccctgatccagctctaccgaaagcagacctccacctgctgagcccaccccaagtatgcctgccacctacgcccacaggcagggcacactgggcagccagcctgccggcaggact

SEQ ID NO: 340283 - DNA, 120 bp, Artificial Sequence
  ENSG00000137843_21 (sequence is synthesized)
tgcctgcctcctcctctcagtattctctccaaagattgaaatgtgaagccccagccccaccctctgcccttcagcctactgggccaggccggacctgccccctcagtgtctctccctccc

SEQ ID NO: 340284 - DNA, 120 bp, Artificial Sequence
  ENSG00000137843_22 (sequence is synthesized)
gagtccccagatggagacccctttctacaggatgaccccttgatatttgcacagggatatttctaagaaacgcagaggccagcgttcctggcctctgcagccaacacagtagaaaaggct

SEQ ID NO: 340285 - DNA, 120 bp, Artificial Sequence
  ENSG00000137843_23 (sequence is synthesized)
gctgtggttttttaaaggcagttgtccactagtgtcctaggccactgcagagggcagactgctggtctccacagatacctgctgttctcagctccagcttcaaacctcgagtctcgagag

SEQ ID NO: 340286 - DNA, 120 bp, Artificial Sequence
  ENSG00000137843_24 (sequence is synthesized)
ggccacggggtggtttttatgaccggaatcccgcttcctccctcacgtctgatgtcctgaaggtgcagtcccacctgtacagcccctccccgcccagaactgtgaatggcctgctccagg

SEQ ID NO: 340287 - DNA, 120 bp, Artificial Sequence
  ENSG00000137843_25 (sequence is synthesized)
ccatggctgggggcagggagtgaggggacaatttctgagtgaaagagaaagaatggggtcggtggtgaaggtgctctcactttacagaatggagagaacatcgtgtgtgtgtgtgtgtgt

SEQ ID NO: 340288 - DNA, 120 bp, Artificial Sequence
  ENSG00000137843_26 (sequence is synthesized)
gtgtgtgtgtgtgtgtgtgtgtaaggggaggaaagccaccttgacagcccaggtccctccaggtcacccacagccagtttcaggaaggctgcccctctctcccactaagttctggcctga

SEQ ID NO: 340289 - DNA, 120 bp, Artificial Sequence
  ENSG00000137843_27 (sequence is synthesized)
agggacctgctttcttggcctggcttccacctctccactcctgtgtctacctggccagtggagtggtccatgctaagtctaacactcctgggagctcaggaggcttctgagcttctcctg

SEQ ID NO: 340290 - DNA, 120 bp, Artificial Sequence
  ENSG00000137843_28 (sequence is synthesized)
tactgtgcatcgtgagggccagagacaggaatgtaaggattggcaactgtgttacctttcaagtttatctcaataaccaggtcatcagggacccattgttctcttcagaaccctatctgg

SEQ ID NO: 340291 - DNA, 120 bp, Artificial Sequence
  ENSG00000137843_29 (sequence is synthesized)
gagagaaggcgaaccacctccgggtttccatcatgtcaaggtcacaggcatccatgtgtgcaaaccatctgccccagctgcctccacagactgctgtctccttgtcctcctcggccctgc

SEQ ID NO: 340292 - DNA, 120 bp, Artificial Sequence
  ENSG00000137843_30 (sequence is synthesized)
cccacttcagggctgctgtgagatggaattccaggaaagaacttcaggtgtctggaccctttctatctagataatatttttagattcttctgctccctagtgacctacctgggggcaaag

SEQ ID NO: 340293 - DNA, 120 bp, Artificial Sequence
  ENSG00000137843_31 (sequence is synthesized)
aaattgcaaggacttttttttaagggtcagagttttcaaaacaaaagcatcttccctagaaatttttgtgaattgtttgcacttgtgcctgttttaaattaaattgagtgttcaaagcca

SEQ ID NO: 340294 - DNA, 120 bp, Artificial Sequence
  ENSG00000137843_32 (sequence is synthesized)
attttgggagctggaaacttggagctgcacctgagtcccgccccttctagctctcccctccctaccttgggctccaggaagatgggacttgctgtgagtctgctgccaccccctaaagat

SEQ ID NO: 340295 - DNA, 120 bp, Artificial Sequence
  ENSG00000137843_33 (sequence is synthesized)
atggaagacgctgtgggggccagaagtgcccggggggctgtggcagcaggcagagtgcaatagcagatatggtggtcaggctgcctgtgtgtgtcctctggaggtgttgggacagaaggg

SEQ ID NO: 340296 - DNA, 120 bp, Artificial Sequence
  ENSG00000137843_34 (sequence is synthesized)
cagtcttgtccgagctgactggagtcctcccgggctggctctgaactcatctcccacggggatgtttcggtaaaggagtggcttctggggtcggagtggcatttggagagcgaggctgga

SEQ ID NO: 340297 - DNA, 120 bp, Artificial Sequence
  ENSG00000137843_35 (sequence is synthesized)
atcgcggtcaggtgaagccggcgctgcaccaacgtgtaagcgcggcccctcctcggcgttcccgcgccgaggtccctcccgcggagggcgggcccggctcccacgacctcttcgagcgtt

SEQ ID NO: 340298 - DNA, 120 bp, Artificial Sequence
  ENSG00000137843_36 (sequence is synthesized)
ccccttctccccgtaagccccgcaaggagcctgccgcctcttgcacctgagccaggagttcagtcgggaggcgggcgcggagcggttcccagcgcctggacgtcagccagtcgcaacacc

SEQ ID NO: 340299 - DNA, 120 bp, Artificial Sequence
  ENSG00000137843_37 (sequence is synthesized)
cgcgggaacacttgctacatttgccataatgcatttctgatctgtttccgcgcaggcctgcggaggactggcccagcaaggtcccaggtcttccctctcctcagcgcctaagagagaggc

SEQ ID NO: 340300 - DNA, 88 bp, Artificial Sequence
  ENSG00000137843_38 (sequence is synthesized)
gtactaaggcaccatgttccgcaagaaaaagaagaaacgccctgagatctcagcgccacagaacttccagcaccgtgtccacacctcc

SEQ ID NO: 340301 - DNA, 120 bp, Artificial Sequence
  ENSG00000137843_39 (sequence is synthesized)
aaaaccagctgagaccagcacctgccagatctgaatgcgcagctccaagttctggggggtgggggtgggggtgagccaaggaggtctggcttctctagggcaagggtaggaaggacagca

SEQ ID NO: 340302 - DNA, 120 bp, Artificial Sequence
  ENSG00000137843_40 (sequence is synthesized)
gggaggctcaccctgagcccggcaggcagcccttcctcctcctccccttcagcaaagaaaggcagataaaaacgtgtttttataaatagctccagccccagctgatttgtaaattcagtg

SEQ ID NO: 340303 - DNA, 120 bp, Artificial Sequence
  ENSG00000137843_41 (sequence is synthesized)
ggttttttgtgtcaatgacatcaccttcctccccatggcaacccccgacgatatcaaaattgccaagcaacgttggagcagctcggcgccccaaacgagcaggtcgatgcctgaggattt

SEQ ID NO: 340304 - DNA, 120 bp, Artificial Sequence
  ENSG00000137843_42 (sequence is synthesized)
cgtccccgagagggcgcagcagtggggcctgcgagctggggccgggtggccgcgccgggtcggagtgtggctggagaggggccgccccggaagcggtgctgcgcccaacgtccccttctc

SEQ ID NO: 340305 - DNA, 120 bp, Artificial Sequence
  ENSG00000137843_43 (sequence is synthesized)
tttcatggcctatttttattatctccttctcttaaatctgggctcagaatccacgatccctatgattgtaacaagaacaatcaagctttgaagatagtggacttttcctacagtgttgac

SEQ ID NO: 340306 - DNA, 120 bp, Artificial Sequence
  ENSG00000137843_44 (sequence is synthesized)
cgcgaggaagaggcggaaggcgccggaaggctcttcctgagtgacgaccgtgagaaatatccaaagctcctccgtgagcaggaacagatgctccccctcactgtgcctggagaagctggc

SEQ ID NO: 340307 - DNA, 120 bp, Artificial Sequence
  ENSG00000137843_45 (sequence is synthesized)
aaaattgccaagcaacgttggagcagctcggcgccccaaacgagcaggtcgatgcctgaggatttaatggagaaatcccaaagcctgcggaggactggcccagcaaggtcccaggtcttc

SEQ ID NO: 340308 - DNA, 120 bp, Artificial Sequence
  ENSG00000137843_46 (sequence is synthesized)
tctctgagtgactgacagctgtgtccctataggcagtggtcactcatgcaggcagtaactggccacagggcaggtgaccaggggaggaaggagacagacccaccaaggagagctggggcc

SEQ ID NO: 340309 - DNA, 120 bp, Artificial Sequence
  ENSG00000137843_47 (sequence is synthesized)
aaggcggcagaaatgtgcacggtaacctcttctctaaggagggtggctcgcctcctccttccctcccttcctttccttcttttctctgtggctgttgtgttgtttcccatttctgtcagt

SEQ ID NO: 340310 - DNA, 120 bp, Artificial Sequence
  ENSG00000137843_48 (sequence is synthesized)
atttgttcccaagtgtgtggccataggaaaagctggatttgcctagtccaggggcagcaggaggccgacttgtggcatgtgtgactgcttcagacgcacatttttcttgtgagaaaggaa

SEQ ID NO: 340311 - DNA, 120 bp, Artificial Sequence
  ENSG00000137843_49 (sequence is synthesized)
ggcagagtggagcgcacctttttgcttcttccaggccctccagcatcctgttgatagtgacagtaacctcttttcccatttggcagaggaggagactgatagagagaggcccaactcctc

SEQ ID NO: 340312 - DNA, 120 bp, Artificial Sequence
  ENSG00000137843_50 (sequence is synthesized)
aaacgagcaggtcgatgcctgaggatttaatggagaaatcccaaagtgagccggggcgcgcggtggaggaggggcgcgccgcagccggggccgctgggccctgatgggcgggagcggggt

SEQ ID NO: 340313 - DNA, 120 bp, Artificial Sequence
  ENSG00000137843_51 (sequence is synthesized)
ggagcggcctcgcctgccaggcagccctgggcgcggggctcggcggccacactctggagacagccacggtccaggcaggtgggggagggcgctgctcccgtcctgatgtgccaggagccg

SEQ ID NO: 340314 - DNA, 120 bp, Artificial Sequence
  ENSG00000137843_52 (sequence is synthesized)
acacgcggcccgctcaggtccgggagagtcggcccgcggctctggagcgtgcatctgcgatgccagtgaacgaggcctgcggaggactggcccagcaaggtcccaggtcttccctctcct

SEQ ID NO: 340315 - DNA, 120 bp, Artificial Sequence
  ENSG00000137845_0 (sequence is synthesized)
gttgccggcccctgaagtggagcgagagggaggtgcttcgccgtttctcctgccaggggaggtcccggcttcccgtggaggctccggaccaagccccttcagcttctccctccggatcga

SEQ ID NO: 340316 - DNA, 120 bp, Artificial Sequence
  ENSG00000137845_1 (sequence is synthesized)
tgtgctgctgttaacccgtgaggaggcggcggcggcggcagcggcagcggaagatggtgttgctgagagtgttaattctgctcctctcctgggcggcggggatgggaggtcagtatggga

SEQ ID NO: 340317 - DNA, 120 bp, Artificial Sequence
  ENSG00000137845_2 (sequence is synthesized)
atcctttaaataaatatatcagacattatgaaggattatcttacaatgtggattcattacaccaaaaacaccagcgtgccaaaagagcagtctcacatgaagaccaatttttacgtctag

SEQ ID NO: 340318 - DNA, 120 bp, Artificial Sequence
  ENSG00000137845_3 (sequence is synthesized)
atttccatgcccatggaagacatttcaacctacgaatgaagagggacacttcccttttcagtgatgaatttaaagtagaaacatcaaataaagtacttgattatgatacctctcatattt

SEQ ID NO: 340319 - DNA, 120 bp, Artificial Sequence
  ENSG00000137845_4 (sequence is synthesized)
acactggacatatttatggtgaagaaggaagttttagccatgggtctgttattgatggaagatttgaaggattcatccagactcgtggtggcacattttatgttgagccagcagagagat

SEQ ID NO: 340320 - DNA, 120 bp, Artificial Sequence
  ENSG00000137845_5 (sequence is synthesized)
atattaaagaccgaactctgccatttcactctgtcatttatcatgaagatgatattaactatccccataaatacggtcctcaggggggctgtgcagatcattcagtatttgaaagaatga

SEQ ID NO: 340321 - DNA, 120 bp, Artificial Sequence
  ENSG00000137845_6 (sequence is synthesized)
ggaaataccagatgactggtgtagaggaagtaacacagatacctcaagaagaacatgctgctaatggtccagaacttctgaggaaaaaacgtacaacttcagctgaaaaaaatacttgtc

SEQ ID NO: 340322 - DNA, 120 bp, Artificial Sequence
  ENSG00000137845_7 (sequence is synthesized)
agctttatattcagactgatcatttgttctttaaatattacggaacacgagaagctgtgattgcccagatatccagtcatgttaaagcgattgatacaatttaccagaccacagacttct

SEQ ID NO: 340323 - DNA, 120 bp, Artificial Sequence
  ENSG00000137845_8 (sequence is synthesized)
ccggaatccgtaacatcagtttcatggtgaaacgcataagaatcaatacaactgctgatgagaaggaccctacaaatcctttccgtttcccaaatattggtgtggagaagtttctggaat

SEQ ID NO: 340324 - DNA, 120 bp, Artificial Sequence
  ENSG00000137845_9 (sequence is synthesized)
tgaattctgagcagaatcatgatgactactgtttggcctatgtcttcacagaccgagattttgatgatggcgtacttggtctggcttgggttggagcaccttcaggaagctctggaggaa

SEQ ID NO: 340325 - DNA, 120 bp, Artificial Sequence
  ENSG00000137845_10 (sequence is synthesized)
tatgtgaaaaaagtaaactctattcagatggtaagaagaagtccttaaacactggaattattactgttcagaactatgggtctcatgtacctcccaaagtctctcacattacttttgctc

SEQ ID NO: 340326 - DNA, 120 bp, Artificial Sequence
  ENSG00000137845_11 (sequence is synthesized)
acgaagttggacataactttggatccccacatgattctggaacagagtgcacaccaggagaatctaagaatttgggtcaaaaagaaaatggcaattacatcatgtatgcaagagcaacat

SEQ ID NO: 340327 - DNA, 120 bp, Artificial Sequence
  ENSG00000137845_12 (sequence is synthesized)
ctggggacaaacttaacaacaataaattctcactctgtagtattagaaatataagccaagttcttgagaagaagagaaacaactgttttgttgaatctggccaacctatttgtggaaatg

SEQ ID NO: 340328 - DNA, 120 bp, Artificial Sequence
  ENSG00000137845_13 (sequence is synthesized)
gaatggtagaacaaggtgaagaatgtgattgtggctatagtgaccagtgtaaagatgaatgctgcttcgatgcaaatcaaccagagggaagaaaatgcaaactgaaacctgggaaacagt

SEQ ID NO: 340329 - DNA, 120 bp, Artificial Sequence
  ENSG00000137845_14 (sequence is synthesized)
gcagtccaagtcaaggtccttgttgtacagcacagtgtgcattcaagtcaaagtctgagaagtgtcgggatgattcagactgtgcaagggaaggaatatgtaatggcttcacagctctct

SEQ ID NO: 340330 - DNA, 120 bp, Artificial Sequence
  ENSG00000137845_15 (sequence is synthesized)
gcccagcatctgaccctaaaccaaacttcacagactgtaataggcatacacaagtgtgcattaatgggcaatgtgcaggttctatctgtgagaaatatggcttagaggagtgtacgtgtg

SEQ ID NO: 340331 - DNA, 120 bp, Artificial Sequence
  ENSG00000137845_16 (sequence is synthesized)
ccagttctgatggcaaagatgataaagaattatgccatgtatgctgtatgaagaaaatggacccatcaacttgtgccagtacagggtctgtgcagtggagtaggcacttcagtggtcgaa

SEQ ID NO: 340332 - DNA, 120 bp, Artificial Sequence
  ENSG00000137845_17 (sequence is synthesized)
ccatcaccctgcaacctggatccccttgcaacgattttagaggttactgtgatgttttcatgcggtgcagattagtagatgctgatggtcctctagctaggcttaaaaaagcaattttta

SEQ ID NO: 340333 - DNA, 120 bp, Artificial Sequence
  ENSG00000137845_18 (sequence is synthesized)
gtccagagctctatgaaaacattgctgaatggattgtggctcattggtgggcagtattacttatgggaattgctctgatcatgctaatggctggatttattaagatatgcagtgttcata

SEQ ID NO: 340334 - DNA, 120 bp, Artificial Sequence
  ENSG00000137845_19 (sequence is synthesized)
ctccaagtagtaatccaaagttgcctcctcctaaaccacttccaggcactttaaagaggaggagacctccacagcccattcagcaaccccagcgtcagcggccccgagagagttatcaaa

SEQ ID NO: 340335 - DNA, 120 bp, Artificial Sequence
  ENSG00000137845_20 (sequence is synthesized)
tgggacacatgagacgctaactgcagcttttgccttggttcttcctagtgcctacaatgggaaaacttcactccaaagagaaacctattaagtcatcatctccaaactaaaccctcacaa

SEQ ID NO: 340336 - DNA, 120 bp, Artificial Sequence
  ENSG00000137845_21 (sequence is synthesized)
gtaacagttgaagaaaaaatggcaagagatcatatcctcagaccaggtggaattacttaaattttaaagcctgaaaattccaatttgggggtgggaggtggaaaaggaacccaattttct

SEQ ID NO: 340337 - DNA, 120 bp, Artificial Sequence
  ENSG00000137845_22 (sequence is synthesized)
tatgaacagatatttttaacttaatggcacaaagtcttagaatattattatgtgccccgtgttccctgttcttcgttgctgcattttcttcacttgcaggcaaacttggctctcaataaa

SEQ ID NO: 340338 - DNA, 120 bp, Artificial Sequence
  ENSG00000137845_23 (sequence is synthesized)
cttttaccacaaattgaaataaatatatttttttcaactgccaatcaaggctaggaggctcgaccacctcaacattggagacatcacttgccaatgtacataccttgttatatgcagaca

SEQ ID NO: 340339 - DNA, 120 bp, Artificial Sequence
  ENSG00000137845_24 (sequence is synthesized)
tgtatttcttacgtacactgtacttctgtgtgcaattgtaaacagaaattgcaatatggatgtttctttgtattataaaatttttccgctcttaattaaaaattactgtttaattgacat

SEQ ID NO: 340340 - DNA, 120 bp, Artificial Sequence
  ENSG00000137845_25 (sequence is synthesized)
actcaggataacagagaatggtggtattcagtggtccaggattctgtaatgctttacacaggcagttttgaaatgaaaatcaatttacctttctgttacgatggagttggttttgatact

SEQ ID NO: 340341 - DNA, 120 bp, Artificial Sequence
  ENSG00000137845_26 (sequence is synthesized)
cattttttctttatcacatggctgctacgggcacaagtgactatactgaagaacacagttaagtgttgtgcaaactggacatagcagcacatactacttcagagttcatgatgtagatgt

SEQ ID NO: 340342 - DNA, 120 bp, Artificial Sequence
  ENSG00000137845_27 (sequence is synthesized)
ctggtttctgcttacgtcttttaaactttctaattcaattccatttttcaattaataggtgaaattttattcatgctttgatagaaattatgtcaatgaaatgattctttttatttgtag

SEQ ID NO: 340343 - DNA, 120 bp, Artificial Sequence
  ENSG00000137845_28 (sequence is synthesized)
cctacttatttgtgtttttcatatatctgaaatatgctaattatgttttctgtctgatatggaaaagaaaagctgtgtctttatcaaaatatttaaacggttttttcagcatatcatcac

SEQ ID NO: 340344 - DNA, 120 bp, Artificial Sequence
  ENSG00000137845_29 (sequence is synthesized)
tgatcattggtaaccactaaagatgagtaatttgcttaagtagtagttaaaattgtagataggccttctgacattttttttcctaaaatttttaacagcattgaaggtgaaacagcacaa

SEQ ID NO: 340345 - DNA, 120 bp, Artificial Sequence
  ENSG00000137845_30 (sequence is synthesized)
tgtcccattccaaatttatttttgaaacagatgtaaataattggcattttaaagagaaagcaaaaacatttaatgtattaacaggcttattgctatgcaggaaatagaaggggcattaca

SEQ ID NO: 340346 - DNA, 120 bp, Artificial Sequence
  ENSG00000137845_31 (sequence is synthesized)
aaaattgaagcttgtgacatatttattgcttctgttttccaactacatcacttcaactagaagtaaagctatgattttcctgacttcacataggaggcaaatttagagaaagttgtaaag

SEQ ID NO: 340347 - DNA, 120 bp, Artificial Sequence
  ENSG00000137845_32 (sequence is synthesized)
tgggtttttttttttcctttttttttttaagagtataaggtttacacaatcattctcataatgtgacgcaagccagcaaggccaaaaatgctagagaaaataacgggatctcttccttgt

SEQ ID NO: 340348 - DNA, 120 bp, Artificial Sequence
  ENSG00000137845_33 (sequence is synthesized)
tctcttccttgtaaacttgtacagtatgtggtgactttttcaaaatacagctttttgtacatgatttagagacaaattttgtacatgaaaccccagatagactataaataattctaaaca

SEQ ID NO: 340349 - DNA, 120 bp, Artificial Sequence
  ENSG00000137845_34 (sequence is synthesized)
aacaagtaggtagatatgtatgtaattgcttttaaatcatttaaatgcctttgtttttggactgtgcaaaggttggaagtgggtttgcatttctaaaatggtgacttttattctgcaaga

SEQ ID NO: 340350 - DNA, 120 bp, Artificial Sequence
  ENSG00000137845_35 (sequence is synthesized)
gttcttagtaacttcttgagtgtggtagactttggaacatgtaaattttttgcttgtaatgttatcctgtggtaggattttggcaggtacacacactgccctattttattttgagtctaa

SEQ ID NO: 340351 - DNA, 120 bp, Artificial Sequence
  ENSG00000137845_36 (sequence is synthesized)
gttaaatgttttctgaaaagagatacatgcactgaactctttccactgcgaatcaagatgtggtaatataaaaggatcaagacaaatgagatctaatactactgtcagttttaatgtcca

SEQ ID NO: 340352 - DNA, 120 bp, Artificial Sequence
  ENSG00000137845_37 (sequence is synthesized)
ctgtgttttatacagtatctttttttgttcactttggaaatttttactaaaaattgcaaaaaataaagtattgtgcaaagatgtaaggttttttgaaacttgaaatgcattaataaatag

SEQ ID NO: 340353 - DNA, 120 bp, Artificial Sequence
  ENSG00000137845_38 (sequence is synthesized)
acgattaaatcaacttgaaggttctatactctttgaactctgagaactatcacaagaagcttcccacaaggcagtgttttcttacagttgtctcttcctacaaaagtatagattatcttt

SEQ ID NO: 340354 - DNA, 120 bp, Artificial Sequence
  ENSG00000137845_39 (sequence is synthesized)
attcttaatactttggaatccatgtagaaaatttccagttagatactctgcgtacacacaataaacctttttaaaacacccaactaatctcaactgcattacattgtttctaatcaatat

SEQ ID NO: 340355 - DNA, 120 bp, Artificial Sequence
  ENSG00000137845_40 (sequence is synthesized)
tcagtgcttgtcttggtggaagaggtgagtcattttgaaaacttatggtcttgtttttatgtgtttttcaaagttttgaatgctaagtacctcatttattttaaaaagcctagtttaatg

SEQ ID NO: 340356 - DNA, 120 bp, Artificial Sequence
  ENSG00000137845_41 (sequence is synthesized)
ataagtttgtttaaaattttgagccatcatttttctcttcatagcaaataaggagagaattgacatttcagtgttacctagaaaaggaattgtaagcccagaataattccctgcatgagg

SEQ ID NO: 340357 - DNA, 120 bp, Artificial Sequence
  ENSG00000137845_42 (sequence is synthesized)
taatctgcttcaaattctttttttagtcaaggttagctataagtaatacttgttaaatgagtaaatatgtaatactttgtgaattactttgttaatttaggagcatcaaatgtatattat

SEQ ID NO: 340358 - DNA, 120 bp, Artificial Sequence
  ENSG00000137845_43 (sequence is synthesized)
gtttagttatttatgaaactctcaatattgattgatttgggtaattataaattagttatttttacttgtaattgaatgcttaaattctgtttacagtccgtcctctctccctccatccct

SEQ ID NO: 340359 - DNA, 120 bp, Artificial Sequence
  ENSG00000137845_44 (sequence is synthesized)
ccctccccagttttataaattcaggtaccaattcacaaacaaaatcagaaataaaataaatttattgactgcttctggatttagcattccctgtagtgtcaagcaatgtcatgcagtttg

SEQ ID NO: 340360 - DNA, 120 bp, Artificial Sequence
  ENSG00000137845_45 (sequence is synthesized)
gggaagcatttatttaaggaaatgacaactttctctgatcagtcttgttttgtgaggtgtcttcaacactttatgctttgggtacttcgtgtttgtcacagtcttaggatagtgaaatct

SEQ ID NO: 340361 - DNA, 120 bp, Artificial Sequence
  ENSG00000137845_46 (sequence is synthesized)
tcggggcttgtgcatgagaaggcatttcttattaagtatttctaattgaaggtatcagagtgtcaagcattacaaacctggacagttcacctggaggagtacaagaagagatattcatta

SEQ ID NO: 340362 - DNA, 120 bp, Artificial Sequence
  ENSG00000137845_47 (sequence is synthesized)
tccatatttaaagggtcaaggtttcccaaaaccagggtgcaagccagatgtagttttaaagcagctgccagggacagttcatctttagagaagtcactaaagttgtaagaaattttagtt

SEQ ID NO: 340363 - DNA, 120 bp, Artificial Sequence
  ENSG00000137845_48 (sequence is synthesized)
tccccaaaaccactttcaacttcttagaaactagaaagacaattggtttgccccacagaggacaacttcagtttcagcatctctcatgttgtgttcttgattaaaaacaacttccatttg

SEQ ID NO: 340364 - DNA, 120 bp, Artificial Sequence
  ENSG00000137845_49 (sequence is synthesized)
atatacttttccgtttattaccagtttagttttttcactattgtttctgtattcaactctttatatgattaggatagaaatttagcccttctgttttatattactatattgtttgtgtgt

SEQ ID NO: 340365 - DNA, 120 bp, Artificial Sequence
  ENSG00000137845_50 (sequence is synthesized)
cttagatatatacatgtatgtactattttcagtagaaattcatgtattttataattggtaagttcttcagagcatctcttctataaaaagcaacaggatgctaggtaaaacggagcattg

SEQ ID NO: 340366 - DNA, 120 bp, Artificial Sequence
  ENSG00000137845_51 (sequence is synthesized)
agcaaaatactgattagtttttgctttttcctgaaatctacactaaagtgatagggtgtggggtaatccaacaaggacaaggtgaattgaacaagaacgaaatctggaagcagatgaagg

SEQ ID NO: 340367 - DNA, 120 bp, Artificial Sequence
  ENSG00000137845_52 (sequence is synthesized)
agtactattgattgggcagacccagggaagtcaaatcctaaaccagcagtgggaacacaacagaatggtgtagtttgcactggtaagatttgggtacctggcagggctgggtgcggtggc

SEQ ID NO: 340368 - DNA, 76 bp, Artificial Sequence
  ENSG00000137845_53 (sequence is synthesized)
agctactcgggaggcagaggcaggagatttgcttgaacccgggaggcagaggccgattgcgccattgcactccagc

SEQ ID NO: 340369 - DNA, 120 bp, Artificial Sequence
  ENSG00000137845_54 (sequence is synthesized)
actttttttctatgtgtgtgacaaaaacataatatgcacacttttgtaacccacctttctcatttaatggtacattgataatgtatatcacattaactactctaaatatttctgtggatg

SEQ ID NO: 340370 - DNA, 120 bp, Artificial Sequence
  ENSG00000137845_55 (sequence is synthesized)
tatgtttttttttttcttaaccaatttcccattgtttggacatgtaggttccacattgtttattattttaaacaattctaaagaattttaaacaattcttaggaaaatcctcagcctaat

SEQ ID NO: 340371 - DNA, 120 bp, Artificial Sequence
  ENSG00000137845_56 (sequence is synthesized)
aatgaaattaattcctaaaagtggaattgttggggtaaaggttttttgagggacattgataaaaattatggtactgtctcccagatagatgtaccaagttatactaccacgatttaatat

SEQ ID NO: 340372 - DNA, 120 bp, Artificial Sequence
  ENSG00000137845_57 (sequence is synthesized)
atatatatatatatattaaatcagagtcccatccttagaaatccacatatatgcagccacatgaatgtattagaaacaataatagaagactcatgcttaattcagttgattagctttaga

SEQ ID NO: 340373 - DNA, 120 bp, Artificial Sequence
  ENSG00000137845_58 (sequence is synthesized)
cataattcaaatgcaagtcaaattgagtgccctaattgtggtctcttaagtaccatttttcttcaagggaaccagactcctttggataaatcactaattccacctgtaagaaagaaatgt

SEQ ID NO: 340374 - DNA, 120 bp, Artificial Sequence
  ENSG00000137845_59 (sequence is synthesized)
acaagaagaacctaggaaacattgttttgtaccagatcagaaagattcaggaggcaccttagaagttaccactggccaaggctgagataactttagcatcagcaaggataatatctgcaa

SEQ ID NO: 340375 - DNA, 120 bp, Artificial Sequence
  ENSG00000137845_60 (sequence is synthesized)
gagattgaaactcatagtattgtatttaactctgtgagttaatgatggtagtggacagaattatagttacctttgggatacgcttttaaagaaattccaggtaataagagaaatgataga

SEQ ID NO: 340376 - DNA, 120 bp, Artificial Sequence
  ENSG00000137845_61 (sequence is synthesized)
attaggatatcaccattttacccccccaacaatttatggatctagacaataatcgccagtgactgctaacctcacaaagtgagagcaatcagattttgtgcctcctaatggaagtacata

SEQ ID NO: 340377 - DNA, 120 bp, Artificial Sequence
  ENSG00000137845_62 (sequence is synthesized)
taccacctatgaagcagttctgccaaaagtcacatctcatcatgatgaagcctcctgatctaactaccccttcattagaaatacaggggacagagggacaaataatatacaagggactca

SEQ ID NO: 340378 - DNA, 120 bp, Artificial Sequence
  ENSG00000137845_63 (sequence is synthesized)
atcagcaaaatccagactctggaaaactacaagacatatggtcctgcttcaacaacagaaatgcaaagagaaaagacaacgatgggttaaaggagacttaagagctacatctatcaagac

SEQ ID NO: 340379 - DNA, 120 bp, Artificial Sequence
  ENSG00000137845_64 (sequence is synthesized)
aatttatggacttatttggatactgatttgaacaaactgttgagaccattggaaaaatgtgaaaagtggatatttgatattaaggtttttaattatttttaggtgtgataatggtattgt

SEQ ID NO: 340380 - DNA, 120 bp, Artificial Sequence
  ENSG00000137845_65 (sequence is synthesized)
tacattttttaaaggaccccttttagagatgcaaattgaaacacttaaaaaatgaaatgatacgatgtataagtttttgcttaaaaataaggattgaagttggctggtgtgtgtggatat

SEQ ID NO: 340381 - DNA, 120 bp, Artificial Sequence
  ENSG00000137845_66 (sequence is synthesized)
agttgaaacaagattggctgtgagttgataattattgaagctgggtgatgggcacttggggatttattatactattttctctacctgtgtttatatttgaaatttttcatagaagtttta

SEQ ID NO: 340382 - DNA, 120 bp, Artificial Sequence
  ENSG00000137845_67 (sequence is synthesized)
tcaaagaaaaaaaaaaagtgttttaaatgtgaatcaaattcctatagaagctgattcattactgtttttattttagcagtaattcatgataatgacctgtattcataatgattttcataa

SEQ ID NO: 340383 - DNA, 120 bp, Artificial Sequence
  ENSG00000137845_68 (sequence is synthesized)
tgattgttttagtggaattaaacttgaaccagtcaagctaacataattatattctgctccagttacaatgaataattaattgatttcaactgctagggtgaactcttgaagctatcagtc

SEQ ID NO: 340384 - DNA, 120 bp, Artificial Sequence
  ENSG00000137845_69 (sequence is synthesized)
atccagcaatcttagcaagcaggccattgggtccctgtttgctctgtctctctctctctctctcactgttgaagggcttagctaactacttaagtaaaatatttgttctctgttaaacat

SEQ ID NO: 340385 - DNA, 120 bp, Artificial Sequence
  ENSG00000137845_70 (sequence is synthesized)
gtcaaggagtatggtcagcttatccacattaagcctgtgtgtcccacgttggagtaaatgttaagtagctcactacaataaactagattcttctgccctctcttgtttaaatgatcatgt

SEQ ID NO: 340386 - DNA, 120 bp, Artificial Sequence
  ENSG00000137845_71 (sequence is synthesized)
tccctggaggtggaaatagatctttaaaaagatattctgtagttgtttgttctcagtgtaaaaaaatgagaataatttgataagagtgtaggttgtcttatataaaaagtggttccattt

SEQ ID NO: 340387 - DNA, 120 bp, Artificial Sequence
  ENSG00000137845_72 (sequence is synthesized)
gcatgaattttagaaaaatcattttggaaaaatgaaggctatgtggttatactgaacacattaagcaattttattctttattttaaatgaatattttattatcgttttcttcccttgccc

SEQ ID NO: 340388 - DNA, 120 bp, Artificial Sequence
  ENSG00000137845_73 (sequence is synthesized)
tttgggtatgggagttagcctttgtgtttctaaatacaacaggccggtttttataaattaaggtgtcaatatattcttcattatttagttttgtgattgtggttagttttcatttttctt

SEQ ID NO: 340389 - DNA, 120 bp, Artificial Sequence
  ENSG00000137845_74 (sequence is synthesized)
aagtatctgctagtagcatctgtaattaagtgaagtgacctgttaaccattttcctctttctcctcctttcctcctccttgaaacatatcagagcatgtttgaaattctttggcttttat

SEQ ID NO: 340390 - DNA, 120 bp, Artificial Sequence
  ENSG00000137845_75 (sequence is synthesized)
ggtatgcatttgctgatatgcattgaccagttaccttactcacagatacttcttaggcacttgattgtgccagggccttggctagatgataagaatacagtagtgaacttaacagtttcc

SEQ ID NO: 340391 - DNA, 120 bp, Artificial Sequence
  ENSG00000137845_76 (sequence is synthesized)
ctgccctggtgaagcgtatggtcttgtaggtgagatagatatcagataatcatgtgaataaatgtacaattccagctgtgatacatgctgaggaggaggtttttggtgatccaagagctg

SEQ ID NO: 340392 - DNA, 120 bp, Artificial Sequence
  ENSG00000137845_77 (sequence is synthesized)
atcatgcagagataggactgagaaaggagggtgggacgttgtcacagctgataatgcagagataggactgagaaaggagggtgggacatcaggaaggtcagagaattccttatgaaagtg

SEQ ID NO: 340393 - DNA, 120 bp, Artificial Sequence
  ENSG00000137845_78 (sequence is synthesized)
atgcttgagtcaaaatatgatggatgaagagagtttaaatagattacatagaatttttaataatgtcgattggttatatactgggcactgatagctgatttttctttggggaaaggtatg

SEQ ID NO: 340394 - DNA, 120 bp, Artificial Sequence
  ENSG00000137845_79 (sequence is synthesized)
tcagcctagtcattcagattcctttatttttttaaatgttttttcattttttgctttgcattgcattcatttgctgaagagctggcttgtactttggcaggtgtcatacttggttattct

SEQ ID NO: 340395 - DNA, 120 bp, Artificial Sequence
  ENSG00000137845_80 (sequence is synthesized)
ccttaggatattggcccaacaatctgggagttgtgaaaggcgcttcgcttttcagacctgggcgtctgtatcatgactatcataaatttaggattaagacacctagcctcctaccaggat

SEQ ID NO: 340396 - DNA, 120 bp, Artificial Sequence
  ENSG00000137845_81 (sequence is synthesized)
gaatgaggtgtccatgtgacctgctgtgccctggaattttatacatctttctctcatagcacacaccatattacaatataatcctgcctcatctaagccaaactttcgagagaatcattt

SEQ ID NO: 340397 - DNA, 120 bp, Artificial Sequence
  ENSG00000137845_82 (sequence is synthesized)
acactcagtggctacttcagctcccattcacttatcaacctgctgcaatttttcacagcccccaaaggactgcagtctgtgccttcagggagctgagggtctagcggaaggaaagaaacc

SEQ ID NO: 340398 - DNA, 120 bp, Artificial Sequence
  ENSG00000137845_83 (sequence is synthesized)
agcagttacagtacagaggggtttgtgttggaaactctacaaacacaggatgccctggtagctcagaggaagtgcatatcgagcatggtaggtaggtagtgggaagagccaagatgactt

SEQ ID NO: 340399 - DNA, 120 bp, Artificial Sequence
  ENSG00000137845_84 (sequence is synthesized)
cccagaggagaaaagctggacctgagttttggagtttcggtaaaagtttgctctaactagtccaagctgctgtcacaagcttttagaaatgatgtaaccatggggcagttgactgtcgtc

SEQ ID NO: 340400 - DNA, 120 bp, Artificial Sequence
  ENSG00000137845_85 (sequence is synthesized)
atgttctttgctattttcatgactctggatgtgcttttcctattccctggattgccctttccctcgattcctctgcaggactgggctttattaatctccatttccttgagcttggctata

SEQ ID NO: 340401 - DNA, 120 bp, Artificial Sequence
  ENSG00000137845_86 (sequence is synthesized)
gtaggtgttcaataaacatttgttttgttgtgtgctttgtaaataggcaatgaagctgatttcacaagataggcacaaaagttagtttcattacaacacattaccaacagctgtattttt

SEQ ID NO: 340402 - DNA, 120 bp, Artificial Sequence
  ENSG00000137845_87 (sequence is synthesized)
aacttttaacatatctcattctaaatcctgtggcagcacaacctccttccgtcatacctggagataaattttctttcaaaatctaatatgcactgtatttatagaatatgaaacataccg

SEQ ID NO: 340403 - DNA, 120 bp, Artificial Sequence
  ENSG00000137845_88 (sequence is synthesized)
accatgttttgcaaaaatgggaaaggcataacttagctttggggcatgtaagtaacaactcctgataggagaagaaatgtattcagaaagctcaaattagaaataaaatgggagactcta

SEQ ID NO: 340404 - DNA, 120 bp, Artificial Sequence
  ENSG00000137845_89 (sequence is synthesized)
ttaattttacttggccagaagtcatcaaagttacgagaaaacaacttaactatttatattagaattactttatatgaagatttttaaagttctaatatttctggttattatttccttctg

SEQ ID NO: 340405 - DNA, 120 bp, Artificial Sequence
  ENSG00000137845_90 (sequence is synthesized)
aagtgatcagaatcatgtgtatcattcatagattgcttagtaggtgatgggagtcattctgttttaccgtgctccttagttcatctcctggatgggttacttcttttggtgcatattatt

SEQ ID NO: 340406 - DNA, 120 bp, Artificial Sequence
  ENSG00000137845_91 (sequence is synthesized)
gggacttaaaaaacatttttttttgttgtttttcaagacaacttatttgcccaaatcgtggactaattggtgatttttcctgatctttcagtataatctctgggtctttatcttgtttgt

SEQ ID NO: 340407 - DNA, 120 bp, Artificial Sequence
  ENSG00000137845_92 (sequence is synthesized)
aataggaaatgttgaacagaataagatcagatacacagccttttgtagatctactaatgattatggatgttcatccagcagtaatccactgaacgcttatttttaagcccacatatctcc

SEQ ID NO: 340408 - DNA, 120 bp, Artificial Sequence
  ENSG00000137845_93 (sequence is synthesized)
aagttgtacaaacacagaattacctgatgttttcttaaaagattgtcaagattgactatctcaacttaagtgttcatgctttaaaagtgataacattaaaatatctataggaagcttgca

SEQ ID NO: 340409 - DNA, 120 bp, Artificial Sequence
  ENSG00000137845_94 (sequence is synthesized)
aatgatatatttgagaatgtgctataattgaactgaatgtagtttgctttggaaattgacttataactcacattcccctttctcaaattagtgtgtatgtgtgtgtgtgtgtatgtatgt

SEQ ID NO: 340410 - DNA, 120 bp, Artificial Sequence
  ENSG00000137845_95 (sequence is synthesized)
atgtgtgtgttcagaactatggatgccttaaagcacaaaagatgttgtttgtgtgggatgtcagccttttttgtactcttctaataacattctagagtaaaaattttatagttaacccca

SEQ ID NO: 340411 - DNA, 120 bp, Artificial Sequence
  ENSG00000137845_96 (sequence is synthesized)
gcatttaaaatgatgtttaccgttcctaggacacattaggatatgtggtttttagatatgtaatgatcatggagtagaaggattgttgaaattggatttaggagatctacctaggtttca

SEQ ID NO: 340412 - DNA, 120 bp, Artificial Sequence
  ENSG00000137845_97 (sequence is synthesized)
aaccaaatacttgagcagttgacttaacttaggtttccttaaaacatgttactctttttttaaattcctgtgcttgttgcgtggtaagttctagtaaatacctgtcaaactgaagttgtc

SEQ ID NO: 340413 - DNA, 120 bp, Artificial Sequence
  ENSG00000137845_98 (sequence is synthesized)
taaaatttaattttagaaaacttgtttttcagaagaattattgatgcttaaagctacatagttaaagtaattaatcttggtctctgtttaagtaatattccctcacaaaaccatgaatat

SEQ ID NO: 340414 - DNA, 120 bp, Artificial Sequence
  ENSG00000137845_99 (sequence is synthesized)
attatgtggcattcaattagctactaatttgtctttcatctttccatgtacatgtggttgatattctctagagaaacatagttgtacaactcggcatgtgatttgtctataatatttaag

SEQ ID NO: 340415 - DNA, 120 bp, Artificial Sequence
  ENSG00000137845_100 (sequence is synthesized)
ttttataaaataatatttcagtagcctaaataaaagaactctttggtcatcttctctgaatatcaaaccttcaaagcttttgtggctgaatatcactttgctctacaggaaaaaaattta

SEQ ID NO: 340416 - DNA, 120 bp, Artificial Sequence
  ENSG00000137845_101 (sequence is synthesized)
atttttctttctttatagaagagccgtaataaccaacataaaatcgatcctcatctaatctcttgctctgcttttatttcatttttttaagttgccattgctttaaaagatttactatct

SEQ ID NO: 340417 - DNA, 120 bp, Artificial Sequence
  ENSG00000137845_102 (sequence is synthesized)
ttcttggatttactgtttttcaaattttttcaaatgtatttatgtaattcagttttgatactcatctctgtttgtttttcactttcatttccatttaaatattttgacattggaagctca

SEQ ID NO: 340418 - DNA, 120 bp, Artificial Sequence
  ENSG00000137845_103 (sequence is synthesized)
tacttgcctgtctgttactataaaaaataggtttgactgtatagggattaaacaatttgtcttttatttttcttctagcaatgtgcaggttctatctgtgagaaatatggcttagaggag

SEQ ID NO: 340419 - DNA, 120 bp, Artificial Sequence
  ENSG00000137845_104 (sequence is synthesized)
gctaaatctgtcctcttgaggagattataaatgtaacgtagcattgtgtctctattattatggtctctacaatgttttaaaaatgataaactagacaaaacgttgccagctttacagcag

SEQ ID NO: 340420 - DNA, 120 bp, Artificial Sequence
  ENSG00000137845_105 (sequence is synthesized)
taatttacataaacactgttagactttaagtcatcgtggacactgagtcaagacttgctggttgcttgtttacattgtaacatttaatatgaattactgatggcgttacccagcctaact

SEQ ID NO: 340421 - DNA, 120 bp, Artificial Sequence
  ENSG00000137845_106 (sequence is synthesized)
agagaaggtctgtataacatgttatggtaatgatttcagttttttttccctctttgtatttgcacaactggaaatctgatcttcaacttatatttgaatctgaccttcagcttatatttg

SEQ ID NO: 340422 - DNA, 120 bp, Artificial Sequence
  ENSG00000137845_107 (sequence is synthesized)
tgccatttcactctgtcatttatcatgaagatgatattagtgaaggcttaaactgaggcttagaaaacttatgtcacttgattgtggacctcctgttctttaccctgtgctcttctgctt

SEQ ID NO: 340423 - DNA, 120 bp, Artificial Sequence
  ENSG00000137845_108 (sequence is synthesized)
cactcatggaagaaagctgtaaattctcactgcctttacttcaaggatttctggggcttttctgaaatctactatccccataaatacggtcctcaggggggctgtgcagatcattcagta

SEQ ID NO: 340424 - DNA, 70 bp, Artificial Sequence
  ENSG00000137845_109 (sequence is synthesized)
tgaccaaacatttcaacctacgaatgaagagggacacttcccttttcagtgatgaatttaaagtagaaac

SEQ ID NO: 340425 - DNA, 120 bp, Artificial Sequence
  ENSG00000137845_110 (sequence is synthesized)
cccctgcccggtggcggattccgaagtcctctccgccgccgagacccgccgcgcagactcgtgggaagttgtgttgtttgcagctgggctcgtgtattgttctttacccggcgcgccggt

SEQ ID NO: 340426 - DNA, 120 bp, Artificial Sequence
  ENSG00000137845_111 (sequence is synthesized)
cctgaccgaccccattctgcagaggggccgcccgtggagtggcagcagtcatcacccgcttatctgagactagtggcctcggttcttcctgtgtcctgtgtttggagagagatcacagga

SEQ ID NO: 340427 - DNA, 120 bp, Artificial Sequence
  ENSG00000137845_112 (sequence is synthesized)
gggtgtgttggtgttcttgaaaacattctgtcgcccaggggaaagggtttggtcgggagaagggtaaaccatttggggatgttctttgatttgtaggctggattgggtctcttagagtag

SEQ ID NO: 340428 - DNA, 120 bp, Artificial Sequence
  ENSG00000137845_113 (sequence is synthesized)
aagttcggtccctgggtgacccaacttgaagagtttcgttaaactttcaggtggagtagatgtacagtgtagttagtggattgtcaaaacagtgccccctcccccctgcacatgaaagtc

SEQ ID NO: 340429 - DNA, 120 bp, Artificial Sequence
  ENSG00000137845_114 (sequence is synthesized)
aaatttgctaaaagcatgtcatttcttgtttcgggttttgaagacaacgatttttatttccggtgtgttctaggaccagctgcatcattttattcttgcttaaagtgctttattttaggt

SEQ ID NO: 340430 - DNA, 120 bp, Artificial Sequence
  ENSG00000137845_115 (sequence is synthesized)
aagctttttgacttgccccagagtaaacttaaaaacctcaaggtgtgcctaaaagcaacgattgaaaaaatttgaggaatgctttggatgagtgtctgtagcctttgataatttagaaaa

SEQ ID NO: 340431 - DNA, 120 bp, Artificial Sequence
  ENSG00000137845_116 (sequence is synthesized)
gtaatgtattgtttctgtttttttctttgccactttgacttatgactgcaggaccaagtgtatttctgtcctgtattctaccgagtccgagggtggtactgcgtaggcagacttctgtta

SEQ ID NO: 340432 - DNA, 120 bp, Artificial Sequence
  ENSG00000137845_117 (sequence is synthesized)
tagtttgtagtgttcatttttttgttacacgttttatttaatttttttcaatccaattcatcaagcaagacacacattatagattaagagctgataatagatgtttagttttaaaaagga

SEQ ID NO: 340433 - DNA, 120 bp, Artificial Sequence
  ENSG00000137845_118 (sequence is synthesized)
ttatgtgcgggagactctctgttagaggagcctttttcatctgacatttgttatttctgttctaaacgtggctttcaacaaatcgttttcctatcttttttcactttttgtgattaaatt

SEQ ID NO: 340434 - DNA, 120 bp, Artificial Sequence
  ENSG00000137845_119 (sequence is synthesized)
caggagttaagacactgttctctataaggtaataaaaagtaagacaaacacatgaggcactttactgagtagtagtatactaaatgttcttttaaaaataatgaaaacagtaagaaactg

SEQ ID NO: 340435 - DNA, 120 bp, Artificial Sequence
  ENSG00000137845_120 (sequence is synthesized)
atgtagtcttatatttgaagaaaaaacaattgaataacatgtttgtgggttaaaactcttatacaaaaattttctaaattcatatttccagagtcctttattgcattaagcattggttaa

SEQ ID NO: 340436 - DNA, 120 bp, Artificial Sequence
  ENSG00000137845_121 (sequence is synthesized)
aaggctaatttttggtgtttttgttaagcagaactttttcaaaaaacataagacaagttttattagttttattttaaaattagtatcaagattctagcttttgggtacttggagatactt

SEQ ID NO: 340437 - DNA, 120 bp, Artificial Sequence
  ENSG00000137845_122 (sequence is synthesized)
gtaattttattgtaactatggggtatttttatctactaatctgagctatttttggtcacttgtaagatctttgtatgatgatttgtagacttcagcacattgagattgaatgtatttgtt

SEQ ID NO: 340438 - DNA, 120 bp, Artificial Sequence
  ENSG00000137845_123 (sequence is synthesized)
ttagcatatgagagaaaggagaaatttgtgtagattagaagttgtggtggaaatttaacttaaaatgtaaatcattttcaggtagttaataaatcctttttgttgcttccacctccccaa

SEQ ID NO: 340439 - DNA, 120 bp, Artificial Sequence
  ENSG00000137845_124 (sequence is synthesized)
attcgttatctgaggatggcaaatagctggcatgcttgcttacaacctgtttccccttctattcctgttaatggtgatctattgtaatatctcctggcctagtaaaataataattgacta

SEQ ID NO: 340440 - DNA, 120 bp, Artificial Sequence
  ENSG00000137845_125 (sequence is synthesized)
ttctgcccatgcttataagcttcctgagacctctctagaagccaagcggatgccagcaccatgcttcctgtaaagcctgcagaacgatgagccaattaaaactcttttcttgataaatta

SEQ ID NO: 340441 - DNA, 120 bp, Artificial Sequence
  ENSG00000137845_126 (sequence is synthesized)
atggcaaagatgataaagaattatgccatgtatgctgtatgaagaaaagtaaggcttttaaaaacacaagagtataaaatttgcctcaaactattattttctcctaaattttaagtgtaa

SEQ ID NO: 340442 - DNA, 79 bp, Artificial Sequence
  ENSG00000137845_127 (sequence is synthesized)
cccaggctggtctcaaactcctgggttgaaaatgtgagcctagccctatgatatctgtctttgactatccccataaata

SEQ ID NO: 340443 - DNA, 120 bp, Artificial Sequence
  ENSG00000137857_0 (sequence is synthesized)
gtggctgagccgagccgggccgtgccttcccctcctcacccccagccccgcccgtcccggcgcagagctgcagaggcaccggacgagagagggctccgcgggcccagctggcagccaggc

SEQ ID NO: 340444 - DNA, 120 bp, Artificial Sequence
  ENSG00000137857_1 (sequence is synthesized)
cggagacaagttgcagtcccgggctctggtgacgccgtggccgcagctggaagaggaaaacaaggatcagattggagaagtgatttatctaagatcccacagtggactgggagcagcact

SEQ ID NO: 340445 - DNA, 120 bp, Artificial Sequence
  ENSG00000137857_2 (sequence is synthesized)
gagacctcagcctagtctcctgatccccaagcagggccctgcctaaggaacacactctgcagagtgctgggccaaagcagggttttccaactaatcttagaaggtaaagtccatgaaggg

SEQ ID NO: 340446 - DNA, 120 bp, Artificial Sequence
  ENSG00000137857_3 (sequence is synthesized)
tctccattttgggacattctaatccctgagcccctattattttcatcatgggcttctgcctggctctagcatggacacttctggttggggcatggacccctctgggagctcagaacccca

SEQ ID NO: 340447 - DNA, 120 bp, Artificial Sequence
  ENSG00000137857_4 (sequence is synthesized)
tttcgtgggaggtgcagcgatttgatgggtggtacaacaacctcatggagcacagatggggcagcaaaggctcccggctgcagcgcctggtcccagccagctatgcagatggcgtgtacc

SEQ ID NO: 340448 - DNA, 120 bp, Artificial Sequence
  ENSG00000137857_5 (sequence is synthesized)
agcccttgggagaaccccacctgcccaacccccgagaccttagcaacaccatctcaaggggccctgcagggctggcctccctgagaaaccgcacagtgttgggggtcttctttggctatc

SEQ ID NO: 340449 - DNA, 120 bp, Artificial Sequence
  ENSG00000137857_6 (sequence is synthesized)
acgtgctttcagacctggtgagcgtggaaactcccggctgccccgccgagttcctcaacattcgcatcccgcccggagaccccatgttcgaccccgaccagcgcggggacgtggtgctgc

SEQ ID NO: 340450 - DNA, 120 bp, Artificial Sequence
  ENSG00000137857_7 (sequence is synthesized)
ccttccagagaagccgctgggaccccgagaccggacggagtcccagcaatccccgggacccggccaaccaggtgacgggctggctggacggcagcgccatctatggttcctcgcattcct

SEQ ID NO: 340451 - DNA, 120 bp, Artificial Sequence
  ENSG00000137857_8 (sequence is synthesized)
ggagcgacgcgctgcggagcttctccaggggacagctggcgtcggggcccgaccccgcttttccccgagactcgcagaaccccctgctcatgtgggcggcgcccgaccccgccaccgggc

SEQ ID NO: 340452 - DNA, 120 bp, Artificial Sequence
  ENSG00000137857_9 (sequence is synthesized)
agaacgggccccgggggctgtacgccttcggggcagagagagggaaccgggaacccttcctgcaggcgctgggcctgctctggttccgctaccacaacctgtgggcgcagaggctggccc

SEQ ID NO: 340453 - DNA, 120 bp, Artificial Sequence
  ENSG00000137857_10 (sequence is synthesized)
gccagcacccagactgggaggacgaggagctgttccagcacgcacgcaagagggtcatcgccacctaccagaacatcgctgtgtatgagtggctgcccagcttcctgcagaaaacactcc

SEQ ID NO: 340454 - DNA, 120 bp, Artificial Sequence
  ENSG00000137857_11 (sequence is synthesized)
cggagtatacaggataccggccatttctggaccccagcatctcctcagagttcgtggcggcctctgagcagttcctgtccaccatggtgccccctggcgtctacatgagaaatgccagct

SEQ ID NO: 340455 - DNA, 120 bp, Artificial Sequence
  ENSG00000137857_12 (sequence is synthesized)
gccacttccagggggtcatcaatcggaactcaagtgtctccagagctctccgggtctgcaacagctactggagccgtgagcacccaagcctacaaagtgctgaagatgtggatgcactgc

SEQ ID NO: 340456 - DNA, 120 bp, Artificial Sequence
  ENSG00000137857_13 (sequence is synthesized)
tgctgggcatggcctcccagatcgcagagcgagaggaccatgtgttggttgaagatgtgcgggatttctggcctgggccactgaagttttcccgcacagaccacctggccagctgcctgc

SEQ ID NO: 340457 - DNA, 120 bp, Artificial Sequence
  ENSG00000137857_14 (sequence is synthesized)
agcggggccgggatctgggcctgccctcttacaccaaggccagggcagcactgggcttgtctcccattacccgctggcaggacatcaaccctgcactctcccggagcaatgacactgtac

SEQ ID NO: 340458 - DNA, 120 bp, Artificial Sequence
  ENSG00000137857_15 (sequence is synthesized)
tggaggccacagctgccctgtacaaccaggacttatcctggctagagctgctccctgggggactcctggagagccaccgggaccctggacctctgttcagcaccatcgtccttgaacaat

SEQ ID NO: 340459 - DNA, 120 bp, Artificial Sequence
  ENSG00000137857_16 (sequence is synthesized)
ttgtgcggctacgggatggtgaccgctactggtttgagaacaccaggaatgggctgttctccaagaaggagattgaagaaatccgaaataccaccctgcaggacgtgctggtcgctgtta

SEQ ID NO: 340460 - DNA, 120 bp, Artificial Sequence
  ENSG00000137857_17 (sequence is synthesized)
tcaacattgaccccagtgctctgcagcccaatgtctttgtctggcataaaggagacccctgtccgcagccgagacagctcagcactgaaggcctgccagcgtgtgctccctctgttgttc

SEQ ID NO: 340461 - DNA, 120 bp, Artificial Sequence
  ENSG00000137857_18 (sequence is synthesized)
gtgactattttgagggcagtggatttggcttcggggtcaccatcgggaccctctgttgcttccctttggtgagcctgctcagtgcctggattgttgcccggctccggatgagaaatttca

SEQ ID NO: 340462 - DNA, 120 bp, Artificial Sequence
  ENSG00000137857_19 (sequence is synthesized)
agaggctccagggccaggaccgccagagcatcgtgtctgagaagctcgtgggaggcatggaagctttggaatggcaaggccacaaggagccctgccggcccgtgcttgtgtacctgcagc

SEQ ID NO: 340463 - DNA, 120 bp, Artificial Sequence
  ENSG00000137857_20 (sequence is synthesized)
ccgggcagatccgtgtggtagatggcaggctcaccgtgctccgcaccatccagctgcagcctccacagaaggtcaacttcgtcctgtccagcaaccgtggacgccgcactctgctgctca

SEQ ID NO: 340464 - DNA, 120 bp, Artificial Sequence
  ENSG00000137857_21 (sequence is synthesized)
agatccccaaggagtatgacctggtgctgctgtttaacttggaggaagagcggcaggcgctggtggaaaatctccggggagctctgaaggagagcgggttgagcatccaggagtgggagc

SEQ ID NO: 340465 - DNA, 120 bp, Artificial Sequence
  ENSG00000137857_22 (sequence is synthesized)
tgcgggagcaggagctgatgagagcagctgtgacacgggagcagcggaggcacctcctggagacctttttcaggcaccttttctcccaggtgctggacatcaaccaggccgacgcaggga

SEQ ID NO: 340466 - DNA, 120 bp, Artificial Sequence
  ENSG00000137857_23 (sequence is synthesized)
atgtttgtggagtccatgttctctctggctgacaaggatggcaatggctacctgtccttccgagagttcctggacatcctggtggtcttcatgaaaggctctcctgaggaaaagtctcgc

SEQ ID NO: 340467 - DNA, 120 bp, Artificial Sequence
  ENSG00000137857_24 (sequence is synthesized)
cttatgttccgcatgtacgactttgatgggaatggcctcatttccaaggatgagttcatcaggatgctgagatccttcatcgagatctccaacaactgcctgtccaaggcccagctggct

SEQ ID NO: 340468 - DNA, 120 bp, Artificial Sequence
  ENSG00000137857_25 (sequence is synthesized)
gaggtggtggagtccatgttccgggagtcgggattccaggacaaggaggaactgacatgggaagattttcacttcatgctgcgggaccacaatagcgagctccgcttcacgcagctctgt

SEQ ID NO: 340469 - DNA, 120 bp, Artificial Sequence
  ENSG00000137857_26 (sequence is synthesized)
gtcaaaggggtggaggtgcctgaagtcatcaaggacctctgccggcgagcctcctacatcagccaggatatgatctgtccctctcccagagtgagtgcccgctgttcccgcagcgacatt

SEQ ID NO: 340470 - DNA, 120 bp, Artificial Sequence
  ENSG00000137857_27 (sequence is synthesized)
gagactgagttgacacctcagagactgcagtgccccatggacacagaccctccccaggagattcggcggaggtttggcaagaaggtaacgtcattccagcccttgctgttcactgaggcg

SEQ ID NO: 340471 - DNA, 120 bp, Artificial Sequence
  ENSG00000137857_28 (sequence is synthesized)
caccgagagaagttccaacgcagctgtctccaccagacggtgcaacagttcaagcgcttcattgagaactaccggcgccacatcggctgcgtggccgtgttctacgccatcgctgggggg

SEQ ID NO: 340472 - DNA, 120 bp, Artificial Sequence
  ENSG00000137857_29 (sequence is synthesized)
cttttcctggagagggcctactactacgcctttgccgcacatcacacgggcatcacagacaccacccgcgtgggaatcatcctgtcgcggggcacagcagccagcatctctttcatgttc

SEQ ID NO: 340473 - DNA, 120 bp, Artificial Sequence
  ENSG00000137857_30 (sequence is synthesized)
tcctacatcttgctcaccatgtgccgcaacctcatcaccttcctgcgagaaaccttcctcaaccgctacgtgcccttcgacgccgccgtggacttccatcgcctcattgcctccaccgcc

SEQ ID NO: 340474 - DNA, 120 bp, Artificial Sequence
  ENSG00000137857_31 (sequence is synthesized)
atcgtcctcacagtcttacacagtgtgggccatgtggtgaatgtgtacctgttctccatcagccccctcagcgtcctctcttgcctctttcctggcctcttccatgatgatgggtctgag

SEQ ID NO: 340475 - DNA, 120 bp, Artificial Sequence
  ENSG00000137857_32 (sequence is synthesized)
ctcccccagaagtattactggtggttcttccagaccgtaccaggcctcacgggggttgtgctgctcctgatcctggccatcatgtatgtctttgcctcccaccacttccgccgccgcagt

SEQ ID NO: 340476 - DNA, 120 bp, Artificial Sequence
  ENSG00000137857_33 (sequence is synthesized)
ttccggggcttctggctgacccaccacctctacatcctgctctatgtcctgctcatcatccatggtagctttgccctgatccagctgccccgtttccacatcttcttcctggtcccagca

SEQ ID NO: 340477 - DNA, 120 bp, Artificial Sequence
  ENSG00000137857_34 (sequence is synthesized)
atcatctatgggggcgacaagctggtgagcctgagccggaagaaggtggagatcagcgtggtgaaggcggagctgctgccctcaggagtgacccacctgcggttccagcggccccagggc

SEQ ID NO: 340478 - DNA, 120 bp, Artificial Sequence
  ENSG00000137857_35 (sequence is synthesized)
tttgagtacaagtcagggcagtgggtgcggatcgcttgcctggctctggggaccaccgagtaccaccccttcacactgacctctgcgccccatgaggacacgcttagcctgcacatccgg

SEQ ID NO: 340479 - DNA, 120 bp, Artificial Sequence
  ENSG00000137857_36 (sequence is synthesized)
gcagcagggccctggaccactcgcctcagggagatctactcagccccgacgggtgacagatgtgccagatacccaaagctgtaccttgatggaccatttggagagggccaccaggagtgg

SEQ ID NO: 340480 - DNA, 120 bp, Artificial Sequence
  ENSG00000137857_37 (sequence is synthesized)
cataagtttgaggtgtcagtgttagtgggagggggcattggggtcaccccttttgcctccatcctcaaagacctggtcttcaagtcatccgtcagctgccaagtgttctgtaagaagatc

SEQ ID NO: 340481 - DNA, 120 bp, Artificial Sequence
  ENSG00000137857_38 (sequence is synthesized)
tacttcatctgggtgacgcggacccagcgtcagtttgagtggctggctgacatcatccgagaggtggaggagaatgaccaccaggacctggtgtctgtgcacatctacatcacccagctg

SEQ ID NO: 340482 - DNA, 120 bp, Artificial Sequence
  ENSG00000137857_39 (sequence is synthesized)
gctgagaagttcgacctcaggaccactatgctgtacatctgtgagcggcacttccagaaggttctgaaccggagtctattcacaggcctgcgctccatcacccactttggccgtcccccc

SEQ ID NO: 340483 - DNA, 120 bp, Artificial Sequence
  ENSG00000137857_40 (sequence is synthesized)
tttgagcccttcttcaactccctgcaggaggtccacccccaggtccggaagatcggggtgtttagctgtggcccccctggcatgaccaagaatgtggaaaaggcctgtcagctcatcaac

SEQ ID NO: 340484 - DNA, 120 bp, Artificial Sequence
  ENSG00000137857_41 (sequence is synthesized)
aggcaggaccggactcacttctcccaccattatgagaacttctaggcccctgcccgggggttctgcccactgcccagttgagcagaggtttgagcccacacctcacctctgttcttccta

SEQ ID NO: 340485 - DNA, 120 bp, Artificial Sequence
  ENSG00000137857_42 (sequence is synthesized)
tttctggctgcctcagccttctctgatttcccacctcccaaccttgttccaggtggccatagtcagtcaccatgtgtgggctcagggacccccaggaccaggatgtgtctcagcctggag

SEQ ID NO: 340486 - DNA, 120 bp, Artificial Sequence
  ENSG00000137857_43 (sequence is synthesized)
aaatggtgggggggcagtgtctagggactagagtgagaagtaggggagctactgatttggggcaaagtgaaacctctgcttccagacttcagaaacaaatctcagaagacaagctgacct

SEQ ID NO: 340487 - DNA, 120 bp, Artificial Sequence
  ENSG00000137857_44 (sequence is synthesized)
gacaagtactatgtgtgtgcatgtctgtatgtgtgttggggcggtgagtgtaaggatgcagtgggagcatggatgctggcatcttagaaccctccctactcccatacctcctcctcttct

SEQ ID NO: 340488 - DNA, 120 bp, Artificial Sequence
  ENSG00000137857_45 (sequence is synthesized)
gggctccccactgtcagacgggctggcaaatgccttgcaggaggtagaggctggacccatggcaagccatttacagaaacccactcggcaccccagtctaacaccacaactaatttcacc

SEQ ID NO: 340489 - DNA, 120 bp, Artificial Sequence
  ENSG00000137857_46 (sequence is synthesized)
caaggttttaagcacgttctttcatcagaccctggcccaatacctatgtatgcaatgctcctcagccctcttctccctgctccagtagtctcccttccaaataaatcacttttctgcctt

SEQ ID NO: 340490 - DNA, 120 bp, Artificial Sequence
  ENSG00000137857_47 (sequence is synthesized)
ttgctgtcccttccacacaggtctgagctcccccagaagtattactggtggttcttccagaccgtaccaggcctcacgggggttgtgctgctcctgatcctggccatcatgtatgtcttt

SEQ ID NO: 340491 - DNA, 120 bp, Artificial Sequence
  ENSG00000137857_48 (sequence is synthesized)
tgagttgaaagaggactcagtgtccccctcatcagagtccctttttattaagggaaggaaactgagttcagagagggcctgtgacttgcccaaggtcatacagctggttagtaacagagg

SEQ ID NO: 340492 - DNA, 120 bp, Artificial Sequence
  ENSG00000137857_49 (sequence is synthesized)
actaagacctagatcttctggttactttgccaaccacactgtcaagtatcccaaggtcaaagtaaaattttaagatcccttgtgcttgtatagacctctgtcaggcagcactgacagagg

SEQ ID NO: 340493 - DNA, 120 bp, Artificial Sequence
  ENSG00000137857_50 (sequence is synthesized)
ggacacccctcaccctgagtggggaatcaacctgcagaagaggaatgtcccaccggtttgggagcaaacagcaggactgggtgggctcagggataaggatgatggtgtggagggagccgg

SEQ ID NO: 340494 - DNA, 120 bp, Artificial Sequence
  ENSG00000137857_51 (sequence is synthesized)
ctgtctaacctctgaccccattaaccacacccctttcctccccacccccaacctataaagcacccaagcctacaaagtgctgaagatgtggatgcactgctgctgggcatggcctcccag

SEQ ID NO: 340495 - DNA, 120 bp, Artificial Sequence
  ENSG00000137857_52 (sequence is synthesized)
atcgcagagcgagaggaccatgtgttggttgaagatgtgcggggtgagtctgaggctgtccctgcaggttgtgaactcctggcctctgggaagaggctcagctggacttccagaaccagg

SEQ ID NO: 340496 - DNA, 120 bp, Artificial Sequence
  ENSG00000137857_53 (sequence is synthesized)
tatgagggggtgcctggggctgggagcctgcactgcactcactgatgaaagagcttctgacatgctgaccatggctccttctggctcaagtctcctggggctggttggagcttggggcct

SEQ ID NO: 340497 - DNA, 120 bp, Artificial Sequence
  ENSG00000137857_54 (sequence is synthesized)
ggcacgtgggcctgagacatggaagataggcagtgaaacttgagcacaagagacaagcacctaatgggaggggcagggcttacccagatcacttttcccaatattacatatcaggatgaa

SEQ ID NO: 340498 - DNA, 120 bp, Artificial Sequence
  ENSG00000137857_55 (sequence is synthesized)
gattaccagaccagcaagatttggctttgcactcggattgttcagatccagcaagcgtgtattaagcatctattgtttgctaggcacttaatagtcactatcttatttactgttctctcc

SEQ ID NO: 340499 - DNA, 120 bp, Artificial Sequence
  ENSG00000137857_56 (sequence is synthesized)
accctcctgagtgggtatagaaggtccttgacttaggaacaatctgtgctttcttgcaccgatgtttaagccacctttcaggagtcagctgttacaccctgagctaccacctggactggt

SEQ ID NO: 340500 - DNA, 120 bp, Artificial Sequence
  ENSG00000137857_57 (sequence is synthesized)
ggcccaggccaaggtagaaaatgctggtgatatgtttttgaaaactgtctccaaaaggcaatatataatcaggcatttgattaaaaaaaattttagttctaaagaatagaaaccttttat

SEQ ID NO: 340501 - DNA, 120 bp, Artificial Sequence
  ENSG00000137857_58 (sequence is synthesized)
aacacatcattctgccattcaacttttgcacattctgattttgtcccttcaactttcataccttttcaagaacaagttatgaatgcggattggctggctgttttattactttataaaata

SEQ ID NO: 340502 - DNA, 120 bp, Artificial Sequence
  ENSG00000137857_59 (sequence is synthesized)
ggcagctgaatgtgtgagagggttcccataaatggagttcacttatgtaaaacactcagagaagtgcctggggcataataagcactgtataggagtgagttactgttactgtcatttatt

SEQ ID NO: 340503 - DNA, 88 bp, Artificial Sequence
  ENSG00000137857_60 (sequence is synthesized)
tggcctcttccatgatgatgggtctgagctcccccagaagtattactggtggttcttccagaccgtaccagttatttgaacctgggag

SEQ ID NO: 340504 - DNA, 120 bp, Artificial Sequence
  ENSG00000137857_61 (sequence is synthesized)
gggcctgggtgtccctgggaggctctccagggcctcccgcccccgctgacttcccctcgtatgagagcccccctctctgctggcacttacctttaatgtccttctccatcaggatggagt

SEQ ID NO: 340505 - DNA, 120 bp, Artificial Sequence
  ENSG00000137857_62 (sequence is synthesized)
tggcctgggccagggtgtgaagtaagcccgggagcctgtcgctggtcacttccaagtgcctcttcccgcactttccagggcgcctcaccagcctcagctgacaagttactaacaccccag

SEQ ID NO: 340506 - DNA, 120 bp, Artificial Sequence
  ENSG00000137857_63 (sequence is synthesized)
aatgagtgtgcataatgtgtcaattctcccaatttttatgttttaaagcatgactctgagagaaagcaaaggagtgaacttctaatgctgtaatttcagactcacatggttgcgcacatg

SEQ ID NO: 340507 - DNA, 120 bp, Artificial Sequence
  ENSG00000137857_64 (sequence is synthesized)
cgcacatggatggtgtgtctgtggggtgttgggtagggccaggtgattgtttagaggtcagaagtccaggccggcgcggcggcttatgcccctaatcccagcactttgggaagctgaggc

SEQ ID NO: 340508 - DNA, 120 bp, Artificial Sequence
  ENSG00000137857_65 (sequence is synthesized)
aaatttttatggcagagcaggctcagaaggcaggttatatacagttcccgaaatctaccccatagtcccagaagtgggactgatgatggacacactttagggaagcctgcctggccaact

SEQ ID NO: 340509 - DNA, 120 bp, Artificial Sequence
  ENSG00000137857_66 (sequence is synthesized)
ttctttcaggccttttccctgcccacctatggctgggtccagctcccattggggacaagggctgaggttggagcacccgaaagcagggcctccattggtctgggactgtctactgtgcct

SEQ ID NO: 340510 - DNA, 120 bp, Artificial Sequence
  ENSG00000137860_0 (sequence is synthesized)
agtccttcactgaggagccagagggaatcaattccacaagctgggttgaggagaacaggagatggagaaagcaagtggaagacagtccattgctctgtccacagtggagactggcacagt

SEQ ID NO: 340511 - DNA, 120 bp, Artificial Sequence
  ENSG00000137860_1 (sequence is synthesized)
gaacccggggctggagctcatggaaaaagaagtagagcctgagggaagcaagaggactgacgcacaaggacacagcctgggggatggactgggcccttccacttaccagaggaggagtcg

SEQ ID NO: 340512 - DNA, 120 bp, Artificial Sequence
  ENSG00000137860_2 (sequence is synthesized)
gtggcctttcagcaaagcaagaagtttctgcaaaacacacgccagcttgttcaagaagatcctgttgggcctgttgtgtttggcctatgctgcctatctcctggcagcttgcatcttgaa

SEQ ID NO: 340513 - DNA, 120 bp, Artificial Sequence
  ENSG00000137860_3 (sequence is synthesized)
tttccagagggcactggccttgtttgtcatcacctgcttggtgatctttgtcctggttcactcgtttttgaaaaagctcctgggcaaaaaattaacaagatgtctgaagccctttgaaaa

SEQ ID NO: 340514 - DNA, 120 bp, Artificial Sequence
  ENSG00000137860_4 (sequence is synthesized)
ctcccgcctgaggctttggacgaaatgggtgtttgcaggagtctccttggttggccttatactgtggttggctttagacacagcccaaaggccagagcagctgatcccctttgcaggaat

SEQ ID NO: 340515 - DNA, 120 bp, Artificial Sequence
  ENSG00000137860_5 (sequence is synthesized)
ctgcatgttcatccttatcctctttgcctgctccaaacaccacagcgcagtgtcctggaggacagtgttttcgggcctaggtcttcaatttgtctttgggatcttggtcatcagaactga

SEQ ID NO: 340516 - DNA, 120 bp, Artificial Sequence
  ENSG00000137860_6 (sequence is synthesized)
tcttggatatactgtatttcagtggctgggagagcaggtccagattttcctgaactacactgtggccggctccagttttgtctttggggatacactggtcaaggatgtctttgcttttca

SEQ ID NO: 340517 - DNA, 120 bp, Artificial Sequence
  ENSG00000137860_7 (sequence is synthesized)
ggccttaccaatcatcattttctttggatgtgtggtgtccattctctactacctgggccttgtgcaatgggtagttcagaaggtcgcctggtttttacaaatcactatgggcaccactgc

SEQ ID NO: 340518 - DNA, 120 bp, Artificial Sequence
  ENSG00000137860_8 (sequence is synthesized)
tacagagaccctggctgtggcaggaaacatctttgtgggtatgacagaggcacctctgctcatccgtccctaccttggggacatgacactctctgaaatccatgcggtgatgactggagg

SEQ ID NO: 340519 - DNA, 120 bp, Artificial Sequence
  ENSG00000137860_9 (sequence is synthesized)
gtttgccaccatttctggcactgtgctgggagccttcatagcctttggggttgatgcatcatccctgatttctgcctctgtgatggccgccccttgtgctctcgcctcatcaaagctagc

SEQ ID NO: 340520 - DNA, 120 bp, Artificial Sequence
  ENSG00000137860_10 (sequence is synthesized)
gtatccggaagtggaggagtccaagttcaagagtgaggagggggtaaagctgccccgtgggaaggagaggaatgtcctggaagctgccagcaacggagccgtagatgccataggccttgc

SEQ ID NO: 340521 - DNA, 120 bp, Artificial Sequence
  ENSG00000137860_11 (sequence is synthesized)
tactaatgtagcagccaacctgattgcctttttggctgtgttggccttcatcaatgctgccctctcctggctgggggaattggtggacatacaggggctcactttccaggtcatctgctc

SEQ ID NO: 340522 - DNA, 120 bp, Artificial Sequence
  ENSG00000137860_12 (sequence is synthesized)
ctatctcctaaggcccatggttttcatgatgggtgtagagtggacagactgtccaatggtggctgagatggtgggaatcaagttcttcataaatgagtttgtggcttatcagcaactgtc

SEQ ID NO: 340523 - DNA, 120 bp, Artificial Sequence
  ENSG00000137860_13 (sequence is synthesized)
tcaatacaagaacaaacgtctctctggaatggaggagtggattgagggagagaaacagtggatttctgtgagagctgaaatcattacaacattttcactctgtggatttgccaatcttag

SEQ ID NO: 340524 - DNA, 120 bp, Artificial Sequence
  ENSG00000137860_14 (sequence is synthesized)
ttccataggaatcacacttggaggcttgacatcaatagtacctcaccggaagagtgacttgtccaaggttgtggtcagggccctcttcacaggggcctgtgtatcccttatcagtgcctg

SEQ ID NO: 340525 - DNA, 120 bp, Artificial Sequence
  ENSG00000137860_15 (sequence is synthesized)
tatggcaggaatcctctatgtccccaggggagctgaagctgactgtgtctccttcccaaacacaagtttcaccaatagaacctatgagacctacatgtgctgcagagggctctttcagag

SEQ ID NO: 340526 - DNA, 120 bp, Artificial Sequence
  ENSG00000137860_16 (sequence is synthesized)
tacttctctgaatggcaccaaccctccttctttttctggtccctgggaagataaggagttcagtgctatggcccttactaactgctgtggattctacaacaataccgtctgtgcctaagg

SEQ ID NO: 340527 - DNA, 120 bp, Artificial Sequence
  ENSG00000137860_17 (sequence is synthesized)
ctgcttgatctatttctataacagttttgatcttaaaagctttgtgattgcaaaggtgtttatgtactcagggtgcccacaactcactcaccaagatgtttaacagtaagtaacagtaaa

SEQ ID NO: 340528 - DNA, 120 bp, Artificial Sequence
  ENSG00000137860_18 (sequence is synthesized)
tctcaaaaaaaaaaaaaaaaaaaaagattcattttggttcgctgtatcccaataacgaaaaatagcttttgtttttccattatttggctgaaccaaaaaatggcattcctcatgggccct

SEQ ID NO: 340529 - DNA, 75 bp, Artificial Sequence
  ENSG00000137860_19 (sequence is synthesized)
ccattatttggctgaaccaaaaaatggcattcctcatgggccctgcctgaactttcatttgaaaaaataagtatt

SEQ ID NO: 340530 - DNA, 120 bp, Artificial Sequence
  ENSG00000137860_20 (sequence is synthesized)
ccaaaaaataaaataaataaaataaataaataaaagaaaaaataagtattactatgtcaaaaaagtcttacaaatcatgcttctagttgccatcttaaaaattatgtgatgcagtgtgct

SEQ ID NO: 340531 - DNA, 120 bp, Artificial Sequence
  ENSG00000137860_21 (sequence is synthesized)
ataaatgtgatttagtatgtaatttgcctgggacgggggagaagctacatttattggcattgtggatgagctggatttatattactgatgttacctttgaaaggtatatgaatatttaat

SEQ ID NO: 340532 - DNA, 120 bp, Artificial Sequence
  ENSG00000137860_22 (sequence is synthesized)
gataagatttttctggttgtcaaacatttgtaaatctgcaaacttcttaacaacattacacagtaaacaaaaaatacttcctgtatactaaggaagacttctaaggaatatccatttctt

SEQ ID NO: 340533 - DNA, 120 bp, Artificial Sequence
  ENSG00000137860_23 (sequence is synthesized)
aaaggccattactttgttgtagtattctgctttagtgctagccacatttgctccaagtttatggggaagcctttaaaacagtaattttcagtgggaaggggccaattttgcttttcagag

SEQ ID NO: 340534 - DNA, 120 bp, Artificial Sequence
  ENSG00000137860_24 (sequence is synthesized)
gacatctgacagtgtgtctccagacattattggtgattaaagtgggaggatgctactgacatctagtgagtagaggccaatattgctactaaaattcctataaccaaaggtcagctctcc

SEQ ID NO: 340535 - DNA, 120 bp, Artificial Sequence
  ENSG00000137860_25 (sequence is synthesized)
cacaacgaagaattacctggtcccaaacgtcaattgtgctgagactcagaaactctgattcaaaatattttagatatttattatatttaatattatttattatattaatattatagcctt

SEQ ID NO: 340536 - DNA, 120 bp, Artificial Sequence
  ENSG00000137860_26 (sequence is synthesized)
aaggaagggtttcaaaaggatacaggagttcctcaaaaagttaaacacagaattaccatagagccccacaattccactcctacatacacattcaaaagaatcaaaactaagttctcaaac

SEQ ID NO: 340537 - DNA, 120 bp, Artificial Sequence
  ENSG00000137860_27 (sequence is synthesized)
aagtacatgtacatgcatgttcacagtagcactattcaaaatagccaaaaattggaaacagtctaaatgtccatcaatggataaattgtgttacatacacacaatggaattttattcacc

SEQ ID NO: 340538 - DNA, 120 bp, Artificial Sequence
  ENSG00000137860_28 (sequence is synthesized)
cattaaaaaaagaagtactgatttatgctatgtagaggcaccccgaaaacatgctaaacgaaagaagctagacacaaaagtcttattattgcatgattccatttagatgaaatattcaga

SEQ ID NO: 340539 - DNA, 120 bp, Artificial Sequence
  ENSG00000137860_29 (sequence is synthesized)
atatataaatccatagagacagaagggagatggtggttgccagggcctggggaaggagggattagagagtgactccttaacgagtttggggttttcctttggggtgatgggaatgttttg

SEQ ID NO: 340540 - DNA, 120 bp, Artificial Sequence
  ENSG00000137860_30 (sequence is synthesized)
gaacgagatagaggtggtggttgtgcaacattgtgaatattatgtcactgaattgttcactttaaaatggctgtttatgttatgtgaatttcacctcaataaaaaaaatttttagaagga

SEQ ID NO: 340541 - DNA, 120 bp, Artificial Sequence
  ENSG00000137860_31 (sequence is synthesized)
ctgtcaaacacctgactgtattgttctagtcttgatgcctgattactgtccgattatgagactgccatctagtagtgggatatgcattgtgtggctaagtcttaggccacacaatgagtg

SEQ ID NO: 340542 - DNA, 120 bp, Artificial Sequence
  ENSG00000137860_32 (sequence is synthesized)
ttgctttccttagccctctgtctcaaaatagtccatctaattctggtccaggcttaagagtgcgtatctcaagcagtgaacgccaggcatttgtacctgtctggagaaacccagagcctt

SEQ ID NO: 340543 - DNA, 120 bp, Artificial Sequence
  ENSG00000137860_33 (sequence is synthesized)
gctttatccagatacatcttgggtatgttcacagaaccattaaagtgagggtcagacactcaatacttgatctgaggaaagtctaagttagtgatccctcaggactaatgtatacacaca

SEQ ID NO: 340544 - DNA, 120 bp, Artificial Sequence
  ENSG00000137860_34 (sequence is synthesized)
cttcttagggcaacactggccagtctcaggtggatggtaataaggatgctcttcatcggctgtgttttgtttctctgcgttcttctaagtgggggcccatgggatatacctgattgcctt

SEQ ID NO: 340545 - DNA, 120 bp, Artificial Sequence
  ENSG00000137860_35 (sequence is synthesized)
ggtggggaaaagctgaagttattttattttattgtctgcagcatcaatagtacctcaccggaagagtgacttgtccaaggttgtggtcagggccctcttcacaggggcctgtgtatccct

SEQ ID NO: 340546 - DNA, 120 bp, Artificial Sequence
  ENSG00000137860_36 (sequence is synthesized)
tatcagtgcctgtatggcaggtaggtgcctcagctctgatggagatactgctgcatgagggtgatggttggaggaataatatgaggaaggtagaattgtccttgagtacaggggcaacaa

SEQ ID NO: 340547 - DNA, 120 bp, Artificial Sequence
  ENSG00000137860_37 (sequence is synthesized)
ttccctagatcatgacaggctgtctttcagaatattgatttacccatgcattccacagatacatggcaaaggcacctaatcaagagtgtccacaattcgtgccaaaagaataaagagcct

SEQ ID NO: 340548 - DNA, 120 bp, Artificial Sequence
  ENSG00000137868_0 (sequence is synthesized)
agatcaaacaccttttaaagcaggtgctggggacacttctcagggccaactgccgagaccacacaaccagccacccctctaggatcccagcccagctggtgctgggctcagaggagaagg

SEQ ID NO: 340549 - DNA, 120 bp, Artificial Sequence
  ENSG00000137868_1 (sequence is synthesized)
ccccgtgttgggagcaccctgcttgcctggagggacaagtttccgggagagatcaataaaggaaaggaaagagacaaggaagggagaggtcaggagagcgcttgattggaggagaagggc

SEQ ID NO: 340550 - DNA, 120 bp, Artificial Sequence
  ENSG00000137868_2 (sequence is synthesized)
cagagaatgtcgtcccagccagcagggaaccagacctcccccggggccacagaggactactcctatggcagctggtacatcgatgagccccaggggggcgaggagctccagccagagggg

SEQ ID NO: 340551 - DNA, 120 bp, Artificial Sequence
  ENSG00000137868_3 (sequence is synthesized)
gaagtgccctcctgccacaccagcataccacccggcctgtaccacgcctgcctggcctcgctgtcaatccttgtgctgctgctcctggccatgctggtgaggcgccgccagctctggcct

SEQ ID NO: 340552 - DNA, 120 bp, Artificial Sequence
  ENSG00000137868_4 (sequence is synthesized)
gactgtgtgcgtggcaggcccggcctgcccagccctgtggatttcttggctggggacaggccccgggcagtgcctgctgctgttttcatggtcctcctgagctccctgtgtttgctgctc

SEQ ID NO: 340553 - DNA, 120 bp, Artificial Sequence
  ENSG00000137868_5 (sequence is synthesized)
cccgacgaggacgcattgcccttcctgactctcgcctcagcacccagccaagatgggaaaactgaggctccaagaggggcctggaagatactgggactgttctattatgctgccctctac

SEQ ID NO: 340554 - DNA, 120 bp, Artificial Sequence
  ENSG00000137868_6 (sequence is synthesized)
taccctctggctgcctgtgccacggctggccacacagctgcacacctgctcggcagcacgctgtcctgggcccaccttggggtccaggtctggcagagggcagagtgtccccaggtgccc

SEQ ID NO: 340555 - DNA, 120 bp, Artificial Sequence
  ENSG00000137868_7 (sequence is synthesized)
aagatctacaagtactactccctgctggcctccctgcctctcctgctgggcctcggattcctgagcctttggtaccctgtgcagctggtgagaagcttcagccgtaggacaggagcaggc

SEQ ID NO: 340556 - DNA, 120 bp, Artificial Sequence
  ENSG00000137868_8 (sequence is synthesized)
tccaaggggctgcagagcagctactctgaggaatatctgaggaacctcctttgcaggaagaagctgggaagcagctaccacacctccaagcatggcttcctgtcctgggcccgcgtctgc

SEQ ID NO: 340557 - DNA, 120 bp, Artificial Sequence
  ENSG00000137868_9 (sequence is synthesized)
ttgagacactgcatctacactccacagccaggattccatctcccgctgaagctggtgctttcagctacactgacagggacggccatttaccaggtggccctgctgctgctggtgggcgtg

SEQ ID NO: 340558 - DNA, 120 bp, Artificial Sequence
  ENSG00000137868_10 (sequence is synthesized)
gtacccactatccagaaggtgagggcaggggtcaccacggatgtctcctacctgctggccggctttggaatcgtgctctccgaggacaagcaggaggtggtggagctggtgaagcaccat

SEQ ID NO: 340559 - DNA, 120 bp, Artificial Sequence
  ENSG00000137868_11 (sequence is synthesized)
agctctgcaccgaggagctgccctggacttgagtcccttgcatcggagtccccatccctcccgccaagccatattctgttggatgagcttcagtgcctaccagacagcctttatctgcct

SEQ ID NO: 340560 - DNA, 120 bp, Artificial Sequence
  ENSG00000137868_12 (sequence is synthesized)
tgggctcctggtgcagcagatcatcttcttcctgggaaccacggccctggccttcctggtgctcatgcctgtgctccatggcaggaacctcctgctcttccgttccctggagtcctcgtg

SEQ ID NO: 340561 - DNA, 120 bp, Artificial Sequence
  ENSG00000137868_13 (sequence is synthesized)
gcccttctggctgactttggccctggctgtgatcctgcagaacatggcagcccattgggtcttcctggagactcatgatggacacccacagctgaccaaccggcgagtgctctatgcagc

SEQ ID NO: 340562 - DNA, 120 bp, Artificial Sequence
  ENSG00000137868_14 (sequence is synthesized)
cacctttcttctcttccccctcaatgtgctggtgggtgccatggtggccacctggcgagtgctcctctctgccctctacaacgccatccaccttggccagatggacctcagcctgctgcc

SEQ ID NO: 340563 - DNA, 120 bp, Artificial Sequence
  ENSG00000137868_15 (sequence is synthesized)
accgagagccgccactctcgaccccggctactacacgtaccgaaacttcttgaagattgaagtcagccagtcgcatccagccatgacagccttctgctccctgctcctgcaagcgcagag

SEQ ID NO: 340564 - DNA, 120 bp, Artificial Sequence
  ENSG00000137868_16 (sequence is synthesized)
cctcctacccaggaccatggcagccccccaggacagcctcagaccaggggaggaagacgaagggatgcagctgctacagacaaaggactccatggccaagggagctaggcccggggccag

SEQ ID NO: 340565 - DNA, 120 bp, Artificial Sequence
  ENSG00000137868_17 (sequence is synthesized)
ccgcggcagggctcgctggggtctggcctacacgctgctgcacaacccaaccctgcaggtcttccgcaagacggccctgttgggtgccaatggtgcccagccctgagggcagggaaggtc

SEQ ID NO: 340566 - DNA, 120 bp, Artificial Sequence
  ENSG00000137868_18 (sequence is synthesized)
aacccacctgcccatctgtgctgaggcatgttcctgcctaccatcctcctccctccccggctctcctcccagcatcacaccagccatgcagccagcaggtcctccggatcactgtggttg

SEQ ID NO: 340567 - DNA, 120 bp, Artificial Sequence
  ENSG00000137868_19 (sequence is synthesized)
ggtggaggtctgtctgcactgggagcctcaggagggctctgctccacccacttggctatgggagagccagcaggggttctggagaaagaaactggtgggttagggccttggtccaggagc

SEQ ID NO: 340568 - DNA, 120 bp, Artificial Sequence
  ENSG00000137868_20 (sequence is synthesized)
cagttgagccagggcagccacatccaggcgtctccctaccctggctctgccatcagccttgaagggcctcgatgaagccttctctggaaccactccagcccagctccacctcagccttgg

SEQ ID NO: 340569 - DNA, 120 bp, Artificial Sequence
  ENSG00000137868_21 (sequence is synthesized)
ccttcacgctgtggaagcagccaaggcacttcctcaccccctcagcgccacggacctctctggggagtggccggaaagctcccgggcctctggcctgcagggcagcccaagtcatgactc

SEQ ID NO: 340570 - DNA, 120 bp, Artificial Sequence
  ENSG00000137868_22 (sequence is synthesized)
agaccaggtcccacactgagctgcccacactcgagagccagatatttttgtagtttttatgcctttggctattatgaaagaggttagtgtgttccctgcaataaacttgttcctgagaaa

SEQ ID NO: 340571 - DNA, 120 bp, Artificial Sequence
  ENSG00000137868_23 (sequence is synthesized)
aaaaagggtttaccaatgagacacatgttgcctccttcatggaaaccctaggagaagaaacggacagattccccttccctgcctccgccccagcccagccccagcggtccgtctcactcg

SEQ ID NO: 340572 - DNA, 120 bp, Artificial Sequence
  ENSG00000137868_24 (sequence is synthesized)
atgtgcccagttgcttggctgctccaccaggctctgaaggcacaaacccctgagacggtgtccaagcccagggccctgtagactctgcggatcccgagaccagcgccactcatcctgcag

SEQ ID NO: 340573 - DNA, 120 bp, Artificial Sequence
  ENSG00000137868_25 (sequence is synthesized)
gtgctcaggtgaggggggatgcagccgactgtccagcagcgttggaggttgcaggcatgtacttggggtgaagagcaggactccagaaccccagcctgtctgtgagaagtgagaaataga

SEQ ID NO: 340574 - DNA, 120 bp, Artificial Sequence
  ENSG00000137868_26 (sequence is synthesized)
agagaaagctccgagggggcctttttcacttcccctgggaatagatcatacctggaattccagccctgaagccctgtgatgactccccttagctgtggtcagggccctcagcccagctgg

SEQ ID NO: 340575 - DNA, 120 bp, Artificial Sequence
  ENSG00000137868_27 (sequence is synthesized)
aaaggggccagaaaggggcaggctgaggctgggggaggggctcaagggagcccagctgggagggcccaggcaggcagtgcggagctggccgtgggctgcctaccctttcatctctgcaac

SEQ ID NO: 340576 - DNA, 120 bp, Artificial Sequence
  ENSG00000137868_28 (sequence is synthesized)
tccttcctccctgggcctcccttctggtgtgtctgtgggtctgtctaggtgggcttgggaaaggggaaggaaggggcgtctctttaggcagctcagactggacaagccttctttgaaaat

SEQ ID NO: 340577 - DNA, 120 bp, Artificial Sequence
  ENSG00000137868_29 (sequence is synthesized)
ggtcctttgaacacacgcctgctggtggttggtcagacagatgcgccagcgggagccccggggccccaaggggacagctatctctgcaggaccagtgcgatgggcgggaagggaggaggg

SEQ ID NO: 340578 - DNA, 120 bp, Artificial Sequence
  ENSG00000137868_30 (sequence is synthesized)
atgttatgatgatgctgttggtgaggggggcatgagaattgcaggaagggcacatcagatggtgcttctgaccctcccacatggcaggggaggtaggaggtagagagacaggaggtggag

SEQ ID NO: 340579 - DNA, 120 bp, Artificial Sequence
  ENSG00000137868_31 (sequence is synthesized)
agtcacccatactcttcctgccgtgagcacggcagccgacgacactgccttccagcccactgtgtggagtcagacttggtctggtgccagaattaagcacgtatgtgtgcgaagggcagt

SEQ ID NO: 340580 - DNA, 120 bp, Artificial Sequence
  ENSG00000137868_32 (sequence is synthesized)
tggatgtgtgtgtgagtgtgctgtgccactgagggcacaccccaagctcacgggcccgcatgaggttgactctctcggctgcttattcatggactctcaaggggactgggctgcacagga

SEQ ID NO: 340581 - DNA, 120 bp, Artificial Sequence
  ENSG00000137868_33 (sequence is synthesized)
atgaatgaatgaaggggccttattcccccatctagaaagtgggactgactccacctccttgatttatggaatacagctgggaggtaatgggggtgcaggggctgagcaactccctcctgc

SEQ ID NO: 340582 - DNA, 120 bp, Artificial Sequence
  ENSG00000137868_34 (sequence is synthesized)
ccttcaggattaaagagaaatgtttctttgtttgggttttccgtctttctttctttttttttctcttttaagcctcttttcacatctgtagtggctttttttttctctcgcctggggtca

SEQ ID NO: 340583 - DNA, 120 bp, Artificial Sequence
  ENSG00000137868_35 (sequence is synthesized)
agggcttggaagctggagaccgaagagaggcctgggtgggctcactgcaggccccatgtctgcccctccagcatgggtctctctgcttgtttcaccttccaggggcctggaagatactgg

SEQ ID NO: 340584 - DNA, 120 bp, Artificial Sequence
  ENSG00000137868_36 (sequence is synthesized)
ctggtgaaggggggccctggaagatcctgggtggggggagctatctgggagttctcccagcttggaggcccaaaccaggatgcaagtccaaccttccagatgtctgtcaccccttgacca

SEQ ID NO: 340585 - DNA, 120 bp, Artificial Sequence
  ENSG00000137868_37 (sequence is synthesized)
gtccccaagatgtcacatgagtgtgcactgggcagatccttgtgctgctgctcctggccatgctggtgaggcgccgccagctctggcctgactgtgtgcgtggcaggcccggcctgccca

SEQ ID NO: 340586 - DNA, 120 bp, Artificial Sequence
  ENSG00000137868_38 (sequence is synthesized)
agattatttcaatagacagtccttgggcacctaccgtatgccaggctctggcttgaaggaatgcaaacatcagtttaatatgtagccttatcccccagtaactcaaactcaggagaaact

SEQ ID NO: 340587 - DNA, 120 bp, Artificial Sequence
  ENSG00000137868_39 (sequence is synthesized)
ggagggaaataacatttgcaaagtattttgtgattttaagagtttccacagacattatctcattggatccttacaacagcctctgaggtagggactattatccccattttacagaggaag

SEQ ID NO: 340588 - DNA, 120 bp, Artificial Sequence
  ENSG00000137868_40 (sequence is synthesized)
cgccacacccagccttggcctgggcctcccctcagacactggcctcagttggggagaagagtgctcagcaagtactgccctcagagtttgtctgggaatgctctggggcagcagcaagaa

SEQ ID NO: 340589 - DNA, 120 bp, Artificial Sequence
  ENSG00000137868_41 (sequence is synthesized)
ggagggacccccctgccttccctgcccttaagaagcttattcaggatgggggtacaggagccctcgggaaattgagtgtgtaccctccacatggagatgaaccctgggtgccaccaagta

SEQ ID NO: 340590 - DNA, 120 bp, Artificial Sequence
  ENSG00000137868_42 (sequence is synthesized)
ctccacatggagatgaaccctgggtgccaccaagtattcacatgggggtggacccaggtctggaggtgtcaaattcaaaatggtacattcctggctgggctcagtggctcacacctgtaa

SEQ ID NO: 340591 - DNA, 120 bp, Artificial Sequence
  ENSG00000137868_43 (sequence is synthesized)
gaggggacacgagaggccctgtcctcttcccgtgccagcttgctcaggccctcagtcccagacgggcttttcccagagagctaaaatggctttttttttctctcgcctggggtcaaagga

SEQ ID NO: 340592 - DNA, 120 bp, Artificial Sequence
  ENSG00000137868_44 (sequence is synthesized)
acttcacaggcagcttaaggcctggaatgtggcttagacaaatctggtcacccttgtgatctcccttgcgcagtggcagcaggagaagcctgagggtgtctgacctggaatgaccctctt

SEQ ID NO: 340593 - DNA, 120 bp, Artificial Sequence
  ENSG00000137868_45 (sequence is synthesized)
ctgtgtcctggtctaggatgtgcccgtgggacacaagcttccctttgccccagtttcagctagcagaggccagagggctaggggtgggaagaaacggtgaagagatgtgactgagtaaag

SEQ ID NO: 340594 - DNA, 120 bp, Artificial Sequence
  ENSG00000137868_46 (sequence is synthesized)
caggcgagagttggagacagatcttaggaagaacttcctggcattgatggttctttgataggagactggccttgtatttgtgagagagaaaagggaagctttggagggcacggacctcat

SEQ ID NO: 340595 - DNA, 120 bp, Artificial Sequence
  ENSG00000137868_47 (sequence is synthesized)
accctcccttgcacagaatggctgcagtggaggactggctcctgctccccagaatccttgtcatcaagagggacaactaccagcttgggacagcgggaagaccctggcctggccttggtc

SEQ ID NO: 340596 - DNA, 120 bp, Artificial Sequence
  ENSG00000137868_48 (sequence is synthesized)
atttagggtcctgctggcccttttcctgggccccttgggagggaggagggctcccgggcctgagtggtgctgttcaccatactccttcctttgaggactacaggattccatctcccgctg

SEQ ID NO: 340597 - DNA, 120 bp, Artificial Sequence
  ENSG00000137868_49 (sequence is synthesized)
gctctgattctatgatgggccgccctgcagccttccattgtgcatgggattccatgccttcaaacatgtgccccttccaagcttggctgctctgcaggagaggcagggaacaaggtggct

SEQ ID NO: 340598 - DNA, 120 bp, Artificial Sequence
  ENSG00000137868_50 (sequence is synthesized)
gggcccagccctcaggaactttaagtctaggaggtggcggagaaggggaagtgggcagagtagggggaagagaaagcctgaaatggcccccacccccaatgcctgtgttagtgatccccc

SEQ ID NO: 340599 - DNA, 120 bp, Artificial Sequence
  ENSG00000137868_51 (sequence is synthesized)
agcttccctttggtcaggctggagagggaatgggagtgaagcttgatggaggccggcaagtgcgaagtcagggatggtctaagagggctgagaggagaattccggaacctcaggaccttg

SEQ ID NO: 340600 - DNA, 120 bp, Artificial Sequence
  ENSG00000137868_52 (sequence is synthesized)
ctcactggctgctggctggggctgtgaagctgtccagtctagaactcaaagagtgatggtacaggctttagagccagacaacctgagtgtgaatccagcttcaccacttcattcattcac

SEQ ID NO: 340601 - DNA, 120 bp, Artificial Sequence
  ENSG00000137868_53 (sequence is synthesized)
tcacccattcattcaacaacatatttgaagcacatactttgtaccagggacatttccaggcactggactacagctatgaacaagacaaacagtccctagcctcccaagagccgtcacttc

SEQ ID NO: 340602 - DNA, 120 bp, Artificial Sequence
  ENSG00000137868_54 (sequence is synthesized)
agaagggcagacatgacacgcaaacaaaatgatgccaggtggtaccaagtgccttggggaaacagtgccacctttctgagaccgtttctccatccgtccatggagctgataacaccagtc

SEQ ID NO: 340603 - DNA, 120 bp, Artificial Sequence
  ENSG00000137868_55 (sequence is synthesized)
cctcagggtggaggtgaagactaagaggttgctttgagagggggaacttggtggctttttttcaccacctagaacctggcacatactaagctctcaataaaagtatattgaaccaacaaa

SEQ ID NO: 340604 - DNA, 120 bp, Artificial Sequence
  ENSG00000137869_0 (sequence is synthesized)
gagtttctggagggctgaacacgtggaggcaaacaggaaggtgaagaagaacttatcctatcaggacggaaggtcctgtgctcgggatcttccagacgtcgcgactctaaattgccccct

SEQ ID NO: 340605 - DNA, 120 bp, Artificial Sequence
  ENSG00000137869_1 (sequence is synthesized)
ctgaggtcaaggaacacaagatggttttggaaatgctgaacccgatacattataacatcaccagcatcgtgcctgaagccatgcctgctgccaccatgccagtcctgctcctcactggcc

SEQ ID NO: 340606 - DNA, 120 bp, Artificial Sequence
  ENSG00000137869_2 (sequence is synthesized)
tttttctcttggtgtggaattatgagggcacatcctcaataccaggtcctggctactgcatgggaattggacccctcatctcccacggcagattcctgtggatggggatcggcagtgcct

SEQ ID NO: 340607 - DNA, 120 bp, Artificial Sequence
  ENSG00000137869_3 (sequence is synthesized)
gcaactactacaaccgggtatatggagaattcatgcgagtctggatctctggagaggaaacactcattatcagcaagtcctcaagtatgttccacataatgaagcacaatcattacagct

SEQ ID NO: 340608 - DNA, 120 bp, Artificial Sequence
  ENSG00000137869_4 (sequence is synthesized)
ctcgattcggcagcaaacttgggctgcagtgcatcggtatgcatgagaaaggcatcatatttaacaacaatccagagctctggaaaacaactcgacccttctttatgaaagctctgtcag

SEQ ID NO: 340609 - DNA, 120 bp, Artificial Sequence
  ENSG00000137869_5 (sequence is synthesized)
gccccggccttgttcgtatggtcacagtctgtgctgaatccctcaaaacacatctggacaggttggaggaggtgaccaatgaatcgggctatgtggacgtgttgacccttctgcgtcgtg

SEQ ID NO: 340610 - DNA, 120 bp, Artificial Sequence
  ENSG00000137869_6 (sequence is synthesized)
tcatgctggacacctctaacacgctcttcttgaggatccctttggacgaaagtgctatcgtggttaaaatccaaggttattttgatgcatggcaagctctcctcatcaaaccagacatct

SEQ ID NO: 340611 - DNA, 120 bp, Artificial Sequence
  ENSG00000137869_7 (sequence is synthesized)
tctttaagatttcttggctatacaaaaagtatgagaagtctgtcaaggatttgaaagatgccatagaagttctgatagcagaaaaaagacgcaggatttccacagaagagaaactggaag

SEQ ID NO: 340612 - DNA, 120 bp, Artificial Sequence
  ENSG00000137869_8 (sequence is synthesized)
aatgtatggactttgccactgagttgattttagcagagaaacgtggtgacctgacaagagagaatgtgaaccagtgcatattggaaatgctgatcgcagctcctgacaccatgtctgtct

SEQ ID NO: 340613 - DNA, 120 bp, Artificial Sequence
  ENSG00000137869_9 (sequence is synthesized)
ctttgttcttcatgctatttctcattgcaaagcaccctaatgttgaagaggcaataataaaggaaatccagactgttattggtgagagagacataaagattgatgatatacaaaaattaa

SEQ ID NO: 340614 - DNA, 120 bp, Artificial Sequence
  ENSG00000137869_10 (sequence is synthesized)
aagtgatggaaaacttcatttatgagagcatgcggtaccagcctgtcgtggacttggtcatgcgcaaagccttagaagatgatgtaatcgatggctacccagtgaaaaaggggacaaaca

SEQ ID NO: 340615 - DNA, 120 bp, Artificial Sequence
  ENSG00000137869_11 (sequence is synthesized)
ttatcctgaatattggaaggatgcacagactcgagtttttccccaaacccaatgaatttactcttgaaaattttgcaaagaatgttccttataggtactttcagccatttggctttgggc

SEQ ID NO: 340616 - DNA, 120 bp, Artificial Sequence
  ENSG00000137869_12 (sequence is synthesized)
cccgtggctgtgcaggaaagtacatcgccatggtgatgatgaaagccatcctcgttacacttctgagacgattccacgtgaagacattgcaaggacagtgtgttgagagcatacagaaga

SEQ ID NO: 340617 - DNA, 120 bp, Artificial Sequence
  ENSG00000137869_13 (sequence is synthesized)
tacacgacttgtccttgcacccagatgagactaaaaacatgctggaaatgatctttaccccaagaaactcagacaggtgtctggaacactagagaaggctggtcagtacccactctggag

SEQ ID NO: 340618 - DNA, 120 bp, Artificial Sequence
  ENSG00000137869_14 (sequence is synthesized)
catttctcatcagtagttcacatacaaatcatccatccttgccaatagtgtcatcctcacagtgaacactcagtggcccatggcattttataggcatacctcctatgggttgtcaccaag

SEQ ID NO: 340619 - DNA, 120 bp, Artificial Sequence
  ENSG00000137869_15 (sequence is synthesized)
ctaggtgctatttgtcatctgctcctgttcacaccagagaaccaggctacaagagaaaaagcagaggccaagagtttgagggagaaatagtcggtgaagaaaccgtatccataaagaccc

SEQ ID NO: 340620 - DNA, 120 bp, Artificial Sequence
  ENSG00000137869_16 (sequence is synthesized)
gattccaccaaatgtgctttgagaaggataggccttcattaacaaaatgtatgtctggttccccagtagagctctactgcctcaacccaaggggatttttatgtctggggcagaaacact

SEQ ID NO: 340621 - DNA, 120 bp, Artificial Sequence
  ENSG00000137869_17 (sequence is synthesized)
caagttgattagaaagaccaggccaatgtcagggtacctggggccaaacccacctgctagtgtgaattaaagtactttaattttgttttctgtggaggtggaaaagcaacattcatagtc

SEQ ID NO: 340622 - DNA, 120 bp, Artificial Sequence
  ENSG00000137869_18 (sequence is synthesized)
gtctgtggcaaaagtttaatcagaggaaattctttcccagtctgtcgatttatgcctcagccacttgcctgtgctacaattcattgtgttacctgtagattcaggtaatacaaactatat

SEQ ID NO: 340623 - DNA, 120 bp, Artificial Sequence
  ENSG00000137869_19 (sequence is synthesized)
ataatcatcaagtaatacaaactaatttagtaatagcctgggttaagtattattagggccctgtgtctgctgtagaaaaaaaaattcacatgatgcacttcaaattcaaataaaaatcct

SEQ ID NO: 340624 - DNA, 120 bp, Artificial Sequence
  ENSG00000137869_20 (sequence is synthesized)
tttggcatgttcccatttttgcttagctcaattagtgtggctaaccaagagataactgtaaatgtgacattgatttgctcttactacagcttcagtgattgggggaggaaaagtcccaac

SEQ ID NO: 340625 - DNA, 120 bp, Artificial Sequence
  ENSG00000137869_21 (sequence is synthesized)
ccaatgggctcaaacttctaaggggtactcctctcatccccttatccttctccctcgacattttctccctctttcttcccatgaccccaaagccaagggcaacagatcagtaaagaacgt

SEQ ID NO: 340626 - DNA, 120 bp, Artificial Sequence
  ENSG00000137869_22 (sequence is synthesized)
ggtcagagtagaacccctgaagtattttttaatcctacctcaaaatttaacagttacctgagagatttaacattatctagttcattgaatcattgtatgtggtcatggataaattgcaca

SEQ ID NO: 340627 - DNA, 120 bp, Artificial Sequence
  ENSG00000137869_23 (sequence is synthesized)
ccttggaattcgctttctaaaggaaatcaaatgaatggaggaactttccaaacaccactttacttgtgttatatagccaatataactatctctactgaatgtcattgaaaaactaaaaaa

SEQ ID NO: 340628 - DNA, 120 bp, Artificial Sequence
  ENSG00000137869_24 (sequence is synthesized)
ttaaacttatttacaaataggtaaatatttgtcattgaatccattgccatcccatttgactgttcttttcatcctactgtctagtaataagctgagtataagatgacagtgtaatctccc

SEQ ID NO: 340629 - DNA, 120 bp, Artificial Sequence
  ENSG00000137869_25 (sequence is synthesized)
tgaaagcaggagctactttctttcttttgtaatctatttccatccccatttccctgtcctgtctccctgtattcactcccaagctcagttctgaatagacattcctgctcagagatactc

SEQ ID NO: 340630 - DNA, 120 bp, Artificial Sequence
  ENSG00000137869_26 (sequence is synthesized)
ccaactgatgcagaaaccaaataaagaggtaggtattccaagaattcaagaatggacattagtaaagaataaaacatttatttgagcttggaattatttggatcatctatatggcctaaa

SEQ ID NO: 340631 - DNA, 120 bp, Artificial Sequence
  ENSG00000137869_27 (sequence is synthesized)
aatatatggactatgcctgtgtacctgaatacgtatgtagtcaggtcaagacaatcatccaaataacttagacccctaaaagcaaggccaggatttgcaatttaatgtgtcccaattaat

SEQ ID NO: 340632 - DNA, 120 bp, Artificial Sequence
  ENSG00000137869_28 (sequence is synthesized)
tcacttgaaaattagtaacactctgtttacgttgcctctggctggagctgcatggtggaagaagcccaactttggatccatgtacttcacccatccaatactcttgggacatttatgtgt

SEQ ID NO: 340633 - DNA, 120 bp, Artificial Sequence
  ENSG00000137869_29 (sequence is synthesized)
attttatctgtatatatgaagccaatgtctatgtctacacagtcaaagtgaaatgcatgtttgatatagctgtacatagatatctattttgcaggtacaaaaatatcctgggggaaaact

SEQ ID NO: 340634 - DNA, 120 bp, Artificial Sequence
  ENSG00000137869_30 (sequence is synthesized)
gggagtggaagggtggggggtgggagtgagggacatgggggagggacaggaagaggagaagtgttggtttgaacgatccaagcaaactctcccagaatcaaattacctgggtagttgttc

SEQ ID NO: 340635 - DNA, 120 bp, Artificial Sequence
  ENSG00000137869_31 (sequence is synthesized)
aacttttcactctgcttagcctgtatagacaaaccccatatatttgtagaggcttggccttggaattctggaataccattggcttttcagtaggctgatgaacacattttgaaaattcta

SEQ ID NO: 340636 - DNA, 120 bp, Artificial Sequence
  ENSG00000137869_32 (sequence is synthesized)
ttatcttcagaattttgccccattgttaagtgcttaaccgtcactcttgaatgtgcaatgtgctgtggattccattttcatcagttctgaaagaactgcaatgtgtaaattatcagtgaa

SEQ ID NO: 340637 - DNA, 120 bp, Artificial Sequence
  ENSG00000137869_33 (sequence is synthesized)
atgcatgcatataagggctctatcattatcaaattgtaaggacaattgtacccttctatatctttgggcatgctagacacccccatgccttcattgagatcccattttccccctctcaag

SEQ ID NO: 340638 - DNA, 120 bp, Artificial Sequence
  ENSG00000137869_34 (sequence is synthesized)
tggaaaataatcacatccagcaagctctctcattattgagaaataccatttggaaattgccactttttattcctaagcagcacctttcactgttcatgatgctaatgttccacaaaagca

SEQ ID NO: 340639 - DNA, 120 bp, Artificial Sequence
  ENSG00000137869_35 (sequence is synthesized)
tgtgccattggcccactgaaggatagagggacccttttcaatctatatcagctgggctctgggactgaatctctcacctattcttgcagaaagacatactaattaaaccttgtcaaagta

SEQ ID NO: 340640 - DNA, 120 bp, Artificial Sequence
  ENSG00000137869_36 (sequence is synthesized)
gagtttctggagggctgaacacgtggaggcaaacaggaaggtgaagaagaacttatcctatcaggacggaaggtcctgtgctcgggatcttccagacgtcgcgcggtgtcagaaaccctg

SEQ ID NO: 340641 - DNA, 120 bp, Artificial Sequence
  ENSG00000137869_37 (sequence is synthesized)
acattataaaacagtaagtgaatctgtactgtacagcaccctctgaagcaacaggagctatagatgaaccttttaggggattctgtaatttttctgtccctttgatttccacaggactct

SEQ ID NO: 340642 - DNA, 120 bp, Artificial Sequence
  ENSG00000137869_38 (sequence is synthesized)
actgatctcttagcaacaagaagcacctttataaaagatggcacacgaagagtgattgccagaaaagccacctggttcttaaacagccgcgcatcattagcaaaactcaccatcttcaag

SEQ ID NO: 340643 - DNA, 120 bp, Artificial Sequence
  ENSG00000137869_39 (sequence is synthesized)
tgaagacttaaatgtctttccagaaaattggaattagaaatgagaattgttacttcatctgtactccttcaataaagattgcgtaattataaacccacttggggcactcaaagggcataa

SEQ ID NO: 340644 - DNA, 120 bp, Artificial Sequence
  ENSG00000137869_40 (sequence is synthesized)
aaaaggagatattttatggggatgaaataaaaatcctcctaattgagcttggaaacagtgttacacagagatactgcagatctaagaaaacagactagaaaattgcagtttcaataaaga

SEQ ID NO: 340645 - DNA, 120 bp, Artificial Sequence
  ENSG00000137869_41 (sequence is synthesized)
gggagtttctggagggctgaacacgtggaggcaaacaggaaggtgaagaagaacttatcctatcaggacggaaggtcctgtgctcgggatcttccagacgtcgccatgtggaaaagctcc

SEQ ID NO: 340646 - DNA, 120 bp, Artificial Sequence
  ENSG00000137869_42 (sequence is synthesized)
ctgagttccccgcctgccccacctgctgatttctcaggaccgctgataacagctttcatgtggaacttgggattaatatcaagcaagccatggattttgtctccactgaacttgggcatc

SEQ ID NO: 340647 - DNA, 120 bp, Artificial Sequence
  ENSG00000137869_43 (sequence is synthesized)
atggacagtttccattccagcagttaagggcttcctgactttcaacagtggtgctgatcccagttctgaagagtggaacatcagagagcctcccctcctcagccacttgactctaaattg

SEQ ID NO: 340648 - DNA, 120 bp, Artificial Sequence
  ENSG00000137869_44 (sequence is synthesized)
tatgtaatttaagggtatttatgaagaaataaaatagtaattcacttactcataagcaccaatgttttcaattaaagcagatcattttacctaaatacatggcaaataaatctgtttcgc

SEQ ID NO: 340649 - DNA, 120 bp, Artificial Sequence
  ENSG00000137869_45 (sequence is synthesized)
ttggacggtactgaaattttcactctcacatcttgaccatctgtcctttactgaacaaggagctaggagggataacagaccaaaggaatcacatgccattttctacattgctcttgttta

SEQ ID NO: 340650 - DNA, 120 bp, Artificial Sequence
  ENSG00000137869_46 (sequence is synthesized)
ctcgtttttttccctagtgtttctgctttgttcacttataaaatataaatttccataaagtaggggccagcatctactagccttttgtatctttcctcattactctaggaaatagaattc

SEQ ID NO: 340651 - DNA, 120 bp, Artificial Sequence
  ENSG00000137869_47 (sequence is synthesized)
tacccacagttgaaacttaacaaatgtgattagttcgtttggttattaacatatcctaccaccaatcaactttatatatttaaccatttccagttgttcttttgggcatgatatatacat

SEQ ID NO: 340652 - DNA, 120 bp, Artificial Sequence
  ENSG00000137869_48 (sequence is synthesized)
acatatatacatacatacccacacatatatacacacactcctccctcaaagctactaaacatgaaaacattgtgcctatatgataaaaatgtcaatattgctggtgatactgatgctgat

SEQ ID NO: 340653 - DNA, 120 bp, Artificial Sequence
  ENSG00000137869_49 (sequence is synthesized)
ggaaatgacgatattagctgccattaacgtagtatctaatgtgtgccaaacaatattaaaaattgctgtatatacatgtttgccatttattatttataaccttaacaagatgtctcactc

SEQ ID NO: 340654 - DNA, 120 bp, Artificial Sequence
  ENSG00000137869_50 (sequence is synthesized)
ataagactactttccgcactatgatacagaaatgaatattaaaacatgtgcatgctcatgtcaaactcatagaacttgattttattttggcaggattaaaccaatttgcaacttgagtac

SEQ ID NO: 340655 - DNA, 120 bp, Artificial Sequence
  ENSG00000137869_51 (sequence is synthesized)
aaatgccaatatttcagctagttcttgaaaagttgtgccattgtgcaaaagtcattgaattatttgataactttttaacctaatgaccaaacacctgacaggaatggaattcactggact

SEQ ID NO: 340656 - DNA, 120 bp, Artificial Sequence
  ENSG00000137869_52 (sequence is synthesized)
tgtatctaattgttttacactgttttctatgggttacattttttattgccattgtgacctttatccacacactaacctggaaagtataggaataaaagaattggcattctttctgataca

SEQ ID NO: 340657 - DNA, 120 bp, Artificial Sequence
  ENSG00000137869_53 (sequence is synthesized)
gtgtaagtaatacaactttggaagatttatgagtacaattggattggtttttttcccttgtgtctttgctgtttttcttggcctctcagcaaggatttgaaagatgccatagaagttctg

SEQ ID NO: 340658 - DNA, 120 bp, Artificial Sequence
  ENSG00000137869_54 (sequence is synthesized)
tcagggagtttctggagggctgaacacgtggaggcaaacaggaaggtgaagaagaacttatcctatcaggacggaaggtcctgtgctcgggatcttccagacgtcgcgaccgctgataac

SEQ ID NO: 340659 - DNA, 120 bp, Artificial Sequence
  ENSG00000137869_55 (sequence is synthesized)
tctgtggtaatacaactttggaagatttatgagtacaattggattggtttttttcccttgtgtctttgctgtttttcttggcctctcagcaaggatttgaaagatgccatagaagttctg

SEQ ID NO: 340660 - DNA, 120 bp, Artificial Sequence
  ENSG00000137869_56 (sequence is synthesized)
tgaacacgtggaggcaaacaggaaggtgaagaagaacttatcctatcaggacggaaggtcctgtgctcgggatcttccagacgtcgctgcttacttcacccagggctgggggtagcaggt

SEQ ID NO: 340661 - DNA, 120 bp, Artificial Sequence
  ENSG00000137869_57 (sequence is synthesized)
gctccctggaacttggcaaacatcctcatattgggaggagcttggctggttttccttgatctccctcttcccagtgtgtggctcttgacaactgattggaccccagacttaagctctgca

SEQ ID NO: 340662 - DNA, 120 bp, Artificial Sequence
  ENSG00000137869_58 (sequence is synthesized)
ggctacatctcagggtgtttcctgtgaaagttccagaagaaagctgtatggtcagcttggggaaatatgtggttcatgctggaatgctggacataccacattattggaaagatgcacatt

SEQ ID NO: 340663 - DNA, 120 bp, Artificial Sequence
  ENSG00000137869_59 (sequence is synthesized)
gaatgaccgacaaaatgaaactcaactttccaaatgctggtaatgagagaagattctgttctaatgaccagttgtttcctgaaagaatgtcagctcgattcataatgaatgcattctaac

SEQ ID NO: 340664 - DNA, 120 bp, Artificial Sequence
  ENSG00000137869_60 (sequence is synthesized)
catgacagccacagtcaggacacaaaaaacaaagtgtccttgatcccaggaaacagccctctggaatctgtgaaatctagaaactagattgggaaaactctgacacccctgccccatgac

SEQ ID NO: 340665 - DNA, 120 bp, Artificial Sequence
  ENSG00000137869_61 (sequence is synthesized)
caaccaagactaagagtcccaggaagattgaggtcacagaaggcagaggcctgccccctctccaggagatccctgacccatgtggggtcatgggcggggcatgagtgatgtgatgggaaa

SEQ ID NO: 340666 - DNA, 120 bp, Artificial Sequence
  ENSG00000137869_62 (sequence is synthesized)
ctggctcctggctccaagtagaacgtgaccaactggagcctgacaggaggtccctggcactggtcagcccatcaaaccagaatgatgacagtatgcaatgactcagaatcatcacactca

SEQ ID NO: 340667 - DNA, 120 bp, Artificial Sequence
  ENSG00000137869_63 (sequence is synthesized)
gagggaagatgacctccagcacaccagggcagagtgggggccacatgaaggtgcaagagtgggagggaaccacaacgccttggcagagaggagagcaagtgggggccaagccacaaagct

SEQ ID NO: 340668 - DNA, 120 bp, Artificial Sequence
  ENSG00000137869_64 (sequence is synthesized)
cttcaaggccagtcaacagtgaaacctgaaggagtcccatccatccccaagtctgcttgagttaaagccctgcaccctcacaagcagctggagggaggggaggaaagatattttcaaaag

SEQ ID NO: 340669 - DNA, 120 bp, Artificial Sequence
  ENSG00000137869_65 (sequence is synthesized)
agccatcatatatggggtgtgggaaagaaaaacttgctgcgtctaacaccagagagcctctccaagccaagccatctgcctcagggcaaaggagggaatggaagcgggagagaagggttt

SEQ ID NO: 340670 - DNA, 120 bp, Artificial Sequence
  ENSG00000137869_66 (sequence is synthesized)
ggagccagctctcagcaacatgtttctatctggagaaatgagctgagaagatctgaatcttctccagcctgttctgcaaatgtgggataatcggcccctggcccaaaggctggtgctcac

SEQ ID NO: 340671 - DNA, 120 bp, Artificial Sequence
  ENSG00000137869_67 (sequence is synthesized)
agcgtggctccggcattacccaggactttggttcttggtgatgggaaagaggacaaatttggaagccagagaagctagggctggatggtctggaggaaaacctccacttctctcagactg

SEQ ID NO: 340672 - DNA, 120 bp, Artificial Sequence
  ENSG00000137869_68 (sequence is synthesized)
ttttttctgaggaaacagatgattgcaacctcagaggttgggaggatgaaatgatgtaatgcatctggagctgctctgtaaactgtaaaatgctatgcaaacggtgcttgttaatgtgtt

SEQ ID NO: 340673 - DNA, 120 bp, Artificial Sequence
  ENSG00000137869_69 (sequence is synthesized)
tacatatatgggtgagttaacatagtctgacagactggacgccaaactcagagtccaaggcaatggggcattatattctgtgccttagcatctggaaaacatgatgaaattggaaatgca

SEQ ID NO: 340674 - DNA, 120 bp, Artificial Sequence
  ENSG00000137869_70 (sequence is synthesized)
gaacacgtggaggcaaacaggaaggtgaagaagaacttatcctatcaggacggaaggtcctgtgctcgggatcttccagacgtcgcgtatgtatctcttaatctgactgagccctcaacc

SEQ ID NO: 340675 - DNA, 120 bp, Artificial Sequence
  ENSG00000137869_71 (sequence is synthesized)
gggagtttctggagggctgaacacgtggaggcaaacaggaaggtgaagaagaacttatcctatcaggacggaaggtcctgtgctcgggatcttccagacgtcgcactccactgtcagatc

SEQ ID NO: 340676 - DNA, 120 bp, Artificial Sequence
  ENSG00000137871_0 (sequence is synthesized)
acggctcggctgccagctccgcaatgggagccgccgccgtcgccgcagtgtagtttttcgtgctcctccttttcctcctcctctttctcctcctcctcagggctccagtcaggccgatcc

SEQ ID NO: 340677 - DNA, 120 bp, Artificial Sequence
  ENSG00000137871_1 (sequence is synthesized)
gctccgctcacggaaggaaaacagaaataacttgctggcttgtctggagtcacatgtacttaggtgacaatttacagaaagtcatctctgcagcttgatgggcgacaacccttttcaacc

SEQ ID NO: 340678 - DNA, 120 bp, Artificial Sequence
  ENSG00000137871_2 (sequence is synthesized)
aaaaagtaattcaaaaatggcagaactgtttatggaatgtgaagaagaggagctggaaccatggcagaagaaagtaaaagaagttgaggatgacgatgatgatgagccaatctttgttgg

SEQ ID NO: 340679 - DNA, 120 bp, Artificial Sequence
  ENSG00000137871_3 (sequence is synthesized)
cgagatatcaagttcaaaaccagcaatttcaaatattttgaacagagttaaccccagctcatattcaaggggactaaagaatggtgcactcagtcgaggtattactgctgcattcaagcc

SEQ ID NO: 340680 - DNA, 120 bp, Artificial Sequence
  ENSG00000137871_4 (sequence is synthesized)
tacaagtcaacactacacgaatccaacatcaaatccagtgcctgcctcaccaataaattttcatcctgagtctagatcttcagatagttctgttattgttcagcctttttctaaacctgg

SEQ ID NO: 340681 - DNA, 120 bp, Artificial Sequence
  ENSG00000137871_5 (sequence is synthesized)
ttatataacaaactcatcacgagttgtgtctaataagtcatcagagttactgtttgacttgacccaggatacaggattatcacattaccaagggggaccaacactttctatggcaggtat

SEQ ID NO: 340682 - DNA, 120 bp, Artificial Sequence
  ENSG00000137871_6 (sequence is synthesized)
gagtgaaagttcatttttatcaaaacgtccttctacttctgaagtaaataatgttaatccaaagaagcctaaacccagcgaaagtgtttctggagcaaattcctcagctgtattaccttc

SEQ ID NO: 340683 - DNA, 120 bp, Artificial Sequence
  ENSG00000137871_7 (sequence is synthesized)
agttaaatctccttcagtgacttcttcccaggctatgctagcaaaaggtacaaatacctcatcaaatcagtctaaaaatggaacaccttttccaagagcttgtccaaagtgcaacattca

SEQ ID NO: 340684 - DNA, 120 bp, Artificial Sequence
  ENSG00000137871_8 (sequence is synthesized)
tttcaatcttttggatcctttgaaaaatcacatgaagtattgttgtccagacatgataaataactttttgggactggctaaaacagaattttcaagtacagtaaataaaaacacaactat

SEQ ID NO: 340685 - DNA, 120 bp, Artificial Sequence
  ENSG00000137871_9 (sequence is synthesized)
tgattcagagaaaggaaaattgatcatgttagttaatgacttttattatggaaaacatgaaggagatgtccaggaggaacagaagactcacacaacctttaaatgcttcagttgcttgaa

SEQ ID NO: 340686 - DNA, 120 bp, Artificial Sequence
  ENSG00000137871_10 (sequence is synthesized)
aattctaaaaaataacattaggtttatgaaccacatgaaacaccatttggaacttgagaagcagagcagtgagagctgggaaaaccataccacctgccagcactgctaccgtcagtttcc

SEQ ID NO: 340687 - DNA, 120 bp, Artificial Sequence
  ENSG00000137871_11 (sequence is synthesized)
cacaccatttcagttgcagtgtcacatcgaaagtacacatacgccccatgaattttctactatttgtaaaatctgtgaattgtcatttgaaacagaacatgttcttttacaacatatgaa

SEQ ID NO: 340688 - DNA, 120 bp, Artificial Sequence
  ENSG00000137871_12 (sequence is synthesized)
ggacaatcataaacctggtgaaatgccatatgtctgccaggtttgtaattatagatcatcatcattttctgatgtagaaactcattttagaacatcccatgaaaacactaagaacttgct

SEQ ID NO: 340689 - DNA, 120 bp, Artificial Sequence
  ENSG00000137871_13 (sequence is synthesized)
atgcccgttttgcctcaaagttattaaaattgcaacaccatatatgcatcattatatgaagcatcagaaaaaaggaatacatcgttgtacaaaatgcaggctgcagtttttgacatgcaa

SEQ ID NO: 340690 - DNA, 120 bp, Artificial Sequence
  ENSG00000137871_14 (sequence is synthesized)
ggagaaaatggatcataagactcaacaccatcgaacatttataaaacctaaacaactagaaggattgcctcctggaacaaaagttactattcgagcttcagttggacctctgcaatcagg

SEQ ID NO: 340691 - DNA, 120 bp, Artificial Sequence
  ENSG00000137871_15 (sequence is synthesized)
agcttcacctacaccttccattagtgcaagtgcttctacccttcagctctcacctccaaggactaaaaatataactgctaaaaatcctgcaaaatctaatacaagtaaacctaatacagt

SEQ ID NO: 340692 - DNA, 120 bp, Artificial Sequence
  ENSG00000137871_16 (sequence is synthesized)
caaatccaacgcaagtaaacctaatacaagtaagcctaatggaagtaaatctaaatacaaaccaaaaatctctaatatgcaaaagaaacaaagcacattggctagtagcaataaaaaaag

SEQ ID NO: 340693 - DNA, 120 bp, Artificial Sequence
  ENSG00000137871_17 (sequence is synthesized)
taaagtcaatacagcattgaggaatttaaggtatcgtcggggcattcacaaatgcattgagtgttgttccgaaataaaagattttgcaaaccactttcctacgtacgtccactgtagttt

SEQ ID NO: 340694 - DNA, 120 bp, Artificial Sequence
  ENSG00000137871_18 (sequence is synthesized)
acaacactagctgtagcaaagcctatgtaaatcatatgatgagctttcatagtaaccgtccaagcaaaaggttttgtatttttaagaagcattcagaaaatctccggggcattactctag

SEQ ID NO: 340695 - DNA, 120 bp, Artificial Sequence
  ENSG00000137871_19 (sequence is synthesized)
tgtgccttaattgtgatttcctaagtgatgtttctggcttagataatatggctacacacttaagtcaacataaaactcatacttgccaagttgtaatgcagaaagtttctgtttgtatcc

SEQ ID NO: 340696 - DNA, 120 bp, Artificial Sequence
  ENSG00000137871_20 (sequence is synthesized)
caacttctgagcacctttctgaattaaaaaaagaagctcccgcaaaggaacaagaacctgtgtctaaggaaattgcaagacctaacatggctgaaagagaaacagaaacatcaaattctg

SEQ ID NO: 340697 - DNA, 120 bp, Artificial Sequence
  ENSG00000137871_21 (sequence is synthesized)
aaagtaaacaagataaagctgcttcttcaaaagaaaaaaatggatgtaatgcaaattcatttgaaggctcatcaacaacaaaaagtgaagaaagcataacagtttcagataaggaaaatg

SEQ ID NO: 340698 - DNA, 120 bp, Artificial Sequence
  ENSG00000137871_22 (sequence is synthesized)
aaacctgtcttgcagaccaggaaactggctcaaaaaacatcgtcagttgtgattcaaatattggtgcagataaagtggaaaagaaaaaacaaatacaacacgtttgtcaggaaatggagt

SEQ ID NO: 340699 - DNA, 120 bp, Artificial Sequence
  ENSG00000137871_23 (sequence is synthesized)
tgaagatgtgccaaagttcagaaaacataatcttatctgatcagattaaagatcacaactccagtgaagccagattttcttcaaagaatattaaggatttgcgattagcatcagataatg

SEQ ID NO: 340700 - DNA, 120 bp, Artificial Sequence
  ENSG00000137871_24 (sequence is synthesized)
taagcattgatcagtttttgagaaaaagacatgaacctgaatctgttagttctgatgttagcgagcaaggcagtattcatttggaacctctgactccatccgaggtacttgagtatgaag

SEQ ID NO: 340701 - DNA, 120 bp, Artificial Sequence
  ENSG00000137871_25 (sequence is synthesized)
ccacagagattcttcagaaaggtagtggtgatccttcagccaagactgatgaagtagtgtctgatcaaacagatgacattcctggaggaaataaccctagcacaacagaggcaacagtag

SEQ ID NO: 340702 - DNA, 120 bp, Artificial Sequence
  ENSG00000137871_26 (sequence is synthesized)
acctggaagacgaaaaagaaagaagttgaaattagtcattttaagtttcagtgtaccaacgataagggcatttggaacagtgctatcaggtgagctcagtggtgctgttgtaggttcaga

SEQ ID NO: 340703 - DNA, 120 bp, Artificial Sequence
  ENSG00000137871_27 (sequence is synthesized)
aatggaaatatgtaagggaggtcacacatacactttacctgtatgttcaacctatgttatcaaacaaatcaattcaccaataatagcatgattagtagggattcccaaaaagtttttaaa

SEQ ID NO: 340704 - DNA, 120 bp, Artificial Sequence
  ENSG00000137871_28 (sequence is synthesized)
aacacgaacaggattttaatgataattaaatttgcagtggaaaggtctcatttaatggttttcaaggaaatgggatttggttgctgacatgaattgatgatattagtaatatttataaag

SEQ ID NO: 340705 - DNA, 120 bp, Artificial Sequence
  ENSG00000137871_29 (sequence is synthesized)
cctttcaaacttccatcaatcctaagctaaaaatctttattacctgtatatccttttcagttaactgagaggaagggatttggaaaccatgtacttttggggagtaattgattaaaaaca

SEQ ID NO: 340706 - DNA, 120 bp, Artificial Sequence
  ENSG00000137871_30 (sequence is synthesized)
atggctgattggcattgttaatgaaggctttatttgtgaggatgatgctggtaaatggagcatgcttagagtactaaattgatctaatgagaatttggatgaacataaacttaattttgg

SEQ ID NO: 340707 - DNA, 120 bp, Artificial Sequence
  ENSG00000137871_31 (sequence is synthesized)
atttaatataacattccagtcagacgcatgtaaacagaatatttgaatctttgtacctccatacaagtgttagcctgccaggctgtaagcttaccttaattaaactttcagtgaaagtgg

SEQ ID NO: 340708 - DNA, 120 bp, Artificial Sequence
  ENSG00000137871_32 (sequence is synthesized)
aattattaagatataaatttatatttgtgctttttgtcagtgtgtaagctgtgtagaaattctttgatgtattagttgtattaatgtaaagtagaaacccattgttgaaactcctgtagc

SEQ ID NO: 340709 - DNA, 120 bp, Artificial Sequence
  ENSG00000137871_33 (sequence is synthesized)
tattatgcttttaatattgttttaatgatcttccttagaaataggcccataaaaatggtctggaagccaaaccaaagtatggtataatgtagatattgtaaagcagtaaactgaaaacat

SEQ ID NO: 340710 - DNA, 120 bp, Artificial Sequence
  ENSG00000137871_34 (sequence is synthesized)
gtcctggcatgtattcagccatgtttaagtgacttttctgtaattgtaaaataaaaacttcaaatgggacctaaaacagtgatgtaaaagaactggttttggaaatttagcctaatttat

SEQ ID NO: 340711 - DNA, 120 bp, Artificial Sequence
  ENSG00000137871_35 (sequence is synthesized)
ttatctataagatggctgctaaattgatttttcagttctttttatcatctagaatataatagatatagaaatgaataatatgaagaacagtagtttgctttgaaatactaataaactttt

SEQ ID NO: 340712 - DNA, 120 bp, Artificial Sequence
  ENSG00000137871_36 (sequence is synthesized)
gacctcgacagggaacgcaagcaaaaccacacatttaaaacagacttggtaaaatcagctcgttatttaaagaaacggacgattcctttttctctcctggtttagtcttcgacccacagg

SEQ ID NO: 340713 - DNA, 120 bp, Artificial Sequence
  ENSG00000137871_37 (sequence is synthesized)
ccccttgcttctttcgaacggcggctgtatcccatgaccttttcactttccaagccaacggactgggggtcgttacacacgcggagggcccggaacgcacggctcctcgcctgcaaattc

SEQ ID NO: 340714 - DNA, 120 bp, Artificial Sequence
  ENSG00000137871_38 (sequence is synthesized)
cgagcagtccggattttggggctgcctcccggccacaccagccagcagctcgcacccacatggaggcagggccctggccctcgccccggaccggcgcgtggcggggcgcgtgggtcttcg

SEQ ID NO: 340715 - DNA, 120 bp, Artificial Sequence
  ENSG00000137871_39 (sequence is synthesized)
agggcccgcgacgcggcgcacatgccggtgcccgcctcccgcgtcggcgagaagacagggagctcggacacggggaggctgacccggagcctacccatgaggcagcgcgccggctgcacg

SEQ ID NO: 340716 - DNA, 120 bp, Artificial Sequence
  ENSG00000137871_40 (sequence is synthesized)
atgtgctttggattcttaaattttgtttcactgaatgttcaatgttttaaatggcgattaaaatactctgctgtatatagtagtttttgagtaaatatttgcaataaaaatctgcccccg

SEQ ID NO: 340717 - DNA, 120 bp, Artificial Sequence
  ENSG00000137871_41 (sequence is synthesized)
caaaatttaatttgtaaaaagtttgcacatttctaaaaatactgatgattacagtaattaatggtttgtccagaaataatctcattggtatttccatttaatttaaataaaaatttacat

SEQ ID NO: 340718 - DNA, 120 bp, Artificial Sequence
  ENSG00000137871_42 (sequence is synthesized)
cactcatcatatttcatatgctgttgtaaatgtaaaacttttcttctaatttcagtttctgtttgtatcccaacttctgagcacctttctgagtaagtttaatttttattcagtgcattt

SEQ ID NO: 340719 - DNA, 120 bp, Artificial Sequence
  ENSG00000137871_43 (sequence is synthesized)
tactttgatggattttagcactattgcatttttaaatgtatcattaatacgaatgaaaagtattaaagtatgttgttgtttttttgttttttttttaaagctgcttgttgaaataggttc

SEQ ID NO: 340720 - DNA, 120 bp, Artificial Sequence
  ENSG00000137871_44 (sequence is synthesized)
ctgctctatggagctcgtgacctggtgcaagacaagttggaatttcctaagttcaaagttctgagatgttttcttacacaaaggcagttgagcagccaagttcatgacactagctctcat

SEQ ID NO: 340721 - DNA, 120 bp, Artificial Sequence
  ENSG00000137871_45 (sequence is synthesized)
tattcagctcttttcagctttcaaatgggactagattcttattccaccttatctttgtgtcaggttgacatatcttaacatatttttttttctccagtttgcgctgtctaaaaataacat

SEQ ID NO: 340722 - DNA, 120 bp, Artificial Sequence
  ENSG00000137871_46 (sequence is synthesized)
ttgttgctatggtcttttctttgcttacaataatttttgtttttctctgctgtacttgccttcagaataatagattccaaattatatggctgtttgtcttttgtctgtttgtctgctttc

SEQ ID NO: 340723 - DNA, 120 bp, Artificial Sequence
  ENSG00000137871_47 (sequence is synthesized)
ttaatttcttatacgtcttaagttttaggccagataattgtctttttctcattcgttgtctgtcattgtgctatttttcttatttttcagatgcagaagcagcccagagatttcaaaaaa

SEQ ID NO: 340724 - DNA, 120 bp, Artificial Sequence
  ENSG00000137871_48 (sequence is synthesized)
tatccagggtatacctggacagtgtcccccttcgatggacacaactgatgcctgttctctctttccaaggaatgtgaataatttgactgtgggacctgctcttaggttgtggcctcaaga

SEQ ID NO: 340725 - DNA, 120 bp, Artificial Sequence
  ENSG00000137871_49 (sequence is synthesized)
aatcagatcttggggagactccctttctacatggctggcctcccataaggctgatgttgtttggccagagatggctttaaggcccaccaaattgagcatacttcccactgggggctttgg

SEQ ID NO: 340726 - DNA, 120 bp, Artificial Sequence
  ENSG00000137871_50 (sequence is synthesized)
cttatgatcttaagcttatgagtcagttatgaccaagaaaagcccatcaaaccactgcttcagcatccaagttgaagtttagtcattttggctgctgcctttaaatctttctctagcatg

SEQ ID NO: 340727 - DNA, 120 bp, Artificial Sequence
  ENSG00000137871_51 (sequence is synthesized)
aatgcagtccaaggaatataaaaactctagttgttaggaaaccatggctactttcatatccttggaacaacaggtctccacaattaagttccaaaattgcagttatttttactgacatat

SEQ ID NO: 340728 - DNA, 120 bp, Artificial Sequence
  ENSG00000137871_52 (sequence is synthesized)
ttactgacatataaaatctattaaccagtattaattctgtaattttttaacaataccgattcttgcattttgattttttaaaaattaatttaatagcttggttttatgttctcaaaattt

SEQ ID NO: 340729 - DNA, 120 bp, Artificial Sequence
  ENSG00000137871_53 (sequence is synthesized)
tttatgatgtctatttttatattatattatttaaaatttgtttagtgtttgttttaagaactccaagagatttcttagaattctctacagattttgtgtagctgcctatttgtagatttt

SEQ ID NO: 340730 - DNA, 120 bp, Artificial Sequence
  ENSG00000137871_54 (sequence is synthesized)
aaatttggctgttactaagcccattaaacattattagatactctgtcctattgggattattattaatattaccttaattgtgagttcttaggtgtaaagaattggcaatactacttgcag

SEQ ID NO: 340731 - DNA, 120 bp, Artificial Sequence
  ENSG00000137871_55 (sequence is synthesized)
accttaagagccagttttaaagttacgtatttgtgcgtctaagatgtaatgtctacttagccattaatgtagctcctttgggtaaaggtaacatgttaaaaaacatacatatggtgacca

SEQ ID NO: 340732 - DNA, 120 bp, Artificial Sequence
  ENSG00000137871_56 (sequence is synthesized)
aaacatacatatggtgaccagtaatgcatgtatttctttcctttatatattttaaatttgtcatgtgtttattttagttacattgaatatagatctaaactttttatactattatccttt

SEQ ID NO: 340733 - DNA, 120 bp, Artificial Sequence
  ENSG00000137871_57 (sequence is synthesized)
acaaaatcagctcttgaatatttgctccagtggagggaaacagaggcatggataatccaaagtgaataatccccaaaacatttatttttggctttgggtactttcctttgaatgtgggta

SEQ ID NO: 340734 - DNA, 120 bp, Artificial Sequence
  ENSG00000137871_58 (sequence is synthesized)
tgtctgttatttgaattaactaaaacaatataaagccatgctctgaagacatgatagcaagagaagctatccagcatccttccctgcaatccattcattccatgttgggactagacatgc

SEQ ID NO: 340735 - DNA, 120 bp, Artificial Sequence
  ENSG00000137871_59 (sequence is synthesized)
cctgtaaaacatttgaaataagtagaatgtttcttactttgtgtactgtttcatgtttttggtttgacagtggaagggttaccatgactcaatatgaaatcataaattcagaaatgtttt

SEQ ID NO: 340736 - DNA, 120 bp, Artificial Sequence
  ENSG00000137871_60 (sequence is synthesized)
atctaaatacctgtgcctaatatatttatataaaatactgtggatgcatcttgttattcaaattcaagttgtgttttactagttttctatttaagtaattgtaattatgatccacatttg

SEQ ID NO: 340737 - DNA, 120 bp, Artificial Sequence
  ENSG00000137871_61 (sequence is synthesized)
aaatagaggttacgaaaagcagatattgacatgagtgggtaactgcttttttaccttgaatcagaaacttttggtacactgaaacttttataggtttaaaaacattttcaaaacctgcat

SEQ ID NO: 340738 - DNA, 120 bp, Artificial Sequence
  ENSG00000137871_62 (sequence is synthesized)
aaacttatactttagttaagagaacattattaaggctcttccttattatttttgttttaaaatatatttttatcatttttttaatgtctccctaaggtatcgtcggggcattcacaaatg

SEQ ID NO: 340739 - DNA, 120 bp, Artificial Sequence
  ENSG00000137871_63 (sequence is synthesized)
ctcagggctccagtcaggccgatccgctccgctcacggaaggaaaacagaaataacttgctggcttgtctggagtcacatggtgacaatttacagaaagtcatctctgcagcttgatggg

SEQ ID NO: 340740 - DNA, 120 bp, Artificial Sequence
  ENSG00000137871_64 (sequence is synthesized)
ccagtagaagcatagttagcatcagaaaatgtcaccatattttcgctagctcaagcagtaccccaagtaataactgaaggagctaactacccaacctgttaataacaggcagtatgccta

SEQ ID NO: 340741 - DNA, 120 bp, Artificial Sequence
  ENSG00000137871_65 (sequence is synthesized)
aataggtacagtaatgaaaactatactatcaaaatgtgaataaaattatagtcagccataaatattgcataatgacaaatatttaagattgcagacgggaccaggtattcttaattggga

SEQ ID NO: 340742 - DNA, 120 bp, Artificial Sequence
  ENSG00000137871_66 (sequence is synthesized)
aaacagtcaagtgaccatcatagctttttattctgaaaacattccttcatagttcagttagttaaaaaaaaacaaacattttttcctattacaaaaaactcccactttttttgttacaaa

SEQ ID NO: 340743 - DNA, 120 bp, Artificial Sequence
  ENSG00000137871_67 (sequence is synthesized)
aagtaatagaaaatggtaatagttaacattcattgagctgttaatatgtataagtgtttgtgctaaatgctataggtaaattcatttcatttagttcttaaacatccccatgaagtaaac

SEQ ID NO: 340744 - DNA, 120 bp, Artificial Sequence
  ENSG00000137871_68 (sequence is synthesized)
actattattatcctcattttttagttgaggaaactgaggctcatagaggttgaaagatttattcaagatcccaaagctggcagttgatggatctgggatttcaatccagcctaacccata

SEQ ID NO: 340745 - DNA, 120 bp, Artificial Sequence
  ENSG00000137871_69 (sequence is synthesized)
gtttatatgtatatgcacacatacatacatatatgttgtgtataaatgtacacttttttagacatgaaagaattgccttagttgaacagttctcagattgtagtttgcaatcccctgggg

SEQ ID NO: 340746 - DNA, 120 bp, Artificial Sequence
  ENSG00000137871_70 (sequence is synthesized)
ttccccaagaccctttcagaggtttgagggtcaacagtgttgtcattataatcaaagactgttttccttttccactgtgttggcatttgcactggtgatgctaaagtaatggtggataag

SEQ ID NO: 340747 - DNA, 120 bp, Artificial Sequence
  ENSG00000137871_71 (sequence is synthesized)
ctgctggtgccttagtgtgaatcaaggtagtgccaccaaagtgtacttgtagtttctgtattagtcacctgccgtgcactcacagtaaactacattactcaactgagtattacccagtta

SEQ ID NO: 340748 - DNA, 120 bp, Artificial Sequence
  ENSG00000137871_72 (sequence is synthesized)
tacccaatccctgatgaagtattaaaatgttattagttttattaactctctacacttgaatgtgtgttttttaaaatattctgtgtgatgacatgggtagtgtgcataaagtacctctgt

SEQ ID NO: 340749 - DNA, 120 bp, Artificial Sequence
  ENSG00000137871_73 (sequence is synthesized)
gtctgaagtatgatagttgtcttgaggaaaagcacttgtgtgattgaattgtgaggtaaactacctgatttttttttgttgttacatgaaagaatgagtgacaaatctttaaagtattta

SEQ ID NO: 340750 - DNA, 120 bp, Artificial Sequence
  ENSG00000137871_74 (sequence is synthesized)
aaaatctcaggaagggaaaaaagagtctaaagaacaaaatataacactattttatttcagtcatgttagttcagtttccacagtttgaactgggtatagattaatatctaaaaccaaaaa

SEQ ID NO: 340751 - DNA, 120 bp, Artificial Sequence
  ENSG00000137871_75 (sequence is synthesized)
atgaacatgtgtatagtgatgctgaaaaatgtgcattattttttatttatattttaggaataataaagttagttattaaagaatttagtgattttgattgagtgagaggtgtgagctata

SEQ ID NO: 340752 - DNA, 120 bp, Artificial Sequence
  ENSG00000137871_76 (sequence is synthesized)
tttgcttctttcctgtatgatatacatacattgtttccaatctcatttctattaaataactataggagagcccacagccttgttattttacatatcactatttagatatttgttatttat

SEQ ID NO: 340753 - DNA, 120 bp, Artificial Sequence
  ENSG00000137871_77 (sequence is synthesized)
ttatttgtgttggcctgaagtaaatgttacttttgtacgatatttgaaggatagatttattttataaattaatagtttaaataagattttgccagcatttgaaatgatatttatttctgt

SEQ ID NO: 340754 - DNA, 120 bp, Artificial Sequence
  ENSG00000137871_78 (sequence is synthesized)
gtatcaatattaccacaaacttacacagcttaaaacaacatacactctttatctcatgatctcacaatttctgtgggtcaggaatcaggtcatggcttaggtgggttttctgcttaagga

SEQ ID NO: 340755 - DNA, 120 bp, Artificial Sequence
  ENSG00000137871_79 (sequence is synthesized)
tctcacaaggctgcattcaagatgtggtgcctgaagttgcagtttcatctgaaattctgttggggaagtatttgcttccaagttcacatggttgttggtagcattcagttccttaaggga

SEQ ID NO: 340756 - DNA, 120 bp, Artificial Sequence
  ENSG00000137871_80 (sequence is synthesized)
tgttggactgagaatctctgtatcttgttggcttttggctggctccttgccacgtaggtcttcccaataaggctgcttgcttcctcaaagctagcaggtgagagtgagtccttagcaaga

SEQ ID NO: 340757 - DNA, 120 bp, Artificial Sequence
  ENSG00000137871_81 (sequence is synthesized)
tgcccttacagtcttaggtaacataatcacgtacacaaaaatcatatatatcctgtcacctttgttgtgttctattggttaaaagcaagtcagaggtcctgcccacactcaatgggaggg

SEQ ID NO: 340758 - DNA, 120 bp, Artificial Sequence
  ENSG00000137871_82 (sequence is synthesized)
aattacacaggacctgaataccaggacctggggattatgggtaatgacatttacatggaggccactttagagtctgtctgccacacacgcttagtcaatcttgattgtttggcaaacatt

SEQ ID NO: 340759 - DNA, 120 bp, Artificial Sequence
  ENSG00000137871_83 (sequence is synthesized)
tcctcaaatctgtcacttcagcaaaaataattgatagtaatatttcttaccaatggtaaaatttgaacttttaagcaaaaattagaattttggaaaactcatttgccaccgtgatcttgg

SEQ ID NO: 340760 - DNA, 120 bp, Artificial Sequence
  ENSG00000137871_84 (sequence is synthesized)
cagcttttgaataagagttttctgatgggtggtggtgttcataaataatgatttttaaaatattgtgtaatgaactatgtcaccatttggaagacctgtgtaattcagtgaaactagtat

SEQ ID NO: 340761 - DNA, 120 bp, Artificial Sequence
  ENSG00000137871_85 (sequence is synthesized)
tttccacataactagtatatatactacaaaagtatgcatgggtaaaacatacatttaaaagctaagatagaccaatgattttaatggaacgggtgttctgggatacggtttcagatttca

SEQ ID NO: 340762 - DNA, 120 bp, Artificial Sequence
  ENSG00000137871_86 (sequence is synthesized)
cactgcaacaaacctttaagaaagtaccaactgttcagttttggtatagtatcaaagtagtatatccacagttaattaaaaccctattaaaacactcccttttccagttatatattcctg

SEQ ID NO: 340763 - DNA, 120 bp, Artificial Sequence
  ENSG00000137871_87 (sequence is synthesized)
tgaggcagaatttaataatactcctcaaccaaaacaacatgtcatagtagactgaaggcagaagcagataagagactaaaacaatttttgattaagctagatatttaagagctttgcaaa

SEQ ID NO: 340764 - DNA, 120 bp, Artificial Sequence
  ENSG00000137871_88 (sequence is synthesized)
gatgtgaaacaatgccacttttcactagttttttttgcgtttgcaagtcatttttcattaaaatgttatttatgttaatttgtaatgagtttgttattttaaaatgaataaataaatatt

SEQ ID NO: 340765 - DNA, 120 bp, Artificial Sequence
  ENSG00000137871_89 (sequence is synthesized)
acagaggtcaatttactattaaagtataaaatgtacattagtttcgatctacattttaattattttaggctggcagagaaagaactgtttcatattttaccatcgtacatataaaataaa

SEQ ID NO: 340766 - DNA, 120 bp, Artificial Sequence
  ENSG00000137871_90 (sequence is synthesized)
taaaaaaagaagctcccgcaaaggaacaagaacctgtgtctaaggaaattgcaagacctaacatggctgaaagagaaacagaaacatcaaattctgaaaggtaaatataaggaaaaactg

SEQ ID NO: 340767 - DNA, 120 bp, Artificial Sequence
  ENSG00000137871_91 (sequence is synthesized)
tttaaatagtgtttgctataaatactacactatatttttctattaagaagtattgtaacattcacaggtggaaagtataattacctaatggtgggtcattagctcagaactttgagctta

SEQ ID NO: 340768 - DNA, 120 bp, Artificial Sequence
  ENSG00000137871_92 (sequence is synthesized)
tcgtaggaaaggagaccaaaggggattcgggatttgcaggcacagggcccctcattttgcccagatgaccggtcgttccacgtttgcaccctcatttttgtcaaagagacctcccctcct

SEQ ID NO: 340769 - DNA, 120 bp, Artificial Sequence
  ENSG00000137871_93 (sequence is synthesized)
gagacaaaattttctgagctttgcaaggttcacttactgagacggaaagaatgatctcactctgaggttttagcctgctccagcgatggaaggaattcctcccaacttatcgcaagtttt

SEQ ID NO: 340770 - DNA, 120 bp, Artificial Sequence
  ENSG00000137871_94 (sequence is synthesized)
aacgcttttaaggagaaatctgctggagaggaaaaacgtcaaggtgaacccgcttctgcaagcacgggagacctttggccaaaggcctttgtttgcgaagatttgttaaaaaaaaaaaaa

SEQ ID NO: 340771 - DNA, 120 bp, Artificial Sequence
  ENSG00000137872_0 (sequence is synthesized)
ccgcttcccaccgtccctctccccttactggcagagcgcgctgcgggcggactcccgggcccggagcagcccaccggccaccccaccgcccacccggctcccggtgtctcctcccggccg

SEQ ID NO: 340772 - DNA, 120 bp, Artificial Sequence
  ENSG00000137872_1 (sequence is synthesized)
gccgctctacccagcaactttccgtgctttgttccccgactggaaatgctttacggaagcgtcttggacagggtctccgccaggcgacaagagctcggtgctgagatgtgttacgttctc

SEQ ID NO: 340773 - DNA, 120 bp, Artificial Sequence
  ENSG00000137872_2 (sequence is synthesized)
atctccccatcaattatggatggaaacaaataaggaagagtcaattttgctgagccccttctccggcaacgagaggcgttctgcagccgggagggagccgccgctcgcgccggcagccgc

SEQ ID NO: 340774 - DNA, 120 bp, Artificial Sequence
  ENSG00000137872_3 (sequence is synthesized)
tggcaggggcatggtgaggaggaaggtagctcagtggcatttctgagcaggggccaccctgacttcaccttggcccaccatgagggtcttcctgctttgtgcctacatactgctgctgat

SEQ ID NO: 340775 - DNA, 120 bp, Artificial Sequence
  ENSG00000137872_4 (sequence is synthesized)
ggtttcccagttgagggcagtcagctttcctgaagatgatgaaccccttaatactgtcgactatcactattcaaggcaatatccggtttttagaggacgcccttcaggcaatgaatcgca

SEQ ID NO: 340776 - DNA, 120 bp, Artificial Sequence
  ENSG00000137872_5 (sequence is synthesized)
gcacaggctggactttcagctgatgttgaaaattcgagacacactttatattgctggcagggatcaagtttatacagtaaacttaaatgaaatgcccaaaacagaagtaatacccaacaa

SEQ ID NO: 340777 - DNA, 120 bp, Artificial Sequence
  ENSG00000137872_6 (sequence is synthesized)
gaaactgacatggcgatcaagacaacaggatcgagaaaactgtgctatgaaaggcaagcataaagatgaatgccacaactttatcaaagtatttgttccaagaaacgatgagatggtttt

SEQ ID NO: 340778 - DNA, 120 bp, Artificial Sequence
  ENSG00000137872_7 (sequence is synthesized)
tgtttgtggtaccaatgcattcaatcccatgtgtagatactacaggttgagtaccttagaatatgatggggaagaaattagtggcctggcaagatgcccatttgatgccagacaaaccaa

SEQ ID NO: 340779 - DNA, 120 bp, Artificial Sequence
  ENSG00000137872_8 (sequence is synthesized)
tgttgccctctttgctgatgggaagctgtattctgccacagtggctgacttcttggccagcgatgccgttatttatcgaagcatgggtgatggatctgcccttcgcacaataaaatatga

SEQ ID NO: 340780 - DNA, 120 bp, Artificial Sequence
  ENSG00000137872_9 (sequence is synthesized)
ttccaaatggataaaagagccacactttcttcatgccatagaatatggaaactatgtctatttcttctttcgagaaatcgctgtcgaacataataatttaggcaaggctgtgtattcccg

SEQ ID NO: 340781 - DNA, 120 bp, Artificial Sequence
  ENSG00000137872_10 (sequence is synthesized)
cgtggcccgcatatgtaaaaacgacatgggtggttcccagcgggtcctggagaaacactggacttcatttctaaaggctcggctgaactgttctgtccctggagattcgtttttctactt

SEQ ID NO: 340782 - DNA, 120 bp, Artificial Sequence
  ENSG00000137872_11 (sequence is synthesized)
tgatgttctgcagtctattacagacataatacaaatcaatggcatccccactgtggtcggggtgtttaccacgcagctcaatagcatccctggttctgctgtctgtgcatttagcatgga

SEQ ID NO: 340783 - DNA, 120 bp, Artificial Sequence
  ENSG00000137872_12 (sequence is synthesized)
tgacattgaaaaagtattcaaaggacggtttaaggaacagaaaactccagattctgtttggacagcagttcccgaagacaaagtgccaaagccaaggcctggctgttgtgcaaaacacgg

SEQ ID NO: 340784 - DNA, 120 bp, Artificial Sequence
  ENSG00000137872_13 (sequence is synthesized)
ccttgccgaagcttataaaacctccatcgatttcccggatgaaactctgtcattcatcaaatctcatcccctgatggactctgccgttccacccattgccgatgagccctggttcacaaa

SEQ ID NO: 340785 - DNA, 120 bp, Artificial Sequence
  ENSG00000137872_14 (sequence is synthesized)
gactcgggtcaggtacagactgacggccatctcagtggaccattcagccggaccctaccagaactacacagtcatctttgttggctctgaagctggcatggtacttaaagttctggcaaa

SEQ ID NO: 340786 - DNA, 120 bp, Artificial Sequence
  ENSG00000137872_15 (sequence is synthesized)
gaccagtcctttctctttgaacgacagcgtattactggaagagattgaagcctacaaccatgcaaagtgcagtgctgagaatgaggaagacaaaaaggtcatctcattacagttggataa

SEQ ID NO: 340787 - DNA, 120 bp, Artificial Sequence
  ENSG00000137872_16 (sequence is synthesized)
agatcaccacgctttatatgtggcgttctctagctgcattatccgcatccccctcagtcgctgtgagcgttatggatcatgtaaaaagtcttgtattgcatctcgtgacccgtattgtgg

SEQ ID NO: 340788 - DNA, 120 bp, Artificial Sequence
  ENSG00000137872_17 (sequence is synthesized)
ctggttaagccagggatcctgtggtagagtgaccccagggatgcttgctgaaggatatgaacaagacacagaattcggcaacacagctcatctaggggactgccatgaaattttgcctac

SEQ ID NO: 340789 - DNA, 120 bp, Artificial Sequence
  ENSG00000137872_18 (sequence is synthesized)
ttcaactacaccagattacaaaatatttggcggtccaacatctgacatggaggtatcttcatcttctgttaccacaatggcaagtatcccagaaatcacacctaaagtgattgatacctg

SEQ ID NO: 340790 - DNA, 120 bp, Artificial Sequence
  ENSG00000137872_19 (sequence is synthesized)
gagacctaaactgacaagctctcggaaatttgtagttcaagatgatccaaacacttctgattttactgatcctttatcgggtatcccaaagggtgtacgatgggaagtccagtctggaga

SEQ ID NO: 340791 - DNA, 120 bp, Artificial Sequence
  ENSG00000137872_20 (sequence is synthesized)
gtccaaccagatggtccacatgaatgtcctcatcacctgtgtctttgctgcttttgttttgggggcattcattgcaggtgtggcagtatactgctatcgagacatgtttgttcggaaaaa

SEQ ID NO: 340792 - DNA, 120 bp, Artificial Sequence
  ENSG00000137872_21 (sequence is synthesized)
cagaaagatccataaagatgcagagtccgcccagtcatgcacagactccagtggaagttttgccaaactgaatggtctctttgacagccctgtcaaggaataccaacagaatattgattc

SEQ ID NO: 340793 - DNA, 120 bp, Artificial Sequence
  ENSG00000137872_22 (sequence is synthesized)
tcctaaactgtatagtaacctgctaaccagtcggaaagagctaccacccaatggagatactaaatccatggtaatggaccatcgagggcaacctccagagttggctgctcttcctactcc

SEQ ID NO: 340794 - DNA, 120 bp, Artificial Sequence
  ENSG00000137872_23 (sequence is synthesized)
tgagtctacacccgtgcttcaccagaagaccctgcaggccatgaagagccactcagaaaaggcccatggccatggagcttcaaggaaagaaacccctcagttttttccgtctagtccgcc

SEQ ID NO: 340795 - DNA, 120 bp, Artificial Sequence
  ENSG00000137872_24 (sequence is synthesized)
acctcattccccattaagtcatgggcatatccccagtgccattgttcttccaaatgctacccatgactacaacacgtctttctcaaactccaatgctcacaaagctgaaaagaagcttca

SEQ ID NO: 340796 - DNA, 120 bp, Artificial Sequence
  ENSG00000137872_25 (sequence is synthesized)
tgacccaaatagtaaccccaaagccatcatgggagacatccagatggcacaccagaacttaatgctggatcccatgggatcgatgtctgaggtcccacctaaagtccctaaccgggaggc

SEQ ID NO: 340797 - DNA, 120 bp, Artificial Sequence
  ENSG00000137872_26 (sequence is synthesized)
atcgctatactcccctccttcaactctccccagaaatagcccaaccaagcgagtggatgtccccaccactcctggagtcccaatgacttctctggaaagacaaagaggttatcacaaaaa

SEQ ID NO: 340798 - DNA, 120 bp, Artificial Sequence
  ENSG00000137872_27 (sequence is synthesized)
ttcctcccagaggcactctatatctgctatgcctaaaaacttaaactcaccaaatggtgttttgttatccagacagcctagtatgaaccgtggaggatatatgcccacccccactggggc

SEQ ID NO: 340799 - DNA, 120 bp, Artificial Sequence
  ENSG00000137872_28 (sequence is synthesized)
gaaggtggactatattcagggaacaccagtgagtgttcatctgcagccttccctctccagacagagcagctacaccagtaatggcactcttcctaggacgggactaaagaggacgccgtc

SEQ ID NO: 340800 - DNA, 120 bp, Artificial Sequence
  ENSG00000137872_29 (sequence is synthesized)
cttaaaacctgacgtgccaccaaagccttcctttgttcctcaaaccccatctgtcagaccactgaacaaatacacatactaggcctcaagtgtgctattcccatgtggctttatcctgtc

SEQ ID NO: 340801 - DNA, 120 bp, Artificial Sequence
  ENSG00000137872_30 (sequence is synthesized)
cgtgttgttgagaggatgatgttgtaagggtaccttaaaacaagagactcgcttgtattttaagagaaccaagtggccaaagaaactctttctaactttggcaacatcagaacttgccac

SEQ ID NO: 340802 - DNA, 120 bp, Artificial Sequence
  ENSG00000137872_31 (sequence is synthesized)
atgtagctactgcagcaaggcttctgtgtacttgcctgaaaacaaaggaaggtgctggtcattccatttcttttgtttgaagctaaagagatgtgtagctcacaggggctaccttaccag

SEQ ID NO: 340803 - DNA, 120 bp, Artificial Sequence
  ENSG00000137872_32 (sequence is synthesized)
tataaagagctgataacagtactcagaagaatctgtgaacaaatacttgaaaatgggttcaatgtagactgccattatgtgtggtcttcccattaaatgtgaacattttaatatgtatgc

SEQ ID NO: 340804 - DNA, 120 bp, Artificial Sequence
  ENSG00000137872_33 (sequence is synthesized)
attcaccttgcctcttgcacaaatgtcaaaaaaaagatggtaatatctcaaagaaatgaacttgtagattaccaagcagtttgctaaaaattcaatctttgacccaagctgtagcatttt

SEQ ID NO: 340805 - DNA, 83 bp, Artificial Sequence
  ENSG00000137872_34 (sequence is synthesized)
ttgctaaaaattcaatctttgacccaagctgtagcatttttttttcatgtgtggcatctttttcatgccaccaacaaacttgt

SEQ ID NO: 340806 - DNA, 120 bp, Artificial Sequence
  ENSG00000137872_35 (sequence is synthesized)
ttgcatctttttgtgctatggagttgtttacattaagcatgaccgaacgagagacaatactatttcccacaggagtccattgggttcagctttgaaagaggaatagaatcgaggctcctt

SEQ ID NO: 340807 - DNA, 120 bp, Artificial Sequence
  ENSG00000137872_36 (sequence is synthesized)
tgaccatcaaaatgatgaactttacttatgtggtacccaatgccagaatgtaagagttgcaagtgattttgtgctgctattcattaaaacttgtattccagtcttgccagcttaaggaga

SEQ ID NO: 340808 - DNA, 120 bp, Artificial Sequence
  ENSG00000137872_37 (sequence is synthesized)
tcaagatattaagaggtatccttgatttattttccagtattcagtagtaaaattttcctgtccactgtgaatcaaagcctgagtcactctatttaaccttggacacactaataaggtttt

SEQ ID NO: 340809 - DNA, 120 bp, Artificial Sequence
  ENSG00000137872_38 (sequence is synthesized)
attttgattgtgttcgtttccccccccccaatagtaaaatttctcctcctttaactcctcctaccccccaaggtaagaaacaaaaaacaaacaaacaaacaaaaatagaagacaaaagaa

SEQ ID NO: 340810 - DNA, 120 bp, Artificial Sequence
  ENSG00000137872_39 (sequence is synthesized)
agacatatgaaaggaattgtaattggcttaacagaaacagtctgtaaaaacctaacagtggtgcaatcatgttgtctgtgttgtgttatgtgagaattttctcctaagtcatgcaggtaa

SEQ ID NO: 340811 - DNA, 120 bp, Artificial Sequence
  ENSG00000137872_40 (sequence is synthesized)
tgacaatatactgtaaataccacatgtgagtttacctgaatctgtgcattttgtgccttattcatgagaatgatagaagtactaaaatctgtcaagtgttttcagtatagcacattattt

SEQ ID NO: 340812 - DNA, 120 bp, Artificial Sequence
  ENSG00000137872_41 (sequence is synthesized)
actgagtgccagttgtaaatgtttttcaaccagcacctaaaaagactcttttcaaaaaatcacagaaacaacctaggacaattatttgttacataatccgacctcatagcagcattacat

SEQ ID NO: 340813 - DNA, 120 bp, Artificial Sequence
  ENSG00000137872_42 (sequence is synthesized)
tctttgccgtgataaacattccactcctgctttcctaaggatgaaacagtgataatgtgaactcaaatgaggtttcctgggtaatgtgacacctgcagaaactatagagcgtcatttata

SEQ ID NO: 340814 - DNA, 120 bp, Artificial Sequence
  ENSG00000137872_43 (sequence is synthesized)
cgtagtttggcagaaaccacttacggctgatgatgcgcaaccctgctgactgtttcagttaatatgctgcacaccacacacttgtttagtgaaccaaatctagaaagtaccaaggcagag

SEQ ID NO: 340815 - DNA, 120 bp, Artificial Sequence
  ENSG00000137872_44 (sequence is synthesized)
gtatgctcctgctgtaatcaggcaaatgagttcaactggatttcttttgacaatactgttggtacctattacttgggggaggacatgttgcagaagaccagatcatttttatacagaatg

SEQ ID NO: 340816 - DNA, 120 bp, Artificial Sequence
  ENSG00000137872_45 (sequence is synthesized)
tgaaatactgatacagttattcttttttttaaagaacattgttttataaagaacgtgatttccagtgatctctggaagcgctaaagctaaaatttctgttcttgaaacacttcagctttg

SEQ ID NO: 340817 - DNA, 120 bp, Artificial Sequence
  ENSG00000137872_46 (sequence is synthesized)
caactaaaatattacagattaataataaattaaaccaaccaatgataaacactactcagtccaccaacaacaaacgtgtttgaattcaccttaccaatattaatcccagcgtgtgtaaaa

SEQ ID NO: 340818 - DNA, 120 bp, Artificial Sequence
  ENSG00000137872_47 (sequence is synthesized)
cagaacagtaactctatgtgaccccagataacattttgtaacattgtgcttccttgtagtttgtaatgtgagttcaatcagtatttatgttgaaatttctaacattaaatctagtctcta

SEQ ID NO: 340819 - DNA, 120 bp, Artificial Sequence
  ENSG00000137872_48 (sequence is synthesized)
tcctgttaatttaatttttaaatgctttatccatttgtgcaaaggtaaacgcagattgtatcttttttaatggtacggcataaaaagtaaccctcaagtgaagtgtctctatactgtttt

SEQ ID NO: 340820 - DNA, 120 bp, Artificial Sequence
  ENSG00000137872_49 (sequence is synthesized)
atagagtactttaacatgaatagataccttgtaaacttgtattgtggatgtgtaaataatatgtactttgggtttttaacaccgcatgtaaagtcaaaataaaatatacaaatcattata

SEQ ID NO: 340821 - DNA, 120 bp, Artificial Sequence
  ENSG00000137872_50 (sequence is synthesized)
cgtccgtgcccgggggtgggacccgcgccgggagctgccgagtgcgtggagggagccaggctccggctcgcctgatggattgacttggagatggatcgaattacaccatttgccgtgcat

SEQ ID NO: 340822 - DNA, 120 bp, Artificial Sequence
  ENSG00000137872_51 (sequence is synthesized)
cggtttgttttgctcctgctctgtcccgctgctgctgctgctgctgcaaggggtggtggcgagtttcaggattctatcaaggaagccaagacctaaggagacagagggatatctattttt

SEQ ID NO: 340823 - DNA, 120 bp, Artificial Sequence
  ENSG00000137872_52 (sequence is synthesized)
ctggttaagccagggatcctgtggtagagtgaccccagggatgctgctgttaaccgaagacttctttgctttccataaccacagtgctgaaggatatgaacaagacacagaattcggcaa

SEQ ID NO: 340824 - DNA, 120 bp, Artificial Sequence
  ENSG00000137872_53 (sequence is synthesized)
gtaaccggtggaagtgtcaaagaggaaggagtggagggctgctgaggtgacagggtgtggtctgtgagggagcggacgaacccggagaagagagcagagagacccaccaggactaggagg

SEQ ID NO: 340825 - DNA, 120 bp, Artificial Sequence
  ENSG00000137872_54 (sequence is synthesized)
cagcggggagcgtgcctgcgtcgctcggagcggtgacagcaaggagcgcagcgcggaggccgggcggcaaggggagtttccagtcctcgataagtggagtccctgctctgcgctgcgcca

SEQ ID NO: 340826 - DNA, 120 bp, Artificial Sequence
  ENSG00000137872_55 (sequence is synthesized)
gcgccttccgcctgggcccgcggtgctagacacctgccgagtccgaagcgggagtcaggctgagccttcggcccccaagatctccaacctgagcatatgccagttgacatgggaacactg

SEQ ID NO: 340827 - DNA, 120 bp, Artificial Sequence
  ENSG00000137872_56 (sequence is synthesized)
aggccagcaatttaaggatttcacatttgcttgcagtgaatgcgtaatcctggatctcttgttcgcaaatcgacagcctgaagccctctggaagcccaagactgctggaggtttttgacc

SEQ ID NO: 340828 - DNA, 120 bp, Artificial Sequence
  ENSG00000137872_57 (sequence is synthesized)
tacaccagattacaaaatatttggcggtccaacatctggttagttttttttaatttttttgaattaacaaccttttctttccttcagttcagcattttcagccccttctcccctcctttt

SEQ ID NO: 340829 - DNA, 120 bp, Artificial Sequence
  ENSG00000137872_58 (sequence is synthesized)
tgttaacacttcatcattgaccaagccacatcctttaagaaaattcaaatgggctaacatagactgcattccagctgcacgcacgcccacccaagctttcttctttctcacctctttgca

SEQ ID NO: 340830 - DNA, 120 bp, Artificial Sequence
  ENSG00000137872_59 (sequence is synthesized)
ttgtgaatgtttcttctggtcatctgtatttaatggatggcggaatttcattattttccccatctctcctcacctttcctatgacctagtaaacaaatacacatttcccataaatgtgta

SEQ ID NO: 340831 - DNA, 120 bp, Artificial Sequence
  ENSG00000137872_60 (sequence is synthesized)
agtcatgtccttttggtcctctaaattagcagtggtttggcataatagtgttttgtgttttttttctcattgaaataaatcttgggtttgtttttttcccgagcctgctagggcgagggg

SEQ ID NO: 340832 - DNA, 120 bp, Artificial Sequence
  ENSG00000137872_61 (sequence is synthesized)
ggtgaatggttgatgagtttaaaaataatgcagcccttgtttttcacctgtagaatatgagaacattttaacagcacctctcttatcttgcagatatattccaagatgctacatgcagca

SEQ ID NO: 340833 - DNA, 120 bp, Artificial Sequence
  ENSG00000137872_62 (sequence is synthesized)
gacagctgtgagcttgcatacacacacacacaaatatacatgcacatacatacacagaatgcagtactagttaagtatttccttcctatctttaataagtaagagaatatttagaccatt

SEQ ID NO: 340834 - DNA, 120 bp, Artificial Sequence
  ENSG00000137872_63 (sequence is synthesized)
gcatgctaacattcatggaggcagacatgtgtacccagaatcagagggagccggttatcctcagttggagatcccaaaagacttctgcatacagttcctttcgttggatggagacactgt

SEQ ID NO: 340835 - DNA, 120 bp, Artificial Sequence
  ENSG00000137872_64 (sequence is synthesized)
aagaaccacggagtgttaaacttggggcttgggaatcagagtccatccttgaatttcacaaaagaaacgaccgaaatcaaaagaaggcaagatacagctgttcgcatttgcagacctgta

SEQ ID NO: 340836 - DNA, 120 bp, Artificial Sequence
  ENSG00000137872_65 (sequence is synthesized)
ctttcctgaagatgatgaaccccttaatactgtcgactatcactgtaagtcgtctcaagaacagtcttctattctgagaaggaagcttttctgtttttcattctgtaagcatgttcattt

SEQ ID NO: 340837 - DNA, 120 bp, Artificial Sequence
  ENSG00000137872_66 (sequence is synthesized)
aggactgggtttggagagctgctggatagctgaacacgtggaggttcctggaaggcggcacacccagagagagcatggtagctccatgctgcttcccccatacctcaccctacacatctc

SEQ ID NO: 340838 - DNA, 120 bp, Artificial Sequence
  ENSG00000137872_67 (sequence is synthesized)
acttactccttcaggaaagcaactctcactgaagtgtgggagcggagcagagaaaagactaggtagctcagtggcatttctgagcaggggccaccctgacttcaccttggcccaccatga

SEQ ID NO: 340839 - DNA, 120 bp, Artificial Sequence
  ENSG00000137875_0 (sequence is synthesized)
cgggccaagaaaaccagcgaaggcccggccccccagcagaggccggaccatggttgaccagttgcgggagcgcaccaccatggccgacccgctgcgggagcgcaccgagctgttgctggc

SEQ ID NO: 340840 - DNA, 120 bp, Artificial Sequence
  ENSG00000137875_1 (sequence is synthesized)
cgactacctggggtactgcgcccgggaacccggcacccccgagccggcgccatccacgcccgaggccgccgtgctgcgctccgcggccgccaggttacggcagattcaccggtccttttt

SEQ ID NO: 340841 - DNA, 120 bp, Artificial Sequence
  ENSG00000137875_2 (sequence is synthesized)
ctccgcctacctcggctaccccgggaaccgcttcgagctggtggcgctgatggcggattccgtgctctccgacagccccggccccacctggggcagagtggtgacgctcgtgaccttcgc

SEQ ID NO: 340842 - DNA, 120 bp, Artificial Sequence
  ENSG00000137875_3 (sequence is synthesized)
agggacgctgctggagagagggccgctggtgaccgcccggtggaagaagtggggcttccagccgcggctaaaggagcaggagggcgacgtcgcccgggactgccagcgcctggtggcctt

SEQ ID NO: 340843 - DNA, 120 bp, Artificial Sequence
  ENSG00000137875_4 (sequence is synthesized)
gctgagctcgcggctcatggggcagcaccgcgcctggctgcaggctcagggcggctgggatggcttttgtcacttcttcaggaccccctttccactggctttttggagaaaacagctggt

SEQ ID NO: 340844 - DNA, 120 bp, Artificial Sequence
  ENSG00000137875_5 (sequence is synthesized)
acacgattattatgagttttaaaacttttaacccgcttctacctgcccaactgtgaccaactaaatgacagatgtgtgagaacaagaactgagggaaagcaccttcccccaccccagacg

SEQ ID NO: 340845 - DNA, 120 bp, Artificial Sequence
  ENSG00000137875_6 (sequence is synthesized)
tttttatctgaatgcatacaaggagtcctgaggtggtgatttggccagtgttttaacttgtgacaagtactcaggtgtgaggacaagaatgcaaatggctcttccttgagtgaaagaaat

SEQ ID NO: 340846 - DNA, 120 bp, Artificial Sequence
  ENSG00000137875_7 (sequence is synthesized)
ggggagtctagagcctctttatgccaaagaaccgcagaagaaactgcattccattaaatgggaaatacagtgctatttgctaaaacttggataagagtgcgaacctctcatctctccaca

SEQ ID NO: 340847 - DNA, 120 bp, Artificial Sequence
  ENSG00000137875_8 (sequence is synthesized)
acttcatgtgctgctgactaattttaaacatggccacagctggggcaaaataatccccaaagtagaaaaagtcccagtttaacaaagaatgtaatgttaaaatcacttataaggaattct

SEQ ID NO: 340848 - DNA, 120 bp, Artificial Sequence
  ENSG00000137875_9 (sequence is synthesized)
ttgaaaccaaatcctttgaaatctaattcctgggacttctaggtttttatagttaacatactaatttcttcaataattgttaactgcaaagttttaataaatttgtacctttaaaaaaaa

SEQ ID NO: 340849 - DNA, 120 bp, Artificial Sequence
  ENSG00000137876_0 (sequence is synthesized)
acttcctctcaagcttggcgtttgtttggtggggttacacgcgggttcaacatgcgtatcgaaaagtgttatttctgttcggggcccatctatcctggacacggcatgatgttcgtccgc

SEQ ID NO: 340850 - DNA, 120 bp, Artificial Sequence
  ENSG00000137876_1 (sequence is synthesized)
aacgattgcaaggtgttcagattttgcaaatctaaatgtcataaaaactttaaaaagaagcgcaatcctcgcaaagttaggtggaccaaagcattccggaaagcagctggtaaagagctt

SEQ ID NO: 340851 - DNA, 120 bp, Artificial Sequence
  ENSG00000137876_2 (sequence is synthesized)
acagtggataattcatttgaatttgaaaaacgtagaaatgaacctatcaaataccagcgagagctatggaataaaactattgatgcgatgaagagagttgaagaaatcaaacagaagcgc

SEQ ID NO: 340852 - DNA, 120 bp, Artificial Sequence
  ENSG00000137876_3 (sequence is synthesized)
caagctaaatttataatgaacagattgaagaaaaataaagagctacagaaagttcaggatatcaaagaagtcaagcaaaacatccatcttatccgagcccctcttgcaggcaaagggaaa

SEQ ID NO: 340853 - DNA, 120 bp, Artificial Sequence
  ENSG00000137876_4 (sequence is synthesized)
cagttggaagagaaaatggtacagcagttacaagaggatgtggacatggaagatgctccttaaaaatctctgtaaccatttcttttatgtacatttgaaaatgccctttggatacttgga

SEQ ID NO: 340854 - DNA, 120 bp, Artificial Sequence
  ENSG00000137876_5 (sequence is synthesized)
actgctaaattattttattttttacataaggtcacttaaatgaaaagcgattaaaagacatctttcctgcattgccatctacataatatcagatattacggatgttagattgcatctcag

SEQ ID NO: 340855 - DNA, 120 bp, Artificial Sequence
  ENSG00000137876_6 (sequence is synthesized)
tgttaaatctttactgatagatgtacttaagtaaatcatgaaaattctacttgtaactatagaagtgaattgtggacgtaaaatggttgtgctatttggataatggcactaggcagcatt

SEQ ID NO: 340856 - DNA, 120 bp, Artificial Sequence
  ENSG00000137876_7 (sequence is synthesized)
agaaggggggatacaaaaaggaactaacaatttgtatggcagtgtcagatatttttattttagtatttcctgttttggtttatttgcatcttagaagagcataatgacattgtttgatga

SEQ ID NO: 340857 - DNA, 120 bp, Artificial Sequence
  ENSG00000137876_8 (sequence is synthesized)
agcctaattatgctggactgttttgacctggtttaacccttctgataggtagttgtggatgctggggatgagaactgaataatctttgcctggagtgacactacactctagaatttccac

SEQ ID NO: 340858 - DNA, 120 bp, Artificial Sequence
  ENSG00000137876_9 (sequence is synthesized)
tttggagaatactcagttccaacttgtgattcctgatagaacagactttacttttctagcccagcattgatctagaagcagaggaatcccagcgccttttaaaagttgttatgtggtttt

SEQ ID NO: 340859 - DNA, 120 bp, Artificial Sequence
  ENSG00000137876_10 (sequence is synthesized)
cttttaaaaagctcctgtttttggaaagtagaatttatgggtacaacgtatgttcattatttgtacataaaataaaaccatttaaaaagtaatgctgatatttattctttaaaggcacta

SEQ ID NO: 340860 - DNA, 120 bp, Artificial Sequence
  ENSG00000137876_11 (sequence is synthesized)
aacaaagatatgaaatattgatgacctggaagaagaaatcttcctccacacatcccatttaagtaggagatacatttaattaaagagaaatagatacttaatacttaatgttttgtgttt

SEQ ID NO: 340861 - DNA, 120 bp, Artificial Sequence
  ENSG00000137876_12 (sequence is synthesized)
ttacattgtttacagttttaagtatgttaaatacattaagtaacgatcagtttgcataatggtttttttagggtagagtttaaaatcagtaattcttagccttacataattataaagtaa

SEQ ID NO: 340862 - DNA, 120 bp, Artificial Sequence
  ENSG00000137876_13 (sequence is synthesized)
tggctcattttttgtttcagtattagatagtaaaactaaggctgtagaccagtccctggaccaagtgttaggagacctgagttccaatgtggttttgcctgggtattcttatttgtaaat

SEQ ID NO: 340863 - DNA, 120 bp, Artificial Sequence
  ENSG00000137876_14 (sequence is synthesized)
aatattattgattgaagattaggggaaatgatacatgtgaggaaagacatttgtaaaatttcttgggtttttactacataccgtattcattttttaaagaaataaacattttgaaagtta

SEQ ID NO: 340864 - DNA, 120 bp, Artificial Sequence
  ENSG00000137876_15 (sequence is synthesized)
gtcttccgagcggcgctggccaccacgccacccttgggtggcgttggcagcgaggaacttcaggagcgatcccagctagcgcctaccaggaatcttggatgtctgtgagggctgtttggc

SEQ ID NO: 340865 - DNA, 120 bp, Artificial Sequence
  ENSG00000137876_16 (sequence is synthesized)
gcccgtcttccgagcggcgctggccaccacgccacccttgggtggcgttggcagcgaggaacttcaggagcgatcccagctagcgcctaccaggaatcttggatgtctgatgcttgtcgg

SEQ ID NO: 340866 - DNA, 120 bp, Artificial Sequence
  ENSG00000137876_17 (sequence is synthesized)
ctggatattggaattagaacaacagatcgtgagaactgtcaagacctgggtattgatttggtagacacagtggaagttaagttgatgaagaataaggacagtgttgagttggttgggagt

SEQ ID NO: 340867 - DNA, 120 bp, Artificial Sequence
  ENSG00000137876_18 (sequence is synthesized)
gtggatccagaagagagttgttggaggaaataaaagatagagggcctgaagcactaacaaagaacaagtatctcatctttttttatgcttgatttccaaacctaaatctcctgagctcca

SEQ ID NO: 340868 - DNA, 120 bp, Artificial Sequence
  ENSG00000137876_19 (sequence is synthesized)
aatctgaattttccattggatgtacctaacatcagatcttgatctttcttgattgcaaagtgagattatcacattgctagactaagcttctcaaggtctctgtagatccttcattgtgcc

SEQ ID NO: 340869 - DNA, 120 bp, Artificial Sequence
  ENSG00000137876_20 (sequence is synthesized)
tttcaggtgttcagattttgcaaatctaaatgtcataaaaactttaaaaagaagcgcaatcctcgcaaagttaggtggaccaaagcattccggaaagcagctggtaaagagcttacagtg

SEQ ID NO: 340870 - DNA, 120 bp, Artificial Sequence
  ENSG00000137876_21 (sequence is synthesized)
tatagtttttacacgtttcacagttttagtatttgaagggtatatgtcatctaatcaatcataacaaggcctcctataacatgattaataagtaccttatttgtatttggctgtggaaat

SEQ ID NO: 340871 - DNA, 120 bp, Artificial Sequence
  ENSG00000137876_22 (sequence is synthesized)
ccctgtcaggcattacactaaggtccatactaaagtgtagaggttgatggaagtgttccgtattgcttaatggtagagttatgtattaagttactgcagtcagatcttgatctttcttga

SEQ ID NO: 340872 - DNA, 120 bp, Artificial Sequence
  ENSG00000137876_23 (sequence is synthesized)
ttgcaaagtgagattatcacattgctagactaagcttctcaaggtgttcagattttgcaaatctaaatgtcataaaaactttaaaaagaagcgcaatcctcgcaaagttaggtggaccaa

SEQ ID NO: 340873 - DNA, 120 bp, Artificial Sequence
  ENSG00000137877_0 (sequence is synthesized)
accccagcacgctggctcaaggggagggctgtggtgcagccctgctccagccttggcctctcctgatgtccctctccctccctccacagcccctgctatctgccatctccatccgtccag

SEQ ID NO: 340874 - DNA, 120 bp, Artificial Sequence
  ENSG00000137877_1 (sequence is synthesized)
ctgggccgcctctgtggaacccaggcatcaccaaggtttagggagccatccagcagctcctcatccccaaagtctgcagggctgatggctggtcagccccacagtccccgggagctcctc

SEQ ID NO: 340875 - DNA, 120 bp, Artificial Sequence
  ENSG00000137877_2 (sequence is synthesized)
ggggctgcagggcaccgcagcaggaggcccagcacagaactccgggtcccgcccagtccaagtctcaccatggactctcagtacgagacgggccacattcgcaagctacaggcccggcac

SEQ ID NO: 340876 - DNA, 120 bp, Artificial Sequence
  ENSG00000137877_3 (sequence is synthesized)
atgcagatgcaggagaagactttcaccaagtggatcaataacgtcttccagtgcggccaggcgggcatcaagatccggaacctgtacacagagctggctgacggcatccacctcctgcgg

SEQ ID NO: 340877 - DNA, 120 bp, Artificial Sequence
  ENSG00000137877_4 (sequence is synthesized)
ctgctggagctcatctcaggggaggccctgccacccccgagccggggccgcctgcgtgtgcacttcctggagaacagcagccgagctctggccttcctcagggccaaggtgccagtacca

SEQ ID NO: 340878 - DNA, 120 bp, Artificial Sequence
  ENSG00000137877_5 (sequence is synthesized)
ctcatcgggccagagaacatcgtggacggagaccagacactcatcctgggactcatctgggtcatcattctgcgtttccagatctcccacatctccttggacaaggaggagtttggggcc

SEQ ID NO: 340879 - DNA, 120 bp, Artificial Sequence
  ENSG00000137877_6 (sequence is synthesized)
agcgcagccctgctgtccaccaaggaagccctgctggtctggtgccagcggaagacagccagctacaccaacgtgaacattacagatttctcccgaagctggagcgatgggctgggcttc

SEQ ID NO: 340880 - DNA, 120 bp, Artificial Sequence
  ENSG00000137877_7 (sequence is synthesized)
aatgccctcatccatgcccacaggccagacctgttggactacggctccctgcgtccagaccgcccactgcacaaccttgcttttgctttcctggtggctgagcaggagctgggcattgct

SEQ ID NO: 340881 - DNA, 120 bp, Artificial Sequence
  ENSG00000137877_8 (sequence is synthesized)
cagctgctggaccccgaggacgtggcagccgcacagccagatgagcgctctatcatgacctacgtctccctctactaccactactgctcccgcctgcatcaggggcagactgtccagagg

SEQ ID NO: 340882 - DNA, 120 bp, Artificial Sequence
  ENSG00000137877_9 (sequence is synthesized)
agactcactaagatcctgcttcagctccaggagacagagctgctgcagacccagtacgagcagctggtggctgaccttctacgctggattgcagagaagcagatgcagctggaggcgcgg

SEQ ID NO: 340883 - DNA, 120 bp, Artificial Sequence
  ENSG00000137877_10 (sequence is synthesized)
gattttccagactcgctgcccgccatgcggcagctactggcagcattcaccatcttccgcacccaggagaagccaccccggctacagcagcgaggggccgcagaggccctgctcttccgg

SEQ ID NO: 340884 - DNA, 120 bp, Artificial Sequence
  ENSG00000137877_11 (sequence is synthesized)
ctacagacagcactccaagcccagaaccgcaggcccttcctgcctcatgagggcctgggccttgcagagctgtcccagtgctgggcagggctggagtgggcagaggctgcaaggagccag

SEQ ID NO: 340885 - DNA, 120 bp, Artificial Sequence
  ENSG00000137877_12 (sequence is synthesized)
gccctgcagcagaggctactgcagctgcagcggctagaaaccctggcccggcgcttccagcacaaggcagccctccgggagagtttccttaaggatgcagagcaggtgctagaccaggcc

SEQ ID NO: 340886 - DNA, 120 bp, Artificial Sequence
  ENSG00000137877_13 (sequence is synthesized)
agagccccgccagccagcctggccacagtggaggcagccgtccagaggctgggcatgctggaggctggcatcctgccccaggaggggcgcttccaggccctggctgagatcgcagacatc

SEQ ID NO: 340887 - DNA, 120 bp, Artificial Sequence
  ENSG00000137877_14 (sequence is synthesized)
ctccggcaggagcagtaccacagctgggcagatgtggcccgcaggcaggaggaagttaccgtgcgctggcagaggctccttcagcatctacagggacagaggaagcaggtggcagacatg

SEQ ID NO: 340888 - DNA, 120 bp, Artificial Sequence
  ENSG00000137877_15 (sequence is synthesized)
caggctgtgctgagcctgctgcaggaggtggaggctgcctcccaccagctggaggagctgcaggagccggccaggtccaccgcctgtgggcagcagctggcagaagtggtggagctgctg

SEQ ID NO: 340889 - DNA, 120 bp, Artificial Sequence
  ENSG00000137877_16 (sequence is synthesized)
cagaggcatgacctgctggaggctcaagtctcggcccacggagcccatgtgagccatcttgctcagcagacagcagagctggactcctccctgggcaccagtgtggaggtgctgcaggcc

SEQ ID NO: 340890 - DNA, 120 bp, Artificial Sequence
  ENSG00000137877_17 (sequence is synthesized)
aaggccaggacactggcccagctccaacagagcctggtggctcttgtcagggcccggcgggccctgctggagcagaccctgcagcgggcagagttcctgcgcaactgtgaggaggaggaa

SEQ ID NO: 340891 - DNA, 120 bp, Artificial Sequence
  ENSG00000137877_18 (sequence is synthesized)
gcctggctgaaggagtgcggacagcgggtggggaatgcggccctgggccgggatctcagccagatcgcaggcgccctgcagaaacacaaggccctggaagctgaggtccaccgccaccag

SEQ ID NO: 340892 - DNA, 120 bp, Artificial Sequence
  ENSG00000137877_19 (sequence is synthesized)
gccgtgtgcgtagatctcgtgcggaggggacgcgacctcagcgcccgcaggcccccaacgcagccggatcccggggaacgggcagaggccgttcagggagggtggcagctgctccagacc

SEQ ID NO: 340893 - DNA, 120 bp, Artificial Sequence
  ENSG00000137877_20 (sequence is synthesized)
cgggtggtggggcggggcgcacggctgcagacagccctgctggtcctgcagtacttcgcggacgcggcggaggcggcttcgtggctgcgcgagcggcgatcctcgctggagagagcgtcc

SEQ ID NO: 340894 - DNA, 120 bp, Artificial Sequence
  ENSG00000137877_21 (sequence is synthesized)
gagcgtcctgcggtcaggaccaggcggccgccgagaccctgctgaggcgccacgtgcggctggagcgcgtcctgcgcgccttcgcggccgagctgcggcggctggaggagcaggggcggg

SEQ ID NO: 340895 - DNA, 120 bp, Artificial Sequence
  ENSG00000137877_22 (sequence is synthesized)
gcccgggcgtcgttattcacggtgaactctgccctgagccctccaggagaaagcctgaggaacccagggccctggagtgaggcttcctgccaccctggccctggggatgcctggaagatg

SEQ ID NO: 340896 - DNA, 120 bp, Artificial Sequence
  ENSG00000137877_23 (sequence is synthesized)
gccctcccagctgagcctgaccctgactttgatcccaacactatactccagacacaggaccacttgagtcaggactatgagagtctgcgggccctggcacagctccgcagggcccggttg

SEQ ID NO: 340897 - DNA, 120 bp, Artificial Sequence
  ENSG00000137877_24 (sequence is synthesized)
gaggaggccatggccctgttcggtttctgcagttcctgtggggagctccagttgtggctggagaagcagacagtgctgctccaaagggtgcagccccaggctgacaccctggaggtcatg

SEQ ID NO: 340898 - DNA, 120 bp, Artificial Sequence
  ENSG00000137877_25 (sequence is synthesized)
cagctcaaatatgagaacttcctcactgccctggctgtgggaaagggcctctgggctgaggtcagcagctctgctgagcaactgaggcagagatatcctgggaactccacacaaatccaa

SEQ ID NO: 340899 - DNA, 120 bp, Artificial Sequence
  ENSG00000137877_26 (sequence is synthesized)
cgacagcaggaggaactgagccagaggtgggggcagctggaggccctgaagagggagaaggccgtgcagctggcacacagtgtggaagtgtgcagttttctgcaggagtgtggacccaca

SEQ ID NO: 340900 - DNA, 120 bp, Artificial Sequence
  ENSG00000137877_27 (sequence is synthesized)
caggtccagctgcgagacgtgctcctccagctggaggccctgcagccagggagctcagaggacacctgccacgccctgcagctggcccagaagaagaccctggtgctggagaggagggtc

SEQ ID NO: 340901 - DNA, 120 bp, Artificial Sequence
  ENSG00000137877_28 (sequence is synthesized)
cacttcctccaaagtgtggtcgtaaaggtcgaggagccaggctacgcagagagccagcctctgcaaggacaggtggagacactgcaggggctgctgaagcaagtacaggaacaagtggcc

SEQ ID NO: 340902 - DNA, 120 bp, Artificial Sequence
  ENSG00000137877_29 (sequence is synthesized)
caacgggcccggcgccaggctgagactcaggcccggcagagcttcctgcaagagagccagcaactgctactgtgggcagagagtgtccaggctcagctgcgcagcaaggaggtgtcagtg

SEQ ID NO: 340903 - DNA, 120 bp, Artificial Sequence
  ENSG00000137877_30 (sequence is synthesized)
gatgtggcctcggctcagcggctgctgagggagcaccaagacctgctggaggagatccacctgtggcaggagaggctgcagcagctggacgctcagagccagcccatggcagccttggac

SEQ ID NO: 340904 - DNA, 120 bp, Artificial Sequence
  ENSG00000137877_31 (sequence is synthesized)
tgcccagactcccaagaggtgcccaacactctgagggtcctggggcagcagggccaggagctgaaggttttgtgggagcagaggcagcagtggctgcaagaggggctggagctgcagaag

SEQ ID NO: 340905 - DNA, 120 bp, Artificial Sequence
  ENSG00000137877_32 (sequence is synthesized)
tttggccgagaagtggatggtttcactgccacctgtgccaaccaccaggcctggctgcacctggacaaccttggggaggacgtgagggaggccctgagcctgctgcagcagcaccgggag

SEQ ID NO: 340906 - DNA, 120 bp, Artificial Sequence
  ENSG00000137877_33 (sequence is synthesized)
tttgggcggctcctgagcaccctggggcctcgggcagaggctctgcgggcacacggcgagaagctggttcagagccagcacccagctgcacacacggtcagagagcagctgcagagtatc

SEQ ID NO: 340907 - DNA, 120 bp, Artificial Sequence
  ENSG00000137877_34 (sequence is synthesized)
caggcacagtggaccaggctccaggggaggagtgagcagaggaggaggcagttgctggcttccctccagctccaggagtggaagcaggatgtggcagagctgatgcagtggatggaagag

SEQ ID NO: 340908 - DNA, 120 bp, Artificial Sequence
  ENSG00000137877_35 (sequence is synthesized)
aaggggctgatggctgcgcatgagccctccggagcgcgcagaaacatcctgcagacactcaagcggcacgaagcagctgagagcgagctactcgccacccgcagacacgtggaggccctg

SEQ ID NO: 340909 - DNA, 120 bp, Artificial Sequence
  ENSG00000137877_36 (sequence is synthesized)
cagcaggttgggagagagctgttgagtaggaggccctgtggccaggaggacatacagaccaggcttcaaggcctgagaagcaagtgggaagctttgaaccgcaagatgactgagcgtggg

SEQ ID NO: 340910 - DNA, 120 bp, Artificial Sequence
  ENSG00000137877_37 (sequence is synthesized)
gacgagctccagcaggctggacagcaggagcaactcctgaggcagctgcaggatgcaaaggagcagctggagcagctcgaaggggccctacagagctcggaaacagggcaggacctgcgc

SEQ ID NO: 340911 - DNA, 120 bp, Artificial Sequence
  ENSG00000137877_38 (sequence is synthesized)
tccagccagaggctgcagaaacggcaccaacagctggagagtgagagccggaccctggctgccaagatggctgccctcgcctccatggcccatggcatggccgcctccccggccatcctg

SEQ ID NO: 340912 - DNA, 120 bp, Artificial Sequence
  ENSG00000137877_39 (sequence is synthesized)
gaagagacccagaagcacctccggaggctggagcttctgcaggggcatctggccatccggggcctgcagctgcaggcctcagtggagctgcaccagttctgccacctgagcaacatggag

SEQ ID NO: 340913 - DNA, 120 bp, Artificial Sequence
  ENSG00000137877_40 (sequence is synthesized)
ctctcttgggtagccgagcacatgccccatggcagccccaccagctataccgagtgcttgaatggtgcccagagccttcaccgcaagcacaaggagctccaggtggaggtaaaagctcac

SEQ ID NO: 340914 - DNA, 120 bp, Artificial Sequence
  ENSG00000137877_41 (sequence is synthesized)
caggggcaggtgcaacgggtgctgagttctgggcggagcctggcagcctcagggcacccccaagcccaacacatcgtggagcagtgccaggagctggaaggccactgggcagagctggag

SEQ ID NO: 340915 - DNA, 120 bp, Artificial Sequence
  ENSG00000137877_42 (sequence is synthesized)
agggcatgtgaagcgcgggcccagtgtctgcagcaggctgtcactttccagcagtactttctggatgtgtcagagctggagggctgggtggaggagaagcggccgctggtgagcagtcgg

SEQ ID NO: 340916 - DNA, 120 bp, Artificial Sequence
  ENSG00000137877_43 (sequence is synthesized)
gactatggcagagacgaggcagccaccctcaggctcattaacaagcaccaggctctacaggaggaactagccatttactggagctccatggaggagcttgaccagacggcccaaaccctc

SEQ ID NO: 340917 - DNA, 120 bp, Artificial Sequence
  ENSG00000137877_44 (sequence is synthesized)
actggccccgaagtccctgagcagcagcgtgtggtgcaggagaggctccgggagcagctgcgggcactgcaggagttggcggccacacgggaccgggaactggaggggaccctgaggctg

SEQ ID NO: 340918 - DNA, 120 bp, Artificial Sequence
  ENSG00000137877_45 (sequence is synthesized)
catgagttcctgagggaggctgaggacctgcagggctggctggcaagccagaagcaggcagccaaaggaggggagagcctgggagaggaccccgagcacgccctgcacctctgcaccaag

SEQ ID NO: 340919 - DNA, 120 bp, Artificial Sequence
  ENSG00000137877_46 (sequence is synthesized)
tttgcaaagtttcagcaccaagtggagatgggcagccagcgggtggccgcctgccggctgctggcggagagcctgctagagcgtgggcacagtgctggccccatggtccgtcagaggcag

SEQ ID NO: 340920 - DNA, 120 bp, Artificial Sequence
  ENSG00000137877_47 (sequence is synthesized)
caggatctgcagaccgcctggtcggagctgtgggagctgacccaggcccgaggccacgcgctccgagacaccgagaccaccctcagagttcacagagatctcttggaagtcctcacccag

SEQ ID NO: 340921 - DNA, 120 bp, Artificial Sequence
  ENSG00000137877_48 (sequence is synthesized)
ggcgcagctgagaagccaccaggggctggagcgagaactcgtgggcaccgagcggcagctgcaggaactgctggagactgcaggcagggtgcagaagctgtgtccggggcctcaggccca

SEQ ID NO: 340922 - DNA, 120 bp, Artificial Sequence
  ENSG00000137877_49 (sequence is synthesized)
tgcggtgcagcagaggcagcaagctgtgacgcaggcgtgggcagtgctgcagcgacgcatggagcagcgcagggcccagctggagcgggcacgcctcctggcccgcttccgcacggcggt

SEQ ID NO: 340923 - DNA, 120 bp, Artificial Sequence
  ENSG00000137877_50 (sequence is synthesized)
gcgtgactatgcctcctgggcagcccgcgtgcgccaggacctgcaggtggaggagagttcgcaagagcctagcagtggcccgctgaagctcagtgcccaccagtggctccgggcggagct

SEQ ID NO: 340924 - DNA, 120 bp, Artificial Sequence
  ENSG00000137877_51 (sequence is synthesized)
ggaggcccgggagaagctgtggcagcaggccacccagctggggcagcaggcacttcttgctgcagggacacccaccaaggaggtccaggaagagcttcgagccctgcaggaccagcggga

SEQ ID NO: 340925 - DNA, 120 bp, Artificial Sequence
  ENSG00000137877_52 (sequence is synthesized)
ccaggtgtatcagacctgggcacggaagcaagagaggctgcaggccgagcagcaggagcagctcttcctcagagagtgcggccgcctggaggagatcctcgcggcccaggaggtctccct

SEQ ID NO: 340926 - DNA, 120 bp, Artificial Sequence
  ENSG00000137877_53 (sequence is synthesized)
gaaaaccagtgccttggggagctcggtggaagaggtagagcagttgattcgcaagcacgaggtcttcctgaaggttctgactgcccaggacaagaaggaggcagccctgcgtgagcggct

SEQ ID NO: 340927 - DNA, 120 bp, Artificial Sequence
  ENSG00000137877_54 (sequence is synthesized)
gaagacgctccggcgcccccgggtgcgggaccggcttcccatcctgctgcagcgccggatgagagtgaaggagctggcggagagccggggacacgccctgcatgcctccctgctgatggc

SEQ ID NO: 340928 - DNA, 120 bp, Artificial Sequence
  ENSG00000137877_55 (sequence is synthesized)
cagcttcacccaggccgcaacccaggctgaggactggatccaggcgtgggcccagcagctgaaggagccggtccctcctggggacctgagagataagctgaagcccctgctgaaacacca

SEQ ID NO: 340929 - DNA, 120 bp, Artificial Sequence
  ENSG00000137877_56 (sequence is synthesized)
ggcctttgaggctgaagtccaggcccatgaggaggtcatgacctctgttgccaagaagggagaggctctcctggcacagagtcaccctcgagccggagaggtctcccagcggctgcaggg

SEQ ID NO: 340930 - DNA, 120 bp, Artificial Sequence
  ENSG00000137877_57 (sequence is synthesized)
cctgcggaagcactgggaggacctgaggcaggcaatggccctcaggggccaggagctggaggacaggcggaacttcctggagttcctgcagagagtggaccttgcagaggcctggatcca

SEQ ID NO: 340931 - DNA, 120 bp, Artificial Sequence
  ENSG00000137877_58 (sequence is synthesized)
ggagaaggaggtgaagatgaatgttggtgacctgggccaggacctggagcactgcctgcagctccgacggcggctccgcgagttccgaggaaactcggccggggacacagtgggtgatgc

SEQ ID NO: 340932 - DNA, 120 bp, Artificial Sequence
  ENSG00000137877_59 (sequence is synthesized)
ctgcatcaggagcatcagtgacttgtcactgcagctcaagaaccgggaccctgaggaagtcaagatcatctgccagcggcgaagccagctcaacaacaggtgggcgagtttccatggcaa

SEQ ID NO: 340933 - DNA, 120 bp, Artificial Sequence
  ENSG00000137877_60 (sequence is synthesized)
cttgctccggtaccagcagcagctcgaaggggccttggagatacacgtgttgtcccgagagctggacaatgtcaccaagaggattcaggagaaggaagccctgatccaggccctggactg

SEQ ID NO: 340934 - DNA, 120 bp, Artificial Sequence
  ENSG00000137877_61 (sequence is synthesized)
tgggaaagatctggagagcgtgcagaggctgctgcggaaacacgaggagctggagcgggaagtgcaccccatccaggcccaggtggagtccctagagcgtgaagtgggccgcctctgcca

SEQ ID NO: 340935 - DNA, 120 bp, Artificial Sequence
  ENSG00000137877_62 (sequence is synthesized)
aagaagccccgaggcagcccacggcctcaggcacaggcagcaggaggtggctgagagctggtggcagctccggagcagggcccagaagcggagggaggcgctggatgccttgcaccaagc

SEQ ID NO: 340936 - DNA, 120 bp, Artificial Sequence
  ENSG00000137877_63 (sequence is synthesized)
tcagaaactccaggcaatgctgcaggaattgctggtcagcgcccagaggctgcgggctcagatggacacgagccccgctcctcgcagccctgtggaagcccggcgtatgttagaagagca

SEQ ID NO: 340937 - DNA, 120 bp, Artificial Sequence
  ENSG00000137877_64 (sequence is synthesized)
tcaggagtgcaaggccgagctggactcctggacagacagcatcagcctggcccgaagcactgggcagcaactgctcacagcggggcaccccttcagctccgacattcgccaggtgctggc

SEQ ID NO: 340938 - DNA, 120 bp, Artificial Sequence
  ENSG00000137877_65 (sequence is synthesized)
tggcttagaacaggagctgagcagcctggaaggggcctggcaggagcatcagctacagctgcagcaggccctggagctacagctgtttctgagctcagtggagaagatggaacgttggct

SEQ ID NO: 340939 - DNA, 120 bp, Artificial Sequence
  ENSG00000137877_66 (sequence is synthesized)
ttgcagcaaggaagactccctagccagtgagggtctatgggaccccttggcccccatggagccccttctgtggaagcacaagatgctggagtgggacctggaggtgcaggcgggaaagat

SEQ ID NO: 340940 - DNA, 120 bp, Artificial Sequence
  ENSG00000137877_67 (sequence is synthesized)
cagtgctctggaggccacggcccgcggcctgcaccagggtgggcaccccgaggcccagagtgccctgggcaggtgccaggccatgcttctgaggaaggaggcgctcttcaggcaagccgg

SEQ ID NO: 340941 - DNA, 120 bp, Artificial Sequence
  ENSG00000137877_68 (sequence is synthesized)
gacccgccgccatcgcctggaggagctccggcagctgcaggccttcctgcaggactcccaggaggtggctgcgtggctgagggagaagaacctggtggccttggaggagggtttgctgga

SEQ ID NO: 340942 - DNA, 120 bp, Artificial Sequence
  ENSG00000137877_69 (sequence is synthesized)
cacagccatgctgccagcacagttacagaagcagcagaatttccaggcggagctggacgcgagcatgcaccaacagcaggagctgcagcgggagggacagaggctgctgcaggggggcca

SEQ ID NO: 340943 - DNA, 120 bp, Artificial Sequence
  ENSG00000137877_70 (sequence is synthesized)
cccagcctcggaggccatccaggagcgactggaggagctgggagcactctggggtgagctgcaagacaactcccagaagaaggtggccaagctccagaaggcctgtgaggccctgcgtct

SEQ ID NO: 340944 - DNA, 120 bp, Artificial Sequence
  ENSG00000137877_71 (sequence is synthesized)
gcggcggagcatggaggaactggagaactggctggagcccatcgaggttgagctgagagcccccactgtgggccaggccctgcctggggtgggcgagctcctgggcacacagagggagct

SEQ ID NO: 340945 - DNA, 120 bp, Artificial Sequence
  ENSG00000137877_72 (sequence is synthesized)
ggaggcagcagtggacaagaaggccaggcaggctgaggcactgctgggccaggcccaggcctttgtgagggaaggccactgccttgcccaagatgtggaagagcaggcccggcggctgct

SEQ ID NO: 340946 - DNA, 120 bp, Artificial Sequence
  ENSG00000137877_73 (sequence is synthesized)
tcagaggttcaagagcctgagggagcccctgcaggagcgcaggacggccctggaggcccggagcctcctcttgaagttcttcagggacgccgacgaggaaatggcctgggtgcaggagaa

SEQ ID NO: 340947 - DNA, 120 bp, Artificial Sequence
  ENSG00000137877_74 (sequence is synthesized)
gctgcctctggccgctgcccaggactatggccagagcctgagtgcggtgcggcacctgcaggagcagcaccagaacctggagagtgagatgagcagccacgaggctctgacccgggtggt

SEQ ID NO: 340948 - DNA, 120 bp, Artificial Sequence
  ENSG00000137877_75 (sequence is synthesized)
gctgggcactgggtacaagctggtgcaggctgggcactttgccgcccacgaggtggccgcccgggtgcagcagctggagaaggccatggcccacctgcgggcagaggcggcgcggaggcg

SEQ ID NO: 340949 - DNA, 120 bp, Artificial Sequence
  ENSG00000137877_76 (sequence is synthesized)
gcttctgctgcagcaggctcaggaggcccagcagtttctgactgagctcctggaggcgggatcctggctggctgagcggggccatgtcctggacagcgaggacatgggccacagtgctga

SEQ ID NO: 340950 - DNA, 120 bp, Artificial Sequence
  ENSG00000137877_77 (sequence is synthesized)
agccacacaggcccttctgcggcggctggaggccaccaagagagacctggaagcgttcagcccacgcatcgagcggctgcagcagacagcagcactcctggagagcaggaagaacccaga

SEQ ID NO: 340951 - DNA, 120 bp, Artificial Sequence
  ENSG00000137877_78 (sequence is synthesized)
aagccccaaggtgctagcccagctgcaggcagttcgggaggcccacgcagagctgctgcggagggcggaggccagggggcacggcctgcaggagcagctgcagctacaccagctggagcg

SEQ ID NO: 340952 - DNA, 120 bp, Artificial Sequence
  ENSG00000137877_79 (sequence is synthesized)
agagaccctgctcctcgacgcctggctgaccaccaaggcggccaccgccgagtcccaggactacgggcaggacctggagggtgtcaaggtgctggaagagaagtttgatgctttcagaaa

SEQ ID NO: 340953 - DNA, 120 bp, Artificial Sequence
  ENSG00000137877_80 (sequence is synthesized)
ggaagtgcagagcctgggccaggccaaggtgtatgccctgaggaagttggcaggcaccctggagcggggtgcacccaggcgctatccccacatccaagcccagaggagccgcattgaggc

SEQ ID NO: 340954 - DNA, 120 bp, Artificial Sequence
  ENSG00000137877_81 (sequence is synthesized)
tgcttgggagaggttggaccaagcaataaaagcccgcacagagaacttggctgcagcccatgaggtccacagctttcagcaggcagcagctgagctccagggaaggatgcaggagaagac

SEQ ID NO: 340955 - DNA, 120 bp, Artificial Sequence
  ENSG00000137877_82 (sequence is synthesized)
ggccctgatgaagggggaggacggaggccacagcctgtcatctgtgcggaccctgcagcaacagcacaggcgcctggagagagagctggaagctatggagaaggaggtggcacggctaca

SEQ ID NO: 340956 - DNA, 120 bp, Artificial Sequence
  ENSG00000137877_83 (sequence is synthesized)
gacggaggcctgccgactgggccagctacatcctgcagctccggggggcctggccaaggtgcaggaggcctgggccaccctgcaggcgaaggcccaggagcgaggccagtggctggcgca

SEQ ID NO: 340957 - DNA, 120 bp, Artificial Sequence
  ENSG00000137877_84 (sequence is synthesized)
ggctgcacagggccatgccttcctcgggcgctgccaggaactgctagcatgggcacaggagaggcaggagctggcgtcctccgaggagctggctgaggacgtggcgggggctgagcagct

SEQ ID NO: 340958 - DNA, 120 bp, Artificial Sequence
  ENSG00000137877_85 (sequence is synthesized)
ccttgggcagcatgaagagctggggcaagaaatcagggagtgccgccttcaagcccaggacctgcggcaggaaggacagcagctggtggacaacagccacttcatgtctgcggaggtgac

SEQ ID NO: 340959 - DNA, 120 bp, Artificial Sequence
  ENSG00000137877_86 (sequence is synthesized)
agagtgcctgcaggagctggaagggcggctgcaggagctggaggaggcttgggccctgcgctggcaacgctgtgccgagagctggggcctgcagaagcttcggcagaggctggagcaggc

SEQ ID NO: 340960 - DNA, 120 bp, Artificial Sequence
  ENSG00000137877_87 (sequence is synthesized)
tgaggcctggctggcctgctgggagggactcctgctgaagcccgactatgggcactcagtgtcagatgtggagttgctgctgcacagacaccaggacttagaaaagctgctggcagccca

SEQ ID NO: 340961 - DNA, 120 bp, Artificial Sequence
  ENSG00000137877_88 (sequence is synthesized)
ggaagagaagtttgcccaaatgcaaaagacagagatggaacaggagctcctgctgcagccacaggagctgaagcccgggagagctggcagctcgctgacatcctttcagtggaggccctc

SEQ ID NO: 340962 - DNA, 120 bp, Artificial Sequence
  ENSG00000137877_89 (sequence is synthesized)
tggacaccaggggctaggagcacagctggctgagacgagggacccccaggatgcaaagggtacccccaccatggaggggtctttggagttcaagcagcacctgctgcctggcgggaggca

SEQ ID NO: 340963 - DNA, 120 bp, Artificial Sequence
  ENSG00000137877_90 (sequence is synthesized)
gcctagctcgagctcctgggacagctgccgcgggaacttgcagggcagctctctgagcctgttcctggatgagaggatggcagcggagaaagtagcttccatagccctccttgacctcac

SEQ ID NO: 340964 - DNA, 120 bp, Artificial Sequence
  ENSG00000137877_91 (sequence is synthesized)
gggagcccggtgtgagaggctgcggggccgccacggcaggaaacacacattctccttaaggctgaccagtggggcagagatcctgtttgcagcaccgtccgaagagcaggctgagagctg

SEQ ID NO: 340965 - DNA, 120 bp, Artificial Sequence
  ENSG00000137877_92 (sequence is synthesized)
gtggcgagccctgggcagcactgcagcccagagtctgagcccaaaactcaaagccaaacctgtcagctctctgaatgagtgcacgaccaaggatgcccggcctggatgtctactcaggtc

SEQ ID NO: 340966 - DNA, 120 bp, Artificial Sequence
  ENSG00000137877_93 (sequence is synthesized)
tgatccctgaggtgaaccccagtgcaacaccaaacttcaggggcacaagcgaggacacatctaagggaccagaataagactcagctacaggcaaaagggctccttcccgtggctgcttca

SEQ ID NO: 340967 - DNA, 120 bp, Artificial Sequence
  ENSG00000137877_94 (sequence is synthesized)
acccagttccccaggcccagcttctggaatagacagttccttctggttagatgggtcctaccatgtggcaggaaacagccattgcctggcctccccctgcattcctgtctgggtgaagag

SEQ ID NO: 340968 - DNA, 120 bp, Artificial Sequence
  ENSG00000137877_95 (sequence is synthesized)
gagacgtgttacggcagagcaggtgggcaaggccagggctaccccaggcccatgtggcctcctccttgcttggaaggggtgactctgagcacaggtagacgcagacgtgtgcagagaatg

SEQ ID NO: 340969 - DNA, 120 bp, Artificial Sequence
  ENSG00000137877_96 (sequence is synthesized)
tgctcttcggaggaagaacactgatgagcgagctctgtaccagcccttgccatgtacagccaagagcctagaatgacatggcccttctcagcagtaataacagatggtctcagcgcctca

SEQ ID NO: 340970 - DNA, 120 bp, Artificial Sequence
  ENSG00000137877_97 (sequence is synthesized)
ccaagcccttcctgccagaatcctcatggactgtgttcctccaagggctttccaggctctgttctgtctgatctgggtgcttctctaaccttctagtcctcagacaactttgaatgtcac

SEQ ID NO: 340971 - DNA, 120 bp, Artificial Sequence
  ENSG00000137877_98 (sequence is synthesized)
cacccttgagttgttttgcagacagtaagcaagccaggttctacttggaggaatatatagagacaaccctttggactttcttccgtggtcagcgtgctctgctgaggctccgtgtggacc

SEQ ID NO: 340972 - DNA, 120 bp, Artificial Sequence
  ENSG00000137877_99 (sequence is synthesized)
gtgtgttcagggaatgtgtctgggatcctagctctgtcgctggttcccctggactctcctcccaagagtctgtcttcccaggagcccaaagggatcttgagttgttcgacattccagaat

SEQ ID NO: 340973 - DNA, 120 bp, Artificial Sequence
  ENSG00000137877_100 (sequence is synthesized)
ttcccacctcctaagaaaggctcagcctttcttaactcacctgtgaggagtttcctaagaggcaggacgcatgggggaaaaacctgcccacaagtgctcagcccgccccacacccccacg

SEQ ID NO: 340974 - DNA, 120 bp, Artificial Sequence
  ENSG00000137877_101 (sequence is synthesized)
ggaagggcctggcatagccaggctgcctaaggctgtgctgagcctccagaagctggaggaaggagcagccagacctggcgcctgcagatggtctgggccgggctaacagtggttattccc

SEQ ID NO: 340975 - DNA, 120 bp, Artificial Sequence
  ENSG00000137878_0 (sequence is synthesized)
gctaccgaccgccgctgcgggatgctgcgctccacgtccacggtcaccctgctctcgggcggcgccgccaggacgcccggggcgcccagcaggagggcaaatgtttgcagactacggctg

SEQ ID NO: 340976 - DNA, 120 bp, Artificial Sequence
  ENSG00000137878_1 (sequence is synthesized)
accgtacctcctgagagtccagttcctgagcaatgtgaaaagaagattgagagaaaagagcagcttcttgacctgagcaatggagaacctaccaggaaacttcctcagggtgttgtttat

SEQ ID NO: 340977 - DNA, 120 bp, Artificial Sequence
  ENSG00000137878_2 (sequence is synthesized)
ggtgtggtgcgaagatcagatcaaaatcagcagaaagaaatggtggtgtatgggtggtccaccagtcagctgaaagaagagatgaactacatcaaagatgtgagagccactttggaaaag

SEQ ID NO: 340978 - DNA, 120 bp, Artificial Sequence
  ENSG00000137878_3 (sequence is synthesized)
gtgagaaagcgaatgtatggagactatgatgagatgagacagaagattcgacagctcacccaggaactatcagtttcccatgctcagcaggagtatctggagaatcacatccaaacccag

SEQ ID NO: 340979 - DNA, 120 bp, Artificial Sequence
  ENSG00000137878_4 (sequence is synthesized)
tcgtctgccctggatcgttttaatgccatgaactcagccttggcatcagattccattggcctgcagaaaaccctcgtggatgtgactttggaaaacagcaacattaaggatcaaatcaga

SEQ ID NO: 340980 - DNA, 120 bp, Artificial Sequence
  ENSG00000137878_5 (sequence is synthesized)
aatctgcagcagacgtatgaagcatccatggacaagctgagggaaaagcagaggcagttggaggtagcgcaagttgaaaaccagctgctaaaaatgaaggtggaatcgtcccaagaagcc

SEQ ID NO: 340981 - DNA, 120 bp, Artificial Sequence
  ENSG00000137878_6 (sequence is synthesized)
aatgctgaggtgatgcgagagatgaccaagaagctgtacagccagtatgaggagaagctgcaggaagaacagaggaagcacagtgctgagaaggaggctcttttggaagaaaccaatagt

SEQ ID NO: 340982 - DNA, 120 bp, Artificial Sequence
  ENSG00000137878_7 (sequence is synthesized)
tttctgaaagcgattgaagaagccaataaaaagatgcaagcagcagagatcagcctagaggagaaagaccagaggatcggggagctggacaggctgattgagcgcatggaaaaggaacgt

SEQ ID NO: 340983 - DNA, 120 bp, Artificial Sequence
  ENSG00000137878_8 (sequence is synthesized)
catcaactgcaacttcaactcctagaacatgaaacagaaatgtctggggagttaactgattctgacaaggaaaggtatcagcagttggaggaggcatcagccagcctccgtgagcggatc

SEQ ID NO: 340984 - DNA, 120 bp, Artificial Sequence
  ENSG00000137878_9 (sequence is synthesized)
tggtcgaggagattgaatcattaaagaaaaagttgcaacagaaacagctcttaatactgcagcttttagaaaagatatctttcttagaaggagagaataatgaactacaaagcaggttgg

SEQ ID NO: 340985 - DNA, 120 bp, Artificial Sequence
  ENSG00000137878_10 (sequence is synthesized)
actatttaacagaaacccaggccaagaccgaagtggaaaccagagagataggagtgggctgtgatcttctacccagaaaattcatttgcaaattgcccgacaaaggtaaaaagatctttg

SEQ ID NO: 340986 - DNA, 120 bp, Artificial Sequence
  ENSG00000137878_11 (sequence is synthesized)
actcttttgccaaactgaaagctgccattgcagaatgtgaagaagttagaagaaaaagtgaactgtttaaccctgttagtttagactgtaagctaaggcaaaaagcaattgcagaagttg

SEQ ID NO: 340987 - DNA, 120 bp, Artificial Sequence
  ENSG00000137878_12 (sequence is synthesized)
atgtgggtacagataaggcccagaattctgacccgatacttgatacttcatcactagttcctggatgttcctctgtagataacatcaagtcatctcaaacctcacaaaaccagggacttg

SEQ ID NO: 340988 - DNA, 120 bp, Artificial Sequence
  ENSG00000137878_13 (sequence is synthesized)
gacgtcctactcttgaaggtgatgaagagacttcagaggttgagtacacagtgaataagggcccagcttccagcaatagagacagggtaccaccttcatctgaagctagtgagcatcacc

SEQ ID NO: 340989 - DNA, 120 bp, Artificial Sequence
  ENSG00000137878_14 (sequence is synthesized)
cgcggcatcgtgtttcaagtcaagcggaagatacttccagcagctttgacaacctgtttattgacaggttacagaggatcaccattgcggaccaaggtgaacaacagtcagaagaaaacg

SEQ ID NO: 340990 - DNA, 120 bp, Artificial Sequence
  ENSG00000137878_15 (sequence is synthesized)
caagtactaagaacttgacaggcctttccagtgggactgagaagaaacctcattacatggaagtgctagaaatgcgagccaaaaacccagtgccccagctgcgtaaatttaaaaccaatg

SEQ ID NO: 340991 - DNA, 120 bp, Artificial Sequence
  ENSG00000137878_16 (sequence is synthesized)
tgttaccttttcgacaaaatgattcatctagtcattgccagaagagtgggtctcctatttcctcagaagagcggcggcgcagggataagcagcatcttgatgacatcacagcagctcggc

SEQ ID NO: 340992 - DNA, 120 bp, Artificial Sequence
  ENSG00000137878_17 (sequence is synthesized)
ttctaccacttcaccatatgcccacgcagctgctctccatagaagaatccttggcacttcagaaacagcagaaacagaattatgaggagatgcaagcaaagctcgcagcgcaaaaattag

SEQ ID NO: 340993 - DNA, 120 bp, Artificial Sequence
  ENSG00000137878_18 (sequence is synthesized)
ctgaaagactgaatattaaaatgcggagttataatccagaaggggagtcttcagggagataccgagaagtaagggatgaagatgacgattggtcctctgatgaattctgaagataatctc

SEQ ID NO: 340994 - DNA, 120 bp, Artificial Sequence
  ENSG00000137878_19 (sequence is synthesized)
catgaggaatgagaaacagagtgtacaacatggctttctttaggcagacctgccccccaaacaggtggtgaacaaagttccttcagcatattgcctgtggatatcagaactcagggacat

SEQ ID NO: 340995 - DNA, 120 bp, Artificial Sequence
  ENSG00000137878_20 (sequence is synthesized)
gcaggtgtgagctgcgggcctggaggtgtccctagggcccagagagtgcctgggcagccgacgggaaactggatggactcagaaggagcaagtgtccctcaggatccaggaatcaaagaa

SEQ ID NO: 340996 - DNA, 120 bp, Artificial Sequence
  ENSG00000137878_21 (sequence is synthesized)
ggcctgccgcttagtgagccagcatcaagagcctgtcactcaggccacatgcctaagatgcggtttgactctgagtggggcatgccccctatttcagggatagcctgggagagaggatca

SEQ ID NO: 340997 - DNA, 120 bp, Artificial Sequence
  ENSG00000137878_22 (sequence is synthesized)
acatttgggaagtgcttggagggtgcaccaaccaaggctgacccctgagctggtccatgtgtccactgtgagcacccactttcttcccagtgaatgccatctgcctactccaggaactct

SEQ ID NO: 340998 - DNA, 120 bp, Artificial Sequence
  ENSG00000137878_23 (sequence is synthesized)
agggtggtcaccagggcaaggagtgggggtgataggaatgggtcctggctcaagtcccactgggccatggtgctcttcttgacggccagactgagagggccagttcagttcacccagcac

SEQ ID NO: 340999 - DNA, 120 bp, Artificial Sequence
  ENSG00000137878_24 (sequence is synthesized)
atgccaggtgcttggaagacaaagaaatgcacctcgagacccttgctgtctccaaaatcttttccagcaagtccaggccctcctgatctttcccatctctgaatcccaggggaacttatt

SEQ ID NO: 341000 - DNA, 120 bp, Artificial Sequence
  ENSG00000137878_25 (sequence is synthesized)
ttcagccccttctttattcttacatctcatgaccaatctttgtgtacatttattatctctccagtgacataaactcctcaggggcagtgtcccataaggggcacactagtcatttggagg

SEQ ID NO: 341001 - DNA, 120 bp, Artificial Sequence
  ENSG00000137878_26 (sequence is synthesized)
gaagccattgtaaaccttgataagcatgaagaaatctacaaatgaggagtattccagaaaaagcctcggctttggggaagtaaataataccaggagttactgagctggacacagcacaca

SEQ ID NO: 341002 - DNA, 120 bp, Artificial Sequence
  ENSG00000137878_27 (sequence is synthesized)
tacactgagtctttacaacagtcctgcctggaagatgttatcaccaccatttcatggataaggaaattgaaactcaaaaagatgtgaaaattgtctgaaaccactcagacctgtctgatt

SEQ ID NO: 341003 - DNA, 120 bp, Artificial Sequence
  ENSG00000137878_28 (sequence is synthesized)
tacctccttggtcaggtcactacagcactctgcagctccgtgccccaggatgcagctttttcgatgaagtaaatggaattgcatcccccacccaggcttgctgcacagatcatggcatag

SEQ ID NO: 341004 - DNA, 120 bp, Artificial Sequence
  ENSG00000137878_29 (sequence is synthesized)
cattgacaaatttcctagcagttcatcagagatatgccaataattgatacctgctactattactagtaattaccgggaagccagtattgcaccaagaatatttgcaaacccaaggatttc

SEQ ID NO: 341005 - DNA, 120 bp, Artificial Sequence
  ENSG00000137878_30 (sequence is synthesized)
ttcttattggacacagagattgaatgaatgctagcgaatggaattgtgcagaagacaaacaggagtgagggaaatgctactggataagcaggaggttaaataaactgtatctccttttgt

SEQ ID NO: 341006 - DNA, 120 bp, Artificial Sequence
  ENSG00000137878_31 (sequence is synthesized)
ttagatgtgaatttaagaataatctattttactttgtcagggaaggaaaggcctaaaagggagactaaagatgagttgctaaaaaagagagaacagaagcaaagagaccagaaggtgagt

SEQ ID NO: 341007 - DNA, 120 bp, Artificial Sequence
  ENSG00000137878_32 (sequence is synthesized)
gctgctaaagcttggggtaattcgttaggcaggattagataactaatacatggtgtgaaaaatatcgttgcattttgtttttgcatgcaaatatctaattgttttagcactatttgttga

SEQ ID NO: 341008 - DNA, 120 bp, Artificial Sequence
  ENSG00000137878_33 (sequence is synthesized)
aaagactacccattttccactgaattgcccttgtaccattgttgaaaataaattggccatatatgcataaatctatttctatactctctatactgttatattgggatctagttgcttatc

SEQ ID NO: 341009 - DNA, 120 bp, Artificial Sequence
  ENSG00000137878_34 (sequence is synthesized)
ttgacactaatactatgctgtcttgtttgctgtagctttatcatcggccatgaagtcaggtagcacaggctctctaattatatttttctaagttgattgggctattctaggtcctttgca

SEQ ID NO: 341010 - DNA, 120 bp, Artificial Sequence
  ENSG00000137878_35 (sequence is synthesized)
tttctatatgaattttacagtctgtcaatttccacaaaagcgctattgggattttccttgggactgcattgaatagacaggtcaccaaggataacatcaagaccttgctgtgtcaggcca

SEQ ID NO: 341011 - DNA, 120 bp, Artificial Sequence
  ENSG00000137878_36 (sequence is synthesized)
gctcctagcaacactgcagcccaagttgggagcactaggttggctcctggatgtcagtgactgctcttctcttccttagctggaaaggtactgggaaaaacctccatagtgtattttggt

SEQ ID NO: 341012 - DNA, 120 bp, Artificial Sequence
  ENSG00000137878_37 (sequence is synthesized)
aaaggtatagtataatctttgtgggattccgaacaaaatattataagaaacattcatttgtgcccaagggccataaacttggtgtaatctgaatgcaataaattataaataaatggcaaa

SEQ ID NO: 341013 - DNA, 120 bp, Artificial Sequence
  ENSG00000137878_38 (sequence is synthesized)
gagtgggctgtgatcttctacccagccaaacaggcaggactcgtgaaattgtgatgccttctaggaactacaccccatacacaagagtcctggagttaaccatgaagaaaactctgactt

SEQ ID NO: 341014 - DNA, 120 bp, Artificial Sequence
  ENSG00000137878_39 (sequence is synthesized)
aggcactcagaggcatacactttttacagatggacaaaagctctggaaccctgtggcttcaaatcctttgggaagggtgactgttgtttcccctacacacagtgtaagccggaatgggaa

SEQ ID NO: 341015 - DNA, 120 bp, Artificial Sequence
  ENSG00000137878_40 (sequence is synthesized)
tcgctgaggctctgatccacttctaagacaggaaggaaagtgaaggcagagtgagcaggcaaagtagaaaattcgaaaaggtcctcaacgagtttgtacagctgctcccactccctcatc

SEQ ID NO: 341016 - DNA, 120 bp, Artificial Sequence
  ENSG00000137878_41 (sequence is synthesized)
acctcttgtgggcctttggaaatgtatgttggaggagacattttggattgttgcaatgacttgggagtgccatagcacctagcaggcagaagccagaaacaccaaatgtcttaacaatgc

SEQ ID NO: 341017 - DNA, 120 bp, Artificial Sequence
  ENSG00000137878_42 (sequence is synthesized)
ttgaggcggtgctacaaatgaagtccttctccaaatgcattgagccccaagaaaaatcgctgattctgaggaaccttccaactttaacaatttcaggacgtccctaagctgagctaggag

SEQ ID NO: 341018 - DNA, 120 bp, Artificial Sequence
  ENSG00000137878_43 (sequence is synthesized)
gcaccacgcacaggccggaggcaccacgcacaggccagagtctcccaaatcctgtcccgcactctctcccaccttattaatggccagctcatctttcaagtttcgacttgaaccacttct

SEQ ID NO: 341019 - DNA, 120 bp, Artificial Sequence
  ENSG00000137878_44 (sequence is synthesized)
cagagatatcttcccaggtgcccatcccaacgttactattatatcataatttgattctccctccccccatccccccgccaactctgtaaaccccaagtataacacaggacgttgctattt

SEQ ID NO: 341020 - DNA, 120 bp, Artificial Sequence
  ENSG00000137878_45 (sequence is synthesized)
gttgactgacacatagtgcttggtgaggtcacgctggcgctgaatactttttgtataaaccgacgaacagctgatgaccgcatgaatgctcacacaaggggaaagggcgccaagccaagg

SEQ ID NO: 341021 - DNA, 120 bp, Artificial Sequence
  ENSG00000137878_46 (sequence is synthesized)
agccggcgtcatccgacgtaacttccgccctttaacgctcctgcggacgcccccttctcccagtccgtgtttgtttccggaatttcaataaagctcgattcggctcgaagaagaccccgt

SEQ ID NO: 341022 - DNA, 120 bp, Artificial Sequence
  ENSG00000137878_47 (sequence is synthesized)
tcttccgggaaaatggcgactcccgctcgtgccccggagtcaccgccgtccgcggatccggcgctagtagcggggcctgccgaggaagccgagtgcccgccgccgcgccagcctcagccc

SEQ ID NO: 341023 - DNA, 120 bp, Artificial Sequence
  ENSG00000137878_48 (sequence is synthesized)
gcgcagaatgtgctcgctgccccgcggcttcgagccccaagctcccgaggacttggcgcagcggagtttggtggagctgcgggaaatgttgaagcgccaggagagacttttgcgcaacga

SEQ ID NO: 341024 - DNA, 120 bp, Artificial Sequence
  ENSG00000137878_49 (sequence is synthesized)
tgcattgccagcagaagaaagtcaagcagatggtcgaggagatcatgtcgcacgagctcttctccagatttagtctccggctctttggaagatgataagttggtagcctgctctgggttg

SEQ ID NO: 341025 - DNA, 120 bp, Artificial Sequence
  ENSG00000137878_50 (sequence is synthesized)
aggacatattatttaaaggaaaatttgaccatgtggggctcttgtttgtgaaaacacccacatactgtcaccctgacttgtacagcctcaaactgcagagtcaagagaactcacagatcc

SEQ ID NO: 341026 - DNA, 120 bp, Artificial Sequence
  ENSG00000137878_51 (sequence is synthesized)
acagagtatttttaggaacttgagtagacattgaagaaggaactgcaatgaaaaaggctactgaaaaaccattcagaaagatccaggtggaggcttggaagatgaatccttacttatgga

SEQ ID NO: 341027 - DNA, 120 bp, Artificial Sequence
  ENSG00000137878_52 (sequence is synthesized)
aaagctgccaaagacatctgctaaggagatgggaagagagcttgaagaatgttagtgctctgggaaggaggtgctcccaccagatcacccccaagaaagtacaggagcagccagattgaa

SEQ ID NO: 341028 - DNA, 120 bp, Artificial Sequence
  ENSG00000137878_53 (sequence is synthesized)
ctgaggctctgatccacttctaagacaggaaggaaagtgaaggcagagtgagcaggtaaatacctagcagaagaatggctgggtcaaacggtatattttaagaaactgccaaactggttt

SEQ ID NO: 341029 - DNA, 120 bp, Artificial Sequence
  ENSG00000137878_54 (sequence is synthesized)
tatatgggaggtggccctgaaggtgtccttcctgaatggatatcaatactcatcttaggactcttctaagaggagtttagcttgcttctatcaccatcagcattttgcctgaattggttc

SEQ ID NO: 341030 - DNA, 120 bp, Artificial Sequence
  ENSG00000137878_55 (sequence is synthesized)
aaccaacttcacgaaaaggagtgtatctgataaagagaaatctatctggctgaaatatgttgaactgaaacatccttcatgtatgttttatttttatagaggtctttcttgagattgctg

SEQ ID NO: 341031 - DNA, 120 bp, Artificial Sequence
  ENSG00000137878_56 (sequence is synthesized)
caggcattggtgttttatcagaacatggcagttttgctgagaactagcagtagtagctgcagtcatagcaatgggtggcatgagtctacataagctgggagatggggctcgtggagtgag

SEQ ID NO: 341032 - DNA, 120 bp, Artificial Sequence
  ENSG00000137878_57 (sequence is synthesized)
tgcgttcagaggcccagtgtccctcagacgttggctagttctccactcctatcactccttcatggcaaagcaggcatgaagctgctttcttgctaatatttgcctttgctttcatttaga

SEQ ID NO: 341033 - DNA, 120 bp, Artificial Sequence
  ENSG00000137878_58 (sequence is synthesized)
tgcttctacccagcttaagcaaggagggaggggatgggaaagaagcagatgaatacttttccgcattagttattaaccattaatattgttcacctgtgcacggtgctgtgtttagacaca

SEQ ID NO: 341034 - DNA, 120 bp, Artificial Sequence
  ENSG00000137878_59 (sequence is synthesized)
gatccccagatacgatgctgggtattcagacttccactagggagacagaggcagatttgagaatctcatctggatgttagcttagtgttgttacctacactgttttttagggacgccttt

SEQ ID NO: 341035 - DNA, 120 bp, Artificial Sequence
  ENSG00000137878_60 (sequence is synthesized)
attgctgtaatgtttttctaagtctctggtggaaaagtcactggcatttgttctagcagcattgattcattgccaagttttaaaaaaggaaataattaagagaatgcaatgacctttaga

SEQ ID NO: 341036 - DNA, 120 bp, Artificial Sequence
  ENSG00000137878_61 (sequence is synthesized)
ggtcacccatgtaagtcctgctttcagggtggtgtgctttcttctgcttttagagtttcttttctcttttgggctatgaaccgtacctggaggccaggcaggccttattctggagcagat

SEQ ID NO: 341037 - DNA, 120 bp, Artificial Sequence
  ENSG00000137878_62 (sequence is synthesized)
agtgagtgaggttcctagagtactgcatagcctgagagtgcctcctaagtggatgccctccacacctcctgcacttggccctggccctgggtcctaggctcattgttgatcttcttagat

SEQ ID NO: 341038 - DNA, 120 bp, Artificial Sequence
  ENSG00000137878_63 (sequence is synthesized)
ctgggttccttgcattgcaggacctacctcagcctgctcttgtctgcctttgctgatgcccctcaattcacctctttcctgcctgtactgtgatatggtgtgaacttgacttatactgct

SEQ ID NO: 341039 - DNA, 120 bp, Artificial Sequence
  ENSG00000137878_64 (sequence is synthesized)
tgtgaaacctgagtcatgtgctgaaatcctgccccgccaccgctttcctcccttaactggatccttagccttggactccaaggctacagctctgtctcgtggccactcaagccccaccca

SEQ ID NO: 341040 - DNA, 120 bp, Artificial Sequence
  ENSG00000137878_65 (sequence is synthesized)
aaggaggtgctactcaaaagtttgaggcaggagtgatttattgtgaatgacaatgttatagtttctaattctagtgtttagcatggtattattccttatttattttaaaatcttagacaa

SEQ ID NO: 341041 - DNA, 120 bp, Artificial Sequence
  ENSG00000137878_66 (sequence is synthesized)
tttatctaaaatgtcaatttttagaaggtatcagcacaattgtggcagccttttttctgtatgtgttatatgtattatttaaaaaagcaggttcattctatgacaggtattggtttcggt

SEQ ID NO: 341042 - DNA, 120 bp, Artificial Sequence
  ENSG00000137878_67 (sequence is synthesized)
attcacaatataaattgtcttttcaagggaaaggatattttctttggaaatgtcattgaatctatgttctctttattgaaattgttctaattgactttgaactgtttctcagacacctgg

SEQ ID NO: 341043 - DNA, 120 bp, Artificial Sequence
  ENSG00000137878_68 (sequence is synthesized)
tgcccagtttctggccatagaaactatgtgaggctgagtaattcatgttttgggtcactaccagtcacgaatgcttctctcattccaaggctatgcatatggatgtcacattcccatgtc

SEQ ID NO: 341044 - DNA, 120 bp, Artificial Sequence
  ENSG00000137878_69 (sequence is synthesized)
aatcatctctggaaggtattattcgcccagttttttaagcatgggaaactgaggcttagagtcttaaaaaataagtagctggcagtctctcagcaaataatgatggtgctgcactacaga

SEQ ID NO: 341045 - DNA, 120 bp, Artificial Sequence
  ENSG00000137878_70 (sequence is synthesized)
cccagatctgtgactccaaagtcagcctttgttcttttcttcttgttacttttaattggaaaaaaatttaaattgcaaaaagttgtagagtgataaaaacaaaaatccacgaatgctctt

SEQ ID NO: 341046 - DNA, 120 bp, Artificial Sequence
  ENSG00000137878_71 (sequence is synthesized)
ctaggattaacaaatgttgccattttggcacacttgtttctgtttttttttttttttttaaagaaaagaacacatcacagataaagaagaggttctctttttacctgtccctgattctgt

SEQ ID NO: 341047 - DNA, 120 bp, Artificial Sequence
  ENSG00000137878_72 (sequence is synthesized)
tccttttccttctttcaccctctcttcttctcagaggcagtttggtctctaggccatgccttgatgattttactgtgtatatatatatataaaattagtatgtggcttagtttgtgtttt

SEQ ID NO: 341048 - DNA, 120 bp, Artificial Sequence
  ENSG00000137878_73 (sequence is synthesized)
aaattttacgtaaattttaatttataatattaaaaataaattgtattgtacatattttgcaacttatttctcagttttgtttctgctgttattccacatagatctggattattcatttca

SEQ ID NO: 341049 - DNA, 120 bp, Artificial Sequence
  ENSG00000137878_74 (sequence is synthesized)
atggctaatatccttttatttgaatatattgtaacttatttatcctattgatagacatttttattcttttacaaacaataccaacatgtctccaggcttctctaactaggaagtatacgt

SEQ ID NO: 341050 - DNA, 120 bp, Artificial Sequence
  ENSG00000137878_75 (sequence is synthesized)
aaaggaggaattgctagggcatgggattggcataatttcaccttttctagatattgcccaatcgctgcccacagtgcacatacctttccaccagtcacatgtgagagggcagattttcca

SEQ ID NO: 341051 - DNA, 120 bp, Artificial Sequence
  ENSG00000137878_76 (sequence is synthesized)
aatgctcatcaccacttggcactgtgtggactataattttggccagttaggaaatggcatctcattgttttcatcttaatttgcgtcagcctgattactcattgaaacttgtgaggttga

SEQ ID NO: 341052 - DNA, 120 bp, Artificial Sequence
  ENSG00000137878_77 (sequence is synthesized)
gaaacttttcttaagcttattggccattcaagtttcctcctttatgaaatggttgttcatgtcatttgctcatttttatattagattgtttttcttttttccagctgacttgtaggaact

SEQ ID NO: 341053 - DNA, 120 bp, Artificial Sequence
  ENSG00000137878_78 (sequence is synthesized)
ctacatcttatcaatattaatcatttatcgaaaactatttgggtgccattatcttctcctagtcaatgttttttgtttgtgatatcttttataatatataagtttttaatgttggcagaa

SEQ ID NO: 341054 - DNA, 120 bp, Artificial Sequence
  ENSG00000137878_79 (sequence is synthesized)
gtaaagttaatctttttggctgtgttgtgtgtcttgtttgatgtaaagatagtttctgtaatagttttgcagtttgattgttcatctttaggtcttcaattacaacctgcacatccatcc

SEQ ID NO: 341055 - DNA, 120 bp, Artificial Sequence
  ENSG00000137878_80 (sequence is synthesized)
cctctatcctctttcttactctgtttttctccatagcacttatcatccaataatatgtcatgcactttatttatctgttttgcatatatattttgtctgttacctgtttccttccactag

SEQ ID NO: 341056 - DNA, 120 bp, Artificial Sequence
  ENSG00000137878_81 (sequence is synthesized)
aatgtaagtcccatgagggcagggacttgcatctattttgtttgtggttgtatctctaacacctgggatagtcactggcaaatgatagttgctcaataaatatttgttggacaaataatg

SEQ ID NO: 341057 - DNA, 120 bp, Artificial Sequence
  ENSG00000137880_0 (sequence is synthesized)
agagccggagtaacgggactcccagctgcgcgtcgcagtcccgacgcgagaagggctggagtcggcgtccagcctagagcccccggtgggagccaggccgggacgcgtgcaccatgccct

SEQ ID NO: 341058 - DNA, 120 bp, Artificial Sequence
  ENSG00000137880_1 (sequence is synthesized)
acctgctcatcagcacccagatccgcatggaggtgggccccactatggtgggcgatgaacagtcggatccagagctgatgcagcatctgggggcttcaaagagaagagccttgggaaaca

SEQ ID NO: 341059 - DNA, 120 bp, Artificial Sequence
  ENSG00000137880_2 (sequence is synthesized)
acttttatgaatactacgtcgatgaccctccccgcatagtcctggacaagctggaacgcaggggcttccgtgtgctgagcatgacgggggtgggccagacgctggtgtggtgtctgcaca

SEQ ID NO: 341060 - DNA, 120 bp, Artificial Sequence
  ENSG00000137880_3 (sequence is synthesized)
accttctcatgctgatttgcagacggggcacccctgtggaggggctgctgtgggccctgacctccaagctcctgcctcaccgtctgccttgctcctctcttcccaaatcatcaccgccat

SEQ ID NO: 341061 - DNA, 120 bp, Artificial Sequence
  ENSG00000137880_4 (sequence is synthesized)
gggcccagccccaaagggcagtgaatggccttctctgaaaccctgcgtcaagcagtgggagagggcagtgcccggtgccctggtgctcccagctgccctcctgcttcgggcctgggccga

SEQ ID NO: 341062 - DNA, 120 bp, Artificial Sequence
  ENSG00000137880_5 (sequence is synthesized)
gggccttgtgtaggccatgttcctcgggcagctgccccgggccggagctgggcactccagcggccctggcgcgtggctcctgcatagctagcccaagccaataaagggctgtgatgagtg

SEQ ID NO: 341063 - DNA, 120 bp, Artificial Sequence
  ENSG00000137880_6 (sequence is synthesized)
gctctgttctccggaggagttggtcccatctgtagcctctccaacatcccccctctcccccacgaggcttgctctgaaagctttccacatccttactggaaccgcagaaacagagtccgt

SEQ ID NO: 341064 - DNA, 120 bp, Artificial Sequence
  ENSG00000137880_7 (sequence is synthesized)
tccctgggtctaggactccactagcagactgttccttgccctgccctctcctaagctggaccccatcaaggacagacaggcacagagagaaaggtttttgtcgtgaggatctgcatgagt

SEQ ID NO: 341065 - DNA, 120 bp, Artificial Sequence
  ENSG00000137880_8 (sequence is synthesized)
agtcggcgtccagcctagagcccccggtgggagccaggccgggacgcgtgcaccatgccctacctgctcatcagcacccagatccgcatgtcggatccagagctgatgcagcatctgggg

SEQ ID NO: 341066 - DNA, 120 bp, Artificial Sequence
  ENSG00000137880_9 (sequence is synthesized)
ctagggagggcgcctacattgctcctcctgatcattgatgggctccaccccttcacagcttgtgctcagcccctaagaatccttgctactctctgtagcctttacctgaaccttactcag

SEQ ID NO: 341067 - DNA, 120 bp, Artificial Sequence
  ENSG00000137880_10 (sequence is synthesized)
attgccgcgaaggggcccgggtacgtgcgtcccggcaacagggcgacctccgggcgcttccggctcctgtcctacctgtcggcgggagagacccagggagccctggcctcacgcgcagca

SEQ ID NO: 341068 - DNA, 80 bp, Artificial Sequence
  ENSG00000137936_0 (sequence is synthesized)
ggaccggagccggagctgcggggcgcaccggctagacgcgcgcgggattctcggcgggcacgccccgcggaccatgagcg

SEQ ID NO: 341069 - DNA, 120 bp, Artificial Sequence
  ENSG00000137936_1 (sequence is synthesized)
catgagcgtccccagctccgggagcagccgcggcgcgggcggtgcgaggccggccgcgcggcgcctttgagccccagccggaggtccagagatcctgagagcccgagcgcccagcgccgc

SEQ ID NO: 341070 - DNA, 120 bp, Artificial Sequence
  ENSG00000137936_2 (sequence is synthesized)
agttgagaattatggctgcaggaaaatttgcaagccttcccagaaacatgccggtgaatcaccagttccccctggcctcatccatggaccttctgagcagcaggtcccctctcgctgagc

SEQ ID NO: 341071 - DNA, 120 bp, Artificial Sequence
  ENSG00000137936_3 (sequence is synthesized)
atcgcccagatgcctatcaagatgtgtctatacatggcacccttccacggaagaaaaaaggtcctcctcccataaggtcctgtgatgacttcagtcacatgggcaccctcccccactcca

SEQ ID NO: 341072 - DNA, 120 bp, Artificial Sequence
  ENSG00000137936_4 (sequence is synthesized)
aatccccacggcagaactcgcctgtgacccaggatggcatccaggagagcccatggcaggaccggcacggcgaaaccttcaccttcagggatccacatcttctggacccaactgtggaat

SEQ ID NO: 341073 - DNA, 120 bp, Artificial Sequence
  ENSG00000137936_5 (sequence is synthesized)
atgtgaagttctccaaggagaggcacatcatggacaggacccccgagaaactgaagaaggagctggaggaggagctgctcctgagcagcgaggacctgcgcagccatgcctggtaccacg

SEQ ID NO: 341074 - DNA, 120 bp, Artificial Sequence
  ENSG00000137936_6 (sequence is synthesized)
gccgcatcccccgacaggtgtctgaaaaccttgtgcagcgagatggtgacttcctagttcgtgactctctgtccagccctgggaactttgtcctgacctgtcagtggaagaacctcgctc

SEQ ID NO: 341075 - DNA, 120 bp, Artificial Sequence
  ENSG00000137936_7 (sequence is synthesized)
agcacttcaaaatcaaccggacagttctgcgactcagcgaggcctacagccgcgtgcagtaccagttcgagatggagagcttcgactccatccccggcctggtgcgctgctacgtgggca

SEQ ID NO: 341076 - DNA, 120 bp, Artificial Sequence
  ENSG00000137936_8 (sequence is synthesized)
accgccggcccatctcccagcagagtggcgccatcatcttccagcccatcaacaggacggtgcctctgcggtgcctggaggagcattatggcacctccccaggccaggcccgggagggca

SEQ ID NO: 341077 - DNA, 120 bp, Artificial Sequence
  ENSG00000137936_9 (sequence is synthesized)
gcctcaccaagggaaggccggatgtggccaagaggctgagcctcaccatgggtggcgtccaggcccgagagcagaatttgcccaggggaaacctcctcagaaacaaagaaaagagtggta

SEQ ID NO: 341078 - DNA, 120 bp, Artificial Sequence
  ENSG00000137936_10 (sequence is synthesized)
gccagcccgcctgcctggatcacatgcaggacagaagagccttgtccctcaaagcccaccagtcagagagctacctgccgattggctgcaagctgccacctcagtcctcgggtgtggaca

SEQ ID NO: 341079 - DNA, 120 bp, Artificial Sequence
  ENSG00000137936_11 (sequence is synthesized)
caagcccctgcccaaactcacctgtgttcaggacgggaagcgagcctgccctgagcccagcagtggttcggagggtctcctcagacgccagggctggggaggcgctgaggggatcagaca

SEQ ID NO: 341080 - DNA, 120 bp, Artificial Sequence
  ENSG00000137936_12 (sequence is synthesized)
gtcaactgtgccctaagcccccgcctaagccctgcaaggtgccgttcctcaaggttccctcgtctccctctgcctggctcaactcagaggccaactactgtgaactgaacccagcgtttg

SEQ ID NO: 341081 - DNA, 120 bp, Artificial Sequence
  ENSG00000137936_13 (sequence is synthesized)
caactacttgatccttgatgatgatgacagggaaagaccttgggaacctgcggcagctcagatggagaaggggcagtgggacaagggcgagtttgtgacgcccctcctggagactgtctc

SEQ ID NO: 341082 - DNA, 120 bp, Artificial Sequence
  ENSG00000137936_14 (sequence is synthesized)
ctccttcaggcccaacgagtttgagtcaaagttccttccccctgagaataagcccctggaaacagcaatgttgaaacgtgcaaaagaactgttcaccaacaacgaccccaaggtcatcgc

SEQ ID NO: 341083 - DNA, 120 bp, Artificial Sequence
  ENSG00000137936_15 (sequence is synthesized)
ccagcacgtactgagcatggactgcagggttgctaggatacttggagtctctgaagagatgaggaggaacatgggggtgagctcaggcctggaactcattaccttgcctcacggacacca

SEQ ID NO: 341084 - DNA, 120 bp, Artificial Sequence
  ENSG00000137936_16 (sequence is synthesized)
gctgcgcctggacataattgaaagacacaacacaatggccatcggcattgcagtggacattctgggatgcacgggcactttggaggaccgagcggccactctgagtaagatcatccaggt

SEQ ID NO: 341085 - DNA, 120 bp, Artificial Sequence
  ENSG00000137936_17 (sequence is synthesized)
ggcggtggaactgaaggattccatgggggacctctattccttctcagctctcatgaaagccctggaaatgccacagatcacaaggttagaaaagacgtggactgctctgcggcaccagta

SEQ ID NO: 341086 - DNA, 120 bp, Artificial Sequence
  ENSG00000137936_18 (sequence is synthesized)
cacccaaactgccattctctatgagaaacagctgaagcccttcagcaaactcctgcatgaaggcagagagtccacatgtgttcccccaaacaatgtatcagtcccactgctgatgccgct

SEQ ID NO: 341087 - DNA, 120 bp, Artificial Sequence
  ENSG00000137936_19 (sequence is synthesized)
tgtgacgttaatggagcgccaggctgtgacttttgaaggaaccgacatgtgggaaaaaaacgaccagagctgtgaaatcatgctgaaccatttggcaacagcgcgattcatggccgaggc

SEQ ID NO: 341088 - DNA, 120 bp, Artificial Sequence
  ENSG00000137936_20 (sequence is synthesized)
tgcagacagctaccggatgaatgctgagaggatcctggcaggttttcaaccagatgaagaaatgaatgaaatctgcaagactgaatttcaaatgcgattgctatggggcagcaaaggtgc

SEQ ID NO: 341089 - DNA, 120 bp, Artificial Sequence
  ENSG00000137936_21 (sequence is synthesized)
acaagtcaatcagacagagagatatgagaaattcaaccagattttaactgccctctcgcgtaaattggaacctcctcctgtaaagcaggcagagctttgataactctccagagaaccttt

SEQ ID NO: 341090 - DNA, 120 bp, Artificial Sequence
  ENSG00000137936_22 (sequence is synthesized)
agaatatcttttcaagtttccccagcttcatctttgggaaagcttactgtttttgataaagtaataatgtgcaaatctgacaatatacaagcttttagtatccacaggatattaaacgtg

SEQ ID NO: 341091 - DNA, 120 bp, Artificial Sequence
  ENSG00000137936_23 (sequence is synthesized)
taaattgcacagagcacacttatttatgaattgtctaaagttactactgattttaaaatgaataatttattattaaggtaactactgctaatgttgatcagcaaatttaagagaagacct

SEQ ID NO: 341092 - DNA, 120 bp, Artificial Sequence
  ENSG00000137936_24 (sequence is synthesized)
agctatgttggctggttgctttctattatcatggtatttgaccattttagttttaattccatgtcagataagtgtaaatagaagagtttaaaagcatgaaacatttcagaaggtatcagt

SEQ ID NO: 341093 - DNA, 120 bp, Artificial Sequence
  ENSG00000137936_25 (sequence is synthesized)
tatatgatattctttaaacaaatatgaaaaatgtaaatactcatgaatgaaaatacatctttttgtgaaacagttgtatccagtctctttcatattaaacaactcatcttggtacaataa

SEQ ID NO: 341094 - DNA, 120 bp, Artificial Sequence
  ENSG00000137936_26 (sequence is synthesized)
gagcgcgctgggactccccgagacgtggcccacggcggggagcgctcagcgattggcggccaggcatcttgctcggtggcactcgagcggcatcttcccgggcgctggcctcgcccgacc

SEQ ID NO: 341095 - DNA, 120 bp, Artificial Sequence
  ENSG00000137936_27 (sequence is synthesized)
ccctgcccgtcggagctgctctgccggccaccccgccctgtcccgcccgtcccctcttcgcagaagccggccggggtcgggcagatgcgagggcccagagcgctctggtggaagcccaag

SEQ ID NO: 341096 - DNA, 120 bp, Artificial Sequence
  ENSG00000137936_28 (sequence is synthesized)
aagccgggccggtgacgccgggcctttacgtcgcgcctgtgagcggccgaggccgagcggcctcccctcgggctgcgagacggagacattacctcatccctcaagattgctcgctgcaaa

SEQ ID NO: 341097 - DNA, 120 bp, Artificial Sequence
  ENSG00000137936_29 (sequence is synthesized)
cacaacgctgagaaatggcccaagtaaagcgtgatcagggtcttgcattcttggcacatctaggaagaacgtgcaaggatgcgaattgtgaatcgcttctccaaacagagctgcttcatc

SEQ ID NO: 341098 - DNA, 120 bp, Artificial Sequence
  ENSG00000137936_30 (sequence is synthesized)
agactagcctgggagaaggagccgactcactcccccggctgccgacttccctgacttctgggcagaaacagcacagctgctgtggtgggctagggctttaacgtccgaagccccctttct

SEQ ID NO: 341099 - DNA, 120 bp, Artificial Sequence
  ENSG00000137936_31 (sequence is synthesized)
tttaaccctaaagaaagtgtgtggtccccgggactgaagaccgaaagatgcctaaggaatgcagtgctttccacgccctctcagcagctctgtgctgcttctatcaccgcaagtctttca

SEQ ID NO: 341100 - DNA, 70 bp, Artificial Sequence
  ENSG00000137936_32 (sequence is synthesized)
accacgcccagccactaaaaggtaattttaaaaagaaccttttccaaaacaccacctttcttccagatca

SEQ ID NO: 341101 - DNA, 120 bp, Artificial Sequence
  ENSG00000137936_33 (sequence is synthesized)
aggctggatatagaatcaggagacctagaaacctggcctggtcttatccttaacttaggggaacaatggaggcctgcgatttggagttaaactctcagtgatctctgtgttgacaacacc

SEQ ID NO: 341102 - DNA, 120 bp, Artificial Sequence
  ENSG00000137936_34 (sequence is synthesized)
aaagctagaggaatccagtaggatgtgggcatggttttcccggaaggctgactgagcagttctgcaaatgtttgcaagtacagggcagaatttcatccagcctcagaaccttgagccaag

SEQ ID NO: 341103 - DNA, 120 bp, Artificial Sequence
  ENSG00000137936_35 (sequence is synthesized)
actcagcatcagcaaagccaaaagtttcatttcttcgactgtgggagtgctagtcccaacctttagatggccattcagttttaagttcaataagcattttgattgagaaatactttgctg

SEQ ID NO: 341104 - DNA, 120 bp, Artificial Sequence
  ENSG00000137936_36 (sequence is synthesized)
aggagtgaaaagtccttggctttgaaagacgaatgatgagcagttcagtggcccatgtcacagtccaggcacctgccaaaggtgactccctgggaggagcatcttagtcacagagccagt

SEQ ID NO: 341105 - DNA, 120 bp, Artificial Sequence
  ENSG00000137936_37 (sequence is synthesized)
atttcttatctgctcttctctgcaagatttcctgtgatttaagtcacattaaagtacccataagcccgtaatgcaaaagaaccccaaaaccagcccagcagccaaccatggcagcaagta

SEQ ID NO: 341106 - DNA, 120 bp, Artificial Sequence
  ENSG00000137936_38 (sequence is synthesized)
gatgctctggtctttagatagtcagaaatgacacttctgggctctcaggcagtcagtgggttgagctccccattaaagtccccctgccaagtctggaatagtcctagtcccgtgtgtgtg

SEQ ID NO: 341107 - DNA, 120 bp, Artificial Sequence
  ENSG00000137936_39 (sequence is synthesized)
tgtgtgtgtgtgtgtgtgtgtgtacccgcgtgcatatgcgcgcatgcagtgcagggtctgcatacctaaagcagatgaaattctgcagaatggctgcctcactagacaaagtcaagaaga

SEQ ID NO: 341108 - DNA, 120 bp, Artificial Sequence
  ENSG00000137936_40 (sequence is synthesized)
gacaaagtcaagaagacagaccgaggagagagaggttgatgtgtctccactaccaagagataggcttctctaagccagcgagacatcccatccaacaatatgaaactggccacatttcct

SEQ ID NO: 341109 - DNA, 120 bp, Artificial Sequence
  ENSG00000137936_41 (sequence is synthesized)
tgagatgtcaacgttgaaagtgtagctgcatctttattcttcactgttatgaagttgggtgcaacacagcttgagtggaatacaaaaacaccgcttggaaacacatgatctggatttgaa

SEQ ID NO: 341110 - DNA, 120 bp, Artificial Sequence
  ENSG00000137936_42 (sequence is synthesized)
tcgcagctgtatcattcacctgctatagactttgagcaagacctctctgaggttatttcttcacagtaggtagagacaagacttacttcaaaggttcttaaagttgaacctgagtcaatg

SEQ ID NO: 341111 - DNA, 120 bp, Artificial Sequence
  ENSG00000137936_43 (sequence is synthesized)
ggaggaggttggaccaagacccactggctgggagaggccgtcttggctggagtgatggcgggcctcagacagaagaggaaaatgaggctcctcaggctggagtgcagtggcgccatctca

SEQ ID NO: 341112 - DNA, 120 bp, Artificial Sequence
  ENSG00000137936_44 (sequence is synthesized)
atgatataagtgagccacaaggagattatgtaatttgtccagagtcatacagctgagccaggatgcaaacccaggtggtcaggctacaggaacagccaggctgcaccacattataaattc

SEQ ID NO: 341113 - DNA, 120 bp, Artificial Sequence
  ENSG00000137936_45 (sequence is synthesized)
cttttgtaatttgccctcggtcttgtcttatcttcgaaaggttgctggaatttctctgttccttggagtttgggggttttttgatttgttttttctttggtgcttgtaaagaaacaaaga

SEQ ID NO: 341114 - DNA, 120 bp, Artificial Sequence
  ENSG00000137936_46 (sequence is synthesized)
tgtgactcaccagccgcgcgcgtgctgggcaggtagaggctggagcggtcaggagcatgcctggctcctggtgcctctctatggagagcacctctgtgcctctctgagagcactcacagc

SEQ ID NO: 341115 - DNA, 120 bp, Artificial Sequence
  ENSG00000137936_47 (sequence is synthesized)
caaaagtacacagctgcccccaggctgagagtgcttgatacacccttgaatcccctcttatatgatgccccagcccaggagagataaaagcatcagcaccatgagattcacctgcctctg

SEQ ID NO: 341116 - DNA, 120 bp, Artificial Sequence
  ENSG00000137936_48 (sequence is synthesized)
taatatcattagagagattaacttagcactgtgcgtcacatgattcatcacgggccatctgtgagatatcaaatagagaggtgaagcctgcagtaataaaaaatactgccatagctataa

SEQ ID NO: 341117 - DNA, 120 bp, Artificial Sequence
  ENSG00000137936_49 (sequence is synthesized)
catcagcaaaagcagcttccatcgtggtgtggagggagcagccagaccattccagcacatcgctcctttgaatgctgggtgtccacgcccagatggcctttccctaaaggaatgcaagcc

SEQ ID NO: 341118 - DNA, 120 bp, Artificial Sequence
  ENSG00000137936_50 (sequence is synthesized)
tgtcaccatgcaggcctccagaggaagccttcattcagagatgcaatgtgcaggggaagctgcacgtccacagagctgaggccccaggcaacccagagcatcctaaaaccctgtggaact

SEQ ID NO: 341119 - DNA, 120 bp, Artificial Sequence
  ENSG00000137941_0 (sequence is synthesized)
gttccaggcactccgcgtcgagcaccggagtcccgagccgtggctgccacgggcggtgggcgggcggaggagagcaccggaccaccagtgcaggctgccgagtcggggcggccgcccacg

SEQ ID NO: 341120 - DNA, 120 bp, Artificial Sequence
  ENSG00000137941_1 (sequence is synthesized)
gggaagctgcgaggcgcgggagcacctgggggaccgcttgcagcggggacgcgaggacccgggctgggctttcctcacccgggtaccttgttatcccataactttggtatcctgaaatct

SEQ ID NO: 341121 - DNA, 120 bp, Artificial Sequence
  ENSG00000137941_2 (sequence is synthesized)
gaggattccaccaagataatatgataagaactttcagtgatttggggccatatcctacttagactaatgtggaatttccagatttcctgagagcttggtacagcagcacacactgcttgc

SEQ ID NO: 341122 - DNA, 120 bp, Artificial Sequence
  ENSG00000137941_3 (sequence is synthesized)
taatcagcacaggcaataatgccatctctgcctcaagaaggagttattcagggaccctctcccctggatttgaatacagaattaccttatcaaagcacaatgaaaaggaaagtcagaaag

SEQ ID NO: 341123 - DNA, 120 bp, Artificial Sequence
  ENSG00000137941_4 (sequence is synthesized)
aagaaaaagaagggaaccattacagcaaatgttgccgggacaaagtttgaaattgttcgtttagtaatagatgaaatgggatttatgaaaactccagatgaggatgaaacaagtaatctt

SEQ ID NO: 341124 - DNA, 120 bp, Artificial Sequence
  ENSG00000137941_5 (sequence is synthesized)
atatggtgtgattctgctgttcagcaggagaaaatttcagagctgcaaaattatcagaggatcaaccattttccaggaatgggggagatctgtaggaaggatttcttagcaagaaatatg

SEQ ID NO: 341125 - DNA, 120 bp, Artificial Sequence
  ENSG00000137941_6 (sequence is synthesized)
accaaaatgatcaagtctcggcctctggattatacctttgttcctcgaacttggatctttcctgctgaatatactcaattccaaaattatgtgaaagaattgaagaaaaaacggaagcag

SEQ ID NO: 341126 - DNA, 120 bp, Artificial Sequence
  ENSG00000137941_7 (sequence is synthesized)
aaaacttttatagtgaaaccagctaatggtgcaatgggtcatgggatttctttgataagaaatggtgacaaacttccatctcaggatcatttgattgttcaagaatacattgaaaagcct

SEQ ID NO: 341127 - DNA, 120 bp, Artificial Sequence
  ENSG00000137941_8 (sequence is synthesized)
ttcctaatggaaggttacaagtttgacttacgaatttatattctggttacatcgtgtgatccactaaaaatatttctctaccatgatgggcttgtgcgaatgggtacagagaagtacatt

SEQ ID NO: 341128 - DNA, 120 bp, Artificial Sequence
  ENSG00000137941_9 (sequence is synthesized)
ccacctaatgagtccaatttgacccagttatacatgcatctgacaaactactccgtgaacaagcataatgagcattttgaacgggatgaaactgagaacaaaggcagcaaacgttccatc

SEQ ID NO: 341129 - DNA, 120 bp, Artificial Sequence
  ENSG00000137941_10 (sequence is synthesized)
aaatggtttacagaattccttcaagcaaatcaacatgatgttgctaagttttggagtgatatttcagaattggtggtaaagaccctgattgtagcagaacctcatgtcctgcatgcctat

SEQ ID NO: 341130 - DNA, 120 bp, Artificial Sequence
  ENSG00000137941_11 (sequence is synthesized)
cgaatgtgtagacctggtcaacctccaggaagcgaaagtgtctgctttgaagtcctgggatttgatattttgttggatagaaaactaaagccatggcttctggagattaaccgagcccca

SEQ ID NO: 341131 - DNA, 120 bp, Artificial Sequence
  ENSG00000137941_12 (sequence is synthesized)
agctttggaactgatcagaaaatagactatgatgtaaaaaggggagtgctgctaaatgcgttgaagctactaaacataaggaccagtgacaaaagaagaaacttggccaaacaaaaagct

SEQ ID NO: 341132 - DNA, 120 bp, Artificial Sequence
  ENSG00000137941_13 (sequence is synthesized)
gaggctcaaaggaggctctatggtcaaaattcaattaaaaggctcttaccaggctcctcagactgggaacagcagagacaccagttggagaggcggaaagaagagttgaaagagagactc

SEQ ID NO: 341133 - DNA, 120 bp, Artificial Sequence
  ENSG00000137941_14 (sequence is synthesized)
gctcaagtacgaaagcagatctcacgagaagaacatgaaaatcgacatatggggaattatagacgaatttatcctcctgaagataaagcattacttgaaaagtatgaaaatttgttagct

SEQ ID NO: 341134 - DNA, 120 bp, Artificial Sequence
  ENSG00000137941_15 (sequence is synthesized)
gttgcctttcagaccttcctttcaggaagagcagcttcattccagcgagagttgaataatcctttgaaaaggatgaaggaagaagatattttggatcttctggagcaatgtgaaattgat

SEQ ID NO: 341135 - DNA, 120 bp, Artificial Sequence
  ENSG00000137941_16 (sequence is synthesized)
gatgaaaagttgatgggaaaaactaccaagactcgaggaccaaagcctctgtgttctatgcctgagagtactgagataatgaaaagaccaaagtactgcagcagtgacagcagttatgat

SEQ ID NO: 341136 - DNA, 120 bp, Artificial Sequence
  ENSG00000137941_17 (sequence is synthesized)
agtagcagcagctcttcagaatctgacgaaaatgaaaaagaagagtaccaaaataagaaaagagaaaagcaagttacatataatcttaaaccctccaaccactacaaattaattcaacaa

SEQ ID NO: 341137 - DNA, 120 bp, Artificial Sequence
  ENSG00000137941_18 (sequence is synthesized)
cccagctccataagacgttcagtcagctgccctcggtccatctctgctcaatcaccttccagtggggacacccgcccattttctgctcaacaaatgatatctgtgtcacggccaacttct

SEQ ID NO: 341138 - DNA, 120 bp, Artificial Sequence
  ENSG00000137941_19 (sequence is synthesized)
gcatctcggtcacattccttaaaccgtgcttcctcctacatgaggcatctgcctcacagtaatgatgcctgctctaccaactctcaagtgagtgagtctttgcggcaactgaaaacaaaa

SEQ ID NO: 341139 - DNA, 120 bp, Artificial Sequence
  ENSG00000137941_20 (sequence is synthesized)
gaacaagaagatgatctaacaagtcagaccttatttgttctcaaagacatgaagatccggtttccaggaaagtcagatgcagaatcagaacttctgatagaagatatcattgataactgg

SEQ ID NO: 341140 - DNA, 120 bp, Artificial Sequence
  ENSG00000137941_21 (sequence is synthesized)
aagtatcataaaaccaaagtggcttcatattggctcataaaattggactctgtaaaacaacgaaaagttttggacatagtgaaaacaagtattcgtacagttcttccacgcatctggaag

SEQ ID NO: 341141 - DNA, 120 bp, Artificial Sequence
  ENSG00000137941_22 (sequence is synthesized)
gtgcctgatgttgaagaagtaaatttatatcggattttcaaccgggtttttaatcgcttactctggagtcgtggccaagggctgtggaactgtttctgtgattcaggatcctcttgggag

SEQ ID NO: 341142 - DNA, 120 bp, Artificial Sequence
  ENSG00000137941_23 (sequence is synthesized)
agtatattcaataaaagcccggaggtggtgactcctttgcagctccagtgttgccagcgcctagtggagctttgtaaacagtgcctgctagtggtttacaaatatgcaactgacaaaaga

SEQ ID NO: 341143 - DNA, 120 bp, Artificial Sequence
  ENSG00000137941_24 (sequence is synthesized)
ggatcactttcaggcattggtcctgactggggtaattccaggtatttactaccagggagcacccaattcttcttgagaacaccaacctacaacttgaagtacaattcacctggaatgact

SEQ ID NO: 341144 - DNA, 120 bp, Artificial Sequence
  ENSG00000137941_25 (sequence is synthesized)
cgctccaatgttttgtttacatccagatatggccatctgtgaaacagaagggaagatcgccattggttatacataacagcaattcatttttttcctctgaagttgaacatgcaaagaaca

SEQ ID NO: 341145 - DNA, 120 bp, Artificial Sequence
  ENSG00000137941_26 (sequence is synthesized)
tgaccattaagtgctgttttatgtatataagacatatatatgtgtgaaaatatatgcacatatgcaccctaataacatatatttattatattaaatgatatatgaaagaagaattagcag

SEQ ID NO: 341146 - DNA, 120 bp, Artificial Sequence
  ENSG00000137941_27 (sequence is synthesized)
aaaatggaatataagacttaacctttctggaaacgtaataaaccatgttaaaattgtttacacaaatatgtgaatgtctagaatctgctaggtttataattaattccttcctactagaaa

SEQ ID NO: 341147 - DNA, 120 bp, Artificial Sequence
  ENSG00000137941_28 (sequence is synthesized)
tgttatttttgctgcagagtatataaaacaaattgatcttgaagatccaattacagtgttaaattattttctagataacatgccttttgacctgaaaaagggtttagtataataccttaa

SEQ ID NO: 341148 - DNA, 120 bp, Artificial Sequence
  ENSG00000137941_29 (sequence is synthesized)
aaattctcatatatagtagccattttaaatgaaacaaaaagatttagaagcctggtgttgcttgatgataagattaagaagtttaaaacgggtttatcattactatagcacactgtaaag

SEQ ID NO: 341149 - DNA, 120 bp, Artificial Sequence
  ENSG00000137941_30 (sequence is synthesized)
tgctagaaaagtcataacctgattctccaatctttttattcctctatgtggaaatttagctacttgtaataaggtacattttcagtaaggatctggtgagatcatattatgatctaacat

SEQ ID NO: 341150 - DNA, 120 bp, Artificial Sequence
  ENSG00000137941_31 (sequence is synthesized)
aaataaataaaaagaagataaaaataaataaataaaatggaagacaatccaatgggttaaaaataaaatgtaaactagctttcatttttacttttcataatcacataaaggaacagaaaa

SEQ ID NO: 341151 - DNA, 120 bp, Artificial Sequence
  ENSG00000137941_32 (sequence is synthesized)
ataatcacataaaggaacagaaaatgatggtaacaaaatctttctatatggcttttatgtcttataccactcatttttatttggaaagtatatctttgatgggtttaacatgtggttaaa

SEQ ID NO: 341152 - DNA, 120 bp, Artificial Sequence
  ENSG00000137941_33 (sequence is synthesized)
tacaatttctcctgtttcgcagaagtagaagagttgacacatttcactcattttagtgttacaggataatgagacaaacttatttttataaatctctcaaggttgaaatcaacttatatt

SEQ ID NO: 341153 - DNA, 120 bp, Artificial Sequence
  ENSG00000137941_34 (sequence is synthesized)
gcaaattctaatacagtagtttctcattgcaccacagaaacagttaaaggattgtgaatagaagatttcaattatcacatattacaagtcatcagtgtacccttgagggtttttaaaaaa

SEQ ID NO: 341154 - DNA, 120 bp, Artificial Sequence
  ENSG00000137941_35 (sequence is synthesized)
tcaaaacagagaacgaagtgttcttgtccaaagttgttatgcataagtttcatagcagtttacttccttttcttgaatacagtttttaaaaccaagagtgagctttcagttttccataaa

SEQ ID NO: 341155 - DNA, 120 bp, Artificial Sequence
  ENSG00000137941_36 (sequence is synthesized)
aatataagccgtactactttgacattgaaatcatcagtgcagccatcacttcttagaatttatttaaacttcttctcccaacagttttattttcttttagctgctaattattttcgaaat

SEQ ID NO: 341156 - DNA, 120 bp, Artificial Sequence
  ENSG00000137941_37 (sequence is synthesized)
tcatgaatgttttacctccttttactattctgaaagttatttcaagaagtggccccaaagcaggagaactgagaggggcaaattggcctggtttaattcacagcctgaagaattggcaac

SEQ ID NO: 341157 - DNA, 120 bp, Artificial Sequence
  ENSG00000137941_38 (sequence is synthesized)
ctaaagttataagttagatgtattttgcttttcaagccatcttctgagccttttttaggctgaaatgatttgtttatttcccaaattattgctagctacttgattttttatggctaccta

SEQ ID NO: 341158 - DNA, 120 bp, Artificial Sequence
  ENSG00000137941_39 (sequence is synthesized)
acatccacatttggtagatacttttcctctctgcatgcatcccaaagaagaatttgctatttgtggaagaagagaataagggtatcagaatgaaggaaattacagtgactacactgttta

SEQ ID NO: 341159 - DNA, 120 bp, Artificial Sequence
  ENSG00000137941_40 (sequence is synthesized)
tgactccattttgtgaattcttaaatatgctatggatttttttttagaaaaaataatgcaaaaattgggatattacagaatcaccataaagatgatcaacaagtaataagtcttttcatg

SEQ ID NO: 341160 - DNA, 120 bp, Artificial Sequence
  ENSG00000137941_41 (sequence is synthesized)
gagttcatttttcttttaaattcatgatttggccacaaaaatatatatataagtgtctgatatatgataacagcccagtttctcggccactcatttgcattatcttaaatcacaaataat

SEQ ID NO: 341161 - DNA, 120 bp, Artificial Sequence
  ENSG00000137941_42 (sequence is synthesized)
tacttaatttgctggagtgtgtgctttgcaacttttgtaccagagcaaaatttgtatttaaaacaaaaaataagaatgcccatcactaggagaaacactcctcacagaaaacacacacac

SEQ ID NO: 341162 - DNA, 120 bp, Artificial Sequence
  ENSG00000137941_43 (sequence is synthesized)
acacacacacacaatttaaaaactgagtaaatttaaatgtatgaaagtaccccacaaattgatttcaacaaataaatttcatttctctagctacttatgtctggccttattttgagcgtt

SEQ ID NO: 341163 - DNA, 120 bp, Artificial Sequence
  ENSG00000137941_44 (sequence is synthesized)
acaattttattgccttcatttgcctatttagactgatgtagtttgatatgatgaagttgtgaataaaagccttgtgttcattatttatatatactacctggtatgctatggactgtgtct

SEQ ID NO: 341164 - DNA, 120 bp, Artificial Sequence
  ENSG00000137941_45 (sequence is synthesized)
gctgtagtgctattccctaatgagcaactaagagaagacacaacaataaaccatggaagtgttgggaggccatggaaatgatttagaggtataaaatattcccaagtttttattataaat

SEQ ID NO: 341165 - DNA, 120 bp, Artificial Sequence
  ENSG00000137941_46 (sequence is synthesized)
ttttattcataggttaaaacatataagcataagtgattgtacaggtgtgactcccttttctaggagagaaaatagctttatttgaaaactccaaaagctacttaatcttaccagaggttt

SEQ ID NO: 341166 - DNA, 120 bp, Artificial Sequence
  ENSG00000137941_47 (sequence is synthesized)
ttaataggggaactgggtttacttacaatgaaagcatattttcattctgctatagaaaaacatatccctgctcattcagtaaatctaagattggaatgctttctagaactatgcaatatt

SEQ ID NO: 341167 - DNA, 120 bp, Artificial Sequence
  ENSG00000137941_48 (sequence is synthesized)
tgaataatttctagaaatgtctaagaaacaaccttttttattttaaatcatcacttacaaacgtagtctgagactgcaaactagttttcacttgactaatccatcattatagattagtta

SEQ ID NO: 341168 - DNA, 120 bp, Artificial Sequence
  ENSG00000137941_49 (sequence is synthesized)
ccatttgctctatataatctattgaagaaactattgttattcatattttgattaattttactagcaacaaatttttattttagtagcattgcatttaccttaaatatgtaaaaatgaagt

SEQ ID NO: 341169 - DNA, 120 bp, Artificial Sequence
  ENSG00000137941_50 (sequence is synthesized)
tgtaacaggatcaaatatggaaatggcaatggtaactctgcctagaacatagttgaatgtccttggttgtcggtaagatgcaaagatctatacaaattttatcataggtcaaaattattt

SEQ ID NO: 341170 - DNA, 120 bp, Artificial Sequence
  ENSG00000137941_51 (sequence is synthesized)
ctaaatatacaaacagtttcaactatttctttctccctaaaactaaaaccaaaccaaacccaaatgaagaaacctaaacttcttttcatctaatagttatacccaactagataatagtag

SEQ ID NO: 341171 - DNA, 120 bp, Artificial Sequence
  ENSG00000137941_52 (sequence is synthesized)
cttctagacatcaataaaaagatttcattttaactgtctttttaatttgtaaaatatatgagtatggaattttgtatctaacttgaaatttcagatgttttaataatccaaatacgttct

SEQ ID NO: 341172 - DNA, 120 bp, Artificial Sequence
  ENSG00000137941_53 (sequence is synthesized)
tctttagcatgtcaaagtactaatagttaaaaaatttctttagatttaagcatatacattacttgactttttcaaaagtatcaaaaaattgatagctgcagaaatgccattatttgattt

SEQ ID NO: 341173 - DNA, 120 bp, Artificial Sequence
  ENSG00000137941_54 (sequence is synthesized)
tctaaaaaacattgattcattcttaaatgtgtattctttaaaaaatagtaaatacctcaagagtgacagaaaactttccttttctgttctgtaatgctaatttaaactttgagtcttagt

SEQ ID NO: 341174 - DNA, 120 bp, Artificial Sequence
  ENSG00000137941_55 (sequence is synthesized)
ttacatggtcataggggttaaataaaatgtataactgtacaattaattgtgttcttgtgacctgatgattttttgaaaatttgcttttctctttaagaaatttaagttttcaagggccgt

SEQ ID NO: 341175 - DNA, 120 bp, Artificial Sequence
  ENSG00000137941_56 (sequence is synthesized)
gttatctaaatattttgggctaatgttgacttataaataaataaaaatttagaaatatattcatgatgacaattttgttacttacactgcctattctttatttcttttttagttcaaagg

SEQ ID NO: 341176 - DNA, 120 bp, Artificial Sequence
  ENSG00000137941_57 (sequence is synthesized)
aaggtgaaattttgacctttgtattaacaaagcctcaagaaaagagaaattctgccttttaaacattggttttccttgcattttatggtggtgtgattttgcctcagcaataataaaaca

SEQ ID NO: 341177 - DNA, 120 bp, Artificial Sequence
  ENSG00000137941_58 (sequence is synthesized)
taaaatatgttgttgcatcaagttcagtttgtctgctgagattatttttaagaaccaggttgaagcctctatgcctaaaaaagcgtttattgtctggatacatataaagcaagatatatg

SEQ ID NO: 341178 - DNA, 120 bp, Artificial Sequence
  ENSG00000137941_59 (sequence is synthesized)
gctacaaataagtcttgcaaccaaaattggtatattaaaatttactgcacactttgagattgctgccattttttggtgctttttggacctcgtcataaagggatgtatcgtatattaggg

SEQ ID NO: 341179 - DNA, 120 bp, Artificial Sequence
  ENSG00000137941_60 (sequence is synthesized)
aaaattactcaagttacacattctacattaactgcgctgtattatctacaggtacaatcaatggaccaatagttcctaaattagtaataaggcttaccttacaaaagtaatgaaataaca

SEQ ID NO: 341180 - DNA, 120 bp, Artificial Sequence
  ENSG00000137941_61 (sequence is synthesized)
ctgatatttctctttcaaaggctaacagcaattcttggtcctgagctattcagttcatacaataactactgtacatgctacaacatctgaatattaatggttttgctgcagattctgggt

SEQ ID NO: 341181 - DNA, 120 bp, Artificial Sequence
  ENSG00000137941_62 (sequence is synthesized)
atgaggattagcttgaaagcaatacatttgctaacatgaatcatgactcacattatccccgtgtgctttactacctgtatatgaatgcaaatgttgttacagaaaatatgcttgaaatgt

SEQ ID NO: 341182 - DNA, 120 bp, Artificial Sequence
  ENSG00000137941_63 (sequence is synthesized)
caatacagtgtgcaattagcgttgcattgtcatgctccagcatgtgatatctgtatggtgaagttatttcaattactctgatacattactataataaaaaagtttaacctaagaaagcta

SEQ ID NO: 341183 - DNA, 120 bp, Artificial Sequence
  ENSG00000137941_64 (sequence is synthesized)
tatattccttgggagcagagatgatactaatttatcttactatctccagtacctagcacagagtgtgtactctaaaaaaaatgtttttgatgtactaatatgtaaattagtacatattag

SEQ ID NO: 341184 - DNA, 120 bp, Artificial Sequence
  ENSG00000137941_65 (sequence is synthesized)
ggcaaggttgtttttttttttcactgatgaatccatagtccagaatagtgtctaacacttaataggtgctcagtagacatttgttgaatgaatgaaatcaatgaataagtaaatgaagga

SEQ ID NO: 341185 - DNA, 120 bp, Artificial Sequence
  ENSG00000137941_66 (sequence is synthesized)
caaagggtcgaataactcattatgtagtcaagctctttaagaacacttaaagctgtttgctacatgaaggaaggcactactagcaagcctgattgtgccactctttcttctggaaaacaa

SEQ ID NO: 341186 - DNA, 120 bp, Artificial Sequence
  ENSG00000137941_67 (sequence is synthesized)
ccagtatttacctttaagggactgaacaaggacagcaatcacgaacctaaaggtgataaaacatacttggaaatgaagttatttgacttatataccttcactttcaaaagtccagagcaa

SEQ ID NO: 341187 - DNA, 120 bp, Artificial Sequence
  ENSG00000137941_68 (sequence is synthesized)
gagcatccaaaaatgtgaagctggttgatcacaataatagcagtggtaaagatttcataaactaatttctgttgatggatcttgtagcttttgtgggtacacaaagtaggacgagtcttc

SEQ ID NO: 341188 - DNA, 120 bp, Artificial Sequence
  ENSG00000137941_69 (sequence is synthesized)
aacgaaaaatgaagatgttttcagtttgtatgatgatgagaatgatttagaagagaggaatggcccaggaaagagaggtgttaaaaagttcttgagtaagtaagctgtgagagggggagg

SEQ ID NO: 341189 - DNA, 120 bp, Artificial Sequence
  ENSG00000137941_70 (sequence is synthesized)
gttttcctaatcaagagcatttattctaacaggggggaaggcaggtgcatgggaatgtggtgggaagatgggaaagttttcttctggtggggagggcttctggagatttggggagagagt

SEQ ID NO: 341190 - DNA, 120 bp, Artificial Sequence
  ENSG00000137941_71 (sequence is synthesized)
ctttactatctatgtagatattcttttgtgttttctttaaaattttgcagttttattctctgattaccatactctttaattctacaaattcactgtaggtcatttaacattaaatctttt

SEQ ID NO: 341191 - DNA, 120 bp, Artificial Sequence
  ENSG00000137941_72 (sequence is synthesized)
agattaataattggcagtttattaaaacataaaactcaaaggatggatagaattgtattgtcgtatacatgaatataattaattcgctgagaatattaatatttacctttttattttcca

SEQ ID NO: 341192 - DNA, 88 bp, Artificial Sequence
  ENSG00000137941_73 (sequence is synthesized)
aaccagctaatggtgcaatgggtcatggttttctgcaatgtactttttcaaagaaaatgtggctgaggctgcttttaataaaatacac

SEQ ID NO: 341193 - DNA, 120 bp, Artificial Sequence
  ENSG00000137941_74 (sequence is synthesized)
gaaagttatatggattccacataacttttttagataggttcttaatatgttgccttattacatttcagctcttactcacctgaatagcctgttttgttgctatccagttgtattggctct

SEQ ID NO: 341194 - DNA, 90 bp, Artificial Sequence
  ENSG00000137941_75 (sequence is synthesized)
tctttgcatgaagcctgcatcttttgcagacttaagttttaacctctttctatctttagggaagaatcaatagaaaaaacctcttctggt

SEQ ID NO: 341195 - DNA, 120 bp, Artificial Sequence
  ENSG00000137941_76 (sequence is synthesized)
attgcttaaacccgggaggtggaggctacagtgagctgagattgggccactgcactacagcttggtgacagcgagactccatctcaaaaaacaaacaacaaccaccaaaaaaaaaaacaa

SEQ ID NO: 341196 - DNA, 120 bp, Artificial Sequence
  ENSG00000137942_0 (sequence is synthesized)
tcactcactggggagcccggcggtggcggcacctttcgaggtagacccgctgagctgctagcccgccggccagcgagtgagaggtcggacagactgtggagccgacagactgaaggacag

SEQ ID NO: 341197 - DNA, 120 bp, Artificial Sequence
  ENSG00000137942_1 (sequence is synthesized)
cggcaccgccagacggccagaaagttccgccatgagctggggcacggagctgtgggatcagttcgacagcttagacaagcatacacaatggggaattgacttcttggaaagatatgccaa

SEQ ID NO: 341198 - DNA, 120 bp, Artificial Sequence
  ENSG00000137942_2 (sequence is synthesized)
atttgttaaagagaggatagaaattgaacagaactatgcgaaacaattgagaaatctggttaagaagtactgccccaaacgttcatccaaagatgaagagccacggtttacctcgtgtgt

SEQ ID NO: 341199 - DNA, 120 bp, Artificial Sequence
  ENSG00000137942_3 (sequence is synthesized)
agccttttttaatatccttaatgagttaaatgactatgcaggacagcgagaagttgtagcagaagaaatggcgcacagagtgtatggtgaattaatgagatatgctcatgatctgaaaac

SEQ ID NO: 341200 - DNA, 120 bp, Artificial Sequence
  ENSG00000137942_4 (sequence is synthesized)
tgaaagaaaaatgcatctgcaagaaggacgaaaagctcaacaatatcttgacatgtgctggaaacagatggataatagtaaaaagaagtttgaaagagaatgtagagaggcagaaaaggc

SEQ ID NO: 341201 - DNA, 120 bp, Artificial Sequence
  ENSG00000137942_5 (sequence is synthesized)
acaacagagttatgaaagattggataatgatactaatgcaaccaaggcagatgttgaaaaggccaaacagcagttgaatctgcgtacgcatatggccgatgaaaataaaaatgaatatgc

SEQ ID NO: 341202 - DNA, 120 bp, Artificial Sequence
  ENSG00000137942_6 (sequence is synthesized)
tgcacaattacaaaactttaatggagaacaacataaacatttttatgtagtgattcctcagatttacaagcaactacaagaaatggacgaacgaaggactattaaactcagtgagtgtta

SEQ ID NO: 341203 - DNA, 120 bp, Artificial Sequence
  ENSG00000137942_7 (sequence is synthesized)
cagaggatttgctgactcagaacgcaaagttattcccatcatttcaaaatgtttggaaggaatgattcttgcagcaaaatcagttgatgaaagaagagactctcaaatggtggtagactc

SEQ ID NO: 341204 - DNA, 120 bp, Artificial Sequence
  ENSG00000137942_8 (sequence is synthesized)
cttcaaatctggttttgaacctccaggagactttccatttgaagattacagtcaacatatatatagaaccatttctgatgggactatcagtgcatccaaacaggagagtgggaagatgga

SEQ ID NO: 341205 - DNA, 120 bp, Artificial Sequence
  ENSG00000137942_9 (sequence is synthesized)
tgccaaaaccacagtaggaaaggccaagggcaaattgtggctctttggaaagaagccaaagccacagtccccacccttaacccctactagtttattcacatccagtactcctaatgggtc

SEQ ID NO: 341206 - DNA, 120 bp, Artificial Sequence
  ENSG00000137942_10 (sequence is synthesized)
ccagtttctcacattctccattgagcccgtgcattattgtatgaatgaaataaaaacagggaagcccagaattccttctttcagaagcctcaaaagagggtggtcggtgaagatgggccc

SEQ ID NO: 341207 - DNA, 120 bp, Artificial Sequence
  ENSG00000137942_11 (sequence is synthesized)
agcactagaagatttcagtcatctgccaccagaacagagacgtaaaaaactacagcagcgcattgatgaacttaacagagaactacagaaagaatcagaccaaaaagatgcactcaacaa

SEQ ID NO: 341208 - DNA, 120 bp, Artificial Sequence
  ENSG00000137942_12 (sequence is synthesized)
aatgaaagatgtatatgagaagaatccacaaatgggggatccagggagtttgcagcctaaattagcagagaccatgaataacattgaccgcctacgaatggaaatccataagaatgaggc

SEQ ID NO: 341209 - DNA, 120 bp, Artificial Sequence
  ENSG00000137942_13 (sequence is synthesized)
ttggctctctgaagtcgaaggcaaaacaggtgggagaggagacagaagacatagcagtgacataaatcatcttgtaacacagggacgagaaagtcctgagggaagttacactgatgatgc

SEQ ID NO: 341210 - DNA, 120 bp, Artificial Sequence
  ENSG00000137942_14 (sequence is synthesized)
aaaccaggaagtccgtgggccaccccagcagcatggtcaccacaatgagtttgatgatgaatttgaggatgatgatcccttgcctgctattggacactgcaaagctatctacccttttga

SEQ ID NO: 341211 - DNA, 120 bp, Artificial Sequence
  ENSG00000137942_15 (sequence is synthesized)
tggacataatgaaggtactctagcaatgaaagaaggtgaagttctctacattatagaggaggacaaaggtgacggatggacaagagctcggagacagaacggtgaagaaggctacgttcc

SEQ ID NO: 341212 - DNA, 120 bp, Artificial Sequence
  ENSG00000137942_16 (sequence is synthesized)
cacgtcatacatagatgtaactctagagaaaaacagtaaaggttcctgaagagggtttctgaggaaatgggcaagatgttgaaggaggttacatgcagctgcttttgggggagggtatta

SEQ ID NO: 341213 - DNA, 120 bp, Artificial Sequence
  ENSG00000137942_17 (sequence is synthesized)
tcaaagagagtgagagaagcaagttgcatgagtgcatgcagacatgattttttttttactaacttcattagcatttccatacattgtttttaaaaatcataataccaacccttaagttcc

SEQ ID NO: 341214 - DNA, 120 bp, Artificial Sequence
  ENSG00000137942_18 (sequence is synthesized)
tagttcacagttattcccacaaaagaaaaagccaacaatagtgtaccatttttctatttattttattgctgtctaatcaataaagaatgcagagctgtcaaaaaatgtgtcttacattag

SEQ ID NO: 341215 - DNA, 120 bp, Artificial Sequence
  ENSG00000137942_19 (sequence is synthesized)
ctgtcccaacaggattgtcttccctcccagctctgttttaattggcttttagacccactatctgtcagatccttgccatctgtcagtgtctgcctgcgccacctccgtgcttgcttaaca

SEQ ID NO: 341216 - DNA, 120 bp, Artificial Sequence
  ENSG00000137942_20 (sequence is synthesized)
tcctgttgcatgtctagcgtgattgagctagatttttcaggcatgtctttagattcccttgttcttgtcaaagccttgttttgttttacatttgtagtgcaaatcactttgtcaaacatc

SEQ ID NO: 341217 - DNA, 120 bp, Artificial Sequence
  ENSG00000137942_21 (sequence is synthesized)
tccagcactaatgtttccatcttagtatttgtgcacactgctataacttccccactgcaaacattccagttttggcattacgaagaagtagctgtgaacctgaagtatttatgataagaa

SEQ ID NO: 341218 - DNA, 120 bp, Artificial Sequence
  ENSG00000137942_22 (sequence is synthesized)
aaagaaaacatctctgctgtagcctacagcccagttgaaagaactctttgaaacgtgatacatcttcagcacctcagtctgggaagaatctagtcagcactgaaatcctggcataataaa

SEQ ID NO: 341219 - DNA, 120 bp, Artificial Sequence
  ENSG00000137942_23 (sequence is synthesized)
cacagaagatattcaccacctcaagacaaaggactattgtcaaaagtcagctgcttccattcaaatgctgccttaaacttgagtgcctaaatctgttgattgccaacactaccactacag

SEQ ID NO: 341220 - DNA, 120 bp, Artificial Sequence
  ENSG00000137942_24 (sequence is synthesized)
tatcccacaaagggctttatgtgtcagctcagtgcgacctgctttaactctgcagcaccgctgcagctgccgatgtagcctcggtaggtggctattagagctctaccatatacagtggtg

SEQ ID NO: 341221 - DNA, 120 bp, Artificial Sequence
  ENSG00000137942_25 (sequence is synthesized)
catcttcaaatttatgcatcaaactaaagacatgtccaagtccattttaatttcctcagtggttttatgagaagttttatgggcctcccccaattgtctttttattttgggttatgacga

SEQ ID NO: 341222 - DNA, 120 bp, Artificial Sequence
  ENSG00000137942_26 (sequence is synthesized)
tcatgtttgataattacaatgatagtctctttccacgtgatgcttttgtttgaacctgataaaatttagtgaaactttgtaatgatctatgtgcacttttacttgtaaaatggaatttct

SEQ ID NO: 341223 - DNA, 120 bp, Artificial Sequence
  ENSG00000137942_27 (sequence is synthesized)
gtatgtttatacttgtaaatatgattgttgttagtgctcctgttgctcatggtgtcctgcctcgcatttgtgattctgttaatgacatgtatcttaactaatttcttagtggtgttgtaa

SEQ ID NO: 341224 - DNA, 120 bp, Artificial Sequence
  ENSG00000137942_28 (sequence is synthesized)
tagggagatggggcaggtggggggttatttgtaccactgaatcttcattaatttggttctttactgttttgaggggagaaagaacgtgaaatggtttgtgtattattgaattttaagcaa

SEQ ID NO: 341225 - DNA, 120 bp, Artificial Sequence
  ENSG00000137942_29 (sequence is synthesized)
tattttagaagctgtgtgactgctttaataactttttcccagtgttatttgaatcatactacccgttatactaaagctgaatgacaattgtgtgaaagttactgccttcataagatcaag

SEQ ID NO: 341226 - DNA, 120 bp, Artificial Sequence
  ENSG00000137942_30 (sequence is synthesized)
tcaccactgttacacagctgacatatagtgtattacctttgcagctagtaaactataaagtttagatattgaatctcgttacagggttatttatataatgtgacattattcagtactgac

SEQ ID NO: 341227 - DNA, 120 bp, Artificial Sequence
  ENSG00000137942_31 (sequence is synthesized)
agactacatgaagtagttttaaaatctagtgctatttttattttaaaggttagcaatgaggaggaaatgtgatctggctgtgtttgtcttctgtacaaagcctgaagtgcttatggtttt

SEQ ID NO: 341228 - DNA, 120 bp, Artificial Sequence
  ENSG00000137942_32 (sequence is synthesized)
ttggctaacagccacagagggcaaagtttaagactttcttgtaaggactaactgttcttttcaagctactgtttgtttttctaaaagcaggatttgcttccgtaggaggcaagttccttg

SEQ ID NO: 341229 - DNA, 120 bp, Artificial Sequence
  ENSG00000137942_33 (sequence is synthesized)
atgtggaatagtgcaacctgtatatgggttattataataggaaagacatttgtacttgcacagtttaaatcattcttaaattttgaacatgtgaattgtcccaaaaaatctttaattttt

SEQ ID NO: 341230 - DNA, 120 bp, Artificial Sequence
  ENSG00000137942_34 (sequence is synthesized)
tggtaatttttactctttttgtgcacatgttgatttcttaatggtaaatccttcatttaaagatagtgttctctgttgagaatatttacatggaataaaacaatcttttcatggcctgtt

SEQ ID NO: 341231 - DNA, 120 bp, Artificial Sequence
  ENSG00000137942_35 (sequence is synthesized)
tatctaaactaaccaggcacctttgtgccatgtgtgacataggaagagtaacataaaatgaaaacacattcaacaggttgaaaaaaataaggaaacttaaagggcatccaagattaattg

SEQ ID NO: 341232 - DNA, 120 bp, Artificial Sequence
  ENSG00000137942_36 (sequence is synthesized)
ttcactatgtgagctgagtgtaggcttgatcttgtgaatattaccacaagaaacattttgtggcactttactgtttgagtaacgttggtgtgaagcttaattgatgccttttgctttatg

SEQ ID NO: 341233 - DNA, 120 bp, Artificial Sequence
  ENSG00000137942_37 (sequence is synthesized)
tcccgcttaagtctgtgtgaaggatttgtgtttttctgccttacaaatagaatttgatttattgggcaggaattcatggatagtaatgctctctgccccctttacttcagaaaacacagt

SEQ ID NO: 341234 - DNA, 120 bp, Artificial Sequence
  ENSG00000137942_38 (sequence is synthesized)
gactttagtgaatttgaatagtgaaactgctctgaaatgctatggaaagccgactccccaaagagtggtttcttctagaagtttgaatttgtagctacagtttccaagaagaaaaatagt

SEQ ID NO: 341235 - DNA, 120 bp, Artificial Sequence
  ENSG00000137942_39 (sequence is synthesized)
agttggataatttagtaaaataataacatcattttcattttcttacctattcttaactttggtttcctaaaggaagaaaatgagcaggtagcacataatctatttaagtagatttaaaga

SEQ ID NO: 341236 - DNA, 120 bp, Artificial Sequence
  ENSG00000137942_40 (sequence is synthesized)
gagtttcaaaataaatctcctggtctagctcttaggtgaataaaatagattttgtttgagacctcaaaatattttgaggttagctggtaattttcaataatttacaagcttccttccaaa

SEQ ID NO: 341237 - DNA, 120 bp, Artificial Sequence
  ENSG00000137942_41 (sequence is synthesized)
ctaatctcatacttttgtatgtttcatcttgaaaatatcttttgggaaataccactttagtgattatttagcatttagcagttacacataggaaaatacacagttacatagaaaaataca

SEQ ID NO: 341238 - DNA, 120 bp, Artificial Sequence
  ENSG00000137942_42 (sequence is synthesized)
ggagaaactttttgactatctgggttagaggaagatatgtgtaccgcctttagggcattttgttatttccgctgaatcattagttattaggatagataaatttttccaattagtttcagc

SEQ ID NO: 341239 - DNA, 120 bp, Artificial Sequence
  ENSG00000137942_43 (sequence is synthesized)
aagcgttgttggaaacactgtgcagtcaaggattgtgcagtgctggttgtgtgaccacaccctgagtcagtggtgtggggaagtaaagtgtgaagaagcagtaagattggtttttaattt

SEQ ID NO: 341240 - DNA, 120 bp, Artificial Sequence
  ENSG00000137942_44 (sequence is synthesized)
tgcccatgttttaaattttcctggtgttttcggtagctgactataaaatgatagagacatttgggacaggcactttaaactgaacaccccttttggttttaccaaaggtcttcagtaatt

SEQ ID NO: 341241 - DNA, 120 bp, Artificial Sequence
  ENSG00000137942_45 (sequence is synthesized)
acctaccagttatctgtatctgggtatgattttacttattctgtttcatggttttataaaatgactgaaatttgagctcttttcttcagtacattgttttcattaacatatacgcataaa

SEQ ID NO: 341242 - DNA, 120 bp, Artificial Sequence
  ENSG00000137942_46 (sequence is synthesized)
cacacacatctgtgtagatttcttttttttttaaggggttgcttgaggcaaatttgaaattaaacttaagattggtatgtattcttattttatagcaggtatattttaaaaataaaattt

SEQ ID NO: 341243 - DNA, 120 bp, Artificial Sequence
  ENSG00000137944_0 (sequence is synthesized)
agtcgggactcgagcctagggaggcgaggttcccgcaccggatagcatgtttttggcccagaggagcctctgctctcttagcggtagagcaaaattcctgaagacaatttcttcttccaa

SEQ ID NO: 341244 - DNA, 120 bp, Artificial Sequence
  ENSG00000137944_1 (sequence is synthesized)
aatcctcggattctctacttctgctaaaatgtcactgaaattcacaaatgcaaaacggattgaaggacttgatagtaatgtgtggattgaatttaccaaattggctgcagacccttctgt

SEQ ID NO: 341245 - DNA, 120 bp, Artificial Sequence
  ENSG00000137944_2 (sequence is synthesized)
tgtgaatcttggccaaggctttccagatatatcccctcctacatatgtaaaagaagaattatcaaagattgcagcaatcgatagcctgaatcagtatacacgaggctttggccatccatc

SEQ ID NO: 341246 - DNA, 120 bp, Artificial Sequence
  ENSG00000137944_3 (sequence is synthesized)
acttgtgaaagctctgtcctatctgtatgaaaagctttatcaaaagcaaattgattcaaataaagaaatccttgtgacagtaggagcatatggatctctttttaacaccattcaagcatt

SEQ ID NO: 341247 - DNA, 120 bp, Artificial Sequence
  ENSG00000137944_4 (sequence is synthesized)
aattgatgagggagatgaagtcatactaatagtgcctttctatgactgctatgagcccatggtgagaatggctggagcaacacctgtttttattcccctgagatctaaacctgtttatgg

SEQ ID NO: 341248 - DNA, 120 bp, Artificial Sequence
  ENSG00000137944_5 (sequence is synthesized)
aaaaagatggtctagttctgactggacattagatcctcaagaactggaaagtaaatttaattccaaaaccaaagctattatactaaatactccacataacccacttggcaaggtgtataa

SEQ ID NO: 341249 - DNA, 120 bp, Artificial Sequence
  ENSG00000137944_6 (sequence is synthesized)
cagagaggaactgcaagtaattgctgacctttgcatcaaatatgacacactctgcatcagcgatgaggtttatgaatggcttgtatattctggaaataagcacttaaaaatagctacttt

SEQ ID NO: 341250 - DNA, 120 bp, Artificial Sequence
  ENSG00000137944_7 (sequence is synthesized)
gagaacaataacaataggaagtgctggaaagactttcagtgtaactggctggaagcttggctggtccattggtccaaatcatttgataaaacatttacagacagttcaacaaaacacgat

SEQ ID NO: 341251 - DNA, 120 bp, Artificial Sequence
  ENSG00000137944_8 (sequence is synthesized)
ttatacttgtgcaactcctttacaggaagccttggctcaagctttctggattgacatcaagcgcatggatgacccagaatgttactttaattctttgccaaaagagttagaagtaaaaag

SEQ ID NO: 341252 - DNA, 120 bp, Artificial Sequence
  ENSG00000137944_9 (sequence is synthesized)
agatcggatggtacgtttacttgaaagtgttggcctaaaacccatagttcctgatggaggatacttcatcatcgctgatgtgtctttgctagatccagacctctctgatatgaagaataa

SEQ ID NO: 341253 - DNA, 120 bp, Artificial Sequence
  ENSG00000137944_10 (sequence is synthesized)
tgagccttatgactataagtttgtgaaatggatgactaaacataagaaactatcagccatccccgtttcagcattctgtaactcagagactaaatcacagtttgagaagtttgtgcgttt

SEQ ID NO: 341254 - DNA, 120 bp, Artificial Sequence
  ENSG00000137944_11 (sequence is synthesized)
ttgcttcattaaaaaagacagcacactggatgctgctgaagaaatcatcaaggcatggagtgtacagaagtcttgatttgtgcagaatggattaatgtttctgttagatgacctagtatg

SEQ ID NO: 341255 - DNA, 120 bp, Artificial Sequence
  ENSG00000137944_12 (sequence is synthesized)
gaattgttacttagtgctgccacctgctggatgttaaaaggtatttcagtacaactggaatttaaatatttccattgtttttccaaagcagttaacccaactcctaacaacattttcggg

SEQ ID NO: 341256 - DNA, 120 bp, Artificial Sequence
  ENSG00000137944_13 (sequence is synthesized)
ggatctgaccttttttttccagttgaaatgtattaacacaccttccacaatcattttataagagtcagcataacatagtggataagaaatgtgagatgtttaacctctcagtaactcggt

SEQ ID NO: 341257 - DNA, 120 bp, Artificial Sequence
  ENSG00000137944_14 (sequence is synthesized)
tctctcattataaaataggaataaaatcagtacctgtttcatatgaaggtcgtttctgagaattaaatggactaatgtatgcaaaaagcctggcaaacaataaacactcatctgacttta

SEQ ID NO: 341258 - DNA, 120 bp, Artificial Sequence
  ENSG00000137944_15 (sequence is synthesized)
tcacaaatcttaaatgtacagctggataaattactgtgtaaatttctgtgcaactacaaccagacaaagatatgatacatttccagtacccagaaaacttctttgttcctcttcagagtc

SEQ ID NO: 341259 - DNA, 120 bp, Artificial Sequence
  ENSG00000137944_16 (sequence is synthesized)
ccaccccttccctcctccatttccatccattccgcgatcgcggcggaccccaccgtcatcgcgcgcccctagagatcctggcctacccctccgccaaagcgcgcactgagtgcaaacccc

SEQ ID NO: 341260 - DNA, 120 bp, Artificial Sequence
  ENSG00000137947_0 (sequence is synthesized)
gccacattcgcttcctgctttcggtgtgtctgttgtgtcttgttgcgggcaccgcagtcgccgtgaagatggcgtctaccagccgtttggatgctcttccaagagtcacatgtccaaacc

SEQ ID NO: 341261 - DNA, 120 bp, Artificial Sequence
  ENSG00000137947_1 (sequence is synthesized)
atccagatgcgattttagtggaggactacagagccggtgatatgatctgtcctgaatgtggcttggttgtaggtgaccgggttattgatgtgggatctgaatggcgaactttcagcaatg

SEQ ID NO: 341262 - DNA, 120 bp, Artificial Sequence
  ENSG00000137947_2 (sequence is synthesized)
acaaagcaacaaaagatccatctcgagttggagattctcagaatcctcttctgagtgatggagatttgtctaccatgattggcaagggcacaggagctgcaagttttgacgaatttggca

SEQ ID NO: 341263 - DNA, 120 bp, Artificial Sequence
  ENSG00000137947_3 (sequence is synthesized)
attctaagtaccagaatcggagaacaatgagcagttctgatcgggcaatgatgaatgcattcaaagaaatcactaccatggcagacagaatcaatctacctcgaaatatagttgatcgaa

SEQ ID NO: 341264 - DNA, 120 bp, Artificial Sequence
  ENSG00000137947_4 (sequence is synthesized)
caaataatttattcaagcaagtatatgaacagaagagcctgaagggaagagctaatgatgctatagcttctgcttgtctctatattgcctgtagacaagaaggggttcctaggacattta

SEQ ID NO: 341265 - DNA, 120 bp, Artificial Sequence
  ENSG00000137947_5 (sequence is synthesized)
aagaaatatgtgccgtatcacgaatttctaagaaagaaattggtcggtgttttaaacttattttgaaagcgctagaaaccagtgtggatttgattacaactggggacttcatgtccaggt

SEQ ID NO: 341266 - DNA, 120 bp, Artificial Sequence
  ENSG00000137947_6 (sequence is synthesized)
cagctacacatatagcccgtaaagctgtggaactggacttggttcctgggaggagccccatctctgtggcagcggcagctatttacatggcctcacaggcatcagctgaaaagaggaccc

SEQ ID NO: 341267 - DNA, 120 bp, Artificial Sequence
  ENSG00000137947_7 (sequence is synthesized)
aaaaagaaattggagatattgctggtgttgctgatgttacaatcagacagtcctatagactgatctatcctcgagccccagatctgtttcctacagacttcaaatttgacaccccagtgg

SEQ ID NO: 341268 - DNA, 120 bp, Artificial Sequence
  ENSG00000137947_8 (sequence is synthesized)
acaaactaccacagctataaattgaggcagctaacgtcaaattcttgaatacaaaactttgcctgttgtacatagcctatacaaaatgctgggttgagcctttcatgaggaaaaacaaaa

SEQ ID NO: 341269 - DNA, 120 bp, Artificial Sequence
  ENSG00000137947_9 (sequence is synthesized)
gacatggtacgcattccagggctgaatactattgcttggcattctgtatgtatatactagtgaaacatatttaatgatttaaatttcttatcaaatttcttttgtagcaatctaggaaac

SEQ ID NO: 341270 - DNA, 120 bp, Artificial Sequence
  ENSG00000137947_10 (sequence is synthesized)
ttttggaagatatttgaaattatgtaattcttgaataaaacatttttcaaaactcaagtttttgttatatgttacatgtaacttatgatacataattacaaataatgcaaatcattgcag

SEQ ID NO: 341271 - DNA, 120 bp, Artificial Sequence
  ENSG00000137947_11 (sequence is synthesized)
gcagctaataaagctgatagactttatttccattacttatatatacatagttttttattttaataaatttatggaaagagcaaaagcttttgagaaccattgttaacatcaacatcatag

SEQ ID NO: 341272 - DNA, 120 bp, Artificial Sequence
  ENSG00000137947_12 (sequence is synthesized)
tttccagtttgaaaggatgtgtatgtgagatttattatgtatattattaaacaagaagtgatgagcttgggccttgaaaggcaccagcttgagagacattaaaatgttctaagtatgtga

SEQ ID NO: 341273 - DNA, 120 bp, Artificial Sequence
  ENSG00000137947_13 (sequence is synthesized)
tttaagattaatgtgtcaaaaaaagatgaatgtgtcttctgcaaactgctttgttgttcaaaataaattgagctaattattaatatcacagataacaagtagcttttgaaacaatttctt

SEQ ID NO: 341274 - DNA, 120 bp, Artificial Sequence
  ENSG00000137947_14 (sequence is synthesized)
gaatgataaattcaataactcaattctggactaaaggaaatcatcaagtcttaagttcagcagagcaacttctaccatccctcatttctatacttactgggttcagtgtactatttaaat

SEQ ID NO: 341275 - DNA, 120 bp, Artificial Sequence
  ENSG00000137947_15 (sequence is synthesized)
tctcccgacccgtagccctgctctgctacgactgcgtgggtgagtcgtctataaaaactcatctctgcgcgtctcttcgccacattcgcttcctgctttcggtgtgtctgttgtgtcttg

SEQ ID NO: 341276 - DNA, 120 bp, Artificial Sequence
  ENSG00000137947_16 (sequence is synthesized)
ggctgggggcggggtaggtggtggccgtgagaaggtagccgtgagaaggtgggagaggaaggggtggttaaactattagggatgcaggctttggcaccactacgaagccagggttttctt

SEQ ID NO: 341277 - DNA, 120 bp, Artificial Sequence
  ENSG00000137947_17 (sequence is synthesized)
tgtgttttaactgtcagattgagagtagctctgttgtagcccctttgcagggttcccatgagacttttcctaggtagttacgttgactcgcttagcaacatagcaaattacagaaacgga

SEQ ID NO: 341278 - DNA, 120 bp, Artificial Sequence
  ENSG00000137948_0 (sequence is synthesized)
tataaaagcgcctgtcgcgcgaccgccattacaacaaaaactggcggcgaggaactgcggagaactgttgccctgcaccgcttcattttgtgcagcctgaaaggggcaatcacataaggt

SEQ ID NO: 341279 - DNA, 120 bp, Artificial Sequence
  ENSG00000137948_1 (sequence is synthesized)
cggttttgtaatatacaggtaacatacaggtaatgtaccctccacagggggtgctgccttaggccggccccgaggtgcggccttgggtgggaacaaccgttttttcccccctctcccctc

SEQ ID NO: 341280 - DNA, 120 bp, Artificial Sequence
  ENSG00000137948_2 (sequence is synthesized)
cccgaccccatcaacatcgtgcgacagtccgggcagttgagaaggccaccccgcttcgtgcctgcagcccagttcctcttaggtcttggactggtgtggatcgctgctgcctgtactgta

SEQ ID NO: 341281 - DNA, 120 bp, Artificial Sequence
  ENSG00000137948_3 (sequence is synthesized)
attttggaaatgcaggagaaagacatgtacttgtagacaggattcaaagcagttaagaatgtctctgccaagtcgacaaacagctattattgttaaccctcctccaccagaatatataaa

SEQ ID NO: 341282 - DNA, 120 bp, Artificial Sequence
  ENSG00000137948_4 (sequence is synthesized)
tactaagaaaaatgggcgattgacaaatcaacttcagtatctacaaaaagttgtcctaaaggatttatggaagcatagtttttcatggccctttcaacgtcctgtggatgctgtgaaact

SEQ ID NO: 341283 - DNA, 120 bp, Artificial Sequence
  ENSG00000137948_5 (sequence is synthesized)
acagttgcctgattattataccattataaaaaacccaatggatttaaatacaattaagaagcgcttggagaataaatattatgcgaaggcttcagaatgtatagaagacttcaatacaat

SEQ ID NO: 341284 - DNA, 120 bp, Artificial Sequence
  ENSG00000137948_6 (sequence is synthesized)
gttctcaaattgttatttatataacaagcctggagatgacattgttcttatggcacaagctctagagaagctgtttatgcagaaattatctcagatgccacaagaagagcaagttgtggg

SEQ ID NO: 341285 - DNA, 120 bp, Artificial Sequence
  ENSG00000137948_7 (sequence is synthesized)
tgttaaggaaagaatcaagaaaggcactcaacagaatatagctgtttcttctgctaaagaaaaatcatcacccagcgcaacagaaaaagtatttaagcagcaagaaattccttctgtatt

SEQ ID NO: 341286 - DNA, 120 bp, Artificial Sequence
  ENSG00000137948_8 (sequence is synthesized)
tcctaagacatctatttctcccttgaacgtggtacagggagcttcagtcaactccagttcacaaactgcggcccaagttacaaaaggtgtgaagaggaaagcagatacaacaactcctgc

SEQ ID NO: 341287 - DNA, 120 bp, Artificial Sequence
  ENSG00000137948_9 (sequence is synthesized)
aacttcagcagttaaagcaagtagtgaattttctccaacattcacagaaaaatcagtggcactgccacctataaaagaaaatatgccaaagaatgttttgccagattctcagcaacaata

SEQ ID NO: 341288 - DNA, 120 bp, Artificial Sequence
  ENSG00000137948_10 (sequence is synthesized)
taatgttgtgaagactgttaaagtaactgaacaattaaggcactgtagtgagattcttaaagaaatgcttgcaaagaaacatttttcatatgcatggcccttttataatcctgttgacgt

SEQ ID NO: 341289 - DNA, 120 bp, Artificial Sequence
  ENSG00000137948_11 (sequence is synthesized)
taatgctttgggactccataactactatgacgttgtcaaaaatccgatggatcttggaactattaaggagaaaatggataaccaagaatataaggatgcatacaaatttgcggcagatgt

SEQ ID NO: 341290 - DNA, 120 bp, Artificial Sequence
  ENSG00000137948_12 (sequence is synthesized)
tagattaatgttcatgaattgctacaagtacaatcctccagatcacgaagttgtgacaatggcaagaatgcttcaggatgttttcgaaacgcatttttcaaagatcccgattgaacctgt

SEQ ID NO: 341291 - DNA, 120 bp, Artificial Sequence
  ENSG00000137948_13 (sequence is synthesized)
tgagagtatgcctttatgttacatcaaaacagatatcacagaaaccactggtagagagaacactaatgaagcctcctctgaagggaactcttctgatgattctgaagatgagcgagttaa

SEQ ID NO: 341292 - DNA, 120 bp, Artificial Sequence
  ENSG00000137948_14 (sequence is synthesized)
caggttttgtcccaagtacctttccgtaagctaaataaaaagaaagagaagtctaaaaaggaaaagaaaaaagaaaaggttaataacagcaatgaaaatccaagaaaaatgtgtgagcaa

SEQ ID NO: 341293 - DNA, 120 bp, Artificial Sequence
  ENSG00000137948_15 (sequence is synthesized)
atgaggctaaaggaaaagtccaagagaaatcagccaaagaaaaggaaacaacagttcattggtctaaaatctgaagatgaagataatgctaaacctatgaactatgatgagaaaaggcag

SEQ ID NO: 341294 - DNA, 120 bp, Artificial Sequence
  ENSG00000137948_16 (sequence is synthesized)
ttaagtctgaatataaacaaactccctggagataaacttgggcgagtagttcacataatacaatcaagagagccttctctgagcaattccaatcctgatgagatagagatagactttgaa

SEQ ID NO: 341295 - DNA, 120 bp, Artificial Sequence
  ENSG00000137948_17 (sequence is synthesized)
acactgaaagcatcaacactaagagaattagaaaaatatgtttcggcatgtctaagaaagagaccattaaaacctcctgctaagaaaataatgatgtccaaagaagaacttcactcacag

SEQ ID NO: 341296 - DNA, 120 bp, Artificial Sequence
  ENSG00000137948_18 (sequence is synthesized)
aaaaaacaggaattggaaaagcggttactggatgttaataatcagttaaattctagaaaacgtcaaacaaaatctgataaaacgcaaccatccaaagctgttgaaaatgtttcccgactg

SEQ ID NO: 341297 - DNA, 120 bp, Artificial Sequence
  ENSG00000137948_19 (sequence is synthesized)
agtgagagcagcagcagcagcagcagctcatcagagtctgaaagtagcagcagtgacttaagctcttcagacagcagtgattctgaatcagaaatgttccctaagtttacagaagtaaaa

SEQ ID NO: 341298 - DNA, 120 bp, Artificial Sequence
  ENSG00000137948_20 (sequence is synthesized)
ccaaatgattctccttctaaagagaatgtaaagaaaatgaagaatgaatgcataccgcctgaaggaagaacaggcgtcacacagataggatattgtgtgcaagacacaacctctgccaat

SEQ ID NO: 341299 - DNA, 120 bp, Artificial Sequence
  ENSG00000137948_21 (sequence is synthesized)
actacccttgttcatcagaccacaccttcacatgtaatgccaccaaatcaccaccaattagcatttaattatcaagaattagaacatttacagactgtgaaaaacatttcacctttacaa

SEQ ID NO: 341300 - DNA, 120 bp, Artificial Sequence
  ENSG00000137948_22 (sequence is synthesized)
attctgcctccctcaggtgattctgaacagctctcaaatggcataactgtgatgcatccatctggtgatagtgacacaacgatgttagaatctgaatgtcaagctcctgtacagaaggat

SEQ ID NO: 341301 - DNA, 120 bp, Artificial Sequence
  ENSG00000137948_23 (sequence is synthesized)
ataaagattaagaatgcagattcatggaaaagtttaggcaaaccagtgaaaccatcaggtgtaatgaaatcctcagatgagctcttcaaccaatttagaaaagcagccatagaaaaggaa

SEQ ID NO: 341302 - DNA, 120 bp, Artificial Sequence
  ENSG00000137948_24 (sequence is synthesized)
gtaaaagctcggacacaggaactcatacggaagcatttggaacaaaatacaaaggaactaaaagcatctcaagaaaatcagagggatcttgggaatggattgactgtagaatctttttca

SEQ ID NO: 341303 - DNA, 120 bp, Artificial Sequence
  ENSG00000137948_25 (sequence is synthesized)
aataaaatacaaaacaagtgctctggagaagagcagaaagaacatcagcagtcatcagaagctcaagataaatccaaactctggcttctcaaagaccgtgatttagcaaggcagaaagaa

SEQ ID NO: 341304 - DNA, 120 bp, Artificial Sequence
  ENSG00000137948_26 (sequence is synthesized)
caagagaggaggaggagagaagcaatggtgggtaccattgatatgacccttcaaagtgacattatgacaatgtttgaaaacaactttgattaaaactcagtttttaaattaaccatcaac

SEQ ID NO: 341305 - DNA, 120 bp, Artificial Sequence
  ENSG00000137948_27 (sequence is synthesized)
ttaaaatgaatggtaaaagatcaaaatgcatatggtaaaatgattgctttcagataacaagataccaatcttatattgtattttgactgctctaaaatgattaaacagttttcacttaca

SEQ ID NO: 341306 - DNA, 120 bp, Artificial Sequence
  ENSG00000137948_28 (sequence is synthesized)
cctggaacgtctgaaccctcttttgggtactgcaggattgtggtgggctttacttcaaggcgcgctggcctgtattaagaattaagatagaggaggccgggtgcagtggctcgcccctgt

SEQ ID NO: 341307 - DNA, 120 bp, Artificial Sequence
  ENSG00000137948_29 (sequence is synthesized)
agtccgggcagttgagaaggccaccccgcttcgtgcctgcagcccaggtcttggactggtgtggatcgctgctgcctgtactgtaattttggaaatgcaggagaaagtacggagcgttta

SEQ ID NO: 341308 - DNA, 76 bp, Artificial Sequence
  ENSG00000137948_30 (sequence is synthesized)
ccgctccccccaaaaaagaaagaggacatgtacttgtagacaggattcaaagcagttaagaatgtctctgccaagt

SEQ ID NO: 341309 - DNA, 120 bp, Artificial Sequence
  ENSG00000137948_31 (sequence is synthesized)
ttcatcattgcaaagaaatcttaaaatctagaaaaagatgaaggaaattaagatcatccaagtcacactatctggagagaaaatggataaccaagaatataaggatgcatacaaatttgc

SEQ ID NO: 341310 - DNA, 120 bp, Artificial Sequence
  ENSG00000137948_32 (sequence is synthesized)
gggcagttgagaaggccaccccgcttcgtgcctgcagcccaggttcacagcaaaactgagcagtaaatagtgttcccatctaccccgtttcaacactagtacagcaccagagtggacatg

SEQ ID NO: 341311 - DNA, 120 bp, Artificial Sequence
  ENSG00000137948_33 (sequence is synthesized)
attacaacaaaaactggcggcgaggaactgcggagaactgttgccctgcaccgcttcattttgtgcagcctgaaaggggcaatcacataagctgggtgtgatggcaggcgcctgtagtcc

SEQ ID NO: 341312 - DNA, 120 bp, Artificial Sequence
  ENSG00000137955_0 (sequence is synthesized)
cctttccctgttagacatgggcactccacagaaggatgttattatcaagtcagatgcaccggacactttgttattggagaaacatgcagattatatcgcatcctatggctcaaagaaaga

SEQ ID NO: 341313 - DNA, 120 bp, Artificial Sequence
  ENSG00000137955_1 (sequence is synthesized)
tgattatgaatactgtatgtctgagtatttgagaatgagtggcatctattggggtctgacagtaatggatctcatgggacaacttcatcgcatgaatagagaagagattctggcatttat

SEQ ID NO: 341314 - DNA, 120 bp, Artificial Sequence
  ENSG00000137955_2 (sequence is synthesized)
taagtcttgccaacatgaatgtggtggaataagtgctagtatcggacatgatcctcatcttttatacactcttagtgctgtccagattcttacgctgtatgacagtattaatgttattga

SEQ ID NO: 341315 - DNA, 120 bp, Artificial Sequence
  ENSG00000137955_3 (sequence is synthesized)
cgtaaataaagttgtggaatatgttaaaggtctacagaaagaagatggttcttttgctggagatatttggggagaaattgacacaagattctctttttgtgcggtggcaactttggcttt

SEQ ID NO: 341316 - DNA, 120 bp, Artificial Sequence
  ENSG00000137955_4 (sequence is synthesized)
gttggggaagcttgatgctattaatgtggaaaaggcaatcgaatttgttttatcctgtatgaactttgacggtggatttggttgcagaccaggttctgaatcccatgctgggcagatcta

SEQ ID NO: 341317 - DNA, 120 bp, Artificial Sequence
  ENSG00000137955_5 (sequence is synthesized)
ttgttgcacaggatttctggcaattacaagtcagttgcatcaagtaaattctgatttacttggctggtggctttgtgaacgacaattaccctcaggcgggctcaatggaaggccggagaa

SEQ ID NO: 341318 - DNA, 120 bp, Artificial Sequence
  ENSG00000137955_6 (sequence is synthesized)
atgtatgctactcatggtgggtcctggcttccctaaagataattggaagacttcattggattgatagagagaaactgcgtaatttcattttagcatgtcaagatgaagaaacggggggat

SEQ ID NO: 341319 - DNA, 120 bp, Artificial Sequence
  ENSG00000137955_7 (sequence is synthesized)
ttgcagacaggccaggagatatggtggatccttttcataccttatttggaattgctggattgtcacttttgggagaagaacagattaaacctgttaatcctgtcttttgcatgcctgaag

SEQ ID NO: 341320 - DNA, 120 bp, Artificial Sequence
  ENSG00000137955_8 (sequence is synthesized)
aagtgcttcagagagtgaatgttcagcctgagctagtgagctagattcattgaattgaaagttgcatagtatagttttgccattttaacatttctgtatttgaagtgcttatcgaatcta

SEQ ID NO: 341321 - DNA, 120 bp, Artificial Sequence
  ENSG00000137955_9 (sequence is synthesized)
ttgtgttaaattaattttaataaattatataattatacatattgtaaaataaagaccggtattttattttctgctttttattctgaagtcctgttattctgactacagttctttgtgtat

SEQ ID NO: 341322 - DNA, 120 bp, Artificial Sequence
  ENSG00000137955_10 (sequence is synthesized)
gttattctgactacagttctttgtgtatacttctgtgtctgttatgttcaataactgagctaacataaaataactctaggtttctacttgatttttcccccatgtatacctttcatctgt

SEQ ID NO: 341323 - DNA, 120 bp, Artificial Sequence
  ENSG00000137955_11 (sequence is synthesized)
tctatagcaagttgatgtaaattggtttgtcaacaagaatgttaactgatgaaagtggatagaacccatacatgaattaaatgatgcacaaaataaatggctgttgaaatttggaaatga

SEQ ID NO: 341324 - DNA, 120 bp, Artificial Sequence
  ENSG00000137955_12 (sequence is synthesized)
gtgactgcagtgtactctcaatgaggaagatatagatacgaaaagaactagagccgcatcacatggggacttctgcaaatacagagactcggattaaaggtggagaagatggagctaaag

SEQ ID NO: 341325 - DNA, 120 bp, Artificial Sequence
  ENSG00000137955_13 (sequence is synthesized)
cttttgctggagatatttggggtaatgtcagatttagtccattctacccaaaataccaatattaaaatgtactggttttgctagtaaccagtttataagtttttcatcttttcaggtccc

SEQ ID NO: 341326 - DNA, 120 bp, Artificial Sequence
  ENSG00000137955_14 (sequence is synthesized)
tcagcatatacaggagcactggaacagagggggccagtctaaaagataagggatgaacacagtgcaggccagagagaccagctgcttcatgggatgtgaaaaatctacttttataaagta

SEQ ID NO: 341327 - DNA, 120 bp, Artificial Sequence
  ENSG00000137955_15 (sequence is synthesized)
gtctacccaggaactgaccctgctctctcctttccctgttagacatgtgactgcagtgtactctcaatgaggaagatatagatacgaaaagaactagagccgcatcacatggggacttct

SEQ ID NO: 341328 - DNA, 120 bp, Artificial Sequence
  ENSG00000137955_16 (sequence is synthesized)
tgcagagaactgaggatgtgctgtgcctttgaacttcagttaagtgtgctttggacgtctgaggctgtgggcttattagaatctcagtttttacctatactgagagggcttgccagacaa

SEQ ID NO: 341329 - DNA, 120 bp, Artificial Sequence
  ENSG00000137955_17 (sequence is synthesized)
agtagatgagggtttgaggtacaaaacgggtttctctttttgtagttaggggtaatactttcaaggtcaatgatgtgttggcatgtattatctgaatctattgctgatgtgtaataacac

SEQ ID NO: 341330 - DNA, 120 bp, Artificial Sequence
  ENSG00000137955_18 (sequence is synthesized)
tttagctctagaattactctgagaccttgaaaaagttttaccttaaatttttaaatttcgaggaaaactctgggacaatcttagcaaaaagtagtaaacaacttagttaagagtaaatgt

SEQ ID NO: 341331 - DNA, 120 bp, Artificial Sequence
  ENSG00000137955_19 (sequence is synthesized)
atcatggagttaaggccatatggatggggctggactcgtttctgcctttatctgctatctatctttatgccctgaatttgggttagtagcaaactaagatgcaccacctgttaaaaaaac

SEQ ID NO: 341332 - DNA, 120 bp, Artificial Sequence
  ENSG00000137955_20 (sequence is synthesized)
ttctttttttccttttgagagctataacctcactttgttgcccagactggaggacagcggtgcgatctgggctcactgcagcctccatctcctgggtttaagtgagccacctgaatagct

SEQ ID NO: 341333 - DNA, 90 bp, Artificial Sequence
  ENSG00000137955_21 (sequence is synthesized)
gcctccatctcctgggtttaagtgagccacctgaatagctgggattacaggcacattcgtagagactgagttttgctatgttggccagag

SEQ ID NO: 341334 - DNA, 120 bp, Artificial Sequence
  ENSG00000137955_22 (sequence is synthesized)
gctgggattacaggcaggagccaccacccagccacaaaacttcttaaaatataatgcattgttgagtgtgggaaaaatttgtttctggaatcctaatactaattttcatgtatcattgat

SEQ ID NO: 341335 - DNA, 120 bp, Artificial Sequence
  ENSG00000137955_23 (sequence is synthesized)
tgtatcattgattagccactgttttatctgggcttaaacatctttggcatgtttagggcattttgatttttcatgtagttatataatttactaatagataataggttttgtacagagtcc

SEQ ID NO: 341336 - DNA, 120 bp, Artificial Sequence
  ENSG00000137955_24 (sequence is synthesized)
actgcttatttaatacatttgaacaacttttggggtacttagaaggtgctttgaaacctgcatttgattaagcaagaattcgcttgcaagttaagggttagatttttttattttttaaaa

SEQ ID NO: 341337 - DNA, 120 bp, Artificial Sequence
  ENSG00000137955_25 (sequence is synthesized)
atatgctttctgccacatgtaaaccgtaagttgtcctgaaatgataagctttgatattctatggtgtttattttttacttatctttttgaatgaaaagtgaacaacaagaaatgctggtg

SEQ ID NO: 341338 - DNA, 120 bp, Artificial Sequence
  ENSG00000137955_26 (sequence is synthesized)
gtaattttttgggtcaatgatgagttggcatgtattctgaatctaaagttgattattactactttagctctagaattactctgagacctgaaaattacctgaatcgtgactaagacgaag

SEQ ID NO: 341339 - DNA, 120 bp, Artificial Sequence
  ENSG00000137955_27 (sequence is synthesized)
cctgaatgatttaagttcttttttgttggatacaatttgttgttgttgttgttgttttggttttgtttttgagtcggtctccggtcgcccaggatggagtgcagtgacacaacctcagtt

SEQ ID NO: 341340 - DNA, 120 bp, Artificial Sequence
  ENSG00000137955_28 (sequence is synthesized)
cactgcagccttaatttccctggctcaagcgatcttctacctcagcctccctagttagttacaatttttaaatggaacgttttcctattacaagatgaaatcaagtgaaaattgagatgt

SEQ ID NO: 341341 - DNA, 120 bp, Artificial Sequence
  ENSG00000137955_29 (sequence is synthesized)
ccactgtgctcggcctgtatttttatttttaaaccttagtatttctgaataacaacgggtagagaaacacccgcagtagctgtctacaatagagtgaaataaaaagcctgaggaactgtc

SEQ ID NO: 341342 - DNA, 120 bp, Artificial Sequence
  ENSG00000137955_30 (sequence is synthesized)
aacagaaaaatgggtggccgtggggagcaccgggacctgcacttgcacacaatctagggcagcttctaatgagtctatgagttactcagggatctcattaaaatgagatcagccttgagt

SEQ ID NO: 341343 - DNA, 120 bp, Artificial Sequence
  ENSG00000137955_31 (sequence is synthesized)
ggggttttctttatagacttctgtcaccatattttgaagagcaagggtttagttgattttaagcaggtgtgtacccccctggacagtgcttgtagaaaaacagaactatacccatggatt

SEQ ID NO: 341344 - DNA, 120 bp, Artificial Sequence
  ENSG00000137955_32 (sequence is synthesized)
tcatgattatactgctagcttcttggttaaggggctgagttaggcattcattgcagatagaaacaaagcagatgcatgcttatcagtgagtactgagatatttagcatggttacctatga

SEQ ID NO: 341345 - DNA, 120 bp, Artificial Sequence
  ENSG00000137955_33 (sequence is synthesized)
ttccacatggtttgacactttgaacatcagattacctaagagtgagacttaacccacttttaaattgttctcaaaattagggaaataaaagagaatgaaattgtggcaacttttttccct

SEQ ID NO: 341346 - DNA, 120 bp, Artificial Sequence
  ENSG00000137955_34 (sequence is synthesized)
gtagtaaaataagaaaattggttatttcagtgtttgtcaaatacacataaagttaattcgactgtaatagggcatcttacataagaattgcttaattgctatcattactttgctttatat

SEQ ID NO: 341347 - DNA, 120 bp, Artificial Sequence
  ENSG00000137955_35 (sequence is synthesized)
actatatacctttctctgtcggtggattcgtctgacctaagcaaacataagtgggtttataagcaccaaaacacttttgttttccattaatttttcactaaccatacagataaaaaaaaa

SEQ ID NO: 341348 - DNA, 120 bp, Artificial Sequence
  ENSG00000137955_36 (sequence is synthesized)
agttggaaattgaaactgtatcaggatttggtcaaaaagttttgttacaagtgaagctgtcctacaaggtcaatgatgtaatggcatgtattagctgaatctaaagttgatgtgagttct

SEQ ID NO: 341349 - DNA, 120 bp, Artificial Sequence
  ENSG00000137955_37 (sequence is synthesized)
aaaattacactgagaccttggagggtaaaatttttatcttcagtatgtgtaaatactgtaaaatagctaaatggagctatttgattttgatattagtgaacatctacctggtggtttaaa

SEQ ID NO: 341350 - DNA, 120 bp, Artificial Sequence
  ENSG00000137955_38 (sequence is synthesized)
gtctttctggtactactgggtgctgagatgggaagatcaggactttgtgtggatgtgagttagtatacttgagtatcttggaatgccaagttaaaatttatatgtagaaaattatacttt

SEQ ID NO: 341351 - DNA, 120 bp, Artificial Sequence
  ENSG00000137955_39 (sequence is synthesized)
aaagatttgagttttcttgatactatctaattttattcaataacaggagagtctgcatatttgagaaaaggttatatacacagagacaaaaggatgtgcttgacaacttaaaaagagttg

SEQ ID NO: 341352 - DNA, 120 bp, Artificial Sequence
  ENSG00000137955_40 (sequence is synthesized)
aaggtaggtggaatttttttccccaatatttggtggctttgtaaagttttttaaaaactacttgctggaaagggaaaaatatttaaaaaaaaaaactttacaaacttgctgaatatttga

SEQ ID NO: 341353 - DNA, 120 bp, Artificial Sequence
  ENSG00000137955_41 (sequence is synthesized)
aaaggtagatgtttttctgtctctggctcatgggagaaactaaagcactgtttgtattgtcagccatagattaactaatcctgtgcttctcagataattgtttttttctgataatagttg

SEQ ID NO: 341354 - DNA, 120 bp, Artificial Sequence
  ENSG00000137955_42 (sequence is synthesized)
tgtctgaagatggcttctaacattgagcagcacagattttaaactcactactgatcagtgctgttaaggtcaggagaggtaaaaatagcagcatggctaatgagttacctttgtgtttaa

SEQ ID NO: 341355 - DNA, 120 bp, Artificial Sequence
  ENSG00000137959_0 (sequence is synthesized)
ctttcctagagtctctgaagccacagatctcttaagaactttctgtctccaaaccgtggctgctcgataaatcagacagaacagttaatcctcaatttaagcctgatctaacccctagaa

SEQ ID NO: 341356 - DNA, 120 bp, Artificial Sequence
  ENSG00000137959_1 (sequence is synthesized)
acagatatagaacaatggaagtgacaacaagattgacatggaatgatgaaaatcatctgcgcaagctgcttggaaatgtttctttgagtcttctctataagtctagtgttcatggaggta

SEQ ID NO: 341357 - DNA, 120 bp, Artificial Sequence
  ENSG00000137959_2 (sequence is synthesized)
gcattgaagatatggttgaaagatgcagccgtcagggatgtactataacaatggcttacattgattacaatatgattgtagcctttatgcttggaaattatattaatttacatgaaagtt

SEQ ID NO: 341358 - DNA, 120 bp, Artificial Sequence
  ENSG00000137959_3 (sequence is synthesized)
ctacagagccaaatgattccctatggttttcacttcaaaagaaaaatgacaccactgaaatagaaactttactcttaaatacagcaccaaaaattattgatgagcaactggtgtgtcgtt

SEQ ID NO: 341359 - DNA, 120 bp, Artificial Sequence
  ENSG00000137959_4 (sequence is synthesized)
tatcgaaaacggatattttcattatatgtcgagataataaaatttatctagataaaatgataacaagaaacttgaaactaaggttttatggccaccgtcagtatttggaatgtgaagttt

SEQ ID NO: 341360 - DNA, 120 bp, Artificial Sequence
  ENSG00000137959_5 (sequence is synthesized)
ttcgagttgaaggaattaaggataacctagacgacataaagaggataattaaagccagagagcacagaaataggcttctagcagacatcagagactataggccctatgcagacttggttt

SEQ ID NO: 341361 - DNA, 120 bp, Artificial Sequence
  ENSG00000137959_6 (sequence is synthesized)
cagaaattcgtattcttttggtgggtccagttgggtctggaaagtccagttttttcaattcagtcaagtctatttttcatggccatgtgactggccaagccgtagtggggtctgatatca

SEQ ID NO: 341362 - DNA, 120 bp, Artificial Sequence
  ENSG00000137959_7 (sequence is synthesized)
ccagcataaccgagcggtataggatatattctgttaaagatggaaaaaatggaaaatctctgccatttatgttgtgtgacactatggggctagatggggcagaaggagcaggactgtgca

SEQ ID NO: 341363 - DNA, 120 bp, Artificial Sequence
  ENSG00000137959_8 (sequence is synthesized)
tggatgacattccccacatcttaaaaggttgtatgccagacagatatcagtttaattcccgtaaaccaattacacctgagcattctacttttatcacctctccatctctgaaggacagga

SEQ ID NO: 341364 - DNA, 120 bp, Artificial Sequence
  ENSG00000137959_9 (sequence is synthesized)
ttcactgtgtggcttatgtcttagacatcaactctattgacaatctctactctaaaatgttggcaaaagtgaagcaagttcacaaagaagtattaaactgtggtatagcatatgtggcct

SEQ ID NO: 341365 - DNA, 120 bp, Artificial Sequence
  ENSG00000137959_10 (sequence is synthesized)
tgcttactaaagtggatgattgcagtgaggttcttcaagacaactttttaaacatgagtagatctatgacttctcaaagccgggtcatgaatgtccataaaatgctaggcattcctattt

SEQ ID NO: 341366 - DNA, 120 bp, Artificial Sequence
  ENSG00000137959_11 (sequence is synthesized)
ccaatattttgatggttggaaattatgcttcagatttggaactggaccccatgaaggatattctcatcctctctgcactgaggcagatgctgcgggctgcagatgattttttagaagatt

SEQ ID NO: 341367 - DNA, 120 bp, Artificial Sequence
  ENSG00000137959_12 (sequence is synthesized)
tgcctcttgaggaaactggtgcaattgagagagcgttacagccctgcatttgagataagttgccttgattctgacatttggcccagcctgtactggtgtgccgcaatgagagtcaatctc

SEQ ID NO: 341368 - DNA, 120 bp, Artificial Sequence
  ENSG00000137959_13 (sequence is synthesized)
tattgacagcctgcttcagattttgcttttgttcgttttgccttctgtccttggaacagtcatatctcaagttcaaaggccaaaacctgagaagcggtgggctaagataggtcctactgc

SEQ ID NO: 341369 - DNA, 120 bp, Artificial Sequence
  ENSG00000137959_14 (sequence is synthesized)
aaaccacccctccatatttccgtaccatttacaattcagtttctgtgacatctttttaaaccactggaggaaaaatgagatattctctaatttattcttctataacactctatatagagc

SEQ ID NO: 341370 - DNA, 120 bp, Artificial Sequence
  ENSG00000137959_15 (sequence is synthesized)
tatgtgagtactaatcacattgaataatagttataaaattattgtatagacatctgcttcttaaacagattgtgagttctttgagaaacagcgtggattttacttatctgtgtattcaca

SEQ ID NO: 341371 - DNA, 120 bp, Artificial Sequence
  ENSG00000137959_16 (sequence is synthesized)
gagcttagcacagtgcctggtaatgagcaagcatacttgccattacttttccttcccactctctccaacatcacattcactttaaatttttctgtatatagaaaggaaaactagcctggg

SEQ ID NO: 341372 - DNA, 88 bp, Artificial Sequence
  ENSG00000137959_17 (sequence is synthesized)
aaaaaaaaaataagaaagaacaaaacaaaccccacaaaaattagctgggtatgatgattgattgagccttggaggtggaggctacagt

SEQ ID NO: 341373 - DNA, 120 bp, Artificial Sequence
  ENSG00000137959_18 (sequence is synthesized)
gatgattgattgagccttggaggtggaggctacagtgagctgagattgtgccactgtactctagccagggagaaagagtgagatcctggctcaaaaaaaccaaataaaacaaaacaaaca

SEQ ID NO: 341374 - DNA, 120 bp, Artificial Sequence
  ENSG00000137959_19 (sequence is synthesized)
aacgaaaaacagaaaggaagactgaaagagaatgaaaagctggggagaggaaataaaaataaagaaggaagagtgtttcatttatatctgaatgaaaatatgaatgactctaagtaattg

SEQ ID NO: 341375 - DNA, 120 bp, Artificial Sequence
  ENSG00000137959_20 (sequence is synthesized)
aattaattaaaatgagccaacttttttttaacaatttacattttatttctatgggaaaaaataaatattcctcttctaacaaacccatgcttgattttcattaattgaattccaaatcat

SEQ ID NO: 341376 - DNA, 120 bp, Artificial Sequence
  ENSG00000137959_21 (sequence is synthesized)
cctagccatgtgtccttccatttaggttactggggcaaatcagtaagaaagttcttatatttatgctccaaataattctgaagtcctcttactagctgtgaaagctagtactattaagaa

SEQ ID NO: 341377 - DNA, 120 bp, Artificial Sequence
  ENSG00000137959_22 (sequence is synthesized)
agaaaacaaaattcccaaaagatagctttcacttttttttttccttaaagacttcctaattctcttctccaaattcttagtcttcttcaaaataatatgctttggttcaatagttatcca

SEQ ID NO: 341378 - DNA, 120 bp, Artificial Sequence
  ENSG00000137959_23 (sequence is synthesized)
cattctgacagtctaatttagttttaatcagaattatactcatcttttgggtagtcatagatattaagaaagcaagagtttcttatgtccagttatggaatatttcctaaagcaaggctg

SEQ ID NO: 341379 - DNA, 120 bp, Artificial Sequence
  ENSG00000137959_24 (sequence is synthesized)
agacctaggaataggagaaccatggaaattgaggaggtaggcctacaagtagatattgggaacaaaattagagaggcaaccagaaaaagttattttaggctcaccagagttgttcttatt

SEQ ID NO: 341380 - DNA, 120 bp, Artificial Sequence
  ENSG00000137959_25 (sequence is synthesized)
gcacagtaacacaccaatataccaaaacagcaggtattgcagtagagaaagagtttaataattgaatggcagaaaaatgaggaaggttgaggaaacctcaaatctacctccctgctgagt

SEQ ID NO: 341381 - DNA, 120 bp, Artificial Sequence
  ENSG00000137959_26 (sequence is synthesized)
ctaagtttaggatttttaagagaaaggcaggtaaggtgctgaaggtctggagctgctgatttgttggggtatagggaatgaaatgaaacatacagagatgaaaactggaagttttttttt

SEQ ID NO: 341382 - DNA, 120 bp, Artificial Sequence
  ENSG00000137959_27 (sequence is synthesized)
ttttttttttttttgtttttttgctgagtcaattccttggagggggtcttcagactgactggtgtcagcagacccatgggattccaagatctggaaaactttttagatagaaacttgatg

SEQ ID NO: 341383 - DNA, 120 bp, Artificial Sequence
  ENSG00000137959_28 (sequence is synthesized)
ggaaaactttttagatagaaacttgatgtttcttaacgttacatatattatcttatagaaataactaagggaagttagtgccttgtgaccacatctatgtgacttttaggcagtaagaaa

SEQ ID NO: 341384 - DNA, 120 bp, Artificial Sequence
  ENSG00000137959_29 (sequence is synthesized)
ctataaggaaaggagctaacagtcatgctgtaagtagctacagggaattggcttaaagggcaagttggttagtacttagctgtgtttttattcaaagtctacattttatgtagtggttaa

SEQ ID NO: 341385 - DNA, 120 bp, Artificial Sequence
  ENSG00000137959_30 (sequence is synthesized)
tgtttgctgttcattaggatggtttcacagttaccatacaaatgtagaagcaacaggtccaaaaagtagggcatgattttctccatgtaatccagggagaaaacaagccatgaccattgt

SEQ ID NO: 341386 - DNA, 120 bp, Artificial Sequence
  ENSG00000137959_31 (sequence is synthesized)
tggttgggagactgaaggtgattgaaggttcaccatcatcctcaccaacttttgggccataattcacccaaccctttggtggagcctgaaaaaaatctgggcagaatgtaggacttcttt

SEQ ID NO: 341387 - DNA, 120 bp, Artificial Sequence
  ENSG00000137959_32 (sequence is synthesized)
attttgtttaaaggggtaacacagagtgcccttatgaaggagttggagatcctgcaaggaagagaaggagtgaaggagagatcaagagagagaaacaatgaggaacatttcatttgaccc

SEQ ID NO: 341388 - DNA, 120 bp, Artificial Sequence
  ENSG00000137959_33 (sequence is synthesized)
aacatcctttaggagcataaatgttgacactaagttatcccttttgtgctaaaatggacagtattggcaaaatgataccacaacttcttattctctggctctatattgctttggaaacac

SEQ ID NO: 341389 - DNA, 120 bp, Artificial Sequence
  ENSG00000137959_34 (sequence is synthesized)
ttaaacatcaaatggagttaaatacatatttgaaatttaggttaggaaatattggtgaggaggcctcaaaaagggggaaacatcttttgtctgggaggatattttccattttgtggattt

SEQ ID NO: 341390 - DNA, 120 bp, Artificial Sequence
  ENSG00000137959_35 (sequence is synthesized)
ccctgatctttttctaccaccctgaggggtggtgggaattatcattttgctacattttagaggtcatccaggatttttgaaactttacattctttacggttaagcaagatgtacagctca

SEQ ID NO: 341391 - DNA, 120 bp, Artificial Sequence
  ENSG00000137959_36 (sequence is synthesized)
gtcaaagacactaaattcttcttagaaaaatagtgctaaggagtatagcagatgacctatatgtgtgttggctgggagaatatcatcttaaagtgagagtgatgttgtggagacagttga

SEQ ID NO: 341392 - DNA, 120 bp, Artificial Sequence
  ENSG00000137959_37 (sequence is synthesized)
aatgtcaatgctagagcctctgtggtgtgaatgggcacgttaggttgttgcattagaaagtgactgtttctgacagaaatttgtagctttgtgcaaactcacccaccatctacctcaata

SEQ ID NO: 341393 - DNA, 120 bp, Artificial Sequence
  ENSG00000137959_38 (sequence is synthesized)
aaatatagagaaaagaaaaatagagcagtttgagttctatgaggtatgcaggcccagagagacataagtatgttcctttagtcttgcttcctgtgtgccacactgcccctccacaaccat

SEQ ID NO: 341394 - DNA, 120 bp, Artificial Sequence
  ENSG00000137959_39 (sequence is synthesized)
agctgggggcaattgtttaaagtcattttgttcccgactagctgccttgcacattatcttcattttcctggaatttgatacagagagcaatttatagccaattgatagcttatgctgttt

SEQ ID NO: 341395 - DNA, 120 bp, Artificial Sequence
  ENSG00000137959_40 (sequence is synthesized)
caatgtaaattcgtggtaaataacttaggaactgcctcttctttttctttgaaaacctacttataactgttgctaataagaatgtgtattgttcaggacaacttgtctccatacagttgg

SEQ ID NO: 341396 - DNA, 120 bp, Artificial Sequence
  ENSG00000137959_41 (sequence is synthesized)
gttgtaaccctcatgcttggcccaaataaactctctacttatatcagtttttcctacacttcttccttttaggtcaacaataccaagaggggttactgtgctgggtaatgtgtaaacttg

SEQ ID NO: 341397 - DNA, 120 bp, Artificial Sequence
  ENSG00000137959_42 (sequence is synthesized)
tgtcttgtttagaaagataaatttaaagactatcacattgctttttcataaaacaagacaggtctacaattaatttattttgacgcaaattgataggggggccaagtaagccccatatgc

SEQ ID NO: 341398 - DNA, 120 bp, Artificial Sequence
  ENSG00000137959_43 (sequence is synthesized)
ttaatgatcagctgatgaataatcatctcctagcaacataactcaatctaatgctaaggtacccacaagatggcaaggctgatcaaagtcgtcatggaatcctgcaaccaaaagccatgg

SEQ ID NO: 341399 - DNA, 120 bp, Artificial Sequence
  ENSG00000137959_44 (sequence is synthesized)
gaatttggaagccctcaaatcccattcctaatctgatgagtctatggaccaatttgtggaggacagtagattaaatagatctgatttttgccatcaatgtaaggaggataaaaacttgca

SEQ ID NO: 341400 - DNA, 120 bp, Artificial Sequence
  ENSG00000137959_45 (sequence is synthesized)
taccaattgtacacccttgcaaaatctttctctgatgttggagaaaatgggccagtgagatcatggatatagaagtacagtcaatgttcagctgtaccctcccacaatcccacttccttc

SEQ ID NO: 341401 - DNA, 120 bp, Artificial Sequence
  ENSG00000137959_46 (sequence is synthesized)
ctcaacacaattcaaacaaatagactcagactgtttcaggctccaggacaggaagtgcagtgtaggcaaaattgcaaaaattgagggcacaggggtggaggtgggggggttgaataacaa

SEQ ID NO: 341402 - DNA, 120 bp, Artificial Sequence
  ENSG00000137959_47 (sequence is synthesized)
gctgtgctaaataattacgtgtaaatatattttttcatttttaaaaattgatttcttttgcacattccatgacaatatatgtcacatttttaaaataaatgcaaagaagcatacatccaa

SEQ ID NO: 341403 - DNA, 120 bp, Artificial Sequence
  ENSG00000137959_48 (sequence is synthesized)
tgtgctatattatacagagaagctttcaaattttatggatggaagaagcagttatataaagaatactttttagtatttgtataaaaaacaacaaaaaattaaaaaccctatgaaaatctt

SEQ ID NO: 341404 - DNA, 120 bp, Artificial Sequence
  ENSG00000137959_49 (sequence is synthesized)
atatagaacaatggaagtgacaacaagattgacatggaatgatgaaaatcatctgcgcaagctgcttggaaatgtttctttgagtcttctctataagtctagtgttcatggaggaattaa

SEQ ID NO: 341405 - DNA, 120 bp, Artificial Sequence
  ENSG00000137959_50 (sequence is synthesized)
aaagtgtctctgagaaatccttttctttgcaatcttcccaaatcgtccatatttttttgtgtatgttgaatgtatatctgaccatcaaataaaatactttcagaattgttctagaaaata

SEQ ID NO: 341406 - DNA, 120 bp, Artificial Sequence
  ENSG00000137959_51 (sequence is synthesized)
gatttctttctacttactttgagtttaattggtattttttctgactttttgaagtgaaagtctatataattaattttcagcctttctccatttctaatacatatgtttaaacttatatga

SEQ ID NO: 341407 - DNA, 120 bp, Artificial Sequence
  ENSG00000137959_52 (sequence is synthesized)
tcttcattgtataagttttaacaagtatcttttgtcatttaattaaatttcattatgatttcttatgtgaataatggattatttcaaattatattttttattttccaatgtatgagggga

SEQ ID NO: 341408 - DNA, 120 bp, Artificial Sequence
  ENSG00000137959_53 (sequence is synthesized)
ccaatgtatgaggggatctactagttatcttcttgttaaaaaaattctggcatatactgtctgttcaatattatagtactttgaaaatttttgagacttgcttgctttttaaggtttgta

SEQ ID NO: 341409 - DNA, 120 bp, Artificial Sequence
  ENSG00000137959_54 (sequence is synthesized)
gaatatctcttctatattctttttcttttattcttgttttctggttcatatatcttaactaattttactgtatcctttaatcccttttgcccttttctctttttattctttttttgtctc

SEQ ID NO: 341410 - DNA, 120 bp, Artificial Sequence
  ENSG00000137959_55 (sequence is synthesized)
aatacttcagttggtaaattttcttctaattctttatgcctaccttgcagttaaatgtattcatttaattattaatttcagatatatatttttacatagcaaatctctttttgacttctt

SEQ ID NO: 341411 - DNA, 120 bp, Artificial Sequence
  ENSG00000137959_56 (sequence is synthesized)
attgtattcattttactgtaaatcattcaatcttaccttttagctgtttgaacatattaaacatagtaatttaaaaatctctatgggtaactccagtataagtatgtgtttgtttctagt

SEQ ID NO: 341412 - DNA, 120 bp, Artificial Sequence
  ENSG00000137959_57 (sequence is synthesized)
gtgtgctttttcctcttggttttctatcatgttgtttcatttacctccaaacatgaatgtgtttatgatgaatgagagtcactgaatatttaaaaaatcatagagatattttgaagctgg

SEQ ID NO: 341413 - DNA, 120 bp, Artificial Sequence
  ENSG00000137959_58 (sequence is synthesized)
aagaatgttcttttcatccagacaagatttattttgtttctgctatgcagctatggacactagcaattctcatttaccttaattcaatcaaggactgagaatactgaagtatgaaattaa

SEQ ID NO: 341414 - DNA, 120 bp, Artificial Sequence
  ENSG00000137959_59 (sequence is synthesized)
ctctgtctgcttccagttcatacttcttccctgtacctcttttcttaaattttttttaaaattttatttcaacagcatttggagtataagtggtttttttttacgtggatgaattatata

SEQ ID NO: 341415 - DNA, 120 bp, Artificial Sequence
  ENSG00000137959_60 (sequence is synthesized)
gtggtgaattctgagattttagtgcatccatcactcaagtagtgtacattgtatctaatatgtagttttttttaatccctagctcctcttccatcctctcctttctgagtctctaaagtc

SEQ ID NO: 341416 - DNA, 120 bp, Artificial Sequence
  ENSG00000137959_61 (sequence is synthesized)
catcatatcagtctgtatgcctttgtgtactcatagcttagctcccacttataagtgagagcatatggtttttggttttctctgtagctctttagaatcccaaactgtagcctaagggaa

SEQ ID NO: 341417 - DNA, 120 bp, Artificial Sequence
  ENSG00000137959_62 (sequence is synthesized)
aggtttccaaggtgctctccttattgcactccaaagtatgatttttatctccctaactctatgaatctagcaaacactttgcttaacttttcagcatctcaagtgccttttctgaatttg

SEQ ID NO: 341418 - DNA, 120 bp, Artificial Sequence
  ENSG00000137959_63 (sequence is synthesized)
acagatacacgtcagaaatgtgctcccaaatgcctagcttatctctctttattaacttctccaaatctttgccaatagctatatgtcttaactgccttgtttgctctttagagctttgta

SEQ ID NO: 341419 - DNA, 120 bp, Artificial Sequence
  ENSG00000137959_64 (sequence is synthesized)
acacatgcatttttatagtttattctgcttttcaagtttttttcattgaaataattcttgtaatgaccaatagtctagtatgctgctgtaagacttctatagctgttaactcctttcata

SEQ ID NO: 341420 - DNA, 120 bp, Artificial Sequence
  ENSG00000137959_65 (sequence is synthesized)
tttcaatttctttatgtgctgttttttgcaagaattcctaggctccattttctaattcatacgttggcaaatgatgaatgtgatatgacaatgatgacctctgttccagccatatacttt

SEQ ID NO: 341421 - DNA, 120 bp, Artificial Sequence
  ENSG00000137959_66 (sequence is synthesized)
tttaaagaaaattttattggaacacagtcatgctctcttgtttacatattatctatgacttcttttgtattacagtggcaaagttgagtaattgtggaagagaccatatggcctacaaag

SEQ ID NO: 341422 - DNA, 120 bp, Artificial Sequence
  ENSG00000137959_67 (sequence is synthesized)
gctaaaatatttactatcttgttcattaagaaaaaatttgctgactcttattgagatttatttttcctttattcaactttctgaagtttgtcaattgatttaaaaattttaatgactttt

SEQ ID NO: 341423 - DNA, 120 bp, Artificial Sequence
  ENSG00000137959_68 (sequence is synthesized)
cctttctaaattatatatttttatatctaacattattgtgccatttctatatttttgctatattttttgccttaaccaaacaatgtgttttaattgagtcagtgaataaagaactcactg

SEQ ID NO: 341424 - DNA, 120 bp, Artificial Sequence
  ENSG00000137959_69 (sequence is synthesized)
cacattatgattctaatccttgtgttcggtaggtaataattgatctacaagagcaaggaaagtgaaaggaacagttagattcatgccatactctttgataaattctgaaatgaaacgtgg

SEQ ID NO: 341425 - DNA, 120 bp, Artificial Sequence
  ENSG00000137959_70 (sequence is synthesized)
ggaacataaggattatgaggtttttatccagaacgtataggctgctttgagcaaagcaagttgagaaatatatgtgcagagatagagatgacaaaggagatggggatgtggagagagaga

SEQ ID NO: 341426 - DNA, 120 bp, Artificial Sequence
  ENSG00000137959_71 (sequence is synthesized)
gatcttatcatcagagctgctctgttttgacatatgacccaaagatcagacccttatatgacccttagaacttctaggtgtaattatgtgagagcttccagagcaagttaatgtgcagag

SEQ ID NO: 341427 - DNA, 120 bp, Artificial Sequence
  ENSG00000137959_72 (sequence is synthesized)
aggataatttttcctcctcttcctctcatgttgccaactctgactcctaactgagcagctcagccctgggttatgcaagaaaactccatgtcttatttcaaaagtagacttggccacatt

SEQ ID NO: 341428 - DNA, 120 bp, Artificial Sequence
  ENSG00000137959_73 (sequence is synthesized)
ttaaattgtatttaacaaacgttaatggtgtttatttctggatactaggatttgaaattagcttttcaaaaatattatttaaactttcctgcaatacttacaatggataattatcatttt

SEQ ID NO: 341429 - DNA, 120 bp, Artificial Sequence
  ENSG00000137959_74 (sequence is synthesized)
taccaaagcaataaagtgttttttttcctataagagagatataatggcattatgctcacagtggaaaggaagtaaagaggaggtgctactgtttggggaaagagtagctgaggagaaaga

SEQ ID NO: 341430 - DNA, 120 bp, Artificial Sequence
  ENSG00000137959_75 (sequence is synthesized)
cagtgcagacaggcttggctttgaacagcatccagctccacgattctatcagctaaattttttttttgtactttaagaaatagggatagtcatagtgtttactgtacgcagttgttctga

SEQ ID NO: 341431 - DNA, 120 bp, Artificial Sequence
  ENSG00000137959_76 (sequence is synthesized)
agaagctctaggtgacttgagatgttctttatggtattctttattggctgttctgatgctgtatttaaccactatattttaacaggcacagaaataggcttctagcagacatcagagact

SEQ ID NO: 341432 - DNA, 120 bp, Artificial Sequence
  ENSG00000137959_77 (sequence is synthesized)
atatccaaaacatttcaaatcattttcttcagtatttttcattgaatttttaaccacataaggcaatttcaactcccataatgtggtttcaacatcaatcaacactattctactttgaat

SEQ ID NO: 341433 - DNA, 120 bp, Artificial Sequence
  ENSG00000137959_78 (sequence is synthesized)
gaataagaattcatatgaaaaagtagagtgactattgttcttttctgtaacattgagaaataaagccaaaaggcaggattctactcatttgcattctagtaaaagatcaaggagatagtg

SEQ ID NO: 341434 - DNA, 120 bp, Artificial Sequence
  ENSG00000137959_79 (sequence is synthesized)
tgtttttatcactctttacaataatgtaaactaatgatagtcacttaatcccttgcactttttgggttacatagacaaaatattggaacaagtaactattttgtgttgaaatgtcatttt

SEQ ID NO: 341435 - DNA, 120 bp, Artificial Sequence
  ENSG00000137959_80 (sequence is synthesized)
atactgtaaatgcttagatttcaccactaaatacctagattcaaaatttggctttgctactaacagatgtttacccgtaagttgcacacttctctctctcggtctttttttttttttttt

SEQ ID NO: 341436 - DNA, 120 bp, Artificial Sequence
  ENSG00000137960_0 (sequence is synthesized)
aggcggaagcgcggctgccattggaggctgcttttacctgcgcggggcccggggcgcaaagtccgaggcgccggggggaggaggcggcggacggcagcgcaggtgggcccgcgctctcgg

SEQ ID NO: 341437 - DNA, 120 bp, Artificial Sequence
  ENSG00000137960_1 (sequence is synthesized)
ccctgcaagatgcccctgaagctgcgggggaagaagaaggccaagtccaaggagaccgccgggctggtggagggcgagccgacgggcgcgggcggcgggagcctctcagcgtcccgggct

SEQ ID NO: 341438 - DNA, 120 bp, Artificial Sequence
  ENSG00000137960_2 (sequence is synthesized)
cccgcacgcaggctggtcttccacgcgcagctggcgcacggtagtgccacgggccgagtggagggcttctccagcatccaggagctctacgcccagatcgcgggcgcgtttgaaatctcg

SEQ ID NO: 341439 - DNA, 120 bp, Artificial Sequence
  ENSG00000137960_3 (sequence is synthesized)
ccgtcggagatcttatattgcactttaaacacacctaaaattgacatggaaagactcttaggaggacaactaggactagaagatttcatatttgcccatgtgaaaggaatcgaaaaagaa

SEQ ID NO: 341440 - DNA, 120 bp, Artificial Sequence
  ENSG00000137960_4 (sequence is synthesized)
gtgaatgtgtataaatctgaggattcacttggtctcaccattacagataatggtgttggctatgcttttataaagagaattaaagatggtggtgttattgactcagttaaaacaatctgt

SEQ ID NO: 341441 - DNA, 120 bp, Artificial Sequence
  ENSG00000137960_5 (sequence is synthesized)
gttggggatcatattgaatccataaatggagaaaatattgttgggtggcgtcactatgatgttgctaagaagttaaaggaattaaaaaaggaggaactctttactatgaagttaatagaa

SEQ ID NO: 341442 - DNA, 120 bp, Artificial Sequence
  ENSG00000137960_6 (sequence is synthesized)
cctaagaaggcatttgaaatagagctgaggtcaaaggctggaaagtcatcaggagaaaaaattggttgtggaagggcaacacttcgcctgagatcaaaaggtcctgccaccgtggaagaa

SEQ ID NO: 341443 - DNA, 120 bp, Artificial Sequence
  ENSG00000137960_7 (sequence is synthesized)
atgccttctgaaaccaaagcaaaggcaattgaaaagattgatgatgttcttgagttgtacatgggaattcgagatattgatttagccaccacaatgtttgaagctggaaaggacaaagta

SEQ ID NO: 341444 - DNA, 120 bp, Artificial Sequence
  ENSG00000137960_8 (sequence is synthesized)
aatccagatgaatttgctgtggcacttgacgaaactcttggagactttgcgttcccagacgaatttgtctttgatgtttggggagtcattggtgatgccaaacgaagaggattatgatgt

SEQ ID NO: 341445 - DNA, 120 bp, Artificial Sequence
  ENSG00000137960_9 (sequence is synthesized)
gtacactccatctctgaagaaacaacccatcgttcttttttttctcttttttaaaaagtcctataagatctgtttttggacacctttactaactctggtttaatttcatgtgtatggaat

SEQ ID NO: 341446 - DNA, 120 bp, Artificial Sequence
  ENSG00000137960_10 (sequence is synthesized)
atattctttgaaatataattttggtaattttgatttctgggcactttttaacattgctgatgtagtatgcttaagagaaatgacctaaataaggatcaattgtaatattcattcaaaagg

SEQ ID NO: 341447 - DNA, 120 bp, Artificial Sequence
  ENSG00000137960_11 (sequence is synthesized)
tttttaaaagtaagttttaaggagtatttctcgacagatgattttcttctccattaatacccatgctttgtttttcacatataaatagatgatttcaatagctttgtagttttttttcaa

SEQ ID NO: 341448 - DNA, 120 bp, Artificial Sequence
  ENSG00000137960_12 (sequence is synthesized)
aatcttaatgtaaactaggattggagtatgatttacctcatagtatcttcactgtgttatcctagtttgaacaggatatgttcaggaaatgaaaggtgaattatgccccttattggtcta

SEQ ID NO: 341449 - DNA, 120 bp, Artificial Sequence
  ENSG00000137960_13 (sequence is synthesized)
gaagcattggtttttttttgatcctctgagtaagggaaggaagattcctgtggcatgttgatttctatggccaactttctctctttgtaaaacaaagattgattgattttcttgtatgct

SEQ ID NO: 341450 - DNA, 120 bp, Artificial Sequence
  ENSG00000137960_14 (sequence is synthesized)
tctttatacatgctcttaaaacttgtggttgaaatctgtgctgtgtgtgtgtgtctctgcatgtgtaaaagaagggtaaaaaagagatgggtagggtagaactacttgcatttgattttt

SEQ ID NO: 341451 - DNA, 120 bp, Artificial Sequence
  ENSG00000137960_15 (sequence is synthesized)
tttataagcactccagggaagattttatatttttttgtagagtttttggaaagatatttactcaaaataactatgctttagaactttttttttttttttttttttggttaaacagcagca

SEQ ID NO: 341452 - DNA, 120 bp, Artificial Sequence
  ENSG00000137960_16 (sequence is synthesized)
ctttttagttccctaaactttagaagaaatgctatcagaaatagatttccttccagtggaaagaaaggaggaagggagaattgagaaaatatattagtctattattttagagttctaata

SEQ ID NO: 341453 - DNA, 120 bp, Artificial Sequence
  ENSG00000137960_17 (sequence is synthesized)
cactctaaattaaagagaaaattgagagtaaatgactgtcttatcactcttatttgacatttcgtaggtgtaagagaaatggaaatgaatggtttcaacaaagatcatttaatacagcag

SEQ ID NO: 341454 - DNA, 120 bp, Artificial Sequence
  ENSG00000137960_18 (sequence is synthesized)
agcatggcatgaccaagcatctttgtaaagtgttagatggaaaatgctgtgtgctgccatggtaatcagaaataataacctgttagggatgtattctaggaaatcagaagtagttctctt

SEQ ID NO: 341455 - DNA, 120 bp, Artificial Sequence
  ENSG00000137960_19 (sequence is synthesized)
ttcttgctggattattgcttagataactcttgttttctggtaaaactttagttgtattgccatccactcctttttcaaatgagtttaatgccataaagctgatattctttgtccgattaa

SEQ ID NO: 341456 - DNA, 120 bp, Artificial Sequence
  ENSG00000137960_20 (sequence is synthesized)
tttgaaatctgcacagaagctgttttagtcattaatgtgtaacaaaagtagcttatagaatatggactgccttattgctgttgcttatcatttgaaaataaaatccagctcaggttgtaa

SEQ ID NO: 341457 - DNA, 120 bp, Artificial Sequence
  ENSG00000137960_21 (sequence is synthesized)
cttgttggtactcgtttagtgagttcgttttggaggttctgaaatacctattaattcttaatattacctctcttggaaagacacaaaaaaagagctgttatttttaggcataagatgact

SEQ ID NO: 341458 - DNA, 120 bp, Artificial Sequence
  ENSG00000137960_22 (sequence is synthesized)
taggaggcccatagaaacattctcgtttaaacaacaacaacaaaataaatttatcagcactagatattagatttgaaataagtcattgttcattattgatggttgtcagtttctccttcc

SEQ ID NO: 341459 - DNA, 120 bp, Artificial Sequence
  ENSG00000137960_23 (sequence is synthesized)
tttttgggcatgcataaagacacacttggtgctgattccatgtgatttatggaatgtcattttcacaatgatctttctagaatttgtgtgtaaggttgtgatatccatgtacagctgtaa

SEQ ID NO: 341460 - DNA, 120 bp, Artificial Sequence
  ENSG00000137960_24 (sequence is synthesized)
ctatatatacttgtctgttagcattcagtggaccattatcattactatcatcacattacctgggcttcaactgggcccaagtactctatatactgcctgtaataggtttttccttgaaat

SEQ ID NO: 341461 - DNA, 120 bp, Artificial Sequence
  ENSG00000137960_25 (sequence is synthesized)
atccttatctttcacctctacagctaaactgataacaaggtcagtttctttatgtcattttattcccatacctaaaattgcatctatttgtgagctttctgcctttttgtaacgctcagt

SEQ ID NO: 341462 - DNA, 120 bp, Artificial Sequence
  ENSG00000137960_26 (sequence is synthesized)
gcaccaaaagcgtctgtttttagtgcagtcacataatatataagtgtgggatacccttctgcagcttcagtgagacaaatcactttttaaaaaacattccattttattggcatcactaga

SEQ ID NO: 341463 - DNA, 120 bp, Artificial Sequence
  ENSG00000137960_27 (sequence is synthesized)
tgtttttaggaccctgtccttttcacttttctgtaggctttttttttttaaatggaagatgattattttgtttgttcttgatttcctgttattgaaaacagcatcttccttcttgcaatg

SEQ ID NO: 341464 - DNA, 120 bp, Artificial Sequence
  ENSG00000137960_28 (sequence is synthesized)
gccactaatagcacacaatgcgttttctttgattgtagcagaaaatgcaaatgataattgtatgttgggctcgatgaggccttgaacatagctgagtcctaatcagatgtatatactctg

SEQ ID NO: 341465 - DNA, 120 bp, Artificial Sequence
  ENSG00000137960_29 (sequence is synthesized)
atgattacaaataggtacatgttgggtttctgtgatgtttcaaaaatacaattatataattatgatgtaaactctttaagaattcaattataaaagcaataatcaggtaacctctatttg

SEQ ID NO: 341466 - DNA, 120 bp, Artificial Sequence
  ENSG00000137960_30 (sequence is synthesized)
gagctgctacatccaatattgtgactgaaaattaactaaagagagataatttttcaaatgatgtataatttgcaatattttcccttgcaactttagcaaatacacatattccaagtaaaa

SEQ ID NO: 341467 - DNA, 120 bp, Artificial Sequence
  ENSG00000137962_0 (sequence is synthesized)
agtggtggtggtgcctgtggctgtggctgcggctgcggctgcggctgagatttggccgggcgtccgcaggccgtgggggatgggggcagcgagctccagccctcggcggtggcggcggcc

SEQ ID NO: 341468 - DNA, 120 bp, Artificial Sequence
  ENSG00000137962_1 (sequence is synthesized)
gtaggtgtggggcgggcgtccgcgtccggcacgcgagatggagcgccgtggatttcagtttttctgactgttacatgaaaggatgattgctcacaaacagaaaaagacaaagaaaaaacg

SEQ ID NO: 341469 - DNA, 120 bp, Artificial Sequence
  ENSG00000137962_2 (sequence is synthesized)
tgcttgggcatcaggtcaactctctactgatattacaacttctgaaatggggctcaagtccttaagttccaactctatttttgatccggattacatcaaggagttggtgaatgatatcag

SEQ ID NO: 341470 - DNA, 120 bp, Artificial Sequence
  ENSG00000137962_3 (sequence is synthesized)
gaagttctcccacatgttactatatttgaaagaagccatattttcagactgttttaaagaagttattcatatacgtctagaggaactgctccgtgttttaaagtctataatgaataaaca

SEQ ID NO: 341471 - DNA, 120 bp, Artificial Sequence
  ENSG00000137962_4 (sequence is synthesized)
tcagaacctcaattctgttgatcttcaaaatgctgcagaaatgctcactgcaaaagtgaaagctgtgaacttcacagaagttaatgaagaaaacaaaaacgatctcttccaggaagtgtt

SEQ ID NO: 341472 - DNA, 120 bp, Artificial Sequence
  ENSG00000137962_5 (sequence is synthesized)
ttcttctattgaaactttggcatttacctttggaaatatccttacaaacttccttatgggagatgtaggcaatgattcattattgcgactgcctgtttctcgagaaactaagtcgtttga

SEQ ID NO: 341473 - DNA, 120 bp, Artificial Sequence
  ENSG00000137962_6 (sequence is synthesized)
aaatgtttctgtggaatcagtggactcatccagtgaaaaaggaaatttttcccctttagaactagacaacgtgctgttaaagaacactgactctatcgagctggctttgtcatatgctaa

SEQ ID NO: 341474 - DNA, 120 bp, Artificial Sequence
  ENSG00000137962_7 (sequence is synthesized)
aacttggtcaaaatatactaagaacatagtttcatgggttgaaaaaaagcttaacttggaattggagtccactagaaatatggtcaagttggcagaggcaactagaactaacattggaat

SEQ ID NO: 341475 - DNA, 120 bp, Artificial Sequence
  ENSG00000137962_8 (sequence is synthesized)
tcaggagttcatgccactgcagtctctgtttactaatgctcttcttaatgatatagaaagcagtcaccttttacaacaaacaattgcagctctccaggctaacaaatttgtgcagcctct

SEQ ID NO: 341476 - DNA, 120 bp, Artificial Sequence
  ENSG00000137962_9 (sequence is synthesized)
acttggaaggaaaaatgaaatggaaaaacaaaggaaagaaataaaagagctttggaaacaggagcaaaataaaatgcttgaagcagagaatgctctcaaaaaggcaaaattattatgcat

SEQ ID NO: 341477 - DNA, 120 bp, Artificial Sequence
  ENSG00000137962_10 (sequence is synthesized)
gcaacgtcaagatgaatatgagaaagcaaagtcttccatgtttcgtgcagaagaggagcatctgtcttcaagtggcggattagcaaaaaatctcaacaagcaactagaaaaaaagcgaag

SEQ ID NO: 341478 - DNA, 120 bp, Artificial Sequence
  ENSG00000137962_11 (sequence is synthesized)
gttggaagaggaggctctccaaaaagtagaagaagcaaatgaactttacaaagtttgtgtgacaaatgttgaagaaagaagaaatgatctagaaaataccaaaagagaaattttagcaca

SEQ ID NO: 341479 - DNA, 120 bp, Artificial Sequence
  ENSG00000137962_12 (sequence is synthesized)
actccggacacttgttttccagtgtgatcttacccttaaagctgtaacagttaacctcttccacatgcagcatctgcaggctgcttcccttgcagacagtttacagtctctctgtgatag

SEQ ID NO: 341480 - DNA, 120 bp, Artificial Sequence
  ENSG00000137962_13 (sequence is synthesized)
tgccaaactctatgacccaggccaagagtacagtgaatttgtcaaggccacaaattcaactgaagaagaaaaagttgatggaaatgtaaataaacatttaaatagttcccaaccttcagg

SEQ ID NO: 341481 - DNA, 120 bp, Artificial Sequence
  ENSG00000137962_14 (sequence is synthesized)
atttggacctgccaactctttagaggatgttgtacgccttcctgacagttctaataaaattgaagaggacagatgctctaacagtgcagatataacaggtccttcctttataagatcatg

SEQ ID NO: 341482 - DNA, 120 bp, Artificial Sequence
  ENSG00000137962_15 (sequence is synthesized)
gacatttgggatgtttagtgattctgagagcactggagggagcagcgaatctagatctctggattcagaatctataagtccaggagactttcatcgaaaacttccacgaacaccatccag

SEQ ID NO: 341483 - DNA, 120 bp, Artificial Sequence
  ENSG00000137962_16 (sequence is synthesized)
tggaactatgtcctctgcagatgatctagatgaaagagagccaccttccccttcagaaactggacccaattcccttggaacatttaagaaaacattgatgtcaaaggcagctctcacaca

SEQ ID NO: 341484 - DNA, 120 bp, Artificial Sequence
  ENSG00000137962_17 (sequence is synthesized)
caagtttcgcaaattgagatcccccacgaaatgtagggattgtgaaggcattgtagtgttccaaggtgttgaatgtgaagagtgtctccttgtttgtcatcgaaagtgtttggaaaattt

SEQ ID NO: 341485 - DNA, 120 bp, Artificial Sequence
  ENSG00000137962_18 (sequence is synthesized)
agtcattatttgtggtcatcagaaacttccaggaaaaatacacttatttggagcagaattcacacaagttgcaaaaaaggaaccagatggtatcccttttatactcaaaatatgtgcctc

SEQ ID NO: 341486 - DNA, 120 bp, Artificial Sequence
  ENSG00000137962_19 (sequence is synthesized)
agagattgaaaatagagctttgtgtctacagggaatttatcgtgtgtgtggaaacaaaataaaaactgaaaaattgtgtcaagctttggaaaatggaatgcacttggtagatatttcaga

SEQ ID NO: 341487 - DNA, 120 bp, Artificial Sequence
  ENSG00000137962_20 (sequence is synthesized)
atttagttcacatgatatctgtgacgtcttgaaattataccttcggcagctcccagaaccatttattttatttcgattgtacaaggaatttatagaccttgcaaaagagatccaacatgt

SEQ ID NO: 341488 - DNA, 120 bp, Artificial Sequence
  ENSG00000137962_21 (sequence is synthesized)
aaatgaagaacaagagacaaaaaagaatagtcttgaagacaaaaaatggccaaatatgtgtatagaaataaaccgaattcttctaaaaagcaaagaccttctaagacaattgccagcatc

SEQ ID NO: 341489 - DNA, 120 bp, Artificial Sequence
  ENSG00000137962_22 (sequence is synthesized)
aaattttaacagtcttcatttccttatagtacatctaaagcgggtagtagatcatgcagaagaaaacaagatgaactccaaaaacttgggggtgatatttggaccaagtctcattaggcc

SEQ ID NO: 341490 - DNA, 120 bp, Artificial Sequence
  ENSG00000137962_23 (sequence is synthesized)
aaggcccacaactgctcctatcaccatctcctcccttgcagagtattcaaatcaagcacgcttggtagagtttctcattacttactcacagaagatcttcgatgggtccctacaaccaca

SEQ ID NO: 341491 - DNA, 120 bp, Artificial Sequence
  ENSG00000137962_24 (sequence is synthesized)
agatgttatgtgtagcataggtgttgttgatcaaggctgttttccaaagcctctgttatcaccagaagaaagagacattgaacgttccatgaagtcactatttttttcttcaaaggaaga

SEQ ID NO: 341492 - DNA, 120 bp, Artificial Sequence
  ENSG00000137962_25 (sequence is synthesized)
tatccatacttcagagagtgaaagcaaaatttttgaacgagctacatcatttgaggaatcagaacgcaagcaaaatgcgttaggaaaatgtgatgcatgtctcagtgacaaagcacagtt

SEQ ID NO: 341493 - DNA, 120 bp, Artificial Sequence
  ENSG00000137962_26 (sequence is synthesized)
gcttctagaccaagaggctgaatcagcatcccaaaagatagaagatggtaaaacccctaagccactttctctgaaatctgataggtcaacaaacaatgtggagaggcatactccaaggac

SEQ ID NO: 341494 - DNA, 120 bp, Artificial Sequence
  ENSG00000137962_27 (sequence is synthesized)
caagattagacctgtaagtttgcctgtagatagactacttcttgcaagtcctcctaatgagagaaatggcagaaatatgggaaatgtaaatttagacaagttttgcaagaatcctgcctt

SEQ ID NO: 341495 - DNA, 120 bp, Artificial Sequence
  ENSG00000137962_28 (sequence is synthesized)
tgaaggagttaatagaaaagacgctgctactactgtttgttccaaatttaatggctttgaccagcaaactctacagaaaattcaggacaaacagtatgaacaaaacagcctaactgccaa

SEQ ID NO: 341496 - DNA, 120 bp, Artificial Sequence
  ENSG00000137962_29 (sequence is synthesized)
gactacaatgatcatgcccagtgcactccaggaaaaaggagtgacaacaagcctccagattagtggggaccattctatcaatgccactcaacccagtaagccatatgcagagccagtcag

SEQ ID NO: 341497 - DNA, 120 bp, Artificial Sequence
  ENSG00000137962_30 (sequence is synthesized)
gtcagtgagagaggcatctgagagacggtcttcagattcctaccctctcgctcctgtcagagcacccagaacactgcagcctcaacattggacaacattttataaaccacatgctcccat

SEQ ID NO: 341498 - DNA, 120 bp, Artificial Sequence
  ENSG00000137962_31 (sequence is synthesized)
catcagtatcagggggaatgaggagaagccagcttcaccctcagcagcagtgcctcctggcacagatcacgatccccacggtctcgtggtgaagtcaatgccagacccagacaaagcatc

SEQ ID NO: 341499 - DNA, 120 bp, Artificial Sequence
  ENSG00000137962_32 (sequence is synthesized)
agcttgtcctgggcaagcaactggtcaacctaaagaagactctgaggagcttggcttgcctgatgtgaatccaatgtgtcagagaccaaggctaaaacgaatgcaacagtttgaagacct

SEQ ID NO: 341500 - DNA, 120 bp, Artificial Sequence
  ENSG00000137962_33 (sequence is synthesized)
cgaaggtgaaattccacaatttgtgtagggatgtcaaatttcagggtttttttgttgttgttgtgttattttgtggtattgtgcttgttttgtgaaagaatgttttgacagggcctcttt

SEQ ID NO: 341501 - DNA, 120 bp, Artificial Sequence
  ENSG00000137962_34 (sequence is synthesized)
tgtataggactgccaaatcatgggttttgccttttgttgttgtatttatcctctgttggtaatactgaatggtagaatgttttgatagggtcacatttgtgcctcactggaattatcttt

SEQ ID NO: 341502 - DNA, 120 bp, Artificial Sequence
  ENSG00000137962_35 (sequence is synthesized)
aaattctgtatttttaaagttgtgaataagataggtggattcgtattttttaaagttcagttgactttccccaccaaatggtccatttgaatgcatccctaatatatgatatagtctcaa

SEQ ID NO: 341503 - DNA, 120 bp, Artificial Sequence
  ENSG00000137962_36 (sequence is synthesized)
ctaataggtgcaatttgggaaaatcaggtttattttttggagtggaactgttataagtgcttatttataaaaggaatgtttctgaatgcaagtgcctaaaaagatctttgttggtatgca

SEQ ID NO: 341504 - DNA, 120 bp, Artificial Sequence
  ENSG00000137962_37 (sequence is synthesized)
tatttttcaattggcaattcagttaatttttaaatgtttacataatggccagaaggcttgcaaatctgtatttaattgcattttaattaattgccagtttttacatgtgatagtcagttg

SEQ ID NO: 341505 - DNA, 120 bp, Artificial Sequence
  ENSG00000137962_38 (sequence is synthesized)
tacaaagaaaatgcacttaaacctgtttctaaattatatattcagttatattatatttggctttagatggttttaatacatttgatagtttttcaccccttggctttattttatataaac

SEQ ID NO: 341506 - DNA, 120 bp, Artificial Sequence
  ENSG00000137962_39 (sequence is synthesized)
ttttgtttttcagcagttctgaactttttagtattttataaatggtccaaaaaatgcctgtttcagaagtttttgaattcagtgcatttcctcttgatttgtctgggttaaaaccattcc

SEQ ID NO: 341507 - DNA, 120 bp, Artificial Sequence
  ENSG00000137962_40 (sequence is synthesized)
ttttgtatgaaatgttttgacttaggaatcattttatgtacttgttctacctggattgtcaacaactgaaagtacatatttcatccaaatcaagctaaaatttatttaagttgattctga

SEQ ID NO: 341508 - DNA, 120 bp, Artificial Sequence
  ENSG00000137962_41 (sequence is synthesized)
gagtacaggtcagtaagcctcattatttggaatttgagagaaggtataggtgatcggatctgtttcatttataaaaggtccagtttttaggactagtacattcctgttattttctgggtt

SEQ ID NO: 341509 - DNA, 120 bp, Artificial Sequence
  ENSG00000137962_42 (sequence is synthesized)
ttatcattttgcctaaaataggatataaaagggacaaaaaataagtagactgtttttatgtgtgaattatatttctactaaatgtttttgtatgactgtgttatacttgataatatatat

SEQ ID NO: 341510 - DNA, 120 bp, Artificial Sequence
  ENSG00000137962_43 (sequence is synthesized)
atatatatatatcaacttgttaaattatttcatgttcccgtggcttcttttcagttgttgcctattacagtatgagagtttaaggttattaaccattggcttagaagtcaacacctagga

SEQ ID NO: 341511 - DNA, 120 bp, Artificial Sequence
  ENSG00000137962_44 (sequence is synthesized)
tcatacatccgttgactacaatgtggaatgaattttatggaaacctgttttatagttctatgtgatgtaaaggtctagggagcaataaccagcccttttttttctgaaggcttgttttta

SEQ ID NO: 341512 - DNA, 120 bp, Artificial Sequence
  ENSG00000137962_45 (sequence is synthesized)
gtcctcattgtacaaaatataaaataatcatattgctatgaatacctaaaaagaaaattagagcccatgtgtattgagccttctctgtgtgccaggaactttgccaaggtgctacataga

SEQ ID NO: 341513 - DNA, 120 bp, Artificial Sequence
  ENSG00000137962_46 (sequence is synthesized)
ttattttatttcaagttcacagcaacctataatgggtgggtaagcatgttattatttctgtgttacagataaggaaactaaggcttagttaaatgacttgcttcagtgttccacaggtgt

SEQ ID NO: 341514 - DNA, 120 bp, Artificial Sequence
  ENSG00000137962_47 (sequence is synthesized)
aacaggtggagtcaaatctcaaacatagggctgtcagattttgatggttagtgctcttaatgactgtgattactaaataatatctggtagtttttaacaatagaaaatgcaactttaaaa

SEQ ID NO: 341515 - DNA, 120 bp, Artificial Sequence
  ENSG00000137962_48 (sequence is synthesized)
aatttttattgtggtaaaatacacataacatttaccatttttaagtatattgtttgaaccatttttaagcatatagttcagtggcattaagtatattcacattgttttgcaaccatgagc

SEQ ID NO: 341516 - DNA, 120 bp, Artificial Sequence
  ENSG00000137962_49 (sequence is synthesized)
acctattcatctccagaacattatcatcatcctatactaaaacttagaaaatgtacttttaaacttcttcagttctcttttaatatatggagcccacccaaaggttatatcatgtaataa

SEQ ID NO: 341517 - DNA, 120 bp, Artificial Sequence
  ENSG00000137962_50 (sequence is synthesized)
actcatttctctgttttccctcacagcttaaaaatgagaatttcacttttgggtcctttctgcctttagggctccctggcactttgtccagcgtagagccttaagcctctagatgctttc

SEQ ID NO: 341518 - DNA, 120 bp, Artificial Sequence
  ENSG00000137962_51 (sequence is synthesized)
tagtttcctggggccctgaggcaagtatctcttgagaagaggttgctatttctagaggatccacagtgtgcactgtgttgtgctatctaatagtgtggtggaaatcatttatccagaagt

SEQ ID NO: 341519 - DNA, 120 bp, Artificial Sequence
  ENSG00000137962_52 (sequence is synthesized)
tgttttttgcaacatggaaagatacgtgaccaaaaggaaagggcaacagcaggagccctgttagtgctgccagaacaccaggaagccttgtgggaggcgtattgtccaagatgatgcgta

SEQ ID NO: 341520 - DNA, 120 bp, Artificial Sequence
  ENSG00000137962_53 (sequence is synthesized)
ttgtccaaacgactcagaagaagtcatttctgaagggttgatcataacttccctagccatgttttacctacagagaacttagttagaatttatgagtacagtatgttaaattacttttag

SEQ ID NO: 341521 - DNA, 120 bp, Artificial Sequence
  ENSG00000137962_54 (sequence is synthesized)
tgtaccttaggcagtgtatttgttttgatacagagacaaagactatatgatccctgagacttgttgcctagtgaactcacaagcagatagaattgtacctcagttatttgggtgatttaa

SEQ ID NO: 341522 - DNA, 120 bp, Artificial Sequence
  ENSG00000137962_55 (sequence is synthesized)
agatggtactatggctacactattcccagctatcgttgtgttacagtatttatacaactggaaacatctctctaaatgacaaccattgtatattgttaaataacttatagtcagtggaat

SEQ ID NO: 341523 - DNA, 120 bp, Artificial Sequence
  ENSG00000137962_56 (sequence is synthesized)
tctgtgggtttttctttcctacaggcaggaaattatggtgatgtgttgatatgattatatatgtagactattcagttaacatctaggagttagcaaatttgctacattcacaatcagtat

SEQ ID NO: 341524 - DNA, 120 bp, Artificial Sequence
  ENSG00000137962_57 (sequence is synthesized)
gtaagtcagttgtattcctagatatcagcaactaacagaaatggaagtttttagaaagatctcttcaatatcattaaaaaatacaaaatactctacctaagaataagtctaacaaaagat

SEQ ID NO: 341525 - DNA, 120 bp, Artificial Sequence
  ENSG00000137962_58 (sequence is synthesized)
gtacaagatcttgatggagaaaatgttagaccatgtcaggaagcatttaaggagatcttaaataaatgtagtactccataatgtacacgaattagaagactcagtcgtgtaaagatgttc

SEQ ID NO: 341526 - DNA, 120 bp, Artificial Sequence
  ENSG00000137962_59 (sequence is synthesized)
atttacatttgtagattcaatgtaatcccaaccaaaatattttttgcattattacctctatctactgtgtgtttccttaagacaagggcattcctacgtaaccatagtacaaccatcaaa

SEQ ID NO: 341527 - DNA, 120 bp, Artificial Sequence
  ENSG00000137962_60 (sequence is synthesized)
cttaggagattgacattgacatcatgatatctaatccatagaccacattcaatctgctgattttgattgcctcagtaatgttcctgtgtttcagcatcccaatccaggaccacatagtgc

SEQ ID NO: 341528 - DNA, 120 bp, Artificial Sequence
  ENSG00000137962_61 (sequence is synthesized)
atttagttgccctatctcttgtttcattcagtccagaacatcttttcagacttgtctttgaccttgacacttgaggaggattggccagtttgtagaaagttcctcagttttggtttatca

SEQ ID NO: 341529 - DNA, 120 bp, Artificial Sequence
  ENSG00000137962_62 (sequence is synthesized)
ttagataagacccataaggtttaggatagacatttttgtccaatactacagaaatgatgctctatactcaaatgtgtcatgccaggatgcacacaatgtcaatttgtcttatacctgata

SEQ ID NO: 341530 - DNA, 120 bp, Artificial Sequence
  ENSG00000137962_63 (sequence is synthesized)
gtattaattttggtcacttggttcagatagtatataccaggtttctccattgtaaaattagaattaggaagtaatttgtgaggagattcttaaagattgtaaatgtattgtttctcatcg

SEQ ID NO: 341531 - DNA, 120 bp, Artificial Sequence
  ENSG00000137962_64 (sequence is synthesized)
aattgtcacgggctagtctattgacaattcttgactgaaccaattactattttggttgtcaaatggtgagtccgtggcttctgccttggttggcatcctactactgtaaggaagagctct

SEQ ID NO: 341532 - DNA, 120 bp, Artificial Sequence
  ENSG00000137962_65 (sequence is synthesized)
tccttctctattccttcattcacttaaatcagtatagattcatgaatgcctgctttattcagtgacagtgtattattgtcacttattttcatgctgaaattttccccgatttggtttttg

SEQ ID NO: 341533 - DNA, 120 bp, Artificial Sequence
  ENSG00000137962_66 (sequence is synthesized)
ggagtctcttcaagctggcttctgtgttccttagagatgcctcattgctttttcccctcttattttttttacgagctcatcttacactttttcctactccctaccccaagtctagaatta

SEQ ID NO: 341534 - DNA, 120 bp, Artificial Sequence
  ENSG00000137962_67 (sequence is synthesized)
gcccttttttccaaggagccctggtttctttaaatgggaaatggtatatggaaatgaagacctgagaaaggctcactgtcttattggtgaacagctcaaaggaaaacgtgtgtctacaca

SEQ ID NO: 341535 - DNA, 120 bp, Artificial Sequence
  ENSG00000137962_68 (sequence is synthesized)
cattcaagaatagtcacctacttctatatctatttatatacatacgtattgaaaactttgagttcacattgacaccttcaattcaatcctttgaggttaatctagtctccctttccatct

SEQ ID NO: 341536 - DNA, 120 bp, Artificial Sequence
  ENSG00000137962_69 (sequence is synthesized)
ttgtaacttccttctctcatagaaacctgactcccataatcctaaataatttgttcattcttcctccctccctcaacctcttgacatgccagctgctgtctcatcacacccagtcccaaa

SEQ ID NO: 341537 - DNA, 120 bp, Artificial Sequence
  ENSG00000137962_70 (sequence is synthesized)
tatgccaaataaatccgcagtcatagcagcgctggtcctgaccacaccaatccctaacatcctccccagcctggagcctggaccatggcagctgaatctttgaccccagtgatgtcagtc

SEQ ID NO: 341538 - DNA, 120 bp, Artificial Sequence
  ENSG00000137962_71 (sequence is synthesized)
ctgagcacaccattggaatcctaggctcctgtcatctggctggaagagagacaaattcacaaccttttgataatgagcaattattgaatactcactgaatttatcagagaaagtttaaaa

SEQ ID NO: 341539 - DNA, 120 bp, Artificial Sequence
  ENSG00000137962_72 (sequence is synthesized)
gtgtacgattatacatatttaccaggaatgtttaaacatagacatttatgaaatttatagaaaatattgaattgtggttctcactttttggtcttggctgtaacaatttttaaatattaa

SEQ ID NO: 341540 - DNA, 120 bp, Artificial Sequence
  ENSG00000137962_73 (sequence is synthesized)
tacttcctacaataactgtatcatgctatttttaagtgtcctcacactcaaccaatctactctgcatccataaaataagcatgcagttcagaaaatagattaaacgactaattggctatg

SEQ ID NO: 341541 - DNA, 120 bp, Artificial Sequence
  ENSG00000137962_74 (sequence is synthesized)
ccaggagtttggtgtcaaagttctgcgtctgccaagactgcctggaaaggcatgttaaaacatggctaagcccatcccccagagtttctcattcagtaggtcaacattttttaataggct

SEQ ID NO: 341542 - DNA, 120 bp, Artificial Sequence
  ENSG00000137962_75 (sequence is synthesized)
ctcaggtcgtgctgatgctgttggtgaagatccacattttgagaaccactatgctgagacctgaattttggagtttgtgaaagaatgtcttagagaaggcagtagtttattttacttgac

SEQ ID NO: 341543 - DNA, 120 bp, Artificial Sequence
  ENSG00000137962_76 (sequence is synthesized)
aagaaagttcaccttttaggcaagtgtgtgtgtgtatgtgtactaattcaggcacctgatagcaaggataggcaaaagctttgtattattgatgaaatgtaattttacgaacaaattctg

SEQ ID NO: 341544 - DNA, 120 bp, Artificial Sequence
  ENSG00000137962_77 (sequence is synthesized)
taagattatatggaatatagtaaatataaatataaaatgctatttcaaatagaagcaaatattttatagacagtgtactaattataaattgtacatggctgtccattaaaatcaactgcc

SEQ ID NO: 341545 - DNA, 120 bp, Artificial Sequence
  ENSG00000137962_78 (sequence is synthesized)
tttgaatcactgaccagaacagattaacttcagaagtattattttgaaaacagaagatttcagaattttcagttatttcaacttagctttactatagtaaatatttgtttaaaatataaa

SEQ ID NO: 341546 - DNA, 120 bp, Artificial Sequence
  ENSG00000137962_79 (sequence is synthesized)
gtatattgatccttttatccctagaaatgtgtctctttttatactgataaattcccttgctttttattttactttatttaatactgatatgttattccagttttcttttggttattttga

SEQ ID NO: 341547 - DNA, 120 bp, Artificial Sequence
  ENSG00000137962_80 (sequence is synthesized)
ttgagtgtagcatatcttttatcattcttttaattttatcatatttaaagtgagtttcttatatagcattatagagagcatatacttctattgtgattttttttaaaaatctattttggc

SEQ ID NO: 341548 - DNA, 120 bp, Artificial Sequence
  ENSG00000137962_81 (sequence is synthesized)
tcttataagtggagtgtttagaccatttatatttaaggtaaatatatgttcagatttagttttatcattttatttcttttttgtttatgccttatgatattttccttaatctatttccct

SEQ ID NO: 341549 - DNA, 120 bp, Artificial Sequence
  ENSG00000137962_82 (sequence is synthesized)
tttgctgccgtcttttggatgaattgatacttttctagacatatattttaatttgtctactgggttttttattatgtatcttcatataccttttttaaaaaattggttgcacacatctgt

SEQ ID NO: 341550 - DNA, 120 bp, Artificial Sequence
  ENSG00000137962_83 (sequence is synthesized)
gttattaagaagctatagtagctcaggttatattcctaacttttaaatgttttctgaagaaaacattgtgaaggaaaaaacagtgtggatgctcataacacctcccctggcaccactgtc

SEQ ID NO: 341551 - DNA, 120 bp, Artificial Sequence
  ENSG00000137962_84 (sequence is synthesized)
ataaactgaatattgcttgcaatgtcttggattcactgtcaattgaatattgggttgcctggcccatgggtccaatcaccagaatggtttttttcccctttgttcttataaaatgagaga

SEQ ID NO: 341552 - DNA, 120 bp, Artificial Sequence
  ENSG00000137962_85 (sequence is synthesized)
aaagtttaataaatgaaccaaaactgagattttgtttggtagaactctttcccttcccttctcgttctaatgactacagtgtctttttcaagagaatatagcagttacaaaccactcctg

SEQ ID NO: 341553 - DNA, 120 bp, Artificial Sequence
  ENSG00000137962_86 (sequence is synthesized)
gccagcttccagttaggaaattcaatttttatctttttatataacccgagaaaatctccctctaattatcatttagaaacttgcattgccttgataaccacaatggttgcatgtagactt

SEQ ID NO: 341554 - DNA, 120 bp, Artificial Sequence
  ENSG00000137962_87 (sequence is synthesized)
ctattattactttttacttttgtctacatttactctcagtgaagctaaatgtaaaactacatcgcttgaccaatgaaaaaatgtgtttgattgtttatgtcatatagagtcaaccagtta

SEQ ID NO: 341555 - DNA, 120 bp, Artificial Sequence
  ENSG00000137962_88 (sequence is synthesized)
agcagcatatatcaaaacataatggtttttgagatcatttagcattgtaaattctcattagaacctcacaatcttggttgaatctttggtatttatctgtttaagacttggttgaactga

SEQ ID NO: 341556 - DNA, 120 bp, Artificial Sequence
  ENSG00000137962_89 (sequence is synthesized)
gttgctatggactgcttatgaccccctgcaaaattagcatgttgagttcctaatccccagtgtgatgatgtgatgatatttggagggtggggcttttgggaggtgactaggtggagccct

SEQ ID NO: 341557 - DNA, 120 bp, Artificial Sequence
  ENSG00000137962_90 (sequence is synthesized)
catgacccttccccttctatcatgtgaggacacagagagaaaagaacagtctacgcatcaggaattggggcccacaccagaccctgaatctgatagtgccttggtcttgatctctcaatc

SEQ ID NO: 341558 - DNA, 120 bp, Artificial Sequence
  ENSG00000137962_91 (sequence is synthesized)
tctacaactgtgagaaataaatctttgttaagtcactctgtggtatttttgttgtagcagcctgatgtgactaagaacatacagatgtagtagtacatatatggattctgtcatatatga

SEQ ID NO: 341559 - DNA, 120 bp, Artificial Sequence
  ENSG00000137962_92 (sequence is synthesized)
aaatggatattgtgtcattaagatacaaaataagcattctggtaaaaaaaaaattatctctttcatggaacagaaatagaagttctgagattactagttacctgaaagtgtagtaatgaa

SEQ ID NO: 341560 - DNA, 120 bp, Artificial Sequence
  ENSG00000137962_93 (sequence is synthesized)
ctgtgaaaaactgttgaagaagccgagcatttaatgtggcttccagagttttatgaaaatgctagatgcattaaaacatgtactaggacaattcagcctaaaatagattattctataaat

SEQ ID NO: 341561 - DNA, 120 bp, Artificial Sequence
  ENSG00000137962_94 (sequence is synthesized)
agccaagtttaaaaaaaatggttgcacacttatctatatttatacatacacttaatttttttacagtctacttagaactagttttttaccacttcaagtggaacacagaagcatcaccac

SEQ ID NO: 341562 - DNA, 120 bp, Artificial Sequence
  ENSG00000137962_95 (sequence is synthesized)
cgtagaagttcctttacctaatctgggttgtatttgatatatgtaaattacatccatatacgttgaaaacctcaccagactctcataatttttgcttttaaaagtcatacatattataaa

SEQ ID NO: 341563 - DNA, 120 bp, Artificial Sequence
  ENSG00000137962_96 (sequence is synthesized)
gaggttaagaggaaaaaagtagtctattatttactatttctattcattcttcttgcattctagtggttccatctttcctctggtaacactttgtctacagaacttcctttaccactattt

SEQ ID NO: 341564 - DNA, 120 bp, Artificial Sequence
  ENSG00000137962_97 (sequence is synthesized)
tatagcaggtctgctggtaatggattcacttggttgtgtttcatatgagaatgtctttatttcgtctttatttctgaaggacaccttcactggatatagaattctaaatacagaaatcag

SEQ ID NO: 341565 - DNA, 120 bp, Artificial Sequence
  ENSG00000137962_98 (sequence is synthesized)
ttctttcactgctttaaaaatattgttccactgccttatggcatccgtagtttctcatgagataccagtaatcatatgaattatcattccccaattgtggcatgtgtttttctttggctg

SEQ ID NO: 341566 - DNA, 120 bp, Artificial Sequence
  ENSG00000137962_99 (sequence is synthesized)
tttttgtgggattttttttgtctttggattttatctgtttaagacgtatctagacctggtttttgctgtttttcctgttttggattggttgaacttcttgaatctacaagtttgactctt

SEQ ID NO: 341567 - DNA, 120 bp, Artificial Sequence
  ENSG00000137962_100 (sequence is synthesized)
gaaaaatttgagaagttttcaactattgtttcttcaatttttttttttttttgtagtattctttttcctctttctctgacaggcagtgactcaaacactagagcttttgttaatcttctg

SEQ ID NO: 341568 - DNA, 120 bp, Artificial Sequence
  ENSG00000137962_101 (sequence is synthesized)
cagttctggaggtcctctgttttttccccaaagctttttcctcttggttgtttatagtgttctgttgatctgtcttcaagttcacagtctcttttcctttggttatccccattctcccat

SEQ ID NO: 341569 - DNA, 120 bp, Artificial Sequence
  ENSG00000137962_102 (sequence is synthesized)
acagttcatccagtaaattttttgttctggatattttatttttcagcaataaattttccttttgtttctttatatcttacatttctttgctgagacttcttctgtttttccatgtttcaa

SEQ ID NO: 341570 - DNA, 120 bp, Artificial Sequence
  ENSG00000137962_103 (sequence is synthesized)
gattgtttgctctacttttttgaaacctttgtaatagttgttgtagatttttcatctaatcgtcccaaatctgagctgtatcagggttggtgtctttttattgtcttttgtcttgcgagt

SEQ ID NO: 341571 - DNA, 120 bp, Artificial Sequence
  ENSG00000137962_104 (sequence is synthesized)
tgttgagattttcctggttctttgtatgacaagtaattttgaatgatatcctagatattttcatcattactttattgactctgggtcctgtttataacctatattgagcattaatttttt

SEQ ID NO: 341572 - DNA, 120 bp, Artificial Sequence
  ENSG00000137962_105 (sequence is synthesized)
ttttcaattttagcagccatttgatacagttaggttcattttccagcttctgcgtgactcccttcctaatcttctggctgggggcttaggtctgcctattctgctcttctccagggccaa

SEQ ID NO: 341573 - DNA, 120 bp, Artificial Sequence
  ENSG00000137962_106 (sequence is synthesized)
gtgtggggaggataaagagaaaaaagtaacagaaatttcagaccctctcactctagactacagttcatctggtcataaacaaggatttccatcagagttttggcatctcctcagctgcta

SEQ ID NO: 341574 - DNA, 120 bp, Artificial Sequence
  ENSG00000137962_107 (sequence is synthesized)
ctgccatcattgctgctcccataagattgtgtcttagggatttggacttgcttggggtctggggcaggagagaaaataaatatacaaaagaaaccagggagttttcttctactgttttag

SEQ ID NO: 341575 - DNA, 120 bp, Artificial Sequence
  ENSG00000137962_108 (sequence is synthesized)
tttcatctcccatcacccctccccgcttttgttccttgggccagaaaggacctctcttggagctccttctgtctgcactcagtttgtactttgggaattggagaattgggtaggagctga

SEQ ID NO: 341576 - DNA, 120 bp, Artificial Sequence
  ENSG00000137962_109 (sequence is synthesized)
gcatgggctggaaaagagggcaggagtagacctatcactggataggtcataccttgaattgtagtttatttccatttacttttcagagtcttgatttgtgcattctgttcagatttttag

SEQ ID NO: 341577 - DNA, 120 bp, Artificial Sequence
  ENSG00000137962_110 (sequence is synthesized)
gtgaattcagtgggagacgggagaagttagcttactgcatctgaaccagaaaacttccttaaaatatttttgagtgtttaatattgtatctcatttattttccaaattttgattaattaa

SEQ ID NO: 341578 - DNA, 120 bp, Artificial Sequence
  ENSG00000137962_111 (sequence is synthesized)
tatattatttacttaaagaatcatgaaaggatttaaaagaattataaaatccaggatttgaaattaccttagaagtcatttaggccatttacttttgacaaattctcttcacctcaaaca

SEQ ID NO: 341579 - DNA, 120 bp, Artificial Sequence
  ENSG00000137962_112 (sequence is synthesized)
atagctaataatagctaagattgactacgtacctgccagtgtattaagctcatggtctacattaattcatttaattctcacaaaaatcctatcaagtttttagctccattttactgatga

SEQ ID NO: 341580 - DNA, 120 bp, Artificial Sequence
  ENSG00000137962_113 (sequence is synthesized)
gaaaactaaagtttagaaagccttctcaagatgcggtccttggaccagtcatattgccattactttgagagcctatgaggaatgcagaatcttgggtttcaacacagatccttagaacca

SEQ ID NO: 341581 - DNA, 120 bp, Artificial Sequence
  ENSG00000137962_114 (sequence is synthesized)
aataacttgatgaaggtcacctagcgtgcaagttacctttaggatcaagagagtaagcagtttacctttagctggagaatgctctaacatagccagttgctagaattaaactgtacctta

SEQ ID NO: 341582 - DNA, 120 bp, Artificial Sequence
  ENSG00000137962_115 (sequence is synthesized)
tgcagtttgaattttctttgtttcttgaagaagttagggcacaaataagctatttattctgttatctgtacttttcaaatactatttatgcagagtcaagtatccttagggaatgcctgt

SEQ ID NO: 341583 - DNA, 120 bp, Artificial Sequence
  ENSG00000137962_116 (sequence is synthesized)
ctacattgaaaaggacttagaggctaattatcctatcatctggtatatcaagagagatgaagaggaaacatggcagtctttgaaataacattaagctaatcgaaatttagcacttattca

SEQ ID NO: 341584 - DNA, 120 bp, Artificial Sequence
  ENSG00000137962_117 (sequence is synthesized)
gattgctacccttaaataccttccccacaaagaagccagagtgtcattttaaagaataaatcagatcatgttacagctttgtgtaaaatgctccaccagcttcctgttgctcttaaattc

SEQ ID NO: 341585 - DNA, 120 bp, Artificial Sequence
  ENSG00000137962_118 (sequence is synthesized)
agacaccttgccatagttcagatgactacttctttttttagctttatcttaaaccagagctccagctctttccatatacttcaaccatattgacctttcatctctttcttgagcatgaca

SEQ ID NO: 341586 - DNA, 120 bp, Artificial Sequence
  ENSG00000137962_119 (sequence is synthesized)
agctctttcgcattcacatttgcactacctcctcctttcatttggattgatctccatgaagcttttcttacatcggctcgcagttcaaatgttacctcctcagagaagccttccctaatt

SEQ ID NO: 341587 - DNA, 120 bp, Artificial Sequence
  ENSG00000137962_120 (sequence is synthesized)
taccatgttggaaataccctttcacaaacacgtacctggtcatactgcataatttgacattcttatgtagtatttatagcatttttcagtaccagaaagtattttatttacgtaatttgt

SEQ ID NO: 341588 - DNA, 120 bp, Artificial Sequence
  ENSG00000137962_121 (sequence is synthesized)
tacttctctcgcgtaccaccctcaggagaacgtaaaggtccaggagggtcagtatctcatcggtttgctgtaatatacccaaagcctaggtttttgtgaacatcaaattagtgtattcat

SEQ ID NO: 341589 - DNA, 120 bp, Artificial Sequence
  ENSG00000137962_122 (sequence is synthesized)
gtaagactctgagaatgggtctggcatattgtacacacttgtcagctgctgctattgttgttagtacaagtgatgatagtgataatatatttaggcatttgtgaaactcaatggaataat

SEQ ID NO: 341590 - DNA, 120 bp, Artificial Sequence
  ENSG00000137962_123 (sequence is synthesized)
ttattttgaataaattcaaggtaatatctaattattagaactgagtactgtagttaagcatttctatttttataggattgaaaaagtgaaaacagtctaaataatagttctttgattgga

SEQ ID NO: 341591 - DNA, 120 bp, Artificial Sequence
  ENSG00000137962_124 (sequence is synthesized)
agtgttttccccatgtttttctcttaggcagttgtgatcagaccatcaggatatagagatgaggatcctcagaaacacatccatctcctaaaattatgaaccagctggggcatggagttt

SEQ ID NO: 341592 - DNA, 120 bp, Artificial Sequence
  ENSG00000137962_125 (sequence is synthesized)
ttgaagtcacttttgaacttttcagctaaaagccagttttgctggaaatgattgctcctagatattagattcaaactgcttttctccctaatctagacttatgcaaaatcaggcatcata

SEQ ID NO: 341593 - DNA, 120 bp, Artificial Sequence
  ENSG00000137962_126 (sequence is synthesized)
gtatgttcagagtgatattcagtgttgtatgcttcactgtatggcatttttattggtgcagtcattgaaataaatgtatgtttatatagcattctgtatatcatgagttactctgccttt

SEQ ID NO: 341594 - DNA, 120 bp, Artificial Sequence
  ENSG00000137962_127 (sequence is synthesized)
aaaattttaccagtagaaccgtgattaaaaccaaggtgaggggcaatgagggaagccagagaatgaagctttattagttaacaaatcttggctagccattgagaaagttgccttttagtg

SEQ ID NO: 341595 - DNA, 120 bp, Artificial Sequence
  ENSG00000137962_128 (sequence is synthesized)
tatcttgcatttaaatgaatgtcattcttcataaaagtctttcttataataagacatcttggagtttataatgttttttgtgttccttctgaattttgtttttgtttttgagttttgcca

SEQ ID NO: 341596 - DNA, 120 bp, Artificial Sequence
  ENSG00000137962_129 (sequence is synthesized)
tcagctaaaatcaaggtagaaatgtgttgagcaatgtgatattcgttagtatcttccagttccgtagttcagtgcattgagctaactgctcatacagagtcaactagactcctgaaattc

SEQ ID NO: 341597 - DNA, 120 bp, Artificial Sequence
  ENSG00000137962_130 (sequence is synthesized)
aaaaactttagagtcctactttttttttgacatgctttttacctgtggcctacatttaacctattaaacacagagatgtgtatgtcttttttctttccttgactgcgatcattttattca

SEQ ID NO: 341598 - DNA, 120 bp, Artificial Sequence
  ENSG00000137962_131 (sequence is synthesized)
cttattttctctttataatattagttgctgtcattgctagttgttaagctggtggaaaagcttccatttgtattgtcatttctacattgttatagctaaattccagttttttacattgca

SEQ ID NO: 341599 - DNA, 120 bp, Artificial Sequence
  ENSG00000137962_132 (sequence is synthesized)
tagctaaattccagttttttacattgcagccatatatgttaaatttaatgtgtaatcaagtatcagtgatcatagggtctaaaaaggaaaggagggccgggcatggtggctcacgcctgt

SEQ ID NO: 341600 - DNA, 87 bp, Artificial Sequence
  ENSG00000137962_133 (sequence is synthesized)
agaagcagaggttgcagtgaggcgagaacgtgccattgcactccagccagggtgacaagagaaactccatctcaaagaaaaaaaaaa

SEQ ID NO: 341601 - DNA, 120 bp, Artificial Sequence
  ENSG00000137962_134 (sequence is synthesized)
accatttttttccgagaatgaatagcagaatttccctgtataaaaagtccaagaatagaagccaattttaaattaaagctaaaatagtatgacttttattattctgaaaatgttgtcatt

SEQ ID NO: 341602 - DNA, 120 bp, Artificial Sequence
  ENSG00000137962_135 (sequence is synthesized)
ccccatttccaaaataatacaatgaataatcagaagagctgtatccatgtttttcttttaggagactttaatacaaaattaccgtgtacttcatctacaatatgtcttctgctgctgatc

SEQ ID NO: 341603 - DNA, 120 bp, Artificial Sequence
  ENSG00000137962_136 (sequence is synthesized)
tagatctgagctgtccgatacagctgccagaagccacaggtgacgttatattcctattcgaagaccaagagctcaaaacatcattcctcccccaaatgaaaaaatgtctgggaaaaatta

SEQ ID NO: 341604 - DNA, 120 bp, Artificial Sequence
  ENSG00000137962_137 (sequence is synthesized)
ctaatctacttctctgaaacccatttgggaagctggcccaattcgagttctatactcaaaaggcaaacgtaaagactaaacctgtaagtgtgcctgtatgtagatgacttcttacaagac

SEQ ID NO: 341605 - DNA, 120 bp, Artificial Sequence
  ENSG00000137962_138 (sequence is synthesized)
ctcctaatgagagtaatggcagaaataggggaaatgaaaattaagacaagttttgcaagtgttattccaaagaatccagaatatttccattttgcccatggtgaaactatccaaggaagg

SEQ ID NO: 341606 - DNA, 120 bp, Artificial Sequence
  ENSG00000137962_139 (sequence is synthesized)
ttaagtaatttggattggtcaggatgtgaacctaggccagtctgacttttaagcctgtgatttttctgttatcccatgacatggtgtacactacaagaaatgctaatcttaataacatag

SEQ ID NO: 341607 - DNA, 120 bp, Artificial Sequence
  ENSG00000137962_140 (sequence is synthesized)
ctacctgtattgagagctcattaggtccggtactgttctaagcactttgcttctatctctcactcagcatattttagtgagctctttattgatttacaagattatgcatctatgaactca

SEQ ID NO: 341608 - DNA, 120 bp, Artificial Sequence
  ENSG00000137962_141 (sequence is synthesized)
tggctattaattaaattcccttcaagtttgtaaaaaattaattgacatttcattcttttttcagaagacaccaggtttttagccttggatcaagatgtctcaaaaaaaattcagtaaaaa

SEQ ID NO: 341609 - DNA, 120 bp, Artificial Sequence
  ENSG00000137962_142 (sequence is synthesized)
tctagatcttgctcagctccaaattcttgtactgctttcagagtactgagatcattgtagcccaaacatgcaatggcattttataagcctcttgaactctgaggactaagctctgatttt

SEQ ID NO: 341610 - DNA, 87 bp, Artificial Sequence
  ENSG00000137962_143 (sequence is synthesized)
ttataagcctcttgaactctgaggactaagctctgattttttttaatcttgtccaaattcctatctaaggggtctggggagtcatgc

SEQ ID NO: 341611 - DNA, 120 bp, Artificial Sequence
  ENSG00000137962_144 (sequence is synthesized)
tcaaaatattttaccccaaaacatgtttatttgccatatcttgaaatggccctgcaaagctgtcttttgtgggggaaaatttgcctctgtaaagaatctctattaacataactagatctt

SEQ ID NO: 341612 - DNA, 120 bp, Artificial Sequence
  ENSG00000137962_145 (sequence is synthesized)
gtaaagaatctctattaacataactagatctttttcttccaggccctcccaaacctaaggagattaactaaaagtctagcacttcttaaagatctgaataggaaacatttcaactattat

SEQ ID NO: 341613 - DNA, 74 bp, Artificial Sequence
  ENSG00000137962_146 (sequence is synthesized)
tctccacaatcttttatcttaacctgaacctttcccagaaaatatttaaattcacctgtagcctggaagcccct

SEQ ID NO: 341614 - DNA, 120 bp, Artificial Sequence
  ENSG00000137962_147 (sequence is synthesized)
caaactcaaccaattgtcaatcagaaaatatttaaattcacctgtagcctggaagcccctgctttgagttgtcccatccttctagaccaaacgaatgtatttcttaaatgtatttgattg

SEQ ID NO: 341615 - DNA, 87 bp, Artificial Sequence
  ENSG00000137962_148 (sequence is synthesized)
ttcttaaatgtatttgattgatgtctcatacctccctaaaatgtataaaaccaagctgcatccccaactaccttgggcacatgttct

SEQ ID NO: 341616 - DNA, 120 bp, Artificial Sequence
  ENSG00000137965_0 (sequence is synthesized)
cattttgtgcctgcctagctatccagacagagcagctaccctcagctctagctgatactacagacagtacaacagatcaagaagtatggcagtgacaactcgtttgacatggttgcacga

SEQ ID NO: 341617 - DNA, 120 bp, Artificial Sequence
  ENSG00000137965_1 (sequence is synthesized)
aaagatcctgcaaaatcattttggagggaagcggcttagccttctctataagggtagtgtccatggattccgtaatggagttttgcttgacagatgttgtaatcaagggcctactctaac

SEQ ID NO: 341618 - DNA, 120 bp, Artificial Sequence
  ENSG00000137965_2 (sequence is synthesized)
agtgatttatagtgaagatcatattattggagcatatgcagaagagagttaccaggaaggaaagtatgcttccatcatcctttttgcacttcaagatactaaaatttcagaatggaaact

SEQ ID NO: 341619 - DNA, 120 bp, Artificial Sequence
  ENSG00000137965_3 (sequence is synthesized)
aggactatgtacaccagaaacactgttttgttgtgatgttacaaaatataactccccaactaatttccagatagatggaagaaatagaaaagtgattatggacttaaagacaatggaaaa

SEQ ID NO: 341620 - DNA, 120 bp, Artificial Sequence
  ENSG00000137965_4 (sequence is synthesized)
tcttggacttgctcaaaattgtactatctctattcaggattatgaagtttttcgatgcgaagattcactggatgaaagaaagataaaaggggtcattgagctcaggaagagcttactgtc

SEQ ID NO: 341621 - DNA, 120 bp, Artificial Sequence
  ENSG00000137965_5 (sequence is synthesized)
tgccttgagaacttatgaaccatatggatccctggttcaacaaatacgaattctgctgctgggtccaattggagctgggaagtccagctttttcaactcagtgaggtctgttttccaagg

SEQ ID NO: 341622 - DNA, 120 bp, Artificial Sequence
  ENSG00000137965_6 (sequence is synthesized)
gcatgtaacgcatcaggctttggtgggcactaatacaactgggatatctgagaagtataggacatactctattagagacgggaaagatggcaaatacctgccgtttattctgtgtgactc

SEQ ID NO: 341623 - DNA, 120 bp, Artificial Sequence
  ENSG00000137965_7 (sequence is synthesized)
tggggctgagtgagaaagaaggcggcctgtgcagggatgacatattctatatcttgaacggtaacattcgtgatagataccagtttaatcccatggaatcaatcaaattaaatcatcatg

SEQ ID NO: 341624 - DNA, 120 bp, Artificial Sequence
  ENSG00000137965_8 (sequence is synthesized)
actacattgattccccatcgctgaaggacagaattcattgtgtggcatttgtatttgatgccagctctattcaatacttctcctctcagatgatagtaaagatcaaaagaattcgaaggg

SEQ ID NO: 341625 - DNA, 120 bp, Artificial Sequence
  ENSG00000137965_9 (sequence is synthesized)
agttggtaaacgctggtgtggtacatgtggctttgctcactcatgtggatagcatggatttgattacaaaaggtgaccttatagaaatagagagatgtgagcctgtgaggtccaagctag

SEQ ID NO: 341626 - DNA, 120 bp, Artificial Sequence
  ENSG00000137965_10 (sequence is synthesized)
aggaagtccaaagaaaacttggatttgctctttctgacatctcggtggttagcaattattcctctgagtgggagctggaccctgtaaaggatgttctaattctttctgctctgagacgaa

SEQ ID NO: 341627 - DNA, 120 bp, Artificial Sequence
  ENSG00000137965_11 (sequence is synthesized)
tgctatgggctgcagatgacttcttagaggatttgccttttgagcaaatagggaatctaagggaggaaattatcaactgtgcacaaggaaaaaaatagatatgtgaaaggttcacgtaaa

SEQ ID NO: 341628 - DNA, 120 bp, Artificial Sequence
  ENSG00000137965_12 (sequence is synthesized)
tttcctcacatcacagaagattaaaattcagaaaggagaaaacacagaccaaagagaagtatctaagaccaaagggatgtgttttattaatgtctaggatgaagaaatgcatagaacatt

SEQ ID NO: 341629 - DNA, 120 bp, Artificial Sequence
  ENSG00000137965_13 (sequence is synthesized)
gaagaaatgcatagaacattgtagtacttgtaaataactagaaataacatgatttagtcataattgtgaaaaataataataatttttcttggatttatgttctgtatctgtgaaaaaata

SEQ ID NO: 341630 - DNA, 120 bp, Artificial Sequence
  ENSG00000137965_14 (sequence is synthesized)
ttttgtgcctgcctagctatccagacagagcagctaccctcagctctagctgatactacagacagtacaacagattcactggatgaaagaaagataaaaggggtcattgagctcaggaag

SEQ ID NO: 341631 - DNA, 120 bp, Artificial Sequence
  ENSG00000137965_15 (sequence is synthesized)
attttgtgcctgcctagctatccagacagagcagctaccctcagctctagctgatactacagacagtacaacagatagatggaagaaatagaaaagtgattatggacttaaagacaatgg

SEQ ID NO: 341632 - DNA, 120 bp, Artificial Sequence
  ENSG00000137965_16 (sequence is synthesized)
ccttttgcagatcaactttattacatatagacttcatctcaatttataataaaaaatgaatctttaaaattgcttttctcccctctacagtataggacatactctattagagacgggaaa

SEQ ID NO: 341633 - DNA, 120 bp, Artificial Sequence
  ENSG00000137968_0 (sequence is synthesized)
aggttcagtgttgatggagttattgaagaaatgatggagtaagagactcttttctaagcaactcaagtttgcagtgattcaggcctacttctgaagagacagccttttatctcaatgaat

SEQ ID NO: 341634 - DNA, 120 bp, Artificial Sequence
  ENSG00000137968_1 (sequence is synthesized)
gacacagaaaaaccagcagatactccctctgaggaagaggactttggtgatccaaggacatatgacccagatttcaaggggcctgttgccaacaggagttgtacagatgttctgtgctgt

SEQ ID NO: 341635 - DNA, 120 bp, Artificial Sequence
  ENSG00000137968_2 (sequence is synthesized)
atgatcttcctactgtgtattattggctacattgttttaggacttgtggcctgggtacatggggaccccagaagagcagcctatcctacagacagccagggccacttttgtggccagaag

SEQ ID NO: 341636 - DNA, 120 bp, Artificial Sequence
  ENSG00000137968_3 (sequence is synthesized)
ggcactcccaatgagaacaagaccattttgttttactttaacctgttacgctgtaccagtccctccgtgttgctaaacctacagtgccctaccacacagatctgtgtctccaagtgccca

SEQ ID NO: 341637 - DNA, 120 bp, Artificial Sequence
  ENSG00000137968_4 (sequence is synthesized)
gaaaaatttttaacctatgtggaaatgcaacttttgtacacaaaagacaaaagctactgggaagactaccgtcagttctgtaagaccactgctaagcctgtgaagtctctcacacagctt

SEQ ID NO: 341638 - DNA, 120 bp, Artificial Sequence
  ENSG00000137968_5 (sequence is synthesized)
ttactggatgatgattgtccaacagcgatttttcccagcaaaccttttctccagagatgtttccctgacttctctaccaaaaatggcactttaacaataggaagtaagatgatgtttcaa

SEQ ID NO: 341639 - DNA, 120 bp, Artificial Sequence
  ENSG00000137968_6 (sequence is synthesized)
gatggaaatggagggacaagaagtgttgtagaactcgggattgctgcaaatggtatcaataaacttcttgatgcaaagtcacttggattgaaagtgtttgaagactatgcaagaacttgg

SEQ ID NO: 341640 - DNA, 120 bp, Artificial Sequence
  ENSG00000137968_7 (sequence is synthesized)
tattggattctcattggcctgacgattgccatggtccttagttggatatttttgatacttctgaggttcatagctggatgcctcttctgggtcttcatgattggtgtgattggaattata

SEQ ID NO: 341641 - DNA, 120 bp, Artificial Sequence
  ENSG00000137968_8 (sequence is synthesized)
ggttatggaatatggcactgttaccagcagtacaccaatcttcaggaacgcccaagttctgtattaactatctatgacatcgggattcagactaacataagcatgtactttgaactgcaa

SEQ ID NO: 341642 - DNA, 120 bp, Artificial Sequence
  ENSG00000137968_9 (sequence is synthesized)
caaacatggttcacatttatgataatactctgcatcattgaagtgattgtcatcctcatgctgatcttcctcaggaatcgaatccgagtcgccattatcctgctgaaggaaggaagcaaa

SEQ ID NO: 341643 - DNA, 120 bp, Artificial Sequence
  ENSG00000137968_10 (sequence is synthesized)
gccattggatatgttcctagtacattagtctatccagctttaactttcattttgctctcaatctgcatttgctactgggtcgtgacagcagttttcttggcgacatcgggggtacctgta

SEQ ID NO: 341644 - DNA, 120 bp, Artificial Sequence
  ENSG00000137968_11 (sequence is synthesized)
tacaaagtcatagctccaggggggcattgtatacatgaaaatcaaacctgtgacccagagatttttaatacaactgaaattgccaaagcttgccctggggctctgtgtaactttgctttc

SEQ ID NO: 341645 - DNA, 120 bp, Artificial Sequence
  ENSG00000137968_12 (sequence is synthesized)
tatggtggaaagagcttgtaccatcagtacatccctaccttccatgtatacaacttatttgtctttctctggcttataaacttcgtcattgcattaggtcagtgcgcccttgctggtgca

SEQ ID NO: 341646 - DNA, 120 bp, Artificial Sequence
  ENSG00000137968_13 (sequence is synthesized)
ttcgctacttattactgggccatgaaaaaacctgatgacatcccacgatatccactttttactgcatttggacgagccatacgatatcacacaggatccctagcatttggatctttaatt

SEQ ID NO: 341647 - DNA, 120 bp, Artificial Sequence
  ENSG00000137968_14 (sequence is synthesized)
attgcattaattcaaatgtttaaaattgtactagaatacttggaccaccgtcttaaacgtacccagaacacattgtctaaattcctacaatgctgcctgagatgctgcttctggtgtttg

SEQ ID NO: 341648 - DNA, 120 bp, Artificial Sequence
  ENSG00000137968_15 (sequence is synthesized)
gaaaatgcaataaagtttttaaacagaaatgcctatattatgattgcaatatatggcagaaacttctgcaggtcagcaaaagatgctttcaatctgctgatgagaaatgttttgaaagtt

SEQ ID NO: 341649 - DNA, 120 bp, Artificial Sequence
  ENSG00000137968_16 (sequence is synthesized)
gcagttacagatgaagttacatactttgtattattcctggggaaacttctagttgctggaagtataggtgttctggccttcctattcttcacacaaagactgccagtgattgcacaagga

SEQ ID NO: 341650 - DNA, 120 bp, Artificial Sequence
  ENSG00000137968_17 (sequence is synthesized)
ccagcatctttaaattactactgggtacctttgctgacagtcatttttgggtcttacctgattgcacatgggttcttcagcgtctatgcaatgtgtgttgaaacaattttcatctgcttc

SEQ ID NO: 341651 - DNA, 120 bp, Artificial Sequence
  ENSG00000137968_18 (sequence is synthesized)
actagttccccagaagcagaaagagtagaaaagctccaaacagtgtcactcatttttaagtagaagttgtgtaaattaggttgattgtaatttggaaatgttgcttttgagtaatgtgaa

SEQ ID NO: 341652 - DNA, 120 bp, Artificial Sequence
  ENSG00000137968_19 (sequence is synthesized)
atttctgtgcttaattctaagaagtcagcacctggtactacctgaggtgtcaggtatttgatgacattagctgctgtctactttatagacagtggtcccagctaaagatcaaaatgttaa

SEQ ID NO: 341653 - DNA, 120 bp, Artificial Sequence
  ENSG00000137968_20 (sequence is synthesized)
tgtcaaacgttttttaaaatctgtagccgagagtgttttaataacttttataactcagcgtgctgtttccattgcagcactttaatagcctttctttttataagtgtatatttgtaaagg

SEQ ID NO: 341654 - DNA, 120 bp, Artificial Sequence
  ENSG00000137968_21 (sequence is synthesized)
atattcaggcaatttttgaaaacactataaatgtgtaattaattagccataaaatattgatttatagttaaccagcatatggtactaaatttgtaaatatggtgctatggttatatttat

SEQ ID NO: 341655 - DNA, 120 bp, Artificial Sequence
  ENSG00000137968_22 (sequence is synthesized)
actgttcaagctggtggacaactctctaaactgtgattaaacttgtattaatggttccctaggaagtatatttcagtgagtcatgtccataacaaacatagatgttaatgttatataggt

SEQ ID NO: 341656 - DNA, 120 bp, Artificial Sequence
  ENSG00000137968_23 (sequence is synthesized)
tctacggagagcattactgggtaaaaaatactatggaaccttcagagcccattctgttttagtgaaatcatgtttatattgaagtcgaatctgagttctggagtgtcatttccaacaaca

SEQ ID NO: 341657 - DNA, 120 bp, Artificial Sequence
  ENSG00000137968_24 (sequence is synthesized)
tgaacctctgtccatggtgaaaatattctgaacaaaactgaaattgttacataactcatgccttttgtctttaacccaaatttcttattcccactatatagaaaatcaatatgaatttgt

SEQ ID NO: 341658 - DNA, 120 bp, Artificial Sequence
  ENSG00000137968_25 (sequence is synthesized)
ttcagaagagtgattatatcttttcatgagtatacctgtatttctagattaaagagattgtgtggctttgttctacagaaggtttgattttgtctcacctttcagtgaggaaagagaaaa

SEQ ID NO: 341659 - DNA, 120 bp, Artificial Sequence
  ENSG00000137968_26 (sequence is synthesized)
gaaagacacttcagattttaccctaaggaaatatactgttggcgctccatcatctaatacctttatgaggggcatactgtgggttaggaactctctctctgcagggcttaggaggaaagt

SEQ ID NO: 341660 - DNA, 120 bp, Artificial Sequence
  ENSG00000137968_27 (sequence is synthesized)
tgttgccacctgccaccgctggccgcctgaggtttctgatagtcatgtgtaagttttgaatggcagaacaaagcatgaatcagacacacatcttgcctagccatcccctgtgtgcaaatg

SEQ ID NO: 341661 - DNA, 120 bp, Artificial Sequence
  ENSG00000137968_28 (sequence is synthesized)
tgtatgatgtggttaaccatgtaaaaatgcaccccaaaaggagcattgaatcaatttgtattttcttggcttttaccttaaacttgtatataaggattatttatatattgacagaaagga

SEQ ID NO: 341662 - DNA, 120 bp, Artificial Sequence
  ENSG00000137968_29 (sequence is synthesized)
acatgttgatctgaatatcactcatatatccaagaaaagagtcagaaatgtattgttgtgttatagattgatctaaatacgtattaattatcttcaagtgtagacacctagatttaaact

SEQ ID NO: 341663 - DNA, 120 bp, Artificial Sequence
  ENSG00000137968_30 (sequence is synthesized)
gactctgtggcagattaattaatagcaataagccaatgaatagggaagatttttaatatataatgactaccagcttgttcttggcttacattcttgagattattgtattcaaaagtgtca

SEQ ID NO: 341664 - DNA, 120 bp, Artificial Sequence
  ENSG00000137968_31 (sequence is synthesized)
gttggcttcacattttggcaaagagccttctgcattcttattctccttgaagcataatgcagataatgacaacttatctttctagattagtcttttattattcaacaagacaaaggccac

SEQ ID NO: 341665 - DNA, 120 bp, Artificial Sequence
  ENSG00000137968_32 (sequence is synthesized)
aacaaaggactagtagaatagtgacctctacctgagaatttgttataactatagatgtttgtgctctgcccaagagattctgatatactgtgatttgatgtgagccacgatgtgaattat

SEQ ID NO: 341666 - DNA, 120 bp, Artificial Sequence
  ENSG00000137968_33 (sequence is synthesized)
tgatatactgtgatttgatgtgagccacgatgtgaattattataaagttctctagttgattctgatacacataaaagttgaaaaattggccatgtgtggtgtctcacgcctgtaatccca

SEQ ID NO: 341667 - DNA, 120 bp, Artificial Sequence
  ENSG00000137968_34 (sequence is synthesized)
tccaagatggacagatcactggagcctaggagttccagaccagtctaggcaacatggtgaaaccccatctatctttataaaaaatataaaagttagccaagtgtggtggtgcacacctgt

SEQ ID NO: 341668 - DNA, 120 bp, Artificial Sequence
  ENSG00000137968_35 (sequence is synthesized)
ggttctactgcaagaccttattatgtgagtcaacctttgctgaagattttccaggaggaaaatccacaaactaggaagcagtagaagagcaaactggtcgtcctacagctgtgtgttacc

SEQ ID NO: 341669 - DNA, 120 bp, Artificial Sequence
  ENSG00000137968_36 (sequence is synthesized)
ttttctccatctgctgtgtctgtgcaacatttgtttcataagtgctttgtgtttagcaacactgtattcacgaccttgttggcttgcatttgcatgttttataccaaagcttatactgta

SEQ ID NO: 341670 - DNA, 120 bp, Artificial Sequence
  ENSG00000137968_37 (sequence is synthesized)
ctatgtgaagccatcagaagtcgcaagggaattgttaataacataaaacatttttatactaagatcatttgttttgtaattcgtttttaaagagtggcttggatgttttgaaaatactac

SEQ ID NO: 341671 - DNA, 120 bp, Artificial Sequence
  ENSG00000137968_38 (sequence is synthesized)
tgaatatgttaatattcttttaaatcttagattgaaaaatgatacattacttaaattgatagctcctaatatatttttaaaattacaactaaaagaagacttcttctgcagggaaaattg

SEQ ID NO: 341672 - DNA, 120 bp, Artificial Sequence
  ENSG00000137968_39 (sequence is synthesized)
gtcagcaaagtgaaattaaaaattttaaagtttttcccactctcgttggacagtaaatcagtgaaaggactgccccagttgagagtttgctctctttaagtatagaatgtttcctcttaa

SEQ ID NO: 341673 - DNA, 120 bp, Artificial Sequence
  ENSG00000137968_40 (sequence is synthesized)
acaaattgccaatcatccagcctttactacttagccctctgacaaagtgccttactggctatttaatattacccagcttttatgggcaagtttacaaacattgttttttaaaaaattaaa

SEQ ID NO: 341674 - DNA, 120 bp, Artificial Sequence
  ENSG00000137968_41 (sequence is synthesized)
acctgcaatgtttcgtgattaaaacaagtcttattgcatttgtttcactcttagctcactgattggaaaacatttgtcattttgctctgtttgatatcctcactattatggaatacattg

SEQ ID NO: 341675 - DNA, 120 bp, Artificial Sequence
  ENSG00000137968_42 (sequence is synthesized)
tgcagctaaacaatttcccttgcgcctagtggacattcatgaatgtgtactacacgcaagaagaaacaaaccccgaaagaacacttgttggatttctttgtttttttttttactaaaaga

SEQ ID NO: 341676 - DNA, 120 bp, Artificial Sequence
  ENSG00000137968_43 (sequence is synthesized)
gaagttttaaaatgaaatgttttctatagtagatctttgaaaatacaataggtataatactgcatttctcagtgttttacaaagatcagaaagagaaacttctaggaattgcaaagggaa

SEQ ID NO: 341677 - DNA, 120 bp, Artificial Sequence
  ENSG00000137968_44 (sequence is synthesized)
actttactcctcgaaagggtgctcacagatgtcatgtactgaatagctcccttttaaatgatcatttattttcatcaaagcctgttctatatatgccacttcattttctaacttttggta

SEQ ID NO: 341678 - DNA, 120 bp, Artificial Sequence
  ENSG00000137968_45 (sequence is synthesized)
tgaaaaaatcagtttacttacagtatgttaattgtattgtactactataaacaggaacataatttccaattcagttttaaataattttaccagtactactaacttttaaggaaattaatt

SEQ ID NO: 341679 - DNA, 120 bp, Artificial Sequence
  ENSG00000137968_46 (sequence is synthesized)
cagttggttactcagtgtttgttacagaaagagtccagaaaagtattcaccctaagagaatgtcaatcatataatgataatttgtgaaagctttgagaatcaatcatcagtaagttacta

SEQ ID NO: 341680 - DNA, 120 bp, Artificial Sequence
  ENSG00000137968_47 (sequence is synthesized)
tcagtttataaaatattatcacatttgtttaaatgtgactttagatacttttatgccaaaaataaactcacatgagcacatgacagtctgagctctataatcagtgtgcttctgctgtgc

SEQ ID NO: 341681 - DNA, 120 bp, Artificial Sequence
  ENSG00000137968_48 (sequence is synthesized)
cttctgctgtgcagaaatgttagaaacgtattgtctaaatatctttgataattaaaatgtttaatatttaatgaaatttgttgttacttgttttaaatcttttttcttttaataaagatt

SEQ ID NO: 341682 - DNA, 120 bp, Artificial Sequence
  ENSG00000137968_49 (sequence is synthesized)
ctttggtgatccaaggacatatgacccagatttcaaggggcctgttgccaacagactaaactgggaactccgtgagagaaagcatctcatctgtgtggttcaccaacgtttcatagcatc

SEQ ID NO: 341683 - DNA, 120 bp, Artificial Sequence
  ENSG00000137975_0 (sequence is synthesized)
atctgcatccatattgaaaacctgacacaatgtatgcagcaggctcagtgtgagtgaactggaggcttctctacaacatgacccaaaggagcattgcaggtcctatttgcaacctgaagt

SEQ ID NO: 341684 - DNA, 120 bp, Artificial Sequence
  ENSG00000137975_1 (sequence is synthesized)
ttgtgactctcctggttgccttaagttcagaactcccattcctgggagctggagtacagcttcaagacaatgggtataatggattgctcattgcaattaatcctcaggtacctgagaatc

SEQ ID NO: 341685 - DNA, 120 bp, Artificial Sequence
  ENSG00000137975_2 (sequence is synthesized)
agaacctcatctcaaacattaaggaaatgataactgaagcttcattttacctatttaatgctaccaagagaagagtatttttcagaaatataaagattttaatacctgccacatggaaag

SEQ ID NO: 341686 - DNA, 120 bp, Artificial Sequence
  ENSG00000137975_3 (sequence is synthesized)
ctaataataacagcaaaataaaacaagaatcatatgaaaaggcaaatgtcatagtgactgactggtatggggcacatggagatgatccatacaccctacaatacagagggtgtggaaaag

SEQ ID NO: 341687 - DNA, 120 bp, Artificial Sequence
  ENSG00000137975_4 (sequence is synthesized)
agggaaaatacattcatttcacacctaatttcctactgaatgataacttaacagctggctacggatcacgaggccgagtgtttgtccatgaatgggcccacctccgttggggtgtgttcg

SEQ ID NO: 341688 - DNA, 120 bp, Artificial Sequence
  ENSG00000137975_5 (sequence is synthesized)
atgagtataacaatgacaaacctttctacataaatgggcaaaatcaaattaaagtgacaaggtgttcatctgacatcacaggcatttttgtgtgtgaaaaaggtccttgcccccaagaaa

SEQ ID NO: 341689 - DNA, 120 bp, Artificial Sequence
  ENSG00000137975_6 (sequence is synthesized)
actgtattattagtaagctttttaaagaaggatgcacctttatctacaatagcacccaaaatgcaactgcatcaataatgttcatgcaaagtttatcttctgtggttgaattttgtaatg

SEQ ID NO: 341690 - DNA, 120 bp, Artificial Sequence
  ENSG00000137975_7 (sequence is synthesized)
caagtacccacaaccaagaagcaccaaacctacagaaccagatgtgcagcctcagaagtgcatgggatgtaatcacagactctgctgactttcaccacagctttcccatgaatgggactg

SEQ ID NO: 341691 - DNA, 120 bp, Artificial Sequence
  ENSG00000137975_8 (sequence is synthesized)
agcttccacctcctcccacattctcgcttgtacaggctggtgacaaagtggtctgtttagtgctggatgtgtccagcaagatggcagaggctgacagactccttcaactacaacaagccg

SEQ ID NO: 341692 - DNA, 120 bp, Artificial Sequence
  ENSG00000137975_9 (sequence is synthesized)
cagaattttatttgatgcagattgttgaaattcataccttcgtgggcattgccagtttcgacagcaaaggagagatcagagcccagctacaccaaattaacagcaatgatgatcgaaagt

SEQ ID NO: 341693 - DNA, 120 bp, Artificial Sequence
  ENSG00000137975_10 (sequence is synthesized)
tgctggtttcatatctgcccaccactgtatcagctaaaacagacatcagcatttgttcagggcttaagaaaggatttgaggtggttgaaaaactgaatggaaaagcttatggctctgtga

SEQ ID NO: 341694 - DNA, 120 bp, Artificial Sequence
  ENSG00000137975_11 (sequence is synthesized)
tgatattagtgaccagcggagatgataagcttcttggcaattgcttacccactgtgctcagcagtggttcaacaattcactccattgccctgggttcatctgcagccccaaatctggagg

SEQ ID NO: 341695 - DNA, 120 bp, Artificial Sequence
  ENSG00000137975_12 (sequence is synthesized)
aattatcacgtcttacaggaggtttaaagttctttgttccagatatatcaaactccaatagcatgattgatgctttcagtagaatttcctctggaactggagacattttccagcaacata

SEQ ID NO: 341696 - DNA, 120 bp, Artificial Sequence
  ENSG00000137975_13 (sequence is synthesized)
ttcagcttgaaagtacaggtgaaaatgtcaaacctcaccatcaattgaaaaacacagtgactgtggataatactgtgggcaacgacactatgtttctagttacgtggcaggccagtggtc

SEQ ID NO: 341697 - DNA, 120 bp, Artificial Sequence
  ENSG00000137975_14 (sequence is synthesized)
ctcctgagattatattatttgatcctgatggacgaaaatactacacaaataattttatcaccaatctaacttttcggacagctagtctttggattccaggaacagctaagcctgggcact

SEQ ID NO: 341698 - DNA, 120 bp, Artificial Sequence
  ENSG00000137975_15 (sequence is synthesized)
ggacttacaccctgaacaatacccatcattctctgcaagccctgaaagtgacagtgacctctcgcgcctccaactcagctgtgcccccagccactgtggaagcctttgtggaaagagaca

SEQ ID NO: 341699 - DNA, 120 bp, Artificial Sequence
  ENSG00000137975_16 (sequence is synthesized)
gagactggagatcctgttacgctgagactccttgatgatggagcaggtgctgatgttataaaaaatgatggaatttactcgaggtattttttctcctttgctgcaaatggtagatatagc

SEQ ID NO: 341700 - DNA, 120 bp, Artificial Sequence
  ENSG00000137975_17 (sequence is synthesized)
ttgaaagtgcatgtcaatcactctcccagcataagcaccccagcccactctattccagggagtcatgctatgtatgtaccaggttacacagcaaacggtaatattcagatgaatgctcca

SEQ ID NO: 341701 - DNA, 120 bp, Artificial Sequence
  ENSG00000137975_18 (sequence is synthesized)
aggaaatcagtaggcagaaatgaggaggagcgaaagtggggctttagccgagtcagctcaggaggctccttttcagtgctgggagttccagctggcccccaccctgatgtgtttccacca

SEQ ID NO: 341702 - DNA, 120 bp, Artificial Sequence
  ENSG00000137975_19 (sequence is synthesized)
tgcaaaattattgacctggaagctgtaaaagtagaagaggaattgaccctatcttggacagcacctggagaagactttgatcagggccaggctacaagctatgaaataagaatgagtaaa

SEQ ID NO: 341703 - DNA, 120 bp, Artificial Sequence
  ENSG00000137975_20 (sequence is synthesized)
agtctacagaatatccaagatgactttaacaatgctattttagtaaatacatcaaagcgaaatcctcagcaagctggcatcagggagatatttacgttctcaccccaaatttccacgaat

SEQ ID NO: 341704 - DNA, 120 bp, Artificial Sequence
  ENSG00000137975_21 (sequence is synthesized)
ggacctgaacatcagccaaatggagaaacacatgaaagccacagaatttatgttgcaatacgagcaatggataggaactccttacagtctgctgtatctaacattgcccaggcgcctctg

SEQ ID NO: 341705 - DNA, 120 bp, Artificial Sequence
  ENSG00000137975_22 (sequence is synthesized)
tttattccccccaattctgatcctgtacctgccagagattatcttatattgaaaggagttttaacagcaatgggtttgataggaatcatttgccttattatagttgtgacacatcatact

SEQ ID NO: 341706 - DNA, 120 bp, Artificial Sequence
  ENSG00000137975_23 (sequence is synthesized)
ttaagcaggaaaaagagagcagacaagaaagagaatggaacaaaattattataaataaatatccaaagtgtcttccttcttagatataagacccatggccttcgactacaaaaacatact

SEQ ID NO: 341707 - DNA, 120 bp, Artificial Sequence
  ENSG00000137975_24 (sequence is synthesized)
aacaaagtcaaattaacatcaaaactgtattaaaatgcattgagtttttgtacaatacagataagatttttacatggtagatcaacaaattctttttgggggtagattagaaaaccctta

SEQ ID NO: 341708 - DNA, 120 bp, Artificial Sequence
  ENSG00000137975_25 (sequence is synthesized)
cactttggctatgaacaaataataaaaattattctttaaagtaatgtctttaaaggcaaagggaagggtaaagtcggaccagtgtcaaggaaagtttgttttattgaggtggaaaaatag

SEQ ID NO: 341709 - DNA, 120 bp, Artificial Sequence
  ENSG00000137975_26 (sequence is synthesized)
ccccaagcagagaaaaggagggtaggtctgcattataactgtctgtgtgaagcaatcatttagttactttgattaatttttcttttctccttatctgtgcagaacaggttgcttgtttac

SEQ ID NO: 341710 - DNA, 120 bp, Artificial Sequence
  ENSG00000137975_27 (sequence is synthesized)
aactgaagatcatgctatattttatatatgaagcccctaatgcaaagctctttacctcttgctattttgttatatatattacagatgaaatctcactgctaatgctcagagatctttttt

SEQ ID NO: 341711 - DNA, 120 bp, Artificial Sequence
  ENSG00000137975_28 (sequence is synthesized)
cactgtaagaggtaacctttaacaatatgggtattacctttgtctcttcataccggttttatgacaaaggtctattgaatttatttgtttgtaagtttctactcccatcaaagcagcttt

SEQ ID NO: 341712 - DNA, 120 bp, Artificial Sequence
  ENSG00000137975_29 (sequence is synthesized)
ctaagttattgccttggttattatggatgatagttatagcccttataatgccttaactaaggaagaaaagatgttattctgagtttgttttaatacatatatgaacatatagttttattc

SEQ ID NO: 341713 - DNA, 120 bp, Artificial Sequence
  ENSG00000137975_30 (sequence is synthesized)
aattaaaccaaagaagaggtcagcagggagatactaacctttggaaatgattagctggctctgttttttggttaaataagagtctttaatcctttctccatcaagagttacttaccaagg

SEQ ID NO: 341714 - DNA, 120 bp, Artificial Sequence
  ENSG00000137975_31 (sequence is synthesized)
gcaggggaagggggatatagaggtcacaaggaaataaaaatcatctttcatctttaattttactccttcctcttatttttttaaaagattatcgaacaataaaatcatttgcctttttaa

SEQ ID NO: 341715 - DNA, 120 bp, Artificial Sequence
  ENSG00000137975_32 (sequence is synthesized)
ttattccagatgggaggctgaatctctcagttgtagattttgacacattggcactatttttgtttctgatttattgccttggccataaggtcaaaggcaacaataaagtgtactttcatt

SEQ ID NO: 341716 - DNA, 120 bp, Artificial Sequence
  ENSG00000137975_33 (sequence is synthesized)
agtaatcagattggactgttaaaatagcaaatgaaaatcagaagggaggtgcagtgacagcgaacccactttttccctttggaccccagttatgaagaaaaaattggaaactgaacttgt

SEQ ID NO: 341717 - DNA, 120 bp, Artificial Sequence
  ENSG00000137975_34 (sequence is synthesized)
gacctataagatgaccctagacccaagaggctgggttgaagagagggcacagctcagttctagcacagccaatgccttttacgtgtgtaatttggtcccaagaagacccagcctgcaagc

SEQ ID NO: 341718 - DNA, 120 bp, Artificial Sequence
  ENSG00000137975_35 (sequence is synthesized)
ctagtggaatcagaatagagaaaagttctcattctgcacatacagcattcagagcctcgtcatcatacattatagatggtatagcatccagccaggtgctgatgttataaaaaatgatgg

SEQ ID NO: 341719 - DNA, 120 bp, Artificial Sequence
  ENSG00000137976_0 (sequence is synthesized)
atggggaaagtgtcctgctgtggcatgaaataaatgaaacagaaaatgatggcaagactgctaagaacatcctttgctttgctcttccttggcctctttggggtgctgggggcagcaaca

SEQ ID NO: 341720 - DNA, 120 bp, Artificial Sequence
  ENSG00000137976_1 (sequence is synthesized)
atttcatgcagaaatgaagaagggaaagctgtggactggtttactttttataagttacctaaaagacaaaacaaggaaagtggagagactgggttagagtacctgtacctagactctaca

SEQ ID NO: 341721 - DNA, 120 bp, Artificial Sequence
  ENSG00000137976_2 (sequence is synthesized)
actagaagctggaggaagagtgagcaactaatgaatgacaccaagagtgttttgggaaggacattacaacagctatatgaagcatatgcctctaagagtaacaacacagcctatctaata

SEQ ID NO: 341722 - DNA, 120 bp, Artificial Sequence
  ENSG00000137976_3 (sequence is synthesized)
tacaatgatggagtccctaaacctgtgaattacagcagaaagtatggacacaccaaaggtttactgctgtggaacagagttcaagggttctggctgattcattccatccctcagtttcct

SEQ ID NO: 341723 - DNA, 120 bp, Artificial Sequence
  ENSG00000137976_4 (sequence is synthesized)
ccaattccggaagaaggctatgattatccacccacagggagacgaaatggacaaagtggcatctgcataactttcaagtacaaccagtatgaggcaatagattctcagctcttggtctgc

SEQ ID NO: 341724 - DNA, 120 bp, Artificial Sequence
  ENSG00000137976_5 (sequence is synthesized)
tgcaccagggccagctcatcagagattcctggcaggctcctcaccacacttcagtcggcccagggacaaaaattcctccattttgcaaagtcggattcttttcttgacgacatctttgca

SEQ ID NO: 341725 - DNA, 120 bp, Artificial Sequence
  ENSG00000137976_6 (sequence is synthesized)
gcctggatggctcaacggctgaagacacacttgttaacagaaacctggcagcgaaaaagacaagagcttccttcaaactgctcccttccttaccatgtctacaatataaaagcaattaaa

SEQ ID NO: 341726 - DNA, 120 bp, Artificial Sequence
  ENSG00000137976_7 (sequence is synthesized)
ttatcacgacactcttatttcagttcttatcaagatcatgccaagtggtgtatttcccaaaagggcaccaaaaatcgctggacatgtattggagacctaaatcggagtccacaccaagcc

SEQ ID NO: 341727 - DNA, 120 bp, Artificial Sequence
  ENSG00000137976_8 (sequence is synthesized)
ttcagaagtggaggattcatttgtacccagaattggcaaatttaccaagcatttcaaggattagtattatactatgaaagctgtaagtaaacttggtgaaaggacacaggtactatcatt

SEQ ID NO: 341728 - DNA, 120 bp, Artificial Sequence
  ENSG00000137976_9 (sequence is synthesized)
gaaaaccttgacaatgggtcttcttccattacaccttctttatattttaaaggcctgtgaatatacttataacctgcatatcacaaaataaaacatttttctctcatgtttaccatttaa

SEQ ID NO: 341729 - DNA, 120 bp, Artificial Sequence
  ENSG00000137976_10 (sequence is synthesized)
catgcacagttaaaaatggactttctttcccctgtctttcatgtcacaggcttcatattgatggggaagctgcctattaggggaatagatgacttctcatgtgtattaatgaaagcaatg

SEQ ID NO: 341730 - DNA, 120 bp, Artificial Sequence
  ENSG00000137992_0 (sequence is synthesized)
atttccggggtaagatggctgcagtccgtatgctgagaacctggagcaggaatgcggggaagctgatttgtgttcgctattttcaaacatgtggtaatgttcatgttttgaagccaaatt

SEQ ID NO: 341731 - DNA, 120 bp, Artificial Sequence
  ENSG00000137992_1 (sequence is synthesized)
atgtgtgtttctttggttatccttcattcaagtatagtcatccacatcacttcctgaaaacaactgctgctctccgtggacaggttgttcagttcaagctctcagacattggagaaggga

SEQ ID NO: 341732 - DNA, 120 bp, Artificial Sequence
  ENSG00000137992_2 (sequence is synthesized)
ttagagaagtaactgttaaagaatggtatgtaaaagaaggagatacagtgtctcagtttgatagcatctgtgaagttcaaagtgataaagcttctgttaccatcactagtcgttatgatg

SEQ ID NO: 341733 - DNA, 120 bp, Artificial Sequence
  ENSG00000137992_3 (sequence is synthesized)
gagtcattaaaaaactctattataatctagacgatattgcctatgtggggaagccattagtagacatagaaacggaagctttaaaagattcagaagaagatgttgttgaaactcctgcag

SEQ ID NO: 341734 - DNA, 120 bp, Artificial Sequence
  ENSG00000137992_4 (sequence is synthesized)
tgtctcatgatgaacatacacaccaagagataaagggccgaaaaacactggcaactcctgcagttcgccgtctggcaatggaaaacaatattaagctgagtgaagttgttggctcaggaa

SEQ ID NO: 341735 - DNA, 120 bp, Artificial Sequence
  ENSG00000137992_5 (sequence is synthesized)
aagatggcagaatacttaaagaagatatcctcaactatttggaaaagcagacaggagctatattgcctccttcacccaaagttgaaattatgccacctccaccaaagccaaaagacatga

SEQ ID NO: 341736 - DNA, 120 bp, Artificial Sequence
  ENSG00000137992_6 (sequence is synthesized)
ctgttcctatactagtatcaaaacctccggtattcacaggcaaagacaaaacagaacccataaaaggctttcaaaaagcaatggtcaagactatgtctgcagccctgaagatacctcatt

SEQ ID NO: 341737 - DNA, 120 bp, Artificial Sequence
  ENSG00000137992_7 (sequence is synthesized)
ttggttattgtgatgagattgaccttactgaactggttaagctccgagaagaattaaaacccattgcatttgctcgtggaattaaactctcctttatgcctttcttcttaaaggctgctt

SEQ ID NO: 341738 - DNA, 120 bp, Artificial Sequence
  ENSG00000137992_8 (sequence is synthesized)
ccttgggattactacagtttcctatccttaacgcttctgtggatgaaaactgccagaatataacatataaggcttctcataacattgggatagcaatggatactgagcagggtttgattg

SEQ ID NO: 341739 - DNA, 120 bp, Artificial Sequence
  ENSG00000137992_9 (sequence is synthesized)
tccctaatgtgaaaaatgttcagatctgctctatatttgacatcgccactgaactgaaccgcctccagaaattgggctctgtgagtcagctcagcaccactgatcttacaggaggaacat

SEQ ID NO: 341740 - DNA, 120 bp, Artificial Sequence
  ENSG00000137992_10 (sequence is synthesized)
ttactctttccaacattggatcaattggtggtacctttgccaaaccagtgataatgccacctgaagtagccattggggcccttggatcaattaaggccattccccgatttaaccagaaag

SEQ ID NO: 341741 - DNA, 120 bp, Artificial Sequence
  ENSG00000137992_11 (sequence is synthesized)
gagaagtatataaggcacagataatgaatgtgagctggtcagctgatcacagagttattgatggtgctacaatgtcacgcttctccaatttgtggaaatcctatttagaaaacccagctt

SEQ ID NO: 341742 - DNA, 120 bp, Artificial Sequence
  ENSG00000137992_12 (sequence is synthesized)
ttatgctactagatctgaaatgaagactgataagacattcttgaactttttgagcttccaaagagtatgtaaaccctagctgtgccagcacatgttcatctttacaatttatattgtaaa

SEQ ID NO: 341743 - DNA, 120 bp, Artificial Sequence
  ENSG00000137992_13 (sequence is synthesized)
tgatttgtatcgtatgattaaggatctaaggcacaatatttgtcactgttctattagactttttactgaaaatgaataatggtgtaatggttctcctggggctgtcacattttataggtc

SEQ ID NO: 341744 - DNA, 120 bp, Artificial Sequence
  ENSG00000137992_14 (sequence is synthesized)
ctcctggggctgtcacattttataggtcagagtgtgacttcttaatatggtgctgatgtttttgtgtcaatggcttgaaactggcaagattaacaaaattaggccgggcatggtggctca

SEQ ID NO: 341745 - DNA, 120 bp, Artificial Sequence
  ENSG00000137992_15 (sequence is synthesized)
caaaaaaacaaaattcatgttactaaaagacaggtagccatatacagacagtatatgccctattttttttaactgactcttaatgaaactttaattttacttaattaagaaatggaattt

SEQ ID NO: 341746 - DNA, 120 bp, Artificial Sequence
  ENSG00000137992_16 (sequence is synthesized)
atatacaaaaatattttccatttccgttattatgctaattgttgtatgaaataagtgcaattatacttctcttttgagatatccaagagtatattcttgctctgtatagagaatatcatc

SEQ ID NO: 341747 - DNA, 120 bp, Artificial Sequence
  ENSG00000137992_17 (sequence is synthesized)
tgatagtgtcttatttatattaattaatgtctttgaaaagggaaaagtataaactggccttaaaattgtccaattatagttttataaccagtctattaaaggtgtttgtttaaaatggat

SEQ ID NO: 341748 - DNA, 120 bp, Artificial Sequence
  ENSG00000137992_18 (sequence is synthesized)
atagttttagatttgtggtaatgctttggtattttcttggggaagaccttcacctttgcaaacttccctcatgtaaggaaggtactttaaatgtagcagccactgacatttcttttttta

SEQ ID NO: 341749 - DNA, 120 bp, Artificial Sequence
  ENSG00000137992_19 (sequence is synthesized)
aaaaaaatttgagaagtctacttccttttaacttttttggtcttcagctaaaaaataggataagaaattaaggtctattccattctccatatcctgggtaagaatgtaaataagaggaga

SEQ ID NO: 341750 - DNA, 120 bp, Artificial Sequence
  ENSG00000137992_20 (sequence is synthesized)
aggaagagtctaatagtaattatggatataaaaaataagaaattttgtatagaaatgaaggtttcataatgatcattttgttaaaggtctactttaatcagaaatagcaacgagatgaat

SEQ ID NO: 341751 - DNA, 120 bp, Artificial Sequence
  ENSG00000137992_21 (sequence is synthesized)
gtatccaacatttcaatttgcattcggaaatccatgttgtttctaatattgtccagttgaaaactgtatgccaaaattagttgtttaagtgaagttttgtgacagaaaaaaggttgtttt

SEQ ID NO: 341752 - DNA, 120 bp, Artificial Sequence
  ENSG00000137992_22 (sequence is synthesized)
aatatctacttggtttttctcaaaatggaaataattttaaaatcaggaaagaataaatcagccaggtgtgatgacttgtaactgtaatcccagttataggggaggctgaagcaggaggat

SEQ ID NO: 341753 - DNA, 64 bp, Artificial Sequence
  ENSG00000137992_23 (sequence is synthesized)
tgagcccaagaggtgcactttgtctcagaaaaaaaaaaaaaaaccaaaaagccaagtgtggtgg

SEQ ID NO: 341754 - DNA, 89 bp, Artificial Sequence
  ENSG00000137992_24 (sequence is synthesized)
tgtgcacaagaggatcaattgagcccaggagttcaaagctgtagtgagctgtcattgtgccactatcctccagtatgggtgacagagtg

SEQ ID NO: 341755 - DNA, 120 bp, Artificial Sequence
  ENSG00000137992_25 (sequence is synthesized)
tgtcattgtgccactatcctccagtatgggtgacagagtgagacctggtctctaaaaaataaaataaaataaaaaaaacaggtcaaataaatgctgttgttgtaaaatttcagataatac

SEQ ID NO: 341756 - DNA, 120 bp, Artificial Sequence
  ENSG00000137992_26 (sequence is synthesized)
aaagagttaaccaataaaagaaaaagtcattcataatcttaccactattaacattttgatgtatctatctgtatgtatggctattcttttttgttaaaacatgatcatagcatatctact

SEQ ID NO: 341757 - DNA, 120 bp, Artificial Sequence
  ENSG00000137992_27 (sequence is synthesized)
attttattatttgatttttaaaatttaacattatattatgggtaaccttacatgtcaataaacaattccacattgtcatgctttaaatggctgcataggctgggtgtggtggctcacgcc

SEQ ID NO: 341758 - DNA, 67 bp, Artificial Sequence
  ENSG00000137992_28 (sequence is synthesized)
ttgaaaatacaaaaatcagccaggcacggtggcaggcgcctgtagtccacctactcgggaggctgag

SEQ ID NO: 341759 - DNA, 76 bp, Artificial Sequence
  ENSG00000137992_29 (sequence is synthesized)
aacctcatctctattgaaaatacaaaaatcagccaggcacggtggcaggcgcctgtagtcggcagaggttgcagtg

SEQ ID NO: 341760 - DNA, 120 bp, Artificial Sequence
  ENSG00000137992_30 (sequence is synthesized)
tctaaataaataaataaataaataaatgtctgcatagtattccattgtatgcatttattatacattcaaacattaaacatctaccataccaatcatggttctaagcatacagtagccacc

SEQ ID NO: 341761 - DNA, 120 bp, Artificial Sequence
  ENSG00000137992_31 (sequence is synthesized)
acagtagccaccttcatgcttccttgattgggcttacagtctagtaaggagacagatattaaataactgcataaaacactgttcttggtaggtaataacccagatgctatgagccatcca

SEQ ID NO: 341762 - DNA, 120 bp, Artificial Sequence
  ENSG00000137992_32 (sequence is synthesized)
gtaaaggttaccgatcttatctggaaggatcagaagatggatgtcccataatttaaccaattatctattgataggcatttattgagttttaaatgaataatgacatgatcaataaaaatg

SEQ ID NO: 341763 - DNA, 120 bp, Artificial Sequence
  ENSG00000137992_33 (sequence is synthesized)
tcctcctcacttaaagaatagaaaaaccaggagaagggagttctgaaataagtaagtatgtaggtccagcatcaatggctcaagatactctattcccaaataacccttaagttatctggt

SEQ ID NO: 341764 - DNA, 120 bp, Artificial Sequence
  ENSG00000137992_34 (sequence is synthesized)
tctattccaacccttgggtattactatcttctctttggtctcatgcattgagaattcagcaaaggatttgttccctacagtgtgcacggcccttaggatagcaggattccctgaagaggg

SEQ ID NO: 341765 - DNA, 120 bp, Artificial Sequence
  ENSG00000137992_35 (sequence is synthesized)
ccaaaggggcaggagcgcagccttagtggcagtgctggtccatgaggctctacaaagcaagggatgggtgtttgggaggaggaaaaggctcttgctgtactcctagaggttggaattaaa

SEQ ID NO: 341766 - DNA, 120 bp, Artificial Sequence
  ENSG00000137992_36 (sequence is synthesized)
gtggaaaagccagaaaattcaagtcctttactaacatgtctggagattagaaggtatatgtacatgggggagaagccaaaattattgctgcgagtggtcagcaagaaaatcaaggctctt

SEQ ID NO: 341767 - DNA, 120 bp, Artificial Sequence
  ENSG00000137992_37 (sequence is synthesized)
ttcattattttgagcattcctctgatatttgaaaaggaagtacaacaggaaaggaagtctgaggatggaagctaaaattggtatgaatttatattttagagatcaaaatgtaccttatgt

SEQ ID NO: 341768 - DNA, 120 bp, Artificial Sequence
  ENSG00000137992_38 (sequence is synthesized)
tgaaacctatgtaagaagtgattatgtagaaagagtgaaagtgatagctcttagtctggaaagcccactggcttgtttgggcatttctcatggcttcccactcaaagtggatccccaaaa

SEQ ID NO: 341769 - DNA, 120 bp, Artificial Sequence
  ENSG00000137992_39 (sequence is synthesized)
tcacttgatggatttccttgctgatttctaagtaaactatggtttaagaaagaaatgacagggctcagcactgccctacagtaccaagaatacaaatgtttccatgaagtcttcaaaggc

SEQ ID NO: 341770 - DNA, 120 bp, Artificial Sequence
  ENSG00000137992_40 (sequence is synthesized)
agtttttgccctcacagcaaaagctttagccaataattaaagctatcactggaagtgggtctgtgccaataacctagagaagagcagtgcttttagagttgagctatattcccaatcagt

SEQ ID NO: 341771 - DNA, 120 bp, Artificial Sequence
  ENSG00000137992_41 (sequence is synthesized)
tcttaatggtggttttacccccttccctctacactgtcttttcttgagattggatcatgtgtgtgaacccacatcatttccagtcaaaatcaccaagagaggccggacacagtggctcat

SEQ ID NO: 341772 - DNA, 120 bp, Artificial Sequence
  ENSG00000137992_42 (sequence is synthesized)
ataatcccagcactttgggaggcctaaatgggtgggcctcttgagtccagagtttgagaccagcctgggcgaccccagctctaccaaaaaaaccaaaaaacaaaaaataccaaaaaaaaa

SEQ ID NO: 341773 - DNA, 120 bp, Artificial Sequence
  ENSG00000137992_43 (sequence is synthesized)
aaaaaaaaattaggccgatgaagtgacatgcacctgtgtgccacctactcaggaggctgaggtggcaggatcacttgcatctgggggcaaaggctgccgtgagctgagattgtgccattg

SEQ ID NO: 341774 - DNA, 120 bp, Artificial Sequence
  ENSG00000137992_44 (sequence is synthesized)
caggagaccttttgtctttcttggttcatgtgcccatcagtgtgggcaggagaatagaatactctgtccacacttgagtcttagtcacctttggagcctaggagtcagccatcctcattc

SEQ ID NO: 341775 - DNA, 120 bp, Artificial Sequence
  ENSG00000137992_45 (sequence is synthesized)
aactacatggatcgagaatgggaatctgggagaatttttttatgggcagattaaaaaggaagttaactatgtaaagtaaggcattgccttcccaccccatcccacctcagttcgtgttaa

SEQ ID NO: 341776 - DNA, 120 bp, Artificial Sequence
  ENSG00000137992_46 (sequence is synthesized)
attatgaatttttctaagagagttctttaatgacatggatagagaggaagctgaggtggcagtagagtagggagtggaaggcaaatacataagatactattaaactgtgaagctgtttgt

SEQ ID NO: 341777 - DNA, 120 bp, Artificial Sequence
  ENSG00000137992_47 (sequence is synthesized)
tacaattccaagattttataatttctccaacaaaaaacatttgtattttcttcccagtttaagttcaatgttaatttgagaaataattctactctcaaacttcatgttatgctgacagtt

SEQ ID NO: 341778 - DNA, 120 bp, Artificial Sequence
  ENSG00000137992_48 (sequence is synthesized)
caactgatgctgtcaaaatgtgaattactaacttcagtattctctattcatctgatttttcttaaaatgtttgcgtgttaatatactcactagctttaatgctctactcttatactggca

SEQ ID NO: 341779 - DNA, 120 bp, Artificial Sequence
  ENSG00000137992_49 (sequence is synthesized)
ccttaattatggtaaaaggtaaaaggttaagttaaaattcccaatcctagttatttggtcaaacagaagattaacagaactccatggcttaccacaggaatatttatcaagagaaaaaga

SEQ ID NO: 341780 - DNA, 120 bp, Artificial Sequence
  ENSG00000137992_50 (sequence is synthesized)
agatacctatttgaatttacatgacactttctgtgaaatatctggattaccagattagtctgaaacaaatgccttccaaattctacagcgcatgcccaaggcactctttacagtacctgt

SEQ ID NO: 341781 - DNA, 120 bp, Artificial Sequence
  ENSG00000137992_51 (sequence is synthesized)
tcgggtcttttcttctaattttaagcacctacccaaacgtcttcccaggcttgtcataataagcaaataacctcagagcagacaaagtgattcaatctaagaaccttgaatttctctcct

SEQ ID NO: 341782 - DNA, 120 bp, Artificial Sequence
  ENSG00000137992_52 (sequence is synthesized)
tttcacctcaaaatttctattctcacactttctttttgtttctctttccgagaagtggttctccatcagcaaataccaactgttttctgtcctctattatttattccatctcttcctcct

SEQ ID NO: 341783 - DNA, 120 bp, Artificial Sequence
  ENSG00000137992_53 (sequence is synthesized)
gatccctgccccatgttgaacccccattgccccactttgatccttcagtctcttcctcacatccagaactgtaccagatttactcccttagcacactgattaaaatttatttccatttcc

SEQ ID NO: 341784 - DNA, 120 bp, Artificial Sequence
  ENSG00000137992_54 (sequence is synthesized)
ttatggaggaggtattagagactgatcccagacctctacaaatttcattgtggcagggtaatgttatgtgtccataaaccttgttccttttctttcagcctgcagttaggtagagccatg

SEQ ID NO: 341785 - DNA, 120 bp, Artificial Sequence
  ENSG00000137992_55 (sequence is synthesized)
tcatttatttgtaactattagaatatgggtatatgggttgaagtaatgtaggccatttccagacatggcccataacacttctcaagagattcttcatattctatctcttcccctccaaca

SEQ ID NO: 341786 - DNA, 120 bp, Artificial Sequence
  ENSG00000137992_56 (sequence is synthesized)
tgcacccttcaaggttgaagatggcaccacacaagatagaaggagccagtgttccaaatgactaggcagagcagaatgctcccctccctacaccctagcaccaattggtttggatgtgat

SEQ ID NO: 341787 - DNA, 120 bp, Artificial Sequence
  ENSG00000137992_57 (sequence is synthesized)
agttgaataatacacttttattgttttaagacattaatattttgagattaatctgcaagtctagttagtaaaactcgaactctgagctgtctaatgcagtagcctctagccacatgtagc

SEQ ID NO: 341788 - DNA, 120 bp, Artificial Sequence
  ENSG00000137992_58 (sequence is synthesized)
tatttaaatttaaattttaattttaattaatcaaaattcaactcagatatactagccacatttcaattgctcagtagccacactaattaaatttaaatttaaatagctacatgtggctta

SEQ ID NO: 341789 - DNA, 120 bp, Artificial Sequence
  ENSG00000137992_59 (sequence is synthesized)
tagcaccataccagatagcacagatgtagactgtttccatcatcacagaaaattctattggatagtgctgccttaactaataagacacaaatgttcttattttttaaatagtccctaaaa

SEQ ID NO: 341790 - DNA, 120 bp, Artificial Sequence
  ENSG00000137992_60 (sequence is synthesized)
caaacgaaaaacaaagaactcccttctctaatggcaaatttcagtttgcctaaaagaagactcagaatgcttttcttatattgttacctctgactgccactaaatgaataaatttcctgt

SEQ ID NO: 341791 - DNA, 120 bp, Artificial Sequence
  ENSG00000137992_61 (sequence is synthesized)
cttgctccttctgccaaacttcttgaatgggtgatctttaactccttgcaatcctggcttttttccccagtgctcacctgtaatcagtgttggccacaactcccacccagatgtctccta

SEQ ID NO: 341792 - DNA, 120 bp, Artificial Sequence
  ENSG00000137992_62 (sequence is synthesized)
aatagttctctgaacccacctctgtcctgatctacagacattcattccaatgctttagcatttcaaggtcatcaaatgactcagtgacatctcagacagtcagacagaccaggtcaacta

SEQ ID NO: 341793 - DNA, 120 bp, Artificial Sequence
  ENSG00000137992_63 (sequence is synthesized)
actatgaactatttatgccaaaccttacatggttcatgttatccttgctatcccatcaaaataaccacaggctttttttttttttttttttaatttttgagatggagtctcactctgtca

SEQ ID NO: 341794 - DNA, 88 bp, Artificial Sequence
  ENSG00000137992_64 (sequence is synthesized)
ttgagatggagtctcactctgtcaccccgactagagtgcagtggtgcgatctcggctcacagtgctcattcctcaactcccaagtagc

SEQ ID NO: 341795 - DNA, 62 bp, Artificial Sequence
  ENSG00000137992_65 (sequence is synthesized)
acaaagctttgggattacaggcatgagccacggtgcctggcctgcagcctcctttattttac

SEQ ID NO: 341796 - DNA, 120 bp, Artificial Sequence
  ENSG00000137992_66 (sequence is synthesized)
atgagccacggtgcctggcctgcagcctcctttattttacaaaaggcattaccacttaaacactgaagatagcacgaatctctgatgtttgcaagttcagaataaaatggaaatgaaaat

SEQ ID NO: 341797 - DNA, 120 bp, Artificial Sequence
  ENSG00000137992_67 (sequence is synthesized)
tcattatgtggcagtctcagtactgagcacaaaggcttttaaccacaagcaaattactgtgctagccagaccgtgtgagagaactccaggccagcttgctaaaactgagcaggagaattt

SEQ ID NO: 341798 - DNA, 120 bp, Artificial Sequence
  ENSG00000137992_68 (sequence is synthesized)
ggagagagtccagaggagagccacagaaacaactgaagcatgacaagaataattgcagttctgttatagagaggtcatctatatcaggcttttatggagtaccatgtggaatgttaccac

SEQ ID NO: 341799 - DNA, 120 bp, Artificial Sequence
  ENSG00000137992_69 (sequence is synthesized)
gcagagcatggggaacagctgttgtgactcaacaagagacaggacagaagaaatgagaacaggtggaagatcaataatttaggtttgatatggggaaagatggaacagtcaaagggattc

SEQ ID NO: 341800 - DNA, 120 bp, Artificial Sequence
  ENSG00000137992_70 (sequence is synthesized)
acactgatttttggctgagcagaaggcagagtctcctccaacgggcaatgtaagtgcccccactcatctacaccccgagaagagccatcaaactgtattaaacttggaaaaagctattta

SEQ ID NO: 341801 - DNA, 120 bp, Artificial Sequence
  ENSG00000137992_71 (sequence is synthesized)
acttcaagtgtgctgcgagaaaacttcataatagttcctaagatgtgctaaaaagtaaagtccaaaaagatcataaagtctgtagagaagttctaagagtgcagtcagctataaaaacct

SEQ ID NO: 341802 - DNA, 120 bp, Artificial Sequence
  ENSG00000137992_72 (sequence is synthesized)
agcaatttaatttcttagaaaaatgtagctggagttcaaactgtagtaacaaaggcaagtaaattaagttgtgggcaggtgtaattaagttaataggaatggcagggatgaatataaatc

SEQ ID NO: 341803 - DNA, 120 bp, Artificial Sequence
  ENSG00000137992_73 (sequence is synthesized)
agaacaggactaacagtttgaaacattagatattcaaatgctcagagctgatgagccgagccactacgctaacaactctgcaaaccaaaggtttcacaaattgcacaagaacctggcctc

SEQ ID NO: 341804 - DNA, 120 bp, Artificial Sequence
  ENSG00000137992_74 (sequence is synthesized)
gatcccattgtgttgctggcataagattagaagggcctgttggttcaattgttgctttggacagaggaggacaaacttgccacagtgaagaaatcatttttaaaaaccaccactgtcctt

SEQ ID NO: 341805 - DNA, 120 bp, Artificial Sequence
  ENSG00000137992_75 (sequence is synthesized)
tagtgcactaatttctctaataactaggtgtatattagaaataatgatatataagtgcagtatactccagtttcaacagaatggtgtcacttctgtaaaatgttgattttcagattgtca

SEQ ID NO: 341806 - DNA, 120 bp, Artificial Sequence
  ENSG00000137992_76 (sequence is synthesized)
tactttctaaatacaaaaatttgtcacagcttccacatttacaagatattaaacattccataaaatatttgtagaaatatgaaaaaccaatttttgtagttgccttttgaaatgtataca

SEQ ID NO: 341807 - DNA, 120 bp, Artificial Sequence
  ENSG00000137992_77 (sequence is synthesized)
ttttgaaatgtatacaaaatatcccacatgggcaacatggtaaaacctcgtctctacaaaaaaaaaaaaaaaaatacaaaaagttagccaggcctggtggtgcacgcctgtggtcccagc

SEQ ID NO: 341808 - DNA, 65 bp, Artificial Sequence
  ENSG00000137992_78 (sequence is synthesized)
gtggtgcacgcctgtggtcccagctactcgggaagctgaagtgagatcacctgtgcccaggaggt

SEQ ID NO: 341809 - DNA, 120 bp, Artificial Sequence
  ENSG00000137992_79 (sequence is synthesized)
atatattagaaagttgggttaatatcctacaaacaaagtattacatagtttgcacaggattatgtgtgtaaaaagttttaaattcagtatagcttttatttctgcagaactaaaagtagt

SEQ ID NO: 341810 - DNA, 120 bp, Artificial Sequence
  ENSG00000137992_80 (sequence is synthesized)
gcataaaaataaaagtgggatgagcatatctttttaatttgctatgcagtaaaaagtatctcagtcaacatataggaaaccagtgccatttctgtatcatttgacaccgaaggggtattg

SEQ ID NO: 341811 - DNA, 120 bp, Artificial Sequence
  ENSG00000137992_81 (sequence is synthesized)
ttttttgttttgttttgtttttcttttgaagaaagacttttatgtcttttattctattcttccgatttggggtttaaattacccccaataagtttgcagaatattctgattactactgct

SEQ ID NO: 341812 - DNA, 120 bp, Artificial Sequence
  ENSG00000137992_82 (sequence is synthesized)
taggtgatatatttcatatgagaactatctttacacaatgggaaaaaatatggtaaccacttcattcatcagagaagttgtgttttgtttacttgtattttgtttgctaaatgaaattgg

SEQ ID NO: 341813 - DNA, 120 bp, Artificial Sequence
  ENSG00000137992_83 (sequence is synthesized)
ttatttagactcatggcatgctttttctcaaatggagatttaaaagtcatttccaatgtccttctaacttctggccaattcccagtaggctatagaataaacagttttcatataatagtc

SEQ ID NO: 341814 - DNA, 120 bp, Artificial Sequence
  ENSG00000137992_84 (sequence is synthesized)
gaaaatctccttgatgtttacaagctacctgactactttatcttttattctttaatgattagggtgacctagttccacatggcctgaaggtaacattggcagtaatgtgactaggtacat

SEQ ID NO: 341815 - DNA, 120 bp, Artificial Sequence
  ENSG00000137992_85 (sequence is synthesized)
gtagacttgaaattaaactcagcataaataagagttctctctctccctccttttatacctcttattgtttcaaattctctatcctttctaagttaaaagtactaaaattgcattcttttt

SEQ ID NO: 341816 - DNA, 120 bp, Artificial Sequence
  ENSG00000137992_86 (sequence is synthesized)
ctgttaaacaggctgcttccttgggattactacagtttcctatccttaacgcttctgtggatgaaaactgccagaatataacatataaggttggctatgcagagtaaaaatgttcttatt

SEQ ID NO: 341817 - DNA, 120 bp, Artificial Sequence
  ENSG00000137992_87 (sequence is synthesized)
attaatagaagatggggcaaatgtgcttgtagattagagacttctattgtacctcaaatagtgatcttttttagactagaattaaaggtatggggtaaaacattaaacttaagtctaatt

SEQ ID NO: 341818 - DNA, 120 bp, Artificial Sequence
  ENSG00000137996_0 (sequence is synthesized)
gctgactccagtgtcccgagaggcgccgcttcttccgctttctcgtcaggctcctgcgccccaggcatgaaccaaggtttctgaactactgggcgggagccaacgtctcttctttctccc

SEQ ID NO: 341819 - DNA, 120 bp, Artificial Sequence
  ENSG00000137996_1 (sequence is synthesized)
gctctggcggaggctttgtcgctgcgggctgggccccagggtgtcccccatggcggggccgcgggtggaggtcgatggcagcatcatggaagggggcggccagatcctgagagtctctac

SEQ ID NO: 341820 - DNA, 120 bp, Artificial Sequence
  ENSG00000137996_2 (sequence is synthesized)
ggccttgagctgtctcctaggcctccccttgcgggtgcagaagatccgagccggccggagcacgccaggcctgaggcctcaacatttatctggactggaaatgattcgagatttgtgtga

SEQ ID NO: 341821 - DNA, 120 bp, Artificial Sequence
  ENSG00000137996_3 (sequence is synthesized)
tgggcaactggagggggcagaaattggctcaacagaaataacctttacaccagagaagatcaaaggtggaatccacacagcagataccaagacagcagggagtgtgtgcctcttgatgca

SEQ ID NO: 341822 - DNA, 120 bp, Artificial Sequence
  ENSG00000137996_4 (sequence is synthesized)
ggtctcaatgccgtgtgttctctttgctgcttctccatcagaacttcatttgaaaggtggaactaatgctgaaatggcaccacagatcgattatacagtgatggtcttcaagccaattgt

SEQ ID NO: 341823 - DNA, 120 bp, Artificial Sequence
  ENSG00000137996_5 (sequence is synthesized)
tgaaaaatttggtttcatatttaattgtgacattaaaacaaggggatattacccaaaagggggtggtgaagtgattgttcgaatgtcaccagttaaacaattgaaccctataaatttaac

SEQ ID NO: 341824 - DNA, 120 bp, Artificial Sequence
  ENSG00000137996_6 (sequence is synthesized)
tgagcgtggctgtgtgactaagatatatggaagagctttcgttgctggtgttttgccatttaaagtagcaaaagatatggcagcggcagcagttagatgcatcagaaaggagatccggga

SEQ ID NO: 341825 - DNA, 120 bp, Artificial Sequence
  ENSG00000137996_7 (sequence is synthesized)
tttgtatgttaacatccagcctgttcaagaacctaaagaccaagcatttggcaatggaaatggaataataattattgctgagacctccactggctgtttgtttgctggatcatcgcttgg

SEQ ID NO: 341826 - DNA, 120 bp, Artificial Sequence
  ENSG00000137996_8 (sequence is synthesized)
taaacgaggtgtaaatgcagacaaagttggaattgaagctgccgaaatgctattagcaaatcttagacatggtggtactgtggatgagtatctgcaagaccagctgattgttttcatggc

SEQ ID NO: 341827 - DNA, 120 bp, Artificial Sequence
  ENSG00000137996_9 (sequence is synthesized)
attagccaatggagtttccagaataaaaacaggaccagttacactccatacgcaaaccgcgatacattttgctgaacaaatagcaaaggctaaatttattgtgaagaaatcagaagatga

SEQ ID NO: 341828 - DNA, 120 bp, Artificial Sequence
  ENSG00000137996_10 (sequence is synthesized)
agatacttatattattgaatgccaaggaattgggatgacaaatccaaatctatagagtatttgcctcttaaatgatacctcattgatatattgcactatttcataaatactataaaataa

SEQ ID NO: 341829 - DNA, 120 bp, Artificial Sequence
  ENSG00000137996_11 (sequence is synthesized)
tgactaggaagtaacttattaaaggctatgacttaaatttgaagatgaagtacagtgttctaggtttgctgagaaggcttcattaaattaatctcactttgaatatctcctgagagatgg

SEQ ID NO: 341830 - DNA, 120 bp, Artificial Sequence
  ENSG00000137996_12 (sequence is synthesized)
acaatgaaatatcagttggtggatatgtgtgatagctgatttcaatattgaagtattgaaataaaatattctttacacctgaagtaaatacatttttcttttttatgtaattaattaaat

SEQ ID NO: 341831 - DNA, 120 bp, Artificial Sequence
  ENSG00000137996_13 (sequence is synthesized)
cagggatatagatttgatctgtaatttgggtataattctaatctttgctgaaatcacatctcaagtataatgaggcaactttatgcaaatgtacttgttgtgacaacaataacattttcc

SEQ ID NO: 341832 - DNA, 120 bp, Artificial Sequence
  ENSG00000137996_14 (sequence is synthesized)
aaagtggtgggattacaggcgtgagccagtgcacccggcaacaataacatttaataggcattgtctcattctaatgatatataccttctacctagtgggcactttgtacatatttatttt

SEQ ID NO: 341833 - DNA, 84 bp, Artificial Sequence
  ENSG00000137996_15 (sequence is synthesized)
aatgatatataccttctacctagtgggcactttgtacatatttattttttattttatttattcttggagtgcagtggcacaatc

SEQ ID NO: 341834 - DNA, 74 bp, Artificial Sequence
  ENSG00000137996_16 (sequence is synthesized)
ctcactgcaacctccgccttccaggttcacgtaccaccatacccagataatttttgcatttttagtagagacgg

SEQ ID NO: 341835 - DNA, 120 bp, Artificial Sequence
  ENSG00000137996_17 (sequence is synthesized)
ggattacaggcatgagccaccacagctggtcgtaaatattttttgaatttgaatctgttttggaagccaaatatgttttggaagccaaacaattaagagaagtaaaattttaaccctagt

SEQ ID NO: 341836 - DNA, 120 bp, Artificial Sequence
  ENSG00000137996_18 (sequence is synthesized)
gaagccaaacaattaagagaagtaaaattttaaccctagtaggtttcgcagattcatccccagatatgtttttgtttggcttgtgttattaacaaataaatgagtgtctttcaaatggaa

SEQ ID NO: 341837 - DNA, 120 bp, Artificial Sequence
  ENSG00000137996_19 (sequence is synthesized)
tggggcatcgggagtccgagtggtggaacccagaaggtcccagacgcaggtatgggcgatccagggcggggcactctgcctgggcggtggcctgggttgtaaagtcttgaaagcctggag

SEQ ID NO: 341838 - DNA, 120 bp, Artificial Sequence
  ENSG00000137996_20 (sequence is synthesized)
gggtgagtttagaaatggtctcgagttttctctgtttgactaaatagtgtcatttgctgaagagctagcttttaaaatgttttctcacctcaccgggcattccaaatatccgaacagcac

SEQ ID NO: 341839 - DNA, 120 bp, Artificial Sequence
  ENSG00000138002_0 (sequence is synthesized)
agtgcctgtcgctgcggctgcgtggcgggttgtccaggtaaccacgggagttgtcgctgtctaggagcatctgaaagacaggtgtgcgtcatgcacttgaagcacctgaggaccctgctg

SEQ ID NO: 341840 - DNA, 120 bp, Artificial Sequence
  ENSG00000138002_1 (sequence is synthesized)
agccctcaggatggagctgcaaaggtgacctgcatggcttggtcccagaacaatgccaaatttgctgtctgcacagtggaccgagtggtcttgctgtatgatgaacatggagaacggaga

SEQ ID NO: 341841 - DNA, 120 bp, Artificial Sequence
  ENSG00000138002_2 (sequence is synthesized)
gataaattctccaccaaaccagctgacatgaagtatggcaggaagagctatatggtgaagggcatggctttttctcctgattccactaaaattgccataggacagactgacaacatcatc

SEQ ID NO: 341842 - DNA, 120 bp, Artificial Sequence
  ENSG00000138002_3 (sequence is synthesized)
tatgtctacaagattggagaagattggggtgacaagaaagtcatctgcaacaagttcatccagacgagtgctgtcacttgtctgcaatggccggcagaatacatcattgtctttggactg

SEQ ID NO: 341843 - DNA, 120 bp, Artificial Sequence
  ENSG00000138002_4 (sequence is synthesized)
gctgaagggaaggttcgtttagcaaacaccaaaactaataaatcatctaccatctatgggacagagtcttacgtggtgtccctgacaacaaattgctctgggaaaggaattctctctggt

SEQ ID NO: 341844 - DNA, 120 bp, Artificial Sequence
  ENSG00000138002_5 (sequence is synthesized)
catgcagatggtaccatcgttaggtatttctttgatgatgaaggctctggagagtcacaggggaagttggttaaccacccgtgtccaccctatgccttggcatgggcaaccaatagcatc

SEQ ID NO: 341845 - DNA, 120 bp, Artificial Sequence
  ENSG00000138002_6 (sequence is synthesized)
gtggctgcaggctgtgatcggaaaattgtagcctatggaaaagaaggtcacatgctacaaacttttgattatagccgtgaccctcaggagcgggagttcaccacagctgtatcaagtcct

SEQ ID NO: 341846 - DNA, 120 bp, Artificial Sequence
  ENSG00000138002_7 (sequence is synthesized)
gggggccagtctgttgtgctaggaagttatgacaggcttcgggtgttcaactggatccctcgaagaagcatctgggaagaggcaaagcccaaggagattaccaatttatacaccatcact

SEQ ID NO: 341847 - DNA, 120 bp, Artificial Sequence
  ENSG00000138002_8 (sequence is synthesized)
gccttggcctggaagcgggatggctcacggctctgtgtgggcacactatgtggtggggtggaacagtttgactgctgcctccgaaggagtatttacaagaacaagtttgagttgacgtat

SEQ ID NO: 341848 - DNA, 120 bp, Artificial Sequence
  ENSG00000138002_9 (sequence is synthesized)
gtgggacctagccaggtgattgtgaagaacctgtcatcaggaacccgagtggtgctcaagtcacactatggctatgaggtggaagaggtgaaaatcctaggaaaggaacgttacttggtg

SEQ ID NO: 341849 - DNA, 120 bp, Artificial Sequence
  ENSG00000138002_10 (sequence is synthesized)
gctcacacatcagaaacactgctgctgggggacctgaacactaatcggcttagtgagatagcctggcaaggatctggtggcaatgagaagtatttctttgaaaatgagaatgtatgcatg

SEQ ID NO: 341850 - DNA, 120 bp, Artificial Sequence
  ENSG00000138002_11 (sequence is synthesized)
atcttcaatgccggagagctaaccctggtggaatatgggaataatgacaccctgggttctgtacgcactgaattcatgaacccccacctcatcagtgttcgtattaatgagaggtgtcag

SEQ ID NO: 341851 - DNA, 120 bp, Artificial Sequence
  ENSG00000138002_12 (sequence is synthesized)
cgaggaacagaagataataagaaattggcttatcttattgatattaagactattgctatagtggatctgattggtggctacaacattggcaccgtcagccatgagagccgtgtggattgg

SEQ ID NO: 341852 - DNA, 120 bp, Artificial Sequence
  ENSG00000138002_13 (sequence is synthesized)
ctggaacttaatgagactggacacaagctcctcttcagggaccggaaacttcgtttgcatctgtatgatattgaaagctgctctaagacaatgatcctcaacttctgctcctatatgcag

SEQ ID NO: 341853 - DNA, 120 bp, Artificial Sequence
  ENSG00000138002_14 (sequence is synthesized)
tgggtcccaggaagtgacgtgctggtagctcagaaccgaaacagtctgtgtgtatggtacaacattgaggcacctgagagagtcaccatgttcactattaggggtgatgttataggtctg

SEQ ID NO: 341854 - DNA, 120 bp, Artificial Sequence
  ENSG00000138002_15 (sequence is synthesized)
gagcggggcgggggaaagaccgaggtgatggtgatggaaggtgtgactactgttgcctacacattggatgagggcctcatcgagtttggaacagccattgatgatggcaactacatccgg

SEQ ID NO: 341855 - DNA, 120 bp, Artificial Sequence
  ENSG00000138002_16 (sequence is synthesized)
gcaacagccttcttagagactctggaaatgaccccagaaacagaggcaatgtggaaaaccttgagtaaactggcactagaggcaaggcaactacacattgcggagaggtgcttttctgct

SEQ ID NO: 341856 - DNA, 120 bp, Artificial Sequence
  ENSG00000138002_17 (sequence is synthesized)
ttgggccaagtagcaaaagctcgattcctgcatgagaccaatgagattgcagatcaagtatcccgggaatatggcggagaaggaacagacttttatcaggtccgagcacgtctagccatg

SEQ ID NO: 341857 - DNA, 120 bp, Artificial Sequence
  ENSG00000138002_18 (sequence is synthesized)
ctggaaaagaactacaaactggctgaaatgatctttttggaacagaatgctgtggaggaggccatgggcatgtaccaggagctacaccgttgggatgagtgtatcgctgtggctgaagcc

SEQ ID NO: 341858 - DNA, 120 bp, Artificial Sequence
  ENSG00000138002_19 (sequence is synthesized)
aaggggcacccagccctggagaagctacgtcgtagttactaccagtggctgatggacacacagcaagaggagcgagcaggtgaactacaggagagccaaggggatgggctagcagccatc

SEQ ID NO: 341859 - DNA, 120 bp, Artificial Sequence
  ENSG00000138002_20 (sequence is synthesized)
agcctctacctcaaagctgggctccctgccaaagctgctcggctggtgctgacccgagaggaactgctagccaacacagagctggtagaacacatcactgcagcccttatcaagggggaa

SEQ ID NO: 341860 - DNA, 120 bp, Artificial Sequence
  ENSG00000138002_21 (sequence is synthesized)
ctctacgaaagggcaggtgatctctttgagaagattcacaatccacagaaggccctggagtgctaccgtaaaggcaacgcattcatgaaagcggtagagctggctcgattggccttccca

SEQ ID NO: 341861 - DNA, 120 bp, Artificial Sequence
  ENSG00000138002_22 (sequence is synthesized)
ccgccctgggtgcccgccagtggaagaaggcaatttatatattagatctacaggaccggaacactgcatccaaatactatcctctcgtggcccaacactatgcatccctgcaggagtatg

SEQ ID NO: 341862 - DNA, 120 bp, Artificial Sequence
  ENSG00000138002_23 (sequence is synthesized)
agattgctgaggagctctatactaagggagatcggacaaaagatgccatagacatgtacacccaggctggtcgttgggaacaagcccacaagctggcgatgaaatgcatgagaccagaag

SEQ ID NO: 341863 - DNA, 120 bp, Artificial Sequence
  ENSG00000138002_24 (sequence is synthesized)
atgtgtcagtgctatacatcactcaggcccaggaaatggagaagcagggcaagtaccgtgaggctgaaaggctatatgtgacagtacaagagcctgatcttgccatcaccatgtacaaaa

SEQ ID NO: 341864 - DNA, 120 bp, Artificial Sequence
  ENSG00000138002_25 (sequence is synthesized)
agcacaagttgtatgatgacatgatccgcctggtagggaagcaccatccagatctcctcagtgatacacacctacatctgggcaaggagctggaggctgaaggccgactacaggaggctg

SEQ ID NO: 341865 - DNA, 120 bp, Artificial Sequence
  ENSG00000138002_26 (sequence is synthesized)
agtaccactacctcgaggcccaggaatggaaggcaacagtgaacatgtaccgggccagtgggctttgggaagaggcctacagggtggccagaactcaaggaggggctaatgcccacaaac

SEQ ID NO: 341866 - DNA, 120 bp, Artificial Sequence
  ENSG00000138002_27 (sequence is synthesized)
acgtggcctatctgtgggcaaagagcctgggaggagaggctgcagttagactgcttaataagctgggactcctggaagctgctgttgaccacgctgcagacaattgctcctttgaatttg

SEQ ID NO: 341867 - DNA, 120 bp, Artificial Sequence
  ENSG00000138002_28 (sequence is synthesized)
cgtttgaactctctcggctggccctcaagcacaaaacccccgaggttcatctcaaatatgctatgttcctggaggatgagggtaaattcgaagaggctgaagctgaattcatcagagctg

SEQ ID NO: 341868 - DNA, 120 bp, Artificial Sequence
  ENSG00000138002_29 (sequence is synthesized)
gtaaacccaaggaggcagtcctcatgtttgtccataaccaggattgggaggcagctcagcgtgtggctgaggctcacgaccctgacagtgtcgccgaggtgcttgtgggacaggcccggg

SEQ ID NO: 341869 - DNA, 120 bp, Artificial Sequence
  ENSG00000138002_30 (sequence is synthesized)
gggccttggaggagaaggactttcagaaagcagaagggctgctgctccgggcccagagaccaggcctggccctcaattattataaggaggctggattatggagtgacgctctgcgcatct

SEQ ID NO: 341870 - DNA, 120 bp, Artificial Sequence
  ENSG00000138002_31 (sequence is synthesized)
gcaaggactatgtgcccagccagctggaggctctgcaggaagaatatgagcgggaagctactaagaagggggccaggggtgtggagggatttgtggaacaagctcgacactgggagcagg

SEQ ID NO: 341871 - DNA, 120 bp, Artificial Sequence
  ENSG00000138002_32 (sequence is synthesized)
ctggagagtacagccgtgccgtggactgctacctcaaagtgcgagactctggaaacagcggcctggcggagaagtgctggatgaaggcagctgaactctccatcaagtttctgcctcccc

SEQ ID NO: 341872 - DNA, 120 bp, Artificial Sequence
  ENSG00000138002_33 (sequence is synthesized)
aacgtaatatggaagtcgttctggctgtaggaccccagctgattggaattggaaagcacagtgcagctgcagagctctatctgaatctggaccttgtcaaggaagcaatcgatgctttca

SEQ ID NO: 341873 - DNA, 120 bp, Artificial Sequence
  ENSG00000138002_34 (sequence is synthesized)
tcgagggtgaggagtggaacaaggcgaagcgtgtagctaaggagttagatcccaggtatgaagactatgtggaccagcattataaagagttcctcaagaatcagggcaaagtggactcgc

SEQ ID NO: 341874 - DNA, 120 bp, Artificial Sequence
  ENSG00000138002_35 (sequence is synthesized)
tggtgggtgtggatgtgatagctgctttggacctgtatgtggagcagggccagtgggacaagtgcattgaaacagctaccaagcagaactacaagattctgcacaagtatgtggctttgt

SEQ ID NO: 341875 - DNA, 120 bp, Artificial Sequence
  ENSG00000138002_36 (sequence is synthesized)
atgcaactcacttgatccgggagggtagctctgcccaggcattggccctgtatgtacagcacggagcccctgctaacccacagaacttcaatatctacaaaaggatcttcactgacatgg

SEQ ID NO: 341876 - DNA, 120 bp, Artificial Sequence
  ENSG00000138002_37 (sequence is synthesized)
tgagctctcctggaaccaactgtgccgaggcctatcatagctgggctgatcttcgagatgtcctcttcaacctgtgtgaaaacctggtgaagtccagtgaggcaaactctccagcccatg

SEQ ID NO: 341877 - DNA, 120 bp, Artificial Sequence
  ENSG00000138002_38 (sequence is synthesized)
aggagttcaagacgatgctgctgatcgctcattactatgccacgcgctctgcagcccagagtgtcaaacagctggaaaccgtggctgccaggctttctgtttcactcttgcgtcacaccc

SEQ ID NO: 341878 - DNA, 120 bp, Artificial Sequence
  ENSG00000138002_39 (sequence is synthesized)
agctactacctgtagacaaagccttctatgaagcaggcattgctgccaaggcagttggctgggataacatggcattcatcttcctcaatcgctttttggacctgaccgatgcaatcgagg

SEQ ID NO: 341879 - DNA, 120 bp, Artificial Sequence
  ENSG00000138002_40 (sequence is synthesized)
aagggactctagatggccttgaccactctgattttcaggatacagacattccctttgaggtgccactcccagctaagcagcatgtaccggaggctgagagagaagaggttcgagactggg

SEQ ID NO: 341880 - DNA, 120 bp, Artificial Sequence
  ENSG00000138002_41 (sequence is synthesized)
tgcttacagtctccatggaccagcggctggagcaggttctgcctcgggatgagcgtggcgcctacgaggcctccctagtggcagcgagcactggtgttcgagccctgccctgccttatta

SEQ ID NO: 341881 - DNA, 120 bp, Artificial Sequence
  ENSG00000138002_42 (sequence is synthesized)
caggataccccattctgaggaacaaaattgaatttaagcggccagggaaggctgctaacaaggacaactggaataaattccttatggccatcaagacctcccacagcccagtgtgccagg

SEQ ID NO: 341882 - DNA, 120 bp, Artificial Sequence
  ENSG00000138002_43 (sequence is synthesized)
acgtgctgaaattcatcagtcagtggtgtggagggctccccagcaccagcttttcctttcagtagttggtagagctgaggaagagttagggcctctccctcattaaagttttataaataa

SEQ ID NO: 341883 - DNA, 120 bp, Artificial Sequence
  ENSG00000138002_44 (sequence is synthesized)
ggatggggtctgaggatgtgtaccctctgcccagaaggcagtgatagcaggggtcgggtctaggaggccccagatgtatctccttccccaggctatatgtgacagtacaagagcctgatc

SEQ ID NO: 341884 - DNA, 120 bp, Artificial Sequence
  ENSG00000138002_45 (sequence is synthesized)
ttagggtatgttggacactaggggccctcagatgtggtattgagctgattaattagagccatgaggagactctgaaggctacttggttttctgtgtccaccacccttaatctctgtgata

SEQ ID NO: 341885 - DNA, 120 bp, Artificial Sequence
  ENSG00000138002_46 (sequence is synthesized)
gaggaaagctgagtgtagggctgatgttacggaggatgtagtcctcctatgtcttcctggatttttctccctggatcccagagaaatagcattcaagcccagcttgctcactcccatttg

SEQ ID NO: 341886 - DNA, 120 bp, Artificial Sequence
  ENSG00000138002_47 (sequence is synthesized)
caagttcatccagacggtaaagttcagaccagtccctggaaccttaggatgaacaaacatatatcagtatatctacttataaatacagccaggagttgcatttctaacatctgaatgtga

SEQ ID NO: 341887 - DNA, 120 bp, Artificial Sequence
  ENSG00000138002_48 (sequence is synthesized)
cttttcctactgcaaggatggtgcttcatggctgttcatggtcatctgctgtcttccttagagccctgctgtgtccttccctataggagattgaggtggtggtgtgtggtggggtgttga

SEQ ID NO: 341888 - DNA, 120 bp, Artificial Sequence
  ENSG00000138002_49 (sequence is synthesized)
agttgttataaaagtgctggcccacacagatggggttatccttttcattgtttccttccacgcagagtgctgtcacttgtctgcaatggccggcagaatacatcattgtctttggactgg

SEQ ID NO: 341889 - DNA, 120 bp, Artificial Sequence
  ENSG00000138002_50 (sequence is synthesized)
gttatgatataaaattgctttgcattgcagaaatgtgaggcccttttggattccactgtttggggctggtctttctttttaaatggtagaatgtatgagacacccatactcatcttttct

SEQ ID NO: 341890 - DNA, 120 bp, Artificial Sequence
  ENSG00000138002_51 (sequence is synthesized)
tctctattattacaaggttgtatcgcaggctctccaccatcccagccaaggtttgttctttcctcattcaagctgctttaagtctgttgctctgaccttttgtatctacctcccatcaac

SEQ ID NO: 341891 - DNA, 120 bp, Artificial Sequence
  ENSG00000138002_52 (sequence is synthesized)
gtgtgagaagagctactaaggccttaggcattggctggcccacagagggtgtgagacaagctgccaccagggactgagggaggcaggatggagcacattgtctttgctgtgtcatcaaca

SEQ ID NO: 341892 - DNA, 120 bp, Artificial Sequence
  ENSG00000138002_53 (sequence is synthesized)
tggcagaaggcacagaagaatcaacattctctgtagctgataccaaaactgatagcaaaacccatcctttattacctctttttttttttttttggagacagtgtctcactctgtcaccca

SEQ ID NO: 341893 - DNA, 120 bp, Artificial Sequence
  ENSG00000138002_54 (sequence is synthesized)
tggagtgcctgctggatgatagagccagaacctctgaaggctataaaagtggatataagacagagccctgacagccaaaagttaggggaattagaccaataaatggctcaattactatca

SEQ ID NO: 341894 - DNA, 79 bp, Artificial Sequence
  ENSG00000138002_55 (sequence is synthesized)
tgagccatgcgcccagcaatcctgtatgacctcagaggtgattgtattatggcaacaaagtcaagaagggagtttggaa

SEQ ID NO: 341895 - DNA, 120 bp, Artificial Sequence
  ENSG00000138002_56 (sequence is synthesized)
ggagtatactttaacccaaggatattgctataaatgaagtatttttttatgcttgagagaaactaaaatgttaggaaaatcagggccgctgtgactctcttgaccactgactgggtcgga

SEQ ID NO: 341896 - DNA, 120 bp, Artificial Sequence
  ENSG00000138002_57 (sequence is synthesized)
taaggtactccctcccttcccactgccagcaaatagcatagagcccttctgcagtacaatattccaaacactctcccatcctagattataagagtatgccttgaccaggcgtgatggctg

SEQ ID NO: 341897 - DNA, 120 bp, Artificial Sequence
  ENSG00000138002_58 (sequence is synthesized)
tcaggtaacctcacaagattctctgaatccctgaaacccagaataattccttttggactcctaaattctgtgtcctccagttaatccaaaagcttcagccaggtgtggtggctcatgcct

SEQ ID NO: 341898 - DNA, 120 bp, Artificial Sequence
  ENSG00000138002_59 (sequence is synthesized)
atggtggcacacccctgtagtcccagttactcaggaaggtgaggtaggagaatcacccggagcctgggaagtcaaagctgtagtgagccgtgatcacaccactgcacttcagctttggca

SEQ ID NO: 341899 - DNA, 120 bp, Artificial Sequence
  ENSG00000138002_60 (sequence is synthesized)
caaaataaataaataaataaataaaagcttcatcccatatggtacttcagagcctttaataaacatcccaactacctcagcccattttgccttacctcacccttcatgtttcagtgttcg

SEQ ID NO: 341900 - DNA, 120 bp, Artificial Sequence
  ENSG00000138002_61 (sequence is synthesized)
ccttcatgtttcagtgttcgtattaatgagaggtgtcagcgaggaacagaagataataagaaattggcttatcttattgatattaagactattgctatagtggatctgattggtggctac

SEQ ID NO: 341901 - DNA, 120 bp, Artificial Sequence
  ENSG00000138002_62 (sequence is synthesized)
cttgttcactcccatttgcaactcttctttgctgcaggcagttggctgggataacatggcattcatcttcctcaatcgctttttggacctgaccgatgaggctgagagagaagaggttcg

SEQ ID NO: 341902 - DNA, 120 bp, Artificial Sequence
  ENSG00000138018_0 (sequence is synthesized)
gccatccttgcccagccggtgtggtgcttgtgtgtcacagccttgtagccgggagtcgctgccgagtgggcgctcagttttcgggtcgtcatggctggctacgaatacgtgagcccggag

SEQ ID NO: 341903 - DNA, 120 bp, Artificial Sequence
  ENSG00000138018_1 (sequence is synthesized)
cagctggctggctttgataagtacaagtacagtgctgtggataccaatccactttctctgtatgtcatgcatccattctggaacactatagtaaaggtatttcctacttggctggcgccc

SEQ ID NO: 341904 - DNA, 120 bp, Artificial Sequence
  ENSG00000138018_2 (sequence is synthesized)
aatctgataactttttctggctttctgctggtcgtattcaattttctgctaatggcatactttgatcctgacttttatgcctcagcaccaggtcacaagcacgtgcctgactgggtttgg

SEQ ID NO: 341905 - DNA, 120 bp, Artificial Sequence
  ENSG00000138018_3 (sequence is synthesized)
attgtagtgggcatcctcaacttcgtagcctacactctagatggtgtggacggaaagcaagctcgcagaaccaattctagcactcccttaggggagctttttgatcatggcctggatagt

SEQ ID NO: 341906 - DNA, 120 bp, Artificial Sequence
  ENSG00000138018_4 (sequence is synthesized)
tggtcatgtgtttactttgttgtgactgtttattccatctttggaagaggatcaactggtgtcagtgtttttgttctttatctcctgctatgggtagttttgttttctttcatcctgtcc

SEQ ID NO: 341907 - DNA, 120 bp, Artificial Sequence
  ENSG00000138018_5 (sequence is synthesized)
cactgggaaaagtataacacagggattcttttcctgccatggggatatgacattagccaggtgactatttcttttgtctacatagtgactgcagttgtgggagttgaggcctggtatgaa

SEQ ID NO: 341908 - DNA, 120 bp, Artificial Sequence
  ENSG00000138018_6 (sequence is synthesized)
cctttcctgtttaatttcttatatagagacctattcactgcaatgattattggttgtgcattatgtgtgactcttccaatgagtttattaaactttttcagaagctataaaaataacacc

SEQ ID NO: 341909 - DNA, 120 bp, Artificial Sequence
  ENSG00000138018_7 (sequence is synthesized)
ttgaaactcaattcagtctatgaagctatggttcccttattttctccatgcttgctgttcattttgtctacagcgtggatcctttggtcaccttcagatattttagagctacatcctaga

SEQ ID NO: 341910 - DNA, 120 bp, Artificial Sequence
  ENSG00000138018_8 (sequence is synthesized)
gtattctactttatggttggaacagcttttgccaacagtacatgtcagctgattgtttgccaaatgagtagtacccggtgtccaactttgaattggttgctggttcctctcttcttggtt

SEQ ID NO: 341911 - DNA, 120 bp, Artificial Sequence
  ENSG00000138018_9 (sequence is synthesized)
gtcttagtggtaaacctaggagtagcctcttacgttgagagcattctcctgtatacattaacaactgcttttactctggcccacatccattatggagtacgagtggtaaagcagctgagc

SEQ ID NO: 341912 - DNA, 120 bp, Artificial Sequence
  ENSG00000138018_10 (sequence is synthesized)
agccattttcagatttaccccttctcattgaggaaaccaaactcagattgactaggaatggaagaaaagaatattggcctgtaataatctttctttgggcacaaagaagtactgtaaata

SEQ ID NO: 341913 - DNA, 120 bp, Artificial Sequence
  ENSG00000138018_11 (sequence is synthesized)
aatgcttgtaaatatttcctccatcaccattgaactagactgatctgcttgacagacgtgggatctcagtatggtacttggacagcaggaatgatacatataatctgaacttgggaaatt

SEQ ID NO: 341914 - DNA, 120 bp, Artificial Sequence
  ENSG00000138018_12 (sequence is synthesized)
ttggacctactaactctaagcctattttattttttataaaactatgtgacattttggttgagcagaatgtacgttagaccagcaaaatgttcctaatggttctaacttcgtgagtttaca

SEQ ID NO: 341915 - DNA, 120 bp, Artificial Sequence
  ENSG00000138018_13 (sequence is synthesized)
atgttgtgattcatgcagggttaaagatgctttgtttttattttttaagtaccaaaattggtttcagaacactgataacactcagaaaaccacagtgtgttttcatatttggaactttgt

SEQ ID NO: 341916 - DNA, 120 bp, Artificial Sequence
  ENSG00000138018_14 (sequence is synthesized)
aatagcgggagtagcagtagtccaaacctagtatagggaaaggataaaaataagtcaccttcaccaagagatgccaatgattaccaaacaacagacagttgccaaatactggtttctctt

SEQ ID NO: 341917 - DNA, 120 bp, Artificial Sequence
  ENSG00000138018_15 (sequence is synthesized)
tcccctgaaaatggcttttgttctcaaatgataagagagctaatacatttagctaatattctagctctctttattatggaacagatcttgatagatggtttaattttctcctaaagagaa

SEQ ID NO: 341918 - DNA, 120 bp, Artificial Sequence
  ENSG00000138018_16 (sequence is synthesized)
ataatcagttgagaatttgagaatgggttgtaattatcgctcacccattgggatggttcattgtttaaatatggcattttccccccttcagctgcaggttcctgagatttggtgcctgtg

SEQ ID NO: 341919 - DNA, 120 bp, Artificial Sequence
  ENSG00000138018_17 (sequence is synthesized)
agctctgattgtaggaatgcatgtgacagtcccagtcctatggtaatgacttaggaggaatgcagataaaagtaccttgtaagataaatataaattggagttaggaatttcatgaacctc

SEQ ID NO: 341920 - DNA, 120 bp, Artificial Sequence
  ENSG00000138018_18 (sequence is synthesized)
actatgaccaaaattaattttttgattcagtttgtctgtctgtctgtccttcccctctcttcttttttcagggtgaggtgctgtgtttcttatttcatacgagataaaacagagagaagt

SEQ ID NO: 341921 - DNA, 120 bp, Artificial Sequence
  ENSG00000138018_19 (sequence is synthesized)
tctctcttctccagcttgtccatttccccacttgaagaaaacttttgatatatatgccttactgagtacatgccccctttaatgttaacatgacttggagtaatttctgaggtttactga

SEQ ID NO: 341922 - DNA, 120 bp, Artificial Sequence
  ENSG00000138018_20 (sequence is synthesized)
caaacataaaaatccctttaattgtagtgtagttgttctataaaccatattttttcatgatgtggatattttcttctatttctttgtcttcatttaatttggtggtggtgaactttactt

SEQ ID NO: 341923 - DNA, 120 bp, Artificial Sequence
  ENSG00000138018_21 (sequence is synthesized)
gctgattttcttttatttttcactgaatgaagtttgtgcttgaatgaagagtgtatcttaaaccccctttttttggacaggctgcacttggataaaataggcaccactgtgttgatatgt

SEQ ID NO: 341924 - DNA, 120 bp, Artificial Sequence
  ENSG00000138018_22 (sequence is synthesized)
aattaaattcataactatttatgaatgtgaccattgttaaatttaattatagtgtatttctttcttgaatttcagtctgctgctttgtaaaaaataactgtaattgatatttcattttta

SEQ ID NO: 341925 - DNA, 120 bp, Artificial Sequence
  ENSG00000138018_23 (sequence is synthesized)
aaatttataaattccaatcattgtcattcaagttattagaaatgagtcacggcactaactcatggttctatactcattttaagaaattgtaaaggttgaggtgtatttggtgactttctc

SEQ ID NO: 341926 - DNA, 120 bp, Artificial Sequence
  ENSG00000138018_24 (sequence is synthesized)
tgagacacagatgaacgttggaaatagatgagaaatggatgcagaataatgcagatagtgatcccatgtttgttaattgccatcatggaagtcagagaattaaccaattaagtgacggta

SEQ ID NO: 341927 - DNA, 120 bp, Artificial Sequence
  ENSG00000138018_25 (sequence is synthesized)
actattttttgtataccttgttctttgtgatctataaaattaaactggataaaatgttaattgggggtagggaaaaagctttgttttaagatttctaagctaattattttaccgttttgt

SEQ ID NO: 341928 - DNA, 120 bp, Artificial Sequence
  ENSG00000138018_26 (sequence is synthesized)
tgaccttgtacacaagaatgagattaatctgtattatataagaaaagaactgataaatatttataaaatgacaaacttggaccacaggctttcttgaccttgtacagtatagtaaaaata

SEQ ID NO: 341929 - DNA, 120 bp, Artificial Sequence
  ENSG00000138018_27 (sequence is synthesized)
ccctttacttctgacattttaaggtcacgtcctatagtttgggggcccttttacttcaaaggtgtgtttctgccctcttttggttgtatcaaatttatttgaaaattgttttgtgctgta

SEQ ID NO: 341930 - DNA, 120 bp, Artificial Sequence
  ENSG00000138018_28 (sequence is synthesized)
ctttatgacttgtttccctatggtggtaaagaatgatgccatagtcagttttattgacattgttagatgaaagaaaagtagctgtcaacaaggggaaagtgaaattgagcaattcactgt

SEQ ID NO: 341931 - DNA, 120 bp, Artificial Sequence
  ENSG00000138018_29 (sequence is synthesized)
ttcaggatacttgaggatctttagtgtactgctgactctttttcttgttttgtctgccattcttgaaagtgcatcttgagagcccccatttgttgtgtagagatatagcagctgaagcag

SEQ ID NO: 341932 - DNA, 120 bp, Artificial Sequence
  ENSG00000138018_30 (sequence is synthesized)
gacttcattccagatagctgtgtgcatttatgtcatgccaattactataacatttccaaagtatgaaaggtctttcaggcttatgcatgatattgtgggtgacttcatgccccagccttt

SEQ ID NO: 341933 - DNA, 120 bp, Artificial Sequence
  ENSG00000138018_31 (sequence is synthesized)
ctccccagcatacagtgagctgccttttggggagcaatgccatgataaggagcatacgtgcatgttttccgtactttcagaatagagtgccttagctaggccagaggctcgtattgtgtt

SEQ ID NO: 341934 - DNA, 120 bp, Artificial Sequence
  ENSG00000138018_32 (sequence is synthesized)
tctgctgaccaaagttgcatacacctgtaagaagtgtctttttaggttatggtattaaaaaagtcgtttcaggcttatcagataataattctcctatatttgaggggggcatgggataaa

SEQ ID NO: 341935 - DNA, 120 bp, Artificial Sequence
  ENSG00000138018_33 (sequence is synthesized)
atgctaatgctgccttttgtgatcctttaatattatccatgcttttataaagtgcagtacacattttgacattgccacagtttacagtgtcattcttccacgaataggtaattgatagag

SEQ ID NO: 341936 - DNA, 120 bp, Artificial Sequence
  ENSG00000138018_34 (sequence is synthesized)
tttatgggtcttagtcttaagggtaacagagtgaataccttccaaataaaaagctaaatattcctccttgtcattttaatgtcattattgaaatacttttaattctaattttcaaaagaa

SEQ ID NO: 341937 - DNA, 120 bp, Artificial Sequence
  ENSG00000138018_35 (sequence is synthesized)
agctaaatgctgattgtggtttaggatgttacagtactaataccatcatgttatttattctaatatagaggcattgagaggaggggagtgtatgtctagagttaccccaattctaaatag

SEQ ID NO: 341938 - DNA, 120 bp, Artificial Sequence
  ENSG00000138018_36 (sequence is synthesized)
gtaccaaaagagtattgattatgacctggagcctgagctttgggagaatatacaaaggaaaaagcaggcatagtttccactttaaagggaagaagggactttaacatcctatgaatttga

SEQ ID NO: 341939 - DNA, 120 bp, Artificial Sequence
  ENSG00000138018_37 (sequence is synthesized)
aacatcctatgaatttgaaagtttcctaagtgttgttttcaaagaactggtttattttatagtcagtcaaaatgcatttggaatgtaccttgcttccataacagactttgactctatgac

SEQ ID NO: 341940 - DNA, 120 bp, Artificial Sequence
  ENSG00000138018_38 (sequence is synthesized)
ctatgaagaataaaaagataatctgaaggtgtttgagtcagaggctacttttcccctttatattttatatagaagcctatttgtaattcttcctcttcgttcttcacctgggtttcctct

SEQ ID NO: 341941 - DNA, 120 bp, Artificial Sequence
  ENSG00000138018_39 (sequence is synthesized)
tatctacccaccacctaggacagaggctgcccactcaggtcttgccttgttgcccctagatgttgccacattcacatctccttgatggccttagatctcttgactagtcaaggactggga

SEQ ID NO: 341942 - DNA, 120 bp, Artificial Sequence
  ENSG00000138018_40 (sequence is synthesized)
acgtgccagggggaacaaagtaagcttgatgggctggaacttttgactttgggtccccaaacagccaaaaacagatacagaaatctttggttgtgtggatgcctgtgttcagagtggcct

SEQ ID NO: 341943 - DNA, 120 bp, Artificial Sequence
  ENSG00000138018_41 (sequence is synthesized)
tatcttgacctcagttctggatttaagtactctatagaaaatttgtgaagtcagaccagaattttctttgtcccatgaggtgtctttgtaagtcagcatgctcttgcttgaacaccctgt

SEQ ID NO: 341944 - DNA, 120 bp, Artificial Sequence
  ENSG00000138018_42 (sequence is synthesized)
gggtgaataactttagtaagttagctgccagcattagaaccttccaggaagaattttaactagtatgctacatttgaagcactctgacatgtacatttaaagtgacagttttaaaagtaa

SEQ ID NO: 341945 - DNA, 120 bp, Artificial Sequence
  ENSG00000138018_43 (sequence is synthesized)
aatggtgttaaatctctgaaacttgaacgtatgatgctctggacattttaggaagcttaagtaaatttctgattttcctttattgattatgtaacccacgtgatttgcatattttagttt

SEQ ID NO: 341946 - DNA, 120 bp, Artificial Sequence
  ENSG00000138018_44 (sequence is synthesized)
ttatgtttgacagtggtacaaatgactgacattggcaggcagttattgtagggtatatggttaatcacgattgtctaacttttccagagaaagtggtgatatgcttcttccttgcatgga

SEQ ID NO: 341947 - DNA, 120 bp, Artificial Sequence
  ENSG00000138018_45 (sequence is synthesized)
gctgtgggaattggatttgttggctcttcatttccagtgtttctacagtgcagaataaatgtaactttttaagcctgcatgctagtaatatgctttgctctttagtaaacaaatatgcaa

SEQ ID NO: 341948 - DNA, 120 bp, Artificial Sequence
  ENSG00000138018_46 (sequence is synthesized)
tagatagtaatctatctactttttttaaagcagggatctgctccctatctagacagatcttttaatgcattaatatttagagtagcaaaagaagttttgccatttgtagctctctcacag

SEQ ID NO: 341949 - DNA, 120 bp, Artificial Sequence
  ENSG00000138018_47 (sequence is synthesized)
gtagcttaagcgagggggttgtgttgcatgtgcttagaaaggccaggatcccagaattggaaggtgccacatatacttttagaatattttaacaaaggcttgtctctaggaaaatccact

SEQ ID NO: 341950 - DNA, 120 bp, Artificial Sequence
  ENSG00000138018_48 (sequence is synthesized)
tggactgcagcaggattgttctggtcttccacagaccattcacatggtctttctctccagagaatcattcttagaaagccaggctaaatcagagtagtgctgtttttaaagcaagtatat

SEQ ID NO: 341951 - DNA, 120 bp, Artificial Sequence
  ENSG00000138018_49 (sequence is synthesized)
tggatgatggctatagggtaccttaatgctgtgttgaaattggaagcagactgctcttcagcagcacatatactgcaactgaagttagagacagtactgaagacgagggagtagctaaat

SEQ ID NO: 341952 - DNA, 120 bp, Artificial Sequence
  ENSG00000138018_50 (sequence is synthesized)
gctgtggatatttcatgtctgtttggctaatgtcttctcttgaggagtttctatgggtagcaattaaaattagaatttattttaaggtttttattaaaatatatacaatttgccataaat

SEQ ID NO: 341953 - DNA, 120 bp, Artificial Sequence
  ENSG00000138018_51 (sequence is synthesized)
tctagattctgatattcttgacaagcactttttgaatatctcaagagtaagttcttgacctggaacatatatagttagtacttgatgtcactaaccaagttgtagaaggagcctgttata

SEQ ID NO: 341954 - DNA, 81 bp, Artificial Sequence
  ENSG00000138018_52 (sequence is synthesized)
cttgatgtcactaaccaagttgtagaaggagcctgttataattctgcaagatctgtgaatagcattataaatctggggcag

SEQ ID NO: 341955 - DNA, 63 bp, Artificial Sequence
  ENSG00000138018_53 (sequence is synthesized)
ggattgcttgagcccaggagttcgacaccaacctgagcaacatggcgaaaccccgtctgtatg

SEQ ID NO: 341956 - DNA, 80 bp, Artificial Sequence
  ENSG00000138018_54 (sequence is synthesized)
caaaataaacaaatctgtttaaattactgttgcctttcagcattagactttgagtttaataactacaaattgagactgct

SEQ ID NO: 341957 - DNA, 120 bp, Artificial Sequence
  ENSG00000138018_55 (sequence is synthesized)
cattagactttgagtttaataactacaaattgagactgctcacaatattaactttttttgtaggttattttgttgtttagataacttgcctccctagaggagcattcaggagataaagac

SEQ ID NO: 341958 - DNA, 120 bp, Artificial Sequence
  ENSG00000138018_56 (sequence is synthesized)
ctagctacatgtaatgatatgatcatttcaaaaatgtgccaagaaagcaaaattcattattgaactctaaatttctgggtgtttttttttttaaagtagcattttctctgggtaaaggga

SEQ ID NO: 341959 - DNA, 120 bp, Artificial Sequence
  ENSG00000138018_57 (sequence is synthesized)
aaggcaatgaatgattgccaacatgtaaactccctgctgcccgccttcccccagtcccctccatctaacataatacagtaaatttgtagccagttgtagaaaaagaaattgatatctttc

SEQ ID NO: 341960 - DNA, 120 bp, Artificial Sequence
  ENSG00000138018_58 (sequence is synthesized)
tgagtaaggtttcatgccctgtgactaagaataggtggaggaatcatggccaaatcaaatatgaattgtttagcttggtcctgttgcagttggctttctgtagtgttctgaaacaagagg

SEQ ID NO: 341961 - DNA, 120 bp, Artificial Sequence
  ENSG00000138018_59 (sequence is synthesized)
acgattccattccttctcaggaacctagaaacaacaccgcttgagcaactggaatatgtttgctgcaagcagaatattttggggagaggaagagtagtttaattcaagtagtttaattga

SEQ ID NO: 341962 - DNA, 120 bp, Artificial Sequence
  ENSG00000138018_60 (sequence is synthesized)
acatattagtcattggtctgtctgggacgtgcagtgttcatagtagcaatgtatgtaccatttattttatctggttgtgtgtgatgtgtgtgtatgcctatttaatatgtacacatatat

SEQ ID NO: 341963 - DNA, 120 bp, Artificial Sequence
  ENSG00000138018_61 (sequence is synthesized)
tcactacatatgtatgtatgatatattcatatatacatgcagtctgcttgattatcagcaaaatggtcagcctttatcagatagtttcttcatgtggagttcatctgcatgtggccctta

SEQ ID NO: 341964 - DNA, 120 bp, Artificial Sequence
  ENSG00000138018_62 (sequence is synthesized)
ctctgaagcctcttcctgatctggagccacagtctgtctgtcttccagttcatctcagtcctcgagaaaggccctttaaatatgtcactttcccattttcctttaaccatgggttgtgtg

SEQ ID NO: 341965 - DNA, 120 bp, Artificial Sequence
  ENSG00000138018_63 (sequence is synthesized)
agccagaaagagctttgagaaagatggctgcttccaccagggtggaggcttctaggtctgcatgatgatggggcccgtttctggccagagggtggctctgggagcagttgtgctgcgggc

SEQ ID NO: 341966 - DNA, 120 bp, Artificial Sequence
  ENSG00000138018_64 (sequence is synthesized)
ttgctgggggagaactctaactgttgcagaaacagagcttcatggcttgcttaaattacttagctggaatattttaaagtgtcagataatgtgatgtacaaagagagtatgccgatgcat

SEQ ID NO: 341967 - DNA, 120 bp, Artificial Sequence
  ENSG00000138018_65 (sequence is synthesized)
ttcattgtttttgcattatctgtatcagtgtttcccattgctagcccgaataatcaagaccagactgtttcttgtcactggattctggaagccttgccctttcaactggatttatgtttg

SEQ ID NO: 341968 - DNA, 120 bp, Artificial Sequence
  ENSG00000138018_66 (sequence is synthesized)
tttctgctgctgtgaaaccccaaagtaatgcagtaggttttaattgaaaattgtttaattctattattgataattatttattgtaataaaagtaaaagagtaatttttaaatccttttaa

SEQ ID NO: 341969 - DNA, 120 bp, Artificial Sequence
  ENSG00000138018_67 (sequence is synthesized)
aaaggttaaagaaagagggaccaattaacttcaccttttcctaaacttgaaaagacaaaccaaattctgcccttcatctccaatgtttgaaagatcagaggttcctgtcaatacagtgct

SEQ ID NO: 341970 - DNA, 120 bp, Artificial Sequence
  ENSG00000138018_68 (sequence is synthesized)
cacagccttgtagccgggagtcgctgccgagtgggcgctcagttttcgggtcgtcatggctggctacgaatacgtgagcccggagcagctggctggctttgataagtacaagcccccgaa

SEQ ID NO: 341971 - DNA, 120 bp, Artificial Sequence
  ENSG00000138018_69 (sequence is synthesized)
tgcatacaacttcggaggaggagatgatcgtttggcagatgaggcccgggaggggagcgacttgccgatgccatcctgctgatgtctccacttctgctcccggcagggacttcctaagcg

SEQ ID NO: 341972 - DNA, 120 bp, Artificial Sequence
  ENSG00000138018_70 (sequence is synthesized)
gcagcttgtggcgctagggccaccagatgaaagggaggtgcacaggaaggagctgtggagtggaaagagcgcgggctttcgagcacatacaaacctgattacaaaagtcagatttcttta

SEQ ID NO: 341973 - DNA, 80 bp, Artificial Sequence
  ENSG00000138028_0 (sequence is synthesized)
gcggcggctggcactggctccggactctgcccggccagggcggcggctccagccgggagggcgacgtggagcggccacgt

SEQ ID NO: 341974 - DNA, 120 bp, Artificial Sequence
  ENSG00000138028_1 (sequence is synthesized)
gggcggcgcagcagccaggagcgcccacggagctggacccccagagccgcgcggcgccgcagcagctttactcctgaagccagcgagatcacgaacccactgggagaaacgaacaactcc

SEQ ID NO: 341975 - DNA, 80 bp, Artificial Sequence
  ENSG00000138028_2 (sequence is synthesized)
cagcgagatcacgaacccactgggagaaacgaacaactccagacgcactgcattcctgagccagcgagaccacaaaccca

SEQ ID NO: 341976 - DNA, 120 bp, Artificial Sequence
  ENSG00000138028_3 (sequence is synthesized)
gttccaggaaggatgttacctttgacgatgacagtgttaatcctgctgctgctccccacgggtcaggctgccccaaaggatggagtcacaaggccagactctgaagtgcagcatcagctc

SEQ ID NO: 341977 - DNA, 120 bp, Artificial Sequence
  ENSG00000138028_4 (sequence is synthesized)
ctgcccaaccccttccagccaggccaggagcagctcggacttctgcagagctacctaaagggactaggaaggacagaagtgcaactggagcatctgagccgggagcaggttctcctctac

SEQ ID NO: 341978 - DNA, 120 bp, Artificial Sequence
  ENSG00000138028_5 (sequence is synthesized)
gctgctgtccatgttgacagctgctctggcccctggagctgccaactctcctaccaccaacccggtgatcttgatagtggacaaagtgctcgagacccaggacctgaatggggatgggct

SEQ ID NO: 341979 - DNA, 120 bp, Artificial Sequence
  ENSG00000138028_6 (sequence is synthesized)
catgacccctgctgagctcatcaacttcccgggagtagccctcaggcacgtggagcccggagagccccttgctccatctcctcaggagccacaagctgttggaaggcagtccctattagc

SEQ ID NO: 341980 - DNA, 120 bp, Artificial Sequence
  ENSG00000138028_7 (sequence is synthesized)
taaaagcccattaagacaagaaacacaggaagcccctggtcccagagaagaagcaaagggccaggtagaggccagaagggagtctttggatcctgtccaggagcctgggggccaggcaga

SEQ ID NO: 341981 - DNA, 120 bp, Artificial Sequence
  ENSG00000138028_8 (sequence is synthesized)
ggctgatggagatgttccagggcccagaggggaagctgagggccaggcagaggctaaaggagatgcccctgggcccagaggggaagctgggggccaggcagaggctgaaggagatgcccc

SEQ ID NO: 341982 - DNA, 120 bp, Artificial Sequence
  ENSG00000138028_9 (sequence is synthesized)
cgggcccagaggggaagctgggggccaggcagaggctgaaggagatgcccccgggcccagaggggaagctgggggccaggcagaggccagggagaatggagaggaggccaaggaacttcc

SEQ ID NO: 341983 - DNA, 120 bp, Artificial Sequence
  ENSG00000138028_10 (sequence is synthesized)
aggggaaacactggagtctaagaacacccaaaatgactttgaggtgcacattgttcaagtggagaatgatgagatctagatcttgaagatacaggtaccccacgaagtctcagtgccaga

SEQ ID NO: 341984 - DNA, 120 bp, Artificial Sequence
  ENSG00000138028_11 (sequence is synthesized)
acataagccctgaagtgggcaggggaaatgtacgctgggacaaggaccatctctgtgccccctgcctggtcccagtaggtatcaggtctttctgtgcagctcagggagaccctaagttaa

SEQ ID NO: 341985 - DNA, 120 bp, Artificial Sequence
  ENSG00000138028_12 (sequence is synthesized)
cccggccacctctctacccgtccagcctgcccagaccctctcagaggaacggggttggggaccgaaaggacagggatgccgcctgcccagtgtttctgggcctcacggtgctccggcagc

SEQ ID NO: 341986 - DNA, 120 bp, Artificial Sequence
  ENSG00000138028_13 (sequence is synthesized)
agagcgcatggtgctagccatggccggctgcagaggacccagtgaggaaagctcagtctatccctgggccccaaaccctcaccggttccccctcacctggtgttcagacaccccatgctc

SEQ ID NO: 341987 - DNA, 120 bp, Artificial Sequence
  ENSG00000138028_14 (sequence is synthesized)
tcctgcagctcagggcaggtgaccccatccccagtaatattaatcatcactagaactttttgagagccttgtacacatcaggcatcatgctgggcattttatatatgattttatcctcac

SEQ ID NO: 341988 - DNA, 120 bp, Artificial Sequence
  ENSG00000138028_15 (sequence is synthesized)
aataattctgtagccaagcagaattggttccatttgacagatgaagaaattgaggcagattgcgttaagtgctgtaccctaaggtgatatgcagctaattaaatggcagattttaatcca

SEQ ID NO: 341989 - DNA, 120 bp, Artificial Sequence
  ENSG00000138028_16 (sequence is synthesized)
tggacccccagagccgcgcggcgccgcagcaggtgggtgacaccccgccccggccggccggagacccgagcccatcgccgtcagccagccagggccgcgcgggttccaggaaggatgtta

SEQ ID NO: 341990 - DNA, 120 bp, Artificial Sequence
  ENSG00000138028_17 (sequence is synthesized)
gtaagatgaatgggctgaaggaggtcagatatgcttgcgctgtacttctctgggcaccttggcacctagtggggagcaagggaatggggcgtggggtggggatgcgcccccagctctgct

SEQ ID NO: 341991 - DNA, 120 bp, Artificial Sequence
  ENSG00000138028_18 (sequence is synthesized)
tccgccacagcaggcctgcctttatgtgctttatatacaagagctggagtgacatttattttgagcatagttccatgggatccctgctgtctgtctgtgagtcctccctgagcaggagtc

SEQ ID NO: 341992 - DNA, 120 bp, Artificial Sequence
  ENSG00000138028_19 (sequence is synthesized)
catcataactcttttggccttacccaccctatattggagttggccccaattccaatatgtgttccagatcggacctccctgaggacagcaacactctgtatcctgggtcacatttgtggc

SEQ ID NO: 341993 - DNA, 120 bp, Artificial Sequence
  ENSG00000138028_20 (sequence is synthesized)
tgaggcacgcccttaattccaagggcaacctggacgccaggctggatggaggggagaaggcgatgcagccgcaatggtagtctccatggtgtgtgaggagccggcacctgctctcacacg

SEQ ID NO: 341994 - DNA, 120 bp, Artificial Sequence
  ENSG00000138028_21 (sequence is synthesized)
tgcaggccacacttcttgccggccacctggcacccgaatctcagtgcttcctgcacgctcctccctggaggaggggcaagtagctaggtcagccaggtgtttggggcagggacaggtccc

SEQ ID NO: 341995 - DNA, 120 bp, Artificial Sequence
  ENSG00000138028_22 (sequence is synthesized)
agtccttttcccctcctgctgccatactcaccctgggagaggctgaagatgacggaggcattgaaggtgtctccagctcccagtgtatccaccacgcggggtggcgggaaagcatccgag

SEQ ID NO: 341996 - DNA, 120 bp, Artificial Sequence
  ENSG00000138028_23 (sequence is synthesized)
tggagcaatttgccatcagggcccagggcgtcggcgccctcctcagcccaggcacagacaagcacagccctgcaagacggctccactcagctgggtgttagcccaccccgtccccccagc

SEQ ID NO: 341997 - DNA, 120 bp, Artificial Sequence
  ENSG00000138028_24 (sequence is synthesized)
catcctcccagctccagggcggactcctggagtccaggctcatcctgtaccttctaaagccccttcctggcttccccggctcaccctttcctcacacgaccatacaagcccctcaaggct

SEQ ID NO: 341998 - DNA, 120 bp, Artificial Sequence
  ENSG00000138028_25 (sequence is synthesized)
tcctctgctgactggaaccccaagtgcttggccacatctttgctgacaaacacctgtgggcagtggaagagaagctggtggtcacttctaactcgtcattcaccaacagcagcctagcgt

SEQ ID NO: 341999 - DNA, 120 bp, Artificial Sequence
  ENSG00000138028_26 (sequence is synthesized)
tgcccccattacaacacgactcccccaacatgtccacatagatccccaacgtagcatctcactgtcccacgggaacgtggttttcttttttctttattttttgtgaagatggtctccctg

SEQ ID NO: 342000 - DNA, 120 bp, Artificial Sequence
  ENSG00000138028_27 (sequence is synthesized)
cttttttctttattttttgtgaagatggtctccctgaggctggtcttgaactcctggccccatatgatcttcctgcctcagcctcccaaaatttctgggattacaggtgtgagtcactgc

SEQ ID NO: 342001 - DNA, 120 bp, Artificial Sequence
  ENSG00000138028_28 (sequence is synthesized)
caggccaggagcagctcgggtgagtagggtgggccgggggtgctttcagggagaagaccaggcccagggctgcagactcacctctcccgggctgattctccacttttctgacagacttct

SEQ ID NO: 342002 - DNA, 120 bp, Artificial Sequence
  ENSG00000138028_29 (sequence is synthesized)
aggggctgggctgatggggccagggacgggaggctctgggcagccagatctgggactgacctcggctgccccattgactcctgccttctccacctcccccggcacctcttctaatccagc

SEQ ID NO: 342003 - DNA, 120 bp, Artificial Sequence
  ENSG00000138028_30 (sequence is synthesized)
ttctcttctctttagttctcctctacctctttgccctccatgactatgaccagagtggacagctggatggcctggagctgctgtccatgttgacagctgctctggcccctggagctgcca

SEQ ID NO: 342004 - DNA, 120 bp, Artificial Sequence
  ENSG00000138029_0 (sequence is synthesized)
acttggacctgaaccttgctccgagagggagtcctcgcggacgtcagccaagattccagaatgactatcttgacttacccctttaaaaatcttcccactgcatcaaaatgggccctcaga

SEQ ID NO: 342005 - DNA, 120 bp, Artificial Sequence
  ENSG00000138029_1 (sequence is synthesized)
ttttccataagacctctgagctgttcctcccagctacgagctgccccagctgtccagaccaaaacgaagaagacgttagccaaacccaatataaggaatgttgtggtggtggatggtgtt

SEQ ID NO: 342006 - DNA, 120 bp, Artificial Sequence
  ENSG00000138029_2 (sequence is synthesized)
cgcactccatttttgctgtctggcacttcatataaagacctgatgccacatgatttggctagagcagcgcttacgggtttgttgcatcggaccagtgtccctaaggaagtagttgattat

SEQ ID NO: 342007 - DNA, 120 bp, Artificial Sequence
  ENSG00000138029_3 (sequence is synthesized)
atcatctttggtacagttattcaggaagtgaaaacaagcaatgtggctagagaggctgcccttggagctggcttctctgacaagactcctgctcacactgtcaccatggcttgtatctct

SEQ ID NO: 342008 - DNA, 120 bp, Artificial Sequence
  ENSG00000138029_4 (sequence is synthesized)
gccaaccaagccatgaccacaggtgttggcttgattgcttctggccagtgtgatgtgatcgtggcaggtggtgttgagttgatgtccgatgtccctattcgtcactcaaggaaaatgaga

SEQ ID NO: 342009 - DNA, 120 bp, Artificial Sequence
  ENSG00000138029_5 (sequence is synthesized)
aaactgatgcttgatctcaataaggccaaatctatgggccagcgactgtctttaatctctaaattccgatttaatttcctagcacctgagctccctgcggtttctgagttctccaccagt

SEQ ID NO: 342010 - DNA, 120 bp, Artificial Sequence
  ENSG00000138029_6 (sequence is synthesized)
gagaccatgggccactctgcagaccgactggccgctgcctttgctgtttctcggctggaacaggatgaatatgcactgcgctctcacagtctagccaagaaggcacaggatgaaggactc

SEQ ID NO: 342011 - DNA, 120 bp, Artificial Sequence
  ENSG00000138029_7 (sequence is synthesized)
ctttctgatgtggtacccttcaaagtaccaggaaaagatacagttaccaaagataatggcatccgtccttcctcactggagcagatggccaaactaaaacctgcattcatcaagccctac

SEQ ID NO: 342012 - DNA, 120 bp, Artificial Sequence
  ENSG00000138029_8 (sequence is synthesized)
tctggccatgggttataagccgaaggcatatttgagggattttatgtatgtgtctcaggatccaaaagatcaactattacttggaccaacatatgctactccaaaagttctagaaaaggc

SEQ ID NO: 342013 - DNA, 120 bp, Artificial Sequence
  ENSG00000138029_9 (sequence is synthesized)
aggattgaccatgaatgatattgatgcttttgaatttcatgaagctttctcgggtcagattttggcaaattttaaagccatggattctgattggtttgcagaaaactacatgggtagaaa

SEQ ID NO: 342014 - DNA, 120 bp, Artificial Sequence
  ENSG00000138029_10 (sequence is synthesized)
aaccaaggttggattgcctcctttggagaagtttaataactggggtggatctctgtccctgggacacccatttggagccactggctgcaggttggtcatggctgctgccaacagattacg

SEQ ID NO: 342015 - DNA, 120 bp, Artificial Sequence
  ENSG00000138029_11 (sequence is synthesized)
gaaagaaggaggccagtatggcttagtggctgcgtgtgcagctggagggcagggccatgctatgatagtggaagcttatccaaaataatagatccagaagaagtgacctgaagtttctgt

SEQ ID NO: 342016 - DNA, 120 bp, Artificial Sequence
  ENSG00000138029_12 (sequence is synthesized)
gcaacactcacactaggcaatgccatttcaatgcattactaaatgacatttgtagttcctagctcctcttaggaaaacagttcttgtggccttctattaaatagtttgcacttaagcctt

SEQ ID NO: 342017 - DNA, 120 bp, Artificial Sequence
  ENSG00000138029_13 (sequence is synthesized)
gccagtgttctgagcttttcaataatcagtttactgctctttcagggatttctaagccaccagaatctcacatgagatgtgtgggtggttgtttttggtctctgttgtcactaaagacta

SEQ ID NO: 342018 - DNA, 120 bp, Artificial Sequence
  ENSG00000138029_14 (sequence is synthesized)
aatgagggtttgcagttgggaaagaggtcaactgagatttggaaatcatctttgtaatatttgcaaattatacttgttcttatctgtgtcctaaagatgtgttctctataaaatacaaac

SEQ ID NO: 342019 - DNA, 120 bp, Artificial Sequence
  ENSG00000138029_15 (sequence is synthesized)
caacgtgcctaattaattatggaaaaataattcagaatctaaacaccactgaaaacttataaaaaatgtttagatacataaatatggtggtcagcgttaataaagtggagaaatattgga

SEQ ID NO: 342020 - DNA, 120 bp, Artificial Sequence
  ENSG00000138029_16 (sequence is synthesized)
cttgttctccttgacactctcctgcctttgatcttgtgtactgttctctcttgattctcctactacctctcaagttactgtttgtctcacatattccctcagccttctcattgtagggac

SEQ ID NO: 342021 - DNA, 120 bp, Artificial Sequence
  ENSG00000138029_17 (sequence is synthesized)
atcacaaagctaagggttttttggtgtagtaatggaccctcaagttaaggatgagaaggtttgtgtgtactacagctggaaaggtgttaggaaccaagcaagcagctctaggggccagct

SEQ ID NO: 342022 - DNA, 120 bp, Artificial Sequence
  ENSG00000138029_18 (sequence is synthesized)
actttgtctcacacaccacatggtatgtccctttcctggtctttctgcttctatcattcttcattctggctggcttatttgctcacttatggtttacaaactctggcttacgaatgacat

SEQ ID NO: 342023 - DNA, 120 bp, Artificial Sequence
  ENSG00000138029_19 (sequence is synthesized)
cagtttaccatcaacctgttcttcctcatggcatctttttagcttcaactaattggcatttctttccatgcttctttgcctagagagagaatctgaccaacacagttgatcacttgtagg

SEQ ID NO: 342024 - DNA, 120 bp, Artificial Sequence
  ENSG00000138029_20 (sequence is synthesized)
tagatgacactggtttctggttggctcctatatggatggatcattggtgagtccagtacctactctgaatctaatcagcttttatattgacttagggatgtgtctatggcttcccctttg

SEQ ID NO: 342025 - DNA, 120 bp, Artificial Sequence
  ENSG00000138029_21 (sequence is synthesized)
gcagggactgtaagcagggcaactccctttagaggggcctgtgggatgtccaaaacaacaacaacacaacaaataccccccccccatccagacaaacaaaaaaagtatcttttattgtta

SEQ ID NO: 342026 - DNA, 120 bp, Artificial Sequence
  ENSG00000138029_22 (sequence is synthesized)
aagaggaaataggaaatttaaaaataaaagaaatagagggggctgtgggagaacaggcattgcagaatacatctctgctttccttctgtattctaagcttcaatatttcatgactttcta

SEQ ID NO: 342027 - DNA, 120 bp, Artificial Sequence
  ENSG00000138029_23 (sequence is synthesized)
atctacactcatttctcttcagaggttttgctttgcatcttctagctaactgtggaattaacatatccacctggttgtctctctgtcacctcaaagttagcgagtttaaaaatgaggcca

SEQ ID NO: 342028 - DNA, 83 bp, Artificial Sequence
  ENSG00000138029_24 (sequence is synthesized)
ctctgtcacctcaaagttagcgagtttaaaaatgaggccaggcgcagtgccttatgccggtaatcccaacactttgggaagcc

SEQ ID NO: 342029 - DNA, 120 bp, Artificial Sequence
  ENSG00000138029_25 (sequence is synthesized)
tcgctcctggctaacatggccgaaaggtcgtattctccgggggaggacgggggcccggagaggagggggtggagtgcctggttttccagtcaggcggccggagggcagccctcaagaacg

SEQ ID NO: 342030 - DNA, 120 bp, Artificial Sequence
  ENSG00000138029_26 (sequence is synthesized)
acgtcagccaaggtgagacggcgagccctcagctctccgcccgggctttcccaaaggcgagattccacttccttccccgcaactgtcgccggtgcccccggccccctcccctccctggga

SEQ ID NO: 342031 - DNA, 120 bp, Artificial Sequence
  ENSG00000138029_27 (sequence is synthesized)
aaagtaacacagctagtgactagaaccacgtgccctggctaccacttccgagtgacatcagctgccgatccataagaaataccttcaaaccaatgcagggattccagaatgactatcttg

SEQ ID NO: 342032 - DNA, 120 bp, Artificial Sequence
  ENSG00000138029_28 (sequence is synthesized)
ctcggacaaggtcggcagtgctagctgcagttaggacagtgacttggactagcgttccagctgaagttcgggacagtagtgtcacctgcgccctaatttatcatcacaagttaacgaagt

SEQ ID NO: 342033 - DNA, 120 bp, Artificial Sequence
  ENSG00000138029_29 (sequence is synthesized)
ctgggggtgtgggggtgtgtgtgtgtgtgtgggtgtgtgtgggcgtgtgtgggcgtcggccttaatgtaaccctggtctgcgtagaagtgtgtgttgtttcgcctgcttcccctgtaccc

SEQ ID NO: 342034 - DNA, 120 bp, Artificial Sequence
  ENSG00000138029_30 (sequence is synthesized)
aacatctctgttgccttcaaattaaaaaattataggtccaatcaataatgatactacattatttaggattaggcttgaggatgttaatgggaggctgttttctgggatttgaacctgctg

SEQ ID NO: 342035 - DNA, 120 bp, Artificial Sequence
  ENSG00000138029_31 (sequence is synthesized)
gagtcatggaggttccataaacctcgttggtcagtttatttatcctcttgctgtccgtcctggaggtgaatggcatacaaatgctcttgagacctgctatggaaccaaaagttaacttta

SEQ ID NO: 342036 - DNA, 120 bp, Artificial Sequence
  ENSG00000138029_32 (sequence is synthesized)
aatttgcaatttgtgaaatgcttctctattgatgaatatcttcttctcccatgtgcaagagggcccattcctgaaatagaagtgattaggaactagttaataacagaaagttgtttagtt

SEQ ID NO: 342037 - DNA, 120 bp, Artificial Sequence
  ENSG00000138030_0 (sequence is synthesized)
aggcagggctgcagatgcgaggcccagctgtacctcgcgtgtcccgggtcgggagtcggagacgcaggtgcaggagagtgcggggcaagtagcgcattttctctttgcattctcgagatc

SEQ ID NO: 342038 - DNA, 120 bp, Artificial Sequence
  ENSG00000138030_1 (sequence is synthesized)
gcttagccgcgctttaaaaaggtttgcatcagctgtgagtccatctgacaagcgaggaaactaaggctgagaagtgggaggcgttgccatctgcaggcccaggcaacctgctacgggaag

SEQ ID NO: 342039 - DNA, 120 bp, Artificial Sequence
  ENSG00000138030_2 (sequence is synthesized)
accggggaccaagacctctgggttggctttcctagacccgctcgggtcttcgggtgtcgcgaggaagggccctgctcctttcgttccctgcacccctggccgctgcaggtggctccctgg

SEQ ID NO: 342040 - DNA, 120 bp, Artificial Sequence
  ENSG00000138030_3 (sequence is synthesized)
aggaggagctcccacgcggaggaggagccagggcagctgggagcggggacaccatcctcctggataagaggcagaggccgggaggaaccccgtcagccgggcgggcaggaagctctggga

SEQ ID NO: 342041 - DNA, 120 bp, Artificial Sequence
  ENSG00000138030_4 (sequence is synthesized)
gtagcctcatggaagagaagcagatcctgtgcgtggggctagtggtgctggacgtcatcagcctggtggacaagtaccctaaggaggactcggagataaggtgtttgtcccagagatggc

SEQ ID NO: 342042 - DNA, 120 bp, Artificial Sequence
  ENSG00000138030_5 (sequence is synthesized)
agcgcggaggcaacgcgtccaactcctgcaccgttctctccctgctcggagccccctgtgccttcatgggctcaatggctcctggccatgttgctgacttcctggtggccgacttcaggc

SEQ ID NO: 342043 - DNA, 120 bp, Artificial Sequence
  ENSG00000138030_6 (sequence is synthesized)
ggcggggcgtggacgtgtctcaggtggcctggcagagcaagggggacacccccagctcctgctgcatcatcaacaactccaatggcaaccgtaccattgtgctccatgacacgagcctgc

SEQ ID NO: 342044 - DNA, 120 bp, Artificial Sequence
  ENSG00000138030_7 (sequence is synthesized)
cagatgtgtctgctacagactttgagaaggttgatctgacccagttcaagtggatccacattgagggccggaacgcatcggagcaggtgaagatgctgcagcggatagacgcacacaaca

SEQ ID NO: 342045 - DNA, 120 bp, Artificial Sequence
  ENSG00000138030_8 (sequence is synthesized)
ccaggcagcctccagagcagaagatccgggtgtccgtggaggtggagaagccacgagaggagctcttccagctgtttggctacggagacgtggtgtttgtcagcaaagatgtggccaagc

SEQ ID NO: 342046 - DNA, 120 bp, Artificial Sequence
  ENSG00000138030_9 (sequence is synthesized)
gcaaattgctccactcggatgctttcccgccaccccgcgtggtggatacactgggagctggagacaccttcaatgcctccgtcatcttcagcctctcccaggggaggagcgtgcaggaag

SEQ ID NO: 342047 - DNA, 120 bp, Artificial Sequence
  ENSG00000138030_10 (sequence is synthesized)
cactgagattcgggtgccaggtggccggcaagaagtgtggcctgcagggctttgatggcatcgtgtgagagcaggtgccggctcctcacacaccatggagactaccattgcggctgcatc

SEQ ID NO: 342048 - DNA, 120 bp, Artificial Sequence
  ENSG00000138030_11 (sequence is synthesized)
gccttctcccctccatccagcctggcgtccaggttgccctgttcaggggacagatgcaagctgtggggaggactctgcctgtgtcctgtgttccccacagggagaggctctggggggatg

SEQ ID NO: 342049 - DNA, 120 bp, Artificial Sequence
  ENSG00000138030_12 (sequence is synthesized)
gctgggggatgcagagcctcagagcaaataaatcttcctcagagccagcttctcctctcaatgtctgaactgctctggctgggcattcctgaggctctgactcttcgatcctccctcttt

SEQ ID NO: 342050 - DNA, 120 bp, Artificial Sequence
  ENSG00000138030_13 (sequence is synthesized)
gtgtccattccccaaattaacctctccgcccaggcccagaggaggggctgcctgggctagagcagcgagaagtgccctgggcttgccaccagctctgccctggctggggaggacactcgg

SEQ ID NO: 342051 - DNA, 120 bp, Artificial Sequence
  ENSG00000138030_14 (sequence is synthesized)
tgccccacacccagtgaacctgccaaagaaaccgtgagagctcttcggggccctgcgttgtgcagactctattcccacagctcagaagctgggagtccacaccgctgagctgaactgaca

SEQ ID NO: 342052 - DNA, 120 bp, Artificial Sequence
  ENSG00000138030_15 (sequence is synthesized)
ggccagtggggggcaggggtgcgcctcctctgccctgcccaccagcctgtgatttgatggggtcttcattgtccagaaatacctcctcccgctgactgccccagagcctgaaagtctcac

SEQ ID NO: 342053 - DNA, 120 bp, Artificial Sequence
  ENSG00000138030_16 (sequence is synthesized)
ccttggagcccaccttggaattaagggcgtgcctcagccacaaatgtgacccaggatacagagtgttgctgtcctcagggaggtccgatctggaacacatattggaattggggccaactc

SEQ ID NO: 342054 - DNA, 120 bp, Artificial Sequence
  ENSG00000138030_17 (sequence is synthesized)
caatatagggtgggtaaggccttataatgtaaagagcatataatgtaaagggctttagagtgagacagacctggattaaaatctgccatttaattagctgcatatcaccttagggtacag

SEQ ID NO: 342055 - DNA, 120 bp, Artificial Sequence
  ENSG00000138030_18 (sequence is synthesized)
cacttaacgcaatctgcctcaatttcttcatctgtcaaatggaaccaattctgcttggctacagaattattgtgaggataaaatcatatataaaatgcccagcatgatgcctgatgtgta

SEQ ID NO: 342056 - DNA, 120 bp, Artificial Sequence
  ENSG00000138030_19 (sequence is synthesized)
gattttgtcctggatgacctccgccgctattctgtggacctacgctacacagtctttcagaccacaggctccgtccccatcgccacggtcatcatcaacgaggccagtggtagccgcacc

SEQ ID NO: 342057 - DNA, 120 bp, Artificial Sequence
  ENSG00000138030_20 (sequence is synthesized)
atgagttggactgaaaaacagagtcaggatcggagcatgcttcagccaagacctaaaaggatggcccttagtgtttctctctctgagctccaggctctgcactcctgcatctcctgccct

SEQ ID NO: 342058 - DNA, 120 bp, Artificial Sequence
  ENSG00000138030_21 (sequence is synthesized)
gttgcactgcctgtggcaagactgtgattcccagttctctcccagccccctttgcttgcacccctgcctttcagggtccctagtggccctgccagctaccctccagtccccaaaaccctt

SEQ ID NO: 342059 - DNA, 120 bp, Artificial Sequence
  ENSG00000138030_22 (sequence is synthesized)
cagaacaggactcttcttctcttagaggctcgtgtgctccagcaccctctccccactccttttggaggtccagaccacttccaggctctaatctgtgtctccttgcccttttcctggccc

SEQ ID NO: 342060 - DNA, 80 bp, Artificial Sequence
  ENSG00000138031_0 (sequence is synthesized)
ggctctgcggggagcagccctcgggcgcgccgagctctcccgccccagcccgcgcggggaccgtcccggagcacgcggtg

SEQ ID NO: 342061 - DNA, 120 bp, Artificial Sequence
  ENSG00000138031_1 (sequence is synthesized)
ccgtcccggagcacgcggtggccgagttcccgcacaggtaaacgcaggggcagggccaggcttccgggggggaagacagcgccccgagcgtgggaagggggccggatcggagcccgagcc

SEQ ID NO: 342062 - DNA, 120 bp, Artificial Sequence
  ENSG00000138031_2 (sequence is synthesized)
tccaagggtttggtggaaaaaggaagtaaacagaaggaaggctcaggaatcccccacgatggtcctgatttctttccggcacattttatttacagcttctaaggactgggcctggaggga

SEQ ID NO: 342063 - DNA, 120 bp, Artificial Sequence
  ENSG00000138031_3 (sequence is synthesized)
atttaggtgaggaagtcggggactgagaaagaagagatgacagagagaaaccggttaccagggatggaaaggcggctaggcccttccacaagccagggacaggaaattgagtgtctggcg

SEQ ID NO: 342064 - DNA, 120 bp, Artificial Sequence
  ENSG00000138031_4 (sequence is synthesized)
tggacaggactaagtgtgcctgcggtgggcggtggtgtgagccgggggtggcagggaaggccctgggttgggaggctcttgcagcagagatccttttatgagggttagggcgggtcatgg

SEQ ID NO: 342065 - DNA, 120 bp, Artificial Sequence
  ENSG00000138031_5 (sequence is synthesized)
ggaaaccgcaaggtaggagggaagaggtgcttctactcagcaatgcccttttcagttctagctgatcagtgctacctgtgctctggaaacccgctctgcgttcctgctggaggtggcctc

SEQ ID NO: 342066 - DNA, 120 bp, Artificial Sequence
  ENSG00000138031_6 (sequence is synthesized)
ccctccgccccagacaagaagaggccctcagccctcccccggtctcagagagccctgagaggaggcccagtccagagctcttcctccgttcccagtccacttctctagggccagtagcag

SEQ ID NO: 342067 - DNA, 120 bp, Artificial Sequence
  ENSG00000138031_7 (sequence is synthesized)
acaccagccagtatgccgaggaaccagggcttctccgagcccgaatactcggccgagtactcagccgagtactccgtcagcctgccctccgaccctgaccgcggggtgggccggacccat

SEQ ID NO: 342068 - DNA, 120 bp, Artificial Sequence
  ENSG00000138031_8 (sequence is synthesized)
gaaatctcggtccggaactcgggctcctgcctgtgcctgcctcgcttcatgcggctgactttcgtgccggagtccttggagaacctctaccagacctacttcaaaaggcagcgccacgag

SEQ ID NO: 342069 - DNA, 120 bp, Artificial Sequence
  ENSG00000138031_9 (sequence is synthesized)
accctgctggtgctggtggtctttgcagccctctttgactgctacgtggtggtcatgtgtgctgtggtcttctccagcgacaagctggcttccctcgccgtggctggaattggactggtg

SEQ ID NO: 342070 - DNA, 120 bp, Artificial Sequence
  ENSG00000138031_10 (sequence is synthesized)
ttggacatcatcctcttcgtgctctgcaaaaaggggctgctcccggaccgggtcacccgcagagtgctgccctacgtgctgtggctgctcataaccgcccagatcttctcctacctgggc

SEQ ID NO: 342071 - DNA, 120 bp, Artificial Sequence
  ENSG00000138031_11 (sequence is synthesized)
ctgaacttcgcgcgtgcccacgcggctagtgacacggtgggctggcaggtcttctttgtcttctccttcttcatcacgctgcccctcagcctcagccccatcgtgatcatctccgtggtc

SEQ ID NO: 342072 - DNA, 120 bp, Artificial Sequence
  ENSG00000138031_12 (sequence is synthesized)
tcctgtgtggtgcacacgttggtcctgggggtcaccgtggcccagcagcagcaggaggagctcaaggggatgcagctgctgcgggagatcctggccaacgtcttcctctacctgtgcgcc

SEQ ID NO: 342073 - DNA, 120 bp, Artificial Sequence
  ENSG00000138031_13 (sequence is synthesized)
atcgctgtgggcatcatgtcctactacatggctgaccgcaagcaccgcaaggccttcctggaggcccgccagtcgctggaggtgaagatgaacctggaagagcagagccagcagcaggag

SEQ ID NO: 342074 - DNA, 120 bp, Artificial Sequence
  ENSG00000138031_14 (sequence is synthesized)
aacctcatgctttccatcctgcccaagcacgtggctgacgagatgctgaaagacatgaagaaagacgagagccagaaggaccagcagcagttcaacaccatgtacatgtaccgtcacgag

SEQ ID NO: 342075 - DNA, 120 bp, Artificial Sequence
  ENSG00000138031_15 (sequence is synthesized)
aacgtcagcatcctctttgccgacatcgtgggctttacccagctgtcttctgcctgcagtgcccaggagcttgtgaagctgctcaacgagctctttgcccgctttgacaagctggcagct

SEQ ID NO: 342076 - DNA, 120 bp, Artificial Sequence
  ENSG00000138031_16 (sequence is synthesized)
aaataccaccagctgcggattaagatcctgggcgactgctactactgcatctgcggcttgcccgactaccgggaggaccacgccgtctgctccatcctcatggggctggccatggtggag

SEQ ID NO: 342077 - DNA, 120 bp, Artificial Sequence
  ENSG00000138031_17 (sequence is synthesized)
gccatctcgtatgtgcgggagaagaccaagactggggtggacatgcgtgtgggggtgcacacgggcaccgtgctggggggcgtcctgggccagaagcgctggcagtacgacgtgtggtcg

SEQ ID NO: 342078 - DNA, 120 bp, Artificial Sequence
  ENSG00000138031_18 (sequence is synthesized)
actgatgtcactgtagccaacaagatggaggccggcggcatccctgggcgcgtgcacatctcccagagcaccatggactgcctgaaaggggagtttgatgtggagccaggcgatgggggc

SEQ ID NO: 342079 - DNA, 120 bp, Artificial Sequence
  ENSG00000138031_19 (sequence is synthesized)
agccgctgtgattacctagaagagaagggtattgaaacctacctcatcattgcctccaagccagaggtgaagaaaacagccacccagaatggcctcaatggctcggccctgcccaatgga

SEQ ID NO: 342080 - DNA, 120 bp, Artificial Sequence
  ENSG00000138031_20 (sequence is synthesized)
gcaccagcttcctcaaagtccagctcccctgccctcattgagaccaaggagcccaacgggagtgcccacagcagtgggtccacgtcggagaagcccgaggagcaggatgcccaggccgac

SEQ ID NO: 342081 - DNA, 120 bp, Artificial Sequence
  ENSG00000138031_21 (sequence is synthesized)
tccccaacccacgccggaggctgcgcctgcaggacctggctgaccgagtggtggatgcctctgaagatgagcacgagctcaaccagctgctcaacgaggccctgcttgagcgagagtccg

SEQ ID NO: 342082 - DNA, 120 bp, Artificial Sequence
  ENSG00000138031_22 (sequence is synthesized)
cccaagtagtaaagaagagaaacaccttcctcttgtccatgcggttcatggaccccgagatggaaacccgctactcggtggagaaggagaagcagagtggggctgccttcagctgctcct

SEQ ID NO: 342083 - DNA, 120 bp, Artificial Sequence
  ENSG00000138031_23 (sequence is synthesized)
gcgtcgtcctgctctgcacggccctggtcgagatactcatcgacccctggctaatgacaaactatgtgaccttcatggtgggggagattctgctcctcatcctgaccatctgctccctgg

SEQ ID NO: 342084 - DNA, 120 bp, Artificial Sequence
  ENSG00000138031_24 (sequence is synthesized)
ctgccatctttccccgggcctttcctaagaagcttgtggccttctcaacttggattgaccggacccgctgggccaggaacacctgggccatgctcgccatcttcatcctggtgatggcaa

SEQ ID NO: 342085 - DNA, 120 bp, Artificial Sequence
  ENSG00000138031_25 (sequence is synthesized)
atgtcgtggacatgctcagctgtctccagtactacacgggacccagcaatgcaacggcagggatggaaacggagggcagctgcctggagaaccccaagtattacaactatgtggccgtgc

SEQ ID NO: 342086 - DNA, 120 bp, Artificial Sequence
  ENSG00000138031_26 (sequence is synthesized)
tgtccctcatcgccaccatcatgctggtgcaggtcagccacatggtgaagctcacgctcatgctgctcgtcgcaggcgccgtggccaccatcaacctctatgcctggcgtcccgtctttg

SEQ ID NO: 342087 - DNA, 120 bp, Artificial Sequence
  ENSG00000138031_27 (sequence is synthesized)
atgaatacgaccacaagcgttttcgggagcacgacttacctatggtggccttagagcagatgcaaggattcaaccctgggctcaatggcactgacaggctgcccctggtgccttccaagt

SEQ ID NO: 342088 - DNA, 120 bp, Artificial Sequence
  ENSG00000138031_28 (sequence is synthesized)
actctatgacggtgatggtgttcctcatgatgctcagcttctactacttctcccgccacgtagaaaaactggcacggacacttttcttgtggaagattgaggtccacgaccagaaggaac

SEQ ID NO: 342089 - DNA, 120 bp, Artificial Sequence
  ENSG00000138031_29 (sequence is synthesized)
gtgtctatgagatgcgacgctggaacgaggccttggtcaccaacatgttgcctgagcacgtggcacgccatttcctggggtccaagaagagagatgaggagctgtatagccagacgtatg

SEQ ID NO: 342090 - DNA, 120 bp, Artificial Sequence
  ENSG00000138031_30 (sequence is synthesized)
atgagattggagtcatgtttgcctccctgcccaactttgctgacttctacacagaggagagcatcaacaatggtggtattgagtgtctgcgtttcctcaatgaaatcatctcagattttg

SEQ ID NO: 342091 - DNA, 120 bp, Artificial Sequence
  ENSG00000138031_31 (sequence is synthesized)
actctctcctggacaatcccaagttccgggtgatcaccaagatcaaaaccattggcagcacgtatatggcggcttcaggagtcacccccgatgtcaacaccaatggctttgccagctcca

SEQ ID NO: 342092 - DNA, 120 bp, Artificial Sequence
  ENSG00000138031_32 (sequence is synthesized)
acaaggaagacaagtccgagagagagcgctggcagcacctggctgacctggccgacttcgcgctggccatgaaggatacgctcaccaacatcaacaaccagtccttcaataacttcatgc

SEQ ID NO: 342093 - DNA, 120 bp, Artificial Sequence
  ENSG00000138031_33 (sequence is synthesized)
tgcgcataggcatgaacaaaggcggggttctggctggggtcatcggagcccggaaaccacactacgacatctggggcaatacagtcaatgtagccagcaggatggagtccacgggggtca

SEQ ID NO: 342094 - DNA, 120 bp, Artificial Sequence
  ENSG00000138031_34 (sequence is synthesized)
tgggcaacattcaggtggtagaagaaacccaagtcatcctccgagagtacggcttccgctttgtgaggcgaggccccatctttgtgaaggggaagggggagctgctgaccttcttcttga

SEQ ID NO: 342095 - DNA, 120 bp, Artificial Sequence
  ENSG00000138031_35 (sequence is synthesized)
aggggcgggataagctagccaccttccccaatggcccctctgtcacactgccccaccaggtggtggacaactcctgaatggcctcgagcctgcaacagtccaaaccggaagggagaattt

SEQ ID NO: 342096 - DNA, 120 bp, Artificial Sequence
  ENSG00000138031_36 (sequence is synthesized)
attttttgaaactgaaggaagtcccgaccttcctggattgaagtgcacactcatggactttaggtttagaaacctcctcagccttcatttgttcgtggatgtgtgagctctgagggtggc

SEQ ID NO: 342097 - DNA, 120 bp, Artificial Sequence
  ENSG00000138031_37 (sequence is synthesized)
cctgctattcctgtgtgtgcctgtagtgtccccagcataggggtcttaggcatagggctgaacagtccttccagagccctcgttccaatccctgccgtccttgcccctgaggggccctga

SEQ ID NO: 342098 - DNA, 120 bp, Artificial Sequence
  ENSG00000138031_38 (sequence is synthesized)
ccactgtgagcaggagggtggcagagctgggacaaagctgcctttgccgctgggctttccgggactgtggagggagcacaggcggggaagctccacttcagacagggcttggtggggcag

SEQ ID NO: 342099 - DNA, 120 bp, Artificial Sequence
  ENSG00000138031_39 (sequence is synthesized)
gacatggctcccattttgaagggaggtctccatgtggtccgagtgaggtgagacggccctcgtcctggtgttcctgatcatcttgaaaggttcttctggaactcctgtccccttagtcat

SEQ ID NO: 342100 - DNA, 120 bp, Artificial Sequence
  ENSG00000138031_40 (sequence is synthesized)
gagaacagaaagtgcaatatttcctttcacctggcaggggaggggggatttatttctgaaagaaaaatatataaacagatcttctacatttatatttttaatcttctgttaaatacactt

SEQ ID NO: 342101 - DNA, 120 bp, Artificial Sequence
  ENSG00000138031_41 (sequence is synthesized)
tccgatattgccttgccttttgagctcttgctacagtcgcctttgctactgctttaagagaatttacaggtattgataaagaacaagactgttttattaaaagctttattcaacttgaaa

SEQ ID NO: 342102 - DNA, 120 bp, Artificial Sequence
  ENSG00000138031_42 (sequence is synthesized)
aggtatgtccagtggcacagctggcacgtgctcagactcggcatgagaacaaaaccggaacagtgctttcccacgtgcccctgcctcccaccctggccctgaacagtaagtccagaggca

SEQ ID NO: 342103 - DNA, 120 bp, Artificial Sequence
  ENSG00000138031_43 (sequence is synthesized)
gagacgtggggcaagtggaaaagaatctctgcaatagctagcctcagcacaggaagaaacacttccacccatccacaaaatctgggctgaagttctagatgcatatggcctacctttggg

SEQ ID NO: 342104 - DNA, 120 bp, Artificial Sequence
  ENSG00000138031_44 (sequence is synthesized)
tatgaaccttctaataccttgtgatctgtctcagtggcgtctggcagaaaagctccacgaaaggggcaaagggacagaagagcaggcagtggcagtttccaggtaacagtgctgccaccc

SEQ ID NO: 342105 - DNA, 120 bp, Artificial Sequence
  ENSG00000138031_45 (sequence is synthesized)
aggtgaccatggccatcctaggagagaagtctctggatgagaggaggcccccagccagtcactccagggttctccttcccacccgctgctcgccacgggtggaagggcttggccctggga

SEQ ID NO: 342106 - DNA, 120 bp, Artificial Sequence
  ENSG00000138031_46 (sequence is synthesized)
tgtcaccacagagcctgatcgtgctgtgcagtctaaaggggaccacggggcaagaagaggtgactttggtggtgtccagagcaggcttctcaacctcatgggtttgatcctggccaacgt

SEQ ID NO: 342107 - DNA, 120 bp, Artificial Sequence
  ENSG00000138031_47 (sequence is synthesized)
attgccaccctcagccttgtcagggccagaagctgcctgtcccagacccctggctgctcccgaggcagatctgtgaggtctctctggagggcagcatggttccctgctcacgtttcttgc

SEQ ID NO: 342108 - DNA, 120 bp, Artificial Sequence
  ENSG00000138031_48 (sequence is synthesized)
atccctggcggatcaaagattgaagaaagattgtactcctgtgtcgtggctccaacactgaggctgagatgggagcgcgtgcacatctcccagagcaccatggactgcctgaaaggggag

SEQ ID NO: 342109 - DNA, 120 bp, Artificial Sequence
  ENSG00000138031_49 (sequence is synthesized)
ctacgacatctggggcaatacagtcaatgtagccagcaggatggagtccacgggggtcatgggcaacattcagtggcgtctggcagaaaagctccacgaaaggggcaaagggacagaaga

SEQ ID NO: 342110 - DNA, 120 bp, Artificial Sequence
  ENSG00000138032_0 (sequence is synthesized)
gcaaaaggagccgagcggcttctgctcaatggcggaaaagccgccggtgctctgacggcctcgttcccctagcagttgcgggggagtttcctgccggcgcggctggagtctctgattctc

SEQ ID NO: 342111 - DNA, 120 bp, Artificial Sequence
  ENSG00000138032_1 (sequence is synthesized)
agggttcggtggttggaagatgctccagagagacgaggctgcggcggaggaggtggcggcggccgaatcggcaacggcgctagggtggagagaaggcggcatcggcggcggcggcggcgt

SEQ ID NO: 342112 - DNA, 120 bp, Artificial Sequence
  ENSG00000138032_2 (sequence is synthesized)
gaggggccgggcggtgtaaacagccccggaggcggcggtcgagaccccgagggggaagcggcggctgagtcagggtcgcgcctccgttggaaacttgggctgagtaccgcggcgggcgcg

SEQ ID NO: 342113 - DNA, 120 bp, Artificial Sequence
  ENSG00000138032_3 (sequence is synthesized)
agcgaggcgccctagacatcttctccctcccttgcctcagatttattgctaaacatgggtgcatttttggataaacccaaaactgaaaaacataatgctcatggtgctgggaatggttta

SEQ ID NO: 342114 - DNA, 120 bp, Artificial Sequence
  ENSG00000138032_4 (sequence is synthesized)
cgttatggcctgagcagcatgcaaggatggagagtggaaatggaagatgcacacacagctgttgtaggtattcctcacggcttggaagactggtcattttttgcagtttatgatggtcat

SEQ ID NO: 342115 - DNA, 120 bp, Artificial Sequence
  ENSG00000138032_5 (sequence is synthesized)
gctggatcccgagtggcaaattactgctcaacacatttattagaacacatcactactaacgaagactttagggcagctggaaaatcaggatctgctcttgagctttcagtggaaaatgtt

SEQ ID NO: 342116 - DNA, 120 bp, Artificial Sequence
  ENSG00000138032_6 (sequence is synthesized)
aagaatggtatcagaactggatttttgaaaattgatgaatacatgcgtaacttttcagacctcagaaacgggatggacaggagtggttcaactgcagtgggagttatgatttcacctaag

SEQ ID NO: 342117 - DNA, 120 bp, Artificial Sequence
  ENSG00000138032_7 (sequence is synthesized)
catatctactttatcaactgtggtgattcacgtgctgttctgtataggaatggacaagtctgcttttctacccaggatcacaaaccttgcaatccaagggaaaaggagcgaatccaaaat

SEQ ID NO: 342118 - DNA, 120 bp, Artificial Sequence
  ENSG00000138032_8 (sequence is synthesized)
gcaggaggcagcgtgatgatacaacgtgttaatggttcattagcagtatctcgtgctctgggggactatgattacaagtgtgttgatggcaagggcccaacagaacaacttgtttctcca

SEQ ID NO: 342119 - DNA, 120 bp, Artificial Sequence
  ENSG00000138032_9 (sequence is synthesized)
gagcctgaggtttatgaaattttaagagcagaagaggatgaatttatcatcttggcttgtgatgggatctgggatgttatgagtaatgaggagctctgtgaatatgttaaatctaggctt

SEQ ID NO: 342120 - DNA, 120 bp, Artificial Sequence
  ENSG00000138032_10 (sequence is synthesized)
tagtttgcttttcaaatgctcccaaggtctcagatgaagcggtgaaaaaagattcagagttggataagcacttggaatcacgggttgaagagattatggagaagtctggcgaggaaggaa

SEQ ID NO: 342121 - DNA, 120 bp, Artificial Sequence
  ENSG00000138032_11 (sequence is synthesized)
tgcctgatcttgcccatgtcatgcgcatcttgtctgcagaaaatatcccaaatttgcctcctgggggaggtcttgctggcaagcgtaatgttattgaagctgtttatagtagactgaatc

SEQ ID NO: 342122 - DNA, 120 bp, Artificial Sequence
  ENSG00000138032_12 (sequence is synthesized)
cacatagagaaagtgatggggcctccgatgaagcagaggaaagtggatcacagggaaaattggtggaagctctcaggcaaatgagaattaatcataggggaaactaccgacaacttctgg

SEQ ID NO: 342123 - DNA, 120 bp, Artificial Sequence
  ENSG00000138032_13 (sequence is synthesized)
aggagatgctgactagttacaggctagctaaagtagagggagaagaaagccctgctgaaccagctgccacagctacttcttcgaacagtgatgctggaaacccagtgacaatgcaggaaa

SEQ ID NO: 342124 - DNA, 120 bp, Artificial Sequence
  ENSG00000138032_14 (sequence is synthesized)
gccatactgaatcagaaagtggtcttgctgaattagacagctctaatgaagatgcagggacaaagatgagtggtgaaaaaatatgactttcctttttggtaatatttttgtgatctttga

SEQ ID NO: 342125 - DNA, 120 bp, Artificial Sequence
  ENSG00000138032_15 (sequence is synthesized)
tggtttttaacctaggaagtgtaatgtatgcatttatataactgttttgttatttgaatcttggaaaactagttttattatattcagatagccttgttttttaaaaaggcctttgcatac

SEQ ID NO: 342126 - DNA, 120 bp, Artificial Sequence
  ENSG00000138032_16 (sequence is synthesized)
acctttatgagatagtgtaaaattgactatttatagtactatggatttaatgaaattatatgtcatttcacattgtatgccagaaattaggctaccaattatgaattaaagtcagtagtt

SEQ ID NO: 342127 - DNA, 120 bp, Artificial Sequence
  ENSG00000138032_17 (sequence is synthesized)
actagatagaattagaaattttgattagagagattatgctatattatggaaaaacttgttaatgtagaattatactgcttcatattattttacctattagtacactcatagttagctttg

SEQ ID NO: 342128 - DNA, 120 bp, Artificial Sequence
  ENSG00000138032_18 (sequence is synthesized)
tagctttgtaataaatttatgttttctttaataattttagttcttcaaagaatggctgatgctggcctgtaatttttctttcaaggatgataatttgtgtgttgtttgatttgtttatat

SEQ ID NO: 342129 - DNA, 120 bp, Artificial Sequence
  ENSG00000138032_19 (sequence is synthesized)
tttacatctctgtagttttatttttagaagttgtgagatattggatgtgtggctatttttcctttctctgtattctttatgaaacataacttttgaaaaacctatgtattattcatacag

SEQ ID NO: 342130 - DNA, 120 bp, Artificial Sequence
  ENSG00000138032_20 (sequence is synthesized)
ctttggtttgtatattctgtatagcctaactacacacatcaaaatgtatgtcaaccaagtgtttagaatgaaattataagtgtttaagtccaaataaagcatgtgatgtggaataatcta

SEQ ID NO: 342131 - DNA, 120 bp, Artificial Sequence
  ENSG00000138032_21 (sequence is synthesized)
agaagacccatggtagccttaaaaaccttctaaaatgcttttgattctgaaaattgggggaaaaaacttttaatcacaattttcttcaatacaaggggaaaatattcttgcggattccca

SEQ ID NO: 342132 - DNA, 120 bp, Artificial Sequence
  ENSG00000138032_22 (sequence is synthesized)
acgttttgtgatatgagcagaaaatcattagcatttcccatcatttgttcatatttgtgttttctgacagttgccacttgtagcattgcctgtactacagtattttttgccaacctcagg

SEQ ID NO: 342133 - DNA, 120 bp, Artificial Sequence
  ENSG00000138032_23 (sequence is synthesized)
catactcgttacatctgtattgaactttcggccctagaaaccagtggagttatttcaccacaaatcaacaatgtgcctgaggtgcatgggaaatatagttagctatactctgaaaataca

SEQ ID NO: 342134 - DNA, 120 bp, Artificial Sequence
  ENSG00000138032_24 (sequence is synthesized)
aagcatgtaagagtaaagaattgtatgatatgttccttttttcagttcaccaagttggaagccttttgcagctctgtggcttggaatttcatttgagcaatttctataggatatgtattt

SEQ ID NO: 342135 - DNA, 120 bp, Artificial Sequence
  ENSG00000138032_25 (sequence is synthesized)
attattgattgttatttaatttttttccaattttacctgtattaccaaactgggttctccaataatgtccaaattgtaatgttgccttgcttcaagataaagtgtatttgggaataatat

SEQ ID NO: 342136 - DNA, 120 bp, Artificial Sequence
  ENSG00000138032_26 (sequence is synthesized)
tataaacccttacaaattttatgcatgtatctactgcatccttcaactctcactagaaaatcttttgaaaccaaatggattaatttatggctatttataatttgctttgacatctcactg

SEQ ID NO: 342137 - DNA, 120 bp, Artificial Sequence
  ENSG00000138032_27 (sequence is synthesized)
ttggaaattttttaaagatgagatttgcctttataatgtaaattgtgatttttgttttacatgtgggtttctatagttttaattttttcagcttttaagatacgagttttgtgtaatttg

SEQ ID NO: 342138 - DNA, 120 bp, Artificial Sequence
  ENSG00000138032_28 (sequence is synthesized)
atgttattttaaaagctcagaatatcacattgaaattactataaatacatttaaaattatctattttagatctaaggaaatactacagagatattttcatgggttcagtaacttttcatt

SEQ ID NO: 342139 - DNA, 120 bp, Artificial Sequence
  ENSG00000138032_29 (sequence is synthesized)
tcagtaacttttcattttataacattgggcacggtacagagtgattgtcacataaggtacttgaagatttattagtttaattctatttttacagtaaccttgaattcttctgagttttgc

SEQ ID NO: 342140 - DNA, 120 bp, Artificial Sequence
  ENSG00000138032_30 (sequence is synthesized)
atgtattaaattcaattaatgctgaacatgaagagtaaagtatttatctgaaagaagtttctgggttaggagaagtaatgaatgtatccatttgtacatggtttacatgttgtggatgct

SEQ ID NO: 342141 - DNA, 120 bp, Artificial Sequence
  ENSG00000138032_31 (sequence is synthesized)
ttgtaaacattttcctgtatgtttaaattgtgtttcagcaggatgtaattgcccttgtgtgtagttaaaatgagtcatcatctggtcctttgtgaaatggaattcatggtattttctgta

SEQ ID NO: 342142 - DNA, 120 bp, Artificial Sequence
  ENSG00000138032_32 (sequence is synthesized)
acgttttcctgaagctgtttctggagagccacacatttaaatacagacagctttcctgatcatttgatttattgtgcacctgatttttggtctaaaaggaattattgccacaatatattt

SEQ ID NO: 342143 - DNA, 120 bp, Artificial Sequence
  ENSG00000138032_33 (sequence is synthesized)
tatttattctttagattttagccttgtaagttaaagtgctttacatgatgatgtgaaaagctgtttgtccctttactgggtttggggggttgttaaaagatagggaatgaagaatgcaaa

SEQ ID NO: 342144 - DNA, 120 bp, Artificial Sequence
  ENSG00000138032_34 (sequence is synthesized)
atggtttatcgttcaaactgtccactctgatccaaccctgtactgatagtacttcccagtatgatattgtgatgtttcatacaatgcagtgaacataaccaacttgttacctaaataaag

SEQ ID NO: 342145 - DNA, 120 bp, Artificial Sequence
  ENSG00000138032_35 (sequence is synthesized)
aattgataaaaacagtgtgacatattactatttggtatgattcagtttttaatgttattttaaacttcttatatggttggcatatttctgaaaatttaattccaaagaggaattaaccaa

SEQ ID NO: 342146 - DNA, 120 bp, Artificial Sequence
  ENSG00000138032_36 (sequence is synthesized)
aagaggaattaaccaaactgtacaggacaatattaaccccttctgtactctagaaatatttatactccttttaaaaaaacctgcctttggccgggtgcattggctcacacctgtaatccc

SEQ ID NO: 342147 - DNA, 120 bp, Artificial Sequence
  ENSG00000138032_37 (sequence is synthesized)
aaaaaagaaaaaaaaaaacttttccggcagggggcagggtgggggttactggtgcttgaaacagaaataatgtatgagttagtaaaagaaaaacccatattcagtgttgactcatctgaa

SEQ ID NO: 342148 - DNA, 120 bp, Artificial Sequence
  ENSG00000138032_38 (sequence is synthesized)
gagtaatgaggagctctgtgaatatgttaaatctaggcttgaggtatctgatgacctggaaaatgtgtgcaattgggtagtggacacttgtttacacaagagattatggagaagtctggc

SEQ ID NO: 342149 - DNA, 88 bp, Artificial Sequence
  ENSG00000138032_39 (sequence is synthesized)
gaagcggtgaaaaaagattcagagttggataagcacttggaatcacgggttgaaggtaagacaaatgctttttaaaaatatagactag

SEQ ID NO: 342150 - DNA, 120 bp, Artificial Sequence
  ENSG00000138032_40 (sequence is synthesized)
gagagctctggtgacaagaaaggcagtggctggcagaccttccaagcactcagaagcacgcggacaaaaaggtttttttgtaaacccgaacgaaaaataaacccagcattatataattat

SEQ ID NO: 342151 - DNA, 120 bp, Artificial Sequence
  ENSG00000138032_41 (sequence is synthesized)
tgtccttttcctactgctttaaacattgattttcttttgtactaaatcatatagccaaatattgtttaagtaagtcagttttaggaaatgcttgtgttgctgttgaattataaaagctga

SEQ ID NO: 342152 - DNA, 120 bp, Artificial Sequence
  ENSG00000138032_42 (sequence is synthesized)
gtaaatttcagattaaactttaaatgactgtgaaataagacataaactagttaatggtaatttgcttaaaatgacttgagattattattggaagtttttattaattgatacaggtaagaa

SEQ ID NO: 342153 - DNA, 120 bp, Artificial Sequence
  ENSG00000138032_43 (sequence is synthesized)
ttgatatttaataaaatgttctcatgcttagactatattacttttcggtagagaaattagtattttgctgtaatgtgttatgaaatacatgtgatatcctagtttgtctactgacactgg

SEQ ID NO: 342154 - DNA, 120 bp, Artificial Sequence
  ENSG00000138032_44 (sequence is synthesized)
cttcttaaaaattttttgtgtgttgatggtaattttttttaatatattttaaaataggtactaccaaatagtatctcttgtttcacttcttggtgagtactggcttatcacattaattta

SEQ ID NO: 342155 - DNA, 120 bp, Artificial Sequence
  ENSG00000138032_45 (sequence is synthesized)
atactaaatatgaatacattcacattaacgaagtctataataaattatagtctgtagtaaattactactgcttttcattttaaagtgtcagttaaagtttaagaaaatgtattgaaatga

SEQ ID NO: 342156 - DNA, 120 bp, Artificial Sequence
  ENSG00000138032_46 (sequence is synthesized)
tgttttgtagatagttttgttgtcactttctgggcatcaaatgaccttttttgtttgggctgtctttatttcttctctatatgtctgcttttccttcttctcctttaaaccttaattttg

SEQ ID NO: 342157 - DNA, 120 bp, Artificial Sequence
  ENSG00000138032_47 (sequence is synthesized)
aggcaagaatgctcttttaaatatctcaatttctcctccagcaggctgctgccatcaccagaagttagtgatagtgagtgagttgttattttaataactagacctttcagtacccctgta

SEQ ID NO: 342158 - DNA, 120 bp, Artificial Sequence
  ENSG00000138032_48 (sequence is synthesized)
tgcccacttggaatacccgaggatagtttttttctaatattattgttgtattatgggtacatgagtgttgagctgagataaccatttctgttgtaccttgctgtacttcatcagagcaag

SEQ ID NO: 342159 - DNA, 120 bp, Artificial Sequence
  ENSG00000138032_49 (sequence is synthesized)
actctatgcccttaccttttattttgcttttcttcgaaatgtcagtgagctgccagctgcccctctatattgttttgttttgttttagtactattaccaggagacagaagtgtccttttt

SEQ ID NO: 342160 - DNA, 120 bp, Artificial Sequence
  ENSG00000138032_50 (sequence is synthesized)
ggctgaagcaaaacaaccgcctctcccctgcccacttcttgtcctcgtctgagtcgtcccttcccgtctccacgccgaagagaggcgtttagatcctccaatgagggcctaggaggactt

SEQ ID NO: 342161 - DNA, 120 bp, Artificial Sequence
  ENSG00000138032_51 (sequence is synthesized)
tcttagccaatcagtagccaagcccctgcaattccgggtgggaccaggcgtccacacctatagctggactgctcgttggtcccttatggcgcttcttttacgcgaggcttagaggtcaaa

SEQ ID NO: 342162 - DNA, 120 bp, Artificial Sequence
  ENSG00000138032_52 (sequence is synthesized)
tacaagggggcacggtcctcacagaacggaaaggatccgtacagactctccgggtttgaccgttttctaggacgaaccaatcgctttccagatacttccccgccttttgcgcgttcattt

SEQ ID NO: 342163 - DNA, 120 bp, Artificial Sequence
  ENSG00000138032_53 (sequence is synthesized)
gaaaaaagccggtgtgacggacttggaaattggctcagtgactgacccgcaagaaagccagtgactgggggttcggatcacgagttggaccaataagaaaagacaatcgctggggccggg

SEQ ID NO: 342164 - DNA, 120 bp, Artificial Sequence
  ENSG00000138032_54 (sequence is synthesized)
gctttgctaggaggagcgcaggtgggcgttatttgattgacggagggctctacttatggctggtagcgggggctggtccctgacgttcgggaggtaggacctagcggaggcggggccgaa

SEQ ID NO: 342165 - DNA, 120 bp, Artificial Sequence
  ENSG00000138035_0 (sequence is synthesized)
gttgaccgcgtgccgggtgtcatggcggcctgcaggtactgctgctcgtgcctccggctccggcccctgagcgatggtcctttccttctgccacggcgggatcgggcactcacccagttg

SEQ ID NO: 342166 - DNA, 120 bp, Artificial Sequence
  ENSG00000138035_1 (sequence is synthesized)
caagtgcgagcactatggagtagcgcagggtctcgagctgtggccgtggacttaggcaacaggaaattagaaatatcttctggaaagctggccagatttgcagatggctctgctgtagta

SEQ ID NO: 342167 - DNA, 120 bp, Artificial Sequence
  ENSG00000138035_2 (sequence is synthesized)
cagtcaggtgacactgcagtaatggtcacagcggtcagtaaaacaaaaccttccccttcccagtttatgcctttggtggttgactacagacaaaaagctgctgcagcaggtagaattccc

SEQ ID NO: 342168 - DNA, 120 bp, Artificial Sequence
  ENSG00000138035_3 (sequence is synthesized)
acaaactatctgagaagagagattggtacttctgataaagaaattctaacaagtcgaataatagatcgttcaattagaccgctctttccagctggctacttctatgatacacaggttctg

SEQ ID NO: 342169 - DNA, 120 bp, Artificial Sequence
  ENSG00000138035_4 (sequence is synthesized)
tgtaatctgttagcagtagatggtgtaaatgagcctgatgtcctagcaattaatggcgcttccgtagccctctcattatcagatattccttggaatggacctgttggggcagtacgaata

SEQ ID NO: 342170 - DNA, 120 bp, Artificial Sequence
  ENSG00000138035_5 (sequence is synthesized)
ggaataattgatggagaatatgttgttaacccaacaagaaaagaaatgtcttctagtactttaaatttagtggttgctggagcacctaaaagtcagattgtcatgttggaagcctctgca

SEQ ID NO: 342171 - DNA, 120 bp, Artificial Sequence
  ENSG00000138035_6 (sequence is synthesized)
gagaacattttacagcaggacttttgccatgctatcaaagtgggagtgaaatatacccaacaaataattcagggcattcagcagttggtaaaagaaactggtgttaccaagaggacacct

SEQ ID NO: 342172 - DNA, 120 bp, Artificial Sequence
  ENSG00000138035_7 (sequence is synthesized)
cagaagttatttaccccttcgccagagattgtgaaatatactcataaacttgctatggagagactctatgcagtttttacagattacgagcatgacaaagtttccagagatgaagctgtt

SEQ ID NO: 342173 - DNA, 120 bp, Artificial Sequence
  ENSG00000138035_8 (sequence is synthesized)
aacaaaataagattagatacggaggaacaactaaaagaaaaatttccagaagccgatccatatgaaataatagaatccttcaatgttgttgcaaaggaagtttttagaagtattgttttg

SEQ ID NO: 342174 - DNA, 120 bp, Artificial Sequence
  ENSG00000138035_9 (sequence is synthesized)
aatgaatacaaaaggtgcgatggtcgggatttgacttcacttaggaatgtaagttgtgaggtagatatgtttaaaacccttcatggatcagcattatttcaaagaggacaaacacaggtg

SEQ ID NO: 342175 - DNA, 120 bp, Artificial Sequence
  ENSG00000138035_10 (sequence is synthesized)
ctttgtaccgttacatttgattcattagaatctggtattaagtcagatcaagttataacagctataaatgggataaaagataaaaatttcatgctgcactacgagtttcctccttatgca

SEQ ID NO: 342176 - DNA, 120 bp, Artificial Sequence
  ENSG00000138035_11 (sequence is synthesized)
actaatgaaattggcaaagtcactggtttaaatagaagagaacttgggcatggtgctcttgctgagaaagctttgtatcctgttattccccgagattttcctttcaccataagagttaca

SEQ ID NO: 342177 - DNA, 120 bp, Artificial Sequence
  ENSG00000138035_12 (sequence is synthesized)
tctgaagtcctagagtcaaatgggtcatcttctatggcatctgcatgtggcggaagtttagcattaatggattcaggggttccaatttcatctgctgttgcaggcgtagcaataggattg

SEQ ID NO: 342178 - DNA, 120 bp, Artificial Sequence
  ENSG00000138035_13 (sequence is synthesized)
gtcaccaaaaccgatcctgagaagggtgaaatagaagattatcgtttgctgacagatattttgggaattgaagattacaatggtgacatggacttcaaaatagctggcactaataaagga

SEQ ID NO: 342179 - DNA, 120 bp, Artificial Sequence
  ENSG00000138035_14 (sequence is synthesized)
ataactgcattacaggctgatattaaattacctggaataccaataaaaattgtgatggaggctattcaacaagcttcagtggcaaaaaaggagatattacagatcatgaacaaaactatt

SEQ ID NO: 342180 - DNA, 120 bp, Artificial Sequence
  ENSG00000138035_15 (sequence is synthesized)
tcaaaacctcgagcatctagaaaagaaaatggacctgttgtagaaactgttcaggttccattatcaaaacgagcaaaatttgttggacctggtggctataacttaaaaaaacttcaggct

SEQ ID NO: 342181 - DNA, 120 bp, Artificial Sequence
  ENSG00000138035_16 (sequence is synthesized)
gaaacaggtgtaactattagtcaggtggatgaagaaacgttttctgtatttgcaccaacacccagtgctatgcatgaggcaagagacttcattactgaaatctgcaaggatgatcaggag

SEQ ID NO: 342182 - DNA, 120 bp, Artificial Sequence
  ENSG00000138035_17 (sequence is synthesized)
cagcaattagaatttggagcagtatataccgccacaataactgaaatcagagatactggtgtaatggtaaaattatatccaaatatgactgcggtactgcttcataacacacaacttgat

SEQ ID NO: 342183 - DNA, 120 bp, Artificial Sequence
  ENSG00000138035_18 (sequence is synthesized)
aagtgcttcagtcgccagctacaaccgtggtcagaactttgaatgacagaagtagtattgtaatgggagaacctatttcacagtcatcatctaattctcagtgatttttttttttaaaga

SEQ ID NO: 342184 - DNA, 120 bp, Artificial Sequence
  ENSG00000138035_19 (sequence is synthesized)
gaattctagaattctattttgtctagggtgatgtgctgtagagcaacattttagtagtatcttccattgtgtagatttctatataatataaatacattttaattatttgtactaaaatgc

SEQ ID NO: 342185 - DNA, 120 bp, Artificial Sequence
  ENSG00000138035_20 (sequence is synthesized)
atgctcatttacatgtgccatttttttaattcgagtaacccatatttgtttaattgtatttacattataaatcaagaaatatttattattaaaagtaagtcatttatacatcttagaaaa

SEQ ID NO: 342186 - DNA, 120 bp, Artificial Sequence
  ENSG00000138035_21 (sequence is synthesized)
acatagttttgtttttacaattctgaaatatatgaaaaacttagatagaatatgtcatatgttattataacagatctcttcctacatcttatttttcttctttgtatacagtagtgacag

SEQ ID NO: 342187 - DNA, 120 bp, Artificial Sequence
  ENSG00000138035_22 (sequence is synthesized)
tttaccttcagtcatcctacaggtcacctctgtgcccaacaactttacttgcctacaacggttcacaaactggaacaggccatattcaaagccagtgcctatttcttcagaactgttaac

SEQ ID NO: 342188 - DNA, 120 bp, Artificial Sequence
  ENSG00000138035_23 (sequence is synthesized)
agatatagtgagttgagggagctaatctgatacacttttgataatataatgcctttcaaattagttaccaaatcataaacagagtggaataaatataaatgagattctaactaggatgaa

SEQ ID NO: 342189 - DNA, 120 bp, Artificial Sequence
  ENSG00000138035_24 (sequence is synthesized)
tggaataaatataaatgagattctaactaggatgaatgtggtagtaatgatgtatatttttcaaatttacctaaacagaaagattattggctaaggcaggcggatcatgagatcaggaga

SEQ ID NO: 342190 - DNA, 120 bp, Artificial Sequence
  ENSG00000138035_25 (sequence is synthesized)
ctccgtctcaaaaaaaaaaaaaaaattgtttacttatcaaattgaactaggtcaatttgaatatgtgtattgctctaatgtatggaagttcttagtataagagctgaaggatcatgactt

SEQ ID NO: 342191 - DNA, 120 bp, Artificial Sequence
  ENSG00000138035_26 (sequence is synthesized)
tatggaagttcttagtataagagctgaaggatcatgactttcggttaatagatgtttgaaatagatgtttagaggttactgatacacatgtcaagttgttcattcccatcatttaaaata

SEQ ID NO: 342192 - DNA, 120 bp, Artificial Sequence
  ENSG00000138035_27 (sequence is synthesized)
tcaccttataattccacagaaaagtaaatggtatgtggacgtcataatttagaatgtgtaatcttttttaaaatcttataaaaatacactggactcagtggtacgtgcctgtagtcccag

SEQ ID NO: 342193 - DNA, 120 bp, Artificial Sequence
  ENSG00000138035_28 (sequence is synthesized)
ctacttggaaggctgaagtgggaaggtcactagagcccagaagttcgacactgtagtgtgcaacaatcatacctgtgaatagctactgtactccagcctgggcaacatagcaggactctt

SEQ ID NO: 342194 - DNA, 83 bp, Artificial Sequence
  ENSG00000138035_29 (sequence is synthesized)
agctactgtactccagcctgggcaacatagcaggactcttatctctaaaaaaaattttaaatcttataaaaatgtaggtatat

SEQ ID NO: 342195 - DNA, 65 bp, Artificial Sequence
  ENSG00000138035_30 (sequence is synthesized)
aaaactccatctcaaaaaaaaaaatggtgggcacagaagctcatgcctgtaattccagcactttg

SEQ ID NO: 342196 - DNA, 120 bp, Artificial Sequence
  ENSG00000138035_31 (sequence is synthesized)
gacagagcaagactccgtctccagaaaaaaaaaaaaaaaaggtaaattcatgactcagggttaactagttcataaaatattacaaatttatctggctaaaccaaagatttttaagtcaat

SEQ ID NO: 342197 - DNA, 120 bp, Artificial Sequence
  ENSG00000138035_32 (sequence is synthesized)
aaacattgattatatatctattgtgtgtaaaatagcatgttaggcaatgttgatatacttctgaaatattaaagattaattgaaaatgaaagattaaatttatttgctttctacacttga

SEQ ID NO: 342198 - DNA, 77 bp, Artificial Sequence
  ENSG00000138035_33 (sequence is synthesized)
gaacaaaactatttcaaaacctcgagcatctagaaaagaaaatggacctgttgtaggtaatacattaaaattttagt

SEQ ID NO: 342199 - DNA, 120 bp, Artificial Sequence
  ENSG00000138035_34 (sequence is synthesized)
ttttgtagttaaaatgctttaaattttagggaatattctttaacagttttcagtaattttaatcatctacttttctgttttatagtaaaatatttttacatgtgtctaggtcaaaaaaaa

SEQ ID NO: 342200 - DNA, 120 bp, Artificial Sequence
  ENSG00000138035_35 (sequence is synthesized)
aaaaaatctcaagtgaccatggcatgttttaggttcatgtatgtagttgaattgtttatatatttgtctgtattacgttccagaaactgttcaggttccattatcaaaacgagcaaaatt

SEQ ID NO: 342201 - DNA, 120 bp, Artificial Sequence
  ENSG00000138035_36 (sequence is synthesized)
taatctgttagcagtagatggtgtaaatgagcctgatgtcctagcaattaatggcggtaagtataaaagtagagattaaaattatcagattaaaaatttttttaaagcaatgaaatttta

SEQ ID NO: 342202 - DNA, 120 bp, Artificial Sequence
  ENSG00000138036_0 (sequence is synthesized)
agaaggcctcactcccagactccttgcggagctcgccgcctgattctaggctggtcactactccgagcctgtgacgtttgcggcagccaggccgtcgacgatgcccagtgaaactctctg

SEQ ID NO: 342203 - DNA, 120 bp, Artificial Sequence
  ENSG00000138036_1 (sequence is synthesized)
ggaaattgcaaaagctgaagtggaaaaaaggggaattaatggaagtgaaggtgatggagctgaaattgcagaaaaatttgttttcttcattggcagtaaaaatgggggaaagactactat

SEQ ID NO: 342204 - DNA, 120 bp, Artificial Sequence
  ENSG00000138036_2 (sequence is synthesized)
tattctaaggtgtcttgacagagatgaaccaccaaaaccaaccttagctttggaatatacatatggaagaagagcaaaagggcacaacacaccaaaagatatcgctcacttttgggaact

SEQ ID NO: 342205 - DNA, 120 bp, Artificial Sequence
  ENSG00000138036_3 (sequence is synthesized)
cggtggaggaacctctttattggacttaatcagcatacccatcacaggtgacaccttacggacgttttctcttgttctcgttctggatctttcaaaacctaatgatctctggcccaccat

SEQ ID NO: 342206 - DNA, 120 bp, Artificial Sequence
  ENSG00000138036_4 (sequence is synthesized)
ggaaaatctcttgcaagccacaaaaagccatgtagacaaagtgataatgaaactgggaaagacaaatgctaaagcagtttctgaaatgagacagaagatctggaataatatgccgaagga

SEQ ID NO: 342207 - DNA, 120 bp, Artificial Sequence
  ENSG00000138036_5 (sequence is synthesized)
tttgagtctgagaagagaaaggtaatatgcaagacacttcgatttgttgcacattattatggagcatcattaatgtttaccagtaaatcagaagctctattactaaaaatacgtggagtt

SEQ ID NO: 342208 - DNA, 120 bp, Artificial Sequence
  ENSG00000138036_6 (sequence is synthesized)
atcaaccagttggcatttggcattgacaaaagcaaatcaatatgtgtggatcagaataaaccgctgtttatcacagcaggattggattctttcggtcaaataggatctcctcctgttcct

SEQ ID NO: 342209 - DNA, 120 bp, Artificial Sequence
  ENSG00000138036_7 (sequence is synthesized)
gaaaatgacattggaaagcttcatgcccactcacctatggagttgtggaaaaaagtgtatgaaaagctctttccaccaaagagtattaacacgctgaaagatatcaaggaccctgcgaga

SEQ ID NO: 342210 - DNA, 120 bp, Artificial Sequence
  ENSG00000138036_8 (sequence is synthesized)
gatcctcagtatgctgaaaatgaagtcgatgagatgagaattcagaaggatctggaactggaacagtacaaaagaagttcttccaagtcttggaaacaaatcgagcttgattcttgaacc

SEQ ID NO: 342211 - DNA, 120 bp, Artificial Sequence
  ENSG00000138036_9 (sequence is synthesized)
tatttcaattattgtatatttatttcttcttttccaaatacaaataagattatactgtgaattaactattgtggcaatatgtgaagaaagttaaactgtataatttgttaaaggacaagc

SEQ ID NO: 342212 - DNA, 120 bp, Artificial Sequence
  ENSG00000138036_10 (sequence is synthesized)
tggatttcttggactagtgcatctccctgtatatcttgaagctttttaaaaggaaaaattattgtagaaccacgtgtaattttttttaaaataaaagaatcttctactacctacctctaa

SEQ ID NO: 342213 - DNA, 61 bp, Artificial Sequence
  ENSG00000138036_11 (sequence is synthesized)
aggctggtcactactccgagcctgtgacgtttgcggcagccaggccgtcgacgatgctaca

SEQ ID NO: 342214 - DNA, 120 bp, Artificial Sequence
  ENSG00000138036_12 (sequence is synthesized)
cctcagtatgctgaaaatgaagtcgatgagatgagaattcagaaggatctggtattatcctaaacatttacttaatttcatctgaaattttaacacaaaacctggggtgccttgggaatt

SEQ ID NO: 342215 - DNA, 120 bp, Artificial Sequence
  ENSG00000138036_13 (sequence is synthesized)
gccttgggaattccttacatttttctctatgtatttacttagagtatcttctttactattaaaattatttaagtagtacatctatttaaataacacactaatagtatactgtagaaaaaa

SEQ ID NO: 342216 - DNA, 120 bp, Artificial Sequence
  ENSG00000138036_14 (sequence is synthesized)
atgaataaagaaaaatttttaaatcacctgtcatcccaccacccagacatgacttagtgttcacataaacctttttgattttccagttttcattatattaaagatgagtggtgattctta

SEQ ID NO: 342217 - DNA, 120 bp, Artificial Sequence
  ENSG00000138036_15 (sequence is synthesized)
taacatcacaaacaacttctttagatttttatgcatgacttgaaattcatttgatgtagatgaacctgttcactggaaaattacagcaatttattaaaacctcagtaagagcaaaacaag

SEQ ID NO: 342218 - DNA, 120 bp, Artificial Sequence
  ENSG00000138036_16 (sequence is synthesized)
gaagaagattccttatatcttcttgttagacatcttctgtgattgttatggcatattacaccaatcagagaaatagagttttaaagtagtggtttgatattgattttataatctctgtaa

SEQ ID NO: 342219 - DNA, 120 bp, Artificial Sequence
  ENSG00000138036_17 (sequence is synthesized)
aaatgaagataaaaagccagattgtacaaaagtcacctgacaaagactagatgaagctacaactttaagcaaggggtagagttgtaatagccttcaccatcactctgtattttacattca

SEQ ID NO: 342220 - DNA, 120 bp, Artificial Sequence
  ENSG00000138036_18 (sequence is synthesized)
tttcgtttctgtcacttattcagtatctttttatcatctgacagctaattaaattataaagttgctatgatggtaacacaagttcttcaaatacaataataaatatcatcatctggaaaa

SEQ ID NO: 342221 - DNA, 120 bp, Artificial Sequence
  ENSG00000138036_19 (sequence is synthesized)
ttaatcagcatacccatcacaggtgacaccttacgctcctggcaactatcatccctactgcctgtctctatgaatttgaccactccagtacctcatataaatgaaatcattcattatttg

SEQ ID NO: 342222 - DNA, 120 bp, Artificial Sequence
  ENSG00000138036_20 (sequence is synthesized)
tccttttgttatttatttcatttagcataacgtcttcagggttcttccgtttgtagtatgtgtcaggatttccctcacttctaaggctaaataatgttccattgtgtaaacaaataccac

SEQ ID NO: 342223 - DNA, 120 bp, Artificial Sequence
  ENSG00000138036_21 (sequence is synthesized)
agttcagttatccgttaatccatgcagaacatttgggttgttttcatcttttgactattgtgagtaatgctggtatgaacattggtgtacattatctgtttaaatctcttccttcagttc

SEQ ID NO: 342224 - DNA, 120 bp, Artificial Sequence
  ENSG00000138036_22 (sequence is synthesized)
ttttgggtttagactcagaagtggaattgctggatcatctggtaattctatggtgaattttttgaggaatcactatactattttacacagtggctgcaccattttacattcccataagca

SEQ ID NO: 342225 - DNA, 120 bp, Artificial Sequence
  ENSG00000138036_23 (sequence is synthesized)
tacattcccataagcaatgtacaggggttctaatttctctgtatcctcactaatacttgttatcttctcatttaaaaaaatgttttaggccaggagtggtggcttacacctgtaatccca

SEQ ID NO: 342226 - DNA, 69 bp, Artificial Sequence
  ENSG00000138036_24 (sequence is synthesized)
caatagagactcctcctccaaaaacaacaacaaaaaaatgttttgacaatagctagcctaatggatagg

SEQ ID NO: 342227 - DNA, 120 bp, Artificial Sequence
  ENSG00000138036_25 (sequence is synthesized)
acaaaaaaatgttttgacaatagctagcctaatggataggaagttggacatcttttcatgtgttaattggccatctgtatatcttctttggcgaaatgtctatttgagtcttttgccttc

SEQ ID NO: 342228 - DNA, 67 bp, Artificial Sequence
  ENSG00000138036_26 (sequence is synthesized)
atcttctttggcgaaatgtctatttgagtcttttgccttctttttttttttttttaatatagttgag

SEQ ID NO: 342229 - DNA, 120 bp, Artificial Sequence
  ENSG00000138036_27 (sequence is synthesized)
ttgcccatttttgaacaggaatgtttgtttttgttgccgagtctaggtttatgtttgatgggcatgaacagaatacaagtgcatgtggtgatggtggtcatgtatctggtggtcaggagt

SEQ ID NO: 342230 - DNA, 120 bp, Artificial Sequence
  ENSG00000138036_28 (sequence is synthesized)
gtgctttcagagagacagaatggtattgcagaaaaacgtgtaactttggatctaaataccagttctacaatttactaattatataaatctgtgcctcagacttctaatctataaaatgga

SEQ ID NO: 342231 - DNA, 120 bp, Artificial Sequence
  ENSG00000138036_29 (sequence is synthesized)
cattataacatcttctggagagggttattgtggagattaactaggtagttccctagcaaggtccacccatatatctattttcttctcctttacctgattattgtgttactgtttttgctt

SEQ ID NO: 342232 - DNA, 120 bp, Artificial Sequence
  ENSG00000138036_30 (sequence is synthesized)
cttttattatttttgcttcccttttttggagcacacagtaaaactggatgtaaacgtggcattgtcgatgcaaatgcttggagcttctctatttgaactaaactacttttaattttagtt

SEQ ID NO: 342233 - DNA, 120 bp, Artificial Sequence
  ENSG00000138036_31 (sequence is synthesized)
caaacagaaacttagttccactattgtaacacttaaatattactagaggaaagtattggaataaataaggctatgactttggttttttgtttttgggagtcttagaataatgctacggtt

SEQ ID NO: 342234 - DNA, 120 bp, Artificial Sequence
  ENSG00000138036_32 (sequence is synthesized)
tttttttccccttaaggtatattttagttattcttagataaatttcagtacattaggatttcaaaatggtaattattttgagtcttttttgaaaagtgtttttatttctttaggacgttt

SEQ ID NO: 342235 - DNA, 120 bp, Artificial Sequence
  ENSG00000138036_33 (sequence is synthesized)
atactagctccctgatttcttttacttcctttcccacacttcagtagcttccctctactatcactttcttttactgatttgaaatggaattgaaaattttggtatgtatcttcttagcct

SEQ ID NO: 342236 - DNA, 120 bp, Artificial Sequence
  ENSG00000138036_34 (sequence is synthesized)
tgctacttctcttggttttgatttaaggtaatagggtctgtcactttttttcctataaaatgtttatttatgctatatgttaatttttgaaatcacttaaattgatagtcactcattcat

SEQ ID NO: 342237 - DNA, 120 bp, Artificial Sequence
  ENSG00000138039_0 (sequence is synthesized)
actcagaggccgtccaagacactggcaagccgcagaagcccagttcgccggccatgaagcagcggttctcggcgctgcagctgctgaagctgctgctgctgctgcagccgccgctgccac

SEQ ID NO: 342238 - DNA, 120 bp, Artificial Sequence
  ENSG00000138039_1 (sequence is synthesized)
gagcgctgcgcgaggcgctctgccctgagccctgcaactgcgtgcccgacggcgccctgcgctgccccggccccacggccggtctcactcgactatcacttgcctacctccctgtcaaag

SEQ ID NO: 342239 - DNA, 120 bp, Artificial Sequence
  ENSG00000138039_2 (sequence is synthesized)
tgatcccatctcaagctttcagaggacttaatgaggtcataaaaattgaaatctctcagattgattccctggaaaggatagaagctaatgcctttgacaacctcctcaatttgtctgaaa

SEQ ID NO: 342240 - DNA, 120 bp, Artificial Sequence
  ENSG00000138039_3 (sequence is synthesized)
tactgatccagaacaccaaaaatctgagatacattgagcccggagcatttataaatcttccccgattaaaatacttgagcatctgtaacacaggcatcagaaagtttccagatgttacga

SEQ ID NO: 342241 - DNA, 120 bp, Artificial Sequence
  ENSG00000138039_4 (sequence is synthesized)
aggtcttctcctctgaatcaaatttcattctggaaatttgtgataacttacacataaccaccataccaggaaatgcttttcaagggatgaataatgaatctgtaacactcaaactatatg

SEQ ID NO: 342242 - DNA, 120 bp, Artificial Sequence
  ENSG00000138039_5 (sequence is synthesized)
gaaatggatttgaagaagtacaaagtcatgcattcaatgggacgacactgacttcactggagctaaaggaaaacgtacatctggagaagatgcacaatggagccttccgtggggccacag

SEQ ID NO: 342243 - DNA, 120 bp, Artificial Sequence
  ENSG00000138039_6 (sequence is synthesized)
ggccgaaaaccttggatatttcttccaccaaattgcaggccctgccgagctatggcctagagtccattcagaggctaattgccacgtcatcctattctctaaaaaaattgccatcaagag

SEQ ID NO: 342244 - DNA, 120 bp, Artificial Sequence
  ENSG00000138039_7 (sequence is synthesized)
aaacatttgtcaatctcctggaggccacgttgacttaccccagccactgctgtgcttttagaaacttgccaacaaaagaacagaatttttcacattccatttctgaaaacttttccaaac

SEQ ID NO: 342245 - DNA, 120 bp, Artificial Sequence
  ENSG00000138039_8 (sequence is synthesized)
aatgtgaaagcacagtaaggaaagtgaataacaaaacactttattcttccatgcttgctgagagtgaactgagtggctgggactatgaatatggtttctgcttacccaagacaccccgat

SEQ ID NO: 342246 - DNA, 120 bp, Artificial Sequence
  ENSG00000138039_9 (sequence is synthesized)
gtgctcctgaaccagatgcttttaatccctgtgaagatattatgggctatgacttccttagggtcctgatttggctgattaatattctagccatcatgggaaacatgactgttctttttg

SEQ ID NO: 342247 - DNA, 120 bp, Artificial Sequence
  ENSG00000138039_10 (sequence is synthesized)
ttctcctgacaagtcgttacaaacttacagtgcctcgttttctcatgtgcaatctctcctttgcagacttttgcatggggctctatctgctgctcatagcctcagttgattcccaaacca

SEQ ID NO: 342248 - DNA, 120 bp, Artificial Sequence
  ENSG00000138039_11 (sequence is synthesized)
agggccagtactataaccatgccatagactggcagacagggagtgggtgcagcactgctggctttttcactgtattcgcaagtgaactttctgtctacaccctcaccgtcatcactctag

SEQ ID NO: 342249 - DNA, 120 bp, Artificial Sequence
  ENSG00000138039_12 (sequence is synthesized)
tggaggatggctcttttcttctctaattgctatgttgccccttgtcggtgtcagcaattacatgaaggtcagtatttgcttccccatggatgtggaaaccactctctcacaagtctatat

SEQ ID NO: 342250 - DNA, 120 bp, Artificial Sequence
  ENSG00000138039_13 (sequence is synthesized)
attaaccatcctgattctcaatgtggtggccttcttcataatttgtgcttgctacattaaaatttattttgcagttcgaaacccagaattaatggctaccaataaagatacaaagattgc

SEQ ID NO: 342251 - DNA, 120 bp, Artificial Sequence
  ENSG00000138039_14 (sequence is synthesized)
taagaaaatggcaatcctcatcttcaccgatttcacctgcatggcacctatctctttttttgccatctcagctgccttcaaagtacctcttatcacagtaaccaactctaaagttttact

SEQ ID NO: 342252 - DNA, 120 bp, Artificial Sequence
  ENSG00000138039_15 (sequence is synthesized)
ggttcttttttatcccatcaattcttgtgccaatccatttctgtatgcaatattcactaagacattccaaagagatttctttcttttgctgagcaaatttggctgctgtaaacgtcgggc

SEQ ID NO: 342253 - DNA, 120 bp, Artificial Sequence
  ENSG00000138039_16 (sequence is synthesized)
tgaactttatagaaggaaagatttttcagcttacacctccaactgcaaaaatggcttcactggatcaaataagccttctcaatccaccttgaagttgtccacattgcactgtcaaggtac

SEQ ID NO: 342254 - DNA, 120 bp, Artificial Sequence
  ENSG00000138039_17 (sequence is synthesized)
agctctcctagacaagactcgctacacagagtgttaactgttacatcagtaactgcattattgaattgttcttaaacctgtaaaaaaaaattacctgtaccagtaattttaacataaagg

SEQ ID NO: 342255 - DNA, 120 bp, Artificial Sequence
  ENSG00000138039_18 (sequence is synthesized)
gttggatttaggaaattatttatttttaggtacattaggcaagagacctctacctagtagaaagtgtagtctatgaccactgccacactaaaaactatttgtcattgttacatggcataa

SEQ ID NO: 342256 - DNA, 120 bp, Artificial Sequence
  ENSG00000138039_19 (sequence is synthesized)
atactgaagttgagagtgtttagaaatttttatagaaattttgacacagtaattttgtttgatgaatcttttaaaaaactgaggaggtattttgcatatcttttttttcattttcgtaat

SEQ ID NO: 342257 - DNA, 120 bp, Artificial Sequence
  ENSG00000138039_20 (sequence is synthesized)
ttgtattgcattctataaaaatattagttcataacagatcagaaatttaaaataactggcctttttcctcaggtagtttgaaaaacacactctagagatgcactgtccaatccggtagcc

SEQ ID NO: 342258 - DNA, 120 bp, Artificial Sequence
  ENSG00000138039_21 (sequence is synthesized)
actagccacatgtggctaaattaaaattaaataaaatgagaaatgtagtttctcagttgcactagccacgtttcaagttctcaatggctacgtgtgactagtgcttaccatactggacag

SEQ ID NO: 342259 - DNA, 120 bp, Artificial Sequence
  ENSG00000138039_22 (sequence is synthesized)
cacagacacagaatattttcatcaccacagaaagttctatctgttctattatagagacttttatctatgccctatctggattctacttatttataatttaaggtaaacatctgaaagcac

SEQ ID NO: 342260 - DNA, 120 bp, Artificial Sequence
  ENSG00000138039_23 (sequence is synthesized)
atttcagcctatttgcttagtgaaacattaagctgtagactgtaaactcctcgtgagtaggaaccctgtctcagtgcattttgttttcctgcttcctacctcaagatcttggcaatggta

SEQ ID NO: 342261 - DNA, 120 bp, Artificial Sequence
  ENSG00000138039_24 (sequence is synthesized)
ggtacactacaaatgtgctgagttagaattactctgaagttatgaaacatataatgaaaacaattttttctagagcttatatttttatttgaatgaaataaaatgtttaaatatttaaaa

SEQ ID NO: 342262 - DNA, 120 bp, Artificial Sequence
  ENSG00000138039_25 (sequence is synthesized)
gggtgtccctccacatcatccccaagctgatatgtgagacatcagcctctacacctgaaaaggctgctgttggaaagacaaagtgtatcacagctgccataataaagtaccccaaaccga

SEQ ID NO: 342263 - DNA, 120 bp, Artificial Sequence
  ENSG00000138039_26 (sequence is synthesized)
gaaaaaagagaaaacatggattggaatgactctgaaatgaagagatagatgtgaagcaaaagaagagatcatctcagaggactctcttttatatcactggattctaaaaattggtatcct

SEQ ID NO: 342264 - DNA, 120 bp, Artificial Sequence
  ENSG00000138039_27 (sequence is synthesized)
tggtgcactgcctttgtatagtacttttactttgtgtagatgtaattttacatgtataattgtcatgttacaaagctgtgaccatgtagcttcatctcagattaatgcaatcaaaagaat

SEQ ID NO: 342265 - DNA, 120 bp, Artificial Sequence
  ENSG00000138039_28 (sequence is synthesized)
acagagcagcaaccaaaaataatttcaaaaataacccatactctttacttgcaactctcaaacaccaggaaagagattctgttgatcctagaaatatttctcaacagtctctccactcct

SEQ ID NO: 342266 - DNA, 120 bp, Artificial Sequence
  ENSG00000138039_29 (sequence is synthesized)
gccacttccctcacacaccacagctctaccggctgcttataaagtgttttcaactcaccattgcataatggatctggaactactcattcatcatgtcccccaccaaaaacaaggtattca

SEQ ID NO: 342267 - DNA, 120 bp, Artificial Sequence
  ENSG00000138039_30 (sequence is synthesized)
acaaacaaattccgaatgaggtgatatcacatgccttaggatttggggtctccccacatgtctatatcaagaacacaaaagacacaggattagattcatgtcctcgagaagttcatagtc

SEQ ID NO: 342268 - DNA, 120 bp, Artificial Sequence
  ENSG00000138039_31 (sequence is synthesized)
aacataaaataataaaataataatacaagctagtagatattcactatgagagtgtgtggtacctagaaataagatcttagagaagtccttttgggctggggaagtcagagaggctttatg

SEQ ID NO: 342269 - DNA, 120 bp, Artificial Sequence
  ENSG00000138039_32 (sequence is synthesized)
gtagagctaacagatttgaattagacctcatggaatcagtaacgtttatatgggtaaatgtgaaaatagcagctaatatgtatgtagcccttattaaatacctgcactgtttttaagtac

SEQ ID NO: 342270 - DNA, 120 bp, Artificial Sequence
  ENSG00000138039_33 (sequence is synthesized)
tttttaagtcccatagcaaccttatgagataggaactatcaaccctacttttagatgaggagaccaaggcatcaagaggttaagtatctctatctcaggtcaagatttggtcccagacag

SEQ ID NO: 342271 - DNA, 120 bp, Artificial Sequence
  ENSG00000138039_34 (sequence is synthesized)
tatggctccagagtcatgttcttaaccgttatgcggtaccacaacatacagagaaaggcagagtaaggaatccaagtgaagagatggcaggagcaaaagcatggcaggaggagaacagga

SEQ ID NO: 342272 - DNA, 120 bp, Artificial Sequence
  ENSG00000138039_35 (sequence is synthesized)
tgaggctactacttgggagtaaacatgctgtttaaggaatggaaagtgagtttagataactggctgagatggagaggacactgaattgcagagacccttaagtgccaggacaaggagaca

SEQ ID NO: 342273 - DNA, 120 bp, Artificial Sequence
  ENSG00000138039_36 (sequence is synthesized)
ggcttggaggtaactctggaaaaagtaataaaataatctattcaatagagtaggctttattcaaagatcacaaatatccatgactcccttcaactttgatctaaatctaaaaataatcag

SEQ ID NO: 342274 - DNA, 120 bp, Artificial Sequence
  ENSG00000138039_37 (sequence is synthesized)
agaccaataggtattcctccgaggtaaatgtacaatgatgggagtggagtgaagtaggaacgaaaaggcagaagacatggaggagggtgaagaagaaaaccaatgttgggataatccata

SEQ ID NO: 342275 - DNA, 120 bp, Artificial Sequence
  ENSG00000138039_38 (sequence is synthesized)
ggtaactatgagctcacaagactgggccaccccacgagactcaaagagtaaccaaagattccttctcacacatcatacttcagtatgtgcacagagagcttcatggttttctaatgacag

SEQ ID NO: 342276 - DNA, 120 bp, Artificial Sequence
  ENSG00000138039_39 (sequence is synthesized)
ggacattaacttatgttgctcatgattttaagaaaaagagtgcatgccagtagggtgtaatttccccactctgaagttaataaagattgaggctccgtctctcccagagagcctgtggga

SEQ ID NO: 342277 - DNA, 120 bp, Artificial Sequence
  ENSG00000138050_0 (sequence is synthesized)
agggcgcgcctgagccgccatgtcggaggcgcgtggagagccagggtccgggcctgaggctggcgcccgattcttctgcactgcgggtcgcggcctggagccgttcgtaatgcgagaggt

SEQ ID NO: 342278 - DNA, 120 bp, Artificial Sequence
  ENSG00000138050_1 (sequence is synthesized)
gcgggcgcggctggcggccacgcaggttgaatatatttcaggaaaggtttttttcaccacctgttctgatttgaatatgttgaagaaattaaaatctgcagaaagattatttttgctgat

SEQ ID NO: 342279 - DNA, 120 bp, Artificial Sequence
  ENSG00000138050_2 (sequence is synthesized)
taaaaagcagtttccacttattatttcttctgtaagtaaaggaaaaatatttaatgaaatgcaaagacttataaatgaagatccaggaagttggttgaatgccatttcaatttggaaaaa

SEQ ID NO: 342280 - DNA, 120 bp, Artificial Sequence
  ENSG00000138050_3 (sequence is synthesized)
tcttcttgaacttgatgcaaaaaaggaaaaactttctcagagagatgataaccaactaaaaagaaaagtgggagaaaatgaaatcattgcaaagaaattaaaaatagaacaaatgcaaaa

SEQ ID NO: 342281 - DNA, 120 bp, Artificial Sequence
  ENSG00000138050_4 (sequence is synthesized)
gatagaagagaatagggactgccagctggaaaaacaaataaaagaagaaactctggagcaaagagattttaccactaaaagcgaaaagtttcaagaagaagaatttcagaatgacataga

SEQ ID NO: 342282 - DNA, 120 bp, Artificial Sequence
  ENSG00000138050_5 (sequence is synthesized)
gaaagcaattgatactcataatcagaatgacttgactttcagagtatcttgtcgctgcagtggaactattggaaaggccttcactgcacaggaggtaggaaaagtaattggaattgctat

SEQ ID NO: 342283 - DNA, 120 bp, Artificial Sequence
  ENSG00000138050_6 (sequence is synthesized)
tatgaaacactttggatggaaagcagacttgaggaatccacaattagagatctttatacatctaaatgacatttactctgtggtggggattcctgtgttcagggtttccctagccagcag

SEQ ID NO: 342284 - DNA, 120 bp, Artificial Sequence
  ENSG00000138050_7 (sequence is synthesized)
agcttacatcaagacagctggactgcgatctacaatagcgtgggcaatggcatctctggctgacattaaggctggtgcatttgttttagatccaatgtgtggacttggaacaatactttt

SEQ ID NO: 342285 - DNA, 120 bp, Artificial Sequence
  ENSG00000138050_8 (sequence is synthesized)
ggaagctgctaaagaatggccagatgtgtattatgtaggtgctgatgtcagcgactcacagttactaggtacttgggacaatctgaaagctgcaggccttgaggataaaattgaattact

SEQ ID NO: 342286 - DNA, 120 bp, Artificial Sequence
  ENSG00000138050_9 (sequence is synthesized)
tattattatttctgacattccatttgggaaaaagtttaagttaggaaaagacatcaaaagcattctacaagaaatggaaagagtgcttcatgttggcggaaccattgtattgttgcttag

SEQ ID NO: 342287 - DNA, 120 bp, Artificial Sequence
  ENSG00000138050_10 (sequence is synthesized)
tgaagatcaccacaggcgccttacagattgtaaagagagcaacatccctttcaattccaaggacagtcacacagatgaacctggaattaaaaagtgcttgaatcctgaagaaaaaactgg

SEQ ID NO: 342288 - DNA, 120 bp, Artificial Sequence
  ENSG00000138050_11 (sequence is synthesized)
tgcattcaagacagcgtcaacttcattcgaagccagtaaccacaaattcttagacagaatgtcaccatttggctccttggtaccagtggaatgctacaaagttagccttggaaagacaga

SEQ ID NO: 342289 - DNA, 120 bp, Artificial Sequence
  ENSG00000138050_12 (sequence is synthesized)
tgcgttcatatgtaaatataagaagtcgcactcttctggactgtagcaggcttgctgccatcagccgggttcaggcccttgtaagttagctgtacagcagaagtttgctgtctctaggat

SEQ ID NO: 342290 - DNA, 120 bp, Artificial Sequence
  ENSG00000138050_13 (sequence is synthesized)
tcatatagcacccacagagctccaagtaaccaaattcccccaaagacaggaggtgtggctgatgggtacacatgcttggtaagagtttctgctttatattctaaagtacttaatgttttt

SEQ ID NO: 342291 - DNA, 120 bp, Artificial Sequence
  ENSG00000138050_14 (sequence is synthesized)
gagaaaaaagttatcgaatattttttagacttaagttttatcttctgtcagaatgtgaaaagttctgcccagtttctgagcaaaaacttcaatttcaaaataaaggttttcaggggttca

SEQ ID NO: 342292 - DNA, 120 bp, Artificial Sequence
  ENSG00000138050_15 (sequence is synthesized)
cttaagtgtatcacaatcaacaccagacgggatattttaactatcagattttcggaaatgtaaaaacctttatgtgtaacttcttttgatattaaacttgatttttgagcctgtaatttt

SEQ ID NO: 342293 - DNA, 120 bp, Artificial Sequence
  ENSG00000138050_16 (sequence is synthesized)
cttctccattggaatgaaaataatttgtatttgcaatacattttatatgtttattatgtaaaccaacagtgagaataataactgaattaagccagtatccttcaaaacatgatggaaaat

SEQ ID NO: 342294 - DNA, 120 bp, Artificial Sequence
  ENSG00000138050_17 (sequence is synthesized)
gaaatttgctttttttctaaaagcattcatacactgtcacctcgcccttatttatatagaaagtcagtttgttgcttatgttcactacctgagaaaaagaaacagtaagtttgaggagaa

SEQ ID NO: 342295 - DNA, 120 bp, Artificial Sequence
  ENSG00000138050_18 (sequence is synthesized)
atcattagtgattgtgaaagcattttgggatcttgtaattactttaaaacaatattagcaaccctaaatgttaatctgttacgcaaaaataatcctgtgtacttcaattttctcattatt

SEQ ID NO: 342296 - DNA, 120 bp, Artificial Sequence
  ENSG00000138050_19 (sequence is synthesized)
ggctggcggccacgcaggaaaaatatttaatgaaatgcaaagacttataaatgaagatccaggaagttggttgaatgccatttcaatttggaaaaatcttcttgaacttgatgcaaaaaa

SEQ ID NO: 342297 - DNA, 120 bp, Artificial Sequence
  ENSG00000138050_20 (sequence is synthesized)
gtttctcttcagttcagctttgtgcttattcagtggctactctgcacaggtcctgtacatgggattgtcaccaggacctagactgcaaatgcacatgaggtctcagcaatgtagagaaga

SEQ ID NO: 342298 - DNA, 120 bp, Artificial Sequence
  ENSG00000138050_21 (sequence is synthesized)
gcgaacaccacaaactgttgccatcaccagacctcatcagttggcccttacaaagttcagtgatgttaaaggccattggtctgaatactttatcaaccttaaaatcagtcaaaccctaaa

SEQ ID NO: 342299 - DNA, 120 bp, Artificial Sequence
  ENSG00000138050_22 (sequence is synthesized)
tcccattttttaaagaattaattattctttagatttaaaatgagatgcaaacctctcacagaacaaataactagccgcagacaattagttcttatggaattaaatgtctttaaaactaca

SEQ ID NO: 342300 - DNA, 120 bp, Artificial Sequence
  ENSG00000138050_23 (sequence is synthesized)
ttttccttttaatttttcctcagatgtttaagaggaatggtatgccattccaagtaatgactttcttatactttctgcctaaaaatttccttaaatctacagatgtcctttgtatttgga

SEQ ID NO: 342301 - DNA, 120 bp, Artificial Sequence
  ENSG00000138050_24 (sequence is synthesized)
cctgaaacccagaatgatcatatttatcaggtcataatctagttatttcatatacctaaaattacaaggatagagattatgcatgagtagacattaatgccatggggtgtactgggggct

SEQ ID NO: 342302 - DNA, 120 bp, Artificial Sequence
  ENSG00000138050_25 (sequence is synthesized)
agggcaggtaaaatacagccttactgccttgaataggaaatgctttcatgtacaattttaatatcagaactctaaattaccatcagatagcctgacttgattttcttataggctactctg

SEQ ID NO: 342303 - DNA, 120 bp, Artificial Sequence
  ENSG00000138050_26 (sequence is synthesized)
tggcatctctggctgacattaaggtaccatatggctctgactgaaacctggctgtgcactgaggactctgcttcctctgtagacatatcaagtggtggatgtcttttctcccctatctcg

SEQ ID NO: 342304 - DNA, 120 bp, Artificial Sequence
  ENSG00000138050_27 (sequence is synthesized)
tttgttctttcagatctttatacatctaaatgacatttactctgtggtggggattcctgtgttcagggtttccctagccagcagagcttacatcaagacagctggactgcgatctacaat

SEQ ID NO: 342305 - DNA, 120 bp, Artificial Sequence
  ENSG00000138061_0 (sequence is synthesized)
gactctggagtgggagtgggagcgagcgcttctgcgactccagttgtgagagccgcaagggcatgggaattgacgccactcaccgacccccagtctcaatctcaacgctgtgaggaaacc

SEQ ID NO: 342306 - DNA, 120 bp, Artificial Sequence
  ENSG00000138061_1 (sequence is synthesized)
tcgactttgccaggtccccaagggcagcggggctcggcgagcgaggcacccttctccgtccccatcccaatccaagcgctcctggcactgacgacgccaagagactcgagtgggagttaa

SEQ ID NO: 342307 - DNA, 120 bp, Artificial Sequence
  ENSG00000138061_2 (sequence is synthesized)
agcttccagtgagggcagcaggtgtccaggccgggcctgcgggttcctgttgacgtcttgccctaggcaaaggtcccagttccttctcggagccggctgtcccgcgccactggaaaccgc

SEQ ID NO: 342308 - DNA, 120 bp, Artificial Sequence
  ENSG00000138061_3 (sequence is synthesized)
acctccccgcagcatgggcaccagcctcagcccgaacgacccttggccgctaaacccgctgtccatccagcagaccacgctcctgctactcctgtcggtgctggccactgtgcatgtggg

SEQ ID NO: 342309 - DNA, 120 bp, Artificial Sequence
  ENSG00000138061_4 (sequence is synthesized)
ccagcggctgctgaggcaacggaggcggcagctccggtccgcgcccccgggcccgtttgcgtggccactgatcggaaacgcggcggcggtgggccaggcggctcacctctcgttcgctcg

SEQ ID NO: 342310 - DNA, 120 bp, Artificial Sequence
  ENSG00000138061_5 (sequence is synthesized)
cctggcgcggcgctacggcgacgttttccagatccgcctgggcagctgccccatagtggtgctgaatggcgagcgcgccatccaccaggccctggtgcagcagggctcggccttcgccga

SEQ ID NO: 342311 - DNA, 120 bp, Artificial Sequence
  ENSG00000138061_6 (sequence is synthesized)
ccggccggccttcgcctccttccgtgtggtgtccggcggccgcagcatggctttcggccactactcggagcactggaaggtgcagcggcgcgcagcccacagcatgatgcgcaacttctt

SEQ ID NO: 342312 - DNA, 120 bp, Artificial Sequence
  ENSG00000138061_7 (sequence is synthesized)
cacgcgccagccgcgcagccgccaagtcctcgagggccacgtgctgagcgaggcgcgcgagctggtggcgctgctggtgcgcggcagcgcggacggcgccttcctcgacccgaggccgct

SEQ ID NO: 342313 - DNA, 120 bp, Artificial Sequence
  ENSG00000138061_8 (sequence is synthesized)
gaccgtcgtggccgtggccaacgtcatgagtgccgtgtgtttcggctgccgctacagccacgacgaccccgagttccgtgagctgctcagccacaacgaagagttcgggcgcacggtggg

SEQ ID NO: 342314 - DNA, 120 bp, Artificial Sequence
  ENSG00000138061_9 (sequence is synthesized)
cgcgggcagcctggtggacgtgatgccctggctgcagtacttccccaacccggtgcgcaccgttttccgcgaattcgagcagctcaaccgcaacttcagcaacttcatcctggacaagtt

SEQ ID NO: 342315 - DNA, 120 bp, Artificial Sequence
  ENSG00000138061_10 (sequence is synthesized)
cttgaggcactgcgaaagccttcggcccggggccgccccccgcgacatgatggacgcctttatcctctctgcggaaaagaaggcggccggggactcgcacggtggtggcgcgcggctgga

SEQ ID NO: 342316 - DNA, 120 bp, Artificial Sequence
  ENSG00000138061_11 (sequence is synthesized)
tttggagaacgtaccggccactatcactgacatcttcggcgccagccaggacaccctgtccaccgcgctgcagtggctgctcctcctcttcaccaggtatcctgatgtgcagactcgagt

SEQ ID NO: 342317 - DNA, 120 bp, Artificial Sequence
  ENSG00000138061_12 (sequence is synthesized)
gcaggcagaattggatcaggtcgtggggagggaccgtctgccttgtatgggtgaccagcccaacctgccctatgtcctggccttcctttatgaagccatgcgcttctccagctttgtgcc

SEQ ID NO: 342318 - DNA, 120 bp, Artificial Sequence
  ENSG00000138061_13 (sequence is synthesized)
tgtcactattcctcatgccaccactgccaacacctctgtcttgggctaccacattcccaaggacactgtggtttttgtcaaccagtggtctgtgaatcatgacccactgaagtggcctaa

SEQ ID NO: 342319 - DNA, 120 bp, Artificial Sequence
  ENSG00000138061_14 (sequence is synthesized)
cccggagaactttgatccagctcgattcttggacaaggatggcctcatcaacaaggacctgaccagcagagtgatgattttttcagtgggcaaaaggcggtgcattggcgaagaactttc

SEQ ID NO: 342320 - DNA, 120 bp, Artificial Sequence
  ENSG00000138061_15 (sequence is synthesized)
taagatgcagctttttctcttcatctccatcctggctcaccagtgcgatttcagggccaacccaaatgagcctgcgaaaatgaatttcagttatggtctaaccattaaacccaagtcatt

SEQ ID NO: 342321 - DNA, 120 bp, Artificial Sequence
  ENSG00000138061_16 (sequence is synthesized)
taaagtcaatgtcactctcagagagtccatggagctccttgatagtgctgtccaaaatttacaagccaaggaaacttgccaataagaagcaagaggcaagctgaaattttagaaatattc

SEQ ID NO: 342322 - DNA, 120 bp, Artificial Sequence
  ENSG00000138061_17 (sequence is synthesized)
acatcttcggagatgaggagtaaaattcagtttttttccagttcctcttttgtgctgcttctcaattagcgtttaaggtgagcataaatcaactgtccatcaggtgaggtgtgctccata

SEQ ID NO: 342323 - DNA, 120 bp, Artificial Sequence
  ENSG00000138061_18 (sequence is synthesized)
cccagcggttcttcatgagtagtgggctatgcaggagcttctgggagatttttttgagtcaaagacttaaagggcccaatgaattattatatacatactgcatcttggttatttctgaag

SEQ ID NO: 342324 - DNA, 120 bp, Artificial Sequence
  ENSG00000138061_19 (sequence is synthesized)
gtagcattctttggagttaaaatgcacatatagacacatacacccaaacacttacaccaaactactgaatgaagcagtattttggtaaccaggccatttttggtgggaatccaagattgg

SEQ ID NO: 342325 - DNA, 120 bp, Artificial Sequence
  ENSG00000138061_20 (sequence is synthesized)
tctcccatatgcagaaatagacaaaaagtatattaaacaaagtttcagagtatattgttgaagagacagagacaagtaatttcagtgtaaagtgtgtgattgaaggtgataagggaaaag

SEQ ID NO: 342326 - DNA, 120 bp, Artificial Sequence
  ENSG00000138061_21 (sequence is synthesized)
tatgggtggatttatccttttgccttctggtatacttccttacttttaaggataaatcataaagtcagttgctcaaaaagaaatcaatagttgaattagtgagtatagtggggttccatg

SEQ ID NO: 342327 - DNA, 120 bp, Artificial Sequence
  ENSG00000138061_22 (sequence is synthesized)
agttatcatgaattttaaagtatgcattattaaattgtaaaactccaaggtgatgttgtacctcttttgcttgccaaagtacagaatttgaattatcagcaaagaaaaaaaaaaaagcca

SEQ ID NO: 342328 - DNA, 120 bp, Artificial Sequence
  ENSG00000138061_23 (sequence is synthesized)
gccaagctttaaattatgtgaccataatgtactgatttcagtaagtctcataggttaaaaaaaaaagtcaccaaatagtgtgaaatatattacttaactgtccgtaagcagtatattagt

SEQ ID NO: 342329 - DNA, 120 bp, Artificial Sequence
  ENSG00000138061_24 (sequence is synthesized)
attatcttgttcaggaaaaggttgaataatatatgccttgtataatattgaaaattgaaaagtacaactaacgcaaccaagtgtgctaaaaatgagcttgattaaatcaaccacctattt

SEQ ID NO: 342330 - DNA, 120 bp, Artificial Sequence
  ENSG00000138061_25 (sequence is synthesized)
ttgacatggaaatgaagcagggtttcttttcttcactcaaattttggcgaatctcaaaattagatcctaagatgtgttcttatttttataacatctttattgaaattctatttataatac

SEQ ID NO: 342331 - DNA, 120 bp, Artificial Sequence
  ENSG00000138061_26 (sequence is synthesized)
agaatcttgttttgaaaataacctaattaatatattaaaattccaaattcatggcatgcttaaattttaactaaattttaaagccattctgattattgagttccagttgaagttagtgga

SEQ ID NO: 342332 - DNA, 120 bp, Artificial Sequence
  ENSG00000138061_27 (sequence is synthesized)
aatctgaacattctcctgtggaaggcagagaaatctaagctgtgtctgcccaatgaataatggaaaatgccatgaattacctggatgttctttttacgaggtgacaagagttggggacag

SEQ ID NO: 342333 - DNA, 120 bp, Artificial Sequence
  ENSG00000138061_28 (sequence is synthesized)
aactcccattacaactgaccaagtttctcttctagatgattttttgaaagttaacattaatgcctgctttttggaaagtcagaatcagaagatagtcttggaagctgtttggaaaagaca

SEQ ID NO: 342334 - DNA, 120 bp, Artificial Sequence
  ENSG00000138061_29 (sequence is synthesized)
gtggagatgaggtcagttgtgttttttaagatggcaattactttggtagctgggaaagcataaagctcaaatgaaatgtatgcattcacatttagaaaagtgaattgaagtttcaagttt

SEQ ID NO: 342335 - DNA, 120 bp, Artificial Sequence
  ENSG00000138061_30 (sequence is synthesized)
taaagttcattgcaattaaacttccaaagaaagttctacagtgtcctaagtgctaagtgcttattacattttattaagctttttggaatctttgtaccaaaattttaaaaaagggagttt

SEQ ID NO: 342336 - DNA, 120 bp, Artificial Sequence
  ENSG00000138061_31 (sequence is synthesized)
ttgatagttgtgtgtatgtgtgtgtggggtggggggatggtaagagaaaagagagaaacactgaaaagaaggaaagatggttaaacattttcccactcattctgaattaattaatttgga

SEQ ID NO: 342337 - DNA, 120 bp, Artificial Sequence
  ENSG00000138061_32 (sequence is synthesized)
gcacaaaattcaaagcatggacatttagaagaaagatgtttggcgtagcagagttaaatctcaaataggctattaaaaaagtctacaacatagcagatctgttttgtggtttggaatatt

SEQ ID NO: 342338 - DNA, 120 bp, Artificial Sequence
  ENSG00000138061_33 (sequence is synthesized)
aaaaaacttcatgtaattttattttaaaatttcatagctgtacttcttgaatataaaaaatcatgccagtatttttaaaggcattagagtcaactacacaaagcaggcttgcccagtaca

SEQ ID NO: 342339 - DNA, 120 bp, Artificial Sequence
  ENSG00000138061_34 (sequence is synthesized)
tttaaattttttggcacttgccattccaaaatattatgccccaccaaggctgagacagtgaatttgggctgctgtagcctatttttttagattgagaaatgtgtagctgcaaaaataatc

SEQ ID NO: 342340 - DNA, 120 bp, Artificial Sequence
  ENSG00000138061_35 (sequence is synthesized)
atgaaccaatctggatgcctcattatgtcaaccaggtccagatgtgctataatctgtttttacgtatgtaggcccagtcgtcatcagatgcttgcggcaaaaggaaagctgtgtttatat

SEQ ID NO: 342341 - DNA, 120 bp, Artificial Sequence
  ENSG00000138061_36 (sequence is synthesized)
ggaagaaagtaaggtgcttggagtttacctggcttatttaatatgcttataacctagttaaagaaaggaaaagaaaacaaaaaacgaatgaaaataactgaatttggaggctggagtaat

SEQ ID NO: 342342 - DNA, 120 bp, Artificial Sequence
  ENSG00000138061_37 (sequence is synthesized)
cagattactgctttaatcagaaaccctcattgtgtttctaccggagagagaatgtatttgctgacaaccattaaagtcagaagttttactccaggttattgcaataaagtataatgttta

SEQ ID NO: 342343 - DNA, 120 bp, Artificial Sequence
  ENSG00000138061_38 (sequence is synthesized)
ttaaatgcttcatttgtatgtcaaagctttgactctataagcaaattgcttttttccaaaacaaaaagatgtctcaggtttgttttgtgaattttctaaaagctttcatgtcccagaact

SEQ ID NO: 342344 - DNA, 120 bp, Artificial Sequence
  ENSG00000138061_39 (sequence is synthesized)
tagcctttacctgtgaagtgttactacagccttaatattttcctagtagatctatattagatcaaatagttgcatagcagtatatgttaatttgtgtgtttttagctgtgacacaactgt

SEQ ID NO: 342345 - DNA, 120 bp, Artificial Sequence
  ENSG00000138061_40 (sequence is synthesized)
gtgattaaaaggtatactttagtagacatttataactcaaggataccttcttatttaatcttttcttatttttgtactttatcatgaatgcttttagtgtgtgcataatagctacagtgc

SEQ ID NO: 342346 - DNA, 120 bp, Artificial Sequence
  ENSG00000138061_41 (sequence is synthesized)
atagttgtagacaaagtacattctggggaaacaacatttatatgtagcctttactgtttgatataccaaattaaaaaaaaattgtatctcattacttatactgggacaccattaccaaaa

SEQ ID NO: 342347 - DNA, 120 bp, Artificial Sequence
  ENSG00000138061_42 (sequence is synthesized)
gacaccattaccaaaataataaaaatcactttcataatcttgttatgaagttttatgttgtagcaaatatagtctaatgtatcactttatttcaactattactatggattattcaattaa

SEQ ID NO: 342348 - DNA, 120 bp, Artificial Sequence
  ENSG00000138061_43 (sequence is synthesized)
gcagcctctcctaggctagtcctcggcgtgcatccgaggccgcccagccctggcgctaaaagcgggccgcccgtcagggctttgttccaggccaaggaagcccatggaggccgggccagc

SEQ ID NO: 342349 - DNA, 120 bp, Artificial Sequence
  ENSG00000138061_44 (sequence is synthesized)
cgacaggtaacccgcacagaaactttcagaaggcggccacaactagcgggcagcgctaggtttataaaacctccgcgctaggagtttgagaaatgccggggtagaagacaagaagcagtc

SEQ ID NO: 342350 - DNA, 120 bp, Artificial Sequence
  ENSG00000138061_45 (sequence is synthesized)
acttttacgaaagcagagtagcattcagaaaggcagatgggatatccaggaggcgcctgcagacgtttctggcccctgcgcttggctcagttagcggaccccctgatgcccacgttggtc

SEQ ID NO: 342351 - DNA, 120 bp, Artificial Sequence
  ENSG00000138061_46 (sequence is synthesized)
ggcttttacaaagagatcaacaatagaacaggagaaattctaccagatgcaaaaagaaaagggcaagggagaatataaacgtttgcctaattcactgatctgcttaaactgccttttaat

SEQ ID NO: 342352 - DNA, 120 bp, Artificial Sequence
  ENSG00000138061_47 (sequence is synthesized)
gcttagaaaatagaaaggatggcacgatcctttgatgaaaggaggctgtttatgtcagaagaagtccagacctctcacagtgacgaggggagaataaaaaagctgcaacatcaggtatcc

SEQ ID NO: 342353 - DNA, 120 bp, Artificial Sequence
  ENSG00000138061_48 (sequence is synthesized)
tagaaatattcacatcttcggagatgaggagtaaaattcagtttttttccagttcctcttttgtgctgcttctcaattagcgtttaagatgattttttgaaagttaacattaatgcctgc

SEQ ID NO: 342354 - DNA, 120 bp, Artificial Sequence
  ENSG00000138061_49 (sequence is synthesized)
gacagtggagatgagggcctaggtcatgactctccaggccttcactgtgccacactcacagatgacagggcttgcggtaccaaaggctctttatcttccagactacagctcctattaatg

SEQ ID NO: 342355 - DNA, 120 bp, Artificial Sequence
  ENSG00000138068_0 (sequence is synthesized)
atggctgataaatccaaatttattgaatacattgacgaagctttagaaaaatcaaaagaaactgcactctctcatttatttttcacctatcaggggattccttaccccatcaccatgtgc

SEQ ID NO: 342356 - DNA, 120 bp, Artificial Sequence
  ENSG00000138068_1 (sequence is synthesized)
acctcagaaactttccaagcgctggacaccttcgaagccagacatgatgacatcgtgctagcatcttatccaaagtgcggttcaaactggattctccacattgtcagtgaattaatatat

SEQ ID NO: 342357 - DNA, 120 bp, Artificial Sequence
  ENSG00000138068_2 (sequence is synthesized)
gctgtttctaaaaaaaagtataaatatccagaattcccagttcttgaatgtggggattcagaaaaatatcagagaatgaaaggctttccatcaccaaggattttggcaactcacctccac

SEQ ID NO: 342358 - DNA, 120 bp, Artificial Sequence
  ENSG00000138068_3 (sequence is synthesized)
tatgacaaattacctgggtctatcttcgagaataaagccaagatattggtgatatttcgaaaccctaaagatacagcagtatcttttttgcatttccacaacgatgtccccgatattcca

SEQ ID NO: 342359 - DNA, 120 bp, Artificial Sequence
  ENSG00000138068_4 (sequence is synthesized)
ttgattttgcaatcaattggaacaaacatcttgatggcgacaatgttaagttcatattatatgaagacctgaaagagaatctggctgctggaataaaacagattgctgagttcttgggat

SEQ ID NO: 342360 - DNA, 120 bp, Artificial Sequence
  ENSG00000138068_5 (sequence is synthesized)
tctttctaactggggagcaaattcaaactatctcagtccagagcaccttccaagccatgcgtgcgaagtctcaggacacacacggtgctgtcggcccattccttttccgcaaaggtgaag

SEQ ID NO: 342361 - DNA, 120 bp, Artificial Sequence
  ENSG00000138068_6 (sequence is synthesized)
ttggtgattggaaaaatttgttcagtgaaattcagaaccaggaaatggatgaaaaattcaaagagtgcttagcaggcacctccctcggagcaaagttgaagtatgaatcatattgccagg

SEQ ID NO: 342362 - DNA, 120 bp, Artificial Sequence
  ENSG00000138068_7 (sequence is synthesized)
cagggttgattccagtcaattcagcaggcctagatttattttccttaataataattaagtgtaaataattaaatgataattcaatcaaataatcaaataataattaaacaatattgaaat

SEQ ID NO: 342363 - DNA, 120 bp, Artificial Sequence
  ENSG00000138068_8 (sequence is synthesized)
cagagtcttacctgagtgaaaaatgccatggccttgtttctcatagcaggggattccttaccccatcaccatgtgcacctcagaaactttccaagcgctggacaccttcgaagccagaca

SEQ ID NO: 342364 - DNA, 120 bp, Artificial Sequence
  ENSG00000138068_9 (sequence is synthesized)
tcctccgaattagcaaatctggtttgccaacacagtatctgccttccaggggattccttaccccatcaccatgtgcacctcagaaactttccaagcgctggacaccttcgaagccagaca

SEQ ID NO: 342365 - DNA, 120 bp, Artificial Sequence
  ENSG00000138068_10 (sequence is synthesized)
agaattcactggtactaacaattaaacctatgccctctgagatctcattgggattccttaccccatcaccatgtgcacctcagaaactttccaagcgctggacaccttcgaagccagaca

SEQ ID NO: 342366 - DNA, 120 bp, Artificial Sequence
  ENSG00000138069_0 (sequence is synthesized)
attttgggtggaagcgatagctgagtggcggcggctgctgattgtgttctaggggacggagtaggggaagacgtttgctctcccggaacagcctatctcattcctttctttcgattaccc

SEQ ID NO: 342367 - DNA, 120 bp, Artificial Sequence
  ENSG00000138069_1 (sequence is synthesized)
gtggcgcggagagtcagggcggcggctgcggcagcaagggcggcggtggcggcggcggcagctgcagtgacatgtccagcatgaatcccgaatatgattatttattcaagttacttctga

SEQ ID NO: 342368 - DNA, 120 bp, Artificial Sequence
  ENSG00000138069_2 (sequence is synthesized)
ttggcgactcaggggttggaaagtcttgccttcttcttaggtttgcagatgatacatatacagaaagctacatcagcacaattggtgtggatttcaaaataagaactatagagttagacg

SEQ ID NO: 342369 - DNA, 120 bp, Artificial Sequence
  ENSG00000138069_3 (sequence is synthesized)
ggaaaacaatcaagcttcaaatatgggacacagcaggccaggaaagatttcgaacaatcacctccagttattacagaggagcccatggcatcatagttgtgtatgatgtgacagatcagg

SEQ ID NO: 342370 - DNA, 120 bp, Artificial Sequence
  ENSG00000138069_4 (sequence is synthesized)
agtccttcaataatgttaaacagtggctgcaggaaatagatcgttatgccagtgaaaatgtcaacaaattgttggtagggaacaaatgtgatctgaccacaaagaaagtagtagactaca

SEQ ID NO: 342371 - DNA, 120 bp, Artificial Sequence
  ENSG00000138069_5 (sequence is synthesized)
caacagcgaaggaatttgctgattcccttggaattccgtttttggaaaccagtgctaagaatgcaacgaatgtagaacagtctttcatgacgatggcagctgagattaaaaagcgaatgg

SEQ ID NO: 342372 - DNA, 120 bp, Artificial Sequence
  ENSG00000138069_6 (sequence is synthesized)
gtcccggagcaacagctggtggtgctgagaagtccaatgttaaaattcagagcactccagtcaagcagtcaggtggaggttgctgctaaaatttgcctccatccttttctcacagcaatg

SEQ ID NO: 342373 - DNA, 120 bp, Artificial Sequence
  ENSG00000138069_7 (sequence is synthesized)
aatttgcaatctgaacccaagtgaaaaaacaaaattgcctgaattgtactgtatgtagctgcactacaacagattcttaccgtctccacaaaggtcagagattgtaaatggtcaatactg

SEQ ID NO: 342374 - DNA, 120 bp, Artificial Sequence
  ENSG00000138069_8 (sequence is synthesized)
actttttttttattcccttgactcaagacagctaacttcattttcagaactgttttaaacctttgtgtgctggtttataaaataatgtgtgtaatccttgttgctttcctgataccagac

SEQ ID NO: 342375 - DNA, 120 bp, Artificial Sequence
  ENSG00000138069_9 (sequence is synthesized)
tgtttcccgtggttggttagaatatattttgttttgatgtttatattggcatgtttagatgtcaggtttagtcttctgaagatgaagttcagccattttgtatcaaacagcacaagcagt

SEQ ID NO: 342376 - DNA, 120 bp, Artificial Sequence
  ENSG00000138069_10 (sequence is synthesized)
tctgatttgctagttcttccttgtagagttataaatggaaagattacactatctgattaatagtttcttcatactctgcatataatttgtggctgcagaatattgtaatttgttgcacac

SEQ ID NO: 342377 - DNA, 120 bp, Artificial Sequence
  ENSG00000138069_11 (sequence is synthesized)
tatgtaacaaaacaactgaagatatgtttaataaatattgtacttattggaagtaatatcaaactgtatggtgataagtattgttttgattcttatggttaaagggaaatagagccttgc

SEQ ID NO: 342378 - DNA, 120 bp, Artificial Sequence
  ENSG00000138069_12 (sequence is synthesized)
attatattcaacacagccatttgtgtgtgcacaatgcaaactaaggtattctagacctatcttagagcagcatccagtatttgctttctagataatatgcccaataacatgacctagagg

SEQ ID NO: 342379 - DNA, 120 bp, Artificial Sequence
  ENSG00000138069_13 (sequence is synthesized)
ggcttctgtgctgtgtagggatttaaccaacttcagtggttcagggagctcaaactatatgtaaaacaagtttagaatgtatgctatctagcccgttatctctgatccttctctaaaacc

SEQ ID NO: 342380 - DNA, 120 bp, Artificial Sequence
  ENSG00000138069_14 (sequence is synthesized)
atttgaaatagcttcattgatcaacatttcataaatgcatctgtggtagaggtagaaagcagcacctttcctaattggcaaatgatcagactaatgtgtgctaatgtttttcttccatgc

SEQ ID NO: 342381 - DNA, 120 bp, Artificial Sequence
  ENSG00000138069_15 (sequence is synthesized)
tttcagtcagattcaactattttatcctccacagttgcttaacttggtgttggaggagggtttaagcattaagataggaagcaggaaatttgattgctctaaatttagaaattatatccc

SEQ ID NO: 342382 - DNA, 120 bp, Artificial Sequence
  ENSG00000138069_16 (sequence is synthesized)
taaaaattaaaacatgaatactgggtggtaatgataattgaggcaaatgtatttattttggtgacattttgcatatatgaagattttctgaaataggaccttcaagatcctagggggttt

SEQ ID NO: 342383 - DNA, 120 bp, Artificial Sequence
  ENSG00000138069_17 (sequence is synthesized)
tgtttggtttttaattgtgaggaataaaaaatcttctgcccacactggcattttaaggtgactgaggtcaaacgttgtttccttaggttgaaatagcagccaaaacattcttcacgcagg

SEQ ID NO: 342384 - DNA, 120 bp, Artificial Sequence
  ENSG00000138069_18 (sequence is synthesized)
ggcttgggatatggctgctggcaacacattttgttgtgggctccttaatttaatgataaaatttaagctaaacacaagccaaaaatgaataggtttttttaatttttatttttcactaaa

SEQ ID NO: 342385 - DNA, 120 bp, Artificial Sequence
  ENSG00000138069_19 (sequence is synthesized)
caggcaattgaaatacatggtacaaaaataagtggtaagataattgtaaaatgaaatggacagaatattcaattttccatctatgaaaatttcacaataaaaatcatagtttactttgta

SEQ ID NO: 342386 - DNA, 120 bp, Artificial Sequence
  ENSG00000138069_20 (sequence is synthesized)
aagtcttgccttcttcttaggtttgcagtatccagggtgtgagcaagcagaactcagacagctctgtcatgctgaagctggaaaacagtcccttacctctgagaagcgtctcctggcaga

SEQ ID NO: 342387 - DNA, 120 bp, Artificial Sequence
  ENSG00000138069_21 (sequence is synthesized)
tcgccccagaccccatcctgctcagttcacacgccagtggtaactgaacactagcagaatgactggttcatctcagcttcttcactgaattttttatctgcttgatgaagaactcacccc

SEQ ID NO: 342388 - DNA, 120 bp, Artificial Sequence
  ENSG00000138069_22 (sequence is synthesized)
cgagggaagcaggacagcacagtgttgaaggacatgggttttggagccagacaaacctgaggccagcccctaactttgccaccttccagatgtatgacttcgagcctcactttcctcccc

SEQ ID NO: 342389 - DNA, 120 bp, Artificial Sequence
  ENSG00000138069_23 (sequence is synthesized)
tcatagcaccagctcctcagaaggtaaggattaaatacacccatgtgtgcaaagcacatggtaagagcttaacgaacaacaggaattctaataataagcaccggactcatccccgtgaaa

SEQ ID NO: 342390 - DNA, 120 bp, Artificial Sequence
  ENSG00000138069_24 (sequence is synthesized)
gagtggggaatggggcgggcgacaacccttcaggtacgcatgccccagaggcgcggcgcttggcgggaagctgagtcctggccttgcgtcgcactgtctgtcctcagctcgcgtagccgc

SEQ ID NO: 342391 - DNA, 120 bp, Artificial Sequence
  ENSG00000138071_0 (sequence is synthesized)
agctaaatgacgggcggagcccggcggcggcttccggtcgggggaaaaaagttgggccgaaggaggggccgggaagacgcaagaggaagaagagaaaacggccgggcggcggtggctgta

SEQ ID NO: 342392 - DNA, 120 bp, Artificial Sequence
  ENSG00000138071_1 (sequence is synthesized)
ggttgtgcggctgcagcggctcttccctgggcggacgatggacagccagggcaggaaggtggtggtgtgcgacaacggcaccgggtttgtgaagtgtggatatgcaggctctaactttcc

SEQ ID NO: 342393 - DNA, 120 bp, Artificial Sequence
  ENSG00000138071_2 (sequence is synthesized)
agaacacatcttcccagctttggttggaagacctattatcagatcaaccaccaaagtgggaaacattgaaatcaaggatcttatggttggtgatgaggcaagtgaattacgatcaatgtt

SEQ ID NO: 342394 - DNA, 120 bp, Artificial Sequence
  ENSG00000138071_3 (sequence is synthesized)
agaagttaactaccctatggaaaatggcatagtacgaaattgggatgacatgaaacacctgtgggactacacatttggaccagagaaacttaatatagataccagaaattgtaaaatctt

SEQ ID NO: 342395 - DNA, 120 bp, Artificial Sequence
  ENSG00000138071_4 (sequence is synthesized)
actcacagaacctcctatgaacccaaccaaaaacagagagaagattgtagaggtaatgtttgaaacttaccagttttccggtgtatatgtagccatccaggcagttctgactttgtacgc

SEQ ID NO: 342396 - DNA, 120 bp, Artificial Sequence
  ENSG00000138071_5 (sequence is synthesized)
tcaaggtttattgactggtgtagtggtagactctggagatggtgtgactcacatttgcccagtatatgaaggcttttctctccctcatcttaccaggagactggatattgctgggaggga

SEQ ID NO: 342397 - DNA, 120 bp, Artificial Sequence
  ENSG00000138071_6 (sequence is synthesized)
tataactagatatcttatcaagctacttctgttgcgaggatacgccttcaaccactctgctgattttgaaacggttcgcatgattaaagaaaaactgtgttacgtgggatataatattga

SEQ ID NO: 342398 - DNA, 120 bp, Artificial Sequence
  ENSG00000138071_7 (sequence is synthesized)
gcaagagcagaaactggccttagaaaccacagtattagttgaatcttatacactcccagatggacgtatcatcaaagttgggggagagagatttgaagcaccagaagctttatttcagcc

SEQ ID NO: 342399 - DNA, 120 bp, Artificial Sequence
  ENSG00000138071_8 (sequence is synthesized)
tcacttgatcaatgttgaaggagttggtgttgctgaattgctttttaacacaattcaggcagctgacattgataccagatctgaattctacaaacacattgtgctttctggagggtctac

SEQ ID NO: 342400 - DNA, 120 bp, Artificial Sequence
  ENSG00000138071_9 (sequence is synthesized)
tatgtatcctggcctgccatcacggttggaacgagaacttaaacagctttacttagaacgagttttgaagggtgatgtggaaaaactttctaaatttaagatccgcattgaagacccacc

SEQ ID NO: 342401 - DNA, 120 bp, Artificial Sequence
  ENSG00000138071_10 (sequence is synthesized)
ccgcagaaagcacatggtattcctgggtggtgcagttctagcggatatcatgaaagacaaagacaacttttggatgacccgacaagagtaccaagaaaagggtgtccgtgtgctagagaa

SEQ ID NO: 342402 - DNA, 120 bp, Artificial Sequence
  ENSG00000138071_11 (sequence is synthesized)
acttggtgtgactgttcgataaactccaaagcttgttcccgtcatacccgtaatgctttcttttttcctttattgccaatctttgaactcattcaactccaggacatggaagaggcctct

SEQ ID NO: 342403 - DNA, 120 bp, Artificial Sequence
  ENSG00000138071_12 (sequence is synthesized)
ctctgccctttgactggaaaggtcaagttttattctggtgtcttggggaagctttgttaaatttttgttaatgtgggtaaatctgagtttaattcaactgcttccctacatagactagag

SEQ ID NO: 342404 - DNA, 120 bp, Artificial Sequence
  ENSG00000138071_13 (sequence is synthesized)
ggctaaggattctgtctgctgctttgtttcttctaagtaggcatttagatcattcctataggcttcctattttcactttactgctctaatgctgctagtcgtagtctttagcacactagg

SEQ ID NO: 342405 - DNA, 120 bp, Artificial Sequence
  ENSG00000138071_14 (sequence is synthesized)
tggtatgcctttattagcataaaacaaaaaaaactttaacaggagcttttacatattactgggatggggggtggttcgggatgggtgggcagctgctgaaccctttagggcatttcctct

SEQ ID NO: 342406 - DNA, 120 bp, Artificial Sequence
  ENSG00000138071_15 (sequence is synthesized)
gtaatgtggcgctttcaactgtactgctgcagctttaagtaccttaaagcttctcctgtgaacttcttagggaaatgttaggttcagaactaaagtgttttgggtgggttttgttgcggg

SEQ ID NO: 342407 - DNA, 120 bp, Artificial Sequence
  ENSG00000138071_16 (sequence is synthesized)
tcttctgatttttatttttgaggttttgtcaactggagtacgtagaggaactttatttacagtactttgatttggcaggttttcttctacttgtgctctgcctggagctgtttccatatg

SEQ ID NO: 342408 - DNA, 120 bp, Artificial Sequence
  ENSG00000138071_17 (sequence is synthesized)
atataaaaagcaagtgtagtattccattactatgtggcttagggatttatttgttttttaaaatcaaccatgttagctgggattagactccctacagtccttcaatggaaaagtaacatt

SEQ ID NO: 342409 - DNA, 120 bp, Artificial Sequence
  ENSG00000138071_18 (sequence is synthesized)
taaaaatcctttgggtaattcgaattacagatttaaaagagcttaagatctggtgttttgttaatgcttctgtttattccagaagcattaaggtaacccattgccaagtatcattcttgc

SEQ ID NO: 342410 - DNA, 120 bp, Artificial Sequence
  ENSG00000138071_19 (sequence is synthesized)
aaattattcttttatataactgaccagtgcttaataaaacaagcaggtacttacaaataattactggcagtaggttataattggtggtttaaaaataacattggaatacaggacttgttg

SEQ ID NO: 342411 - DNA, 120 bp, Artificial Sequence
  ENSG00000138071_20 (sequence is synthesized)
ccaattgggtaattttcattagttgttttgtttgttttgatttgaaacctggaaatacagtaaaatttgactgtttaaaatgttggccaaaaaaatcaagatttaatttttttatttgta

SEQ ID NO: 342412 - DNA, 120 bp, Artificial Sequence
  ENSG00000138071_21 (sequence is synthesized)
ctgaaaaactaatcataactgttaattctcagccatctttgaagcttgaaagaagagtctttggtattttgtaaacgttagcagactttcctgccagtgtcagaaaatcctatttatgaa

SEQ ID NO: 342413 - DNA, 120 bp, Artificial Sequence
  ENSG00000138071_22 (sequence is synthesized)
tcctgtcggtattccttggtatctgaaaaaaataccaaatagtaccatacatgagttatttctaagtttgaaaaataaaaagaaattgcatcacactaattacaaaatacaagttctgga

SEQ ID NO: 342414 - DNA, 120 bp, Artificial Sequence
  ENSG00000138071_23 (sequence is synthesized)
aaaaatatttttcttcattttaaaacttttttttaactaataatagctttgaaagaagaggcttaatttgggggtggtaactaaaatcaaaagaaatgattgacttgagggtctctgttt

SEQ ID NO: 342415 - DNA, 120 bp, Artificial Sequence
  ENSG00000138071_24 (sequence is synthesized)
ggtaagaatacatcattagcttaaataagcagcagaaggttagttttaattatgtagcttctgttaatattaagtgttttttgtctgttttacctcaatttgaacagataagtttgcctg

SEQ ID NO: 342416 - DNA, 120 bp, Artificial Sequence
  ENSG00000138071_25 (sequence is synthesized)
catgctggacatgcctcagaaccctgaatagcccgtactagatcttgggaacatggatcttagagtcactttggaataagttcttatataaatacccccagccttttgagaacggggctt

SEQ ID NO: 342417 - DNA, 120 bp, Artificial Sequence
  ENSG00000138071_26 (sequence is synthesized)
gttaaaggacgcgtatgtagggcccgtacctactggcagttgggttcagggaaatgggattgacttggccttcaggctcctttggtcataattttaaaatatgggagtagaaaacaacaa

SEQ ID NO: 342418 - DNA, 120 bp, Artificial Sequence
  ENSG00000138071_27 (sequence is synthesized)
agaatggaatggactcttaaaacaatgaaagagcatttatcgtttgtcccttgaatgtagaatttgtttttgatttcataattctgctggtaaatgtgacagttaaaatggtgcattatg

SEQ ID NO: 342419 - DNA, 120 bp, Artificial Sequence
  ENSG00000138071_28 (sequence is synthesized)
tatatatattataatttagaaataccattttataattttactattccagggtgacataatgcatttaaatttgggatttgggtggagtattatgtttaactggagttgtcaagtatgagt

SEQ ID NO: 342420 - DNA, 120 bp, Artificial Sequence
  ENSG00000138071_29 (sequence is synthesized)
ccctcaggaaaaaaaaaaaattctgttttaaaaagcaatctgattcttagctcttgaaactattgctacttaaatttccaataattaaaaatttaaaatttttaaattagaattgccaat

SEQ ID NO: 342421 - DNA, 120 bp, Artificial Sequence
  ENSG00000138071_30 (sequence is synthesized)
acttctacatttgagaagggtttttttagaaatacatttagtaaagtccccaagacattagtcttacatttaaacttttttctttaaaacatggttttggtggttaacttttacacagtt

SEQ ID NO: 342422 - DNA, 120 bp, Artificial Sequence
  ENSG00000138071_31 (sequence is synthesized)
ctgagtactgttaatatctggaaagtatcttgagatatcagtggaaagctaaacagtctaaattaacatgaaatacttcattttgattgagaaaataaaatcagattttttcaaagtcaa

SEQ ID NO: 342423 - DNA, 120 bp, Artificial Sequence
  ENSG00000138071_32 (sequence is synthesized)
gggtgggggcggcgggcgagaccggcactggacatggagcctactgaccgcccggcagggacctgctccgcgctaatgcgggggcaattgggctaaagcggacggaagcgtaaaaggctc

SEQ ID NO: 342424 - DNA, 120 bp, Artificial Sequence
  ENSG00000138071_33 (sequence is synthesized)
ggtttgtgtgttccgagaagggctcttttccccagggccaccggtttgtaaaaaggagaaagacctagaggccttcctcttcctgtatagttgaagatacaccaaacgagaagcaggaag

SEQ ID NO: 342425 - DNA, 120 bp, Artificial Sequence
  ENSG00000138073_0 (sequence is synthesized)
agtgcgcgtctgcgagaccgacttggacggagccgagctgaggctcggcttcctgctgatggtcagggttttggcaactccccggtgtgagaggggtagggagtgctcccggcggcgacg

SEQ ID NO: 342426 - DNA, 120 bp, Artificial Sequence
  ENSG00000138073_1 (sequence is synthesized)
cgagttcaccagccgccggggcagtagtcgaaggcccggcgcggcatgtcctgggtgccgcggtgcgggcagtgaacgcgcgccgggcgggatgggccggcgccgggcgccagagctgta

SEQ ID NO: 342427 - DNA, 120 bp, Artificial Sequence
  ENSG00000138073_2 (sequence is synthesized)
tgtaccgggctccgttcccgttgtacgcgcttcaggtcgaccccagcactgggctgctcatcgctgcgggcggaggaggcgccgccaagacaggcataaagaatggcgtgcactttctgc

SEQ ID NO: 342428 - DNA, 120 bp, Artificial Sequence
  ENSG00000138073_3 (sequence is synthesized)
agctagagctgattaatgggcgcttgagtgcctccttgctgcactcccatgacacagagacacgggccaccatgaacttggcactggctggtgacatccttgctgcagggcaggatgccc

SEQ ID NO: 342429 - DNA, 120 bp, Artificial Sequence
  ENSG00000138073_4 (sequence is synthesized)
actgtcagctcctgcgcttccaggcacatcaacagcagggcaacaaggcagagaaggccggttccaaggagcaggggcctcgacaaaggaagggagcagccccagcagagaagaaatgtg

SEQ ID NO: 342430 - DNA, 120 bp, Artificial Sequence
  ENSG00000138073_5 (sequence is synthesized)
gagcggaaacccagcacgaggggctagaactcagggtagagaatttgcaggcggtgcagacagactttagctccgatccactgcagaaagttgtgtgcttcaaccacgataataccctgc

SEQ ID NO: 342431 - DNA, 120 bp, Artificial Sequence
  ENSG00000138073_6 (sequence is synthesized)
ttgccactggaggaacagatggctacgtccgtgtctggaaggtgcccagcctggagaaggttctggagttcaaagcccacgaaggggagattgaagacctggctttagggcctgatggca

SEQ ID NO: 342432 - DNA, 120 bp, Artificial Sequence
  ENSG00000138073_7 (sequence is synthesized)
agttggtaaccgtgggccgggaccttaaggcctctgtgtggcagaaggatcagctggtgacacagctgcactggcaagaaaatggacccaccttttccagcacaccttaccgctaccagg

SEQ ID NO: 342433 - DNA, 120 bp, Artificial Sequence
  ENSG00000138073_8 (sequence is synthesized)
ctccctgctacctcacagcctgggatggctccaacttcttgccccttcggaccaagtcctgtggccatgaagtcgtctcctgcctcgatgtcagtgaatccggcaccttcctaggcctgg

SEQ ID NO: 342434 - DNA, 120 bp, Artificial Sequence
  ENSG00000138073_9 (sequence is synthesized)
gcacagtcactggctctgttgccatctacatagctttctctctccagtgcctctactacgtgagggaggcccatggcattgtggtgacggatgtggcctttctacctgagaagggtcgtg

SEQ ID NO: 342435 - DNA, 120 bp, Artificial Sequence
  ENSG00000138073_10 (sequence is synthesized)
gtccagagctccttgggtcccatgaaactgccctgttctctgtggctgtggacagtcgttgccagctgcatctgttgccctcacggcggagtgttcctgtgtggctcctgctcctgctgt

SEQ ID NO: 342436 - DNA, 120 bp, Artificial Sequence
  ENSG00000138073_11 (sequence is synthesized)
gtgtcgggcttattattgtgaccatcctgctgctccagagtgcctttccaggtttcctttagcttccctgcttcctgggaatcaggagcctggacactgccatctctagagcagagtgga

SEQ ID NO: 342437 - DNA, 120 bp, Artificial Sequence
  ENSG00000138073_12 (sequence is synthesized)
ggcctggactccctttgctcactccattcgggtccacagctgaggttgccgctgacaagatgaatgggcactgcctgcccttctagtgaaaaggcttggctatggccctgtgtgactcca

SEQ ID NO: 342438 - DNA, 120 bp, Artificial Sequence
  ENSG00000138073_13 (sequence is synthesized)
ggtcccaggaaccttgccttcgtcatctgtggatccatccagaacagcggtatctgaagcccaggccatactccctgcctcctttcttctgcctaccagaggctccagagttgagcttgt

SEQ ID NO: 342439 - DNA, 120 bp, Artificial Sequence
  ENSG00000138073_14 (sequence is synthesized)
ccttatctagaaacatgtgaagatgcccaagagcctggaggcactgctgtccttcctgcagaaacagtttctcctcctcccctcagccttgtggccagttcctcttcacatgaagcccct

SEQ ID NO: 342440 - DNA, 120 bp, Artificial Sequence
  ENSG00000138073_15 (sequence is synthesized)
ggcatttgctggggaagggactggcctggtacttgctgttagggcaggaaggggcaaaaggaagacttgggtagtaatctgggggttcagatgggtagcactaagccagctggcctaaag

SEQ ID NO: 342441 - DNA, 120 bp, Artificial Sequence
  ENSG00000138073_16 (sequence is synthesized)
atgcaataagttcctaggtagtctacccttaccttgaggaatgggaaaatgaacctcagcccattaggcaggaaaagttgatatttaataaacaaggaaagagtgaactgagaccccaaa

SEQ ID NO: 342442 - DNA, 120 bp, Artificial Sequence
  ENSG00000138073_17 (sequence is synthesized)
gtatgggcacctgccatggagagaggggccagtactccttactgtagaagcctggaacctggccaagtgtttgtgttacaggttccaaggagcaggggcctcgacaaaggaagggagcag

SEQ ID NO: 342443 - DNA, 120 bp, Artificial Sequence
  ENSG00000138073_18 (sequence is synthesized)
ctggggctgggtcttgctgcgggctggcggcgattccagggtggccggggggtcgcggggcgggccacactccagcttcgggccctgcccacttctgttgggaagacccgcttgcctgac

SEQ ID NO: 342444 - DNA, 120 bp, Artificial Sequence
  ENSG00000138073_19 (sequence is synthesized)
gcccaggggcgaatttcagtcgagaactcagcgggcggaggagaggcttttaaggtaaagtgaaaactgcacacagctgcagagtcgccaggaacgcttcagctccgcctcagagcagct

SEQ ID NO: 342445 - DNA, 120 bp, Artificial Sequence
  ENSG00000138073_20 (sequence is synthesized)
ccaggggtcttatactggccttttccgggaggtcttgcctgccctctagcagcggcgagagtggtgcatttgggtttaggctaagttccttccctctcctgagcttcaccctgttctgta

SEQ ID NO: 342446 - DNA, 120 bp, Artificial Sequence
  ENSG00000138073_21 (sequence is synthesized)
aaatagaggtaataatcccagtcctgctcactgtgtagatttgtgaggcccaaatgagagaaaaaagactcgagaaacccttgtgaactagaacgtgcagaaagcaaaggggtaagacat

SEQ ID NO: 342447 - DNA, 120 bp, Artificial Sequence
  ENSG00000138073_22 (sequence is synthesized)
acaaggcagagaaggccggtgaggagctccctctctacccccttggggaaagggttgaacgagtaaggtcactcttggtgtctctaaagaagtgggtctggaagtagggttttggtagca

SEQ ID NO: 342448 - DNA, 120 bp, Artificial Sequence
  ENSG00000138073_23 (sequence is synthesized)
aggttggcatggccctgtgggtggactgtaggcctgtctctaccctgagtttgcaggaaggagtctggcccatcctatcgagggaaatcctgggggtggggaacatgctttccagaaaga

SEQ ID NO: 342449 - DNA, 120 bp, Artificial Sequence
  ENSG00000138074_0 (sequence is synthesized)
ggtccagtcgccctggggctgcttgggggcttttcctgctcgtggagctctgcgctggtcttcatgcgccctagccctctttcggggatactggccgaccccctcttccttttccccttt

SEQ ID NO: 342450 - DNA, 120 bp, Artificial Sequence
  ENSG00000138074_1 (sequence is synthesized)
agtgaaggcctcccccgtcgccgcgcggcttcccggagccgactgcagactccctcagcccggtgttccccgcgtccggacgccgaggtcgcggcttcgcagaaactcgggcccctccat

SEQ ID NO: 342451 - DNA, 120 bp, Artificial Sequence
  ENSG00000138074_2 (sequence is synthesized)
ccgccctcagaaaagggagcgatgttgatctcaggaagcacaaagggaccttcctagctctgactgaaccacggagctcaccctggacagtatcactccgtggaggaagactgtgagact

SEQ ID NO: 342452 - DNA, 120 bp, Artificial Sequence
  ENSG00000138074_3 (sequence is synthesized)
gtggctggaagccagattgtagccacacatccgcccctgccctaccccagagccctggagcagcaactggctgcagatcacagacacagtgaggatatgagtgtaggggtgagcacctca

SEQ ID NO: 342453 - DNA, 120 bp, Artificial Sequence
  ENSG00000138074_4 (sequence is synthesized)
gcccctctttccccaacctcgggcacaagcgtgggcatgtctaccttctccatcatggactatgtggtgttcgtcctgctgctggttctctctcttgccattgggctctaccatgcttgt

SEQ ID NO: 342454 - DNA, 120 bp, Artificial Sequence
  ENSG00000138074_5 (sequence is synthesized)
cgtggctggggccggcatactgttggtgagctgctgatggcggaccgcaaaatgggctgccttccggtggcactgtccctgctggccaccttccagtcagccgtggccatcctgggtgtg

SEQ ID NO: 342455 - DNA, 120 bp, Artificial Sequence
  ENSG00000138074_6 (sequence is synthesized)
ccgtcagagatctaccgatttgggacccaatattggttcctgggctgctgctactttctggggctgctgatacctgcacacatcttcatccccgttttctaccgcctgcatctcaccagt

SEQ ID NO: 342456 - DNA, 120 bp, Artificial Sequence
  ENSG00000138074_7 (sequence is synthesized)
gcctatgagtacctggagcttcgattcaataaaactgtgcgagtgtgtggaactgtgaccttcatctttcagatggtgatctacatgggagttgtgctctatgctccgtcattggctctc

SEQ ID NO: 342457 - DNA, 120 bp, Artificial Sequence
  ENSG00000138074_8 (sequence is synthesized)
aatgcagtgactggctttgatctgtggctgtccgtgctggccctgggcattgtctgtaccgtctatacagctctgggtgggctgaaggccgtcatctggacagatgtgttccagacactg

SEQ ID NO: 342458 - DNA, 120 bp, Artificial Sequence
  ENSG00000138074_9 (sequence is synthesized)
gtcatgttcctcgggcagctggcagttatcattgtggggtcagccaaggtgggcggcttggggcgtgtgtgggccgtggcttcccagcacggccgcatctctgggtttgagctggatcca

SEQ ID NO: 342459 - DNA, 120 bp, Artificial Sequence
  ENSG00000138074_10 (sequence is synthesized)
gacccctttgtgcggcacaccttctggaccttggccttcgggggtgtcttcatgatgctctccttatacggggtgaaccaggctcaggtgcagcggtacctcagttcccgcacggagaag

SEQ ID NO: 342460 - DNA, 120 bp, Artificial Sequence
  ENSG00000138074_11 (sequence is synthesized)
gctgctgtgctctcctgttatgcagtgttccccttccagcaggtgtccctctgcgtgggctgcctcattggcctggtcatgttcgcgtattaccaggagtatcccatgagcattcagcag

SEQ ID NO: 342461 - DNA, 120 bp, Artificial Sequence
  ENSG00000138074_12 (sequence is synthesized)
gctcaggcagccccagaccagttcgtcctgtactttgtgatggatctcctgaagggcctgccaggcctgccagggctcttcattgcctgcctcttcagcggctctctcagcactatatcc

SEQ ID NO: 342462 - DNA, 120 bp, Artificial Sequence
  ENSG00000138074_13 (sequence is synthesized)
agaggccttgcctttggctatgggctgctttgtctaggaatggcctatatttcctcccagatgggacctgtgctgcaggcagcaatcagcatctttggcatggttgggggaccgctgctg

SEQ ID NO: 342463 - DNA, 120 bp, Artificial Sequence
  ENSG00000138074_14 (sequence is synthesized)
ggactcttctgccttggaatgttctttccatgtgctaaccctcctggtgctgttgtgggcctgttggctgggctcgtcatggccttctggattggcatcgggagcatcgtgaccagcatg

SEQ ID NO: 342464 - DNA, 120 bp, Artificial Sequence
  ENSG00000138074_15 (sequence is synthesized)
ggctccagcatgccaccctctccctctaatgggtccagcttctccctgcccaccaatctaaccgttgccactgtgaccacactgatgcccttgactaccttctccaagcccacagggctg

SEQ ID NO: 342465 - DNA, 120 bp, Artificial Sequence
  ENSG00000138074_16 (sequence is synthesized)
cagcggttctattccttgtcttacttatggtacagtgctcacaactccaccacagtgattgtggtgggcctgattgtcagtctactcactgggagaatgcgaggccggtccctgaaccct

SEQ ID NO: 342466 - DNA, 120 bp, Artificial Sequence
  ENSG00000138074_17 (sequence is synthesized)
gcaaccatttacccagtgttgccaaagctcctgtccctccttccgttgtcctgtcagaagcggctccactgcaggagctacggccaggaccacctcgacactggcctgtttcctgagaag

SEQ ID NO: 342467 - DNA, 120 bp, Artificial Sequence
  ENSG00000138074_18 (sequence is synthesized)
ccgaggaatggtgtgctgggggacagcagagacaaggaggccatggccctggatggcacagcctatcaggggagcagctccacctgcatcctccaggagacctccctgtgatgttgactc

SEQ ID NO: 342468 - DNA, 120 bp, Artificial Sequence
  ENSG00000138074_19 (sequence is synthesized)
aggaccccgcctctgtcctcactgtgccaggccatagccagaggccaccctgtagtacagggatgagtcttggtgtgttctgcagggacaggcctggatgatctagctcataccaaagga

SEQ ID NO: 342469 - DNA, 120 bp, Artificial Sequence
  ENSG00000138074_20 (sequence is synthesized)
ccttgttctgagaggttcttgcctgcaggagaagctgtcacatctcaagcatgtgaggcaccgtttttctcgtcgcttgccaatctgttttttaaaggatcaggctcgtagggagcagga

SEQ ID NO: 342470 - DNA, 120 bp, Artificial Sequence
  ENSG00000138074_21 (sequence is synthesized)
tcatgccagaaatagggatggaagtgcatcctctgggaaaaagataatggcttctgattcaacatagccatagtcctttgaagtaagtggctagaaacagcactctggttataattgccc

SEQ ID NO: 342471 - DNA, 120 bp, Artificial Sequence
  ENSG00000138074_22 (sequence is synthesized)
cagggcctgattcaggactgactctccaccataaaactggaagctgcttcccctgtagtccccatttcagtaccagttctgccagccacagtgagcccctattattactttcagattgtc

SEQ ID NO: 342472 - DNA, 120 bp, Artificial Sequence
  ENSG00000138074_23 (sequence is synthesized)
tgtgacactcaagcccctctcatttttatctgtctacctccattctgaagagggaggttttggtgtccctggtcctctgggaatagaagatccatttgtctttgtgtagagcaagcacgt

SEQ ID NO: 342473 - DNA, 120 bp, Artificial Sequence
  ENSG00000138074_24 (sequence is synthesized)
tttccacctcactgtctccatcctccacctctgagatggacacttaagagacggggcaaatgtggatccaagaaaccagggccatgaccgggtccactgtggagcagccatctatctacc

SEQ ID NO: 342474 - DNA, 120 bp, Artificial Sequence
  ENSG00000138074_25 (sequence is synthesized)
tgactcctgagccaggctgccgtggtgtcatttctgtcatccgtgctctgtttccttttggagtttcttctccacattatctttgttcctggggaataaaaactaccattggacctagaa

SEQ ID NO: 342475 - DNA, 120 bp, Artificial Sequence
  ENSG00000138074_26 (sequence is synthesized)
tccgccgcgtagagggaagcgggaaaccgagaaagaacgagggaaaagggagcgatgttgatctcaggaagcacaaagggaccttcctagctctgactgaaccacggagctactcataga

SEQ ID NO: 342476 - DNA, 120 bp, Artificial Sequence
  ENSG00000138074_27 (sequence is synthesized)
ctcgagtgcacccagcttcttgctttcagtgtcccccttggccctagcagtggtgtctctcctttcctgtccactgactcctgttgccaagagggcaggaaggctgtgtctctcaggctt

SEQ ID NO: 342477 - DNA, 120 bp, Artificial Sequence
  ENSG00000138074_28 (sequence is synthesized)
ggcgggcagggggcgggcagggggcggggcccccgcgggctcccggccagggctctcggccgggctctggctacccacgtgtggagaccgggcaggaaaagggagcgatgttgatctcag

SEQ ID NO: 342478 - DNA, 120 bp, Artificial Sequence
  ENSG00000138074_29 (sequence is synthesized)
atatggcgttcgtgcgtagagagattacacaagaggcagaggacccgtctgtagaaagaacttaaagttattctaaaattaaggggcgaaatcaagtttcacaggtctttgaaagtcggc

SEQ ID NO: 342479 - DNA, 120 bp, Artificial Sequence
  ENSG00000138074_30 (sequence is synthesized)
gtcacataggagtgaggacttggtgggaggaagctggggcgtgatgtaatatgccttttgtttccagagagacagaggtggtagtttggctgggcagggagccttgctttaccccattgc

SEQ ID NO: 342480 - DNA, 120 bp, Artificial Sequence
  ENSG00000138074_31 (sequence is synthesized)
aggatggacctgggggttggcagggctgtcaccaggagagctgaggactgccgtgagggctggcaggactggccttgtgacaggcctgcactgtgtctcggcagggtgctgttgtgggcc

SEQ ID NO: 342481 - DNA, 120 bp, Artificial Sequence
  ENSG00000138074_32 (sequence is synthesized)
gatgggccaccagaggccccagggaaatgttgggtattgggtcccaagaccctgggaccatgcgggcaagtagagattggtgcccaaggaatgccctgccaacgaattgctaattgttct

SEQ ID NO: 342482 - DNA, 120 bp, Artificial Sequence
  ENSG00000138074_33 (sequence is synthesized)
cacctctgctcttcccaggcccacagggctgcagcggttctattccttgtcttacttatggtacagtgctcacaactccaccacagtgattgtggtgggcctgattgtcagtctactcac

SEQ ID NO: 342483 - DNA, 120 bp, Artificial Sequence
  ENSG00000138074_34 (sequence is synthesized)
tggtaagggtgtgggattgcggtgcagatgagcaccgaggggttaacagagggccctaagggactctagggagaaaggctcctgccctctgagctcttgggtgtccgtagctgtcaggct

SEQ ID NO: 342484 - DNA, 120 bp, Artificial Sequence
  ENSG00000138074_35 (sequence is synthesized)
ggggctggggtctctgggggccaagggaggacatggggcccgctgctgtggatggttccacccagagactcagaagcacatttccattcagggagaatgcgaggccggtccctgaaccct

SEQ ID NO: 342485 - DNA, 120 bp, Artificial Sequence
  ENSG00000138074_36 (sequence is synthesized)
gagcgtgagccggtgccgagaggcaccggggagcggcgtctgagccggggcggggacaagggggcggggaggggcggagcgagccggcctccggcgtgggtctgagatcttaagtgcgag

SEQ ID NO: 342486 - DNA, 120 bp, Artificial Sequence
  ENSG00000138074_37 (sequence is synthesized)
agtaccagatatcgcacagggaaggtcctcatctctgaagatcactattcgaacttatttattatgctttctgcagagacttctcaatctgacagccctagtttggcgcggtgtaaaacg

SEQ ID NO: 342487 - DNA, 120 bp, Artificial Sequence
  ENSG00000138074_38 (sequence is synthesized)
ccacctcaattgacagctagtaacatgttaccatgccctatctgaactggttagtcaatatcttttggtggagctctgcaaacatttttctccgttgtggtgaatgatttatttcattgt

SEQ ID NO: 342488 - DNA, 120 bp, Artificial Sequence
  ENSG00000138074_39 (sequence is synthesized)
tgggaagcctgaggtgtaacagcagacagtgggaaactggtcctgcagagatggagggtgattacaggtgcccggctagtgtttatagagagtcaggacattacctgggatgagtacctg

SEQ ID NO: 342489 - DNA, 120 bp, Artificial Sequence
  ENSG00000138074_40 (sequence is synthesized)
atatcgcacagggaaggtcctcatctctgaagatcactattcgaacttatttattatgctttctgcagagacttctcaatctgacagccctagtttggcgcggtgtaaaacgaccgcagg

SEQ ID NO: 342490 - DNA, 120 bp, Artificial Sequence
  ENSG00000138074_41 (sequence is synthesized)
ggaagacctgattcgaccttggttccctgagttctctgaagcccgggccatcatgctttccagaggccttggtggggttatgcttcctcatctcttcagtctgggtctttctaagcttca

SEQ ID NO: 342491 - DNA, 120 bp, Artificial Sequence
  ENSG00000138075_0 (sequence is synthesized)
agataatggtctccgtggccaagtcccagtcctgctgtcccaagggactccggggtcaggtggagcaggcagggcagtctgccacgggctccccaactgaagccactctggggagggtcc

SEQ ID NO: 342492 - DNA, 120 bp, Artificial Sequence
  ENSG00000138075_1 (sequence is synthesized)
ggccaccagaaaatttgcccagctttgctgcctgttggccatgggtgacctctcatctttgacccccggagggtccatgggtctccaagtaaacagaggctcccagagctccctggaggg

SEQ ID NO: 342493 - DNA, 120 bp, Artificial Sequence
  ENSG00000138075_2 (sequence is synthesized)
ggctcctgccaccgccccggagcctcacagcctgggcatcctccatgcctcctacagcgtcagccaccgcgtgaggccctggtgggacatcacatcttgccggcagcagtggaccaggca

SEQ ID NO: 342494 - DNA, 120 bp, Artificial Sequence
  ENSG00000138075_3 (sequence is synthesized)
gatcctcaaagatgtctccttgtacgtggagagcgggcagatcatgtgcatcctaggaagctcaggctccgggaaaaccacgctgctggacgccatgtccgggaggctggggcgcgcggg

SEQ ID NO: 342495 - DNA, 120 bp, Artificial Sequence
  ENSG00000138075_4 (sequence is synthesized)
gaccttcctgggggaggtgtatgtgaacggccgggcgctgcgccgggagcagttccaggactgcttctcctacgtcctgcagagcgacaccctgctgagcagcctcaccgtgcgcgagac

SEQ ID NO: 342496 - DNA, 120 bp, Artificial Sequence
  ENSG00000138075_5 (sequence is synthesized)
gctgcactacaccgcgctgctggccatccgccgcggcaatcccggctccttccagaagaaggtggaggccgtcatggcagagctgagtctgagccatgtggcagaccgactgattggcaa

SEQ ID NO: 342497 - DNA, 120 bp, Artificial Sequence
  ENSG00000138075_6 (sequence is synthesized)
ctacagcttggggggcatttccacgggtgagcggcgccgggtctccatcgcagcccagctgctccaggatcctaaggtcatgctgtttgatgagccaaccacaggcctggactgcatgac

SEQ ID NO: 342498 - DNA, 120 bp, Artificial Sequence
  ENSG00000138075_7 (sequence is synthesized)
tgctaatcagattgtcgtcctcctggtggaactggctcgcaggaaccgaattgtggttctcaccattcaccagccccgttctgagctttttcagctctttgacaaaattgccatcctgag

SEQ ID NO: 342499 - DNA, 120 bp, Artificial Sequence
  ENSG00000138075_8 (sequence is synthesized)
cttcggagagctgattttctgtggcacgccagcggaaatgcttgatttcttcaatgactgcggttacccttgtcctgaacattcaaacccttttgacttctatatggacctgacgtcagt

SEQ ID NO: 342500 - DNA, 120 bp, Artificial Sequence
  ENSG00000138075_9 (sequence is synthesized)
ggatacccaaagcaaggaacgggaaatagaaacctccaagagagtccagatgatagaatctgcctacaagaaatcagcaatttgtcataaaactttgaagaatattgaaagaatgaaaca

SEQ ID NO: 342501 - DNA, 120 bp, Artificial Sequence
  ENSG00000138075_10 (sequence is synthesized)
cctgaaaacgttaccaatggttcctttcaaaaccaaagattctcctggagttttctctaaactgggtgttctcctgaggagagtgacaagaaacttggtgagaaataagctggcagtgat

SEQ ID NO: 342502 - DNA, 120 bp, Artificial Sequence
  ENSG00000138075_11 (sequence is synthesized)
tacgcgtctccttcagaatctgatcatgggtttgttcctccttttcttcgttctgcgggtccgaagcaatgtgctaaagggtgctatccaggaccgcgtaggtctcctttaccagtttgt

SEQ ID NO: 342503 - DNA, 120 bp, Artificial Sequence
  ENSG00000138075_12 (sequence is synthesized)
gggcgccaccccgtacacaggcatgctgaacgctgtgaatctgtttcccgtgctgcgagctgtcagcgaccaggagagtcaggacggcctctaccagaagtggcagatgatgctggccta

SEQ ID NO: 342504 - DNA, 120 bp, Artificial Sequence
  ENSG00000138075_13 (sequence is synthesized)
tgcactgcacgtcctccccttcagcgttgttgccaccatgattttcagcagtgtgtgctactggacgctgggcttacatcctgaggttgcccgatttggatatttttctgctgctctctt

SEQ ID NO: 342505 - DNA, 120 bp, Artificial Sequence
  ENSG00000138075_14 (sequence is synthesized)
ggccccccacttaattggtgaatttctaactcttgtgctacttggtatcgtccaaaatccaaatatagtcaacagtgtagtggctctgctgtccattgcgggggtgcttgttggatctgg

SEQ ID NO: 342506 - DNA, 120 bp, Artificial Sequence
  ENSG00000138075_15 (sequence is synthesized)
attcctcagaaacatacaagaaatgcccattccttttaaaatcatcagttattttacattccaaaaatattgcagtgagattcttgtagtcaatgagttctacggactgaatttcacttg

SEQ ID NO: 342507 - DNA, 120 bp, Artificial Sequence
  ENSG00000138075_16 (sequence is synthesized)
tggcagctcaaatgtttctgtgacaactaatccaatgtgtgccttcactcaaggaattcaattcattgagaaaacctgcccaggtgcaacatctagattcacaatgaactttctgatttt

SEQ ID NO: 342508 - DNA, 120 bp, Artificial Sequence
  ENSG00000138075_17 (sequence is synthesized)
gtattcatttattccagctcttgtcatcctaggaatagttgttttcaaaataagggatcatctcattagcaggtagtgaaagccatggctgggaaaatggaagtgaagctgccgactgtg

SEQ ID NO: 342509 - DNA, 120 bp, Artificial Sequence
  ENSG00000138075_18 (sequence is synthesized)
catgactgctctgaacgtctgaaatgagagtgccatgtatttctttcttgacaggacatctcaagtcttttaaccattaagactccatttgtgcctcttggatccaagcaggccttgaat

SEQ ID NO: 342510 - DNA, 120 bp, Artificial Sequence
  ENSG00000138075_19 (sequence is synthesized)
gcaatggaagtggtttatagtcccttgctcttacaacttgcagggacatgtggttatttggaaattgtgactgagcggacccaagaatgtaaataatattcataaacctatgggagactc

SEQ ID NO: 342511 - DNA, 120 bp, Artificial Sequence
  ENSG00000138075_20 (sequence is synthesized)
gtgtgactattttttttccttgttctaggcacagaaaaaaataggtcagcttaaaaatatgtttacattggataaaggattaggcaaaaataaaatgtttcaaggattcctgaccataag

SEQ ID NO: 342512 - DNA, 120 bp, Artificial Sequence
  ENSG00000138075_21 (sequence is synthesized)
tgacagagaaagagagttgtgggtttagatgaagcaaggttatcatgcagaattgggtaagaatgcttctgttcctggaagacccagagttaaatgcagatgtccacacgaggggtcgga

SEQ ID NO: 342513 - DNA, 120 bp, Artificial Sequence
  ENSG00000138075_22 (sequence is synthesized)
gttacctgatcacatcgagagagtgctgggcagatggatggtgagcaccactgctacagagcacccagtgattttactgaggattaaaataaaaaaccgtaggaatgggctcaacagtga

SEQ ID NO: 342514 - DNA, 120 bp, Artificial Sequence
  ENSG00000138075_23 (sequence is synthesized)
ctcccccaggagtgcggggcccggcgctcacccctctgctgcctttcttcactctttaagtgccagtctgggcacttcgggctccctctttagtggatcgggtggagagaggagagggag

SEQ ID NO: 342515 - DNA, 120 bp, Artificial Sequence
  ENSG00000138075_24 (sequence is synthesized)
aagggctgtgctgggaaacatggagcgacagtgaatggcccctccccctgcccagggaagggcctgggcataaacaaagtggcagcagtgccctgccaacccagtgtctacggcctgccc

SEQ ID NO: 342516 - DNA, 120 bp, Artificial Sequence
  ENSG00000138075_25 (sequence is synthesized)
tctgtggatgggaatgggggtactgcgaatgcaaggagtcttgaaacctggtgaaagaatgcagggacagccacctcgcagccaaacggacaggacattcagagcaactccagcacaggc

SEQ ID NO: 342517 - DNA, 120 bp, Artificial Sequence
  ENSG00000138075_26 (sequence is synthesized)
cccctccctacgtggcagacagcctcagtcgctatctgccaggttctacagaggagggcgcagagactgaaacacgttaggagcctgtccggagactactggggtggggcacaggtagga

SEQ ID NO: 342518 - DNA, 120 bp, Artificial Sequence
  ENSG00000138075_27 (sequence is synthesized)
tcaatgctggggacctgggtgtggccccttccagggccccaagctgcctttgccttcctggggtttcctttaaagccaccgcgtgaggccctggtgggacatcacatcttgccggcagca

SEQ ID NO: 342519 - DNA, 90 bp, Artificial Sequence
  ENSG00000138075_28 (sequence is synthesized)
tggggacgttttaaaaaattcatattatttatttaaatctgacacatgtattacgatttaagccgaattggatcatattattatcaaaga

SEQ ID NO: 342520 - DNA, 120 bp, Artificial Sequence
  ENSG00000138075_29 (sequence is synthesized)
ttacgatttaagccgaattggatcatattattatcaaagacatgctttccccagggtgtggtgagtctggaagtggcccttggattcttgggcggtgtgctgcctctttcatgtcctccc

SEQ ID NO: 342521 - DNA, 120 bp, Artificial Sequence
  ENSG00000138078_0 (sequence is synthesized)
gaagaaactgaggcccggagacacagttaagtgtaggagctaagacctcaacccaggtctctctgactcttaactacttattagcaatcaaggttaataaaagctacctcctgacaaacc

SEQ ID NO: 342522 - DNA, 120 bp, Artificial Sequence
  ENSG00000138078_1 (sequence is synthesized)
agagatggccttacattttatttgtgcatcttgcaggggttttttgttgtttttaattaaagcgctaaatacctttttaacattaaaaatccgaagttgagtatgtccagtatttggaac

SEQ ID NO: 342523 - DNA, 120 bp, Artificial Sequence
  ENSG00000138078_2 (sequence is synthesized)
cgaaccaaattggattttttgctatacagcttactgtacaagtgacctggaacagttgcttagaacctcccacagccacagtttggcaacctgtaaaatgtgcatggtaatatctacttt

SEQ ID NO: 342524 - DNA, 120 bp, Artificial Sequence
  ENSG00000138078_3 (sequence is synthesized)
attaagtccatataaaatttaaattagacaaacaagataaaagcacctggcagttagttaacactcaacaataattaatcttccctcccccacctttattaaataattaggcttttccag

SEQ ID NO: 342525 - DNA, 120 bp, Artificial Sequence
  ENSG00000138078_4 (sequence is synthesized)
tttatcttccacatatataccaaagatacgttcataattatgtaagaccaaagggctttttaccttttacagccctgagttcctgagataccccattaagtctgtgtacttatttgcaaa

SEQ ID NO: 342526 - DNA, 120 bp, Artificial Sequence
  ENSG00000138078_5 (sequence is synthesized)
tttatattttgtttcttgttttgttttttgttttagtttaacccctatgtgtgccagagtcagtgctgcatagtttgagcctgataggattaactttacaaatgagacatttaagtcaca

SEQ ID NO: 342527 - DNA, 120 bp, Artificial Sequence
  ENSG00000138078_6 (sequence is synthesized)
tctgccaagaattatgatttgaatgaaactttaacttacacaggtttttagatttagttagcctaagttatcagctgtctgaagttattcataacctaagtggggcatggccctgaaaag

SEQ ID NO: 342528 - DNA, 120 bp, Artificial Sequence
  ENSG00000138078_7 (sequence is synthesized)
gagggatgagaactgctgatcttagttactctgagaacccactactctgtaatcatacctataaaatcattcgtgtgctggcagccccaaaaggagcataaaccagggactttgatatca

SEQ ID NO: 342529 - DNA, 120 bp, Artificial Sequence
  ENSG00000138078_8 (sequence is synthesized)
tgcagcagaagaccaaattatttctccaagctttgaagtatagtattcctcaccttggaaaatgcatgcagaaacagcatttgaatcactataacttcgctgatcattgttacaatagaa

SEQ ID NO: 342530 - DNA, 120 bp, Artificial Sequence
  ENSG00000138078_9 (sequence is synthesized)
taaaattgaaaaaatatcacctaaccaagtgtcttcagaataaacccaagatatcagagttagcaagaaacatcccaagtcggagcttctcatgtaaggatcttcagcctgttaaacaag

SEQ ID NO: 342531 - DNA, 120 bp, Artificial Sequence
  ENSG00000138078_10 (sequence is synthesized)
aaaacgaaaaaccccttccagaaaacatggatgcatttgaaaaagtgagaacaaaattagaaacacagccacaagaagaatatgaaatcatcaatgtggaagttaaacatggtggttttg

SEQ ID NO: 342532 - DNA, 120 bp, Artificial Sequence
  ENSG00000138078_11 (sequence is synthesized)
tttattaccaagaaggttgttgcttggttcgttccaaagatgaagaagcagacaatgataattatgaagttttattcaatttggaggaacttaagttagaccagcccttcattgattgta

SEQ ID NO: 342533 - DNA, 120 bp, Artificial Sequence
  ENSG00000138078_12 (sequence is synthesized)
tcagagttgctccagatgaaaaatatgtggctgccaagataagaactgaagattctgaagcatctacctgtgtaattataaagctcagcgatcagcccgtaatggaagcttctttcccga

SEQ ID NO: 342534 - DNA, 120 bp, Artificial Sequence
  ENSG00000138078_13 (sequence is synthesized)
atgtgtccagttttgaatgggtaaaggacgaggaagatgaagatgttttattctacaccttccagaggaaccttcgctgtcatgacgtatatcgagccacttttggtgataacaaacgta

SEQ ID NO: 342535 - DNA, 120 bp, Artificial Sequence
  ENSG00000138078_14 (sequence is synthesized)
atgaacgcttttacacagaaaaagacccaagctactttgttttcctttatcttacaaaagacagtcgtttcctcaccataaatattatgaacaagactacttctgaagtgtggttgatag

SEQ ID NO: 342536 - DNA, 120 bp, Artificial Sequence
  ENSG00000138078_15 (sequence is synthesized)
acagagatgatgaattatacattctcactaatgttggagaacctacagaatttaagctaatgagaacagcggctgatacccctgcaattatgaattgggatttattttttacaatgaaga

SEQ ID NO: 342537 - DNA, 120 bp, Artificial Sequence
  ENSG00000138078_16 (sequence is synthesized)
gaaatacaaaagtgatagacttggacatgtttaaggatcactgtgttctatttctgaagcacagcaatctcctttatgttaatgtgattggtctggctgatgattcagttcggtctctaa

SEQ ID NO: 342538 - DNA, 120 bp, Artificial Sequence
  ENSG00000138078_17 (sequence is synthesized)
agctccctccttgggcctgtggattcataatggatacaaattctgacccaaagaactgcccctttcaactttgctctccaatacgtcccccaaaatattacacatacaagtttgcagaag

SEQ ID NO: 342539 - DNA, 120 bp, Artificial Sequence
  ENSG00000138078_18 (sequence is synthesized)
gcaaactgtttgaggaaactgggcatgaagacccaatcacaaagactagtcgcgttttacgtctagaagccaaaagcaaggatggaaaattagtgccaatgactgttttccacaaaactg

SEQ ID NO: 342540 - DNA, 120 bp, Artificial Sequence
  ENSG00000138078_19 (sequence is synthesized)
actctgaggacttgcagaagaaacctctcttggtacatgtatatggagcttatggaatggatttgaaaatgaatttcaggcctgagaggcgggtcctggtggatgatggatggatattag

SEQ ID NO: 342541 - DNA, 120 bp, Artificial Sequence
  ENSG00000138078_20 (sequence is synthesized)
catactgccatgttcgaggtggtggtgagttaggcctccagtggcacgctgatggccgcctaactaaaaaactcaatggccttgctgatttagaggcttgcattaagacgcttcatggcc

SEQ ID NO: 342542 - DNA, 120 bp, Artificial Sequence
  ENSG00000138078_21 (sequence is synthesized)
aaggcttttctcagccaagtctaacaaccctgactgctttcagtgctggaggggtgcttgcaggagcattgtgtaattctaatccagagctggtgagagcggtgactttggaggcacctt

SEQ ID NO: 342543 - DNA, 120 bp, Artificial Sequence
  ENSG00000138078_22 (sequence is synthesized)
tcttggatgttctcaacaccatgatggacactacacttcctctgacattagaagaattagaagaatgggggaatccttcatctgatgaaaaacacaagaactacataaaacgttactgtc

SEQ ID NO: 342544 - DNA, 120 bp, Artificial Sequence
  ENSG00000138078_23 (sequence is synthesized)
cctatcaaaatattaaacctcagcattatccttcaattcacataacggcatatgaaaacgatgaacgggtacctctgaaaggaattgtaagttatactgagaaactcaaggaagccatcg

SEQ ID NO: 342545 - DNA, 120 bp, Artificial Sequence
  ENSG00000138078_24 (sequence is synthesized)
cggagcatgctaaggacacaggtgaaggctatcagacccctaatattattctagatattcagcctggaggcaatcatgtaattgaggattctcacaaaaagattacagcccaaattaaat

SEQ ID NO: 342546 - DNA, 120 bp, Artificial Sequence
  ENSG00000138078_25 (sequence is synthesized)
tcctgtacgaggaacttggacttgacagcaccagtgttttcgaggatcttaagaaatacctgaaattctgaaacactgcattcaactgggaattggaaacacactgaaatatttcatagt

SEQ ID NO: 342547 - DNA, 120 bp, Artificial Sequence
  ENSG00000138078_26 (sequence is synthesized)
cttacttccaattgagttagcaaaaaaaaaattaataacttgagacttttaagttattaattttttaaaatgtgcttctccatctaaattttgcttagtctacatctcacttgcttatac

SEQ ID NO: 342548 - DNA, 120 bp, Artificial Sequence
  ENSG00000138078_27 (sequence is synthesized)
tattctctccattgatgcacatgcccattaacctaggaaagtaattttcaaatcatgctccttagaaggatgtggagtagagggaagggaaggattggtgatagcagagctccaggcctc

SEQ ID NO: 342549 - DNA, 120 bp, Artificial Sequence
  ENSG00000138078_28 (sequence is synthesized)
ccttccagtcagaacagttgagcagtttacaaattagtgtcctgcctctttgctagcaaatgcttttagacactgtggcagtgagtcatcctctaatttctatgactgcattttaaggga

SEQ ID NO: 342550 - DNA, 120 bp, Artificial Sequence
  ENSG00000138078_29 (sequence is synthesized)
aaagataaaattcttccccttaaaattcgttaaagtttttgaataatctggggtcctaatgtgttctggtcatccctgattgatgctatctgaataaagttataagctcctataagccat

SEQ ID NO: 342551 - DNA, 120 bp, Artificial Sequence
  ENSG00000138078_30 (sequence is synthesized)
attcttgctggtagccatcttgagtgagggcggaccagaggatgagagagctgtggcagggctactggaacgctgtccctcattgttttagccttctgtgcttcatctcgagctcagaag

SEQ ID NO: 342552 - DNA, 120 bp, Artificial Sequence
  ENSG00000138078_31 (sequence is synthesized)
actagcgaagaacgaaaagtcttatatatttcgagactaaagaacccaggaacccaagaagactccttgaccacaacaaagatggcgaaatctgcctgttgctcgtgctagattgaggtt

SEQ ID NO: 342553 - DNA, 120 bp, Artificial Sequence
  ENSG00000138078_32 (sequence is synthesized)
gcagacttcggctggacttgcctgcggtgacacctgctcccctctgagagcttcaggttctccggcctgccttcactggtttgtgtccagagccggactgattctctcaatttgctttaa

SEQ ID NO: 342554 - DNA, 120 bp, Artificial Sequence
  ENSG00000138078_33 (sequence is synthesized)
tttttttcaaaacatttgagaacctttcttaaagcagttacattcaagctacagaaatatcgaagaattaatgattgttcaccaagcagcatgctgtacatgaagctattacaaatgctt

SEQ ID NO: 342555 - DNA, 120 bp, Artificial Sequence
  ENSG00000138078_34 (sequence is synthesized)
acaatcccactgaaatgccagtgtcttcatctcttcataaaggtgcctaacacgaggtatacagtatgttcagtacactggaatagcatgctcgattggaaacaaagcatctatctctga

SEQ ID NO: 342556 - DNA, 120 bp, Artificial Sequence
  ENSG00000138078_35 (sequence is synthesized)
aagctgtttggcgatgaaggagattcttcgtgttgtgttcaaagatgagtccctctcccttgtccagaaaaatgccacttgtatcaactttactgcctttgtcggcagaattggtactta

SEQ ID NO: 342557 - DNA, 120 bp, Artificial Sequence
  ENSG00000138078_36 (sequence is synthesized)
accttattctcattttagcgggaaggcccgaaatcatattatgtagatttaacagtgttgattctccaaaattcagaaccacgataaagattctgtcgatgccatccagctctcttgtgt

SEQ ID NO: 342558 - DNA, 120 bp, Artificial Sequence
  ENSG00000138078_37 (sequence is synthesized)
acacaacatagtggctgtcattcctcaaatggcaaaaccagcccctgttgaggagtagctcattggcatgaagtagacttaaatcttgatataacttcaaagccgatctgggctgagtct

SEQ ID NO: 342559 - DNA, 120 bp, Artificial Sequence
  ENSG00000138078_38 (sequence is synthesized)
tttggacctatttttttaaaaaagtatttacgtaagtgtttgattctaagaattgtttgtaagtatttttaatatattgtaaggagttatttacccaaaacacttgctccaattttgccc

SEQ ID NO: 342560 - DNA, 120 bp, Artificial Sequence
  ENSG00000138078_39 (sequence is synthesized)
cttataattgccaaattgtaagcatcaataagtaggtaagaacaatttatataaaaactgatagaaatgacaaattcggggtttcggcttgtctgggagtcaataagtacgcacagtgct

SEQ ID NO: 342561 - DNA, 120 bp, Artificial Sequence
  ENSG00000138078_40 (sequence is synthesized)
ctgctacattgtagagtttctgtagagatcaaatttgactccactttaggagtcccaaagcaaatgtccatgtctaagatgaatatttaacttgcatagtcattctgtgctatattgtaa

SEQ ID NO: 342562 - DNA, 120 bp, Artificial Sequence
  ENSG00000138078_41 (sequence is synthesized)
ctgccagatggccagaaagaaggcaacagtggactcagacttctgaggaatttgggtttgttcccctttgtagactaatgtgtaggttgctgttgtgcgaagatcgtgtaactttagcag

SEQ ID NO: 342563 - DNA, 120 bp, Artificial Sequence
  ENSG00000138078_42 (sequence is synthesized)
acatgtatttcttgcacagctaatagaagacaaagttgaaaaaaaggatgcaaaataaaaagctgcctaaggtgaaagttagaaattgtagacttttttttaccataatagtatgtgttc

SEQ ID NO: 342564 - DNA, 120 bp, Artificial Sequence
  ENSG00000138078_43 (sequence is synthesized)
attaaagatgatttgggtttattttacagctatataaaacataatttgatgatgtacttctaacctttcaagcattttctgttattgactatataatatagcctccataaatgtttttaa

SEQ ID NO: 342565 - DNA, 120 bp, Artificial Sequence
  ENSG00000138078_44 (sequence is synthesized)
tgacaatattctgttgaacggttgtaccatactcagccatgccctttcattttgacgatagtgtttctaatattttgtatttttattcccctccccccatttttgtattacttaagatag

SEQ ID NO: 342566 - DNA, 120 bp, Artificial Sequence
  ENSG00000138078_45 (sequence is synthesized)
attatcagaaagacagttactttgtcaaagagtatgggcacttgatacataatgccaaattattcttcataagagctgttgccaaatcagtgataatgttcatttaattgtattcttgcc

SEQ ID NO: 342567 - DNA, 120 bp, Artificial Sequence
  ENSG00000138078_46 (sequence is synthesized)
agccatgtttactggggtgatagttgttattgtggttgttattgttctttaggggtaggttcccaatatgtggtctttaaataattatctaatggtgtttaaaaagatgtttattctgtt

SEQ ID NO: 342568 - DNA, 120 bp, Artificial Sequence
  ENSG00000138078_47 (sequence is synthesized)
tgtcaggtacaaagatatttatgatacatgtatgacttgtctaagttattaacattttctctagccttaggtaatgcatgaaagcacatgtttcagtgccactcacataagaagtgcccg

SEQ ID NO: 342569 - DNA, 120 bp, Artificial Sequence
  ENSG00000138078_48 (sequence is synthesized)
gtaagtgttagctattattgtctacttgagttactactttctaaaagtatgttgaagtctttttctgtaattgcagatttgttgattttgcatttgagtattttctatattttgaagctg

SEQ ID NO: 342570 - DNA, 120 bp, Artificial Sequence
  ENSG00000138078_49 (sequence is synthesized)
ttagatgcgtagtcatgatttttggtggaatgttttatcaatttttgaaaattgcctttgtctcatataatgcttttcatattgaactatattttgtctgctattaaatacttccaagcc

SEQ ID NO: 342571 - DNA, 120 bp, Artificial Sequence
  ENSG00000138078_50 (sequence is synthesized)
aaaccagctctaggcggctctgggtaagttgtcgttctgtgggctgcggaacgcagacttcggctggacttgcctgcggtgacacctgctcccctctgagagcttcaggttctccggcct

SEQ ID NO: 342572 - DNA, 120 bp, Artificial Sequence
  ENSG00000138078_51 (sequence is synthesized)
tagcttcacagttcccctcagagacaggcactatatgttcttttgtttttaatgtatcatatgtttgcataggcacagaatgtatcatttcatatgtttatatatttttctttacacagt

SEQ ID NO: 342573 - DNA, 120 bp, Artificial Sequence
  ENSG00000138078_52 (sequence is synthesized)
tggtgatatgttaccattctatactttattgaatacctgtttgaaatggtctcatatcaatgtatatagaactgtcatttttaaaagctgcatactgggcccatagttgatagaactggt

SEQ ID NO: 342574 - DNA, 120 bp, Artificial Sequence
  ENSG00000138078_53 (sequence is synthesized)
tttctgttgataaaatatttaaatcatttcttgtgtcttctattaaaaacaaattttgcaggccaggcaaggtggctcaggcccgtaatcctagcactttgggaggcaaggcagacagat

SEQ ID NO: 342575 - DNA, 90 bp, Artificial Sequence
  ENSG00000138078_54 (sequence is synthesized)
tgaacccaggaagcagaggctgcagtgtgccgagatcacgccactgcactcgagcatgggtgacgcagtgttgagatcctttaagtatta

SEQ ID NO: 342576 - DNA, 120 bp, Artificial Sequence
  ENSG00000138078_55 (sequence is synthesized)
ttgagatcctttaagtattattgtgcacatgtgcaaatatttctaagtattaggaatggaattattaggtcaaaagataacttcattttttgtgtttatagctatagctgggttgcaagc

SEQ ID NO: 342577 - DNA, 120 bp, Artificial Sequence
  ENSG00000138078_56 (sequence is synthesized)
tttctattatttgcttgctatatcttcattttaattctttgtgttttatgttagtgtttcttatgtctgtttttgttatctgagtggttttatcttttaataggctaatttaacccattc

SEQ ID NO: 342578 - DNA, 120 bp, Artificial Sequence
  ENSG00000138078_57 (sequence is synthesized)
atatttgtaattattgtattatttagacataattcggaagccctattttatttgtagttatactattgtttagggtttttttctattaagctttttgttggattgactgtataatttttt

SEQ ID NO: 342579 - DNA, 120 bp, Artificial Sequence
  ENSG00000138078_58 (sequence is synthesized)
agctttttgttggattgactgtataatttttttcttctagtattctttgaaaatttgaaaattgttatattttatgtctagtgttctttgaaaataattctttgaaaattatttttatgt

SEQ ID NO: 342580 - DNA, 120 bp, Artificial Sequence
  ENSG00000138078_59 (sequence is synthesized)
tagcacttatgttctattttatttcattgtttgacagtcttttatacttctgagagatctaatcacttcttgaaagaatgtcaaggagctccattaaacagcaatctactgggggtattt

SEQ ID NO: 342581 - DNA, 120 bp, Artificial Sequence
  ENSG00000138078_60 (sequence is synthesized)
tgttatcaaggccctctcagtggacagattcccgaactagatacatgttgttttcacattttcagtggttgcagcaggtttatgacaaagccacttcacaaatgtcctatctatgggtga

SEQ ID NO: 342582 - DNA, 120 bp, Artificial Sequence
  ENSG00000138078_61 (sequence is synthesized)
gacccaggaggggagggagggacactgtgtcaatcaagagaaatgtctctctcttgtacttgatacgtgagctctgttaaagaaaataatttaatcttaattgttggaagccttctgcct

SEQ ID NO: 342583 - DNA, 120 bp, Artificial Sequence
  ENSG00000138078_62 (sequence is synthesized)
ctctctcgaatgaaagtattcttgccataaattgctgacttcacggttaggtaaagatggatagataaagagaagcttaaacagtggcattttactacaaaggccttctatttaattttt

SEQ ID NO: 342584 - DNA, 120 bp, Artificial Sequence
  ENSG00000138078_63 (sequence is synthesized)
cagacttcggctggacttgcctgcggtgacacctgctcccctctgagagcttcaggttctccggcctgccttcactggtttgtgtccagagccggactgattctctcaatttgcatgaag

SEQ ID NO: 342585 - DNA, 87 bp, Artificial Sequence
  ENSG00000138078_64 (sequence is synthesized)
gacacctgctcccctctgagagcttcaggttctccggcctgccttcactggtttgtgtccagagccggactgattctctcaatttgc

SEQ ID NO: 342586 - DNA, 120 bp, Artificial Sequence
  ENSG00000138078_65 (sequence is synthesized)
agtgagccaccatgcccggccccagatctgttttttgaagttcacatcagggtctcactctgcatgctggagtgcaatggcatgatcatgcttcactgcagcctcaacctcctgggctca

SEQ ID NO: 342587 - DNA, 90 bp, Artificial Sequence
  ENSG00000138078_66 (sequence is synthesized)
tcttcagcctgttaaacaagaaaacgaaaaaccccttccagaaaacatggatgcatttgaaaaagtgagaacaaaattagaaacacagcc

SEQ ID NO: 342588 - DNA, 120 bp, Artificial Sequence
  ENSG00000138079_0 (sequence is synthesized)
actcttccacctcccttactgcaggaaggcactccgaagacataagtcggtgagacatggctgaagataaaagcaagagagactccatcgagatgagtatgaagggatgccagacaaaca

SEQ ID NO: 342589 - DNA, 120 bp, Artificial Sequence
  ENSG00000138079_1 (sequence is synthesized)
acgggtttgtccataatgaagacattctggagcagaccccggatccaggaagctcaacagacaacctgaagcacagcaccaggggcatccttggctcccaggagcccgacttcaagggcg

SEQ ID NO: 342590 - DNA, 120 bp, Artificial Sequence
  ENSG00000138079_2 (sequence is synthesized)
tccagccctatgcggggatgcccaaggaggtgctgttccagttctctggccaggcccgctaccgcatacctcgggagatcctcttctggctcacagtggcttctgtgctggtgctcatcg

SEQ ID NO: 342591 - DNA, 120 bp, Artificial Sequence
  ENSG00000138079_3 (sequence is synthesized)
cggccaccatagccatcattgccctctctccaaagtgcctagactggtggcaggaggggcccatgtaccagatctacccaaggtctttcaaggacagtaacaaggatgggaacggagatc

SEQ ID NO: 342592 - DNA, 120 bp, Artificial Sequence
  ENSG00000138079_4 (sequence is synthesized)
tgaaaggtattcaagataaactggactacatcacagctttaaatataaaaactgtttggattacttcattttataaatcgtcccttaaagatttcagatatggtgttgaagatttccggg

SEQ ID NO: 342593 - DNA, 120 bp, Artificial Sequence
  ENSG00000138079_5 (sequence is synthesized)
aagttgatcccatttttggaacgatggaagattttgagaatctggttgcagccatacatgataaaggtttaaaattaatcatcgatttcataccaaaccacacgagtgataaacatattt

SEQ ID NO: 342594 - DNA, 120 bp, Artificial Sequence
  ENSG00000138079_6 (sequence is synthesized)
ggtttcaattgagtcggacacggacaggaaaatatactgattattatatctggcatgactgtacccatgaaaatggcaaaaccattccacccaacaactggttaagtgtgtatggaaact

SEQ ID NO: 342595 - DNA, 120 bp, Artificial Sequence
  ENSG00000138079_7 (sequence is synthesized)
ccagttggcactttgacgaagtgcgaaaccaatgttattttcatcagtttatgaaagagcaacctgatttaaatttccgcaatcctgatgttcaagaagaaataaaagaaattttacggt

SEQ ID NO: 342596 - DNA, 120 bp, Artificial Sequence
  ENSG00000138079_8 (sequence is synthesized)
tctggctcacaaagggtgttgatggttttagtttggatgctgttaaattcctcctagaagcaaagcacctgagagatgagatccaagtaaataagacccaaatcccggacacggtcacac

SEQ ID NO: 342597 - DNA, 120 bp, Artificial Sequence
  ENSG00000138079_9 (sequence is synthesized)
aatactcggagctgtaccatgacttcaccaccacgcaggtgggaatgcacgacattgtccgcagcttccggcagaccatggaccaatacagcacggagcccggcagatacaggttcatgg

SEQ ID NO: 342598 - DNA, 120 bp, Artificial Sequence
  ENSG00000138079_10 (sequence is synthesized)
ggactgaagcctatgcagagagtattgacaggaccgtgatgtactatggattgccatttatccaagaagctgattttcccttcaacaattacctcagcatgctagacactgtttctggga

SEQ ID NO: 342599 - DNA, 120 bp, Artificial Sequence
  ENSG00000138079_11 (sequence is synthesized)
acagcgtgtatgaggttatcacatcctggatggaaaacatgccagaaggaaaatggcctaactggatgattggtggaccagacagttcacggctgacttcgcgtttggggaatcagtatg

SEQ ID NO: 342600 - DNA, 120 bp, Artificial Sequence
  ENSG00000138079_12 (sequence is synthesized)
gcaaatctcaatgaaagctatgatattaatacccttcgctcaaagtcaccaatgcagtgggacaatagttcaaatgctggtttttctgaagctagtaacacctggttacctaccaattca

SEQ ID NO: 342601 - DNA, 120 bp, Artificial Sequence
  ENSG00000138079_13 (sequence is synthesized)
gattaccacactgtgaatgttgatgtccaaaagactcagcccagatcggctttgaagttatatcaagatttaagtctacttcatgccaatgagctactcctcaacaggggctggttttgc

SEQ ID NO: 342602 - DNA, 120 bp, Artificial Sequence
  ENSG00000138079_14 (sequence is synthesized)
catttgaggaatgacagccactatgttgtgtacacaagagagctggatggcatcgacagaatctttatcgtggttctgaattttggagaatcaacactgttaaatctacataatatgatt

SEQ ID NO: 342603 - DNA, 120 bp, Artificial Sequence
  ENSG00000138079_15 (sequence is synthesized)
tcgggccttcccgctaaaatgagaataaggttaagtaccaattctgccgacaaaggcagtaaagttgatacaagtggcatttttctggacaagggagagggactcatctttgaacacaac

SEQ ID NO: 342604 - DNA, 120 bp, Artificial Sequence
  ENSG00000138079_16 (sequence is synthesized)
acgaagaatctccttcatcgccaaacagctttcagagatagatgctttgtttccaatcgagcatgctattccagtgtactgaacatactgtatacctcgtgttaggcacctttatgaaga

SEQ ID NO: 342605 - DNA, 120 bp, Artificial Sequence
  ENSG00000138079_17 (sequence is synthesized)
gatgaagacactggcatttcagtgggattgtaagcatttgtaatagcttcatgtacagcatgctgcttggtgaacaatcattaattcttcgatatttctgtagcttgaatgtaactgctt

SEQ ID NO: 342606 - DNA, 120 bp, Artificial Sequence
  ENSG00000138079_18 (sequence is synthesized)
taagaaaggttctcaaatgttttgaaaaaaataaaatgtttaaaagtaaattatggcttataggagcttataactttattcagatagcatcaatcagggatgaccagaacacattaggac

SEQ ID NO: 342607 - DNA, 120 bp, Artificial Sequence
  ENSG00000138079_19 (sequence is synthesized)
cccagattattcaaaaactttaacgaattttaaggggaagaattttatcttttcccttaaaatgcagtcatagaaattagaggatgactcactgccacagtgtctaaaagcatttgctag

SEQ ID NO: 342608 - DNA, 120 bp, Artificial Sequence
  ENSG00000138079_20 (sequence is synthesized)
caaagaggcaggacactaatttgtaaactgctcaactgttctgactggaagggaggcctggagctctgctatcaccaatccttcccttccctctactccacatccttctaaggagcatga

SEQ ID NO: 342609 - DNA, 120 bp, Artificial Sequence
  ENSG00000138079_21 (sequence is synthesized)
tttgaaaattactttcctaggttaatgggcatgtgcatcaatggagagaatagtataagcaagtgagatgtagactaagcaaaatttagatggagaagcacattttaaaaaattaataac

SEQ ID NO: 342610 - DNA, 120 bp, Artificial Sequence
  ENSG00000138079_22 (sequence is synthesized)
ttaaaagtctcaagttattaattttttttttgctaactcaattggaagtaagactatgaaatatttcagtgtgtttccaattcccagttgaatgcagtgtttcagaatttcaggtatttc

SEQ ID NO: 342611 - DNA, 120 bp, Artificial Sequence
  ENSG00000138079_23 (sequence is synthesized)
ttaagatcctcgaaaacactggtgctgtcaagtccaagttcctcgtacaggaatttaatttgggctgtaatctaaaagaaacacattaaaaaaattaaatagaaggcctttgtagtaaaa

SEQ ID NO: 342612 - DNA, 120 bp, Artificial Sequence
  ENSG00000138079_24 (sequence is synthesized)
taacggatactctttaaatcaatcacagacttccttgcagttttccatttgtaaggagtttgtaaatcatgcctttgtgaaaatacaaactggtacaaatctaccaagtgaagtgaagta

SEQ ID NO: 342613 - DNA, 120 bp, Artificial Sequence
  ENSG00000138079_25 (sequence is synthesized)
tcatatagaatatacaagtcttcattgcaatgacctttactaaggcctttgagctatgaaggaaattttatgaagttttttagctagcccagctgcctttcctcctctcttcccctcaaa

SEQ ID NO: 342614 - DNA, 120 bp, Artificial Sequence
  ENSG00000138079_26 (sequence is synthesized)
aggcagggagagaggcgagtggataggcagccatgcaggcagtaaggagatcaatcaatcaacccagagcaaggctcaaatccacactactgttctgaagaaacagaagccatacatgat

SEQ ID NO: 342615 - DNA, 120 bp, Artificial Sequence
  ENSG00000138079_27 (sequence is synthesized)
ccttaaagtggttgctctggcatactaatacaactttggcttttacccttttttctgttcccatagtgatcaagcactaatgtcattcactagtgaaaacttcactggaaaacaaactaa

SEQ ID NO: 342616 - DNA, 120 bp, Artificial Sequence
  ENSG00000138079_28 (sequence is synthesized)
accaatttaggggaaatgaaattatagatgccacatggagatagttaagaaatgcatagcaccctctgccacacacacacacacaccatgcccatcccactctactgagtaatctgagga

SEQ ID NO: 342617 - DNA, 120 bp, Artificial Sequence
  ENSG00000138079_29 (sequence is synthesized)
aactccccaggatattcagatatagaaagccacacaaaccctcctgctcccacagctccctgctacaagcaccactgagaattcttggatagtataagctttgttttatatagttgtaag

SEQ ID NO: 342618 - DNA, 120 bp, Artificial Sequence
  ENSG00000138079_30 (sequence is synthesized)
tcttgaagacacaaaatatatatgggttgaatgcctcttgattctcattatgtctaaaatattcccataggccaaggccaatctgaatacagtatgtaggaagtcctacataaaaatgca

SEQ ID NO: 342619 - DNA, 73 bp, Artificial Sequence
  ENSG00000138079_31 (sequence is synthesized)
atctgaatacagtatgtaggaagtcctacataaaaatgcataccagcaaagatggagaaaatgcaaattaaaa

SEQ ID NO: 342620 - DNA, 88 bp, Artificial Sequence
  ENSG00000138079_32 (sequence is synthesized)
accttggcctcccaagtatctgggattacaggtgcccgccaggcgcctgccaccatgtatggctaatttttgtatttttagtggagac

SEQ ID NO: 342621 - DNA, 120 bp, Artificial Sequence
  ENSG00000138079_33 (sequence is synthesized)
tgaactcctgacctctggtgatctgtctgccttgcctcccaaagtgctaggattacgggcctgagccaccttgcctggcctgcaaaatttgtttttaatagaagacacaagaaatgattt

SEQ ID NO: 342622 - DNA, 120 bp, Artificial Sequence
  ENSG00000138079_34 (sequence is synthesized)
ttttaatagaagacacaagaaatgatttaaatattttatcaacagaaaaccagttctatcaactatgggcccagtatgcagcttttaaaaatgacagttctatatacattgatatgagac

SEQ ID NO: 342623 - DNA, 120 bp, Artificial Sequence
  ENSG00000138079_35 (sequence is synthesized)
catttcaaacaggtattcaataaagtatagaatggtaacatatcaccaactgtgtaaagaaaaatatataaacatatgaaatgatacattctgtgcctatgcaaacatatgatacattaa

SEQ ID NO: 342624 - DNA, 120 bp, Artificial Sequence
  ENSG00000138079_36 (sequence is synthesized)
aaacaaaagaacatatagtgcctgtctctgaggggaactgtgaagctatggaaaggtgttgaagaaaacctttttatagtatgtattcttgtaattgaataaaaaataaaattacaaaaa

SEQ ID NO: 342625 - DNA, 120 bp, Artificial Sequence
  ENSG00000138079_37 (sequence is synthesized)
ctggaactcctataacttactatggagaagaaattggaatgggaaatattgtagccgcaaatctcaatgaaagctatgatattgtaagttgaatacaacttgactattcatcacagctat

SEQ ID NO: 342626 - DNA, 120 bp, Artificial Sequence
  ENSG00000138079_38 (sequence is synthesized)
gcagtgtatccctcacaaccaagtgtatttggaggttcaagtaataatgtaacaagcctgcataactctaattgattacagtttggttgtaccagggcctgccatattcctttcctgttt

SEQ ID NO: 342627 - DNA, 120 bp, Artificial Sequence
  ENSG00000138079_39 (sequence is synthesized)
gcttattttgctgactttcagtttcctcttttgtaaaatgatgcagatcacactacgtacttcacaggagttttgtgaaaattaggttaatgaaaaagagattatattagctaaatgtta

SEQ ID NO: 342628 - DNA, 120 bp, Artificial Sequence
  ENSG00000138079_40 (sequence is synthesized)
tgtgccacattttcttaatccagtctaacatttggtgacagcttgattatgctttctagaaggtgctagtcctatatggttaatagtgtgcattcagcccctacatcttgtacatgcaag

SEQ ID NO: 342629 - DNA, 120 bp, Artificial Sequence
  ENSG00000138079_41 (sequence is synthesized)
agcgacatcgtcaactattgctgagtaccaacacttgaagttgctttttattcttggagactggtagagattttaagtgaaggattctaataattttctggggatataatttaaatattc

SEQ ID NO: 342630 - DNA, 120 bp, Artificial Sequence
  ENSG00000138079_42 (sequence is synthesized)
agtctatctgggctcaagctccaagatgagcggaatgtttctttcttccaaattgactaccattttgcttctcttcacaaacaagagtttggatcctggacagaagattcaagaaaatac

SEQ ID NO: 342631 - DNA, 120 bp, Artificial Sequence
  ENSG00000138079_43 (sequence is synthesized)
tcttcagttccttttgtattctggatactgattttttattgtttatgtacactaaaaatctcttgccctggttgtgtccaggtgggctgtgtgttgaattggaaagggtgcatgtccttg

SEQ ID NO: 342632 - DNA, 120 bp, Artificial Sequence
  ENSG00000138079_44 (sequence is synthesized)
aaaggcagcagctactactcagcatctgcctgtgttgccatggacatgtggactcagtgtaactacgtcttccaactcaaaaagatttatgtaaaatctcccagttgttaaatgttttcc

SEQ ID NO: 342633 - DNA, 120 bp, Artificial Sequence
  ENSG00000138079_45 (sequence is synthesized)
agatgttctctttaacatgaaatggacaaaaggcctaggacagagccccatgaaactctcacattcaagggcccacagcgttgacttaaggagtggccagagatgtgggagggcagccgg

SEQ ID NO: 342634 - DNA, 120 bp, Artificial Sequence
  ENSG00000138079_46 (sequence is synthesized)
gttacaaacagcatctactgtaaaaatacgttgcaaccatgtttgtgaggcattaggccaatggggtggggggtatttggaaggggtttctttaacctgctgctctctgtagaaggaaaa

SEQ ID NO: 342635 - DNA, 120 bp, Artificial Sequence
  ENSG00000138079_47 (sequence is synthesized)
ctctcaggatttacatactctgcctgcaaaggatcagggagggcaatgatctttatttgtgggcaataccattataggtcactgatgtgctgttttctttgtttgccagttaagtgtgta

SEQ ID NO: 342636 - DNA, 120 bp, Artificial Sequence
  ENSG00000138080_0 (sequence is synthesized)
actctcgcgcctccgaacagccacaggggcaaagccctgtcacccccaggatccggtcatcagggaaagaggacagggagaccagaagagggccagctgggacgagggggcggacgccca

SEQ ID NO: 342637 - DNA, 120 bp, Artificial Sequence
  ENSG00000138080_1 (sequence is synthesized)
ggaggcaacttctgagacgcagctcctgagaggggcagggaccaggcgcgggaggccagagggggcacagagaacaaaccccctcagaagtgaagaggagagcggaaggaaccgagaggg

SEQ ID NO: 342638 - DNA, 120 bp, Artificial Sequence
  ENSG00000138080_2 (sequence is synthesized)
gacggacaggagctgaggaggaaagaggaggggagaggggtcaggccaggcagccaaggagaagacgtgtggccgggggctatcagaaggaaactgggacggacgggccgggctcgggct

SEQ ID NO: 342639 - DNA, 120 bp, Artificial Sequence
  ENSG00000138080_3 (sequence is synthesized)
gtcctgtggagcagcagcatccccggggccggcagaggcgccagtggctgggcgggatgagtctctgagggccactgtggagcgccccgccatggccccccgcaccctctggagctgcta

SEQ ID NO: 342640 - DNA, 120 bp, Artificial Sequence
  ENSG00000138080_4 (sequence is synthesized)
cctctgctgcctgctgacggcagctgcaggggccgccagctaccctcctcgaggtttcagcctctacacaggttccagtggggccctcagccccggggggccccaggcccagattgcccc

SEQ ID NO: 342641 - DNA, 120 bp, Artificial Sequence
  ENSG00000138080_5 (sequence is synthesized)
ccggccagccagccgccacaggaactggtgtgcctacgtggtgacccggacagtgagctgtgtccttgaggatggagtggagacatatgtcaagtaccagccttgtgcctggggccagcc

SEQ ID NO: 342642 - DNA, 120 bp, Artificial Sequence
  ENSG00000138080_6 (sequence is synthesized)
ccagtgtccccaaagcatcatgtaccgccgcttcctccgccctcgctaccgtgtggcctacaagacagtgaccgacatggagtggaggtgctgtcagggttatgggggcgatgactgtgc

SEQ ID NO: 342643 - DNA, 120 bp, Artificial Sequence
  ENSG00000138080_7 (sequence is synthesized)
tgagagtcccgctccagcgctggggcctgcgtcttccacaccacggcccctggcccggcctgcccgccccaacctctctggctccagtgcaggcagccccctcagtggactggggggaga

SEQ ID NO: 342644 - DNA, 120 bp, Artificial Sequence
  ENSG00000138080_8 (sequence is synthesized)
aggtcctggggagtcagagaaggtgcagcagctggaggaacaggtgcagagcctgaccaaggagctgcaaggcctgcggggcgtcctgcaaggactgagcgggcgcctggcagaggatgt

SEQ ID NO: 342645 - DNA, 120 bp, Artificial Sequence
  ENSG00000138080_9 (sequence is synthesized)
gcagagggctgtggagacggccttcaacgggaggcagcagccagctgacgcggctgcccgccctggggtgcatgaaaccctcaatgagatccagcaccagctgcagctcctggacacccg

SEQ ID NO: 342646 - DNA, 120 bp, Artificial Sequence
  ENSG00000138080_10 (sequence is synthesized)
cgtctccacccacgaccaggagctgggtcacctcaacaaccatcatggcggcagcagcagcagtgggggcagcagggccccagccccagcctcagcccctccgggccccagtgaggagct

SEQ ID NO: 342647 - DNA, 120 bp, Artificial Sequence
  ENSG00000138080_11 (sequence is synthesized)
gctgcggcagctggagcagcggttgcaggagtcctgctccgtgtgcctggccgggctagatggcttccgccggcagcagcaggaggacagggagcggctgcgagcgatggagaagctgct

SEQ ID NO: 342648 - DNA, 120 bp, Artificial Sequence
  ENSG00000138080_12 (sequence is synthesized)
ggcctcggtggaggagcggcaacggcacctcgcagggctggcggtgggccgcaggccccctcaggaatgctgctctccagagctgggccggcgactggcagagctggagcgcaggctgga

SEQ ID NO: 342649 - DNA, 120 bp, Artificial Sequence
  ENSG00000138080_13 (sequence is synthesized)
tgtcgtggccggctcagtgacagtgctgagtgggcggcgaggcacagagctgggaggagccgcggggcagggaggccaccccccaggctacaccagcttggcctcccgcctgtctcgcct

SEQ ID NO: 342650 - DNA, 120 bp, Artificial Sequence
  ENSG00000138080_14 (sequence is synthesized)
ggaggaccgcttcaactccaccctgggcccttcggaggagcaggaggagagctggcctggggctcctggggggctgagccactggctgcctgctgcccggggccgactagagcagttggg

SEQ ID NO: 342651 - DNA, 120 bp, Artificial Sequence
  ENSG00000138080_15 (sequence is synthesized)
ggggctgctggccaatgtgagcggggagctgggggggcggttggatctgttggaggagcaggtggcaggggccatgcaggcatgcgggcagctctgctctggggcccctggggagcagga

SEQ ID NO: 342652 - DNA, 120 bp, Artificial Sequence
  ENSG00000138080_16 (sequence is synthesized)
gtgaggggcagctgcggctggtgggctccggcctgcacacggtggaagcagcgggggaggcccggcaggccacgctggagggattacaagaggttgtgggccggctccaggatcgtgtgg

SEQ ID NO: 342653 - DNA, 120 bp, Artificial Sequence
  ENSG00000138080_17 (sequence is synthesized)
atgcccaggatgagacagctgcagagttcacactacggctgaatctcactgcggcccggctaggccaactggaggggctgctgcaggcccatggggatgagggctgtggggcctgtggcg

SEQ ID NO: 342654 - DNA, 120 bp, Artificial Sequence
  ENSG00000138080_18 (sequence is synthesized)
gagtccaagaggaactaggccgccttcgggatggtgtggagcgctgctcctgccccctgttgcctcctcggggtcctggggctggtccaggtgttgggggcccaagccgtgggcccctgg

SEQ ID NO: 342655 - DNA, 120 bp, Artificial Sequence
  ENSG00000138080_19 (sequence is synthesized)
acggcttcagcgtgtttgggggcagctcaggctcagccctgcaggccctgcaaggagagctctctgaggttattctcagcttcagctccctcaatgactcactgaatgagctccagacca

SEQ ID NO: 342656 - DNA, 120 bp, Artificial Sequence
  ENSG00000138080_20 (sequence is synthesized)
ctgtggagggccagggcgctgatctggctgacctgggggcaaccaaggaccgtatcatttctgagattaacaggctgcagcaggaggccacagagcatgctacagagagtgaagagcgct

SEQ ID NO: 342657 - DNA, 120 bp, Artificial Sequence
  ENSG00000138080_21 (sequence is synthesized)
tccgaggcctagaggagggacaagcacaggccggccagtgccccagcttagaggggcgattgggccgtcttgagggtgtctgtgaacggttggacactgtggctgggggactgcagggcc

SEQ ID NO: 342658 - DNA, 120 bp, Artificial Sequence
  ENSG00000138080_22 (sequence is synthesized)
tgcgcgagggcctttccagacacgtggctgggctctgggctgggctccgggaaaccaacaccaccagccagatgcaggcagccctgctggagaagctggtcgggggacaggcgggcctgg

SEQ ID NO: 342659 - DNA, 120 bp, Artificial Sequence
  ENSG00000138080_23 (sequence is synthesized)
gcaggcggctgggtgcccttaacagctccctgcagctcctggaggaccgtctgcaccagctcagcctgaaggacctcactgggcctgcaggagaggctgggcccccagggcctcctgggc

SEQ ID NO: 342660 - DNA, 120 bp, Artificial Sequence
  ENSG00000138080_24 (sequence is synthesized)
tgcagggacccccaggccctgctggacctccaggatcaccaggcaaggacgggcaagagggccccatcgggccaccaggtcctcaaggtgaacagggagtggagggggcaccagcagccc

SEQ ID NO: 342661 - DNA, 120 bp, Artificial Sequence
  ENSG00000138080_25 (sequence is synthesized)
ctgtgccccaagtggcattttcagctgctctgagtttgccccggtctgaaccaggcacggtccccttcgacagagtcctgctcaatgatggaggctattatgatccagagacaggcgtgt

SEQ ID NO: 342662 - DNA, 120 bp, Artificial Sequence
  ENSG00000138080_26 (sequence is synthesized)
tcacagcgccactggctggacgctacttgctgagcgcggtgctgactgggcaccggcacgagaaagtggaggccgtgctgtcccgctccaaccagggcgtggcccgcgtagactccggtg

SEQ ID NO: 342663 - DNA, 120 bp, Artificial Sequence
  ENSG00000138080_27 (sequence is synthesized)
gctacgagcctgagggcctggagaataagccggtggccgagagccagcccagcccgggcaccctgggcgtcttcagcctcatcctgccgctgcaggccggggacacggtctgcgtcgacc

SEQ ID NO: 342664 - DNA, 120 bp, Artificial Sequence
  ENSG00000138080_28 (sequence is synthesized)
tggtcatggggcagctggcgcactcggaggagccgctcaccatcttcagcggggccctgctctatggggacccagagcttgaacacgcgtagactggggtcccgcccgacgtgtctacgt

SEQ ID NO: 342665 - DNA, 120 bp, Artificial Sequence
  ENSG00000138080_29 (sequence is synthesized)
gtctacgtcggctgaagagacagcgggggcggcgggctcctggggtctcgcctgagacggggcacctagccctgggcgagcgccgcacccgggcccgcagcggcaccgcgcccagagcgg

SEQ ID NO: 342666 - DNA, 120 bp, Artificial Sequence
  ENSG00000138080_30 (sequence is synthesized)
cacgcccggggcgcgccggctcagggaggctcggggccgcccatgcagacttttggcctggcgcgatcccccaagaacccctccagggccggcctgcggaggagccgatcctcgcaccct

SEQ ID NO: 342667 - DNA, 120 bp, Artificial Sequence
  ENSG00000138080_31 (sequence is synthesized)
ccgctccctccactggccctccaggtcgattccctgggctccaggctcccccgcgcgggcgccgcccaccgccatactaaacgatcgaggaataaagacacttggtttttctaaaaaaaa

SEQ ID NO: 342668 - DNA, 120 bp, Artificial Sequence
  ENSG00000138081_0 (sequence is synthesized)
atcatagcaataagatttgtaaaacattgcaatggctgaaaaactgtctaacaggaaattttaagtgttattccaaagaagaacaagcctaaaaatgatgatgtgcctgcagatatggtt

SEQ ID NO: 342669 - DNA, 120 bp, Artificial Sequence
  ENSG00000138081_1 (sequence is synthesized)
gcagaagaatcaggtcctggtgcacaaaatagtccataccaacttcgtagaaaaactcttttgccgaaaagaacagcgtgtcccacaaagaacagtatggagggcgcctcaacttcaact

SEQ ID NO: 342670 - DNA, 120 bp, Artificial Sequence
  ENSG00000138081_2 (sequence is synthesized)
acagaaaactttggtcatcgtgcaaaacgtgcaagagtgtctggaaaatcacaagatctatcagcagcacctgctgaacagtatcttcaggagaaactgccagatgaagtggttctaaaa

SEQ ID NO: 342671 - DNA, 120 bp, Artificial Sequence
  ENSG00000138081_3 (sequence is synthesized)
atcttctcttacttgctggaacaggatctttgtagagcagcttgtgtatgtaaacgcttcagtgaacttgctaatgatccaattttgtggaaacgattatatatggaagtatttgaatat

SEQ ID NO: 342672 - DNA, 120 bp, Artificial Sequence
  ENSG00000138081_4 (sequence is synthesized)
actcgccctatgatgcatcctgaacctggaaaattctaccagattaatccagaagagtatgaacatccaaatccctggaaagagagtttccagcagttgtataaaggtgcacatgtaaag

SEQ ID NO: 342673 - DNA, 120 bp, Artificial Sequence
  ENSG00000138081_5 (sequence is synthesized)
ccaggatttgctgaacatttctacagtaaccctgcaagatataaaggaagagaaaatatgttgtattatgatactattgaagatgcccttggtggggtacaagaggctcattttgatgga

SEQ ID NO: 342674 - DNA, 120 bp, Artificial Sequence
  ENSG00000138081_6 (sequence is synthesized)
cttatctttgttcattctggaatatatactgatgaatggatatatattgaatctccaatcaccatgattggtgcagcacctgggaaagtggcagacaaagttataattgaaaacactaga

SEQ ID NO: 342675 - DNA, 120 bp, Artificial Sequence
  ENSG00000138081_7 (sequence is synthesized)
gattcaaccttcgtttttatggaaggctctgaagatgcttatgttggatatatgacaataaggtttaaccctgatgacaaatctgcacaacaccacaatgcacaccactgcttagagatt

SEQ ID NO: 342676 - DNA, 120 bp, Artificial Sequence
  ENSG00000138081_8 (sequence is synthesized)
acagtaaattgtagccctattattgatcactgtatcatccgaagtacatgtacagttggttctgcagtatgtgttagtggtcaaggagcatgtcccaccatcaagcactgtaacatcagt

SEQ ID NO: 342677 - DNA, 120 bp, Artificial Sequence
  ENSG00000138081_9 (sequence is synthesized)
gactgtgaaaatgttggactatatataacagatcatgcacagggaatatatgaggataatgaaatttccaataatgcgttagctgggatttgggttaaaaatcatggaaacccaattatt

SEQ ID NO: 342678 - DNA, 120 bp, Artificial Sequence
  ENSG00000138081_10 (sequence is synthesized)
agacggaatcatattcatcatggacgtgatgttggtgtgttcacatttgatcatggcatgggttactttgaaagttgcaatatacacagaaataggatagcaggctttgaagtaaaagcc

SEQ ID NO: 342679 - DNA, 120 bp, Artificial Sequence
  ENSG00000138081_11 (sequence is synthesized)
tatgctaaccctacagtggttcgatgtgaaattcaccatgggcagactggaggaatatatgtccatgaaaaaggaagaggacaattcatagagaataaaatctatgcaaacaactttgca

SEQ ID NO: 342680 - DNA, 120 bp, Artificial Sequence
  ENSG00000138081_12 (sequence is synthesized)
ggtgtatggattacctcaaatagtgacccaacaataaggggaaattctatatttaatggaaatcaaggaggagtttacatctttggtgatggacgaggccttattgaaggaaatgacatt

SEQ ID NO: 342681 - DNA, 120 bp, Artificial Sequence
  ENSG00000138081_13 (sequence is synthesized)
tatggcaatgcattagcaggaattcaaattaggacaaacagttgtccaattgttcggcataacaaaattcatgatggccagcatggtgggatttatgtgcatgaaaagggacaaggagta

SEQ ID NO: 342682 - DNA, 120 bp, Artificial Sequence
  ENSG00000138081_14 (sequence is synthesized)
atagaagagaatgaagtttatagtaacactctagctggagtctgggtgacaactggcagcactccagtactgagaagaaaccggatacacagtggcaagcaggttggtgtttatttttat

SEQ ID NO: 342683 - DNA, 120 bp, Artificial Sequence
  ENSG00000138081_15 (sequence is synthesized)
gacaatggacatggagtgctagaagacaatgatatctataatcatatgtattcaggggttcagataaggactggaagcaaccccaaaattagacgcaacaaaatctggggaggacagaat

SEQ ID NO: 342684 - DNA, 120 bp, Artificial Sequence
  ENSG00000138081_16 (sequence is synthesized)
gaattctagtttataattctggtctaggctgtatagaagacaatgaaatatttgacaatgcaatggctggagtctggattaagacagatagtaatcctacactaagaagaaataaaatcc

SEQ ID NO: 342685 - DNA, 120 bp, Artificial Sequence
  ENSG00000138081_17 (sequence is synthesized)
atgatggaagagatggtggcatctgtatatttaatgggggtcgaggtctccttgaagaaaatgatattttcaggaatgctcaagcaggtgttctcatcagcactaatagtcatccaatct

SEQ ID NO: 342686 - DNA, 120 bp, Artificial Sequence
  ENSG00000138081_18 (sequence is synthesized)
taaggaaaaacagaatatttgatggatttgccgcaggtattgaaattacaaatcacgcaactgcaacactagaaggcaatcagatttttaacaaccggtttggaggcttatttttagcat

SEQ ID NO: 342687 - DNA, 120 bp, Artificial Sequence
  ENSG00000138081_19 (sequence is synthesized)
ctggtgttaatgtgacaatgaaagataacaaaataatgaacaatcaagatgccatagaaaaggctgttagtagaggccaatgtttatataaaatatcaagttataccagctatcccatgc

SEQ ID NO: 342688 - DNA, 120 bp, Artificial Sequence
  ENSG00000138081_20 (sequence is synthesized)
atgatttctacagatgtcatacttgtaacaccacagatcgaaatgccatatgtgtgaactgcattaagaagtgccatcagggacatgatgtagagtttattagacatgataggtttttct

SEQ ID NO: 342689 - DNA, 120 bp, Artificial Sequence
  ENSG00000138081_21 (sequence is synthesized)
gtgactgtggtgctggaacactgtctaatccttgtacattagctggtgagcctacacatgatacagatacactatatgactctgctccacctatagaatctaatacattgcagcacaact

SEQ ID NO: 342690 - DNA, 120 bp, Artificial Sequence
  ENSG00000138081_22 (sequence is synthesized)
gaattccttccctaaagaaaaagtcctgccattgtaacatcataacttaaaacacttttttggaagaagatttaaaatatttgcccatgctacaggaagagactgtattaaaaatggata

SEQ ID NO: 342691 - DNA, 120 bp, Artificial Sequence
  ENSG00000138081_23 (sequence is synthesized)
cacaaggtcagttgacactatgaagctcaagctaccaaaaagaaagtggcaatatattgactcaggatctcaaagctgggtgttttagcattactgtgtaaagacttgaagggacagaag

SEQ ID NO: 342692 - DNA, 120 bp, Artificial Sequence
  ENSG00000138081_24 (sequence is synthesized)
tgaagaaaataagctgcaattttgtacagataccaacttctgaaaagctggtgtttttacaactagcattgaatgcagtccaatttgcagtagtaatcttcaatagacaagcagctttgt

SEQ ID NO: 342693 - DNA, 120 bp, Artificial Sequence
  ENSG00000138081_25 (sequence is synthesized)
tgctgcctttatggacatgggtaccaattgcttttgtaatatggtaaaaatgtgagctagcacttctgcgttccttttgattttttttttttaacatgtattcagattgagaaatatgat

SEQ ID NO: 342694 - DNA, 120 bp, Artificial Sequence
  ENSG00000138081_26 (sequence is synthesized)
tttaatgctttaatctcatgtagtttgtttttaatttcaagcaaaatcttactgtacttgaatgtgccctgttttgttagcacacctagacttgctgtaactgtactcatgtcccagtat

SEQ ID NO: 342695 - DNA, 120 bp, Artificial Sequence
  ENSG00000138081_27 (sequence is synthesized)
gtacgttctttctatgaaagagaaaacactaatcttaaattatatccagcaatgtttctggtatcctttaagaaaagttaagactattatttccttcccttccctgtgcagcattcaaaa

SEQ ID NO: 342696 - DNA, 120 bp, Artificial Sequence
  ENSG00000138081_28 (sequence is synthesized)
tcacccctagaaaaagtgagtgttttaatgagacttcctaggaagggatgcactgtaaaacaaaagtattcttgtaactcagttttgtgaaaggtaaaaaactactatgttttaagtaca

SEQ ID NO: 342697 - DNA, 120 bp, Artificial Sequence
  ENSG00000138081_29 (sequence is synthesized)
ctttagaaagtctcttcaaaacaaacagtcctgtatttgaactctgttcatagtttttttttgaacagtttagacaaaactgctggaaattaaaccaatttcctgcattaagctgagaca

SEQ ID NO: 342698 - DNA, 120 bp, Artificial Sequence
  ENSG00000138081_30 (sequence is synthesized)
agtatatatacagccctatacagtttcatagcttttcctcccccatttatgtgtattggtgacagtgggtataaaacagcctgaaagtgtatgcatgtaccataacatctagacttaata

SEQ ID NO: 342699 - DNA, 120 bp, Artificial Sequence
  ENSG00000138081_31 (sequence is synthesized)
tattgtggagtattcaataaccattatgtagaaggtagataagaattaaaagggtttaatttcctagaaagaaaatggaaaaatggtcatttttaaaaaataaagtttattagatcataa

SEQ ID NO: 342700 - DNA, 120 bp, Artificial Sequence
  ENSG00000138081_32 (sequence is synthesized)
aggaaatggtttctggaaaacattagtaaggtcagtttttaaacactgaatccaaggttgtcttctggaatatccaaattggttatgaccagaatgtgattcattatactaagctaaagg

SEQ ID NO: 342701 - DNA, 74 bp, Artificial Sequence
  ENSG00000138081_33 (sequence is synthesized)
ggttatgaccagaatgtgattcattatactaagctaaaggaatagattaaagaattagcaacggaggcccaggt

SEQ ID NO: 342702 - DNA, 120 bp, Artificial Sequence
  ENSG00000138081_34 (sequence is synthesized)
tggcagagtgagactctgtctcaaaaattaaaaagcaacagtgtatatgcaatagttgcaagatgtaagatcacccaaagagtatgcagagggaaatgagggacagaacccagaaatatt

SEQ ID NO: 342703 - DNA, 120 bp, Artificial Sequence
  ENSG00000138081_35 (sequence is synthesized)
tgcagagggaaatgagggacagaacccagaaatattaatacccagggagtgaacaggaggaggaccccaagaagttactgagtcagatttttcccactcatccaggtgaaagtttaggtc

SEQ ID NO: 342704 - DNA, 120 bp, Artificial Sequence
  ENSG00000138081_36 (sequence is synthesized)
aataatgtgaaataccagagggattaaatgtctacagaaataaaaccatgtctcacattaagacaaacaagtaggttggagggatattttgaaaggcaaggtgatattaaactttattct

SEQ ID NO: 342705 - DNA, 120 bp, Artificial Sequence
  ENSG00000138081_37 (sequence is synthesized)
gaaagtagtttgttagagaaagaggcatgataagagttgcagttaactgattggaaactatgcagcagatgaaactggaataaaggaaactcatcaggaaatgattatagtaataagggc

SEQ ID NO: 342706 - DNA, 120 bp, Artificial Sequence
  ENSG00000138081_38 (sequence is synthesized)
cagaaataagggcttgcttgcctgaactaaaaacaaagaggatacaaaggttctagaaatatttcaaaggaattagctttaattcagcaatactcattgagaatcacctatgcacctggc

SEQ ID NO: 342707 - DNA, 120 bp, Artificial Sequence
  ENSG00000138081_39 (sequence is synthesized)
tctgaagatgaagtgctgagtaaacttagacatggaccctgctatcatggagatggcagattattggtcagaatgctcttacctgtcattgtagcaattttgttagatccttaatacctc

SEQ ID NO: 342708 - DNA, 120 bp, Artificial Sequence
  ENSG00000138081_40 (sequence is synthesized)
tgaattgctaataaacttgttttggctgaaaaaatagtcctgtgaattttaccatgcagttaaataagaaactaaaagcaaacctaaataccaccaaaaaggttagtagtctgttatatg

SEQ ID NO: 342709 - DNA, 120 bp, Artificial Sequence
  ENSG00000138081_41 (sequence is synthesized)
atgtagtcagtctataattccttaatcaaagtcagcaatttatggacagcttcagcatctacagttgacctttcactagccaggcaaacttcccttaaaattaaaaaaaaaaaaaaaaaa

SEQ ID NO: 342710 - DNA, 120 bp, Artificial Sequence
  ENSG00000138081_42 (sequence is synthesized)
ggcttctccgctcgctcacagaccccgcgggagtctgttggtggccggggggaaggcgagcggcgtgatttctcccttttctgccgccttccatggtttagtctgcctctttctagtgat

SEQ ID NO: 342711 - DNA, 120 bp, Artificial Sequence
  ENSG00000138081_43 (sequence is synthesized)
atcatagcaataagatttgtaaaacattgcaatggctgaaaaactgtctaacaggaaattttaagtgttattccaaagaagaacaagcctaaaattaatcctcacagtggttctcagaag

SEQ ID NO: 342712 - DNA, 120 bp, Artificial Sequence
  ENSG00000138081_44 (sequence is synthesized)
ctcctgccccgaagctcgctgtgcgtgtgcgtgtgtgtgtccctccgccaacgccgccacctcagcccggcaaatgaactccgtccgagccgccaaccggagacccaggcgagtgtcgcg

SEQ ID NO: 342713 - DNA, 80 bp, Artificial Sequence
  ENSG00000138081_45 (sequence is synthesized)
cgcccggtgcagcaacagcagcagcagcccccgcagcagccgccgccgcagccgccccagcagcagccgccccagcagca

SEQ ID NO: 342714 - DNA, 120 bp, Artificial Sequence
  ENSG00000138081_46 (sequence is synthesized)
ggataaatgtgcatcctcactaggaaaaaaaagtttgtgtgaaaagctggatccaaccattatcagttttgaaataaattcctttctgaaataaaatattagaaacataagcatttaaac

SEQ ID NO: 342715 - DNA, 120 bp, Artificial Sequence
  ENSG00000138081_47 (sequence is synthesized)
gaaaaatccagttttccattattcttccatatctttaatgatcaatgacattgctaactaagttataaatgagtgaatctcaagtctttttccttatcaagttgaactggtttaggagat

SEQ ID NO: 342716 - DNA, 120 bp, Artificial Sequence
  ENSG00000138081_48 (sequence is synthesized)
tagtgcctagagttaagagacaaatgtttacaatacttttccttttgtagccactttgagtctgcagttgtcagtaagcctttttaaagatagaatttgtttacattctctggacctttt

SEQ ID NO: 342717 - DNA, 120 bp, Artificial Sequence
  ENSG00000138081_49 (sequence is synthesized)
aaaattcagaatagtaatatgattataataaacttcaaagtcaagttatagaaatagatgtgagaaattgatctgtaaatatctgaaaatgtctttagtaaacgggtattgcttttgtaa

SEQ ID NO: 342718 - DNA, 120 bp, Artificial Sequence
  ENSG00000138081_50 (sequence is synthesized)
aaatgttttcatatttggctatcttttgggagggagttaggagtatgtggggtgtgtaaaagaaatttgcttattgtttaatgcccaatctttatccccctattgtatatatattcacat

SEQ ID NO: 342719 - DNA, 120 bp, Artificial Sequence
  ENSG00000138081_51 (sequence is synthesized)
tcttaaaataatcttgacttaaattgtcagaatgtagctttccttggtctaggtgaggacagaagccactggcacatgtgccataagagctcacttccaccgttctgctttccactatga

SEQ ID NO: 342720 - DNA, 120 bp, Artificial Sequence
  ENSG00000138081_52 (sequence is synthesized)
gagtcacatcagctgccaatatgatccttcatacttggagagtggaagtctgtgttaaaatacttgtgcattatgcctggcatatcattggcactcaataaaatgaagcttctgttttat

SEQ ID NO: 342721 - DNA, 120 bp, Artificial Sequence
  ENSG00000138081_53 (sequence is synthesized)
ttttatgaaatgctattgcatacttaatagactacagtataatgtaaaccaaaaaattgatgcgactctctttattgcaatactcgctttattatggtggtctggaacggaacctgcagt

SEQ ID NO: 342722 - DNA, 120 bp, Artificial Sequence
  ENSG00000138081_54 (sequence is synthesized)
tatctccaaggcatgcctgtaattcagtccttcattttacatatgaggggaatatatgtcacttaatataaccccatttagtttacatgttaggaaactctacaataataatctgtagta

SEQ ID NO: 342723 - DNA, 120 bp, Artificial Sequence
  ENSG00000138081_55 (sequence is synthesized)
aagtatgttctgtgggaaatacaggattaagcaaaattaaaccactttcttctcagggcatcttggactccattgtatagttaattcttactaagtgacttatgtggatttctccactgt

SEQ ID NO: 342724 - DNA, 120 bp, Artificial Sequence
  ENSG00000138083_0 (sequence is synthesized)
gcactcactgtggatttaggggagatattatgaggctgttgtcattagggcgattgcggtggaatcgctgaatcttgactcggcggtggttggctctccctctcctctctccctctccct

SEQ ID NO: 342725 - DNA, 120 bp, Artificial Sequence
  ENSG00000138083_1 (sequence is synthesized)
ctccctctctgtctcgggttctctctctgcgcgcgcgcaccgggccgctctcctacctccctctctatgtggctgcgcgggtgtgtgtgtgtgtggatgtgtgtggggtgtgggtgtccc

SEQ ID NO: 342726 - DNA, 120 bp, Artificial Sequence
  ENSG00000138083_2 (sequence is synthesized)
ttacgcccttcctcctctccctcctcctcctgctcccccctcctttccttctcctcctcccccctctcctctccctcctcctggtcctcatcgcccctctcctcctcttcctcccctctc

SEQ ID NO: 342727 - DNA, 120 bp, Artificial Sequence
  ENSG00000138083_3 (sequence is synthesized)
tcttcctctccctgaattttctcctctcctctcaggtcagtccatggtattccgctcccccctagacctctattcctcccacttcttgttgccaaacttcgccgattctcaccaccgctc

SEQ ID NO: 342728 - DNA, 120 bp, Artificial Sequence
  ENSG00000138083_4 (sequence is synthesized)
attctcaccaccgctccatacttctggcgagtagcggcggcgggaacggtgcgggaggcggcggcggcgcgggaggcggcagcggcggcgggaacggtgcgggaggcggcggtgctggcg

SEQ ID NO: 342729 - DNA, 120 bp, Artificial Sequence
  ENSG00000138083_5 (sequence is synthesized)
cggcggcggctccagggcccccccggaagagttgtccatgttccagctgcccaccctcaacttctcgccggagcaggtggccagcgtctgtgagacgctggaggagacgggcgacatcga

SEQ ID NO: 342730 - DNA, 120 bp, Artificial Sequence
  ENSG00000138083_6 (sequence is synthesized)
gcggctgggccgcttcctctggtcgctgcccgtggcccccggggcgtgcgaggccatcaacaaacacgagtcgatcctgcgcgcgcgcgccgtggtcgccttccacacgggcaacttccg

SEQ ID NO: 342731 - DNA, 120 bp, Artificial Sequence
  ENSG00000138083_7 (sequence is synthesized)
cgacctctaccacatccttgagaaccacaagttcaccaaggagtctcacggcaagctgcaggccatgtggctcgaggcgcactaccaggaggccgagaagctgcgcggccgcccactcgg

SEQ ID NO: 342732 - DNA, 120 bp, Artificial Sequence
  ENSG00000138083_8 (sequence is synthesized)
cccggtggacaagtaccgcgtgcgcaagaagttcccgctgccacgcaccatctgggacggcgagcagaagacgcattgcttcaaggagcggactcggagcctgttgcgggagtggtacct

SEQ ID NO: 342733 - DNA, 120 bp, Artificial Sequence
  ENSG00000138083_9 (sequence is synthesized)
acaggacccctaccccaaccccagcaagaaacgcgaactggcgcaggccaccggcctcactcccacacaagtaggcaactggtttaagaaccggcggcagcgcgaccgcgccgcggcggc

SEQ ID NO: 342734 - DNA, 120 bp, Artificial Sequence
  ENSG00000138083_10 (sequence is synthesized)
caagaacaggctccagcaccaggccattggaccgagcggcatgcgctcgctggccgagcccggctgccccacgcacggctcggcagagtcgccgtccacggcggccagcccgaccaccag

SEQ ID NO: 342735 - DNA, 120 bp, Artificial Sequence
  ENSG00000138083_11 (sequence is synthesized)
gatgtatgatagccaaggccgccctcctccctctccttcccctcctcccccactccttcccctccgcctcctagccctcctcctcttcctcctcttccttctcctcctccatccccagaa

SEQ ID NO: 342736 - DNA, 120 bp, Artificial Sequence
  ENSG00000138083_12 (sequence is synthesized)
caaaccgaaatcaggatacccaaccatacacacatacaagtccacacacactcccaccccagccaaaaatatataaaaaacaagaaaataacaaattaaccgcaaactatcaacaacccc

SEQ ID NO: 342737 - DNA, 120 bp, Artificial Sequence
  ENSG00000138083_13 (sequence is synthesized)
caaccaccatctaccactacggccaccccaaaggaccccgacgccaacagacagtcaaacgctgatgttgcgggcagaaaacataaaagaggtgacaattgtatactttctaggacaagc

SEQ ID NO: 342738 - DNA, 120 bp, Artificial Sequence
  ENSG00000138083_14 (sequence is synthesized)
acggcttctcctttcggttcccatggacccggcaccccacctgcatgacgatttatttgtatctgggaaaatattctctctagttaaaaatgatttaaagagtcgactatacaaaaatca

SEQ ID NO: 342739 - DNA, 120 bp, Artificial Sequence
  ENSG00000138083_15 (sequence is synthesized)
agtcgactatacaaaaatcaatcaccaccacgaggacaagagggcaaaagcaaaacagacaaaaagaaaaaaaatcgccgtctccgttccgaatttgttaaaaaaaaaaaaaaaaaaaaa

SEQ ID NO: 342740 - DNA, 120 bp, Artificial Sequence
  ENSG00000138083_16 (sequence is synthesized)
aaaaaaaaaagaactcctggagagggaaatagcaaatgtgtcttgccttttgttgctctctctctctttttttttctctcgctctctttctttctcttcttctctctgtttttaagtcaa

SEQ ID NO: 342741 - DNA, 120 bp, Artificial Sequence
  ENSG00000138083_17 (sequence is synthesized)
gtattggtcaaaaaaatgcaatcttctgttttttgttcagcagacaatcattttcttcgtaagcacctttttctctccactctgtcactgcctgtgtgggtactggttataaatgtggaa

SEQ ID NO: 342742 - DNA, 120 bp, Artificial Sequence
  ENSG00000138083_18 (sequence is synthesized)
aaagaatagttatgactgtaacagatttttatttttatttcaaaattttatatgaattatgtatatcttaatgatcggtcattttcccagtttgtaatatatgtgtagaaattgcctgta

SEQ ID NO: 342743 - DNA, 120 bp, Artificial Sequence
  ENSG00000138083_19 (sequence is synthesized)
tatgatattgctttttctcctctccctttctctttctctcctctccctctctctgtctttctccccgctcaactgtctcttttctttttggggttctcctcccactcggtgctcctggtg

SEQ ID NO: 342744 - DNA, 120 bp, Artificial Sequence
  ENSG00000138083_20 (sequence is synthesized)
tcgacttggcagtcaaggagaggcatggtggcctgggttaggaagagggaccctgtcgctagcaaaagcggagagtgagattgtagtattcttatgcaaaagctatttccagtatttctt

SEQ ID NO: 342745 - DNA, 120 bp, Artificial Sequence
  ENSG00000138083_21 (sequence is synthesized)
agcagcttcagaggtatctctcactccctgtagggcgcttttactgttatcttaaactgcgtgtttatctatatgtaaaaactttctaaagcaaatacagtattctccattttcttatca

SEQ ID NO: 342746 - DNA, 120 bp, Artificial Sequence
  ENSG00000138085_0 (sequence is synthesized)
ggatggaggggcccgagtttctgcgaagccgcgacctcggcgtccggacgcggggaacaccgggctgagggagtctgcagtcggctccgggaagccgcgcggcgacgggggaggccttca

SEQ ID NO: 342747 - DNA, 120 bp, Artificial Sequence
  ENSG00000138085_1 (sequence is synthesized)
ctaaaggggaaaaggaagagggggtcggccagtatccccgaaagagggctagggcgcatgaagaccagcgcagagctccacgagcaggaaaagcccccaagcagccccagggcgactgga

SEQ ID NO: 342748 - DNA, 120 bp, Artificial Sequence
  ENSG00000138085_2 (sequence is synthesized)
ccgggccgcttaggccacgcccggggaagagggcctgacgcgctgcggggcggggccgcggggccgggtcgcgcgagcagcggagcaccaagggaacggaaaatggcgcctcacgacccg

SEQ ID NO: 342749 - DNA, 120 bp, Artificial Sequence
  ENSG00000138085_3 (sequence is synthesized)
ggtagtcttacgaccctggtgccctgggctgccgccctgctcctcgctctgggcgtggaaagggctctggcgctacccgagatatgcacccaatgtccagggagcgtgcaaaatttgtca

SEQ ID NO: 342750 - DNA, 120 bp, Artificial Sequence
  ENSG00000138085_4 (sequence is synthesized)
aaagtggccttttattgtaaaacgacacgagagctaatgctgcatgcccgttgctgcctgaatcagaagggcaccatcttggggctggatctccagaactgttctctggaggaccctggt

SEQ ID NO: 342751 - DNA, 120 bp, Artificial Sequence
  ENSG00000138085_5 (sequence is synthesized)
tgcaagcaaaccccctcaaaggtgacttggccaacaccttccgtggctttactcagctccagactctgatactgccacaacatgtcaactgtcctggaggaattaatgcctggaatacta

SEQ ID NO: 342752 - DNA, 120 bp, Artificial Sequence
  ENSG00000138085_6 (sequence is synthesized)
tcacctcttatatagacaaccaaatctgtcaagggcaaaagaacctttgcaataacactggggacccagaaatgtgtcctgagaatggatcttgtgtacctgatggtccaggtcttttgc

SEQ ID NO: 342753 - DNA, 120 bp, Artificial Sequence
  ENSG00000138085_7 (sequence is synthesized)
agtgtgtttgtgctgatggtttccatggatacaagtgtatgcgccagggctcgttctcactgcttatgttcttcgggattctgggagccaccactctatccgtctccattctgctttggg

SEQ ID NO: 342754 - DNA, 120 bp, Artificial Sequence
  ENSG00000138085_8 (sequence is synthesized)
cgacccagcgccgaaaagccaagacttcatgaactacataggtcttaccattgacctaagatcaatctgaactatcttagcccagtcagggagctctgcttcctagaaaggcatctttcg

SEQ ID NO: 342755 - DNA, 120 bp, Artificial Sequence
  ENSG00000138085_9 (sequence is synthesized)
ccagtggattcgcctcaaggttgaggccgccattggaagatgaaaaattgcactcccttggtgtagacaaataccagttcccattggtgttgttgcctataataaacacttttttctttt

SEQ ID NO: 342756 - DNA, 120 bp, Artificial Sequence
  ENSG00000138085_10 (sequence is synthesized)
tggcgcctcacgacccgggtagtcttacgaccctggtgccctgggctgccgccctgctcctcgctctgggcgtggaaagggctctggcgctacccgaggtacagaagcaagtttgaggtc

SEQ ID NO: 342757 - DNA, 120 bp, Artificial Sequence
  ENSG00000138085_11 (sequence is synthesized)
gggctgaagcagggtcgctggccagccgtgcgtcgcgctcgccagcggctcccccttctcctcggcgggcctgcggttctgatttcgtccctgacgcttcccgaccctgcccagccagat

SEQ ID NO: 342758 - DNA, 120 bp, Artificial Sequence
  ENSG00000138085_12 (sequence is synthesized)
ccctagatgctggatacaggccattccttagcctggctgcttttatacccttatattatttaaagaatccacctattatggtttcagctgtaatcatcacgcagatgtctaccaaaacta

SEQ ID NO: 342759 - DNA, 120 bp, Artificial Sequence
  ENSG00000138085_13 (sequence is synthesized)
gtcagattgagaagtctctgcagaaagcataataaataagttcgaatagtgatcttcagagatgaggaccttccctgtgcgatatctggtactgaaagtgtcgggagctgattcggcgca

SEQ ID NO: 342760 - DNA, 120 bp, Artificial Sequence
  ENSG00000138085_14 (sequence is synthesized)
ggactctggaggaagagatggcatctcctagcctagcctgttacaagggtgggacacgagccgtttatccatttatcggccccgtgttagaggaattctggaaacgtgtactggcagtta

SEQ ID NO: 342761 - DNA, 120 bp, Artificial Sequence
  ENSG00000138085_15 (sequence is synthesized)
acattattgttactgtttttatctgtaattttctttcttcttcctttatcctagcaatgattgagagaatctaagttgaaacagataattgagaaatatgcctaatgaaatggataaagt

SEQ ID NO: 342762 - DNA, 120 bp, Artificial Sequence
  ENSG00000138092_0 (sequence is synthesized)
ttgaagacgtggatggcgggaattctcgcttctggcctgggtgagctagaagggagaagcaaggacattggagtccctatcaccggttgcctagacaacttcatgggaaggcccttggga

SEQ ID NO: 342763 - DNA, 120 bp, Artificial Sequence
  ENSG00000138092_1 (sequence is synthesized)
atctgagatggagcaggcgaaccctttacgtccagatggcgagtccaaaggaggtgttttagctcacttggaaaggctagagacccaagtgagcagatcccgtaaacagtctgaagagct

SEQ ID NO: 342764 - DNA, 120 bp, Artificial Sequence
  ENSG00000138092_2 (sequence is synthesized)
gcagagcgtgcaggcccaggaaggtgctcttggaaccaagattcataaactaaggcgtctgcgagatgagctgagggctgtggtgcggcaccggcgagccagcgtgaaagcatgtattgc

SEQ ID NO: 342765 - DNA, 120 bp, Artificial Sequence
  ENSG00000138092_3 (sequence is synthesized)
caatgtagaacccaaccaaacagtggagatcaatgagcaagaagcattggaagagaaattggaaaatgtgaaagccattctgcaggcatatcattttacaggcctcagtggtaaactgac

SEQ ID NO: 342766 - DNA, 120 bp, Artificial Sequence
  ENSG00000138092_4 (sequence is synthesized)
cagccgaggagtttgtgtctgcatcagtactgcttttgaggggaacctattggattcctattttgtggaccttgtcatacagaaaccactccggatacatcaccattcagtcccagtctt

SEQ ID NO: 342767 - DNA, 120 bp, Artificial Sequence
  ENSG00000138092_5 (sequence is synthesized)
cattcccctggaagagatagctgcaaaatatttacagaccaacatccagcacttcctgttcagtctctgcgagtacctgaatgcttactctgggaggaagtaccaggcagaccggcttca

SEQ ID NO: 342768 - DNA, 120 bp, Artificial Sequence
  ENSG00000138092_6 (sequence is synthesized)
gagtgactttgcagccctcctgactgggcccttgcagagaaacccactgtgtaacttgctgtcatttacttacaaactggatccagggggtcagtccttcccgttctgtgctagattgct

SEQ ID NO: 342769 - DNA, 120 bp, Artificial Sequence
  ENSG00000138092_7 (sequence is synthesized)
gtataaggacctcacagcaactcttcccactgacgtcaccgtgacatgtcaaggagtggaagtattatccacttcatgggaggagcaacgagcatctcatgaaactctgttctgtacgaa

SEQ ID NO: 342770 - DNA, 120 bp, Artificial Sequence
  ENSG00000138092_8 (sequence is synthesized)
gcccttgcatcaagtgtttgcctcatttacaagaaaaggagaaaagttggatatgagtctggtctcctaatagattgttttcactgcactgggagcacatcagagaaataaatcccccct

SEQ ID NO: 342771 - DNA, 120 bp, Artificial Sequence
  ENSG00000138092_9 (sequence is synthesized)
cccctgccaggtgaaaggaaatattgcactttctgttctcatgactaaggggacaggagttccagaagaacctttcaagatgatcaggaacaccaggacgagggccgtctcacctcactc

SEQ ID NO: 342772 - DNA, 120 bp, Artificial Sequence
  ENSG00000138092_10 (sequence is synthesized)
ggaccacatggagacctcccttcaaaatgggagccatgtcctgccccaccaagccctgtctgaagtggagcttccccgcctgtgctccctccacagtcccggaaagcccagcggcaaagg

SEQ ID NO: 342773 - DNA, 120 bp, Artificial Sequence
  ENSG00000138092_11 (sequence is synthesized)
cagctttgtcccagctctgccaccctcctgctcacagtggtcagggcccctcaggggcaaggacggcagggattggaacgagggctctggaaggactgttcagccctatgcctaagaccc

SEQ ID NO: 342774 - DNA, 120 bp, Artificial Sequence
  ENSG00000138092_12 (sequence is synthesized)
ctatgctggggacactacaggcacacacaggaatagcagggccaccctcagagctcacacatccacgaacaaatgaaggctgaggaggtttctaaacctaaagtccatgagtgtgcactt

SEQ ID NO: 342775 - DNA, 120 bp, Artificial Sequence
  ENSG00000138092_13 (sequence is synthesized)
caatccaggaaggtcgggacttccttcagtttcaaaaaataaattctcccttccggtttggactgttgcaggctcgaggccattcaggagttgtccaccacctggtggggcagtgtgaca

SEQ ID NO: 342776 - DNA, 120 bp, Artificial Sequence
  ENSG00000138092_14 (sequence is synthesized)
gaggggccattggggaaggtggctagcttatcccgccccttcaagaagaaggtcagcagctcccccttccccttcacaaagatggggcctcgcctcacaaagcggaagccgtactctcgg

SEQ ID NO: 342777 - DNA, 120 bp, Artificial Sequence
  ENSG00000138092_15 (sequence is synthesized)
aggatgacttgggtttcttctaccacctggagagggagggggagcaagaacgtggcgttacggggggagcctagactgagggcgggtgggggctttgggtggttggagccgagcactgat

SEQ ID NO: 342778 - DNA, 120 bp, Artificial Sequence
  ENSG00000138092_16 (sequence is synthesized)
ccatgggtcccaagcagtacgggacactccccaaacctcccagggccaagcccttccacccgtggcgagcagcgggtgggaaggagaaccctggagtgactggctgggggcctcctctca

SEQ ID NO: 342779 - DNA, 120 bp, Artificial Sequence
  ENSG00000138092_17 (sequence is synthesized)
agacttctctcctaggatggccatggtcacctgggtggcagcactgttacctggaaactgccactgcctgctcttctgtccctttgcccctttcgtggagcttttctgccagacgccact

SEQ ID NO: 342780 - DNA, 120 bp, Artificial Sequence
  ENSG00000138092_18 (sequence is synthesized)
gagacagatcacaaggtattagaaggttcatacccaaaggtaggccatatgcatctagaacttcagcccagattttgtggatgggtggaagtgtttcttcctgtgctgaggctagctatt

SEQ ID NO: 342781 - DNA, 120 bp, Artificial Sequence
  ENSG00000138092_19 (sequence is synthesized)
gcagagattcttttccacttgccccacgtctctgcctctggacttactgttcagggccagggtgggaggcaggggcacgtgggaaagcactgttccggttttgttctcatgccgagtctg

SEQ ID NO: 342782 - DNA, 120 bp, Artificial Sequence
  ENSG00000138092_20 (sequence is synthesized)
agcacgtgccagctgtgccactggacatacctgaatgttgcccatgacccccgtggactccatcctgctggctacattgactgtattgccccagatgtcgtagtgtggtttccgggctcc

SEQ ID NO: 342783 - DNA, 120 bp, Artificial Sequence
  ENSG00000138092_21 (sequence is synthesized)
gatgaccccagccagaaccccgcctttgttcatgcctagggtagaggcataaagttcagcacagccacaggccacaccttgttatgggcctcagaagccatctcctctccagacctgtac

SEQ ID NO: 342784 - DNA, 120 bp, Artificial Sequence
  ENSG00000138092_22 (sequence is synthesized)
cacaaagctcctaatgtaacacatcattgtcctcattcaacttggctgtatgctattggagggtggaaatcacatctcctgtttatccgtgtgcttgttaggtgtcagccgccacccccc

SEQ ID NO: 342785 - DNA, 120 bp, Artificial Sequence
  ENSG00000138092_23 (sequence is synthesized)
ccccatatgcagatttactcggcatggtagtggccagcttctaacacagctggtatttcaagtctcctgggacctcactcaggaatgataccccctcagtagaagcagcaggtgatctta

SEQ ID NO: 342786 - DNA, 120 bp, Artificial Sequence
  ENSG00000138092_24 (sequence is synthesized)
actcctttcaaagagcaggcctgtctgggaagccatgtcctcagcaggcacagcaacccctctggaaatggatcacaaactcacttctcagccaggcaggccaagcttctattgtaacag

SEQ ID NO: 342787 - DNA, 120 bp, Artificial Sequence
  ENSG00000138092_25 (sequence is synthesized)
taggcacagtatagtcggatcatcacatcagctgggtttttggtttagtcatctagagtcgtctggactaaaggtctttcaggtctccttgccctgtgagtgcgtgaacctccccacccg

SEQ ID NO: 342788 - DNA, 120 bp, Artificial Sequence
  ENSG00000138092_26 (sequence is synthesized)
aattgcctcagttgtcctgagcctcatgtctctcctggtggtgggccaggcccctgcatgggaagggagcctgctgcggggcaggccagctgggggtgctcacctatgcgcagcatgaag

SEQ ID NO: 342789 - DNA, 120 bp, Artificial Sequence
  ENSG00000138092_27 (sequence is synthesized)
ttattgaaggactggttgttgatgttggtgagcgtatccttcatggccagcgcgaagtcggccaggtcagccaggtgctgccagcgctctctctcggacttgtcttcctgtgccagggga

SEQ ID NO: 342790 - DNA, 120 bp, Artificial Sequence
  ENSG00000138092_28 (sequence is synthesized)
ccgtggagaaagtgtcaggggccgctcactgcagcagcctgctctgctgccttccctggcagtgttctgggggtggattccctacacctagatgttcaaggccttacttttcctcccaca

SEQ ID NO: 342791 - DNA, 120 bp, Artificial Sequence
  ENSG00000138092_29 (sequence is synthesized)
aaggagtcgcagccacgctagctctgacttgccactgtgacaaagttcacgtagcaggtctaggcaaagactgggcaattgagcagaggagacggacctgtgagtctgaccacgaggcgg

SEQ ID NO: 342792 - DNA, 120 bp, Artificial Sequence
  ENSG00000138092_30 (sequence is synthesized)
accccttcaccttggctgggcctggtcctggtccttaggttttgtcaggttgtccttgtttggatccctcaactaggtgataagcactggagggggatgacccgccttggacgtgtttct

SEQ ID NO: 342793 - DNA, 120 bp, Artificial Sequence
  ENSG00000138092_31 (sequence is synthesized)
ttaacctcatccatataatagggccgtgggatggttgtagaggtaaagcaggatgatggtgttttaagaccagagcttgggaccagggctcctacacctaattttctctcctggtagctg

SEQ ID NO: 342794 - DNA, 120 bp, Artificial Sequence
  ENSG00000138092_32 (sequence is synthesized)
aacaaaggtctaaattagcttaacaaaagaacaggctgccgtcagccagagttctgaaggccatgctttcagtttcccttgttgacaattgctctccagttcctatgaaagcacagagcc

SEQ ID NO: 342795 - DNA, 120 bp, Artificial Sequence
  ENSG00000138092_33 (sequence is synthesized)
ttagggggcctggccacagaacacaaccatcttaggcctgagctgtgaacagcagggggttgtgtgtctgttctgtttctctgcttgccgaactttctcaataaaccctatttcttattt

SEQ ID NO: 342796 - DNA, 120 bp, Artificial Sequence
  ENSG00000138092_34 (sequence is synthesized)
aggatcgcaaagcacgccgggaccggttggtttggttttgaagacgtggatggcgggaattctcgcttctggcctggcaaggacattggagtccctatcaccggttgcctagacaacttc

SEQ ID NO: 342797 - DNA, 120 bp, Artificial Sequence
  ENSG00000138092_35 (sequence is synthesized)
atgcgccccagctcttggaggtaagcggctgtgtgcgggtggtcgcggtgagtgtgcaaggccgcggtggccgcgtgacaagcctgcgctaccagtgcgcccgccggccaggagaacgga

SEQ ID NO: 342798 - DNA, 120 bp, Artificial Sequence
  ENSG00000138092_36 (sequence is synthesized)
gcttgtgatagatcctttcgtaacaccaagtattgtaccaggacctgcggctccgccccagaggccgccatcttcctgaccacccgaaaggccggacctactccccggtgcatcttggga

SEQ ID NO: 342799 - DNA, 120 bp, Artificial Sequence
  ENSG00000138092_37 (sequence is synthesized)
ttagaagtttgaccgttacctttccgatgcttgtttcttatttatataaaagcactatcccaccctcttttcttttgaaactctggatggcgttgaagcctgggtactggttaaaggatt

SEQ ID NO: 342800 - DNA, 120 bp, Artificial Sequence
  ENSG00000138092_38 (sequence is synthesized)
atgcacccctgaatggtggtcttcaagcttttatcgtaagattgtacagagtgcagttgctatacttttgatccatcagggatttatggcgtgcctactatgtaccataccgagtgcctt

SEQ ID NO: 342801 - DNA, 120 bp, Artificial Sequence
  ENSG00000138092_39 (sequence is synthesized)
gctgaaccttgggtatagatctcattagagaagaaaggtttctgcagtgccatggaacaatgctgtccatcttcccctaaactctagcctacctttttgggttgcagttgagctaaggtt

SEQ ID NO: 342802 - DNA, 120 bp, Artificial Sequence
  ENSG00000138092_40 (sequence is synthesized)
gggtgaaaaaagtagataggaaattaatgcaaataggctgtaagtgcctcctacaagcttagcatttccccctctatggatttggagtaactctgaagctctcagctgtagatttaactt

SEQ ID NO: 342803 - DNA, 120 bp, Artificial Sequence
  ENSG00000138092_41 (sequence is synthesized)
aaattgaaatgtggatgcagtcatgaagcatcttagccgtgtaacgtcagtgaagtttctgcagaaacagtctcttgcgaagctgtacccctggccatttaggcctataggcctttccag

SEQ ID NO: 342804 - DNA, 120 bp, Artificial Sequence
  ENSG00000138092_42 (sequence is synthesized)
gctgccagtgactcttagttatcttaggcatctttttcattagtccttttttcagacctttttctgtccctcatttatttctctgaaatgtaatcgatgggcctctttttggttgacgta

SEQ ID NO: 342805 - DNA, 120 bp, Artificial Sequence
  ENSG00000138092_43 (sequence is synthesized)
ggtctgcctctagtgagttagtttgctagatgtgttatcagtcctggaattatttcataatttatagtattttacaccctctgccctcatcactcacacacacacacacacacagacaca

SEQ ID NO: 342806 - DNA, 120 bp, Artificial Sequence
  ENSG00000138092_44 (sequence is synthesized)
tatttgtaggcctatcttcacctacaagattgactggcccctttgtacagcagctcagttggtggctggcttattccactcatcttaacagttcgtcatgtgccagaccttgtactagaa

SEQ ID NO: 342807 - DNA, 120 bp, Artificial Sequence
  ENSG00000138095_0 (sequence is synthesized)
cttctggcggagcgtgcttcccgctgcggggacgttcgagcaatggcagccctgctgagatccgcgcgttggttgctgcgtgccggggcggccccgcgcctcccgctctccctgcgcctc

SEQ ID NO: 342808 - DNA, 120 bp, Artificial Sequence
  ENSG00000138095_1 (sequence is synthesized)
ctccctggcggcccgggccggctgcatgccgcctcctatctgcccgccgctcgcgccgggcccgtggccggaggactactgagcccagccaggctgtatgccattgctgccaaagaaaaa

SEQ ID NO: 342809 - DNA, 120 bp, Artificial Sequence
  ENSG00000138095_2 (sequence is synthesized)
gatattcaagaggagtccactttttcttctaggaagatttccaatcagtttgattgggctctaatgagactagatctttctgttcgaagaactggccgcattccaaagaagcttctacaa

SEQ ID NO: 342810 - DNA, 120 bp, Artificial Sequence
  ENSG00000138095_3 (sequence is synthesized)
aaagtttttaatgatacctgccgctcaggtggcctaggtggtagtcatgccttgcttctactacgtagttgtggttctctcttgcctgaactaaagcttgaagagagaacagaatttgct

SEQ ID NO: 342811 - DNA, 120 bp, Artificial Sequence
  ENSG00000138095_4 (sequence is synthesized)
cataggatatgggacacacttcagaaattaggtgctgtgtatgatgtgagtcactataatgctttacttaaagtctatcttcaaaatgaatataaattctcaccaactgatttcctggca

SEQ ID NO: 342812 - DNA, 120 bp, Artificial Sequence
  ENSG00000138095_5 (sequence is synthesized)
aaaatggaggaagcaaacattcaaccaaatcgagtgacataccagagattgattgcttcttattgtaatgtaggagatattgaaggtgccagcaagattcttggatttatgaaaactaag

SEQ ID NO: 342813 - DNA, 120 bp, Artificial Sequence
  ENSG00000138095_6 (sequence is synthesized)
gatctcccagttacagaggcagtattcagtgcccttgtgacagggcatgccagagctggtgatatggagaatgcagaaaacattctcacagtgatgagagatgccggaattgagcctggt

SEQ ID NO: 342814 - DNA, 120 bp, Artificial Sequence
  ENSG00000138095_7 (sequence is synthesized)
ccagacacatacctcgcattattgaatgcatatgctgagaagggcgacattgaccatgttaagcagactctggagaaggtggagaagtccgagcttcaccttatggaccgtgatttactg

SEQ ID NO: 342815 - DNA, 120 bp, Artificial Sequence
  ENSG00000138095_8 (sequence is synthesized)
caaattatttttagcttcagtaaagctgggtatcctcagtatgtctcagaaattttggaaaaagttacatgtgaaagaagatatattccagatgcaatgaacctcattttacttttagtc

SEQ ID NO: 342816 - DNA, 120 bp, Artificial Sequence
  ENSG00000138095_9 (sequence is synthesized)
actgaaaaattggaagatgtagcgttgcaaattttactagcatgccccgtatcaaaggaagatggcccaagtgtctttggcagtttctttttacaacactgtgtgactatgaatacgcct

SEQ ID NO: 342817 - DNA, 120 bp, Artificial Sequence
  ENSG00000138095_10 (sequence is synthesized)
gtggagaagctaacagactactgtaagaagttaaaggaagtccagatgcactcctttcctctgcagttcaccctccattgtgctttactcgccaataaaactgatttggcaaaagcctta

SEQ ID NO: 342818 - DNA, 120 bp, Artificial Sequence
  ENSG00000138095_11 (sequence is synthesized)
atgaaggctgtgaaggaggaaggttttcctatcagacctcactatttctggccattgctagttggacgtcggaaggaaaaaaatgttcaaggtataattgaaatcctcaaaggaatgcaa

SEQ ID NO: 342819 - DNA, 120 bp, Artificial Sequence
  ENSG00000138095_12 (sequence is synthesized)
gaattgggagtacatcctgatcaggaaacatatacagattatgtgattccatgctttgatagtgtaaactcagcacgagccattttgcaggaaaatggatgtctgtctgatagtgatatg

SEQ ID NO: 342820 - DNA, 120 bp, Artificial Sequence
  ENSG00000138095_13 (sequence is synthesized)
ttttctcaagctggattgagaagtgaagcagcaaatgggaacttagactttgtattatcatttttgaaatcaaatacattgcccatctcgctgcagtctataagaagtagcctactgcta

SEQ ID NO: 342821 - DNA, 120 bp, Artificial Sequence
  ENSG00000138095_14 (sequence is synthesized)
ggcttcaggaggtctatgaatataaatctttggagcgagataacagaattgttgtacaaggatggacgttattgccaggagcctcgaggaccgacggaagctgttggctattttctttat

SEQ ID NO: 342822 - DNA, 120 bp, Artificial Sequence
  ENSG00000138095_15 (sequence is synthesized)
aacttgattgacagcatgagtgactcagaggtacaggccaaggaggagcatttgagacaatacttccatcagctggagaagatgaatgtaaaaattcctgaaaatatctacagaggcatt

SEQ ID NO: 342823 - DNA, 120 bp, Artificial Sequence
  ENSG00000138095_16 (sequence is synthesized)
cgtaatctcctggaaagctaccatgttcctgaattgattaaggatgctcacttgttggttgagagtaagaatttagactttcaaaaaactgtgcaacttacatcatctgaattggagtcc

SEQ ID NO: 342824 - DNA, 120 bp, Artificial Sequence
  ENSG00000138095_17 (sequence is synthesized)
acacttgaaacactaaaagctgaaaatcaacctataagagatgtcctaaagcaactcatattagtgctttgttcagaagagaatatgcaaaaagcccttgaattgaaagcaaaatatgaa

SEQ ID NO: 342825 - DNA, 120 bp, Artificial Sequence
  ENSG00000138095_18 (sequence is synthesized)
tccgacatggttactggtggctatgcagctttaataaatttatgctgtcgacatgataaagtagaagatgccttgaacttgaaagaagaatttgaccgcttagattcatctgctgtcctt

SEQ ID NO: 342826 - DNA, 120 bp, Artificial Sequence
  ENSG00000138095_19 (sequence is synthesized)
gacaccggcaagtatgtaggccttgtaagagtattggcaaagcatggcaagctccaagatgctattaacattctgaaggagatgaaagagaaggatgttcttatcaaagatacaacagcc

SEQ ID NO: 342827 - DNA, 120 bp, Artificial Sequence
  ENSG00000138095_20 (sequence is synthesized)
ttgtcctttttccacatgctaaatggcgcagctttaagaggtgaaattgaaacagtaaaacagttgcatgaagccatcgtgactctagggttagcagaaccatccaccaacataagtttc

SEQ ID NO: 342828 - DNA, 120 bp, Artificial Sequence
  ENSG00000138095_21 (sequence is synthesized)
ccattggtcactgtacacttggaaaagggcgacctatctactgctcttgaggtcgccattgactgctatgaaaagtataaagtattaccaaggattcatgatgtcttgtgtaaactggta

SEQ ID NO: 342829 - DNA, 120 bp, Artificial Sequence
  ENSG00000138095_22 (sequence is synthesized)
gagaaaggcgagactgatctaattcagaaagcaatggactttgtgagccaagaacaaggtgaaatggtgatgctctatgatctcttctttgccttcctacaaacaggaaattacaaagag

SEQ ID NO: 342830 - DNA, 120 bp, Artificial Sequence
  ENSG00000138095_23 (sequence is synthesized)
gccaagaagatcattgagactccagggattagagctcgatctgcaaggcttcagtggttttgtgacagatgtgttgcaaataatcaggttgaaactctggaaaaattagtggagctgaca

SEQ ID NO: 342831 - DNA, 120 bp, Artificial Sequence
  ENSG00000138095_24 (sequence is synthesized)
cagaagctatttgaatgtgatagagaccagatgtactacaatctgctaaaactgtataaaataaacggtgactggcaaagagctgatgcagtctggaataaaatccaagaagaaaatgtt

SEQ ID NO: 342832 - DNA, 120 bp, Artificial Sequence
  ENSG00000138095_25 (sequence is synthesized)
attcctcgtgaaaagacattaagattattagcagaaatccttagagagggtaaccaggaagttccgtttgacgtacctgagttgtggtatgaagatgaaaaacattccctgaattcttcg

SEQ ID NO: 342833 - DNA, 120 bp, Artificial Sequence
  ENSG00000138095_26 (sequence is synthesized)
tcagcctcaaccacagaacctgatttccagaaagatatattgattgcctgccgattgaaccaaaaaaaaggggcatatgatattttcctgaatgcaaaagagcaaaacattgtgtttaat

SEQ ID NO: 342834 - DNA, 120 bp, Artificial Sequence
  ENSG00000138095_27 (sequence is synthesized)
gaaacctacagcaatctcattaaattactgatgtcagaagattattttacacaagcaatggaagtgaaagcattcgcggagacccacatcaagggcttcacactgaacgatgctgccaac

SEQ ID NO: 342835 - DNA, 120 bp, Artificial Sequence
  ENSG00000138095_28 (sequence is synthesized)
agccgcctcatcataacgcaagttaggcgggattatttgaaagaggctgtgacaacactgaaaacagtattggatcagcagcagaccccttctaggttagcagtgacccgtgtcatccag

SEQ ID NO: 342836 - DNA, 120 bp, Artificial Sequence
  ENSG00000138095_29 (sequence is synthesized)
gcattggccatgaagggtgatgttgaaaacatagaagtagttcagaagatgttaaatggactcgaagactccattggactttcaaaaatggttttcatcaataacattgctttggctcaa

SEQ ID NO: 342837 - DNA, 120 bp, Artificial Sequence
  ENSG00000138095_30 (sequence is synthesized)
ataaagaataataacatagatgccgcaatagaaaacattgaaaatatgcttacttcagagaataaagtcattgaaccccaatacttcggcttggcatacttattcagaaaagtaatagag

SEQ ID NO: 342838 - DNA, 120 bp, Artificial Sequence
  ENSG00000138095_31 (sequence is synthesized)
gagcagttggaaccagcagttgaaaagataagcatcatggcggagagattggccaatcagtttgcaatttataaacctgtcactgattttttccttcaacttgtggatgcaggcaaggtg

SEQ ID NO: 342839 - DNA, 120 bp, Artificial Sequence
  ENSG00000138095_32 (sequence is synthesized)
gatgatgccagagctctcctacagagatgtggtgcaattgctgaacaaaccccgattttgttgttgttcctccttaggaattctaggaaacaaggaaaggcatcaactgtgaaatctgtg

SEQ ID NO: 342840 - DNA, 120 bp, Artificial Sequence
  ENSG00000138095_33 (sequence is synthesized)
ttagaattgattcctgaattaaatgaaaaggaagaagcatacaattccctcatgaaaagctatgtctcagagaaagatgtcacatctgctaaagcactgtatgaacatttgactgcaaag

SEQ ID NO: 342841 - DNA, 120 bp, Artificial Sequence
  ENSG00000138095_34 (sequence is synthesized)
aatacaaaattggatgatctgtttctaaagcgttacgcatctttgctgaagtatgctggagagcctgtccctttcattgaaccccctgaaagctttgaattttatgcacagcagctaaga

SEQ ID NO: 342842 - DNA, 120 bp, Artificial Sequence
  ENSG00000138095_35 (sequence is synthesized)
aaattgagggaaaactcttcttgaaataaccaggcgatactttgttttgtatatatttgtgattctgtgtctacatgttattttgaagtatatctgagggaaaaataaatgaaaattttc

SEQ ID NO: 342843 - DNA, 120 bp, Artificial Sequence
  ENSG00000138095_36 (sequence is synthesized)
tttatgtacttatgtatgtgtgatgcatgttcaaagtcttattgaccataactctgtgcacttggttattggacatttttggagtttttttctctgggaaaaatcgatagtgttttcttc

SEQ ID NO: 342844 - DNA, 120 bp, Artificial Sequence
  ENSG00000138095_37 (sequence is synthesized)
aatgctgctgctgtgtgaagccatactttttcaggattcttcccctaattggctctttggtttccctgctctgtttcatttatttcattaaaatgttattcctttatttaagattcactt

SEQ ID NO: 342845 - DNA, 120 bp, Artificial Sequence
  ENSG00000138095_38 (sequence is synthesized)
attagtctgctgtttctctgaaaaattttagagctaggtatagtgaccgtgaactttctaacgcataatattctgtgatacagccattccgtacatgtgtgaagtcctgcataactttcg

SEQ ID NO: 342846 - DNA, 120 bp, Artificial Sequence
  ENSG00000138095_39 (sequence is synthesized)
aactttgttaaatgttggcactaggagtcatcagatctaggcttcatcattttccagtgagaagcagagacccaaagggcctgttacttgtgcttggtcaggggactgtctgtcatgcct

SEQ ID NO: 342847 - DNA, 120 bp, Artificial Sequence
  ENSG00000138095_40 (sequence is synthesized)
ggaggctcttcggcacacttccccatctttcccttctgccactgtggcttcaagcacctctgttcatagagcgtctctgaaattgagtctcggtcatgacttatcccgaagtagagcaat

SEQ ID NO: 342848 - DNA, 120 bp, Artificial Sequence
  ENSG00000138095_41 (sequence is synthesized)
gtgtttcctctcattgtagtttcaggactttgtcagtacaagctctgccctaggcttgttactttatactcatatcctgaaaagatgtgatttcatctatgaaggggtaaaatattggtt

SEQ ID NO: 342849 - DNA, 120 bp, Artificial Sequence
  ENSG00000138095_42 (sequence is synthesized)
tgtatttaattgtttgaaataaaagtgatccctatattgaatctcatgcctgttaatatctacactgtaagtagtgacttcaaaaaaattctaagataggtagtcaggagagtttgccat

SEQ ID NO: 342850 - DNA, 120 bp, Artificial Sequence
  ENSG00000138095_43 (sequence is synthesized)
tataaaaggtgtcttaataatatggaatattgacctaactggagatgaggtaattaattaccgaaatgttgaaaatgttttgagaactctccccattttggggtattccttgttcatttg

SEQ ID NO: 342851 - DNA, 120 bp, Artificial Sequence
  ENSG00000138095_44 (sequence is synthesized)
aatttggtgactccctactgttccagtttcagtgccaacttgggtcacactgttcacatcaggggagaccttgccttggggacgtaggcgggcctcttgcaacttgtgctgttgaccttc

SEQ ID NO: 342852 - DNA, 120 bp, Artificial Sequence
  ENSG00000138095_45 (sequence is synthesized)
tgtcttgtggaactctctctcctgcatctgctacctgcccgcagatggtgtgagggagggttgatggcgggaagccaggaagtagatgtcatcatggtattggccaggcttttacttcaa

SEQ ID NO: 342853 - DNA, 120 bp, Artificial Sequence
  ENSG00000138095_46 (sequence is synthesized)
ctctttttgtggcgttagatttaaggaagcagggggcatggccaacgttgagtcttggcccagtggacatagtgcggctttcccttgagcactgcccagatgcaggacctgcacatgtta

SEQ ID NO: 342854 - DNA, 80 bp, Artificial Sequence
  ENSG00000138095_47 (sequence is synthesized)
tcccttgagcactgcccagatgcaggacctgcacatgttacaggtttgccaaaagcattgcttaagccagagtgcagtgg

SEQ ID NO: 342855 - DNA, 82 bp, Artificial Sequence
  ENSG00000138095_48 (sequence is synthesized)
cgtagctgagattacaggcttgcaccaccatgttcagctaatttttgtatggtaaagacggagtttcaccatgttggccagg

SEQ ID NO: 342856 - DNA, 71 bp, Artificial Sequence
  ENSG00000138095_49 (sequence is synthesized)
gcctcactcctgtctttagtgattgcactgaagcaggcctcatttttttgcagtcatgctaaccacaagtt

SEQ ID NO: 342857 - DNA, 120 bp, Artificial Sequence
  ENSG00000138095_50 (sequence is synthesized)
agcaggcctcatttttttgcagtcatgctaaccacaagttagtcaacattcactaattgacattcattagaataggtctccaaggtgaggcataacgttggggtgtaatctggatttcgc

SEQ ID NO: 342858 - DNA, 120 bp, Artificial Sequence
  ENSG00000138095_51 (sequence is synthesized)
agtcatctttttggggaaactgaaagtaccatctcatttgcatgaagtgactccacactggccctgtatatggactctggtaaaatgtgagtgtggtacagaggaaataggtaagacccc

SEQ ID NO: 342859 - DNA, 120 bp, Artificial Sequence
  ENSG00000138095_52 (sequence is synthesized)
cttatctagccctctcggcagcagcgggggggtgttacaaaggactagctgttcaaatatcttttgtattgtattgattcccctattgaatataaatatttaaagtataataactatact

SEQ ID NO: 342860 - DNA, 120 bp, Artificial Sequence
  ENSG00000138095_53 (sequence is synthesized)
gtaggtgggcttatgagtgttctaaatatctaatagctaaattgaaataagtagaaatataaacaatttagcagctttctgtaatacatttacactcaaattataagcagctaattctaa

SEQ ID NO: 342861 - DNA, 120 bp, Artificial Sequence
  ENSG00000138095_54 (sequence is synthesized)
aagcagctaattctaaaaaagatgtcactgtaaactattgagaactatagtattttatatataattatatgttcatgtatttgaacccaaaataattttaactgaaatgctttgaataaa

SEQ ID NO: 342862 - DNA, 120 bp, Artificial Sequence
  ENSG00000138095_55 (sequence is synthesized)
tttttgatgttgagctgatgatcttgatgttgatgtagatttctacataattgacatgtccctctccacaacagttcctggattatcttgatttcacagtggttttaagccaaaggggat

SEQ ID NO: 342863 - DNA, 120 bp, Artificial Sequence
  ENSG00000138095_56 (sequence is synthesized)
attttattttccaatctgacaagaagaaaacagagaagcattagcagaggaatctgggctcacgaggtggatccatgagagctgccttttccttttatcatatcatccattccacttcgt

SEQ ID NO: 342864 - DNA, 120 bp, Artificial Sequence
  ENSG00000138095_57 (sequence is synthesized)
tgtcaacctcttgatttttcaggcttgtttgttgctaaggaaactagatgctttttgtcagcagccttcatagctgagatgtttctggtcatctttttaatgaataaaaacttgacaata

SEQ ID NO: 342865 - DNA, 120 bp, Artificial Sequence
  ENSG00000138095_58 (sequence is synthesized)
taaaagcctgttgtttcaggaccttatttgagaatactatagagattcaagactttgcttgtctctacttagagtcagttttgtcgtctgttagctgtactggaaatgtaaaacaagttc

SEQ ID NO: 342866 - DNA, 120 bp, Artificial Sequence
  ENSG00000138095_59 (sequence is synthesized)
agtattttatgtaataaaatgataaacaattttaaaacaatgaaaagttaaacttgctcgccatataaataagctcattgtcataaatagcttttgtttctgtagacatggagataagaa

SEQ ID NO: 342867 - DNA, 120 bp, Artificial Sequence
  ENSG00000138095_60 (sequence is synthesized)
caaaacacttttctaatttcagggggttcatttttcagctgaacctgacccagatttcttcagctggattggtaccctttatttttatgttaggtgccctgtgtaagctacaggaaagga

SEQ ID NO: 342868 - DNA, 120 bp, Artificial Sequence
  ENSG00000138095_61 (sequence is synthesized)
catggtataatttctcatctactcttctgagctgttcagctcaattggaggttgcctgagagcaggagcctcgagcgcactgttcctgcactacctcccccacccccaccccacccccct

SEQ ID NO: 342869 - DNA, 120 bp, Artificial Sequence
  ENSG00000138095_62 (sequence is synthesized)
ccctgagcacatcaccacaaacctgttgttagagtaaaatgatcatcagtgaggacaggagtagtgtttgcactattcccatcttcttattttgctccatggctgatgagagctcttgat

SEQ ID NO: 342870 - DNA, 120 bp, Artificial Sequence
  ENSG00000138095_63 (sequence is synthesized)
ttttaaaaattcccttccgttgttctgcctttcttttaggtttccttttctcaaccccatctaaagcagaaagaaaaaataaagccgattaaattttactgttggtgaatattaatagct

SEQ ID NO: 342871 - DNA, 120 bp, Artificial Sequence
  ENSG00000138095_64 (sequence is synthesized)
gatacgtggcacttgtacagtgtaattagtatcactagtgagtaattgagtaaatgttggaattaggtgacagtgggaaaggacctggggggagggatgtggatgggtaacatttttggt

SEQ ID NO: 342872 - DNA, 120 bp, Artificial Sequence
  ENSG00000138095_65 (sequence is synthesized)
gtccctgaagtcattaactgtacagaaggcaagccttatatgagaataggatttaggtcacaaggtcctgtgctatctttagacagatgtgaaatggtctgttctccccacccttctgct

SEQ ID NO: 342873 - DNA, 120 bp, Artificial Sequence
  ENSG00000138095_66 (sequence is synthesized)
ctcttgtgcacacgcgcactcatagacggaagctctgggatcattggaatcttcgagtcttgtctaaaaatatgattttaccttgggcaaactaatctctgtgcccaggggtctcatctg

SEQ ID NO: 342874 - DNA, 120 bp, Artificial Sequence
  ENSG00000138095_67 (sequence is synthesized)
taaaattggtacttgtctcggaagggtagttgtgacagtagctgtttaaactgctgtgcctggcatgtagtaaatgctcaataagtttgagttactgtcatcaccatcattaatcttatt

SEQ ID NO: 342875 - DNA, 120 bp, Artificial Sequence
  ENSG00000138095_68 (sequence is synthesized)
tttgttattattgttttgatgtactgtgggaagagcctccctagctgacaatattcttggttaataagactattattataattatctgtgtatgaccacccattagcaaaattttatcaa

SEQ ID NO: 342876 - DNA, 120 bp, Artificial Sequence
  ENSG00000138095_69 (sequence is synthesized)
taaatatttttaaatagtataaaaacattttttgtttcctatatgtgcatgtgtatttttaaatttttattgactatgctttttaacctgtttttcttttttctcatttgagaatgagtg

SEQ ID NO: 342877 - DNA, 120 bp, Artificial Sequence
  ENSG00000138095_70 (sequence is synthesized)
aatgagtggtttaagattgtagatttcaaataatcataaattctttattcattaatgaacactaaattcatcatgtctttccactgtattttgagtacacttcaattaatacactttccc

SEQ ID NO: 342878 - DNA, 120 bp, Artificial Sequence
  ENSG00000138095_71 (sequence is synthesized)
catttttctgtaaaactaagctgttcttagttggaaagctgtttggagagtcttagttttgtctaagttacattgctttagttgctataaagctattaagttttcttcgataatggtagg

SEQ ID NO: 342879 - DNA, 120 bp, Artificial Sequence
  ENSG00000138095_72 (sequence is synthesized)
ggtgattgttaggctactcctcagtctaccactttatttcatatcatgattttgctacagttttatgagtcagttagctagaaggctattccatagttatttataatcaagtacttgaaa

SEQ ID NO: 342880 - DNA, 120 bp, Artificial Sequence
  ENSG00000138095_73 (sequence is synthesized)
ggggctaagtcgggataaagttgaaaatgcattaactaccccataaacccatcgtaagtcagggactgtctgtatttgtggaaatcagtaggcattattttttaatttagtgcaggaaaa

SEQ ID NO: 342881 - DNA, 120 bp, Artificial Sequence
  ENSG00000138095_74 (sequence is synthesized)
taatcacaaggcatctaatcataaaataaatttgttggtgttaaagttcaatgtttcagtttggaacattgatcctagaggatcaatgtttttagtgtttttgagaaagaattgttggga

SEQ ID NO: 342882 - DNA, 120 bp, Artificial Sequence
  ENSG00000138095_75 (sequence is synthesized)
tattaagttttgatgatcatttaatcttcgagttaaaatctggacaagtatgaacatggatagaagtcacacatttttggaaactctagaaaatctttcttatttgtattcatttgaact

SEQ ID NO: 342883 - DNA, 120 bp, Artificial Sequence
  ENSG00000138095_76 (sequence is synthesized)
taccaactttagtcactgaatgttatccctaaatggaactcatattgtcggtaacatttgtattttctctgtgacttaaagaagaaattcctcgggcctctaatatcttatatagtcaag

SEQ ID NO: 342884 - DNA, 120 bp, Artificial Sequence
  ENSG00000138095_77 (sequence is synthesized)
taaataatttttgggggtatctcatgaagtattaataattttctgtaatctaaaattaattattcatagctttttgtttatggccatttggtgctcatatttaaaagctggttttcaaaa

SEQ ID NO: 342885 - DNA, 120 bp, Artificial Sequence
  ENSG00000138095_78 (sequence is synthesized)
tatactgtgattcagaaaataattgaactgaacttaccgatcttttcttactttattctaagttctctatctctgtgcttctacattttatttggtaggtataattgaaatcctcaaagg

SEQ ID NO: 342886 - DNA, 120 bp, Artificial Sequence
  ENSG00000138100_0 (sequence is synthesized)
acagtaaaattaatctgctctctggggagtaagggacaaacagtgctacccacagagtgaacaagagagagtcatttgggaaacaaaaggagaattttacagagagagagggatagctaa

SEQ ID NO: 342887 - DNA, 120 bp, Artificial Sequence
  ENSG00000138100_1 (sequence is synthesized)
aactacgtgagcctggcgagggtgcagagcagaaagtagagactgtccgaagactgctatctgggacgagacaagttgttaaagggacaggagagaaagcagagctatttcaagagtgag

SEQ ID NO: 342888 - DNA, 120 bp, Artificial Sequence
  ENSG00000138100_2 (sequence is synthesized)
ccacagaagggaatccagaggccatctaagcgaggaagggtctacaggcagtgagtgaaggccaggagcagggcccaggccaggcacgaccaccgaggggatgaacttcacagtgggttt

SEQ ID NO: 342889 - DNA, 120 bp, Artificial Sequence
  ENSG00000138100_3 (sequence is synthesized)
caagccgctgctaggggatgcacacagcatggacaacctggagaagcagctcatctgccccatctgcctggagatgttctccaaaccagtggtgatcctgccctgccaacacaacctgtg

SEQ ID NO: 342890 - DNA, 120 bp, Artificial Sequence
  ENSG00000138100_4 (sequence is synthesized)
ccgcaaatgtgccaacgacgtcttccaggcctcgaatcctctatggcagtcccggggctccaccactgtgtcttcaggaggccgtttccgctgcccatcgtgcaggcatgaggttgtcct

SEQ ID NO: 342891 - DNA, 120 bp, Artificial Sequence
  ENSG00000138100_5 (sequence is synthesized)
ggacagacacggtgtctacggcctgcagcgaaacctgctagtggagaacattatcgacatttacaagcaggagtcatccaggccgctgcactccaaggctgagcagcacctcatgtgcga

SEQ ID NO: 342892 - DNA, 120 bp, Artificial Sequence
  ENSG00000138100_6 (sequence is synthesized)
ggagcatgaagaagagaagatcaatatttactgcctgagctgtgaggtgcccacctgctctctctgcaaggtcttcggtgcccacaaggactgtgaggtggccccactgcccaccattta

SEQ ID NO: 342893 - DNA, 120 bp, Artificial Sequence
  ENSG00000138100_7 (sequence is synthesized)
caaacgccagaagagtgagctcagcgatggcatcgcgatgctggtggcaggcaatgaccgcgtgcaagcagtgatcacacagatggaggaggtgtgccagactatcgaggacaatagccg

SEQ ID NO: 342894 - DNA, 120 bp, Artificial Sequence
  ENSG00000138100_8 (sequence is synthesized)
tgctggaggagcgcaagggtgagctgctgcaggcgctggcccgggagcaagaggagaagctgcagcgcgtccgcggcctcatccgtcagtatggcgaccacctggaggcctcctctaagc

SEQ ID NO: 342895 - DNA, 120 bp, Artificial Sequence
  ENSG00000138100_9 (sequence is synthesized)
tggtggagtctgccatccagtccatggaagagccacaaatggcgctgtatctccagcaggccaaggagctgatcaataaggtcggggccatgtcgaaggtggagctggcagggcggccgg

SEQ ID NO: 342896 - DNA, 120 bp, Artificial Sequence
  ENSG00000138100_10 (sequence is synthesized)
agccaggctatgagagcatggagcaattcaccgtaagggtggagcacgtggccgaaatgctgcggaccatcgacttccagccaggcgcttccggggaggaagaggaggtggccccagacg

SEQ ID NO: 342897 - DNA, 120 bp, Artificial Sequence
  ENSG00000138100_11 (sequence is synthesized)
gagaggagggcagcgcggggccggaggaagagcggccggatgggccttaaggcctgcgccgacccgaccctgctcgagagcccgcgctagagtcggggaggatctgcgcagagaccgcag

SEQ ID NO: 342898 - DNA, 120 bp, Artificial Sequence
  ENSG00000138100_12 (sequence is synthesized)
catcacccaaatcggcgccggccccgggaggatctcaataaagaactcgagcgtcccagacccgtatctcctttcgctgcccaaccccgcagcctgggcttcgaaggcgacccgcccacc

SEQ ID NO: 342899 - DNA, 120 bp, Artificial Sequence
  ENSG00000138100_13 (sequence is synthesized)
atcctgcccttcccagaacctgagaccgtctggggggcggaagccaaatgaacccctattgggcacctctgtgatgccaggagcgaactggtgagcccagcgccctgggaagagggccga

SEQ ID NO: 342900 - DNA, 120 bp, Artificial Sequence
  ENSG00000138100_14 (sequence is synthesized)
gggcggggcggtggtgccgggacctctgaggtcctggggatttggggacccttggggtccacatgcacctggctgacctggctgaaagccgctgtctcggagccccccacagcattttgt

SEQ ID NO: 342901 - DNA, 120 bp, Artificial Sequence
  ENSG00000138100_15 (sequence is synthesized)
tcccctcccgctggcccgggggccccaccttcccacgggttcccacgctgctgtgactgccctgcctctacgacaaaagccaacgggtcttcagtacttttattaaaaaatagtcacgca

SEQ ID NO: 342902 - DNA, 120 bp, Artificial Sequence
  ENSG00000138100_16 (sequence is synthesized)
ctagcccagtgtctggtatctggtggatgtttggagactgtctgttccttccccacttagtggtggagggcttctctccacctccttccagaatcactagaatgtgcttccgtacctctt

SEQ ID NO: 342903 - DNA, 120 bp, Artificial Sequence
  ENSG00000138100_17 (sequence is synthesized)
gatggttcaagccttctagattgctgtagatgcccttatggggggtgaggtggaagggccagccctctcctaggcaaccctggctggggtgaggggtgtagctctaggccaggtcccagc

SEQ ID NO: 342904 - DNA, 120 bp, Artificial Sequence
  ENSG00000138100_18 (sequence is synthesized)
ggaggtgcttttgccaggctgctgggtgtgcattccagctttgccgcaaaactttaatccagttatttaacttctctgtgctttggttttgtttaacctcataaaacagtgatgatgata

SEQ ID NO: 342905 - DNA, 120 bp, Artificial Sequence
  ENSG00000138100_19 (sequence is synthesized)
atgatacaccagctacctcatgggttctttttgagaattaaatggaataatgcaaataaaaaccagggctagggatatagacagcaatcagtgaagctactttaaagcattgtgttttta

SEQ ID NO: 342906 - DNA, 80 bp, Artificial Sequence
  ENSG00000138101_0 (sequence is synthesized)
ctgcgcgtgccgggcggagaagcggcgcgagccgggcgctgcgaacgttcgccgcgggggtggctccggggcctgagtag

SEQ ID NO: 342907 - DNA, 120 bp, Artificial Sequence
  ENSG00000138101_1 (sequence is synthesized)
ggggtggctccggggcctgagtaggcgctgccgctgcctcagccgagggggctgggccggagcgtgcggaggagtgaggccgcaggagaccttcccgacgacccctgctccggcggggaa

SEQ ID NO: 342908 - DNA, 120 bp, Artificial Sequence
  ENSG00000138101_2 (sequence is synthesized)
gtgagcaaggatgattgaggaaagtgggaacaagcggaagaccatggcagagaagaggcagctgttcatagaaatgcgtgctcagaattttgatgtcatacgactatcaacttacagaac

SEQ ID NO: 342909 - DNA, 120 bp, Artificial Sequence
  ENSG00000138101_3 (sequence is synthesized)
agcctgcaaattacgatttgtacaaaaacgatgcaaccttcatcttgttgatatctggaacatgattgaagccttccgagacaatggccttaatacactggaccataccaccgagatcag

SEQ ID NO: 342910 - DNA, 120 bp, Artificial Sequence
  ENSG00000138101_4 (sequence is synthesized)
tgtgtcccgcctcgaaactgtcatctcctccatctactatcagttgaacaagcgccttccttctactcaccaaattagtgtggaacaatctatcagcctcctcctcaactttatgattgc

SEQ ID NO: 342911 - DNA, 120 bp, Artificial Sequence
  ENSG00000138101_5 (sequence is synthesized)
tgcatatgacagtgagggccgaggcaagttgacggtattttcagttaaagctatgttagcaaccatgtgtggtggaaaaatgctggacaaattgagatatgttttctcccagatgtcaga

SEQ ID NO: 342912 - DNA, 120 bp, Artificial Sequence
  ENSG00000138101_6 (sequence is synthesized)
ttccaatggcttaatgatatttagcaagtttgaccagtttctgaaggaagttctgaagctcccaacagctgtctttgaagggccatcttttggttacacagagcactcagtccgcacctg

SEQ ID NO: 342913 - DNA, 120 bp, Artificial Sequence
  ENSG00000138101_7 (sequence is synthesized)
ttttccacagcagagaaagataatgctaaatatgtttttagacacaatgatggctgaccctcctccccagtgccttgtctggctacctctcatgcacaggcttgcccatgttgagaatgt

SEQ ID NO: 342914 - DNA, 120 bp, Artificial Sequence
  ENSG00000138101_8 (sequence is synthesized)
cttccatcccgtggagtgctcctactgccgatgtgagagtatgatgggtttccggtaccgatgccagcagtgccacaactatcagctctgccagaattgcttttggcgtggccatgccgg

SEQ ID NO: 342915 - DNA, 120 bp, Artificial Sequence
  ENSG00000138101_9 (sequence is synthesized)
cggccctcacagcaaccagcaccagatgaaggagcattcctcttggaaatctcctgcaaagaagctgagccatgcaattagtaaatctttggggtgtgtacccacgagagaacccccgca

SEQ ID NO: 342916 - DNA, 120 bp, Artificial Sequence
  ENSG00000138101_10 (sequence is synthesized)
tgaatgacaccatggttagccacatgtcctctggagtgcccactcccaccaagaggttacagtatagccaggatatacccagtcacttggccgatgagcatgcgctgatagcctcctatg

SEQ ID NO: 342917 - DNA, 120 bp, Artificial Sequence
  ENSG00000138101_11 (sequence is synthesized)
tggcccgtctgcagcactgtgcacgtgttctggacagtcctagccgactggatgaggaacaccgtcttatagctcgctatgctgcccggctggctgcagaagcaggaaacgtgactcgtc

SEQ ID NO: 342918 - DNA, 120 bp, Artificial Sequence
  ENSG00000138101_12 (sequence is synthesized)
ctcccactgacttgagctttaactttgatgccaacaaacaacaaagacagcttattgcagaactggaaaacaaaaacagagagatcctgcaggagattcagcgtctccgcctggaacacg

SEQ ID NO: 342919 - DNA, 120 bp, Artificial Sequence
  ENSG00000138101_13 (sequence is synthesized)
agcaggcctcccagcccacccctgagaaggcacagcagaaccccacgctgctggcagagctgcggctgctgaggcaaaggaaggatgaactggagcagaggatgtcggccctgcaggaga

SEQ ID NO: 342920 - DNA, 120 bp, Artificial Sequence
  ENSG00000138101_14 (sequence is synthesized)
gcaggcgggagctgatggtccagctggaagagctgatgaagttgctgaaggaggaagagcaaaagcaggcagctcaggccacagggtcaccacatacatcgcccacccatggaggcggcc

SEQ ID NO: 342921 - DNA, 120 bp, Artificial Sequence
  ENSG00000138101_15 (sequence is synthesized)
ggccaatgcccatgccagtgcgctccacgtctgccggctccacccccacccactgtccgcaggactcgctgagcggagtcgggggagacgtgcaggaggccttcgcacaaggtacgagga

SEQ ID NO: 342922 - DNA, 120 bp, Artificial Sequence
  ENSG00000138101_16 (sequence is synthesized)
gaaacctccgcaatgacctgctggtggcagctgactccatcaccaacaccatgtcatccctggtgaaggagctccattcagcagaggaaggtgcagaggaagaagaagagaagatgcaga

SEQ ID NO: 342923 - DNA, 120 bp, Artificial Sequence
  ENSG00000138101_17 (sequence is synthesized)
atgggaaagacagaggttagcagaggagccggacacagaggaagctcaggcacagaggacgaggagcaagctggcgccgacatggcgaaggcaaggtcttcccccagaggcacattcctc

SEQ ID NO: 342924 - DNA, 120 bp, Artificial Sequence
  ENSG00000138101_18 (sequence is synthesized)
tccatctttccaccgcacacctggaccaggcttgcaggctgccagacgtcactccacccgccagggagaggggagccagagccggtgggaagcggggaggggctgcgtggcacagctagt

SEQ ID NO: 342925 - DNA, 120 bp, Artificial Sequence
  ENSG00000138101_19 (sequence is synthesized)
gggcctccccctgcacagccctgcatgtactagcaccttcatcactcccctcagggcatggtctcatctccgcatcaggaattcacctggaggttgaaaagagaaaagaaaaagcaccaa

SEQ ID NO: 342926 - DNA, 120 bp, Artificial Sequence
  ENSG00000138101_20 (sequence is synthesized)
acttgttgaaaacagatttctgggacaacatcagacccagtgaactggaatttctgaagataggatcttgagaagctacatttttattccagctgattcttatcatcaagcaagtttggg

SEQ ID NO: 342927 - DNA, 120 bp, Artificial Sequence
  ENSG00000138101_21 (sequence is synthesized)
caatagcctgacaaggaagctaacgagtaaagtgtaggactaccctgaagagagaagttagggacttaataaatcagagtggcctgataacacattacccgcatggagactcaggacctg

SEQ ID NO: 342928 - DNA, 120 bp, Artificial Sequence
  ENSG00000138101_22 (sequence is synthesized)
gaattaaggagctgtctgcatcaaagcggtagacagacaccatcgtcctattttttcaccctgcttgcattcccattaactcctcttcagcaaaacaaaaaactcaagccttactggttc

SEQ ID NO: 342929 - DNA, 120 bp, Artificial Sequence
  ENSG00000138101_23 (sequence is synthesized)
tccctacctcctgatagctacctacctagactgcttggcagacacagttctgtaggctactttcttatcaagagttggcaattagaagaggcccttggagaggaggtgggagtgctcctt

SEQ ID NO: 342930 - DNA, 120 bp, Artificial Sequence
  ENSG00000138101_24 (sequence is synthesized)
acagcaaccagcaccagatgaaggagcattcctcttgggtaactgctttgtgtttcatctgtgtccctgagtgttaatctgtttgatcagtaacagcacctgggccagtttcctcatgga

SEQ ID NO: 342931 - DNA, 120 bp, Artificial Sequence
  ENSG00000138101_25 (sequence is synthesized)
tgcctaccaaataagggtgtgatatagtaaaatcttaacactaacatttatgccaggattgcaaaaatgttgtgcttcctcacttgattttaaaagcagaatttttaaaaattccaggaa

SEQ ID NO: 342932 - DNA, 120 bp, Artificial Sequence
  ENSG00000138101_26 (sequence is synthesized)
acaaagatagtacatttgaaatggtctcttttattcagtaaaatggaatgttgcagtgctctcttttcaaagcaaaaagtgagtttctttttattttaaaactgtacaggctgggcacga

SEQ ID NO: 342933 - DNA, 120 bp, Artificial Sequence
  ENSG00000138101_27 (sequence is synthesized)
tgaatctcatcccaaggaaacatcagacaaactccaatgaaggaatttctacaacctaactgaactttacacttcaaaagtgtcaataatatgaaagattaaaaaagatgaaatgttcta

SEQ ID NO: 342934 - DNA, 120 bp, Artificial Sequence
  ENSG00000138101_28 (sequence is synthesized)
ggttaaaagagtttaaagagacatgaaaagctgaatgaactcacaagccaggattttctgttgctataacggacgttattgggacaattggaaaaatctgaataaagtttatagactgga

SEQ ID NO: 342935 - DNA, 120 bp, Artificial Sequence
  ENSG00000138101_29 (sequence is synthesized)
aaacacagtaattcctgatactaagaagaggctggggtgccttaagtaatacgcatgcaggcgttgatggggtagagatctgaagtagtcctgccaagaactgggtttacttctttgtga

SEQ ID NO: 342936 - DNA, 120 bp, Artificial Sequence
  ENSG00000138101_30 (sequence is synthesized)
atgttactactcttacacagaaacctcatatgaattatcatcctctgacttaaggataacagtcagtctgggagacgtttggtgctcagaattttgatgtcatacgactatcaacttaca

SEQ ID NO: 342937 - DNA, 120 bp, Artificial Sequence
  ENSG00000138101_31 (sequence is synthesized)
attcaagttgagaattggatggggacacagccaaaccgtatcagggattaatacctgatttctttaatatgaaattgaatattcatgtatattttatgtataagctaactgttcttatgt

SEQ ID NO: 342938 - DNA, 120 bp, Artificial Sequence
  ENSG00000138101_32 (sequence is synthesized)
cctttattacagcctttcattacatttattttctaaattatatttagtaacatgtttatccatataaaacagtagagatatgggaagttacctcaactaatccaggactctgcagagaaa

SEQ ID NO: 342939 - DNA, 120 bp, Artificial Sequence
  ENSG00000138101_33 (sequence is synthesized)
ctttcctcatataaatgtttctcctcttctccccgcacatcatctctgaagagggttttatgtgtaaaacccccagcggttctccccatggtgttgtaaaatggcctaaaagttcaaggc

SEQ ID NO: 342940 - DNA, 120 bp, Artificial Sequence
  ENSG00000138101_34 (sequence is synthesized)
atgtttacccagtagagcatgttcttacttaaaaccagagcttgtaagtacccatctgttgtgcgcattgaagtgtgcatgattagccaggctaccattgcattttcctgctctttcatt

SEQ ID NO: 342941 - DNA, 120 bp, Artificial Sequence
  ENSG00000138101_35 (sequence is synthesized)
ctctgttgttgtgtgtctggagtgattttaattgcttgaaacaactttcagggtgctggggtgacctcatgtcatgaatgaatgtgcatgaaaatgaggacttcttttgctaactataga

SEQ ID NO: 342942 - DNA, 120 bp, Artificial Sequence
  ENSG00000138101_36 (sequence is synthesized)
agaatattaagtgagtggaagagaggggcctcatctgcagggtagccacacagtgttaataaggatgagaatagttttaatattaactaaaagtcacaataattttatgatactttttta

SEQ ID NO: 342943 - DNA, 120 bp, Artificial Sequence
  ENSG00000138101_37 (sequence is synthesized)
agatcaccccaaatcactgtttcccgaggcgcctaatagcgaacctgtccaggaggtcaccctggacaggaaagaagtgtcccgagacgaggatgccggtgacgaatacttgcccttaaa

SEQ ID NO: 342944 - DNA, 120 bp, Artificial Sequence
  ENSG00000138101_38 (sequence is synthesized)
gtttcaactgccctcgtataagctgcctttatgaattaaggagctgtctgcatcaaagcgtcctcctcgccctctgactaatatgaatgacaccatggttagccacatgtcctctggagt

SEQ ID NO: 342945 - DNA, 120 bp, Artificial Sequence
  ENSG00000138101_39 (sequence is synthesized)
tccctggtgaaggagctccattcaggtgaaacccagagctcccagccagcttcctggcctcccctgccttgcccgcgcccttctcacttccttgccagcaccggcagaacctcaccaccc

SEQ ID NO: 342946 - DNA, 120 bp, Artificial Sequence
  ENSG00000138101_40 (sequence is synthesized)
ctgtctccaccactctgtgccagcctcttctttccctcccattcttggtcttgttcttaggatgttctctctctctgccctgcacgcccccttccttttttccttttcttcctctctcca

SEQ ID NO: 342947 - DNA, 120 bp, Artificial Sequence
  ENSG00000138101_41 (sequence is synthesized)
gtcttggaagcagcctaactccttcctttcaagtatgatcttgtaccactgaactgaggcccactggctggctctggttgatggagaaaaagtactttcttccttcctcaaagaggtcag

SEQ ID NO: 342948 - DNA, 120 bp, Artificial Sequence
  ENSG00000138101_42 (sequence is synthesized)
tttttcttttattcattgtgtgccggtcattaacagtctaattgccttgaaacctagctttctaaaaatttgatctctacttaaaagtttttaagctaaatccagattgcttccctcttt

SEQ ID NO: 342949 - DNA, 120 bp, Artificial Sequence
  ENSG00000138101_43 (sequence is synthesized)
catcgttttcttttataacagaaatactcttcctattcagtctttatttttctttttttctcactataaattggctgttgtagaattttttcttcaataccctgtttcctgcttatcacc

SEQ ID NO: 342950 - DNA, 120 bp, Artificial Sequence
  ENSG00000138101_44 (sequence is synthesized)
tacttactactggaccctgttttctctgagcagtttaatatggtttctttactattaatctaaatttgggctaattttatatatttttcaaaaggcattgattttctaaagagtttttta

SEQ ID NO: 342951 - DNA, 120 bp, Artificial Sequence
  ENSG00000138101_45 (sequence is synthesized)
atcattaattcactctggtaatataagtaatacctttatatagtcatctaaactttccaaagcacttttacctattattctcagaacagtccaggaagtaggcaaaacagacattatcac

SEQ ID NO: 342952 - DNA, 120 bp, Artificial Sequence
  ENSG00000138101_46 (sequence is synthesized)
cattttatgaggtattggatgctaaatgacttgctcagcgtctcataactggtaagtagcaggatcaggtctgaaatccatttcacctggccttagatccatctttgagggtctctttat

SEQ ID NO: 342953 - DNA, 120 bp, Artificial Sequence
  ENSG00000138101_47 (sequence is synthesized)
tggggagcccgagctcatggatcagccgccccccactttgtttctgcattcctccctgccaccacctttcccagagctttcggacccgaggtccctgtacctacttttcccatctgacag

SEQ ID NO: 342954 - DNA, 120 bp, Artificial Sequence
  ENSG00000138101_48 (sequence is synthesized)
ctccgatgagcagacaggatatcaggagctagactagcagagttcctgcacatactggagatgcacgtgtttcctatccttttctccctctgttgttgttttaattgacccaccgttttt

SEQ ID NO: 342955 - DNA, 120 bp, Artificial Sequence
  ENSG00000138101_49 (sequence is synthesized)
aagaagtcctagctgactggtatactatgacaatacaatagaatggagtcatttcctagcgtttggaaactaaatggtaaatctagttgagcatttctgtttgccttttttcaggtgctc

SEQ ID NO: 342956 - DNA, 120 bp, Artificial Sequence
  ENSG00000138101_50 (sequence is synthesized)
caccctccacagcctcatgttatgctcctgtgtccttcacagtctcccctcccataccctgccatcccggtgtgggggctgtaaatccagtttgcatccataaagagccctggtgcaagg

SEQ ID NO: 342957 - DNA, 120 bp, Artificial Sequence
  ENSG00000138101_51 (sequence is synthesized)
ctggacagcaatggccctcagagaacagaacaggctcaggaggggccaggcagtgctcgagcctcgggtgagcaagcgcagggcttttcaaagcagaccatctgcaggagggggaccgcc

SEQ ID NO: 342958 - DNA, 120 bp, Artificial Sequence
  ENSG00000138101_52 (sequence is synthesized)
ctcactcaaggcgcagtcatgttcccttggggaactttcagagctgagtgggctttgcccccctcatgtaactgctccctggatttaaggagttttgattccattttttaatgactttcc

SEQ ID NO: 342959 - DNA, 120 bp, Artificial Sequence
  ENSG00000138101_53 (sequence is synthesized)
tggctgcctcgggttggctacagtagtagaaagtatgactctaccctgctgtcatacctgggtgggaaaagtcaacaaacgagtaacgggagaagcaaggaagcccctggggtgggttgg

SEQ ID NO: 342960 - DNA, 120 bp, Artificial Sequence
  ENSG00000138101_54 (sequence is synthesized)
atttccagcaacgtcaaccagaaactccagcataactactttctatggatgccagaatcacctttttccagccattattcagttgtatcatttagtgctcagaattttgatgtcatacga

SEQ ID NO: 342961 - DNA, 120 bp, Artificial Sequence
  ENSG00000138107_0 (sequence is synthesized)
gtcagtggcgctagcggcggacccggctgggcagttccttccccagaaggagagattcctctgccatggagtcctacgatgtgatcgccaaccagcctgtcgtgatcgacaacggatccg

SEQ ID NO: 342962 - DNA, 120 bp, Artificial Sequence
  ENSG00000138107_1 (sequence is synthesized)
gtgtgattaaagctggttttgctggtgatcagatccccaaatactgctttccaaactatgtgggccgacccaagcacgttcgtgtcatggcaggagcccttgaaggcgacatcttcattg

SEQ ID NO: 342963 - DNA, 120 bp, Artificial Sequence
  ENSG00000138107_2 (sequence is synthesized)
gccccaaagctgaggagcaccgagggctgctttcaatccgctatcccatggagcatggcatcgtcaaggattggaacgacatggaacgcatttggcaatatgtctattctaaggaccagc

SEQ ID NO: 342964 - DNA, 120 bp, Artificial Sequence
  ENSG00000138107_3 (sequence is synthesized)
tgcagactttctcagaggagcatcctgtgctcctgactgaggcgcctttaaacccacgaaaaaaccgggaacgagctgccgaagttttcttcgagaccttcaatgtgcccgctcttttca

SEQ ID NO: 342965 - DNA, 120 bp, Artificial Sequence
  ENSG00000138107_4 (sequence is synthesized)
tctccatgcaagctgtactcagcctttacgctacaggcaggaccacaggggtggtgctggattctggggatggagtcacccatgctgtgcccatctatgagggctttgccatgccccact

SEQ ID NO: 342966 - DNA, 120 bp, Artificial Sequence
  ENSG00000138107_5 (sequence is synthesized)
ccatcatgcgcatcgacatcgcgggccgggacgtctctcgcttcctgcgcctctacctgcgtaaggagggctacgacttccactcatcctctgagtttgagattgtcaaggccataaaag

SEQ ID NO: 342967 - DNA, 120 bp, Artificial Sequence
  ENSG00000138107_6 (sequence is synthesized)
aaagagcctgttacctatccataaacccccaaaaggatgagacgctagagacagagaaagctcagtactacctgcctgatggcagcaccattgagattggtccttcccgattccgggccc

SEQ ID NO: 342968 - DNA, 120 bp, Artificial Sequence
  ENSG00000138107_7 (sequence is synthesized)
ctgagttgctcttcaggccagatttgattggagaggagagtgaaggcatccacgaggtcctggtgttcgccattcagaagtcagacatggacctgcggcgcacgcttttctctaacattg

SEQ ID NO: 342969 - DNA, 120 bp, Artificial Sequence
  ENSG00000138107_8 (sequence is synthesized)
tcctctcaggaggctctaccctgttcaaaggttttggtgacaggctcctgagtgaagtgaagaaactagctccaaaagatgtgaagatcaggatatctgcacctcaggagagactgtatt

SEQ ID NO: 342970 - DNA, 120 bp, Artificial Sequence
  ENSG00000138107_9 (sequence is synthesized)
ccacgtggattgggggctccatccttgcctccctggacacctttaagaagatgtgggtctccaaaaaggaatatgaggaagacggtgcccgatccatccacagaaaaaccttctaatgtc

SEQ ID NO: 342971 - DNA, 120 bp, Artificial Sequence
  ENSG00000138107_10 (sequence is synthesized)
gggacatcatcttcacctctctctgaagttaactccactttaaaactcgctttcttgagtcggagtgtttgcgaggaactgcctgtgtgtgagtgcgtgtgtggatatgagtgtgtgtgc

SEQ ID NO: 342972 - DNA, 120 bp, Artificial Sequence
  ENSG00000138107_11 (sequence is synthesized)
gcctgaggcctggggttgaccactaactggctcctgacagggaagagcgctggcagaggctgtgctccctcctcaggtggcctctggctggctgtgggggactccgtttactaccacagg

SEQ ID NO: 342973 - DNA, 120 bp, Artificial Sequence
  ENSG00000138107_12 (sequence is synthesized)
gagacagagggaggtaagccatcccccgggagaccttgctgctgaccatcctaggctgggctggccccaccctcacccccacccccagggtgccctgaggccccaggcagctgctgcctc

SEQ ID NO: 342974 - DNA, 120 bp, Artificial Sequence
  ENSG00000138107_13 (sequence is synthesized)
cactatcgatgcctcctgactgcacactgaggactgggactggggttgagttctgtctggttttgttgccattttggtttgggaggctggaaaagcaccccaagagctattacagagact

SEQ ID NO: 342975 - DNA, 120 bp, Artificial Sequence
  ENSG00000138107_14 (sequence is synthesized)
ggagtcaggagagagcaggaggccctcatgttcaccagggaacaggaccacaccggccactggaggagggcaggagcagtcctcactctgaatggctgcagagttaatgttcccagccca

SEQ ID NO: 342976 - DNA, 120 bp, Artificial Sequence
  ENSG00000138107_15 (sequence is synthesized)
gtcccctttcgggggccttgggagagtttaaggcacctgctggttccaggacctcgctttccatctgttcttgttgcaatgccatcttcaaaccgttttatttattgaagtgtttgttca

SEQ ID NO: 342977 - DNA, 120 bp, Artificial Sequence
  ENSG00000138107_16 (sequence is synthesized)
gttaggggctggagagagggagcttgctgcctcctgccttgctacactaatgtttacagcacctaagcttagcctccagggccccacctctcccagctgatggtgagctgacagtgtcca

SEQ ID NO: 342978 - DNA, 120 bp, Artificial Sequence
  ENSG00000138107_17 (sequence is synthesized)
caggttccaggaccatttgagattggaagctacactcaaagacactcccaccaggctctttctcccttttcctcttgctcactgccctggaatcaacaggctggttgctggttagatttt

SEQ ID NO: 342979 - DNA, 120 bp, Artificial Sequence
  ENSG00000138107_18 (sequence is synthesized)
ctgaaacaggaggtaaaatttttctttggcagaggcccctaagcaagggaggggtgttggagagccagtgcccttaagactggagaaagctgcaatttaccaagttgccttttgccactg

SEQ ID NO: 342980 - DNA, 120 bp, Artificial Sequence
  ENSG00000138107_19 (sequence is synthesized)
tagctgaccaggggactaggttgtagaggtgggaaggccccctctgggctgatcttgtgccattcttgaccttggacctgcttggttaaggagggagtgggccagaccagagtgccagga

SEQ ID NO: 342981 - DNA, 120 bp, Artificial Sequence
  ENSG00000138107_20 (sequence is synthesized)
gctaatggagccaggcctgactcctaggagtggtccaaaggccttcagcctagatggtgcaaagctggggccagcctgtcttcaccggcaccctcacctgtgacaccaagacccacccca

SEQ ID NO: 342982 - DNA, 120 bp, Artificial Sequence
  ENSG00000138107_21 (sequence is synthesized)
atcccagacttcacacagtattctcccccacgccgtcctatgaccaaaggcccctgccaggtgtgggccacagcagcaggtatgtgtgaaagcaacgtagcgccccgcggactgcagtgc

SEQ ID NO: 342983 - DNA, 120 bp, Artificial Sequence
  ENSG00000138107_22 (sequence is synthesized)
gcttaaccaactcacctcccttctcttagcccaagcctgtccctcgcacagcctcgcacaaaccacattgcctggtggggcccagtgtactgaaataaagtcgttccgatagacacgtca

SEQ ID NO: 342984 - DNA, 120 bp, Artificial Sequence
  ENSG00000138107_23 (sequence is synthesized)
aagagagggaagaagttgctgttgaagtggcagtggaagacctgcaacccgacagggatggtcccagaagaggcgacagcttcacctcaggaccacccacccctcccaagccactgagga

SEQ ID NO: 342985 - DNA, 120 bp, Artificial Sequence
  ENSG00000138107_24 (sequence is synthesized)
gtttgggatcagcccaggagctcttcactcaatagctggtgctgaaacacgtgtagggctgctccccaccgcctgcacgttaaaatcacctgaggagctgtgcaataataccgaggccca

SEQ ID NO: 342986 - DNA, 83 bp, Artificial Sequence
  ENSG00000138107_25 (sequence is synthesized)
tctcaaactcctgaccaaattgcagcatgagctaccgcgcccactcctggtttttttatttttatttttttaacatccttgaa

SEQ ID NO: 342987 - DNA, 120 bp, Artificial Sequence
  ENSG00000138107_26 (sequence is synthesized)
ctcctggtttttttatttttatttttttaacatccttgaagaagtcataatacatttaaaacatttgtctttgtaagtaaactgaaacctcctgccacctgtggctatagggaaaactcg

SEQ ID NO: 342988 - DNA, 120 bp, Artificial Sequence
  ENSG00000138107_27 (sequence is synthesized)
agctgggtaggaccagaaccatatgagtggtagaaggagaaagatgcctgggcctgggctgaacttaggttgtggtctcagacctaggatccaggggccaagtttccaagcttgcccatc

SEQ ID NO: 342989 - DNA, 120 bp, Artificial Sequence
  ENSG00000138107_28 (sequence is synthesized)
aggaaggtggagcggttaagaactcatatgctaaatgccacccagtgaaggccaacagagacctcactgcccctgcttctgggcagcagctatagtgaccattggggccatcacaacgtt

SEQ ID NO: 342990 - DNA, 120 bp, Artificial Sequence
  ENSG00000138107_29 (sequence is synthesized)
tagacaggtttgtgcagcagcacattcctcccctgggcctttgactggatgtgcaccagatttcctgccagcctgactgtcttgcttggatctgcagagagcctgttacctatccataaa

SEQ ID NO: 342991 - DNA, 120 bp, Artificial Sequence
  ENSG00000138107_30 (sequence is synthesized)
cccccaaaaggatgagacgctagagacagagaaagctcagtactacctgcctgatggcagcaccattgaggtaggtggcctgccttctttcttcggtccccttaggtccacaaaagctct

SEQ ID NO: 342992 - DNA, 120 bp, Artificial Sequence
  ENSG00000138107_31 (sequence is synthesized)
gggcccaaccagaattctccatcagggtctggagtctggcaggccagtccctttacaccaagcttgtccaacccctggcccatgggctgcacgtggcccaggatggctttcagtaaggcc

SEQ ID NO: 342993 - DNA, 120 bp, Artificial Sequence
  ENSG00000138107_32 (sequence is synthesized)
caacacaaagtcgtaaactttcttaaaacattatgagattcttttgcaatttttttttttagctcagcagctgtcattagtgttagtgtatattatgtgtggcccaagacaattcttctt

SEQ ID NO: 342994 - DNA, 120 bp, Artificial Sequence
  ENSG00000138107_33 (sequence is synthesized)
gcccagggaagccaaaagactggacaccccagccttacaccctctctctggagcagcagagctcctgagcatgagtggccctgtctcctgcagaggaggcagccagaactttgctccctc

SEQ ID NO: 342995 - DNA, 120 bp, Artificial Sequence
  ENSG00000138107_34 (sequence is synthesized)
gctccctcccgctagaggggaggaagctcctaagggattgtcccacatcagtatgagattaggaagtgggatggttagtgccatccttcaccacacctgggtgcagtgtagggtgagtta

SEQ ID NO: 342996 - DNA, 120 bp, Artificial Sequence
  ENSG00000138107_35 (sequence is synthesized)
ccactcccttgaacccccattgctaggaagacgtttccatgagcaaataaatccatgtactgatgccaaagacctcttggctggaaaatgccagagcgagaaggaaatataggagcctcc

SEQ ID NO: 342997 - DNA, 120 bp, Artificial Sequence
  ENSG00000138107_36 (sequence is synthesized)
cctcactagtttccaggaggcctatctttgttcctttaagcccttgacatgtagagtctgtcttgagcctggccttcatagccacccagttactaagtgacgtgcagaggggcgtcttcc

SEQ ID NO: 342998 - DNA, 120 bp, Artificial Sequence
  ENSG00000138109_0 (sequence is synthesized)
gtcttaacaagaagagaaggcttcaatggattctcttgtggtccttgtgctctgtctctcatgtttgcttctcctttcactctggagacagagctctgggagaggaaaactccctcctgg

SEQ ID NO: 342999 - DNA, 120 bp, Artificial Sequence
  ENSG00000138109_1 (sequence is synthesized)
ccccactcctctcccagtgattggaaatatcctacagataggtattaaggacatcagcaaatccttaaccaatctctcaaaggtctatggccctgtgttcactctgtattttggcctgaa

SEQ ID NO: 343000 - DNA, 120 bp, Artificial Sequence
  ENSG00000138109_2 (sequence is synthesized)
acccatagtggtgctgcatggatatgaagcagtgaaggaagccctgattgatcttggagaggagttttctggaagaggcattttcccactggctgaaagagctaacagaggatttggaat

SEQ ID NO: 343001 - DNA, 120 bp, Artificial Sequence
  ENSG00000138109_3 (sequence is synthesized)
tgttttcagcaatggaaagaaatggaaggagatccggcgtttctccctcatgacgctgcggaattttgggatggggaagaggagcattgaggaccgtgttcaagaggaagcccgctgcct

SEQ ID NO: 343002 - DNA, 120 bp, Artificial Sequence
  ENSG00000138109_4 (sequence is synthesized)
tgtggaggagttgagaaaaaccaaggcctcaccctgtgatcccactttcatcctgggctgtgctccctgcaatgtgatctgctccattattttccataaacgttttgattataaagatca

SEQ ID NO: 343003 - DNA, 120 bp, Artificial Sequence
  ENSG00000138109_5 (sequence is synthesized)
gcaatttcttaacttaatggaaaagttgaatgaaaacatcaagattttgagcagcccctggatccagatctgcaataatttttctcctatcattgattacttcccgggaactcacaacaa

SEQ ID NO: 343004 - DNA, 120 bp, Artificial Sequence
  ENSG00000138109_6 (sequence is synthesized)
attacttaaaaacgttgcttttatgaaaagttatattttggaaaaagtaaaagaacaccaagaatcaatggacatgaacaaccctcaggactttattgattgcttcctgatgaaaatgga

SEQ ID NO: 343005 - DNA, 120 bp, Artificial Sequence
  ENSG00000138109_7 (sequence is synthesized)
gaaggaaaagcacaaccaaccatctgaatttactattgaaagcttggaaaacactgcagttgacttgtttggagctgggacagagacgacaagcacaaccctgagatatgctctccttct

SEQ ID NO: 343006 - DNA, 120 bp, Artificial Sequence
  ENSG00000138109_8 (sequence is synthesized)
cctgctgaagcacccagaggtcacagctaaagtccaggaagagattgaacgtgtgattggcagaaaccggagcccctgcatgcaagacaggagccacatgccctacacagatgctgtggt

SEQ ID NO: 343007 - DNA, 120 bp, Artificial Sequence
  ENSG00000138109_9 (sequence is synthesized)
gcacgaggtccagagatacattgaccttctccccaccagcctgccccatgcagtgacctgtgacattaaattcagaaactatctcattcccaagggcacaaccatattaatttccctgac

SEQ ID NO: 343008 - DNA, 120 bp, Artificial Sequence
  ENSG00000138109_10 (sequence is synthesized)
tgtttgaccctcatcactttctggatgaaggtggcaattttaagaaaagtaaatacttcatgcctttctcagcaggaaaacggatttgtgtgggagaagccctggccggcatggagctgt

SEQ ID NO: 343009 - DNA, 120 bp, Artificial Sequence
  ENSG00000138109_11 (sequence is synthesized)
ttttattcctgacctccattttacagaactttaacctgaaatctctggttgacccaaagaaccttgacaccactccagttgtcaatggatttgcctctgtgccgcccttctaccagctgt

SEQ ID NO: 343010 - DNA, 120 bp, Artificial Sequence
  ENSG00000138109_12 (sequence is synthesized)
gcttcattcctgtctgaagaagagcagatggcctggctgctgctgtgcagtccctgcagctctctttcctctggggcattatccatctttcactatctgtaatgccttttctcacctgtc

SEQ ID NO: 343011 - DNA, 120 bp, Artificial Sequence
  ENSG00000138109_13 (sequence is synthesized)
atctcacattttcccttccctgaagatctagtgaacattcgacctccattacggagagtttcctatgtttcactgtgcaaatatatctgctattctccatactctgtaacagttgcattg

SEQ ID NO: 343012 - DNA, 120 bp, Artificial Sequence
  ENSG00000138109_14 (sequence is synthesized)
actgtcacataatgctcatacttatctaatgttgagttattaatatgttattattaaatagagaaatatgatttgtgtattataattcaaaggcatttcttttctgcatgttctaaataa

SEQ ID NO: 343013 - DNA, 120 bp, Artificial Sequence
  ENSG00000138109_15 (sequence is synthesized)
aaagcattattatttgctgagtcagtttattagaccttccttcttttatgcataatgtaggtcagaaattaaagaaaatagagttccaggaggccatgctggttctcaaaatgataagga

SEQ ID NO: 343014 - DNA, 120 bp, Artificial Sequence
  ENSG00000138109_16 (sequence is synthesized)
cagaaaggacaaagaggaagagggtagggaagctattttgggtgagtgttagagttacttgaggattggatttgaaagtgagaaactgtgtccaggggcagctctaacctctagggaaat

SEQ ID NO: 343015 - DNA, 120 bp, Artificial Sequence
  ENSG00000138109_17 (sequence is synthesized)
ggcagctctaacctctagggaaatattcagaggatcagtcaaagggtggaatggacattaaatgctagaattcttatatccacattggtgttcctttttttttgagacaaagtcttgctc

SEQ ID NO: 343016 - DNA, 120 bp, Artificial Sequence
  ENSG00000138109_18 (sequence is synthesized)
tggtgttactttgaagtgtcattactttatctctaaataaagaatcagattacttttattacttcatgtttccaacttagaatgatgtaatgaagtataaatacatgctttcatatcgct

SEQ ID NO: 343017 - DNA, 120 bp, Artificial Sequence
  ENSG00000138109_19 (sequence is synthesized)
acaaaagcttagttatgtgactgcttgtgaatttgtgatttgttgactagttctgtgtttactaaggatgtttaactggtcaatcagtaatgcttgagaagcactttaagtttttattgt

SEQ ID NO: 343018 - DNA, 120 bp, Artificial Sequence
  ENSG00000138109_20 (sequence is synthesized)
tgtggaggagttgagaaaaaccaagggtgggtgaccctactccatatcactgaccttactggactactatcttctctactgacattcttggaaacatttcaggggtggccatatctttca

SEQ ID NO: 343019 - DNA, 120 bp, Artificial Sequence
  ENSG00000138109_21 (sequence is synthesized)
gggtataaaaggttcatttaatcccatgttctcctgaactttgcttttttgctttcaaataagaaatgatgaatatagattttgagttcattttttgaaagagttaaagagcagtgtttt

SEQ ID NO: 343020 - DNA, 120 bp, Artificial Sequence
  ENSG00000138109_22 (sequence is synthesized)
tcccattacctattccagaacatgtcaccagagaatacttgacaagtcaacatggtgggaatggccctatcatacccatatggagcatgaaccaaatggcatgtgcttttatttaattgg

SEQ ID NO: 343021 - DNA, 120 bp, Artificial Sequence
  ENSG00000138109_23 (sequence is synthesized)
actgtgtttgtatggtcagcctcactgacttctctggggtttcttttaggcccgtgcttgccattctggccagtaatgacattctacagtttttattgcttaggcatatcttagtgcagt

SEQ ID NO: 343022 - DNA, 120 bp, Artificial Sequence
  ENSG00000138109_24 (sequence is synthesized)
agtgcagttctcatcaattattatttctctgtaaacacagcattattttaaaaatagtattaattatttcttgttactgtattgatttatatattttcagtaaatacatcctgtagcata

SEQ ID NO: 343023 - DNA, 120 bp, Artificial Sequence
  ENSG00000138109_25 (sequence is synthesized)
aaatacccaaatgtcaatttataaaatgatttatttaacaagattttacttattagtaataactctgtaatctgcattccctatgtatgatttggctctgtttcagttttgcttatctct

SEQ ID NO: 343024 - DNA, 120 bp, Artificial Sequence
  ENSG00000138109_26 (sequence is synthesized)
ttccaaccatatttatgaaattttggcttagaaatttatgttaattattttttttccatggccaactctactcatctatgaagttttacaatgaatctgtttatcagcttggataccaaa

SEQ ID NO: 343025 - DNA, 120 bp, Artificial Sequence
  ENSG00000138109_27 (sequence is synthesized)
aagtgttgggattacaggcaggagccaccacacctggccgtttgtttaaaatagagtaaatagacctgctgaatatgttgatgtgagtattaattgtaatctgcatagcaattgtctgac

SEQ ID NO: 343026 - DNA, 120 bp, Artificial Sequence
  ENSG00000138109_28 (sequence is synthesized)
tgaccattgccttgaacatcacaggccatctgagtggcaagtataatcatcatcatgtttctatttaaaattcagaaatatttgaagcctgtgtggctgaataaaagcatacaaatacaa

SEQ ID NO: 343027 - DNA, 120 bp, Artificial Sequence
  ENSG00000138109_29 (sequence is synthesized)
tgaaaatatcatgctaaatcaggcttagcaaatggacaaaatagtaacttcgtttgctgttatctctgtctactttcctagctctcaaaggtctatggccctgtgttcactctgtatttt

SEQ ID NO: 343028 - DNA, 120 bp, Artificial Sequence
  ENSG00000138111_0 (sequence is synthesized)
ggctcgcacctggctcccgccagccgtgggattaggcttcgccggctacgattgcggcccccatcttctgacttttcctcgtgtgacccatcttttcaaattcccttacctgaggaagga

SEQ ID NO: 343029 - DNA, 120 bp, Artificial Sequence
  ENSG00000138111_1 (sequence is synthesized)
gcccgattacaaggatatttacctgctcctaccctgatctagggacgaggatgggaagaccgcctgtggccatgagccctccccggtgctcctggggctaaggctggggctgcagccatg

SEQ ID NO: 343030 - DNA, 120 bp, Artificial Sequence
  ENSG00000138111_2 (sequence is synthesized)
gggctgggtcagccccaggcctggttgctgggtctgcccacagctgtggtctatggctccctggctctcttcaccaccatcctgcacaatgtcttcctgctctactatgtggacaccttt

SEQ ID NO: 343031 - DNA, 120 bp, Artificial Sequence
  ENSG00000138111_3 (sequence is synthesized)
gtctcagtgtacaagatcaacaaaatggccttctgggtcggagagacagtgtttctcctctggaacagcctcaatgaccccctcttcggttggctcagtgaccggcagttcctcagctcc

SEQ ID NO: 343032 - DNA, 120 bp, Artificial Sequence
  ENSG00000138111_4 (sequence is synthesized)
cagccccggtcaggcgccgggctctcctcaagggctgtggtgctggcccgggtgcaggccctgggctggcatgggccgctgctggcgctgtcgttcctggcgttctgggtgccctgggcc

SEQ ID NO: 343033 - DNA, 120 bp, Artificial Sequence
  ENSG00000138111_5 (sequence is synthesized)
ccagctggcctgcagttcttgctgtgcctgtgcctctatgatggcttcctgacgctcgtggacctgcaccaccatgccttgctggccgacctggccctctcagcccacgaccgcacccac

SEQ ID NO: 343034 - DNA, 120 bp, Artificial Sequence
  ENSG00000138111_6 (sequence is synthesized)
ctcaacttctactgctccctcttcagcgcggccggctccctctctgtctttgcatcctatgccttttggaacaaggaggatttctcctccttccgcgctttctgcgtgacactggctgtc

SEQ ID NO: 343035 - DNA, 120 bp, Artificial Sequence
  ENSG00000138111_7 (sequence is synthesized)
agctctgggctgggctttctgggggccacacagctgctgaggcggcgggttgaggcggcccgaaaggacccagggtgctcaggcctggttgtggatagcggcctgtgtggagaggagctg

SEQ ID NO: 343036 - DNA, 120 bp, Artificial Sequence
  ENSG00000138111_8 (sequence is synthesized)
cttgtaggcagtgaggaggcggacagcatcaccttgggccggtatctccggcagctggcacgccatcggaacttcctgtggttcgtgagcatggacctggtgcaggtcttccactgccac

SEQ ID NO: 343037 - DNA, 120 bp, Artificial Sequence
  ENSG00000138111_9 (sequence is synthesized)
ttcaacagcaacttcttccctctcttcctggagcatctgttgtccgaccatatctccctttccacgggctccatcctgttgggcctctcctatgtcgctccccatctcaacaacctctac

SEQ ID NO: 343038 - DNA, 120 bp, Artificial Sequence
  ENSG00000138111_10 (sequence is synthesized)
ttcctgtccctgtgccggcgctggggcgtctacgcggtggtgcgggggctcttcctgctcaagctgggacttagcctgctcatgttgttggccggcccggaccacctcagcctgctgtgc

SEQ ID NO: 343039 - DNA, 120 bp, Artificial Sequence
  ENSG00000138111_11 (sequence is synthesized)
gaaccaccgcaagcaggcagcctcggcactcctctttggcatggttgccttggtgaccaagccaggccagacctttgccccgctgctgggcacctggctgctctgtttctacacaggtca

SEQ ID NO: 343040 - DNA, 120 bp, Artificial Sequence
  ENSG00000138111_12 (sequence is synthesized)
tgacctcttccagcagtccctcataacccctgtggggagtgcccatccctggccagagcccccagctccagcccctgcacaggccccgacgctccgccagggctgcttctacctgctggt

SEQ ID NO: 343041 - DNA, 120 bp, Artificial Sequence
  ENSG00000138111_13 (sequence is synthesized)
gctggtgcccatcacctgtgctctgctgcagctcttcacctggtcccagttcacgctgcatgggagacgcctgcacatggtcaaggcccagcgccagaacctgtcacaggcccaaaccct

SEQ ID NO: 343042 - DNA, 120 bp, Artificial Sequence
  ENSG00000138111_14 (sequence is synthesized)
ggatgttaagatggtgtgagagctgtggcaaggtcaccccactgaggatgctgctggcagcctggggaaggagccagttttttttggttttttttttaaggatttcatagtttttttttt

SEQ ID NO: 343043 - DNA, 120 bp, Artificial Sequence
  ENSG00000138111_15 (sequence is synthesized)
gatttcatagttttttttttttttttttggagctgttgcccaaaaaaatggatctgttgcagtggtgcaatctgggctcactgaaaccaccacccaggttcaagcaattatcctgcctca

SEQ ID NO: 343044 - DNA, 70 bp, Artificial Sequence
  ENSG00000138111_16 (sequence is synthesized)
acccctgaccttaggtgatcagccaacctaatttttgtattatttagtagagacagggtttcaccacatt

SEQ ID NO: 343045 - DNA, 120 bp, Artificial Sequence
  ENSG00000138111_17 (sequence is synthesized)
gctgggaatacaggcatgagccaccgcactcggccaggagctagttttaccagcaccctgctccactgccttcctctagtgcagcctggaagacatggcagcgggtagctcctggggctg

SEQ ID NO: 343046 - DNA, 120 bp, Artificial Sequence
  ENSG00000138111_18 (sequence is synthesized)
ggcagcgggtagctcctggggctgagccagaagcatcactgcagtgaaagtctctgcttacctgtctggctcagcttgggcaagggctgggccatatgtgctcagggacgtgcttctctt

SEQ ID NO: 343047 - DNA, 120 bp, Artificial Sequence
  ENSG00000138111_19 (sequence is synthesized)
gtaaggcaggaggacagaagaggaccaagaagggagggggctgccctgtggtgcacacaggcctgccatggggcgtgggagcccatcccgctgcctgactggagctggccgctgtggtgg

SEQ ID NO: 343048 - DNA, 120 bp, Artificial Sequence
  ENSG00000138111_20 (sequence is synthesized)
actcaggaaccacttttaatactgcaactgctcccttttgcccagtcagggaaagctgactgtaagtcccacctcccactccgtccacccttctagtggtttctctgagaggtttctctg

SEQ ID NO: 343049 - DNA, 120 bp, Artificial Sequence
  ENSG00000138111_21 (sequence is synthesized)
cttcagctgtgcttgaagtggcatgcctcctctgctgcagggctcccccacccccacacggcctctaaagatgtttatttccttatagactgattaaagtcagccattctttttcctcaa

SEQ ID NO: 343050 - DNA, 120 bp, Artificial Sequence
  ENSG00000138111_22 (sequence is synthesized)
ggcccccatcttctgacttttcctcgtgtgacccatcttttcaaattcccttacctgaggaaggagcccgattacaaggatatttacctgctcctaccctgatctagaagaggaagctaa

SEQ ID NO: 343051 - DNA, 120 bp, Artificial Sequence
  ENSG00000138111_23 (sequence is synthesized)
ggcctgggttgggtaactgcctgacgttttactgctctctgtttcctcgagtcactcccagattagtggtgtctagctcagcactgtttctgttatacttcattcataattcccagcgct

SEQ ID NO: 343052 - DNA, 120 bp, Artificial Sequence
  ENSG00000138111_24 (sequence is synthesized)
actccagcctgggcggcagagaaaggctccatctctaaaaaaagaagagctaagtgctgtacctaaaacatgcagtatataaactggctgaacttagaaataaactgttttcatgttatg

SEQ ID NO: 343053 - DNA, 120 bp, Artificial Sequence
  ENSG00000138111_25 (sequence is synthesized)
ttttcaaattcccttacctgaggaaggagcccgattacaaggatatttacctgctcctaccctgatctagaagaggaagctaaggcctgggttgggtaactgcctgacgttttactgtaa

SEQ ID NO: 343054 - DNA, 120 bp, Artificial Sequence
  ENSG00000138115_0 (sequence is synthesized)
acatgtcaaagagacacacactaaattagcagggagtgttataaaaactttggagtgcaagctcacagctgtcttaataagaagagaaggcttcaatggaaccttttgtggtcctggtgc

SEQ ID NO: 343055 - DNA, 120 bp, Artificial Sequence
  ENSG00000138115_1 (sequence is synthesized)
tgtgtctctcttttatgcttctcttttcactctggagacagagctgtaggagaaggaagctccctcctggccccactcctcttcctattattggaaatatgctacagatagatgttaagg

SEQ ID NO: 343056 - DNA, 120 bp, Artificial Sequence
  ENSG00000138115_2 (sequence is synthesized)
acatctgcaaatctttcaccaatttctcaaaagtctatggtcctgtgttcaccgtgtattttggcatgaatcccatagtggtgtttcatggatatgaggcagtgaaggaagccctgattg

SEQ ID NO: 343057 - DNA, 120 bp, Artificial Sequence
  ENSG00000138115_3 (sequence is synthesized)
ataatggagaggagttttctggaagaggcaattccccaatatctcaaagaattactaaaggacttggaatcatttccagcaatggaaagagatggaaggagatccggcgtttctccctca

SEQ ID NO: 343058 - DNA, 120 bp, Artificial Sequence
  ENSG00000138115_4 (sequence is synthesized)
caaccttgcggaattttgggatggggaagaggagcattgaggaccgtgttcaagaggaagctcactgccttgtggaggagttgagaaaaaccaaggcttcaccctgtgatcccactttca

SEQ ID NO: 343059 - DNA, 120 bp, Artificial Sequence
  ENSG00000138115_5 (sequence is synthesized)
tcctgggctgtgctccctgcaatgtgatctgctccgttgttttccagaaacgatttgattataaagatcagaattttctcaccctgatgaaaagattcaatgaaaacttcaggattctga

SEQ ID NO: 343060 - DNA, 120 bp, Artificial Sequence
  ENSG00000138115_6 (sequence is synthesized)
actccccatggatccaggtctgcaataatttccctctactcattgattgtttcccaggaactcacaacaaagtgcttaaaaatgttgctcttacacgaagttacattagggagaaagtaa

SEQ ID NO: 343061 - DNA, 120 bp, Artificial Sequence
  ENSG00000138115_7 (sequence is synthesized)
aagaacaccaagcatcactggatgttaacaatcctcgggactttatcgattgcttcctgatcaaaatggagcaggaaaaggacaaccaaaagtcagaattcaatattgaaaacttggttg

SEQ ID NO: 343062 - DNA, 120 bp, Artificial Sequence
  ENSG00000138115_8 (sequence is synthesized)
tgtagctgatctatttgttgctggaacagagacaacaagcaccactctgagatatggactcctgctcctgctgaagcacccagaggtcacagctaaagtccaggaagagattgatcatgt

SEQ ID NO: 343063 - DNA, 120 bp, Artificial Sequence
  ENSG00000138115_9 (sequence is synthesized)
aattggcagacacaggagcccctgcatgcaggataggagccacatgccttacactgatgctgtagtgcacgagatccagagatacagtgaccttgtccccaccggtgtgccccatgcagt

SEQ ID NO: 343064 - DNA, 120 bp, Artificial Sequence
  ENSG00000138115_10 (sequence is synthesized)
gaccactgatactaagttcagaaactacctcatccccaagggcacaaccataatggcattactgacttccgtgctacatgatgacaaagaatttcctaatccaaatatctttgaccctgg

SEQ ID NO: 343065 - DNA, 120 bp, Artificial Sequence
  ENSG00000138115_11 (sequence is synthesized)
ccactttctagataagaatggcaactttaagaaaagtgactacttcatgcctttctcagcaggaaaacgaatttgtgcaggagaaggacttgcccgcatggagctatttttatttctaac

SEQ ID NO: 343066 - DNA, 120 bp, Artificial Sequence
  ENSG00000138115_12 (sequence is synthesized)
cacaattttacagaactttaacctgaaatctgttgatgatttaaagaacctcaatactactgcagttaccaaagggattgtttctctgccaccctcataccagatctgcttcatccctgt

SEQ ID NO: 343067 - DNA, 120 bp, Artificial Sequence
  ENSG00000138115_13 (sequence is synthesized)
ctgaagaatgctagcccatctggctgccgatctgctatcacctgcaactctttttttatcaaggacattcccactattatgtcttctctgacctctcatcaaatcttcccattcactcaa

SEQ ID NO: 343068 - DNA, 120 bp, Artificial Sequence
  ENSG00000138115_14 (sequence is synthesized)
tatcccataagcatccaaactccattaaggagagttgttcaggtcactgcacaaatatatctgcaattattcatactctgtaacacttgtattaattgctgcatatgctaatacttttct

SEQ ID NO: 343069 - DNA, 120 bp, Artificial Sequence
  ENSG00000138115_15 (sequence is synthesized)
aatgctgactttttaatatgttatcactgtaaaacacagaaaagtgattaatgaatgataatttagatccatttcttttgtgaatgtgctaaataaaaagtgttattaattgctggttca

SEQ ID NO: 343070 - DNA, 120 bp, Artificial Sequence
  ENSG00000138115_16 (sequence is synthesized)
ctgtgtcagctttggtaactggggtgagggggatggaaaacagagccctaaaaagcttctcagcagagcttagcctatctgcatggctgccaagtgttgcagcactttcttccttggctg

SEQ ID NO: 343071 - DNA, 120 bp, Artificial Sequence
  ENSG00000138115_17 (sequence is synthesized)
acatctgcaaatctttcaccaatgtaagtctgccttatgttcctccagccaattgcaaaggtgttttgctatgatttttgactgaaggtgaagggaagtgtgtgtgattagaaatttcat

SEQ ID NO: 343072 - DNA, 120 bp, Artificial Sequence
  ENSG00000138115_18 (sequence is synthesized)
ataatctacataatcaaaatacaagatgtgtcaaatttgaagtgatgaaatagagcggcaaatgaggccagaaaagggcatccaaacttgatgatctggagaacacattcagaaggttgc

SEQ ID NO: 343073 - DNA, 120 bp, Artificial Sequence
  ENSG00000138115_19 (sequence is synthesized)
acacaagtatccaagatgtaagacttcaaatgtgattggaaagctctttagcaagcttccaccactggccttaagctcatccatgtaaattactgtgtctggctggacctgagtttcctc

SEQ ID NO: 343074 - DNA, 120 bp, Artificial Sequence
  ENSG00000138115_20 (sequence is synthesized)
gatcaacgttatggcgctacgtgatgtccactacttctcctcacttctggacttctttataaatcagattatctgttttgttacttccagggcacaaccataatggcattactgacttcc

SEQ ID NO: 343075 - DNA, 120 bp, Artificial Sequence
  ENSG00000138119_0 (sequence is synthesized)
gccttttccccttccttgccctgggagaaatcctcccttcactgggagagaacttctctcccagggcggtgcgacccggagctccagcgccctagtctccacttcgtttgctgaaacttg

SEQ ID NO: 343076 - DNA, 120 bp, Artificial Sequence
  ENSG00000138119_1 (sequence is synthesized)
ctttctaccagctaagaaccatgctgcgagtgattgtggaatctgccagcaatatccctaaaacgaaatttggcaagccggatcctattgtttctgtcatttttaaggatgagaaaaaga

SEQ ID NO: 343077 - DNA, 120 bp, Artificial Sequence
  ENSG00000138119_2 (sequence is synthesized)
aaacaaagaaagttgataatgaattgaaccctgtctggaatgagattttggagtttgacttgaggggtataccactggacttttcatcttcccttgggattattgtgaaagattttgaga

SEQ ID NO: 343078 - DNA, 120 bp, Artificial Sequence
  ENSG00000138119_3 (sequence is synthesized)
caattggacaaaataaattaattggcacggcgactgtagccctgaaggacctgactggtgaccagagcagatccctgccgtacaagctgatctccctgctaaatgaaaaagggcaagata

SEQ ID NO: 343079 - DNA, 120 bp, Artificial Sequence
  ENSG00000138119_4 (sequence is synthesized)
ctggggccaccattgacttggtgatcggctatgatccgccttctgctccacatccaaatgacctgagcgggcccagcgtgccaggcatgggaggagatggggaagaagatgaaggtgatg

SEQ ID NO: 343080 - DNA, 120 bp, Artificial Sequence
  ENSG00000138119_5 (sequence is synthesized)
aagacaggttggacaatgcagtcaggggccctgggcccaaggggccagttgggacggtgtcggaagctcagcttgctcggaggctcaccaaagtaaagaacagccggcggatgctgtcaa

SEQ ID NO: 343081 - DNA, 120 bp, Artificial Sequence
  ENSG00000138119_6 (sequence is synthesized)
ataagccacaggacttccagatccgcgtccgagtgattgagggccgacagttaagtggtaacaacataaggcctgtggtcaaagttcacgtctgtggccagacacaccgaacaagaatca

SEQ ID NO: 343082 - DNA, 120 bp, Artificial Sequence
  ENSG00000138119_7 (sequence is synthesized)
agagaggaaacaaccctttttttgatgagttgtttttctacaatgtcaacatgaccccttctgaattgatggatgagatcatcagcatccgggtttataattctcactctctgcgggcag

SEQ ID NO: 343083 - DNA, 120 bp, Artificial Sequence
  ENSG00000138119_8 (sequence is synthesized)
attgtctgatgggggaatttaagattgatgttggatttgtttatgatgaacctggccatgctgtcatgagaaagtggcttcttctcaatgacccggaagataccagttcaggttctaaag

SEQ ID NO: 343084 - DNA, 120 bp, Artificial Sequence
  ENSG00000138119_9 (sequence is synthesized)
gttatatgaaagtcagcatgtttgtcctgggaaccggagatgagcctcctcctgagagacgagatcgtgataatgacagtgatgatgtggagagtaatttgttactccctgctggcattg

SEQ ID NO: 343085 - DNA, 120 bp, Artificial Sequence
  ENSG00000138119_10 (sequence is synthesized)
ccctccggtgggtgaccttcttgctgaaaatctaccgagctgaggacatcccccagatggatgatgccttctcacagacagtaaaggaaatatttggaggcaatgcagataagaaaaatc

SEQ ID NO: 343086 - DNA, 120 bp, Artificial Sequence
  ENSG00000138119_11 (sequence is synthesized)
tcgtggatccttttgtagaagtttcctttgctggaaaaaaggtttgtacaaacataattgagaaaaatgcaaacccagagtggaatcaggtcgtcaatcttcagatcaagtttccttcag

SEQ ID NO: 343087 - DNA, 120 bp, Artificial Sequence
  ENSG00000138119_12 (sequence is synthesized)
tgtgtgaaaaaataaaactaacaatatatgactgggaccgtcttactaaaaatgatgtagttggaacaacatatctacacctctctaaaattgctgcctctggtggggaagtggaagatt

SEQ ID NO: 343088 - DNA, 120 bp, Artificial Sequence
  ENSG00000138119_13 (sequence is synthesized)
tctcatcttcgggaactggggctgcatcatatacagtaaacacaggagaaacagaggtaggctttgttccaacgtttggaccttgttacctgaatctttatggaagccccagagagtaca

SEQ ID NO: 343089 - DNA, 120 bp, Artificial Sequence
  ENSG00000138119_14 (sequence is synthesized)
cgggattcccagacccctatgatgagctgaatactggaaagggggaaggagttgcctacagaggcaggatcttggttgaattagccacttttcttgagaagacaccaccagataaaaagc

SEQ ID NO: 343090 - DNA, 120 bp, Artificial Sequence
  ENSG00000138119_15 (sequence is synthesized)
ttgagcccatttcaaatgatgacctgctggttgttgagaaataccagcgaaggcggaagtacagcctgtctgccgtgtttcattcagccaccatgttgcaagatgttggtgaggccattc

SEQ ID NO: 343091 - DNA, 120 bp, Artificial Sequence
  ENSG00000138119_16 (sequence is synthesized)
agtttgaagtcagcattgggaactatggcaacaagtttgacaccacctgtaagcctttggcatcaacaactcagtacagccgtgctgtatttgatggcaactactattattacttgcctt

SEQ ID NO: 343092 - DNA, 120 bp, Artificial Sequence
  ENSG00000138119_17 (sequence is synthesized)
gggcccacaccaagccagttgttaccctgacttcatactgggaggatattagtcatcgcctggatgcggtgaacactctcctagctatggcagaacggctgcaaacaaatatagaagctc

SEQ ID NO: 343093 - DNA, 120 bp, Artificial Sequence
  ENSG00000138119_18 (sequence is synthesized)
taaaatcagggatacaaggtaaaattcctgcaaaccagctggctgaattgtggctgaagctgatagatgaagttatagaagacacgagatacacgttgcctctcacagaaggaaaagcca

SEQ ID NO: 343094 - DNA, 120 bp, Artificial Sequence
  ENSG00000138119_19 (sequence is synthesized)
acgtcacagttctcgatactcagatccgaaagctgcggtccaggtctctctcccaaatacatgaggcggctgtgaggatgaggtcggaagccacagatgtgaagtccacactggcagaaa

SEQ ID NO: 343095 - DNA, 120 bp, Artificial Sequence
  ENSG00000138119_20 (sequence is synthesized)
ttgaggactggcttgataaattaatgcagctgactgaagagccacagaacagcatgcctgacatcatcatctggatgatccggggagagaagagactggcctatgcacgaattcccgcac

SEQ ID NO: 343096 - DNA, 120 bp, Artificial Sequence
  ENSG00000138119_21 (sequence is synthesized)
atcaggtcttgtactccaccagtggtgagaatgcatctggaaaatactgtgggaaaacccaaaccatctttctgaagtatccacaggagaaaaacaacgggccaaaggtgcctgtggagt

SEQ ID NO: 343097 - DNA, 120 bp, Artificial Sequence
  ENSG00000138119_22 (sequence is synthesized)
tgcgagtgaacatctggctaggcttaagtgctgtggagaagaagtttaacagcttcgcagaaggaactttcaccgtctttgctgaaatgtatgaaaatcaagctctcatgtttggaaaat

SEQ ID NO: 343098 - DNA, 120 bp, Artificial Sequence
  ENSG00000138119_23 (sequence is synthesized)
ggggtacttctggattagtaggacgtcataagttttctgatgtcacaggaaaaataaaactcaagagggaattttttctgcctccaaaaggctgggaatgggaaggagagtggatagttg

SEQ ID NO: 343099 - DNA, 120 bp, Artificial Sequence
  ENSG00000138119_24 (sequence is synthesized)
atcctgaaagaagcttgctgactgaggcagatgcaggtcacacggagttcactgatgaagtctatcagaacgagagccgctaccccgggggcgactggaagccggccgaggacacctaca

SEQ ID NO: 343100 - DNA, 120 bp, Artificial Sequence
  ENSG00000138119_25 (sequence is synthesized)
cggatgcgaacggcgataaagcagcatcacccagcgagttgacttgtcctccaggttgggaatgggaagatgatgcatggtcttatgacataaatcgagcggtggatgagaaaggctggg

SEQ ID NO: 343101 - DNA, 120 bp, Artificial Sequence
  ENSG00000138119_26 (sequence is synthesized)
aatatggaatcaccattcctcctgatcataagcccaaatcctgggttgcagcagagaaaatgtaccacactcatagacggcgaaggctggtccgaaaacgcaagaaagatttaacacaga

SEQ ID NO: 343102 - DNA, 120 bp, Artificial Sequence
  ENSG00000138119_27 (sequence is synthesized)
ctgcttcaagcaccgcaagggccatggaggaattgcaagaccaagagggctgggaatatgcttctctaattggctggaaatttcactggaaacaacgtagttcagataccttccgccgca

SEQ ID NO: 343103 - DNA, 120 bp, Artificial Sequence
  ENSG00000138119_28 (sequence is synthesized)
gctccttcagaaacacatggtgcagctgccatctttaaacttgaaggtgcccttggggcagacactaccgaagatggggatgagaagagcctggagaaacagaagcacagtgccaccact

SEQ ID NO: 343104 - DNA, 120 bp, Artificial Sequence
  ENSG00000138119_29 (sequence is synthesized)
gtgttcggagcaaacacccccattgtttcctgcaattttgacagagtctacatctaccatctgcgctgctatgtctatcaagccagaaacctcttggctttagataaggatagcttttca

SEQ ID NO: 343105 - DNA, 120 bp, Artificial Sequence
  ENSG00000138119_30 (sequence is synthesized)
gatccatatgctcatatctgtttcctccatcggagcaaaaccactgagatcatccattcaaccctgaatcccacgtgggaccaaacaattatattcgatgaagttgaaatctatggggaa

SEQ ID NO: 343106 - DNA, 120 bp, Artificial Sequence
  ENSG00000138119_31 (sequence is synthesized)
ccccaaacagttctacagaatccacccaaagttatcatggaactttttgacaatgaccaagtgggcaaagatgaatttttaggacgaagcattttctctcctgtggtgaaactgaactca

SEQ ID NO: 343107 - DNA, 120 bp, Artificial Sequence
  ENSG00000138119_32 (sequence is synthesized)
gaaatggacatcacacccaaacttctctggcacccagtaatgaatggagacaaagcctgcggggatgttcttgtaactgcagagctgattctgaggggcaaggatggctccaaccttccc

SEQ ID NO: 343108 - DNA, 120 bp, Artificial Sequence
  ENSG00000138119_33 (sequence is synthesized)
attcttccccctcaaagggcgccaaatctatacatggtcccccaggggatcaggcctgtggtccagctcactgccattgagattctagcttggggcttaagaaatatgaaaaacttccag

SEQ ID NO: 343109 - DNA, 120 bp, Artificial Sequence
  ENSG00000138119_34 (sequence is synthesized)
atggcttctatcacatcccccagtcttgttgtggagtgtggaggagaaagggtggaatcggtggtgatcaaaaaccttaagaagacacccaactttccaagttctgttctcttcatgaaa

SEQ ID NO: 343110 - DNA, 120 bp, Artificial Sequence
  ENSG00000138119_35 (sequence is synthesized)
gtgttcttgcccaaggaggaattgtacatgcccccactggtgatcaaggtcatcgaccacaggcagtttgggcggaagcctgtcgtcggccagtgcaccatcgagcgcctggaccgcttt

SEQ ID NO: 343111 - DNA, 120 bp, Artificial Sequence
  ENSG00000138119_36 (sequence is synthesized)
cgctgtgacccttatgcagggaaagaggacatcgtcccacagctcaaagcctcccttctgtctgccccaccatgccgggacatcgttatcgaaatggaagacaccaaaccattactggct

SEQ ID NO: 343112 - DNA, 120 bp, Artificial Sequence
  ENSG00000138119_37 (sequence is synthesized)
tctaagctgacagaaaaggaggaagaaatcgtggactggtggagtaaattttatgcttcctcaggggaacatgaaaaatgcggacagtatattcagaaaggctattccaagctcaagata

SEQ ID NO: 343113 - DNA, 120 bp, Artificial Sequence
  ENSG00000138119_38 (sequence is synthesized)
tataattgtgaactagaaaatgtagcagaatttgagggcctgacagacttctcagatacgttcaagttgtaccgaggcaagtcggatgaaaatgaagatccttctgtggttggagagttt

SEQ ID NO: 343114 - DNA, 120 bp, Artificial Sequence
  ENSG00000138119_39 (sequence is synthesized)
aagggctcctttcggatctaccctctgccggatgaccccagcgtgccagcccctcccagacagtttcgggaattacctgacagcgtcccacaggaatgcacggttaggatttacattgtt

SEQ ID NO: 343115 - DNA, 120 bp, Artificial Sequence
  ENSG00000138119_40 (sequence is synthesized)
cgaggcttagagctccagccccaggacaacaatggcctgtgtgacccttacataaaaataacactgggcaaaaaagtcattgaagaccgagatcactacattcccaacactctcaaccca

SEQ ID NO: 343116 - DNA, 120 bp, Artificial Sequence
  ENSG00000138119_41 (sequence is synthesized)
gtctttggcaggatgtacgaactgagctgctacttacctcaagaaaaagacctgaaaatttctgtctatgattatgacacctttacccgggatgaaaaagtaggagaaacaattattgat

SEQ ID NO: 343117 - DNA, 120 bp, Artificial Sequence
  ENSG00000138119_42 (sequence is synthesized)
ctggaaaaccgattcctttcccgctttgggtcccactgcggcataccagaggagtactgtgtttctggagtcaatacctggcgagatcaactgagaccaacacagctgcttcaaaatgtc

SEQ ID NO: 343118 - DNA, 120 bp, Artificial Sequence
  ENSG00000138119_43 (sequence is synthesized)
gccagattcaaaggcttcccacaacccatcctttccgaagatgggagtagaatcagatatggaggacgagactacagcttggatgaatttgaagccaacaaaatcctgcaccagcacctc

SEQ ID NO: 343119 - DNA, 120 bp, Artificial Sequence
  ENSG00000138119_44 (sequence is synthesized)
ggggcccctgaagagcggcttgctcttcacatcctcaggactcaggggctggtccctgagcacgtggaaacaaggactttgcacagcaccttccagcccaacatttcccagggaaaactt

SEQ ID NO: 343120 - DNA, 120 bp, Artificial Sequence
  ENSG00000138119_45 (sequence is synthesized)
cagatgtgggtggatgttttccccaagagtttggggccaccaggccctcctttcaacatcacaccccggaaagccaagaaatactacctgcgtgtgatcatctggaacaccaaggacgtt

SEQ ID NO: 343121 - DNA, 120 bp, Artificial Sequence
  ENSG00000138119_46 (sequence is synthesized)
atcttggacgagaaaagcatcacaggagaggaaatgagtgacatctacgtcaaaggctggattcctggcaatgaagaaaacaaacagaaaacagatgtccattacagatctttggatggt

SEQ ID NO: 343122 - DNA, 120 bp, Artificial Sequence
  ENSG00000138119_47 (sequence is synthesized)
gaagggaattttaactggcgatttgttttcccgtttgactaccttccagccgaacaactctgtatcgttgcgaaaaaagagcatttctggagtattgaccaaacggaatttcgaatccca

SEQ ID NO: 343123 - DNA, 120 bp, Artificial Sequence
  ENSG00000138119_48 (sequence is synthesized)
cccaggctgatcattcagatatgggacaatgacaagttttctctggatgactacttgggtttcctagaacttgacttgcgtcacacgatcattcctgcaaaatcaccagagaaatgcaga

SEQ ID NO: 343124 - DNA, 120 bp, Artificial Sequence
  ENSG00000138119_49 (sequence is synthesized)
ttggacatgattccggacctcaaagccatgaacccccttaaagccaagacagcctccctctttgagcagaagtccatgaaaggatggtggccatgctacgcagagaaagatggcgcccgc

SEQ ID NO: 343125 - DNA, 120 bp, Artificial Sequence
  ENSG00000138119_50 (sequence is synthesized)
gtaatggctgggaaagtggagatgacattggaaatcctcaacgagaaggaggccgacgagaggccagccgggaaggggcgggacgaacccaacatgaaccccaagctggacttaccaaat

SEQ ID NO: 343126 - DNA, 120 bp, Artificial Sequence
  ENSG00000138119_51 (sequence is synthesized)
cgaccagaaacctccttcctctggttcaccaacccatgcaagaccatgaagttcatcgtgtggcgccgctttaagtgggtcatcatcggcttgctgttcctgcttatcctgctgctcttc

SEQ ID NO: 343127 - DNA, 120 bp, Artificial Sequence
  ENSG00000138119_52 (sequence is synthesized)
gtggccgtgctcctctactctttgccgaactatttgtcaatgaagattgtaaagccaaatgtgtaacaaaggcaaaggcttcatttcaagagtcatccagcaatgagagaatcctgcctc

SEQ ID NO: 343128 - DNA, 120 bp, Artificial Sequence
  ENSG00000138119_53 (sequence is synthesized)
tgtagaccaacatccagtgtgattttgtgtctgagaccacaccccagtagcaggttacgccatgtcaccgagccccattgattcccagagggtcttagtcctggaaagtcaggccaacaa

SEQ ID NO: 343129 - DNA, 120 bp, Artificial Sequence
  ENSG00000138119_54 (sequence is synthesized)
gcaacgtttgcatcatgttatctcttaagtattaaaagttttattttctaaagtttaaatcatgtttttcaaaatatttttcaaggtggctggttccatttaaaaatcatctttttatat

SEQ ID NO: 343130 - DNA, 120 bp, Artificial Sequence
  ENSG00000138119_55 (sequence is synthesized)
gtgtcttcggttctagacttcagcttttggaaattgctaaatagaattcaaaaatctctgcatcctgaggtgatatacttcatatttgtaatcaactgaaagagctgtgcattataaaat

SEQ ID NO: 343131 - DNA, 120 bp, Artificial Sequence
  ENSG00000138119_56 (sequence is synthesized)
cagttagaatagttagaacaattcttatttatgcccacaaccattgctatattttgtatggatgtcataaaagtctatttaacctctgtaatgaaactaaataaaaatgtttcaccttta

SEQ ID NO: 343132 - DNA, 120 bp, Artificial Sequence
  ENSG00000138119_57 (sequence is synthesized)
taaacttcatgttcctggggtctccatatctatgtgacctgttatatggtttgccctcttcctcacgggacatgtgcacgagcagctgacagaaaaggaggaagaaatcgtggactggtg

SEQ ID NO: 343133 - DNA, 120 bp, Artificial Sequence
  ENSG00000138119_58 (sequence is synthesized)
gagtaaattttatgcttcctcaggggaacatgaaaaatgcggacagtatattcagaaaggctattccaagctcaaggtacctggatctatgctgctatgggtggagaatcaacatccttt

SEQ ID NO: 343134 - DNA, 120 bp, Artificial Sequence
  ENSG00000138119_59 (sequence is synthesized)
actggccacaggcagagctaagaggatgactaaaaggtcccttgggtgggtgctaatgagcagggcccaggaaaacctctgtcttcccggagagccctcttgcatgagtttcggctttgc

SEQ ID NO: 343135 - DNA, 120 bp, Artificial Sequence
  ENSG00000138119_60 (sequence is synthesized)
caagattccagggacttgaggacagctattgagttatggttacgtgactgccacattggggcttggaggcatctggcagatggttgggaatgggctggcaccacactaattaggccacga

SEQ ID NO: 343136 - DNA, 120 bp, Artificial Sequence
  ENSG00000138119_61 (sequence is synthesized)
aaacccccatcacttctgcctccagcattagccacagactgtggctgggtttggggagacactggacgcctaatattctgtagagtgcttgatgaattgtagagccctgagccctagaga

SEQ ID NO: 343137 - DNA, 120 bp, Artificial Sequence
  ENSG00000138119_62 (sequence is synthesized)
ttagttgcaggagagtcaggatcatagtaaaatacatccttttcaagagctccacttaatgtattttgatcacaatgcattaggaagccaatctagtggtttccttggcaactttcttga

SEQ ID NO: 343138 - DNA, 120 bp, Artificial Sequence
  ENSG00000138119_63 (sequence is synthesized)
atgctgcgagtgattgtggaatctgccagcaatatccctaaaacgaaatttggcaagccggatcctattgtttctgtcatttttaagggttccatgagccagatccgaattgaggctgga

SEQ ID NO: 343139 - DNA, 120 bp, Artificial Sequence
  ENSG00000138119_64 (sequence is synthesized)
gtgagtgcctgtgagccaggggtggccattctgccctaagttccatgcggacagccaggctgtgaagctgaatctagctgagattagactacacagacctctgagaccaatttcaactct

SEQ ID NO: 343140 - DNA, 120 bp, Artificial Sequence
  ENSG00000138119_65 (sequence is synthesized)
atgtgtatgttggggttgggttagtgatgggaagtctgcagttttattaaccaggcgagacccagactatgatacaggtgggcatgtgcagccgtcagagacccctgagtgagaatggaa

SEQ ID NO: 343141 - DNA, 120 bp, Artificial Sequence
  ENSG00000138119_66 (sequence is synthesized)
cacaagcctgtagctccctgcccacccagacaggggccccgagaggcaggtggggctgcctgaattgggacattgcaattgtttatgaaatgcccttcaaggtagaggggaagggtgaac

SEQ ID NO: 343142 - DNA, 120 bp, Artificial Sequence
  ENSG00000138119_67 (sequence is synthesized)
caaccctttactgaacaacctcacggtgagcacaaaaagcacatgccggctccagcagaatgtcccagggctttgcttcaggtttgtggcttccaccccatacagtgtctccaggctgtt

SEQ ID NO: 343143 - DNA, 120 bp, Artificial Sequence
  ENSG00000138131_0 (sequence is synthesized)
gagcccgttagcgctgctccgccgcggcgcccgcccagccccggactgtccgcgctccatctggtatcttggcctcagctgtccttgaagtcaccatggcgtggtccccaccagccaccc

SEQ ID NO: 343144 - DNA, 120 bp, Artificial Sequence
  ENSG00000138131_1 (sequence is synthesized)
tctttctgttcctgctgctgctaggccagccccctcccagcaggccacagtcactgggcaccactaagctccggctggtgggcccagagagcaagccagaggagggccgcctggaggtgc

SEQ ID NO: 343145 - DNA, 120 bp, Artificial Sequence
  ENSG00000138131_2 (sequence is synthesized)
tgcaccagggccagtggggcaccgtgtgtgatgacaactttgctatccaggaggccacagtggcttgccgccagctgggcttcgaagctgccttgacctgggcccacagtgccaagtacg

SEQ ID NO: 343146 - DNA, 120 bp, Artificial Sequence
  ENSG00000138131_3 (sequence is synthesized)
gccaaggggagggacccatctggctggacaatgtgcgctgtgtgggcacagagagctccttggaccagtgcgggtctaatggctggggagtcagtgactgcagtcactcagaagacgtag

SEQ ID NO: 343147 - DNA, 120 bp, Artificial Sequence
  ENSG00000138131_4 (sequence is synthesized)
gggtgatatgccacccccggcgccatcgtggctacctttctgaaactgtctccaatgcccttgggccccagggccggcggctggaggaggtgcggctcaagcccatccttgccagtgcca

SEQ ID NO: 343148 - DNA, 120 bp, Artificial Sequence
  ENSG00000138131_5 (sequence is synthesized)
agcagcatagcccagtgaccgagggagccgtggaggtgaagtatgagggccactggcggcaggtgtgtgaccagggctggaccatgaacaacagcagggtggtgtgcgggatgctgggct

SEQ ID NO: 343149 - DNA, 120 bp, Artificial Sequence
  ENSG00000138131_6 (sequence is synthesized)
tccccagcgaggtgcctgtcgacagccactactacaggaaagtctgggatctgaagatgagggaccctaagtctaggctgaagagcctgacgaataagaactccttctggatccaccagg

SEQ ID NO: 343150 - DNA, 120 bp, Artificial Sequence
  ENSG00000138131_7 (sequence is synthesized)
tcacctgcctggggacagagccccacatggccaactgccaggtgcaggtggctccagcccggggcaagctgcggccagcctgcccaggtggcatgcacgctgtggtcagctgtgtggcag

SEQ ID NO: 343151 - DNA, 120 bp, Artificial Sequence
  ENSG00000138131_8 (sequence is synthesized)
ggcctcacttccgcccaccgaagacaaagccacaacgcaaagggtcctgggcagaggagccgagggtgcgcctgcgctccggggcccaggtgggcgagggccgggtggaagtgctcatga

SEQ ID NO: 343152 - DNA, 120 bp, Artificial Sequence
  ENSG00000138131_9 (sequence is synthesized)
accgccagtggggcacggtctgtgaccacaggtggaacctcatctctgccagtgtcgtgtgtcgtcagctgggctttggctctgctcgggaggccctctttggggcccggctgggccaag

SEQ ID NO: 343153 - DNA, 120 bp, Artificial Sequence
  ENSG00000138131_10 (sequence is synthesized)
ggctagggcccatccacctgagtgaggtgcgctgcaggggatatgagcggaccctcagcgactgccctgccctggaagggtcccagaatggttgccaacatgagaatgatgctgctgtca

SEQ ID NO: 343154 - DNA, 120 bp, Artificial Sequence
  ENSG00000138131_11 (sequence is synthesized)
ggtgcaatgtccctaacatgggctttcagaatcaggtgcgcttggctggtgggcgtatccctgaggaggggctattggaggtgcaggtggaggtgaacggggtcccacgctgggggagcg

SEQ ID NO: 343155 - DNA, 120 bp, Artificial Sequence
  ENSG00000138131_12 (sequence is synthesized)
tgtgcagtgaaaactgggggctcaccgaagccatggtggcctgccgacagctcggcctgggttttgccatccatgcctacaaggaaacctggttctggtcggggacgccaagggcccagg

SEQ ID NO: 343156 - DNA, 120 bp, Artificial Sequence
  ENSG00000138131_13 (sequence is synthesized)
aggtggtgatgagtggggtgcgctgctcaggcacagagctggccctgcagcagtgccagaggcacgggccggtgcactgctcccacggtggcgggcgcttcctggctggagtctcctgca

SEQ ID NO: 343157 - DNA, 120 bp, Artificial Sequence
  ENSG00000138131_14 (sequence is synthesized)
ctgcggatcacatggactggccctacggataccgccgcctattgcgcttctccacacagatctacaatctgggccggactgactttcgtccaaagactggacgcgatagctgggtttggc

SEQ ID NO: 343158 - DNA, 120 bp, Artificial Sequence
  ENSG00000138131_15 (sequence is synthesized)
accagtgccacaggcattaccacagcattgaggtcttcacccactacgacctcctcactctcaatggctccaaggtggctgaggggcacaaggccagcttctgtctggaggacacaaact

SEQ ID NO: 343159 - DNA, 120 bp, Artificial Sequence
  ENSG00000138131_16 (sequence is synthesized)
gccccacaggactgcagcggcgctacgcatgtgccaactttggagaacagggagtgactgtaggctgctgggacacctaccggcatgacattgattgccagtgggtggatatcacagatg

SEQ ID NO: 343160 - DNA, 120 bp, Artificial Sequence
  ENSG00000138131_17 (sequence is synthesized)
tgggccccgggaattatatcttccaggtgattgtgaacccccactatgaagtggcagagtcagatttctccaacaatatgctgcagtgccgctgcaagtatgatgggcaccgggtctggc

SEQ ID NO: 343161 - DNA, 120 bp, Artificial Sequence
  ENSG00000138131_18 (sequence is synthesized)
tgcacaactgccacacagggaattcatacccagccaatgcagaactctccctggagcaggaacagcgtctcaggaacaacctcatctgaagctgtcactgcacactcctagctgctgccg

SEQ ID NO: 343162 - DNA, 120 bp, Artificial Sequence
  ENSG00000138131_19 (sequence is synthesized)
atacaccagatacctcagcttattggagccatgcccttcacagagtcccaactcagaggaaaagggccagtgccaaggggcaccaagaacctgctcaggaagccttttgatggcaagatc

SEQ ID NO: 343163 - DNA, 120 bp, Artificial Sequence
  ENSG00000138131_20 (sequence is synthesized)
accaatccagatggtattgctccctcaggatggctctgggcctgcccctaagggcctgtggcctatggaatatgtcctccaggctttgctcagctgagctcctcttctgtaaggaaaccc

SEQ ID NO: 343164 - DNA, 120 bp, Artificial Sequence
  ENSG00000138131_21 (sequence is synthesized)
agtcatccctgaatcttgccacagagatccgggattcaggagctctcagtttcttagggatggactatggcccagtcccccatctaagtggtgctttgcaaatgtcttggaggagtatag

SEQ ID NO: 343165 - DNA, 120 bp, Artificial Sequence
  ENSG00000138131_22 (sequence is synthesized)
gacagaggaccaaaatacacagcaggtagtgttagctctctgctaggagctcaaagcaacacaacttgtatcaaaatcacaactggcagagaagctggtggatccaatcctttcttcatc

SEQ ID NO: 343166 - DNA, 120 bp, Artificial Sequence
  ENSG00000138131_23 (sequence is synthesized)
tgttgttatttagaactcacctctcacactctgttctttagtgtccttacctttatcttaccacacacatgggtgtttctattatccttggaagcacagacctcgggcatccccttattg

SEQ ID NO: 343167 - DNA, 120 bp, Artificial Sequence
  ENSG00000138131_24 (sequence is synthesized)
cctgatgggccaacaccaacagttacggagtgcttgagaaggggcaagtttcacagaaatggccagatagggccttcctacagagcagcaagagtaggccaagcagaaagactgctgagg

SEQ ID NO: 343168 - DNA, 120 bp, Artificial Sequence
  ENSG00000138131_25 (sequence is synthesized)
taacacggaccccagcccctgtcagggcctctgccaaggaaataatatggaccatttacctggcaggcagtctgctctctctcaggatcaccacgcatctcaggattggtctaaacttca

SEQ ID NO: 343169 - DNA, 120 bp, Artificial Sequence
  ENSG00000138131_26 (sequence is synthesized)
agtctcaaccaagtgtctgaagtgaactttgcattgaataaatttttgccatggaaagaacatcaaacaagccactcatctctacagagataagaaaacaagtttggcagagcaagagac

SEQ ID NO: 343170 - DNA, 120 bp, Artificial Sequence
  ENSG00000138131_27 (sequence is synthesized)
agaagaccgtggagaaatcagaagggggaacagtcagtttagttaaggatggaacctgggaaaggccaccattcctgcttgatggggctctgatttgctcttgctcaagtggaataaaac

SEQ ID NO: 343171 - DNA, 120 bp, Artificial Sequence
  ENSG00000138131_28 (sequence is synthesized)
cccatggtcttcttgacatgattcttgatcttttctccactgagacacacttaagtgatgatccttacaggactgacaccctaatgccaataaaagttgctcattatggactgctacaaa

SEQ ID NO: 343172 - DNA, 120 bp, Artificial Sequence
  ENSG00000138134_0 (sequence is synthesized)
ctcttcatctttgtcatgtgattcaacatattcatgggaataatattccatgacctttgctgtcttctattggttagaagccaactacaggtcttaaacacactcaagtggagaggatta

SEQ ID NO: 343173 - DNA, 120 bp, Artificial Sequence
  ENSG00000138134_1 (sequence is synthesized)
cacaaacctacagatatcaaggggcaggaatcacagagctatcttagaattctgcctgttatagttctaaggttgagtttaaatccagactggctctaagtttaacagtccatgcttcta

SEQ ID NO: 343174 - DNA, 120 bp, Artificial Sequence
  ENSG00000138134_2 (sequence is synthesized)
atcagtattatcttctttattcctttgaagaaagcaaacctactttataaccttgcatagagttctaagtaaggtatcccgcagcagattcatactgggtgtcagtcaaatgtgaattat

SEQ ID NO: 343175 - DNA, 120 bp, Artificial Sequence
  ENSG00000138134_3 (sequence is synthesized)
tttcacaccttcacttttaaagatcagcttcaggaaactataaccacttgcagttttgtattttcaggaagagatttccaacagtctctctaaacactcaggttatataggttatttcaa

SEQ ID NO: 343176 - DNA, 120 bp, Artificial Sequence
  ENSG00000138134_4 (sequence is synthesized)
tttgttcctgtttgtctgaggcagagataaccctggggtttgggatttcaaacttgggtctcaaaaaataactttagttctgcttcttgtttttgaaacagatgaagtgattgagaagaa

SEQ ID NO: 343177 - DNA, 120 bp, Artificial Sequence
  ENSG00000138134_5 (sequence is synthesized)
acagtgaacatcctcatttcacagataagacaacatggatcagccttttactgtgaattctctgaaaaagttagctgctatgcctgaccatacagatgtttccctaagcccagaagagcg

SEQ ID NO: 343178 - DNA, 120 bp, Artificial Sequence
  ENSG00000138134_6 (sequence is synthesized)
agtccgtgccctaagcaagcttggttgtaatatcaccatcagtgaagacatcactccacgacgttactttaggtctggagtagagatggagaggatggcgtctgtgtatttggaagaagg

SEQ ID NO: 343179 - DNA, 120 bp, Artificial Sequence
  ENSG00000138134_7 (sequence is synthesized)
aaatttggaaaatgcctttgttctttataataaatttataaccttatttgtagaaaagcttcctaaccatcgagattaccagcaatgtgcagtacctgaaaagcaggatattatgaagaa

SEQ ID NO: 343180 - DNA, 120 bp, Artificial Sequence
  ENSG00000138134_8 (sequence is synthesized)
actgaaggagattgcattcccaaggacagatgaattgaaaaacgaccttttaaagaaatataacgtagaataccaagaatatttgcaaagcaaaaacaaatataaagctgaaattctcaa

SEQ ID NO: 343181 - DNA, 120 bp, Artificial Sequence
  ENSG00000138134_9 (sequence is synthesized)
tcagatgcgccagcagcagctagaatcggagcagtttctgtttttcgaagatcaactcaagaagcaagagttagcccgaggtcaaatgcgaagtcagcaaacctcagggctgtcagagca

SEQ ID NO: 343182 - DNA, 120 bp, Artificial Sequence
  ENSG00000138134_10 (sequence is synthesized)
gattgatgggagcgctttgtcctgcttttccacacaccagaacaattccttgctgaatgtatttgcagatcaacctaataaaagtgatgcaaccaattatgctagccactctcctcctgt

SEQ ID NO: 343183 - DNA, 120 bp, Artificial Sequence
  ENSG00000138134_11 (sequence is synthesized)
aaacagggccttaacgccagctgctactctaagtgctgttcagaatttagtggttgaaggactgcgatgtgtagttttgccagaagatctttgccacaaatttctgcaactggcagaatc

SEQ ID NO: 343184 - DNA, 120 bp, Artificial Sequence
  ENSG00000138134_12 (sequence is synthesized)
taatacagtgagaggaatagaaacctgtggaatactctgtggaaaactgacacataatgaatttactattacccatgtaattgtgccaaagcagtctgcgggaccagactattgtgacat

SEQ ID NO: 343185 - DNA, 120 bp, Artificial Sequence
  ENSG00000138134_13 (sequence is synthesized)
ggagaatgtagaggaattattcaatgttcaggatcaacatgatctcctcactctaggatggatccatacacatcccactcaaactgcatttttatccagcgttgatcttcacactcactg

SEQ ID NO: 343186 - DNA, 120 bp, Artificial Sequence
  ENSG00000138134_14 (sequence is synthesized)
ttcctatcaactcatgttgccagaggccattgccattgtttgctcaccaaagcataaagacactggcatcttcaggctcaccaatgctggcatgcttgaggtttctgcttgtaaaaaaaa

SEQ ID NO: 343187 - DNA, 120 bp, Artificial Sequence
  ENSG00000138134_15 (sequence is synthesized)
gggctttcatccacacaccaaggagcccaggctgttcagtatatgcaaacatgtgttggtaaaagacataaaaataattgtgttggatctgaggtgatatgttctgaatgtaagcaccgt

SEQ ID NO: 343188 - DNA, 120 bp, Artificial Sequence
  ENSG00000138134_16 (sequence is synthesized)
caacatcagacacctactcatggacatgtggttgccggattttcttaagatgtttccagaaatgactgatattttatatttatacattttagatgacaaagcttgatatttattgctgtt

SEQ ID NO: 343189 - DNA, 120 bp, Artificial Sequence
  ENSG00000138134_17 (sequence is synthesized)
gcacattttaaagttttctttttgggttgctctgtgtcaagagaggttacatggtgttaaatcggtacctgataatgtacccaaatactatggccagataataaattgtgctgcaaacaa

SEQ ID NO: 343190 - DNA, 120 bp, Artificial Sequence
  ENSG00000138134_18 (sequence is synthesized)
gcagtgacaatttattttcctgcagcagcggcagcagggacggttgctgcaggttcggggtcggccggcctgcgcgtgggcttgcgaggacgctgttcgtcccctgcgctggggtgtccg

SEQ ID NO: 343191 - DNA, 120 bp, Artificial Sequence
  ENSG00000138134_19 (sequence is synthesized)
acagcgaggaggagaacgacgcacggagcccgcgcgactggaaccagcaaagctccatctgtcggcagaggagaagggggaggaggcacggccgaggcaaacgagcggacgcctcgtcgc

SEQ ID NO: 343192 - DNA, 120 bp, Artificial Sequence
  ENSG00000138134_20 (sequence is synthesized)
cgggtgccggtatcaccccgctgcaacgccttccagcaaaagccaccgcggcccgggttgcagcagccggacggatgccaaggccacacggcagccacgggggcagccgtcgcagtcgcc

SEQ ID NO: 343193 - DNA, 120 bp, Artificial Sequence
  ENSG00000138134_21 (sequence is synthesized)
actggttcttgggaatttcaagaagaaacttgttttcttatcctcacctataaagacccttcccagctgtaagaatttacagctacaatccaagaaatgagattgcattttacaagaaaa

SEQ ID NO: 343194 - DNA, 120 bp, Artificial Sequence
  ENSG00000138134_22 (sequence is synthesized)
tcctggtgggtacatttacaaattagggacattttaattaatctactggatttgtgattctgtctgctactatcttctttttcttgaccttatgaaagatttatagatggcttcaactga

SEQ ID NO: 343195 - DNA, 120 bp, Artificial Sequence
  ENSG00000138134_23 (sequence is synthesized)
aactacaggaaatgactcatggttatccctgaagatattagagccagatttccattccttagggctgatgcatagcagctctttgataaatatttgctaaataaatgacaaattttagaa

SEQ ID NO: 343196 - DNA, 120 bp, Artificial Sequence
  ENSG00000138134_24 (sequence is synthesized)
taacatccaggagatattctaatacttcttattttccaagtacacacaaattgggggtagggggaagggctaagatgcttaatagtgggcgtagccagttgtggataaatatcaaaaagg

SEQ ID NO: 343197 - DNA, 120 bp, Artificial Sequence
  ENSG00000138134_25 (sequence is synthesized)
gaatcctaacatgaagtataagtgggattttcaccaaaaccctatccttccccagactccagtgacagtttaacggtcagctgcatcaaggcttgtgtactgtgcagtcttaaaaggcac

SEQ ID NO: 343198 - DNA, 120 bp, Artificial Sequence
  ENSG00000138134_26 (sequence is synthesized)
cactcctgtccatctcggtgaaattgatggtggagcaaaagggagtttaggtggttccggtctggggagaagacgtgcagggtttcagatgcgaaagtcgcacccaaccgcttcactcgg

SEQ ID NO: 343199 - DNA, 120 bp, Artificial Sequence
  ENSG00000138134_27 (sequence is synthesized)
gctctaggccatccgcaggggccctgcttccttccacctgcgagctttttctgcagaatgcgggaagccgccgccgccgccacagaggagggggcggaggcagaggcggaggcggcaccc

SEQ ID NO: 343200 - DNA, 120 bp, Artificial Sequence
  ENSG00000138134_28 (sequence is synthesized)
ccctgaaaattggctatggaccaaatggattcccactcttggggatctctaggtcatcatcaccatctgaacagctctgagagagacaagaagtggaatggagaaggtgattaggtaatc

SEQ ID NO: 343201 - DNA, 120 bp, Artificial Sequence
  ENSG00000138134_29 (sequence is synthesized)
caagaattgccaggcgaacaattgtgaaaatctttcatagagttcccgatgaaaacaactctttcttgttagccattatctctgcctttcctttctaaagaaaaacacgtcatttcatct

SEQ ID NO: 343202 - DNA, 120 bp, Artificial Sequence
  ENSG00000138134_30 (sequence is synthesized)
tgattatcagtttctcaagtactcatggatgtgaggccaggtaccctgtcaccttggctctgtttgggatgcaatgttgtgtttgtcaccacttcccattccccaaaagcatctttaaca

SEQ ID NO: 343203 - DNA, 120 bp, Artificial Sequence
  ENSG00000138134_31 (sequence is synthesized)
tagaccattcattcttcagattcaaaatgcttaagctgaactaacctcaaagggccctcattaatttacagacatttgaataacacccatattcatttctgctactgaaccaaagccttt

SEQ ID NO: 343204 - DNA, 120 bp, Artificial Sequence
  ENSG00000138134_32 (sequence is synthesized)
tccaaaaaaatcatctagcaaactgtttttgccaggccaaatattaacaggtatatatatttgcatacataaatatttacctctatgtcttgtgtgtttttgttatgagacagagtctca

SEQ ID NO: 343205 - DNA, 78 bp, Artificial Sequence
  ENSG00000138134_33 (sequence is synthesized)
gagatggggttttaccctgttggccagggtggtctcgaattcctgacctctgatgatctacccgcctggatgcctctg

SEQ ID NO: 343206 - DNA, 120 bp, Artificial Sequence
  ENSG00000138134_34 (sequence is synthesized)
ttacagacatgagccactgtgccctgcctctgttttgtgtatttacataaatacatgtctccagagctttaaattcttcttaaattttaaaactagaactaaaccagacattgagaggac

SEQ ID NO: 343207 - DNA, 120 bp, Artificial Sequence
  ENSG00000138134_35 (sequence is synthesized)
ccagaaatataccctgactaacgtgggtggaatttcatttggcttgactctttggtgaaaaaaaaaaaaatcaggctctcaaggactcaatttggtgaaccaatgccaaatagaaaaatg

SEQ ID NO: 343208 - DNA, 120 bp, Artificial Sequence
  ENSG00000138134_36 (sequence is synthesized)
ttcttgacattttccccaaaatagatgtctaaagattttgcacttcaaattggtactttatgtattaaaagtgatattgaaactaaattcctacccaattagttgaaaaatatgaaaaaa

SEQ ID NO: 343209 - DNA, 120 bp, Artificial Sequence
  ENSG00000138134_37 (sequence is synthesized)
gcaattgctagagaatgcaatttattaaatgttggtggtcttttaaaaaatgaattcctcttgtagccagtgagatcagttatttatttatttattttaatagtaacaaggtctcactat

SEQ ID NO: 343210 - DNA, 75 bp, Artificial Sequence
  ENSG00000138134_38 (sequence is synthesized)
ctcccatctcagcagttaatggttattaagtaatacaaacatttctgtgaattccaccagatcattgactttggc

SEQ ID NO: 343211 - DNA, 120 bp, Artificial Sequence
  ENSG00000138134_39 (sequence is synthesized)
caaacatttctgtgaattccaccagatcattgactttggcatagttcacttaagactttgtttgataaaataaatctctttcactctaattaggaagcatttttgggatcctgattaatg

SEQ ID NO: 343212 - DNA, 120 bp, Artificial Sequence
  ENSG00000138134_40 (sequence is synthesized)
ctctaatattgtggggccaaaaaatatgtggaacgtggccctgcagttagatgagctgagatcactatagtactatatagcgctctaaatcctaaatgctagatcactgtaatactgtac

SEQ ID NO: 343213 - DNA, 120 bp, Artificial Sequence
  ENSG00000138134_41 (sequence is synthesized)
agatcagccacttgctggcttgtgactctgggccatttacttcacctctcaaaaggcatatttaaagtgaggaaaataataagtttattttggaaattcagttagatgatgcaaattgtt

SEQ ID NO: 343214 - DNA, 120 bp, Artificial Sequence
  ENSG00000138134_42 (sequence is synthesized)
tactgtaatttctagcatgtagttcgtgctccatgcatttaactgttattacaggttgtattagtatcacattaaattacccactgaagtgaaagtgaaaccagaatgctgtcaacgatt

SEQ ID NO: 343215 - DNA, 120 bp, Artificial Sequence
  ENSG00000138134_43 (sequence is synthesized)
atattatctgacctaataagcctggatattttgttagaactggagagcttgggactcctcctttttagcaaaactctgggttagtggtgacagagaaggttggaacacattttaataacc

SEQ ID NO: 343216 - DNA, 120 bp, Artificial Sequence
  ENSG00000138134_44 (sequence is synthesized)
attttttagtgattccttcttatccataaatttccagcagagtatgagttctagagtcaaatgcgaaaggttctagggcagcactgttcaatagaactcctgtgatgatggaagtgttct

SEQ ID NO: 343217 - DNA, 120 bp, Artificial Sequence
  ENSG00000138134_45 (sequence is synthesized)
gtttggcactttccaatatggtatccactagccacatgtggcttctgggtacttaaatgtgactgactagtgtccctgaggtactgaatttctaattttgtttaattttaatcaagttca

SEQ ID NO: 343218 - DNA, 120 bp, Artificial Sequence
  ENSG00000138134_46 (sequence is synthesized)
aataaccacatgtggctagtggccactatattagaagtgcagtaggggtgagatattttgtttcatatggtcttgttggtctgactgagcaaacaaccttgacgttgattttccagtatt

SEQ ID NO: 343219 - DNA, 120 bp, Artificial Sequence
  ENSG00000138134_47 (sequence is synthesized)
taaaagcattagggaatgaagggatcctgattgtcatggcctgtctctggtaaaatatcagtggatttagaactgctatgttaatcagatcaaggggcttttgccctgatgttatgtatt

SEQ ID NO: 343220 - DNA, 120 bp, Artificial Sequence
  ENSG00000138134_48 (sequence is synthesized)
tctctcactgttccatgagtgtccctgtgggcatatcacagtatctagcattttctctgtctgcttgaagactgaaaatgtctaattccagttcaatgtttctccttggaaactaacctt

SEQ ID NO: 343221 - DNA, 120 bp, Artificial Sequence
  ENSG00000138134_49 (sequence is synthesized)
cccaaaacatgagaagtagaaggaatgtgagagaaaataatgtagattccgtccaggaagtgctaggtgctttcctggcccaaggatgtgaccttctcttggattttcctgattattatg

SEQ ID NO: 343222 - DNA, 120 bp, Artificial Sequence
  ENSG00000138135_0 (sequence is synthesized)
ctcagctgccttgcacagcctcgcaatgagctgccacaactgctccgacccccaggtcctttgcagctccgggcagctgttcctgcagcccctctgggaccacctgaggagctgggaggc

SEQ ID NO: 343223 - DNA, 120 bp, Artificial Sequence
  ENSG00000138135_1 (sequence is synthesized)
cctcctacagtcgcccttcttcccggtcatcttctccatcaccacatacgtgggcttttgcctgcccttcgtggtcctggatatcctgtgctcctgggtgcccgccctgcggcgctacaa

SEQ ID NO: 343224 - DNA, 120 bp, Artificial Sequence
  ENSG00000138135_2 (sequence is synthesized)
gatccaccctgacttctcgccatccgcgcagcagctgctaccttgcctggggcagaccctctaccagcatgtgatgtttgtgttccccgtgacgctgctgcattgggcccgcagcccggc

SEQ ID NO: 343225 - DNA, 120 bp, Artificial Sequence
  ENSG00000138135_3 (sequence is synthesized)
cctcctgccccacgaagctcccgagctgctcctgctgctgcaccacatcctgttctgcctgctactcttcgacatggagttcttcgtgtggcacctgctgcaccacaaggtgccctggct

SEQ ID NO: 343226 - DNA, 120 bp, Artificial Sequence
  ENSG00000138135_4 (sequence is synthesized)
gtaccgcaccttccacaaggtgcaccaccagaactcgtcctcgttcgcgctggcaacgcagtatatgagcgtctgggaactgttttctttgggcttcttcgacatgatgaacgtcacact

SEQ ID NO: 343227 - DNA, 120 bp, Artificial Sequence
  ENSG00000138135_5 (sequence is synthesized)
gctcgggtgccacccgctcaccaccctgaccttccacgtggtcaacatctggctttccgtggaggaccactccggctacaacttcccttggtccactcacagactggtgcccttcgggtg

SEQ ID NO: 343228 - DNA, 120 bp, Artificial Sequence
  ENSG00000138135_6 (sequence is synthesized)
gtacgggggtgtggtgcaccacgacctgcatcactctcactttaactgcaacttcgctccgtactttacacactgggacaaaatactgggaacgctgcggactgcatctgtcccagcgcg

SEQ ID NO: 343229 - DNA, 120 bp, Artificial Sequence
  ENSG00000138135_7 (sequence is synthesized)
ctgcggtgggtgcccctaagactcgggactgctgtgcctttcacacttgaatgaagagaaacacctgagctatatatttttttaaagcaactaacttattgctttatgtttatctatgaa

SEQ ID NO: 343230 - DNA, 120 bp, Artificial Sequence
  ENSG00000138135_8 (sequence is synthesized)
aaccatagataaaatctgatgcatttttgtaatctgacaaagtaatttacatactgtttgtgtatcaatacaattttgtgttcttggtattcttagtctagctcacctcaatagccttga

SEQ ID NO: 343231 - DNA, 120 bp, Artificial Sequence
  ENSG00000138135_9 (sequence is synthesized)
atcctgcatatgaattagacattcatcactggcatatttagaatatctctaaaaggacttgtttgtagaataaggaattttctatgtttcaaagtgttctaaaacctggctaaaagaatg

SEQ ID NO: 343232 - DNA, 120 bp, Artificial Sequence
  ENSG00000138135_10 (sequence is synthesized)
tatttttgtggatggtgttgacttctgactctaaaagcaatcaaacatgtttctgctggacagtgaccaagaattatagtaccttcttatatttttttatagaactgtatatttattttg

SEQ ID NO: 343233 - DNA, 120 bp, Artificial Sequence
  ENSG00000138135_11 (sequence is synthesized)
aaagaaatgttattcgtgctttaaaaaggaaaaaaaaccatgaatcaaataagtattgacttccgtttcactggtattttgactgataaaaaagggaagagggagcgggcataccaagtg

SEQ ID NO: 343234 - DNA, 120 bp, Artificial Sequence
  ENSG00000138135_12 (sequence is synthesized)
tccttctaagcctccatcagcctcaccatggaaagagaggaatctgggtgtagggtgttctgttgggggttgttagagaaaaggaggcaggagaaggggctctgtttgttgtgctctagc

SEQ ID NO: 343235 - DNA, 120 bp, Artificial Sequence
  ENSG00000138135_13 (sequence is synthesized)
aatttcatggaggaaaaacacgctaatattcttaatgcttttcagctgatttctgtataacaggcaaatgataggattactctgtaaagtttcatagaaagattaacgctgagcagtcaa

SEQ ID NO: 343236 - DNA, 120 bp, Artificial Sequence
  ENSG00000138136_0 (sequence is synthesized)
gtccctcccgggctggggttcccaccactctttcgggctccacatcccgggtcggagagaccgagaccttcgggccggtgcggtcattgcagctaggccggcgggaggcgggtgcgccag

SEQ ID NO: 343237 - DNA, 120 bp, Artificial Sequence
  ENSG00000138136_1 (sequence is synthesized)
gagcgcggctcgcagtttggggtgggggcggtggcttttcagtcgcccgaggttcgggtgcaataaaggagcagctaatgtaatttacaaacagctcgggccgaacgcagcgcagcgccc

SEQ ID NO: 343238 - DNA, 120 bp, Artificial Sequence
  ENSG00000138136_2 (sequence is synthesized)
ggactgacaggcgcattaggcaggctaattccagccggctcctcctacccccggcccgctaattaatgagcttcccaacttacagccgcctgcattggacagacagagagtgaaagagag

SEQ ID NO: 343239 - DNA, 120 bp, Artificial Sequence
  ENSG00000138136_3 (sequence is synthesized)
ggcgagggagagggagagaaggagagagaaggggggagcagagaagagagaagagagagggagggagggagagcgagaacaggaggagagaacagaggcaaagaagagaggaaaaaggga

SEQ ID NO: 343240 - DNA, 120 bp, Artificial Sequence
  ENSG00000138136_4 (sequence is synthesized)
gaaaggagagagaaagagaaagaagtgccgctgcagataattgattacaccgcgatcaaggctaacttgttagcaatagtcaattgccccgtctctccgcctccctcgcagtccgggatc

SEQ ID NO: 343241 - DNA, 120 bp, Artificial Sequence
  ENSG00000138136_5 (sequence is synthesized)
ggcgccctcgcctcggctcttccaactgcggccgccaggacccggggccaggagccactgccgagccacctgacacctttaaatagcaccggggttggcgaaactggagccccgcgcagc

SEQ ID NO: 343242 - DNA, 120 bp, Artificial Sequence
  ENSG00000138136_6 (sequence is synthesized)
cagcgcgccccggctccggccccggattgctggaagccccagcagcagcggcgcccgcgtcagcgccctcttcccggggccccgcgctgttctcccctcctcagccgccgcgctaatcgg

SEQ ID NO: 343243 - DNA, 80 bp, Artificial Sequence
  ENSG00000138136_7 (sequence is synthesized)
ctaatcggccccgcgcccggcccgcgccctgcccagtgcggcctcctttccacccgccgctgcctgcccgcgccgtccgg

SEQ ID NO: 343244 - DNA, 120 bp, Artificial Sequence
  ENSG00000138136_8 (sequence is synthesized)
gaccccgaacaaggccgagatgacttccaaggaggacggcaaggcggcgccgggggaggagcggcggcgcagcccgctggaccacctgcctccgcctgccaactccaacaagccactgac

SEQ ID NO: 343245 - DNA, 120 bp, Artificial Sequence
  ENSG00000138136_9 (sequence is synthesized)
gccgttcagcatcgaggacatcctcaacaagccgtctgtgcggagaagttactcgctgtgcggggcggcgcacctgctggccgccgcggacaagcacgcgcagggcggcttgcccctggc

SEQ ID NO: 343246 - DNA, 120 bp, Artificial Sequence
  ENSG00000138136_10 (sequence is synthesized)
gggccgcgcgctgctctcgcagacctcgccgctgtgcgcgctggaggagctcgccagcaagacgtttaaggggctggaggtcagcgttctgcaggcagccgaaggccgcgacggtatgac

SEQ ID NO: 343247 - DNA, 120 bp, Artificial Sequence
  ENSG00000138136_11 (sequence is synthesized)
catctttgggcagcggcagacccctaagaagcggcgaaagtcgcgcacggccttcaccaaccaccagatctatgaattggaaaagcgctttctataccagaagtacctgtcccccgccga

SEQ ID NO: 343248 - DNA, 120 bp, Artificial Sequence
  ENSG00000138136_12 (sequence is synthesized)
agctgggcctcaccaacgcgcaagtcatcacctggttccagaatcggcgcgctaagctcaagcgggacctggaggagatgaaggccgacgtagagtccgccaagaaactgggccccagcg

SEQ ID NO: 343249 - DNA, 120 bp, Artificial Sequence
  ENSG00000138136_13 (sequence is synthesized)
ggcagatggacatcgtggcgctggccgaactcgagcagaactcggaggccacagccggcggtggcggcggctgcggcagggccaagtcgaggcccggctctccggtcctccccccaggcg

SEQ ID NO: 343250 - DNA, 120 bp, Artificial Sequence
  ENSG00000138136_14 (sequence is synthesized)
ccccgaaggccccgggcgctggcgccctgcagctctcgcctgcctctccgctcacggaccagccggccagcagccaggactgctcggaggacgaggaagacgaagagatcgacgtggacg

SEQ ID NO: 343251 - DNA, 120 bp, Artificial Sequence
  ENSG00000138136_15 (sequence is synthesized)
attgagcggcgccccgggtcttccgccgccctgggctcctagcgctcgaaagcccaacgcctcccggaccggaccgccgaggggagctgggacctcctctgccaactcccgcctcctccc

SEQ ID NO: 343252 - DNA, 120 bp, Artificial Sequence
  ENSG00000138136_16 (sequence is synthesized)
ctgtccccggccccggactcggctcctggcagccgcctcttccctctcgaagcaataaacccaggctggccggccgggccggccgccaccagcggcctccgccgccccggaagccctcgc

SEQ ID NO: 343253 - DNA, 120 bp, Artificial Sequence
  ENSG00000138136_17 (sequence is synthesized)
cgtgcaattctgtatggcttctatataaatatttaaacctatatagcgggttcttcccaccgcagcctgatttttcctttcttttattattattttttaaatctcggagatttcgatgtt

SEQ ID NO: 343254 - DNA, 120 bp, Artificial Sequence
  ENSG00000138136_18 (sequence is synthesized)
ttcaaagctctcgggctgccgggtttgctgagggcgagacagaaaccagggcggggaacactaaccctgcggtctaggggagtggcagctccggctgttttgatttttctctgcatgtgg

SEQ ID NO: 343255 - DNA, 120 bp, Artificial Sequence
  ENSG00000138136_19 (sequence is synthesized)
cgaatgcaccggcccgctccttcctcgcctccctcggccttattgcagttgacttctatttcctcgggccttttttcctcatgtgggaggggaagaggtgggcagtcaggtcctgacttg

SEQ ID NO: 343256 - DNA, 120 bp, Artificial Sequence
  ENSG00000138136_20 (sequence is synthesized)
caagtttcaaaatcgatctttcctccccaccctctgagagaaaagtctgttttcgatgccatttctgcctcctaatgcccactaatgctgtttttaagattcctccctccctcccgcatt

SEQ ID NO: 343257 - DNA, 120 bp, Artificial Sequence
  ENSG00000138136_21 (sequence is synthesized)
tcctcggactgactgttggagtccggctcttagggacaatgcagggggaaatccaaccaaccaactatcgaaaacagaacccaaagccctataattattttgtactctttttagaatttt

SEQ ID NO: 343258 - DNA, 120 bp, Artificial Sequence
  ENSG00000138136_22 (sequence is synthesized)
tttgcatgtgacagagacagagaggaggccgacccaagccctcacctcacctcctccacagctctgggtctctcttgccacttcgaacaccccactcctacccgacttggccagaggagg

SEQ ID NO: 343259 - DNA, 120 bp, Artificial Sequence
  ENSG00000138136_23 (sequence is synthesized)
gtggctggatgtgagtgggctgcgagtgccccttccctgctcctcccttcccctctcctccctagactgtacccaaggcctctttctccaataaataaagtctttgccattttactagaa

SEQ ID NO: 343260 - DNA, 120 bp, Artificial Sequence
  ENSG00000138138_0 (sequence is synthesized)
agctggttcccgtggggcctcatgggatggttgtcgtatccttctgaggtcctttaaggaccgtctcggacctgggaacccccggaggaaaggtcaccccggtcttctcccacgccctac

SEQ ID NO: 343261 - DNA, 120 bp, Artificial Sequence
  ENSG00000138138_1 (sequence is synthesized)
ctcagtgccgcccccaagcgccccgcagcccttagtatctagaggattaacctccaagggcgtcccgggcctcgccttggcgtccggcccggcctgggcccttagggtctgcttagctct

SEQ ID NO: 343262 - DNA, 120 bp, Artificial Sequence
  ENSG00000138138_2 (sequence is synthesized)
tccccaagactcgtgccattcccgagggaatctttgtcggcatcctggtcactgtgggggtttgaggtcgtcccggaagacttcagaaccaggcgaacctagacgaaggcggctggaatg

SEQ ID NO: 343263 - DNA, 120 bp, Artificial Sequence
  ENSG00000138138_3 (sequence is synthesized)
aaccaggttaacattcaagatggtacatgctgaagccttttctcgtcctttgagtcggaatgaagttgttggtttaattttccgtttgacaatatttggtgcagtgacatactttactat

SEQ ID NO: 343264 - DNA, 120 bp, Artificial Sequence
  ENSG00000138138_4 (sequence is synthesized)
caaatggatggtagatgcaattgatccaaccagaaagcaaaaagtagaagctcagaaacaggcagaaaaactaatgaagcaaattggagtgaaaaatgtgaagctctcagaatatgaaat

SEQ ID NO: 343265 - DNA, 120 bp, Artificial Sequence
  ENSG00000138138_5 (sequence is synthesized)
gagtattgctgctcatcttgtagaccctcttaatatgcatgttacttggagtgatatagcaggtttagatgatgtcattacggatctgaaagacacagtcatcttacctatcaaaaagaa

SEQ ID NO: 343266 - DNA, 120 bp, Artificial Sequence
  ENSG00000138138_6 (sequence is synthesized)
acatttgtttgagaattccaggcttctgcagcctccaaaaggtgttcttctctatgggcctccaggctgtggtaaaacgttgattgccaaggccacagccaaagaagcaggctgtcgatt

SEQ ID NO: 343267 - DNA, 120 bp, Artificial Sequence
  ENSG00000138138_7 (sequence is synthesized)
tattaaccttcagccttcgacactgaccgataagtggtatggagaatctcagaaattggctgctgctgtcttctcccttgccataaagctacaaccatccatcatctttatagatgaaat

SEQ ID NO: 343268 - DNA, 120 bp, Artificial Sequence
  ENSG00000138138_8 (sequence is synthesized)
agactcctttctacgaaaccgttcaagttctgaccatgaagctacagccatgatgaaagctcagtttatgagtctctgggatggattggatactgatcacagctgccaggtcatagtaat

SEQ ID NO: 343269 - DNA, 120 bp, Artificial Sequence
  ENSG00000138138_9 (sequence is synthesized)
gggagctaccaatcgtcctcaggaccttgactcggctataatgagaagaatgcctacaagatttcatatcaaccagcctgctttaaaacagagagaagcaatcctgaaactcatcttgaa

SEQ ID NO: 343270 - DNA, 120 bp, Artificial Sequence
  ENSG00000138138_10 (sequence is synthesized)
aaatgaaaatgtggataggcatgtagacctgctagaagttgcccaggaaactgatgggttttcaggaagtgacctaaaagagatgtgtcgagatgctgccctcctctgtgttagagaata

SEQ ID NO: 343271 - DNA, 120 bp, Artificial Sequence
  ENSG00000138138_11 (sequence is synthesized)
tgttaattctacatcagaagaaagccatgacgaagatgaaattcggcctgttcaacagcaggacctgcatcgggcaattgaaaagatgaagaaatcaaaggatgcagcatttcagaatgt

SEQ ID NO: 343272 - DNA, 120 bp, Artificial Sequence
  ENSG00000138138_12 (sequence is synthesized)
tttaacacatgtttgtttagattaagagtaaagatcatttgtacagttcagtgatctagtttggtgtgtcctcttatcagttagtggaaatagaacggaaagagtgctctttaaacaatg

SEQ ID NO: 343273 - DNA, 120 bp, Artificial Sequence
  ENSG00000138138_13 (sequence is synthesized)
agggagctcagtgtttatggttttatactctgaattctaagttattgagatatagttgttacataggtggtattactgttggtcaaaaatcatgaggaggaacagttgaatccagcctga

SEQ ID NO: 343274 - DNA, 120 bp, Artificial Sequence
  ENSG00000138138_14 (sequence is synthesized)
acgtgggtgcttgtgtttgaccttttcagccatatattgtacagccttatagaatctaagctggtcttaaagtcataaatgattcattgggtcattagtgagaaacggggatgtggttag

SEQ ID NO: 343275 - DNA, 120 bp, Artificial Sequence
  ENSG00000138138_15 (sequence is synthesized)
gtgctggttcctagacatgtgagtatgcgtttgtgtgtgtgcgtgtatgtatgtgtatattaaatgtatatatccacacattttatattgacattctgtagatatgtttgaatatagaaa

SEQ ID NO: 343276 - DNA, 120 bp, Artificial Sequence
  ENSG00000138138_16 (sequence is synthesized)
ctttttttaccccaactactgaatccaggagtaccaaataatatatagtaaaactaagatttaaggttgtgtcaaaaaggtacagtgattcagccatttccatttgtcatttgtttcaac

SEQ ID NO: 343277 - DNA, 120 bp, Artificial Sequence
  ENSG00000138138_17 (sequence is synthesized)
cttttttaagttgagtgtttttatttctgcagttattagttggatcctccacatcttgcatatatacatgggctcaattattatgtttgtcaggataatcaaatgaaaatactagttcag

SEQ ID NO: 343278 - DNA, 120 bp, Artificial Sequence
  ENSG00000138138_18 (sequence is synthesized)
tgatcagcattgaatggttgttaggcagccatgtgctcaacactgatttcacctcttgagtataaactttttaaatttaaattggtttacatgaaagtggattaaaaggcctttcaaaag

SEQ ID NO: 343279 - DNA, 120 bp, Artificial Sequence
  ENSG00000138138_19 (sequence is synthesized)
aactatgtttcttaaatattattttaaggttatgtgttctttaattatggtcaaatataatttggtcaccaaaaatgaaataatagtttaaaacaagtagctgttactaagtgtgctaaa

SEQ ID NO: 343280 - DNA, 120 bp, Artificial Sequence
  ENSG00000138138_20 (sequence is synthesized)
aatactcattttataattaattttagttttcttagtatattattataaattgtgccctaagtcaggtacaaatgtacacatcaaaatgcccatattgtatctatctgtagtcgtttaatg

SEQ ID NO: 343281 - DNA, 120 bp, Artificial Sequence
  ENSG00000138138_21 (sequence is synthesized)
tgaattatatgtgaatttttttcaaaattttactaaccagaattctgttataggcacctaaccacgcagcatgaggaaaacggcacaacacaatcttgaggtgccttctgaatcatcaga

SEQ ID NO: 343282 - DNA, 120 bp, Artificial Sequence
  ENSG00000138138_22 (sequence is synthesized)
ttaaattatgcttcatatgtttttgcttttactgtatttctttaaaaactctaaatctttattcatgtgtcactggattaatttatctgataatgtgtctcacaagaatctgttagatcg

SEQ ID NO: 343283 - DNA, 120 bp, Artificial Sequence
  ENSG00000138138_23 (sequence is synthesized)
tttattcttcagttgtactttgaatggtggggtggaagtttcaggtgaacaatggataacaaaaagcaagttatggaagattgtgaagaggatggaaaaactgaatacaagataccaaaa

SEQ ID NO: 343284 - DNA, 120 bp, Artificial Sequence
  ENSG00000138138_24 (sequence is synthesized)
atgaaaaaaagtgtcccatttttaataactatattctattattttataaatgtgtaataaaggggtccctctttattggttgttctccacttaatctttggtctttttcagtaattttaa

SEQ ID NO: 343285 - DNA, 120 bp, Artificial Sequence
  ENSG00000138138_25 (sequence is synthesized)
gttttctgggattttttttggtttataaaacttgtgtttagactttatcttgctatggagttttcacacttctatagcacatatcctagtatctagtcatttctgttttaatatgaattt

SEQ ID NO: 343286 - DNA, 120 bp, Artificial Sequence
  ENSG00000138138_26 (sequence is synthesized)
cagtaatttaattttaatctggtgacatattaatcgaaaataaggagtaatgtatacctccacatgtcctttctttttgtcttctcttaaattcacaatatccagtaggagtggttattc

SEQ ID NO: 343287 - DNA, 120 bp, Artificial Sequence
  ENSG00000138138_27 (sequence is synthesized)
aatttcttcgtggttttaatcatcaaatgaagttagagaagtatactaatcccagcaactatgactcatctaggcatgttaagaccataaagtaattcaggaaactattttcctgatttt

SEQ ID NO: 343288 - DNA, 120 bp, Artificial Sequence
  ENSG00000138138_28 (sequence is synthesized)
taaataacttttagtgttatgtaacatctatccttctgttttagacatgcatttcacatatagttgaattctagattctaagataattcattttgggtaatacttcagagtactggatct

SEQ ID NO: 343289 - DNA, 120 bp, Artificial Sequence
  ENSG00000138138_29 (sequence is synthesized)
agaatcaggcttcctgaatttaaactcaggctccccattaactgtgtgtctgtgagcccagtttctcatctgtaaaatggggcaacagtggcactcatcttaaagggttggataataaaa

SEQ ID NO: 343290 - DNA, 120 bp, Artificial Sequence
  ENSG00000138138_30 (sequence is synthesized)
taatgcatgtaaggccctcagcatagtgcctggcacagaattactgctcaaatgttagctgtcgtattaatattgtcacttttgcacactgatgtacatttcctgttgaccaggctcatt

SEQ ID NO: 343291 - DNA, 120 bp, Artificial Sequence
  ENSG00000138138_31 (sequence is synthesized)
ctttaagcattctccatgcttaaaccagttccataatccctaggcctgtactccagggattgagactgaaaggatcatttatgccatgtttctctaaaagcatcattgctggaagacttt

SEQ ID NO: 343292 - DNA, 120 bp, Artificial Sequence
  ENSG00000138138_32 (sequence is synthesized)
tgataagtctgatgtgtctcaagctattctcaggccttttttgtagagtttagaaatgaagtatttgaatcaatttagtatctcctttactatgtttctccttttaatctcagccaaccc

SEQ ID NO: 343293 - DNA, 120 bp, Artificial Sequence
  ENSG00000138138_33 (sequence is synthesized)
cctacctgcaggtaaacccagcattcattaagagctgggttggggtactctattctgtatgcatcataatagcttaacattatttagtagctgtaacttacaggtttaatgctagatgag

SEQ ID NO: 343294 - DNA, 120 bp, Artificial Sequence
  ENSG00000138138_34 (sequence is synthesized)
gatgtctcaagccgtgagtgtgcttgtgtaaaaatggtggcaacatcatctcgttggtaggaattttttacttgaattgttattttgggaaaatgttaacagatttcttctggataaaga

SEQ ID NO: 343295 - DNA, 120 bp, Artificial Sequence
  ENSG00000138138_35 (sequence is synthesized)
aaataaattggatgatgtatattttatgtttctttttagcttctcttaaaatcagaatattgaacagaattctgatatgctgaatatatatagtgcatggctgaaactccagcaccaact

SEQ ID NO: 343296 - DNA, 120 bp, Artificial Sequence
  ENSG00000138138_36 (sequence is synthesized)
gggtgcttcaaatgaagtcatagaataattccatctagagctgacagaaatctttcagagccttcattattaaatttgttatagatttagttatcaaagatagagttctctaatcttttt

SEQ ID NO: 343297 - DNA, 120 bp, Artificial Sequence
  ENSG00000138138_37 (sequence is synthesized)
tttaaagctaaagttctctttatttacatgtataggaaaacattctgcctaaatcatgatgttaatgaaaatcatattgaggagaacttgaaccttattaaatatgagcttctaacataa

SEQ ID NO: 343298 - DNA, 120 bp, Artificial Sequence
  ENSG00000138138_38 (sequence is synthesized)
gtatttttcaaataaaatgattaattctactaccaaataaatcttaatttctagtctacttctagtttgcaagaggagctttaaatgtatttgtttacttaacatttaaaaatccatttc

SEQ ID NO: 343299 - DNA, 120 bp, Artificial Sequence
  ENSG00000138138_39 (sequence is synthesized)
tttctccttaaaatgaaacactttttttaaggtaggtaatattttaatttgactagaagttagtttttctttcttagtttaagctactttgttagtcttacaattttaataagtatagtt

SEQ ID NO: 343300 - DNA, 120 bp, Artificial Sequence
  ENSG00000138138_40 (sequence is synthesized)
gtggggactaggttcagaagatgtcatctcccccatagactagcttcccagagaatgtcacctgcaaactagaatgatgctagtctcagcttaactgtgcaaagagaaaaccagaacgcg

SEQ ID NO: 343301 - DNA, 120 bp, Artificial Sequence
  ENSG00000138152_0 (sequence is synthesized)
acaaccacccaggaaaccaaggcaagctccccctgtcaaagcaccttggcccataagaagaaaagggggagccccagatgtgatgagcgcttccaggcttcaggctcagaaggcgccccc

SEQ ID NO: 343302 - DNA, 120 bp, Artificial Sequence
  ENSG00000138152_1 (sequence is synthesized)
agctctcctgtaactcagaggccagtgtgatgggagttcctccactcagcacacttcccctgtaaacacgcctgtggtgggcaaaagggctttggaacggttgcttgtcttttctctcct

SEQ ID NO: 343303 - DNA, 120 bp, Artificial Sequence
  ENSG00000138152_2 (sequence is synthesized)
gcgtaatttccactttcattcatgataatgtcgaacacgcacaaagctcggctggaacgccgggtcactggctcaaccaaccggtggcgtttgcccaaacagcctttctctggggacctg

SEQ ID NO: 343304 - DNA, 120 bp, Artificial Sequence
  ENSG00000138152_3 (sequence is synthesized)
ctctcactttcccagatgtgcaaggctctgagcatagactttgaggaagctttgaggaacccagacaggttatgcatttcacaaatccagaagtttttctttgagaatttcaagaacaag

SEQ ID NO: 343305 - DNA, 120 bp, Artificial Sequence
  ENSG00000138152_4 (sequence is synthesized)
gacatccaaagtggggaagcagatgtgattctcgagtgcctgggcttcaaatgggagctccatcagccccagctttttcagtctgagaccttggccaagctctacctgaaagccctggcg

SEQ ID NO: 343306 - DNA, 120 bp, Artificial Sequence
  ENSG00000138152_5 (sequence is synthesized)
cagggcaccacacaccccctgagggagctggaggagcttctgcgagctcaatcacctaagaagaccaaagaaaaatcccctgcaaagaggatcatcatttccttgaagatcaatgaccca

SEQ ID NO: 343307 - DNA, 120 bp, Artificial Sequence
  ENSG00000138152_6 (sequence is synthesized)
ctggtcactaaagtcgccttcgccacggccctgaagaacctctacatgagtgaggtggagattaacttggaagacctactgggagtgctggcttccgcccacatcctccagttcagtggc

SEQ ID NO: 343308 - DNA, 120 bp, Artificial Sequence
  ENSG00000138152_7 (sequence is synthesized)
aggccggctgcaagtacaaggaagagcagctcaccaccggctgcgagaagtggctggaaatgaacttggttcctctaggggggacgcagatccacctccacaaaatcccacaggacctgc

SEQ ID NO: 343309 - DNA, 120 bp, Artificial Sequence
  ENSG00000138152_8 (sequence is synthesized)
tccacaaagtgctgaagtcccccaggttatttacctttagtgaattccatcttctgaaaacaatgcttttgtgggtcttcttgcaactgaactacaagattcaggcaattccgacttatg

SEQ ID NO: 343310 - DNA, 120 bp, Artificial Sequence
  ENSG00000138152_9 (sequence is synthesized)
aaaccgtgatgacattttttaagagctttcctgagaactgttgctttctggaccgggacataggacggagcttgaggccgctcttcctctgcttgcgtctgcacggcatcaccaaaggca

SEQ ID NO: 343311 - DNA, 120 bp, Artificial Sequence
  ENSG00000138152_10 (sequence is synthesized)
aggatctggaggtgctgcggcaccttaacttcttcccagagtcatggctcgaccaggttacagtcaaccattaccacgcactggagaatgggggcgacatggtccacctgaaagatctta

SEQ ID NO: 343312 - DNA, 120 bp, Artificial Sequence
  ENSG00000138152_11 (sequence is synthesized)
acacccaggctgtgagatttgggctgctctttaaccaggagaatacaacttattcgaaaacgattgctctatatggattcttctttaagataaagggactcaaacatgatactacctctt

SEQ ID NO: 343313 - DNA, 120 bp, Artificial Sequence
  ENSG00000138152_12 (sequence is synthesized)
atagtttttacatgcagagaataaagcacacagacctggaatctccctctgcggtctacgagcacaaccacgtcagcctgcgagcggcacgcctggtgaagtatgagatcagagcagagg

SEQ ID NO: 343314 - DNA, 120 bp, Artificial Sequence
  ENSG00000138152_13 (sequence is synthesized)
ccctggttgacggcaagtggcaggagttcaggacaaaccagatcaagcagaagtttgggttgaccacgtcatcctgcaaaagccataccttgaaaatccaaactgtgggcatcccaatct

SEQ ID NO: 343315 - DNA, 120 bp, Artificial Sequence
  ENSG00000138152_14 (sequence is synthesized)
atgtaagttttgcattcatcttcccagcatcttgacagtttccagaagaatctatgggattttccccccactggtctgcataaaagaaaataaaatgacataaaagggagcactcaagca

SEQ ID NO: 343316 - DNA, 120 bp, Artificial Sequence
  ENSG00000138152_15 (sequence is synthesized)
gacagtctgtgcagacatctcgggaagtccccaccttcctcttggtcctctgactctgcccacctccttccttttgtcccccgctgccaacgtcatcctctccaattccgctccctctcc

SEQ ID NO: 343317 - DNA, 120 bp, Artificial Sequence
  ENSG00000138152_16 (sequence is synthesized)
tccccagccctcaccttggagcctcccatgaggggccttgcttgctcttgattttgtgactgtgatcatctctgccccatgcacacattttatttcccatgtgagactgctcagatactt

SEQ ID NO: 343318 - DNA, 120 bp, Artificial Sequence
  ENSG00000138152_17 (sequence is synthesized)
cttcgccacggccctgaagaacctctacatgagtgaggtggagattaacttggaagacctactgggagtgctggcttccgcccacatcctccagttcagtggcctgtttcaaaggaatga

SEQ ID NO: 343319 - DNA, 120 bp, Artificial Sequence
  ENSG00000138152_18 (sequence is synthesized)
ctaccactgggagagacttcatgtgtatacacagtgacttcctagtagcccccaaaccaggcttgcttatcaatttcacctcttctcattgttggctaaaagaaaaaaaaaatctctctc

SEQ ID NO: 343320 - DNA, 120 bp, Artificial Sequence
  ENSG00000138152_19 (sequence is synthesized)
ctttaagtcatacacacacacagaagctggccattggaggacaagctgacttttccatcactgttgggcctacattttcctgctcatttgagataaagtcttgttttttcttgtaaataa

SEQ ID NO: 343321 - DNA, 120 bp, Artificial Sequence
  ENSG00000138160_0 (sequence is synthesized)
agtttctggggattcgggcggagacgagattagtgatttggcggctccgactggcgcgggacaaacgccacggccagagtaccgggtagagagcggggacgccgacctgcgtgcgtcggt

SEQ ID NO: 343322 - DNA, 120 bp, Artificial Sequence
  ENSG00000138160_1 (sequence is synthesized)
cctccaggccacgccagcgcccgagagggaccagggagactccggcccctgtcggccgccaagcccctccgcccctcacagcgcccaggtccgcggccgggccttgattttttggcgggg

SEQ ID NO: 343323 - DNA, 120 bp, Artificial Sequence
  ENSG00000138160_2 (sequence is synthesized)
accgtcatggcgtcgcagccaaattcgtctgcgaagaagaaagaggagaaggggaagaacatccaggtggtggtgagatgcagaccatttaatttggcagagcggaaagctagcgcccat

SEQ ID NO: 343324 - DNA, 120 bp, Artificial Sequence
  ENSG00000138160_3 (sequence is synthesized)
tcaatagtagaatgtgatcctgtacgaaaagaagttagtgtacgaactggaggattggctgacaagagctcaaggaaaacatacacttttgatatggtgtttggagcatctactaaacag

SEQ ID NO: 343325 - DNA, 120 bp, Artificial Sequence
  ENSG00000138160_4 (sequence is synthesized)
attgatgtttaccgaagtgttgtttgtccaattctggatgaagttattatgggctataattgcactatctttgcgtatggccaaactggcactggaaaaacttttacaatggaaggtgaa

SEQ ID NO: 343326 - DNA, 120 bp, Artificial Sequence
  ENSG00000138160_5 (sequence is synthesized)
aggtcacctaatgaagagtatacctgggaagaggatcccttggctggtataattccacgtacccttcatcaaatttttgagaaacttactgataatggtactgaattttcagtcaaagtg

SEQ ID NO: 343327 - DNA, 120 bp, Artificial Sequence
  ENSG00000138160_6 (sequence is synthesized)
tctctgttggagatctataatgaagagctttttgatcttcttaatccatcatctgatgtttctgagagactacagatgtttgatgatccccgtaacaagagaggagtgataattaaaggt

SEQ ID NO: 343328 - DNA, 120 bp, Artificial Sequence
  ENSG00000138160_7 (sequence is synthesized)
ttagaagaaattacagtacacaacaaggatgaagtctatcaaattttagaaaagggggcagcaaaaaggacaactgcagctactctgatgaatgcatactctagtcgttcccactcagtt

SEQ ID NO: 343329 - DNA, 120 bp, Artificial Sequence
  ENSG00000138160_8 (sequence is synthesized)
ttctctgttacaatacatatgaaagaaactacgattgatggagaagagcttgttaaaatcggaaagttgaacttggttgatcttgcaggaagtgaaaacattggccgttctggagctgtt

SEQ ID NO: 343330 - DNA, 120 bp, Artificial Sequence
  ENSG00000138160_9 (sequence is synthesized)
gataagagagctcgggaagctggaaatataaatcaatccctgttgactttgggaagggtcattactgcccttgtagaaagaacacctcatgttccttatcgagaatctaaactaactaga

SEQ ID NO: 343331 - DNA, 120 bp, Artificial Sequence
  ENSG00000138160_10 (sequence is synthesized)
atcctccaggattctcttggagggcgtacaagaacatctataattgcaacaatttctcctgcatctctcaatcttgaggaaactctgagtacattggaatatgctcatagagcaaagaac

SEQ ID NO: 343332 - DNA, 120 bp, Artificial Sequence
  ENSG00000138160_11 (sequence is synthesized)
atattgaataagcctgaagtgaatcagaaactcaccaaaaaagctcttattaaggagtatacggaggagatagaacgtttaaaacgagatcttgctgcagcccgtgagaaaaatggagtg

SEQ ID NO: 343333 - DNA, 120 bp, Artificial Sequence
  ENSG00000138160_12 (sequence is synthesized)
tatatttctgaagaaaattttagagtcatgagtggaaaattaactgttcaagaagagcagattgtagaattgattgaaaaaattggtgctgttgaggaggagctgaatagggttacagag

SEQ ID NO: 343334 - DNA, 120 bp, Artificial Sequence
  ENSG00000138160_13 (sequence is synthesized)
ttgtttatggataataaaaatgaacttgaccagtgtaaatctgacctgcaaaataaaacacaagaacttgaaaccactcaaaaacatttgcaagaaactaaattacaacttgttaaagaa

SEQ ID NO: 343335 - DNA, 120 bp, Artificial Sequence
  ENSG00000138160_14 (sequence is synthesized)
gaatatatcacatcagctttggaaagtactgaggagaaacttcatgatgctgccagcaagctgcttaacacagttgaagaaactacaaaagatgtatctggtctccattccaaactggat

SEQ ID NO: 343336 - DNA, 120 bp, Artificial Sequence
  ENSG00000138160_15 (sequence is synthesized)
cgtaagaaggcagttgaccaacacaatgcagaagctcaggatatttttggcaaaaacctgaatagtctgtttaataatatggaagaattaattaaggatggcagctcaaagcaaaaggcc

SEQ ID NO: 343337 - DNA, 120 bp, Artificial Sequence
  ENSG00000138160_16 (sequence is synthesized)
atgctagaagtacataagaccttatttggtaatctgctgtcttccagtgtctctgcattagataccattactacagtagcacttggatctctcacatctattccagaaaatgtgtctact

SEQ ID NO: 343338 - DNA, 120 bp, Artificial Sequence
  ENSG00000138160_17 (sequence is synthesized)
catgtttctcagatttttaatatgatactaaaagaacaatcattagcagcagaaagtaaaactgtactacaggaattgattaatgtactcaagactgatcttctaagttcactggaaatg

SEQ ID NO: 343339 - DNA, 120 bp, Artificial Sequence
  ENSG00000138160_18 (sequence is synthesized)
attttatccccaactgtggtgtctatactgaaaatcaatagtcaactaaagcatattttcaagacttcattgacagtggccgataagatagaagatcaaaaaaaggaactagatggcttt

SEQ ID NO: 343340 - DNA, 120 bp, Artificial Sequence
  ENSG00000138160_19 (sequence is synthesized)
ctcagtatactgtgtaacaatctacatgaactacaagaaaataccatttgttccttggttgagtcacaaaagcaatgtggaaacctaactgaagacctgaagacaataaagcagacccat

SEQ ID NO: 343341 - DNA, 120 bp, Artificial Sequence
  ENSG00000138160_20 (sequence is synthesized)
caggaaaatatacagcagaaatctaaggatatagtcaacaaaatgacttttcacagtcaaaaattttgtgctgattctgatggcttctcacaggaactcagaaattttaaccaagaaggt

SEQ ID NO: 343342 - DNA, 120 bp, Artificial Sequence
  ENSG00000138160_21 (sequence is synthesized)
acaaaattggttgaagaatctgtgaaacactctgataaactcaatggcaacctggaaaaaatatctcaagagactgaacagagatgtgaatctctgaacacaagaacagtttatttttct

SEQ ID NO: 343343 - DNA, 120 bp, Artificial Sequence
  ENSG00000138160_22 (sequence is synthesized)
gaacagtgggtatcttccttaaatgaaagggaacaggaacttcacaacttattggaggttgtaagccaatgttgtgaggcttcaagttcagacatcactgagaaatcagatggacgtaag

SEQ ID NO: 343344 - DNA, 120 bp, Artificial Sequence
  ENSG00000138160_23 (sequence is synthesized)
gcagctcatgagaaacagcataacatttttcttgatcagatgactattgatgaagataaattgatagcacaaaatctagaacttaatgaaaccataaaaattggtttgactaagcttaat

SEQ ID NO: 343345 - DNA, 120 bp, Artificial Sequence
  ENSG00000138160_24 (sequence is synthesized)
tgctttctggaacaggatctgaaactggatatcccaacaggtacgacaccacagaggaaaagttatttatacccatcaacactggtaagaactgaaccacgtgaacatctccttgatcag

SEQ ID NO: 343346 - DNA, 120 bp, Artificial Sequence
  ENSG00000138160_25 (sequence is synthesized)
ctgaaaaggaaacagcctgagctgttaatgatgctaaactgttcagaaaacaacaaagaagagacaattccggatgtggatgtagaagaggcagttctggggcagtatactgaagaacct

SEQ ID NO: 343347 - DNA, 120 bp, Artificial Sequence
  ENSG00000138160_26 (sequence is synthesized)
ctaagtcaagagccatctgtagatgctggtgtggattgttcatcaattggcggggttccatttttccagcataaaaaatcacatggaaaagacaaagaaaacagaggcattaacacactg

SEQ ID NO: 343348 - DNA, 120 bp, Artificial Sequence
  ENSG00000138160_27 (sequence is synthesized)
gagaggtctaaagtggaagaaactacagagcacttggttacaaagagcagattacctctgcgagcccagatcaacctttaattcacttgggggttggcaattttatttttaaagaaaact

SEQ ID NO: 343349 - DNA, 120 bp, Artificial Sequence
  ENSG00000138160_28 (sequence is synthesized)
gggggttggcaattttatttttaaagaaaacttaaaaataaaacctgaaaccccagaacttgagccttgtgtatagattttaaaagaatatatatatcagccgggcgcggtggctcatgc

SEQ ID NO: 343350 - DNA, 69 bp, Artificial Sequence
  ENSG00000138160_29 (sequence is synthesized)
agtgagccaaaggcaaaatttaaaaaagatataaggcagtactgtaaattcagttgaattttgatatct

SEQ ID NO: 343351 - DNA, 120 bp, Artificial Sequence
  ENSG00000138160_30 (sequence is synthesized)
tataaggcagtactgtaaattcagttgaattttgatatctacccatttttctgtcatccctatagttcactttgtattaaattgggtttcatttgggatttgcaatgtaaatacgtattt

SEQ ID NO: 343352 - DNA, 120 bp, Artificial Sequence
  ENSG00000138160_31 (sequence is synthesized)
atttctagttttcatataaagtagttcttttataacaaatgaaaagtatttttcttgtatattattaagtaatgaatatataagaactgtactcttctcagcttgagcttacataggtaa

SEQ ID NO: 343353 - DNA, 120 bp, Artificial Sequence
  ENSG00000138160_32 (sequence is synthesized)
caccaacatctgtccttagaaaggaccatctcatgttttttttcttgctatgacttgtgtattttcttgcatcctccctagacttccctatttcgctttctcctcggctcactttctccc

SEQ ID NO: 343354 - DNA, 120 bp, Artificial Sequence
  ENSG00000138160_33 (sequence is synthesized)
tttttatttttcaccaaaccatttgtagagctacaaaaggtatcctttcttattttcagtagtcagaattttatctagaaatcttttaacacctttttagtggttatttctaaaatcact

SEQ ID NO: 343355 - DNA, 120 bp, Artificial Sequence
  ENSG00000138160_34 (sequence is synthesized)
gtcaacaataaatctaaccctagttgtatccctcctttcagtatttttcacttgttgccccaaatgtgaaagcatttcattcctttaagaggcctaactcattcaccctgacagagttca

SEQ ID NO: 343356 - DNA, 120 bp, Artificial Sequence
  ENSG00000138160_35 (sequence is synthesized)
caaaaagcccacttaagagtatacattgctattatgggagaccacccagacatctgactaatggctctgtgcccacactccaagacctgtgccttttagagaagctcacaatgatttaag

SEQ ID NO: 343357 - DNA, 120 bp, Artificial Sequence
  ENSG00000138160_36 (sequence is synthesized)
gactgtttgaaacttccaattatgtctataatttatattcttttgtttacatgatgaaactttttgttgttgcttgtttgtatataatacaatgtgtacatgtatctttttctcgattca

SEQ ID NO: 343358 - DNA, 120 bp, Artificial Sequence
  ENSG00000138160_37 (sequence is synthesized)
aatcttaacccttaggactctggtatttttgatctggcaaccatatttctggaagttgagatgtttcagcttgaagaaccaaaacagaaggaatatgtacaaagaataaattttctgctc

SEQ ID NO: 343359 - DNA, 120 bp, Artificial Sequence
  ENSG00000138160_38 (sequence is synthesized)
acgatgagtttagtgtgtaaagtttagagacatctgactttgatagctaaattaaaccaaaccctattgaagaattgaatatatgctacttcaagaaactaaattgatctcgtagaatta

SEQ ID NO: 343360 - DNA, 120 bp, Artificial Sequence
  ENSG00000138160_39 (sequence is synthesized)
tcttaataaaataatggctataatttctctgcaaaatcagatgtcagcataagcgatggataatacctaataaactgccctcagtaaatccatggttaataaatgtggtttctacattaa

SEQ ID NO: 343361 - DNA, 120 bp, Artificial Sequence
  ENSG00000138161_0 (sequence is synthesized)
agcgccttgccaaaatggagcttgtaagaaggctcatgccattgaccctcttaattctctcctgtttggcggagctgacaatggcggaggctgaaggcaatgcaagctgcacagtcagtc

SEQ ID NO: 343362 - DNA, 120 bp, Artificial Sequence
  ENSG00000138161_1 (sequence is synthesized)
tagggggtgccaatatggcagagacccacaaagccatgatcctgcaactcaatcccagtgagaactgcacctggacaatagaaagaccagaaaacaaaagcatcagaattatcttttcct

SEQ ID NO: 343363 - DNA, 120 bp, Artificial Sequence
  ENSG00000138161_2 (sequence is synthesized)
atgtccagcttgatccagatggaagctgtgaaagtgaaaacattaaagtctttgacggaacctccagcaatgggcctctgctagggcaagtctgcagtaaaaacgactatgttcctgtat

SEQ ID NO: 343364 - DNA, 120 bp, Artificial Sequence
  ENSG00000138161_3 (sequence is synthesized)
ttgaatcatcatccagtacattgacgtttcaaatagttactgactcagcaagaattcaaagaactgtctttgtcttctactacttcttctctcctaacatctctattccaaactgtggcg

SEQ ID NO: 343365 - DNA, 120 bp, Artificial Sequence
  ENSG00000138161_4 (sequence is synthesized)
gttacctggataccttggaaggatccttcaccagccccaattacccaaagccgcatcctgagctggcttattgtgtgtggcacatacaagtggagaaagattacaagataaaactaaact

SEQ ID NO: 343366 - DNA, 120 bp, Artificial Sequence
  ENSG00000138161_5 (sequence is synthesized)
tcaaagagattttcctagaaatagacaaacagtgcaaatttgattttcttgccatctatgatggcccctccaccaactctggcctgattggacaagtctgtggccgtgtgactcccacct

SEQ ID NO: 343367 - DNA, 120 bp, Artificial Sequence
  ENSG00000138161_6 (sequence is synthesized)
tcgaatcgtcatcaaactctctgactgtcgtgttgtctacagattatgccaattcttaccggggattttctgcttcctacacctcaatttatgcagaaaacatcaacactacatctttaa

SEQ ID NO: 343368 - DNA, 120 bp, Artificial Sequence
  ENSG00000138161_7 (sequence is synthesized)
cttgctcttctgacaggatgagagttattataagcaaatcctacctagaggcttttaactctaatgggaataacttgcaactaaaagacccaacttgcagaccaaaattatcaaatgttg

SEQ ID NO: 343369 - DNA, 120 bp, Artificial Sequence
  ENSG00000138161_8 (sequence is synthesized)
agaaaggtagaagatcagtcaattacttacaccaatataatcaccttttctgcatcctcaacttctgaagtgatcacccgtcagaaacaactccagattattgtgaagtgtgaaatggga

SEQ ID NO: 343370 - DNA, 120 bp, Artificial Sequence
  ENSG00000138161_9 (sequence is synthesized)
cataattctacagtggagataatatacataacagaagatgatgtaatacaaagtcaaaatgcactgggcaaatataacaccagcatggctctttttgaatccaattcatttgaaaagact

SEQ ID NO: 343371 - DNA, 120 bp, Artificial Sequence
  ENSG00000138161_10 (sequence is synthesized)
atacttgaatcaccatattatgtggatttgaaccaaactctttttgttcaagttagtctgcacacctcagatccaaatttggtggtgtttcttgatacctgtagagcctctcccacctct

SEQ ID NO: 343372 - DNA, 120 bp, Artificial Sequence
  ENSG00000138161_11 (sequence is synthesized)
gactttgcatctccaacctacgacctaatcaagagtggatgtagtcgagatgaaacttgtaaggtgtatcccttatttggacactatgggagattccagtttaatgcctttaaattcttg

SEQ ID NO: 343373 - DNA, 120 bp, Artificial Sequence
  ENSG00000138161_12 (sequence is synthesized)
agaagtatgagctctgtgtatctgcagtgtaaagttttgatatgtgatagcagtgaccaccagtctcgctgcaatcaaggttgtgtctccagaagcaaacgagacatttcttcatataaa

SEQ ID NO: 343374 - DNA, 120 bp, Artificial Sequence
  ENSG00000138161_13 (sequence is synthesized)
tggaaaacagattccatcataggacccattcgtctgaaaagggatcgaagtgcaagtggcaattcaggatttcagcatgaaacacatgcggaagaaactccaaaccagcctttcaacagt

SEQ ID NO: 343375 - DNA, 120 bp, Artificial Sequence
  ENSG00000138161_14 (sequence is synthesized)
gtgcatctgttttccttcatggttctagctctgaatgtggtgactgtagcgacaatcacagtgaggcattttgtaaatcaacgggcagactacaaataccagaagctgcagaactattaa

SEQ ID NO: 343376 - DNA, 120 bp, Artificial Sequence
  ENSG00000138161_15 (sequence is synthesized)
ctaacaggtccaaccctaagtgagacatgtttctccaggatgccaaaggaaatgctacctcgtggctacacatattatgaataaatgaggaagggcctgaaagtgacacacaggcctgca

SEQ ID NO: 343377 - DNA, 120 bp, Artificial Sequence
  ENSG00000138161_16 (sequence is synthesized)
gaggccacctgtttgtgatgtgcaggcacagaagaaaggcacagctccccatcagtttcatggaaaataactcagtgcctgctgggaaccagctgctggagatccctacagagagcttcc

SEQ ID NO: 343378 - DNA, 120 bp, Artificial Sequence
  ENSG00000138161_17 (sequence is synthesized)
actgggggcaacccttccaggaaggagttggggagagagaaccctcactgtggggaatgctgataaaccagtcacacagctgctctattctcacacaaatctaccccttgcgtggctgga

SEQ ID NO: 343379 - DNA, 120 bp, Artificial Sequence
  ENSG00000138161_18 (sequence is synthesized)
actgacgtttccctggaggtgtccagaaagctgatgtaacacagagcctataaaagctgtcggtccttaaggctgcccagcgccttgccaaaatggagcttgtaagaaggctcatgccat

SEQ ID NO: 343380 - DNA, 120 bp, Artificial Sequence
  ENSG00000138161_19 (sequence is synthesized)
cttactggggaaaggagagaccaagggctgcttcatgaaggctgtttctgagctgagctttgaacaatagcatgacgagggtaggtggaggtgggagtcagggaagaggactcacctctg

SEQ ID NO: 343381 - DNA, 120 bp, Artificial Sequence
  ENSG00000138161_20 (sequence is synthesized)
ctggagctgacagctgaggagtcatgggaagaaagggaggatagaacagaaggccatgaagtagtggcggatgagactggaaagctgagctggtgagagtgaggaagagccttcaaggga

SEQ ID NO: 343382 - DNA, 120 bp, Artificial Sequence
  ENSG00000138161_21 (sequence is synthesized)
gggtgtgactttattttctatggcgcaattcaggtaatgggagtctctccagatgcaacacatgttacagcacaactttaatatgattcgtttggcaatagtataaagattccctctctg

SEQ ID NO: 343383 - DNA, 120 bp, Artificial Sequence
  ENSG00000138161_22 (sequence is synthesized)
ccctgcaccagtggacagaaatttcaatgataaaaaaggatgaaaacctcaatatgtgacccatgggaaagatagagatggaatcatactcaggagagatgtgttaagctcaatgcacaa

SEQ ID NO: 343384 - DNA, 120 bp, Artificial Sequence
  ENSG00000138162_0 (sequence is synthesized)
gtcacctctgacaaaattctggggacgctgggaacactgaatcaacatgggcaatgagaacagcacctcggacaaccagaggactttatcagctcagactccaaggtccgcgcagccacc

SEQ ID NO: 343385 - DNA, 120 bp, Artificial Sequence
  ENSG00000138162_1 (sequence is synthesized)
cgggaacagtcagaatataaaaaggaagcagcaggacacgcccggaagccctgaccacagagacgcgtccagcattggcagcgttgggcttggaggcttctgcaccgcttctgagagttc

SEQ ID NO: 343386 - DNA, 120 bp, Artificial Sequence
  ENSG00000138162_2 (sequence is synthesized)
tgccagcctggatccatgccttgtgtccccagaggtgactgagccaaggaaggacccacagggagccagggggccagaaggttctttgctgcccagcccaccaccgtcccaggagcgaga

SEQ ID NO: 343387 - DNA, 120 bp, Artificial Sequence
  ENSG00000138162_3 (sequence is synthesized)
gcacccctcgtcctccatgccctttgccgagtgtcccccggaaggttgcttggcaagtccagcagcggcacctgaagatggtcctcagactcagtctcccaggagggaacctgccccaaa

SEQ ID NO: 343388 - DNA, 120 bp, Artificial Sequence
  ENSG00000138162_4 (sequence is synthesized)
tgccccaggagacatcgcggcggcatttcccgctgagagggacagctctactccataccaagagattgctgccgtccccagtgctggaagagagagacagccgaaggaagaaggacagaa

SEQ ID NO: 343389 - DNA, 120 bp, Artificial Sequence
  ENSG00000138162_5 (sequence is synthesized)
gtcctccttctccttctccagtggcatcgaccagtcacctggaatgtcgccagtacccctcagagagccaatgaaggcaccgctgtgtggagagggggaccagcctggtggttttgagtc

SEQ ID NO: 343390 - DNA, 120 bp, Artificial Sequence
  ENSG00000138162_6 (sequence is synthesized)
ccaagagaaagaggctgcaggtggctttccccctgcagagtccaggcagggggtggcttctgtgcaagtgacccctgaggcccctgctgcagcccagcagggcacagaaagctcagcggt

SEQ ID NO: 343391 - DNA, 120 bp, Artificial Sequence
  ENSG00000138162_7 (sequence is synthesized)
cttggagaagtcccccctaaaacccatggccccgatcccacaagatccagccccaagagcctcagacagagaaagaggccaaggggaggcgccgcctcagtatttaacagatgacttgga

SEQ ID NO: 343392 - DNA, 120 bp, Artificial Sequence
  ENSG00000138162_8 (sequence is synthesized)
attcctcagggcctgccatctccctaggagcaattcaggggctgccccagaagcagaagtgaatgccgcttcccaggagagctgccagcagccagtgggagcatatctgccgcacgcaga

SEQ ID NO: 343393 - DNA, 120 bp, Artificial Sequence
  ENSG00000138162_9 (sequence is synthesized)
gctgccctggggcttgccaagtcctgccctggtgccagaggctgggggctctgggaaggaggctctggacaccattgatgttcagggtcacccacagacagggatgcgaggaaccaagcc

SEQ ID NO: 343394 - DNA, 120 bp, Artificial Sequence
  ENSG00000138162_10 (sequence is synthesized)
caatcaagttgtctgtgtggcagcaggcggccagcccgaagggggtttgcctgtgagccctgaaccttccctgctcactccgactgaggaagcacatccagcttcaagcctcgcttcatt

SEQ ID NO: 343395 - DNA, 120 bp, Artificial Sequence
  ENSG00000138162_11 (sequence is synthesized)
cccagctgctcagattcctattgctgtagaagaacctggatcatcatccagggaatcagtttccaaggctgggatgccagtttctgcagatgcagccaaagaggtggtggatgcagggtt

SEQ ID NO: 343396 - DNA, 120 bp, Artificial Sequence
  ENSG00000138162_12 (sequence is synthesized)
ggtgggactggagaggcaggtgtcagatcttggaagcaagggagagcatccagaaggggaccctggagaggttcctgccccatcaccccaggagaggggagagcacttgaacacggagca

SEQ ID NO: 343397 - DNA, 120 bp, Artificial Sequence
  ENSG00000138162_13 (sequence is synthesized)
aagccatgaggtccaaccaggagtaccaccccctcctcttcccaaggagcaaagccatgaggtccaaccaggagcaccaccccctcctcttcccaaggcaccaagtgaaagtgccagagg

SEQ ID NO: 343398 - DNA, 120 bp, Artificial Sequence
  ENSG00000138162_14 (sequence is synthesized)
gccaccggggccaacggatggagccaaggtccatgaagattccacaagcccagccgtggctaaagaaggaagcagatcacctggtgacagccctggaggaaaggaggaagccccagagcc

SEQ ID NO: 343399 - DNA, 120 bp, Artificial Sequence
  ENSG00000138162_15 (sequence is synthesized)
acctgatggtggagacccagggaacctgcaaggagaggactctcaggctttcagcagcaagcgtgatccagaagtaggcaaagatgagctttcaaagccaagcagtgatgcagagagcag

SEQ ID NO: 343400 - DNA, 120 bp, Artificial Sequence
  ENSG00000138162_16 (sequence is synthesized)
agaccatcccagctcacactcagcacagccacccagaaaggggggtgctgggcacacggacgggccccactctcagacagcagaggctgatgcatctggcctaccacacaagctgggtga

SEQ ID NO: 343401 - DNA, 120 bp, Artificial Sequence
  ENSG00000138162_17 (sequence is synthesized)
ggaggaccccgtcctgccccctgtgccagatggagctggtgagcccactgttcccgaaggagccatctgggaggggtcaggattgcagcccaaatgtcctgacacccttcagagcaggga

SEQ ID NO: 343402 - DNA, 120 bp, Artificial Sequence
  ENSG00000138162_18 (sequence is synthesized)
aggattgggaagaatggagtctttcctgactttagaatcagagaaatcagattttccaccaactcctgttgcagaggttgcacccaaagcccaggaaggtgagagcacattggaaataag

SEQ ID NO: 343403 - DNA, 120 bp, Artificial Sequence
  ENSG00000138162_19 (sequence is synthesized)
gaagatgggcagctgtgatggggagggcttgctgacgtccccagatcaaccccgcgggccggcgtgtgatgcgtcgagacaggaatttcatgctggggtgccacatcccccccaggggga

SEQ ID NO: 343404 - DNA, 120 bp, Artificial Sequence
  ENSG00000138162_20 (sequence is synthesized)
gaacttggcagcagacctggggctcacggcactcatcctggaccaagatcagcagggaatcccatcctgcccaggggaaggctggataagaggagctgcatccgagtggcccctactatc

SEQ ID NO: 343405 - DNA, 120 bp, Artificial Sequence
  ENSG00000138162_21 (sequence is synthesized)
ttctgagaagcatctccagccatcccaggcacaaccagagacatccatctttgacgtgctcaaggagcaggcccagccacctgaaaatgggaaagagacttctccaagccatccaggttt

SEQ ID NO: 343406 - DNA, 120 bp, Artificial Sequence
  ENSG00000138162_22 (sequence is synthesized)
taaggaccagggagcagattcttcccaaatccatgtacctgtggaacctcaggaagataacaacttgcccactcatggaggacaggagcaggctttgggatcagaacttcaaagtcagct

SEQ ID NO: 343407 - DNA, 120 bp, Artificial Sequence
  ENSG00000138162_23 (sequence is synthesized)
ccccaaaggcaccctgtctgatactccaacttcatctcccactgacatggtttgggagagttctctgacagaagagtcagaattgtcagcaccaacgagacagaagttgcctgcactagg

SEQ ID NO: 343408 - DNA, 120 bp, Artificial Sequence
  ENSG00000138162_24 (sequence is synthesized)
ggagaagcggccagagggagcatgcggtgatggtcagtcctcgagggtctcgcctccagcagcagatgtcttaaaagacttttctcttgcagggaacttcagcagaaaggaaacttgctg

SEQ ID NO: 343409 - DNA, 120 bp, Artificial Sequence
  ENSG00000138162_25 (sequence is synthesized)
cactgggcaggggccaaacaagtctcaacaggcattggctgatgccttggaagaaggcagccagcatgaagaagcatgtcaaaggcatccaggagcttctgaagcagctgatggttgttc

SEQ ID NO: 343410 - DNA, 120 bp, Artificial Sequence
  ENSG00000138162_26 (sequence is synthesized)
cccactctggggcttgagtaagagggagatggcaagtggaaacacaggggaggccccaccttgtcagcctgactcagtagctctcctggatgcagttccctgcctgccagccctggcgcc

SEQ ID NO: 343411 - DNA, 120 bp, Artificial Sequence
  ENSG00000138162_27 (sequence is synthesized)
cgccagccccggagtcacacccacccaggatgccccagagacagaggcatgtgatgaaacccaggaaggcaggcagcaaccagtgccggccccgcagcagaaaatggagtgctgggccac

SEQ ID NO: 343412 - DNA, 120 bp, Artificial Sequence
  ENSG00000138162_28 (sequence is synthesized)
ttcggatgcagagtccccaaagcttcttgcaagtttcccatcagctggggagcaaggtggtgaagccggggctgctgagactggtggcagcgctggtgcaggagacccaggaaagcagca

SEQ ID NO: 343413 - DNA, 120 bp, Artificial Sequence
  ENSG00000138162_29 (sequence is synthesized)
ggctccggagaaacctggagaagctactttgagttgtggcctccttcagactgagcactgccttacctccggggaggaagcttctacctctgccctacgtgagtcctgccaagctgagca

SEQ ID NO: 343414 - DNA, 120 bp, Artificial Sequence
  ENSG00000138162_30 (sequence is synthesized)
ccccatggccagctgccaggatgccttgctgccagccagagagctgggtgggattcccaggagcaccatggatttttctacacaccaggctgtcccagacccaaaggagctcctgctgtc

SEQ ID NO: 343415 - DNA, 120 bp, Artificial Sequence
  ENSG00000138162_31 (sequence is synthesized)
tgggccaccagaagtggctgctcctgacaccccttacctgcatgtcgacagtgctgcccagagaggagcagaagacagtggagtgaaagctgtttcctctgcagaccccagagctcctgg

SEQ ID NO: 343416 - DNA, 120 bp, Artificial Sequence
  ENSG00000138162_32 (sequence is synthesized)
cgaaagcccctgtcctgtaggggagcccccacttgccttggaaaatgctgcctccttgaagctgtttgctggctccctcgcccccctgttgcaaccaggagctgcaggtggggaaatccc

SEQ ID NO: 343417 - DNA, 120 bp, Artificial Sequence
  ENSG00000138162_33 (sequence is synthesized)
tgcagtgcaagccagcagtggtagtcccaaagccagaaccactgagggaccagtggactccatgccatgcctggaccggatgccacttctggccaagggcaagcaggcaacaggggaaga

SEQ ID NO: 343418 - DNA, 120 bp, Artificial Sequence
  ENSG00000138162_34 (sequence is synthesized)
gaaagcagcaacagctccaggtgcaggtgccaaggccagtggggagggcatggcaggtgatgcagcaggagagacagagggcagcatggagaggatgggagagccttcccaggacccaaa

SEQ ID NO: 343419 - DNA, 120 bp, Artificial Sequence
  ENSG00000138162_35 (sequence is synthesized)
gcagggcacatcaggtggtgtggacacaagctctgagcaaatcgccaccctcactggcttcccagacttcagggagcacatcgccaagatcttcgagaagcctgtgctcggagccctggc

SEQ ID NO: 343420 - DNA, 120 bp, Artificial Sequence
  ENSG00000138162_36 (sequence is synthesized)
cacacctggagaaaaggcaggagctgggaggagtgcagtgggtaaagacctcaccaggccattgggcccagagaagcttctagatgggcctccaggagtggatgtcacccttctccctgc

SEQ ID NO: 343421 - DNA, 120 bp, Artificial Sequence
  ENSG00000138162_37 (sequence is synthesized)
acctcctgctcgactccaggtggagaagaagcaacagttggctggagaggctgagatttcccatctggctctgcaagatccagcttcagacaagcttctgggtccagcagggctgacctg

SEQ ID NO: 343422 - DNA, 120 bp, Artificial Sequence
  ENSG00000138162_38 (sequence is synthesized)
ggagcggaacttgccaggtgccggtgtggggaaggagatggcaggtgtcccacccacactgagggaagacgagaggccagaggggcctggggcagcctggccaggcctggaaggccaggc

SEQ ID NO: 343423 - DNA, 120 bp, Artificial Sequence
  ENSG00000138162_39 (sequence is synthesized)
ggagcaggcaggaattagcttcaggtcttccttcaccagcagctactcaggagctccctgtggagagagctgctgccttccaggtggctccccatagccatggagaagaggccgtggccc

SEQ ID NO: 343424 - DNA, 120 bp, Artificial Sequence
  ENSG00000138162_40 (sequence is synthesized)
aagacagaattccttctggaaagcagcaccaggaaacatctgcctgcgacagtccacatggagaagatggtcccggggactttgctcacacaggggttccaggacatgtgccaaggtcca

SEQ ID NO: 343425 - DNA, 120 bp, Artificial Sequence
  ENSG00000138162_41 (sequence is synthesized)
cgtgtgccccttctcctcagagggaggttttgactgtgcctgaggccaacagtgagccctggacccttgacacgcttgggggtgaaaggagacccggagtcactgctggcatcttggaaa

SEQ ID NO: 343426 - DNA, 120 bp, Artificial Sequence
  ENSG00000138162_42 (sequence is synthesized)
tgcgaaatgccctgggcaaccagagcacccctgcaccaccaactggagaagtggcagacactcccctggagcctggcaaggtggcaggcgctgctggggaagcagagggtgacatcaccc

SEQ ID NO: 343427 - DNA, 120 bp, Artificial Sequence
  ENSG00000138162_43 (sequence is synthesized)
tgagcacagctgagacacaggcatgtgcgtccggtgatctgcctgaagcaggtactacgaggacattctccgttgtggcaggtgacttggtgctgccaggaagctgtcaggacccagcct

SEQ ID NO: 343428 - DNA, 120 bp, Artificial Sequence
  ENSG00000138162_44 (sequence is synthesized)
gctctgacaaggctccggggatggagggtacagctgcccttcatggggacagcccagccaggccccagcaggctaaggagcagccagggcctgagcgccccattccagctggggatggga

SEQ ID NO: 343429 - DNA, 120 bp, Artificial Sequence
  ENSG00000138162_45 (sequence is synthesized)
aggtgtgcgtctcctcacctccagagcctgacgaaactcacgacccgaagctgcaacatttggctccagaagagctccacactgacagagagagccccaggcctggcccatccatgttac

SEQ ID NO: 343430 - DNA, 120 bp, Artificial Sequence
  ENSG00000138162_46 (sequence is synthesized)
cttcggttcctaagaaggatgctccaagagtcatggataaagtcacttcagatgagaccagaggtgcggaaggaacagaaagttcacctgtggcagatgatatcatccagcccgctgccc

SEQ ID NO: 343431 - DNA, 120 bp, Artificial Sequence
  ENSG00000138162_47 (sequence is synthesized)
ccgcagacctggaaagcccaaccttagctgcctcttcctaccacggtgatgttgttggccaggtctctacggatctgatagcccagagcatctccccagctgctgcccatgcgggtcttc

SEQ ID NO: 343432 - DNA, 120 bp, Artificial Sequence
  ENSG00000138162_48 (sequence is synthesized)
ctccctcggctgcagaacacatagtttcgccatctgccccagctggtgacagagtagaagcttccactccctcctgcccagatccggccaaggacctcagcaggagttccgattctgaag

SEQ ID NO: 343433 - DNA, 120 bp, Artificial Sequence
  ENSG00000138162_49 (sequence is synthesized)
aggcatttgagaccccggagtcaacgacccctgtcaaagctccgccagctccacccccaccaccccccgaagtcatcccagaacccgaggtcagcacacagccacccccggaagaaccag

SEQ ID NO: 343434 - DNA, 120 bp, Artificial Sequence
  ENSG00000138162_50 (sequence is synthesized)
gatgtggttctgagacagtccctgtccctgatggcccacggagcgactcggtggaaggaagtcccttccgtcccccgtcacactccttctctgccgtcttcgatgaagacaagccgatag

SEQ ID NO: 343435 - DNA, 120 bp, Artificial Sequence
  ENSG00000138162_51 (sequence is synthesized)
ccagcagtgggacttacaacttggactttgacaacattgagcttgtggatacctttcagaccttggagcctcgtgcctcagacgctaagaatcaggagggcaaagtgaacacacggagga

SEQ ID NO: 343436 - DNA, 120 bp, Artificial Sequence
  ENSG00000138162_52 (sequence is synthesized)
agtccacggattccgtccccatctctaagtctacactgtcccggtcgctcagcctgcaagccagtgactttgatggtgcttcttcctcaggcaatcccgaggccgtggcccttgccccag

SEQ ID NO: 343437 - DNA, 120 bp, Artificial Sequence
  ENSG00000138162_53 (sequence is synthesized)
atgcatatagcacgggttccagcagtgcttctagtacccttaagcgaactaaaaaaccgaggccgccttccttaaaaaagaaacagaccaccaagaaacccacagagacccccccagtga

SEQ ID NO: 343438 - DNA, 120 bp, Artificial Sequence
  ENSG00000138162_54 (sequence is synthesized)
aggagacgcaacaggagccagatgaagagagccttgtccccagtggggagaatctagcatctgagacgaaaacggaatctgccaagacggaaggtcctagcccagccttattggaggaga

SEQ ID NO: 343439 - DNA, 120 bp, Artificial Sequence
  ENSG00000138162_55 (sequence is synthesized)
cgccccttgagcccgctgtggggcccaaagctgcctgccctctggactcagagagtgcagaaggggttgtccccccggcttctggaggtggcagagtgcagaactcaccccctgtcggga

SEQ ID NO: 343440 - DNA, 120 bp, Artificial Sequence
  ENSG00000138162_56 (sequence is synthesized)
ggaaaacgctgcctcttaccacggccccggaggcaggggaggtaaccccatcggatagcggggggcaagaggactctccagccaaagggctctccgtaaggctggagtttgactattctg

SEQ ID NO: 343441 - DNA, 120 bp, Artificial Sequence
  ENSG00000138162_57 (sequence is synthesized)
aggacaagagtagttgggacaaccagcaggaaaacccccctcctaccaaaaagataggcaaaaagccagttgccaaaatgcccctgaggaggccaaagatgaaaaagacacccgagaaac

SEQ ID NO: 343442 - DNA, 120 bp, Artificial Sequence
  ENSG00000138162_58 (sequence is synthesized)
ttgacaacactcctgcctcacctcccagatcccctgctgaacccaatgacatccccattgctaaaggtacttacacctttgatattgacaagtgggatgaccccaattttaacccttttt

SEQ ID NO: 343443 - DNA, 120 bp, Artificial Sequence
  ENSG00000138162_59 (sequence is synthesized)
cttccacctcaaaaatgcaggagtctcccaaactgccccaacaatcatacaactttgacccagacacctgtgatgagtccgttgacccctttaagacatcctctaagacccccagctcac

SEQ ID NO: 343444 - DNA, 120 bp, Artificial Sequence
  ENSG00000138162_60 (sequence is synthesized)
cttctaaatccccagcctcctttgagatcccagccagtgctatggaagccaatggagtggacggggatgggctaaacaagcccgccaagaagaagaagacgcccctaaagactgacacat

SEQ ID NO: 343445 - DNA, 120 bp, Artificial Sequence
  ENSG00000138162_61 (sequence is synthesized)
ttagggtgaaaaagtcgccaaaacggtctcctctctctgatccaccttcccaggaccccaccccagctgctacaccagaaacaccaccagtgatctctgcggtggtccacgccacagatg

SEQ ID NO: 343446 - DNA, 120 bp, Artificial Sequence
  ENSG00000138162_62 (sequence is synthesized)
aggaaaagctggcggtcaccaaccagaagtggacgtgcatgacagtggacctagaggctgacaaacaggactacccgcagccctcggacctgtccacctttgtaaacgagaccaaattca

SEQ ID NO: 343447 - DNA, 120 bp, Artificial Sequence
  ENSG00000138162_63 (sequence is synthesized)
gttcacccactgaggagttggattacagaaactcctatgaaattgaatatatggagaaaattggctcctccttacctcaggacgacgatgccccgaagaagcaggccttgtaccttatgt

SEQ ID NO: 343448 - DNA, 120 bp, Artificial Sequence
  ENSG00000138162_64 (sequence is synthesized)
ttgacacttctcaggagagccctgtcaagtcatctcccgtccgcatgtcagagtccccgacgccgtgttcagggtcaagttttgaagagactgaagcccttgtgaacactgctgcgaaaa

SEQ ID NO: 343449 - DNA, 120 bp, Artificial Sequence
  ENSG00000138162_65 (sequence is synthesized)
accagcatcctgtcccacgaggactggcccctaaccaagagtcacacttgcaggtgccagagaaatcctcccagaaggagctggaggccatgggcttgggcaccccttcagaagcgattg

SEQ ID NO: 343450 - DNA, 120 bp, Artificial Sequence
  ENSG00000138162_66 (sequence is synthesized)
aaattacagctcccgagggctcctttgcctctgctgacgccctcctcagcaggctagctcaccccgtctctctctgtggtgcacttgactatctggagcccgacttagcagaaaagaacc

SEQ ID NO: 343451 - DNA, 120 bp, Artificial Sequence
  ENSG00000138162_67 (sequence is synthesized)
ccccactattcgctcagaaactccaggaggagttagagtttgccatcatgcggatagaagccctgaagctggccaggcagattgctttggcttcccgcagccaccaggatgccaagagag

SEQ ID NO: 343452 - DNA, 120 bp, Artificial Sequence
  ENSG00000138162_68 (sequence is synthesized)
aggctgctcacccaacagacgtctccatctccaaaacagccttgtactcccgcatcgggaccgctgaggtggagaaacctgcaggccttctgttccagcagcccgacctggactctgccc

SEQ ID NO: 343453 - DNA, 120 bp, Artificial Sequence
  ENSG00000138162_69 (sequence is synthesized)
tccagatcgccagagcagagatcataaccaaggagagagaggtctcagaatggaaagataaatatgaagaaagcaggcgggaagtgatggaaatgaggaaaatagtggccgagtatgaga

SEQ ID NO: 343454 - DNA, 120 bp, Artificial Sequence
  ENSG00000138162_70 (sequence is synthesized)
agaccatcgctcagatgatagaggacgaacagagagagaagtcagtctcccaccagacggtgcagcagctggttctggagaaggagcaagccctggccgacctgaactccgtggagaagt

SEQ ID NO: 343455 - DNA, 120 bp, Artificial Sequence
  ENSG00000138162_71 (sequence is synthesized)
ctctggccgacctcttcagaagatatgagaagatgaaggaggtcctagaaggcttccgcaagaatgaagaggtgttgaagagatgtgcgcaggagtacctgtcccgggtgaagaaggagg

SEQ ID NO: 343456 - DNA, 120 bp, Artificial Sequence
  ENSG00000138162_72 (sequence is synthesized)
agcagaggtaccaggccctgaaggtgcacgcggaggagaaactggacagggccaatgctgagattgctcaggttcgaggcaaggcccagcaggagcaagccgcccaccaggccagcctgc

SEQ ID NO: 343457 - DNA, 120 bp, Artificial Sequence
  ENSG00000138162_73 (sequence is synthesized)
ggaaggagcagctgcgagtggacgccctggaaaggacgctggagcagaagaataaagaaatagaagaactcaccaagatttgtgacgaactgattgccaaaatggggaaaagctaactct

SEQ ID NO: 343458 - DNA, 120 bp, Artificial Sequence
  ENSG00000138162_74 (sequence is synthesized)
gaaccgaatgttttggacttaactgttgcgtgcaatatgaccgtcggcacactgctgttcctccagttccatggacaggttctgttttcactttttcgtatgcactactgtatttccttt

SEQ ID NO: 343459 - DNA, 120 bp, Artificial Sequence
  ENSG00000138162_75 (sequence is synthesized)
ctaaataaaattgatttgattgtatgcagtactaaggagactatcagaatttcttgctattggtttgcattttcctagtataattcatagcaagttgacctcagagttcctgtatcaggg

SEQ ID NO: 343460 - DNA, 120 bp, Artificial Sequence
  ENSG00000138162_76 (sequence is synthesized)
agattgtctgattctctaataaaagacacattgctgaccttggccttgccctttgtacacaagttcccagggtgagcagcttttggatttaatatgaacatgtacagcgtgcatagggac

SEQ ID NO: 343461 - DNA, 120 bp, Artificial Sequence
  ENSG00000138162_77 (sequence is synthesized)
tcttgccttaaggagtgtaaacttgatctgcatttgctgatttgtttttaaaaaaacaagaaatgcatgtttcaaataaaattctctattgtaaataaaattttttctttggatcttggc

SEQ ID NO: 343462 - DNA, 120 bp, Artificial Sequence
  ENSG00000138162_78 (sequence is synthesized)
ataagtggacagcctgctccaagggaaggatcaggagagaagaaacgcaaatcccagaaccgtgccaacatataaaaccccacattaagggttgtacagtgcactgggatttctcaagtc

SEQ ID NO: 343463 - DNA, 120 bp, Artificial Sequence
  ENSG00000138162_79 (sequence is synthesized)
acccgcttggtcctcttccaagtatactttacttcctttcattcctctctaaaacttttttaaaaactttcactcctgctctaaaagttatcttggtttcttactctaccttatgcccct

SEQ ID NO: 343464 - DNA, 120 bp, Artificial Sequence
  ENSG00000138162_80 (sequence is synthesized)
cgccccggctcccggctgcaggaatcgcgccaggacgctggccccgctcgcggctagcttgcacgccagggcacagcgaggatgggagggtcgcagtccctgcagccagccccagccagc

SEQ ID NO: 343465 - DNA, 120 bp, Artificial Sequence
  ENSG00000138162_81 (sequence is synthesized)
gcgggcggtcccggcgaggcgggaggggccggggcagagggagggtcttcgcctccccacccccagccccgtttccggagcccgcgatggagctttgtgaagatgcaggcgttggggctg

SEQ ID NO: 343466 - DNA, 120 bp, Artificial Sequence
  ENSG00000138162_82 (sequence is synthesized)
ctcggcgatgatgacatcatcgtgtcacacacaggagccggctgccggggggtttaagagaagagcctttcggaccacaccggcgctcacgctcatacccgcacgccccgggcagagccg

SEQ ID NO: 343467 - DNA, 80 bp, Artificial Sequence
  ENSG00000138162_83 (sequence is synthesized)
ctcgcgcgcacacatacgcggcgctcgccccccggcccccggctcgggccgcgagtcgcagctccctgccgccgctcccg

SEQ ID NO: 343468 - DNA, 120 bp, Artificial Sequence
  ENSG00000138162_84 (sequence is synthesized)
ggaaagccctttgcacacatcggcctattgaagcactttgcttgattcagctattctcctctcaggacctgcctggatcatcccagcctgtagaatcctgggtttctgtggcagtttgtt

SEQ ID NO: 343469 - DNA, 120 bp, Artificial Sequence
  ENSG00000138162_85 (sequence is synthesized)
cttctggtatcacctgctatgctctgaatgtttgtatccctctcagccccgaaattcctgtgttgaaatcctaacccctaaggtgatggtatgaggaggtggggccttcgggaggtgatt

SEQ ID NO: 343470 - DNA, 120 bp, Artificial Sequence
  ENSG00000138162_86 (sequence is synthesized)
aggccataagggtggagcctttgtgaatgggattagtgcccttataaaaagaggccccacagcactgccttgcctcttctgccacgtgaagatgcagtgagaaggagctgtctgtgaact

SEQ ID NO: 343471 - DNA, 120 bp, Artificial Sequence
  ENSG00000138162_87 (sequence is synthesized)
gcctttcggggagccacgccggccctgcgccgttgtcccgggaaactttgcgtcccagggccgcaccggaccgtggtgaccccacgcgccgcgccgccaccgggctcggaaaacccagcg

SEQ ID NO: 343472 - DNA, 120 bp, Artificial Sequence
  ENSG00000138162_88 (sequence is synthesized)
tggatgttttggaaaggagagtagtccttatacagcatgagttcctacataagaaagaagcaaatggccattcccgttttatgtacagttcacctgtggcagatgatatcatccagcccg

SEQ ID NO: 343473 - DNA, 120 bp, Artificial Sequence
  ENSG00000138162_89 (sequence is synthesized)
agtgcccaggaatgcagaagccaggggatggacgagtactcaggctttcctcgaatctctgcttgagtggggcagcctcggggcctccggacgctggagaagctcacagcatctgtggcc

SEQ ID NO: 343474 - DNA, 120 bp, Artificial Sequence
  ENSG00000138162_90 (sequence is synthesized)
ggtggtgcagctaacttttttggtgacattgaaagagatttaggtccaagagatacgagcaggggaattaggggtgggaatttgggggacagaggctgttcttcagcggaaatggcctat

SEQ ID NO: 343475 - DNA, 120 bp, Artificial Sequence
  ENSG00000138162_91 (sequence is synthesized)
gcctcctggcagaggtggtccccagtggaatgggcccggtggatgtggacagcggtgaccagcagtggggactccagtctgctggtgcttcagggagactctggaaaaaggagttccgat

SEQ ID NO: 343476 - DNA, 120 bp, Artificial Sequence
  ENSG00000138162_92 (sequence is synthesized)
cccaaggtggtctcaaaatcctagccttaagtaatccaccagcctcagccttctcaatacctgggactgcaggcatgcaccactctacctggtttgattttttttcttagtgggcagtga

SEQ ID NO: 343477 - DNA, 120 bp, Artificial Sequence
  ENSG00000138162_93 (sequence is synthesized)
gggatgttgaaggctttgcacaagggagtggcatatttagagtcacgcaccaggaaaatgagcgtgcagggcgagggctgacattgaaggtgaccctggaagttggggccctgctggaca

SEQ ID NO: 343478 - DNA, 120 bp, Artificial Sequence
  ENSG00000138162_94 (sequence is synthesized)
ttggcagttcctgtcagaggcgtggacaagaaagtggcttcgtttctttccagcttgataaagccgacataaataggagcacttcatttctgaattacacaccattactcttatcacata

SEQ ID NO: 343479 - DNA, 120 bp, Artificial Sequence
  ENSG00000138162_95 (sequence is synthesized)
gaaaggttttgtctatttctgttccttgttgaatctctagtacctagaaccatgtctggtcctgattaggcacttggtgaatgtttttgaatgaatactctgagctgttctttaatcggt

SEQ ID NO: 343480 - DNA, 120 bp, Artificial Sequence
  ENSG00000138162_96 (sequence is synthesized)
cctcatgatcctcattgtacagatgagggaactctgggcgaacctggcctgggtcttgagctaattacgggtaggtcaggttctgtacccaagtagtacacacagtgatgggcggggtgg

SEQ ID NO: 343481 - DNA, 120 bp, Artificial Sequence
  ENSG00000138162_97 (sequence is synthesized)
gacgcgctgcttgaggtgtgtcagggcctctgcttagaactcgcgcaattctgaacggaggaggagaaagtccagttgctgaagggcagaatttccatgcgcccgcagcttccaagtcca

SEQ ID NO: 343482 - DNA, 120 bp, Artificial Sequence
  ENSG00000138162_98 (sequence is synthesized)
agaacagcacctcggacaaccaggtgggtgtcaggaagcttctctctcgagctacgtggtgctcttggcagaccttgactaggttctttttacagcgtctcatcttcacccaggaaggag

SEQ ID NO: 343483 - DNA, 120 bp, Artificial Sequence
  ENSG00000138162_99 (sequence is synthesized)
caaacaagacagcttctgcgtagatgtgtgcgggcatttatggatctatgcagccatttttcatttcattggaattctcttacgattaaggctagctctagttaaagccggaaacgctaa

SEQ ID NO: 343484 - DNA, 120 bp, Artificial Sequence
  ENSG00000138162_100 (sequence is synthesized)
agagttggattacagaaactcctatgaaattgaatatatggagaaaattggctcctccttacctcaggacgacgatgccccgaagaagcaggccttgtaccttatgtttgacacttctca

SEQ ID NO: 343485 - DNA, 120 bp, Artificial Sequence
  ENSG00000138162_101 (sequence is synthesized)
gaacagcacctcggacaaccagcaggaggactccgtcttgcataacgtcattctgtggcctccaaaccctgagcccacacagaggactttatcagctcagactccaaggtccgcgcagcc

SEQ ID NO: 343486 - DNA, 120 bp, Artificial Sequence
  ENSG00000138162_102 (sequence is synthesized)
agccctgaccacagagacgcgtccaggtaggaggccagctctggaggactgatgcagcccaaggactgccccgctcattgcctgctccagcattagctttgccccatttgctttggaaac

SEQ ID NO: 343487 - DNA, 120 bp, Artificial Sequence
  ENSG00000138162_103 (sequence is synthesized)
tggacccttagacacatggtatcgtcctcagtggtgagatgttccaagcagtggttcacagacctctctgtgactggctaggcctgcatgattgaaaaattcatcctgattgcctgccca

SEQ ID NO: 343488 - DNA, 120 bp, Artificial Sequence
  ENSG00000138162_104 (sequence is synthesized)
aagatgaaattagtaattatagacttccattccagccacactccagagtatcttcattgtcagaacttaaaatggaaaacatcaagggttcccaggggtttatcagtgtctaatccgtgg

SEQ ID NO: 343489 - DNA, 120 bp, Artificial Sequence
  ENSG00000138162_105 (sequence is synthesized)
ctaagtggagtctgtaactcagtgtggtggccattgcgggcactggaccatgaaacagaggactgagaacacaattaccaaagccacccaagccctttgtcccagggaggctggtggatg

SEQ ID NO: 343490 - DNA, 120 bp, Artificial Sequence
  ENSG00000138162_106 (sequence is synthesized)
gatgaatcccagaaaccaactgtggcagtgggatgtggccagtgcgggggtggcccatcagtcacttccttttttttgagatggagtctcatccaggctggagtgcagtggcacggtctc

SEQ ID NO: 343491 - DNA, 90 bp, Artificial Sequence
  ENSG00000138162_107 (sequence is synthesized)
cattgcaacctctacctcgtccgaatagctgggattacaggagcccgccaccatgcccagccattttttgtatttttagtagagacggga

SEQ ID NO: 343492 - DNA, 120 bp, Artificial Sequence
  ENSG00000138162_108 (sequence is synthesized)
gccaggccctagggctccctgccggggctctctcctgggcctctccccatgttggccccacactcatagttttaggggatacaagcagtagtccagcagactcgagcacctggtgtccag

SEQ ID NO: 343493 - DNA, 120 bp, Artificial Sequence
  ENSG00000138162_109 (sequence is synthesized)
catggacacaggccaggcacgctgggggcacttaataactgctcgtgggttcaactcgcaaacaggccatggatttggtcagaaaaaccctgcaaaattggagcccagctctcaggagtg

SEQ ID NO: 343494 - DNA, 120 bp, Artificial Sequence
  ENSG00000138162_110 (sequence is synthesized)
tatcatgacaggccttaagggaagcaaatgagcaggaactctgtggaacaaaaatgcaaaatggaatgataggcccctgtcatagacaatgcaactttgactcacatgctacttcatagc

SEQ ID NO: 343495 - DNA, 120 bp, Artificial Sequence
  ENSG00000138162_111 (sequence is synthesized)
tttttttttttttttttttgctttgggtaagtcagagcaacccctggtggcaggaattttcatgcctggggcatggaagtgggtggcttgggctatgtggctttccagaggaagtacttg

SEQ ID NO: 343496 - DNA, 120 bp, Artificial Sequence
  ENSG00000138162_112 (sequence is synthesized)
ggcttgggctatgtggctttccagaggaagtacttggggcatcttggcaggagctttggatttctttagggaaatggcaatcagatggggcagagtgttttttgctgagggaatcagaat

SEQ ID NO: 343497 - DNA, 120 bp, Artificial Sequence
  ENSG00000138162_113 (sequence is synthesized)
gatccctcaaacagcacctttgatctctattctctgctaaagatggtgcttcctctacttccccagacccccgtgtctgttccatttccatgaatttttcatcagggtcacaggacaaag

SEQ ID NO: 343498 - DNA, 120 bp, Artificial Sequence
  ENSG00000138162_114 (sequence is synthesized)
gttttagtctttggttctaatgagacctctgacttggctctggatgactatgaaactagtgaatgcatttgtcttttctggaatcccacacaagggaagccactgtggctgctgaggccc

SEQ ID NO: 343499 - DNA, 120 bp, Artificial Sequence
  ENSG00000138162_115 (sequence is synthesized)
agggtccagctcttctctttccctcttggtgaggtcctgggatctcctgaggcctgggaattgctcgaggcctgtgtcacagctggactgaagagtagcagcagctcaaatgtcttttgt

SEQ ID NO: 343500 - DNA, 120 bp, Artificial Sequence
  ENSG00000138162_116 (sequence is synthesized)
tcttttgttgcttgttccccagctttagtcaattattatttttcccttgaagaattgcctctcgttggcatgcaaattgagcataaaagaggtgcccgtaatcccagcactttgggaggc

SEQ ID NO: 343501 - DNA, 120 bp, Artificial Sequence
  ENSG00000138162_117 (sequence is synthesized)
catcctccaaggtctgtcattacatggggcccgtgtagagacgtggttatgatcacggcttcaggcttggctttgggctctgccattttctcagtgaacagtgacttagcttctcaaacc

SEQ ID NO: 343502 - DNA, 120 bp, Artificial Sequence
  ENSG00000138162_118 (sequence is synthesized)
ctctgttccgccttctgtaaaatgagggtgagaaaagctgcccgggtggttgtgatgctctaagttgttcactcgtcgcatggacatgtatcaagacatcctgtatgcccggcactatcc

SEQ ID NO: 343503 - DNA, 120 bp, Artificial Sequence
  ENSG00000138162_119 (sequence is synthesized)
taggccctggggcagagcaagtggacaaaacagactctggtgcctgccctcacagagcgtgcattcatcagggagatgagccgctgatacaccagcataggcacgcacgcacacacgtgc

SEQ ID NO: 343504 - DNA, 120 bp, Artificial Sequence
  ENSG00000138162_120 (sequence is synthesized)
acacatgtgtgcacacatctgatacaatgataaggggtggctgctgctgcaaagaggaaaatgaaggactctagaggaagaggagccatttccagtacctctggggaggtgacatgggat

SEQ ID NO: 343505 - DNA, 120 bp, Artificial Sequence
  ENSG00000138162_121 (sequence is synthesized)
cagagccctgagagaatgttggagagccctggaagccctggggcgggaccccctggggcattggaggccttcgtggctggagcagagaggcctgggagggtagagggcagagcatgtggg

SEQ ID NO: 343506 - DNA, 120 bp, Artificial Sequence
  ENSG00000138162_122 (sequence is synthesized)
caaggatttgggtgttatttccatttcagagggaggtcactgcgggggagctctgagcaggagtgaggtggcctggtttgcacattaggaagctcagtctggctgctgagtgctggctta

SEQ ID NO: 343507 - DNA, 120 bp, Artificial Sequence
  ENSG00000138162_123 (sequence is synthesized)
gggacagtcaacacctagagcaatcagcagggtgcccgccacatggaagggtccagtcagcgctggctcccgttgttctgttatttccagatgtgatctgtctatggcagccagccctcg

SEQ ID NO: 343508 - DNA, 120 bp, Artificial Sequence
  ENSG00000138162_124 (sequence is synthesized)
gagtcattccaggtggcaggcagccccctccccagtgacgagggcctggtagaaagacaggtctgctgagctccttccccaggagctctgagtgggcgcttctcccttccccactctgct

SEQ ID NO: 343509 - DNA, 120 bp, Artificial Sequence
  ENSG00000138162_125 (sequence is synthesized)
gtcaccaagagagcaaatggttcctcacccacctgggccggggatggatccgcacagaggacagaggggtgttttgtgtagagtagtcagagaaggcctttcccataagtgtagaaatga

SEQ ID NO: 343510 - DNA, 120 bp, Artificial Sequence
  ENSG00000138162_126 (sequence is synthesized)
ttttctaagcagccataaaaaaagaacaaagtcatgtcctaggtaccagcatggatgcagctggaggccattgtcctcagggaattaatgcagaaacagagcgccaaacactgagcattc

SEQ ID NO: 343511 - DNA, 120 bp, Artificial Sequence
  ENSG00000138162_127 (sequence is synthesized)
tcatttataagagggagctacacattgggtacacacggacacaaagatgggaacagaagacgctggggagttcacagtgggggtagaagggagacgggttgaaaacctgcctttcaggta

SEQ ID NO: 343512 - DNA, 120 bp, Artificial Sequence
  ENSG00000138162_128 (sequence is synthesized)
ctatgctcagtacctgggtgacaggctcattagaaatctgtaccccagcattagtcacacagtatggccatgtaaccaacctgcacatgtgccccaaatctaaaaatatacattttctag

SEQ ID NO: 343513 - DNA, 120 bp, Artificial Sequence
  ENSG00000138162_129 (sequence is synthesized)
attaatattgtacatcactgagaagctaaccttgacggaaatagctccgtgtttcttggagttacaacacttgctgtatcgaagacgctatctgtgcctgcgtgaatggaatttcagagg

SEQ ID NO: 343514 - DNA, 120 bp, Artificial Sequence
  ENSG00000138162_130 (sequence is synthesized)
agatgcttttttgggctctgggtttccagatgtgttaaggatctccaaagacctcctctctgtcctgatacataggagggcccatccctcacagcccagacctcacaccctttaatcgtc

SEQ ID NO: 343515 - DNA, 120 bp, Artificial Sequence
  ENSG00000138162_131 (sequence is synthesized)
ccaacgcaaaattcactagcgatgtcttcttttttactttacggatctgtctgcttgctgtcaacaaccacatagaatcaccagggacaccaatatagacctgtgaaggggccgtactga

SEQ ID NO: 343516 - DNA, 120 bp, Artificial Sequence
  ENSG00000138162_132 (sequence is synthesized)
tcaggttaaggaatagtaatggctcatttctacctcacgcgaggctgcacaggcccgggtctgggaagccagggctctggtttttgttctgttagagacagtctgggagggctctggggc

SEQ ID NO: 343517 - DNA, 120 bp, Artificial Sequence
  ENSG00000138162_133 (sequence is synthesized)
gtgggttcgtcccaaggaaaagctggggtttgagatgcccccactggtgaggctgagttgcatctgaggcctcggctggccccagagacccagtttggactttctgggctccatcatttg

SEQ ID NO: 343518 - DNA, 120 bp, Artificial Sequence
  ENSG00000138162_134 (sequence is synthesized)
agtgctgaaaaggagcctctggaagagagggccttctcccgcttctctcctcctcctctccacgctggggggatcctggtcacctctgacaaaattctggggacgctgggaacactgaat

SEQ ID NO: 343519 - DNA, 78 bp, Artificial Sequence
  ENSG00000138162_135 (sequence is synthesized)
catgatcatagctcactgcagcctcaaacacctggactaaagcgatcctcctgccacacagccttccaagtgtaatgt

SEQ ID NO: 343520 - DNA, 90 bp, Artificial Sequence
  ENSG00000138162_136 (sequence is synthesized)
atgttgcccaggctggccttgaactcccggactcaagtaattctccttctttcactccccaaagcgctgggattacaagtatgagccacc

SEQ ID NO: 343521 - DNA, 120 bp, Artificial Sequence
  ENSG00000138162_137 (sequence is synthesized)
attctgtcttctaaaactgacataagagagattggcacatttttcctaggttgtgtccacccatcaacttacatggatttagcagaggttaaaataaaacctttccacactgctccccca

SEQ ID NO: 343522 - DNA, 120 bp, Artificial Sequence
  ENSG00000138162_138 (sequence is synthesized)
aataaagctatggccattaaaaatgattttgaaatctatcagtgttgggcagattaaatgtgagtggtcattctcatgttaaacaaggttttcacaattgaagaatggactttaactgct

SEQ ID NO: 343523 - DNA, 120 bp, Artificial Sequence
  ENSG00000138162_139 (sequence is synthesized)
gctgagatattacaacatattcaagtttttcattatctattttaagtttgaaagttttaacttaatgcgttggtgaacaaaatcaggaagacactttctcatttatctcacacaaactgg

SEQ ID NO: 343524 - DNA, 120 bp, Artificial Sequence
  ENSG00000138162_140 (sequence is synthesized)
aaaatttggattaatgacattgagttccttgaacgagaaaactggatctaaaaacccacatgctgtaattcatttccctctgcctttttcttccctacaattttttttttttgacagagt

SEQ ID NO: 343525 - DNA, 120 bp, Artificial Sequence
  ENSG00000138162_141 (sequence is synthesized)
tgagcccccgcgcccggcctctacaattttcttttctcaagcaagaaaacaaagtgtcaaaagaaaagttgtcaaactccagcatctttaggggcaggccagaaacaacaattgtgttaa

SEQ ID NO: 343526 - DNA, 70 bp, Artificial Sequence
  ENSG00000138162_142 (sequence is synthesized)
agcatctttaggggcaggccagaaacaacaattgtgttaaaagactgggtgttaggtacatggatgaagc

SEQ ID NO: 343527 - DNA, 80 bp, Artificial Sequence
  ENSG00000138166_0 (sequence is synthesized)
ggcttctagggcggcgagcggccgggctggctatcgagcgagcggggcgggaacgcggagttgcgccgccgctcgggcgc

SEQ ID NO: 343528 - DNA, 80 bp, Artificial Sequence
  ENSG00000138166_1 (sequence is synthesized)
gcgcgcggcgcggggccgctggccggcggcggcggcggcatgaaggtcacgtcgctcgacgggcgccagctgcgcaagat

SEQ ID NO: 343529 - DNA, 120 bp, Artificial Sequence
  ENSG00000138166_2 (sequence is synthesized)
gccagctgcgcaagatgctccgcaaggaggcggcggcgcgctgcgtggtgctcgactgccggccctatctggccttcgctgcctcgaacgtgcgcggctcgctcaacgtcaacctcaact

SEQ ID NO: 343530 - DNA, 120 bp, Artificial Sequence
  ENSG00000138166_3 (sequence is synthesized)
gctcgctcaacgtcaacctcaactcggtggtgctgcggcgggcccggggcggcgcggtgtcggcgcgctacgtgctgcccgacgaggcggcgcgcgcgcggctcctgcaggagggcggcg

SEQ ID NO: 343531 - DNA, 120 bp, Artificial Sequence
  ENSG00000138166_4 (sequence is synthesized)
tggaccagggcagccgccactggcagaagctgcgagaggagagcgccgcgcgtgtcgtcctcacctcgctactcgcttgcctacccgccggcccgcgggtctacttcctcaaagggggat

SEQ ID NO: 343532 - DNA, 120 bp, Artificial Sequence
  ENSG00000138166_5 (sequence is synthesized)
atgagactttctactcggaatatcctgagtgttgcgtggatgtaaaacccatttcacaagagaagattgagagtgagagagccctcatcagccagtgtggaaaaccagtggtaaatgtca

SEQ ID NO: 343533 - DNA, 120 bp, Artificial Sequence
  ENSG00000138166_6 (sequence is synthesized)
gctacaggccagcttatgaccagggtggcccagttgaaatccttcccttcctctaccttggaagtgcctaccatgcatccaagtgcgagttcctcgccaacctgcacatcacagccctgc

SEQ ID NO: 343534 - DNA, 120 bp, Artificial Sequence
  ENSG00000138166_7 (sequence is synthesized)
tgaatgtctcccgacggacctccgaggcctgcgcgacccacctacactacaaatggatccctgtggaagacagccacacggctgacattagctcccactttcaagaagcaatagacttca

SEQ ID NO: 343535 - DNA, 120 bp, Artificial Sequence
  ENSG00000138166_8 (sequence is synthesized)
ttgactgtgtcagggaaaagggaggcaaggtcctggtccactgtgaggctgggatctcccgttcacccaccatctgcatggcttaccttatgaagaccaagcagttccgcctgaaggagg

SEQ ID NO: 343536 - DNA, 120 bp, Artificial Sequence
  ENSG00000138166_9 (sequence is synthesized)
ccttcgattacatcaagcagaggaggagcatggtctcgcccaactttggcttcatgggccagctcctgcagtacgaatctgagatcctgccctccacgcccaacccccagcctccctcct

SEQ ID NO: 343537 - DNA, 120 bp, Artificial Sequence
  ENSG00000138166_10 (sequence is synthesized)
acattccctgcctcggtgctggcaccggtgcctacccactcaacagtctcagagctcagcagaagccctgtggcaacggccacatcctgctaaaactgggatggaggaatcggcccagcc

SEQ ID NO: 343538 - DNA, 120 bp, Artificial Sequence
  ENSG00000138166_11 (sequence is synthesized)
ccaagagcaactgtgatttttgtttttaagactcatggacatttcatacctgtgcaatactgaagacctcattctgtcatgctgccccagtgagatagtgagtggtcaccaggcttgcaa

SEQ ID NO: 343539 - DNA, 120 bp, Artificial Sequence
  ENSG00000138166_12 (sequence is synthesized)
atgaacttcagacggacctcagggtaggttctcgggactgaaggaaggccaagccattacgggagcacagcatgtgctgactactgtacttccagacccctgccctcttgggactgccca

SEQ ID NO: 343540 - DNA, 120 bp, Artificial Sequence
  ENSG00000138166_13 (sequence is synthesized)
gtccttgcacctcagagttcgccttttcatttcaagcataaggcaataaatacctgcagcaacgtgggagaaagaagttgctggaccaggagaaaaggcagttatgaagccaattcattt

SEQ ID NO: 343541 - DNA, 120 bp, Artificial Sequence
  ENSG00000138166_14 (sequence is synthesized)
tgaaggaagcacaatttccaccttattttttgaactttggcagtttcaatgtctgtctctgttgcttcggggcataagctgatcaccgtctagttgggaaagtaaccctacagggtttgt

SEQ ID NO: 343542 - DNA, 120 bp, Artificial Sequence
  ENSG00000138166_15 (sequence is synthesized)
agggacatgatcagcatcctgatttgaaccctgaaatgttgtgtagacaccctcttgggtccaatgaggtagttggttgaagtagcaagatgttggcttttctggattttttttgccatg

SEQ ID NO: 343543 - DNA, 120 bp, Artificial Sequence
  ENSG00000138166_16 (sequence is synthesized)
ggttcttcactgaccttggactttggcatgattcttagtcatacttgaacttgtctcattccacctcttctcagagcaactcttcctttgggaaaagagttcttcagatcatagaccaaa

SEQ ID NO: 343544 - DNA, 120 bp, Artificial Sequence
  ENSG00000138166_17 (sequence is synthesized)
aaagtcataccttcgaggtggtagcagtagattccaggaggagaagggtacttgctaggtatcctgggtcagtggcggtgcaaactggtttcctcagctgcctgtccttctgtgtgctta

SEQ ID NO: 343545 - DNA, 120 bp, Artificial Sequence
  ENSG00000138166_18 (sequence is synthesized)
tgtctcttgtgacaattgttttcctccctgcccctggaggttgtcttcaagctgtggacttctgggatttgcagattttgcaacgtggtactactttttttttctttttgtctgttagtt

SEQ ID NO: 343546 - DNA, 120 bp, Artificial Sequence
  ENSG00000138166_19 (sequence is synthesized)
atttctccaggggaaaaggcaataattttctaagacccgtgtgaatgtgaagaaaagcagtatgttactggttgttgttgttgttcttgttttttatagtgtaaaataaaaatagtaaaa

SEQ ID NO: 343547 - DNA, 120 bp, Artificial Sequence
  ENSG00000138172_0 (sequence is synthesized)
cactcactggcgcgcagactccatcccactgttttcttctctcttttctggagttagattagtctgaagccgccaccagccccaggcccccgtgcagaagaaaagcgggagggaacggcg

SEQ ID NO: 343548 - DNA, 120 bp, Artificial Sequence
  ENSG00000138172_1 (sequence is synthesized)
gaggccgccgctgccctgcaccgccctcctggaggccacttggagagtccggccccgaggaggccatggccacaagtgcccacagctggccccaggttgccagcgtcgctacagcccaga

SEQ ID NO: 343549 - DNA, 120 bp, Artificial Sequence
  ENSG00000138172_2 (sequence is synthesized)
ccaaggcagaataatctccggatgagctggtggcaccgctgagcctttggtctcaccagggcttcctgttgctggcaggcggggtggagcggagctgctgggaggctgctggataggaga

SEQ ID NO: 343550 - DNA, 120 bp, Artificial Sequence
  ENSG00000138172_3 (sequence is synthesized)
ggggtcacggctgcggaagaggaggttcttcgggacacccgtggatggacacggcaaggaaacaccaggccaaccacagctggggataaaatagcacaaccacaccctgccgtccagcgc

SEQ ID NO: 343551 - DNA, 120 bp, Artificial Sequence
  ENSG00000138172_4 (sequence is synthesized)
ctcccagcctgtgccccttcctagtaccaccagcaaccatcaatcccgtctcctcctgcctcctctcctgcaatccaccccgccacgactatcgccatggcagccctgatcgcagagaac

SEQ ID NO: 343552 - DNA, 120 bp, Artificial Sequence
  ENSG00000138172_5 (sequence is synthesized)
ttccgcttcctgtcacttttcttcaagagcaaggatgtgatgattttcaacggcctggtggcactgggcacggtgggcagccaggagctgttctctgtggtggccttccactgcccctgc

SEQ ID NO: 343553 - DNA, 120 bp, Artificial Sequence
  ENSG00000138172_6 (sequence is synthesized)
tcgccggcccggaactacctgtacgggctggcggccatcggcgtgcccgccctggtgctcttcatcattggcatcatcctcaacaaccacacctggaacctcgtggccgagtgccagcac

SEQ ID NO: 343554 - DNA, 120 bp, Artificial Sequence
  ENSG00000138172_7 (sequence is synthesized)
gcttatgtctgtgctctcagtgagttcgtggacccttcctcactcacggccagggaagagcacttcccatcagcccacgccactgaaatcctggccaggttcccctgcaaggagaaccct

SEQ ID NO: 343555 - DNA, 120 bp, Artificial Sequence
  ENSG00000138172_8 (sequence is synthesized)
gacaacctgtcagacttccgggaggaggtcagccgcaggctcaggtatgagtcccagctctttggatggctgctcatcggcgtggtggccatcctggtgttcctgaccaagtgcctcaag

SEQ ID NO: 343556 - DNA, 120 bp, Artificial Sequence
  ENSG00000138172_9 (sequence is synthesized)
cattactgctcaccactcagctaccgccaggaggcctactgggcgcagtaccgcgccaatgaggaccagctgttccagcgcacggccgaggtgcactctcgggtgctcgctgccaacaat

SEQ ID NO: 343557 - DNA, 120 bp, Artificial Sequence
  ENSG00000138172_10 (sequence is synthesized)
gtgcgccgcttctttggctttgtggcgctcaacaaggatgatgaggaactgattgccaacttcccagtggaaggcacgcagccacggccacagtggaatgccatcaccggcgtctacttg

SEQ ID NO: 343558 - DNA, 120 bp, Artificial Sequence
  ENSG00000138172_11 (sequence is synthesized)
taccgtgagaaccagggcctcccactctacagccgcctgcacaagtgggcccagggtctggcaggcaacggcgcggcccctgacaacgtggagatggccctgctcccctcctaaggaggt

SEQ ID NO: 343559 - DNA, 120 bp, Artificial Sequence
  ENSG00000138172_12 (sequence is synthesized)
gcttcccatgctctttgtaaatggcactacttggtcccaaactgaaccccactgcttgctcacatccatatcagaaggggatttttaaaaaactgttatcttcttggccaggggaaagga

SEQ ID NO: 343560 - DNA, 120 bp, Artificial Sequence
  ENSG00000138172_13 (sequence is synthesized)
ccacaaggcaatctggggtgtggacagacccagtagacaatggaagccccagccagcagggccaggtgacagtgaagctcaccagtgggctcctttatggtactctatgcagttaacatg

SEQ ID NO: 343561 - DNA, 120 bp, Artificial Sequence
  ENSG00000138172_14 (sequence is synthesized)
tatctagctgcatagggacacccagcgcagcagtgcaccactgggaagtggcctccagtgcagcctctggccttattttatatatttaaatttttgataaagtttttcttactaaaagga

SEQ ID NO: 343562 - DNA, 120 bp, Artificial Sequence
  ENSG00000138172_15 (sequence is synthesized)
atcctcttttcactgatgaggaatctgaggcccagagaacagtcatgaagtgtgatcagaccctgaggtctccaaaaagataatgtccttgcgaactccagggattctggcatcttgctg

SEQ ID NO: 343563 - DNA, 120 bp, Artificial Sequence
  ENSG00000138172_16 (sequence is synthesized)
tacccaccccagcccacacggcaggatcctatccaagtcccttatccacccggacactcactttagcttttacaccctcaaggctgagaccctaaggacacgccctggatccaaggagtc

SEQ ID NO: 343564 - DNA, 120 bp, Artificial Sequence
  ENSG00000138172_17 (sequence is synthesized)
cctggcccctctgctaatatgcgccacctggactcccagagggaaagccggtcagcaccccacatgcattagcaccatgggccacccccaagccctaccccaggagaagctcgtggtggc

SEQ ID NO: 343565 - DNA, 120 bp, Artificial Sequence
  ENSG00000138172_18 (sequence is synthesized)
aaaaagaacctaagcatttgaggcaggtcacccaagcttgaatctcagtctgcctctcatctgtgaccctggcgagccactcgtcctcaggaagccttcactttccctagtgcacggcgg

SEQ ID NO: 343566 - DNA, 120 bp, Artificial Sequence
  ENSG00000138172_19 (sequence is synthesized)
gccacatggctctgcctgagcccatctggcagccttccttggcagggacagaaggggtgatctagaaggggtgatccctccatgaagcatggaagggaacagggctaggtctgtgtttgg

SEQ ID NO: 343567 - DNA, 120 bp, Artificial Sequence
  ENSG00000138172_20 (sequence is synthesized)
cgctcaccccatccctccactccctggcttcctctggcctggggagttttgtttttcaccctccagagggggaggacatggggccacaccctggcctgtctctcaggcttgtgtgggtgg

SEQ ID NO: 343568 - DNA, 120 bp, Artificial Sequence
  ENSG00000138172_21 (sequence is synthesized)
ggaaatgaggggtgccatgcaccctggaggaactcagtgaacagtggcaactgtcacttccctggggccctatggtccttcctttctccccagcctgtccacactagcatcttcctcaac

SEQ ID NO: 343569 - DNA, 120 bp, Artificial Sequence
  ENSG00000138172_22 (sequence is synthesized)
tcctggttttcagagggaaacacttatcggtcatctgctccacaggaaacaccaggccaaccacagctggggataaaatagcacaaccacaccctgccgtccagcgcctcccagcctgtg

SEQ ID NO: 343570 - DNA, 120 bp, Artificial Sequence
  ENSG00000138175_0 (sequence is synthesized)
gtattgctgctcagctcctcagctgtgcgtgcgagggacgtcgggggcggcgccgcagcagttgcccctggtaacgggggaggcagcaggaggaggaggaggaggagggactcggcggga

SEQ ID NO: 343571 - DNA, 120 bp, Artificial Sequence
  ENSG00000138175_1 (sequence is synthesized)
ggatgggcttgctctcaattttgcgcaagttgaaaagtgcaccagaccaggaggtgagaatacttctcctgggcttggataatgctggcaagaccactcttctgaagcagcttgcatctg

SEQ ID NO: 343572 - DNA, 120 bp, Artificial Sequence
  ENSG00000138175_2 (sequence is synthesized)
aagacatcagccacatcacacctacacagggtttcaacatcaaaagtgtacaatcacaaggttttaaactgaatgtatgggacattggtggacagaggaaaatcagaccatactggaaga

SEQ ID NO: 343573 - DNA, 120 bp, Artificial Sequence
  ENSG00000138175_3 (sequence is synthesized)
attattttgaaaataccgatattcttatatatgtaatcgacagtgcagacagaaaaagatttgaagagacgggtcaggaactagcggaattactggaggaagaaaaactaagttgtgtgc

SEQ ID NO: 343574 - DNA, 120 bp, Artificial Sequence
  ENSG00000138175_4 (sequence is synthesized)
cagtgctcatctttgctaataagcaggatttgctcacagcagcccctgcctctgaaattgcagaaggactgaacctgcataccatccgcgaccgagtctggcagatccagtcttgctcag

SEQ ID NO: 343575 - DNA, 120 bp, Artificial Sequence
  ENSG00000138175_5 (sequence is synthesized)
ctctcacaggagagggcgttcaggatggcatgaactgggtctgcaaaaatgtcaatgcaaagaagaaataaaatctagacgaatggagatgcaggagctgcgggagccgaattcggtcct

SEQ ID NO: 343576 - DNA, 120 bp, Artificial Sequence
  ENSG00000138175_6 (sequence is synthesized)
gaaaaacactaatttgctgctttctgaccaaatgtttttccatctgtgtacagctccagctgtttgaagagagggaacaacacggtttagaaagaatccccattccagcagtagatttaa

SEQ ID NO: 343577 - DNA, 120 bp, Artificial Sequence
  ENSG00000138175_7 (sequence is synthesized)
ctgatctctgaggttcagtatcatttttcaaataaaggaattatattatttcctctgcataattgaaatagtattaaatgtctcaaagcacatgattagaaaatgagatcttttaaatga

SEQ ID NO: 343578 - DNA, 89 bp, Artificial Sequence
  ENSG00000138175_8 (sequence is synthesized)
tctcaaagcacatgattagaaaatgagatcttttaaatgagcaagagattgcattgcagtttagacaattccagtgggcttttttttcc

SEQ ID NO: 343579 - DNA, 120 bp, Artificial Sequence
  ENSG00000138175_9 (sequence is synthesized)
gtcccttgcattccctccatggttttgaaaccacagacagtgtttgctggtgctgtcagtgatttttaccgtcactagcccagccaggcttcagtctgtccgacaggaagctgctgggtg

SEQ ID NO: 343580 - DNA, 120 bp, Artificial Sequence
  ENSG00000138175_10 (sequence is synthesized)
ggggtggggggagaaaaggcagataattaaaccatctcatcgtcttgcaggtcggagactacgtatgtaatcctcactctttggacagaaaaaaaaaaaaaagtctttcttgcagacaag

SEQ ID NO: 343581 - DNA, 120 bp, Artificial Sequence
  ENSG00000138175_11 (sequence is synthesized)
tcactacagaaacataccccatcccacccacccctgcctctgccccagccagccacacagagaagcaaattcttatgacttttgactgtaatgacatctggaatgtaaggagaggtggga

SEQ ID NO: 343582 - DNA, 120 bp, Artificial Sequence
  ENSG00000138175_12 (sequence is synthesized)
ggtttaattccagaaaaattacaaggtccttaaaaagctctcacatcgagggctcaggctagcgtaaacaggctttctccagctcagtggagcagtgagcagccgactctgagattagct

SEQ ID NO: 343583 - DNA, 120 bp, Artificial Sequence
  ENSG00000138175_13 (sequence is synthesized)
ggcttctccacggccgtcctatagacaggatttctaaagctcaaagaattctgtgtttaaacgatcacaataggccgctgctatcagattttagaaataaatgcagctttaccatgaacc

SEQ ID NO: 343584 - DNA, 120 bp, Artificial Sequence
  ENSG00000138175_14 (sequence is synthesized)
tgctccactgagaaaagccaggcagatcgatttttagatcaatttttacagtgctggcaacttggtggtgtgggatgctcctggatggagagggtttgctgctggggaggacatgggtgt

SEQ ID NO: 343585 - DNA, 120 bp, Artificial Sequence
  ENSG00000138175_15 (sequence is synthesized)
cagaacatttctcctgcccctcgttgcaaaacgagcttgtttccctgaacctcagaaatcctcagcttcaaacatggggaaacaggccagagcattgcccggctcctgaattaaactctg

SEQ ID NO: 343586 - DNA, 120 bp, Artificial Sequence
  ENSG00000138175_16 (sequence is synthesized)
ttctggtgcctgagctcaggggttttcagagaatgaataagagactgtccagtgactggtgggtccctgggggccagctgccttctcatcctgggaggtggcccttcccaagcccatcag

SEQ ID NO: 343587 - DNA, 120 bp, Artificial Sequence
  ENSG00000138175_17 (sequence is synthesized)
ggcgtgtgagcagactgaaggggccgctgcagcccctggccctcaatacccagctgcttctggctaagagtgcagcagagactgaggcatagccagcttcaaaagcgatctgacatgaaa

SEQ ID NO: 343588 - DNA, 120 bp, Artificial Sequence
  ENSG00000138175_18 (sequence is synthesized)
gtcattaacaaagccagccgtgaaaaggtgccccagagttgctgtggacagacctgtaaggacttgcaaaacaaaagaaagtgaggggtttttttaacctcagagctagctgctctctgc

SEQ ID NO: 343589 - DNA, 120 bp, Artificial Sequence
  ENSG00000138175_19 (sequence is synthesized)
agcctcctccactggcttctctggctcacccaagctctcccttacagaggcaacacagaattataaggaatcagaaatcccccttctaccaggctgcaaatgtggctctagcacttgcaa

SEQ ID NO: 343590 - DNA, 120 bp, Artificial Sequence
  ENSG00000138175_20 (sequence is synthesized)
attgttttttcttccgaatagttcagcagggacaagttatctgaggggcaaaatgcctgcttggaggtctgcaattttggaacactgcagtatggaactttggcattggagggtctgtaa

SEQ ID NO: 343591 - DNA, 120 bp, Artificial Sequence
  ENSG00000138175_21 (sequence is synthesized)
aatatttttgttcttttaccaccaacttaggggactgttttaaagagccatcccaaggcctctcctagcaggcagaagccactcctctgataacggcctctgtaaatgttctgatttgct

SEQ ID NO: 343592 - DNA, 120 bp, Artificial Sequence
  ENSG00000138175_22 (sequence is synthesized)
ctcagctgcagagacacagagacactgcagatgtcacacgctttcatcttccctttgagcccttttgaaccctcctggggctctggggtagatgagagaagcctgaaaaaggcagagttt

SEQ ID NO: 343593 - DNA, 120 bp, Artificial Sequence
  ENSG00000138175_23 (sequence is synthesized)
gaaagctcccatttaaaaacaaaatactttttaaagccctcttgcctcttccctgcccactcctgccccctgaccagaagacagaatttgaagctggaaagggaagaccccttttcccct

SEQ ID NO: 343594 - DNA, 120 bp, Artificial Sequence
  ENSG00000138175_24 (sequence is synthesized)
cctcctgtccccagtgagtcttagcgagacttttgccctgcgcacaattgcatctgaatgtgcgggggagagggctgggggccggagggcaggcaaggcctggggggtgctcgtgatatg

SEQ ID NO: 343595 - DNA, 120 bp, Artificial Sequence
  ENSG00000138175_25 (sequence is synthesized)
tgctcaagccagttgtgggaaaaactcgagtcctcccctcctcccgacctaccccgtgtggctgcttttggctggattccctgcacccagtgcaacacaccctttccccttcactctccc

SEQ ID NO: 343596 - DNA, 120 bp, Artificial Sequence
  ENSG00000138175_26 (sequence is synthesized)
ttggttactatggaaacaagggtgtcattgatgtgggctgagctggggaacatgtcggtgcacagctgaaagtcagcgattatgccggcggttagaaatgtgccagggttaaaggagtcc

SEQ ID NO: 343597 - DNA, 120 bp, Artificial Sequence
  ENSG00000138175_27 (sequence is synthesized)
gcagctcccacggctgctgggaggacatggtcctgcccccttccttcctccctccctccgtctccacttctctctccttgcttttgacaaatttctttattcccctctggactaaagtag

SEQ ID NO: 343598 - DNA, 120 bp, Artificial Sequence
  ENSG00000138175_28 (sequence is synthesized)
tggctatttttgtgccactctgcgccccaccctcactgttggccgctccttatccggcctggcctggagggtgacaccatgtcaccctcaccaggactcgtctctccattcccgtcagag

SEQ ID NO: 343599 - DNA, 120 bp, Artificial Sequence
  ENSG00000138175_29 (sequence is synthesized)
tttgctttgatttccctttcctttccttctcggggaccagttcttacttccttttatttttagctctgcactccatgtggtttcagggttcagtctgatccatcaaaaggttcttttttt

SEQ ID NO: 343600 - DNA, 120 bp, Artificial Sequence
  ENSG00000138175_30 (sequence is synthesized)
ataatcccttttgaaaatgataatcaaaggaagagatgtggtgtttggtcatgtggaaaactcaatgtataatttagacgtctgtcaaaaatccgacaaataaaatttagctggaacgaa

SEQ ID NO: 343601 - DNA, 120 bp, Artificial Sequence
  ENSG00000138180_0 (sequence is synthesized)
aaactcccggaagcggcatccacacctgatggtgtgactcggccgacgcgagcgccgcgcttcgcttcagctgctagctggcccaagggaggcgaccgcggagggtggcgaggggcggcc

SEQ ID NO: 343602 - DNA, 120 bp, Artificial Sequence
  ENSG00000138180_1 (sequence is synthesized)
aggacccgcagccccggggccgggccggtccggaccgccagggagggcaggtcagtgggcagatcgcgtccgcgggattcaatctctgcccgctctgataacagtccttttccctggcgc

SEQ ID NO: 343603 - DNA, 120 bp, Artificial Sequence
  ENSG00000138180_2 (sequence is synthesized)
tcacttcgtgcctggcacccggctgggcgcctcaagaccgttgtctcttcgatcgcttctttggacttggcgaccatttcagagatgtcttccagaagtaccaaagatttaattaaaagt

SEQ ID NO: 343604 - DNA, 120 bp, Artificial Sequence
  ENSG00000138180_3 (sequence is synthesized)
aagtggggatcgaagcctagtaactccaaatccgaaactacattagaaaaattaaagggagaaattgcacacttaaagacatcagtggatgaaatcacaagtgggaaaggaaagctgact

SEQ ID NO: 343605 - DNA, 120 bp, Artificial Sequence
  ENSG00000138180_4 (sequence is synthesized)
gataaagagagacacagacttttggagaaaattcgagtccttgaggctgagaaggagaagaatgcttatcaactcacagagaaggacaaagaaatacagcgactgagagaccaactgaag

SEQ ID NO: 343606 - DNA, 120 bp, Artificial Sequence
  ENSG00000138180_5 (sequence is synthesized)
gccagatatagtactaccacattgcttgaacagctggaagagacaacgagagaaggagaaaggagggagcaggtgttgaaagccttatctgaagagaaagacgtattgaaacaacagttg

SEQ ID NO: 343607 - DNA, 120 bp, Artificial Sequence
  ENSG00000138180_6 (sequence is synthesized)
tctgctgcaacctcacgaattgctgaacttgaaagcaaaaccaatacactccgtttatcacagactgtggctccaaactgcttcaactcatcaataaataatattcatgaaatggaaata

SEQ ID NO: 343608 - DNA, 120 bp, Artificial Sequence
  ENSG00000138180_7 (sequence is synthesized)
cagctgaaagatgctctggagaaaaatcagcagtggctcgtgtatgatcagcagcgggaagtctatgtaaaaggacttttagcaaagatctttgagttggaaaagaaaacggaaacagct

SEQ ID NO: 343609 - DNA, 120 bp, Artificial Sequence
  ENSG00000138180_8 (sequence is synthesized)
gctcattcactcccacagcagacaaaaaagcctgaatcagaaggttatcttcaagaagagaagcagaaatgttacaacgatctcttggcaagtgcaaaaaaagatcttgaggttgaacga

SEQ ID NO: 343610 - DNA, 120 bp, Artificial Sequence
  ENSG00000138180_9 (sequence is synthesized)
caaaccataactcagctgagttttgaactgagtgaatttcgaagaaaatatgaagaaacccaaaaagaagttcacaatttaaatcagctgttgtattcacaaagaagggcagatgtgcaa

SEQ ID NO: 343611 - DNA, 120 bp, Artificial Sequence
  ENSG00000138180_10 (sequence is synthesized)
catctggaagatgataggcataaaacagagaagatacaaaaactcagggaagagaatgatattgctaggggaaaacttgaagaagagaagaagagatccgaagagctcttatctcaggtc

SEQ ID NO: 343612 - DNA, 120 bp, Artificial Sequence
  ENSG00000138180_11 (sequence is synthesized)
ctgctaaagcagcaagaagaacaaacaagggtagctctgttggaacaacagatgcaggcatgtactttagactttgaaaatgaaaaactcgaccgtcaacatgtgcagcatcaattgcat

SEQ ID NO: 343613 - DNA, 120 bp, Artificial Sequence
  ENSG00000138180_12 (sequence is synthesized)
gtaattcttaaggagctccgaaaagcaagaaatcaaataacacagttggaatccttgaaacagcttcatgagtttgccatcacagagccattagtcactttccaaggagagactgaaaac

SEQ ID NO: 343614 - DNA, 120 bp, Artificial Sequence
  ENSG00000138180_13 (sequence is synthesized)
agagaaaaagttgccgcctcaccaaaaagtcccactgctgcactcaatgaaagcctggtggaatgtcccaagtgcaatatacagtatccagccactgagcatcgcgatctgcttgtccat

SEQ ID NO: 343615 - DNA, 120 bp, Artificial Sequence
  ENSG00000138180_14 (sequence is synthesized)
gtggaatactgttcaaagtagcaaaataagtatttgttttgatattaaaagattcaatactgtattttctgttagcttgtgggcattttgaattatatatttcacattttgcataaaact

SEQ ID NO: 343616 - DNA, 120 bp, Artificial Sequence
  ENSG00000138180_15 (sequence is synthesized)
gcctatctacctttgacactccagcatgctagtgaatcatgtatcttttaggctgctgtgcatttctcttggcagtgatacctccctgacatggttcatcatcaggctgcaatgacagaa

SEQ ID NO: 343617 - DNA, 120 bp, Artificial Sequence
  ENSG00000138180_16 (sequence is synthesized)
tgtggtgagcagcgtctactgagactactaacattttgcactgtcaaaatacttggtgaggaaaagatagctcaggttattgctaatgggttaatgcaccagcaagcaaaatattttatg

SEQ ID NO: 343618 - DNA, 120 bp, Artificial Sequence
  ENSG00000138180_17 (sequence is synthesized)
ttttgggggttttgaaaaatcaaagataattaaccaaggatcttaactgtgttcgcattttttatccaagcacttagaaaacctacaatcctaattttgatgtccattgttaagaggtgg

SEQ ID NO: 343619 - DNA, 120 bp, Artificial Sequence
  ENSG00000138180_18 (sequence is synthesized)
tgatagatactattttttttttcatattgtatagcggttattagaaaagttggggattttcttgatctttattgctgcttaccattgaaacttaacccagctgtgttccccaactctgtt

SEQ ID NO: 343620 - DNA, 120 bp, Artificial Sequence
  ENSG00000138180_19 (sequence is synthesized)
ctgcgcacgaaacagtatctgtttgaggcataatcttaagtggccacacacaatgttttctcttatgttatctggcagtaactgtaacttgaattacattagcacattctgcttagctaa

SEQ ID NO: 343621 - DNA, 120 bp, Artificial Sequence
  ENSG00000138180_20 (sequence is synthesized)
aattgttaaaataaactttaataaacccatgtagccctctcatttgattgacagtattttagttatttttggcattcttaaagctgggcaatgtaatgatcagatctttgtttgtctgaa

SEQ ID NO: 343622 - DNA, 120 bp, Artificial Sequence
  ENSG00000138180_21 (sequence is synthesized)
caggtatttttatacatgctttttgtaaaccaaaaacttttaaatttcttcaggttttctaacatgcttaccactgggctactgtaaatgagaaaagaataaaattatttaatgttttaa

SEQ ID NO: 343623 - DNA, 120 bp, Artificial Sequence
  ENSG00000138180_22 (sequence is synthesized)
aaatgcagtttttcctcatgtttatgctgttctatggagaactgtttgaaagttgtgaaaagtgtctttaaaagacttcaataaaagtctttcttcttcaataaaaaagatatttcaaga

SEQ ID NO: 343624 - DNA, 120 bp, Artificial Sequence
  ENSG00000138180_23 (sequence is synthesized)
tcagtaggtagagcctctgcctcatttgaagcaactgccctttgagcatcaattcagaggacatgaaagagggacatgatcacatctggaaacattcccccaactaccccagctgctgtg

SEQ ID NO: 343625 - DNA, 120 bp, Artificial Sequence
  ENSG00000138180_24 (sequence is synthesized)
atgctggaggcactaaatagtgcctgagctggggtcaaaagggtagaatagagggtagtcacagaatcctgaactgaaattgtgtttatctattaaaaaagaaagaaaggctgggcacga

SEQ ID NO: 343626 - DNA, 120 bp, Artificial Sequence
  ENSG00000138182_0 (sequence is synthesized)
attgtttgaatttgaaaacggtaacatcgcagtgctgctcgcgggtctggctagtcaggcgaagtttgcagaatggaatctaattttaatcaagagggagtacctcgaccatcttatgtt

SEQ ID NO: 343627 - DNA, 120 bp, Artificial Sequence
  ENSG00000138182_1 (sequence is synthesized)
tttagtgctgacccaattgcaaggccttcagaaataaatttcgatggcattaagcttgatctgtctcatgaattttccttagttgctccaaatactgaggcaaacagtttcgaatctaaa

SEQ ID NO: 343628 - DNA, 120 bp, Artificial Sequence
  ENSG00000138182_2 (sequence is synthesized)
gattatctccaggtttgtcttcgaataagaccatttacacagtcagaaaaagaacttgagtctgagggctgtgtgcatattctggattcacagactgttgtgctgaaagagcctcaatgc

SEQ ID NO: 343629 - DNA, 120 bp, Artificial Sequence
  ENSG00000138182_3 (sequence is synthesized)
atccttggtcggttaagtgaaaaaagctcagggcagatggcacagaaattcagtttttccaaggtttttggcccagcaactacacagaaggaattctttcagggttgcattatgcaacca

SEQ ID NO: 343630 - DNA, 120 bp, Artificial Sequence
  ENSG00000138182_4 (sequence is synthesized)
gtaaaagacctcttgaaaggacagagtcgtctgatttttacttacgggctaaccaattcaggaaaaacatatacatttcaagggacagaagaaaatattggcattctgcctcgaactttg

SEQ ID NO: 343631 - DNA, 120 bp, Artificial Sequence
  ENSG00000138182_5 (sequence is synthesized)
aatgtattatttgatagtcttcaagaaagactgtatacaaagatgaaccttaaaccacatagatccagagaatacttaaggttatcatcagaacaagagaaagaagaaattgctagcaaa

SEQ ID NO: 343632 - DNA, 120 bp, Artificial Sequence
  ENSG00000138182_6 (sequence is synthesized)
agtgcattgcttcggcaaattaaagaggttactgtgcataatgatagtgatgatactctttatggaagtttaactaactctttgaatatctcagagtttgaagaatccataaaagattat

SEQ ID NO: 343633 - DNA, 120 bp, Artificial Sequence
  ENSG00000138182_7 (sequence is synthesized)
gaacaagccaacttgaatatggctaatagtataaaattttctgtgtgggtttctttctttgaaatttacaatgaatatatttatgacttatttgttcctgtatcatctaaattccaaaag

SEQ ID NO: 343634 - DNA, 120 bp, Artificial Sequence
  ENSG00000138182_8 (sequence is synthesized)
agaaagatgctgcgcctttcccaagacgtaaagggctattcttttataaaagatctacaatggattcaagtatctgattccaaagaagcctatagacttttaaaactaggaataaagcac

SEQ ID NO: 343635 - DNA, 120 bp, Artificial Sequence
  ENSG00000138182_9 (sequence is synthesized)
cagagtgttgccttcacaaaattgaataatgcttccagtagaagtcacagcatattcactgttaaaatattacagattgaagattctgaaatgtctcgtgtaattcgagtcagtgaatta

SEQ ID NO: 343636 - DNA, 120 bp, Artificial Sequence
  ENSG00000138182_10 (sequence is synthesized)
tctttatgtgatcttgctggttcagaacgaactatgaagacacagaatgaaggtgaaaggttaagagagactgggaatatcaacacttctttattgactctgggaaagtgtattaacgtc

SEQ ID NO: 343637 - DNA, 120 bp, Artificial Sequence
  ENSG00000138182_11 (sequence is synthesized)
ttgaagaatagtgaaaagtcaaagtttcaacagcatgtgcctttccgggaaagtaaactgactcactattttcaaagtttttttaatggtaaagggaaaatttgtatgattgtcaatatc

SEQ ID NO: 343638 - DNA, 120 bp, Artificial Sequence
  ENSG00000138182_12 (sequence is synthesized)
agccaatgttatttagcctatgatgaaacactcaatgtattgaagttctccgccattgcacaaaaagtttgtgtcccagacactttaaattcctctcaagagaaattatttggacctgtc

SEQ ID NO: 343639 - DNA, 120 bp, Artificial Sequence
  ENSG00000138182_13 (sequence is synthesized)
aaatcttctcaagatgtatcactagacagtaattcaaacagtaaaatattaaatgtaaaaagagccaccatttcatgggaaaatagtctagaagatttgatggaagacgaggatttggtt

SEQ ID NO: 343640 - DNA, 120 bp, Artificial Sequence
  ENSG00000138182_14 (sequence is synthesized)
gaggagctagaaaacgctgaagaaactcaaaatgtggaaactaaacttcttgatgaagatctagataaaacattagaggaaaataaggctttcattagccacgaggagaaaagaaaactg

SEQ ID NO: 343641 - DNA, 120 bp, Artificial Sequence
  ENSG00000138182_15 (sequence is synthesized)
ttggacttaatagaagacttgaaaaaaaaactgataaatgaaaaaaaggaaaaattaaccttggaatttaaaattcgagaagaagttacacaggagtttactcagtattgggctcaacgg

SEQ ID NO: 343642 - DNA, 120 bp, Artificial Sequence
  ENSG00000138182_16 (sequence is synthesized)
gaagctgactttaaggagactctgcttcaagaacgagagatattagaagaaaatgctgaacgtcgtttggctatcttcaaggatttggttggtaaatgtgacactcgagaagaagcagcg

SEQ ID NO: 343643 - DNA, 120 bp, Artificial Sequence
  ENSG00000138182_17 (sequence is synthesized)
aaagacatttgtgccacaaaagttgaaactgaagaagctactgcttgtttagaactaaagtttaatcaaattaaagctgaattagctaaaaccaaaggagaattaatcaaaaccaaagaa

SEQ ID NO: 343644 - DNA, 120 bp, Artificial Sequence
  ENSG00000138182_18 (sequence is synthesized)
gagttaaaaaagagagaaaatgaatcagattcattgattcaagagcttgagacatctaataagaaaataattacacagaatcaaagaattaaagaattgataaatataattgatcaaaaa

SEQ ID NO: 343645 - DNA, 120 bp, Artificial Sequence
  ENSG00000138182_19 (sequence is synthesized)
gaagatactatcaacgaatttcagaacctaaagtctcatatggaaaacacatttaaatgcaatgacaaggctgatacatcttctttaataataaacaataaattgatttgtaatgaaaca

SEQ ID NO: 343646 - DNA, 120 bp, Artificial Sequence
  ENSG00000138182_20 (sequence is synthesized)
gttgaagtacctaaggacagcaaatctaaaatctgttcagaaagaaaaagagtaaatgaaaatgaacttcagcaagatgaaccaccagcaaagaaagggtctatccatgttagttcagct

SEQ ID NO: 343647 - DNA, 120 bp, Artificial Sequence
  ENSG00000138182_21 (sequence is synthesized)
atcactgaagaccaaaagaaaagtgaagaagtgcgaccgaacattgcagaaattgaagacatcagagttttacaagaaaataatgaaggactgagagcatttttactcactattgagaat

SEQ ID NO: 343648 - DNA, 120 bp, Artificial Sequence
  ENSG00000138182_22 (sequence is synthesized)
gaacttaaaaatgaaaaggaagaaaaagcagaattaaataaacagattgttcattttcagcaggaactttctctttctgaaaaaaagaatttaactttaagtaaagaggtccaacaaatt

SEQ ID NO: 343649 - DNA, 120 bp, Artificial Sequence
  ENSG00000138182_23 (sequence is synthesized)
cagtcaaattatgatattgcaattgctgaattacatgtgcagaaaagtaaaaatcaagaacaggaggaaaagatcatgaaattgtcaaatgagatagaaactgctacaagaagcattaca

SEQ ID NO: 343650 - DNA, 120 bp, Artificial Sequence
  ENSG00000138182_24 (sequence is synthesized)
aataatgtttcacaaataaaattaatgcacacgaaaatagacgaactacgtactcttgattcagtttctcagatttcaaacatagatttgctcaatctcagggatctgtcaaatggttct

SEQ ID NO: 343651 - DNA, 120 bp, Artificial Sequence
  ENSG00000138182_25 (sequence is synthesized)
gaggaggataatttgccaaatacacagttagaccttttaggtaatgattatttggtaagtaagcaagttaaagaatatcgaattcaagaacccaatagggaaaattctttccactctagt

SEQ ID NO: 343652 - DNA, 120 bp, Artificial Sequence
  ENSG00000138182_26 (sequence is synthesized)
gaggaactggaacaacaaattgaaaaattgcaggcagaagtaaaaggctataaggatgaaaacaatagactaaaggagaaggagcataaaaaccaagatgacctactaaaagaaaaagaa

SEQ ID NO: 343653 - DNA, 120 bp, Artificial Sequence
  ENSG00000138182_27 (sequence is synthesized)
actcttatacagcagctgaaagaagaattgcaagaaaaaaatgttactcttgatgttcaaatacagcatgtagttgaaggaaagagagcgctttcagaacttacacaaggtgttacttgc

SEQ ID NO: 343654 - DNA, 120 bp, Artificial Sequence
  ENSG00000138182_28 (sequence is synthesized)
tataaggcaaaaataaaggaacttgaaacaattttagagactcagaaagttgaatgtagtcattcagccaagttagaacaagacattttggaaaaggaatctatcatcttaaagctagaa

SEQ ID NO: 343655 - DNA, 120 bp, Artificial Sequence
  ENSG00000138182_29 (sequence is synthesized)
agaaatttgaaggaatttcaagaacatcttcaggattctgtcaaaaacaccaaagatttaaatgtaaaggaactcaagctgaaagaagaaatcacacagttaacaaataatttgcaagat

SEQ ID NO: 343656 - DNA, 120 bp, Artificial Sequence
  ENSG00000138182_30 (sequence is synthesized)
atgaaacatttacttcaattaaaagaagaagaagaagaaaccaacaggcaagaaacagaaaaattgaaagaggaactctctgcaagctctgctcgtacccagaatctgaaagcagatctt

SEQ ID NO: 343657 - DNA, 120 bp, Artificial Sequence
  ENSG00000138182_31 (sequence is synthesized)
cagaggaaggaagaagattatgctgacctgaaagagaaactgactgatgccaaaaagcagattaagcaagtacagaaagaggtatctgtaatgcgtgatgaggataaattactgaggatt

SEQ ID NO: 343658 - DNA, 120 bp, Artificial Sequence
  ENSG00000138182_32 (sequence is synthesized)
aaaattaatgaactggagaaaaagaaaaaccagtgttctcaggaattagatatgaaacagcgaaccattcagcaactcaaggagcagttaaataatcagaaagtggaagaagctatacaa

SEQ ID NO: 343659 - DNA, 120 bp, Artificial Sequence
  ENSG00000138182_33 (sequence is synthesized)
cagtatgagagagcatgcaaagatctaaatgttaaagagaaaataattgaagacatgcgaatgacactagaagaacaggaacaaactcaggtagaacaggatcaagtgcttgaggctaaa

SEQ ID NO: 343660 - DNA, 120 bp, Artificial Sequence
  ENSG00000138182_34 (sequence is synthesized)
ttagaggaagttgaaaggctggccacagaattggaaaaatggaaggaaaaatgcaatgatttggaaaccaaaaacaatcaaaggtcaaataaagaacatgagaacaacacagatgtgctt

SEQ ID NO: 343661 - DNA, 120 bp, Artificial Sequence
  ENSG00000138182_35 (sequence is synthesized)
ggaaagctcactaatcttcaagatgagttacaggagtctgaacagaaatataatgctgatagaaagaaatggttagaagaaaaaatgatgcttatcactcaagcgaaagaagcagagaat

SEQ ID NO: 343662 - DNA, 120 bp, Artificial Sequence
  ENSG00000138182_36 (sequence is synthesized)
atacgaaataaagagatgaaaaaatatgctgaggacagggagcgtttttttaagcaacagaatgaaatggaaatactgacagcccagctgacagagaaagatagtgaccttcaaaagtgg

SEQ ID NO: 343663 - DNA, 120 bp, Artificial Sequence
  ENSG00000138182_37 (sequence is synthesized)
cgagaagaacgagatcaactggttgcagctttagaaatacagctaaaagcactgatatccagtaatgtacagaaagataatgaaattgaacaactaaaaaggatcatatcagagacttct

SEQ ID NO: 343664 - DNA, 120 bp, Artificial Sequence
  ENSG00000138182_38 (sequence is synthesized)
aaaatagaaacacaaatcatggatatcaagcccaaacgtattagttcagcagatcctgacaaacttcaaactgaacctctatcgacaagttttgaaatttccagaaataaaatagaggat

SEQ ID NO: 343665 - DNA, 120 bp, Artificial Sequence
  ENSG00000138182_39 (sequence is synthesized)
ggatctgtagtccttgactcttgtgaagtgtcaacagaaaatgatcaaagcactcgatttccaaaacctgagttagagattcaatttacacctttacagccaaacaaaatggcagtgaaa

SEQ ID NO: 343666 - DNA, 120 bp, Artificial Sequence
  ENSG00000138182_40 (sequence is synthesized)
caccctggttgtaccacaccagtgacagttaagattcccaaggctcggaagaggaagagtaatgaaatggaggaggacttggtgaaatgtgaaaataagaagaatgctacacccagaact

SEQ ID NO: 343667 - DNA, 120 bp, Artificial Sequence
  ENSG00000138182_41 (sequence is synthesized)
aatttgaaatttcctatttcagatgatagaaattcttctgtcaaaaaggaacaaaaggttgccatacgtccatcatctaagaaaacatattctttacggagtcaggcatccataattggt

SEQ ID NO: 343668 - DNA, 120 bp, Artificial Sequence
  ENSG00000138182_42 (sequence is synthesized)
gtaaacctggccactaagaaaaaagaaggaacactacagaaatttggagacttcttacaacattctccctcaattcttcaatcaaaagcaaagaagataattgaaacaatgagctcttca

SEQ ID NO: 343669 - DNA, 120 bp, Artificial Sequence
  ENSG00000138182_43 (sequence is synthesized)
aagctctcaaatgtagaagcaagtaaagaaaatgtgtctcaaccaaaacgagccaaacggaaattatacacaagtgaaatttcatctcctattgatatatcaggccaagtgattttaatg

SEQ ID NO: 343670 - DNA, 120 bp, Artificial Sequence
  ENSG00000138182_44 (sequence is synthesized)
gaccagaaaatgaaggagagtgatcaccagattatcaaacgacgacttcgaacaaaaacagccaaataaatcacttatggaaatgtttaatataaattttatagtcatagtcattggaac

SEQ ID NO: 343671 - DNA, 120 bp, Artificial Sequence
  ENSG00000138182_45 (sequence is synthesized)
gaacttgcatcctgtattgtaaatataaatgtatatattatgcattaaatcactctgcatatagattgctgttttatacatagtataattttaattcaataaatgagtcaaaatttgtat

SEQ ID NO: 343672 - DNA, 120 bp, Artificial Sequence
  ENSG00000138182_46 (sequence is synthesized)
ttataaggcttttttataatagcttctttcaaactgtatttccctattatctcagacattggatcagtgaagatcctaggaaagaggctgttattctcatttattttgctatacaggatg

SEQ ID NO: 343673 - DNA, 120 bp, Artificial Sequence
  ENSG00000138182_47 (sequence is synthesized)
taataggtcaggtatttggtttacttatatttaacaatgtcttatgaattttttttactttatctgttatacaactgattttacatatctgtttggattatagctaggatttggagaata

SEQ ID NO: 343674 - DNA, 120 bp, Artificial Sequence
  ENSG00000138182_48 (sequence is synthesized)
agtgtgtacagatcacaaaacatgtatatacattatttagaaaagatctcaagtctttaattagaatgtctcacttattttgtaaacattttgtgggtacatagtacatgtatatattta

SEQ ID NO: 343675 - DNA, 120 bp, Artificial Sequence
  ENSG00000138182_49 (sequence is synthesized)
cggggtatgtgagatgttttgacacaggcatgcaatgtgaaatacgtgtatcatggagaatgaggtatccatcccctcaagcatttttcctttgaattacagataatccaattacattct

SEQ ID NO: 343676 - DNA, 120 bp, Artificial Sequence
  ENSG00000138182_50 (sequence is synthesized)
ttagatcatttaaaaatatacaagtaagttattattgattatagtcactctattgtgctatcagatagtagatcattctttttatcttatttgtttttgtacccattaaccatccccacc

SEQ ID NO: 343677 - DNA, 120 bp, Artificial Sequence
  ENSG00000138182_51 (sequence is synthesized)
tccccctgcaaccgtcagtacccttaccagccactggtaaccattcttctactctgtatgcccatgaggtcaattgattttatttttagatcccataaataaatgagaacatgcagtctt

SEQ ID NO: 343678 - DNA, 120 bp, Artificial Sequence
  ENSG00000138182_52 (sequence is synthesized)
tttgtgccacaaaagttgaaactgaagaaacacataattatgtaggatttgaagatattattgattctcttcaagataatgttgctgatattaagaaacaggctgaaattgctcacttat

SEQ ID NO: 343679 - DNA, 120 bp, Artificial Sequence
  ENSG00000138182_53 (sequence is synthesized)
tctgatccttatgcttcccacctgtgaaatatggatgataccaagctcacagaaagttgtggattaaatgaagcaaatatggaactccccagagtagttcttgatagataataaatgcac

SEQ ID NO: 343680 - DNA, 120 bp, Artificial Sequence
  ENSG00000138182_54 (sequence is synthesized)
taattaactttacttattttcttagtatagctaaacagtgagacgagttaccaaaggtctatttctaaaatgtggaaaggccaacctgatttttcagttaacaaatctttgcaaacatat

SEQ ID NO: 343681 - DNA, 120 bp, Artificial Sequence
  ENSG00000138182_55 (sequence is synthesized)
aattttcagtgagaacattatcactattaaaaaggacacagaattacaattgactaaatgtaaagttttattttttgaacagttggacggtatttctcttgggatatatttattctttta

SEQ ID NO: 343682 - DNA, 120 bp, Artificial Sequence
  ENSG00000138185_0 (sequence is synthesized)
acggagacggaccacagcaagcagaggctgggggggggaaagacgaggaaagaggaggaaaacaaaagctgctacttatggaagatacaaaggagtctaacgtgaagacattttgctcca

SEQ ID NO: 343683 - DNA, 120 bp, Artificial Sequence
  ENSG00000138185_1 (sequence is synthesized)
agaatatcctagccatccttggcttctcctctatcatagctgtgatagctttgcttgctgtggggttgacccagaacaaagcattgccagaaaacgttaagtatgggattgtgctggatg

SEQ ID NO: 343684 - DNA, 120 bp, Artificial Sequence
  ENSG00000138185_2 (sequence is synthesized)
cgggttcttctcacacaagtttatacatctataagtggccagcagaaaaggagaatgacacaggcgtggtgcatcaagtagaagaatgcagggttaaaggtcctggaatctcaaaatttg

SEQ ID NO: 343685 - DNA, 120 bp, Artificial Sequence
  ENSG00000138185_3 (sequence is synthesized)
ttcagaaagtaaatgaaataggcatttacctgactgattgcatggaaagagctagggaagtgattccaaggtcccagcaccaagagacacccgtttacctgggagccacggcaggcatgc

SEQ ID NO: 343686 - DNA, 120 bp, Artificial Sequence
  ENSG00000138185_4 (sequence is synthesized)
ggttgctcaggatggaaagtgaagagttggcagacagggttctggatgtggtggagaggagcctcagcaactacccctttgacttccagggtgccaggatcattactggccaagaggaag

SEQ ID NO: 343687 - DNA, 120 bp, Artificial Sequence
  ENSG00000138185_5 (sequence is synthesized)
gtgcctatggctggattactatcaactatctgctgggcaaattcagtcagaaaacaaggtggttcagcatagtcccatatgaaaccaataatcaggaaacctttggagctttggaccttg

SEQ ID NO: 343688 - DNA, 120 bp, Artificial Sequence
  ENSG00000138185_6 (sequence is synthesized)
ggggagcctctacacaagtcacttttgtaccccaaaaccagactatcgagtccccagataatgctctgcaatttcgcctctatggcaaggactacaatgtctacacacatagcttcttgt

SEQ ID NO: 343689 - DNA, 120 bp, Artificial Sequence
  ENSG00000138185_7 (sequence is synthesized)
gctatgggaaggatcaggcactctggcagaaactggccaaggacattcaggttgcaagtaatgaaattctcagggacccatgctttcatcctggatataagaaggtagtgaacgtaagtg

SEQ ID NO: 343690 - DNA, 120 bp, Artificial Sequence
  ENSG00000138185_8 (sequence is synthesized)
acctttacaagaccccctgcaccaagagatttgagatgactcttccattccagcagtttgaaatccagggtattggaaactatcaacaatgccatcaaagcatcctggagctcttcaaca

SEQ ID NO: 343691 - DNA, 120 bp, Artificial Sequence
  ENSG00000138185_9 (sequence is synthesized)
ccagttactgcccttactcccagtgtgccttcaatgggattttcttgccaccactccagggggattttggggcattttcagctttttactttgtgatgaagtttttaaacttgacatcag

SEQ ID NO: 343692 - DNA, 120 bp, Artificial Sequence
  ENSG00000138185_10 (sequence is synthesized)
agaaagtctctcaggaaaaggtgactgagatgatgaaaaagttctgtgctcagccttgggaggagataaaaacatcttacgctggagtaaaggagaagtacctgagtgaatactgctttt

SEQ ID NO: 343693 - DNA, 120 bp, Artificial Sequence
  ENSG00000138185_11 (sequence is synthesized)
ctggtacctacattctctccctccttctgcaaggctatcatttcacagctgattcctgggagcacatccatttcattggcaagatccagggcagcgacgccggctggactttgggctaca

SEQ ID NO: 343694 - DNA, 120 bp, Artificial Sequence
  ENSG00000138185_12 (sequence is synthesized)
tgctgaacctgaccaacatgatcccagctgagcaaccattgtccacacctctctcccactccacctatgtcttcctcatggttctattctccctggtccttttcacagtggccatcatag

SEQ ID NO: 343695 - DNA, 120 bp, Artificial Sequence
  ENSG00000138185_13 (sequence is synthesized)
gcttgcttatctttcacaagccttcatatttctggaaagatatggtatagcaaaagcagctgaaatatgctggctggagtgaggaaaaaaatcgtccagggagcattttcctccatcgca

SEQ ID NO: 343696 - DNA, 120 bp, Artificial Sequence
  ENSG00000138185_14 (sequence is synthesized)
gtgttcaaggccatccttccctgtctgccagggccagtcttgacgagtgtgaagcttccttggcttttactgaagcctttcttttggaggtattcaatatcctttgcctcaaggacttcg

SEQ ID NO: 343697 - DNA, 120 bp, Artificial Sequence
  ENSG00000138185_15 (sequence is synthesized)
gcagatactgtctctttcatgagtttttcccagctacacctttctcctttgtactttgtgcttgtataggttttaaagacctgacacctttcataatctttgctttataaaagaacaata

SEQ ID NO: 343698 - DNA, 120 bp, Artificial Sequence
  ENSG00000138185_16 (sequence is synthesized)
ttgactttgtctagaagaactgagagtcttgagtcctgtgataggaggctgagctggctgaaagaagaatctcaggaactggttcagttgtactctttaagaacccctttctctctcctg

SEQ ID NO: 343699 - DNA, 120 bp, Artificial Sequence
  ENSG00000138185_17 (sequence is synthesized)
tttgccatccattaagaaagccatatgatgcctttggagaaggcagacacacattccattcccagcctgctctgtgggtaggagaattttctacagtaggcaaatatgtgctaaagccaa

SEQ ID NO: 343700 - DNA, 120 bp, Artificial Sequence
  ENSG00000138185_18 (sequence is synthesized)
agagttttataaggaaatatatgtgctcatgcagtcaatacagttctcaatcccacccaaagcaggtatgtcaataaatcacatattcctaggtgatacccaaatgctacagagtggaac

SEQ ID NO: 343701 - DNA, 120 bp, Artificial Sequence
  ENSG00000138185_19 (sequence is synthesized)
actcagacctgagatttgcaaaaagcagatgtaaatatatgcattcaaacatcagggcttactatgaggtaggtggtatatacatgtcacaaataaaaatacagttacaactcagggtca

SEQ ID NO: 343702 - DNA, 120 bp, Artificial Sequence
  ENSG00000138185_20 (sequence is synthesized)
caaaaaatgcatcttccaatgcatatttttattatggtaaaatatacataaatataattcaccattttaacatttaattcatattaaatacgtacaaatcagtgacatttagtacattca

SEQ ID NO: 343703 - DNA, 120 bp, Artificial Sequence
  ENSG00000138185_21 (sequence is synthesized)
cagtgttgtgccaccatcaccactatttagttccagaacatttgcatcatcaatacattgtctagagacaagactatcctgggtaggcagaaaccatagatcttttgtgtttacagctat

SEQ ID NO: 343704 - DNA, 120 bp, Artificial Sequence
  ENSG00000138185_22 (sequence is synthesized)
ggaaaccaactgtaccataaagatagttcactgagttttaaagccaagccacatcttatttttccaaggtttaatttagtgagagggcagcattagtgtggagtggcatgcttttgccct

SEQ ID NO: 343705 - DNA, 120 bp, Artificial Sequence
  ENSG00000138185_23 (sequence is synthesized)
atcgtggaatttacacatcagaatgtgcaggatccaagtctgaaagtgttgccacccgtcacacaacatgggctttgtttgcttattccatgaagcagcagctatagaccttaccatgga

SEQ ID NO: 343706 - DNA, 120 bp, Artificial Sequence
  ENSG00000138185_24 (sequence is synthesized)
aacatgaagagaccctgcacccctttccttaaggattgctgcaagagttacctgttgagcaggattgactggtgatgtttcattctgaccttgtcccaagctctccatctctagatctgg

SEQ ID NO: 343707 - DNA, 120 bp, Artificial Sequence
  ENSG00000138185_25 (sequence is synthesized)
ggactgactgttgagctgatggggaaagaaaagctctcacacaaaccggaagccaaatgtcccctatctcttgaatgatcaagtcacttttgacaacatccaggtgaatataaaaactta

SEQ ID NO: 343708 - DNA, 120 bp, Artificial Sequence
  ENSG00000138185_26 (sequence is synthesized)
ataaagctgtggaaaggaactcttaatcttcttttctgctacttaggttaaattcactagatcttgattaggaatcaaaattcgaattgggacatgttcaaattctttcttgtggtagtt

SEQ ID NO: 343709 - DNA, 120 bp, Artificial Sequence
  ENSG00000138185_27 (sequence is synthesized)
gcctatactgtcatcgctgctgttggttgagcatttgtggtgtaccacgctgtgtgctcaagggtattacattcatcttctcatttaatcctcacaacaatctgaagaaggtaggtatta

SEQ ID NO: 343710 - DNA, 120 bp, Artificial Sequence
  ENSG00000138185_28 (sequence is synthesized)
caattcccacttcatagaaacagaaactgaggttcagagaggttaagtcatttgcccaaatggctgagccaaagcctaccatgtacctaacctttattttctttcccgaacataccaggc

SEQ ID NO: 343711 - DNA, 120 bp, Artificial Sequence
  ENSG00000138185_29 (sequence is synthesized)
tgtctcctcataacttccaagcatgcacttaaaactccacatgaatacaaggttcatgggacttggtattcatagaaagggaggcagaaagctggtctgttcctgataggcttgtaattt

SEQ ID NO: 343712 - DNA, 120 bp, Artificial Sequence
  ENSG00000138185_30 (sequence is synthesized)
aatatcattctgttcatgtgctttggatggaagcacatctggcatatgatgctaatcagtggttcccatacccctggcttcctaattttaatgtttgctcacagcatagtagattgacat

SEQ ID NO: 343713 - DNA, 120 bp, Artificial Sequence
  ENSG00000138185_31 (sequence is synthesized)
caaatagtggccgatgatgatgaaaataaaggtcaaataagttgagccaataacagccgcttttttccttctgtctgcgtatacaaagcactgtcatgcacacaatctattctgaccctc

SEQ ID NO: 343714 - DNA, 120 bp, Artificial Sequence
  ENSG00000138185_32 (sequence is synthesized)
acaacaacccataagggtgtaaatagtatttccattttacaaatgaggatcacacaaactactacatggcagagcagatactccaactcatgtcttctggttgaagcctattgctttttc

SEQ ID NO: 343715 - DNA, 120 bp, Artificial Sequence
  ENSG00000138185_33 (sequence is synthesized)
ttttctaaacactttccctcagcaagttggaattagacttcacaagtctccttcagagaacacaaatcttttcttattccattcctgtttggttgcctacgtccaatctccccctcccca

SEQ ID NO: 343716 - DNA, 120 bp, Artificial Sequence
  ENSG00000138185_34 (sequence is synthesized)
gagatgccaaaaaaaaaatcctttaaggtatttgggagccaaactcaacttgttaaaatctcaaattatggagacaatcagcagacacaacctaaccccaattattttggcaggaaggtt

SEQ ID NO: 343717 - DNA, 120 bp, Artificial Sequence
  ENSG00000138185_35 (sequence is synthesized)
ggtttagaggcagatccagcaatctgctttgggccactctgggtggggtaggtgaaataagattggtcactgttaactaattttaatattggattggccattggttatcactgattacca

SEQ ID NO: 343718 - DNA, 120 bp, Artificial Sequence
  ENSG00000138185_36 (sequence is synthesized)
ttctcccctggattttcacccaggactcaaaacttggttctgctaaccctgttcctttatgaggaaccttttaaagattcctttataaggtgggagttttttttctatgaacctataggg

SEQ ID NO: 343719 - DNA, 69 bp, Artificial Sequence
  ENSG00000138185_37 (sequence is synthesized)
ctttataaggtgggagttttttttctatgaacctataggggagaaaaaagatcagcagaacattgccca

SEQ ID NO: 343720 - DNA, 64 bp, Artificial Sequence
  ENSG00000138185_38 (sequence is synthesized)
ataagtggttacttctgtagacaaaagaataatgctacttaatcaggctttctgtgtgacaaga

SEQ ID NO: 343721 - DNA, 120 bp, Artificial Sequence
  ENSG00000138185_39 (sequence is synthesized)
aagaataatgctacttaatcaggctttctgtgtgacaagaaagagaaagaaaataaagaagtttcaattcatccaattcttaataagaaatatgtaaataaaattttttaaaattacact

SEQ ID NO: 343722 - DNA, 120 bp, Artificial Sequence
  ENSG00000138185_40 (sequence is synthesized)
tcattttaatgttgtatcagtcaaggtccctgcaagagatggatggtatggtacactcaaactgggtaacacaggagagttttcagaaagcaactaaatccaaaatactatcaaggaatc

SEQ ID NO: 343723 - DNA, 120 bp, Artificial Sequence
  ENSG00000138185_41 (sequence is synthesized)
aatataaaaattgttaatatttttctcatactaaattttcaaaatattttgtgtctattacatttacagcacatcttaattaggactagctgtgtgttcacctcacatgtggcttgtagc

SEQ ID NO: 343724 - DNA, 120 bp, Artificial Sequence
  ENSG00000138185_42 (sequence is synthesized)
taccatactggacagcacatgtccaaaaaaatacacgtaaagttaaagtttaaaagacacaggaactaagccctcattgtctttcccttgggaggtagtttaaagagctatagatgctgt

SEQ ID NO: 343725 - DNA, 120 bp, Artificial Sequence
  ENSG00000138185_43 (sequence is synthesized)
aacattcttgctattatttattatatatgacattattcctaaaaaagcttttgagatcctaggttgtattcctcaggttttgttgccttcccatgaagatgtgaaggcagggatgcctgt

SEQ ID NO: 343726 - DNA, 120 bp, Artificial Sequence
  ENSG00000138185_44 (sequence is synthesized)
tattcagtccaagatgcatgacaagagaccttgggaaagtttcatctggatttaaagattaattcttgatgcttacattccatactcaaaatgtaaatttgaatattaaaataaagatga

SEQ ID NO: 343727 - DNA, 87 bp, Artificial Sequence
  ENSG00000138185_45 (sequence is synthesized)
gcaaggctacaggtgtgcaccttctagctatttttttttctgtagagacagggttttcctatgttgtccaggctggtctcgaactcc

SEQ ID NO: 343728 - DNA, 120 bp, Artificial Sequence
  ENSG00000138185_46 (sequence is synthesized)
caggcgtaagccactgcacctggccaagatgaatattttaatagctcacagaacaaagtttgccacataatgataaaattactatgaaaatatattccctttattgtcagtttaaaagat

SEQ ID NO: 343729 - DNA, 120 bp, Artificial Sequence
  ENSG00000138185_47 (sequence is synthesized)
ttattgtcagtttaaaagatgaactgagtttcacccaaactggtctggcccctctctgattcaaataccaatagttgctctgattcaaattccaactgttagaacatgacagctgctcat

SEQ ID NO: 343730 - DNA, 120 bp, Artificial Sequence
  ENSG00000138185_48 (sequence is synthesized)
aactagctttgcttactaaccatgtttctttccatttgtattaggtcctttactttttataacagcctcaaagtttcatgaattgctgcagtaaacattgattttcatgtttgtgagtct

SEQ ID NO: 343731 - DNA, 120 bp, Artificial Sequence
  ENSG00000138185_49 (sequence is synthesized)
gcaagccagctgggcagctctacttcaggtggtaagggtggatcagacctattccatatacctcttgttctccttgtccagtggtttctagggatatgttctcatgatgaaccccgcaga

SEQ ID NO: 343732 - DNA, 120 bp, Artificial Sequence
  ENSG00000138185_50 (sequence is synthesized)
gagaggaaactaggatgcctcttaaggtcttggtcaggatggggtctcctgtcacttctgtcacaggctattgtaagtcatatgagcaagctcaataaaatataaacaagtcagataaac

SEQ ID NO: 343733 - DNA, 120 bp, Artificial Sequence
  ENSG00000138185_51 (sequence is synthesized)
agtgggaggaatggcaaagtcatatggccaaggccatgagtgattaattttaacacaggaaaaaagtaaagcattaaatgcgattatttaatatacaatgtcttattaactgaaatataa

SEQ ID NO: 343734 - DNA, 120 bp, Artificial Sequence
  ENSG00000138185_52 (sequence is synthesized)
aatgtgtttactgtaaaatataatctgtttatctcaccaaagaaatattatctttaaaaaatgtcattacttctaagacatcatcagtctgcaacttctttccatagccttaatcaggat

SEQ ID NO: 343735 - DNA, 120 bp, Artificial Sequence
  ENSG00000138185_53 (sequence is synthesized)
gctgtggcagctcccacattagcctcgcattctaaactggtagatgtcctaggaaaccatacatctatgtatttttcttattttatacgtttaggacaatgtatagctaattacccaact

SEQ ID NO: 343736 - DNA, 120 bp, Artificial Sequence
  ENSG00000138185_54 (sequence is synthesized)
ttttatttgcatacaaatctaatacaactgaacacaatcagttttatcacaggtataatggatttttcaatagtgaggaggtgcctccatgagccttctctttagaaaagtggcattcaa

SEQ ID NO: 343737 - DNA, 120 bp, Artificial Sequence
  ENSG00000138185_55 (sequence is synthesized)
gactcttcatttgaagtgaagattgctatgtcttttgcattgctctattttacataaattaagttataaattgacactataatcaactgacaccatgatcagtgatgatgatcaccctca

SEQ ID NO: 343738 - DNA, 120 bp, Artificial Sequence
  ENSG00000138185_56 (sequence is synthesized)
tcagcactagagttgacttgtttttataacccctttgcatgtatgttgaatagcaaagttcatcagagaacatgtattagtcaatggtaagtaagatactctcatctaagaaataacatc

SEQ ID NO: 343739 - DNA, 120 bp, Artificial Sequence
  ENSG00000138185_57 (sequence is synthesized)
acctcttctaatgaagttctaagaagagagggaagaaaaagtcttgggagctagtcagggaatagtgtgtatttgcaattacctaaactgaactctaccattactcctaacccagttcct

SEQ ID NO: 343740 - DNA, 120 bp, Artificial Sequence
  ENSG00000138185_58 (sequence is synthesized)
cctcctgtgttttacatgattaatgccacccctgcctcaatgaaccaagatcagctccatcactgggacctccccattctgcctgtgcaatatttttcttttttatttctccttctaata

SEQ ID NO: 343741 - DNA, 120 bp, Artificial Sequence
  ENSG00000138185_59 (sequence is synthesized)
ttactgttattgctccagtaaagagctgtaatatattttacctggactgataccaggaatggtggtgttgcttccaatctgttgctgctagattaatctttgcaaagcacaggcttaatt

SEQ ID NO: 343742 - DNA, 120 bp, Artificial Sequence
  ENSG00000138185_60 (sequence is synthesized)
tcattgctgctcaactaaaaccactggtggctttccattgcctacaaaataaagtcaacctccccatcagacattcaaggctttcaatgatccatggccgccagctctctccaggctcat

SEQ ID NO: 343743 - DNA, 120 bp, Artificial Sequence
  ENSG00000138185_61 (sequence is synthesized)
atcccactccactcctctgatgtttcctacactacactacactatactacactacagccaggtagaatgactgttcacccaacaccactcaggttgtcttctcaacttggaatactcttg

SEQ ID NO: 343744 - DNA, 120 bp, Artificial Sequence
  ENSG00000138185_62 (sequence is synthesized)
caccttcaaagctcatttcaaatgccccttcatttgtgaagccttctccaaatttccaagtcagaatgtctcttccttgtgctaccacaaccctttaactgagcctccattagtgcactg

SEQ ID NO: 343745 - DNA, 120 bp, Artificial Sequence
  ENSG00000138185_63 (sequence is synthesized)
agaccattctgttcagtgtctgggtgaagcttcctggtgaaaaatatgttacctatttctttctgaaaagttggattcagggatattatcacggacctaaggtaatagttctagccaacc

SEQ ID NO: 343746 - DNA, 120 bp, Artificial Sequence
  ENSG00000138185_64 (sequence is synthesized)
tccctgtccactgccaggccgactacaaacccttctgttgctggcgagctggtccgcaccactagttctgcttcactctatttatctcttgatgtaaccatcttctttctccaggtttta

SEQ ID NO: 343747 - DNA, 120 bp, Artificial Sequence
  ENSG00000138185_65 (sequence is synthesized)
agaaccagcccaactcctggttccctgatgaagcttttattcccctagccacatggaacttttcctttttggaacatgcctttagtttctgtgtagtttgccatgcagcacttcattgta

SEQ ID NO: 343748 - DNA, 120 bp, Artificial Sequence
  ENSG00000138185_66 (sequence is synthesized)
cacattattaaaacagaattttaaggattagaatgaaccttaaaagatcatgcatctcaaaatttaatgtacatacaaattacccagggattttgttgaaataaaaattatttaatttta

SEQ ID NO: 343749 - DNA, 120 bp, Artificial Sequence
  ENSG00000138185_67 (sequence is synthesized)
attaatataaataattcagtaggtctggggtgaggcctgaggttttacatttccaacaagctgccaggtaaagccaatacatctgtccaggaatcacactttgcgtatcaaaggtctaga

SEQ ID NO: 343750 - DNA, 120 bp, Artificial Sequence
  ENSG00000138185_68 (sequence is synthesized)
tgacattatcattccaaagagtttcttttacaggctctcagatcagtgttcatccactacctgactactgtcattcacaggcattctgttccacagcaggccagctaacgtggtatttac

SEQ ID NO: 343751 - DNA, 120 bp, Artificial Sequence
  ENSG00000138185_69 (sequence is synthesized)
aaagctcactcctcttatacaacaatccaagtgtttcttttgtcagttgtctgtgccccaggagatccctctctgccttgccttgccctctgcctttggagaccagcacctcatactcag

SEQ ID NO: 343752 - DNA, 120 bp, Artificial Sequence
  ENSG00000138185_70 (sequence is synthesized)
tgaaggcctggagtgcttaagagggatttcttccagctctcttgccctggtcttcagtgtattagatgtattacctccatgctctcagtagaggcccataggaaagagtaggtaggttat

SEQ ID NO: 343753 - DNA, 120 bp, Artificial Sequence
  ENSG00000138185_71 (sequence is synthesized)
gccagctcacacgcatcctttaaaaatggtttagaagtttagctggtttcttattactcctgtctatggatgtttccttctgtcactctactagggatgaaacagctaatcatgttcaat

SEQ ID NO: 343754 - DNA, 120 bp, Artificial Sequence
  ENSG00000138185_72 (sequence is synthesized)
agttacatttagattggtttttaaaaactatgattgtattagttcgtttccatgctgctgataaagacatatctgagactggaaacaaaaagggtttaattggacttacagttccacatg

SEQ ID NO: 343755 - DNA, 120 bp, Artificial Sequence
  ENSG00000138185_73 (sequence is synthesized)
gctggggaggcctcaaaatcaggtgggaggcaaaaggtacttcttacgtggtggcatcaagagcaaaatgaggaagaagcaaaagcagaaactcttcataaacccaccagatcttgtggg

SEQ ID NO: 343756 - DNA, 120 bp, Artificial Sequence
  ENSG00000138185_74 (sequence is synthesized)
aaactcttcataaacccaccagatcttgtgggacttattatcacgagaatagcacagaaaagactggcctccatgattcaattacctcccactgcgtccctcccacaacatgtgggaatt

SEQ ID NO: 343757 - DNA, 77 bp, Artificial Sequence
  ENSG00000138185_75 (sequence is synthesized)
ggggacacagccaaaccatatcattcctccctgggctcctccaaatttcataatcctcacatttcaaaaccaatcat

SEQ ID NO: 343758 - DNA, 80 bp, Artificial Sequence
  ENSG00000138185_76 (sequence is synthesized)
gagacaaggcaagtcccttccacttacaagcctgtaaaagcaagctagttacctcctagatacaatagagaaattggcca

SEQ ID NO: 343759 - DNA, 120 bp, Artificial Sequence
  ENSG00000138185_77 (sequence is synthesized)
tgtctcacattcaggtcatgctgatgcaagagataggttcccatggtcttgtgcagctccgcccctgtggctttgcagagtacagcctccctcctggctgctttctcaggctgatgttga

SEQ ID NO: 343760 - DNA, 120 bp, Artificial Sequence
  ENSG00000138185_78 (sequence is synthesized)
gtgtctgtagcttttccaggcacaagatgcaagttggtggttgatctaccattctggggtctaccattctggggtctaccgttctgggactgtggccttcttctcacagctccactaggc

SEQ ID NO: 343761 - DNA, 120 bp, Artificial Sequence
  ENSG00000138185_79 (sequence is synthesized)
agtgccccaacagggactctgtgtgggggctctgccccacatttcccttccacactgccctaggagaggttccccatgagggctctgcccctgcagcaaacttttgcctggacatccagg

SEQ ID NO: 343762 - DNA, 120 bp, Artificial Sequence
  ENSG00000138185_80 (sequence is synthesized)
cagaggttcccaaatctcaattcttgacatctctgcacccacaggctcaacatcacatggaagctgccaatgcttggggcctctaccctctgaagccacagcccaagctctatgttggct

SEQ ID NO: 343763 - DNA, 67 bp, Artificial Sequence
  ENSG00000138185_81 (sequence is synthesized)
tcacatggaagctgccaatgcttggggcctctaccctctgaagccacagcccaagctctatgttggc

SEQ ID NO: 343764 - DNA, 77 bp, Artificial Sequence
  ENSG00000138185_82 (sequence is synthesized)
ctccttaattttccacatttatgctcttgtttcccttttaaaacagaatgtttttaacagcacccaagtcacctttt

SEQ ID NO: 343765 - DNA, 120 bp, Artificial Sequence
  ENSG00000138185_83 (sequence is synthesized)
gcttagaaatttattccaccagataccctaagtcatctctctcaagctctaagttccacaaatctctagggcaagggtgaaatgctgccagtctccttgctaaaacataacaagggtcac

SEQ ID NO: 343766 - DNA, 120 bp, Artificial Sequence
  ENSG00000138185_84 (sequence is synthesized)
gttccacaaatctctagggcaagggtgaaatgctgccagtctccttgctaaaacataacaagggtcacctttacttcagttcccaacaaggtcttcatctccatctgagaccacctcagc

SEQ ID NO: 343767 - DNA, 89 bp, Artificial Sequence
  ENSG00000138185_85 (sequence is synthesized)
accttattgttcatatcactatcagtatttttgtcaatgccattcacagtctctaggaggttccaaactttccgattatttcaacaccc

SEQ ID NO: 343768 - DNA, 76 bp, Artificial Sequence
  ENSG00000138185_86 (sequence is synthesized)
ttatagttccacttcttacacggcagcagcaagagaaaaatgaagaagcagcaaaagcagaaacccctgataaaac

SEQ ID NO: 343769 - DNA, 72 bp, Artificial Sequence
  ENSG00000138185_87 (sequence is synthesized)
ttgattcaattacctccccctgggtcctgtgggaattctggaaggtacaattcaagttgagatttgggtggg

SEQ ID NO: 343770 - DNA, 120 bp, Artificial Sequence
  ENSG00000138185_88 (sequence is synthesized)
gacacagccaaaccatatcaatgattttgtactttaaccagctgaatggaagtacaatctcttgctatatgacacaataattatttgcaaaatgagtaaacatatcataaggaaattatt

SEQ ID NO: 343771 - DNA, 120 bp, Artificial Sequence
  ENSG00000138185_89 (sequence is synthesized)
tttacaaggtttgaaacctgaaatgcagtctattatcatacataactaaaaatagagcctcaataaacagattcccagttttgaaaatgcaacatttgtactccacattgtcagttttct

SEQ ID NO: 343772 - DNA, 120 bp, Artificial Sequence
  ENSG00000138185_90 (sequence is synthesized)
taggtatatttataaatactcctataaaaatgtaaagaaacacataatgtagattgctaattttataataacacaagttgattttgacatccaacttattaattatgaaatgacttttgg

SEQ ID NO: 343773 - DNA, 120 bp, Artificial Sequence
  ENSG00000138185_91 (sequence is synthesized)
cctagtaacaatgaaaatgggggcaaatacagataaatggtaattcttagaatgaactactcagcaccaattctaagtttttcttgatggtaaatcataatgttccctttctcctcggtt

SEQ ID NO: 343774 - DNA, 120 bp, Artificial Sequence
  ENSG00000138185_92 (sequence is synthesized)
ctgcaatctataggcataccataattgtaatcaatagcttaaaaatatgtctctctgtcctattctgtatctgtatctcttggatttttacctttgcaatagtcaactgaaccatcttct

SEQ ID NO: 343775 - DNA, 120 bp, Artificial Sequence
  ENSG00000138185_93 (sequence is synthesized)
tggagtactcatgaagatggaagtctacatggagaatacaggatgaatccactctgtctcctgcagtgaagtctgtttgaaggatgtatttggctgtcttctggacaggccattctaata

SEQ ID NO: 343776 - DNA, 120 bp, Artificial Sequence
  ENSG00000138185_94 (sequence is synthesized)
acagaaacaaacaagttattttaaaacttattggaatattcaaatattaaccaaagtagaaaaatataatacacatccatgtgcccatcacagaacttcactgattatcatcatttagcc

SEQ ID NO: 343777 - DNA, 120 bp, Artificial Sequence
  ENSG00000138185_95 (sequence is synthesized)
agtcttgaagaagcaagtgctaattacaatcacaaatgaaacaagattcagacttcatgaagagcactgcgctataataaaagaagaaatgagcacatacattcttttactgacagtcaa

SEQ ID NO: 343778 - DNA, 120 bp, Artificial Sequence
  ENSG00000138185_96 (sequence is synthesized)
atggtgaaggtgggcagaatcattatgtgatgcaacatggcaaaagtatacagacagtgcatccagaggaaggcaccttgctgaatgactagaatggaagtaggagacattttgcaggcc

SEQ ID NO: 343779 - DNA, 120 bp, Artificial Sequence
  ENSG00000138185_97 (sequence is synthesized)
cccttcatcctgcagggagaaccagaaccacagcagctctatttgcctattcctctttaaattacaaagttaaaatttgggagtagtagaaaatcaattggttatcttatagagtctcct

SEQ ID NO: 343780 - DNA, 120 bp, Artificial Sequence
  ENSG00000138185_98 (sequence is synthesized)
agaatatttcattggcattgagaaggtggaaaatgcaaattatatactttaaaatgtaatttttgcttttcacatatgcttaaagcctaaaacctcttaataaacttcttctgaaatata

SEQ ID NO: 343781 - DNA, 120 bp, Artificial Sequence
  ENSG00000138185_99 (sequence is synthesized)
cctgttgctctttgctctaatgagccttgagaaaggattgctggtcatgggaccagaggctttatggggagggaagaactgttcttgactttcagtttttcgagcgggtttcaagagtct

SEQ ID NO: 343782 - DNA, 120 bp, Artificial Sequence
  ENSG00000138185_100 (sequence is synthesized)
gtgtacgtgtaaaattatgatcaaataaatttgtatgccttttctcctattaacctgccttttttgtcagcgattgtcagtgaaacttcagagggcaaaggggaagttttccttggcccc

SEQ ID NO: 343783 - DNA, 120 bp, Artificial Sequence
  ENSG00000138185_101 (sequence is synthesized)
tccagttttggtgctgtgaacaggataccaaagctgctctgttcttctggaagctgcaatgaagggaaccaaggacctgacaagccagcagaaggagtctaacgtgaagacattttgctc

SEQ ID NO: 343784 - DNA, 120 bp, Artificial Sequence
  ENSG00000138185_102 (sequence is synthesized)
ggatcaggcactctggcagaaactggccaaggacattcaggcaagtataactcaatccagacctgcccccttcacatctgcacctccagcccccacatcctgttgttttctgtttcaaat

SEQ ID NO: 343785 - DNA, 120 bp, Artificial Sequence
  ENSG00000138185_103 (sequence is synthesized)
tcagtagtttgtctgaacttggttattgtactttccaaacctttttaggcaggatattgaactacatctggttgacccctataaattgtttcagtcagacatcccctcccatgtttgttt

SEQ ID NO: 343786 - DNA, 120 bp, Artificial Sequence
  ENSG00000138185_104 (sequence is synthesized)
actgcgttatctccacagacacaactgagatcttctctcaggaaataatttctccccctcgtggggttgataatgaaaattatgtggtagaatattgtttgttggagggggaattgcaat

SEQ ID NO: 343787 - DNA, 120 bp, Artificial Sequence
  ENSG00000138185_105 (sequence is synthesized)
ttataagctcttttagaccactttttaaagctccctttcctacaaactacaaaaaaacagagttgttagaaatgacctggagaggagaaggaaaaaaaaaaaaacacttcaggagaaaca

SEQ ID NO: 343788 - DNA, 120 bp, Artificial Sequence
  ENSG00000138185_106 (sequence is synthesized)
tcaggagaaacacaaaatgtatcaattgacacttcaaatcttgtcatcttgtccccagatgccttctgcattttgaagacaagaaaagttaaacacactttgggaggctgaggtgggtgg

SEQ ID NO: 343789 - DNA, 120 bp, Artificial Sequence
  ENSG00000138185_107 (sequence is synthesized)
ggtgattcccgtatgattccaatgtgtagacaagtttggggactatagattaatggctttctattccttccatagtgtctcagctacttcagcatgtggttctgaatcttggctgcacat

SEQ ID NO: 343790 - DNA, 120 bp, Artificial Sequence
  ENSG00000138185_108 (sequence is synthesized)
tctctgacttcatggagcttgtgttctaccggatgtgcaaaggatggaaagtgaagagttggcagacagggttctggatgtggtggagaggagcctcagcaactacccctttgacttcca

SEQ ID NO: 343791 - DNA, 120 bp, Artificial Sequence
  ENSG00000138185_109 (sequence is synthesized)
caactatctgctgggcaaattcagtcaggtgaatatctcacagcatccatggaggtggctctctggaggccaatgccattgctatctcaggcagtacttgggtcgctagccagaatgaat

SEQ ID NO: 343792 - DNA, 120 bp, Artificial Sequence
  ENSG00000138185_110 (sequence is synthesized)
gaatgaatgatagatggatggatggatggatgactggatgaatgaatttactctcacatttgtaagggtcaccagaggtataattctcttacaagaccttctactattgggagaataagg

SEQ ID NO: 343793 - DNA, 120 bp, Artificial Sequence
  ENSG00000138185_111 (sequence is synthesized)
taagaagcttctaaacaatactgcttcttgggccctgttctgcataaggtctgaatatttctaacatgcaaacagcatgaagagccccgttctagcagggttgttgtcctggtagatctt

SEQ ID NO: 343794 - DNA, 120 bp, Artificial Sequence
  ENSG00000138190_0 (sequence is synthesized)
agcttccagccaaaatggcggagaacagcgagagtctgggcaccgtccccgagcacgagcggatcttgcaggagatcgagagcaccgacaccgcctgtgtggggcccaccctccggtctg

SEQ ID NO: 343795 - DNA, 120 bp, Artificial Sequence
  ENSG00000138190_1 (sequence is synthesized)
tgtatgatgaccaaccaaatgcgcacaagaagtttatggaaaagttagatgcttgtatccgtaatcatgacaaggaaattgaaaagatgtgtaattttcatcatcagggttttgtagatg

SEQ ID NO: 343796 - DNA, 120 bp, Artificial Sequence
  ENSG00000138190_2 (sequence is synthesized)
ctattacagaactccttaaagtaaggactgatgcagaaaaactgaaggtgcaagttactgataccaaccgaaggtttcaagatgctggaaaagaggtgatagtccacacagaagatatca

SEQ ID NO: 343797 - DNA, 120 bp, Artificial Sequence
  ENSG00000138190_3 (sequence is synthesized)
ttcgatgtagaattcagcagagaaatattacaactgtagtagaaaaattgcagttatgccttcctgtgctagaaatgtacagtaagctgaaagaacagatgagtgccaaaaggtactatt

SEQ ID NO: 343798 - DNA, 120 bp, Artificial Sequence
  ENSG00000138190_4 (sequence is synthesized)
ctgccctaaaaactatggaacaattagagaatgtgtactttccctgggttagtcaataccggttttgtcagctcatgatagaaaatcttcccaaactccgtgaggatattaaagaaatct

SEQ ID NO: 343799 - DNA, 120 bp, Artificial Sequence
  ENSG00000138190_5 (sequence is synthesized)
ccatgtctgatctcaaagactttttggaaagtattcgaaaacattctgacaaaataggtgaaacagcaatgaaacaggcacagcatcagaaaaccttcagtgtttctctgcagaaacaaa

SEQ ID NO: 343800 - DNA, 120 bp, Artificial Sequence
  ENSG00000138190_6 (sequence is synthesized)
ataaaatgaaatttgggaaaaatatgtatataaatcgtgatagaattccagaggaaaggaatgaaactgtattgaaacattcacttgaagaagaggatgagaatgaagaagagatcttaa

SEQ ID NO: 343801 - DNA, 120 bp, Artificial Sequence
  ENSG00000138190_7 (sequence is synthesized)
ctgttcaggatcttgttgatttttcccctgtttatcgatgtttgcacatttattctgttttgggtgacgaggaaacatttgaaaactattatcgaaaacaaagaaagaaacaagcaagac

SEQ ID NO: 343802 - DNA, 120 bp, Artificial Sequence
  ENSG00000138190_8 (sequence is synthesized)
tggtattgcaaccccagtcgaatatgcatgaaacagttgatggctatagaagatatttcactcaaattgtagggttctttgtggtagaagatcacattttacatgtgacccaaggattag

SEQ ID NO: 343803 - DNA, 120 bp, Artificial Sequence
  ENSG00000138190_9 (sequence is synthesized)
taaccagggcatacactgatgaactttggaacatggccctctcaaagataattgctgtccttagagctcattcatcctattgcactgatcctgatcttgttctggagctgaagaatctta

SEQ ID NO: 343804 - DNA, 120 bp, Artificial Sequence
  ENSG00000138190_10 (sequence is synthesized)
ctgtaatatttgcagatactttacagggttatggttttccagtgaaccgactttttgaccttttatttgaaataagagaccaatacaatgaaacactgcttaagaaatgggctggagttt

SEQ ID NO: 343805 - DNA, 120 bp, Artificial Sequence
  ENSG00000138190_11 (sequence is synthesized)
tcagggacatttttgaagaagataattacagccccatccctgttgtcaatgaagaagaatataaaattgtcatcagcaaatttccctttcaagatccagaccttgaaaagcagtctttcc

SEQ ID NO: 343806 - DNA, 120 bp, Artificial Sequence
  ENSG00000138190_12 (sequence is synthesized)
caaagaaattccccatgtctcagtcagtgcctcatatttacattcaagttaaagaatttatttatgccagccttaaattttcagagtcactacaccggagctcaacagaaatagacgata

SEQ ID NO: 343807 - DNA, 120 bp, Artificial Sequence
  ENSG00000138190_13 (sequence is synthesized)
tgcttagaaaatcaacaaatctgctgctgaccagaactttgagtagctgtttactgaaccttattagaaaacctcatataggtttgacagagctggtacaaatcatcataaacacaacac

SEQ ID NO: 343808 - DNA, 120 bp, Artificial Sequence
  ENSG00000138190_14 (sequence is synthesized)
tttatggactttctactttcaaggatgctcgacatgcagcagaaggagaaatatataccaaactgaatcaaaaaattgatgaatttgttcagcttgctgattatgactggacaatgtctg

SEQ ID NO: 343809 - DNA, 120 bp, Artificial Sequence
  ENSG00000138190_15 (sequence is synthesized)
agccagatggaagagctagtggttatttaatggaccttataaattttttgagaagcatctttcaagtgtttactcatttgcctgggaaagttgctcagacagcttgcatgtcagcctgcc

SEQ ID NO: 343810 - DNA, 120 bp, Artificial Sequence
  ENSG00000138190_16 (sequence is synthesized)
agcatctgtcaacatccttaatgcagatgctactggacagtgagttaaaacaaataagcatgggagctgttcagcagtttaacttagatgtcatacagtgtgaattgtttgccagctctg

SEQ ID NO: 343811 - DNA, 120 bp, Artificial Sequence
  ENSG00000138190_17 (sequence is synthesized)
agcctgtgccaggattccagggggataccctgcagctagcattcattgacctcagacaactccttgacctgtttatggtttgggattggtctacttacctagctgattatgggcagccag

SEQ ID NO: 343812 - DNA, 120 bp, Artificial Sequence
  ENSG00000138190_18 (sequence is synthesized)
cttctaagtaccttcgggtgaatccaaacacagcccttactcttttggagaagatgaaggatactagcaaaaagaacaatatatttgctcagttcaggaagaatgatcgagacaaacaga

SEQ ID NO: 343813 - DNA, 120 bp, Artificial Sequence
  ENSG00000138190_19 (sequence is synthesized)
agttgatagagacagtcgtgaaacagctgagaagtttggtgaatggtatgtcccagcacatgtagacctcacatggcttgcactcagtgacaccaaatccatgattcaatgttgatcttg

SEQ ID NO: 343814 - DNA, 120 bp, Artificial Sequence
  ENSG00000138190_20 (sequence is synthesized)
agcaagtattggtcatgatacagtaatttgtttacagaatccaaaaatacaatagagaagatacatgagggcttaaacaagaaatagtaataaatatcatttgtatggatttttaaataa

SEQ ID NO: 343815 - DNA, 120 bp, Artificial Sequence
  ENSG00000138190_21 (sequence is synthesized)
tcgaatactattttatatatggaaaaaaatgaccattttttcacttttaggggaaaatgcaaaagtgtaatacataaattgtcacaaattatacatgaaattgattacaaatacatttga

SEQ ID NO: 343816 - DNA, 120 bp, Artificial Sequence
  ENSG00000138190_22 (sequence is synthesized)
aaaacatatgcctctactcataagtatttttttctatttagacttgaatgataatctgttttttgatcagtatatggctttggaattcaatcatgtctgatatggtagtatttcactacc

SEQ ID NO: 343817 - DNA, 120 bp, Artificial Sequence
  ENSG00000138190_23 (sequence is synthesized)
attttctgacttttagcttttattttcacctcaatgtgatttaagcagaccaaaatttctaattctgctaattctgaaggggaaatagacaaatcttaaaagctgcctgaaatcaaactt

SEQ ID NO: 343818 - DNA, 120 bp, Artificial Sequence
  ENSG00000138190_24 (sequence is synthesized)
gatttaactcagtaagaatgtgaattatttgttctacttgggtggtttaatttaatcgttctgaatatgaacaaaaggttttggattttctaaagatgcagtgttgtttctgttcatcag

SEQ ID NO: 343819 - DNA, 120 bp, Artificial Sequence
  ENSG00000138190_25 (sequence is synthesized)
ggttaatatttctaactatattgcttgtaggtgaccccattctggatttgtttggtttggtttggttccagttaaaagagaggacaggaactaaatggggctaaccacttcaggtgcagc

SEQ ID NO: 343820 - DNA, 120 bp, Artificial Sequence
  ENSG00000138190_26 (sequence is synthesized)
ttgtgcgagggtagatggttcctgcacacagaagttaccacaggggtcaggttactttcttcaaatagcagatttcagtactttatcctcattgtggaaacaagccaaaccaaatgaact

SEQ ID NO: 343821 - DNA, 120 bp, Artificial Sequence
  ENSG00000138190_27 (sequence is synthesized)
ctggaaaacctaaaacaaatgtacattttcctttgtgtatgtttccgtggtccaaatggcaatataaatccagtctttattctccctttgttgtatttatgctgaatcttccctttgcct

SEQ ID NO: 343822 - DNA, 120 bp, Artificial Sequence
  ENSG00000138190_28 (sequence is synthesized)
tttcaggatttaggcctgtaagaaactatgcctgattctgtaaaataagtgtaaagaattatatgtacatctctggattttgtgatgaaatattaaaaatattgagcaagttgttgaaaa

SEQ ID NO: 343823 - DNA, 120 bp, Artificial Sequence
  ENSG00000138190_29 (sequence is synthesized)
tcaaactcctggcctcaagtcatcctcctgccttggcatcccaaaatgctggaattagaggcgtgagctactgtgcctggccatttttataagcttttaagctgaaatgtttgccagctc

SEQ ID NO: 343824 - DNA, 120 bp, Artificial Sequence
  ENSG00000138190_30 (sequence is synthesized)
gttttgctttcttcattacactaacctttgtacttaaaatttgcgcatcaggataatccactaaagcaaatcttagccttttattaataaatcattgtcctttataaatgatatcaagga

SEQ ID NO: 343825 - DNA, 120 bp, Artificial Sequence
  ENSG00000138190_31 (sequence is synthesized)
ttggtaatgttgatcaagtacaaatagccgaacaggaatgaaaatattgattagcttaccaacatactaatattgcatgtaactaagggctaagtgcatattgtggaaggaaaagagtgt

SEQ ID NO: 343826 - DNA, 120 bp, Artificial Sequence
  ENSG00000138190_32 (sequence is synthesized)
aggcagttatattttgacagtctgggtgaatgtagtagttcacattctgttttataactcaaatgcatatatgacagttgaaaaagaaagtaatttaaagtagtttattgattgccatag

SEQ ID NO: 343827 - DNA, 120 bp, Artificial Sequence
  ENSG00000138190_33 (sequence is synthesized)
gagcattggatatagtgatgtttaaaatattttaaagacgaacagttttggccaggtgtcatggctcatgcttgtaatcccggcactttgggagtctgaggcaaggggatcacttgaacc

SEQ ID NO: 343828 - DNA, 120 bp, Artificial Sequence
  ENSG00000138190_34 (sequence is synthesized)
caggagtttgagaccagcgtgggcaatatagggagacctcatttcacctccccacccccttccccccaaaaaacaaaagaaaaaaaacaaatgattcaaaagtaacatagaaaaaccaga

SEQ ID NO: 343829 - DNA, 120 bp, Artificial Sequence
  ENSG00000138190_35 (sequence is synthesized)
ataaattagacaatttggactagggaaaaaatgatttcttcttggttagtaactacttaattatcagaacacatcttatacagacctatagtaaaagatgtgtgtatgtcctgcttcatt

SEQ ID NO: 343830 - DNA, 120 bp, Artificial Sequence
  ENSG00000138190_36 (sequence is synthesized)
caagccaaaaactattctgaaagtcttattttctttcacgtatgtattaataatatattctctttttaaatcaatgttatatatcctcacattttaaagattcaaataattttcctacgc

SEQ ID NO: 343831 - DNA, 120 bp, Artificial Sequence
  ENSG00000138190_37 (sequence is synthesized)
gtttgctgccaaaaaaaaaaaaaacagatatcacctttcctatttcccattcaccattccttctttataggagcaaaaacttttacctcttttaatggattattttggtatttatattta

SEQ ID NO: 343832 - DNA, 120 bp, Artificial Sequence
  ENSG00000138190_38 (sequence is synthesized)
tgtctttaaataactaacttttaattattaccatattattttccagtttggggcattatcggtttttcagtaatataatctaatatttatactcacattttctcaactatccccaaaatg

SEQ ID NO: 343833 - DNA, 120 bp, Artificial Sequence
  ENSG00000138190_39 (sequence is synthesized)
tcttacgtctttttccctccctgaaaacattgatttgtatgtgttcttttgtcccttttaatctagaacagtcctcctgttctttgtttttttcatggaagagtgcaggtcagttctctt

SEQ ID NO: 343834 - DNA, 120 bp, Artificial Sequence
  ENSG00000138190_40 (sequence is synthesized)
gtagaccagggcattttggatttatctagttgtttcttcatgtttagattcaagttaaaaggttttggcaagagtatagcataagtgatacctcacattgcatgacatcaggaggcttat

SEQ ID NO: 343835 - DNA, 120 bp, Artificial Sequence
  ENSG00000138190_41 (sequence is synthesized)
aaagtcatgttgtccttaggttatgctaaatttgatcatttggttaaggggaagtctaccagatgtcttttgaaaaggtatatttttctctttgcaattaataagtaatatgtgggtcct

SEQ ID NO: 343836 - DNA, 120 bp, Artificial Sequence
  ENSG00000138190_42 (sequence is synthesized)
gtttcctaacaggttttcacccagtagttttatcattcttgccttaatccgttattatattggatttacaagatgttgatttaaaaaattctattatttcttaaacatttattaactggc

SEQ ID NO: 343837 - DNA, 120 bp, Artificial Sequence
  ENSG00000138190_43 (sequence is synthesized)
tgttttatatataaagaagagctttttattccccaccaccaccttttttctttttttccgattatggctgtgaacttacgcatttttaaaataaatatattataatttattattgtcatt

SEQ ID NO: 343838 - DNA, 120 bp, Artificial Sequence
  ENSG00000138190_44 (sequence is synthesized)
attcattttgatgcacaaattgtttcaaatttaacaagagaaacttctcaagccaattcctgtgtctttgtctttgagtatttttgtgtttattgtatcgtaagatgttccaagctctca

SEQ ID NO: 343839 - DNA, 120 bp, Artificial Sequence
  ENSG00000138190_45 (sequence is synthesized)
ttgtgccttttttttttttttttgcctcagatctggaagcagccattctccagggtaccctagctccttttagtattaatggtatttagaaactaagatgtatgggttgggagcagtggc

SEQ ID NO: 343840 - DNA, 74 bp, Artificial Sequence
  ENSG00000138190_46 (sequence is synthesized)
gcttaagctcaagagtttgagaccagcctggcccgtatggtaaaaccccatctctactgaaaaaaaaaaaaaaa

SEQ ID NO: 343841 - DNA, 120 bp, Artificial Sequence
  ENSG00000138190_47 (sequence is synthesized)
gaggtgataggtgtctttctttcttttctattattagataattttttttcttttggattgtaatgtacatctgtgtgatttagtcttcctgtatgcaaaataaatttatgttgtaaaagt

SEQ ID NO: 343842 - DNA, 120 bp, Artificial Sequence
  ENSG00000138190_48 (sequence is synthesized)
gcaaaagcatttcagaaagaggggagagcaggagcataaaccctgaggtggagcatgcctggtaaagtgtgaggaacactgaggtcagtgcaactgaagtggaatgaaacacagctggaa

SEQ ID NO: 343843 - DNA, 120 bp, Artificial Sequence
  ENSG00000138190_49 (sequence is synthesized)
agcaggactgagaggagcagaagacagtggggtgggagtagagggagggtggggagagctgaggagcagagggaagcaactgggccaccaggacagaagaccttgaatctccaggctgag

SEQ ID NO: 343844 - DNA, 120 bp, Artificial Sequence
  ENSG00000138190_50 (sequence is synthesized)
ccggctgtaccggaagaggatgaatgtgctgtgtaggaggagcggggtcatgcagtgacactggaaaattaggggcctgtcgagcgatgttggaagaagaaacagatcaaacctatgaga

SEQ ID NO: 343845 - DNA, 120 bp, Artificial Sequence
  ENSG00000138193_0 (sequence is synthesized)
atctaccaccttaaaaccctgatctagaaaaaatatatattcatgataggaagttataactaagaaaatttatttgcctcttaatgctcctgaatgaaaggaattatccctttgttcttt

SEQ ID NO: 343846 - DNA, 120 bp, Artificial Sequence
  ENSG00000138193_1 (sequence is synthesized)
gggaggacttgtgtatctgagattgttgtaataatcagtcattttattaaaaccttgacatgatcaccagggaggaaaaatagagcaatagtcaaaacctgtgtgttagtccaagatgac

SEQ ID NO: 343847 - DNA, 120 bp, Artificial Sequence
  ENSG00000138193_2 (sequence is synthesized)
ttctgaagaaatgacagcttctgttctcatacctgtgactcagagaaaagtggtttctgcccagtcggctgcagatgaaagtagtgaaaaggtctcagacatcaatatttcaaaagcaca

SEQ ID NO: 343848 - DNA, 120 bp, Artificial Sequence
  ENSG00000138193_3 (sequence is synthesized)
tactgtcagacgaagtggggagacttctcataccatctcacaactgaacaaacttaaagaagaaccttctggaagcaacttgccaaagattctctcaatagcgagggagaaaatagtgag

SEQ ID NO: 343849 - DNA, 120 bp, Artificial Sequence
  ENSG00000138193_4 (sequence is synthesized)
tgatgagaacagtaatgaaaaatgttgggagaaaatcatgccagattctgcgaaaaaccttaacattaactgcaacaacatattgagaaaccatcagcatggccttcctcagagacaatt

SEQ ID NO: 343850 - DNA, 120 bp, Artificial Sequence
  ENSG00000138193_5 (sequence is synthesized)
ttatgaaatgtacaactctgttgctgaggaagacttgtgtttagaaactggaattccttctccactggaaagaaaggtgttccctggaattcaactggaactagacagaccttccatggg

SEQ ID NO: 343851 - DNA, 120 bp, Artificial Sequence
  ENSG00000138193_6 (sequence is synthesized)
cattagtcctttaggaaatcagtcagtgatcatagagacaggcagagcacaccctgacagcagaagggcagtatttcattttcattatgaagttgacagaagaatgtcagacactttctg

SEQ ID NO: 343852 - DNA, 120 bp, Artificial Sequence
  ENSG00000138193_7 (sequence is synthesized)
taccctatcagaaaacttaattttagacgattgtggaaattgtgtaccactacctgggggtgaggagaagcaaaagaaaaactatgtggcatatacctgtaaactgatggaattggccaa

SEQ ID NO: 343853 - DNA, 120 bp, Artificial Sequence
  ENSG00000138193_8 (sequence is synthesized)
aaattgtgataataagaatgagcagctgcagtgtgatcattgtgacaccttgaatgataaatacttttgctttgaaggctcttgtgagaaggttgacatggtatattcaggtgatagctt

SEQ ID NO: 343854 - DNA, 120 bp, Artificial Sequence
  ENSG00000138193_9 (sequence is synthesized)
ttgtaggaaagactttactgacagtcaagctgccaagacctttttgagccattttgaggacttccctgataattgtgatgatgtagaagaagacgcttttaaaagcaaaaaggagcgatc

SEQ ID NO: 343855 - DNA, 120 bp, Artificial Sequence
  ENSG00000138193_10 (sequence is synthesized)
cactttgttagtcaggagattctgtaaaaatgacagagaagttaagaaatctgtgtatactggaacaagagcaattgtgagaactctgccttctggccacattgggctgactgcatggag

SEQ ID NO: 343856 - DNA, 120 bp, Artificial Sequence
  ENSG00000138193_11 (sequence is synthesized)
ttacatagatcagaagagaaatggtcccttactgccttgtgggagagtaatggaacccccgtcaacagtggagataaggcaagatgggagccaacgtctgtcagaagcccagtggtatcc

SEQ ID NO: 343857 - DNA, 120 bp, Artificial Sequence
  ENSG00000138193_12 (sequence is synthesized)
tatctacaatgcagtgagaagagaagaaacagaaaatacagttggatctctactccatttcctcaccaagctcccagcctccgagacagcccatggaaggataagcgttggtccatgctt

SEQ ID NO: 343858 - DNA, 120 bp, Artificial Sequence
  ENSG00000138193_13 (sequence is synthesized)
aaagcaatgtgtccgagacactgtatgtgagtatcgcgccaccctccaaaggacttcaatatcgcagtacatcaccggttctctcctagaagcaaccacgtctttgggagcaagaagtgg

SEQ ID NO: 343859 - DNA, 120 bp, Artificial Sequence
  ENSG00000138193_14 (sequence is synthesized)
ccttctcagtacttttggaggatccactggacgaatgatgctgaaagaacgccagccaggcccctctgtggccaattccaatgccctcccttcaagttcagctgggatcagcaaggagct

SEQ ID NO: 343860 - DNA, 120 bp, Artificial Sequence
  ENSG00000138193_15 (sequence is synthesized)
gatcgatctgcagcctctcatccagttcccagaggaagtcgccagcatcctgatggagcaagagcagactatttaccgcagggtcttgccagtcgactacctttgcttcttaacacggga

SEQ ID NO: 343861 - DNA, 120 bp, Artificial Sequence
  ENSG00000138193_16 (sequence is synthesized)
cttgggcactcctgaatgccagagctccttgccctgcctcaaagcatccatctcagcgtcgattcttaccactcagaatggagagcacaatgcccttgaagatctggtgatgaggtttaa

SEQ ID NO: 343862 - DNA, 120 bp, Artificial Sequence
  ENSG00000138193_17 (sequence is synthesized)
tgaggtgagctcctgggtgacatggctgatcctcacggcaggctccatggaggagaagcgagaagtcttttcatatttggtgcatgtggccaaatgctgctggaacatgggcaactacaa

SEQ ID NO: 343863 - DNA, 120 bp, Artificial Sequence
  ENSG00000138193_18 (sequence is synthesized)
cgctgtcatggagttcttggctggcctcaggtcaagaaaagttttaaaaatgtggcagttcatggaccagtctgatattgagaccatgaggagcctgaaggatgctatggcccagcatga

SEQ ID NO: 343864 - DNA, 120 bp, Artificial Sequence
  ENSG00000138193_19 (sequence is synthesized)
gtcctcttgtgagtacagaaaggtggtgacacgtgccctgcacatccctggctgtaaggtggttccattctgtggggtgtttctgaaggagctctgtgaagtgcttgacggcgcctccgg

SEQ ID NO: 343865 - DNA, 120 bp, Artificial Sequence
  ENSG00000138193_20 (sequence is synthesized)
tctcatgaagctttgcccgcggtacaattcccaagaagaaactttagagtttgtagcagattacagtggacaagataatttcttacaacgagtgggacaaaatggcttaaagaattcgga

SEQ ID NO: 343866 - DNA, 120 bp, Artificial Sequence
  ENSG00000138193_21 (sequence is synthesized)
gaaggagtccactgtcaacagcatctttcaggtcatccggagctgcaatcgaagtctggagacagacgaggaggacagccccagtgaaggaaacagctccaggaaaagctccttgaagga

SEQ ID NO: 343867 - DNA, 120 bp, Artificial Sequence
  ENSG00000138193_22 (sequence is synthesized)
taaaagccgatggcagtttataattggagatttgttggattcagacaatgacatctttgagcaatccaaagaatacgactctcatggttcagaggactcacagaaggccttcgaccatgg

SEQ ID NO: 343868 - DNA, 120 bp, Artificial Sequence
  ENSG00000138193_23 (sequence is synthesized)
gacggagctcatcccttggtacgtgctgtccatccaagccgatgtgcaccagttcctgctgcagggggccacggtcatccactacgaccaggacacacacctctctgcccgctgcttcct

SEQ ID NO: 343869 - DNA, 120 bp, Artificial Sequence
  ENSG00000138193_24 (sequence is synthesized)
ccagcttcagcccgacaatagcaccttgacctgggtaaagcccacaactgcctccccagccagcagtaaagcaaaacttggtgtacttaataacacagctgagcctggaaaattcccact

SEQ ID NO: 343870 - DNA, 120 bp, Artificial Sequence
  ENSG00000138193_25 (sequence is synthesized)
actgggtaatgctggattaagtagcctgacggaaggggtcttggatctttttgcagtgaaggctgtatacatgggccaccctggcattgatatacacactgtgtgtgttcagaacaaact

SEQ ID NO: 343871 - DNA, 120 bp, Artificial Sequence
  ENSG00000138193_26 (sequence is synthesized)
gggtagcatgttcctgtcagagactggtgtgacattgctctatgggcttcagaccacagacaacagattattgcacttcgtggcaccaaagcacacagctaaaatgctcttcagcggatt

SEQ ID NO: 343872 - DNA, 120 bp, Artificial Sequence
  ENSG00000138193_27 (sequence is synthesized)
attggaactcactagagctgtgagaaagatgaggaaattccctgaccaaagacagcagtggctgcggaaacagtacgtcagcctttatcaggaggatggacggtatgaaggcccaacttt

SEQ ID NO: 343873 - DNA, 120 bp, Artificial Sequence
  ENSG00000138193_28 (sequence is synthesized)
ggctcacgctgtggagttgtttggtggcagacggtggagtgctcgaaaccccagccccggaacatcagcaaagaatgctgagaagcccaatatgcagagaaacaataccctgggcataag

SEQ ID NO: 343874 - DNA, 120 bp, Artificial Sequence
  ENSG00000138193_29 (sequence is synthesized)
cactaccaagaaaaagaagaaaatcctcatgaggggtgagagtggagaggtaactgacgatgagatggcaacccgaaaggccaagatgcacaaagagtgtcgaagccggagtggttctga

SEQ ID NO: 343875 - DNA, 120 bp, Artificial Sequence
  ENSG00000138193_30 (sequence is synthesized)
tcctcaagacattaatgaacaagaagaatcagaggtgaatgccatcgctaaccctccaaaccccctcccttccagaagagcccactctttgaccacagctgggtcccccaacttggctgc

SEQ ID NO: 343876 - DNA, 120 bp, Artificial Sequence
  ENSG00000138193_31 (sequence is synthesized)
cgggacgtcatctcccatcaggccagtgtcctcccctgtgctgtcttcttcaaacaagagcccatccagtgcttggagcagtagtagctggcacgggcggatcaaaggcggcatgaaggg

SEQ ID NO: 343877 - DNA, 120 bp, Artificial Sequence
  ENSG00000138193_32 (sequence is synthesized)
atttcagagcttcatggtttcagatagcaacatgagttttgttgaatttgttgagctgttcaaatcattcagtgtcaggagccgcaaggacctgaaggatctgtttgatgtctatgcagt

SEQ ID NO: 343878 - DNA, 120 bp, Artificial Sequence
  ENSG00000138193_33 (sequence is synthesized)
gccctgcaaccgatctggctccgagtcagccccactctacaccaacctgacaattgatgaaaacaccagcgatcttcagcctgacctagatctgttgaccagaaatgtctcggatttggg

SEQ ID NO: 343879 - DNA, 120 bp, Artificial Sequence
  ENSG00000138193_34 (sequence is synthesized)
gttgttcattaagagtaaacagcagctatcggacaaccagaggcagatatctgatgccattgctgctgcaagcattgtgacaaatggcactgggattgagagcacatctctgggcatttt

SEQ ID NO: 343880 - DNA, 120 bp, Artificial Sequence
  ENSG00000138193_35 (sequence is synthesized)
tggggtgggcatacttcagctcaacgatttcctcgtgaattgccaaggagaacactgcacttatgatgaaatcctcagcatcatccagaagttcgagcctagcatcagtatgtgtcatca

SEQ ID NO: 343881 - DNA, 120 bp, Artificial Sequence
  ENSG00000138193_36 (sequence is synthesized)
gggactaatgtcatttgaagggtttgccaggtttctgatggataaagaaaattttgcctcaaaaaatgatgagtcacaggagaacattaaagaactgcagctacccctctcatactatta

SEQ ID NO: 343882 - DNA, 120 bp, Artificial Sequence
  ENSG00000138193_37 (sequence is synthesized)
catcgaatcttcgcacaatacctacctcacgggccatcagctcaaaggagaatcctcggtagaactctacagccaggtccttttgcaaggctgtcgaagtgtagaattggactgctggga

SEQ ID NO: 343883 - DNA, 120 bp, Artificial Sequence
  ENSG00000138193_38 (sequence is synthesized)
cggagacgatgggatgcccatcatttatcatggacatacgctgacaaccaagatccccttcaaggaagtggttgaagccattgatcgcagtgccttcatcaactctgacctgccaatcat

SEQ ID NO: 343884 - DNA, 120 bp, Artificial Sequence
  ENSG00000138193_39 (sequence is synthesized)
catatcgattgagaaccactgttcattgcctcagcaacgaaaaatggcagaaattttcaagactgtgtttggagaaaagctggtgactaaattcttatttgagactgatttctcagatga

SEQ ID NO: 343885 - DNA, 120 bp, Artificial Sequence
  ENSG00000138193_40 (sequence is synthesized)
tccaatgcttccttcacctgaccaactcagaaagaaagttcttcttaaaaacaagaagctaaaagcccatcagacgccagtggatatcttaaagcaaaaggctcatcagttagcatctat

SEQ ID NO: 343886 - DNA, 120 bp, Artificial Sequence
  ENSG00000138193_41 (sequence is synthesized)
gcaagtgcaggcttataatggtgggaatgccaacccccgacctgccaataatgaggaagaggaagatgaggaggacgaatatgattatgactatgaatccctttctgatgacaacattct

SEQ ID NO: 343887 - DNA, 120 bp, Artificial Sequence
  ENSG00000138193_42 (sequence is synthesized)
ggaagacagacctgaaaataaatcatgtaatgacaagcttcagtttgaatataatgaagaaatcccaaagaggataaagaaagcagataactctgcttgcaacaaaggaaaggtttatga

SEQ ID NO: 343888 - DNA, 120 bp, Artificial Sequence
  ENSG00000138193_43 (sequence is synthesized)
tatggaactgggagaagaattttatcttgatcagaataaaaaggaaagcagacagattgcaccagagctttctgaccttgtaatctattgtcaagcagtaaaatttccaggactgtcaac

SEQ ID NO: 343889 - DNA, 120 bp, Artificial Sequence
  ENSG00000138193_44 (sequence is synthesized)
tctaaatgcatctggctctagcagaggaaaagaaaggaaaagcaggaagtccatttttggcaacaatccgggcagaatgagcccaggggagacagcatcatttaacaaaacatctggaaa

SEQ ID NO: 343890 - DNA, 120 bp, Artificial Sequence
  ENSG00000138193_45 (sequence is synthesized)
aagttcctgtgaaggcattcgacagacctgggaggaatcttcttcccctctcaacccaaccacgtccctcagtgctatcattagaactcccaaatgttatcatatctcgtcgctgaatga

SEQ ID NO: 343891 - DNA, 120 bp, Artificial Sequence
  ENSG00000138193_46 (sequence is synthesized)
aaatgccgccaaacgtctgtgtcgcaggtattctcagaaactgacccagcacaccgcctgtcagctgctgagaacttaccctgctgccacccgcatcgactcttccaacccgaaccccct

SEQ ID NO: 343892 - DNA, 120 bp, Artificial Sequence
  ENSG00000138193_47 (sequence is synthesized)
catgttctggctccatgggatacagcttgtggcactcaactaccagactgatgatctccctttacatttaaatgctgcaatgtttgaggcaaatggtggttgtggttatgtattgaaacc

SEQ ID NO: 343893 - DNA, 120 bp, Artificial Sequence
  ENSG00000138193_48 (sequence is synthesized)
tccagttctgtgggacaagaactgccccatgtatcagaagttttctccactagaaagagatctggacagcatggatcctgcagtctattctttaactattgtctctggtcagaatgtgtg

SEQ ID NO: 343894 - DNA, 120 bp, Artificial Sequence
  ENSG00000138193_49 (sequence is synthesized)
ccccagtaatagcatgggaagcccgtgcattgaagtcgacgtcctgggcatgcctctggacagctgccatttccgcacaaagcccatccatcgaaacaccctgaaccccatgtggaacga

SEQ ID NO: 343895 - DNA, 120 bp, Artificial Sequence
  ENSG00000138193_50 (sequence is synthesized)
cgaagatcttgtatttcttcgttttgcagttgtggaaaacaatagttcagcggtaactgctcagagaatcattccactgaaagctttaaaacgaggatatcgacatcttcagctgcgaaa

SEQ ID NO: 343896 - DNA, 120 bp, Artificial Sequence
  ENSG00000138193_51 (sequence is synthesized)
ccttcacaatgaagtcttggagatttctagtttattcattaacagcagaaggatggaagaaaattcctctggcaataccatgtcagcctcttcgatgtttaatacagaagaaagaaaatg

SEQ ID NO: 343897 - DNA, 120 bp, Artificial Sequence
  ENSG00000138193_52 (sequence is synthesized)
tttgcagactcacagagtcacggtgcatggggtcccagggccagagccctttaccgttttcactattaatggaggcaccaaggcaaagcagcttctgcagcaaattctgacaaatgaaca

SEQ ID NO: 343898 - DNA, 120 bp, Artificial Sequence
  ENSG00000138193_53 (sequence is synthesized)
agacatcaaacctgttaccacagactattttttgatggaagaaaaatattttatatctaaagaaaagaatgaatgtaggaaacaaccattccagagagccattggtccagaagaggagat

SEQ ID NO: 343899 - DNA, 120 bp, Artificial Sequence
  ENSG00000138193_54 (sequence is synthesized)
catgcaaattttaagcagctggtttccagaagagggatacatgggcaggattgtcttaaaaacccagcaggaaaacctagaagagaaaaacattgttcaagatgacaaagaggtgatctt

SEQ ID NO: 343900 - DNA, 120 bp, Artificial Sequence
  ENSG00000138193_55 (sequence is synthesized)
gagctcagaggaggagagtttctttgtccaagtgcatgatgtttctccagagcaacctcgaacagtcatcaaagcaccccgcgtcagcactgcacaggatgtcattcagcagaccttatg

SEQ ID NO: 343901 - DNA, 120 bp, Artificial Sequence
  ENSG00000138193_56 (sequence is synthesized)
caaagccaaatattcctacagcatcctgagcaaccccaatccaagcgactatgtgcttttggaagaggtggtgaaagacactaccaacaagaagactaccacaccaaagtcctctcagcg

SEQ ID NO: 343902 - DNA, 120 bp, Artificial Sequence
  ENSG00000138193_57 (sequence is synthesized)
ggtccttctggatcaggagtgtgtgtttcaagcccaaagcaagtggaaaggtgcaggaaaattcatccttaagctaaaggagcaggtgcaggcatctcgagaagataaaaagaaaggcat

SEQ ID NO: 343903 - DNA, 120 bp, Artificial Sequence
  ENSG00000138193_58 (sequence is synthesized)
ttctttcgcaagtgaactcaagaagctcaccaagtcaactaaacagccccgaggacttacatcaccttctcagctcttgacctcagaaagtatccaaaccaaggaggagaaacctgtggg

SEQ ID NO: 343904 - DNA, 120 bp, Artificial Sequence
  ENSG00000138193_59 (sequence is synthesized)
tggcttgtcctccagtgacacaatggattaccgacagtgactaagggcagcatgtttaacccaggtgaagatctttaagcaagaagttaaagagtgaacatggtggaaaaaatataatta

SEQ ID NO: 343905 - DNA, 120 bp, Artificial Sequence
  ENSG00000138193_60 (sequence is synthesized)
ttttcatcagacttaaactggaaattgatgatttctgaactgaagccttcacacatgtgagatccatgctgaggagaagcaaaatggcacagggctagttgccaccaaccaatttactga

SEQ ID NO: 343906 - DNA, 120 bp, Artificial Sequence
  ENSG00000138193_61 (sequence is synthesized)
tgaatgaagcccaggggactgccattttataaatgtcagcagttggaaaaatcgtcacgaattgacttagagcaagggtcagcaagcttgtctgtaaagggccaaacagtaaatatttta

SEQ ID NO: 343907 - DNA, 120 bp, Artificial Sequence
  ENSG00000138193_62 (sequence is synthesized)
gggctgggggccataaaatatgttgcaaccacccaattctgccattgtagtgcaaaagcagccatagacaacacatacatgaacgaacgtggctgtattccaataaaactttatttatgg

SEQ ID NO: 343908 - DNA, 120 bp, Artificial Sequence
  ENSG00000138193_63 (sequence is synthesized)
acactgaaattggaatttcatatatttttcacatgtcacaaatactcttgttttgactttttttcaaccatttaaaaacttaaaaactattcttaattcaggggccatacaaaaacaggt

SEQ ID NO: 343909 - DNA, 120 bp, Artificial Sequence
  ENSG00000138193_64 (sequence is synthesized)
ggcaggctagatttggcccaaggaccttaatttgccaacacaactaagagaagagaactgggaacaaggagcacaaagatctgaaaacaggaaaggaagtttagccatacattttatggc

SEQ ID NO: 343910 - DNA, 120 bp, Artificial Sequence
  ENSG00000138193_65 (sequence is synthesized)
cgagaattagaagcttagaattagaagctttggggcatttcaagtgtaaatatgtcctataacataagagtcattaaaattcaatttagttcctgtattgtgtaccacagtgcactcctc

SEQ ID NO: 343911 - DNA, 120 bp, Artificial Sequence
  ENSG00000138193_66 (sequence is synthesized)
tttaggatttttttacatatagaaataatattgggttttttttaaggttattgcctattcagttaatagggttgctttaaaaaaggttattgcttaatcatagattagattactcatttt

SEQ ID NO: 343912 - DNA, 120 bp, Artificial Sequence
  ENSG00000138193_67 (sequence is synthesized)
tggttttcaaaatgaatttagaatgacgtataatttaatatctactgaattgcaatgtcttaacaagaaacctaacaattttttaaagcaaaagtagattgagttggcgtttaaatttat

SEQ ID NO: 343913 - DNA, 120 bp, Artificial Sequence
  ENSG00000138193_68 (sequence is synthesized)
tttgcaaggtttgtactgacactatacttatatatttattatacatcgctctcttgatattgccatggattagaagcattagttctcagtacttgaagacaaacttctaaaaagaaaata

SEQ ID NO: 343914 - DNA, 120 bp, Artificial Sequence
  ENSG00000138193_69 (sequence is synthesized)
tatgctctgaacatctgaaatgggctagactttcaagtaaaattgcttcatttctcattaactgaagagctattgatccaagtcatacttgccatttaatgtaaattatttttaaacttt

SEQ ID NO: 343915 - DNA, 120 bp, Artificial Sequence
  ENSG00000138193_70 (sequence is synthesized)
gctgtacaaaaccattaagtgtaaaggattcttcatattcttagtatgaagcaaattatgaattttaaaaatgaaatatgtattcctctaaaacccaaacttttatctttccattggtat

SEQ ID NO: 343916 - DNA, 120 bp, Artificial Sequence
  ENSG00000138193_71 (sequence is synthesized)
ctttgaattttaagacacttttcttcaaattacaaaacactaaaactcactcctaaacttcactttgagaaacttttttaaccaattataaaaataaaaccatccccatgtgtttcttgc

SEQ ID NO: 343917 - DNA, 120 bp, Artificial Sequence
  ENSG00000138193_72 (sequence is synthesized)
aaaccatccccatgtgtttcttgcatattctaaaaacagaagtgttaaaaatacaccacacaggctgggcagagtggctcacgcctgtaactccagcactttgggaggccaagatgggcg

SEQ ID NO: 343918 - DNA, 75 bp, Artificial Sequence
  ENSG00000138193_73 (sequence is synthesized)
gaggccaagatgggcggatcaggacagagaagtacaaaaattagctgagcgtggtggcacgtgcctgtaatccca

SEQ ID NO: 343919 - DNA, 120 bp, Artificial Sequence
  ENSG00000138193_74 (sequence is synthesized)
ttcatgtcattgaaagttcttactgggtcaaagccttaaggctagaactaccattttcttgtcaacagaattcaggctattccagtttgatgtaatctatacagtagtacagttttaagt

SEQ ID NO: 343920 - DNA, 120 bp, Artificial Sequence
  ENSG00000138193_75 (sequence is synthesized)
caaatattcattctaacaaatgcacaatgctgctccattttaaaaatattccggaaacactttatcaagcctctataagtgaacatgccaaacagtttgccctaccacgtgttgaaaact

SEQ ID NO: 343921 - DNA, 120 bp, Artificial Sequence
  ENSG00000138193_76 (sequence is synthesized)
gagttgctggtctaagtggctagaggccaaatgaaaactgtgcagagtaacaagatgaaaagactcgtctctttaggtttatcacatttgattctgatgctaagcgctgccccactcctc

SEQ ID NO: 343922 - DNA, 120 bp, Artificial Sequence
  ENSG00000138193_77 (sequence is synthesized)
ctccatgacctttaacacaggtgtatgttttacaacataaatctgagactgaagttgagaccaggttgtttagcaagtgagagaatccagcctactgcctaggttgcatcccaatttagt

SEQ ID NO: 343923 - DNA, 120 bp, Artificial Sequence
  ENSG00000138193_78 (sequence is synthesized)
tgtttatcacattttgaggtgaaagtacatacttcattgtatttgagtctttgggattacagaaagaacacattgtttcaaaatgtaaagagttggctgggcacagtggctcatgcctgt

SEQ ID NO: 343924 - DNA, 66 bp, Artificial Sequence
  ENSG00000138193_79 (sequence is synthesized)
gaggtctggagttcgtaaaaatacaaaaattagtggtggtgggcacctgtaaatcccagctattgg

SEQ ID NO: 343925 - DNA, 90 bp, Artificial Sequence
  ENSG00000138193_80 (sequence is synthesized)
gctattggggaggctgaggcaggagagaattgcctgaactcaagacgcagaggttgcagtgagtgacaagagtgagactccatctcaaaa

SEQ ID NO: 343926 - DNA, 120 bp, Artificial Sequence
  ENSG00000138193_81 (sequence is synthesized)
tccatctcaaaaaaaaaaaaaaaaagtaaagagtctagtctactattatacacaaatggccagcacaatctgatgttggctgaaaatatttaagttttatttaaagctttctgaattaaa

SEQ ID NO: 343927 - DNA, 120 bp, Artificial Sequence
  ENSG00000138193_82 (sequence is synthesized)
ttaaagctttctgaattaaacagctatattatgccaagtgaaagaaattatcctaaatagccactatgactatacccattaccatttcacactttttaggccaccagaaatctgggtagc

SEQ ID NO: 343928 - DNA, 120 bp, Artificial Sequence
  ENSG00000138193_83 (sequence is synthesized)
aaactcttctcattaaagttgatgtggacaagaatctaaatatgcaagttggggtcattacaaaattttaagaagcatcactgaaagtgaagagaaaggagcatgaattctgtcactcta

SEQ ID NO: 343929 - DNA, 120 bp, Artificial Sequence
  ENSG00000138193_84 (sequence is synthesized)
ttcagtgatgccaaatctgtaggaatgatcctatctgggtagaaagtgccctttgaggggtaaagcttcttttcatgtcatcattagcaagtaaaagttatttacaaattctccagttgg

SEQ ID NO: 343930 - DNA, 120 bp, Artificial Sequence
  ENSG00000138193_85 (sequence is synthesized)
gagtcaatatgaagtctagactcaacaaaagttgagttacaagtgacttgtttttaatcaaacttgctttcttttatgggaggcttttatgcctcccatctcaatacctctggagacact

SEQ ID NO: 343931 - DNA, 120 bp, Artificial Sequence
  ENSG00000138193_86 (sequence is synthesized)
ggaagctcattaatgaaagtgggccctctatgatatgtatcaatttaccttttgctaactacatcgtccccttcctttcttctctcctcttccaatatctctatagacttctgtcctctg

SEQ ID NO: 343932 - DNA, 120 bp, Artificial Sequence
  ENSG00000138193_87 (sequence is synthesized)
cccagagacccacaggccttgcttaattctggaaagttatcagggcttgcttactggcccaataaaattgaattaactctaaaacacaaaactccacatctatgctcccatgctagtaaa

SEQ ID NO: 343933 - DNA, 120 bp, Artificial Sequence
  ENSG00000138193_88 (sequence is synthesized)
gaagagtaggattttcctggctggtgtctttgatcttacattggcagcctgcagggaaagtgctctcatggtgaaagtctctgaccccttttcagttgcttatatatcagcagtgaggcc

SEQ ID NO: 343934 - DNA, 120 bp, Artificial Sequence
  ENSG00000138193_89 (sequence is synthesized)
agaaaagatatacctgggaccccaaaaaagttagagagaaaagggagattgtctcttatacagagtctagacttgggtcaatattccccatgatccattgttaataatttatgtgttctc

SEQ ID NO: 343935 - DNA, 120 bp, Artificial Sequence
  ENSG00000138193_90 (sequence is synthesized)
tgccatccttatgtagcagcttcctaaaagcaatccttggctgatggctatggattctgacataggaatacctgaaatgagtccctttgaaacacatactgagtctctatgattaccaag

SEQ ID NO: 343936 - DNA, 84 bp, Artificial Sequence
  ENSG00000138193_91 (sequence is synthesized)
gtccctttgaaacacatactgagtctctatgattaccaagttattcttttttttttttttttttttgaggcaaacgatctcgac

SEQ ID NO: 343937 - DNA, 75 bp, Artificial Sequence
  ENSG00000138193_92 (sequence is synthesized)
tgtccgtctaattttttttattttcagtagagacgggggtttcactatgttggtaaggctggtctcgaactcctg

SEQ ID NO: 343938 - DNA, 120 bp, Artificial Sequence
  ENSG00000138193_93 (sequence is synthesized)
caggcgtgagccaccacacctggcctacctactcttatacatctcttagattcaaaacatactatgcacaagcctgtcaccaaacagatctctgaaaccttccctattgcagatgacata

SEQ ID NO: 343939 - DNA, 120 bp, Artificial Sequence
  ENSG00000138193_94 (sequence is synthesized)
caaacagatctctgaaaccttccctattgcagatgacataggtctctaaacttttgacacaagtaattctaacactgaattgggtactgtcgcatttttcaaaagcgttatgtggatgat

SEQ ID NO: 343940 - DNA, 120 bp, Artificial Sequence
  ENSG00000138193_95 (sequence is synthesized)
ttgactcagcatggaagactgaggttgtcttacacccattatttcccaccccactcttaagtgccagcatagtgctaaacacacagtaggtgctcattatttgtctagttaaaaaacaaa

SEQ ID NO: 343941 - DNA, 71 bp, Artificial Sequence
  ENSG00000138193_96 (sequence is synthesized)
acacagtaggtgctcattatttgtctagttaaaaaacaaattaaggctgtagcttaatatagcctcaggat

SEQ ID NO: 343942 - DNA, 120 bp, Artificial Sequence
  ENSG00000138193_97 (sequence is synthesized)
aatgcacaaatatatttcctcaaattcacataggatactcaaatatagatgtataattttgtagtcccactgtgattctccatatgtataacaagaaaattaaaggcataatacagctgt

SEQ ID NO: 343943 - DNA, 120 bp, Artificial Sequence
  ENSG00000138193_98 (sequence is synthesized)
gaaatagctgatgagtttctattttaagctgatttttcaccagaagtatagtttctgctgccaaagtaaagtataaatgtatttgtatatgtgtggaaaataaataatttgtgacatgta

SEQ ID NO: 343944 - DNA, 120 bp, Artificial Sequence
  ENSG00000138193_99 (sequence is synthesized)
atggtttcagaaggaagtgcagcaggaagagactttgcaggaatggaagaggtgaggcagctccacgtgagattctgcaaagggattaagatttggcaccaggcttggtttctgtgcagc

SEQ ID NO: 343945 - DNA, 120 bp, Artificial Sequence
  ENSG00000138193_100 (sequence is synthesized)
ctcttaggcagagagccccaggagagggaagcaggctgtcagctgtggctttgcacgctctcagctgtcttgaaggttggttggctcttcccgctctctgaggtacccaattttaccttg

SEQ ID NO: 343946 - DNA, 120 bp, Artificial Sequence
  ENSG00000138193_101 (sequence is synthesized)
ggaacagggcttaacttaaactactttgtaaggaaggcataattagtacaatgtcttttatcttttccaacaggaggatgtcccttgaaggcaggtaggaatgggaccttaaaacaggaa

SEQ ID NO: 343947 - DNA, 120 bp, Artificial Sequence
  ENSG00000138193_102 (sequence is synthesized)
aggaatgggaccttaaaacaggaaaagggctctgaagatatgtgtaacatgatatgctattgaacaccgcctataaagaaaaagggaaagaggctgggcgtggtggcgcatgcctgtaat

SEQ ID NO: 343948 - DNA, 120 bp, Artificial Sequence
  ENSG00000138207_0 (sequence is synthesized)
gcctccctcgctccacgcgcgcccggactcggcggccaggcttgcgcgcggttcccctcccggtgggcggattcctgggcaagatgaagtgggtgtgggcgctcttgctgttggcggcgc

SEQ ID NO: 343949 - DNA, 120 bp, Artificial Sequence
  ENSG00000138207_1 (sequence is synthesized)
tgggcagcggccgcgcggagcgcgactgccgagtgagcagcttccgagtcaaggagaacttcgacaaggctcgcttctctgggacctggtacgccatggccaagaaggaccccgagggcc

SEQ ID NO: 343950 - DNA, 120 bp, Artificial Sequence
  ENSG00000138207_2 (sequence is synthesized)
tctttctgcaggacaacatcgtcgcggagttctccgtggacgagaccggccagatgagcgccacagccaagggccgagtccgtcttttgaataactgggacgtgtgcgcagacatggtgg

SEQ ID NO: 343951 - DNA, 120 bp, Artificial Sequence
  ENSG00000138207_3 (sequence is synthesized)
gcaccttcacagacaccgaggaccctgccaagttcaagatgaagtactggggcgtagcctcctttctccagaaaggaaatgatgaccactggatcgtcgacacagactacgacacgtatg

SEQ ID NO: 343952 - DNA, 120 bp, Artificial Sequence
  ENSG00000138207_4 (sequence is synthesized)
gtaaggcagcggcaggaggagctgtgcctggccaggcagtacaggctgatcgtccacaacggttactgcgatggcagatcagaaagaaaccttttgtagcaatatcaagaatctagtttc

SEQ ID NO: 343953 - DNA, 120 bp, Artificial Sequence
  ENSG00000138207_5 (sequence is synthesized)
atctgagaacttctgattagctctcagtcttcagctctatttatcttaggagtttaatttgcccttctctccccatcttccctcagttcccataaaaccttcattacacataaagataca

SEQ ID NO: 343954 - DNA, 120 bp, Artificial Sequence
  ENSG00000138207_6 (sequence is synthesized)
cgtgggggtcagtgaatctgcttgcctttcctgaaagtttctggggcttaagattccagactctgattcattaaactatagtcacccgtgtcctgtgattttagttttcatttgtgttta

SEQ ID NO: 343955 - DNA, 120 bp, Artificial Sequence
  ENSG00000138207_7 (sequence is synthesized)
tgtctgtgctgcagacggatgggtggggtgcgcttctttataccaggagcacgtggctctttctgacctttggcctgttctagtgcctaatctccattattaaatactggcttctcccaa

SEQ ID NO: 343956 - DNA, 120 bp, Artificial Sequence
  ENSG00000138207_8 (sequence is synthesized)
gccaatttggcatggccagggcctgggcactcacgcaccagggagcctcgcgggtccgctctcgctctgtgaggccacggtcttcccgccaggttgactcgagcctcctgccagagccac

SEQ ID NO: 343957 - DNA, 120 bp, Artificial Sequence
  ENSG00000138207_9 (sequence is synthesized)
tggccccggaggccaccctagaccgcagctggcggccgctggcacgagtgcagggtaactgagccagggccgctggcgcatttggcctggccgaggccaccccgcgcggccgctccactg

SEQ ID NO: 343958 - DNA, 120 bp, Artificial Sequence
  ENSG00000138231_0 (sequence is synthesized)
gcaggagtctacacccaggcggtggctatacttattaaagttggcgggagctgagcgatcagtcggtcctgggctggctgtggtgtagggcgttgcaggcagcgctcacctcctcaggcc

SEQ ID NO: 343959 - DNA, 120 bp, Artificial Sequence
  ENSG00000138231_1 (sequence is synthesized)
ggcagaatgcgggtggctgtggctggctgctgccacggcgagctggataagatctatgagacgctggcgctggcagagcggcgcggcccggggcctgtcgacctcttgctgtgctgcggc

SEQ ID NO: 343960 - DNA, 120 bp, Artificial Sequence
  ENSG00000138231_2 (sequence is synthesized)
gacttccaggcggtgcgcaacgaggcggatctacgctgcatggccgtgccgcccaagtatcgtcacatgcaaaccttctacaggtattactctggagagaaaaaggctccagttctcacg

SEQ ID NO: 343961 - DNA, 120 bp, Artificial Sequence
  ENSG00000138231_3 (sequence is synthesized)
ctcttcattgggggaaaccatgaagcctcaaatcatttgcaagagttaccctatggtggctgggtggcaccaaacatttattatttaggtttggctggtgtggtaaaataccgaggtgta

SEQ ID NO: 343962 - DNA, 120 bp, Artificial Sequence
  ENSG00000138231_4 (sequence is synthesized)
aggatcggtggaatctctggtatctttaaatctcatgactatcgaaaaggtcattttgagtgccccccttataattcatctacaatcaggagtatatatcatgtgagaaatattgaagtc

SEQ ID NO: 343963 - DNA, 120 bp, Artificial Sequence
  ENSG00000138231_5 (sequence is synthesized)
tataaattaaaacagctgaagcagcctatagatatattcttgtctcatgattggccaagaagtatatatcattatggaaataagaagcaacttcttaagactaaatcttttttccgacaa

SEQ ID NO: 343964 - DNA, 120 bp, Artificial Sequence
  ENSG00000138231_6 (sequence is synthesized)
gaagtggaaaataacacattaggaagtccagctgcctcagagcttttagagcatctcaaacctacttattggttttctgcccaccttcatgtgaagtttgccgccttgatgcagcatcag

SEQ ID NO: 343965 - DNA, 120 bp, Artificial Sequence
  ENSG00000138231_7 (sequence is synthesized)
gcaaaggataaaggacagacagccagagcaaccaaatttttagccttggacaaatgcttaccacatagagattttcttcagatattagagatagaacatgaccccagtgctcctgattac

SEQ ID NO: 343966 - DNA, 120 bp, Artificial Sequence
  ENSG00000138231_8 (sequence is synthesized)
ttggaatatgatattgaatggctcactattctcagggctacggatgatcttattaatgtgactgggcgcctgtggaatatgccagaaaataatggcctgcatgcaaggtgggattatagt

SEQ ID NO: 343967 - DNA, 120 bp, Artificial Sequence
  ENSG00000138231_9 (sequence is synthesized)
gcaacagaagaaggtatgaaagaagtattggaaaaattgaatcatgatctcaaggttccatgtaactttagtgtaacagctgcttgttatgatcctagcaagccacagacacaaatgcag

SEQ ID NO: 343968 - DNA, 120 bp, Artificial Sequence
  ENSG00000138231_10 (sequence is synthesized)
ctgattcataggatcaatcctcagacaactgaattttgtgcccaacttggcatcatagacatcaatgttaggcttcagaagtccaaggaagaacatcatgtgtgtggtgaatatgaagaa

SEQ ID NO: 343969 - DNA, 120 bp, Artificial Sequence
  ENSG00000138231_11 (sequence is synthesized)
actctggagaagaccagagtgaatataatacagacacatctgctctgtcttctattaatccagatgaaataatgttagatgaagaagaagatgaagatagtattgtaagtgcacatagtg

SEQ ID NO: 343970 - DNA, 120 bp, Artificial Sequence
  ENSG00000138231_12 (sequence is synthesized)
gcatgaatacaccatcggtagaaccttctgatcaagcttctgagttttctgcaagtttctctgatgtcaggatcttgccaggctctatgattgtatcttctgatgatacggtggattcca

SEQ ID NO: 343971 - DNA, 120 bp, Artificial Sequence
  ENSG00000138231_13 (sequence is synthesized)
caattgatagagaggggaaacctggtgggactgtggagtcagggaatggagaggacttaaccaaggtgccattgaagaggctgagtgatgaacatgaacctgaacaaagaaagaaaatta

SEQ ID NO: 343972 - DNA, 120 bp, Artificial Sequence
  ENSG00000138231_14 (sequence is synthesized)
attaagaggaggaatcaagccatttacgctgcagtggatgatgatgatgacgatgcagcttaagatgatttacttgttttgtttttgtgtttgttttgtttttttgagatggagtttcac

SEQ ID NO: 343973 - DNA, 60 bp, Artificial Sequence
  ENSG00000138231_15 (sequence is synthesized)
tgcccgccaccacacccggctaatttttgcatttttagtaattgtcttggccttctaaag

SEQ ID NO: 343974 - DNA, 120 bp, Artificial Sequence
  ENSG00000138231_16 (sequence is synthesized)
aggcgtgagccactgtgcctggccgacaatttacttgtcttagtattatatgtagatatgtgattttttgagactgtatttttagagctgaatttttgactaaagacttaactttataat

SEQ ID NO: 343975 - DNA, 120 bp, Artificial Sequence
  ENSG00000138231_17 (sequence is synthesized)
aatgaagatacattagagaattttagttagatattgactttatctttaggcttttgtatgtttcagatgcaaacatattaaagtttcatatatttacttgactgggtatctttttttttg

SEQ ID NO: 343976 - DNA, 120 bp, Artificial Sequence
  ENSG00000138231_18 (sequence is synthesized)
aagacatacattattcacttccatttttacaataaacacttacttaacatctactctgtgccaagcactctgctataatatgggaccataaagatgagtaagacaaggatttttgcctcc

SEQ ID NO: 343977 - DNA, 120 bp, Artificial Sequence
  ENSG00000138231_19 (sequence is synthesized)
ctccaaggacttgttatcactgtaaacattttgatgtatacaatatggctatattatattttgttttataaaatcaagtcattgtatatattatgatgtatgctttcttttcatttatta

SEQ ID NO: 343978 - DNA, 120 bp, Artificial Sequence
  ENSG00000138231_20 (sequence is synthesized)
tatttttcctgatcagcttttaatatctgtcaaataaaaattgaaattgaagatggtatataagatttcaggaaataaactactctgaatactaaacattggtaaacgtacaatcttaat

SEQ ID NO: 343979 - DNA, 120 bp, Artificial Sequence
  ENSG00000138231_21 (sequence is synthesized)
tttaagttctgccagtttacttttaagctcttttgtttatctttaatccttgggttatatgctttgatttatgtgtgttcaatgctttgagttaacatcatcatcatcattagtttttgc

SEQ ID NO: 343980 - DNA, 120 bp, Artificial Sequence
  ENSG00000138231_22 (sequence is synthesized)
cttgaattttgtatggaaattgaaggtctgagaagttaaatgccttctcttttatcacacaagtgggtatagaattaacttaattttggaaaagtaacagtcattcctttgacacacaac

SEQ ID NO: 343981 - DNA, 120 bp, Artificial Sequence
  ENSG00000138246_0 (sequence is synthesized)
agagcgcgctcgctcaaagcctgagcgaagatggcggcctccagagtgaaactctgagaggcagagggaggaggcggagggggcggggaggcagcgccgcggcggcaccaggaacccgcg

SEQ ID NO: 343982 - DNA, 120 bp, Artificial Sequence
  ENSG00000138246_1 (sequence is synthesized)
gcagcggagctgcagggccccggcgggggaaaggggaagtggtgagggtgaggaggccggagggcgcctcatcccactctggaagctgagccggcggcgggaggagctagggctggagcc

SEQ ID NO: 343983 - DNA, 120 bp, Artificial Sequence
  ENSG00000138246_2 (sequence is synthesized)
tctccagcctcccgcgaaggtttgagcacaaaatgaacataattagggaaaataaggatctggcatgtttctacacaacaaaacattcatggagggggaagtataagcgtgtcttttcag

SEQ ID NO: 343984 - DNA, 120 bp, Artificial Sequence
  ENSG00000138246_3 (sequence is synthesized)
ttggaactcatgcgattactacatataatcccaataccttagaagtaacaaatcagtggccttatggagacatttgcagcatcagccctgttggaaaaggacaaggaacggagttcaacc

SEQ ID NO: 343985 - DNA, 120 bp, Artificial Sequence
  ENSG00000138246_4 (sequence is synthesized)
tcacatttcgtaaaggcagtggaaaaaagtcagaaactttaaaattttctacagagcacagaacagaacttcttacagaagcattgagatttagaactgatttttcagagggaaaaatca

SEQ ID NO: 343986 - DNA, 120 bp, Artificial Sequence
  ENSG00000138246_5 (sequence is synthesized)
caggaaggagatacaactgctataagcatcactggagtgactcaagaaaacctgtaattttggaagtaactccaggaggctttgaccaaattaatcctgcaaccaacagagtactctgtt

SEQ ID NO: 343987 - DNA, 120 bp, Artificial Sequence
  ENSG00000138246_6 (sequence is synthesized)
cctatgactatagaaatattgaaggatttgtagatctctcagattatcaaggaggattttgtatactttatggaggatttagtagattgcatttatttgcgtcagagcaaagagaagaga

SEQ ID NO: 343988 - DNA, 120 bp, Artificial Sequence
  ENSG00000138246_7 (sequence is synthesized)
ttattaaaagtgcaatagaccatgctggtaactacataggtatttcattgcggatcaggaaagagcctttagaattcgagcaatatttgaatcttcgctttggaaaatacagcactgatg

SEQ ID NO: 343989 - DNA, 120 bp, Artificial Sequence
  ENSG00000138246_8 (sequence is synthesized)
aatccatcacatctttagcagagtttgtagtccaaaaaatatcacctagacattcggagcctgttaaaagagttctagcacttacagaaacatgtttagtagaacgtgatccggcaacct

SEQ ID NO: 343990 - DNA, 120 bp, Artificial Sequence
  ENSG00000138246_9 (sequence is synthesized)
ataatattgcaacattgaagcctttaggagaagtatttgcgttggtctgtgactcagaaaatccacaactttttaccattgaatttataaaagggcaagtacggaaatattcttcaacag

SEQ ID NO: 343991 - DNA, 120 bp, Artificial Sequence
  ENSG00000138246_10 (sequence is synthesized)
agagagattccttattagcaagtttgctggatggagtaagagcctctggtaatagagatgtttgtgtaaaaatgacaccaacccataaaggtcagcgatgggggttactcagcatgcctg

SEQ ID NO: 343992 - DNA, 120 bp, Artificial Sequence
  ENSG00000138246_11 (sequence is synthesized)
ttgatgaggaagtagagagccttcacctcaggttcttagctacgcctccaaatggcaactttgcagatgctgtattcaggttcaatgctaatatttcatacagtggagtcctacatgcag

SEQ ID NO: 343993 - DNA, 120 bp, Artificial Sequence
  ENSG00000138246_12 (sequence is synthesized)
taacacaagatggtctcttctcagaaaacaaagaaaaactgatcaataatgccataacagcattactgtcccaagaaggggatgtcgttgcttcaaatgcggaacttgagagtcagttcc

SEQ ID NO: 343994 - DNA, 120 bp, Artificial Sequence
  ENSG00000138246_13 (sequence is synthesized)
aggctgtgaggaggcttgtggcatccaaagctggtttcctggctttcactcagcttccaaagtttcgcgagcgtctaggggtgaaggtagtaaaagcactcaaaagaagcaacaacggaa

SEQ ID NO: 343995 - DNA, 120 bp, Artificial Sequence
  ENSG00000138246_14 (sequence is synthesized)
taatccatgcagcagttgatatgctttgtgcccttatgtgtcccatgcatgatgactatgacttaagacaagaacagttgaacaaagcttctcttctctcgtcaaagaagtttctggaaa

SEQ ID NO: 343996 - DNA, 120 bp, Artificial Sequence
  ENSG00000138246_15 (sequence is synthesized)
acttactggagaaatttaattcccatgtggatcatgggactggtgccctagttattagttcgctcttggacttccttacctttgccctctgtgctccatatagtgagacaactgaagggc

SEQ ID NO: 343997 - DNA, 120 bp, Artificial Sequence
  ENSG00000138246_16 (sequence is synthesized)
agcagtttgatatgctcttggagatggtagcatccaatggaagaaccctttttaaactttttcagcatccttccatggcaataataaaaggagctgggttggttatgaaggcaataatag

SEQ ID NO: 343998 - DNA, 120 bp, Artificial Sequence
  ENSG00000138246_17 (sequence is synthesized)
aggaaggtgataaagaaattgctacaaaaatgcaggagcttgccctaagtgaaggtgccttacctcgacacttgcatactgcgatgtttacaataagctcagatcaaaggatgcttacaa

SEQ ID NO: 343999 - DNA, 120 bp, Artificial Sequence
  ENSG00000138246_18 (sequence is synthesized)
atagacagctaagtagacatttagtgggactctggacagctgataatgcaactgcaacaaacttgttgaaacgcattttgccgccaggcttgctggcatacttggaaagctcagatctcg

SEQ ID NO: 344000 - DNA, 120 bp, Artificial Sequence
  ENSG00000138246_19 (sequence is synthesized)
tacctgagaaggatgctgatcggatgcatgttagagacaatgtgaaaatagcaatggatcagtatggaaaatttaataaagttccagagtggcaaagactagctggaaaagctgctaaag

SEQ ID NO: 344001 - DNA, 120 bp, Artificial Sequence
  ENSG00000138246_20 (sequence is synthesized)
aagttgaaaaatttgccaaagaaaaagtggatcttgtattgatgcactggagggataggatgggcattgctcaaaaagagaatataaatcagaagccagtggttcttcgaaagagaagac

SEQ ID NO: 344002 - DNA, 120 bp, Artificial Sequence
  ENSG00000138246_21 (sequence is synthesized)
aaagaataaaaatagaagcaaattgggatctcttctattataggtttggtcaagaccatgccaggtcaaaccttatttggaatttcaaaacacgagaagaactgaaagatactcttgaat

SEQ ID NO: 344003 - DNA, 120 bp, Artificial Sequence
  ENSG00000138246_22 (sequence is synthesized)
ctgaaatgagagcatttaatattgacagagaacttggaagtgcaaatgtgatctcctggaaccaccatgagtttgaggttaaatatgagtgcctggcagaggaaattaaaataggagact

SEQ ID NO: 344004 - DNA, 120 bp, Artificial Sequence
  ENSG00000138246_23 (sequence is synthesized)
attacctgagattactattggaggaagatgagaatgaagaaagtggatcaattaagagatcgtatgaatttttcaatgagctttatcatcgcttcttgctcaccccaaaagtaaacatga

SEQ ID NO: 344005 - DNA, 120 bp, Artificial Sequence
  ENSG00000138246_24 (sequence is synthesized)
agtgtttatgtttacaagcccttgctattgtttatggcagatgtcacgaagaaataggaccttttacagataccagatatatcattggaatgttagagaggtgcacagataaacttgaac

SEQ ID NO: 344006 - DNA, 120 bp, Artificial Sequence
  ENSG00000138246_25 (sequence is synthesized)
gagataggttgattctcttccttaacaagttgatccttaataagaaaaatgttaaggatctcatggattcaaatggaataagaatccttgtggacttgcttacccttgcacatctccatg

SEQ ID NO: 344007 - DNA, 120 bp, Artificial Sequence
  ENSG00000138246_26 (sequence is synthesized)
taagccgagctacagtaccactgcaaagcaatgtaattgaagctgctccagatatgaaaagagagagtgaaaaggaatggtattttggcaacgcagacaaagaaaggagtggcccgtatg

SEQ ID NO: 344008 - DNA, 120 bp, Artificial Sequence
  ENSG00000138246_27 (sequence is synthesized)
gatttcatgagatgcaagaattgtggaccaaaggaatgttaaatgcaaaaaccagatgctgggctcaaggcatggatggatggcgaccacttcagtccataccccagcttaagtggtgtc

SEQ ID NO: 344009 - DNA, 120 bp, Artificial Sequence
  ENSG00000138246_28 (sequence is synthesized)
tcttagccagtggacaggctgtcctgaatgaaactgaccttgctacccttatattgaacatgttgatcacaatgtgtggatattttccaagcagggatcaagacaatgccatcattcggc

SEQ ID NO: 344010 - DNA, 120 bp, Artificial Sequence
  ENSG00000138246_29 (sequence is synthesized)
ctctacccaaagtgaaaagactgctgtcagatagcacttgccttccccatattattcagctactgctgacctttgaccctatccttgttgagaaggttgctattttgttataccatatca

SEQ ID NO: 344011 - DNA, 120 bp, Artificial Sequence
  ENSG00000138246_30 (sequence is synthesized)
tgcaagataacccacagttaccccgcctttatctgagtggagtatttttctttatcatgatgtacacaggttccaatgtgcttcctgttgctcgatttttgaaatacacacataccaaac

SEQ ID NO: 344012 - DNA, 120 bp, Artificial Sequence
  ENSG00000138246_31 (sequence is synthesized)
aggctttcaagtcagaagagacaaaaggacaagatatttttcagagaagtatacttgggcacattctacctgaagcaatggtttgttacttagaaaattatgaacctgaaaagttttctg

SEQ ID NO: 344013 - DNA, 120 bp, Artificial Sequence
  ENSG00000138246_32 (sequence is synthesized)
attgctgcccatctcgcggatttcacacctcgtcttcagagtaacacaagagcactttatcagtattgccccattcctataatcaactatccacaactcgaaaatgaactattttgtaat

SEQ ID NO: 344014 - DNA, 120 bp, Artificial Sequence
  ENSG00000138246_33 (sequence is synthesized)
atttattacctcaaacaactgtgtgatacactccggtttccagattggccaattaaagacccggttaagcttctaaaagatacccttgatgcctggaagaaagaagtagaaaagaagcca

SEQ ID NO: 344015 - DNA, 120 bp, Artificial Sequence
  ENSG00000138246_34 (sequence is synthesized)
cctatgatgtcaatagatgatgcttatgaagtgcttaatctgcctcaaggacagggaccgcatgatgagagcaagattaggaaagcttacttcagacttgcacaaaagtaccaccctgat

SEQ ID NO: 344016 - DNA, 120 bp, Artificial Sequence
  ENSG00000138246_35 (sequence is synthesized)
aagaatccagaagggagggacatgtttgaaaaagtaaataaagcatatgaatttttatgtaccaaatcagcaaaaatagtggatgggccagatccagagaatataattttaattctaaaa

SEQ ID NO: 344017 - DNA, 120 bp, Artificial Sequence
  ENSG00000138246_36 (sequence is synthesized)
acacagagcatcctcttcaaccgtcataaagaagatttacagccttataaatatgcaggataccccatgcttattcggactataacaatggaaacttcagatgacctccttttctcaaaa

SEQ ID NO: 344018 - DNA, 120 bp, Artificial Sequence
  ENSG00000138246_37 (sequence is synthesized)
gaatcaccattgttgcctgcggctacagagctagctttccatactgtcaactgttcagccctcaatgctgaagagctcagaagagagaatggactagaggtgttacaagaggcatttagt

SEQ ID NO: 344019 - DNA, 120 bp, Artificial Sequence
  ENSG00000138246_38 (sequence is synthesized)
cgctgtgtggctgtcttgactcgtgctagtaaaccaagtgacatgtcagtacaggtgtgtggatacataagtaaatgctacagtgtggctgctcagtttgaggaatgccgagagaagatc

SEQ ID NO: 344020 - DNA, 120 bp, Artificial Sequence
  ENSG00000138246_39 (sequence is synthesized)
acggaaatgcctagcatcatcaaggatctctgtcgggtactatattttggcaagagtattccccgcgtagctgctcttggggtagaatgtgtcagttcttttgctgtggatttctggcta

SEQ ID NO: 344021 - DNA, 120 bp, Artificial Sequence
  ENSG00000138246_40 (sequence is synthesized)
cagacacacctatttcaggctggaattttgtggtatctccttggttttctgtttaattatgactacacactagaagagagtggcattcagaaaagtgaagaaacaaaccagcaggaggta

SEQ ID NO: 344022 - DNA, 120 bp, Artificial Sequence
  ENSG00000138246_41 (sequence is synthesized)
gcaaacagccttgccaaactgagtgtccatgctctgagtcgccttggagggtatttggctgaagaacaagcaactccagaaaatccaaccataaggaaaagcttagctggcatgctgaca

SEQ ID NO: 344023 - DNA, 120 bp, Artificial Sequence
  ENSG00000138246_42 (sequence is synthesized)
ccctatgttgctagaaaacttgctgtggctagtgtgactgagattttgaagatgcttaacagcaacacagaaagtccatatttgatatggaacaattctacaagagcagaattacttgaa

SEQ ID NO: 344024 - DNA, 120 bp, Artificial Sequence
  ENSG00000138246_43 (sequence is synthesized)
tttcttgaatcccaacaagaaaacatgattaaaaaaggtgattgtgacaaaacttatggatcagaatttgtctacagtgatcatgccaaagaacttattgtaggggagatttttgttagg

SEQ ID NO: 344025 - DNA, 120 bp, Artificial Sequence
  ENSG00000138246_44 (sequence is synthesized)
gtgtataatgaagttcctactttccaactggaggttccaaaagcatttgctgcaagtctcttggattatataggctcgcaggcccaatacttgcacacattcatggccatcacacacgcg

SEQ ID NO: 344026 - DNA, 120 bp, Artificial Sequence
  ENSG00000138246_45 (sequence is synthesized)
gcaaaagtggagtcagagcaacatggagatcgcttaccgagagtagaaatggctttggaggctctgagaaatgtcataaaatacaatccaggttctgagagtgaatgcattgggcacttt

SEQ ID NO: 344027 - DNA, 120 bp, Artificial Sequence
  ENSG00000138246_46 (sequence is synthesized)
aagttgatattttctcttctccgagttcatggagctggtcaagtgcagcagttggctttagaggttgtgaatatagtgacatctaaccaagactgtgtcaacaatattgctgaatcaatg

SEQ ID NO: 344028 - DNA, 120 bp, Artificial Sequence
  ENSG00000138246_47 (sequence is synthesized)
gttttgtccagtttattggctcttctacattcattgccatcaagtcgtcagcttgttctggaaactctttatgctttgacatcgagtacaaaaataatcaaagaagcaatggcaaagggt

SEQ ID NO: 344029 - DNA, 120 bp, Artificial Sequence
  ENSG00000138246_48 (sequence is synthesized)
gctttgatctatttactggatatgttctgcaattcaacacatccacaggttcgagcccaaacagcagaactttttgccaaaatgacagcagataaactgataggtccaaaggttcgaatt

SEQ ID NO: 344030 - DNA, 120 bp, Artificial Sequence
  ENSG00000138246_49 (sequence is synthesized)
acgttaatgaaatttctaccaagcgttttcatggatgctatgagagacaatcctgaagctgctgtacatatttttgaaggaactcatgaaaatcctgagttaatttggaatgataattcc

SEQ ID NO: 344031 - DNA, 120 bp, Artificial Sequence
  ENSG00000138246_50 (sequence is synthesized)
agagataaagtgtccacaacagttagggaaatgatgctagagcactttaaaaatcagcaggacaaccctgaggcaaactggaagttgcctgaagattttgctgtggtgtttggagaagca

SEQ ID NO: 344032 - DNA, 120 bp, Artificial Sequence
  ENSG00000138246_51 (sequence is synthesized)
gagggtgaacttgctgttggaggagtcttcttgaggatctttattgcacaaccagcctgggttctaagaaagcctagagaatttcttattgccctgttagaaaaattaactgagctccta

SEQ ID NO: 344033 - DNA, 120 bp, Artificial Sequence
  ENSG00000138246_52 (sequence is synthesized)
gagaagaacaatcctcatggagaaactctggaaaccttgacaatggcaacagtgtgtctcttcagcgcacaacctcagctggcagatcaggtcccgccattgggccatcttcccaaagtt

SEQ ID NO: 344034 - DNA, 120 bp, Artificial Sequence
  ENSG00000138246_53 (sequence is synthesized)
atccaggcaatgaatcataggaacaatgccattcctaagagtgccattcgggttatccatgccttgtctgaaaatgagctgtgtgttcgagccatggcatctttagagaccattggccca

SEQ ID NO: 344035 - DNA, 120 bp, Artificial Sequence
  ENSG00000138246_54 (sequence is synthesized)
ctgatgaatggaatgaaaaagcgagcagatactgttggtctagcctgtgaagcaattaatcgaatgtttcagaaggagcagagtgaattagtagcacaagccctgaaagcagatttggtt

SEQ ID NO: 344036 - DNA, 120 bp, Artificial Sequence
  ENSG00000138246_55 (sequence is synthesized)
ccatacctcttaaaattactcgaaggcattggccttgaaaacctggacagcccagcagccactaaggctcagattgttaaagctctcaaggcaatgactcgaagtttgcagtatggagaa

SEQ ID NO: 344037 - DNA, 120 bp, Artificial Sequence
  ENSG00000138246_56 (sequence is synthesized)
caggtgaatgaaatcctgtgccgttcttcagtctggagtgccttcaaagatcagaaacatgatttgttcatttctgagtcacaaacagcaggatacctcacaggacctggagttgctggc

SEQ ID NO: 344038 - DNA, 120 bp, Artificial Sequence
  ENSG00000138246_57 (sequence is synthesized)
taccttaccgcaggtacatctacatcagtcatgtctaacctgccacctcctgtagaccatgaggcaggcgaccttggctatcagacttgaaatattcacgagagacaataaacgctgaaa

SEQ ID NO: 344039 - DNA, 120 bp, Artificial Sequence
  ENSG00000138246_58 (sequence is synthesized)
ggccagtgccaagtccacattcctccagctgatacgttgaagcaaactcttactgcctttctcctggtttcatgacagtgttattcctttttctataaatatatttttaggaaaaaaagt

SEQ ID NO: 344040 - DNA, 120 bp, Artificial Sequence
  ENSG00000138246_59 (sequence is synthesized)
cagtgatcctaattgtatcacattataagaaagcactctgtggatcaacataagtgggtacacaagaattttttttttcttggtgtatgtaagcacatttgttcctttatatctgtttac

SEQ ID NO: 344041 - DNA, 120 bp, Artificial Sequence
  ENSG00000138246_60 (sequence is synthesized)
aaaactgtgaatcaaaaagacaaaactttcttcctagtttttgtaattttttttttgaactagcatgactgtagggttgagctacagtcaacaaaaattgggctaagtcacttttcccca

SEQ ID NO: 344042 - DNA, 120 bp, Artificial Sequence
  ENSG00000138246_61 (sequence is synthesized)
ggaaagaatatttccctctcctgcatcaagtctgcgtggccatcctccccccaccatccaagactattaggttttgtccctgcacccttcactggcatcctcaatcattaaccttctgaa

SEQ ID NO: 344043 - DNA, 120 bp, Artificial Sequence
  ENSG00000138246_62 (sequence is synthesized)
agctcacagtacacattagtatgtataactggctttaccaaattgaatgaaaaggagcttgtgcaaaaaaatttaaaaatggatgtcaagatgttatgtaaaagatgagtgtaattgtga

SEQ ID NO: 344044 - DNA, 120 bp, Artificial Sequence
  ENSG00000138246_63 (sequence is synthesized)
aatgttctatacactatcaaatatataaagctttctatattgaatgtacattatacagatcattcatatgtgtacataaaattttaaaaataaagggaattgactgctttgttaatgaga

SEQ ID NO: 344045 - DNA, 70 bp, Artificial Sequence
  ENSG00000138246_64 (sequence is synthesized)
ctctccagcctcagcctcacaagtagcttggattataggtttggtcaagaccatgccaggtcaaacctta

SEQ ID NO: 344046 - DNA, 120 bp, Artificial Sequence
  ENSG00000138246_65 (sequence is synthesized)
aaactggtttttcttaagttgactggtggttttgatttccacagtcccagattttcattgtaccaataagttcttgtttctgtttcataaattgttctcatagttactcaaacctttgtt

SEQ ID NO: 344047 - DNA, 120 bp, Artificial Sequence
  ENSG00000138246_66 (sequence is synthesized)
gtaaggtagtaggggccataggatcttgaaaagcagcactttatttttgtttggtgatgaggggaagatgaaagattctcacccagtctttctggaagatgttacatttgatctgaatct

SEQ ID NO: 344048 - DNA, 120 bp, Artificial Sequence
  ENSG00000138246_67 (sequence is synthesized)
tgaaggacaggcaggaattttctagctctggaaaggccttcctgggtggggaatagcatataaaaaggcatgtttggaaagcaacaaataattaaatatggttgggttataaggtatgga

SEQ ID NO: 344049 - DNA, 120 bp, Artificial Sequence
  ENSG00000138246_68 (sequence is synthesized)
tggggggtaattaggagttgcagctagagatgtatgcagacagtaataaaaaaccttctgtatcaggagggaggagctagatttttatctttttgtaaggaacacctgaaggattttttt

SEQ ID NO: 344050 - DNA, 120 bp, Artificial Sequence
  ENSG00000138246_69 (sequence is synthesized)
tagcaagagagcagtaatgtgatcaggtttgagtttttaaaaacccacactggtagtatgtggagaatagaagtaaaattagaggcaggtagaccaaattgtcacgtaagaaatgagttg

SEQ ID NO: 344051 - DNA, 120 bp, Artificial Sequence
  ENSG00000138246_70 (sequence is synthesized)
ctgagctagggtagtcacagggctaaagaagcagcacacctgaaagctgtttgcgcagtaaagatctaacttagtggcagcttgtacagagggagaaacaattgtttagtacagttttga

SEQ ID NO: 344052 - DNA, 120 bp, Artificial Sequence
  ENSG00000138246_71 (sequence is synthesized)
agtttctgattatctcagttttgtgtgtagtacctgggacttttccttatataaagtgttttaggcaagcttagtcgtacataaacataagtaaatacttctgtaaaaccttgcattccc

SEQ ID NO: 344053 - DNA, 120 bp, Artificial Sequence
  ENSG00000138246_72 (sequence is synthesized)
accacagcaagattagcccatggaaaggagttgttgcatagttgatacaaaacctcaaacaaatgtcatctatgtttagttttaaagtgttatttacactagatttgtcttcctaataat

SEQ ID NO: 344054 - DNA, 120 bp, Artificial Sequence
  ENSG00000138246_73 (sequence is synthesized)
tacaaccttattcacaaagaccatgaattaggaattggccagctctttcaatatagcagccacatttaaattcacatatgcccctcgatcatttttttgccatgttcaaaagtgaagctc

SEQ ID NO: 344055 - DNA, 120 bp, Artificial Sequence
  ENSG00000138246_74 (sequence is synthesized)
tttagtatgtttatgaaccaaagttatagagatatctatattgagaggatgctatttctaacagttacagaagcctgaaaagaaggtttttactgtccatctctaatgaatatgtaattt

SEQ ID NO: 344056 - DNA, 120 bp, Artificial Sequence
  ENSG00000138271_0 (sequence is synthesized)
agtagtcgcctggcaggagaatttgaaagggtgccccaaaggacaatctctaaaggggtaagggagatacctaccttgtctggtaggggagatgtttcgttttcatgctttaccagaaaa

SEQ ID NO: 344057 - DNA, 120 bp, Artificial Sequence
  ENSG00000138271_1 (sequence is synthesized)
tccacttccctgccgaccttagtttcaaagcttattcttaattagagacaagaaacctgtttcaacttgaagacaccgtatgaggtgaatggacagccagccaccacaatgaaagaaatc

SEQ ID NO: 344058 - DNA, 120 bp, Artificial Sequence
  ENSG00000138271_2 (sequence is synthesized)
aaaccaggaataacctatgctgaacccacgcctcaatcgtccccaagtgtttcctgacacgcatctttgcttacagtgcatcacaactgaagaatggggttcaacttgacgcttgcaaaa

SEQ ID NO: 344059 - DNA, 120 bp, Artificial Sequence
  ENSG00000138271_3 (sequence is synthesized)
ttaccaaataacgagctgcacggccaagagagtcacaattcaggcaacaggagcgacgggccaggaaagaacaccacccttcacaatgaatttgacacaattgtcttgccggtgctttat

SEQ ID NO: 344060 - DNA, 120 bp, Artificial Sequence
  ENSG00000138271_4 (sequence is synthesized)
ctcattatatttgtggcaagcatcttgctgaatggtttagcagtgtggatcttcttccacattaggaataaaaccagcttcatattctatctcaaaaacatagtggttgcagacctcata

SEQ ID NO: 344061 - DNA, 120 bp, Artificial Sequence
  ENSG00000138271_5 (sequence is synthesized)
atgacgctgacatttccatttcgaatagtccatgatgcaggatttggaccttggtacttcaagtttattctctgcagatacacttcagttttgttttatgcaaacatgtatacttccatc

SEQ ID NO: 344062 - DNA, 120 bp, Artificial Sequence
  ENSG00000138271_6 (sequence is synthesized)
tggggactctcggatgtacagcataaccttcacgaaggttttatctgtttgtgtttgggtgatcatggctgttttgtctttgccaaacatcatcctaacaaatggtcagccaacagagga

SEQ ID NO: 344063 - DNA, 120 bp, Artificial Sequence
  ENSG00000138271_7 (sequence is synthesized)
caatatccatgactgctcaaaacttaaaagtcctttgggggtcaaatggcatacggcagtcacctatgtgaacagctgcttgtttgtggccgtgctggtgattctgatcggatgttacat

SEQ ID NO: 344064 - DNA, 120 bp, Artificial Sequence
  ENSG00000138271_8 (sequence is synthesized)
agccatatccaggtacatccacaaatccagcaggcaattcataagtcagtcaagccgaaagcgaaaacataaccagagcatcagggttgttgtggctgtgttttttacctgctttctacc

SEQ ID NO: 344065 - DNA, 120 bp, Artificial Sequence
  ENSG00000138271_9 (sequence is synthesized)
atatcacttgtgcagaattccttttacttttagtcacttagacaggcttttagatgaatctgcacaaaaaatcctatattactgcaaagaaattacacttttcttgtctgcgtgtaatgt

SEQ ID NO: 344066 - DNA, 120 bp, Artificial Sequence
  ENSG00000138271_10 (sequence is synthesized)
ttgcctggatccaataatttactttttcatgtgtaggtcattttcaagaaggctgttcaaaaaatcaaatatcagaaccaggagtgaaagcatcagatcactgcaaagtgtgagaagatc

SEQ ID NO: 344067 - DNA, 120 bp, Artificial Sequence
  ENSG00000138271_11 (sequence is synthesized)
ggaagttcgcatatattatgattacactgatgtgtaggccttttattgtttgttggaatcgatatgtacaaagtgtaaataaatgtttcttttcattatccttgcttgagcccatcaaaa

SEQ ID NO: 344068 - DNA, 120 bp, Artificial Sequence
  ENSG00000138279_0 (sequence is synthesized)
cccggctccatcttgcgggagaccgggttgggctgtgacgctgctgctggggtcagaatgtcatacccaggctatcccccaacaggctacccacctttccctggatatcctcctgcaggt

SEQ ID NO: 344069 - DNA, 120 bp, Artificial Sequence
  ENSG00000138279_1 (sequence is synthesized)
caggagtcatcttttcccccttctggtcagtatccttatcctagtggctttcctccaatgggaggaggtgcctacccacaagtgccaagtagtggctacccaggagctggaggctaccct

SEQ ID NO: 344070 - DNA, 120 bp, Artificial Sequence
  ENSG00000138279_2 (sequence is synthesized)
gcgcctggaggttatccagcccctggaggctatcctggtgccccacagccagggggagctccatcctatcccggagttcctccaggccaaggatttggagtcccaccaggtggagcaggc

SEQ ID NO: 344071 - DNA, 120 bp, Artificial Sequence
  ENSG00000138279_3 (sequence is synthesized)
ttttctgggtatccacagccaccttcacagtcttatggaggtggtccagcacaggttccactacctggtggctttcctggaggacagatgccttctcagtatcctggaggacaacctact

SEQ ID NO: 344072 - DNA, 120 bp, Artificial Sequence
  ENSG00000138279_4 (sequence is synthesized)
taccctagtcagatcaatacagattctttttcttcctatcctgttttctctcctgtttctttggattatagcagtgaacctgccacagtgactcaggtcactcaaggaactatccgacca

SEQ ID NO: 344073 - DNA, 120 bp, Artificial Sequence
  ENSG00000138279_5 (sequence is synthesized)
gctgccaacttcgatgctataagagatgcagaaattcttcgtaaggcaatgaagggttttgggacagatgagcaggcaattgtggatgtggtggccaaccgttccaatgatcagaggcaa

SEQ ID NO: 344074 - DNA, 120 bp, Artificial Sequence
  ENSG00000138279_6 (sequence is synthesized)
aaaattaaagcagcatttaagacctcctatggcaaggatttaatcaaagatctcaaatcagagttaagtggaaatatggaagaactgatcctggccctcttcatgcctcctacgtattac

SEQ ID NO: 344075 - DNA, 120 bp, Artificial Sequence
  ENSG00000138279_7 (sequence is synthesized)
gatgcctggagcttacggaaagcaatgcagggagcaggaactcaggaacgtgtattgattgagattttgtgcacaagaacaaatcaggaaatccgagaaattgtcagatgttatcagtca

SEQ ID NO: 344076 - DNA, 120 bp, Artificial Sequence
  ENSG00000138279_8 (sequence is synthesized)
gaatttggacgagaccttgaaaaggacattaggtcagatacatcaggacattttgaacgtttacttgtgtccatgtgccagggaaatcgtgatgagaaccagagtataaaccaccaaatg

SEQ ID NO: 344077 - DNA, 120 bp, Artificial Sequence
  ENSG00000138279_9 (sequence is synthesized)
tcagcgtctctatcaagctggtgaggggagactagggaccgatgaatcttgctttaacatgatccttgccacaagaagctttcctcagctgagagctaccatggaggcttattctaggat

SEQ ID NO: 344078 - DNA, 120 bp, Artificial Sequence
  ENSG00000138279_10 (sequence is synthesized)
ggctaatcgagacttgttaagcagtgtgagccgtgagttttccggatatgtagaaagtggtttgaagaccatcttgcagtgtgccctgaaccgccctgccttctttgctgagaggctcta

SEQ ID NO: 344079 - DNA, 120 bp, Artificial Sequence
  ENSG00000138279_11 (sequence is synthesized)
ctatgctatgaaaggtgctggcacagatgactccaccctggtccggattgtggtcactcgaagtgagattgaccttgtacaaataaaacagatgttcgctcagatgtatcagaagactct

SEQ ID NO: 344080 - DNA, 120 bp, Artificial Sequence
  ENSG00000138279_12 (sequence is synthesized)
gggcacaatgattgcaggtgacacgagtggagattaccgaagacttcttctggctattgtgggccagtaggagggatttttttttttttaatgaaaaaaaatttctattcatagcttatc

SEQ ID NO: 344081 - DNA, 120 bp, Artificial Sequence
  ENSG00000138279_13 (sequence is synthesized)
cttcagagcaatgacctgcatgcagcaatatcaaacatcagctaaccgaaagagctttctgtcaaggaccgtatcagggtaatgtgcttggtttgcacatgttgttattgccttaattct

SEQ ID NO: 344082 - DNA, 120 bp, Artificial Sequence
  ENSG00000138279_14 (sequence is synthesized)
aattttattttgttctctacatacaatcaatgtaaagccatatcacaatgatacagtaatattgcaatgtttgtaaaccttcattcttactagtttcattctaatcaagatgtcaaattg

SEQ ID NO: 344083 - DNA, 120 bp, Artificial Sequence
  ENSG00000138279_15 (sequence is synthesized)
aataaaaatcacagcaatctctgattctgtgtaataatattgaataattttttagaaggttactgaaagctctgccttccggaatccctctaagtctgcttgatagagtggatagtgtgt

SEQ ID NO: 344084 - DNA, 120 bp, Artificial Sequence
  ENSG00000138279_16 (sequence is synthesized)
taaaactgtgtactttaaaaaaaaattcaacctttacatctagaataatttgcatctcattttgcctaaattggttctgtattcataaacactttccacatagaaaatagattagtatta

SEQ ID NO: 344085 - DNA, 120 bp, Artificial Sequence
  ENSG00000138279_17 (sequence is synthesized)
cctgtggcaccttttaagaaagggtcaaatgtttatatgcttaagatacatagcctacttttttttcgcagttgttttctttttttaaattgagttatgacaaataaaaaattgcatata

SEQ ID NO: 344086 - DNA, 120 bp, Artificial Sequence
  ENSG00000138279_18 (sequence is synthesized)
ttttttcatgtgtggtgaaaacacttaagatctactaccttagcaaattttaagtgttcagtacattattaactatagatactgtgctctacattaaacctctagcatttattcgtttta

SEQ ID NO: 344087 - DNA, 120 bp, Artificial Sequence
  ENSG00000138279_19 (sequence is synthesized)
taactgaaagtttataccctttgaccaacatctccccattttccccacctctcacctggacaaccaccactgtgtttaagttcagctattttagattccacgtataaatggtatacaata

SEQ ID NO: 344088 - DNA, 83 bp, Artificial Sequence
  ENSG00000138279_20 (sequence is synthesized)
cccttggtctatctagtcttgtcttgtcttttctttcaactggagtgcaatgatgcaaacacgactcactgccgccttgacct

SEQ ID NO: 344089 - DNA, 120 bp, Artificial Sequence
  ENSG00000138279_21 (sequence is synthesized)
agtgcaatgatgcaaacacgactcactgccgccttgacctcctggcctcaagcaattctcccacctcagcttcctgaatagtttggactacagaatgtcatacccaggctatcccccaac

SEQ ID NO: 344090 - DNA, 120 bp, Artificial Sequence
  ENSG00000138286_0 (sequence is synthesized)
acttccgcccccgcggcaaagcagggaggtcggaggactggagaggtggggaccctggggaggtggctgctcggagtctaggtgacggggcgagacggggccggtaggtggcgggagggg

SEQ ID NO: 344091 - DNA, 88 bp, Artificial Sequence
  ENSG00000138286_1 (sequence is synthesized)
ggggccgggccggagccggcgggagggccaggcccggaggcccccaccctggcgtgcctgccccggccgcggcttgatctccagatac

SEQ ID NO: 344092 - DNA, 120 bp, Artificial Sequence
  ENSG00000138286_2 (sequence is synthesized)
ggaaggcggtgccacagagcttggagctgaaaggaataacaaaacatgctcttaaccatcatccccctccagagaagctggaggaaatttcccccaccagtgacagtcatgagaaagaca

SEQ ID NO: 344093 - DNA, 120 bp, Artificial Sequence
  ENSG00000138286_3 (sequence is synthesized)
caagttcccaaagcaagtctgacatcacaagagaatcatcttttacatcagccgacactgggaattcactgtctgcttttccaagttatacaggcgcagggatatctactgaaggaagct

SEQ ID NO: 344094 - DNA, 120 bp, Artificial Sequence
  ENSG00000138286_4 (sequence is synthesized)
cggacttctcctggggatatggtgaactcgatcaaaatgccactgaaaaagtccagacaatgttcacagccattgatgaactcttgtatgagcagaagttgagtgtgcataccaagagtc

SEQ ID NO: 344095 - DNA, 120 bp, Artificial Sequence
  ENSG00000138286_5 (sequence is synthesized)
tacaagaagagtgccaacagtggacagctagctttcctcacctcaggattctaggtaggcagataatcactccaagtgaaggttatagattgtatcctagatccccttctgctgtttccg

SEQ ID NO: 344096 - DNA, 120 bp, Artificial Sequence
  ENSG00000138286_6 (sequence is synthesized)
cttcatatgaaacaaccttgtctcaagaaagagattctactatatttggtataaggggaaagaagttacatttttcatcttcttatgctcataaagcatcttccattgccaaatcctcca

SEQ ID NO: 344097 - DNA, 120 bp, Artificial Sequence
  ENSG00000138286_7 (sequence is synthesized)
gcttttgttctatggaaagagatgaggaagactctataatcgtctcagaaggaataattgaggaatacctagcattcgatcacatagatatagaagagggatttcatgggaagaaatcag

SEQ ID NO: 344098 - DNA, 120 bp, Artificial Sequence
  ENSG00000138286_8 (sequence is synthesized)
aagcagctacagagaaacagaaattagggtatcctcccattgctccattttactgcatgaaagaagatgtccttgcttatgtgtttgacagtgtatggtgcaaggttgtgagctgtatgg

SEQ ID NO: 344099 - DNA, 120 bp, Artificial Sequence
  ENSG00000138286_9 (sequence is synthesized)
agcagttgacacgtagtcactgggaaggatttgcctctgatgatgagagtaatgttgcagttaccagacccgattcagaaagttcctgtgtgctgagtgaactacatcctttggtgttac

SEQ ID NO: 344100 - DNA, 120 bp, Artificial Sequence
  ENSG00000138286_10 (sequence is synthesized)
cgcgagtgccacagtctaaggtgctgtacattacctcaaatccgatgagtctctgtcaagcaagcagacatcagccaaatgtgaatgatctcttggttcatggaatgcctctacagccaa

SEQ ID NO: 344101 - DNA, 120 bp, Artificial Sequence
  ENSG00000138286_11 (sequence is synthesized)
gaaatctctccctaatggacaagctcctagatcttgatgacaagctacttatgaggcctgggtccagtaccatcctttcaactcgaaattggccaaatcgagctgtggagtttagtacat

SEQ ID NO: 344102 - DNA, 120 bp, Artificial Sequence
  ENSG00000138286_12 (sequence is synthesized)
catctctgtcatacacagtgcagtccaccaggagacgcaatccaccaccacgaactcttcatccgatcagcacgagccattcatgtgctgaaacaccaagatctgtggaagaaatcctca

SEQ ID NO: 344103 - DNA, 120 bp, Artificial Sequence
  ENSG00000138286_13 (sequence is synthesized)
gaggagcccgagtcccagtggcacccgactcgctctcctctccctcaccgacgcccctgagtcgaaataatctgctaccacctattggcacagctgaagtggaacatgtgagcactgtgg

SEQ ID NO: 344104 - DNA, 120 bp, Artificial Sequence
  ENSG00000138286_14 (sequence is synthesized)
ggccacaaagacagatgaaaccccatggcgactctagtcgagctcaaagtgcggtggtggatgaacctaactatcagcagccacaagaaaggctccttttgcccgactttttccccaggc

SEQ ID NO: 344105 - DNA, 120 bp, Artificial Sequence
  ENSG00000138286_15 (sequence is synthesized)
ccaacacaactcaatcatttttgctggatacacagtatcgtcgctcatgtgcagttgagtatcctcatcaggcccgacctggcaggggatctgcaggtcctcagttacatgggtctacaa

SEQ ID NO: 344106 - DNA, 120 bp, Artificial Sequence
  ENSG00000138286_16 (sequence is synthesized)
aatctcaaagcggaggcagaccagtctctcgaaccaggcagggaccataaggcaaatgagaagaatctatcaggctgcaggaaacacgagatttcatgaagcagtattcagtcatcaagt

SEQ ID NO: 344107 - DNA, 120 bp, Artificial Sequence
  ENSG00000138286_17 (sequence is synthesized)
gatgcagagcttgtatagaagatcgactagaaatcatcttcatgaagagtgattttggcacaagtgaccgaagaacaaaacaccatagcagccaaaaatgacatgagtgttgtttctatc

SEQ ID NO: 344108 - DNA, 120 bp, Artificial Sequence
  ENSG00000138286_18 (sequence is synthesized)
tccagttactgtctctttcagcagaaattaacctatcccattggaaaggcaagtttgtacccaaagatgcaacagtgaataatacccaaatcactgctcatgttatctcttaacaatgat

SEQ ID NO: 344109 - DNA, 120 bp, Artificial Sequence
  ENSG00000138286_19 (sequence is synthesized)
cagttcaatcatataggatttgatgagctcacacatacacaaaaagcagcaaatcatcagtgacaatatcactggcttcagaatacttcagcctgtgttcatttctggagagttgtactc

SEQ ID NO: 344110 - DNA, 120 bp, Artificial Sequence
  ENSG00000138286_20 (sequence is synthesized)
agttttaagtcattttgctgttgaaaatctgacctcatcaaatagatgtcattcctaaaactctctttagatgtcctaccctatcagcagattaaaatggaaggggtgtgtaactaaaaa

SEQ ID NO: 344111 - DNA, 120 bp, Artificial Sequence
  ENSG00000138286_21 (sequence is synthesized)
cataaatgttaagcattagtataaagtaacttctgtaataaattatatcgcatattttttcagataggacagctcaaccttacgatgcctacctgatgccaggtgatgcttattttcttc

SEQ ID NO: 344112 - DNA, 120 bp, Artificial Sequence
  ENSG00000138286_22 (sequence is synthesized)
atattctcctgcagctctaaggaaaggaaatcaatttaaaaataatttgtagaatctactattgagccaccaaagtataattccctaaaagtttaagaaaccctggcaattaattcagca

SEQ ID NO: 344113 - DNA, 120 bp, Artificial Sequence
  ENSG00000138286_23 (sequence is synthesized)
taaacatatcctataaacagcaggagaggttcagctttctgattttactgtggaccttttcctaagggcattcatgaatgcagcaacagttttaactatggcttacatttattttaaatt

SEQ ID NO: 344114 - DNA, 120 bp, Artificial Sequence
  ENSG00000138286_24 (sequence is synthesized)
tcactaaatacaaatcttgattgtcatgccagttttagatcttattaattttcagaatggataaattcaaataatcataaattacggtaactttttattataccaaggtgttctaatgcc

SEQ ID NO: 344115 - DNA, 120 bp, Artificial Sequence
  ENSG00000138286_25 (sequence is synthesized)
atcatatgaagacagatgcttcaaacaacctgcattaaattatatttttaataaaattaaaatctatttttaacctatttgtagtcacaaaccgaaaacgtgtcgtctttaccttagagc

SEQ ID NO: 344116 - DNA, 120 bp, Artificial Sequence
  ENSG00000138286_26 (sequence is synthesized)
taaaggcttactttatgcatacggtatatttaatagtctacaaatcaaagatttaaacagtcccttaaaaattccatatattctcataccaactcatctacatagaaatgaaaatctcta

SEQ ID NO: 344117 - DNA, 120 bp, Artificial Sequence
  ENSG00000138286_27 (sequence is synthesized)
ttgttctcacaaaccattaccatgagttcactataacaactggatcaatatggcttgcctttcaaagttaaagaatcagaaaggggcctgtaagaagtcatttagcccaattccctcacc

SEQ ID NO: 344118 - DNA, 120 bp, Artificial Sequence
  ENSG00000138286_28 (sequence is synthesized)
ctgtgtgttttccctcaaagccagtgcaatttttttttaaccaaaaaactggacatgtttaatacatacagtttgacaaatttggatttcactctttgttttgatgtagtaactctttta

SEQ ID NO: 344119 - DNA, 120 bp, Artificial Sequence
  ENSG00000138286_29 (sequence is synthesized)
taaaagggaacagattcagacaagctcagtggcccaactgaagacattcagcaattaatggcaggacttcagtaatcagtggcaggactacaacatacatctcttcatgctagggaaacc

SEQ ID NO: 344120 - DNA, 120 bp, Artificial Sequence
  ENSG00000138286_30 (sequence is synthesized)
aggctctctattataaagctgaccagggctattgttttccccttttctctcatcctaaacaccattcatatttttcctaggtcacattttagtgggatcatttacaaagcccccagaact

SEQ ID NO: 344121 - DNA, 120 bp, Artificial Sequence
  ENSG00000138286_31 (sequence is synthesized)
taatcatcatgttttaccttttttattgaattatatacacctcttacaaaaatgcttgaagtaatttaacacctgtacatcagtacaaaacctggctgagtaaaatgaagagaggatcta

SEQ ID NO: 344122 - DNA, 120 bp, Artificial Sequence
  ENSG00000138286_32 (sequence is synthesized)
ttcaagatcattaagaccaaatgtaaactgggaagtatgtggaagatagctgtccagcaagtgtctggaaggtgttctagctgggtagagagcctattctaacagacacgcacatcgcag

SEQ ID NO: 344123 - DNA, 120 bp, Artificial Sequence
  ENSG00000138286_33 (sequence is synthesized)
aaagcagcatgaacagaaccacatcctagataagagttctgtgtacagaagatccatggaggcaagtgctgtcaggaaggacactgcctccctccaccctcccaaatgtcaccaccaagt

SEQ ID NO: 344124 - DNA, 120 bp, Artificial Sequence
  ENSG00000138286_34 (sequence is synthesized)
tccttcaggtgagacctcacacaatgtcaagtgctttctaggaaatactaagatcaggttgagagattctgcttggtctagtcaatctgaaaaattcaggctggaaagacaccttttctc

SEQ ID NO: 344125 - DNA, 120 bp, Artificial Sequence
  ENSG00000138286_35 (sequence is synthesized)
aagagctgaattgacttttgccttcaaatcctgcctgcaccttgcctacgatggcatcaatttacacctaaggacctttgaagagaaaaattccattatttcttttctttcttgagagca

SEQ ID NO: 344126 - DNA, 120 bp, Artificial Sequence
  ENSG00000138286_36 (sequence is synthesized)
gattttttccctcctcctttggaagatttgcagtactttgcttccatctgagccagaaaattgtccatttccttttgccgatccttttgtctgctctgtttgagaagttaaaacacaagc

SEQ ID NO: 344127 - DNA, 120 bp, Artificial Sequence
  ENSG00000138286_37 (sequence is synthesized)
tttcacaacattatccatagacagaaagtacctagtggttgccaggggctggaaaagtggaataactactaatgggtatggagtttttttggaatggtgaaaatgtcctacaattggtgt

SEQ ID NO: 344128 - DNA, 120 bp, Artificial Sequence
  ENSG00000138286_38 (sequence is synthesized)
taataattgtaaaactttgtaaatacacttaaaaccaccaaattgtacactttaaaaggacaaatagaaggtatgcggttatgtcttaaaagaagaaaacaaaatacaacattccaaaga

SEQ ID NO: 344129 - DNA, 120 bp, Artificial Sequence
  ENSG00000138286_39 (sequence is synthesized)
aaatattagcagtaggaatcagatcattaaagatgtggcaacaaactgccaagtttacctgaatggctgccttcaggctatccacgccttcatcaagccccaactcctttctgctcattt

SEQ ID NO: 344130 - DNA, 120 bp, Artificial Sequence
  ENSG00000138286_40 (sequence is synthesized)
ctgcttctttggcctcttcctgagcctgaaacaggaactcacatgagactcagggccaccaggaaatgcttaaaatacatactctttcccaaaagcaaatctataattctgtttcaattt

SEQ ID NO: 344131 - DNA, 120 bp, Artificial Sequence
  ENSG00000138286_41 (sequence is synthesized)
tatgaatatatgaatagacaaaatgaatcgaattacataactatgtcattcattaaatggcaacaatgctgacagcaagcagtagatcctctgattccaattaccatttgttttttaccc

SEQ ID NO: 344132 - DNA, 120 bp, Artificial Sequence
  ENSG00000138286_42 (sequence is synthesized)
aattctatttgctagaggtagtaagtactctggcactcataaatcacatgatgataaaaaggaacatgaggccgggtatggtggctcacaactgtaatccccataccttgggaggccaag

SEQ ID NO: 344133 - DNA, 120 bp, Artificial Sequence
  ENSG00000138286_43 (sequence is synthesized)
gtgggaggatcacttgaactcaggagttcaagacctgcctgggtaacatagtgagacctcagttctataaaaaagaaaagaaatgagcctggtgtggtggcatgtgcttgtagtcccagc

SEQ ID NO: 344134 - DNA, 90 bp, Artificial Sequence
  ENSG00000138286_44 (sequence is synthesized)
cagctactagggaggctgaggtgggaagatggcttcagtctgagagttcaggctgcaataagctgttggagatgccatctcttagaaaaa

SEQ ID NO: 344135 - DNA, 120 bp, Artificial Sequence
  ENSG00000138286_45 (sequence is synthesized)
ttcctagaatggtcttgatagttggggaaagaaaaggtggggggaataatagtttggcagacttaagattttatctagaggcttaacccagaataaaagttgagtttccaacaataaaaa

SEQ ID NO: 344136 - DNA, 120 bp, Artificial Sequence
  ENSG00000138286_46 (sequence is synthesized)
aaaaattaaagcatggggaaaaagtataaataaccaaattggaaatattaacttttggcaaagttggaaaaccaaacaggtatcttctccaaccgatcaagagtactgtcttctttcaac

SEQ ID NO: 344137 - DNA, 120 bp, Artificial Sequence
  ENSG00000138286_47 (sequence is synthesized)
gttcatggaatgcctctacagccaagaaatctctccctaatggacaagctcctgtaagaagttcaacattttcagactatacagtgtaaaagggaaacagagggaaagcaaaatcagttt

SEQ ID NO: 344138 - DNA, 120 bp, Artificial Sequence
  ENSG00000138286_48 (sequence is synthesized)
atcagtatgcatgtattgagtgccaaccaagcaaccacaaaaactcctggggagtaaaacatccaagggacatggtctccaccatcagggggctgataatgtaactggaaagagaagaca

SEQ ID NO: 344139 - DNA, 120 bp, Artificial Sequence
  ENSG00000138286_49 (sequence is synthesized)
tacgtgggtaaaaaaagacctaaccatatgtggcatttttgtaactgagtgccatgtgcgtgctgtccagaatgagtgctatgacagccccaaagcattctggtgggtaagtgtaggttt

SEQ ID NO: 344140 - DNA, 120 bp, Artificial Sequence
  ENSG00000138286_50 (sequence is synthesized)
taggaaagatagcagatcacttttgacatagaagaacggaaaataggtcagaactttaatgcttctgatcaaagataattgacaatcttctagaattaaaatagaccatggtgtgattag

SEQ ID NO: 344141 - DNA, 120 bp, Artificial Sequence
  ENSG00000138286_51 (sequence is synthesized)
cgggaaagaagtgactatggaactaatgaatgttaggaccagattgtggagagttttgagtgtcaggtttttgggattcatccacgttgttgtgtatgacctcctcccttgctgaggagt

SEQ ID NO: 344142 - DNA, 120 bp, Artificial Sequence
  ENSG00000138286_52 (sequence is synthesized)
attctattgtaatacacacaatttatccatctgctctcctgttaattaattaacaagggtcatttccaggttagaggtattacacataataaagttactctaaatattcttgtataggtc

SEQ ID NO: 344143 - DNA, 120 bp, Artificial Sequence
  ENSG00000138286_53 (sequence is synthesized)
aaaaatatcctcaaaggtatgagataataaggccacagcagtgttttcaatgcggcttccaagttaagcattattatgtggatgtagctatatctataccaacagagctataaatgcatt

SEQ ID NO: 344144 - DNA, 120 bp, Artificial Sequence
  ENSG00000138286_54 (sequence is synthesized)
catttggggatgagtagtcttgatgtataattaatctctcattccttctgacagtactttttttcaaagttgaaaagtaagttgctttgttacttctgggacatgaaagtatcattcagt

SEQ ID NO: 344145 - DNA, 120 bp, Artificial Sequence
  ENSG00000138286_55 (sequence is synthesized)
ttcaattactgtcttaaggataaggaatactgcaagctgctccagatcctactgaagggaatgaaggtttaggaactttacccgagaactatagttattagggaaaacgataaccagaag

SEQ ID NO: 344146 - DNA, 120 bp, Artificial Sequence
  ENSG00000138286_56 (sequence is synthesized)
gtccagaactgtcaagaattccatcatcagctgggaatttacaaatccaaatcagcagagaagtgcaataccagatagggacaaatgttttattccagttctgtgggagagaaaaggcca

SEQ ID NO: 344147 - DNA, 120 bp, Artificial Sequence
  ENSG00000138286_57 (sequence is synthesized)
gcttctgttgtgtacccagagtatagagcttcaaaacaaaatcagaaaacactattttaaaaactaattttccaaaaatcctgagatctctacttgaaaacataggtagcctaaagcttt

SEQ ID NO: 344148 - DNA, 120 bp, Artificial Sequence
  ENSG00000138286_58 (sequence is synthesized)
ctgtgcacattaaactcatctgcttcatttatctgatttctaatcaatttgctggtattgttataacttcatgctttcataccttcgtgtttgttggtgggatctgcagcccagtggcac

SEQ ID NO: 344149 - DNA, 120 bp, Artificial Sequence
  ENSG00000138286_59 (sequence is synthesized)
tctttcatattgcctctccatgtacttaccatacaacctaatgggcagtaattctgcaggatctgtgccctgatcttgatttatactgtgttttgtcaaaagtacaaacacagtgctaat

SEQ ID NO: 344150 - DNA, 120 bp, Artificial Sequence
  ENSG00000138286_60 (sequence is synthesized)
ttatgacgtggaattggagctgtttggcctgcacttaccatatctgccatggtcgatagggttttaactacataccacattacagatagttttcactgtttctgtaacttttgtctcctc

SEQ ID NO: 344151 - DNA, 120 bp, Artificial Sequence
  ENSG00000138303_0 (sequence is synthesized)
ctttctaccctcaatgccgagcacagaacctggggcagtgtttccactgtgcttccagtcccgagcatttcggatgaatgaatgatgaacaaacgacagaacgcagggcgagcagctcag

SEQ ID NO: 344152 - DNA, 120 bp, Artificial Sequence
  ENSG00000138303_1 (sequence is synthesized)
caaaggtcatgcaggagatagagaagcgctgtgtcatgagtattggatcattatggatttttttctttctcattgtgcagatctattcgcacaactctatcttcaaccagtttgccaggc

SEQ ID NO: 344153 - DNA, 120 bp, Artificial Sequence
  ENSG00000138303_2 (sequence is synthesized)
ccaccggaggtgcccagtaaaattttgtcaaacaaatactgatgatgaagtatcctgggacttggccctgtcagggcataattggaatatcatttggagaaagtgtcatggaagttctgc

SEQ ID NO: 344154 - DNA, 120 bp, Artificial Sequence
  ENSG00000138303_3 (sequence is synthesized)
gtccacagcttataagaattgatggccggaattacaggaagaatccagtccaagaacagacctatcaacatgaagaagatgaagaggacttctatcaaggctccatggagtgtgctgatg

SEQ ID NO: 344155 - DNA, 120 bp, Artificial Sequence
  ENSG00000138303_4 (sequence is synthesized)
agccctgtgatgcctacgaggtggagcagaccccacaaggattccggtctactttgagggcccccagcttgctctataagcatatagttggaaagagaggggacactaggaagaaaatag

SEQ ID NO: 344156 - DNA, 120 bp, Artificial Sequence
  ENSG00000138303_5 (sequence is synthesized)
aaatggagaccaaaacttctattagcattcctaaacctggacaagacggggaaattgtaatcactggccagcatcgaaatggtgtaatttcagcccgaacacggattgatgttcttttgg

SEQ ID NO: 344157 - DNA, 120 bp, Artificial Sequence
  ENSG00000138303_6 (sequence is synthesized)
ggttcaggaaggattcctgagattccaggaggaagtactggcgaagtgctccatggatcatggggttgacagcagcattttccagaatcctaaaaagcttcatctaactattgggatgtt

SEQ ID NO: 344158 - DNA, 120 bp, Artificial Sequence
  ENSG00000138303_7 (sequence is synthesized)
ggtgcttttgagtgaggaagagatccagcagacatgtgagatgctacagcagtgtaaagaggaattcattaatgatatttctgggggtaaacccctagaagtggagatggcagggataga

SEQ ID NO: 344159 - DNA, 120 bp, Artificial Sequence
  ENSG00000138303_8 (sequence is synthesized)
atacatgaatgatgatcctggcatggtggatgttctttacgccaaagtccatatgaaagatggctccaacaggctacaagaattagttgatcgagtgctggaacgttttcaggcatctgg

SEQ ID NO: 344160 - DNA, 120 bp, Artificial Sequence
  ENSG00000138303_9 (sequence is synthesized)
actaatagtgaaagagtggaatagtgtgaaactgcatgctacagttatgaatacactattcaggaaagaccccaatgctgaaggcaggtacaatctctacacagcggaaggcaaatatat

SEQ ID NO: 344161 - DNA, 120 bp, Artificial Sequence
  ENSG00000138303_10 (sequence is synthesized)
cttcaaggaaagagaatcatttgatggccgaaatattttaaagttgtttgagaacttctactttggctccctaaagctgaattcaattcacatctctcagaggttcaccgtagacagctt

SEQ ID NO: 344162 - DNA, 120 bp, Artificial Sequence
  ENSG00000138303_11 (sequence is synthesized)
tggaaactacgcttcctgtggacaaattgacttctcctgaggtggatcttggaaagcactagaaactaaacatcttcaccaggtgctgaagaaaagtgtcttcgttttaattgccaagca

SEQ ID NO: 344163 - DNA, 120 bp, Artificial Sequence
  ENSG00000138303_12 (sequence is synthesized)
gcactcggtcaaacccggcctggggaaatttcctatcgcacgtctgctgcagcagtctcctgtttctcctcctaccttctccatttttctagtccctgcagggcataattggaatatcat

SEQ ID NO: 344164 - DNA, 120 bp, Artificial Sequence
  ENSG00000138303_13 (sequence is synthesized)
tggatggtgactttcctgggtggttccccatagattcaccattgcctctaatggtgtctacacccgtcatactaccagctgagatggtggtgggcataaggagaatttgtgcctataacc

SEQ ID NO: 344165 - DNA, 120 bp, Artificial Sequence
  ENSG00000138303_14 (sequence is synthesized)
cttagtgtgttctggttttttttcttttaatttttaaattgtcgtaaaatactcataaaacatactgtcttcaccatttttaagtgcacagttcagtaacgttaactgttaatacattca

SEQ ID NO: 344166 - DNA, 120 bp, Artificial Sequence
  ENSG00000138303_15 (sequence is synthesized)
taatgctgtgtggccgtcaccgccgtccatctccataggcttctcagcttgtaaaatggaaactgtacccattaaacagtaattcccactcctcccagcccccgcagccaccattctgct

SEQ ID NO: 344167 - DNA, 120 bp, Artificial Sequence
  ENSG00000138303_16 (sequence is synthesized)
ctcctcccagcccccgcagccaccattctgctttctgtctctctggttttgactattctcagtatctcatataagtggaatcatacagtgacttgtctttttgtgactggcttatttcac

SEQ ID NO: 344168 - DNA, 120 bp, Artificial Sequence
  ENSG00000138303_17 (sequence is synthesized)
gtgtcaggtgacaggatttccttcctgtattatacatataatggaatgttccgttacatgtgcgtaccacactctgttcctccatcagtgaacacttggcttgcttcctcttgactattg

SEQ ID NO: 344169 - DNA, 120 bp, Artificial Sequence
  ENSG00000138303_18 (sequence is synthesized)
ggagtagtgctaatacagacacgggggtgcaaatatctctttgagactctgcctttaattcctttaccacccagagttttatctttagcaaaataaccattaaagttgtttgccttttac

SEQ ID NO: 344170 - DNA, 120 bp, Artificial Sequence
  ENSG00000138303_19 (sequence is synthesized)
ccccacccccaggaccagcctgagtggctgcgctcaccacgacgaggaccgcggcgtgttcgccccccaacagacggagccagcggcgaaggcggcgtgcgcgcgcccgtgccgtggtgg

SEQ ID NO: 344171 - DNA, 120 bp, Artificial Sequence
  ENSG00000138303_20 (sequence is synthesized)
gcgtggccggggcggagacgcgaggaggggagcagagaacgcgctcgcgtagaggaattccgggtcctcctcctcgccctaccttggtttacctgcagccgcctagtcctcttctccttc

SEQ ID NO: 344172 - DNA, 120 bp, Artificial Sequence
  ENSG00000138303_21 (sequence is synthesized)
gtctatcattttcctaccaaagtttgtcctcttaatatttgttggattcctgttccttcaccccatccccaccctcatcttcccatgcccctgatggagttgcagtgttgcagccctttt

SEQ ID NO: 344173 - DNA, 120 bp, Artificial Sequence
  ENSG00000138303_22 (sequence is synthesized)
ttgtttacttttcaaggcagcagcaaaagaaactgatgatatcagcaggactgtgcagagttccctggaagaatgtcagccacaggaggccctcactcctccctcaccacggaccagcag

SEQ ID NO: 344174 - DNA, 120 bp, Artificial Sequence
  ENSG00000138303_23 (sequence is synthesized)
agggaggcgggaatgctggggagccccagcctcccacccctgcctcctcacattcttcctccctccatgtcctctccttcttctccttccttattcttgccttgattctttctctcttta

SEQ ID NO: 344175 - DNA, 120 bp, Artificial Sequence
  ENSG00000138303_24 (sequence is synthesized)
tattctttaactgcacttctgaactctgtgttaagttgctacattgtgaggactgtgtctaacagtgagatttattattgggactgcacaaatcacttgtgaataaaatgtttaacggtg

SEQ ID NO: 344176 - DNA, 120 bp, Artificial Sequence
  ENSG00000138303_25 (sequence is synthesized)
gatttagctgagttcctcccttttatgtttcttggtgccttttgtgactaaatgccaaatctcagccctttaagcatgtcagagttagtgtgcctggggaataaagagcagttttaatag

SEQ ID NO: 344177 - DNA, 120 bp, Artificial Sequence
  ENSG00000138303_26 (sequence is synthesized)
ttcctcagaatttttgacatgacagtatgaaaacagtaattgtagtttttcaaattcagcaaagcttttgaaataggacaaagttaccctgccaaaaatctgcagtgcatgcaaaaattt

SEQ ID NO: 344178 - DNA, 120 bp, Artificial Sequence
  ENSG00000138303_27 (sequence is synthesized)
ccagcgagtaaaataaagcaagcctccccaaccttcttctcctgatttctcccatcacatgcatttgtttaaaaagtgcaaaactgatttacttctgagaagagactacttcttaaaaaa

SEQ ID NO: 344179 - DNA, 120 bp, Artificial Sequence
  ENSG00000138303_28 (sequence is synthesized)
acaaaaagggtacttctgttaaatctctgtgatatttctgggggtaaacccctagaagtggagatggcagggatagaatacatgaatgatgatcctggcatggtggatgttctttacgcc

SEQ ID NO: 344180 - DNA, 120 bp, Artificial Sequence
  ENSG00000138303_29 (sequence is synthesized)
agcagtctcctgtttctcctcctaccttctccatttttctagtccctgcaggtaggatcctgggggttaactcccttttcaccaagctcccgagggccctcgacccctcggcctcttacc

SEQ ID NO: 344181 - DNA, 120 bp, Artificial Sequence
  ENSG00000138303_30 (sequence is synthesized)
attccggtctactttgagggcccccagcttgctctataatctcattcacttgaacacatcaaacgactgtgggttccagaagataactttggattgtcagaatatttatacttggaagtc

SEQ ID NO: 344182 - DNA, 120 bp, Artificial Sequence
  ENSG00000138303_31 (sequence is synthesized)
cctatcgcacgtctgctgcagcagtctcctgtttctcctcctaccttctccatttttctagtccctgcagatggtaattatatttttcagggcataattggaatatcatttggagaaagt

SEQ ID NO: 344183 - DNA, 120 bp, Artificial Sequence
  ENSG00000138303_32 (sequence is synthesized)
caagatgggaggattgcttgagcccatgagttggagaccacccagcttgggcaacatggcatatagttggaaagagaggggacactaggaagaaaatagaaatggagaccaaaacttcta

SEQ ID NO: 344184 - DNA, 120 bp, Artificial Sequence
  ENSG00000138303_33 (sequence is synthesized)
atgcgcactcggtcaaacccggcctggggaaatttcctatcgcacgtctgctgcagcagtctcctgtttctcctcctaccttctccatttttctagtccctgcagggcctcggcttccct

SEQ ID NO: 344185 - DNA, 120 bp, Artificial Sequence
  ENSG00000138303_34 (sequence is synthesized)
aatagaaatggagaccaaaacttctattagcattcctaaacctggacaagacggggaaattgagaaatcagagaaggaaatgatctggtagcttttaatcctctagacaaggatctggtc

SEQ ID NO: 344186 - DNA, 120 bp, Artificial Sequence
  ENSG00000138303_35 (sequence is synthesized)
ttctccacctccaaccactgtagagacagagtttcagtaaattgcctaggctgtctggaactcctggcctcaggcaatcctcctgccttggcctttgccccagagtgctgggattacagt

SEQ ID NO: 344187 - DNA, 120 bp, Artificial Sequence
  ENSG00000138303_36 (sequence is synthesized)
agtaccttcagcatcggatcaggagtcacacattcaagccatatgcagctcttccttccaagactcgtggttcaaaatacactagcagcaccaagctgaaggcaggtacaatctctacac

SEQ ID NO: 344188 - DNA, 85 bp, Artificial Sequence
  ENSG00000138303_37 (sequence is synthesized)
tcatggggttgacagcagcattttccagaatcctaaaaagcttcatctaactattgggatgttggtgcttttgagtgaggaagag

SEQ ID NO: 344189 - DNA, 63 bp, Artificial Sequence
  ENSG00000138303_38 (sequence is synthesized)
ctcactctgctgtcaagctatcctcctgcttcagcctcccgagttgctgggactacaagtgca

SEQ ID NO: 344190 - DNA, 120 bp, Artificial Sequence
  ENSG00000138303_39 (sequence is synthesized)
tgcatgccaccatgcccagctaatttaaaaaatttttcttgtagagacgaggtattgctatattgctcaagtggatcttgaacttctggcctcaagtgatcttccctctttggcctccca

SEQ ID NO: 344191 - DNA, 75 bp, Artificial Sequence
  ENSG00000138303_40 (sequence is synthesized)
agacgaggtattgctatattgctcaagtggatcttgaacttctggcctcaagtgatcttccctcacgcgccacta

SEQ ID NO: 344192 - DNA, 90 bp, Artificial Sequence
  ENSG00000138303_41 (sequence is synthesized)
agtgatcacacagacatgagccactgcacccggccccttctaattttggatttgccacttagttttgtgaagttggtcaagttttgtaac

SEQ ID NO: 344193 - DNA, 120 bp, Artificial Sequence
  ENSG00000138303_42 (sequence is synthesized)
tttgccacttagttttgtgaagttggtcaagttttgtaacttctctgtgccttggcttctgtattggtaaatagggataataattggttatgaggattaaatgatttaacagataaaaag

SEQ ID NO: 344194 - DNA, 120 bp, Artificial Sequence
  ENSG00000138303_43 (sequence is synthesized)
tgcttagaactgtgcctgacacatcatagtgatgttgactgttgaagtagccacctagctgactgacctctgtagctgttcctcttctaaagcccttcccactctgctattgagtcagct

SEQ ID NO: 344195 - DNA, 120 bp, Artificial Sequence
  ENSG00000138303_44 (sequence is synthesized)
ttcaaaaatggacatcagaccacataattcccttttgaaagtctttctgtggcttccctaatctgaccactgcttatagacttagctcatctccattgtcccttttctgtcactctctgt

SEQ ID NO: 344196 - DNA, 120 bp, Artificial Sequence
  ENSG00000138303_45 (sequence is synthesized)
cataactgtattgtaaataattgacagttttttgaatatgctgtgatcttgcatgccttggcatctttgcacttgctgtttcttcttctacttgaagtgcccctccttccctggtgttat

SEQ ID NO: 344197 - DNA, 120 bp, Artificial Sequence
  ENSG00000138303_46 (sequence is synthesized)
ttgcaaatctttaatgatcattccagactatgtctaaacctcctgtggaaacctggccctctccatgtagagttgatcactcccttcacgctcaccataatatattgccatcatttattt

SEQ ID NO: 344198 - DNA, 120 bp, Artificial Sequence
  ENSG00000138303_47 (sequence is synthesized)
ctactatctgttaagcagacaaacaagactgatctttagctccatgatggtgggagatgagtctcttattcttcctcctgtgatgcagggctttgtatggtgattagcacagagcacatg

SEQ ID NO: 344199 - DNA, 120 bp, Artificial Sequence
  ENSG00000138303_48 (sequence is synthesized)
atatcttcaaggaaagagaatcatttgatggccgaaatattttaaagagctttgccttgttgcccaggctggagtacaatgatgcaatctccgctcactgcaacctgtgcctcccgggtt

SEQ ID NO: 344200 - DNA, 120 bp, Artificial Sequence
  ENSG00000138303_49 (sequence is synthesized)
gcctcggcttccctcacgatattgcagaaagacacagctttcctcttcctctccaaaccacctcgaagcagggttaaggcataattggaatatcatttggagaaagtgtcatggaagttc

SEQ ID NO: 344201 - DNA, 120 bp, Artificial Sequence
  ENSG00000138308_0 (sequence is synthesized)
gaatgttccagataatccctttcccagtcctgcctgacatctgggtagggggtttgtccctggaattctgggacactggctggggtttgaggagagaagccagtacctacctggctgcag

SEQ ID NO: 344202 - DNA, 120 bp, Artificial Sequence
  ENSG00000138308_1 (sequence is synthesized)
gatgaagctggccagtggcttcttggttttgtggctcagccttgggggtggcctggctcagagcgacacgagccctgacacggaggagtcctattcagactggggccttcggcacctccg

SEQ ID NO: 344203 - DNA, 120 bp, Artificial Sequence
  ENSG00000138308_2 (sequence is synthesized)
gggaagctttgaatccgtcaatagctacttcgattcttttctggagctgctgggagggaagaatggagtctgtcagtacaggtgccgatatggaaaggcaccaatgcccagacctggcta

SEQ ID NO: 344204 - DNA, 120 bp, Artificial Sequence
  ENSG00000138308_3 (sequence is synthesized)
caagccccaagagcccaatggctgcggctcctatttcctgggtctcaaggtaccagaaagtatggacttgggcattccagcaatgacaaagtgctgcaaccagctggatgtctgttatga

SEQ ID NO: 344205 - DNA, 120 bp, Artificial Sequence
  ENSG00000138308_4 (sequence is synthesized)
cacttgcggtgccaacaaatatcgctgtgatgcaaaattccgatggtgtctccactcgatctgctctgaccttaagcggagtctgggctttgtctccaaagtggaagcagcctgtgattc

SEQ ID NO: 344206 - DNA, 120 bp, Artificial Sequence
  ENSG00000138308_5 (sequence is synthesized)
cctggttgacactgtgttcaacaccgtgtggaccttgggctgccgcccctttatgaatagtcagcgggcagcttgcatctgtgcagaggaggagaaggaagagttatgaggaagaagtga

SEQ ID NO: 344207 - DNA, 120 bp, Artificial Sequence
  ENSG00000138308_6 (sequence is synthesized)
ttcctggttttgagtgacaccacagctgtcagccttcaagatgtcaagtcttcgagtcagcgtgactcattcgttcttccaacagtttggacaccacaaagcaggagaaagggaacattt

SEQ ID NO: 344208 - DNA, 120 bp, Artificial Sequence
  ENSG00000138308_7 (sequence is synthesized)
ttctacagctggaaagtgagtcctatcctttgaggaaatttgaaaaaagacatggagtggtttgaaagctactcttcatttaagactgctctccccaaccaagacacatttgcctggaaa

SEQ ID NO: 344209 - DNA, 120 bp, Artificial Sequence
  ENSG00000138308_8 (sequence is synthesized)
ttcagttcttagcttaaagactaaaatgcaagcaaaccctgcaattcctggacctgatagttatattcatgagtgaaattgtggggagtccagccatttgggaggcaatgactttctgct

SEQ ID NO: 344210 - DNA, 120 bp, Artificial Sequence
  ENSG00000138308_9 (sequence is synthesized)
ggcccatgtttcagttgccagtaagcttctcacatttaataaagtgtactttttagaacatttggaaagagatgaatgaattccattatcaccaatgtgcttccatttcacttagaagag

SEQ ID NO: 344211 - DNA, 120 bp, Artificial Sequence
  ENSG00000138308_10 (sequence is synthesized)
accaaaactgaacctggtaagttccaccaatgaccacagttattcccactgatgctaaacagagaaaaacaggtgggcaggctcagaggcttacctgattaaggccaacggaggggaagg

SEQ ID NO: 344212 - DNA, 120 bp, Artificial Sequence
  ENSG00000138308_11 (sequence is synthesized)
tcagatggaattaggtctctgaggattcatttttccctccggtgacctaccccattggtattcccagttactaaatggtgttagagtcatgctaagatctgagatgtacttgctaagagt

SEQ ID NO: 344213 - DNA, 120 bp, Artificial Sequence
  ENSG00000138308_12 (sequence is synthesized)
tactgatggagctagctaggaaaagtccctgcagcctgtcgggagtgagagacaagtggccattccctaacttgcgggtctcaagcctaactatggattagaatcacctgaggatccttt

SEQ ID NO: 344214 - DNA, 120 bp, Artificial Sequence
  ENSG00000138311_0 (sequence is synthesized)
agtctgatttacggctctgctgaaaaccgcttcgctcccgcagcatcagcaccggaggcggcggctgcagcagcagcagcaacaagtcgggacttttagagtaatgcaacagaaggcttt

SEQ ID NO: 344215 - DNA, 120 bp, Artificial Sequence
  ENSG00000138311_1 (sequence is synthesized)
tgaggaaagcagatatccctggcaggagtcctttgagaatgttgctgtgtgcctgccattacgctgcccgaggtgtggagaccataccagatttagaagcttgtcatccttgagggccca

SEQ ID NO: 344216 - DNA, 120 bp, Artificial Sequence
  ENSG00000138311_2 (sequence is synthesized)
tctggagttcagtcacagctacgaagaaagaaccctcttgacaaaatgcagtctctttccatccctcaaagacacagacctagtcacttcctcagaactcctgaaaccgggaaaattgca

SEQ ID NO: 344217 - DNA, 120 bp, Artificial Sequence
  ENSG00000138311_3 (sequence is synthesized)
gagcagtggcaacgtggtaaagcagaaaccgagctatgttaacttgtacagcatttcacatgaacattccaaggacaggaagccatttgaggtggtggcagagaggcctgtgtcctatgt

SEQ ID NO: 344218 - DNA, 120 bp, Artificial Sequence
  ENSG00000138311_4 (sequence is synthesized)
gcagacctacactgccatggacctccatgcagactcgctggatgggacacggtcgggtcctggactgcccacctcagacaccaaagcttctttcgaggcacatgtcagagaaaaattcaa

SEQ ID NO: 344219 - DNA, 120 bp, Artificial Sequence
  ENSG00000138311_5 (sequence is synthesized)
tcgaatggttgaggctgtggataggaccattgagaagagaattgataaactcaccaaagagttggcccagaaaactgcggaactgttggaagttcgggcagcttttgtgcagctgactca

SEQ ID NO: 344220 - DNA, 120 bp, Artificial Sequence
  ENSG00000138311_6 (sequence is synthesized)
gaaaaagcaggaagttcagagacgagagcgggccttaaacagacaggtggacgtggccgtggaaatgatagctgtactgaggcaacgcctgacggaatctgaggaggagcttcttaggaa

SEQ ID NO: 344221 - DNA, 120 bp, Artificial Sequence
  ENSG00000138311_7 (sequence is synthesized)
agaagaagaagttgtcacattcaaccatttcctggaagcggcagctgagaaggaggttcaagggaaagcccggctccaggactttattgagaatctgttacagcgggtagaactggcgga

SEQ ID NO: 344222 - DNA, 120 bp, Artificial Sequence
  ENSG00000138311_8 (sequence is synthesized)
gaagcagcttgagtactatcagagccagcaggcctctggctttgtccgtgatctcagcgggcacgtgcttacagacatctcctcaaataggaagcccaaatgcctaagccgagggcaccc

SEQ ID NO: 344223 - DNA, 120 bp, Artificial Sequence
  ENSG00000138311_9 (sequence is synthesized)
gcattcggtatgtaaccaccctgatctcaaggcccatttccacccaaagggaaggaaccacctgaaaaaggccaaggatgacagagccagcatgcagcctgccaaggccattcacgaaca

SEQ ID NO: 344224 - DNA, 120 bp, Artificial Sequence
  ENSG00000138311_10 (sequence is synthesized)
ggctgagtcctcaagagacctctgcagacctccaaagaaaggggagctcctggggtttggccgcaaaggcaacatcaggcccaaaatggctaaaaaaaagccaacagccattgtgaacat

SEQ ID NO: 344225 - DNA, 120 bp, Artificial Sequence
  ENSG00000138311_11 (sequence is synthesized)
catctaaaagggtgggtggtgctggaccaatcatcgctgggctttggggaacgttgttccaggagccaacagtaatgtctttctggaaacattccatagtaagacacattggaaaagcca

SEQ ID NO: 344226 - DNA, 120 bp, Artificial Sequence
  ENSG00000138311_12 (sequence is synthesized)
agggcataacacaggcaagcacctcaattaaccagagcttagcaaatgggaatcttagtgaaccagaattttattataacccccttttagaagcttgcaaattacagaaagaataaaaaa

SEQ ID NO: 344227 - DNA, 120 bp, Artificial Sequence
  ENSG00000138311_13 (sequence is synthesized)
attaaatcaatcttaaagctctaacttctaaagtaactggcccagtctccagtaatcttggcatctgggcttctatgcagtggtcactaattttcaggaccaaggccacacaaaatgtca

SEQ ID NO: 344228 - DNA, 120 bp, Artificial Sequence
  ENSG00000138311_14 (sequence is synthesized)
ggcctagggagaaaattcatctgtgcccactgctctccaaagtgcgaggcaaggaatggcagtgtaaagttctgttaatagcagtaaaatgaaaatatttgtgtttgtgtataaccttcc

SEQ ID NO: 344229 - DNA, 120 bp, Artificial Sequence
  ENSG00000138311_15 (sequence is synthesized)
cctcagctaatttgaaagcctccaaaataaggattcccattccccgagtattctggttaatcaagatttcaatttctgggttgctcaagggactcgttcagtcagacttcagttctcatt

SEQ ID NO: 344230 - DNA, 120 bp, Artificial Sequence
  ENSG00000138311_16 (sequence is synthesized)
ttgattgaggttttttggtggcctagatgcatgtttattcagattttggtacacctctgccgtcttctttggctgagtattctgcacccacagaccatgctgccagcctctatcttaata

SEQ ID NO: 344231 - DNA, 120 bp, Artificial Sequence
  ENSG00000138311_17 (sequence is synthesized)
gctgcttctgtggatatggctggggagcgaagtaaaatcctcttttgattagcacccagcatgggctgggtggctaggtggttggaatgacagtggactgcacgcttggtgcatcgtgca

SEQ ID NO: 344232 - DNA, 120 bp, Artificial Sequence
  ENSG00000138311_18 (sequence is synthesized)
tcgtgaccatcctggaagcactgcgggtgtcgccaagccctttcctaagacctgcttcccggccagtgtcagtggccctctctctctctgctatgggcatgactttctcttcgctggctt

SEQ ID NO: 344233 - DNA, 120 bp, Artificial Sequence
  ENSG00000138311_19 (sequence is synthesized)
aacttttccactgggtggttcactttgcctcctgctgcttctgtgccctgttaagggcttcaggtatctttcaaccaagtatctggagtgttcactctatgttgcattctaaagtaattt

SEQ ID NO: 344234 - DNA, 120 bp, Artificial Sequence
  ENSG00000138311_20 (sequence is synthesized)
ctgaaataaacaatgcatgtaggagccagaatctgacactgtcttcccctccttccctccctaaaatggctttagtttccacaaagagctgttaagaatttcctgctgtatgattttcct

SEQ ID NO: 344235 - DNA, 120 bp, Artificial Sequence
  ENSG00000138311_21 (sequence is synthesized)
caagaatgaatttccatgttattttttccttaaatttagcaatatcatcaggtctcttgcagagtttacaagtgctgacattcttctgaaaacaggaataattttgtccacaaatatata

SEQ ID NO: 344236 - DNA, 120 bp, Artificial Sequence
  ENSG00000138311_22 (sequence is synthesized)
catatatataacacatacaaaatatatatgttaagtatattaataatttatttttaaatactcatggagaaagtgtgtgtttgtggtgggtggtttttaaactatatatgtttgttcatg

SEQ ID NO: 344237 - DNA, 120 bp, Artificial Sequence
  ENSG00000138311_23 (sequence is synthesized)
tgttcatgtaaactgaattctcttatttaaaaaatcaaaactgtaacgtaattaacattggcagaattatgattgttactgcaataagcatcaaattagcagcgcattaaaaataggaaa

SEQ ID NO: 344238 - DNA, 120 bp, Artificial Sequence
  ENSG00000138311_24 (sequence is synthesized)
taaagcagttgcttaaaatgccagtcaattgaaaagtgtaacttatcattatacaaacattctgaacctaccataatgaaaatgttcttgaatcttcactttgactttcagtttatgggg

SEQ ID NO: 344239 - DNA, 120 bp, Artificial Sequence
  ENSG00000138311_25 (sequence is synthesized)
ggggtagatcattcatgtgatatataagcagctatcaagtgggcaaaaacattgctgtgaatagcactgtttaggctaacattgtaaaaattgtaatgttataattattatttatttgga

SEQ ID NO: 344240 - DNA, 120 bp, Artificial Sequence
  ENSG00000138311_26 (sequence is synthesized)
gaattaacttccccctctaaagttatttattattgatgcttataccatgattgcaccttagccttttacatactaaaaacatgacttgttagttgtattgcatgctctttgtcctgtaat

SEQ ID NO: 344241 - DNA, 120 bp, Artificial Sequence
  ENSG00000138311_27 (sequence is synthesized)
gtgtgtgcaatgacaacttgtttctgttttatttaaagtaactgacattttggattttcatctaacatagagggcatggcaactctctttgacagtggtaccccatgatcttcagaaagt

SEQ ID NO: 344242 - DNA, 120 bp, Artificial Sequence
  ENSG00000138311_28 (sequence is synthesized)
accataatgtcatcctactctacatttcacaagacgaattattttgagatttgtttattatattaaaatgtttttttacgttcccactaaattttgaccccatataaagaaatgtgttat

SEQ ID NO: 344243 - DNA, 120 bp, Artificial Sequence
  ENSG00000138311_29 (sequence is synthesized)
gtatgttgtgcctccttagagacataaatttagtgtcaaaacatgggagatggcttactcagaagcatactccacttaacataccatggcctgagctaagtaccatgtcctgtttgtgtc

SEQ ID NO: 344244 - DNA, 120 bp, Artificial Sequence
  ENSG00000138311_30 (sequence is synthesized)
ttatttttaaatattttctttgtccacatgggccgttgaccttagagttaaggcggttgcttttttgaagaaatcaccaaagtttctgggaaactatgttcaaggttgaaatggagagta

SEQ ID NO: 344245 - DNA, 120 bp, Artificial Sequence
  ENSG00000138311_31 (sequence is synthesized)
gatttaattttatttgtcttgtagggaagaaatcttcctttgaaccgcttttcttgctttttccctttttcccaaactaggttacaggttcttatctgcaaggttcaagttgcttagaca

SEQ ID NO: 344246 - DNA, 120 bp, Artificial Sequence
  ENSG00000138311_32 (sequence is synthesized)
ttgttttccagtattctgcagggccagtcagttgtacagaagttggaatattctgttccagaattaaagaagtttttagattatgaaatattatgataataaagctatatttctgactaa

SEQ ID NO: 344247 - DNA, 120 bp, Artificial Sequence
  ENSG00000138311_33 (sequence is synthesized)
cgggcacgtgagctggaaaggtgctggcgaagctcgcctggtgtgccaaaatgacctggaattggaggagtctgcgattgtggaataatgaacttcgaatgatgtgattctggatgagga

SEQ ID NO: 344248 - DNA, 120 bp, Artificial Sequence
  ENSG00000138311_34 (sequence is synthesized)
cttggatcaagagaatcgcaaattaattgtgccagagaagctttcattcattcaacaaatatttattaagcatgttttacactccaggaactttacaagaaacttgggctacttggtgac

SEQ ID NO: 344249 - DNA, 120 bp, Artificial Sequence
  ENSG00000138311_35 (sequence is synthesized)
tttactcaccaggagtgggttcagactcctgatggatgagctccaggtcctccctaacaagactgcagacttcctgagggcacagcccacccctcatgctttgagtttctcatataaccc

SEQ ID NO: 344250 - DNA, 120 bp, Artificial Sequence
  ENSG00000138311_36 (sequence is synthesized)
atcatagcaagtagaagatgcttcagaacatttgtccctatgagatagagtcatattctatttagcttgggacatggcaggtactcagttgttaaataaaaaatagttattgagtaattt

SEQ ID NO: 344251 - DNA, 120 bp, Artificial Sequence
  ENSG00000138311_37 (sequence is synthesized)
ttgcaggcttaatgccactgtgcatagcttgagtaatctttcctgtacttgaggataggtcctgagcttgctgtcttaggacccattttgacaattcatgtgagttttcatatgttcttg

SEQ ID NO: 344252 - DNA, 120 bp, Artificial Sequence
  ENSG00000138311_38 (sequence is synthesized)
tgttcacgcatctcggattgtatccttaaaatggggcacggttttgcatttagtgtgccaaattcaggaggggaggaaacttgaattccacttctggatctaccactttccatctgacct

SEQ ID NO: 344253 - DNA, 120 bp, Artificial Sequence
  ENSG00000138311_39 (sequence is synthesized)
tgtctagtttttctgcaagccccacctgtgccctggatcattttagccagctttctctggattctcggaaatccctggacgtcttccacggctactgcaggatttagccaaatttgggtg

SEQ ID NO: 344254 - DNA, 120 bp, Artificial Sequence
  ENSG00000138311_40 (sequence is synthesized)
ctatttcccttttgtggagggacttttcatcacaatgagaaggacgtcttaggactccaggactttgagagagaaagtgtctctacaagtcaaagcaggaatatcagccttcttacacta

SEQ ID NO: 344255 - DNA, 120 bp, Artificial Sequence
  ENSG00000138311_41 (sequence is synthesized)
ggacaactccaaaattgtgtgattggcaaattgacaatcatcgatttgttgactgaacacctgttaggtgtaaggcacggtgtcatatgctttccttggggcttgccttcaagcagctaa

SEQ ID NO: 344256 - DNA, 120 bp, Artificial Sequence
  ENSG00000138315_0 (sequence is synthesized)
gacaaaggaacaccagtattaagaggattttccagtgtttctggcagttggtccagaaggatgcctccattcctgcttctcacctgcctcttcatcacaggcacctccgtgtcacccgtg

SEQ ID NO: 344257 - DNA, 120 bp, Artificial Sequence
  ENSG00000138315_1 (sequence is synthesized)
gccctagatccttgttctgcttacatcagcctgaatgagccctggaggaacactgaccaccagttggatgagtctcaaggtcctcctctatgtgacaaccatgtgaatggggagtggtac

SEQ ID NO: 344258 - DNA, 120 bp, Artificial Sequence
  ENSG00000138315_2 (sequence is synthesized)
cacttcacgggcatggcgggagatgccatgcctaccttctgcataccagaaaaccactgtggaacccacgcacctgtctggctcaatggcagccaccccctagaaggcgacggcattgtg

SEQ ID NO: 344259 - DNA, 120 bp, Artificial Sequence
  ENSG00000138315_3 (sequence is synthesized)
caacgccaggcttgtgccagcttcaatgggaactgctgtctctggaacaccacggtggaagtcaaggcttgccctggaggctactatgtgtatcgtctgaccaagcccagcgtctgcttc

SEQ ID NO: 344260 - DNA, 120 bp, Artificial Sequence
  ENSG00000138315_4 (sequence is synthesized)
cacgtctactgtggtcatttttatgacatctgcgacgaggactgccatggcagctgctcagataccagcgagtgcacatgcgctccaggaactgtgctaggccctgacaggcagacatgc

SEQ ID NO: 344261 - DNA, 120 bp, Artificial Sequence
  ENSG00000138315_5 (sequence is synthesized)
tttgatgaaaatgaatgtgagcaaaacaacggtggctgcagtgagatctgtgtgaacctcaaaaactcctaccgctgtgagtgtggggttggccgtgtgctaagaagtgatggcaagact

SEQ ID NO: 344262 - DNA, 120 bp, Artificial Sequence
  ENSG00000138315_6 (sequence is synthesized)
tgtgaagacgttgaaggatgccacaataacaatggtggctgcagccactcttgccttggatctgagaaaggctaccagtgtgaatgtccccggggcctggtgctgtctgaggataaccac

SEQ ID NO: 344263 - DNA, 120 bp, Artificial Sequence
  ENSG00000138315_7 (sequence is synthesized)
acttgccaagtccctgtgttgtgcaaatcaaatgccattgaagtgaacatccccagggagctggttggtggcctggagctcttcctgaccaacacctcctgccgaggagtgtccaacggc

SEQ ID NO: 344264 - DNA, 120 bp, Artificial Sequence
  ENSG00000138315_8 (sequence is synthesized)
acccatgtcaacatcctcttctctctcaagacatgtggtacagtggtcgatgtggtgaatgacaagattgtggccagcaacctcgtgacaggtctacccaagcagaccccggggagcagc

SEQ ID NO: 344265 - DNA, 120 bp, Artificial Sequence
  ENSG00000138315_9 (sequence is synthesized)
gtttccacgcctgtacaccatttctgaaggatacgttcccaaccttcgaaactccccactggaaatcatgagccgaaatcatgggatcttcccattcactctggagatcttcaaggacaa

SEQ ID NO: 344266 - DNA, 120 bp, Artificial Sequence
  ENSG00000138315_10 (sequence is synthesized)
tgagtttgaagagccttaccgggaagctctgcccaccctcaagcttcgtgactccctctactttggcattgagcccgtggtgcacgtgagcggcttggaaagcttggtggagagctgctt

SEQ ID NO: 344267 - DNA, 120 bp, Artificial Sequence
  ENSG00000138315_11 (sequence is synthesized)
tgccacccccacctccaagatcgacgaggtcctgaaatactacctcatccgggatggctgtgtttcagatgactcggtaaagcagtacacatcccgggatcacctagcaaagcacttcca

SEQ ID NO: 344268 - DNA, 120 bp, Artificial Sequence
  ENSG00000138315_12 (sequence is synthesized)
ggtccctgtcttcaagtttgtgggcaaagaccacaaggaagtgtttctgcactgccgggttcttgtctgtggagtgttggacgagcgttcccgctgtgcccagggttgccaccggcgaat

SEQ ID NO: 344269 - DNA, 120 bp, Artificial Sequence
  ENSG00000138315_13 (sequence is synthesized)
gcgtcgtggggcaggaggagaggactcagccggtctacagggccagacgctaacaggcggcccgatccgcatcgactgggaggactagttcgtagccatacctcgagtccctgcattgga

SEQ ID NO: 344270 - DNA, 120 bp, Artificial Sequence
  ENSG00000138315_14 (sequence is synthesized)
cggctctgctctttggagcttctccccccaccgccctctaagaacatctgccaacagctgggttcagacttcacactgtgagttcagactcccagcaccaactcactctgattctggtcc

SEQ ID NO: 344271 - DNA, 120 bp, Artificial Sequence
  ENSG00000138315_15 (sequence is synthesized)
attcagtgggcacaggtcacagcactgctgaacaatgtggcctgggtggggtttcatctttctagggttgaaaactaaactgtccacccagaaagacactcaccccatttccctcatttc

SEQ ID NO: 344272 - DNA, 120 bp, Artificial Sequence
  ENSG00000138315_16 (sequence is synthesized)
tttcctacacttaaatacctcgtgtatggtgcaatcagaccacaaaatcagaagctgggtataatatttcaagttacaaaccctagaaaaattaaacagttactgaaattatgacttaaa

SEQ ID NO: 344273 - DNA, 120 bp, Artificial Sequence
  ENSG00000138315_17 (sequence is synthesized)
tacccaatgactccttaaatatgtaaattatagttataccttgaaatttcaattcaaatgcagactaattatagggaatttggaagtgtatcaataaaacagtatataattttaaaagta

SEQ ID NO: 344274 - DNA, 120 bp, Artificial Sequence
  ENSG00000138315_18 (sequence is synthesized)
gcagtgcttctctctggggccaaggccagagctgtggacaccttatcccactcatcctcatcctcttcctctgataaagcccctaccagtgctgataaagtctttctcgtgagagcctag

SEQ ID NO: 344275 - DNA, 120 bp, Artificial Sequence
  ENSG00000138316_0 (sequence is synthesized)
atggctccactccgcgcgctgctgtcctacctgctgcctttgcactgtgcgctctgcgccgccgcgggcagccggaccccagagctgcacctctctggaaagctcagtgactatggtgtg

SEQ ID NO: 344276 - DNA, 120 bp, Artificial Sequence
  ENSG00000138316_1 (sequence is synthesized)
acagtgccctgcagcacagactttcggggacgcttcctctcccacgtggtgtctggcccagcagcagcctctgcagggagcatggtagtggacacgccacccacactaccacgacactcc

SEQ ID NO: 344277 - DNA, 120 bp, Artificial Sequence
  ENSG00000138316_2 (sequence is synthesized)
agtcacctccgggtggctcgcagccctctgcacccaggagggaccctgtggcctggcagggtggggcgccactccctctacttcaatgtcactgttttcgggaaggaactgcacttgcgc

SEQ ID NO: 344278 - DNA, 120 bp, Artificial Sequence
  ENSG00000138316_3 (sequence is synthesized)
ctgcggcccaatcggaggttggtagtgccaggatcctcagtggagtggcaggaggattttcgggagctgttccggcagcccttacggcaggagtgtgtgtacactggaggtgtcactgga

SEQ ID NO: 344279 - DNA, 120 bp, Artificial Sequence
  ENSG00000138316_4 (sequence is synthesized)
atgcctggggcagctgttgccatcagcaactgtgacggattggcgggcctcatccgcacagacagcaccgacttcttcattgagcctctggagcggggccagcaggagaaggaggccagc

SEQ ID NO: 344280 - DNA, 120 bp, Artificial Sequence
  ENSG00000138316_5 (sequence is synthesized)
gggaggacacatgtggtgtaccgccgggaggccgtccagcaggagtgggcagaacctgacggggacctgcacaatgaagcctttggcctgggagaccttcccaacctgctgggcctggtg

SEQ ID NO: 344281 - DNA, 120 bp, Artificial Sequence
  ENSG00000138316_6 (sequence is synthesized)
ggggaccagctgggcgacacagagcggaagcggcggcatgccaagccaggcagctacagcatcgaggtgctgctggtggtggacgactcggtggttcgcttccatggcaaggagcatgtg

SEQ ID NO: 344282 - DNA, 120 bp, Artificial Sequence
  ENSG00000138316_7 (sequence is synthesized)
cagaactatgtcctcaccctcatgaatatcgtagatgagatttaccacgatgagtccctgggggttcatataaatattgccctcgtccgcttgatcatggttggctaccgacagtccctg

SEQ ID NO: 344283 - DNA, 120 bp, Artificial Sequence
  ENSG00000138316_8 (sequence is synthesized)
agcctgatcgagcgcgggaacccctcacgcagcctggagcaggtgtgtcgctgggcacactcccagcagcgccaggaccccagccacgctgagcaccatgaccacgttgtgttcctcacc

SEQ ID NO: 344284 - DNA, 120 bp, Artificial Sequence
  ENSG00000138316_9 (sequence is synthesized)
cggcaggactttgggccctcaggtatgcaagggtatgcacccgtcactggcatgtgtcaccccctgaggagctgtgccctcaaccatgaggatggcttctcctcagccttcgtgatagct

SEQ ID NO: 344285 - DNA, 120 bp, Artificial Sequence
  ENSG00000138316_10 (sequence is synthesized)
catgagaccggccacgtgctcggcatggagcatgacggtcaggggaatggctgtgcagatgagaccagcctgggcagcgtcatggcgcccctggtgcaggctgccttccaccgcttccat

SEQ ID NO: 344286 - DNA, 120 bp, Artificial Sequence
  ENSG00000138316_11 (sequence is synthesized)
tggtcccgctgcagcaagctggagctcagccgctacctcccctcctacgactgcctcctcgatgacccctttgatcctgcctggccccagcccccagagctgcctgggatcaactactca

SEQ ID NO: 344287 - DNA, 120 bp, Artificial Sequence
  ENSG00000138316_12 (sequence is synthesized)
atggatgagcagtgccgctttgactttggcagtggctaccagacctgcttggcattcaggacctttgagccctgcaagcagctgtggtgcagccatcctgacaacccgtacttctgcaag

SEQ ID NO: 344288 - DNA, 120 bp, Artificial Sequence
  ENSG00000138316_13 (sequence is synthesized)
accaagaaggggcccccgctggatgggactgagtgtgcacccggcaagtggtgcttcaaaggtcactgcatctggaagtcgccggagcagacatatggccaggatggaggctggagctcc

SEQ ID NO: 344289 - DNA, 120 bp, Artificial Sequence
  ENSG00000138316_14 (sequence is synthesized)
tggaccaagtttgggtcatgttcgcggtcatgtgggggcggggtgcgatcccgcagccggagctgcaacaacccctccccagcctatggaggccgcctgtgcttagggcccatgttcgag

SEQ ID NO: 344290 - DNA, 120 bp, Artificial Sequence
  ENSG00000138316_15 (sequence is synthesized)
taccaggtctgcaacagcgaggagtgccctgggacctacgaggacttccgggcccagcagtgtgccaagcgcaactcctactatgtgcaccagaatgccaagcacagctgggtgccctac

SEQ ID NO: 344291 - DNA, 120 bp, Artificial Sequence
  ENSG00000138316_16 (sequence is synthesized)
gagcctgacgatgacgcccagaagtgtgagctgatctgccagtcggcggacacgggggacgtggtgttcatgaaccaggtggttcacgatgggacacgctgcagctaccgggacccatac

SEQ ID NO: 344292 - DNA, 120 bp, Artificial Sequence
  ENSG00000138316_17 (sequence is synthesized)
agcgtctgtgcgcgtggcgagtgtgtgcctgtcggctgtgacaaggaggtggggtccatgaaggcggatgacaagtgtggagtctgcgggggtgacaactcccactgcaggactgtgaag

SEQ ID NO: 344293 - DNA, 120 bp, Artificial Sequence
  ENSG00000138316_18 (sequence is synthesized)
gggacgctgggcaaggcctccaagcaggcaggagctctcaagctggtgcagatcccagcaggtgccaggcacatccagattgaggcactggagaagtccccccaccgcattgtggtgaag

SEQ ID NO: 344294 - DNA, 120 bp, Artificial Sequence
  ENSG00000138316_19 (sequence is synthesized)
aaccaggtcaccggcagcttcatcctcaaccccaagggcaaggaagccacaagccggaccttcaccgccatgggcctggagtgggaggatgcggtggaggatgccaaggaaagcctcaag

SEQ ID NO: 344295 - DNA, 120 bp, Artificial Sequence
  ENSG00000138316_20 (sequence is synthesized)
accagcgggcccctgcctgaagccattgccatcctggctctccccccaactgagggtggcccccgcagcagcctggcctacaagtacgtcatccatgaggacctgctgccccttatcggg

SEQ ID NO: 344296 - DNA, 120 bp, Artificial Sequence
  ENSG00000138316_21 (sequence is synthesized)
gccggcgcagacgagaccaccacatggtgcagcgacacctgtgtgaccacaagaagaggcccaagcccatccgccggcgctgcaaccagcacccgtgctctcagcctgtgtgggtgacgg

SEQ ID NO: 344297 - DNA, 120 bp, Artificial Sequence
  ENSG00000138316_22 (sequence is synthesized)
aggagtggggtgcctgcagccggagctgtgggaagctgggggtgcagacacgggggatacagtgcctgctgcccctctccaatggaacccacaaggtcatgccggccaaagcctgcgccg

SEQ ID NO: 344298 - DNA, 120 bp, Artificial Sequence
  ENSG00000138316_23 (sequence is synthesized)
gggaccggcctgaggcccgacggccctgtctccgagtgccctgcccagcccagtggaggctgggagcctggtcccagtgctctgccacctgtggagagggcatccagcagcggcaggtgg

SEQ ID NO: 344299 - DNA, 120 bp, Artificial Sequence
  ENSG00000138316_24 (sequence is synthesized)
tgtgcaggaccaacgccaacagcctcgggcattgcgagggggataggccagacactgtccaggtctgcagcctgcccgcctgtggaggaaatcaccagaactccacggtgagggccgatg

SEQ ID NO: 344300 - DNA, 120 bp, Artificial Sequence
  ENSG00000138316_25 (sequence is synthesized)
tctgggaacttgggacgccagaggggcagtgggtgccacaatctgaacccctacatcccattaacaagatatcatcaacggagccctgcacgggagacaggtctgtcttctgccagatgg

SEQ ID NO: 344301 - DNA, 120 bp, Artificial Sequence
  ENSG00000138316_26 (sequence is synthesized)
aagtgctcgatcgctactgctccattcccggctaccaccggctctgctgtgtgtcctgcatcaagaaggcctcgggccccaaccctggcccagaccctggcccaacctcactgcccccct

SEQ ID NO: 344302 - DNA, 120 bp, Artificial Sequence
  ENSG00000138316_27 (sequence is synthesized)
tctccactcctggaagccccttaccaggaccccaggaccctgcagatgctgcagagcctcctggaaagccaacgggatcagaggaccatcagcatggccgagccacacagctcccaggag

SEQ ID NO: 344303 - DNA, 120 bp, Artificial Sequence
  ENSG00000138316_28 (sequence is synthesized)
ctctggatacaagctccccagggacccagcatccctttgcccctgagacaccaatccctggagcatcctggagcatctcccctaccacccccggggggctgccttggggctggactcaga

SEQ ID NO: 344304 - DNA, 120 bp, Artificial Sequence
  ENSG00000138316_29 (sequence is synthesized)
cacctacgccagtccctgaggacaaagggcaacctggagaagacctgagacatcccggcaccagcctccctgctgcctccccggtgacatgagctgtgccctgccatcccactggcacgt

SEQ ID NO: 344305 - DNA, 120 bp, Artificial Sequence
  ENSG00000138316_30 (sequence is synthesized)
ttacactctgtgtactgccccgtgactcccagctcagaggacacacatagcagggcaggcgcaagcacagacttcattttaaatcattcgccttcttctcgtttggggctgtgatgctct

SEQ ID NO: 344306 - DNA, 120 bp, Artificial Sequence
  ENSG00000138316_31 (sequence is synthesized)
ttaccccacaaagcggggtgggaggaagacaaagatcagggaaagccctaatcggagatacctcagcaagctgcccccggcgggactgaccctctcagggcccctgttggtctcccctgc

SEQ ID NO: 344307 - DNA, 120 bp, Artificial Sequence
  ENSG00000138316_32 (sequence is synthesized)
caagaccagggtcaactattgctccctcctcacagaccctgggcctgggcaggtctgaatcccggctggtctgtagctagaagctgtcagggctgcctgccttcccggaactgtgaggac

SEQ ID NO: 344308 - DNA, 120 bp, Artificial Sequence
  ENSG00000138316_33 (sequence is synthesized)
ccctgtggaggccctgcatatttggcccctctccccagaaaggcaaagcagggccagggtaggtgggggactgttcacagccaggccgagaggaggggggcctgggaatgtggcatgagg

SEQ ID NO: 344309 - DNA, 120 bp, Artificial Sequence
  ENSG00000138316_34 (sequence is synthesized)
cttcccagctgcagggctggagggggtggaacacaaggtgatcgcaggcccagctcctggaagccaagagctccatgcagttccaccagctgaggccaggcagcagaggccagtttgtct

SEQ ID NO: 344310 - DNA, 120 bp, Artificial Sequence
  ENSG00000138316_35 (sequence is synthesized)
ttgctggccagaagatggtgctcatggccatactctggccttgcagatgtcactagtgttacttctagtgactccagattacagactggccccccaatctcaccccagcccaccagagaa

SEQ ID NO: 344311 - DNA, 120 bp, Artificial Sequence
  ENSG00000138316_36 (sequence is synthesized)
gggggctcaggacaccctggaccccaagtcctcagcatccagggatttccaaactggcgctcactccctgactccaccaggatggcaacttcaattatcactctcagcctggaaggggac

SEQ ID NO: 344312 - DNA, 120 bp, Artificial Sequence
  ENSG00000138316_37 (sequence is synthesized)
tctgtgggacacagagggaacacgatttctcaggctgtcccttcaatcattgcccttctccgaagatcgctcctgctggagtcggacatcttcatcttctacctggctcaagctgggcca

SEQ ID NO: 344313 - DNA, 120 bp, Artificial Sequence
  ENSG00000138316_38 (sequence is synthesized)
gagtgtgtggttctcccaggggtggttggaccccaggactgaggaccagagtccactcatagcctggccctggagatgacaagggccacccaggccaagtgccccagggcagggtgccag

SEQ ID NO: 344314 - DNA, 120 bp, Artificial Sequence
  ENSG00000138316_39 (sequence is synthesized)
cccctggcctggtgctggagtggggaagacacactcacccacggtgctgtaagggcctgagctgtgctcagctgccggccatgctacctccaagggacaggtaacagtcttagatcctct

SEQ ID NO: 344315 - DNA, 120 bp, Artificial Sequence
  ENSG00000138316_40 (sequence is synthesized)
ggctctcaggaagtggcagggggtcccaggacacctccggggtcttggaggatgtctcctaaactcctgccaggtgatagaggtgcttctcacttcttccttccccaaggcaaaggggct

SEQ ID NO: 344316 - DNA, 120 bp, Artificial Sequence
  ENSG00000138316_41 (sequence is synthesized)
gttctgagccagcctggaggaacatgagtagtgggcccctggcctgcaacccctttggagagtggaggtcctggggggctccccgccctccccctgttgccctcccctccctgggatgct

SEQ ID NO: 344317 - DNA, 120 bp, Artificial Sequence
  ENSG00000138316_42 (sequence is synthesized)
ggggcacacgcggagtcattcctgtgagaaccagcctggcctgtgttaaactcttgtgccttggaaatccagatctttaaaattttatgtatttattaacatcgccattggaccccaaaa

SEQ ID NO: 344318 - DNA, 80 bp, Artificial Sequence
  ENSG00000138316_43 (sequence is synthesized)
actgcgcgggcgggctgaccgaccagccggcagttggcaccgggtgcgctggcgcgtcagtggccccgctctccagccgg

SEQ ID NO: 344319 - DNA, 120 bp, Artificial Sequence
  ENSG00000138316_44 (sequence is synthesized)
gagcaggcgggagggaagcagctaggcggggaggcggctgaggcggcagcggcggcagccagccggtgctccgacagcccggggcgcaccctagcctcgccgccctcagcctgggacttg

SEQ ID NO: 344320 - DNA, 120 bp, Artificial Sequence
  ENSG00000138326_0 (sequence is synthesized)
aggcatcggcgcggtcagcctcgtggcgcgcccacgcccccacgccggctcttcccggggtccttccgtgcgcgttgatatgattggccggcgaatcgtggttctcttttcctccttggc

SEQ ID NO: 344321 - DNA, 120 bp, Artificial Sequence
  ENSG00000138326_1 (sequence is synthesized)
tgtctgaagatagatcgccatcatgaacgacaccgtaactatccgcactagaaagttcatgaccaaccgactacttcagaggaaacaaatggtcattgatgtccttcaccccgggaaggc

SEQ ID NO: 344322 - DNA, 120 bp, Artificial Sequence
  ENSG00000138326_2 (sequence is synthesized)
gccaaaatgtacaagaccacaccggatgtcatctttgtatttggattcagaactcattttggtggtggcaagacaactggctttggcatgatttatgattccctggattatgcaaagaaa

SEQ ID NO: 344323 - DNA, 120 bp, Artificial Sequence
  ENSG00000138326_3 (sequence is synthesized)
aatgaacccaaacatagacttgcaagacatggcctgtatgagaagaaaaagacctcaagaaagcaacgaaaggaacgcaagaacagaatgaagaaagtcagggggactgcaaaggccaat

SEQ ID NO: 344324 - DNA, 120 bp, Artificial Sequence
  ENSG00000138326_4 (sequence is synthesized)
gttggtgctggcaaaaagccgaaggagtaaaggtgctgcaatgatgttagctgtggccactgtggatttttcgcaagaacattaataaactaaaaacttcatgtgtctggttgtttgaaa

SEQ ID NO: 344325 - DNA, 120 bp, Artificial Sequence
  ENSG00000138326_5 (sequence is synthesized)
gctggcaaaaagaagtgagctggagattggatcacagccgaaggagtaaaggtgctgcaatgatgttagctgtggccactgtggatttttcgcaagaacattaataaactaaaaacttca

SEQ ID NO: 344326 - DNA, 120 bp, Artificial Sequence
  ENSG00000138326_6 (sequence is synthesized)
ctggagattggatcacagccgaaggagtaaaggtgctgcaatgatgttagctgtggccactgtggatttttcgcaagaacattaataaactaaaaacttcatgtgtctggttgtttgaaa

SEQ ID NO: 344327 - DNA, 120 bp, Artificial Sequence
  ENSG00000138326_7 (sequence is synthesized)
atgaagtgtctagcagtgagctggagattggatcacagccgaaggagtaaaggtgctgcaatgatgttagctgtggccactgtggatttttcgcaagaacattaataaactaaaaacttc

SEQ ID NO: 344328 - DNA, 120 bp, Artificial Sequence
  ENSG00000138326_8 (sequence is synthesized)
actgagattgtaagcacggtgtggggatgcatcaccttcactgagtttgctttgatgatgctttgcatgttggcctttggacgacagttttatagtatggtcgattataatgccagtgct

SEQ ID NO: 344329 - DNA, 120 bp, Artificial Sequence
  ENSG00000138326_9 (sequence is synthesized)
agtgtggtaaaaagggcaagaccaagcaatctgggatacaactctgaaaggattaagagaaaaagttatttcataaaatgcacaggtggagtacgggggttcaaaattgaagtctgacat

SEQ ID NO: 344330 - DNA, 120 bp, Artificial Sequence
  ENSG00000138326_10 (sequence is synthesized)
tgaagtagtgttcttggagatgggctaggggtaaggattgttttccagaggagaagtaaggggatgtgtttggaaaggtagcctggcaccaaattcacttagtttggattaagtctgcat

SEQ ID NO: 344331 - DNA, 120 bp, Artificial Sequence
  ENSG00000138326_11 (sequence is synthesized)
ctgggcttaaacccataggtagtcaggaaccaggaaaagtttttgattgtatactgagtgtcaaacactgcagagtgaactacagcagtgatctgggcaagctccccagcttacattcta

SEQ ID NO: 344332 - DNA, 120 bp, Artificial Sequence
  ENSG00000138326_12 (sequence is synthesized)
gtaaacaagtaagcatcatcacctcgaagtgcttgttttgtttgttcctttaactcactttatcctatcctgttagataaaccttcccatacgatagctgtgagggaaaatcctggtgat

SEQ ID NO: 344333 - DNA, 82 bp, Artificial Sequence
  ENSG00000138326_13 (sequence is synthesized)
accttcccatacgatagctgtgagggaaaatcctggtgatgtcataggtagaggctgcacttttttttttagagagagagtt

SEQ ID NO: 344334 - DNA, 120 bp, Artificial Sequence
  ENSG00000138326_14 (sequence is synthesized)
gcaggtactgagatttgagctggagattggatcacagccgaaggagtaaaggtgctgcaatgatgttagctgtggccactgtggatttttcgcaagaacattaataaactaaaaacttca

SEQ ID NO: 344335 - DNA, 120 bp, Artificial Sequence
  ENSG00000138326_15 (sequence is synthesized)
gggaggcacatctcgtctgcagttcctcattgggctaggtaggcggcttgcaggtgatggcagtacaagaggtgaagaaggtgcgggcagcgcctgggcgagttgcggcaagtgaaacca

SEQ ID NO: 344336 - DNA, 120 bp, Artificial Sequence
  ENSG00000138326_16 (sequence is synthesized)
cgggctgctttttcttctgtttatggatgaggcacagagggtagatgacttgccccaagtccttcagctcattcatgctggggaaaggagtaagcttcaggcgtcttcccctggagttca

SEQ ID NO: 344337 - DNA, 120 bp, Artificial Sequence
  ENSG00000138326_17 (sequence is synthesized)
gagagatgcacagatgtgaagaactcgaaggcaagagaaagccggggggttgtgtggcaggtagaagtgccaggaccgtggagcgtgtggacatgtggcagattgcggaggggctgtggc

SEQ ID NO: 344338 - DNA, 120 bp, Artificial Sequence
  ENSG00000138326_18 (sequence is synthesized)
aagtatttacaggtggccgttacctggaggaagactgaaaacagagaacagtgctgccaggcgtgccttttggagagggcactggtcagaaacggagccttcatgtcgcctgcctcacct

SEQ ID NO: 344339 - DNA, 120 bp, Artificial Sequence
  ENSG00000138326_19 (sequence is synthesized)
gctcctgctggttctccccaccctgtggacggtgacttggtcctccacttgccagaagccttgtcagcaaccttgactctgtcaccccacatccaggccatcaacaagtcttttggccct

SEQ ID NO: 344340 - DNA, 120 bp, Artificial Sequence
  ENSG00000138326_20 (sequence is synthesized)
ttctttgaaatccaccaggaatccagctgcttctccccaccttcctgcctctctggtctgggccactaatgtcactgccatggccgccttgctgcatttctgaggatgcttcatctctcc

SEQ ID NO: 344341 - DNA, 120 bp, Artificial Sequence
  ENSG00000138326_21 (sequence is synthesized)
accttcttctccactcagcagccagcagggcactgtggaaatcggagtcacatgagctggcacctctgttcagaaccctccagggctccacatctctctcacccaaatgccaaagacctc

SEQ ID NO: 344342 - DNA, 120 bp, Artificial Sequence
  ENSG00000138326_22 (sequence is synthesized)
cccacgcccccacaatcccccacgacctggccactggcctcccaccaccttccagctccagcggctcctaccacatttaaggctttccttcctagttttaatttttcctcgtcagcagtt

SEQ ID NO: 344343 - DNA, 120 bp, Artificial Sequence
  ENSG00000138326_23 (sequence is synthesized)
gattttattattttcttgtttattggtattttcccactagaaatgaagctgcgtgaagttagagatttttttttttggtctgtgttcctaattagctcattgctatacccctggcgccca

SEQ ID NO: 344344 - DNA, 120 bp, Artificial Sequence
  ENSG00000138326_24 (sequence is synthesized)
gctgtgtggggagtggattgggtcgtgaggcagaggctgcggtggaaactcaggcaggaggtgatggtggttcttggggctgcggaatgccaagtttagaagctcttcctctgctgtggc

SEQ ID NO: 344345 - DNA, 120 bp, Artificial Sequence
  ENSG00000138326_25 (sequence is synthesized)
acatgaaccggtcactcgagaaggcttttagatttactttgcctaatcccctcttagtgcatgtggggaaactgaggtacacaaaaggaattccccaccaagttaggggcagaacctagc

SEQ ID NO: 344346 - DNA, 63 bp, Artificial Sequence
  ENSG00000138326_26 (sequence is synthesized)
acaaaaggaattccccaccaagttaggggcagaacctagcccccttgtctcccagatggatat

SEQ ID NO: 344347 - DNA, 80 bp, Artificial Sequence
  ENSG00000138326_27 (sequence is synthesized)
catcttgttattaaagcttcttctctctttgtaggggagggggagatgcctctggtggagaagaccagtgtggcagtgac

SEQ ID NO: 344348 - DNA, 120 bp, Artificial Sequence
  ENSG00000138326_28 (sequence is synthesized)
gggagatgcctctggtggagaagaccagtgtggcagtgactgtgtctgttagtgaacctggtggctggttgagggtctgtcgtggtgactgaggacacatacaaagtgcttttctcagtg

SEQ ID NO: 344349 - DNA, 120 bp, Artificial Sequence
  ENSG00000138326_29 (sequence is synthesized)
gtcaccttggtgttggtgaataagggtcagaagatggctcctgtcctagggcactgccagtcggtttggaagctgaaatgcctgcttagcagtttgaggaaacacagaccttggaggatc

SEQ ID NO: 344350 - DNA, 120 bp, Artificial Sequence
  ENSG00000138326_30 (sequence is synthesized)
ttctggttgcctcttcaagaattcattctattccccttctgctccccaaatttgcttttcttggggtgggtcttggttggcctaagccaagaaagtatggcatctactccttccatagca

SEQ ID NO: 344351 - DNA, 120 bp, Artificial Sequence
  ENSG00000138326_31 (sequence is synthesized)
atagctcaggaataggcagtgacccagacctgaaccaatcagtgcatggaattacccctggccaaagtggttgattgaggctgggtgcaagcagagttgtgagaaggctcccatttggtg

SEQ ID NO: 344352 - DNA, 120 bp, Artificial Sequence
  ENSG00000138326_32 (sequence is synthesized)
gttggagagatcgcacttgctccagaggtcataatgtgcagatctgaggcttggaactgctgcagacattttgctaccacaagtgaagccaccctgacgacacagttgacaatttggagc

SEQ ID NO: 344353 - DNA, 120 bp, Artificial Sequence
  ENSG00000138326_33 (sequence is synthesized)
agggcagagctgagagaacagcagggaaacagccagagtcttgctcaagcctccctgaagtatctatacccctggactctagttatgggggctaataaatgttatatactgtttaaggta

SEQ ID NO: 344354 - DNA, 120 bp, Artificial Sequence
  ENSG00000138326_34 (sequence is synthesized)
ggtgagtctccctgggcccgtgcagtcatctgccgcgtatccgagccatccgtggtccctgggtcccagtacttgagctataggcacgcgaagcccggttgctcttctctggccgtttct

SEQ ID NO: 344355 - DNA, 120 bp, Artificial Sequence
  ENSG00000138326_35 (sequence is synthesized)
gtcagaggatggttgtcgaggggctcggggctgttggcagggcgtccgggctggcgggctgcgctgtagacccggacacgctgggcttcgggctccagcgcctgggcagtgcaggagctg

SEQ ID NO: 344356 - DNA, 120 bp, Artificial Sequence
  ENSG00000138326_36 (sequence is synthesized)
atgtttcttcttttccctcttcttctggattacagaaggtaacatgttttaagaaactatgtagcatagtgtcttaacacctcagtaaagtagcttggcccaccccttgtcagctcacag

SEQ ID NO: 344357 - DNA, 120 bp, Artificial Sequence
  ENSG00000138326_37 (sequence is synthesized)
cacaatctggaggccacattggttcattgatcccagctggtgggcacctttcaagcctatcacaagaagttttaattttactaattggcatagaaccttcaatgcagagcggatcccatt

SEQ ID NO: 344358 - DNA, 120 bp, Artificial Sequence
  ENSG00000138326_38 (sequence is synthesized)
ccctgtgattttacttattaatatggacactggtttaagaagcagttggatcaatgtggcccgtgttttcctggcacactggaaaggcaactgagatctcaggattgctttcctctccag

SEQ ID NO: 344359 - DNA, 120 bp, Artificial Sequence
  ENSG00000138326_39 (sequence is synthesized)
ttggccaagacaagtgattttagcgataagcagctttttaccagctttgctagctgtaaatagttggacattgtaaatcattgaatagaattaaggtgttgggttgttaaattaacaaat

SEQ ID NO: 344360 - DNA, 120 bp, Artificial Sequence
  ENSG00000138326_40 (sequence is synthesized)
aaatagaaaatttttgaggtaattatgtattcatataaaagtctttggtggatatgctttttcccacaagcacttggttagaatggcccattacctcatttgtttattttttgagacagg

SEQ ID NO: 344361 - DNA, 120 bp, Artificial Sequence
  ENSG00000138326_41 (sequence is synthesized)
gctggagtacagtggcatgatcatgggttactgtacctcccgggcttgggtgattctcccacctcagcctcccttgtagctgcgactacaggcatgtgccaccgtgccctgccaattttt

SEQ ID NO: 344362 - DNA, 120 bp, Artificial Sequence
  ENSG00000138326_42 (sequence is synthesized)
accgtgccctgccaattttttgtagagacaggatttagccgtgttgctcaggctgctcttgaactcccggacttgagcagtctgcttgtctaagccttccaaagtgctgggattacaggt

SEQ ID NO: 344363 - DNA, 120 bp, Artificial Sequence
  ENSG00000138326_43 (sequence is synthesized)
gccactgtgcccagcctgttacctcatttaaaacaaattttgcacatctgaacagcctaaaattgtaatgtgataagtggggtaggagtggggtgggcgtagtgggattttgaatcaatg

SEQ ID NO: 344364 - DNA, 120 bp, Artificial Sequence
  ENSG00000138326_44 (sequence is synthesized)
aaggcccttgttcttgtggcatccttttgcagtgattccctgccaggcaaggcagtaaacctgggattgcctgcccaggactgtaatcacattgatgtcccagcgccatggagtatgtaa

SEQ ID NO: 344365 - DNA, 120 bp, Artificial Sequence
  ENSG00000138326_45 (sequence is synthesized)
tgaatgaactgccagcagaactactcactaagaactactccctgtttgtgaggattgtacctgttgagagaagttgcaaaaagaattagtcaaaagaattagtcaaaatttgtcctctga

SEQ ID NO: 344366 - DNA, 120 bp, Artificial Sequence
  ENSG00000138326_46 (sequence is synthesized)
cctaggtctgaaggacatttaacacattgattgttctcttcatccagcctttgagccctatgagttagtgcccttagcctttgagtcccacaggtatggaggagctacctgtggggacct

SEQ ID NO: 344367 - DNA, 120 bp, Artificial Sequence
  ENSG00000138326_47 (sequence is synthesized)
gagccatcactattcctgcttcaagttacactggtgcctctcactagcactgctctgaaaagccagctggaaaaatcaatgcatttgagtacataaattctttggctccaaagaaatgcc

SEQ ID NO: 344368 - DNA, 120 bp, Artificial Sequence
  ENSG00000138326_48 (sequence is synthesized)
attagtagtctcatatctgaggagcaattgtatttttagttcagctaaattaatgcctctttttaaatactaacttgtactacttttgtggctgtgaatggtatcttttattgaactgag

SEQ ID NO: 344369 - DNA, 120 bp, Artificial Sequence
  ENSG00000138326_49 (sequence is synthesized)
gcagcttttaaaagacttgcctgatcatttagagcactcccattgaggttaaattagacttgaatctgtaatgattctcgtaactgttcctggtgtgtgtccagcacaatgttgctgggc

SEQ ID NO: 344370 - DNA, 120 bp, Artificial Sequence
  ENSG00000138326_50 (sequence is synthesized)
agagcagaggggcagaggctcaggtatgtacttcattgacaagtgggcaaggccatcctgggtaccacattggcttaatgatctcttcattgtgaagtccggctacctcgtttgcataag

SEQ ID NO: 344371 - DNA, 120 bp, Artificial Sequence
  ENSG00000138326_51 (sequence is synthesized)
aactacagtaatcaggcaaggcattgtcagaattgggaggaataaaatcagtgagtctggaaggagtgctctgtatacaattgcaaagaacaaaatggtcatctttaaggtacctgattg

SEQ ID NO: 344372 - DNA, 120 bp, Artificial Sequence
  ENSG00000138326_52 (sequence is synthesized)
acaggtataattcaagcttttcatgtagtcatgtagatcactagactccttggtgtactgacgtagcaatttaaaagcagatcatgtgtagtacatctagaagtagatttacaaatattc

SEQ ID NO: 344373 - DNA, 120 bp, Artificial Sequence
  ENSG00000138326_53 (sequence is synthesized)
tgaagagttgtaaccttttaaaatactaacagtgacatggttttgtttttaaggtttagcaatatttagcccattatttttgttttattcttaacttgaatgtttgtaaattttatttct

SEQ ID NO: 344374 - DNA, 120 bp, Artificial Sequence
  ENSG00000138326_54 (sequence is synthesized)
tgatgctttcattgtgttatgataacatcaaaataacttgatattctaggttactaataattgttgtgcatgagtgttactacttttggaattgaagactttaaagaattttaaaggcag

SEQ ID NO: 344375 - DNA, 120 bp, Artificial Sequence
  ENSG00000138326_55 (sequence is synthesized)
ttgttgactaaacttctttctcttgattcacagccgaaggagtaaaggtgctgcaatgatgttagctgtggccactgtggatttttcgcaagaacattaataaactaaaaacttcatgtg

SEQ ID NO: 344376 - DNA, 120 bp, Artificial Sequence
  ENSG00000138326_56 (sequence is synthesized)
ttattttgtaaactccaaaatgcatgttacatgtgaagtgactcactggaggaaggtgagtactttaccaagtaggcacttgggaaatgctgtgtccacatacttaggaaatggcttcag

SEQ ID NO: 344377 - DNA, 120 bp, Artificial Sequence
  ENSG00000138326_57 (sequence is synthesized)
ttaacactgggcttgggaagggctctcttatccaaggagcagtcttctctggagccatgaaaccagcctggcagcactggtaataaactagtctgtgaaatctggcaaagcctctgtcct

SEQ ID NO: 344378 - DNA, 120 bp, Artificial Sequence
  ENSG00000138336_0 (sequence is synthesized)
actccctgaggtctgtcctggggagacactgctgctccggggggctgacctggcggggagtggccgcgcagtctgctccggcgccgctttgtgcgcgcagccgctggcccctctactccc

SEQ ID NO: 344379 - DNA, 120 bp, Artificial Sequence
  ENSG00000138336_1 (sequence is synthesized)
gggtctgccccccgggacacccctctgcctcgcccaagtcatgcagccctacctgcctctccactgtggacctttgggaaccgactcctcacctcgggggctcgggccttgactgtgctg

SEQ ID NO: 344380 - DNA, 120 bp, Artificial Sequence
  ENSG00000138336_2 (sequence is synthesized)
ggagccggtaggcgtcctccgcgacccgcccgcgcccctcgcgcccgccggggccccgggctccaaagttgtggggaccggcgcgagttggaaagtttgcccgagggctggtgcaggctt

SEQ ID NO: 344381 - DNA, 120 bp, Artificial Sequence
  ENSG00000138336_3 (sequence is synthesized)
ggagctgggggccgtgcgctgccctgggaatgtgacccggccagcgaccaaaaccttgtgtgactgagctgaagagcagtgcatccagattctcctcagaagtgagactttccaaaggac

SEQ ID NO: 344382 - DNA, 120 bp, Artificial Sequence
  ENSG00000138336_4 (sequence is synthesized)
caatgactctgtttcctgcgccctttcattttttcctactctgtagctatgtctcgatcccgccatgcaaggccttccagattagtcaggaaggaagatgtaaacaaaaaaaagaaaaac

SEQ ID NO: 344383 - DNA, 120 bp, Artificial Sequence
  ENSG00000138336_5 (sequence is synthesized)
agccaactacgaaagacaaccaagggagccaacaaaaatgtggcatcagtcaagactttaagccctggaaaattaaagcaattaattcaagaaagagatgttaagaaaaaaacagaacct

SEQ ID NO: 344384 - DNA, 120 bp, Artificial Sequence
  ENSG00000138336_6 (sequence is synthesized)
aaaccacccgtgccagtcagaagccttctgacaagagctggagcagcacgcatgaatttggataggactgaggttctttttcagaacccagagtccttaacctgcaatgggtttacaatg

SEQ ID NO: 344385 - DNA, 120 bp, Artificial Sequence
  ENSG00000138336_7 (sequence is synthesized)
gcgctacgaagcacctctcttagcaggcgactctcccaacccccactggtcgtagccaaatccaaaaaggttccactttctaagggtttagaaaagcaacatgattgtgattataagata

SEQ ID NO: 344386 - DNA, 120 bp, Artificial Sequence
  ENSG00000138336_8 (sequence is synthesized)
ctccctgctttgggagtaaagcactcagaaaatgattcggttccaatgcaagacacccaagtccttcctgatatagagactctaattggtgtacaaaatccctctttacttaaaggtaag

SEQ ID NO: 344387 - DNA, 120 bp, Artificial Sequence
  ENSG00000138336_9 (sequence is synthesized)
agccaagagacaactcagttttggtcccaaagagttgaggattccaagatcaatatccctacccacagtggccctgcagctgagatccttcctgggccactggaagggacacgctgtggt

SEQ ID NO: 344388 - DNA, 120 bp, Artificial Sequence
  ENSG00000138336_10 (sequence is synthesized)
gaaggactattctctgaagagacattgaatgataccagtggttccccaaaaatgtttgctcaggacacagtgtgtgctccttttccccaaagagcaacccccaaagttacctctcaagga

SEQ ID NO: 344389 - DNA, 120 bp, Artificial Sequence
  ENSG00000138336_11 (sequence is synthesized)
aaccccagcattcagttagaagagttgggttcacgagtagaatctcttaagttatctgattcttacctggatcccattaaaagtgaacatgattgctaccccacctccagtcttaataag

SEQ ID NO: 344390 - DNA, 120 bp, Artificial Sequence
  ENSG00000138336_12 (sequence is synthesized)
gttatacctgacttgaaccttagaaactgcttggctcttggtgggtctacgtctcctacctctgtaataaaattcctcttggcaggctcaaaacaagcgacccttggtgctaaaccagat

SEQ ID NO: 344391 - DNA, 120 bp, Artificial Sequence
  ENSG00000138336_13 (sequence is synthesized)
catcaagaggccttcgaagctactgcaaatcaacaggaagtttctgataccacctctttcctaggacaggcctttggtgctatcccacatcaatgggaacttcctggtgctgacccagtt

SEQ ID NO: 344392 - DNA, 120 bp, Artificial Sequence
  ENSG00000138336_14 (sequence is synthesized)
catggtgaggccctgggtgagaccccagatctaccagagattcctggtgctattccagtccaaggagaggtctttggtactattttagaccaacaagaaactcttggtatgagtgggagt

SEQ ID NO: 344393 - DNA, 120 bp, Artificial Sequence
  ENSG00000138336_15 (sequence is synthesized)
gttgtcccagacttgcctgtcttccttcctgttcctccaaatccaattgctacctttaatgctccttccaaatggcctgagccccaaagcactgtctcatatggacttgcagtccagggt

SEQ ID NO: 344394 - DNA, 120 bp, Artificial Sequence
  ENSG00000138336_16 (sequence is synthesized)
gctatacagattttgcctttgggctcaggacacactcctcaatcatcatcaaactcagagaaaaattcattacctccagtaatggctataagcaatgtagaaaatgagaagcaggttcat

SEQ ID NO: 344395 - DNA, 120 bp, Artificial Sequence
  ENSG00000138336_17 (sequence is synthesized)
ataagcttcctgccagctaacactcaggggttcccattagcccctgagagaggactcttccatgcttcactgggtatagcccaactctctcaggctggtcctagcaaatcagacagaggg

SEQ ID NO: 344396 - DNA, 120 bp, Artificial Sequence
  ENSG00000138336_18 (sequence is synthesized)
agctcccaggtcagtgtaaccagcacagttcatgttgtcaacaccacagtggtgactatgccagtgccaatggtcagtacctcctcttcttcctataccactttgctaccgactttggaa

SEQ ID NO: 344397 - DNA, 120 bp, Artificial Sequence
  ENSG00000138336_19 (sequence is synthesized)
aagaagaaaagaaagcgatgtggggtctgtgaaccctgccagcagaagaccaactgtggtgaatgcacttactgcaagaacagaaagaacagccatcagatctgtaagaaaagaaaatgt

SEQ ID NO: 344398 - DNA, 120 bp, Artificial Sequence
  ENSG00000138336_20 (sequence is synthesized)
gaggagctgaaaaagaaaccatctgttgttgtgcctctggaggttataaaggaaaacaagaggccccagagggaaaagaagcccaaagttttaaaggcagattttgacaacaaaccagta

SEQ ID NO: 344399 - DNA, 120 bp, Artificial Sequence
  ENSG00000138336_21 (sequence is synthesized)
aatggccccaagtcagaatccatggactacagtagatgtggtcatggggaagaacaaaaattggaattgaacccacatactgttgaaaatgtaactaaaaatgaagacagcatgacaggc

SEQ ID NO: 344400 - DNA, 120 bp, Artificial Sequence
  ENSG00000138336_22 (sequence is synthesized)
atcgaggtggagaagtggacacaaaacaagaaatcacagttaactgatcacgtgaaaggagattttagtgctaatgtcccagaagctgaaaaatcgaaaaactctgaagttgacaagaaa

SEQ ID NO: 344401 - DNA, 120 bp, Artificial Sequence
  ENSG00000138336_23 (sequence is synthesized)
cgaaccaaatctccaaaattgtttgtacaaaccgtaagaaatggcattaaacatgtacactgtttaccagctgaaacaaatgtttcatttaaaaaattcaatattgaagaattcggcaag

SEQ ID NO: 344402 - DNA, 120 bp, Artificial Sequence
  ENSG00000138336_24 (sequence is synthesized)
acattggaaaacaattcttataaattcctaaaagacactgcaaaccataaaaacgctatgagctctgttgctactgatatgagttgtgatcatctcaaggggagaagtaacgttttagta

SEQ ID NO: 344403 - DNA, 120 bp, Artificial Sequence
  ENSG00000138336_25 (sequence is synthesized)
ttccagcagcctggctttaactgcagttccattccacattcttcacactccatcataaatcatcatgctagtatacacaatgaaggtgatcaaccaaaaactcctgagaatataccaagt

SEQ ID NO: 344404 - DNA, 120 bp, Artificial Sequence
  ENSG00000138336_26 (sequence is synthesized)
aaagaaccaaaagatggatctcccgttcaaccaagtctcttatcgttaatgaaagataggagattaacattggagcaagtggtagccatagaggccctgactcaactctcagaagcccca

SEQ ID NO: 344405 - DNA, 120 bp, Artificial Sequence
  ENSG00000138336_27 (sequence is synthesized)
tcagagaattcctccccatcaaagtcagagaaggatgaggaatcagagcagagaacagccagtttgcttaatagctgcaaagctatcctctacactgtaagaaaagacctccaagaccca

SEQ ID NO: 344406 - DNA, 120 bp, Artificial Sequence
  ENSG00000138336_28 (sequence is synthesized)
aacttacagggagagccaccaaaacttaatcactgtccatctttggaaaaacaaagttcatgcaacacggtggttttcaatgggcaaactactaccctttccaactcacatatcaactca

SEQ ID NO: 344407 - DNA, 120 bp, Artificial Sequence
  ENSG00000138336_29 (sequence is synthesized)
gctactaaccaagcatccacaaagtcacatgaatattcaaaagtcacaaattcattatctctttttataccaaaatcaaattcatccaagattgacaccaataaaagtattgctcaaggg

SEQ ID NO: 344408 - DNA, 120 bp, Artificial Sequence
  ENSG00000138336_30 (sequence is synthesized)
ataattactcttgacaattgttccaatgatttgcatcagttgccaccaagaaataatgaagtggagtattgcaaccagttactggacagcagcaaaaaattggactcagatgatctatca

SEQ ID NO: 344409 - DNA, 120 bp, Artificial Sequence
  ENSG00000138336_31 (sequence is synthesized)
tgtcaggatgcaacccatacccaaattgaggaagatgttgcaacacagttgacacaacttgcttcgataattaagatcaattatataaaaccagaggacaaaaaagttgaaagtacacca

SEQ ID NO: 344410 - DNA, 120 bp, Artificial Sequence
  ENSG00000138336_32 (sequence is synthesized)
acaagccttgtcacatgtaatgtacagcaaaaatacaatcaggagaagggcacaatacaacagaaaccaccttcaagtgtacacaataatcatggttcatcattaacaaaacaaaagaac

SEQ ID NO: 344411 - DNA, 120 bp, Artificial Sequence
  ENSG00000138336_33 (sequence is synthesized)
ccaacccagaaaaagacaaaatccaccccatcaagagatcggcggaaaaagaagcccacagttgtaagttatcaagaaaatgatcggcagaagtgggaaaagttgtcctatatgtatggc

SEQ ID NO: 344412 - DNA, 120 bp, Artificial Sequence
  ENSG00000138336_34 (sequence is synthesized)
acaatatgcgacatttggatagcatcgaaatttcaaaattttgggcaattttgtccacatgattttcctactgtatttgggaaaatttcttcctcgaccaaaatatggaaaccactggct

SEQ ID NO: 344413 - DNA, 120 bp, Artificial Sequence
  ENSG00000138336_35 (sequence is synthesized)
caaacgaggtccattatgcaacccaaaacagtatttccaccactcactcagataaaattacagagatatcctgaatcagcagaggaaaaggtgaaggttgaaccattggattcactcagc

SEQ ID NO: 344414 - DNA, 120 bp, Artificial Sequence
  ENSG00000138336_36 (sequence is synthesized)
ttatttcatcttaaaacggaatccaacgggaaggcattcactgataaagcttataattctcaggtacagttaacggtgaatgccaatcagaaagcccatcctttgacccagccctcctct

SEQ ID NO: 344415 - DNA, 120 bp, Artificial Sequence
  ENSG00000138336_37 (sequence is synthesized)
ccacctaaccagtgtgctaacgtgatggcaggcgatgaccaaatacggtttcagcaggttgttaaggagcaactcatgcatcagagactgccaacattgcctggtatctctcatgaaaca

SEQ ID NO: 344416 - DNA, 120 bp, Artificial Sequence
  ENSG00000138336_38 (sequence is synthesized)
cccttaccggagtcagcactaactctcaggaatgtaaatgtagtgtgttcaggtggaattacagtggtttctaccaaaagtgaagaggaagtctgttcatccagttttggaacatcagaa

SEQ ID NO: 344417 - DNA, 120 bp, Artificial Sequence
  ENSG00000138336_39 (sequence is synthesized)
ttttccacagtggacagtgcacagaaaaattttaatgattatgccatgaacttctttactaaccctacaaaaaacctagtgtctataactaaagattctgaactgcccacctgcagctgt

SEQ ID NO: 344418 - DNA, 120 bp, Artificial Sequence
  ENSG00000138336_40 (sequence is synthesized)
atacaaaaagacaaaggcccatattatacacaccttggggcaggaccaagtgttgctgctgtcagggaaatcatggagaataggtatggtcaaaaaggaaacgcaataaggatagaaata

SEQ ID NO: 344419 - DNA, 120 bp, Artificial Sequence
  ENSG00000138336_41 (sequence is synthesized)
gtagtgtacaccggtaaagaagggaaaagctctcatgggtgtccaattgctaagtgggttttaagaagaagcagtgatgaagaaaaagttctttgtttggtccggcagcgtacaggccac

SEQ ID NO: 344420 - DNA, 120 bp, Artificial Sequence
  ENSG00000138336_42 (sequence is synthesized)
cactgtccaactgctgtgatggtggtgctcatcatggtgtgggatggcatccctcttccaatggccgaccggctatacacagagctcacagagaatctaaagtcatacaatgggcaccct

SEQ ID NO: 344421 - DNA, 120 bp, Artificial Sequence
  ENSG00000138336_43 (sequence is synthesized)
accgacagaagatgcaccctcaatgaaaatcgtacctgtacatgtcaaggaattgatccagagacttgtggagcttcattctcttttggctgttcatggagtatgtactttaatggctgt

SEQ ID NO: 344422 - DNA, 120 bp, Artificial Sequence
  ENSG00000138336_44 (sequence is synthesized)
aagtttggtagaagcccaagccccagaagatttagaattgatccaagctctcccttacatgaaaaaaaccttgaagataacttacagagtttggctacacgattagctccaatttataag

SEQ ID NO: 344423 - DNA, 120 bp, Artificial Sequence
  ENSG00000138336_45 (sequence is synthesized)
cagtatgctccagtagcttaccaaaatcaggtggaatatgaaaatgttgcccgagaatgtcggcttggcagcaaggaaggtcgtcccttctctggggtcactgcttgcctggacttctgt

SEQ ID NO: 344424 - DNA, 120 bp, Artificial Sequence
  ENSG00000138336_46 (sequence is synthesized)
gctcatccccacagggacattcacaacatgaataatggaagcactgtggtttgtaccttaactcgagaagataaccgctctttgggtgttattcctcaagatgagcagctccatgtgcta

SEQ ID NO: 344425 - DNA, 120 bp, Artificial Sequence
  ENSG00000138336_47 (sequence is synthesized)
cctctttataagctttcagacacagatgagtttggctccaaggaaggaatggaagccaagatcaaatctggggccatcgaggtcctggcaccccgccgcaaaaaaagaacgtgtttcact

SEQ ID NO: 344426 - DNA, 120 bp, Artificial Sequence
  ENSG00000138336_48 (sequence is synthesized)
cagcctgttccccgttctggaaagaagagggctgcgatgatgacagaggttcttgcacataagataagggcagtggaaaagaaacctattccccgaatcaagcggaagaataactcaaca

SEQ ID NO: 344427 - DNA, 120 bp, Artificial Sequence
  ENSG00000138336_49 (sequence is synthesized)
acaacaaacaacagtaagccttcgtcactgccaaccttagggagtaacactgagaccgtgcaacctgaagtaaaaagtgaaaccgaaccccattttatcttaaaaagttcagacaacact

SEQ ID NO: 344428 - DNA, 120 bp, Artificial Sequence
  ENSG00000138336_50 (sequence is synthesized)
aaaacttattcgctgatgccatccgctcctcacccagtgaaagaggcatctccaggcttctcctggtccccgaagactgcttcagccacaccagctccactgaagaatgacgcaacagcc

SEQ ID NO: 344429 - DNA, 120 bp, Artificial Sequence
  ENSG00000138336_51 (sequence is synthesized)
tcatgcgggttttcagaaagaagcagcactccccactgtacgatgccttcgggaagactcagtggtgccaatgcagctgctgctgatggccctggcatttcacagcttggcgaagtggct

SEQ ID NO: 344430 - DNA, 120 bp, Artificial Sequence
  ENSG00000138336_52 (sequence is synthesized)
cctctccccaccctgtctgctcctgtgatggagcccctcattaattctgagccttccactggtgtgactgagccgctaacgcctcatcagccaaaccaccagccctccttcctcacctct

SEQ ID NO: 344431 - DNA, 120 bp, Artificial Sequence
  ENSG00000138336_53 (sequence is synthesized)
cctcaagaccttgcctcttctccaatggaagaagatgagcagcattctgaagcagatgagcctccatcagacgaacccctatctgatgaccccctgtcacctgctgaggagaaattgccc

SEQ ID NO: 344432 - DNA, 120 bp, Artificial Sequence
  ENSG00000138336_54 (sequence is synthesized)
cacattgatgagtattggtcagacagtgagcacatctttttggatgcaaatattggtggggtggccatcgcacctgctcacggctcggttttgattgagtgtgcccggcgagagctgcac

SEQ ID NO: 344433 - DNA, 120 bp, Artificial Sequence
  ENSG00000138336_55 (sequence is synthesized)
gctaccactcctgttgagcaccccaaccgtaatcatccaacccgcctctcccttgtcttttaccagcacaaaaacctaaataagccccaacatggttttgaactaaacaagattaagttt

SEQ ID NO: 344434 - DNA, 120 bp, Artificial Sequence
  ENSG00000138336_56 (sequence is synthesized)
gaggctaaagaagctaagaataagaaaatgaaggcctcagagcaaaaagaccaggcagctaatgaaggtccagaacagtcctctgaagtaaatgaattgaaccaaattccttctcataaa

SEQ ID NO: 344435 - DNA, 120 bp, Artificial Sequence
  ENSG00000138336_57 (sequence is synthesized)
gcattaacattaacccatgacaatgttgtcaccgtgtccccttatgctctcacacacgttgcggggccctataaccattgggtctgaaggcttttctccccctcttaatgcctttgctag

SEQ ID NO: 344436 - DNA, 120 bp, Artificial Sequence
  ENSG00000138336_58 (sequence is synthesized)
tgcagtgtattttttcaaggtgctgttaaaagaaagtcatgttgtcgtttactatcttcatctcacccatttcaagtctgaggtaaaaaaataataatgataacaaaacggggtgggtat

SEQ ID NO: 344437 - DNA, 120 bp, Artificial Sequence
  ENSG00000138336_59 (sequence is synthesized)
tcttaactgtgactatattttgacaattggtagaaggtgcacattttaagcaaaaataaaagttttatagttttaaatacataaagaaatgtttcagttaggcattaaccttgatagaat

SEQ ID NO: 344438 - DNA, 120 bp, Artificial Sequence
  ENSG00000138336_60 (sequence is synthesized)
cactcagtttggtgctttaaattaagtctgtttactatgaaacaagagtcatttttagaggattttaacaggttcatgttctatgatgtaaaatcaagacacacagtgttaactctacac

SEQ ID NO: 344439 - DNA, 120 bp, Artificial Sequence
  ENSG00000138336_61 (sequence is synthesized)
agcttctggtgcttaaccacatccacacagttaaaaataagctgaattattatttcatggtgccattgttccaacatcttccaatcattgctagaaaattggcatattcctttgaaataa

SEQ ID NO: 344440 - DNA, 120 bp, Artificial Sequence
  ENSG00000138336_62 (sequence is synthesized)
acttatgaaatgttttctctcttaaaatatttctcctgtgtaaaataaatcattgttgttagtaatggttggaggctgttcataaattgtaaatatatattttaaaagcactttctattt

SEQ ID NO: 344441 - DNA, 120 bp, Artificial Sequence
  ENSG00000138336_63 (sequence is synthesized)
ttaaaagtaacttgaaataatatagtataagaatcctattgtctattgtttgtgcatatttgcatacaagagaaatcatttatccttgctgtgtagagttccatcttgttaactgcagta

SEQ ID NO: 344442 - DNA, 120 bp, Artificial Sequence
  ENSG00000138336_64 (sequence is synthesized)
tgtattctaatcatgtatatggtttgtgttcttttactgtgtcctctcacattcaagtattagcaacttgcagtatataaaatagttagataatgagaagttgttaattatctctaaaat

SEQ ID NO: 344443 - DNA, 120 bp, Artificial Sequence
  ENSG00000138336_65 (sequence is synthesized)
tggaattaggaagcatatcaccaatactgattaacattctctttggaactaggtaagagtggtctcttcttattgaacaacctcaatttagtttcatcccacctttctcagtataatcca

SEQ ID NO: 344444 - DNA, 120 bp, Artificial Sequence
  ENSG00000138336_66 (sequence is synthesized)
tgagaggtgtttccaaaaggagatgagggaacaggataggtttcagaagagtcaaatgcttctaatgtctcaaggtgataaaatacaaaaactaagtagacagatatttgtactgaagtc

SEQ ID NO: 344445 - DNA, 120 bp, Artificial Sequence
  ENSG00000138336_67 (sequence is synthesized)
tgatacagaattagaaaaaaaaaattcttgttgaaatattttgaaaacaaattccctactatcatcacatgcctccccaaccccaagtcaaaaacaagaggaatggtactacaaacatgg

SEQ ID NO: 344446 - DNA, 120 bp, Artificial Sequence
  ENSG00000138336_68 (sequence is synthesized)
ctttgtccattaagagctaattcatttgtttatcttagcatactagatttgggaaaatgataactcatcttttctgataattgcctatgttctaggtaacaggaaaacaggcattaagtt

SEQ ID NO: 344447 - DNA, 120 bp, Artificial Sequence
  ENSG00000138336_69 (sequence is synthesized)
tattttagtcttcccattttcttcctattactttattgactcattttattgcaaaacaaaaaggattacccaaacaacatgtttcgaacaaggagaattttcaatgaaatacttgattct

SEQ ID NO: 344448 - DNA, 120 bp, Artificial Sequence
  ENSG00000138336_70 (sequence is synthesized)
gttaaaatgcagaggtgctataacattcaaagtgtcagattccttgggagtatggaaaacctaatggtgcttctcccttggaaatgccataggaagcccacaaccgctaacacttacaat

SEQ ID NO: 344449 - DNA, 120 bp, Artificial Sequence
  ENSG00000138336_71 (sequence is synthesized)
tttggtgcaaaagcaaacagttccagcaggctctctaaagaaaaactcattgtaacttattaaaataatatctggtgcaaagtatctgttttgagcttttgactaatccaagtaaaggaa

SEQ ID NO: 344450 - DNA, 120 bp, Artificial Sequence
  ENSG00000138336_72 (sequence is synthesized)
tatgaagggattgtaaaaaacaaaatgtccattgatagaccatcgtgtacaagtagatttctgcttgttgaatatgtaaaatagggtaattcattgacttgttttagtattttgtgtgcc

SEQ ID NO: 344451 - DNA, 120 bp, Artificial Sequence
  ENSG00000138336_73 (sequence is synthesized)
ttagatttccgttttaagacatgtatatttttgtgagcctaaggtttcttatatacatataagtatataaataagtgattgtttattgcttcagctgcttcaacaagatatttactagta

SEQ ID NO: 344452 - DNA, 120 bp, Artificial Sequence
  ENSG00000138336_74 (sequence is synthesized)
ttagactatcaggaatacacccttgcgagattatgttttagattttaggccttagctcccactagaaattatttcttcaccagatttaatggataaagttttatggctctttatgcatcc

SEQ ID NO: 344453 - DNA, 120 bp, Artificial Sequence
  ENSG00000138336_75 (sequence is synthesized)
actcatctactcattcttcgagtctacacttattgaatgcctgcaaaatctaagtatcacttttatttttctttggatcaccacctatgacatagtaaacttgaagaataaaaactaccc

SEQ ID NO: 344454 - DNA, 120 bp, Artificial Sequence
  ENSG00000138336_76 (sequence is synthesized)
tcagaaatatttttaaaagaagtagcaaattatcttcagtataatccatggtaatgtatgcagtaattcaaattgatctctctctcaataggtttcttaacaatctaaacttgaaacatc

SEQ ID NO: 344455 - DNA, 120 bp, Artificial Sequence
  ENSG00000138336_77 (sequence is synthesized)
aatgttaatttttggaactattgggatttgtgacgcttgttgcagtttaccaaaacaagtatttgaaaatatatagtatcaactgaaatgtttccattccgttgttgtagttaacatcat

SEQ ID NO: 344456 - DNA, 120 bp, Artificial Sequence
  ENSG00000138336_78 (sequence is synthesized)
gaatggacttcttaagctgattaccccactgtgggaaccaaattggattcctactttgttggactctctttcctgattttaacaatttaccatcccattctctgccctgtgatttttttt

SEQ ID NO: 344457 - DNA, 120 bp, Artificial Sequence
  ENSG00000138336_79 (sequence is synthesized)
aaaagcttattcaatgttctgcagcattgtgattgtatgctggctacactgcttttagaatgctctttctcatgaagcaaggaaataaatttgtttgaaatgacattttctctcataaaa

SEQ ID NO: 344458 - DNA, 120 bp, Artificial Sequence
  ENSG00000138346_0 (sequence is synthesized)
atgcgcgcgaggtgcgcaggctcgcgcctttttcccttttctaagctttctgtgttacccccggttccgctgtcttttctgtctacagtttgcgatccccgcgtccaggatggagcagct

SEQ ID NO: 344459 - DNA, 120 bp, Artificial Sequence
  ENSG00000138346_1 (sequence is synthesized)
gaacgaactggagctgctgatggagaagagtttttgggaggaggcggagctgccggcggagctatttcagaagaaagtggtagcttcctttccaagaacagttctgagcacaggaatgga

SEQ ID NO: 344460 - DNA, 120 bp, Artificial Sequence
  ENSG00000138346_2 (sequence is synthesized)
taaccggtacctggtgttggcagtcaatactgtacagaacaaagagggaaactgtgaaaagcgcctggtcatcactgcttcacagtcactagaaaataaagaactatgcatccttaggaa

SEQ ID NO: 344461 - DNA, 120 bp, Artificial Sequence
  ENSG00000138346_3 (sequence is synthesized)
tgactggtgttctgttccagtagagccaggagatatcattcatttggagggagactgcacatctgacacttggataatagataaagattttggatatttgattctgtatccagacatgct

SEQ ID NO: 344462 - DNA, 120 bp, Artificial Sequence
  ENSG00000138346_4 (sequence is synthesized)
gatttctggcaccagcatagccagtagtattcgatgtatgagaagagctgtcctgagtgaaacttttaggagctctgatccagccacacgccaaatgctaattggtacggttctccatga

SEQ ID NO: 344463 - DNA, 120 bp, Artificial Sequence
  ENSG00000138346_5 (sequence is synthesized)
ggtgtttcaaaaagccataaataatagctttgccccagaaaagctacaagaacttgcttttcaaacaattcaagaaataagacatttgaaggaaatgtaccgcttaaatctaagtcaaga

SEQ ID NO: 344464 - DNA, 120 bp, Artificial Sequence
  ENSG00000138346_6 (sequence is synthesized)
tgaaataaaacaagaagtagaggactatcttccttcgttttgtaaatgggcaggagatttcatgcataaaaacacttcgactgacttccctcagatgcagctctctctgccaagtgataa

SEQ ID NO: 344465 - DNA, 120 bp, Artificial Sequence
  ENSG00000138346_7 (sequence is synthesized)
tagtaaggataattcaacatgtaacattgaagtcgtgaaaccaatggatattgaagaaagcatttggtcccctaggtttggattgaaaggcaaaatagatgttacagttggtgtgaaaat

SEQ ID NO: 344466 - DNA, 120 bp, Artificial Sequence
  ENSG00000138346_8 (sequence is synthesized)
acatcgagggtataaaacaaaatacaagataatgccgctggaacttaaaactggcaaagaatcaaattctattgaacaccgtagtcaggttgttctgtacactctactaagccaagagag

SEQ ID NO: 344467 - DNA, 120 bp, Artificial Sequence
  ENSG00000138346_9 (sequence is synthesized)
aagagctgatccagaggctggcttgcttctctacctcaagactggtcagatgtaccctgtgcctgccaaccatctagataaaagagaattattaaagctaagaaaccagatggcattctc

SEQ ID NO: 344468 - DNA, 120 bp, Artificial Sequence
  ENSG00000138346_10 (sequence is synthesized)
attgtttcaccgtattagcaaatctgctactagacagaagacacagcttgcttctttgccacaaataattgaggaagagaaaacttgtaaatattgttcacaaattggcaattgtgctct

SEQ ID NO: 344469 - DNA, 120 bp, Artificial Sequence
  ENSG00000138346_11 (sequence is synthesized)
ttatagcagagcagttgaacaacagatggattgtagttcagtcccaattgtgatgctgcccaaaatagaagaagaaacccagcatctgaagcaaacacacttagaatatttcagcctttg

SEQ ID NO: 344470 - DNA, 120 bp, Artificial Sequence
  ENSG00000138346_12 (sequence is synthesized)
gtgtctaatgttaaccctggagtcacaatcgaaggataataaaaagaatcaccaaaatatctggctaatgcctgcttcggaaatggagaagagtggcagttgcattggaaacctgattag

SEQ ID NO: 344471 - DNA, 120 bp, Artificial Sequence
  ENSG00000138346_13 (sequence is synthesized)
aatggaacatgtaaagatagtttgtgatgggcaatatttacataatttccaatgtaaacatggtgccatacctgtcacaaatctaatggcaggtgacagagttattgtaagtggagaaga

SEQ ID NO: 344472 - DNA, 120 bp, Artificial Sequence
  ENSG00000138346_14 (sequence is synthesized)
aaggtcactgtttgctttgtctagaggatatgtgaaggagattaacatgacaacagtaacttgtttattagacagaaacttgtcggtccttccagaatcaactttgttcagattagacca

SEQ ID NO: 344473 - DNA, 120 bp, Artificial Sequence
  ENSG00000138346_15 (sequence is synthesized)
agaagaaaaaaattgtgatatagataccccattaggaaatctttccaaattgatggaaaacacgtttgtcagcaaaaaacttcgagatttaattattgactttcgtgaacctcagtttat

SEQ ID NO: 344474 - DNA, 120 bp, Artificial Sequence
  ENSG00000138346_16 (sequence is synthesized)
atcctaccttagttctgttcttccacatgatgcaaaggatacagttgcctgcattctaaagggtttgaataagcctcagaggcaagcgatgaaaaaggtacttctttcaaaagactacac

SEQ ID NO: 344475 - DNA, 120 bp, Artificial Sequence
  ENSG00000138346_17 (sequence is synthesized)
gcctgtggttttagcgttttgttgaccagctatacacactctgctgttgacaatattcttttgaagttagccaagtttaaaataggatttttgcgtttgggtcagattcagaaggttcat

SEQ ID NO: 344476 - DNA, 120 bp, Artificial Sequence
  ENSG00000138346_18 (sequence is synthesized)
ccagctatccagcaatttacagagcaagaaatttgcagatcaaagtccattaaatccttagctcttctagaagaactctacaatagtcaacttatagttgcaacaacatgtatgggaata

SEQ ID NO: 344477 - DNA, 120 bp, Artificial Sequence
  ENSG00000138346_19 (sequence is synthesized)
aaccatccaatattttcccgtaaaatttttgatttttgtattgtggatgaagcctctcaaattagccaaccaatttgtctgggccccctttttttttcacggagatttgtgttagtgggg

SEQ ID NO: 344478 - DNA, 120 bp, Artificial Sequence
  ENSG00000138346_20 (sequence is synthesized)
gaccatcagcagcttcctcccctggtgctaaaccgtgaagcaagagctcttggcatgagtgaaagcttattcaagaggctggagcagaataagagtgctgttgtacagttaaccgtgcag

SEQ ID NO: 344479 - DNA, 120 bp, Artificial Sequence
  ENSG00000138346_21 (sequence is synthesized)
tacagaatgaacagtaaaattatgtccttaagtaataagctgacctatgagggcaagctggagtgtggatcagacaaagtggccaatgcagtgataaacctacgtcactttaaagatgtg

SEQ ID NO: 344480 - DNA, 120 bp, Artificial Sequence
  ENSG00000138346_22 (sequence is synthesized)
aagctggaactggaattttatgctgactattctgataatccttggttgatgggagtatttgaacccaacaatcctgtttgtttccttaatacagacaaggttccagcgccagaacaagtt

SEQ ID NO: 344481 - DNA, 120 bp, Artificial Sequence
  ENSG00000138346_23 (sequence is synthesized)
gaaaaaggtggtgtgagcaatgtaacagaagccaaactcatagttttcctaacctccatttttgttaaggctggatgcagtccctctgatattggtattattgcaccgtacaggcagcaa

SEQ ID NO: 344482 - DNA, 120 bp, Artificial Sequence
  ENSG00000138346_24 (sequence is synthesized)
ttaaagatcatcaatgatttattggcacgttctattgggatggtcgaagttaatacagtagacaaataccaaggaagggacaaaagtattgtcctagtatcttttgttagaagtaataag

SEQ ID NO: 344483 - DNA, 120 bp, Artificial Sequence
  ENSG00000138346_25 (sequence is synthesized)
gatggaactgttggtgaactcttgaaagattggcgacgtcttaatgttgctataaccagagccaaacataaactgattcttctggggtgtgtgccctcactaaattgctatcctcctttg

SEQ ID NO: 344484 - DNA, 120 bp, Artificial Sequence
  ENSG00000138346_26 (sequence is synthesized)
gagaagctgcttaatcatttaaactcagaaaaattaatcattgatcttccatcaagagaacatgaaagtctttgccacatattgggtgactttcaaagagaataaaacactatttccctt

SEQ ID NO: 344485 - DNA, 120 bp, Artificial Sequence
  ENSG00000138346_27 (sequence is synthesized)
gccttttcatactagggcagtatctcctctagctagtgcccatacagaaaattctatcaccatacaaaatttaatgcagtatttatgttttaaagcacaggtgtaccgaaaactgtgaaa

SEQ ID NO: 344486 - DNA, 120 bp, Artificial Sequence
  ENSG00000138346_28 (sequence is synthesized)
agtctgaatttatgggttctatgcatgcatttttgcctaacctagagaaagagtttgataaatttttaccagctttgaagatggattaacttttgactttgagctttaaacttttaagtc

SEQ ID NO: 344487 - DNA, 120 bp, Artificial Sequence
  ENSG00000138346_29 (sequence is synthesized)
agacatttcaggactaatttgattttgtagatatcattgtaagaactttatttgaaagactgaataaagggatttgatttgttttcatcatttaagcacagtcttgtgatgatgagaaca

SEQ ID NO: 344488 - DNA, 120 bp, Artificial Sequence
  ENSG00000138346_30 (sequence is synthesized)
taagtgtgattcttttctgtattttgaggtccctaatccaaagcccattttgctaggattttttctgctatcagatgtgttttcactctaaacctagtcttttatgacatgaattgatta

SEQ ID NO: 344489 - DNA, 120 bp, Artificial Sequence
  ENSG00000138346_31 (sequence is synthesized)
cttcctgttaattttctatcctcccttactatcctccttttttgttttcagtattcagtatttcagtattctagagtagattttgatataaaagaaaataattcttacatcatcttttgc

SEQ ID NO: 344490 - DNA, 120 bp, Artificial Sequence
  ENSG00000138346_32 (sequence is synthesized)
aacaaattttgttttctgaattgataataaatttaaaaagttgattcctattttcacatatgttcatatgcccctatgtttgggggtatcactcagttttcccttttttgtgtaaagatg

SEQ ID NO: 344491 - DNA, 120 bp, Artificial Sequence
  ENSG00000138346_33 (sequence is synthesized)
ttttgtaaaacaaaattgtctcaaagtgattatattatatatataaaaagtaacagattttaacaaaggttaaaagattcttggggtaacagattcttctggggcttggaaatcttccat

SEQ ID NO: 344492 - DNA, 120 bp, Artificial Sequence
  ENSG00000138346_34 (sequence is synthesized)
cttggaaatcttccatttctcttgagggttttttttaatgagtgttaaatatgttaaaatttttatttctacctcatgtgtttttttaaattattacttgaagttttttatttaataaat

SEQ ID NO: 344493 - DNA, 120 bp, Artificial Sequence
  ENSG00000138346_35 (sequence is synthesized)
gatatataattcacatctgtgtagttcatccatttaaaatgtacaattcgctggtttttagtatattcacagcgttgtgcagctatcaccacaatcaactttgagtattttcatcacccc

SEQ ID NO: 344494 - DNA, 120 bp, Artificial Sequence
  ENSG00000138346_36 (sequence is synthesized)
aattaagggagcaatgtctaaggaattatttcatcctgggaaatatggacagatttagagcaaattcagtaattgtattcagtctttgagataggaaagtttgttataaacatcagttgg

SEQ ID NO: 344495 - DNA, 120 bp, Artificial Sequence
  ENSG00000138346_37 (sequence is synthesized)
gcacataatgtaaacatttaattattaaattcagaaaagtttaacttaatcaggatttctttcttttaaattgtgtctttttctatttaggctggatgcagtccctctgatattggtatt

SEQ ID NO: 344496 - DNA, 120 bp, Artificial Sequence
  ENSG00000138346_38 (sequence is synthesized)
gtttgcgatccccgcgtccaggatggagcagctgaacgaactggagctgctgatggagaagagtttttgggaggaggcggagctgccggcggagctaaccggggtctttttctgtcgctc

SEQ ID NO: 344497 - DNA, 81 bp, Artificial Sequence
  ENSG00000138346_39 (sequence is synthesized)
agctgccggcggagctaaccggggtctttttctgtcgctcaggaaggggtgcagtagcatgatcgtatccacctcagcctc

SEQ ID NO: 344498 - DNA, 120 bp, Artificial Sequence
  ENSG00000138346_40 (sequence is synthesized)
ttaatcatttaaactcagaaaaattaatatcctttttcttctgtatatggtcacatttgattgcactgttgtgagtatttatttgcttgtttaaattaaagctctcactatgttgcttaa

SEQ ID NO: 344499 - DNA, 120 bp, Artificial Sequence
  ENSG00000138347_0 (sequence is synthesized)
aaaaataatgccatttttttgaatgatgaactatggtataatgcatttagtgttcattccaaacgtcaatcaataaataacatgggcctctagctataagggaaattctataggtaaaag

SEQ ID NO: 344500 - DNA, 120 bp, Artificial Sequence
  ENSG00000138347_1 (sequence is synthesized)
aactgattgacccccacccccataggtgctgtcctgctatggaatccctttgctcagttttctcctgtccaatcaggtggaatgtttcacaggcacatggtttatacagctcaaaataac

SEQ ID NO: 344501 - DNA, 120 bp, Artificial Sequence
  ENSG00000138347_2 (sequence is synthesized)
ttgggacctgtgagctgacaaatgctctggctccggtggtgacaggttgtccagcttcttacagccatcttcactgaaactaaggttaactcctcactctctatggacggctactctcta

SEQ ID NO: 344502 - DNA, 120 bp, Artificial Sequence
  ENSG00000138347_3 (sequence is synthesized)
tttccaagggcgtgaagaatttccctcttctcctgtgctttcatctaaaagttctccctggataattatcattgcagtggagtgcctggattggacatcctcatctgggtcaactaaaaa

SEQ ID NO: 344503 - DNA, 120 bp, Artificial Sequence
  ENSG00000138347_4 (sequence is synthesized)
aagaaagcatgcaagacgacagcatagaagcttctacttccatatctcagcttctaagagagagctatttagctgaaaccagacatcggggaaacaatgagaggagtcgagcggagccct

SEQ ID NO: 344504 - DNA, 120 bp, Artificial Sequence
  ENSG00000138347_5 (sequence is synthesized)
cctccaacccttgccatttcggcagtccttctggggccgctgaaggaggcggaggccaagatgaccttccagatctttcagcctttctgagccaagaagaattagacgaaagtgtcaatt

SEQ ID NO: 344505 - DNA, 120 bp, Artificial Sequence
  ENSG00000138347_6 (sequence is synthesized)
tggcaagactggccatcaattacgaccctttggagaaggcagatgaaactcaagctagaaaacgactttctcctgatcagatgaaacactcacctaatttaagttttgagcctaacttct

SEQ ID NO: 344506 - DNA, 120 bp, Artificial Sequence
  ENSG00000138347_7 (sequence is synthesized)
gccaggataaccctcgaagtcccaccagctctaaagaaagcccccaggaggcaaaaaggccacagtattgttctgaaacccagtccaaaaaagtatttttaaataaggctgccgacttca

SEQ ID NO: 344507 - DNA, 120 bp, Artificial Sequence
  ENSG00000138347_8 (sequence is synthesized)
ttgaagagctatcctcccttttcaaatcccacagctccaaaaggattagacctcgtgcctgcaaaaaccacaagagtaaactggaatctcaaaacaaagttatgcaggaaaacagctcca

SEQ ID NO: 344508 - DNA, 120 bp, Artificial Sequence
  ENSG00000138347_9 (sequence is synthesized)
gtttctcagatctgtcagaaagacgagaaagatcttctgttcccatccctatccctgcggataccagggataatgaagtgaatcacgccctggaacagcaggaagccaagaggcgtgaag

SEQ ID NO: 344509 - DNA, 120 bp, Artificial Sequence
  ENSG00000138347_10 (sequence is synthesized)
cggagcaggctgccagtgaggcggctggtggagacactacaccagggtcttccccttcatctctgtactatgaagaacctctggggcaacctccccggttcactcaaaagttacggagca

SEQ ID NO: 344510 - DNA, 120 bp, Artificial Sequence
  ENSG00000138347_11 (sequence is synthesized)
gagaagttccagaaggaactcgagtacagttggattgcatagtggtaggaattccaccacctcaagtaaggtggtactgtgaaggcaaggagcttgaaaattccccagatattcacatcg

SEQ ID NO: 344511 - DNA, 120 bp, Artificial Sequence
  ENSG00000138347_12 (sequence is synthesized)
tccaggcaggaaatctgcactcactgaccattgcggaagcctttgaagaggacacaggacgctattcctgctttgcttctaacatctatgggacagattcgacttctgctgagatttata

SEQ ID NO: 344512 - DNA, 120 bp, Artificial Sequence
  ENSG00000138347_13 (sequence is synthesized)
tagaaggggtttcttcttctgactcagaaggcgaccctaacaaggaagagatgaatcgaatccagaagccaaatgaggtgtcatctcctcccactacctctgcagtcattcctccagcag

SEQ ID NO: 344513 - DNA, 120 bp, Artificial Sequence
  ENSG00000138347_14 (sequence is synthesized)
taccccaagcccagcatttggtggcccaacctcgtgtggcaaccatccagcagtgtcagagccccaccaattacttgcagggattggatggaaaacctatcattgcagctcctgtgttta

SEQ ID NO: 344514 - DNA, 120 bp, Artificial Sequence
  ENSG00000138347_15 (sequence is synthesized)
caaagatgctacaaaatttgtcagcttctgagggtcagctggttgtctttgaatgcagagtaaaaggagctccatctcctaaggttgagtggtatagagaagggactttaatagaagatt

SEQ ID NO: 344515 - DNA, 120 bp, Artificial Sequence
  ENSG00000138347_16 (sequence is synthesized)
ctccagattttaggattttacagaaaaaacctcgatccatggcagagccagaggagatttgcaccttggtcattgctgaggtgtttgcagaagattctgggtgcttcacatgtactgcaa

SEQ ID NO: 344516 - DNA, 120 bp, Artificial Sequence
  ENSG00000138347_17 (sequence is synthesized)
gcaacaaatacggcacagtgtcaagcattgcacagctgcacgtgagaggaaatgaggacctcagcaacaacgggtctcttcactcagccaactctaccaccaacctggcagctattgagc

SEQ ID NO: 344517 - DNA, 120 bp, Artificial Sequence
  ENSG00000138347_18 (sequence is synthesized)
cacagccctccccaccccactcagagcctccatctgtggaacaaccccccaaacccaaactcgagggggttctggtgaaccacaatgagccccggtccagctccaggattgggcttcgtg

SEQ ID NO: 344518 - DNA, 120 bp, Artificial Sequence
  ENSG00000138347_19 (sequence is synthesized)
tgcacttcaacctgcctgaagatgacaaaggaagtgaagcatcctccgaggctggtgtggtgaccaccagacagaccaggcccgattctttccaggagaggttcaacggacaggcaacaa

SEQ ID NO: 344519 - DNA, 120 bp, Artificial Sequence
  ENSG00000138347_20 (sequence is synthesized)
aaaccccagagccttcttcccccgtgaaagagccccctccagttctggccaaacccaaacttgattccactcagttacaacagcttcataaccaagtcttactggaacaacaccaattgc

SEQ ID NO: 344520 - DNA, 120 bp, Artificial Sequence
  ENSG00000138347_21 (sequence is synthesized)
aaaacccacctccttcatctcctaaggagtttcctttcagcatgactgttttgaactccaatgctcccccagcggtgacaacatccagtaagcaggtgaaggctccttcatcacagacgt

SEQ ID NO: 344521 - DNA, 120 bp, Artificial Sequence
  ENSG00000138347_22 (sequence is synthesized)
tcagcttggcccggccgaagtatttcttcccctccacgaacaccaccgcagcaactgtggccccttccagctctccggtgttcactttgagcagcactcctcaaactattcagaggacag

SEQ ID NO: 344522 - DNA, 120 bp, Artificial Sequence
  ENSG00000138347_23 (sequence is synthesized)
tgagcaaagaaagcctcttagtgtctcacccctctgtgcaaaccaaatctccaggagggctttccatccaaaatgagccactcccaccaggcccaacagaaccaacaccaccaccattca

SEQ ID NO: 344523 - DNA, 120 bp, Artificial Sequence
  ENSG00000138347_24 (sequence is synthesized)
cattttccatccccagcggaaaccagtttcagccccgctgtgtgtccccaattcctgtctctcctaccagccggattcagaacccagtggctttcctcagctctgttctgccttctctcc

SEQ ID NO: 344524 - DNA, 120 bp, Artificial Sequence
  ENSG00000138347_25 (sequence is synthesized)
cacaaatgccatggggctgcctagaagtgcaccatccatgccatcccagggattagcgaagaaaaatacaaagtctcctcaaccagtgaatgatgataacattcgtgaaactaagaacgc

SEQ ID NO: 344525 - DNA, 120 bp, Artificial Sequence
  ENSG00000138347_26 (sequence is synthesized)
agtgattcgagacttggggaaaaaaataactttcagtgatgtcagaccaaaccagcaggagtacaaaatttcaagctttgagcagaggctgatgaatgaaatagagtttcgcttggaacg

SEQ ID NO: 344526 - DNA, 120 bp, Artificial Sequence
  ENSG00000138347_27 (sequence is synthesized)
tactcctgttgatgaatcagatgatgaaattcaacatgatgagatccccacgggcaagtgtattgctcccatctttgacaagagactcaagcacttccgggtcacagaaggctctccagt

SEQ ID NO: 344527 - DNA, 120 bp, Artificial Sequence
  ENSG00000138347_28 (sequence is synthesized)
tacattcacctgcaaaattgttgggatacctgttccaaaggtttactggttcaaagatgggaagcagatttctaagagaaatgagcactgcaaaatgaggcgagaaggagatgggacatg

SEQ ID NO: 344528 - DNA, 120 bp, Artificial Sequence
  ENSG00000138347_29 (sequence is synthesized)
ctctctgcacattgaatccactaccagtgatgacgatggcaactacaccatcatggcagccaacccccaggggagaatcagctgttctggccacttgatggtacaaagtttgcccattcg

SEQ ID NO: 344529 - DNA, 120 bp, Artificial Sequence
  ENSG00000138347_30 (sequence is synthesized)
cagtcggctaacctctgctggtcagtctcacaggggaagatcccgagtgcaagaaagagacaaagagcccctacaggaacgctttttccgaccacatttcctgcaggctcctggggatat

SEQ ID NO: 344530 - DNA, 120 bp, Artificial Sequence
  ENSG00000138347_31 (sequence is synthesized)
ggtagctcatgaggggcgcctctgtcggctggactgtaaggtgagtggtttaccgcccccggagctgacatggctactcaatggccaacctgtgctaccagatgcctcccacaagatgct

SEQ ID NO: 344531 - DNA, 120 bp, Artificial Sequence
  ENSG00000138347_32 (sequence is synthesized)
ggtcagggagaccggagtccactctctgctcattgacccactcactcagcgcgacgcagggacctataagtgcatcgctaccaacaaaaccgggcagaattcttttagtctggagctctc

SEQ ID NO: 344532 - DNA, 120 bp, Artificial Sequence
  ENSG00000138347_33 (sequence is synthesized)
tgtagtagccaaagaggtgaagaaagcacctgtgatcctggagaaactacagaactgcggtgttcccgaaggccaccccgtgagactggagtgccgcgtgataggcatgcccccacctgt

SEQ ID NO: 344533 - DNA, 120 bp, Artificial Sequence
  ENSG00000138347_34 (sequence is synthesized)
gttctactggaagaaagacaatgagaccatcccttgcaccagagagaggatcagtatgcaccaggacacaacagggtatgcctgccttctcattcagccagccaagaaatcagacgctgg

SEQ ID NO: 344534 - DNA, 120 bp, Artificial Sequence
  ENSG00000138347_35 (sequence is synthesized)
atggtacacgttgtcagccaagaatgaagccggcatcgtgtcgtgcactgccaggctggatatatacgctcagtggcaccatcagatcccaccgcccatgtctgtccggcccagtggcag

SEQ ID NO: 344535 - DNA, 120 bp, Artificial Sequence
  ENSG00000138347_36 (sequence is synthesized)
tcgctacggatctctcaccagtaaaggacttgacatattttctgccttttcctccatggaaagcacgatggtgtattcatgctcttctcggagtgtagtggagagtgatgaactttaaga

SEQ ID NO: 344536 - DNA, 120 bp, Artificial Sequence
  ENSG00000138347_37 (sequence is synthesized)
atgtctaggtacctgctgtgtaagagagcggactgtggagggggaatgagaacaagccagacttggtggtttccaagcaaccgaagttgagtaagttcccacactgctggacctgtggca

SEQ ID NO: 344537 - DNA, 120 bp, Artificial Sequence
  ENSG00000138347_38 (sequence is synthesized)
aagagtgctttgaataagtcagctagggattcttgcagtctcagctgagggagaaaggtagggctgtgccttctaaagattccaacagagatgtgagaagataatacagatgaaccaaag

SEQ ID NO: 344538 - DNA, 120 bp, Artificial Sequence
  ENSG00000138347_39 (sequence is synthesized)
atgtcacacagttgccatccactgctttgggaaaaaactagcatgctcccctgctccctgttgtgttagggatgtttaggtcatactaggagcaattaggagccatatgcctgggctgag

SEQ ID NO: 344539 - DNA, 120 bp, Artificial Sequence
  ENSG00000138347_40 (sequence is synthesized)
aagagctaggcagtagtgaccttaggatatgactaactcaccaaacaatgccaaggagaaaggcggacaggtcaccatcacctttcatcgattacatgtatagcagtagttttggtgaat

SEQ ID NO: 344540 - DNA, 120 bp, Artificial Sequence
  ENSG00000138347_41 (sequence is synthesized)
tcaccaaatcagcttccacttagcattaggaggtcatgccatacaactcacgtatgcgggcaaacacttttgatttgcatatcctgggtgtactgagccacataataaggtgtcaaaatg

SEQ ID NO: 344541 - DNA, 120 bp, Artificial Sequence
  ENSG00000138347_42 (sequence is synthesized)
tgcttgagattccaaaaacttgctgaaacacttgatattgcacagtgcacttattttgtggccaaagcatggccttaccagcttgtctgcactattttcttttgggtggtgactgttttt

SEQ ID NO: 344542 - DNA, 120 bp, Artificial Sequence
  ENSG00000138347_43 (sequence is synthesized)
ttctgactttgcatatccctagacactagaactaaaggattggtaataaaccaatcagaaagaaatcctctgtggggtcactttaaaaactactagcttcaactaccacttacaaaatgt

SEQ ID NO: 344543 - DNA, 120 bp, Artificial Sequence
  ENSG00000138347_44 (sequence is synthesized)
gcaagagtcatcatttgcccataaaatacacctcatgggctcctacccctttccccaaaagtctgaaagtgtaggaggaaggaagagatacaaacaaggagaggaaatgatgggagagtg

SEQ ID NO: 344544 - DNA, 120 bp, Artificial Sequence
  ENSG00000138347_45 (sequence is synthesized)
ttgtttttgtcacttgccccagcagagcaggggttttggaaggagaggtctttaatagctttgaaatgctttgagatcattggtcaaattgcattttctatgtagagaatattctgctag

SEQ ID NO: 344545 - DNA, 120 bp, Artificial Sequence
  ENSG00000138347_46 (sequence is synthesized)
gtggaaaagttgggagaaaggggaatatgcatctttattctaatcaccaattcaaaccctgcctcttaaggaatttttagacttaagttcactgtgatatccctagtacctagaagagta

SEQ ID NO: 344546 - DNA, 120 bp, Artificial Sequence
  ENSG00000138347_47 (sequence is synthesized)
cctagcacaaagtagacattcaataaatatttgctggttgaatgaatcttctgttattatgtctattataagataacctaatcttatattctgcaggaatatgccacccacacaccagtc

SEQ ID NO: 344547 - DNA, 120 bp, Artificial Sequence
  ENSG00000138347_48 (sequence is synthesized)
caaacactgccctgggaatgctcatcacagcacagtttgctctaggctgtgcagggaaatgaattgcaggtgtctgttttcaattccctgtgctggaatccctggtgctgtctgtgccaa

SEQ ID NO: 344548 - DNA, 120 bp, Artificial Sequence
  ENSG00000138347_49 (sequence is synthesized)
gcacactcagctggcattgtatttgtgtgaacagacagtaactgcttagaaaggcttgaaactgtcttcacttcaaggcaaggatttccagcataaaaataaattcattcactggagaaa

SEQ ID NO: 344549 - DNA, 120 bp, Artificial Sequence
  ENSG00000138347_50 (sequence is synthesized)
atataggaatggtgcttctcctgagacagaggttttgtttagttttttcatctgatactggatatgtcaagatgaatctatgaacttcaagcaaaacttattgaagctttggtatatgtg

SEQ ID NO: 344550 - DNA, 120 bp, Artificial Sequence
  ENSG00000138347_51 (sequence is synthesized)
agtaatttgttttagagaactggagcctatagcgatataaaaaaatagcaaatgcaaacattttatatgaatctactagcatggaaattctcccatgcttaccgtccaagtgaagacttc

SEQ ID NO: 344551 - DNA, 120 bp, Artificial Sequence
  ENSG00000138347_52 (sequence is synthesized)
gctagccaaatgagcagatctggcaagccatccttgtgcgtgaaaggcctgctgaggccatcctggccatctgagtaaggacaaaaacacttctgacagagagtttgggcatttgaatca

SEQ ID NO: 344552 - DNA, 120 bp, Artificial Sequence
  ENSG00000138347_53 (sequence is synthesized)
tatatacaagaatacataatgaagttacactgagatgaataaaaagtgaaaaataaagttttaggaaaaaaagatccaaatgggccgggtgcagtggctcatgtctgtaattccagcact

SEQ ID NO: 344553 - DNA, 120 bp, Artificial Sequence
  ENSG00000138347_54 (sequence is synthesized)
gctcatgtctgtaattccagcactttgcgaggccgaggcgggcggattacttgagatcagaagttcaagaccagcctggcctacatgacaaaatgaaaccccatctctactaaaaatata

SEQ ID NO: 344554 - DNA, 120 bp, Artificial Sequence
  ENSG00000138356_0 (sequence is synthesized)
actcggcgggtcggtgccgccgggtcccaggtgcccgctacttcccagaacctccgcctcccgctccgggccctcgaaccagcgcggacaccacaatggaccgggcgtccgagctgctct

SEQ ID NO: 344555 - DNA, 120 bp, Artificial Sequence
  ENSG00000138356_1 (sequence is synthesized)
tctacgtgaacggccgcaaggtgatagaaaaaaatgtcgatcctgaaacaatgctgttgccttatttgaggaagaagcttcgactcacaggaactaagtatggctgtggaggaggaggct

SEQ ID NO: 344556 - DNA, 120 bp, Artificial Sequence
  ENSG00000138356_2 (sequence is synthesized)
gtggtgcttgtacagtgatgatatcacgatacaaccccatcaccaagaggataaggcatcacccagccaatgcctgtctgattcccatctgttctctgtatggtgctgccgtcaccacag

SEQ ID NO: 344557 - DNA, 120 bp, Artificial Sequence
  ENSG00000138356_3 (sequence is synthesized)
tagaaggcataggaagcacccacaccagaattcatcctgttcaggagaggattgccaagtgtcatggcacccagtgtggcttctgcacacctgggatggtgatgtccatctacacgctgc

SEQ ID NO: 344558 - DNA, 120 bp, Artificial Sequence
  ENSG00000138356_4 (sequence is synthesized)
tcaggaaccacccagagcccactctggatcagttaactgatgcccttggtggtaacctgtgccgttgcactggatacaggcccataattgatgcatgcaagactttctgtaaaacttcgg

SEQ ID NO: 344559 - DNA, 120 bp, Artificial Sequence
  ENSG00000138356_5 (sequence is synthesized)
gctgctgtcaaagtaaagaaaatggggtttgctgtttggatcaaggaatcaatggattgccagaatttgaggaaggaagtaagacaagtccaaaactcttcgcagaagaggagtttctgc

SEQ ID NO: 344560 - DNA, 120 bp, Artificial Sequence
  ENSG00000138356_6 (sequence is synthesized)
cattggatccaacccaggaactgatatttcctcctgagctaatgataatggctgagaaacagtcgcaaaggaccagggtgtttggcagtgagagaatgatgtggttttcccccgtgaccc

SEQ ID NO: 344561 - DNA, 120 bp, Artificial Sequence
  ENSG00000138356_7 (sequence is synthesized)
tgaaggaactgctggaatttaaattcaagtatccccaggctcctgttatcatgggaaacacctctgtggggcctgaagtgaaatttaaaggcgtctttcacccagttataatttctcctg

SEQ ID NO: 344562 - DNA, 120 bp, Artificial Sequence
  ENSG00000138356_8 (sequence is synthesized)
atagaattgaagaactgagtgttgtaaaccatgcatataatggactcacccttggtgctggtctcagcctagcccaggtgaaggacattttggctgatgtagtccagaagcttccagagg

SEQ ID NO: 344563 - DNA, 120 bp, Artificial Sequence
  ENSG00000138356_9 (sequence is synthesized)
agaagacacagatgtaccatgctctcctgaagcatttgggaactctggctgggtcccagatcaggaacatggcttctttagggggacacatcattagcaggcatccagattcagatctga

SEQ ID NO: 344564 - DNA, 120 bp, Artificial Sequence
  ENSG00000138356_10 (sequence is synthesized)
atcccatcctggctgtgggtaactgtaccctcaacttgctatcaaaagaaggaaaacgacagattcctttaaatgagcaattcctcagcaagtgccctaatgcagatcttaagcctcaag

SEQ ID NO: 344565 - DNA, 120 bp, Artificial Sequence
  ENSG00000138356_11 (sequence is synthesized)
aaatcttggtctcagtgaacatcccctactcaaggaagtgggaatttgtgtcagccttccgacaagcccagcgacaggagaatgcgctagcgatagtcaattcaggaatgagagtctttt

SEQ ID NO: 344566 - DNA, 120 bp, Artificial Sequence
  ENSG00000138356_12 (sequence is synthesized)
ttggagaaggggatggcattattagagagttatgcatctcatatggaggcgttggtccagccaccatctgtgccaagaattcctgccagaaactcattggaaggcactggaacgaacaga

SEQ ID NO: 344567 - DNA, 120 bp, Artificial Sequence
  ENSG00000138356_13 (sequence is synthesized)
tgctggatatagcctgcaggcttattctgaatgaagtctcccttttgggctcggcgccaggtgggaaagtggagttcaagaggactctcatcatcagcttcctcttcaagttctacctgg

SEQ ID NO: 344568 - DNA, 120 bp, Artificial Sequence
  ENSG00000138356_14 (sequence is synthesized)
aagtgtcacagattttgaaaaagatggatccagttcactatcctagccttgcagacaagtatgaaagtgctttagaagatcttcattccaaacatcactgcagtacattaaagtaccaga

SEQ ID NO: 344569 - DNA, 120 bp, Artificial Sequence
  ENSG00000138356_15 (sequence is synthesized)
atataggcccaaagcagcatcctgaagacccaattggccaccccatcatgcatctgtctggtgtgaagcatgccacgggggaggccatctactgtgatgacatgcctctggtggaccagg

SEQ ID NO: 344570 - DNA, 120 bp, Artificial Sequence
  ENSG00000138356_16 (sequence is synthesized)
aacttttcttgacttttgtgactagttcaagagctcatgctaagattgtgtctattgatctgtcagaagctctcagcatgcccggtgtggtggacatcatgacagcagaacatcttagtg

SEQ ID NO: 344571 - DNA, 120 bp, Artificial Sequence
  ENSG00000138356_17 (sequence is synthesized)
acgtcaactccttctgcttttttactgaagctgagaaatttctggcgacagataaggtgttctgtgtgggtcagcttgtctgtgctgtgcttgccgattctgaggttcaggcaaagcgag

SEQ ID NO: 344572 - DNA, 120 bp, Artificial Sequence
  ENSG00000138356_18 (sequence is synthesized)
ctgctaagcgagtgaagattgtctatcaagacttggagccgctgatactaacaattgaggaaagtatacaacacaactcctccttcaagccagaaaggaaactggaatatggaaatgttg

SEQ ID NO: 344573 - DNA, 120 bp, Artificial Sequence
  ENSG00000138356_19 (sequence is synthesized)
acgaagcatttaaagtggttgatcaaattcttgaaggtgaaatacatatgggaggtcaagaacatttttatatggaaacccaaagcatgcttgtcgttcccaagggagaggatcaagaaa

SEQ ID NO: 344574 - DNA, 120 bp, Artificial Sequence
  ENSG00000138356_20 (sequence is synthesized)
tacgtgtccacacagtttcccaaatatatacaggacattgttgcctcaaccttgaagctcccagctaacaaggtcatgtgccatgtaaggcgtgttggtggagcgtttggagggaaggtg

SEQ ID NO: 344575 - DNA, 120 bp, Artificial Sequence
  ENSG00000138356_21 (sequence is synthesized)
ttaaaaaccggaatcattgcagccgtcactgcatttgccgcaaacaaacatggccgtgcagttcgctgtgttctggaacgaggagaagacatgttaataactggaggccgccatccttac

SEQ ID NO: 344576 - DNA, 120 bp, Artificial Sequence
  ENSG00000138356_22 (sequence is synthesized)
cttggaaagtacaaagctggattcatgaacgatggcagaatcttggccctggacatggagcattacagcaatgcaggcgcctccttggatgaatcattattcgtgatagaaatgggactt

SEQ ID NO: 344577 - DNA, 120 bp, Artificial Sequence
  ENSG00000138356_23 (sequence is synthesized)
ctgaaaatggacaatgcttacaagtttcccaatctccgctgccggggttgggcatgcagaaccaaccttccatccaacacagcttttcgtgggtttggctttcctcaggcagcgctgatc

SEQ ID NO: 344578 - DNA, 120 bp, Artificial Sequence
  ENSG00000138356_24 (sequence is synthesized)
accgaatcttgtatcacggaagttgcagccaaatgtggactatcccctgagaaggtgcgaatcataaacatgtacaaggaaattgatcaaacaccctacaaacaagagatcaatgccaag

SEQ ID NO: 344579 - DNA, 120 bp, Artificial Sequence
  ENSG00000138356_25 (sequence is synthesized)
aacctaatccagtgttggagagaatgtatggccatgtcttcctactccttgaggaaagttgctgtggaaaagttcaatgcagagaattattggaagaagaaaggactggccatggtcccc

SEQ ID NO: 344580 - DNA, 120 bp, Artificial Sequence
  ENSG00000138356_26 (sequence is synthesized)
ctgaagtttcctgttggccttggctcacgtgctgctggtcaggctgctgccttggttcacatttatcttgatggctctgtgctggtcactcacggtggaattgaaatggggcagggggtc

SEQ ID NO: 344581 - DNA, 120 bp, Artificial Sequence
  ENSG00000138356_27 (sequence is synthesized)
cacactaaaatgattcaggtggtcagccgtgaattaagaatgccaatgtcgaatgtccacctgcgtggaacaagcacagaaactgtccctaatgcaaatatctctggaggttctgtggtg

SEQ ID NO: 344582 - DNA, 120 bp, Artificial Sequence
  ENSG00000138356_28 (sequence is synthesized)
gcagatctcaacggtttggcagtaaaggatgcctgtcaaactcttctaaaacgcctcgaacccatcatcagcaagaatcctaaaggaacttggaaagactgggcacagactgcttttgat

SEQ ID NO: 344583 - DNA, 120 bp, Artificial Sequence
  ENSG00000138356_29 (sequence is synthesized)
gaaagcattaacctttcagctgttggatacttcagaggttatgagtcagacatgaactgggagaaaggcgaaggccagcccttcgaatactttgtttatggagctgcctgttccgaggtt

SEQ ID NO: 344584 - DNA, 120 bp, Artificial Sequence
  ENSG00000138356_30 (sequence is synthesized)
gaaatagactgcctgacgggggatcataagaacatcagaacagacattgtcatggatgttggctgcagtataaatccagccattgacataggccagattgaaggtgcatttattcaaggc

SEQ ID NO: 344585 - DNA, 120 bp, Artificial Sequence
  ENSG00000138356_31 (sequence is synthesized)
atgggactttatacaatagaggaactgaattattctccccagggcattctgcacactcgtggtccagaccaatataaaatccctgccatctgtgacatgcccacggagttgcacattgct

SEQ ID NO: 344586 - DNA, 120 bp, Artificial Sequence
  ENSG00000138356_32 (sequence is synthesized)
ttgttgcctccttctcaaaactcaaatactctttattcatctaagggtctgggagagtcgggggtgttcctggggtgttccgtgtttttcgctatccatgacgcagtgagtgcagcacga

SEQ ID NO: 344587 - DNA, 120 bp, Artificial Sequence
  ENSG00000138356_33 (sequence is synthesized)
caggagagaggcctgcatggacccttgacccttaatagtccactgaccccggagaagattaggatggcctgtgaagacaagttcacaaaaatgattccgagagatgaacctggatcctac

SEQ ID NO: 344588 - DNA, 120 bp, Artificial Sequence
  ENSG00000138356_34 (sequence is synthesized)
gttccttggaatgtacccatctgaatcaaatgcaaacttctggagaaaacagagtgcctcttcccagatggcaatctgtcctatctctgtgctggaagatgctagatctgaaagacagag

SEQ ID NO: 344589 - DNA, 120 bp, Artificial Sequence
  ENSG00000138356_35 (sequence is synthesized)
tttccacagttcagaaatcatcccacagtgttgcttttctatggagctgatttaaagtattccatttagatttgatagatatgcttaagcaatctataaatcattttcaatgttataaac

SEQ ID NO: 344590 - DNA, 120 bp, Artificial Sequence
  ENSG00000138356_36 (sequence is synthesized)
actaattggtttcctctagggtgatatccgtcattactctgtctcttcaatccatccagctaaatggaataggtgatgacttgcatgtgactcctacttggcttctatccaccaacagaa

SEQ ID NO: 344591 - DNA, 120 bp, Artificial Sequence
  ENSG00000138356_37 (sequence is synthesized)
attataccatatagtgaaaggcaattttctaaataatttcattactaatatgaactgtgaagttgtcattttttcatttgtccttttctgctatcaccttcctcttgtcagaatgaatat

SEQ ID NO: 344592 - DNA, 120 bp, Artificial Sequence
  ENSG00000138356_38 (sequence is synthesized)
agacactgtatctaagtgggaccaaagaaaaaatagcgaactttcaccaaagttttcatgaaaacccaaaagctttaaaagttactatcaagaaattgaaaggaaacccacagaatagga

SEQ ID NO: 344593 - DNA, 120 bp, Artificial Sequence
  ENSG00000138356_39 (sequence is synthesized)
taaaatatttgtaaatcatatatttgataaaagtcttgtaaccagatacataaagagctcttacaactcaataaaaggcaagtaatttaaaaataggcaaaagaattgctggatggtatg

SEQ ID NO: 344594 - DNA, 120 bp, Artificial Sequence
  ENSG00000138356_40 (sequence is synthesized)
gtagttctatttttagtttttaccctaactactctgacttgatcatttaacattctgtgtatgtaacaaaatatcacatgcataaatattatgtatcaataaaattttttaatgggcaaa

SEQ ID NO: 344595 - DNA, 120 bp, Artificial Sequence
  ENSG00000138356_41 (sequence is synthesized)
ggctcttgccaggagttatataaaccccagagaatgcctgctaggtaaaagaggttacctcacttactttttttctgttttagacatggccgtgcagttcgctgtgttctggaacgagga

SEQ ID NO: 344596 - DNA, 120 bp, Artificial Sequence
  ENSG00000138356_42 (sequence is synthesized)
acagacaaaaaaaatagttctccaaagccttgcttaatccttattttagcacttgcttttttatgattacataaatgaaaataactcattatttttaaaagtctttagggggacacatca

SEQ ID NO: 344597 - DNA, 120 bp, Artificial Sequence
  ENSG00000138356_43 (sequence is synthesized)
agccaatgctggtggcataatgtcacattccaaggcgtcagatgaacttggtttgtttgtatgtgaatggaagaacagtaagttttctacattattaataaattcatataaagaaagaaa

SEQ ID NO: 344598 - DNA, 120 bp, Artificial Sequence
  ENSG00000138363_0 (sequence is synthesized)
gccacatcccggcagccctcctacctgcgcacgtggtgccgccgctgctgcctcccgctcgccctgaacccagtgcctgcagccatggctcccggccagctcgccttatttagtgtctct

SEQ ID NO: 344599 - DNA, 120 bp, Artificial Sequence
  ENSG00000138363_1 (sequence is synthesized)
gacaaaaccggccttgtggaatttgcaagaaacctgaccgctcttggtttgaatctggtcgcttccggagggactgcaaaagctctcagggatgctggtctggcagtcagagatgtctct

SEQ ID NO: 344600 - DNA, 120 bp, Artificial Sequence
  ENSG00000138363_2 (sequence is synthesized)
gagttgacgggatttcctgaaatgttggggggacgtgtgaaaactttgcatcctgcagtccatgctggaatcctagctcgtaatattccagaagataatgctgacatggccagacttgat

SEQ ID NO: 344601 - DNA, 120 bp, Artificial Sequence
  ENSG00000138363_3 (sequence is synthesized)
ttcaatcttataagagttgttgcctgcaatctctatccctttgtaaagacagtggcttctccaggtgtaactgttgaggaggctgtggagcaaattgacattggtggagtaaccttactg

SEQ ID NO: 344602 - DNA, 120 bp, Artificial Sequence
  ENSG00000138363_4 (sequence is synthesized)
agagctgcagccaaaaaccacgctcgagtgacagtggtgtgtgaaccagaggactatgtggtggtgtccacggagatgcagagctccgagagtaaggacacctccttggagactagacgc

SEQ ID NO: 344603 - DNA, 120 bp, Artificial Sequence
  ENSG00000138363_5 (sequence is synthesized)
cagttagccttgaaggcattcactcatacggcacaatatgatgaagcaatttcagattatttcaggaaacagtacagcaaaggcgtatctcagatgcccttgagatatggaatgaaccca

SEQ ID NO: 344604 - DNA, 120 bp, Artificial Sequence
  ENSG00000138363_6 (sequence is synthesized)
catcagacccctgcccagctgtacacactgcagcccaagcttcccatcacagttctaaatggagcccctggatttataaacttgtgcgatgctttgaacgcctggcagctggtgaaggaa

SEQ ID NO: 344605 - DNA, 120 bp, Artificial Sequence
  ENSG00000138363_7 (sequence is synthesized)
ctcaaggaggctttaggtattccagccgctgcctctttcaaacatgtcagcccagcaggtgctgctgttggaattccactcagtgaagatgaggccaaagtctgcatggtttatgatctc

SEQ ID NO: 344606 - DNA, 120 bp, Artificial Sequence
  ENSG00000138363_8 (sequence is synthesized)
ataggatgtcttcatttggtgattttgttgcattgtccgatgtttgtgatgtaccaactgcaaaaattatttccagagaagtatctgatggtataattgccccaggatatgaagaagaag

SEQ ID NO: 344607 - DNA, 120 bp, Artificial Sequence
  ENSG00000138363_9 (sequence is synthesized)
ccttgacaatactttccaaaaagaaaaatggaaactattgtgtccttcagatggaccaatcttacaaaccagatgaaaatgaagttcgaactctctttggtcttcatttaagccagaaga

SEQ ID NO: 344608 - DNA, 120 bp, Artificial Sequence
  ENSG00000138363_10 (sequence is synthesized)
gaaataatggtgtcgtcgacaagtcattatttagcaatgttgttaccaaaaataaagatttgccagagtctgccctccgagacctcatcgtagccaccattgctgtcaagtacactcagt

SEQ ID NO: 344609 - DNA, 120 bp, Artificial Sequence
  ENSG00000138363_11 (sequence is synthesized)
ctaactctgtgtgctacgccaagaacgggcaggttatcggcattggagcaggacagcagtctcgtatacactgcactcgccttgcaggagataaggcaaactattggtggcttagacacc

SEQ ID NO: 344610 - DNA, 120 bp, Artificial Sequence
  ENSG00000138363_12 (sequence is synthesized)
atccacaagtgctttcgatgaagtttaaaacaggagtgaagagagcagaaatctccaatgccatcgatcaatatgtgactggaaccattggcgaggatgaagatttgataaagtggaagg

SEQ ID NO: 344611 - DNA, 120 bp, Artificial Sequence
  ENSG00000138363_13 (sequence is synthesized)
cactgtttgaggaagtccctgagttactcactgaggcagagaagaaggaatgggttgagaaactgactgaagtttctatcagctctgatgccttcttccctttccgagataacgtagaca

SEQ ID NO: 344612 - DNA, 120 bp, Artificial Sequence
  ENSG00000138363_14 (sequence is synthesized)
gagctaaaaggagtggtgtggcgtacattgcggctccctccggttctgctgctgacaaagttgtgattgaggcctgcgacgaactgggaatcatcctcgctcatacgaaccttcggctct

SEQ ID NO: 344613 - DNA, 120 bp, Artificial Sequence
  ENSG00000138363_15 (sequence is synthesized)
tccaccactgattttaccacacactgttttttggcttgcttatgtgtaggtgaacagtcacgcctgaaactttgaggataactttttaaaaaaataaaacagtatctcttaatcactgga

SEQ ID NO: 344614 - DNA, 120 bp, Artificial Sequence
  ENSG00000138363_16 (sequence is synthesized)
aacaagtcctaagaaaaatgcccaggtgctttctggcatggtgatttgcaccacatagaactaaagacgatgtcagaccaagcttcttcctttctctctccccgcataggatgaagattt

SEQ ID NO: 344615 - DNA, 120 bp, Artificial Sequence
  ENSG00000138363_17 (sequence is synthesized)
agccctcctacctgcgcacgtggtgccgccgctgctgcctcccgctcgccctgaacccagtgcctgcagccatggctcccggccagctcggtgaggccctagcggagcggcgcggtctgc

SEQ ID NO: 344616 - DNA, 120 bp, Artificial Sequence
  ENSG00000138363_18 (sequence is synthesized)
gccggcgggacccggcactgcaggggcggcgctgcgggattgaaagccagcgtccccgctccccggccgggccgcagcctgcgtggggcccgccttagagcagctcgcgggtgtaagacc

SEQ ID NO: 344617 - DNA, 120 bp, Artificial Sequence
  ENSG00000138363_19 (sequence is synthesized)
taacagattttaacttcatcaccacacagagaaaaagatactttcattgaaattctatgttgtctaaaattgatcattgaaacttcttacacatttctcatgttcttctgtctcatgtaa

SEQ ID NO: 344618 - DNA, 120 bp, Artificial Sequence
  ENSG00000138363_20 (sequence is synthesized)
ctttcttcattgtttttgacccctttctgaaaccacagtcctctgtctttttaaattgcagccttggtgtaggtttgtatatttgtacttcccctgttgattataagcttttgatgacaa

SEQ ID NO: 344619 - DNA, 120 bp, Artificial Sequence
  ENSG00000138363_21 (sequence is synthesized)
agaacgggcaggtaagtgggctgttggactcgccttcgggggactgttgttttacgaaatgatatttaaacatccgtctgccttagatattggacagcttgaaagggaatatttgccaaa

SEQ ID NO: 344620 - DNA, 120 bp, Artificial Sequence
  ENSG00000138363_22 (sequence is synthesized)
tgtttgtcttttgtgtttgtcagtgtttcctcagtaccctggtgggctgttaaaactaatgatgatcagaaaatatctttggaaccaggtactcaaagtagttgtgctgcttcttgcctt

SEQ ID NO: 344621 - DNA, 120 bp, Artificial Sequence
  ENSG00000138363_23 (sequence is synthesized)
ttggcacattttggattagtgagactctaatagctgttacaaaactggattatttcctttccttttcccccattggtattatttccagggaagaggaggtaagttacggtactgccaccc

SEQ ID NO: 344622 - DNA, 120 bp, Artificial Sequence
  ENSG00000138363_24 (sequence is synthesized)
accagcctatatttttgcagcctgcagggtattttcacattatttcttatgttgtcttatcaagaatctgctgagtagaaagactgctagactaggagttaacttcatctttaaaaagtt

SEQ ID NO: 344623 - DNA, 120 bp, Artificial Sequence
  ENSG00000138363_25 (sequence is synthesized)
aggttcattgaggcataatttgtatacagtagaattcacctttttaaagtacagtttgaccagttttcacaaatttcacagtatgtgaccgctgccacaattaaataccaaacatttctc

SEQ ID NO: 344624 - DNA, 120 bp, Artificial Sequence
  ENSG00000138363_26 (sequence is synthesized)
actgtgtgacgttaagcaagatattacacttctttcctagtgtcccgagcctcagaatacaagatggagctggttcatctctgaggtctctgctagccttttcttcacctggtgtcctga

SEQ ID NO: 344625 - DNA, 120 bp, Artificial Sequence
  ENSG00000138363_27 (sequence is synthesized)
gcagctcgcgggtgtaagacctggggaggcccggaccaggcctgcgaacgcagggtccaggtgctggccttgcgattcgagaatctcctcccccagaccctcccaaggccttgcagaaca

SEQ ID NO: 344626 - DNA, 120 bp, Artificial Sequence
  ENSG00000138375_0 (sequence is synthesized)
atcattcttacttttggaagcgaaactgcggccgcgttgcctgctgggaaatgtagttcagcggtggcctagcccttcaggcctggccgctacaataaggctggcgaactcgcagcgctt

SEQ ID NO: 344627 - DNA, 120 bp, Artificial Sequence
  ENSG00000138375_1 (sequence is synthesized)
gaatacccgtggcctaaccgtccactcggaagaccggtcccgctcgggaggctctgcagtcgcgcctggggtcagggccgggggcgaatgtggctcgcgttctaggcctccctgggttgg

SEQ ID NO: 344628 - DNA, 120 bp, Artificial Sequence
  ENSG00000138375_2 (sequence is synthesized)
aaaaagactatgttagcaagtgtcacgccatgcttttgccaactttccaattaaaggttgacattcctgcataagcatttctctgtgaaaatgtccttgcctcttacagaggagcagagg

SEQ ID NO: 344629 - DNA, 120 bp, Artificial Sequence
  ENSG00000138375_3 (sequence is synthesized)
aaaaagattgaagagaatcgacaaaaggctctggcccgcagagctgagaagttattggcagaacagcatcagaggactagctcgggcacctccattgctggcaacccattccaggccaag

SEQ ID NO: 344630 - DNA, 120 bp, Artificial Sequence
  ENSG00000138375_4 (sequence is synthesized)
caaggcccatcccaaaatttcccaagggagtcttgtaagccagtgagccatggtgtcattttcaagcaacagaatctcagtagctcatctaatgctgaccaaagacctcatgattcccac

SEQ ID NO: 344631 - DNA, 120 bp, Artificial Sequence
  ENSG00000138375_5 (sequence is synthesized)
agttttcaggcaaagggaatatggaaaaagccagaagaaatgcccacagcctgcccaggccacagtccacgtagtcaaatggctctcactggaatctctcctcccttggcacaaagtcct

SEQ ID NO: 344632 - DNA, 120 bp, Artificial Sequence
  ENSG00000138375_6 (sequence is synthesized)
ccagaggtccctaaacaacagctcttgagttatgagttaggtcaaggtcatgctcaggcttcacctgagatcaggttcacaccctttgctaacccaactcataagcctctggccaaacca

SEQ ID NO: 344633 - DNA, 120 bp, Artificial Sequence
  ENSG00000138375_7 (sequence is synthesized)
aagagttcccaagagacaccagctcattcctctggacagcctcccagggatgctaagttagaggccaagacagcaaaagcctccccttcggggcagaacatttcttacatccattctagc

SEQ ID NO: 344634 - DNA, 120 bp, Artificial Sequence
  ENSG00000138375_8 (sequence is synthesized)
tcagagagtgtaacgcccaggacagaaggaagactccagcagaagtcagggtcctcagtccaaaaaggagtgaactctcagaagggaaagtgcgtaaggaacggcgatcgtttccaggtg

SEQ ID NO: 344635 - DNA, 120 bp, Artificial Sequence
  ENSG00000138375_9 (sequence is synthesized)
ttgattgggtacaatgcggaactcattgcagtgtttaagaccctgcccagcaagaattatgatcctgacaccaagacgtggaacttcagcatgaatgactatagtgccctgatgaaagca

SEQ ID NO: 344636 - DNA, 120 bp, Artificial Sequence
  ENSG00000138375_10 (sequence is synthesized)
gcccagagcctccccacggtcaacctgcagcctctggaatgggcctatggcagcagcgagtcaccctccaccagcagtgagggacaggccggccttccatcagctccatccctttcattt

SEQ ID NO: 344637 - DNA, 120 bp, Artificial Sequence
  ENSG00000138375_11 (sequence is synthesized)
gtcaaagggcgatgcatgctcatctccagggcctacttcgaggcagacatcagttattcacaggaccttattgcgctttttaaacagatggattccagaagatatgatgtcaagaccagg

SEQ ID NO: 344638 - DNA, 120 bp, Artificial Sequence
  ENSG00000138375_12 (sequence is synthesized)
aagtggagctttctcttggaagagcacagtaaactaattgcaaaggtgcgctgcctcccacaagttcagctggaccctctgcccacgactctcaccctggcgtttgcttctcagctcaag

SEQ ID NO: 344639 - DNA, 120 bp, Artificial Sequence
  ENSG00000138375_13 (sequence is synthesized)
cagaggcagacctttctgaagtggaccccaagctcgtgtctaatctgatgccctttcagagagctggagtcaattttgccatagccaaaggaggccgcctgctgctcgctgacgacatgg

SEQ ID NO: 344640 - DNA, 120 bp, Artificial Sequence
  ENSG00000138375_14 (sequence is synthesized)
gcctggggaagaccatccaagccatctgcatcgcagccttttaccggaaggagtggccgctcctggtggtggtgccatcctccgtgcgcttcacctgggagcaggccttccttcggtggc

SEQ ID NO: 344641 - DNA, 120 bp, Artificial Sequence
  ENSG00000138375_15 (sequence is synthesized)
tgccatctctgagcccagattgcatcaacgtcgtggtgactgggaaggaccgcctgacagctggcctgatcaacattgtcagctttgaccttcttagcaagttggaaaaacagctaaaaa

SEQ ID NO: 344642 - DNA, 120 bp, Artificial Sequence
  ENSG00000138375_16 (sequence is synthesized)
ccccttttaaagttgtcatcattgatgaatctcacttcctcaaaaacagtaggactgcccgctgtcgagcagctatgccggtcctaaaggttgccaagagggtgatcctgttgtcgggca

SEQ ID NO: 344643 - DNA, 120 bp, Artificial Sequence
  ENSG00000138375_17 (sequence is synthesized)
caccagccatgtcccggcccgcagagctctacacgcagatcatcgcagtcaagccaactttcttcccccagtttcatgcctttggacttcgctactgtgatgccaaacggatgccttggg

SEQ ID NO: 344644 - DNA, 120 bp, Artificial Sequence
  ENSG00000138375_18 (sequence is synthesized)
ggtgggactactcaggttcctccaacctgggagagctgaagctcctgctggaggaagcagtcatgctgcggcgcctcaagtccgacgtcctttcccagctgcctgccaagcagcgcaaga

SEQ ID NO: 344645 - DNA, 120 bp, Artificial Sequence
  ENSG00000138375_19 (sequence is synthesized)
tagtggtgattgccccaggacggatcaatgccaggaccagagctgccctggatgctgcagccaaggaaatgaccaccaaggacaaaactaaacagcagcagaaagatgccctcattctct

SEQ ID NO: 344646 - DNA, 120 bp, Artificial Sequence
  ENSG00000138375_20 (sequence is synthesized)
tcttcaacagaacagctgaagctaaaatcccatctgtcattgaatatatcttggacctactggaaagtggaagagagaagtttttagtatttgcacaccataaggtggtcctggacgcaa

SEQ ID NO: 344647 - DNA, 120 bp, Artificial Sequence
  ENSG00000138375_21 (sequence is synthesized)
ttacgcaagagcttgagagaaagcacgtgcagcacatccgcatcgatggctccacctcatcagctgagcgggaggacctgtgccagcagttccaactgtcggagaggcatgctgtggccg

SEQ ID NO: 344648 - DNA, 120 bp, Artificial Sequence
  ENSG00000138375_22 (sequence is synthesized)
tgctgtccatcaccgctgccaatatgggcctcaccttctcctcggctgacctggtggtgtttgctgagctgttttggaacccaggggtgctgatccaggctgaggaccgcgtgcaccgca

SEQ ID NO: 344649 - DNA, 120 bp, Artificial Sequence
  ENSG00000138375_23 (sequence is synthesized)
ttggacagaccagctccgtgggcattcactacctcgtggcaaagggcacagctgatgactacctttggcccctgattcaagagaagattaaagttctggcagaagccgggctttctgaga

SEQ ID NO: 344650 - DNA, 120 bp, Artificial Sequence
  ENSG00000138375_24 (sequence is synthesized)
ccaatttttcagaaatgacagaatccactgattacctctacaaggacccaaagcagcagaagatctacgacctattccagaagtcctttgagaaagaaggaagtgatatggagctcctgg

SEQ ID NO: 344651 - DNA, 120 bp, Artificial Sequence
  ENSG00000138375_25 (sequence is synthesized)
aagcagcagagtcctttgacccaggaagtgcttcaggaacatctggaagtagttcccagaacatgggagacaccctggatgaaagctcattgacagccagtccacagaagaaaaggagat

SEQ ID NO: 344652 - DNA, 120 bp, Artificial Sequence
  ENSG00000138375_26 (sequence is synthesized)
ttgaattttttgataactgggacagctttacgtctcccctgtaaaaggggcaaaaagaaaaaaataaaaagcattttaaaatcatggaattgaaataaaataatgtattttgttttaaaa

SEQ ID NO: 344653 - DNA, 120 bp, Artificial Sequence
  ENSG00000138375_27 (sequence is synthesized)
attactcctcatactgctttgcctgaccacactacgacctggagaacttggattctagtcctaactctgccctcagtcctcttagatcctgacaccaagacgtggaacttcagcatgaat

SEQ ID NO: 344654 - DNA, 120 bp, Artificial Sequence
  ENSG00000138375_28 (sequence is synthesized)
ccttgctgtcagtccagaagggttctcaacaatcttgtcttgttagctgctatttgaaaacattagcatctctgctatgtggctagtagcattctggcaaagagctattttacagaaatg

SEQ ID NO: 344655 - DNA, 120 bp, Artificial Sequence
  ENSG00000138375_29 (sequence is synthesized)
acttctagatgactcacgaagccgacaacacgtctgtcatctcctagtaccagggaaaggacagtagagacagtcgttgtcagggaatggtgtctttctcaggaacactgagatggctga

SEQ ID NO: 344656 - DNA, 120 bp, Artificial Sequence
  ENSG00000138375_30 (sequence is synthesized)
gtaggagacagagtagatgttggttttattcctcttaaatggccgaaggaacataacgcttacaaagccctgccttttctaccagccagttcatcagccctttcttagctttcatcagtt

SEQ ID NO: 344657 - DNA, 120 bp, Artificial Sequence
  ENSG00000138375_31 (sequence is synthesized)
agtggggcgtggcgcccgcttaccttgaggctgggtgaggctcgccccgaaatgcggggcgtggggggcggggggcagaggtccctgcctagaggggaagaggggcgtccatgtggcgga

SEQ ID NO: 344658 - DNA, 120 bp, Artificial Sequence
  ENSG00000138375_32 (sequence is synthesized)
agtggggcgtggcgcccgcttaccttgaggctgggttggaaaaagactatgttagcaagtgtcacgccatggtatgtggttggttggtctatttcagtctaatctattatgctttctggt

SEQ ID NO: 344659 - DNA, 120 bp, Artificial Sequence
  ENSG00000138375_33 (sequence is synthesized)
taaaaatgtcacctttctcattatctgatggatttacgttgcaatgcataactttcttaggttctgataactcaccttggctgggccatgtgagttatcagaagagttactcaccatttt

SEQ ID NO: 344660 - DNA, 120 bp, Artificial Sequence
  ENSG00000138375_34 (sequence is synthesized)
catgtgagttaccatgtgagaaggagagaaatattgcctctgaaatgcctttttagctttggatttgctttttgcttttttttttttctttgagagttttgttcttgttgcccaggctgg

SEQ ID NO: 344661 - DNA, 120 bp, Artificial Sequence
  ENSG00000138375_35 (sequence is synthesized)
caccaaggacaaaactgtgagtccagggctggagacagatttggaagcagacatgtctaggtgttcctttccatgagaggcccttgaaaatgacctggcattctctcagctttcctttct

SEQ ID NO: 344662 - DNA, 120 bp, Artificial Sequence
  ENSG00000138375_36 (sequence is synthesized)
aaaatctcatattaagttgtggttttatacttgtatagatcgctgttgatggatggccataaagataagcacaggcaacagcagggtggtgatcaatattccgaatccctcaaagaatgt

SEQ ID NO: 344663 - DNA, 120 bp, Artificial Sequence
  ENSG00000138375_37 (sequence is synthesized)
ggaaattatgtctactatattttgagaatgcatcagtctagtaacagttgttagaaaattagtcctaacatgtttgatacatatgttaatcctttaaccatactgtgtcatttgtgttag

SEQ ID NO: 344664 - DNA, 120 bp, Artificial Sequence
  ENSG00000138375_38 (sequence is synthesized)
tcaaaataacaagccgacattcttataacaaaatagagttttcaaatcctcctaaccttttaaatccctattacaggcatttatggttggcaggaagttggcatccccctttttacagag

SEQ ID NO: 344665 - DNA, 120 bp, Artificial Sequence
  ENSG00000138375_39 (sequence is synthesized)
agctatgccggtcctaaagcatacggtgaacatttattggttacttggcgtcaggcatatgctacagaaaataaaggttgccaagagggtgatcctgttgtcgggcacaccagccatgtc

SEQ ID NO: 344666 - DNA, 120 bp, Artificial Sequence
  ENSG00000138376_0 (sequence is synthesized)
agacgcgggaagagcttggccggtttcgagtcgctggcctgcagcttccctgtggtttcccgaggcttccttgcttcccgctctgcgaggagcctttcatccgaaggcgggacgatgccg

SEQ ID NO: 344667 - DNA, 120 bp, Artificial Sequence
  ENSG00000138376_1 (sequence is synthesized)
gataatcggcagccgaggaaccggcagccgaggatccgctccgggaacgagcctcgttccgcgcccgccatggaaccggatggtcgcggtgcctgggcccacagtcgcgccgcgctcgac

SEQ ID NO: 344668 - DNA, 120 bp, Artificial Sequence
  ENSG00000138376_2 (sequence is synthesized)
cgcctggagaagctgctgcgctgctcgcgttgtactaacattctgagagagcctgtgtgtttaggaggatgtgagcacatcttctgtagtaattgtgtaagtgactgcattggaactgga

SEQ ID NO: 344669 - DNA, 120 bp, Artificial Sequence
  ENSG00000138376_3 (sequence is synthesized)
tgtccagtgtgttacaccccggcctggatacaagacttgaagataaatagacaactggacagcatgattcaactttgtagtaagcttcgaaatttgctacatgacaatgagctgtcagat

SEQ ID NO: 344670 - DNA, 120 bp, Artificial Sequence
  ENSG00000138376_4 (sequence is synthesized)
ttgaaagaagataaacctaggaaaagtttgtttaatgatgcaggaaacaagaagaattcaattaaaatgtggtttagccctcgaagtaagaaagtcagatatgttgtgagtaaagcttca

SEQ ID NO: 344671 - DNA, 120 bp, Artificial Sequence
  ENSG00000138376_5 (sequence is synthesized)
gtgcaaacccagcctgcaataaaaaaagatgcaagtgctcagcaagactcatatgaatttgtttccccaagtcctcctgcagatgtttctgagagggctaaaaaggcttctgcaagatct

SEQ ID NO: 344672 - DNA, 120 bp, Artificial Sequence
  ENSG00000138376_6 (sequence is synthesized)
ggaaaaaagcaaaaaaagaaaactttagctgaaatcaaccaaaaatggaatttagaggcagaaaaagaagatggtgaatttgactccaaagaggaatctaagcaaaagctggtatccttc

SEQ ID NO: 344673 - DNA, 120 bp, Artificial Sequence
  ENSG00000138376_7 (sequence is synthesized)
tgtagccaaccatctgttatctccagtcctcagataaatggtgaaatagacttactagcaagtggctccttgacagaatctgaatgttttggaagtttaactgaagtctctttaccattg

SEQ ID NO: 344674 - DNA, 120 bp, Artificial Sequence
  ENSG00000138376_8 (sequence is synthesized)
gctgagcaaatagagtctccagacactaagagcaggaatgaagtagtgactcctgagaaggtctgcaaaaattatcttacatctaagaaatctttgccattagaaaataatggaaaacgt

SEQ ID NO: 344675 - DNA, 120 bp, Artificial Sequence
  ENSG00000138376_9 (sequence is synthesized)
ggccatcacaatagactttccagtcccatttctaagagatgtagaaccagcattctgagcaccagtggagattttgttaagcaaacggtgccctcagaaaatataccattgcctgaatgt

SEQ ID NO: 344676 - DNA, 120 bp, Artificial Sequence
  ENSG00000138376_10 (sequence is synthesized)
tcttcaccaccttcatgcaaacgtaaagttggtggtacatcagggaggaaaaacagtaacatgtccgatgaattcattagtctttcaccaggtacaccaccttctacattaagtagttca

SEQ ID NO: 344677 - DNA, 120 bp, Artificial Sequence
  ENSG00000138376_11 (sequence is synthesized)
agttacaggcgagtgatgtctagtccctcagcaatgaagctgttgcccaatatggctgtgaaaagaaatcatagaggagagactttgctccatattgcttctattaagggcgacatacct

SEQ ID NO: 344678 - DNA, 120 bp, Artificial Sequence
  ENSG00000138376_12 (sequence is synthesized)
tctgttgaataccttttacaaaatggaagtgatccaaatgttaaagaccatgctggatggacaccattgcatgaagcttgcaatcatgggcacctgaaggtagtggaattattgctccag

SEQ ID NO: 344679 - DNA, 120 bp, Artificial Sequence
  ENSG00000138376_13 (sequence is synthesized)
cataaggcattggtgaacaccaccgggtatcaaaatgactcaccacttcacgatgcagccaagaatgggcatgtggatatagtcaagctgttactttcctatggagcctccagaaatgct

SEQ ID NO: 344680 - DNA, 120 bp, Artificial Sequence
  ENSG00000138376_14 (sequence is synthesized)
gttaatatatttggtctgcggcctgtcgattatacagatgatgaaagtatgaaatcgctattgctgctaccagagaagaatgaatcatcctcagctagccactgctcagtaatgaacact

SEQ ID NO: 344681 - DNA, 120 bp, Artificial Sequence
  ENSG00000138376_15 (sequence is synthesized)
gggcagcgtagggatggacctcttgtacttataggcagtgggctgtcttcagaacaacagaaaatgctcagtgagcttgcagtaattcttaaggctaaaaaatatactgagtttgacagt

SEQ ID NO: 344682 - DNA, 120 bp, Artificial Sequence
  ENSG00000138376_16 (sequence is synthesized)
acagtaactcatgttgttgttcctggtgatgcagttcaaagtaccttgaagtgtatgcttgggattctcaatggatgctggattctaaaatttgaatgggtaaaagcatgtctacgaaga

SEQ ID NO: 344683 - DNA, 120 bp, Artificial Sequence
  ENSG00000138376_17 (sequence is synthesized)
aaagtatgtgaacaggaagaaaagtatgaaattcctgaaggtccacgcagaagcaggctcaacagagaacagctgttgccaaagctgtttgatggatgctacttctatttgtggggaacc

SEQ ID NO: 344684 - DNA, 120 bp, Artificial Sequence
  ENSG00000138376_18 (sequence is synthesized)
ttcaaacaccatccaaaggacaaccttattaagctcgtcactgcaggtgggggccagatcctcagtagaaagcccaagccagacagtgacgtgactcagaccatcaatacagtcgcatac

SEQ ID NO: 344685 - DNA, 120 bp, Artificial Sequence
  ENSG00000138376_19 (sequence is synthesized)
catgcgagacccgattctgatcagcgcttctgcacacagtatatcatctatgaagatttgtgtaattatcacccagagagggttcggcagggcaaagtctggaaggctccttcgagctgg

SEQ ID NO: 344686 - DNA, 120 bp, Artificial Sequence
  ENSG00000138376_20 (sequence is synthesized)
tttatagactgtgtgatgtcctttgagttgcttcctcttgacagctgaatattataccagatgaacatttcaaattgaatttgcacggtttgtgagagcccagtcattgtactgttttta

SEQ ID NO: 344687 - DNA, 120 bp, Artificial Sequence
  ENSG00000138376_21 (sequence is synthesized)
atgttcacatttttacaaataggtagagtcattcatatttgtctttgaatcaaaaaaaaaaaaaaagtctaatgccagattaggaattcatgttatgtttaccatttagaagctgggatt

SEQ ID NO: 344688 - DNA, 120 bp, Artificial Sequence
  ENSG00000138376_22 (sequence is synthesized)
agattaatgaggacaccagaatcttggttaaatagacaagtggtatcattactgtttgagtcttttaatattctccatacctgccaccagtgaaaaaacttgcctttttttttttttttt

SEQ ID NO: 344689 - DNA, 120 bp, Artificial Sequence
  ENSG00000138376_23 (sequence is synthesized)
ttttagtaaacagaatattatcaaacaatttattttggctttattgaaaaaagagtatttggtctaaatgtgccaccataggtgttaaattctcctatctgcaattgtctttatcctata

SEQ ID NO: 344690 - DNA, 120 bp, Artificial Sequence
  ENSG00000138376_24 (sequence is synthesized)
ttgtgttcatttcttttcttaataatttactttgttgtgtgtttctacactttcatccctgttttttatcttgtatatcatcaggaaattgtgatttaatcattaacattggtttttttg

SEQ ID NO: 344691 - DNA, 120 bp, Artificial Sequence
  ENSG00000138376_25 (sequence is synthesized)
tgtgtgtggtaaaaatcaacactaggctcatggtacatatttttattctgtacatttgcttgtaactatcaatttgtaactctgtttatctactacatgtgtatatatacttagagcatt

SEQ ID NO: 344692 - DNA, 120 bp, Artificial Sequence
  ENSG00000138376_26 (sequence is synthesized)
ttctctaacacattttaatgttagtattttttaaaaggtctgaccagtctagcaaattgtcagtccaacgtcattactttaaattaagaagcagtcttcttctggtaaaccttgttggta

SEQ ID NO: 344693 - DNA, 120 bp, Artificial Sequence
  ENSG00000138376_27 (sequence is synthesized)
tttgtaaaataattttgaaggtcttaatttcttcctttgtaaaaggaaaaggttttttttaaagtttttaggttggcatggaggcagaagttggtgattacttgatttacaacagatttt

SEQ ID NO: 344694 - DNA, 120 bp, Artificial Sequence
  ENSG00000138376_28 (sequence is synthesized)
ttccagatcatacaaaaggccatacagtaagtatagaagtaggtatggggagggcttactaatatcaaataggcaaggccttagtgagtgggcaggataccacctgagagtggccagatg

SEQ ID NO: 344695 - DNA, 120 bp, Artificial Sequence
  ENSG00000138376_29 (sequence is synthesized)
tggggaggttactctgctctgggtgctctcattcatgaatcgacaaggatacattagattattttgaaacatttttttaagaagcagaattctttaataattccttcctagacattgaat

SEQ ID NO: 344696 - DNA, 120 bp, Artificial Sequence
  ENSG00000138376_30 (sequence is synthesized)
atacttataaaattaaagacttggggaaggagacactgagagacttgccagtttggttcctcatgaacaaaagaggacagtttgataactaccagaatagaatatccctagttttaaaat

SEQ ID NO: 344697 - DNA, 120 bp, Artificial Sequence
  ENSG00000138376_31 (sequence is synthesized)
agtgagaatctctgaagttcatcaacatcttaagatgcacttacttgaaagtttgagattctgtttatcatttgaaaacacattttgctttaattctttctttgacatgttgttttttca

SEQ ID NO: 344698 - DNA, 120 bp, Artificial Sequence
  ENSG00000138376_32 (sequence is synthesized)
tatcaagaaatatatgaacaaaataataaccttttgaccctgaccttgctgggtgaattagctctgaaacactctctacaaccagtaatgcatttgtcccacatttcattctgatagaaa

SEQ ID NO: 344699 - DNA, 120 bp, Artificial Sequence
  ENSG00000138376_33 (sequence is synthesized)
atgaacaccatagcaccaaacaaaaatccgaggcgttagataatgtctggattaaataatttaagactctctaggattttggttgtcattttttatttataacagactttaagtcacttt

SEQ ID NO: 344700 - DNA, 120 bp, Artificial Sequence
  ENSG00000138376_34 (sequence is synthesized)
ctgttgcctcataggtcacattttagacaggtttgtgtctgttccttgcatctgaattcctgattgtaaagacacctatgaggtctcttagtttttgtcattcattttcttggtttatca

SEQ ID NO: 344701 - DNA, 120 bp, Artificial Sequence
  ENSG00000138376_35 (sequence is synthesized)
cccctcccttctttttgttgtttttccctgactgttaagcagtttcatctttgcttttgttaaatatttgacagcagttagtttgtgttaagctcttgaaacttgtgattgtactttctg

SEQ ID NO: 344702 - DNA, 120 bp, Artificial Sequence
  ENSG00000138376_36 (sequence is synthesized)
tgtagatatacatgtaattattttttatttttcaatcatagattcaagcttccttcttttttaccacaaatcattaaagttatttgtgtttccatatacctgtgtcttgtataaaattgg

SEQ ID NO: 344703 - DNA, 120 bp, Artificial Sequence
  ENSG00000138376_37 (sequence is synthesized)
cttattctgtgctgttgaatgaggctcaacatgacttggtgaggaagtctattaactaacaaaagcttatcttttttaacataatgctttttaattaattttgaataaaaatatttctaa

SEQ ID NO: 344704 - DNA, 120 bp, Artificial Sequence
  ENSG00000138376_38 (sequence is synthesized)
agtgtactagatactttattaccttagattattccgaatacagtataactttgatagtttggaatagtcattaagaaacaattacacactgattgctttgtgtctctaaaagtgagaggc

SEQ ID NO: 344705 - DNA, 120 bp, Artificial Sequence
  ENSG00000138376_39 (sequence is synthesized)
tggtagcttttccacattctcatggctattttctagttctacttgaatttataactgtttccctttttccttgacagctgccactttgtagctatttttctgtctctgctaatactttac

SEQ ID NO: 344706 - DNA, 120 bp, Artificial Sequence
  ENSG00000138376_40 (sequence is synthesized)
catatctatctcaattgttttttcttttgacttgctgaaaaatagaaaccagatgggaagtatattagcattatgattgaaataagggtaaatgagcaatgtgtgaaggttttcactgac

SEQ ID NO: 344707 - DNA, 120 bp, Artificial Sequence
  ENSG00000138376_41 (sequence is synthesized)
ttcacctaaaagatagtttagctacttgaattttagtaaatagaatttttcctttatttcatcggtccccccacctttttttttttttgcacctgccttgtaaatttaatagttaagtga

SEQ ID NO: 344708 - DNA, 120 bp, Artificial Sequence
  ENSG00000138376_42 (sequence is synthesized)
cctctgcctagaggatgatatttggggaggtttgatgtttcctgtgggaataagacgattcacaggtgagagtggggccacattagctgttattgtttccatgggtcagtgtggaaaatg

SEQ ID NO: 344709 - DNA, 120 bp, Artificial Sequence
  ENSG00000138376_43 (sequence is synthesized)
cattaatcatattctaaacgttcatgggcctcattacagtcacaattgtctattctgtttcctaccctgaacacattaaaatggtaggaactaatgcttgtcttatttaattactaaaag

SEQ ID NO: 344710 - DNA, 120 bp, Artificial Sequence
  ENSG00000138376_44 (sequence is synthesized)
ccaccattttctttgatagattgagctacagattgtaaacttcatgtatttctttataagtcaacccttttcaaagatacgcacatcaaactgaatgaataaataaatattgagaagttg

SEQ ID NO: 344711 - DNA, 120 bp, Artificial Sequence
  ENSG00000138376_45 (sequence is synthesized)
ttccccagaactcctttgccacagtctaccttcgctggaggctggcagcagagggaagctattttttttgtcttacttcaagacagctttaaagtgaccttaaaagtctactcatttata

SEQ ID NO: 344712 - DNA, 120 bp, Artificial Sequence
  ENSG00000138376_46 (sequence is synthesized)
gtaggatttagttggatcatgacacacaagacacagaaagttcaaaactggaaggggtcttcaattttaatgctatttaataattgacggtgtcttaatatgaaagtcgaattaatattg

SEQ ID NO: 344713 - DNA, 120 bp, Artificial Sequence
  ENSG00000138376_47 (sequence is synthesized)
tctgccttcagagtattttccttgccttgtgcctcattttaattcacttattccccggatcttgctcatctgatttaaaaagaggttgtgatttctaaagtaaagttattgtatttctta

SEQ ID NO: 344714 - DNA, 120 bp, Artificial Sequence
  ENSG00000138376_48 (sequence is synthesized)
ctattcctcatctgccttctccattgcatcagtgtgctactgttgctactgttataacattgttgcatagctctccagagtactggaatagagaaatagagaaattgaaaaccacttgtt

SEQ ID NO: 344715 - DNA, 120 bp, Artificial Sequence
  ENSG00000138376_49 (sequence is synthesized)
agaaaagacttgtaaggctacattacagaagctctatttcgtatagttgaattagttgataatgggtggtgattttagtcttgaactgggcggggagcagggggataaaaaatttaatgc

SEQ ID NO: 344716 - DNA, 120 bp, Artificial Sequence
  ENSG00000138376_50 (sequence is synthesized)
ataaggtgaatataaactaaatgtattaggatggagtaactgccaataaaatggcagtttttggctgttttttaactttggtttcactgagtagtcttctgggctaaacagttttggttg

SEQ ID NO: 344717 - DNA, 120 bp, Artificial Sequence
  ENSG00000138376_51 (sequence is synthesized)
ttttaaacaatactcagaagccatttacaaatgctcaaaaattgtttttttcacaagtgaaattatggcttttaaaacttcattgtgagcacatgatctttggccagtgtcctttatttg

SEQ ID NO: 344718 - DNA, 120 bp, Artificial Sequence
  ENSG00000138376_52 (sequence is synthesized)
gtacctgaaatgaattttgaatatggctttctaatagattttgtagtctatattcaagcatgactgtacttcttgatatctcagaataatttatacgcagacaatttcttttttgttttg

SEQ ID NO: 344719 - DNA, 120 bp, Artificial Sequence
  ENSG00000138376_53 (sequence is synthesized)
aggcgtgagccaccacacccggcctaataatttattaactcatgaacagtagccttaagagaaaacgatttaagttttactttatattgaagaaggcagcatttaaaaaagctcaatatt

SEQ ID NO: 344720 - DNA, 120 bp, Artificial Sequence
  ENSG00000138376_54 (sequence is synthesized)
gggtaaaagcatgtctacgaagaaaagtatgtgaacaggaagaaaagtatgaaattcctgaaggtccacgcagaagcaggctcaacagagaacagctgcacttgattctgaaagatgatc

SEQ ID NO: 344721 - DNA, 120 bp, Artificial Sequence
  ENSG00000138376_55 (sequence is synthesized)
ttttttttcctgcaaagcccaatcaaatcatctctagactagcaacctcagttgtgtacctgtcacatgccaaacctatcccaagctctgcttgtttattttaggaagcgctgttgaacc

SEQ ID NO: 344722 - DNA, 120 bp, Artificial Sequence
  ENSG00000138376_56 (sequence is synthesized)
cctgttgtgtggctagctgagcttggtgctgtagactaaagcacattccttcatgtcaaatcacttacagtttaacagacgattagacatataactgtcaaaatgagcagtatagatggg

SEQ ID NO: 344723 - DNA, 120 bp, Artificial Sequence
  ENSG00000138376_57 (sequence is synthesized)
gtacaactgtattttttactagataacaatcatgtaatcttgttgataataatggtacttgatgtttgtgtaactttcaaagtctgcaaagtaacctattgtacattatcttagtttgat

SEQ ID NO: 344724 - DNA, 120 bp, Artificial Sequence
  ENSG00000138376_58 (sequence is synthesized)
ctttaaaactgtgtcttaatttacaaataagaaaaccaaagctcaaagaggatgacttgtccaagttacaaagcttagtagacagctttgccaaattggaggaaaaaaattaatgccttt

SEQ ID NO: 344725 - DNA, 120 bp, Artificial Sequence
  ENSG00000138378_0 (sequence is synthesized)
aaggctactcaaggagagtaggaggaggctaggtcaggaagggcaagcactggtggcctacccaggacttggcccaaccctctgggtcaggtcaccctcgtcggagtgagcggaccccgc

SEQ ID NO: 344726 - DNA, 120 bp, Artificial Sequence
  ENSG00000138378_1 (sequence is synthesized)
tggaattggagcccagtaaggtctatgagtttggtgttttgatcctggctacccatcccttccatcccaggggtggttcaccaggctgagtggagccttatactagggagagaggaagct

SEQ ID NO: 344727 - DNA, 120 bp, Artificial Sequence
  ENSG00000138378_2 (sequence is synthesized)
gaagaactgggctccagcatgtctcagtggaatcaagtccaacagttagaaatcaagtttttggagcaggtggatcaattctatgatgacaactttcccatggaaattcggcatctgttg

SEQ ID NO: 344728 - DNA, 120 bp, Artificial Sequence
  ENSG00000138378_3 (sequence is synthesized)
gcccaatggattgaaaatcaagactgggaggcagcttctaacaatgaaaccatggcaacgattcttcttcaaaacttgttaatacaactggatgaacagttaggtcgtgtttccaaagag

SEQ ID NO: 344729 - DNA, 120 bp, Artificial Sequence
  ENSG00000138378_4 (sequence is synthesized)
aaaaacctactcttgatacacaatctaaaaagaattaggaaggtccttcagggaaaatttcatggaaatccaatgcatgtagctgtggttatttcaaactgtttaagggaagagaggaga

SEQ ID NO: 344730 - DNA, 120 bp, Artificial Sequence
  ENSG00000138378_5 (sequence is synthesized)
atattggctgcagccaacatgcctgtccaggggcctctagagaaatccttacaaagttcttcagtttcagaaagacagaggaatgtggagcacaaagtggctgccattaaaaacagtgtg

SEQ ID NO: 344731 - DNA, 120 bp, Artificial Sequence
  ENSG00000138378_6 (sequence is synthesized)
cagatgacagaacaagataccaaatacttagaagatctgcaagacgaatttgactacaggtataaaacaattcagacaatggatcagagtgacaagaatagtgccatggtgaatcaggaa

SEQ ID NO: 344732 - DNA, 120 bp, Artificial Sequence
  ENSG00000138378_7 (sequence is synthesized)
gttttgacactgcaggaaatgcttaacagcctcgatttcaagagaaaggaggctctcagtaaaatgacccaaatcatccatgagacagacctgttaatgaacaccatgctcatagaagag

SEQ ID NO: 344733 - DNA, 120 bp, Artificial Sequence
  ENSG00000138378_8 (sequence is synthesized)
ctgcaagactggaagcggcggcagcaaatcgcctgcatcgggggtccactccacaatgggctcgaccagcttcagaactgctttacactattggcagaaagtcttttccaactgagaagg

SEQ ID NO: 344734 - DNA, 120 bp, Artificial Sequence
  ENSG00000138378_9 (sequence is synthesized)
caattggagaaactagaggagcaatctaccaaaatgacatatgaaggtgatcccattccaatgcaaagaactcacatgctagaaagagtcaccttcttgatctacaaccttttcaagaac

SEQ ID NO: 344735 - DNA, 120 bp, Artificial Sequence
  ENSG00000138378_10 (sequence is synthesized)
tcatttgtggttgagcgacagccatgtatgccaacccaccctcagaggccgttggtacttaaaaccctaattcagttcactgtaaaactaaggctactaataaaattgccagaactaaac

SEQ ID NO: 344736 - DNA, 120 bp, Artificial Sequence
  ENSG00000138378_11 (sequence is synthesized)
aaggttaaggcatcaattgacaagaatgtttcaactctaagcaaccgaagatttgtactttgtggaactaatgtcaaagccatgtctattgaagaatcttccaatgggagtctctcagta

SEQ ID NO: 344737 - DNA, 120 bp, Artificial Sequence
  ENSG00000138378_12 (sequence is synthesized)
gaatttcgacatttgcaaccaaaggaaatgaagtccagtgctggaggtaaaggaaatgagggctgtcacatggtgactgaagaacttcattccataacgtttgaaacacagatctgcctc

SEQ ID NO: 344738 - DNA, 120 bp, Artificial Sequence
  ENSG00000138378_13 (sequence is synthesized)
tatggcctgaccatagatttggagaccagctcattgcctgtggtgatgatttccaatgtcagtcagttacctaatgcttgggcatccatcatttggtacaacgtgtcaaccaacgattcc

SEQ ID NO: 344739 - DNA, 120 bp, Artificial Sequence
  ENSG00000138378_14 (sequence is synthesized)
cagaacttggttttctttaataatcctccacctgccacattgagtcaactactggaggtgatgagctggcagttttcatcgtacgttggtcgtggtcttaactcagatcaactccatatg

SEQ ID NO: 344740 - DNA, 120 bp, Artificial Sequence
  ENSG00000138378_15 (sequence is synthesized)
ctggcagagaagcttacagtccaatctagctacagtgatggtcacctcacctgggccaagttctgcaaggaacatttacctggtaaatcatttaccttttggacatggcttgaagcaata

SEQ ID NO: 344741 - DNA, 120 bp, Artificial Sequence
  ENSG00000138378_16 (sequence is synthesized)
ttggatctaattaagaaacacattcttcccctttggattgatgggtatgtcatgggctttgttagcaaagagaaggaacggctgttgctaaaggataaaatgcctggcacctttttatta

SEQ ID NO: 344742 - DNA, 120 bp, Artificial Sequence
  ENSG00000138378_17 (sequence is synthesized)
agattcagtgaaagccatctcggaggaataactttcacctgggtggaccattctgaaagtggggaagtgagattccactctgtagaaccctacaataaaggccggttgtctgctctgcca

SEQ ID NO: 344743 - DNA, 120 bp, Artificial Sequence
  ENSG00000138378_18 (sequence is synthesized)
ttcgctgacatcctgcgagactacaaagttattatggctgaaaacattcctgaaaaccctctgaagtacctatatcctgacattcccaaagacaaagccttcggtaaacactacagctct

SEQ ID NO: 344744 - DNA, 120 bp, Artificial Sequence
  ENSG00000138378_19 (sequence is synthesized)
cagccttgcgaagtttcaagaccaacagaaaggggtgacaaaggttatgttccttctgtttttatccccatctcaacaatccgaagtgattcaacagagccacattctccatcagacctt

SEQ ID NO: 344745 - DNA, 120 bp, Artificial Sequence
  ENSG00000138378_20 (sequence is synthesized)
cttcccatgtctccaagtgtgtatgcggtgttgagagaaaacctgagtcccacaacaattgaaactgcaatgaagtctccttattctgctgaatgacaggataaactctgacgcaccaag

SEQ ID NO: 344746 - DNA, 120 bp, Artificial Sequence
  ENSG00000138378_21 (sequence is synthesized)
aaaggaagcaaatgaaaaagtttaaagactgttctttgcccaataaccacattttatttcttcagctttgtaaataccaggttctaggaaatgtttgacatctgaagctctcttcacact

SEQ ID NO: 344747 - DNA, 120 bp, Artificial Sequence
  ENSG00000138378_22 (sequence is synthesized)
cccgtggcactcctcaattgggagtgttgtgactgaaatgcttgaaaccaaagcttcagataaacttgcaagataagacaactttaagaaaccagtgttaataacaatattaacagaaga

SEQ ID NO: 344748 - DNA, 80 bp, Artificial Sequence
  ENSG00000138378_23 (sequence is synthesized)
gaaaggtgggaggatcatttgaagccaagagtttgagaccagtctggccaatgcagcaagaccctgtctccaaaaaaaaa

SEQ ID NO: 344749 - DNA, 120 bp, Artificial Sequence
  ENSG00000138378_24 (sequence is synthesized)
ctgcattcaaaggtccaaatcttgtccctaggacttagcttcttcacctgggacattcagatgatactaattgaggaaaccaagatacaggaatttagtacccatctattccttctaata

SEQ ID NO: 344750 - DNA, 120 bp, Artificial Sequence
  ENSG00000138378_25 (sequence is synthesized)
caaaacatcggagaattctggcttttgcaaactgttgttgacattttatacccagatgttaccattacctttgaagcctcttgtgcctcctccctgacaccactctgctctctttccgcc

SEQ ID NO: 344751 - DNA, 120 bp, Artificial Sequence
  ENSG00000138378_26 (sequence is synthesized)
tggagcaaccactgacccaaaatttgcatttgtcattttttttctttttgttgccattttaccacatacatttgcatccctaaacaataaagtgtctaggtttgaaagctgctaaatcca

SEQ ID NO: 344752 - DNA, 120 bp, Artificial Sequence
  ENSG00000138378_27 (sequence is synthesized)
tagattacagttttactttattggaaagtgaataaaactccagctattaccttattggagtgtctggagggaacagaggaaaatacatgtactccacctaccatgttaaaccagaaggag

SEQ ID NO: 344753 - DNA, 120 bp, Artificial Sequence
  ENSG00000138378_28 (sequence is synthesized)
gtcttgcattctttttgaacagattcattgtgacactaagacttgtatctgtatacctatgcatatatggattgcttttattaacatttgggctgtcacatggtgactgaagaacttcat

SEQ ID NO: 344754 - DNA, 120 bp, Artificial Sequence
  ENSG00000138378_29 (sequence is synthesized)
tgttggcctaaaatgtatcttgaaggaaatatgaatgattgtggccaaacatttaacttttcatacatgaagatgagatgttttgggttcttctcctgatatacttaagatgccttgact

SEQ ID NO: 344755 - DNA, 120 bp, Artificial Sequence
  ENSG00000138378_30 (sequence is synthesized)
tccaggaaatattattcaaaatgttcacaattatttgtacatacaacttttccattcagaagaaatggcacaaacatgggtttcattatcaaaggggagtccataaccctaaaagggttt

SEQ ID NO: 344756 - DNA, 120 bp, Artificial Sequence
  ENSG00000138378_31 (sequence is synthesized)
agaacaactgtaaatttaatcaagtgatgttcattgaaggcagccttattccaaattttatatgcaaactactaattttaagaattagattatttgaacttaatttgttatgatttgagt

SEQ ID NO: 344757 - DNA, 120 bp, Artificial Sequence
  ENSG00000138378_32 (sequence is synthesized)
cactttttcagtgcttcatgtccattatgaattaaaatgatcatttttatcacctgaatccacaaatatttattttgtttgtcccatccagttgtaagtgaaaagaaaaatacaagggaa

SEQ ID NO: 344758 - DNA, 120 bp, Artificial Sequence
  ENSG00000138378_33 (sequence is synthesized)
acaagctattatatccttggtgaagacgggaaagatcagagtgacaagaatagtgccatggtgaatcaggaagttttgacactgcaggaaatgcttaacagcctcgatttcaagagaaag

SEQ ID NO: 344759 - DNA, 120 bp, Artificial Sequence
  ENSG00000138378_34 (sequence is synthesized)
gagtaatgttagtcacatgtgaaatatttttataaaaagctttcctataggagatttaaaggtagagcagagtacacataactgagaacaaagcattgtaatgtgcaatgtcccatttcc

SEQ ID NO: 344760 - DNA, 120 bp, Artificial Sequence
  ENSG00000138378_35 (sequence is synthesized)
tttaatacataaggctagccttcagggcacacttaccacaatctattgtgcctaaaattataaaattccccttttatatgccatatatgccacagtaagttgagtgttctgatatgaaat

SEQ ID NO: 344761 - DNA, 120 bp, Artificial Sequence
  ENSG00000138379_0 (sequence is synthesized)
agattcactggtgtggcaagttgtctctcagactgtacatgcattaaaattttgcttggcattactcaaaagcaaaagaaaagtaaaaggaagaaacaagaacaagaaaaaagattatat

SEQ ID NO: 344762 - DNA, 120 bp, Artificial Sequence
  ENSG00000138379_1 (sequence is synthesized)
tgattttaaaatcatgcaaaaactgcaactctgtgtttatatttacctgtttatgctgattgttgctggtccagtggatctaaatgagaacagtgagcaaaaagaaaatgtggaaaaaga

SEQ ID NO: 344763 - DNA, 120 bp, Artificial Sequence
  ENSG00000138379_2 (sequence is synthesized)
ggggctgtgtaatgcatgtacttggagacaaaacactaaatcttcaagaatagaagccattaagatacaaatcctcagtaaacttcgtctggaaacagctcctaacatcagcaaagatgt

SEQ ID NO: 344764 - DNA, 120 bp, Artificial Sequence
  ENSG00000138379_3 (sequence is synthesized)
tataagacaacttttacccaaagctcctccactccgggaactgattgatcagtatgatgtccagagggatgacagcagcgatggctctttggaagatgacgattatcacgctacaacgga

SEQ ID NO: 344765 - DNA, 120 bp, Artificial Sequence
  ENSG00000138379_4 (sequence is synthesized)
aacaatcattaccatgcctacagagtctgattttctaatgcaagtggatggaaaacccaaatgttgcttctttaaatttagctctaaaatacaatacaataaagtagtaaaggcccaact

SEQ ID NO: 344766 - DNA, 120 bp, Artificial Sequence
  ENSG00000138379_5 (sequence is synthesized)
atggatatatttgagacccgtcgagactcctacaacagtgtttgtgcaaatcctgagactcatcaaacctatgaaagacggtacaaggtatactggaatccgatctctgaaacttgacat

SEQ ID NO: 344767 - DNA, 120 bp, Artificial Sequence
  ENSG00000138379_6 (sequence is synthesized)
gaacccaggcactggtatttggcagagcattgatgtgaagacagtgttgcaaaattggctcaaacaacctgaatccaacttaggcattgaaataaaagctttagatgagaatggtcatga

SEQ ID NO: 344768 - DNA, 120 bp, Artificial Sequence
  ENSG00000138379_7 (sequence is synthesized)
tcttgctgtaaccttcccaggaccaggagaagatgggctgaatccgtttttagaggtcaaggtaacagacacaccaaaaagatccagaagggattttggtcttgactgtgatgagcactc

SEQ ID NO: 344769 - DNA, 120 bp, Artificial Sequence
  ENSG00000138379_8 (sequence is synthesized)
aacagaatcacgatgctgtcgttaccctctaactgtggattttgaagcttttggatgggattggattatcgctcctaaaagatataaggccaattactgctctggagagtgtgaatttgt

SEQ ID NO: 344770 - DNA, 120 bp, Artificial Sequence
  ENSG00000138379_9 (sequence is synthesized)
atttttacaaaaatatcctcatactcatctggtacaccaagcaaaccccagaggttcagcaggcccttgctgtactcccacaaagatgtctccaattaatatgctatattttaatggcaa

SEQ ID NO: 344771 - DNA, 120 bp, Artificial Sequence
  ENSG00000138379_10 (sequence is synthesized)
agaacaaataatatatgggaaaattccagcgatggtagtagaccgctgtgggtgctcatgagatttatattaagcgttcataacttcctaaaacatggaaggttttcccctcaacaattt

SEQ ID NO: 344772 - DNA, 120 bp, Artificial Sequence
  ENSG00000138379_11 (sequence is synthesized)
gcataagctacagtatgtaaactaaaagggggaatatatgcaatggttggcatttaaccatccaaacaaatcatacaagaaagttttatgatttccagagtttttgagctagaaggagat

SEQ ID NO: 344773 - DNA, 120 bp, Artificial Sequence
  ENSG00000138379_12 (sequence is synthesized)
caaattacatttatgttcctatatattacaacatcggcgaggaaatgaaagcgattctccttgagttctgatgaattaaaggagtatgctttaaagtctatttctttaaagttttgttta

SEQ ID NO: 344774 - DNA, 120 bp, Artificial Sequence
  ENSG00000138379_13 (sequence is synthesized)
atatttacagaaaaatccacatacagtattggtaaaatgcaggattgttatataccatcattcgaatcatccttaaacacttgaatttatattgtatggtagtatacttggtaagataaa

SEQ ID NO: 344775 - DNA, 120 bp, Artificial Sequence
  ENSG00000138379_14 (sequence is synthesized)
attccacaaaaatagggatggtgcagcatatgcaatttccattcctattataattgacacagtacattaacaatccatgccaacggtgctaatacgataggctgaatgtctgaggctacc

SEQ ID NO: 344776 - DNA, 120 bp, Artificial Sequence
  ENSG00000138379_15 (sequence is synthesized)
aggtttatcacataaaaaacattcagtaaaatagtaagtttctcttttcttcaggtgcattttcctacacctccaaatgaggaatggattttctttaatgtaagaagaatcatttttcta

SEQ ID NO: 344777 - DNA, 120 bp, Artificial Sequence
  ENSG00000138379_16 (sequence is synthesized)
gaggttggctttcaattctgtagcatacttggagaaactgcattatcttaaaaggcagtcaaatggtgtttgtttttatcaaaatgtcaaaataacatacttggagaagtatgtaatttt

SEQ ID NO: 344778 - DNA, 120 bp, Artificial Sequence
  ENSG00000138379_17 (sequence is synthesized)
gtctttggaaaattacaacactgcctttgcaacactgcagtttttatggtaaaataatagaaatgatcgactctatcaatattgtataaaaagactgaaacaatgcatttatataatatg

SEQ ID NO: 344779 - DNA, 120 bp, Artificial Sequence
  ENSG00000138379_18 (sequence is synthesized)
tatacaatattgttttgtaaataagtgtctccttttttatttactttggtatatttttacactaaggacatttcaaattaagtactaaggcacaaagacatgtcatgcatcacagaaaag

SEQ ID NO: 344780 - DNA, 120 bp, Artificial Sequence
  ENSG00000138379_19 (sequence is synthesized)
caactacttatatttcagagcaaattagcagattaaatagtggtcttaaaactccatatgttaatgattagatggttatattacaatcattttatatttttttacatgattaacattcac

SEQ ID NO: 344781 - DNA, 120 bp, Artificial Sequence
  ENSG00000138379_20 (sequence is synthesized)
ttatggattcatgatggctgtataaagtgaatttgaaatttcaatggtttactgtcattgtgtttaaatctcaacgttccattattttaatacttgcaaaaacattactaagtataccaa

SEQ ID NO: 344782 - DNA, 120 bp, Artificial Sequence
  ENSG00000138379_21 (sequence is synthesized)
aataattgactctattatctgaaatgaagaataaactgatgctatctcaacaataactgttacttttattttataatttgataatgaatatatttctgcatttatttacttctgttttgt

SEQ ID NO: 344783 - DNA, 120 bp, Artificial Sequence
  ENSG00000138379_22 (sequence is synthesized)
aaattgggattttgttaatcaaatttattgtactatgactaaatgaaattatttcttacatctaatttgtagaaacagtataagttatattaaagtgttttcacatttttttgaaagaca

SEQ ID NO: 344784 - DNA, 120 bp, Artificial Sequence
  ENSG00000138380_0 (sequence is synthesized)
gacggtggccgatagtggtcctactgtcgtgggactgctctgcgcgctcccggtggggcgcgcctgcgcattatgctggtctccatggcggggcctcggagccaagacgagagaaaatgc

SEQ ID NO: 344785 - DNA, 120 bp, Artificial Sequence
  ENSG00000138380_1 (sequence is synthesized)
tgctgtgaagacccaattaaagctttcacataaatgaagctacagctatcatgatttagtgcccccaaaaggaagaacttcagtggacaagaaaggacatttctgggggtagtagaatgc

SEQ ID NO: 344786 - DNA, 120 bp, Artificial Sequence
  ENSG00000138380_2 (sequence is synthesized)
ttgaggcctggaatttaaacctgagccactatctgaagctattaaataatagaagaaaatggaattgaatatgatgtcagcatggaacaatctaatgattcattaagagtcaaccataat

SEQ ID NO: 344787 - DNA, 120 bp, Artificial Sequence
  ENSG00000138380_3 (sequence is synthesized)
gacggtgaagagtcaaaaaccagtgctcaagtatttgagcatctaatctgtatggactccagggattcttcctttggacaaaatgattctcctacagttttgcccatcactactcgtgaa

SEQ ID NO: 344788 - DNA, 120 bp, Artificial Sequence
  ENSG00000138380_4 (sequence is synthesized)
gcaaataattcactcatatcacagaatataccagggcccctgactcagacacagactctttctgcagagcaattccatctagtggaccaaaatgggcaggctattcaatatgaacttcag

SEQ ID NO: 344789 - DNA, 120 bp, Artificial Sequence
  ENSG00000138380_5 (sequence is synthesized)
tcattgggggaatccaatgcacaaatgatgatcgttgccagcccaacagaaaatggacaggtacttcgtgtaattccacctacccagacaggaatggcacaagtgattatacctcagggg

SEQ ID NO: 344790 - DNA, 120 bp, Artificial Sequence
  ENSG00000138380_6 (sequence is synthesized)
caacttgtggatgtgaatagtcctcgggatgtccctgaagagaaacccagtaacagaaacttaccaactgtaagagtggatactctagcagacaataccagcaattacattcttcatcct

SEQ ID NO: 344791 - DNA, 120 bp, Artificial Sequence
  ENSG00000138380_7 (sequence is synthesized)
caaacatccttcccattgcccaaaaagtcagtgaccggaatgctggaagaaccccttctggggcctcttcagccactttcttctaatacacctatatgggcctgccgtcttaggagctgt

SEQ ID NO: 344792 - DNA, 120 bp, Artificial Sequence
  ENSG00000138380_8 (sequence is synthesized)
gagaaaattggagattcataccgtggctactgtgtaagtgagactgaattagaaagtgtcctaacatttcacaagcagcaaacacagagtgtttgggggacccgtcagtctccaagccca

SEQ ID NO: 344793 - DNA, 120 bp, Artificial Sequence
  ENSG00000138380_9 (sequence is synthesized)
gccaagcctgctacacgcttgatgtggaaatcccagtatgttccatatgatggaatcccatttgttaatgcagggagtagagctgtggtaatggagtgtcagtatgggccaagaagaaaa

SEQ ID NO: 344794 - DNA, 120 bp, Artificial Sequence
  ENSG00000138380_10 (sequence is synthesized)
ggtttccagttaaaaaaagtcagtgagcaggaaagcaggtcttgtcagctctacaaagccacttgtccagctcggatttacattaaaaaggtacagaagtttcctgaatatagagttcct

SEQ ID NO: 344795 - DNA, 120 bp, Artificial Sequence
  ENSG00000138380_11 (sequence is synthesized)
acagaccccaaaattgacaagaaaattatcagaatggagcaggagaaagcttttaacatgctaaagaagaacttggtagatgctggtggtgttcttaggtggtatgtacagttacctaca

SEQ ID NO: 344796 - DNA, 120 bp, Artificial Sequence
  ENSG00000138380_12 (sequence is synthesized)
cagcaagctcatcagtatcatgaattagagactccctgcctcactttgtcaccttctccttttcctgtgtcttctcttgaagaagaggaaactgcagttagagatgagaattgtgcatta

SEQ ID NO: 344797 - DNA, 120 bp, Artificial Sequence
  ENSG00000138380_13 (sequence is synthesized)
ccctcacgtttacatcctcaagtagcacataagattcaagaattagtatcacagggaatagaacaagtgtatgcagtaaggaaacagctaagaaaatttgtggaaagggaactgttcaaa

SEQ ID NO: 344798 - DNA, 120 bp, Artificial Sequence
  ENSG00000138380_14 (sequence is synthesized)
cccgatgaggtacctgaaagacataatttatctttttttccaactgtaaatgatataaaaaatcacatccatgaggtacagaaatccttgagaaatggagatacggtatataactcagag

SEQ ID NO: 344799 - DNA, 120 bp, Artificial Sequence
  ENSG00000138380_15 (sequence is synthesized)
attattccagcaacgcttcaatggactacagacagtgggaatattctcaaagagaccatgacagttacatttgcagaaggaaattcaccaggagaatcaattaccaccaaagtggaaaca

SEQ ID NO: 344800 - DNA, 120 bp, Artificial Sequence
  ENSG00000138380_16 (sequence is synthesized)
aatcagaccaggggttctttgtctcctgagccaacccacttgctctcctcactctcctcatttcagcccaaaatatttacacaactacagggtttgcagttacaaccaaggtacacctct

SEQ ID NO: 344801 - DNA, 120 bp, Artificial Sequence
  ENSG00000138380_17 (sequence is synthesized)
cctgatgaatcaccagctgtggtatcagtaaataaccagccgtcctctagtccttcaggacttctggatacaataggaagtgctgtaatgaataataattctctactgcttggtcaaagt

SEQ ID NO: 344802 - DNA, 120 bp, Artificial Sequence
  ENSG00000138380_18 (sequence is synthesized)
catagccttcaaagagatacatgcttaacccaaaacaatagtactgcctccaccatgggtaaccttccagaaccagatcaaaatctagttgcaatggacgagctggtagaagttggagat

SEQ ID NO: 344803 - DNA, 120 bp, Artificial Sequence
  ENSG00000138380_19 (sequence is synthesized)
gttgaggatacagggaatctggaaggaactgttcatcggattctgttgggagatgtgcagactattccaatacagattatagacaaccactcagctcttattgaagaaaatccagaaagt

SEQ ID NO: 344804 - DNA, 120 bp, Artificial Sequence
  ENSG00000138380_20 (sequence is synthesized)
accatttctgtgagccaagttaaacaagaacccaaagaaccagcattgtctatggaagcaaaaaaaactgtggactataagaaattatctgctacataaattattgaagcttttcagaat

SEQ ID NO: 344805 - DNA, 120 bp, Artificial Sequence
  ENSG00000138380_21 (sequence is synthesized)
ttacaactctggtgacttctgatgtcttagaaaggaaggtgaatatagtcaaagcgtggcattgagataattggactgaagaccagtttgatgagaagcttttatttaaaactgatatat

SEQ ID NO: 344806 - DNA, 120 bp, Artificial Sequence
  ENSG00000138380_22 (sequence is synthesized)
ttgttgccagttccatatttttaccttccttaagagatgttttactcttcttattttgtataatttttatgctctttgattatctaataaggccagtatttcaaaagctgttctgaattt

SEQ ID NO: 344807 - DNA, 120 bp, Artificial Sequence
  ENSG00000138380_23 (sequence is synthesized)
atccacagtaatatagtctgaacacaaatagtttacttaacttatccttggaaatattcaattttggttattacaaaacagaaaagaacaacagcaacaaaaacattgtgtgaatgtatg

SEQ ID NO: 344808 - DNA, 120 bp, Artificial Sequence
  ENSG00000138380_24 (sequence is synthesized)
tctctccttaaagttgtgaagaaattgttaattgccagacaggtaagaaaatgtttataatctatctcattaagaaagatgaagtattagattttacatcataacacaaagtccagcagc

SEQ ID NO: 344809 - DNA, 120 bp, Artificial Sequence
  ENSG00000138380_25 (sequence is synthesized)
tacatctgtggaaactgtgcagttgcattttagcctcttcccttccaatttttgtacttttaactacaaaccagtagtatactaatggttatctaatagaaatttaaagtgtcttggtaa

SEQ ID NO: 344810 - DNA, 120 bp, Artificial Sequence
  ENSG00000138380_26 (sequence is synthesized)
gtactgagaatttttacttgaattaatcagataagcaacagaaatcaacatatgtagcatggatttgtgctatattggaagtaaaacactataggcagaaagatgtagaaattaagagaa

SEQ ID NO: 344811 - DNA, 120 bp, Artificial Sequence
  ENSG00000138380_27 (sequence is synthesized)
ttgaaaaagaataatagaattccttggtgtttacagataatttggaaaactttttgatgacagcagaggattttttcccccttattttgtaatgaagatccagcactggttaaaaaataa

SEQ ID NO: 344812 - DNA, 120 bp, Artificial Sequence
  ENSG00000138380_28 (sequence is synthesized)
ttacatttttctatgccagagctcttactgaattgatgatattaggatttctagtattttaaggtaagtatttatagtttaaaatttagtttatatttaaaactttaaaacatctgatct

SEQ ID NO: 344813 - DNA, 120 bp, Artificial Sequence
  ENSG00000138380_29 (sequence is synthesized)
aacatctgatctgggatttttttgttaagtaagtatattaacttcaaataccaaattactactaagcagtatattgattataagcatctgttgtctaaagattggtactaggctggacat

SEQ ID NO: 344814 - DNA, 86 bp, Artificial Sequence
  ENSG00000138380_30 (sequence is synthesized)
taagcatctgttgtctaaagattggtactaggctggacatggtggctcacacctgtaatcacaatactttgggaggctgaggtggg

SEQ ID NO: 344815 - DNA, 120 bp, Artificial Sequence
  ENSG00000138380_31 (sequence is synthesized)
ccagcctgggtgacaagagaaaaactccatctcaaaaaaaaaaaaaagattggtaaactagaaatatcaactataattgtcaggaaattaacctaaaggcttttgtttctccagagacca

SEQ ID NO: 344816 - DNA, 120 bp, Artificial Sequence
  ENSG00000138380_32 (sequence is synthesized)
ctccagagaccatttgtgggtatattttatattttaaaaataaagattttaaatggatatcaatgtttaatattcaaaacatgcacaatataatatcaaatttaaccttaatactttaca

SEQ ID NO: 344817 - DNA, 120 bp, Artificial Sequence
  ENSG00000138380_33 (sequence is synthesized)
acttttggcttttctaagtccagcctcccattcttaattgacttggtttcaggtacatgacatgtatctaaatataaagtactgttatagtagaggtaggtggaattctaatattccctg

SEQ ID NO: 344818 - DNA, 120 bp, Artificial Sequence
  ENSG00000138380_34 (sequence is synthesized)
ttatttataccctttttaatgcaaagctaatatttagttatatgtatgatttttaataaaaattactttactttttcctatgaatttaaaacatttgatgttggcattttatacaggcag

SEQ ID NO: 344819 - DNA, 120 bp, Artificial Sequence
  ENSG00000138380_35 (sequence is synthesized)
tttaaaacatttgatgttggcattttatacaggcaggttgccaaatttaattatgttacactaagttaaacacagcacttaattacctcaaatccagatttctcttaatctgtgtgtaca

SEQ ID NO: 344820 - DNA, 120 bp, Artificial Sequence
  ENSG00000138380_36 (sequence is synthesized)
taaaaggaataagtccaaattaatttatagtttagtgttgcactataggtaatattcttttgttatttctagtttttatggaatccttttctttcaagattctaaataataaatcgttac

SEQ ID NO: 344821 - DNA, 120 bp, Artificial Sequence
  ENSG00000138380_37 (sequence is synthesized)
gtctcaatagtggtaatagtggtaatggtttattattagctgtttcaccaattgaactacattcttttggagacattcctttcttttttgatgttgatttgcaaaggagaaatgcttgtt

SEQ ID NO: 344822 - DNA, 120 bp, Artificial Sequence
  ENSG00000138380_38 (sequence is synthesized)
aatatacaaactctagtcagttacctgtgaggatgagatgtgtcagaggactcagactttggtatagttagaaaaataatatttttctcacttgattctgtgtgaatgtctcttctgata

SEQ ID NO: 344823 - DNA, 120 bp, Artificial Sequence
  ENSG00000138380_39 (sequence is synthesized)
ctgttttttaatcagaaagttacagagcaactttcccacaaacaaaccaataaaacaaaaccccacaaaaaccaagagcatgaagaaaagtttaaatccctaattatatactcttttggt

SEQ ID NO: 344824 - DNA, 120 bp, Artificial Sequence
  ENSG00000138380_40 (sequence is synthesized)
ttttaggtagaaactggagctatcaatattttcatgtaagtatttcaaggagtagctctttaaaaatggtttctaaattagattttaaaaattcattgtcatctaaatgcatgtttagtc

SEQ ID NO: 344825 - DNA, 120 bp, Artificial Sequence
  ENSG00000138380_41 (sequence is synthesized)
acaatgtatcagtattgtgtttaaaggtgctcagcatcactttttgaaaactatgtttacatatttaaaatgtttaattattttgaaatgtatagggtattaaatacaagcttctaaaat

SEQ ID NO: 344826 - DNA, 120 bp, Artificial Sequence
  ENSG00000138380_42 (sequence is synthesized)
tttcagtatctatattggctttctctaacagctctacagcaaagtttgacatgttttttgtgtgtgtcatgtattgtaagttgtaatatctgtaggagtgagttggacattctaaattag

SEQ ID NO: 344827 - DNA, 120 bp, Artificial Sequence
  ENSG00000138380_43 (sequence is synthesized)
cagtaaaaaattcacaattacagctcagcttgtttattcattatagtttccacatttccaacttccaagtgaactttatatatactacagtgaattatagataaatacagccatggtgga

SEQ ID NO: 344828 - DNA, 120 bp, Artificial Sequence
  ENSG00000138380_44 (sequence is synthesized)
cctttccctcaatagtgattttttgtacaaacagttagtataattaaaaggaaaagcttttatattttatgcaaggtaaatgtttcctaaatgtcacaaaagtgatagaaaacatagctt

SEQ ID NO: 344829 - DNA, 120 bp, Artificial Sequence
  ENSG00000138380_45 (sequence is synthesized)
ttgggatctggtcctgcattagagtttctaattctgagacccaccagcttgtgtttcatcttctttatatcctgtcagaatacatacttaatcatgtgggtatgagaaagatgttgttta

SEQ ID NO: 344830 - DNA, 80 bp, Artificial Sequence
  ENSG00000138380_46 (sequence is synthesized)
tgggtatgagaaagatgttgtttaacttgtaccaggtttaaaaaaagaggtttaaaaaatgtctgtgcgtatatatatat

SEQ ID NO: 344831 - DNA, 120 bp, Artificial Sequence
  ENSG00000138380_47 (sequence is synthesized)
ttttttcattaaaaatcctgctttttttttatacttgttagttttctttttatatttttcttagagatagtggcaattttgttcatcttgaagatgctgaataaacacttgaatacccga

SEQ ID NO: 344832 - DNA, 120 bp, Artificial Sequence
  ENSG00000138380_48 (sequence is synthesized)
gcctgcgcattatgctggtctccatggcggggcctcggagccaagacgaggttgagtagactcgttttgaattttctcccctctgctccggcggacttcccatgtcgccttgtggggcta

SEQ ID NO: 344833 - DNA, 120 bp, Artificial Sequence
  ENSG00000138380_49 (sequence is synthesized)
tcggcggcggcaggactgggggagtcagaggtctggcagcgctgtctgcgcagacctaccggacgctacctcccaaccccccgtcttcctcctgcctcctcctcctcccgtcacctcctg

SEQ ID NO: 344834 - DNA, 120 bp, Artificial Sequence
  ENSG00000138380_50 (sequence is synthesized)
acccgccggagctccgagcaactgccggcctccgcccccagccgcagccggtcactggcggcgccttccgcgccaagcttgggggccttttcggggtcccacatggcacggcttccgacc

SEQ ID NO: 344835 - DNA, 120 bp, Artificial Sequence
  ENSG00000138380_51 (sequence is synthesized)
cccggcccgggacggggctcgcaggccccagaggggcaggctggagaaggaggaggttaggtgtcttcaggagggttgctgagcccaaggacgcgccatcgccgcggagaaggagccgga

SEQ ID NO: 344836 - DNA, 120 bp, Artificial Sequence
  ENSG00000138380_52 (sequence is synthesized)
ccccttgggcggagcgcccaatgtgtggtccctcacgccgtcccgcaccttgctttttagggttctttttccgctttctgagcccttttataccttacgtttagaaggggaaaatcatcc

SEQ ID NO: 344837 - DNA, 120 bp, Artificial Sequence
  ENSG00000138380_53 (sequence is synthesized)
tcccacaccttctccccgactttttgccttttttgtcttgaagttacccaaaggcctgtgtattgttctcaatggtcccaagaattactctaatatagttgtttttctgagggaggatgg

SEQ ID NO: 344838 - DNA, 120 bp, Artificial Sequence
  ENSG00000138380_54 (sequence is synthesized)
aggcctggaatttaaacctgagccactatctgaaggtttaatatatctttgccaagtccaagggtacaaagattttctcctgtgttttcttctagaagttttatcatttgatagtctgtg

SEQ ID NO: 344839 - DNA, 120 bp, Artificial Sequence
  ENSG00000138380_55 (sequence is synthesized)
gaattttggccagagatttatgtccaatttggaacctgaaagttttaagcataactacaagtaactcctgttagcattacattttggggagacatatatgcatttaataccctgcaactc

SEQ ID NO: 344840 - DNA, 120 bp, Artificial Sequence
  ENSG00000138380_56 (sequence is synthesized)
agccaagcatcaacattttaaaacaatgtgtgtaataagtaattctccacgcccacccacccccagccccccgatgttttggcaccatgacattttcaagtatagctttatattttagga

SEQ ID NO: 344841 - DNA, 120 bp, Artificial Sequence
  ENSG00000138380_57 (sequence is synthesized)
gtaatgacaaagtatgtgatcaaaagagaagggattattaattttttccctctttgcttttttttaaactttattccactctgtacctatttttgaggaccttgaaaatcttaatctctc

SEQ ID NO: 344842 - DNA, 120 bp, Artificial Sequence
  ENSG00000138380_58 (sequence is synthesized)
cagaagggatactgcattggttcttctccatcagctggcttagacatcaaacatcttaaatgatacactgttttaatatctaaaaatctgtcattctacttaattaacttagtcataagg

SEQ ID NO: 344843 - DNA, 120 bp, Artificial Sequence
  ENSG00000138380_59 (sequence is synthesized)
acaaagccttagtatatttttgccacatacatgttatgtataaattttactgttgaataatacaagtattcattgctgactgaattcttaaaactttgggaatagaaaaaacacatttat

SEQ ID NO: 344844 - DNA, 120 bp, Artificial Sequence
  ENSG00000138380_60 (sequence is synthesized)
taatggatgctaaagtgattcctgagaaaaataatgtgtatggttaatatggaaaacctttggtaatgtgatttgggtataagaatactaaaaccagagtacagggtgtgaatcatgtac

SEQ ID NO: 344845 - DNA, 120 bp, Artificial Sequence
  ENSG00000138380_61 (sequence is synthesized)
caggagggattttatttttaaatatctttattgaggtataattgaaatacaataaactgtacatatttaaagtacccaatatgataagttttgtcatatgcatacagccatgaaatcatc

SEQ ID NO: 344846 - DNA, 120 bp, Artificial Sequence
  ENSG00000138380_62 (sequence is synthesized)
agcataagcaaggtaatgaacatattcatcactctcaaagtttcatagtacctctttgtgatcccttcttacttaatcctccttgccaccccaccatcaccagaccactgatctgctttc

SEQ ID NO: 344847 - DNA, 120 bp, Artificial Sequence
  ENSG00000138380_63 (sequence is synthesized)
tttatgatcagtttgctacaaatgaaatcacataatatgaaccttttttggtctagcttttgtcacttagcatagtaattttgtgatttgtctatattgttgcatttatgaataaatcat

SEQ ID NO: 344848 - DNA, 120 bp, Artificial Sequence
  ENSG00000138380_64 (sequence is synthesized)
ttatctgctgctgagtagaactgcattttatgaatatatcaatttgtttattcttttgatgatggacattaatagttctaggctattatgaataaagtttccatgaacatctatgtacaa

SEQ ID NO: 344849 - DNA, 120 bp, Artificial Sequence
  ENSG00000138380_65 (sequence is synthesized)
gtggccgatagtggtcctactgtcgtgggactgctctgcgcgctcccggtggggcgcgcctgcgcattatgctggtctccatggcggggcctcggagccaagacgaggcattcgcttcaa

SEQ ID NO: 344850 - DNA, 120 bp, Artificial Sequence
  ENSG00000138380_66 (sequence is synthesized)
tccatatgatggaatcccatttgttaatgcaggtacttttttaaagaattattttaaaaggttcagcagcagccatagtccattgtcaaaatgtgattttcctaaggtgataacattttt

SEQ ID NO: 344851 - DNA, 120 bp, Artificial Sequence
  ENSG00000138380_67 (sequence is synthesized)
cctaaggtgataacatttttattttggtagctgacaattgaatgctaattgattaaaatgcatattaaattgaaaaaacttatagaaaatataatcaattactttataatattgcatttt

SEQ ID NO: 344852 - DNA, 120 bp, Artificial Sequence
  ENSG00000138380_68 (sequence is synthesized)
atgtacatcagctgtgtttttccccttcagattaaatattttagccttctctcttaatttgtattgtgggagaaatttatgtctattttatgtagcttgtaactctggagttactgtata

SEQ ID NO: 344853 - DNA, 120 bp, Artificial Sequence
  ENSG00000138380_69 (sequence is synthesized)
gaatttgtatacaatctagagttatagaattctgatactaaagttctcaagcattaggtatgttatatacagtattctcagacactgggttagttgtttactaagggagtagagtttcaa

SEQ ID NO: 344854 - DNA, 120 bp, Artificial Sequence
  ENSG00000138380_70 (sequence is synthesized)
gcaaatctcttagactagttagagccccaaagaatctaaaactaagcgatttattttaggactatgagggcactaatttagctgaaagagttgcagtttcatcctggacctctgaggtta

SEQ ID NO: 344855 - DNA, 120 bp, Artificial Sequence
  ENSG00000138380_71 (sequence is synthesized)
atgagatatacttaagatgagataaatgtaaccacttctgcctgagtttcatcagtattctataaaagaaatgcagcattaaaaataaatgagctgggttatttatatatttatttattt

SEQ ID NO: 344856 - DNA, 120 bp, Artificial Sequence
  ENSG00000138380_72 (sequence is synthesized)
atctcagcactttgggaggccaaggcgagaggattgcttgagctcacgagtttgagacccacctgggcaaaacagggagacctcatctttacaaaaaataataaattacctggacatggt

SEQ ID NO: 344857 - DNA, 120 bp, Artificial Sequence
  ENSG00000138380_73 (sequence is synthesized)
aaaaaataataaattacctggacatggtggcatggggctgtagtcccagctatttgggaagctgaggtggaaggatcacttgacccttggaggtcgaggctgcagtgaaccgtgatcatg

SEQ ID NO: 344858 - DNA, 120 bp, Artificial Sequence
  ENSG00000138380_74 (sequence is synthesized)
agcctgggtgacagagtaagaccctgtctttaaaaaaaaaaaattaacaaataataaaatgaacttgaaatcctatagtcttcctttttcccatcctagttttaatctccttaaccctcc

SEQ ID NO: 344859 - DNA, 120 bp, Artificial Sequence
  ENSG00000138380_75 (sequence is synthesized)
ccttaaccctccataggtagctactacatgaatttcatgtgtatcgttctagtctgtatttttatactttaccttacatattgtatctacaataatacattttattgttttggattttta

SEQ ID NO: 344860 - DNA, 120 bp, Artificial Sequence
  ENSG00000138380_76 (sequence is synthesized)
atagtaaaatgtagatattgttttgcaaatattttcattcacccttttttttacatttattggtattgatagttataaatcctagttaatccaatttaatcattgtataatattccagca

SEQ ID NO: 344861 - DNA, 120 bp, Artificial Sequence
  ENSG00000138380_77 (sequence is synthesized)
aatattccagcatgtgaccaaaccacaagtatttttctattgatcatcatttaggttgtttccaacttttcattattacaaagaatgctgtagtcaaacctccacactatatatacttta

SEQ ID NO: 344862 - DNA, 120 bp, Artificial Sequence
  ENSG00000138380_78 (sequence is synthesized)
atgaaaagctgtaattagtttttctagagtatatgccttaaagtagaattgctggttgtgaattatgcccatttcatctttacaagattatcttaaaattgctctcaaggccgggcgcag

SEQ ID NO: 344863 - DNA, 120 bp, Artificial Sequence
  ENSG00000138380_79 (sequence is synthesized)
tcatatttcatataatattaattgatacttttggaagcaatgtaacatgatgtttacgcacataacctgggtataggcccaagctctcttatttactagaaaatttgtggaaagggaact

SEQ ID NO: 344864 - DNA, 120 bp, Artificial Sequence
  ENSG00000138381_0 (sequence is synthesized)
gtggctaatgccgtaggctccttcagggctgagccatcccgcgtgtcttgcgctcggtggaaatgcccagccgagggacgcgaccagaggacagctctgtgctgatccccaccgacaatt

SEQ ID NO: 344865 - DNA, 120 bp, Artificial Sequence
  ENSG00000138381_1 (sequence is synthesized)
cgaccccacacaaggaggatctaagcagcaagattaaagaacaaaaaattgtggtggatgaactttctaaccttaagaagaataggaaagtatataggcaacaacagaacagcaatatat

SEQ ID NO: 344866 - DNA, 120 bp, Artificial Sequence
  ENSG00000138381_2 (sequence is synthesized)
tctttcttgcagaccgaacagaaatgctgtctgagagcaagaatatattggatgaactgaaaaaagaataccaagaaatagaaaacttagacaagaccaaaatcaagaaatagtcaacct

SEQ ID NO: 344867 - DNA, 120 bp, Artificial Sequence
  ENSG00000138381_3 (sequence is synthesized)
gatttcacataacaatgtgtggcatttgttgttctgtaaacttttctgctgagcatttcagtcaagatttaaaagaggacttactatataatcttaaacagcggggacccaatagtagta

SEQ ID NO: 344868 - DNA, 120 bp, Artificial Sequence
  ENSG00000138381_4 (sequence is synthesized)
aacaattgttaaagtctgatgttaactaccagtgtttattttctgctcacgtcctacacttgaggggtgttttgactacccagcctgtggaagatgaaagaggcaatgtgtttctatgga

SEQ ID NO: 344869 - DNA, 120 bp, Artificial Sequence
  ENSG00000138381_5 (sequence is synthesized)
atggagaaatttttagtggaataaaggttgaagctgaagagaatgacactcaaattttgtttaattatctttcctcctgtaagaatgaatctgagattttgtcactcttctcagaagtac

SEQ ID NO: 344870 - DNA, 120 bp, Artificial Sequence
  ENSG00000138381_6 (sequence is synthesized)
aaggtccctggtcatttatatattatcaagcatctagtcattatttatggtttggtagggatttttttggtcgccgtagcttgctttggcattttagtaatttgggcaagagtttctgcc

SEQ ID NO: 344871 - DNA, 120 bp, Artificial Sequence
  ENSG00000138381_7 (sequence is synthesized)
tctcttcagttggcacccaaacatctggattggcaaatcagtggcaagaagttccagcatctggacttttcagaattgatcttaagtctactgtcatttccggatgcattattttacaac

SEQ ID NO: 344872 - DNA, 120 bp, Artificial Sequence
  ENSG00000138381_8 (sequence is synthesized)
tgtatccttggaaatatatttctagggagaatattattgaagaaaatgttaatagcctgagtcaaatttcagcagacttaccagcatttgtatcagtggtagcaaatgaagccaaactgt

SEQ ID NO: 344873 - DNA, 120 bp, Artificial Sequence
  ENSG00000138381_9 (sequence is synthesized)
atcttgaaaaacctgttgttcctttaaatatgatgttgccacaagctgcattggagactcattgcagtaatatttccaatgtgccacctacaagagagatacttcaagtctttcttactg

SEQ ID NO: 344874 - DNA, 120 bp, Artificial Sequence
  ENSG00000138381_10 (sequence is synthesized)
aaggaagtaattcagcagttcattgatgtcctgagtgtagcagtcaagaaacgtgtcttgtgtttacctagggatgaaaacctgacagcaaatgaagttttgaaaacgtgtgataggaaa

SEQ ID NO: 344875 - DNA, 120 bp, Artificial Sequence
  ENSG00000138381_11 (sequence is synthesized)
gcaaatgttgcaatcctgttttctgggggcattgattccatggttattgcaacccttgctgaccgtcatattcctttagatgaaccaattgatcttcttaatgtagctttcatagctgaa

SEQ ID NO: 344876 - DNA, 120 bp, Artificial Sequence
  ENSG00000138381_12 (sequence is synthesized)
gaaaagaccatgccaactacctttaacagagaagggaataaacagaaaaataaatgtgaaataccttcagaagaattctctaaagatgttgctgctgctgctgctgacagtcctaataaa

SEQ ID NO: 344877 - DNA, 120 bp, Artificial Sequence
  ENSG00000138381_13 (sequence is synthesized)
catgtcagtgtaccagatcgaatcacaggaagggcgggactaaaggaactacaagctgttagcccttcccgaatttggaattttgttgaaattaatgtttctatggaagaactgcagaaa

SEQ ID NO: 344878 - DNA, 120 bp, Artificial Sequence
  ENSG00000138381_14 (sequence is synthesized)
ttaagaagaactcgaatatgtcacttaattcggccattggatacagttttggatgatagcattggctgtgcagtctggtttgcttctagaggaattggttggttagtggcccaggaagga

SEQ ID NO: 344879 - DNA, 120 bp, Artificial Sequence
  ENSG00000138381_15 (sequence is synthesized)
gtgaaatcctatcagagcaatgcaaaggtagttctcactggaattggtgcagatgagcaacttgcaggttattctcgtcatcgtgtccgctttcagtcgcatgggctggaaggattgaat

SEQ ID NO: 344880 - DNA, 120 bp, Artificial Sequence
  ENSG00000138381_16 (sequence is synthesized)
aaggaaataatgatggaactgggtcgaatttcttctagaaatcttggtcgtgatgacagagttattggtgatcatggaaaagaagcaagatttcctttcctggatgaaaatgttgtctcc

SEQ ID NO: 344881 - DNA, 120 bp, Artificial Sequence
  ENSG00000138381_17 (sequence is synthesized)
tttctaaattctctgccgatttgggaaaaagcaaacttgactttaccccgaggaattggtgaaaaattacttttacgccttgcagctgtggaacttggtcttacagcctctgctcttctg

SEQ ID NO: 344882 - DNA, 120 bp, Artificial Sequence
  ENSG00000138381_18 (sequence is synthesized)
cccaaacgggccatgcagtttggatcaagaattgcaaaaatggaaaaaattaatgaaaaggcatctgataaatgtggacggctccaaatcatgtccttagaaaatctttctattgaaaag

SEQ ID NO: 344883 - DNA, 120 bp, Artificial Sequence
  ENSG00000138381_19 (sequence is synthesized)
gtccttagaaaatctttctattgaaaaggagactaaattgtaatgtgattcacaatgtaacaatataaaaataagtttttatataattatataaaagtaagatactctgctgctttacta

SEQ ID NO: 344884 - DNA, 120 bp, Artificial Sequence
  ENSG00000138382_0 (sequence is synthesized)
gcttccggcaccggccgaggtgcgggtcgcctccagaggtgcgtggtcgtggcgcgagggatcctgaggctgctccagcagtgcgccgccgccgtctcctggggcggcttgggttagccg

SEQ ID NO: 344885 - DNA, 120 bp, Artificial Sequence
  ENSG00000138382_1 (sequence is synthesized)
ggaggtgggtcagaggctcgccccgtgccctgcgtccgggcgtctccttagggcgcgtcttcgggtccggccagcggtgctgaaaaagggagaaggttgggggtagggaggaaacaagat

SEQ ID NO: 344886 - DNA, 120 bp, Artificial Sequence
  ENSG00000138382_2 (sequence is synthesized)
cccagttcaatagatttctccgcagatcctgtgccttcaaaccctacgagtccatactttaaaacaaaatgaagaaagtaaggcttaaggaactagagagtcgcctgcaacaagtggatg

SEQ ID NO: 344887 - DNA, 120 bp, Artificial Sequence
  ENSG00000138382_3 (sequence is synthesized)
gatttgaaaagcccaagctacttctggaacagtatcctaccaggccgcacattgcagcatgtatgctctatacaatccataacacttatgatgacattgaaaataaagtcgttgcagatc

SEQ ID NO: 344888 - DNA, 120 bp, Artificial Sequence
  ENSG00000138382_4 (sequence is synthesized)
ttaggagcagggttgtgtgttggatttgacatagatgaagacgcattggaaatatttaataggaatgcagaagagtttgagttaacaaatattgacatggttcaatgtgatgtgtgctta

SEQ ID NO: 344889 - DNA, 120 bp, Artificial Sequence
  ENSG00000138382_5 (sequence is synthesized)
ttatctaacagaatgtccaagtcattcgatacagtaattatgaatcctccctttgggaccaaaaataataaagggacagatatggcttttctaaagactgctttggaaatggcaagaaca

SEQ ID NO: 344890 - DNA, 120 bp, Artificial Sequence
  ENSG00000138382_6 (sequence is synthesized)
gcagtatattccttacacaaatcctcaactagagaacatgttcaaaagaaagctgcagaatggaaaatcaagatagatattatagcagaacttcgatatgacctgccagcatcatacaag

SEQ ID NO: 344891 - DNA, 120 bp, Artificial Sequence
  ENSG00000138382_7 (sequence is synthesized)
tttcacaaaaagaaatcagtggacattgaagtggacctaattcggttttccttttaaaagccccgcaaacaaaagtcgtttaaaacctatttaaaatgaataaaaaattggtttactaaa

SEQ ID NO: 344892 - DNA, 120 bp, Artificial Sequence
  ENSG00000138382_8 (sequence is synthesized)
actccagcctgcgcgataagagtgagactcagtctcgaaaaagaaaaaaaaaggaaagctttgtgacaagtaattatttctagtgttaccaactttcctgtgtaaatatacaaagccagc

SEQ ID NO: 344893 - DNA, 120 bp, Artificial Sequence
  ENSG00000138382_9 (sequence is synthesized)
ctaggagacaccataaatggcctgtgggaaaggcccatcgtcaatagctaatattctagttctttcctaaatgctttgggtacaaaaagaaaaaaaaaatcaaaaactgtttttgctctt

SEQ ID NO: 344894 - DNA, 120 bp, Artificial Sequence
  ENSG00000138382_10 (sequence is synthesized)
ttcatatagtatatattttattagttagtttgtactaatacattctcatattacaaaggcaatttaatggaagaatcttccttttgatatttgaatcatctgaaataacacaaacagaac

SEQ ID NO: 344895 - DNA, 120 bp, Artificial Sequence
  ENSG00000138382_11 (sequence is synthesized)
aatacattcaaagaaatctcatttgcataacaaaaagacaagttaaacaacaaaaaaatttttcctttctcacaggtggacattgaagtggacctaattcggttttccttttaaaagccc

SEQ ID NO: 344896 - DNA, 120 bp, Artificial Sequence
  ENSG00000138382_12 (sequence is synthesized)
aatttcagcaagcatccaatcttttcttctagagatttctataaaaatatacaaagtgatcaaaaagtttcttaaaagcaacaacagaccagaaatgactcacaccaccttatagctata

SEQ ID NO: 344897 - DNA, 120 bp, Artificial Sequence
  ENSG00000138382_13 (sequence is synthesized)
gactcacaccaccttatagctatacaagaaaaagactagaaaccaaaatgctattttaaagtagtttcttccgccggggcagcaagagcgaaactccatctcaaaaaataataataataa

SEQ ID NO: 344898 - DNA, 120 bp, Artificial Sequence
  ENSG00000138382_14 (sequence is synthesized)
aacagttatttggatacagagaatgtctagagaaattctgccctaagatcacctgtcgcgttagagaggccttccttgacactgcagctcaaggcacaccctccacagacatacacacta

SEQ ID NO: 344899 - DNA, 120 bp, Artificial Sequence
  ENSG00000138382_15 (sequence is synthesized)
tcattttactgtctagttttctgcatatcccttaacactgccagacatctttttaatgtgtttttttctcttctcacattacaatctctgaggacaaggaatttgttagacttgttcata

SEQ ID NO: 344900 - DNA, 120 bp, Artificial Sequence
  ENSG00000138382_16 (sequence is synthesized)
cgtcttaaaaaaaaaaaaaaaaaagaatttcagactccacccagacctactgaactagaatctgcatttcaacaagatccccaggtgatttgattgcacattaaaacttgaaagctgtga

SEQ ID NO: 344901 - DNA, 120 bp, Artificial Sequence
  ENSG00000138382_17 (sequence is synthesized)
cacattaaaacttgaaagctgtgacatacaggagtagtagactcactgccatccctctaaaatagatcagtagtaaagagtttggagaatctacattattctttagaaggaagaaatatg

SEQ ID NO: 344902 - DNA, 120 bp, Artificial Sequence
  ENSG00000138382_18 (sequence is synthesized)
aaaaactggttttcgttttagagcttaggaggaaaatgggtacttagtaccattattaaactctgggtaagaaaattttgaaataaatatggttatgagattaagttagctatagactat

SEQ ID NO: 344903 - DNA, 120 bp, Artificial Sequence
  ENSG00000138382_19 (sequence is synthesized)
gtataaatggccataataacagaaatgccaagctgccatggctaatgctaggaatacagaagtcactacttggataagttaaaggttctaaaatgttcagcttaccagcacttaacactt

SEQ ID NO: 344904 - DNA, 120 bp, Artificial Sequence
  ENSG00000138382_20 (sequence is synthesized)
ttcttagtttttgttgttgttgttgtttagtcaagggtggtaaacgcttggaaatacaattttatccttaggtggcttttgttttacagaacttcgatatgacctgccagcatcatacaa

SEQ ID NO: 344905 - DNA, 120 bp, Artificial Sequence
  ENSG00000138385_0 (sequence is synthesized)
atcttcttggagcgctttaggctggccggcggcgctgggaggtggagtcgttgctgttgctgtttgtgagcctgtggcgcggcttctgtgggccggaaccttaaagatagccgcaatggc

SEQ ID NO: 344906 - DNA, 120 bp, Artificial Sequence
  ENSG00000138385_1 (sequence is synthesized)
tgaaaatggtgataatgaaaagatggctgccctggaggccaaaatctgtcatcaaattgagtattattttggcgacttcaatttgccacgggacaagtttctaaaggaacagataaaact

SEQ ID NO: 344907 - DNA, 120 bp, Artificial Sequence
  ENSG00000138385_2 (sequence is synthesized)
ggatgaaggctgggtacctttggagataatgataaaattcaacaggttgaaccgtctaacaacagactttaatgtaattgtggaagcattgagcaaatccaaggcagaactcatggaaat

SEQ ID NO: 344908 - DNA, 120 bp, Artificial Sequence
  ENSG00000138385_3 (sequence is synthesized)
cagtgaagataaaactaaaatcagaaggtctccaagcaaacccctacctgaagtgactgatgagtataaaaatgatgtaaaaaacagatctgtttatattaaaggcttcccaactgatgc

SEQ ID NO: 344909 - DNA, 120 bp, Artificial Sequence
  ENSG00000138385_4 (sequence is synthesized)
aactcttgatgacataaaagaatggttagaagataaaggtcaagtactaaatattcagatgagaagaacattgcataaagcatttaagggatcaatttttgttgtgtttgatagcattga

SEQ ID NO: 344910 - DNA, 120 bp, Artificial Sequence
  ENSG00000138385_5 (sequence is synthesized)
atctgctaagaaatttgtagagacccctggccagaagtacaaagaaacagacctgctaatacttttcaaggacgattactttgccaaaaaaaatgaagaaagaaaacaaaataaagtgga

SEQ ID NO: 344911 - DNA, 120 bp, Artificial Sequence
  ENSG00000138385_6 (sequence is synthesized)
cttgctgaaattttcgggtgatttagatgatcagacctgtagagaagatttacacatacttttctcaaatcatggtgaaataaaatggatagacttcgtcagaggagcaaaagaggggat

SEQ ID NO: 344912 - DNA, 120 bp, Artificial Sequence
  ENSG00000138385_7 (sequence is synthesized)
aattctatttaaagaaaaagccaaggaagcattgggtaaagccaaagatgcaaataatggtaacctacaattaaggaacaaagaagtgacttgggaagtactagaaggagaggtggaaaa

SEQ ID NO: 344913 - DNA, 120 bp, Artificial Sequence
  ENSG00000138385_8 (sequence is synthesized)
agaagcactgaagaaaataatagaagaccaacaagaatccctaaacaaatggaagtcaaaaggtcgtagatttaaaggaaaaggaaagggtaataaagctgcccagcctgggtctggtaa

SEQ ID NO: 344914 - DNA, 120 bp, Artificial Sequence
  ENSG00000138385_9 (sequence is synthesized)
aggaaaagtacagtttcagggcaagaaaacgaaatttgctagtgatgatgaacatgatgaacatgatgaaaatggtgcaactggacctgtgaaaagagcaagagaagaaacagacaaaga

SEQ ID NO: 344915 - DNA, 120 bp, Artificial Sequence
  ENSG00000138385_10 (sequence is synthesized)
agaacctgcatccaaacaacagaaaacagaaaatggtgctggagaccagtagtttagtaaaccaattttttattcattttaaataggttttaaacgacttttgtttgcggggcttttaaa

SEQ ID NO: 344916 - DNA, 120 bp, Artificial Sequence
  ENSG00000138385_11 (sequence is synthesized)
aggaaaaccgaattaggtccacttcaatgtccacctgtgagaaaggaaaaatttttttgttgtttaacttgtctttttgttatgcaaatgagatttctttgaatgtattgttctgtttgt

SEQ ID NO: 344917 - DNA, 120 bp, Artificial Sequence
  ENSG00000138385_12 (sequence is synthesized)
gttatttcagatgattcaaatatcaaaaggaagattcttccattaaattgcctttgtaatatgagaatgtattagtacaaactaactaataaaatatatactatatgaaaagagcaaaaa

SEQ ID NO: 344918 - DNA, 120 bp, Artificial Sequence
  ENSG00000138385_13 (sequence is synthesized)
ttttttttttttttttttttttacctccaccgccttctagtctcaccgaaggcttgtggccatctctgtaaagtttctggggaggtgggcacggggtaaacgccggagggttctgtggag

SEQ ID NO: 344919 - DNA, 120 bp, Artificial Sequence
  ENSG00000138385_14 (sequence is synthesized)
cctatgggactgactggaggccaaagaactttgggccgcagatgtacaccagcgtcactcttttggtctgttagggccttcatcgctcacatcaggtttcagtgtgaaacgggaaaacat

SEQ ID NO: 344920 - DNA, 120 bp, Artificial Sequence
  ENSG00000138385_15 (sequence is synthesized)
agctctgacagaaatatagctggtgagctctgaaatagtggcagtagacctttctctttgctagtgaaacactgagatcttaagctgccttgacaatctcagggccaaattgcattgcag

SEQ ID NO: 344921 - DNA, 120 bp, Artificial Sequence
  ENSG00000138385_16 (sequence is synthesized)
tctagcattggacgatcaaaaaaacctaaggacttctggctttggttaagtaagtttagtgatcatgattggttaactttattaggacttaattttcttatatagtaaatagaagtatgt

SEQ ID NO: 344922 - DNA, 120 bp, Artificial Sequence
  ENSG00000138385_17 (sequence is synthesized)
tgaagcaaataccagatgaatcacttttattgtactggagagtagtggctcctaaacaaggctgttaagtgattaacaaagagaaatagagatagataggtatatcctgggttcatttca

SEQ ID NO: 344923 - DNA, 120 bp, Artificial Sequence
  ENSG00000138385_18 (sequence is synthesized)
agaaaaaatgaatcaaattctctccaattgtttatctgagaagtcattatttgttatttgtacatttcttcccactcttcacagaaaggcttcccaactgatgcaactcttgatgacata

SEQ ID NO: 344924 - DNA, 120 bp, Artificial Sequence
  ENSG00000138385_19 (sequence is synthesized)
aaaattagtagaaagtaattttaaaaattgtgtttattaaattagtttctacttgatcatttgttattgccactagatgtgatgtctgatattttctgaattatactaaattagtttcta

SEQ ID NO: 344925 - DNA, 90 bp, Artificial Sequence
  ENSG00000138385_20 (sequence is synthesized)
ttcgctcttgctgccccggcggaagaaactactttaaaatagcattttggtttctagtctttttcttgtatagctataaggtggtgtgag

SEQ ID NO: 344926 - DNA, 120 bp, Artificial Sequence
  ENSG00000138385_21 (sequence is synthesized)
gatgagtataaaaatgatgtaaaaaacagatctgtttatatttctcatcctgttgctcacgttggagtgcagtggtgtgatcatggcccactgcagtcttgacctcctgggctcaagtga

SEQ ID NO: 344927 - DNA, 120 bp, Artificial Sequence
  ENSG00000138385_22 (sequence is synthesized)
agctgggactacagaaaggcttcccaactgatgcaactcttgatgacataaaagaatggttagaagataaaggtcaagtactaaatattcagatgagaagaacattgcataaagcattta

SEQ ID NO: 344928 - DNA, 120 bp, Artificial Sequence
  ENSG00000138385_23 (sequence is synthesized)
ggagcgctttaggctggccggcggcgctgggaggtggagtcgttgctgttgctgtttgtgagcctgtggcgcggcttctgtgggccggaaccttaaagtattattttggcgacttcaatt

SEQ ID NO: 344929 - DNA, 120 bp, Artificial Sequence
  ENSG00000138385_24 (sequence is synthesized)
aacagaaatgagtgcagaagacatggagaagaacgttcagaatagctttattcataacagcaaaaaactagaaacaacaaaatggtcagaaacagaagaatgggccagacgtcgtggctc

SEQ ID NO: 344930 - DNA, 80 bp, Artificial Sequence
  ENSG00000138385_25 (sequence is synthesized)
cactttgggaggccaaggtggatggatcccttgaggtcagaagtttgaaaccagtacaaaaattagccatgcatggtggc

SEQ ID NO: 344931 - DNA, 87 bp, Artificial Sequence
  ENSG00000138385_26 (sequence is synthesized)
agtacaaaaattagccattgggatattgaggcacgagaatcacttgaacccaggggggtagaggttgcggtgagccgagattgcgcc

SEQ ID NO: 344932 - DNA, 120 bp, Artificial Sequence
  ENSG00000138385_27 (sequence is synthesized)
cctgtgcaacagagtgagcctctgtctcaaaaaaaggaaaagaaatggaagaatggataaatcagttgtggtatgtgcgtataccacatgttgtggactgtttgtagttccccaaaattc

SEQ ID NO: 344933 - DNA, 120 bp, Artificial Sequence
  ENSG00000138385_28 (sequence is synthesized)
atacattgacatcctaacctccagtgggatggtattaggaagtggggcctttgggaggtaataagatcatgatggtagaattctacctcatgaatgggatttagtgccttgtaagaagag

SEQ ID NO: 344934 - DNA, 120 bp, Artificial Sequence
  ENSG00000138385_29 (sequence is synthesized)
actggagagtttacttcctttctgcttttcaccatgtaaggatacatgaagaagatggccatctgcaaaccaggaagcaggtcatcatgagacaccagatctaacagcatcttgatcttg

SEQ ID NO: 344935 - DNA, 120 bp, Artificial Sequence
  ENSG00000138385_30 (sequence is synthesized)
gacttctcagccttcaaaactgcgagcaataaatttctgttgtttaagacacccagtctatgatattttgttatagctgtccaaactgagacccagatatatacatactacatgacctag

SEQ ID NO: 344936 - DNA, 120 bp, Artificial Sequence
  ENSG00000138385_31 (sequence is synthesized)
aacaggcaaagctaatcaatggtagttacttttaaggagggtattgactgagagaggagcccaaaggaactttctggagtgctgaaatgttctatatctcaatctggatggtaattacaa

SEQ ID NO: 344937 - DNA, 120 bp, Artificial Sequence
  ENSG00000138385_32 (sequence is synthesized)
ggtggtgttcacttgtgaaacttcattgagcacttaaaattcatgcaccttatagtttgtgtgatataattcaattaaaaaaatgtttagcccccaaaggcccttcttttctctttatct

SEQ ID NO: 344938 - DNA, 120 bp, Artificial Sequence
  ENSG00000138385_33 (sequence is synthesized)
gtcacagttattttattttacatgaagtcttggtaaagaatctgtgctgttttatcaacttccatgtactgtcttctatagaagatctacttatcattttatgcatgctgatctcgtcca

SEQ ID NO: 344939 - DNA, 120 bp, Artificial Sequence
  ENSG00000138385_34 (sequence is synthesized)
aggatagtggaggtcaccaattgttagacataggggtgggctctaggtctccccttaataacctcactttcatatgacttattacaatgaaggaagtttttgtagacaagattcaccttc

SEQ ID NO: 344940 - DNA, 120 bp, Artificial Sequence
  ENSG00000138385_35 (sequence is synthesized)
aaacatctattagcaagaaaacacaaaagtagtcctacaatctattcccaaaattcagggagaccctagatttctggcttttaggcaatctgatattcatcttgcgcgcgcgcgtgcgcg

SEQ ID NO: 344941 - DNA, 120 bp, Artificial Sequence
  ENSG00000138385_36 (sequence is synthesized)
cacacacacacacacacacagaaatagaaaaacttagcaagcctagcagccttcagagtggtactcttggcctggagttttgatttagttgagttttctgccccttagtgatgaattctc

SEQ ID NO: 344942 - DNA, 120 bp, Artificial Sequence
  ENSG00000138385_37 (sequence is synthesized)
gaattctctcaattgccctaaccaaaagtctaaaatattataatcatctgccttgaataatttttcatggatttttttccccctcgcatttaaagtccaggttagaatgataagtccatt

SEQ ID NO: 344943 - DNA, 120 bp, Artificial Sequence
  ENSG00000138385_38 (sequence is synthesized)
ctacgaagccatcagagttggtatggaactacaggatgttgggacttggcttccttctatcttgctgctttgccacacctatggtgtttccttcatttgcttggtccagttttgctcatc

SEQ ID NO: 344944 - DNA, 120 bp, Artificial Sequence
  ENSG00000138385_39 (sequence is synthesized)
taaagtacggaagaataagggctcaggaatcacagcctcactaattactgtatgtcctttcgtaatattcttaacctaagtttcttttgttttgttttgttttgagacagtctcatcctg

SEQ ID NO: 344945 - DNA, 80 bp, Artificial Sequence
  ENSG00000138386_0 (sequence is synthesized)
cgccgcggccaagcgagcgccgtcggggcgggtgggcgggaagaagcggcgggcccgaggtgggggggagcagagagagc

SEQ ID NO: 344946 - DNA, 120 bp, Artificial Sequence
  ENSG00000138386_1 (sequence is synthesized)
gagcgcgcccaccaccttcccttcccccctcgatgggagcgggggcgtcccggctcctgcagccgccagaggagggagagccgggggccgtcgcttcggagttggggctgagcagtcctc

SEQ ID NO: 344947 - DNA, 120 bp, Artificial Sequence
  ENSG00000138386_2 (sequence is synthesized)
ggggagagcgcgccaagaccgctgcagccgctggctgacggaaggagagttttacatggaagtggcttacagaaacttggcgctgaggtgcagggaagccagaaactctttgtgtctcta

SEQ ID NO: 344948 - DNA, 120 bp, Artificial Sequence
  ENSG00000138386_3 (sequence is synthesized)
aggccgatgaggaatttggaaacacatgtgggacatacaagcgttggatatagaggactgagcagggggaggaacatttaagctgatggaagtggaagtggaagttgctgtacattggca

SEQ ID NO: 344949 - DNA, 120 bp, Artificial Sequence
  ENSG00000138386_4 (sequence is synthesized)
gcaaggcctccgagttagcttttgaatgcagttaactggtttctcttaactgtggaattcattgaaaagtcagactccgagtggtcgttccaggatatcttgaaaagcccaggttaaacc

SEQ ID NO: 344950 - DNA, 120 bp, Artificial Sequence
  ENSG00000138386_5 (sequence is synthesized)
catccagagtaatggctgcggccttacccaggaccctgggggagttgcagctgtatagaatattacaaaaagccaatctactttcttattttgatgcctttatccaacaaggtggtgatg

SEQ ID NO: 344951 - DNA, 120 bp, Artificial Sequence
  ENSG00000138386_6 (sequence is synthesized)
atgtccagcaactctgtgaagcaggagaagaggagtttttggaaatcatggcactcgtgggcatggctagcaagccccttcatgttagaaggctgcagaaggctttgagagactgggtca

SEQ ID NO: 344952 - DNA, 120 bp, Artificial Sequence
  ENSG00000138386_7 (sequence is synthesized)
caaaccctgggcttttcaatcagccactgacttcccttcctgtcagtagcatacccatctataaattaccagagggatcaccaacatggctgggaatatcctgcagtagttatgaaagga

SEQ ID NO: 344953 - DNA, 120 bp, Artificial Sequence
  ENSG00000138386_8 (sequence is synthesized)
gtagcaatgcccgggaacctcatttaaaaatccccaaatgtgctgccaccacctgtgtgcagagcttgggacaggggaagtcagatgtggttgggagcctagcactgcagagtgttggtg

SEQ ID NO: 344954 - DNA, 120 bp, Artificial Sequence
  ENSG00000138386_9 (sequence is synthesized)
agtccagactctggcaaggccaccatgccactgagagcgagcacagcctctccccagcagacctgggctcccccgcgtccccaaaggagagcagtgaggcgctggatgctgctgctgcgc

SEQ ID NO: 344955 - DNA, 120 bp, Artificial Sequence
  ENSG00000138386_10 (sequence is synthesized)
tctctgtggctgagtgtgtggagcggatggcccccacactgccaaaaagtgacttgaatgaagtgaaagagctgctaaaaaccaacaagaagttggccaaaatgattggtcacatctttg

SEQ ID NO: 344956 - DNA, 120 bp, Artificial Sequence
  ENSG00000138386_11 (sequence is synthesized)
agatgaacgatgatgatccacacaaagaggaggaaattcggaaatacagtgcaatatatggcagatttgactcaaagaggaaggatgggaaacatctcacacttcatgagctcactgtta

SEQ ID NO: 344957 - DNA, 120 bp, Artificial Sequence
  ENSG00000138386_12 (sequence is synthesized)
atgaagcggctgctcaactctgtgtgaaggataatgccctgctgacaagaagagatgagctttttgccttggctcgacagatttctcgagaagtcacctataaatatacttacagaacca

SEQ ID NO: 344958 - DNA, 120 bp, Artificial Sequence
  ENSG00000138386_13 (sequence is synthesized)
ccaagtcaaaatgtggagaaagagatgaattatccccaaagagaattaaagtggaggatgggtttccagatttccaggattctgtgcaaacactcttccagcaggctagagctaagagtg

SEQ ID NO: 344959 - DNA, 120 bp, Artificial Sequence
  ENSG00000138386_14 (sequence is synthesized)
aagaacttgcagctcttagttcacagcagcctgaaaaggtgatggcaaagcagatggagttcctttgcaaccaagctggctatgagagactgcagcatgccgagaggaggttgtctgcag

SEQ ID NO: 344960 - DNA, 120 bp, Artificial Sequence
  ENSG00000138386_15 (sequence is synthesized)
ggctttacaggcagagctcagaagagcacagtcctaacggcttgacttccgataactcagatggacaaggagaaagacctttgaatctccgaatgcctaatttacagaacagacaacccc

SEQ ID NO: 344961 - DNA, 120 bp, Artificial Sequence
  ENSG00000138386_16 (sequence is synthesized)
atcattttgtggtggatggggagctgagcagactttaccccagtgaggcaaagtcccactcatcagagagccttgggattttaaaagactaccctcattcagcttttaccttagaaaaga

SEQ ID NO: 344962 - DNA, 120 bp, Artificial Sequence
  ENSG00000138386_17 (sequence is synthesized)
aagtcatcaaaacagagcctgaagattcaagatagctgtgatttctctcaccgttctctggaaatggcatcagatttaaggataatactccatcatagaaataagccttaataaccagtg

SEQ ID NO: 344963 - DNA, 120 bp, Artificial Sequence
  ENSG00000138386_18 (sequence is synthesized)
caggaagataaaacaacagccacaaaagagaaaatcaagagtgttgcaatctataacagtaatattgattcattcacattcctgtgttaagtcattttatatggaaaggcttacaaatca

SEQ ID NO: 344964 - DNA, 120 bp, Artificial Sequence
  ENSG00000138386_19 (sequence is synthesized)
atattgtaagcattcattatttaagaatgtacaatgtatttgtgtaatttatagaagtaaaatctagatgttgagacctgtttggtctaatagatgtggatacagtttattttacttgaa

SEQ ID NO: 344965 - DNA, 120 bp, Artificial Sequence
  ENSG00000138386_20 (sequence is synthesized)
attttgttgtctactttgtgtgtttaacgtaaatatatgtcagagtttagaatctgcctgcagttgtgaaaaagaaagcttaagtgatgcagttattggcaagattgcaatgattatgga

SEQ ID NO: 344966 - DNA, 120 bp, Artificial Sequence
  ENSG00000138386_21 (sequence is synthesized)
aaaatagaaagcgaatactcagtttaagccaaggaaaatattgtggatttaatatttgataaaactgattttgtttaacaggaaatttttagcattcagtcatataacatctggttatca

SEQ ID NO: 344967 - DNA, 120 bp, Artificial Sequence
  ENSG00000138386_22 (sequence is synthesized)
atgcacgtttacacaataaatacttgagtggaggaaagttaaaaagatgagcaatagagtagaaaatatatcttaaactagttgacctagattgtattaatagctacttaagatgtttca

SEQ ID NO: 344968 - DNA, 120 bp, Artificial Sequence
  ENSG00000138386_23 (sequence is synthesized)
aagataggaagctattgcttggacagagaacttgaaataagtggacccatgtataaaagctttgacttaaacattgatatttcagaatgtgttaaatagattaagacacagtaagttaac

SEQ ID NO: 344969 - DNA, 120 bp, Artificial Sequence
  ENSG00000138386_24 (sequence is synthesized)
cctacatgttataaagatggcgactgttaacaaaggctgtaacagattaagtactattttatatccagaaagtcttctctatgtagagaagtcagagagactagatgctttcactaggga

SEQ ID NO: 344970 - DNA, 120 bp, Artificial Sequence
  ENSG00000138386_25 (sequence is synthesized)
atgtcttcccacccagccatcacaaatgtggacaatcactgcatccacatctgtaggcatatttctatggaagtttaattgacagctatattcattatttattttacaatttcatttttc

SEQ ID NO: 344971 - DNA, 120 bp, Artificial Sequence
  ENSG00000138386_26 (sequence is synthesized)
tacacctttgagatttatgaatgcagttttttcttaaaatttattttaacttgacagtatgtttttagttcccccaatttaattaatggaccatgtgcatatatatgggagtgtgcttac

SEQ ID NO: 344972 - DNA, 120 bp, Artificial Sequence
  ENSG00000138386_27 (sequence is synthesized)
atgttaataatttacttgcatacttatgagaatttcacattggaattcataatggtaaaacaacatacatctgccaatatacgttttttctgttggtttaagagaagataactgacagct

SEQ ID NO: 344973 - DNA, 120 bp, Artificial Sequence
  ENSG00000138386_28 (sequence is synthesized)
ttacctacttcctacagatgcatctaaacccagatattactgagaagagtgtattgactctgagtgtaagagagtatgtgtttttttgtttttagttctgctctagatcataattgtaaa

SEQ ID NO: 344974 - DNA, 120 bp, Artificial Sequence
  ENSG00000138386_29 (sequence is synthesized)
aaatattaagtcataatctgttacactaaaatttgtcagccaaatgttagatgaaatgtctgcactgtagtctcagatcactgtcacgtatataaattgcttcttcattttaatttgtag

SEQ ID NO: 344975 - DNA, 120 bp, Artificial Sequence
  ENSG00000138386_30 (sequence is synthesized)
aagtactttacagtaggaaacgccagtaaacaacttttatactgttaaaaggcttttttccccttcctaaatgttttaattgtaccatagtgttttgctcactgaagaagcttcttatgg

SEQ ID NO: 344976 - DNA, 120 bp, Artificial Sequence
  ENSG00000138386_31 (sequence is synthesized)
accttgcaactttgttgctagcttgaggttgattattgtggttgtattgttcactgtgtgtagaaatagtatgagtacgatttcaatagactgttcagtttttaatattagccatagcac

SEQ ID NO: 344977 - DNA, 120 bp, Artificial Sequence
  ENSG00000138386_32 (sequence is synthesized)
tggttagtatatctcagtagtttcatgaaacgtttcctgtattctaatctattttgaaacattttgtttttttttaattgtgtcttacagtcaagtttgtagattttcataagccacaat

SEQ ID NO: 344978 - DNA, 120 bp, Artificial Sequence
  ENSG00000138386_33 (sequence is synthesized)
tttaaaagatgcagtaatcttccaacttccaatatttatccattcgttgtggacccacagattgcatctttaaattcataataagtttccttaactatcttatgtttctagtctttcaag

SEQ ID NO: 344979 - DNA, 120 bp, Artificial Sequence
  ENSG00000138386_34 (sequence is synthesized)
cttagtgataaggtggaagcacaagaaaaatttcagtagaatacagtttttattttgtaaacactaatgtattaaacttgctatacattaaagcaaataatatatatttttatttgaatt

SEQ ID NO: 344980 - DNA, 120 bp, Artificial Sequence
  ENSG00000138386_35 (sequence is synthesized)
gtatatgtgaattggaagttataattagttgattttttcattttgttagaggtattttcactgaacaaggtcaattggttacctcagtattacagccaatatagtccaagggaccatttc

SEQ ID NO: 344981 - DNA, 120 bp, Artificial Sequence
  ENSG00000138386_36 (sequence is synthesized)
tccccgagtctcttacactttattgtgcgatgtccacgtttttgtgactcttcaagctgttggtgaggtgggacgaatgcacttgcttcctgtggcaataaagattttctgtgcctcaca

SEQ ID NO: 344982 - DNA, 120 bp, Artificial Sequence
  ENSG00000138386_37 (sequence is synthesized)
actcggccgcgcgtgggcgggagccggagcggcgaatgtagcaagagcggaatctcccaatgtgacagcgcgggttttctttttaaaagcggaaggagagttttacatggaagtggctta

SEQ ID NO: 344983 - DNA, 120 bp, Artificial Sequence
  ENSG00000138386_38 (sequence is synthesized)
acatttccttttcagcatcatgttcagccagacacagacaagcttgggaagaggatttaatgttgtttcttccaactctggaaacaattccactagaaggctcaatagttcaggttaaac

SEQ ID NO: 344984 - DNA, 120 bp, Artificial Sequence
  ENSG00000138395_0 (sequence is synthesized)
ctctggcaaaaagggagagaacaaggataggagaggcagtgggggaaaggttcaagtgcgggttttctccttgaacctacaagattatgggtcaagagctgtgtgcaaagactgtacagc

SEQ ID NO: 344985 - DNA, 120 bp, Artificial Sequence
  ENSG00000138395_1 (sequence is synthesized)
ctggatgcagctgctaccattgttcagagggaggcgaggcacacagctgtcggaggagtcagcctgagaccacggaggctgcgttcaagctaacagacctaaaagaagcatcatgttcca

SEQ ID NO: 344986 - DNA, 120 bp, Artificial Sequence
  ENSG00000138395_2 (sequence is synthesized)
tgacttcatttcaccccaggggacttcaagctgcccgtgcccagaagttcaagagtaaaaggccacggagtaacagtgattgttttcaggaagaggatctgaggcagggttttcagtgga

SEQ ID NO: 344987 - DNA, 120 bp, Artificial Sequence
  ENSG00000138395_3 (sequence is synthesized)
ggaagagcctcccttttggggcagcctcatcttacttgaacttggagaagctgggtgaaggctcttatgcgacagtttacaaggggattagcagaataaatggacaactagtggctttaa

SEQ ID NO: 344988 - DNA, 120 bp, Artificial Sequence
  ENSG00000138395_4 (sequence is synthesized)
aagtcatcagcatgaatgcagaggaaggagtcccatttacagctatccgagaagcttctctcctgaagggtttgaaacatgccaatattgtgctcctgcatgacataatccacaccaaag

SEQ ID NO: 344989 - DNA, 120 bp, Artificial Sequence
  ENSG00000138395_5 (sequence is synthesized)
agacactgacattcgtttttgaatacatgcacacagacctggcccagtatatgtctcagcatccaggagggcttcatcctcataatgtcagacttttcatgtttcaacttttgcggggcc

SEQ ID NO: 344990 - DNA, 120 bp, Artificial Sequence
  ENSG00000138395_6 (sequence is synthesized)
tggcgtacatccaccaccaacacgttcttcacagggacctgaaacctcagaacttactcatcagtcacctgggagagctcaaactggctgattttggtcttgcccgggccaagtccattc

SEQ ID NO: 344991 - DNA, 120 bp, Artificial Sequence
  ENSG00000138395_7 (sequence is synthesized)
ccagccagacatactcttcagaagtcgtgaccctctggtaccggccccctgatgctttgctgggagccactgaatattcctctgagctggacatatggggtgcaggctgcatctttattg

SEQ ID NO: 344992 - DNA, 120 bp, Artificial Sequence
  ENSG00000138395_8 (sequence is synthesized)
aaatgttccagggtcaacctttgtttcctggggtttccaacatccttgaacagctggagaaaatctgggaggtgctgggagtccctacagaggatacttggccgggagtctccaagctac

SEQ ID NO: 344993 - DNA, 120 bp, Artificial Sequence
  ENSG00000138395_9 (sequence is synthesized)
ctaactacaatccagaatggttcccactgcctacgcctcgaagccttcatgttgtctggaacaggctgggcagggttcctgaagctgaagacctggcctcccagatgctaaaaggctttc

SEQ ID NO: 344994 - DNA, 120 bp, Artificial Sequence
  ENSG00000138395_10 (sequence is synthesized)
ccagagaccgcgtctccgcccaggaagcacttgttcatgattatttcagcgccctgccatctcagctgtaccagcttcctgatgaggagtctttgtttacagtttcaggagtgaggctaa

SEQ ID NO: 344995 - DNA, 120 bp, Artificial Sequence
  ENSG00000138395_11 (sequence is synthesized)
agccagaaatgtgtgaccttttggcctcctaccagaaaggtcaccacccagcccagtttagcaaatgctggtgaaaagaaagggcgagatcaccaaggttcttccagggctgtatttctg

SEQ ID NO: 344996 - DNA, 120 bp, Artificial Sequence
  ENSG00000138395_12 (sequence is synthesized)
cagtttcggttttcatttgcttcagcttactaagaagcttcaaatctaactccatactgaacaaggggctttatgtcctcacctatgacctggaatagtttaaatatggtgttcaaggca

SEQ ID NO: 344997 - DNA, 120 bp, Artificial Sequence
  ENSG00000138395_13 (sequence is synthesized)
atagtacataatagtggaagaaaattcagtggaaggttattgctattgtcatttgcatagaatttaagtgattgatttaaaaaaactggacataaactaagtctaagaagagggcttctg

SEQ ID NO: 344998 - DNA, 120 bp, Artificial Sequence
  ENSG00000138395_14 (sequence is synthesized)
aataacttcattcattttggcatttgttaagagattcctgggctagaaggttgatttcccaaaaagacagataagagactgacaatttaaaagaatctggagacagagctggtgcttaca

SEQ ID NO: 344999 - DNA, 120 bp, Artificial Sequence
  ENSG00000138395_15 (sequence is synthesized)
agtttagaaaaagatggtttcttggataacattgttaacaaaaggacttcctgaggactatttattattattttgtagggggcacttcctccttcactaaactggattatcagaacgtat

SEQ ID NO: 345000 - DNA, 120 bp, Artificial Sequence
  ENSG00000138395_16 (sequence is synthesized)
taccacccaacccatattttagaagtttggatttggctgctgattagaaatgaatttcaggctatctcctcctactgaatcttaattgtctgtgatgatggcaacagtgatggggaatct

SEQ ID NO: 345001 - DNA, 120 bp, Artificial Sequence
  ENSG00000138395_17 (sequence is synthesized)
cagtgatggggaatctaagcgctggtttgatggtggagatattgaataagtagttgggagcagagttccaaagatgtaatttaagccctgttgcaccaccacacacacacacacacacac

SEQ ID NO: 345002 - DNA, 120 bp, Artificial Sequence
  ENSG00000138395_18 (sequence is synthesized)
acacccctcaagtaaaatgagagatctgtcttagctaacacgtgtgccgttttatacaatgactccttctaaaagcagccagggaaactcaaatcgcttctgtccagggatcatctcagg

SEQ ID NO: 345003 - DNA, 120 bp, Artificial Sequence
  ENSG00000138395_19 (sequence is synthesized)
aaatgtagcagcctagaaaccagagacctctgtatatcctttggaagagcaaggaggaactaattaagagataattaaaaaatagtaactatcccccaatgtctgagatggaaaaaggaa

SEQ ID NO: 345004 - DNA, 120 bp, Artificial Sequence
  ENSG00000138395_20 (sequence is synthesized)
aaagacacatgggtagcccaaatcaacctgcctgagtaagtatctgattttagtaaggcatttgacaaagactgtccagctatacctgaaagatgaaacagtgtaggctgggtgatggag

SEQ ID NO: 345005 - DNA, 120 bp, Artificial Sequence
  ENSG00000138395_21 (sequence is synthesized)
cagatatatgtactcaaatcatggtgtttatttaacccagagaaaggccagccgtggtgtgctacaaggttcagtcttgagtcctattctggtcaaatatttttattaattactcgaata

SEQ ID NO: 345006 - DNA, 120 bp, Artificial Sequence
  ENSG00000138395_22 (sequence is synthesized)
aatcagagtacatggacaactttatacaactccttgaagtaagtactattattattaatttatgacttccatttcacaaaagaggagactgaggctcagtgaagttaggtaactccttca

SEQ ID NO: 345007 - DNA, 120 bp, Artificial Sequence
  ENSG00000138395_23 (sequence is synthesized)
tagtagcatgccagagtgaagatgcaaacctcagacctggttctccaatgttcctgacacctatcgaatttagagaatacacaactcttgcagaggcagctgctatttagtattggatca

SEQ ID NO: 345008 - DNA, 120 bp, Artificial Sequence
  ENSG00000138395_24 (sequence is synthesized)
tgattcaaaagacaccttgctagaagccaatgaacagcaggccaaaacaacacttacttgcatcaaatttcatctgacttaaattcttacactttgggctacaacttaaaaaaggctatg

SEQ ID NO: 345009 - DNA, 120 bp, Artificial Sequence
  ENSG00000138395_25 (sequence is synthesized)
acttagtggaaattggcacttttaagtacaatatgaattaatagtataatttcgctgtcccccagagataatgctagtaccaatcgaaagctcagggatgctactgttgacgcatcagca

SEQ ID NO: 345010 - DNA, 120 bp, Artificial Sequence
  ENSG00000138395_26 (sequence is synthesized)
agagttcttgagcagttttacctgtccatcaatacaaagagttcccacaacagtagtgggattcctctgcctctctgaagatatgagagctataggagggattcccatgttggaggttag

SEQ ID NO: 345011 - DNA, 120 bp, Artificial Sequence
  ENSG00000138395_27 (sequence is synthesized)
aagagctgacctccaatgtcccgtctaattccaagattctccaataatgactttggaacagctgtgtacagattatacttggaattatgcttagatactattgctgcaggaatgaataga

SEQ ID NO: 345012 - DNA, 120 bp, Artificial Sequence
  ENSG00000138395_28 (sequence is synthesized)
caaattttgttattaaaaaattgattttattaagtggaagttgacagaattatcctctttataatggaggaacattatgcttatgcatatgcatataccttatgcatatgattatgcttg

SEQ ID NO: 345013 - DNA, 120 bp, Artificial Sequence
  ENSG00000138395_29 (sequence is synthesized)
tgcttccttctttaatggatttacctattcaaaagcttaataaatgttataagactctaaaacatttaaatctttcatttctcaattttatcaaataaacattcctggaatttgtgcata

SEQ ID NO: 345014 - DNA, 120 bp, Artificial Sequence
  ENSG00000138395_30 (sequence is synthesized)
gaatgtctcattttgaccttaaatccagtgtgagagcttcactgcgtctgaaaccactatgagacagaagatgattaaaatgatccttgtccccactgggatgataaagagctattctgc

SEQ ID NO: 345015 - DNA, 120 bp, Artificial Sequence
  ENSG00000138395_31 (sequence is synthesized)
tttgggctcaatgagttctgagcaagtctctgtgtttgctgtgagcacaagctaaggtctgcatctgggtcggcatcagcttggttgtatgagctattagccaagggagttattcagtgg

SEQ ID NO: 345016 - DNA, 120 bp, Artificial Sequence
  ENSG00000138395_32 (sequence is synthesized)
gttgaactaaggggaaagatattgataaaagaggctttaactgcaggcatcaattcatatggaactgtaagtccaagctcccccttttactatctggggtaacttgaggaagttacttat

SEQ ID NO: 345017 - DNA, 120 bp, Artificial Sequence
  ENSG00000138395_33 (sequence is synthesized)
ttcctagttctgtaatctgcaaaatgggagaaatcctatcattgtaaaagtgtttcctatgtgccagacacagaacatacacaattgctaatcctattactgcctgccaagatcgatgct

SEQ ID NO: 345018 - DNA, 120 bp, Artificial Sequence
  ENSG00000138395_34 (sequence is synthesized)
gggtggagtagcccgattctacagatgaggaaacagaggctttctcctaggctcacagagaggtgtatacttattggaaatggctgaaatctgcatccaaaccttgttctcctttcatta

SEQ ID NO: 345019 - DNA, 120 bp, Artificial Sequence
  ENSG00000138395_35 (sequence is synthesized)
atcatgttgtatccctctgtctcattttgcaggatgagtctgaaaaataaattatattgaattgcatctgctatagtgcctaacttttagtaggtactcaataaaagttcccattcagtt

SEQ ID NO: 345020 - DNA, 120 bp, Artificial Sequence
  ENSG00000138395_36 (sequence is synthesized)
atttgtcctgcatgtctccatacctcttccatccacctcatctccccacctcacctttctttttctttgtttggctttatataggtgctgggagtccctacagaggatacttggccggga

SEQ ID NO: 345021 - DNA, 120 bp, Artificial Sequence
  ENSG00000138395_37 (sequence is synthesized)
agactgaacactgggtccactcaaattaggaagttgagcaggggaggaggaatcagcaaagatggttgcagaggagtccccagagaggcaggaggaaaaccaaggaagtgcccacttcac

SEQ ID NO: 345022 - DNA, 120 bp, Artificial Sequence
  ENSG00000138395_38 (sequence is synthesized)
agaatcaaggaggctttcaaaaagggtggcatgattatggtgttaaatgccaccaaagagtaaagcaagctgcctcgttttcagttgtgcacatctgaatgcaagcaatccctgtctgat

SEQ ID NO: 345023 - DNA, 120 bp, Artificial Sequence
  ENSG00000138395_39 (sequence is synthesized)
aagctaatgaggagtcaccagagtggaaggttttgcatttgtgagattgctgaaggagagccgcgctgcagcttttttcgttttttatttccctttctttctttcttcctcctttttctt

SEQ ID NO: 345024 - DNA, 120 bp, Artificial Sequence
  ENSG00000138395_40 (sequence is synthesized)
tttctatgagttgggaaggagagtctggcagtccacagccaaattggaatccttttgattaaccggttgccttcccagcatgttctgccagatagtgtctctctctctctccctccctcc

SEQ ID NO: 345025 - DNA, 120 bp, Artificial Sequence
  ENSG00000138395_41 (sequence is synthesized)
ctgcttttgaggagctgctgcttttgaggggcaaggaagccggagggaaatcccagcttttcatgccactgtccccaaggcaagaggatacttctccccgagagaagttccccaaatggt

SEQ ID NO: 345026 - DNA, 120 bp, Artificial Sequence
  ENSG00000138395_42 (sequence is synthesized)
ttggatttgagttgatttgagaataattggtaaagtatacgcactgtttattttagccatttaactgtctatgctatgacaagatctaatagaaagtagaatacaaaattgcatattata

SEQ ID NO: 345027 - DNA, 120 bp, Artificial Sequence
  ENSG00000138395_43 (sequence is synthesized)
atatccgtgtgaaaatgtcttatgcatatcaacaaatggtatgatggctcccctttccagcctatttggaatatgcgattccaaatacaagacaacgagaccccagattacccacagcat

SEQ ID NO: 345028 - DNA, 120 bp, Artificial Sequence
  ENSG00000138395_44 (sequence is synthesized)
ttaagggcagaagtttaggccaggcgaggcagagctggcaagtttatttcttccctttgggtgtgagcagcttccagcaaacagtattatttaaggcattttatgcttttggtgcagtaa

SEQ ID NO: 345029 - DNA, 120 bp, Artificial Sequence
  ENSG00000138395_45 (sequence is synthesized)
taacagaaggctctctttttgttaaattgtgagatattttgagcaccccagatttatgcaaattgtgaacctgggaaaagcaatgcccaagtggaaaggggccctgagtaaattttgcgg

SEQ ID NO: 345030 - DNA, 120 bp, Artificial Sequence
  ENSG00000138395_46 (sequence is synthesized)
atgtgctttggtgacaatgtggctgctgcctcttgctatttttctcagatatctgtgctaatacttgtaacaatggctaccatttattaaaaacatattgtgtatcataaactaacacaa

SEQ ID NO: 345031 - DNA, 120 bp, Artificial Sequence
  ENSG00000138395_47 (sequence is synthesized)
ccatggctctatgcagccttgacctcctgaactcaagcaattgtcctacctcagccttcccagttgctaggaccacagctgcctcgttttcagttgtgcacatctgaatgcaagcaatcc

SEQ ID NO: 345032 - DNA, 120 bp, Artificial Sequence
  ENSG00000138398_0 (sequence is synthesized)
gcgacgctgtctctccatgccaggactgagttgtgggggagggaggcggttagcgggctttagcgccttttctggcggcggtagatttgaagcgcttcaaaggaccggacccagagaaga

SEQ ID NO: 345033 - DNA, 120 bp, Artificial Sequence
  ENSG00000138398_1 (sequence is synthesized)
ggaaaactctaccggtgcaggagcacagggatcagttgtccttgtttttttttggtcttttcttcatttgaagattaagtattggagccatgggaataaaggttcaacgtcctcgatgtt

SEQ ID NO: 345034 - DNA, 120 bp, Artificial Sequence
  ENSG00000138398_2 (sequence is synthesized)
tttttgacattgccattaacaatcaacctgctggaagagttgtctttgaattattttctgatgtgtgccccaaaacatgcgagaactttcgttgtctttgtacaggtgaaaaggggaccg

SEQ ID NO: 345035 - DNA, 120 bp, Artificial Sequence
  ENSG00000138398_3 (sequence is synthesized)
ggaaatcaactcagaaaccattacattataagagttgtctctttcacagagttgtcaaggattttatggttcaaggtggtgacttcagtgaaggaaatggacgaggaggggaatctatct

SEQ ID NO: 345036 - DNA, 120 bp, Artificial Sequence
  ENSG00000138398_4 (sequence is synthesized)
atggaggattttttgaagacgagagtttcgctgttaaacacaacaaagaatttctcttgtcaatggccaacagagggaaggatacaaatggttcacagttcttcataacaacgaaaccaa

SEQ ID NO: 345037 - DNA, 120 bp, Artificial Sequence
  ENSG00000138398_5 (sequence is synthesized)
ctcctcatttagatgggcatcatgttgtttttggacaagtaatctctggtcaagaagttgtaagagagattgaaaaccagaaaacagatgcagctagcaaaccgtttgcggaggtacgga

SEQ ID NO: 345038 - DNA, 120 bp, Artificial Sequence
  ENSG00000138398_6 (sequence is synthesized)
tactcagttgtggagagctgattcccaaatctaaagttaagaaagaagaaaagaaaaggcataaatcatcatcatcttcctcctcctcatctagtgactcagatagctcaagtgattctc

SEQ ID NO: 345039 - DNA, 120 bp, Artificial Sequence
  ENSG00000138398_7 (sequence is synthesized)
agtcctcttctgattcctctgattccgaaagtgctactgaagagaaatcaaagaaaagaaaaaagaaacatcggaaaaattcccgaaaacacaagaaagaaaagaaaaagcgaaagaaaa

SEQ ID NO: 345040 - DNA, 120 bp, Artificial Sequence
  ENSG00000138398_8 (sequence is synthesized)
gcaagaagagtgcatctagtgagagtgaagctgaaaatcttgaagcacaaccccagtctactgtccgtccagaagagatccctcctatacctgaaaatagattcctaatgagaaaaagtc

SEQ ID NO: 345041 - DNA, 120 bp, Artificial Sequence
  ENSG00000138398_9 (sequence is synthesized)
ctcctaaagctgatgagaaggaaaggaaaaacagagagagagaaagggaaagagagtgtaatccacctaactcccagcctgcttcataccagagacgacttttagttactagatctggca

SEQ ID NO: 345042 - DNA, 120 bp, Artificial Sequence
  ENSG00000138398_10 (sequence is synthesized)
ggaaaattaaaggaagaggaccaaggcgttatcgaactccttccagatccagatcaagggatcgtttcagacgtagtgagactcctccacattggaggcaagagatgcagagagctcaaa

SEQ ID NO: 345043 - DNA, 120 bp, Artificial Sequence
  ENSG00000138398_11 (sequence is synthesized)
gaatgagggtatcaagtggtgaaagatggatcaagggggataagagtgagttgaatgaaataaaagaaaatcagagaagtccagttagagtaaaagagagaaaaataacagatcacagga

SEQ ID NO: 345044 - DNA, 120 bp, Artificial Sequence
  ENSG00000138398_12 (sequence is synthesized)
atgtatctgagagtccaaacagaaaaaatgaaaaggagaagaaagttaaagaccataaatctaacagcaaagagagagacatcagaagaaattcagaaaaagatgacaagtataaaaaca

SEQ ID NO: 345045 - DNA, 120 bp, Artificial Sequence
  ENSG00000138398_13 (sequence is synthesized)
aagtgaagaaaagggccaaatctaaaagtaggagtaagagcaaagagaaatcaaagagtaaagaaagagattcaaaacataatagaaatgaagaaaagaggatgaggtcaaggagtaaag

SEQ ID NO: 345046 - DNA, 120 bp, Artificial Sequence
  ENSG00000138398_14 (sequence is synthesized)
gaagggatcatgaaaatgttaaagaaaaagaaaagcagtctgattctaaaggaaaagatcaggaaaggagtagaagtaaagagaagtctaaacagttagaatcaaagagtaatgagcatg

SEQ ID NO: 345047 - DNA, 120 bp, Artificial Sequence
  ENSG00000138398_15 (sequence is synthesized)
atcacagtaaaagtaaggaaaaggatagacgcgcacaatccaggagtagagaatgtgatataactaaaggtaaacacagttataatagcagaacaagagaacgaagcagaagtagggaca

SEQ ID NO: 345048 - DNA, 120 bp, Artificial Sequence
  ENSG00000138398_16 (sequence is synthesized)
gaagcagaagagtgcgatcaagaacccatgacagagatcgcagcagaagcaaggagtaccatagatacagagaacaggaatacaggagaagaggacggtcacgaagccgagagagaagaa

SEQ ID NO: 345049 - DNA, 120 bp, Artificial Sequence
  ENSG00000138398_17 (sequence is synthesized)
caccaccaggaagatcaagaagtaaagataggaggagaaggaggagagactcacggagctcagagagagaagaaagtcaaagcagaaacaaagacaaatacagaaaccaagagagtaaga

SEQ ID NO: 345050 - DNA, 120 bp, Artificial Sequence
  ENSG00000138398_18 (sequence is synthesized)
gctcacacagaaaagaaaattctgagagtgagaaaagaatgtactctaaaagtcgtgatcataatagctcaaataacagcagggaaaaaaaggctgatagagatcaaagtcccttctcaa

SEQ ID NO: 345051 - DNA, 120 bp, Artificial Sequence
  ENSG00000138398_19 (sequence is synthesized)
aaataaaacaaagcagtcaggacaatgaattaaagtcctccatgttgaaaaataaggaggatgagaagatcagatcctcagtggaaaaagaaaaccaaaaatcaaaaggtcaagaaaatg

SEQ ID NO: 345052 - DNA, 120 bp, Artificial Sequence
  ENSG00000138398_20 (sequence is synthesized)
accatgtacatgaaaaaaataaaaaatttgatcatgaatcaagccctggaacagatgaagacaaaagcggatgagtgagttatataaacttacttccattctgtttcggattttaagttt

SEQ ID NO: 345053 - DNA, 120 bp, Artificial Sequence
  ENSG00000138398_21 (sequence is synthesized)
gagagacttgctaatgaatctcctttatgttgttttccttttcattgtttttggattgttttatgtttgtccttttttttcttaatgtggatttcattgagttgattttttgataatctg

SEQ ID NO: 345054 - DNA, 120 bp, Artificial Sequence
  ENSG00000138398_22 (sequence is synthesized)
caatctggataatttgtactgctaaagttttaataaactcgacatgagaaaaacactttggtgtagtactgtgtgctgtgtttaactattttatgtatgcattactgtgttgcaacaatt

SEQ ID NO: 345055 - DNA, 120 bp, Artificial Sequence
  ENSG00000138398_23 (sequence is synthesized)
agccaatagcatcctaatttgtttagtcagccatttggaatggttgcaatgcattgttgcaaaagcttgtgtttctcatgattaaagtaactttagaagccactagaagacatcttgtat

SEQ ID NO: 345056 - DNA, 120 bp, Artificial Sequence
  ENSG00000138398_24 (sequence is synthesized)
agattttctgattgcgttataaatagaggtttgcagcggtttcttttaattacacagaagcagggtcctaataacctgagatcttaaatcatcacttttgattttatagtaatttgtgct

SEQ ID NO: 345057 - DNA, 120 bp, Artificial Sequence
  ENSG00000138398_25 (sequence is synthesized)
ttaaaatagatgtatttatattgcacttcatactctattctttatagttcgagccatagcttgtttcctattaatgcttttcctgtctagttgtgttttacttaactgcctataaaaatc

SEQ ID NO: 345058 - DNA, 120 bp, Artificial Sequence
  ENSG00000138398_26 (sequence is synthesized)
tggtttgaagagttttgggaacgttttaattattaattacccttctctaaactttaaaaaaaaaaaagcttttctcattaaaacataccatttgtgcaggtccttaagctatacagattc

SEQ ID NO: 345059 - DNA, 120 bp, Artificial Sequence
  ENSG00000138398_27 (sequence is synthesized)
taaaaattgttagtattgagacattaacttctaagatttctcttttttggcctccaacctatatagaattgagtgttaactctgcatggattttgtttgttttaattgaactgacttctc

SEQ ID NO: 345060 - DNA, 120 bp, Artificial Sequence
  ENSG00000138398_28 (sequence is synthesized)
taactctcatagctgtgagttccaaatggcaagaaaatgcatcttttctatatatgtatcacgataggctatagcatgtttatgactctggtttctttctcttcaggtggttttatacca

SEQ ID NO: 345061 - DNA, 120 bp, Artificial Sequence
  ENSG00000138398_29 (sequence is synthesized)
ttactgttaatgttattttaacttggcatgtataacattgccatatagagtagagtagaaagttgcaaattttgatagtttacagagttaaacactaaacatatccaaagtccatttaga

SEQ ID NO: 345062 - DNA, 120 bp, Artificial Sequence
  ENSG00000138398_30 (sequence is synthesized)
gttttgggtgttgtattttgccatttttgtgatgtgtggccttttattctgtaatctcttctaaataaaacattgaacatccagcaaacataaaacctgcctcatttgaaaaggaatttc

SEQ ID NO: 345063 - DNA, 120 bp, Artificial Sequence
  ENSG00000138398_31 (sequence is synthesized)
aaaattccaattaataggattctctagagagttttgtactttaatatttgtcagtgtagtgtcaactctgttaccaaggtagcttcttggtaaatccagtagctactcaatgctatttgt

SEQ ID NO: 345064 - DNA, 120 bp, Artificial Sequence
  ENSG00000138398_32 (sequence is synthesized)
actgaataaagcaattattaacatgatacttcccactattgattaatgcaatattgatatatttggcgttgtggtagctgttgcagaatgaatagtgtaatgaccataagattgcttgga

SEQ ID NO: 345065 - DNA, 120 bp, Artificial Sequence
  ENSG00000138398_33 (sequence is synthesized)
aaattgtaatacagatatccacaatgaattctttccaaaatttttttttccgatgataaaagtagtagatgtttattataaaatccaaggtgattgattccttagagactgaccacaaac

SEQ ID NO: 345066 - DNA, 120 bp, Artificial Sequence
  ENSG00000138398_34 (sequence is synthesized)
ccacattagggataattgagtctgagtgcccaagctatataacgttatgtagtttaagcaagttattgtttgtcttaatttcagttaactgcattttaaaattgttgttataaactattt

SEQ ID NO: 345067 - DNA, 120 bp, Artificial Sequence
  ENSG00000138398_35 (sequence is synthesized)
gagctttaagaaaggtgctatttaagaaaggatttctaataacagttaaatattttttttaagtccatgctaagtaaaaattcttacatgttgtctgatcccagagctttatctactaaa

SEQ ID NO: 345068 - DNA, 120 bp, Artificial Sequence
  ENSG00000138398_36 (sequence is synthesized)
aattatacataaggatttccaaatcttagagtttcaaaaagtaaccatagggaaaaaaattgtagtaatttctataggcaatattctgtttgggttatcaaaagagcaactccatgctcc

SEQ ID NO: 345069 - DNA, 120 bp, Artificial Sequence
  ENSG00000138398_37 (sequence is synthesized)
gcattatttatagtccttattttaaagttttattagctctctttacagaacagatgtgaaggagttgagaggacaatcaactagattttatttttagaatataaagaacatttttaaaat

SEQ ID NO: 345070 - DNA, 120 bp, Artificial Sequence
  ENSG00000138398_38 (sequence is synthesized)
gattaaacagcattaactgtacctcaggatctgcgcatgcatctgaatagcacacggctcaaatggtcctttccttttgttacatttagtagttgtgccatctttagtttttgctttgaa

SEQ ID NO: 345071 - DNA, 120 bp, Artificial Sequence
  ENSG00000138398_39 (sequence is synthesized)
cattgttttcctaaaagtcaactattactttcccatcaagttggttttatagttatgtctaaatttatggttcatgtcaaagtatttttgacttaatatccttttaaaaatatttaaact

SEQ ID NO: 345072 - DNA, 120 bp, Artificial Sequence
  ENSG00000138398_40 (sequence is synthesized)
gatttattgctcaattggtgatagctgagaaaattttttcaatatgtagaattttcatggttattttgtatgaattatttttctgggtaagccatctgccacagaaattgacactatggt

SEQ ID NO: 345073 - DNA, 120 bp, Artificial Sequence
  ENSG00000138398_41 (sequence is synthesized)
gagattaatgttaatgaaatgagcagtagagaagctactggattgctttaaaacattctttgattaaattactacatagttggtaagttcatagttttaagttacttaattgaagccctc

SEQ ID NO: 345074 - DNA, 120 bp, Artificial Sequence
  ENSG00000138398_42 (sequence is synthesized)
agaagttgcaaagaatttatctgataaatctgcctttgcacaaatgtgatactgatgcatggacggctttgcggaatgacctttgatatttgtgcctagtggaaggtatggagctaaaca

SEQ ID NO: 345075 - DNA, 120 bp, Artificial Sequence
  ENSG00000138398_43 (sequence is synthesized)
attaaagaactcttcattatggataggcacatattggatctctggtattttgggtagtggtattaacttgacaattctaatttattttagttagtatatgtagcaagttagtatgtttgt

SEQ ID NO: 345076 - DNA, 120 bp, Artificial Sequence
  ENSG00000138398_44 (sequence is synthesized)
tagtagtttattgtacttcattccagttggtaatatagttttcatcacactaaactttttatactaaatttctgtagaagcttgttgggtttgccttcaccagaaggtactttaaatacc

SEQ ID NO: 345077 - DNA, 120 bp, Artificial Sequence
  ENSG00000138398_45 (sequence is synthesized)
taccatagctgatttgttataaagaaacaaaatgggtgttcttctgtttccttttgattatgtttactgtaattatttcattttggatttatacatttacaattgaataaggattatagg

SEQ ID NO: 345078 - DNA, 120 bp, Artificial Sequence
  ENSG00000138398_46 (sequence is synthesized)
ttgataagctgtttattgtgaaaagatgtgttttgttacaaatacttgttttaaaaattaataagcccccaggaagtacagcattgactggcacaactgcccatagtgagcttcccaact

SEQ ID NO: 345079 - DNA, 120 bp, Artificial Sequence
  ENSG00000138398_47 (sequence is synthesized)
aactgccttcagtggattcgggcaagtgcaaagtctttggcctattgtgtgacaaagaggtatatattaaaggaaaagaaaaatgacatgaataagaaaattccgtcaacaaggttggag

SEQ ID NO: 345080 - DNA, 120 bp, Artificial Sequence
  ENSG00000138398_48 (sequence is synthesized)
tagggagttgttgaggggtttagtttgttttaaaaggtatgtgagggagtggtggggtggatttgtgtttctgactttttttctttaagcaaattccatatgttaccaaaagcacatgct

SEQ ID NO: 345081 - DNA, 120 bp, Artificial Sequence
  ENSG00000138398_49 (sequence is synthesized)
gtatattttcttccccttttgtgtgtatatagtattttgaaagataaatgaattgggtatttgtatgtgggatgtacaaaattgtggccgctctctttgtggaaggaaaaaacataaatg

SEQ ID NO: 345082 - DNA, 120 bp, Artificial Sequence
  ENSG00000138398_50 (sequence is synthesized)
aagttaatgcacttcttttcctagcccaaaagtcactgtgattatatttttttaatgaagtttagaaaaaaagctgttgtcttctcaattgtaaaattagtttcaaaatgctgcttctct

SEQ ID NO: 345083 - DNA, 120 bp, Artificial Sequence
  ENSG00000138398_51 (sequence is synthesized)
tatcattagtctagtaattgttgaacttttctgcaaactgcattttacaaaattgaaacttggaagctgtattaacttttatagttaaacattgtattaaataaactatactataataaa

SEQ ID NO: 345084 - DNA, 120 bp, Artificial Sequence
  ENSG00000138398_52 (sequence is synthesized)
ctcaaatgcagttaatttctttacccatgttttaaagtattttaaatttatcagagtgcattgctcacatagtttcatattttttatccattttgtaggaaaatattttttgagagtgtg

SEQ ID NO: 345085 - DNA, 120 bp, Artificial Sequence
  ENSG00000138398_53 (sequence is synthesized)
ataatcgaaacgttttgttttgtttgttttttgattggttagttggtttgtcagaggaatagaagatttttcccatgcgatcacatctttggtaaggacaggatgtttatattatagtga

SEQ ID NO: 345086 - DNA, 120 bp, Artificial Sequence
  ENSG00000138398_54 (sequence is synthesized)
gaagaggggcggagccggcgcggctgaccgggttgggtttaccgtctttccctcgaggtatcggggctgcttgggcccagaggaagtccctgaggaccgcagcagtgcctttgccgctgt

SEQ ID NO: 345087 - DNA, 120 bp, Artificial Sequence
  ENSG00000138398_55 (sequence is synthesized)
tgcagaaggagaaggcttgcagtcgagccccggggcctggggacggtccttcctctgccagcccccgccctccccactcaggcgcacacctccctcactgacgcattttgccgcacaagc

SEQ ID NO: 345088 - DNA, 120 bp, Artificial Sequence
  ENSG00000138398_56 (sequence is synthesized)
gttcttcatttaagaaagaagaaaagaaaaggcataaatcatcatcatcttcctcctcctcatctagtgactcagatagctcaagtgattctcagtcctcttctgattcctctgattccg

SEQ ID NO: 345089 - DNA, 120 bp, Artificial Sequence
  ENSG00000138398_57 (sequence is synthesized)
gggagggaggcggttagcgggctttagcgccttttctggcggcggtagatttgaagcgcttcaaaggaccggacccagagaagaggaaaactctaccggtgcaggtaagtggagcacagg

SEQ ID NO: 345090 - DNA, 120 bp, Artificial Sequence
  ENSG00000138398_58 (sequence is synthesized)
tattttaatgtgcaagtaactaaaatttaggggagatgcaggcattgaattatatattctctttcttaagcagcttctgtatgttggtacttcccaacagaaaatccatgagatatgaat

SEQ ID NO: 345091 - DNA, 120 bp, Artificial Sequence
  ENSG00000138398_59 (sequence is synthesized)
agattttacatttacatggtataaaatgggatcgaggtctttcttgtctcccgtgtttcttggcaatcactgtatctctattcttgttaaaaataaataaaaattaaccctattcttgta

SEQ ID NO: 345092 - DNA, 120 bp, Artificial Sequence
  ENSG00000138399_0 (sequence is synthesized)
ctggtttgggggcaaggtctcatgggaaaggtcatgtctctcgaagaaaggttataaaccctgagatatgagggttgggcgagacatccgagcctgtttcgttccgtgttgggaccagga

SEQ ID NO: 345093 - DNA, 120 bp, Artificial Sequence
  ENSG00000138399_1 (sequence is synthesized)
ataaccctgacttctgagctttcataaccccaggatcctccagaaaatttgcggcgcgctgagggaaaaccttgctgaagctgtacattggaatgcgtttacagtcattgtaatggaagc

SEQ ID NO: 345094 - DNA, 120 bp, Artificial Sequence
  ENSG00000138399_2 (sequence is synthesized)
aaaatacatgaaggaaaaactgttatttgtatccctgcttattgcacctgacgactagttgcagatggttttgtttacctaagaaaacttgtgatataaatgaaaaaaacacctgttttc

SEQ ID NO: 345095 - DNA, 120 bp, Artificial Sequence
  ENSG00000138399_3 (sequence is synthesized)
ctagagtcattggttacaaatatgcttcgtctaagagctatttgtccattctcctggagagtgtttcaatttcgacccatcagttgtgaaccactaattattcagatgaataagtgtaca

SEQ ID NO: 345096 - DNA, 120 bp, Artificial Sequence
  ENSG00000138399_4 (sequence is synthesized)
gatgaggagcaaatgtttggttttattgaaagaaacaaagccatactttcagaaaagcaagtgggatgtgcatttgatatgctttggaagcttcaaaagcagaagaccagcctgttaaaa

SEQ ID NO: 345097 - DNA, 120 bp, Artificial Sequence
  ENSG00000138399_5 (sequence is synthesized)
aatgctgagtatgtcagagaccatcctcaatttcttactcttcataatttagctacaaataaattcaaattaatgaatgacgataccctggtgaatgtgttatacgtcacacaacagttt

SEQ ID NO: 345098 - DNA, 120 bp, Artificial Sequence
  ENSG00000138399_6 (sequence is synthesized)
gctggtgaggcccatgacccgctagttgaagcactagttacagaagcatggagaaggctagaaaggtttgatattaaactgctctcagaattttcctcttgcctagcagatcagcatttg

SEQ ID NO: 345099 - DNA, 120 bp, Artificial Sequence
  ENSG00000138399_7 (sequence is synthesized)
tattttagtccattaatgggaaaaatagctgatattgttcataggaacttggaaaccacacaggacttaagttccttgtctgtcttgatggtcaacatatcttctttaatatcacgacat

SEQ ID NO: 345100 - DNA, 120 bp, Artificial Sequence
  ENSG00000138399_8 (sequence is synthesized)
tttcaacaacaactggtgaacaaaacagaacttctttttgacaccatagattcttctgaggtcaacgttgcaaaaagcatagcaaagtttcttcgaaatgttagatatcgttatcaacca

SEQ ID NO: 345101 - DNA, 120 bp, Artificial Sequence
  ENSG00000138399_9 (sequence is synthesized)
ctattagaaagatgtaataacgtatttttaagtaatgtggaccaccttgatttggattccatcagtaaaatacttagtgtatacaaatttctacaatttaatagttttgaatttattata

SEQ ID NO: 345102 - DNA, 120 bp, Artificial Sequence
  ENSG00000138399_10 (sequence is synthesized)
atggctaaaaagaagctaactgaaatgattcctctgtgtaatcatcctgctagctttgtaaaattgtttgtagcattgggacccattgcaggacctgaagaaaagaaacaacttaaatca

SEQ ID NO: 345103 - DNA, 120 bp, Artificial Sequence
  ENSG00000138399_11 (sequence is synthesized)
actatgttattgatgtcagaggacctaactggcgagcaagccctggcagtgttgggagcaatgggagatatggaaagcagaaactcatgtctgattaaaagagttacttcagttctgcat

SEQ ID NO: 345104 - DNA, 120 bp, Artificial Sequence
  ENSG00000138399_12 (sequence is synthesized)
aaacatttggatggctataaaccattagagttgttgaagataactcaagaattaacttttctgcatttccaaaggaaggagttttttgcgaaacttagagaattactgcttagttatttg

SEQ ID NO: 345105 - DNA, 120 bp, Artificial Sequence
  ENSG00000138399_13 (sequence is synthesized)
aaaaatagtttcataccaactgaggtgtctgttctggtccgtgctatttccctgctcccttctcctcacttggacgaagtggggatatcccgaattgaagccgttttaccacagtgtgac

SEQ ID NO: 345106 - DNA, 120 bp, Artificial Sequence
  ENSG00000138399_14 (sequence is synthesized)
ctaaataacctgagtagttttgccacatctgttttaagatggattcagcatgatcacatgtatttggataatatgactgcgaaacaactgaaactacttcaaaaattagatcactatggt

SEQ ID NO: 345107 - DNA, 120 bp, Artificial Sequence
  ENSG00000138399_15 (sequence is synthesized)
cgtcagagactacaacacagcaacagtttggatctgttacggaaggaacttaaatctctcaaaggaaacacgtttcctgagtcacttcttgaagaaatgattgctactttacagcatttc

SEQ ID NO: 345108 - DNA, 120 bp, Artificial Sequence
  ENSG00000138399_16 (sequence is synthesized)
atggatgatattaattacataaatgttggggagattgcatcttttatttctagtactgattacctcagtactttgctactagataggatagcctcagtggctgttcagcagattgaaaag

SEQ ID NO: 345109 - DNA, 120 bp, Artificial Sequence
  ENSG00000138399_17 (sequence is synthesized)
atccatccttttacaatccctgctattattcgtccattcagcgtattgaactatgatccacctcaaagggatgaatttttgggaacttgcgtgcaacatcttaattcttacttaggtata

SEQ ID NO: 345110 - DNA, 120 bp, Artificial Sequence
  ENSG00000138399_18 (sequence is synthesized)
ttggatccttttatattagtgtttcttggtttctctttggccacacttgaatattttccagaagatctgctaaaggcaatttttaacatcaaattcttagctagattggattctcaactt

SEQ ID NO: 345111 - DNA, 120 bp, Artificial Sequence
  ENSG00000138399_19 (sequence is synthesized)
gaaattttatctccatctcgaagtgcaagagtccagtttcatcttatggagttaaatagatcagtctgcttggaatgccctgagtttcagattccatggtttcatgaccgcttctgtcaa

SEQ ID NO: 345112 - DNA, 120 bp, Artificial Sequence
  ENSG00000138399_20 (sequence is synthesized)
caatataataaaggtattggtggcatggatggaacacaacagcagatttttaaaatgttagcagaggtactaggaggaatcaattgtgtaaaagcctcggttcttacgccttattaccac

SEQ ID NO: 345113 - DNA, 120 bp, Artificial Sequence
  ENSG00000138399_21 (sequence is synthesized)
aaagtagattttgagtgtatcttggataaaagaaaaaaacctcttccgtatggaagccataatatagcattgggacaactaccagaaatgccctgggaatcaaatatcgaaatagttgga

SEQ ID NO: 345114 - DNA, 120 bp, Artificial Sequence
  ENSG00000138399_22 (sequence is synthesized)
tcaaggctgccaccaggggctgaaaggattgctttggaatttttggattcaaaagcactttgtagaaatatccctcacatgaaaggaaaatctgctatgaaaaaacgacatttggaaatt

SEQ ID NO: 345115 - DNA, 120 bp, Artificial Sequence
  ENSG00000138399_23 (sequence is synthesized)
ctggggtatcgtgtaattcagatttcccagtttgaatggaactctatggcactgtcaacaaaggatgctcggatggactacctgagagaatgtatatttggagaagtcaagtcatgtttg

SEQ ID NO: 345116 - DNA, 120 bp, Artificial Sequence
  ENSG00000138399_24 (sequence is synthesized)
tagtttttatttaaaatgaatgttatcgtgtgttacatttggacctattttaataaagtggcctgtctcaattaaaaaataggtacaaatgtcctaaggtgggaacatgcctggcatgtt

SEQ ID NO: 345117 - DNA, 120 bp, Artificial Sequence
  ENSG00000138399_25 (sequence is synthesized)
tgagaataacaaaggatccagtgtggctggagcagaacaagtggggagtggggtgggagtgtataagagaaaagataagagataacagagtcaaatacaacctcttggctactctgagcg

SEQ ID NO: 345118 - DNA, 120 bp, Artificial Sequence
  ENSG00000138399_26 (sequence is synthesized)
agatgagaagccattgggggcttttcaagtaaggaatgatatgaattcacattttaactgcgttactttggctaccttgttgagataagaaaagactacgatgaggcaaatgtgtaagaa

SEQ ID NO: 345119 - DNA, 120 bp, Artificial Sequence
  ENSG00000138399_27 (sequence is synthesized)
agaaaactctttacgaggtcattgcaataatccagacaacaatggatggtggcttggagagagtggtagcagtggaggtaataagaagtagtcagattttttggatgtatgttgaagata

SEQ ID NO: 345120 - DNA, 120 bp, Artificial Sequence
  ENSG00000138399_28 (sequence is synthesized)
aaggcaacagaatttgctcactgattggatatgaggtatgagacaaataggagtcaaggataattctaagtttttgtcctaagcaactaagaggatgtcattagcattaactaagatggg

SEQ ID NO: 345121 - DNA, 120 bp, Artificial Sequence
  ENSG00000138399_29 (sequence is synthesized)
gatagtctataggaagagcaagatggggggcaggtggtgggggttgatcacaagtttgttttagatatgttgagtttgtgatgtcttttaaacatctaagtggatatatcaaatagagaa

SEQ ID NO: 345122 - DNA, 120 bp, Artificial Sequence
  ENSG00000138399_30 (sequence is synthesized)
ttcagtaaatgagcttggaggtcagggaagaggtccaggccccagatataaatgtataaatgtcagcagtattcaatgccatgagagtagatgaaatcgcttaaaatgagattagagaag

SEQ ID NO: 345123 - DNA, 120 bp, Artificial Sequence
  ENSG00000138399_31 (sequence is synthesized)
agtgtgaatggaggagaggtctgaggactgagttttcaagtgccccaacattaaaagattaagaggaagaggaggaatcaggaaaggagactgagcagggatggccaatgaggtaggagg

SEQ ID NO: 345124 - DNA, 120 bp, Artificial Sequence
  ENSG00000138399_32 (sequence is synthesized)
aaggaaggtaagtaatacttcctagaagccaagtggataaagcatttcaagggggaggtgagtagttgtatcagatgctgctgataggtcaggaaagatgacaaatgggaaatggctatt

SEQ ID NO: 345125 - DNA, 120 bp, Artificial Sequence
  ENSG00000138399_33 (sequence is synthesized)
aaatttagcaacatgaaaatcattagtactttgaaaatagtcgttttgaagtggtgcatgtgaaagcctgactggttcaagagaaaatgggaggagatacattttctcctaaatggaagc

SEQ ID NO: 345126 - DNA, 120 bp, Artificial Sequence
  ENSG00000138399_34 (sequence is synthesized)
aaagaaatggggtagtagctgagtggaccatcttgacctggtgtaatcctacacattgagggaataatggcttctccctgtcttacaacacatttattcaataaaatggttactaagggc

SEQ ID NO: 345127 - DNA, 120 bp, Artificial Sequence
  ENSG00000138399_35 (sequence is synthesized)
aacagtaagttcagtttaaaatgcattactttttttgttgtgaatacgtggagccttcaagcttaggtctccttgcagctctggaaggtacaaatatcaccctattaggttgtggaaggg

SEQ ID NO: 345128 - DNA, 120 bp, Artificial Sequence
  ENSG00000138399_36 (sequence is synthesized)
cttttcccacccagcacgttttcgggctggggacatagggttcagttgagatacggaggcttccttcgggatattgggttctctgaagtgcggatggactagggcagggctgagacccca

SEQ ID NO: 345129 - DNA, 120 bp, Artificial Sequence
  ENSG00000138399_37 (sequence is synthesized)
ttcattcactcatttgtttagctctcctttatgcccggcgcagaagataccccttagggtcccaaggcccttcctgtagttaagttccttccttaaggtcattcagctggggcaaagctg

SEQ ID NO: 345130 - DNA, 120 bp, Artificial Sequence
  ENSG00000138399_38 (sequence is synthesized)
gggactcgacacctttctatgctaaccattgagctgcctccactttgagcagctcagtggatgaatatagtatcttgaggatacctttgatttgtgcagggttttcttgtgcaggtttgt

SEQ ID NO: 345131 - DNA, 120 bp, Artificial Sequence
  ENSG00000138399_39 (sequence is synthesized)
gacccaggtcagcttaggtcaggatgctgtactgcttgccacaaaatagcctgtactgtcgcgtcgttttttcttgtgaacagactgtttggcatagccgtagagaggggtctgagacat

SEQ ID NO: 345132 - DNA, 120 bp, Artificial Sequence
  ENSG00000138399_40 (sequence is synthesized)
gaatttagtgatacagcgttgatttgtttgtgtaatgaagctgttcaagtggaaagaactgagttgtagtccctgcttcactagtactagaaggattttttaaacctttttgaacctatt

SEQ ID NO: 345133 - DNA, 120 bp, Artificial Sequence
  ENSG00000138399_41 (sequence is synthesized)
gttgttattattattaaaattttcaaacggagatagaaagagcaatagaataaatcctcaagttcccgtggcccagtgttgataaccaagagcgttttctattctttagaaaaaaaaaaa

SEQ ID NO: 345134 - DNA, 120 bp, Artificial Sequence
  ENSG00000138399_42 (sequence is synthesized)
ggttcaagcaattctcctttaacaactgtaatactattgttaactgtgggcatttgaaattggattattgtggagttttgtgaaaatgtggttggctgcagatgaggatatagtaggttt

SEQ ID NO: 345135 - DNA, 120 bp, Artificial Sequence
  ENSG00000138399_43 (sequence is synthesized)
attgatttccaaagagaggtgccattggaccagatcttataaaaataacttggataatctgagaggttcgtcattcttttgtgagtgtgtgtgtgtacaaatattatatgcatatatatt

SEQ ID NO: 345136 - DNA, 120 bp, Artificial Sequence
  ENSG00000138400_0 (sequence is synthesized)
gcgtggttgccaggaaaccgcgaagccgcggtccctgcctctgagtctctctcgaccatggccaaattcgtcatcgcgggtagagcagattgtccatattatgctaaaacagaacttgtg

SEQ ID NO: 345137 - DNA, 120 bp, Artificial Sequence
  ENSG00000138400_1 (sequence is synthesized)
gcagactatttacaaaagaatcttcctgattttcggatacataaaatcacacaacgtcctgaggtttgggaggattggctaaaagatgtgtgtgaaaagaataagtggagtcacaagaat

SEQ ID NO: 345138 - DNA, 120 bp, Artificial Sequence
  ENSG00000138400_2 (sequence is synthesized)
tcccctatcatctggagagagctgttggatcgtggaggaaagggtttgcttttgggaggatataatgagttcctggagcatgctcagctttactatgatgtcacctctagcatgacgact

SEQ ID NO: 345139 - DNA, 120 bp, Artificial Sequence
  ENSG00000138400_3 (sequence is synthesized)
gaactgatgatggtaattgctcaagagaacctgggggcacatatagaaaaagagcaggaggaagaagccctgaaaacttgcatcaaccccttgcaggtctggatcaccagtgcctctgct

SEQ ID NO: 345140 - DNA, 120 bp, Artificial Sequence
  ENSG00000138400_4 (sequence is synthesized)
cctgcctgctacaacctaattcccatattgacgagtggcgaagtgtttgggatgcatacagaaattagcataactctatttgacaacaagcaggcggaagaacatctcaaaagccttgtg

SEQ ID NO: 345141 - DNA, 120 bp, Artificial Sequence
  ENSG00000138400_5 (sequence is synthesized)
gtggagacccaagacctggcatctcccgtcctgcgcagtgtctccatctgcacgaaggtggaggaggccttccgccaggcccacgtcattgtggtgctggatgacagcaccaacaaggag

SEQ ID NO: 345142 - DNA, 120 bp, Artificial Sequence
  ENSG00000138400_6 (sequence is synthesized)
gtgttcactctggaggactgcctccgaagcagggtgcctctctgcaggctctatgggtacctgatagagaaaaatgctcatgagtctgtcagagtcatcgtgggagggagaacctttgta

SEQ ID NO: 345143 - DNA, 120 bp, Artificial Sequence
  ENSG00000138400_7 (sequence is synthesized)
aacctgaagacagttttactcatgagatatgccccacgcattgcacacaacattattgctgtggcgctgggggtggaaggtgaagcgaaagccatactggccagaaaactgaagacagct

SEQ ID NO: 345144 - DNA, 120 bp, Artificial Sequence
  ENSG00000138400_8 (sequence is synthesized)
ccttcatacattaaagacgtgatcatttggggtaatatcagtggaaataattacgttgatctgagaaaaacaagggtgtacagatatgagagtgccatttggggacctcttcattattca

SEQ ID NO: 345145 - DNA, 120 bp, Artificial Sequence
  ENSG00000138400_9 (sequence is synthesized)
gcaattcttaaaaacttgaccaccacaggaagacaatttggaggcattttggctgcacacagtatagccactacactgaaatactggtaccatggctcaccacctggggagattgtatct

SEQ ID NO: 345146 - DNA, 120 bp, Artificial Sequence
  ENSG00000138400_10 (sequence is synthesized)
ttaggaatattgagtgaaggccagtttggtattccgaaagggatcgtcttttctatgcctgtgaaatttgagaatggaacttgggtggttcttacagatctcaaagatgttgaaataagt

SEQ ID NO: 345147 - DNA, 120 bp, Artificial Sequence
  ENSG00000138400_11 (sequence is synthesized)
gaacaaataatgacccgaatgacaagtgatctaattcaggagaaacttgttgcacttggagacaagatacattttcagccataccaatcaggacataaagatctggtccctgatgaagaa

SEQ ID NO: 345148 - DNA, 120 bp, Artificial Sequence
  ENSG00000138400_12 (sequence is synthesized)
aaaaatctagctatgtcagatgcagcagagtttccaaatcagattcctcaaaccacctttgaaaagccacagagtcttgagttcctaaatgaatttgaaggcaaaaccgtggaatcctaa

SEQ ID NO: 345149 - DNA, 120 bp, Artificial Sequence
  ENSG00000138400_13 (sequence is synthesized)
ctaacagatcaaattggatgaaatatataattacttgatagcacaataaacatagaaagaatttatatgaatgtctatatttaaggaagaataatttgaaagatttatgtcagtcttaga

SEQ ID NO: 345150 - DNA, 120 bp, Artificial Sequence
  ENSG00000138400_14 (sequence is synthesized)
accatgcaaggcaattaaatcactgtgacagcacagaggtcagagttccgtcattttgcattacttgtatccactcatgtttgtttcataataattgcattttcttagaactattttggt

SEQ ID NO: 345151 - DNA, 120 bp, Artificial Sequence
  ENSG00000138400_15 (sequence is synthesized)
gtcaaatgctattttttatattacattaaaatagagttgtcagtcattgcatctgcccatacatcttctgagagaacctgcttccttccatcagccatacctaagacctgcacctaagtg

SEQ ID NO: 345152 - DNA, 120 bp, Artificial Sequence
  ENSG00000138400_16 (sequence is synthesized)
gccatgtttgctcaaatgtcctcatcaccttggcctcaactaattaggccaaacagatgtacttcactcaaggagaaccaatcatattttctctctgtctctcaaaaaaaaattgaactg

SEQ ID NO: 345153 - DNA, 120 bp, Artificial Sequence
  ENSG00000138400_17 (sequence is synthesized)
agaccagtgagtaagttggtgtctgggtcaggttaatggtggtgaactatgtgcctgtgagctcttcagagctggttgggttcaccaccttcataagacctgcctctgtaccatttttcc

SEQ ID NO: 345154 - DNA, 120 bp, Artificial Sequence
  ENSG00000138400_18 (sequence is synthesized)
ttgagtgtgctttgtataaaggtctgtacaataaatcacacttttttaaagcttagattgaataggtttctgctccttgacaagagatatggcctgaataaaatgaattttgaaagaaaa

SEQ ID NO: 345155 - DNA, 120 bp, Artificial Sequence
  ENSG00000138400_19 (sequence is synthesized)
gtggttgccaggaaaccgcgaagccgcggtccctgcctctgagtctctctcgaccatggccaaattcgtcatcgcgggattggctaaaagatgtgtgtgaaaagaataagtggagtcaca

SEQ ID NO: 345156 - DNA, 120 bp, Artificial Sequence
  ENSG00000138400_20 (sequence is synthesized)
ttatatttagaaaggacaatgagatgggattaatttcatgatggaagaatacctgaatgtcaggtttgaaatttgtgtgtatgtatacttatatgtatacacatatacatatgcatctct

SEQ ID NO: 345157 - DNA, 120 bp, Artificial Sequence
  ENSG00000138400_21 (sequence is synthesized)
gtgtgtgtgtgtttgtatcctccatataactcataaatgagttttatgttttatagacacaaacacagtcacttggtctaaaaacaactctatagcatggctgctttgcagaagctcacc

SEQ ID NO: 345158 - DNA, 120 bp, Artificial Sequence
  ENSG00000138400_22 (sequence is synthesized)
acaaatgtacacattggactataatgtaaaatgtgtcttttattgtgggtcatagtcactgaagtttgaaaaacattgactcagaacatctcatgacctagttaggttgttggttatatt

SEQ ID NO: 345159 - DNA, 120 bp, Artificial Sequence
  ENSG00000138411_0 (sequence is synthesized)
gccatttcggtttccgctgcccaggatgtgttggatggtttggttctccagggaaactgggactttggggtctatttgagcatcagttgagggagaggacgcttcatttcctttttggtt

SEQ ID NO: 345160 - DNA, 120 bp, Artificial Sequence
  ENSG00000138411_1 (sequence is synthesized)
gggaatgtgccgtgaacatcctctgctggagcttggggcctggagcaaactggggctgcagatttagacgtagacgtttccgaggacgcgagactgcagagctttgtaggcagccaatcc

SEQ ID NO: 345161 - DNA, 120 bp, Artificial Sequence
  ENSG00000138411_2 (sequence is synthesized)
cagagaagcagacgggatggctagttcagcccgggagcacctgctttttgtgaggcgtcgaaatccccagatgcggtacacattgagcccagagaacctccagagccttgccgcccagag

SEQ ID NO: 345162 - DNA, 120 bp, Artificial Sequence
  ENSG00000138411_3 (sequence is synthesized)
ctccatgccagagaacatgaccctgcagcgggccaacagcgacaccgacctggtgacttctgagagccgctccagcttaactgccagcatgtacgagtacacgctggggcaagcccagaa

SEQ ID NO: 345163 - DNA, 120 bp, Artificial Sequence
  ENSG00000138411_4 (sequence is synthesized)
cctcattatcttctgggacattaaagaggaggtggaccccagtgattggattggactttatcatatagatgagaattctccagccaacttctgggattctaagaacaggggtgtgactgg

SEQ ID NO: 345164 - DNA, 120 bp, Artificial Sequence
  ENSG00000138411_5 (sequence is synthesized)
aacacaaaaagggcaaattgtatggagaattgagcctgggccctatttcatggaaccggagataaaaatctgttttaaatattaccacggcattagtggagccctgcgagccacgacccc

SEQ ID NO: 345165 - DNA, 120 bp, Artificial Sequence
  ENSG00000138411_6 (sequence is synthesized)
ctgcatcaccgtgaagaacccagctgtgatgatgggggcagaaggcatggagggaggtgcttcaggaaacctgcattctcgaaaacttgttagctttacattgtcagatcttagggcagt

SEQ ID NO: 345166 - DNA, 120 bp, Artificial Sequence
  ENSG00000138411_7 (sequence is synthesized)
tgggctaaagaaagggatgttcttcaatcctgacccttatcttaagatgtcaattcagccaggaaagaagagcagtttccccacctgtgcccaccacgggcaggagagacggtctactat

SEQ ID NO: 345167 - DNA, 120 bp, Artificial Sequence
  ENSG00000138411_8 (sequence is synthesized)
catcagtaacaccaccaatccaatttggcaccgagagaaatattccttttttgcacttcttactgatgtcttagaaattgaaattaaagacaaatttgccaagagccgtcccatcatcaa

SEQ ID NO: 345168 - DNA, 120 bp, Artificial Sequence
  ENSG00000138411_9 (sequence is synthesized)
gcgttttctggggaaactaaccattccagtccagaggctgctggagcgacaagccatcggtgatcaaatgctcagctacaaccttggcagaaggctcccagctgaccacgtgagtgggta

SEQ ID NO: 345169 - DNA, 120 bp, Artificial Sequence
  ENSG00000138411_10 (sequence is synthesized)
cctccagtttaaagtggaggttacgtcttctgttcatgaagatgcctctccagaagctgttggcacaatacttggagtcaattctgtgaatggagacttaggtagcccttccgatgacga

SEQ ID NO: 345170 - DNA, 120 bp, Artificial Sequence
  ENSG00000138411_11 (sequence is synthesized)
ggacatgccagggagccatcacgacagccaggtgtgctctaatgggccagtttctgaggacagtgctgccgatggaacccccaagcattcattcaggactagctccactctggaaataga

SEQ ID NO: 345171 - DNA, 120 bp, Artificial Sequence
  ENSG00000138411_12 (sequence is synthesized)
cacagaggaattaacctctacgtcttcaaggacctcacctcccagaggacgtcaggattcactcaatgattacttagatgctatcgaacacaatggccactccaggccggggacagcgac

SEQ ID NO: 345172 - DNA, 120 bp, Artificial Sequence
  ENSG00000138411_13 (sequence is synthesized)
ctgctctgagaggtccatgggtgcctctccgaaactgaggagtagttttcccactgacacaagactcaatgccatgcttcatattgattcagatgaagaagatcacgagttccagcaaga

SEQ ID NO: 345173 - DNA, 120 bp, Artificial Sequence
  ENSG00000138411_14 (sequence is synthesized)
cctgggttacccatcttccttggaggaggagggaggcctgatcatgtttagcagggcatccagagctgatgatggaagcctgacatctcagacaaagctggaggacaaccctgttgagaa

SEQ ID NO: 345174 - DNA, 120 bp, Artificial Sequence
  ENSG00000138411_15 (sequence is synthesized)
tgaggaagcctccacacacgaagctgcttcctttgaggataagccagaaaatcttccagagcttgcagagagctccttacctgcaggcccagccccagaggaaggtgaaggcggcccaga

SEQ ID NO: 345175 - DNA, 120 bp, Artificial Sequence
  ENSG00000138411_16 (sequence is synthesized)
gcctcaacccagtgctgaccagggcagtgctgaactgtgtggctctcaagaggtagatcagcccacaagtggcgcagacacagggacttccgatgcatcaggaggaagccgaagagccgt

SEQ ID NO: 345176 - DNA, 120 bp, Artificial Sequence
  ENSG00000138411_17 (sequence is synthesized)
cagtgagaccgagtctctcgatcagggctctgagccttcccaggtgtcctctgaaacagaacccagtgatcctgccaggacagagagtgtgagcgaagccagcaccaggcctgagggaga

SEQ ID NO: 345177 - DNA, 120 bp, Artificial Sequence
  ENSG00000138411_18 (sequence is synthesized)
gagtgacctggaatgcgctgacagctcctgcaatgagagtgtgaccacgcagctgtcctctgtggacacacggtgctcctctcttgagagcgcacggtttcctgaaaccccagccttttc

SEQ ID NO: 345178 - DNA, 120 bp, Artificial Sequence
  ENSG00000138411_19 (sequence is synthesized)
ttctcaggaggaggaagacggagcctgtgcagcagagcccaccagcagtggccctgccgaagggtcgcaggaatccgtgtgcactgctggttctttacctgtggtacaggtgcccagtgg

SEQ ID NO: 345179 - DNA, 120 bp, Artificial Sequence
  ENSG00000138411_20 (sequence is synthesized)
ggaggatgaagggccaggggcagaatcggccactgtacctgaccaggaggagctgggggaggtctggcagcggagggggagcctggagggagctgcagctgctgccgagagcccaccgca

SEQ ID NO: 345180 - DNA, 120 bp, Artificial Sequence
  ENSG00000138411_21 (sequence is synthesized)
agaagaaggcagtgctggggaggcccaaggcacctgtgaaggggcaactgcccaggaggagggcgctactggaggttctcaagccaacggccaccagccactgcgatcactaccttcagt

SEQ ID NO: 345181 - DNA, 120 bp, Artificial Sequence
  ENSG00000138411_22 (sequence is synthesized)
gcgccaggatgttagccggtaccagagggtggacgaggctctcccaccaaactgggaggcacgcattgacagccacggcaggatcttctacgtggatcacgtaaacagaaccacgacgtg

SEQ ID NO: 345182 - DNA, 120 bp, Artificial Sequence
  ENSG00000138411_23 (sequence is synthesized)
gcagcgaccgacagctcccccagccccgcaggtgctgcagagatctaactccatacagcaaatggagcagctgaaccggcgatatcagagtatccgcagaaccatgaccaatgagaggcc

SEQ ID NO: 345183 - DNA, 120 bp, Artificial Sequence
  ENSG00000138411_24 (sequence is synthesized)
tgaggaaaataccaatgctattgatggggcaggggaggaagctgactttcaccaagccagtgcagatttccgacgggagaacatcctgcctcactctacctccagatccaggatcacgtt

SEQ ID NO: 345184 - DNA, 120 bp, Artificial Sequence
  ENSG00000138411_25 (sequence is synthesized)
gctgttacagtctccccccgtgaagttcctcatcagcccagagttcttcaccgtgctgcattctaaccctagtgcctaccgcatgtttacaaacaacacgtgtttgaagcacatgatcac

SEQ ID NO: 345185 - DNA, 120 bp, Artificial Sequence
  ENSG00000138411_26 (sequence is synthesized)
caaagtccggagggacacccaccactttgaacgctaccagcataaccgcgaccttgtgggattcctcaacatgttcgcgaacaaacagctagagctgccgcggggatgggaaatgaaaca

SEQ ID NO: 345186 - DNA, 120 bp, Artificial Sequence
  ENSG00000138411_27 (sequence is synthesized)
tgatcaccagggcaaggcattctttgtggaccacaactcccgcaccaccactttcattgatccccggctcccacttcagagcagtagacccacaagtgcgctggttcatcggcaacacct

SEQ ID NO: 345187 - DNA, 120 bp, Artificial Sequence
  ENSG00000138411_28 (sequence is synthesized)
gacaaggcaacgcagccacagtgcgggtgaggtaggagaagattctcgacatgcaggaccaccagttcttcccaggccatccagtacattcaatacagtcagtaggccacagtaccagga

SEQ ID NO: 345188 - DNA, 120 bp, Artificial Sequence
  ENSG00000138411_29 (sequence is synthesized)
catggttccagtggcttacaatgacaagattgttgcatttctacgtcaacccaatatctttgaaattctacaggagcgtcaacctgatcttaccaggaatcactcactcagggagaagat

SEQ ID NO: 345189 - DNA, 120 bp, Artificial Sequence
  ENSG00000138411_30 (sequence is synthesized)
ccaatttatccgaactgaagggactccaggattggtgcgcctttcaagcgatgcagaccttgttatgttgctgagcttatttgaagaagagataatgtcgtatgtgcctccacatgcctt

SEQ ID NO: 345190 - DNA, 120 bp, Artificial Sequence
  ENSG00000138411_31 (sequence is synthesized)
actccaccccagctactgtcagtccccacgtggctctcccgtgtcatctcctcagaactcgccaggtacccagcgtgccaatgcccgggctccagccccttacaagcgggatttcgaagc

SEQ ID NO: 345191 - DNA, 120 bp, Artificial Sequence
  ENSG00000138411_32 (sequence is synthesized)
caaactgaggaacttttacaggaagttagagactaaaggatatggacaaggcccagggaagttaaagttaattatccgaagagatcacttactagaagatgcttttaatcagattatggg

SEQ ID NO: 345192 - DNA, 120 bp, Artificial Sequence
  ENSG00000138411_33 (sequence is synthesized)
ctactccagaaaagacctgcagagaaataagctatatgtcaccttcgttggggaggaagggctggattacagtgggccttctagagagtttttcttcctggtatccagagaactctttaa

SEQ ID NO: 345193 - DNA, 120 bp, Artificial Sequence
  ENSG00000138411_34 (sequence is synthesized)
cccatattatggcttatttgaatattcagccaatgacacatacacagtacaaataagtcctatgtctgcttttgtagacaatcaccatgaatggttccgattcagtggtaggatccttgg

SEQ ID NO: 345194 - DNA, 120 bp, Artificial Sequence
  ENSG00000138411_35 (sequence is synthesized)
tcttgcactaatacaccagtatttgttggatgccttcttcacacggcccttttataaggctcttctcagaattctatgtgacctgagtgacctagaataccttgatgaagagttccatca

SEQ ID NO: 345195 - DNA, 120 bp, Artificial Sequence
  ENSG00000138411_36 (sequence is synthesized)
gagcctgcagtggatgaaagacaatgatatccatgacatcctagacctcacgttcactgtgaacgaagaagtatttgggcagataactgaacgagaattaaagccagggggtgccaatat

SEQ ID NO: 345196 - DNA, 120 bp, Artificial Sequence
  ENSG00000138411_37 (sequence is synthesized)
cccagttacagagaagaacaagaaggagtacatcgagaggatggtgaagtggaggattgagaggggtgttgtacagcaaacagagagcttagtgcgtggcttctatgaggtggtggatgc

SEQ ID NO: 345197 - DNA, 120 bp, Artificial Sequence
  ENSG00000138411_38 (sequence is synthesized)
caggctggtatctgtttttgatgcaagagaactggaattggtcatcgcaggcacagctgaaatagacctaagtgattggagaaacaacacagaatatagaggaggataccatgacaatca

SEQ ID NO: 345198 - DNA, 120 bp, Artificial Sequence
  ENSG00000138411_39 (sequence is synthesized)
tattgtaattcggtggttctgggctgcagtggaaagattcaacaatgaacaacgactaaggttgttacagtttgttacaggcacatccagcattccctatgaaggatttgcttcactccg

SEQ ID NO: 345199 - DNA, 120 bp, Artificial Sequence
  ENSG00000138411_40 (sequence is synthesized)
agggagtaacggcccaagaagattctgtgtggagaaatgggggaaaatcactgctcttcccagagcgcatacatgttttaaccgtctggatctgcctccctacccatccttttccatgct

SEQ ID NO: 345200 - DNA, 120 bp, Artificial Sequence
  ENSG00000138411_41 (sequence is synthesized)
ttatgaaaaactgttgacagcagttgaagaaaccagtacttttggacttgagtgacctggaagctgaatgcccatctctgtggacaggcaggttcagaagctgccttctagaagaatgat

SEQ ID NO: 345201 - DNA, 120 bp, Artificial Sequence
  ENSG00000138411_42 (sequence is synthesized)
tgaacattggaagtttcaagaggatgcttcctttaggataaagctatgtgctgttgttttccaggaacaagtgctctgtcacatttggggactggagatgagtcctcttggaaggatttg

SEQ ID NO: 345202 - DNA, 120 bp, Artificial Sequence
  ENSG00000138411_43 (sequence is synthesized)
ggtgagcttgatgcccagggaacaacccaaccgtctttcaatcaacagttcttgactgccaaactttttccatttgttatgttccaagacaaagatgaacccatacatgatcagctccac

SEQ ID NO: 345203 - DNA, 120 bp, Artificial Sequence
  ENSG00000138411_44 (sequence is synthesized)
ggtaatttttagggactcaggagaatcttgaaacttacccttgaacgtggttcaagccaaactggcagcatttggcccaatctccaaattagagcaagttaaataatataataaaagtaa

SEQ ID NO: 345204 - DNA, 120 bp, Artificial Sequence
  ENSG00000138411_45 (sequence is synthesized)
atatatttcctgaaagtacattcatttaagccctaagttataacagaatattcatttcttgcttatgagtgcctgcatggtgtgcaccataggtttccgctttcatgggacatgagtgaa

SEQ ID NO: 345205 - DNA, 120 bp, Artificial Sequence
  ENSG00000138411_46 (sequence is synthesized)
aatgaaaccaagtcaatatgaggtacctttacagatttgcaataagatggtctgtgacaatgtatatgcaagtggtatgtgtgtaattatggctaaagacaaaccattattcagtgaatt

SEQ ID NO: 345206 - DNA, 120 bp, Artificial Sequence
  ENSG00000138411_47 (sequence is synthesized)
actaatgacagattttatgctttataatgcatgaaaacaattttaaaataactagcaattaatcacagcatatcaggaaaaagtacacagtgagttctgtttattttttgtaggttcatt

SEQ ID NO: 345207 - DNA, 120 bp, Artificial Sequence
  ENSG00000138411_48 (sequence is synthesized)
atgtttatgttctttaagatgtatataagaacctacctatcatgctgtatgtatcactcattccattttcatgttccatgcatactcgggcatcatgctaatatgtatccttttaagcac

SEQ ID NO: 345208 - DNA, 120 bp, Artificial Sequence
  ENSG00000138411_49 (sequence is synthesized)
tctcaaggaaacaaaagggccttttatttttataaaggtaaaaaaaattccccaaatattttgcactgaatgtaccaaaggtgaagggacattacaatatgactaacagcaactccatca

SEQ ID NO: 345209 - DNA, 120 bp, Artificial Sequence
  ENSG00000138411_50 (sequence is synthesized)
ccactacaaggactgtgcatctaagtaataattttttaagattcactatatgtgatagtatgatatgcatttatttaaaatgcattagactctcttccatccatcaaatactttacagga

SEQ ID NO: 345210 - DNA, 120 bp, Artificial Sequence
  ENSG00000138411_51 (sequence is synthesized)
tggcatttaatacagatatttcgtatttcccccactgctttttatttgtacagcatcattaaacactaagctcagttaaggagccatcagcaacactgaagagatcagtagtaagaattc

SEQ ID NO: 345211 - DNA, 120 bp, Artificial Sequence
  ENSG00000138411_52 (sequence is synthesized)
cattttccctcatcagtgaagacaccacaaattgaaactcagaactatatttctaagcctgcattttcactgatgcataattttcttattaatattaagagacagtttttctatggcatc

SEQ ID NO: 345212 - DNA, 120 bp, Artificial Sequence
  ENSG00000138411_53 (sequence is synthesized)
tccaaaactgcatgacatcactagtcttacttctgcttaattttatgagaaggtattcttcattttaattgcttttgggattactccacatctttgtttatttcttgactaatcagattt

SEQ ID NO: 345213 - DNA, 120 bp, Artificial Sequence
  ENSG00000138411_54 (sequence is synthesized)
tcaatagagtgaagttaaattgggggtcataaaagcattggattgacatatggtttgccagcctatgggtttacaggcattgcccaaacatttctttgagatctatatttataagcagcc

SEQ ID NO: 345214 - DNA, 120 bp, Artificial Sequence
  ENSG00000138411_55 (sequence is synthesized)
atggaattcctattatgggatgttggcaatcttacattttatagaggtcatatgcatagttttcataggtgttttgtaagaactgattgctctcctgtgagttaagctatgtttactact

SEQ ID NO: 345215 - DNA, 120 bp, Artificial Sequence
  ENSG00000138411_56 (sequence is synthesized)
gggaccctcaagaggaataccacttatgttacactcctgcactaaaggcacgtactgcagtgtgaagaaatgttctgaaaaagggttatagaaatctggaaataagaaaggaagagctct

SEQ ID NO: 345216 - DNA, 120 bp, Artificial Sequence
  ENSG00000138411_57 (sequence is synthesized)
ctgtattctataattggaagagaaaaaaagaaaaacttttaactggaaatgttagtttgtacttattgatcatgaatacaagtatatatttaattttgcaaacttttcacttgtttgtat

SEQ ID NO: 345217 - DNA, 120 bp, Artificial Sequence
  ENSG00000138411_58 (sequence is synthesized)
tcttttcattataaggaaaagtagtataacacacttttttttaagtcacatatttgatggtatacaagatgtttcagggctggcattctccaagcagcagataaaggttgcatttctttc

SEQ ID NO: 345218 - DNA, 120 bp, Artificial Sequence
  ENSG00000138411_59 (sequence is synthesized)
aaaaatacattcaaagaccatgttatccttcattttggtttgagacatttagttatggtatttcatattattaggtaaaagatatttgaaataaaatgtatctctttaattatttctaac

SEQ ID NO: 345219 - DNA, 120 bp, Artificial Sequence
  ENSG00000138411_60 (sequence is synthesized)
aaatatatttctttattaaggcatccaactttttcccaaataacagtacactttaatgtatgtagacattcttaattagtataatcatctagttgatactgttctcagattgggaattat

SEQ ID NO: 345220 - DNA, 120 bp, Artificial Sequence
  ENSG00000138411_61 (sequence is synthesized)
caaagatgtacttatcatatcagaacaccatgctaacttatctattattctttcttagtaaaacaaaacagccagtaataactatataaaatattaaataacatttccacagaataaatt

SEQ ID NO: 345221 - DNA, 120 bp, Artificial Sequence
  ENSG00000138411_62 (sequence is synthesized)
agactttcatgtactctacaattagaaatatccataaatattttcttctggactgtgaacccagataactaggctttctggtcttattttaagtgatgctctttatactatagaagacac

SEQ ID NO: 345222 - DNA, 120 bp, Artificial Sequence
  ENSG00000138411_63 (sequence is synthesized)
tcttaatacatcatatatgtatgcagaacatctcttagatgagagaacaagcacatcattggcattccctctgtgccagtttgatgtttgtttgacgatggagctacaagagtctaaatc

SEQ ID NO: 345223 - DNA, 120 bp, Artificial Sequence
  ENSG00000138411_64 (sequence is synthesized)
tgcctttgaaaagctcagctcacagtgtagtagagtagactccaaggttcaaaaaagtgtttttaataaaatttggtaagttctacaatcaaggaatgaagagagaagagaacagctttt

SEQ ID NO: 345224 - DNA, 120 bp, Artificial Sequence
  ENSG00000138411_65 (sequence is synthesized)
tccatctgggagattcaataatggcttcatatatagatgatagtgtggctaaaaaaaattacatcaatgctgtttctattgggaagcaatggcaagtaatagtatgtcaatactggtcaa

SEQ ID NO: 345225 - DNA, 120 bp, Artificial Sequence
  ENSG00000138411_66 (sequence is synthesized)
gtgttgaagccaggatgcacttacacaacgagagtgtaaagtgtgtagggagctgatctgtgaaggagcaactcaaagattttgaaattatcagtgaaatgccaaaacagggaaagtttc

SEQ ID NO: 345226 - DNA, 120 bp, Artificial Sequence
  ENSG00000138411_67 (sequence is synthesized)
cctgtttcccttcatctattctacaatgcaccattggttttcagtgtgaaaaatcccaatccctgagcccaaaccacttctggggtcaaaacatttttcttgtgcacaaaatgaatggat

SEQ ID NO: 345227 - DNA, 120 bp, Artificial Sequence
  ENSG00000138411_68 (sequence is synthesized)
cttggtcaaagaagtatggtcacaattttctagcatatattgcgtttataatttagcagaaattctgcaataaataaaggaaaatctgttttacctgtgcaacaatcagaaatggtaaaa

SEQ ID NO: 345228 - DNA, 120 bp, Artificial Sequence
  ENSG00000138411_69 (sequence is synthesized)
atgcattcaagtgtttgaaagaaatggtagaatatgcttgcatagtgctttatagtttcaaagtgctgtcaggtacatcgtccgtttagctcctcacgcactttgtagggtacaagcatc

SEQ ID NO: 345229 - DNA, 120 bp, Artificial Sequence
  ENSG00000138411_70 (sequence is synthesized)
atgttccatctgggttgtggctgattttcatggatggcttgtggcatcagtttcattacttcatagtcacaattctgtgtttcatcttgagaaatgtggagactaatgtttgtaccagta

SEQ ID NO: 345230 - DNA, 120 bp, Artificial Sequence
  ENSG00000138411_71 (sequence is synthesized)
tattccacattcagtgaggtttccaagatgcttcctccaaactctcactttcttaaacagatacatttaaaatatgacaccttctgaaaagtccataaagaaattagtatattcatggaa

SEQ ID NO: 345231 - DNA, 120 bp, Artificial Sequence
  ENSG00000138411_72 (sequence is synthesized)
aaaatttccccgtagacttatttgcatttcatgacttgacatgagaaatttaaaaaacagaaggcaaaatgtgattgcttttgatggatttatacagaatagtcatttaattttctcaag

SEQ ID NO: 345232 - DNA, 120 bp, Artificial Sequence
  ENSG00000138411_73 (sequence is synthesized)
tattatttggaaacaagataatggaaaacattaatcagaagccttattttatttttaaatttttaatagggatggatctagtaagccctaatagctgagttccagtgataaaattcacaa

SEQ ID NO: 345233 - DNA, 120 bp, Artificial Sequence
  ENSG00000138411_74 (sequence is synthesized)
attttatttatgattggaccacttctaacaaggcaaatatcttataatgaagataggagtctgttcaatttaaccttattcaggaaactccgtatttatgtgaaatgatgcaatgccatt

SEQ ID NO: 345234 - DNA, 120 bp, Artificial Sequence
  ENSG00000138411_75 (sequence is synthesized)
attaagaggtatctgtaaccctgcataataaaaacatgcataagaagaatgtggtctaatctccaaactgagtctcagtttcagggccttttgctttctttgtttgtttgtttgagacag

SEQ ID NO: 345235 - DNA, 84 bp, Artificial Sequence
  ENSG00000138411_76 (sequence is synthesized)
gctaatttttgtatttttgtagagacaaggcccaggcacgtctcaaactcttgagctcaagtaattataggtgtgagccaccat

SEQ ID NO: 345236 - DNA, 89 bp, Artificial Sequence
  ENSG00000138411_77 (sequence is synthesized)
cccgccttggcctcccaaagtgctaggagtaattataggtgtgagccaccatgctggcagttgtttttgtttatttgtgataaggtctg

SEQ ID NO: 345237 - DNA, 62 bp, Artificial Sequence
  ENSG00000138411_78 (sequence is synthesized)
tgcaacctctgccttccaggctcaagccagcctcccacctcagcctctgtagacacagggtt

SEQ ID NO: 345238 - DNA, 120 bp, Artificial Sequence
  ENSG00000138411_79 (sequence is synthesized)
tggcctcccgaagtgctgggattacagacgtgagcctctgggccttgctctgttttgtctgctttctgatttagtaggtgagggacagcactctggaccttagccattttacttccatct

SEQ ID NO: 345239 - DNA, 120 bp, Artificial Sequence
  ENSG00000138411_80 (sequence is synthesized)
ctggaccttagccattttacttccatcttactgccgtgagtttgatgagaatgtcacttttagactctaattttcaaaaacttagtttctttcccattcatttgtgttttccaaattaat

SEQ ID NO: 345240 - DNA, 120 bp, Artificial Sequence
  ENSG00000138411_81 (sequence is synthesized)
ttgtttgtctagtatggatgcaaaggaatgctgaagacattaaagctttctgaattgtggcttaaggccagctactgcccactgaaaggatgataaaaataaaaaaggaggaaagaggag

SEQ ID NO: 345241 - DNA, 120 bp, Artificial Sequence
  ENSG00000138411_82 (sequence is synthesized)
cccagcagttgtgccaccccgcaagaatataatgctaattattgaccaactgtcaagattcagagtggtaactgcattccgaggagctgtcaggaaggatgaccgtgtgtgtgctgtcca

SEQ ID NO: 345242 - DNA, 120 bp, Artificial Sequence
  ENSG00000138411_83 (sequence is synthesized)
tatcatagccatctgggtcagaaggagcgaaaggatggttaggacaggagtgtagtggagggaaagttaaaacaacggtagatggatcatcttagggcttgctggtgggggtaggaacat

SEQ ID NO: 345243 - DNA, 120 bp, Artificial Sequence
  ENSG00000138411_84 (sequence is synthesized)
acttcaatttggtttcagactgagaagaagaaagctatgctccctgatgaaggcacagtttgatctactagatgggaaataccctcattttataacttcagtaatttaacattttctgta

SEQ ID NO: 345244 - DNA, 120 bp, Artificial Sequence
  ENSG00000138411_85 (sequence is synthesized)
ttgcaaagtggaatttagtcccaaagtattaaagctaaccatagcttgatcaggagatttgacaatttagcataaaattatgttgtggatttttttatttaagaattattgttactatta

SEQ ID NO: 345245 - DNA, 120 bp, Artificial Sequence
  ENSG00000138411_86 (sequence is synthesized)
ttgaacaccatgtatgaaatgaaagaaagggtgcttttatttcattatacttatttggtttttttagcggacatcccttgacattagaatagcatttgagacattttcatgatttctaaa

SEQ ID NO: 345246 - DNA, 120 bp, Artificial Sequence
  ENSG00000138411_87 (sequence is synthesized)
gataacttaaatgctctctgttaatctggaaagtgaaatcctaagagtgaggttgcaaatggagactaaattagtgtttccaagtcaggaagttaatcaagaccggaaatagatttgctt

SEQ ID NO: 345247 - DNA, 120 bp, Artificial Sequence
  ENSG00000138411_88 (sequence is synthesized)
agattttatctgcagagtcgtttatttggctttcgtaattgaacagctcagcagaataagatggccctagttgtatggtttctggggaacacaggagaattaaatttatatatgtgattt

SEQ ID NO: 345248 - DNA, 120 bp, Artificial Sequence
  ENSG00000138411_89 (sequence is synthesized)
ttatgtgtagtgcccttgggcaggtgatatctttctatatgacttttaagatattacaacctgaggagtgtggatagccgtgttgtgtgattcaaactgaatcagctattactgatgcag

SEQ ID NO: 345249 - DNA, 120 bp, Artificial Sequence
  ENSG00000138411_90 (sequence is synthesized)
gtaaggaaccatcagtcaacttctggttactatcaccttcataaaaaagaatggatgatgttcaggaattaccttggaaggattaaccaggaattaacacagaatgggatgttcttttag

SEQ ID NO: 345250 - DNA, 120 bp, Artificial Sequence
  ENSG00000138411_91 (sequence is synthesized)
gaccctaatgctctaaaagataaaattacaacctatttttctttatatgatagcataagtaaaatttggggctgttaatatgttggaaagtgcttaaaattacatgtttttataataggg

SEQ ID NO: 345251 - DNA, 120 bp, Artificial Sequence
  ENSG00000138411_92 (sequence is synthesized)
atgcaggcattccaaaataaatgaataaaaatacatgcatctctctcgcctcttactgaaagtattaatctaattttatagtaatgattactttttaatattaaggctctgtaaaaaaat

SEQ ID NO: 345252 - DNA, 120 bp, Artificial Sequence
  ENSG00000138411_93 (sequence is synthesized)
tatttctaagatttcagtagaacacaggtggtgtatttttttaagcttttaatttctcttcaccaacctcagtcattacgttcaccacacagtgtgtcacagttaatagtggtatttcag

SEQ ID NO: 345253 - DNA, 120 bp, Artificial Sequence
  ENSG00000138411_94 (sequence is synthesized)
tttttgcgttgatttaagcttcatatttatttaatgtgacttttgatggagaataataatgggagatgcttgctgttagcattaaggttatacagctctcacttcaccttatatgtaatt

SEQ ID NO: 345254 - DNA, 120 bp, Artificial Sequence
  ENSG00000138411_95 (sequence is synthesized)
tttttttcaaagtaaataatgcagattgttgacatcctagaaatggtttctgggtggtattatatggggcctaggactctgaactgggactagttgtttattttctgggaagtctgtatt

SEQ ID NO: 345255 - DNA, 120 bp, Artificial Sequence
  ENSG00000138411_96 (sequence is synthesized)
cttattctcaactgaacccctgactcttttgttgtattttttatgattccgaaatgctttgagggaaagatattttaatgtgtacaatttgttttattttcatactgatctctatttttg

SEQ ID NO: 345256 - DNA, 120 bp, Artificial Sequence
  ENSG00000138411_97 (sequence is synthesized)
tttaaaaccatgttgcatcatgaaatcacttaatccaaaataaatcttctttaaaaaaaatagattatgacttttctgtaatacttttggggagggaaaactcagaagggaggagaatag

SEQ ID NO: 345257 - DNA, 120 bp, Artificial Sequence
  ENSG00000138411_98 (sequence is synthesized)
ggaggagaatagaagtagagataaagatttcatggcattagtttgcagctctataaatattggaggttctgttttcatagtatttatagtattttgtttatttttatttatatttttatt

SEQ ID NO: 345258 - DNA, 120 bp, Artificial Sequence
  ENSG00000138411_99 (sequence is synthesized)
aatatttgtttattttgtttggaatctactttgtttatccctacaagaatattttactgtttgatgggctgttaatgttaaaggaatgaattataatacaaatcataatttcttaactca

SEQ ID NO: 345259 - DNA, 120 bp, Artificial Sequence
  ENSG00000138411_100 (sequence is synthesized)
attcatgagagtggaaaagttgctcgggacagaactgacagggtactgggctcaggtacagataaggtgatggcttcatgaagaaaaggagttgtacttagaaagaagccaatccacatg

SEQ ID NO: 345260 - DNA, 120 bp, Artificial Sequence
  ENSG00000138411_101 (sequence is synthesized)
ctacccacttcatggagaagacgtaataccctctgatcttgaggaaatacaaaaagaaacagtggaaactatggattcaaccaaactgtggcccctgtgtctctttgtaggcagccaatc

SEQ ID NO: 345261 - DNA, 120 bp, Artificial Sequence
  ENSG00000138411_102 (sequence is synthesized)
ttcaagcgatgcagaccttgttatgttgctgaggtacatacgtaacactcactcttgaagcagaaggtctcttgtcatcagatatcatggaacattgtagaaaataatatgccaatattc

SEQ ID NO: 345262 - DNA, 120 bp, Artificial Sequence
  ENSG00000138411_103 (sequence is synthesized)
agatgccgccgaagcgtctagcgggaagggcgccggcgcggctggagggtctcagtacagggtctctgagcctgttgcccaatctggagtgcgatggtgcagtcacatctcactgcagcc

SEQ ID NO: 345263 - DNA, 120 bp, Artificial Sequence
  ENSG00000138411_104 (sequence is synthesized)
aaacttaatgaaccctattaatcatctcagctcctcctcctaattcctttcggtgcctcactgccatttagactgggaggcacgcattgacagccacggcaggatcttctacgtggatca

SEQ ID NO: 345264 - DNA, 120 bp, Artificial Sequence
  ENSG00000138411_105 (sequence is synthesized)
agggccaaggctctttgtgaggtgaaacattccaccttctgttcaagtgaaacctggacagcaggttgtttgtgaccacaaacagtgactgtgccattctgaagtcgtggagggagcgga

SEQ ID NO: 345265 - DNA, 120 bp, Artificial Sequence
  ENSG00000138411_106 (sequence is synthesized)
gggagggctgtgacgctggcaaagcattcacttctccctggaaactctcctacctgtcatctctctctatgctctgctgattagagaaaagggttctcaggcagtgcttccttatcccta

SEQ ID NO: 345266 - DNA, 120 bp, Artificial Sequence
  ENSG00000138411_107 (sequence is synthesized)
gtgatacagcttgtgttgtaggtatttgaataaaaagttgtggtattatttggagaaggtggctaggaggtcactaagcaagcaactacatgaggtgtgtctttgtgacactgtctgggc

SEQ ID NO: 345267 - DNA, 120 bp, Artificial Sequence
  ENSG00000138411_108 (sequence is synthesized)
ttgggcttcagtcttactggttcagaactgtgattttgttagcacattaaccaaaactcactgattgattaatttatgacaagaaatatgtaactgtgcaacacaggccagaatagctac

SEQ ID NO: 345268 - DNA, 120 bp, Artificial Sequence
  ENSG00000138411_109 (sequence is synthesized)
atccgtacttcctctgtaggtggatgaaccagaaagcctggttacaatcaggaagtcattctatgagtaagaaatcagaatgagaaaattagtgcttgttataaggtgaccctcagctaa

SEQ ID NO: 345269 - DNA, 120 bp, Artificial Sequence
  ENSG00000138411_110 (sequence is synthesized)
gatttaatttttatttaactcttatgtagtacctactatgagccatgaactgtttaagctcttaaggtcctcaccacaactttgataaagcagtactattattattgccatgtacagata

SEQ ID NO: 345270 - DNA, 120 bp, Artificial Sequence
  ENSG00000138411_111 (sequence is synthesized)
agcagctccatgtgcagaatggttcagtgacttgcctgacatcacagagacaggcagtggctgagccacgctgtaggccagccaggctggttccaggaaccatgctcttaaccatgacat

SEQ ID NO: 345271 - DNA, 120 bp, Artificial Sequence
  ENSG00000138411_112 (sequence is synthesized)
tatgctctgcaagtattgagtaaccaacctcagtttctctgtctataaaaagtctgggaatatgtgacttgaagggtagggaaaattaaaatgacatatttaaagtatttaacaaccctt

SEQ ID NO: 345272 - DNA, 120 bp, Artificial Sequence
  ENSG00000138411_113 (sequence is synthesized)
ggagtgtttgttcaacaaatatttgttgagcgcctaagcaaaacaggtaagccaactactttgtagaactgtcattctcatgaatgcagcattcatgtctcagagacaggcaatagacaa

SEQ ID NO: 345273 - DNA, 120 bp, Artificial Sequence
  ENSG00000138411_114 (sequence is synthesized)
ataaataaacatactattctttgtaggccaagagctgattaatgctatgatgaaaaataacgcaacaaatgaggtctagtgaaagacaggaatggagaatgttatttcatagagggtggt

SEQ ID NO: 345274 - DNA, 120 bp, Artificial Sequence
  ENSG00000138411_115 (sequence is synthesized)
tggggaggatgtcacagataaggccataggtgagcagatacctgaaagaagtaaggagtaaagtatatcaacattcaaggcaaatggaacacgtaaagtactcagtaaatgccatttacc

SEQ ID NO: 345275 - DNA, 120 bp, Artificial Sequence
  ENSG00000138411_116 (sequence is synthesized)
ccccaaagttccctctagcagagggaactttaccacaatagcctcttacttatcctgaactcagcttccagcaatattacctgagaatctatgagtagtcaaaatggttgttacaaaatg

SEQ ID NO: 345276 - DNA, 120 bp, Artificial Sequence
  ENSG00000138411_117 (sequence is synthesized)
catgtattttaatgcatgggagaagcccttaaactctcattgaaactactgacttgatttctgcaagtgtttttaataaacctctaattcccagccaagagaagattagaagtggcaagc

SEQ ID NO: 345277 - DNA, 120 bp, Artificial Sequence
  ENSG00000138411_118 (sequence is synthesized)
atgaagtttaggagagatgaaagagaattgggcttgtgattatgtccctggaccacaggtaaaatgacactgaattagagtcagatgggcgtgacagagaagcctttccagaacactgag

SEQ ID NO: 345278 - DNA, 120 bp, Artificial Sequence
  ENSG00000138411_119 (sequence is synthesized)
ctggaagcagggacaccaggggaagatatggctttgctggtactatatttggttcaacagcctgagagcccagtgcctgtaaatattccattggatggaagggcacagatggtccaagta

SEQ ID NO: 345279 - DNA, 120 bp, Artificial Sequence
  ENSG00000138411_120 (sequence is synthesized)
agtattatacctgggtataaaagagtagtagcccaccaagagttcatctgttttcagctctgacaagattttacctggaatcatgaatgaggagctgtgttcattagagaatcagaggtc

SEQ ID NO: 345280 - DNA, 120 bp, Artificial Sequence
  ENSG00000138411_121 (sequence is synthesized)
cagggaaaacccaagttaagataatggataatgctgcatctgtttctgctctgtgttgagatttaacttgttaaggcaggggttggtcccttcttgccagtcataacttgccagacacac

SEQ ID NO: 345281 - DNA, 120 bp, Artificial Sequence
  ENSG00000138411_122 (sequence is synthesized)
tttaggagagaggttcttttactaacccctgaaccttgaaaaaagtttcaattacatataggatactattgaagaagagttgtaatgtattcttaagaacaagttctgtctcatagcttt

SEQ ID NO: 345282 - DNA, 120 bp, Artificial Sequence
  ENSG00000138411_123 (sequence is synthesized)
tataaaagttttggtggttaaacaggagtaaacattatctcaaccatgttcataacatgactatacaaaacatcctattttctggggatgtttttactaatctgggtcttacaacttgaa

SEQ ID NO: 345283 - DNA, 120 bp, Artificial Sequence
  ENSG00000138411_124 (sequence is synthesized)
gttggcattgtagagaaccctgagtgtaggctggtagagagctgacctcacaatctgctgctggcttttacattagaatcctgtttggggtgaaagatttgaaggacccctgccttgtgg

SEQ ID NO: 345284 - DNA, 120 bp, Artificial Sequence
  ENSG00000138411_125 (sequence is synthesized)
acaagacagattaacaggcagacccaaaagcttatcactttagcctgatctctctctgtcatgcattaagactttaataagatttttagctaagctggacaccttaactaaagcagattt

SEQ ID NO: 345285 - DNA, 120 bp, Artificial Sequence
  ENSG00000138411_126 (sequence is synthesized)
atctccatgcgattctcccatgtaagtttctttccaagtgaccagcttccagtagattaaaataacttaaaggagcattcagggaggctggtgctcggtctctgtttggctactctgctt

SEQ ID NO: 345286 - DNA, 120 bp, Artificial Sequence
  ENSG00000138411_127 (sequence is synthesized)
tgggctgcatgttaggagtcctgtctcctgtcttatgaataggcagctaataggttttctgtcaaccctggaattttagccccttttaattgaatttaataatatttattttaagagaca

SEQ ID NO: 345287 - DNA, 120 bp, Artificial Sequence
  ENSG00000138411_128 (sequence is synthesized)
ggatcttgctatgttgcccaggctggagtacagtggctgttcacagatatgatcccactactgatcagcatgggagtttcaacctgtgccatttctaacctgggctggttcctcctacct

SEQ ID NO: 345288 - DNA, 120 bp, Artificial Sequence
  ENSG00000138411_129 (sequence is synthesized)
taggcaacctggtgatctccaactcctcggagttcaccatattgttggggaacttagtgtggacacctgattggcatagcacactgtagtccagaactcctgggctcaagcagtcctccc

SEQ ID NO: 345289 - DNA, 120 bp, Artificial Sequence
  ENSG00000138411_130 (sequence is synthesized)
tagctggaactataggcacgtgccaccctgcctgccttgacccttttaaaaatgagttgctgtgcttctagaacatttgaagggagaaaacatttttcgtgtaatgcaacatcaaagcta

SEQ ID NO: 345290 - DNA, 120 bp, Artificial Sequence
  ENSG00000138411_131 (sequence is synthesized)
tgcaacatcaaagctattaactattatgaagttattttcccacagtgatgactgatttctagagttgatatgaaacaggatgtccatatcctcatctgcatgaaaggaaatggttcttaa

SEQ ID NO: 345291 - DNA, 120 bp, Artificial Sequence
  ENSG00000138411_132 (sequence is synthesized)
cagaaatgttctcaggctaaaatttgcctccatctcctcttctctagtgtaacatcttcctttcgtgttttcacttatttagtcattcagcaacacttctgaggtgtgtaccattgtgct

SEQ ID NO: 345292 - DNA, 120 bp, Artificial Sequence
  ENSG00000138411_133 (sequence is synthesized)
aacaatgataaaaatttaccacttagtgtagtattctggagtatgtagcattgcccctgggccagacactagttcatttagtgctcacagcagcctggagatgggtgctatttttatcca

SEQ ID NO: 345293 - DNA, 120 bp, Artificial Sequence
  ENSG00000138411_134 (sequence is synthesized)
cattatatagaagaggaaactgaggcacagcatgattacgtgaattgaccaaggtcccacaattcgtaagtggtggaattggatttgcacccaggcagtccagctccagagtctgtgctc

SEQ ID NO: 345294 - DNA, 120 bp, Artificial Sequence
  ENSG00000138411_135 (sequence is synthesized)
ttctcctgcctctcaccagtaaggagggtgaagggatatcttcagcaattatcatgaagatagcaagggcttggcaggatgctgtgggagcctcctgataatttataaggtaggtattat

SEQ ID NO: 345295 - DNA, 120 bp, Artificial Sequence
  ENSG00000138411_136 (sequence is synthesized)
tatcattcataatttactgaaatttagaggtagaagtagggatctatatagaatagtaaccaaaaaatctcatcagtttggcatttcatgaaaataatacagatttgttaattgatgaat

SEQ ID NO: 345296 - DNA, 120 bp, Artificial Sequence
  ENSG00000138411_137 (sequence is synthesized)
ctttactcttataggaaatgcatgatgacttataagggatatactgtaggattcatgtcagcatcctattcctcctcttaaggaacggctggtctcccttaaccatggtggtctgagaga

SEQ ID NO: 345297 - DNA, 120 bp, Artificial Sequence
  ENSG00000138411_138 (sequence is synthesized)
atggcattttcacagcagggtttctttttggtgttacagttctttgctgtccatgttgttcttgatcactgcagggtagtctgacctgggctgtttgctcctgccttacacctgtataat

SEQ ID NO: 345298 - DNA, 120 bp, Artificial Sequence
  ENSG00000138411_139 (sequence is synthesized)
gacatggaatgttctctgtttctgtatgatgcatgctctgatactgtggtgtctgagtggatttgttctcttgctgtatcagtggaattctgctctggtggttgtattctccgtcagcca

SEQ ID NO: 345299 - DNA, 120 bp, Artificial Sequence
  ENSG00000138411_140 (sequence is synthesized)
tgatcatgaaactagggttttagaaacatccttgaaagccaagtaatttagaactggaactgaaatcagatcgacacattggcacaaaatcatgtacttcctgggtaaagccactaacca

SEQ ID NO: 345300 - DNA, 120 bp, Artificial Sequence
  ENSG00000138411_141 (sequence is synthesized)
tgtacttcctgggtaaagccactaaccatccctttcctagacattgctcttttaccctaaatgcctcttctttgaattataaaagaatgcgtgcctgtacacatatgtaacaaacctgca

SEQ ID NO: 345301 - DNA, 120 bp, Artificial Sequence
  ENSG00000138411_142 (sequence is synthesized)
tgagacacattcactcttcttcctccaaaaggtttggcacaaatagcaaaagggaagcagaaaagggctaattcataaggtcaaaaaactttaaagctacaaagagccagtgcacttctt

SEQ ID NO: 345302 - DNA, 120 bp, Artificial Sequence
  ENSG00000138411_143 (sequence is synthesized)
ttgtagatgagaaactttgctcagtaccaaattgctagtcttcaccaaactctgggcatggcccatgtgtcctcatgttcaatccagttttgatcagccttctctttgatcctttttttc

SEQ ID NO: 345303 - DNA, 120 bp, Artificial Sequence
  ENSG00000138411_144 (sequence is synthesized)
tccaaaggggactaaacatcactgaaatggtaaacagtaaggtgagattcctcccaaatcctacaactactgaaatgtgaggaaaaatttggattaaaataatttctacccgccttctat

SEQ ID NO: 345304 - DNA, 120 bp, Artificial Sequence
  ENSG00000138411_145 (sequence is synthesized)
tctggactactaactcagtgcccattaactatgtctattcattggtttgaatcactaaatccttgttagccttttctctgaatttaatttttgttttcactgaaaggtttttggaatcca

SEQ ID NO: 345305 - DNA, 120 bp, Artificial Sequence
  ENSG00000138411_146 (sequence is synthesized)
tcatcactgcccatgaggtgattcctttgacattttcttaaattctactaaagtatggaataagagtaaaattaagttggtgattactcaggatttatttaaggaactaaaggtcacttt

SEQ ID NO: 345306 - DNA, 120 bp, Artificial Sequence
  ENSG00000138411_147 (sequence is synthesized)
tccctttttattagtaagtcaatgtgaaactaagttgattttaaagtatgaatattatatatagcttttaagagagcttgcagttatgtatttgtttgtataaattatttgattaatgtg

SEQ ID NO: 345307 - DNA, 120 bp, Artificial Sequence
  ENSG00000138411_148 (sequence is synthesized)
tctcccctctgccagaagccctgggagggtctgttttctttgccattatgcccccaaccttggtacagtgcttggcatagaggtatttgaaaattatttcttatgtgaatgaccgaaaga

SEQ ID NO: 345308 - DNA, 120 bp, Artificial Sequence
  ENSG00000138411_149 (sequence is synthesized)
gttaagtatttccagtaacaactgttgtattttacagaaatgatatggttaaaataactcatttgttgttcttctctttactagtttcacttagtgaccgttaaatgaaaacagagacct

SEQ ID NO: 345309 - DNA, 120 bp, Artificial Sequence
  ENSG00000138411_150 (sequence is synthesized)
cttggtttcacttaatgttgtttttgtttaacttttgacattcatatgatcatatatacagtgttattccttagtcttaaaattatagacaacttgtaaagaattcaagaggatgattta

SEQ ID NO: 345310 - DNA, 120 bp, Artificial Sequence
  ENSG00000138411_151 (sequence is synthesized)
agacccgccttgacttcagttcagctctggctgctcctatgaatgaaactgccacgtgggttggccaggtgtatgattttaaggaagaatgccatgtttcttcttgctgctgcctaagtc

SEQ ID NO: 345311 - DNA, 120 bp, Artificial Sequence
  ENSG00000138411_152 (sequence is synthesized)
gccaatctttaactgcaaccaaatagcaactataacaatgagcacagacaactgcaaaaacaccaagcaatgagaagaatatgaggaagcactgctggttcagtggcagaattctcgcct

SEQ ID NO: 345312 - DNA, 120 bp, Artificial Sequence
  ENSG00000138411_153 (sequence is synthesized)
cccacgcaatgagaagaatctttgcttgataggtaagcaatgttttcatcctaagcaatataattgtgttatagatagtaaatctgatattttgcattaaaagtaaatggagtttttttt

SEQ ID NO: 345313 - DNA, 120 bp, Artificial Sequence
  ENSG00000138411_154 (sequence is synthesized)
gcaccttcctcagggaggtcccgctggccaaggtctggctgtccctcctgtcctctgcccccgcctcccttccaccggtccccgacgtgccgccagctcccagcccagcgtcccgcaggg

SEQ ID NO: 345314 - DNA, 120 bp, Artificial Sequence
  ENSG00000138411_155 (sequence is synthesized)
aggcagacccattcccatgagtctcaaaagatggatacatggtcttcaagcggaaggaatctgggggttgccacttgacatagcaggtgtagtccgggacgtgctaggccaatgactctt

SEQ ID NO: 345315 - DNA, 120 bp, Artificial Sequence
  ENSG00000138411_156 (sequence is synthesized)
ctctggcaccattatgctgaaagaaagggcagctgtaaatcctgtgttgcccatggggtaaataataatggaggtagatccagatattttgggaaattgggtgcataatagaattgtttt

SEQ ID NO: 345316 - DNA, 120 bp, Artificial Sequence
  ENSG00000138411_157 (sequence is synthesized)
aaattatgcctaaccacagcatgaatgttctttcagctaatagacaaattggtacactctcttagaaaaacctcactctatgtaatatactgcctttttgttcacttacagcatttaaaa

SEQ ID NO: 345317 - DNA, 120 bp, Artificial Sequence
  ENSG00000138411_158 (sequence is synthesized)
tcattaagcacaaggttctgattttttttcttagggatatgcgagaagtattgttaatttcagaaattagtctactagttatttgggataggacaattagctggggacttgaaagacatt

SEQ ID NO: 345318 - DNA, 120 bp, Artificial Sequence
  ENSG00000138411_159 (sequence is synthesized)
tcatttatttcactttcagaaaacacttagcacttaaggagaaatggtggaggattagggatgctgggatatagttacataatctgtattcaaaggtatgagtgatacccttagccaatc

SEQ ID NO: 345319 - DNA, 120 bp, Artificial Sequence
  ENSG00000138411_160 (sequence is synthesized)
ataatccaaatgaagtgtaaactctatttaaatttcgacagtcctttaaagagatgtagctctatgagagcaatgcattttgatgaatattgataaagcctggtaaacattgctttaaaa

SEQ ID NO: 345320 - DNA, 120 bp, Artificial Sequence
  ENSG00000138411_161 (sequence is synthesized)
aaaacactggaaggtatacccttttgccttaccgctttcccttcttgctcaccccctccacttacccatcttatatgtgaccatgacaacaggctgatgctttggttcctctgttttaaa

SEQ ID NO: 345321 - DNA, 120 bp, Artificial Sequence
  ENSG00000138411_162 (sequence is synthesized)
aatggtggaacataaagaagggaggggacgcgtttaaagggttacaattctgagtgattagtctggcaagtagtgacaaaagagctgaatggtactatgaagagtttatcaaaatatcag

SEQ ID NO: 345322 - DNA, 120 bp, Artificial Sequence
  ENSG00000138411_163 (sequence is synthesized)
cttaatccttttgaaattcttttgggcacagatctttcccttgtttgtttatttggataactaagggccgtgactcataacaaacatattttaagcagtttaaaataaaatggactgaga

SEQ ID NO: 345323 - DNA, 120 bp, Artificial Sequence
  ENSG00000138411_164 (sequence is synthesized)
gattaattaaccttgtatcatcttaagcaggtagaggggcccagggacccgagagggccacagaaaacttccttattgataaaacaattggtaaacctttagagaaaagatgagtcaaaa

SEQ ID NO: 345324 - DNA, 120 bp, Artificial Sequence
  ENSG00000138411_165 (sequence is synthesized)
aaggaaaatgtttctggaagatatttaggtataattggagcaaaacaaattcagaacactaggagagagttctgggagagctttatttttatgtatatacagattaatagtcatttagag

SEQ ID NO: 345325 - DNA, 120 bp, Artificial Sequence
  ENSG00000138411_166 (sequence is synthesized)
tttcagagggttggacaggagcattgcagaagtgtgttgataaatcacgtcttcctagccacatccaattgctgtaatttttgctgtatacaagtttggtctcctgattgtatttaataa

SEQ ID NO: 345326 - DNA, 120 bp, Artificial Sequence
  ENSG00000138411_167 (sequence is synthesized)
tgtggccacgactgcctcagccgaggggatgtgatacattttttcacttaggatgcctggacagtgataagtcttgatgaaaggcaggagtggcttttagtgtcattcatactggacagg

SEQ ID NO: 345327 - DNA, 120 bp, Artificial Sequence
  ENSG00000138411_168 (sequence is synthesized)
agcctcttgttagagacctgccggaatcctgtctagtatttcatttctagaactttgggggaagaggaagagaagcaggagcatccgtgaagtggacctgcagagctttcacagccacct

SEQ ID NO: 345328 - DNA, 120 bp, Artificial Sequence
  ENSG00000138411_169 (sequence is synthesized)
aaaaaaaaaaaaaaaaaaaagtttcatgaggagttttttggtgaggaatttagagtgaatgattaaaacctcactcttggtgccacttacttatataccatgtactttccattgcaactt

SEQ ID NO: 345329 - DNA, 120 bp, Artificial Sequence
  ENSG00000138411_170 (sequence is synthesized)
acttcctgtctaattgccatgatatcatttcagcagcaagcaaagacatttcatcctaacagttactactagacatgagtaactctgtttgactcatattagtttcgactgaaaagggga

SEQ ID NO: 345330 - DNA, 120 bp, Artificial Sequence
  ENSG00000138411_171 (sequence is synthesized)
acatacttgagaaacacatgggcaccattgtaactattcaaacagaatttttattctcaaccaaaatgccacaaagaggacgtcacttaagaccttggttgaggtttgttatatccttca

SEQ ID NO: 345331 - DNA, 120 bp, Artificial Sequence
  ENSG00000138411_172 (sequence is synthesized)
acttgcagaaatcaaaaatgcagaagttaagacagttgcctcatttgacttgttgattgtgatagcttttgtccatggtgatgtgatgaacataaggacgaggcacaaatccagattgtc

SEQ ID NO: 345332 - DNA, 120 bp, Artificial Sequence
  ENSG00000138411_173 (sequence is synthesized)
ttcgttggggaggaagggtgagtagaacagagaagtggcctgtggaacataggctgtggccacaaggcggatgtttctccacgtcgctgtggttgcctgaaacaggaaatccttctgcca

SEQ ID NO: 345333 - DNA, 120 bp, Artificial Sequence
  ENSG00000138411_174 (sequence is synthesized)
ggaagtgctgttctcatacacttaaacctttgggcttttttttttttaaaggtctcctctggcttttaaatcacttgacatagaaatcctttagtaaaaacttgtagctttagatcattt

SEQ ID NO: 345334 - DNA, 120 bp, Artificial Sequence
  ENSG00000138411_175 (sequence is synthesized)
ttgagaacagaagcctagttcagtttcttctctccggacctctctttctcttaaagggaaaaagtaaggctttacaaggaaaaaaaacaaggaattgcatttatgcaattcctttgtgat

SEQ ID NO: 345335 - DNA, 120 bp, Artificial Sequence
  ENSG00000138411_176 (sequence is synthesized)
ctgtgatcttattttctaccctgcagggctaggtagaacgtgcttcctctattaaataagttcagtttcagaaacatgaattagaatcttgctgttctacccagaagcctccacagaagt

SEQ ID NO: 345336 - DNA, 120 bp, Artificial Sequence
  ENSG00000138411_177 (sequence is synthesized)
gggaaggcagcacacctaccaacattactacctaacataaacaaacatgtcccgccttccatgactcttccatgagtgtgctcgtcaagataagggttaggaaatgaagcggggaagact

SEQ ID NO: 345337 - DNA, 120 bp, Artificial Sequence
  ENSG00000138411_178 (sequence is synthesized)
cctacacagtgtctgttgtgcccaaatagacataactgttattacacatcacattagaagaggccagctgtcatccctcccagaccccttcttcctcatttcaggtctgggttcaagtct

SEQ ID NO: 345338 - DNA, 120 bp, Artificial Sequence
  ENSG00000138411_179 (sequence is synthesized)
caacatcttcttcataactcagcagctgctagagggaatttttctaataccatacaattgtctgattgtgttctctgtggctcttgttgatttggatcattttaaggctatccctctcag

SEQ ID NO: 345339 - DNA, 120 bp, Artificial Sequence
  ENSG00000138411_180 (sequence is synthesized)
tcatgcctgggaataaagtatattagattatggaatcatattagtgatattgaacaaattcagccattcagtacacagtggatgaaataatgactccaaactataaaataatttgcatct

SEQ ID NO: 345340 - DNA, 120 bp, Artificial Sequence
  ENSG00000138411_181 (sequence is synthesized)
gctgatggaactagggaatagaaaaatcaggattcaaattcaggccgtttgtctttcatctggtactcttggactagctctgggacctaagcaaaactcctgcactccagcccatctgaa

SEQ ID NO: 345341 - DNA, 120 bp, Artificial Sequence
  ENSG00000138411_182 (sequence is synthesized)
ttttttcctatctctggacattttgcccattccagctaatgactgataacttccgctcttgtcacatgcagtgctgtgtagtctcccagctattcctacattaaggtaaagtagtatgtg

SEQ ID NO: 345342 - DNA, 120 bp, Artificial Sequence
  ENSG00000138411_183 (sequence is synthesized)
caaacacactatgacatgacaaaatttgtacagaagtttgcatgagatctgagcctttcattgctgatgtgcataagtggacttctcacttgtgttagttggcttaaagatgaaggtgca

SEQ ID NO: 345343 - DNA, 120 bp, Artificial Sequence
  ENSG00000138411_184 (sequence is synthesized)
cagttgaaaatgaaggcaaatgttagcctaatcaccagtatgcatgagattccaagtatttccttacataatcagtctggtttggatgagaatacttttcctcccccagaactccagctg

SEQ ID NO: 345344 - DNA, 120 bp, Artificial Sequence
  ENSG00000138411_185 (sequence is synthesized)
cctcccttcattgttggaccagagtttgttgagatctcaaagatatagggaagagtctttggaagcactgatatttaagtttgaatagaacagacgtttatcatgactggttttcctaaa

SEQ ID NO: 345345 - DNA, 120 bp, Artificial Sequence
  ENSG00000138411_186 (sequence is synthesized)
gcagtctcctcatggtgtggattaatgacattagttcctaggaggaggtccagggtgagtggggcttgatgcctctgtatttgattacattacattgatgtccaaatgcttcctgcctcc

SEQ ID NO: 345346 - DNA, 120 bp, Artificial Sequence
  ENSG00000138411_187 (sequence is synthesized)
atcatctgtctccttcctgtgacatcggagggaaaacaagggagaggatgttctaagctgtgagctcagttagcagggacaatttcttaatctgttcactctgcatatggtttattgaag

SEQ ID NO: 345347 - DNA, 120 bp, Artificial Sequence
  ENSG00000138411_188 (sequence is synthesized)
ctggatttctggactcatgactttgtcaggtcagtatcataaattattagatatagactttaatttgctattgaggtaccgaggatacatatgctgtttttgagagatgaaaacagtaat

SEQ ID NO: 345348 - DNA, 120 bp, Artificial Sequence
  ENSG00000138413_0 (sequence is synthesized)
ggcggggcctgggaggggacaaagccgggaagaggaaaagctcggacctaccctgtggtcccgggtttctgcagagtctacttcagaagcggaggcactgggagtccggtttgggattgc

SEQ ID NO: 345349 - DNA, 120 bp, Artificial Sequence
  ENSG00000138413_1 (sequence is synthesized)
caggctgtggttgtgagtctgagcttgtgagcggctgtggcgccccaactcttcgccagcatatcatcccggcaggcgataaactacattcagttgagtctgcaagactgggaggaactg

SEQ ID NO: 345350 - DNA, 120 bp, Artificial Sequence
  ENSG00000138413_2 (sequence is synthesized)
gggtgataagaaatctattcactgtcaaggtttattgaagtcaaaatgtccaaaaaaatcagtggcggttctgtggtagagatgcaaggagatgaaatgacacgaatcatttgggaattg

SEQ ID NO: 345351 - DNA, 120 bp, Artificial Sequence
  ENSG00000138413_3 (sequence is synthesized)
attaaagagaaactcatttttccctacgtggaattggatctacatagctatgatttaggcatagagaatcgtgatgccaccaacgaccaagtcaccaaggatgctgcagaagctataaag

SEQ ID NO: 345352 - DNA, 120 bp, Artificial Sequence
  ENSG00000138413_4 (sequence is synthesized)
aagcataatgttggcgtcaaatgtgccactatcactcctgatgagaagagggttgaggagttcaagttgaaacaaatgtggaaatcaccaaatggcaccatacgaaatattctgggtggc

SEQ ID NO: 345353 - DNA, 120 bp, Artificial Sequence
  ENSG00000138413_5 (sequence is synthesized)
acggtcttcagagaagccattatctgcaaaaatatcccccggcttgtgagtggatgggtaaaacctatcatcataggtcgtcatgcttatggggatcaatacagagcaactgattttgtt

SEQ ID NO: 345354 - DNA, 120 bp, Artificial Sequence
  ENSG00000138413_6 (sequence is synthesized)
gttcctgggcctggaaaagtagagataacctacacaccaagtgacggaacccaaaaggtgacatacctggtacataactttgaagaaggtggtggtgttgccatggggatgtataatcaa

SEQ ID NO: 345355 - DNA, 120 bp, Artificial Sequence
  ENSG00000138413_7 (sequence is synthesized)
gataagtcaattgaagattttgcacacagttccttccaaatggctctgtctaagggttggcctttgtatctgagcaccaaaaacactattctgaagaaatatgatgggcgttttaaagac

SEQ ID NO: 345356 - DNA, 120 bp, Artificial Sequence
  ENSG00000138413_8 (sequence is synthesized)
atctttcaggagatatatgacaagcagtacaagtcccagtttgaagctcaaaagatctggtatgagcataggctcatcgacgacatggtggcccaagctatgaaatcagagggaggcttc

SEQ ID NO: 345357 - DNA, 120 bp, Artificial Sequence
  ENSG00000138413_9 (sequence is synthesized)
ggcaagacagtagaagcagaggctgcccacgggactgtaacccgtcactaccgcatgtaccagaaaggacaggagacgtccaccaatcccattgcttccatttttgcctggaccagaggg

SEQ ID NO: 345358 - DNA, 120 bp, Artificial Sequence
  ENSG00000138413_10 (sequence is synthesized)
ttagcccacagagcaaagcttgataacaataaagagcttgccttctttgcaaatgctttggaagaagtctctattgagacaattgaggctggcttcatgaccaaggacttggctgcttgc

SEQ ID NO: 345359 - DNA, 120 bp, Artificial Sequence
  ENSG00000138413_11 (sequence is synthesized)
attaaaggtttacccaatgtgcaacgttctgactacttgaatacatttgagttcatggataaacttggagaaaacttgaagatcaaactagctcaggccaaactttaagttcatacctga

SEQ ID NO: 345360 - DNA, 120 bp, Artificial Sequence
  ENSG00000138413_12 (sequence is synthesized)
gctaagaaggataattgtcttttggtaactaggtctacaggtttacatttttctgtgttacactcaaggataaaggcaaaatcaattttgtaatttgtttagaagccagagtttatcttt

SEQ ID NO: 345361 - DNA, 120 bp, Artificial Sequence
  ENSG00000138413_13 (sequence is synthesized)
tctataagtttacagcctttttcttatatatacagttattgccacctttgtgaacatggcaagggacttttttacaatttttattttattttctagtaccagcctaggaattcggttagt

SEQ ID NO: 345362 - DNA, 120 bp, Artificial Sequence
  ENSG00000138413_14 (sequence is synthesized)
actcatttgtattcactgtcactttttctcatgttctaattataaatgaccaaaatcaagattgctcaaaagggtaaatgatagccacagtattgctccctaaaatatgcataaagtaga

SEQ ID NO: 345363 - DNA, 120 bp, Artificial Sequence
  ENSG00000138413_15 (sequence is synthesized)
aattcactgccttcccctcctgtccatgaccttgggcacagggaagttctggtgtcatagatatcccgttttgtgaggtagagctgtgcattaaacttgcacatgactggaacgaagtag

SEQ ID NO: 345364 - DNA, 120 bp, Artificial Sequence
  ENSG00000138413_16 (sequence is synthesized)
gagtgcaactcaaatgtgttgaagatactgcagtcatttttgtaaagaccttgctgaatgtttccaatagactaaatactgtttaggccgcaggagagtttggaatccggaataaatact

SEQ ID NO: 345365 - DNA, 120 bp, Artificial Sequence
  ENSG00000138413_17 (sequence is synthesized)
acctggaggtttgtcctctccatttttctctttctcctcctggcctggcctgaatattatactactctaaatagcatatttcatccaagtgcaataatgtaagctgaatcttttttggac

SEQ ID NO: 345366 - DNA, 120 bp, Artificial Sequence
  ENSG00000138413_18 (sequence is synthesized)
ttctgctggcctgttttatttcttttatataaatgtgatttctcagaaattgatattaaacactatcttatcttctcctgaactgttgattttaattaaaattaagtgctaattaccatt

SEQ ID NO: 345367 - DNA, 120 bp, Artificial Sequence
  ENSG00000138413_19 (sequence is synthesized)
aggggaggggaggggcgggcgtggagacctggaaggaggtaccgatccagccttgattgcagccctcttgcacaacggccataaggacgggtgcaggccaagagcaaggacatgcaaacc

SEQ ID NO: 345368 - DNA, 120 bp, Artificial Sequence
  ENSG00000138413_20 (sequence is synthesized)
ccaagacctgctaacgggcggcgaagcgggggcacgccctcgcacacgcagagataaattgtgctcccatgacctttatttggaaagtgcctgcgggcctaaaattggcctttgtcccac

SEQ ID NO: 345369 - DNA, 120 bp, Artificial Sequence
  ENSG00000138413_21 (sequence is synthesized)
agggggcgtggaggggcggagctccagcggccttcagaggggtcgctaggccacacggggcgagagggggctgggggaaacacccccgccagttccgggtgcctggagtttaaaaggcga

SEQ ID NO: 345370 - DNA, 88 bp, Artificial Sequence
  ENSG00000138413_22 (sequence is synthesized)
ctgccctgtcttaaaaaagaaaataataagaatcccattcattatcttctaatgcaaacaatcaatggagtttctaaagacctagaca

SEQ ID NO: 345371 - DNA, 120 bp, Artificial Sequence
  ENSG00000138413_23 (sequence is synthesized)
ctaatgcaaacaatcaatggagtttctaaagacctagacataggtggtgtcaggacctgcttctgtaacttttccatcctttgcattaggcagcgcggaaccccctaggcgaccccgcgc

SEQ ID NO: 345372 - DNA, 120 bp, Artificial Sequence
  ENSG00000138413_24 (sequence is synthesized)
actgagccgcagtagctatgaagtcatagaactagagtggaatgtaggcagttggaccctgaaccctccatcaaggagtaggtatccctgaaataagtgaggggaaaatgcagcctttcc

SEQ ID NO: 345373 - DNA, 120 bp, Artificial Sequence
  ENSG00000138413_25 (sequence is synthesized)
agacccattggctctgatatctggagcggggatcctgccttctgaaaggcagaattattggtgattccatgtgctcttgtttactttgcttaccaagacctatcaagattgagtcattta

SEQ ID NO: 345374 - DNA, 120 bp, Artificial Sequence
  ENSG00000138413_26 (sequence is synthesized)
aagaagccagggggactgcgcgcgtgagcgtcacgcatgcggggtcaacggatgggtgcttggtgctctgggcactgcaggggtgctggctggactgcggttaccgcagcgcggaacccc

SEQ ID NO: 345375 - DNA, 120 bp, Artificial Sequence
  ENSG00000138413_27 (sequence is synthesized)
gtatatttacacacatttagctaaaggcaaatacaaataaacttacaaataggcgtccatctcaacacattttttttcaaacatgctgttttttttcctttatccttttattcagttata

SEQ ID NO: 345376 - DNA, 120 bp, Artificial Sequence
  ENSG00000138413_28 (sequence is synthesized)
ccatatgatattgccatttttatgttggtaatttcatatggttcaaccagatctgtggttttcaacactggctgcacaataggatccccttacaagtttttttggtggttttgttttgct

SEQ ID NO: 345377 - DNA, 120 bp, Artificial Sequence
  ENSG00000138413_29 (sequence is synthesized)
ttgcttgatttgtttctttgttttagtttcaatgcttgagtaccaccctacacaaattaaaatctgaattccatggggttcaggcattttaaagctccccaggtgaatctaatgtgcaaa

SEQ ID NO: 345378 - DNA, 120 bp, Artificial Sequence
  ENSG00000138413_30 (sequence is synthesized)
aggtgaatctaatgtgcaaacttgagaaccaccaaagattgtattaaacatgatcccatcatgcataaaagaaaaaactggctgggtactatggttcacacctgtaatcctagcactttg

SEQ ID NO: 345379 - DNA, 120 bp, Artificial Sequence
  ENSG00000138413_31 (sequence is synthesized)
gaggccaggagtttgagactagcctggacaacatagcagaaccctgtctctacaaaaatgaaaagtatttcaataattatgtcaattgttcatggaagagccagttttgtttattcatat

SEQ ID NO: 345380 - DNA, 120 bp, Artificial Sequence
  ENSG00000138413_32 (sequence is synthesized)
catgtgcctatagtcccagctacttggaaggctgaggcctgaggatcccttaagcctaggagttcaaggttacagctatgagctatgatcacaccactgcctacgcaacagagcaagacc

SEQ ID NO: 345381 - DNA, 120 bp, Artificial Sequence
  ENSG00000138413_33 (sequence is synthesized)
atgatcacaccactgcctacgcaacagagcaagaccctgtctcgaaaaagaaaaagaaaaaaaaaactgactcggtagttgaaagcagccttactaaagcattccttcctgcctggaaaa

SEQ ID NO: 345382 - DNA, 120 bp, Artificial Sequence
  ENSG00000138413_34 (sequence is synthesized)
ggataatctggctgggcatggtggtgcacacgtgaagtcccagctacttaggaggcagaggcaggaggatccctcaagaccaggaattcaagtccagcctgggcaacagagtgagacccc

SEQ ID NO: 345383 - DNA, 120 bp, Artificial Sequence
  ENSG00000138430_0 (sequence is synthesized)
cttcctccccgcctccagctgccggcaggacctttctctcgctgccgctgggaccccgtgtcatcgcccaggccgagcacgatgccccctaaaaagggaggtgatggaattaaaccaccc

SEQ ID NO: 345384 - DNA, 120 bp, Artificial Sequence
  ENSG00000138430_1 (sequence is synthesized)
ccaatcattggaagatttggaacctcactgaaaattggtattgttggattgccaaatgttgggaaatctactttcttcaatgtgttaaccaatagtcaggcttcagcagaaaacttcccg

SEQ ID NO: 345385 - DNA, 120 bp, Artificial Sequence
  ENSG00000138430_2 (sequence is synthesized)
ttctgcactattgatcctaatgagagcagagtacctgtgccagatgaaaggtttgactttctttgtcaataccacaaaccagcaagcaaaattcctgcctttctaaatgtggtggatatt

SEQ ID NO: 345386 - DNA, 120 bp, Artificial Sequence
  ENSG00000138430_3 (sequence is synthesized)
gctggccttgtgaaaggagctcacaatgggcagggcctggggaatgcttttttatctcatattagtgcctgtgatggcatctttcatctaacacgtgcttttgaagatgatgatatcacg

SEQ ID NO: 345387 - DNA, 120 bp, Artificial Sequence
  ENSG00000138430_4 (sequence is synthesized)
cacgttgaaggaagtgtagatcctattcgagatatagaaataatacatgaagagcttcagcttaaagatgaggaaatgattgggcccattatagataaactagaaaaggtggctgtgaga

SEQ ID NO: 345388 - DNA, 120 bp, Artificial Sequence
  ENSG00000138430_5 (sequence is synthesized)
ggaggagataaaaaactaaaacctgaatatgatataatgtgcaaagtaaaatcctgggttatagatcaaaagaaacctgttcgcttctatcatgattggaatgacaaagagattgaagtg

SEQ ID NO: 345389 - DNA, 120 bp, Artificial Sequence
  ENSG00000138430_6 (sequence is synthesized)
ttgaataaacacttatttttgacttcaaaaccaatggtctacttggttaatctttctgaaaaagactacattagaaagaaaaacaaatggttgataaaaattaaagagtgggtggacaag

SEQ ID NO: 345390 - DNA, 120 bp, Artificial Sequence
  ENSG00000138430_7 (sequence is synthesized)
tatgacccaggtgctttggtcattccttttagtggggccttggaactcaagttgcaagaattgagtgctgaggagagacagaagtatctggaagcgaacatgacacaaagtgctttgcca

SEQ ID NO: 345391 - DNA, 120 bp, Artificial Sequence
  ENSG00000138430_8 (sequence is synthesized)
aagatcattaaggctgggtttgcagcactccaactagaatactttttcactgcaggcccagatgaagtgcgtgcatggaccatcaggaaagggactaaggctcctcaggctgcaggaaag

SEQ ID NO: 345392 - DNA, 120 bp, Artificial Sequence
  ENSG00000138430_9 (sequence is synthesized)
attcacacagattttgaaaagggattcattatggctgaagtaatgaaatacgaagattttaaagaggaaggttctgaaaatgcagtcaaggctgctggaaagtacagacaacaaggcaga

SEQ ID NO: 345393 - DNA, 120 bp, Artificial Sequence
  ENSG00000138430_10 (sequence is synthesized)
aattatattgttgaagatggagatattatcttcttcaaatttaacacacctcaacaaccgaagaagaaataaaatttagttattgctcagataaacatacaacttccaaaaggcatctga

SEQ ID NO: 345394 - DNA, 120 bp, Artificial Sequence
  ENSG00000138430_11 (sequence is synthesized)
tttttaaaaaattaaaatttctgaaaaccaatgcgacaaataaagttggggagatgggaatctttgacaaacaaattatttttatttgttttaaaattaaaatactgtgtaccccccccc

SEQ ID NO: 345395 - DNA, 120 bp, Artificial Sequence
  ENSG00000138430_12 (sequence is synthesized)
ccccatgaaatgcaggttcactaaatgtgaacagctttgcttttcacgtgattaagaccctactccaaattgtagaagcttttcaggaaccatattactctcatgatacttcattaatct

SEQ ID NO: 345396 - DNA, 120 bp, Artificial Sequence
  ENSG00000138430_13 (sequence is synthesized)
ccatcatgtatgccaagcctgacacatttgacagtgaggacaatgtggcttgctcctttttgaatctacagataatgcatgttttacagtactccagatgtctacactcaataaaacatt

SEQ ID NO: 345397 - DNA, 120 bp, Artificial Sequence
  ENSG00000138430_14 (sequence is synthesized)
tgacaaaaccagccttggtgtgtttggggatgtctgtattgactgactgtggtgtgctgaatgcgatacggcacctggtggttgctgattacagaattttaaggcgtgtgtatgacacag

SEQ ID NO: 345398 - DNA, 120 bp, Artificial Sequence
  ENSG00000138430_15 (sequence is synthesized)
taactggcagtgtggggcagctgcaattgtatcttaaaagtgagtctttcatgggaatcagaagaatagtataccagggatttgtctcaaaaaagttaattaatttatagatcaacattt

SEQ ID NO: 345399 - DNA, 120 bp, Artificial Sequence
  ENSG00000138430_16 (sequence is synthesized)
attgaaagatgatagcaatgatattatgagggatatgagataggtgactgaccacaaagaagaaaattctgtctcaaaaattaaagaattttgtttgttattgttgttctgaccatattg

SEQ ID NO: 345400 - DNA, 120 bp, Artificial Sequence
  ENSG00000138430_17 (sequence is synthesized)
tgacccattgatgtctggtgggttatgttttgcttcaattcagcaatgtgtataaaagttcctacactgattttgaaatactaagatcagactttgaaaattttaaaaattctttcattc

SEQ ID NO: 345401 - DNA, 120 bp, Artificial Sequence
  ENSG00000138430_18 (sequence is synthesized)
ttacttttcagatatttgagagcagtcgaagtggtagtatgggtaagttaagcacttcttaacattgtagcagaaaattccaaaagaaagactagaacaaattggtaatttggagaccct

SEQ ID NO: 345402 - DNA, 120 bp, Artificial Sequence
  ENSG00000138430_19 (sequence is synthesized)
ttgccacttagccttctcttgtgatgatggcctgaaagctctctcggccctgagcctccctttctctcccatgtttccattcctgtgagacctcccttccttgtccttgtcctctgccct

SEQ ID NO: 345403 - DNA, 120 bp, Artificial Sequence
  ENSG00000138430_20 (sequence is synthesized)
tttgtgctcttctgtgatcacaggaccatttccatggaatgcagattcatacccagccagcctttgcctctactgtatcgctttgggactttaaagatgcagaagtattagaacacacac

SEQ ID NO: 345404 - DNA, 120 bp, Artificial Sequence
  ENSG00000138430_21 (sequence is synthesized)
aaacttaaaatggaaagttaccaaatgtagcactagaggcaagaaaaggggtgattttttaaagatttggctatacttaagatatttaaagaggatgaggttgagtcgtgagtataattt

SEQ ID NO: 345405 - DNA, 120 bp, Artificial Sequence
  ENSG00000138430_22 (sequence is synthesized)
agaagctctccagtgagtatttttttagtatcaaatagtgatcttcttttgctaacataaaaatgagtaaactacagcagagaaataagaataaaactaatgaagggttttttaaaagaa

SEQ ID NO: 345406 - DNA, 120 bp, Artificial Sequence
  ENSG00000138430_23 (sequence is synthesized)
ctaaataaaacaaataaaactaggctacaggtatagctgaccaagtttgctgtgaaaaatccttgttatatctatttctgtattggagtaatgtgtagattagtggattgttagggattt

SEQ ID NO: 345407 - DNA, 120 bp, Artificial Sequence
  ENSG00000138430_24 (sequence is synthesized)
cagcagtataagaaagaatcaaatatcttgcttttgggtcttctccaaagtaaattgcatggacttcttaaagaagtttgaaatcagtaaaaagacattaggatcatgcaattttacttt

SEQ ID NO: 345408 - DNA, 120 bp, Artificial Sequence
  ENSG00000138430_25 (sequence is synthesized)
gtctagcttctaatgtggtaaattgcacattgtgcaacagaaccattaataaaagaaaggagttagttttgaggtaactgcattcattaggggctgaaaataaatgttaaaaatgtttaa

SEQ ID NO: 345409 - DNA, 120 bp, Artificial Sequence
  ENSG00000138430_26 (sequence is synthesized)
tttggttagaagttctacaacattgtatgtacatatacaaaatttcattttctctgaaagtcgagaattccaagaactgttacatataatcatatatatgcctatatctaaacgttttcc

SEQ ID NO: 345410 - DNA, 120 bp, Artificial Sequence
  ENSG00000138430_27 (sequence is synthesized)
ctcctttaatattgataaagttaatatattttaggatgttatgtaaatatttttgcatgtatctgtagctccatcttaatcaaatttatggttaaaagagatttgaggccaggcgtggag

SEQ ID NO: 345411 - DNA, 82 bp, Artificial Sequence
  ENSG00000138430_28 (sequence is synthesized)
tgcaacatcatgaaacatcatctctacataaaaaaatacatatatacaaaaattagctgggcatcatggcacacacctgtag

SEQ ID NO: 345412 - DNA, 79 bp, Artificial Sequence
  ENSG00000138430_29 (sequence is synthesized)
gggcatctgggaggattgatcgatcgcttgagcctgggaggtggaggctactgtgagccatgatcatgccactgcactc

SEQ ID NO: 345413 - DNA, 120 bp, Artificial Sequence
  ENSG00000138430_30 (sequence is synthesized)
gcaacagagtgagaccctgtctccaaagagaaagagaaacttgagaaggcttgtgcccaaagcttgaagaaagattgtaatagcatttagttgtgttttatcatgttatcttcataacat

SEQ ID NO: 345414 - DNA, 120 bp, Artificial Sequence
  ENSG00000138430_31 (sequence is synthesized)
tttatcatgttatcttcataacatgcattttgcatatggctcagagcagagccggatctcccaaggaagcacaaatagtttttgtcgctaacttagttatgagtgaagcctctgttcact

SEQ ID NO: 345415 - DNA, 120 bp, Artificial Sequence
  ENSG00000138430_32 (sequence is synthesized)
tataacttgccagtttcattggtggaataagtccccttactcatgattcatcaatattcctatattaaaattccagtttgatgtttgtctctagttgtctgtgtataatatttccaaagc

SEQ ID NO: 345416 - DNA, 120 bp, Artificial Sequence
  ENSG00000138430_33 (sequence is synthesized)
tcctttgtaaaccccgtctcctttcattcagagagtcagagacggtatctcctcctcctgcctcttctattgttctgattagtctacttaaattcacttgatgctctttttattttacaa

SEQ ID NO: 345417 - DNA, 120 bp, Artificial Sequence
  ENSG00000138430_34 (sequence is synthesized)
gagacttgagaaatgtcggttgttcctaatggcaaactactttagctgggaaaattcatttcaacttattttaagcttgtaaaatacactgtggtgataaaataaaagagctgggtttga

SEQ ID NO: 345418 - DNA, 120 bp, Artificial Sequence
  ENSG00000138430_35 (sequence is synthesized)
ccactgcttctaaatcaataaaacagtggatgactgttaggaaaaacaaagccacgcttctttaatatctactgatctatgctaaatctgctgcacagatactacccagtgttgaaaatg

SEQ ID NO: 345419 - DNA, 120 bp, Artificial Sequence
  ENSG00000138430_36 (sequence is synthesized)
tactaattatatacctgacatcttaacagatattaaactaagttctagttgagcccaactgcagatcagagaaaagaaactctgtgcttacaatcagtcatcttaaatgcaattagtttt

SEQ ID NO: 345420 - DNA, 72 bp, Artificial Sequence
  ENSG00000138430_37 (sequence is synthesized)
cctcccgagtagctggaattacaggctgcgcgcctgatggccggctaatttttttgtatttgtttttctcct

SEQ ID NO: 345421 - DNA, 66 bp, Artificial Sequence
  ENSG00000138430_38 (sequence is synthesized)
gaacaaatattgattttagatcagtctttctgggacttctcagcaatgactcttttgacaacggat

SEQ ID NO: 345422 - DNA, 120 bp, Artificial Sequence
  ENSG00000138430_39 (sequence is synthesized)
gattcatacttattcatcagctatatccagttccacactattgaattcagattgatatcactgactttgaagtttgtcatggtggcggttagctagtcattacagatgaggtttttgtcc

SEQ ID NO: 345423 - DNA, 120 bp, Artificial Sequence
  ENSG00000138430_40 (sequence is synthesized)
aggataactttaattatttgtgagctgctgaacagtgaaagtggagcggcattgattgaggcaggtaacaattgattctgcctattacatagtctgaatttcttcatcctgtagaatctg

SEQ ID NO: 345424 - DNA, 120 bp, Artificial Sequence
  ENSG00000138430_41 (sequence is synthesized)
agtggccaagatggggccagggcagcgggtggcttggggatgtgtggatgaatgaggcgctgtcggactaggccgcgcgtcgggagatcggcctacgcctcacgcgggaaagccctgggg

SEQ ID NO: 345425 - DNA, 120 bp, Artificial Sequence
  ENSG00000138430_42 (sequence is synthesized)
aaagccttctcccgacgccaggacgcccggtggcccagtccggagaggaggatggggggtggggcccactttgggtgggctgccggccacctctctgtaggccagaggacccgacaggcg

SEQ ID NO: 345426 - DNA, 120 bp, Artificial Sequence
  ENSG00000138430_43 (sequence is synthesized)
ctgttcctgtatctgttctttggaggcctgggagttggccaggaacaggtgtcaggacgctgagaagggaaattcctggccctcggggtcagggatcagaggctggaatactactgcaag

SEQ ID NO: 345427 - DNA, 120 bp, Artificial Sequence
  ENSG00000138430_44 (sequence is synthesized)
ggcagggccccagcgtggtcctaggaggtacaactctcagccagaagactgggacagttttagttcccagcttctgagacgtgagcttagcggtctttgtgatttcactttgcagtccaa

SEQ ID NO: 345428 - DNA, 120 bp, Artificial Sequence
  ENSG00000138430_45 (sequence is synthesized)
gggtgggagtaattctgcacgcatgatttggagacagaactagtaagggacagagaaagtttcgacttgtaaataaaaaggttccgtcgattaatttaccattagaaatagtaaccataa

SEQ ID NO: 345429 - DNA, 120 bp, Artificial Sequence
  ENSG00000138430_46 (sequence is synthesized)
tgtagattttggaggttgcttatgaggactgatgagccgtaccttcagtgccaaaggtgggagggacttggtggaaggaccccagtacctgatgccccctaaaaagggaggtgatggaat

SEQ ID NO: 345430 - DNA, 120 bp, Artificial Sequence
  ENSG00000138430_47 (sequence is synthesized)
gttccgccgctgtcgccgccgtcgtgcgtgccgctcggcggaggggacgggcctgcgttctctcctccttcctccccgcctccagctgccggcaggacctttctctcgctgccgctggga

SEQ ID NO: 345431 - DNA, 120 bp, Artificial Sequence
  ENSG00000138433_0 (sequence is synthesized)
gctgctggaaacgcagttccggttaggcggctgagtttgtttacgttgctaacagatctagcccctgctttccctagttccagttccaagatggggaaatccttcgccaacttcatgtgc

SEQ ID NO: 345432 - DNA, 120 bp, Artificial Sequence
  ENSG00000138433_1 (sequence is synthesized)
aagaaagactttcatcctgcctccaaatccaatatcaaaaaagtatggatggcagaacagaaaatatcatatgataagaagaaacaagaagaattgatgcagcaatatcttaaagaacaa

SEQ ID NO: 345433 - DNA, 120 bp, Artificial Sequence
  ENSG00000138433_2 (sequence is synthesized)
gaatcatatgataatagattgcttatgggagatgaacgtgtaaagaatggccttaatttcatgtatgaagccccaccaggagctaaaaaagaaaacaaagagaaagaagaaacagaagga

SEQ ID NO: 345434 - DNA, 120 bp, Artificial Sequence
  ENSG00000138433_3 (sequence is synthesized)
gagaccgaatacaaatttgaatggcagaaaggagccccacgagaaaaatatgccaaagatgacatgaacatcagagatcagccctttggtattcaggttcgaaatgtgaggtgcattaaa

SEQ ID NO: 345435 - DNA, 120 bp, Artificial Sequence
  ENSG00000138433_4 (sequence is synthesized)
tgtcacaaatggggtcatgtcaacacagatcgagaatgtcctttgtttggtctttctggaatcaatgcaagttcggttcccactgatggctcagggccatcgatgcacccctcggagcta

SEQ ID NO: 345436 - DNA, 120 bp, Artificial Sequence
  ENSG00000138433_5 (sequence is synthesized)
atagcggagatgagaaacagtgggtttgcactgaaacgaaatgtactggggagaaacttgaccgcaaatgatccatcacaggagtatgttgcaagtgagggtgaagaagatccagaagtt

SEQ ID NO: 345437 - DNA, 120 bp, Artificial Sequence
  ENSG00000138433_6 (sequence is synthesized)
gagggtgaagaagatccagaagttgaatttttaaagtcactaacaaccaaacaaaaacagaaacttctcaggaaattagatcgactggagaagaaaaaaaagaaaaaagatagaaaaaag

SEQ ID NO: 345438 - DNA, 120 bp, Artificial Sequence
  ENSG00000138433_7 (sequence is synthesized)
aaaggaagaaaagaaagaaaaacaagtgttcagggcataacaacagtgattctgaagagaaggacaagtctaagaagagaaagcttcatgaagaactttctagcagtcaccataaccggg

SEQ ID NO: 345439 - DNA, 120 bp, Artificial Sequence
  ENSG00000138433_8 (sequence is synthesized)
aaaaagccaaggaaaagcccaggttcttaaaacacgagagttctagggaggacagcaaatggagccattctgattctgacaaaaagtccagaacccataaacatagcccagagaagagag

SEQ ID NO: 345440 - DNA, 120 bp, Artificial Sequence
  ENSG00000138433_9 (sequence is synthesized)
gctctgaaagaaaggaggggagcagcagaagccacggcagggaggaaaggagccggagaagccggagcagaagtcctggtagttacaagcaaagggagacaaggaaacgggcacagcgaa

SEQ ID NO: 345441 - DNA, 120 bp, Artificial Sequence
  ENSG00000138433_10 (sequence is synthesized)
atcctggtgaagagcaaagcagaagaaatgacagcagaagccatggcacagacttgtatagaggagaaaaaatgtacagagagcacccaggaggtacacatactaaagtgacacaaagag

SEQ ID NO: 345442 - DNA, 120 bp, Artificial Sequence
  ENSG00000138433_11 (sequence is synthesized)
aatgaagcagaagtagagaagaaagactgtatgtgacaattacctgggaataaaaatatctccacttttttattgaatacctttagcaaggggtaaattatgtactgttgtctttctaat

SEQ ID NO: 345443 - DNA, 120 bp, Artificial Sequence
  ENSG00000138433_12 (sequence is synthesized)
aaaaaagctcaattttaatttttcatctctagactgtcaattcaagtacaaaactacatgagtactataagaatgaattttgcaaatatttgtaagtaagctattttggggctgtggaaa

SEQ ID NO: 345444 - DNA, 120 bp, Artificial Sequence
  ENSG00000138433_13 (sequence is synthesized)
tattttctgttggtaactgtttcttgttccccataccagataaaaaccgcatataactctgtgacattttctttgttctgaaacatcattaaaagaatgacagtacattgaatgggtata

SEQ ID NO: 345445 - DNA, 120 bp, Artificial Sequence
  ENSG00000138433_14 (sequence is synthesized)
cagtacattgaatgggtataatttacttttttcaattcaaatttgttattctaggatttgaatttgcttgaagtgaattgtaataattattcaaattcattagtataaattaaggattaa

SEQ ID NO: 345446 - DNA, 120 bp, Artificial Sequence
  ENSG00000138433_15 (sequence is synthesized)
tgaatgatatattaagtcagttttttggaatcaaatacccaattataggattcgtgtctttccgtgagggctatctcttttactctcatacctgtagatgaccactttttccagctttac

SEQ ID NO: 345447 - DNA, 120 bp, Artificial Sequence
  ENSG00000138433_16 (sequence is synthesized)
ccataattcacgtaaaatatagattcacgtgactcatatacagtctttgagcaagtctcaaattaggcaaagcttagaagaacaatcatgtctacacttgaactgctgagacctcttaca

SEQ ID NO: 345448 - DNA, 120 bp, Artificial Sequence
  ENSG00000138433_17 (sequence is synthesized)
gacttatttctttaacacaaaagatacccagcatactttcaagaggaaaggtaaagtgactttatttgacacgcatgtcattgttctgttaaaagctgtttcgtggctagagttcttcat

SEQ ID NO: 345449 - DNA, 120 bp, Artificial Sequence
  ENSG00000138433_18 (sequence is synthesized)
gacaaagttacataagaagactccccttgcacgtaaagaaaaatgcaattattttctattctgaatctccagactgctgttttagaaaatcatatctgattatttgctcagcagaagatt

SEQ ID NO: 345450 - DNA, 120 bp, Artificial Sequence
  ENSG00000138433_19 (sequence is synthesized)
tcaggtaggcactagacatgatttgtttcgggagaggacaaacaaggaaagataaaacaacatttttctttactctttctgggtattgttttatttgggtttgtgtgtggggcttgtttg

SEQ ID NO: 345451 - DNA, 120 bp, Artificial Sequence
  ENSG00000138433_20 (sequence is synthesized)
tttgtttttgactaagaccattcccaaaatatgattaatgggaaactctgatcatatatgttgaattaaaatgctgtgtaataggattaagtttaatttttccagccaaaggccctatga

SEQ ID NO: 345452 - DNA, 65 bp, Artificial Sequence
  ENSG00000138433_21 (sequence is synthesized)
aaccccgtctctactgaaatacaaaaattagccgggttttgtggccagcgcctgtaatcacagct

SEQ ID NO: 345453 - DNA, 90 bp, Artificial Sequence
  ENSG00000138433_22 (sequence is synthesized)
aggaggtggaagttgcagtgagctgagatggtgtcattgcacttcagcctgggcgatagagcaagattccctctctcttcattgtgtaag

SEQ ID NO: 345454 - DNA, 120 bp, Artificial Sequence
  ENSG00000138434_0 (sequence is synthesized)
ctgcccggccgggcgctgacagcaagggcgggggtccctgccgccgccttgtctcgcgcagggtccggctggggtagcggagcccccagtgcggccatggaccggcccctgtcgtcgtcg

SEQ ID NO: 345455 - DNA, 120 bp, Artificial Sequence
  ENSG00000138434_1 (sequence is synthesized)
gcccctgtcgtcgtcggcggaggcggaggaggaactggagtggcaagtggcgagtcgcaggaggaaggcctgggccaagtgccgcagctcctggcaagcgtcggagacggaggatctgtc

SEQ ID NO: 345456 - DNA, 120 bp, Artificial Sequence
  ENSG00000138434_2 (sequence is synthesized)
cacagaagcgacgacgcaggacgaggaggaggacgaggaggaggacctccccggcgcgcagctgccggcagcggggggaagaggaaacgtgcccaacgagaagatcgcgatatggctcaa

SEQ ID NO: 345457 - DNA, 120 bp, Artificial Sequence
  ENSG00000138434_3 (sequence is synthesized)
ggactgccgtacacctttgggagcctcactggatgaacaaagcagtagtacactcaagggtgtgcttgtgagaaatggaggaagttttgaagatgatttgtcattgggagctgaagccaa

SEQ ID NO: 345458 - DNA, 120 bp, Artificial Sequence
  ENSG00000138434_4 (sequence is synthesized)
ccacctccatgaaagtgatgctcaaattgaaaactgcaataatatcttggccaaagagagaagattacagtttcatcagaaagggagaagtatgaattccactggatctgggaaaagtag

SEQ ID NO: 345459 - DNA, 120 bp, Artificial Sequence
  ENSG00000138434_5 (sequence is synthesized)
tgggacagtttcaagtgtttcagaattgttggaactttatgaggaagatcctgaagaaattctttataatcttggatttggacgtgatgaaccagatattgcttctaaaattccttccag

SEQ ID NO: 345460 - DNA, 120 bp, Artificial Sequence
  ENSG00000138434_6 (sequence is synthesized)
attttttaattcatcatcctttgccaaagggatagatattaaagtatttttgagtgctcagatgcaacggatggaagtagaaaacccaaattatgctttaacaagccgttttcgtcaaat

SEQ ID NO: 345461 - DNA, 120 bp, Artificial Sequence
  ENSG00000138434_7 (sequence is synthesized)
tgaagtgcttactactgtggccaatgcgttttcttctttatattctcaagtctccgggacgcccctgcagagaattggaagtatgtcctcagtgacctctaacaaggagacagacccacc

SEQ ID NO: 345462 - DNA, 120 bp, Artificial Sequence
  ENSG00000138434_8 (sequence is synthesized)
tccacctttaactcgaagtaacactgcaaatcgtttaatgaaaacactctcaaaactgaatttatgtgttgataaaacagagaaaggagaaagtagtagtccttctccatcagctgaaaa

SEQ ID NO: 345463 - DNA, 120 bp, Artificial Sequence
  ENSG00000138434_9 (sequence is synthesized)
aggaaagattctaaatgtttcagtgattgaagaaagtggcaataaaaacgatcaaaagtctcaaaaaattatgaagaagaaagagtcatcttctatgttggctacagttaaagaagaagt

SEQ ID NO: 345464 - DNA, 120 bp, Artificial Sequence
  ENSG00000138434_10 (sequence is synthesized)
ctctggtagttcagcagctgttacggagaatgctgatagtgatagaatttctgatgaagcaaatagtaattttaaccaaggaactgaaaatgaacaaagtaaagaaactcaaagtcatga

SEQ ID NO: 345465 - DNA, 120 bp, Artificial Sequence
  ENSG00000138434_11 (sequence is synthesized)
gagtaaactgggtgaggaatctggtattgtagaatccaaattagatagtgatttcaacatatccagccacagtgagctggaaaatagcagtgagctgaaaagtgtccatatatccacacc

SEQ ID NO: 345466 - DNA, 120 bp, Artificial Sequence
  ENSG00000138434_12 (sequence is synthesized)
tgaaaaagagccttgtgcaccactgacaataccatccataagaaatataatgacacagcagaaggactccttcgaaatggaagaggttcaaagtacggagggagaagctcctcatgttcc

SEQ ID NO: 345467 - DNA, 120 bp, Artificial Sequence
  ENSG00000138434_13 (sequence is synthesized)
agccacttaccagctaggtcttacgaagtcgaaaagagatcatctgttacgtactgcaagtcagcattccgatagcagtggttttgctgaagattctacagactgcctatcccttaatca

SEQ ID NO: 345468 - DNA, 120 bp, Artificial Sequence
  ENSG00000138434_14 (sequence is synthesized)
tcttcaggttcaggagtccttgcaggctatggggagtagtgctgatagttgtgacagtgagacaacagttacgtcacttggtgaagaccttgccacaccaacagcacaagaccagcctta

SEQ ID NO: 345469 - DNA, 120 bp, Artificial Sequence
  ENSG00000138434_15 (sequence is synthesized)
ttttaatgaatcagaggaggagtctcttgtccctcttcagaagggactagagaaggcagcagcagttgcagacaaaagaaaatcaggtagccaggatttccctcagtgcaacaccattga

SEQ ID NO: 345470 - DNA, 120 bp, Artificial Sequence
  ENSG00000138434_16 (sequence is synthesized)
gaatacaggaactaaacagtccacctgtagtccaggggatcatatcattgaaattactgaagtggaagaggatttgtttccagcagagacagtagagctactgagggaagcaagtgctga

SEQ ID NO: 345471 - DNA, 120 bp, Artificial Sequence
  ENSG00000138434_17 (sequence is synthesized)
aagtgatgtgggtaaaagcagtgaaagtgaatttactcagtataccacacaccatattctgaaatcattggcttctattgaagctaaatgcagtgatatgagctctgaaaatacaactgg

SEQ ID NO: 345472 - DNA, 120 bp, Artificial Sequence
  ENSG00000138434_18 (sequence is synthesized)
gcctccctcttccatggacagagttaatacagctttgcaaagagctcaaatgaaggtttgcagtctgtctaatcaaaggatggggcgtagcctgctaaaatcaaaagatttgttaaaaca

SEQ ID NO: 345473 - DNA, 120 bp, Artificial Sequence
  ENSG00000138434_19 (sequence is synthesized)
aaggtacttatttgcaaaagctggctatcctctaagaaggtctcagtctttaccaaccaccttattgagcccagtaagggttgtgtcctctgtcaatgttcgattatctccaggaaaaga

SEQ ID NO: 345474 - DNA, 120 bp, Artificial Sequence
  ENSG00000138434_20 (sequence is synthesized)
agaggagcaggaattggaaaagcgggtgatggaacatgatggtcagtctttagttaaatcgaccattttcatctctccatcatctgtgaagaaagaagaagccccccagagtgaggcgcc

SEQ ID NO: 345475 - DNA, 120 bp, Artificial Sequence
  ENSG00000138434_21 (sequence is synthesized)
gcgggtggaggaatgccatcatggaaggactcctacctgttcacggcttgctccaccaccaatgtctcagtctacctgttcccttcattccatccactctgagtggcaagaaaggcccct

SEQ ID NO: 345476 - DNA, 120 bp, Artificial Sequence
  ENSG00000138434_22 (sequence is synthesized)
gtgtgagcacacaagaactctgagcactcacagtgttcccaacatatcaggggctacttgtagtgccttcgcttcccctttcgggtgtccttactcacatagacatgccacctaccctta

SEQ ID NO: 345477 - DNA, 120 bp, Artificial Sequence
  ENSG00000138434_23 (sequence is synthesized)
ccgagtgtgctctgtgaatcctccttcagccatagaaatgcagttgcgaagagtattacatgatattagaaactcactgcagaatctttcacagtaccctatgatgagaggacctgatcc

SEQ ID NO: 345478 - DNA, 120 bp, Artificial Sequence
  ENSG00000138434_24 (sequence is synthesized)
tgctgctgctccatatagtactcagaaatcatctgttctacctctttatgaaaatacttttcaggagctccaggtaatgaggcggagcctgaatttgtttagaacacaaatgatggattt

SEQ ID NO: 345479 - DNA, 120 bp, Artificial Sequence
  ENSG00000138434_25 (sequence is synthesized)
agaattggcaatgctgcgtcagcaaaccatggtttatcatcatatgactgaggaggagaggtttgaagttgatcagctccagggtttgagaaattcagtccgaatggaacttcaggacct

SEQ ID NO: 345480 - DNA, 120 bp, Artificial Sequence
  ENSG00000138434_26 (sequence is synthesized)
ggaactgcagctggaggagcgcctgctgggcctggaggagcagcttcgtgctgtgcgcatgccttcacccttccgctcctccgcactcatgggaatgtgtggcagtagaagcgctgataa

SEQ ID NO: 345481 - DNA, 120 bp, Artificial Sequence
  ENSG00000138434_27 (sequence is synthesized)
cttgtcatgcccttctccattgaatgtaatggaaccagtcactgaactgatgcaggagcagtcatacctgaagtctgaattgggcctgggacttggagaaatgggatttgaaattcctcc

SEQ ID NO: 345482 - DNA, 120 bp, Artificial Sequence
  ENSG00000138434_28 (sequence is synthesized)
tggagaaagctcagaatctgttttttcccaagcaacatcagaatcatcttctgtatgttctggtccctctcatgctaacagaagaactggagtaccttctactgcctcagtgggcaaatc

SEQ ID NO: 345483 - DNA, 120 bp, Artificial Sequence
  ENSG00000138434_29 (sequence is synthesized)
caaaaccccattagtggcaaggaagaaagtgttccgagcatcggtggctctaacgccaacagctccttctagaacaggctctgtgcagacacctccagatttggaaagttctgaggaagt

SEQ ID NO: 345484 - DNA, 120 bp, Artificial Sequence
  ENSG00000138434_30 (sequence is synthesized)
tgatgcagctgaaggagccccagaagttgtaggacctaaatctgaagtggaagaagggcatggaaaactcccatcaatgccagctgctgaggaaatgcataaaaatgtggagcaagatga

SEQ ID NO: 345485 - DNA, 120 bp, Artificial Sequence
  ENSG00000138434_31 (sequence is synthesized)
gttgcagcaagtcatacgggaggttggcatggatcctattagctgtgtaatactggaattatcaatgatatgcactggtggaggtgttatttgtgctttagaagatacttgctgttgagc

SEQ ID NO: 345486 - DNA, 120 bp, Artificial Sequence
  ENSG00000138434_32 (sequence is synthesized)
tgggctactgtatacagtgtacaatgtgtatttcttcaaccatatattttaaaaagacgtacatagaaacttaggcactttgctatttcttttctaaactatcaaaaactctagcagttt

SEQ ID NO: 345487 - DNA, 120 bp, Artificial Sequence
  ENSG00000138434_33 (sequence is synthesized)
gaaaagcctaatatttatttgtatgtcagtatttttcatttgattccctattagaattaattttaaaacttgaagacttccagacttatccaacttataaataacatatttcttcagact

SEQ ID NO: 345488 - DNA, 120 bp, Artificial Sequence
  ENSG00000138434_34 (sequence is synthesized)
aacatcttaaaacactgacctctatgaggtatttactgtgcaataactgattcatttttttcagagcttgaagcatccaatgatttttccctccactgctgttaattaatgtcacttcca

SEQ ID NO: 345489 - DNA, 120 bp, Artificial Sequence
  ENSG00000138434_35 (sequence is synthesized)
agaagaaaaactgttctgttgtaaaaaatataattgctcttaattcttggggaggttactaatagcagtaggatagaattttatgaggttacctacaactacttaatgtacttacactgt

SEQ ID NO: 345490 - DNA, 120 bp, Artificial Sequence
  ENSG00000138434_36 (sequence is synthesized)
aagccttgttgctttacccaagacaaatgtaattttatcattgcttatgtagtatttttcttttggaaatgtgccttatgttaaacactatgtacttttactttttgcattgtccagact

SEQ ID NO: 345491 - DNA, 120 bp, Artificial Sequence
  ENSG00000138434_37 (sequence is synthesized)
tctttattagatggagatgtttctttttctgtcttctagactaaatagagtatcatccaaataatggggcctatgacttgaatgaatagaaatgaataagctggtgtttgttttttcaaa

SEQ ID NO: 345492 - DNA, 120 bp, Artificial Sequence
  ENSG00000138434_38 (sequence is synthesized)
atggaagtaatttagatttgttctcctcatacataaaatgattttagttcagttttaaccagtgaaaactttgtttttatgaaaaaaaaggaaaatggtttcccatttggttttatatgt

SEQ ID NO: 345493 - DNA, 120 bp, Artificial Sequence
  ENSG00000138434_39 (sequence is synthesized)
gttaaataaatgtgtaaagtaaccaccaaatgttattagaatttttcttctagcatttataattttttcaactcctattgtgtttctttgtgtgtgatattttaatcaaaagtggttgag

SEQ ID NO: 345494 - DNA, 120 bp, Artificial Sequence
  ENSG00000138434_40 (sequence is synthesized)
ttgttaacagtgttctttgaaagaatctctaaaaggcttataaatgtttgaaatatcacacaaaggctgatttctaaaatatatatatattaaaacaataaagtatttattttgcctaaa

SEQ ID NO: 345495 - DNA, 80 bp, Artificial Sequence
  ENSG00000138434_41 (sequence is synthesized)
gccgggcgggcgctcggctcccagccgcgctccctcgggccactagcgctcccgcgcgcgcccggccgccttcatgtgaa

SEQ ID NO: 345496 - DNA, 120 bp, Artificial Sequence
  ENSG00000138434_42 (sequence is synthesized)
acaaaccggaaagtgagccggcggatagcttcctcctctaagcgattagaaatggaagtgctgtgaccgctgattatttggtgaccgtgttgactttacagttaggacttgagctactca

SEQ ID NO: 345497 - DNA, 120 bp, Artificial Sequence
  ENSG00000138434_43 (sequence is synthesized)
cgcatcgtgttagcatcagagatcagaaatccagaacagataatcatgccatatttgttctgtttttatttgaaagaattctcacatctcgaacaggatattttgttttgctttagtttt

SEQ ID NO: 345498 - DNA, 120 bp, Artificial Sequence
  ENSG00000138434_44 (sequence is synthesized)
ggcatctgtacaactggcacggaatcattttcctttcaaatgtgttttagacgagtttaatttacctaactacactaaatgggctttaattttgtttctgtttggggagctattaaaact

SEQ ID NO: 345499 - DNA, 120 bp, Artificial Sequence
  ENSG00000138434_45 (sequence is synthesized)
agctaactttgtacttatagtttacttcttgaacatggaattgtcagatggcactggaattctcagggaatagaacttttaaaagcattcagactgcataaatctgtttaattacatgct

SEQ ID NO: 345500 - DNA, 120 bp, Artificial Sequence
  ENSG00000138434_46 (sequence is synthesized)
ttggcaactggtacaaaaatgtttgataaaatacagaggagatgaatcatgttgcacgtaaatctgactacagcaaaatgtacttgtttcttattccactttgctagttgtaaaatcagg

SEQ ID NO: 345501 - DNA, 120 bp, Artificial Sequence
  ENSG00000138434_47 (sequence is synthesized)
gcctttaaacttttgttggtgtttgctttcgagcatatttttgctttctcaatttagattttcttaatattttgttcaaatattagagttagggtagtttgttttgttttgttgtggaaa

SEQ ID NO: 345502 - DNA, 120 bp, Artificial Sequence
  ENSG00000138434_48 (sequence is synthesized)
gtgattcatatgccagtttgcctcctctaaagacagacaagatattggctaccatgatattaatgccttgttttgatgaatcgactggaaccttattgaacactctttattacagaactc

SEQ ID NO: 345503 - DNA, 120 bp, Artificial Sequence
  ENSG00000138434_49 (sequence is synthesized)
gtaccctttattggaagtgtcatagacccttctgaaatatgatgacatatatggaataacttctgtttaaagatgcacagaggcaaatacactgcttgaagtccttggaccccagattta

SEQ ID NO: 345504 - DNA, 120 bp, Artificial Sequence
  ENSG00000138434_50 (sequence is synthesized)
caatctagctgtaaatcaatctcccagttttcagataagccttagatattagatacttcactcaaagtatggatcaagaaattgtattaatgtgctattggttcatttaattgttaaata

SEQ ID NO: 345505 - DNA, 120 bp, Artificial Sequence
  ENSG00000138434_51 (sequence is synthesized)
ctaaaatagtctataatgtaaaagcttgaaattttgaatgtacatgttcaagaccttttgggtgagatctgataaaactagtatctttcaggtttccacttagaaatgtgtttgagaagt

SEQ ID NO: 345506 - DNA, 120 bp, Artificial Sequence
  ENSG00000138434_52 (sequence is synthesized)
tgttttgtaacttttacttaagtcctttaaagcctccaatctgactctttatttaaatacagtcctaagtacagtattggcttactttaggtttcttaaaataggcttagcattacaaat

SEQ ID NO: 345507 - DNA, 120 bp, Artificial Sequence
  ENSG00000138434_53 (sequence is synthesized)
aatgttttattgtttaaattcaagtgcatattcaaaagaattttaaaaattaagaacaagagaagaatcacactatagtttaatgacatataggatttaagattgtataagagatcctat

SEQ ID NO: 345508 - DNA, 120 bp, Artificial Sequence
  ENSG00000138434_54 (sequence is synthesized)
gatcctatcaattagacagtaaataagtgcatcttttttgagacaaatgcagtaggcaaatgttgacattcaccagggcacagtcaatccctgacaatttcagaagttttgttgccaata

SEQ ID NO: 345509 - DNA, 120 bp, Artificial Sequence
  ENSG00000138434_55 (sequence is synthesized)
ctgatttatgtgggcagattctgtagtctgctgctccttctctcatggattaccttcttgttcctacagttgcacctattctacacaagagtggcattcatttgtatccaggaaagctag

SEQ ID NO: 345510 - DNA, 120 bp, Artificial Sequence
  ENSG00000138434_56 (sequence is synthesized)
aacaagtagtcttttaatcttggctatattatcacagattcgacttaggatatgttgcatctgtatttttgttttaaataacaactcaagttccttctcagagttgggcatctatgtatt

SEQ ID NO: 345511 - DNA, 120 bp, Artificial Sequence
  ENSG00000138434_57 (sequence is synthesized)
ttgtttattatgtacaaatgacctgaagacagcattttacccacttgataagttctcaaatagtctttgtttcttagtgccgtccatatcctgaataaagataccgtgttttctttcctt

SEQ ID NO: 345512 - DNA, 120 bp, Artificial Sequence
  ENSG00000138434_58 (sequence is synthesized)
ttgttttagtctagaatcttttgtcatttctattattaaaaaatcttccctcttaaagttctttctctctttctctctgctatttgaacatgttgactaccttttccttttccaagtttt

SEQ ID NO: 345513 - DNA, 120 bp, Artificial Sequence
  ENSG00000138434_59 (sequence is synthesized)
ctccctgttggcttctgtggcaccacgttctcctggttctgctcgtagctctctgactaagctttccccttcacctactgaccctcgatgctgtgcacagagttagtctacttccactgg

SEQ ID NO: 345514 - DNA, 120 bp, Artificial Sequence
  ENSG00000138434_60 (sequence is synthesized)
attgttggcatggatcctattagctgtgtaatactggaattatcaatgatatgcactggtggaggtgttatttgtgctttagaagatacttgctgttgagctgggctactgtatacagtg

SEQ ID NO: 345515 - DNA, 120 bp, Artificial Sequence
  ENSG00000138434_61 (sequence is synthesized)
atgagaaaaagtatgttatcattagcttttttcttttactgctctgagcactttttaattcacagagaagctaaggcacatcaagtatgaactacctcagctttattttctgacatgtct

SEQ ID NO: 345516 - DNA, 120 bp, Artificial Sequence
  ENSG00000138434_62 (sequence is synthesized)
aaacttaatctgcatctgccttcgttttctatcttccctcctgtttcaagggagaagctgtaactaaccctgatcaaagtcgatttctctgctcacaagtctgtctcctttccaagagga

SEQ ID NO: 345517 - DNA, 120 bp, Artificial Sequence
  ENSG00000138434_63 (sequence is synthesized)
tttgttagtagactggaaataattttcccaaaaaaattttgaaaataagtacgttgtcttcagttttgccttttacattttcttgaacattctctctgaatgaatcatgtttagacaatt

SEQ ID NO: 345518 - DNA, 120 bp, Artificial Sequence
  ENSG00000138434_64 (sequence is synthesized)
gagggattgaagaaaatgacaatgtaatatagtcatgagagcattcaacaaagagtcaggaggcctagaatgaatgtaatagacctcttatcatgacatagtagacagggagccacttgg

SEQ ID NO: 345519 - DNA, 120 bp, Artificial Sequence
  ENSG00000138434_65 (sequence is synthesized)
aaagtaaaaatcaaaggtgtaacttctcaagttataataagatatacctcctcttaactgtaagttttatcctcatgacaattgtcccctaacagttttctgtttaaacagaatgtgggt

SEQ ID NO: 345520 - DNA, 120 bp, Artificial Sequence
  ENSG00000138434_66 (sequence is synthesized)
tctaggccacctagttcttctgctccagctgtggtctctttctcctggatatcccagcaataactcagctaatacatctccccatgcctaccccaccctacactagtggacaggtgcttt

SEQ ID NO: 345521 - DNA, 120 bp, Artificial Sequence
  ENSG00000138434_67 (sequence is synthesized)
ctatgatgtggtctctgactatctctccagcctcattccttagctgtaggattgtgcacaggtctctaaacagttgtgtgttcttaggtatctgcacatggctgattttgtgttttgttt

SEQ ID NO: 345522 - DNA, 120 bp, Artificial Sequence
  ENSG00000138434_68 (sequence is synthesized)
tgtgttttgtttttttaaaataaaaagatgaagtttctgtttctcgcccacgtggagtgctggagacagtggtgtaatcatggctccctgcagtcttgaactcctgggctcaagtgatcc

SEQ ID NO: 345523 - DNA, 120 bp, Artificial Sequence
  ENSG00000138434_69 (sequence is synthesized)
ctcccaaagtactgggactataagccacttttttttaaccgagatcacccagtctttgcctttctttgcataatcaagccctatttactgttaaggctcagttcaagtagtgttaccact

SEQ ID NO: 345524 - DNA, 120 bp, Artificial Sequence
  ENSG00000138434_70 (sequence is synthesized)
tttgggaaagttcacgtaatctgaatttttctgtgttcatcatagcactccttccacagtattagaatttttttaaaatttcctttatttttctttacactgtgagaacacctgaaggct

SEQ ID NO: 345525 - DNA, 120 bp, Artificial Sequence
  ENSG00000138434_71 (sequence is synthesized)
gggaataccttttatgtttttatctcactgcctaaaatagtggcatataggaaatgctaagatgtctgagaaagacgacaatgattgcttgctctccagcaaagttaataatcactataa

SEQ ID NO: 345526 - DNA, 120 bp, Artificial Sequence
  ENSG00000138434_72 (sequence is synthesized)
tctcatgatgatatttgcaatggcttctacatttttgcgttttgattttgtttttttttagtttcgcaagagggaagtcctgaaagaaatagatgtgaactatgttccttcgcctcctcc

SEQ ID NO: 345527 - DNA, 120 bp, Artificial Sequence
  ENSG00000138434_73 (sequence is synthesized)
tcccacgtagattgacttatacctggaacagctagcagtactaggtgtcattgggaactgatttcttttttcctgcttacaatatgaaggttttttggatccttttgtcttaaagagaaa

SEQ ID NO: 345528 - DNA, 120 bp, Artificial Sequence
  ENSG00000138434_74 (sequence is synthesized)
aatatataggccccaaattctgccttttaaccccttaagtgatttggaagtattcactttaacattggttttaatcctacttttacttttttgaagtaccctatgatgagaggacctgat

SEQ ID NO: 345529 - DNA, 120 bp, Artificial Sequence
  ENSG00000138434_75 (sequence is synthesized)
gaatccatccctttcacttttaacttgcaacaacaacaacaacaaaaatgtgtgatctttggatttacaaaacttttgagctttagagaaagggaaagaggaagaagtgaaaatgaccac

SEQ ID NO: 345530 - DNA, 120 bp, Artificial Sequence
  ENSG00000138434_76 (sequence is synthesized)
cagcaagtcatacgggagattaaagagtctattgttggggaaatcagacgggaaattgtaagtggacttttggcagcagtatcttcaagtaaagcgtctaattctaagcaagattatcat

SEQ ID NO: 345531 - DNA, 120 bp, Artificial Sequence
  ENSG00000138435_0 (sequence is synthesized)
agacaagcacccagccagagtgccagtgagaagcacaggccaccactctgccctggtccacacaagctccggtagcccatggagccctggcctctcctcctgctctttagcctttgctca

SEQ ID NO: 345532 - DNA, 120 bp, Artificial Sequence
  ENSG00000138435_1 (sequence is synthesized)
gctggcctcgtcctgggctccgaacatgagacccgtctggtggcaaagctatttaaagactacagcagcgtggtgcggccagtggaagaccaccgccaggtcgtggaggtcaccgtgggc

SEQ ID NO: 345533 - DNA, 120 bp, Artificial Sequence
  ENSG00000138435_2 (sequence is synthesized)
ctgcagctgatacagctcatcaatgtggatgaagtaaatcagatcgtgacaaccaatgtgcgtctgaaacagcaatgggtggattacaacctaaaatggaatccagatgactatggcggt

SEQ ID NO: 345534 - DNA, 120 bp, Artificial Sequence
  ENSG00000138435_3 (sequence is synthesized)
gtgaaaaaaattcacattccttcagaaaagatctggcgcccagaccttgttctctataacaatgcagatggtgactttgctattgtcaagttcaccaaagtgctcctgcagtacactggc

SEQ ID NO: 345535 - DNA, 120 bp, Artificial Sequence
  ENSG00000138435_4 (sequence is synthesized)
cacatcacgtggacacctccagccatctttaaaagctactgtgagatcatcgtcacccactttccctttgatgaacagaactgcagcatgaagctgggcacctggacctacgacggctct

SEQ ID NO: 345536 - DNA, 120 bp, Artificial Sequence
  ENSG00000138435_5 (sequence is synthesized)
gtcgtggccatcaacccggaaagcgaccagccagacctgagcaacttcatggagagcggggagtgggtgatcaaggagtcccggggctggaagcactccgtgacctattcctgctgcccc

SEQ ID NO: 345537 - DNA, 120 bp, Artificial Sequence
  ENSG00000138435_6 (sequence is synthesized)
gacaccccctacctggacatcacctaccacttcgtcatgcagcgcctgcccctctacttcatcgtcaacgtcatcatcccctgcctgctcttctccttcttaactggcctggtattctac

SEQ ID NO: 345538 - DNA, 120 bp, Artificial Sequence
  ENSG00000138435_7 (sequence is synthesized)
ctgcccacagactcaggggagaagatgactctgagcatctctgtcttactgtctttgactgtgttccttctggtcatcgtggagctgatcccctccacgtccagtgctgtgcccttgatt

SEQ ID NO: 345539 - DNA, 120 bp, Artificial Sequence
  ENSG00000138435_8 (sequence is synthesized)
tcaacacacaccaccgctcacccagcacccatgtcatgcccaactgggtgcggaaggtttttatcgacactatcccaaatatcatgtttttctccacaatgaaaagaccatccagagaaa

SEQ ID NO: 345540 - DNA, 120 bp, Artificial Sequence
  ENSG00000138435_9 (sequence is synthesized)
agcaagacaaaaagatttttacagaagacattgatatctctgacatttctggaaagccagggcctccacccatgggcttccactctcccctgatcaaacaccccgaggtgaaaagtgcca

SEQ ID NO: 345541 - DNA, 120 bp, Artificial Sequence
  ENSG00000138435_10 (sequence is synthesized)
tcgagggcatcaagtacatcgcagagaccatgaagtcagaccaggagtctaacaatgcggcggcagagtggaagtacgttgcaatggtgatggaccacatactcctcggagtcttcatgc

SEQ ID NO: 345542 - DNA, 120 bp, Artificial Sequence
  ENSG00000138435_11 (sequence is synthesized)
ttgtttgcatcatcggaaccctagccgtgtttgcaggtcgactcattgaattaaatcagcaaggatgagcagaaaatgagctgagcttagctctgccctggaacctaccagagcagagaa

SEQ ID NO: 345543 - DNA, 120 bp, Artificial Sequence
  ENSG00000138435_12 (sequence is synthesized)
gggcaggagaggaagatttgtctacttgctccactcgcacttatcaaacgtgttatattccatacttattattgatgataagatttacctttatgtaagtttatggccttgaagtgtttt

SEQ ID NO: 345544 - DNA, 120 bp, Artificial Sequence
  ENSG00000138435_13 (sequence is synthesized)
catattgcttctccctttagttctgctgtctccctgaagagtgaaccctctttagtaaatgaaactaatcactaaaaaaagtgttcatttccagtgtctggaagagtttttgccaggata

SEQ ID NO: 345545 - DNA, 120 bp, Artificial Sequence
  ENSG00000138435_14 (sequence is synthesized)
accgaggttttctgttgcattgtcattgctgttatatttatatatttacttattttgtctaaccacgagaccactagggagttgctgatgttctaaatgaagtgtattctttgcttaaga

SEQ ID NO: 345546 - DNA, 120 bp, Artificial Sequence
  ENSG00000138435_15 (sequence is synthesized)
gtcagttttgtacctactaagaaaaccccatctaccagtcctaaagagataaggcatttgatttggagagagaggaagcagtagaaatgaaataaactaaaatgcaaactgcatcaaaaa

SEQ ID NO: 345547 - DNA, 120 bp, Artificial Sequence
  ENSG00000138435_16 (sequence is synthesized)
ctgacgctgatgggtctcgtgctgctattttggggaagccagaaataatcatgtgctaacaaacaggcagatcgacccgaaccatcatcattaggagggtgcatttgctgagtgggcgtg

SEQ ID NO: 345548 - DNA, 120 bp, Artificial Sequence
  ENSG00000138435_17 (sequence is synthesized)
cgcagtggtgagagtcactgtgagtggagctcacagctggggcagacaccccgagcggcagggagttgaacatgaccctagagatgcacagtgtagcttaggctggttaaagtacattaa

SEQ ID NO: 345549 - DNA, 120 bp, Artificial Sequence
  ENSG00000138435_18 (sequence is synthesized)
ccaccaatacctatttgctgaataccaactgtgtgcccagaagtgtactgggtaaggcatgtgatcccagacacttctcatgccacttccacgatgaagtcactttctatgtactgacta

SEQ ID NO: 345550 - DNA, 120 bp, Artificial Sequence
  ENSG00000138435_19 (sequence is synthesized)
atcctggtcttgcccctttacccactgctcaccacttgaaaatagattttgcatatctttttttccagatggtggcatcttcacacacaagaccctacttcccaagtggctgttctttct

SEQ ID NO: 345551 - DNA, 120 bp, Artificial Sequence
  ENSG00000138435_20 (sequence is synthesized)
cacatatcagcctagacaacttacttacctcctactgagtaatcctatctgtgacataattttatcaaacaataacaatccaccagaaaggaggaaagggtacccatctgcctgccagca

SEQ ID NO: 345552 - DNA, 120 bp, Artificial Sequence
  ENSG00000138435_21 (sequence is synthesized)
agtcactattcataaacaacttatggcagacaagtttgaaaaaaagaaagatgctacagacagacctcaagcttatgacaggtagcaatttttatcaaaatgactttaaaaaaaaaaaaa

SEQ ID NO: 345553 - DNA, 120 bp, Artificial Sequence
  ENSG00000138435_22 (sequence is synthesized)
catggggatgcgaggttttctactcaggctgtttgagaagcaaatttttccattgtgtatataaagatcaaactttatattgttcattggttgaactcgtctatagtcctggcagtggac

SEQ ID NO: 345554 - DNA, 120 bp, Artificial Sequence
  ENSG00000138435_23 (sequence is synthesized)
atgcgaggttttctactcaggctgtttgagaagcaaatttttccattgtgtatatgtgagaaagtgcctactactcctttgctctccaacactcagaaaatgctctgcaaatccatgaac

SEQ ID NO: 345555 - DNA, 120 bp, Artificial Sequence
  ENSG00000138435_24 (sequence is synthesized)
acagaaggctgcttatctatttcactggagctaaaaatgttcaacagccacatccttgaccttggagatctctaagctcagaggcccttggagatctttccacaggatctcctgccccag

SEQ ID NO: 345556 - DNA, 120 bp, Artificial Sequence
  ENSG00000138435_25 (sequence is synthesized)
tttcagaatagtgggagtcaggggagactggaacagagatgacaattgcagctgggcaggaaggccctgagggcacttagcagtcaccctggagttgtaaatggcagagcctcgccagct

SEQ ID NO: 345557 - DNA, 120 bp, Artificial Sequence
  ENSG00000138435_26 (sequence is synthesized)
acagacccgccagccagttgcacagcatacatcaaaggctcgagatgcccggctgtgggtttaaatggagcccaggtgtagcctgcaaactccctctcttctcccccactgagctacacc

SEQ ID NO: 345558 - DNA, 120 bp, Artificial Sequence
  ENSG00000138435_27 (sequence is synthesized)
tccactttacacgctgagcttggcaacctcagcacgaccaaggctgtggggtcagagttgctctcagtcttgccagctaggaacgctcagttaggcttggtgattagaacccaccctatg

SEQ ID NO: 345559 - DNA, 120 bp, Artificial Sequence
  ENSG00000138435_28 (sequence is synthesized)
aatagagcagagatgctgtgttagaccaactactgttccagaatcaagtgattcggatcatgtgtgtaagcaaataaaaagttcaatgttgtgaattgagaaaaaatttacgtacctcct

SEQ ID NO: 345560 - DNA, 120 bp, Artificial Sequence
  ENSG00000138435_29 (sequence is synthesized)
tattacaaatttcaagcagaagagataagtacgaagaatacaaaatcacttaaaactccaccatacggaaacaaccatcacaaacattttgttcattttcattccatatatctctcaatg

SEQ ID NO: 345561 - DNA, 120 bp, Artificial Sequence
  ENSG00000138435_30 (sequence is synthesized)
atagatgggtaggcaggtgagtccgtagatgggcacacaagttatagatgtaattctagaaataatcctacagtacatgttattttgaactgaaaatgtgttccttctctttagaaacta

SEQ ID NO: 345562 - DNA, 120 bp, Artificial Sequence
  ENSG00000138435_31 (sequence is synthesized)
ttacctgttgctttcttcctgtaagtacaggagtaagatattcttaatgcagaaacctggagatcatagaacacaaactaaaaaatgcactcatattccaccaccagaagattactgtta

SEQ ID NO: 345563 - DNA, 120 bp, Artificial Sequence
  ENSG00000138435_32 (sequence is synthesized)
acatatatgcatacgtatgtatataggtatgttatggactgaatgatatcaccccataattcacgtgtcaaagccctaatcttcaatgtgactgtatttggagacaaggcctttaaagaa

SEQ ID NO: 345564 - DNA, 120 bp, Artificial Sequence
  ENSG00000138435_33 (sequence is synthesized)
gtaattaaggttaaatgaggtcataaggcccctaatccagtagggctgatatccttataagaggaggaagagacaccagagatctctctctctctctctccatgtgtgtacagagaaaag

SEQ ID NO: 345565 - DNA, 120 bp, Artificial Sequence
  ENSG00000138435_34 (sequence is synthesized)
gtcatgtgaggacacagtgagaaggtggccgtctgcaagtaaggaagagagccctcaccagaaaccaaccctgttggcactctgatcttagacttccagcctccaaaactgtgagaaaat

SEQ ID NO: 345566 - DNA, 120 bp, Artificial Sequence
  ENSG00000138435_35 (sequence is synthesized)
aagtatctgttgtgtgatccatccagcctgtattactttatggcagcccaaacagactcaaacaaaatacaatgtaatatttagcaatgcacctctgtcacctacctccatggtcccttt

SEQ ID NO: 345567 - DNA, 120 bp, Artificial Sequence
  ENSG00000138435_36 (sequence is synthesized)
ttcagtctttattctgttcagtggccaagggccaaggactccctgtgatgccagcctctgggcaccagaatggaactactcaaaagggcaacagcagccccgcaggcctccccatcctcc

SEQ ID NO: 345568 - DNA, 120 bp, Artificial Sequence
  ENSG00000138435_37 (sequence is synthesized)
cacccagtgtaggctcagtaataactgagtcttcatagctacaatgccttgaaccagattttaaaacaaacaaaccatgcatgaaattgatacaaaaaataaaatgctgcttaagtctgt

SEQ ID NO: 345569 - DNA, 120 bp, Artificial Sequence
  ENSG00000138435_38 (sequence is synthesized)
gaaactgcctggtcaaagacttcaagatagacacgcatgtctctccctccatcatgcctggcagccgactcatccctctgaacactcggcaccatttgtaggacctggaccacttgtgga

SEQ ID NO: 345570 - DNA, 120 bp, Artificial Sequence
  ENSG00000138439_0 (sequence is synthesized)
agaggagacactattgttgatgaggagcggcggcggcggcggcggcggctgcaccacctcgttgctgcctgccccggcccggtctccccctgcaccccggagtccggcttcgtcaccccg

SEQ ID NO: 345571 - DNA, 120 bp, Artificial Sequence
  ENSG00000138439_1 (sequence is synthesized)
tcttggggggcctgccctccggcctcgagaatcctccccctgcagcccaacaacaacaaaaccccccgtctcgcccagtcaccggggaggggggggaccatgtcccagcgggtgaggcgc

SEQ ID NO: 345572 - DNA, 120 bp, Artificial Sequence
  ENSG00000138439_2 (sequence is synthesized)
aatgggtcccccacgccggccggctcccttgggggtggtgcggtggccacggccgggggacccgggagccgcttgcagcccatgagggcgacggttccgttccagctgaagcagcagcag

SEQ ID NO: 345573 - DNA, 120 bp, Artificial Sequence
  ENSG00000138439_3 (sequence is synthesized)
gctgaagcagcagcagcagcagcaacatggcagccccacgcggagcggcggcggcggcggcggcaacaacaacggtggctgctgtggtggcgcctcaggccccgcaggcggcggcggcgg

SEQ ID NO: 345574 - DNA, 80 bp, Artificial Sequence
  ENSG00000138439_4 (sequence is synthesized)
cggccgcgcgcaccagccccacggtggccacgcagacgggcgcgtccgcgacgtccacgcgaggcaccagccccacgcgc

SEQ ID NO: 345575 - DNA, 120 bp, Artificial Sequence
  ENSG00000138439_5 (sequence is synthesized)
cgccgccgccgccgctgctgggcaccgtgtcgtcgcccagctcgtcgcccacccacctgtggaccggcgaggtgagcgcggccccacccccagcccgcgtccggcatcggaggaggtctc

SEQ ID NO: 345576 - DNA, 120 bp, Artificial Sequence
  ENSG00000138439_6 (sequence is synthesized)
gccccacccccagcccgcgtccggcatcggaggaggtctccggagcagagccgaagctcgccggagaagaggagccccagcgccccggtttgcaaagcaggtgacaaaacacgacagcct

SEQ ID NO: 345577 - DNA, 120 bp, Artificial Sequence
  ENSG00000138439_7 (sequence is synthesized)
tcttcaagcccctccagtattatccgacgcacttcctccctggatactcttgctgcaccgtatcttgctggacactggcctcgggatagccatgggcaagctgcaccttgcatgagggac

SEQ ID NO: 345578 - DNA, 120 bp, Artificial Sequence
  ENSG00000138439_8 (sequence is synthesized)
aaagctacacagacagagagtgcatgggctgaagaatactctgaaaagaagaaagggtctcacaagcgctcagcatcttggggcagtacagatcaacttaaggagattgcaaaattacgc

SEQ ID NO: 345579 - DNA, 120 bp, Artificial Sequence
  ENSG00000138439_9 (sequence is synthesized)
cagcagttgcagagaagtaaacacagcagtcggcatcatcgagataaagaaagacagtctccatttcatggcaaccatgcagctattaaccagtgtcaggctcctgttccaaagagtgca

SEQ ID NO: 345580 - DNA, 120 bp, Artificial Sequence
  ENSG00000138439_10 (sequence is synthesized)
cttattcctgtaattcccatcaccaaatcaacaggctcccggttccggaatagcgtggaaggattgaatcaggagattgaaataataattaaagagactggggaaaaggaagagcaactt

SEQ ID NO: 345581 - DNA, 120 bp, Artificial Sequence
  ENSG00000138439_11 (sequence is synthesized)
ataccgcaagatattccagatggccatcgtgctccacccccccttgtacagagaagtagcagcacgcgcagcattgacacacagacgcctggtggggcagacaggggaagcaacaacagc

SEQ ID NO: 345582 - DNA, 120 bp, Artificial Sequence
  ENSG00000138439_12 (sequence is synthesized)
agccgttcccagtccgtgtccccaacatcgttcctcaccatttccaatgaaggtagcgaggagagtccttgctcagcggatgacctgcttgttgatcccagagataaagagaatgggaac

SEQ ID NO: 345583 - DNA, 120 bp, Artificial Sequence
  ENSG00000138439_13 (sequence is synthesized)
aattctcctttgcccaaatatgcaacctcaccaaaacctaacaacagttatatgttcaaaagggaacctcctgagggctgtgaaagggtcaaagtctttgaggaatgctcgccaaaacag

SEQ ID NO: 345584 - DNA, 120 bp, Artificial Sequence
  ENSG00000138439_14 (sequence is synthesized)
cttcatgaaatcccagccttttattgtcctgacaaaaacaaggtgaatttcattcctaaaagtggatctgctttctgcctcgtcagcatcctcaagccactccttcctaccccggatctt

SEQ ID NO: 345585 - DNA, 120 bp, Artificial Sequence
  ENSG00000138439_15 (sequence is synthesized)
acactcaagggctctggccacagcctgacagtcaccactggcatgacaaccactctgctgcagcctattgctgtggcctccctgtctacaaacacagagcaagaccgagtctctcgagga

SEQ ID NO: 345586 - DNA, 120 bp, Artificial Sequence
  ENSG00000138439_16 (sequence is synthesized)
acaagtacagtcatgccatcagcttctctactcccaccaccagaaccaattgaggaagctgaaggataggtcacagtgcaacgtggctgttgttctgggaaattgggaacctcctcagat

SEQ ID NO: 345587 - DNA, 120 bp, Artificial Sequence
  ENSG00000138439_17 (sequence is synthesized)
cactggattctgatggcatcgtgcgcttctggtcggctgtgatgtgctccagctttccagtgacatgtgacggcgaggcttctggaagaaaggatcccccgtgacggctctgccccactt

SEQ ID NO: 345588 - DNA, 120 bp, Artificial Sequence
  ENSG00000138439_18 (sequence is synthesized)
gtgaacgccaaccctcagtgcttagcctgctttttatcaaagcactgattgaaacaagaaaggtctcattctttacctttggagagacaatatcacgtttttgttttcgaattagacttc

SEQ ID NO: 345589 - DNA, 120 bp, Artificial Sequence
  ENSG00000138439_19 (sequence is synthesized)
acacacacacacacacacacccctgatccttgccaacatgattcctaaagggagatgtgactgatgctgcaagaaccatcttttctatgaaaatgactattttataatataccaatgtta

SEQ ID NO: 345590 - DNA, 120 bp, Artificial Sequence
  ENSG00000138439_20 (sequence is synthesized)
gaaaatgactattttataatataccaatgttacattttctgaaacgtagcaaacaggatattcaaaagattctttggtggcctctgtttcttgttccctttctagatgtgtgcttttctc

SEQ ID NO: 345591 - DNA, 120 bp, Artificial Sequence
  ENSG00000138439_21 (sequence is synthesized)
agctgttttcagctttgggaccaaagggattgttgacgttttcccagcaatcttaatctcatgactatgttcttctcccaaacaaggattgataggtaaatgcattgaacaagtatatat

SEQ ID NO: 345592 - DNA, 120 bp, Artificial Sequence
  ENSG00000138439_22 (sequence is synthesized)
aaaaagagattaaaaagcaatattcgtacattatgtgatttatgtttttgatgtcaaaagtttgtgctttgggtgaaatatttgtataactgctgttttcttcactactcctgtacacat

SEQ ID NO: 345593 - DNA, 120 bp, Artificial Sequence
  ENSG00000138439_23 (sequence is synthesized)
ttcaccatgtggtcagaaaagttgtagtctgaagacaagtgctttaatatgttctcacccatattggaacttgatttaaaagtcagtgagccaaaaggaagctatccagcgttgattgct

SEQ ID NO: 345594 - DNA, 120 bp, Artificial Sequence
  ENSG00000138439_24 (sequence is synthesized)
atcatagccccaaagagatcctgaaatggctgtgcatggatttcctcctttgcccttgtgatgttgttgtcttgtggatttggttgggctagtagtttgccaggagtgtaatccagtgga

SEQ ID NO: 345595 - DNA, 120 bp, Artificial Sequence
  ENSG00000138439_25 (sequence is synthesized)
tagtgatccaaactgtagccgcagaatcctgtgactgacatttttctttgtggtggtggttggccctgagatttgttgcctacagattttgctaatttacccccctaacgcttcacatag

SEQ ID NO: 345596 - DNA, 120 bp, Artificial Sequence
  ENSG00000138439_26 (sequence is synthesized)
tggggaaaatacacaagaagaacttgagtatgaacgataagcacctttgaaaactccatacagttttggattagggctcatcctaatataaatcactgccagtatcacatgacatcagta

SEQ ID NO: 345597 - DNA, 78 bp, Artificial Sequence
  ENSG00000138439_27 (sequence is synthesized)
tcctaatataaatcactgccagtatcacatgacatcagtatgtgatttctgggtatgtggtagtgagattaaggagca

SEQ ID NO: 345598 - DNA, 68 bp, Artificial Sequence
  ENSG00000138439_28 (sequence is synthesized)
gatctgctccaggagcagctctttttttaaaagtgagtttcagcaaacagtattgaataaaagcatcc

SEQ ID NO: 345599 - DNA, 120 bp, Artificial Sequence
  ENSG00000138439_29 (sequence is synthesized)
aaaagtgagtttcagcaaacagtattgaataaaagcatccttttcatatcttcatatactactttatgatgcaataatttactgttcctatacatattataaggtagaaaaaagttttta

SEQ ID NO: 345600 - DNA, 120 bp, Artificial Sequence
  ENSG00000138439_30 (sequence is synthesized)
aatccttataaagaggatgcagtttagaaggttaatatgtcagcttacccagacatattctatcaaggaaaacctagtggtagcaataaatctttggaaaggacttcttatactcatgta

SEQ ID NO: 345601 - DNA, 120 bp, Artificial Sequence
  ENSG00000138439_31 (sequence is synthesized)
cctttaaaacatctaagcaatttaaaataatccctgttgagtttaaattcgagatgcatttaggtaaattggataaattcaacatttgaataaatccgtcaggttttagatggtgggatt

SEQ ID NO: 345602 - DNA, 120 bp, Artificial Sequence
  ENSG00000138439_32 (sequence is synthesized)
gatgaactttggtactttctcaatccaaaactaatttatttggaactagtacgttatggcttctcagtcatgaaaagctcagttatttggggtctacattttctcactgagagccttgat

SEQ ID NO: 345603 - DNA, 120 bp, Artificial Sequence
  ENSG00000138439_33 (sequence is synthesized)
attttgccttctttgttatgcattataacttgactgtatcaccactgagtatctgctgtatcagaagttcagaagaaaaggtaaaactgaaatcagaatgggggtagaggaagttaaaaa

SEQ ID NO: 345604 - DNA, 120 bp, Artificial Sequence
  ENSG00000138439_34 (sequence is synthesized)
caagttatttaaaaagaactcttggtttttggatgacttgaattctgttaaatctgtgttcttggccttgcacttccgttcctcttccatctctatccctgctagtcacaatggcatttt

SEQ ID NO: 345605 - DNA, 120 bp, Artificial Sequence
  ENSG00000138439_35 (sequence is synthesized)
agaactagaatgccactctgtagaggttttcccttttgctctgttgtgcctatttgtctaattcatatctttctgtggagtttcatatgtccttaatctaaagtaacttaaaattggaat

SEQ ID NO: 345606 - DNA, 120 bp, Artificial Sequence
  ENSG00000138439_36 (sequence is synthesized)
ggaagaacaagtttcagaattatttacagtcttatacatagaacttctagtgtaatgtttggttgtaaggagaatgtgaatttgcaggtaaatgaattgtatggcaaccagacagatccc

SEQ ID NO: 345607 - DNA, 120 bp, Artificial Sequence
  ENSG00000138439_37 (sequence is synthesized)
tggggtttgggagaaatagagcttgagatttgaaaaaaaggtacaaggtacaaaacaactctaactgccagtgccaaagggctaatttttaagcatgtaagctttaccacagtcttgaaa

SEQ ID NO: 345608 - DNA, 120 bp, Artificial Sequence
  ENSG00000138439_38 (sequence is synthesized)
aaaatattaaccataggttcattcagctgttttatttaacccttagttccctggtggttgattttttttttaaatgggtctccagctttccagtgaaatgtgacactctcaatagaatgc

SEQ ID NO: 345609 - DNA, 120 bp, Artificial Sequence
  ENSG00000138439_39 (sequence is synthesized)
ataatgttggtttctaaagttacactccataattattgttattctgtagaaaactgtacagaaggtaaatagaatagcttcaatgggaatataatttaaatttttttaattttataaaaa

SEQ ID NO: 345610 - DNA, 120 bp, Artificial Sequence
  ENSG00000138439_40 (sequence is synthesized)
tttatttccattgcattaaaagaaatgggtagcatgtgtctttcagagaaaggagctatttggttattcactttgtcaatcttaggtttttttaaatctttaaacaatttcttctttgtg

SEQ ID NO: 345611 - DNA, 120 bp, Artificial Sequence
  ENSG00000138439_41 (sequence is synthesized)
atgataaaaataatataaatttactgtttctgatcatgactgagtctattacttgtcatggcttttgtacgcaactgtgttttaaaaataccggttttgcctctttggttacatgtggtg

SEQ ID NO: 345612 - DNA, 120 bp, Artificial Sequence
  ENSG00000138439_42 (sequence is synthesized)
agcatggatgtcaagattatttttcaactagattattcaatttgttttatatttcttatacttaatacttatgactacagtccaaatcagtcttttagaaggtgctcttgctaactgtgg

SEQ ID NO: 345613 - DNA, 120 bp, Artificial Sequence
  ENSG00000138439_43 (sequence is synthesized)
aatatttgacgacatgaaagtcctttttctttgctttcagtggttggctttcactgaaagaaagtgtaaaaaaagtcagaatttatagctttcactatgtccaagactaggactgggtta

SEQ ID NO: 345614 - DNA, 120 bp, Artificial Sequence
  ENSG00000138439_44 (sequence is synthesized)
taaagattttcttttgtgaaggaaaataaaagaaaatttgccactactgcatttactttactattgtaaacttaagattcattccttagtctttggaattttgatgtctcaaaaccagat

SEQ ID NO: 345615 - DNA, 120 bp, Artificial Sequence
  ENSG00000138439_45 (sequence is synthesized)
gagtggaagtgctgaatttgcaaaataaagctaagaatgcttaactctgcactttaagttctactctgaccaaattgaagatgagcagagcagccctgaacagcattttgtttatacagt

SEQ ID NO: 345616 - DNA, 120 bp, Artificial Sequence
  ENSG00000138439_46 (sequence is synthesized)
cttgtttaagaatagaatttttttaactcttcattttttgtctctgtggaagctgtgtaactctttttaaaatgcaatttaaaacattttgttattctaacaattctctcaaaaaacagc

SEQ ID NO: 345617 - DNA, 120 bp, Artificial Sequence
  ENSG00000138439_47 (sequence is synthesized)
atttccaatggtaatcggtattgttacgctgtacttatgtattccctgtacctgaacacttgttgctgcctcacaagaaaatagaacttttatgttaaaaataaagtctgttcttcttga

SEQ ID NO: 345618 - DNA, 120 bp, Artificial Sequence
  ENSG00000138439_48 (sequence is synthesized)
tcttttttctttttggcttctgaaataacaaaaacaattattgtgttgatttaataaagatttcaatagggatatttatatatcacttacctgattatgtatgtttgtctttttttagga

SEQ ID NO: 345619 - DNA, 120 bp, Artificial Sequence
  ENSG00000138442_0 (sequence is synthesized)
atcggccaccgtcgaccgtttcctctctcatccgttcttttctttgtatttccgcctctcgcctctctctaaaagccgcagttagaggcgagatttaggaaaaacctctgccgagtgagc

SEQ ID NO: 345620 - DNA, 120 bp, Artificial Sequence
  ENSG00000138442_1 (sequence is synthesized)
ctctggttgggaatatgtatgagaaaaaaaaactggcaaggcgttagtcaagcaaagctgaaggcagaggaaatttgatatctggctggagtctagaggatttaatgcaaataagatact

SEQ ID NO: 345621 - DNA, 120 bp, Artificial Sequence
  ENSG00000138442_2 (sequence is synthesized)
ctgagggcagcgtggcaaaaaaagactacaattcccggtggtcacagcgtttgagaagcgatgctttctgagacttgtagtaactaggagctgtgtttgaactatccaggctcaggacag

SEQ ID NO: 345622 - DNA, 120 bp, Artificial Sequence
  ENSG00000138442_3 (sequence is synthesized)
cctcttgaaaaaaaattttttattaataaagcggatttgagtgggatctttttcctaatcgattacgggcccacacgtatgggaagaattctaacaatgattaaagggacatgctacctt

SEQ ID NO: 345623 - DNA, 120 bp, Artificial Sequence
  ENSG00000138442_4 (sequence is synthesized)
tacgactatccttttctaatcgatgactcctaaatctaggagtaggtagtcgatgtttgtggtctgggcgtctgtagaagggcaacctcgtgctttctgcagaggagaccggagggcaga

SEQ ID NO: 345624 - DNA, 120 bp, Artificial Sequence
  ENSG00000138442_5 (sequence is synthesized)
aggcagagtccaggcttagactgcagttcctcgcttacctgtgcagtctaattttgagctgcctctttgtagtcttaaaaggcaggagcttcgtgttgtgggtctgctaacccgtacgtt

SEQ ID NO: 345625 - DNA, 120 bp, Artificial Sequence
  ENSG00000138442_6 (sequence is synthesized)
tccgtgggcaagtcgtgtgtactcctcgccatggctcagctccaaacacgcttctacactgataacaagaaatatgccgtagatgatgttcccttctcaatccctgctgcctctgaaatt

SEQ ID NO: 345626 - DNA, 120 bp, Artificial Sequence
  ENSG00000138442_7 (sequence is synthesized)
gccgaccttagtaacatcatcaataaactactaaaggacaaaaatgagttccacaaacatgtggagtttgatttccttattaagggccagtttctgcgaatgcccttggacaaacacatg

SEQ ID NO: 345627 - DNA, 120 bp, Artificial Sequence
  ENSG00000138442_8 (sequence is synthesized)
gaaatggagaacatctcatcagaagaagttgtggaaatagaatacgtggagaagtatactgcaccccagccagagcaatgcatgttccatgatgactggatcagttcaattaaaggggca

SEQ ID NO: 345628 - DNA, 120 bp, Artificial Sequence
  ENSG00000138442_9 (sequence is synthesized)
gaggaatggatcttgactggttcttatgataagacttctcggatctggtccttggaaggaaagtcaataatgacaattgtgggacatacggatgttgtaaaagatgtggcctgggtgaaa

SEQ ID NO: 345629 - DNA, 120 bp, Artificial Sequence
  ENSG00000138442_10 (sequence is synthesized)
aaagatagtttgtcctgcttattattgagtgcttctatggatcagactattctcttatgggagtggaatgtagagagaaacaaagtgaaagccctacactgctgtagaggtcatgctgga

SEQ ID NO: 345630 - DNA, 120 bp, Artificial Sequence
  ENSG00000138442_11 (sequence is synthesized)
agtgtagattctatagctgttgatggctcaggaactaaattttgcagtggctcctgggataagatgctaaagatctggtctacagtccctacagatgaagaagatgaaatggaggagtcc

SEQ ID NO: 345631 - DNA, 120 bp, Artificial Sequence
  ENSG00000138442_12 (sequence is synthesized)
acaaatcgaccaagaaagaaacagaagacagaacagttgggactaacaaggactcccatagtgaccctctctggccacatggaggcagtttcctcagttctgtggtcagatgctgaagaa

SEQ ID NO: 345632 - DNA, 120 bp, Artificial Sequence
  ENSG00000138442_13 (sequence is synthesized)
atctgcagtgcatcttgggaccatacaattagagtgtgggatgttgagtctggcagtcttaagtcaactttgacaggaaataaagtgtttaattgtatttcctattctccactttgtaaa

SEQ ID NO: 345633 - DNA, 120 bp, Artificial Sequence
  ENSG00000138442_14 (sequence is synthesized)
cgtttagcatctggaagcacagataggcatatcagactgtgggatccccgaactaaagatggttctttggtgtcgctgtccctaacgtcacatactggttgggtgacatcagtaaaatgg

SEQ ID NO: 345634 - DNA, 120 bp, Artificial Sequence
  ENSG00000138442_15 (sequence is synthesized)
tctcctacccatgaacagcagctgatttcaggatctttagataacattgttaagctgtgggatacaagaagttgtaaggctcctctctatgatctggctgctcatgaagacaaagttctg

SEQ ID NO: 345635 - DNA, 120 bp, Artificial Sequence
  ENSG00000138442_16 (sequence is synthesized)
agtgtagactggacagacacagggctacttctgagtggaggagcagacaataaattgtattcctacagatattcacctaccacttcccatgttggggcatgaaagtgaacaataatttga

SEQ ID NO: 345636 - DNA, 120 bp, Artificial Sequence
  ENSG00000138442_17 (sequence is synthesized)
ctatagagattatttctgtaaatgaaattggtagagaaccatgaaattacatagatgcagatgcagaaagcagccttttgaagtttatataatgttttcacccttcataacagctaacgt

SEQ ID NO: 345637 - DNA, 120 bp, Artificial Sequence
  ENSG00000138442_18 (sequence is synthesized)
atcactttttcttattttgtatttataataagataggttgtgtttataaaatacaaactgtggcatacattctctatacaaacttgaaattaaactgagttttacatttctctttaaagg

SEQ ID NO: 345638 - DNA, 72 bp, Artificial Sequence
  ENSG00000138442_19 (sequence is synthesized)
cgcaatctcaactcactgcaacctccgcttcctaggttcaattcacgatgtcctgctaatttttgtattttt

SEQ ID NO: 345639 - DNA, 120 bp, Artificial Sequence
  ENSG00000138442_20 (sequence is synthesized)
tctgcccacctcagcctcccaaagtgagccactgtgcctggccgaattaagatttgtttttgaaatgctgtaaaaggttatattggaaatccagtaattgattgttgagatttttatttc

SEQ ID NO: 345640 - DNA, 120 bp, Artificial Sequence
  ENSG00000138442_21 (sequence is synthesized)
ggaaatccagtaattgattgttgagatttttatttctgttagagacttagatttttttaagttagctattttaaaaaagcattcaaaaagattaatgaaaattgtaatagagaaaaagtt

SEQ ID NO: 345641 - DNA, 120 bp, Artificial Sequence
  ENSG00000138442_22 (sequence is synthesized)
taatagagaaaaagttagaaattcagttccttttggcagaataaatgttcaagaaaattaggctgtgagggtactcagaacattaaaaaaaatgtaggctgggcatggtggctcacacct

SEQ ID NO: 345642 - DNA, 82 bp, Artificial Sequence
  ENSG00000138442_23 (sequence is synthesized)
tgggtgacagtgcaagactctgtctcaacaacaacgataacaaaatattgattcggcagtggccaaggcaggcggctcacct

SEQ ID NO: 345643 - DNA, 88 bp, Artificial Sequence
  ENSG00000138442_24 (sequence is synthesized)
agcctgaaaaaaaaatccaaaacaaattagccgggtgtggtggcacactcctgtggtcccaagtacttgggaggctgaggcaggagaa

SEQ ID NO: 345644 - DNA, 120 bp, Artificial Sequence
  ENSG00000138442_25 (sequence is synthesized)
ttgcagtgagctgagatcataccactgtgctccagcctgggcagcagagccagactctatctcaaaataaagacaagtagattgccaatttttgaagaattcatcaagatattttaagga

SEQ ID NO: 345645 - DNA, 120 bp, Artificial Sequence
  ENSG00000138442_26 (sequence is synthesized)
gtagattgccaatttttgaagaattcatcaagatattttaaggaaggcactttatattaaatatatgtcagatcctttagaaattgcatacagttggttgggcacggtggctcacgcctg

SEQ ID NO: 345646 - DNA, 120 bp, Artificial Sequence
  ENSG00000138442_27 (sequence is synthesized)
aataaaaaattgcattgcatacagttttcactgtaaccctaatctttcctcatgtgtagattagaataaattttttagacaaaacctttcatcagtattaaacattctacagattttatg

SEQ ID NO: 345647 - DNA, 120 bp, Artificial Sequence
  ENSG00000138442_28 (sequence is synthesized)
ttttaaatgttatttccattattaatggattgatactccttaagtagagcattcacaaccttttagtaatatttgggaaatatgtttggtctcattattagatggtattacatctcaaat

SEQ ID NO: 345648 - DNA, 120 bp, Artificial Sequence
  ENSG00000138442_29 (sequence is synthesized)
gatgttcctgttgcagaagtctgcgaaacaatatctaaacttggctgcagttgagagctaaacagtgtattgaaccagttaggagtttagttctctgtagaaaaccagaggcagtccagg

SEQ ID NO: 345649 - DNA, 120 bp, Artificial Sequence
  ENSG00000138442_30 (sequence is synthesized)
gctgatgtaggttttgttccacattctttaggatcctaggctccctccatccctggtatgtggtcctcattttcatatagaccaagagctagagctccagttaccatttcttaaagtata

SEQ ID NO: 345650 - DNA, 120 bp, Artificial Sequence
  ENSG00000138442_31 (sequence is synthesized)
ttttaatgccaaatagtgaataaaggtggccagaaaattcatgcacagaatccttctttttctcattttgtgctgattggtataaattttattgtatttgtagtctctggaaatcttcta

SEQ ID NO: 345651 - DNA, 120 bp, Artificial Sequence
  ENSG00000138442_32 (sequence is synthesized)
actttgagaggacaaagatgaattcctagtcctgttttggatggtcttcaaatgatccttaagggcagttatttaaaatgtctttcttaactcacccaacctaggctgaccgaatgtagt

SEQ ID NO: 345652 - DNA, 120 bp, Artificial Sequence
  ENSG00000138442_33 (sequence is synthesized)
ctgtataaactagatggttaaagataaagaagcctatatatcagatgcatagacaaagaataaaatggcatccagaactggtccccacctattcccaatcctggttccacagcagaatac

SEQ ID NO: 345653 - DNA, 120 bp, Artificial Sequence
  ENSG00000138442_34 (sequence is synthesized)
attcatagttcaggcattcttccttgagatagatataatgtaagtgaccaagtctcttggacaagtattgtctctgatcaatccctgccaaactcctttccttggttaactcaagtggtt

SEQ ID NO: 345654 - DNA, 120 bp, Artificial Sequence
  ENSG00000138442_35 (sequence is synthesized)
agatcttactccctgaacagaaggaatatgagaggtcaatacatgcctagactattcagtcctctgatattgctccacaccctttccctcaaaagccatgagacctttcaatggtcccag

SEQ ID NO: 345655 - DNA, 120 bp, Artificial Sequence
  ENSG00000138442_36 (sequence is synthesized)
ttcctctaccagaacaccagagatgcctgctttacatggacttatatattcccaagaatcacttggataaatgagtggtgctgctttcccgtggttggggaaaagctaggaacctgacaa

SEQ ID NO: 345656 - DNA, 120 bp, Artificial Sequence
  ENSG00000138442_37 (sequence is synthesized)
tgcagtgctcagaacctgctgaccggtactagttatgctgtcttgccatagtagtgcagttctttaaaatgttgatacttgctctcttatcaaaggttggtttttttgtttttttgtcaa

SEQ ID NO: 345657 - DNA, 120 bp, Artificial Sequence
  ENSG00000138442_38 (sequence is synthesized)
gacagggtctcactatgtcacccatactggagtacaatggtgtaatcttggcttactgcaacctccaccttctgggctcaagctggcctctcacctcagccttccaagtagctgggacca

SEQ ID NO: 345658 - DNA, 89 bp, Artificial Sequence
  ENSG00000138442_39 (sequence is synthesized)
tagctgggaccacacccagtcaaattattactttttttgtagagagagggtttcgccatgtagcccatgctggtcttgaactcctgggc

SEQ ID NO: 345659 - DNA, 120 bp, Artificial Sequence
  ENSG00000138442_40 (sequence is synthesized)
aggcatgagccaccgcacccagcccaaataaagttttaagaaattacttggccaggcatagtggggcctttgtagaaaaacatagcttttctatgagaagatgatcaatattttcttttc

SEQ ID NO: 345660 - DNA, 120 bp, Artificial Sequence
  ENSG00000138442_41 (sequence is synthesized)
ttctatgagaagatgatcaatattttcttttcctttgaatttggaattaccattttggaactgttgtcaacaatgcataataatatatcagaatgcttcctagtatattattggagaaag

SEQ ID NO: 345661 - DNA, 120 bp, Artificial Sequence
  ENSG00000138442_42 (sequence is synthesized)
aacaaacaaaagtttaaattgatataaaatgcatataatggaacaagcaaccctgcaaaaaaaaaaatatatatatatatataccatctgggaatttctgataataacattgaaatctgt

SEQ ID NO: 345662 - DNA, 120 bp, Artificial Sequence
  ENSG00000138442_43 (sequence is synthesized)
aaatctgttcacacagtctaaaattcttttgatgtatcgtagttttgaaaaaaaggtaacagtttactatatataacaaatataaggaaaatattaaattttttgaaagatactagtttt

SEQ ID NO: 345663 - DNA, 120 bp, Artificial Sequence
  ENSG00000138442_44 (sequence is synthesized)
agacagggtctcactatgttgcccaagctagagtgcagcggcccgattatagctcactgcagcctctaactcccggactcaagggatcctcccacctcatcctcctaactaggaccacag

SEQ ID NO: 345664 - DNA, 120 bp, Artificial Sequence
  ENSG00000138442_45 (sequence is synthesized)
ctaggaccacaggcgcatgtcaccacatctggctgattttaaaatttttttgtggagacagtcttgctgtgttgcccaggctggttatgaactcttggcctcaggcagtcctcatgcctc

SEQ ID NO: 345665 - DNA, 120 bp, Artificial Sequence
  ENSG00000138442_46 (sequence is synthesized)
agcctccctaagtgctcggattataggcatgccactgtgcctggccaaaaatacagattttttaatagatattactatggctcctattcttaaaggaaaaaatatgacattttaagacta

SEQ ID NO: 345666 - DNA, 120 bp, Artificial Sequence
  ENSG00000138442_47 (sequence is synthesized)
tatgcaagggatattccaataatatcttttttatttaaaaagccactaattagaatcagatttcattaggcaagtgaaatccagattttactagccagaaactgccaggtgtagaaacag

SEQ ID NO: 345667 - DNA, 120 bp, Artificial Sequence
  ENSG00000138442_48 (sequence is synthesized)
caagaacattttagtcacttcattgttgacatttttgactatcatagattaagtatcaaacacaataacagtattttgttatatgaaccaaatatatctctttttacgagacatagtcta

SEQ ID NO: 345668 - DNA, 120 bp, Artificial Sequence
  ENSG00000138442_49 (sequence is synthesized)
gctctgccatccaggctcaactcctgggttcaagggatcctcctgccccagcttcctgagtacgtacctgggagtacaattgcatgctgccacacccagctattttttttatttttgtgg

SEQ ID NO: 345669 - DNA, 120 bp, Artificial Sequence
  ENSG00000138442_50 (sequence is synthesized)
tattttttttatttttgtggagatggcgtcttgctatgttgcccaggctggactccaactcctgacctcaagcaatcatctcaccttggcctcaaaagtgctaagattacaggcatgagc

SEQ ID NO: 345670 - DNA, 120 bp, Artificial Sequence
  ENSG00000138442_51 (sequence is synthesized)
aaatatatctttattataacttaggagagaaacgtttttggctggttagttttacagaattaaacctaatggttgttctaatagcagttccaatgatttgcagatttgaggaagtaaatt

SEQ ID NO: 345671 - DNA, 120 bp, Artificial Sequence
  ENSG00000138442_52 (sequence is synthesized)
attttcttacagtgtccataaaagtaacaatgaaactatatcctaccataataatcctctataggtaataaattatttgcattttataggagagaaaaatatatgttaaagtttttgaac

SEQ ID NO: 345672 - DNA, 120 bp, Artificial Sequence
  ENSG00000138442_53 (sequence is synthesized)
agtcacacaggcaggaaataaatggcagtgaatttgaacttggacttatcttggacaagctcttaactggtatatattttgtcaatcttatgtcgtgcacaagaatgatgtttttataaa

SEQ ID NO: 345673 - DNA, 120 bp, Artificial Sequence
  ENSG00000138442_54 (sequence is synthesized)
aagaatgatgtttttataaatggaaagaatgagtgtggaagtgtcttcacttgcctaacagaaaggttatatgtggctgggcgccgtggctaacgcctgtaatcccaacattttgggagg

SEQ ID NO: 345674 - DNA, 63 bp, Artificial Sequence
  ENSG00000138442_55 (sequence is synthesized)
aatcccaacattttgggaggctgaggtgggcatatcatctgaggtcgggagttcaagacatag

SEQ ID NO: 345675 - DNA, 120 bp, Artificial Sequence
  ENSG00000138442_56 (sequence is synthesized)
acataaatttaagtgacatttgtgggtactaaattacaataatatgttcagctttgcatttttttgcctttaaaattaatttcaattttagcgtgccactaaacgtattactgtaatagt

SEQ ID NO: 345676 - DNA, 120 bp, Artificial Sequence
  ENSG00000138442_57 (sequence is synthesized)
aaagatcaatttctgtatattctaataggaattgtatataagcaaaaatgaattttagaaattatcctattattcatgtaattatgtcattcatgttatttaaaggaaaccacaatgcag

SEQ ID NO: 345677 - DNA, 120 bp, Artificial Sequence
  ENSG00000138442_58 (sequence is synthesized)
accacaatgcagacaggttaagtacctagtgtgaaggtatgtaaccaattaatggagctgtgcgacatacatctgagtaataaagactacagagaaagtatcttgttaggtactatctga

SEQ ID NO: 345678 - DNA, 120 bp, Artificial Sequence
  ENSG00000138442_59 (sequence is synthesized)
tacaaagtttagaaacatgtcaaacaattctatgtatagttggtgaaagtgtaataacatggctgagacttaataccagatgaagttcagtggtttcagggggaggaaataatttttaaa

SEQ ID NO: 345679 - DNA, 120 bp, Artificial Sequence
  ENSG00000138442_60 (sequence is synthesized)
acgatgtcgataacacttcacatttaaaatcatcataataattctaattctagaattgtgtctaattctaatactgtttctagctttgcttgaataaacagaaatgtagtagggaagaga

SEQ ID NO: 345680 - DNA, 120 bp, Artificial Sequence
  ENSG00000138442_61 (sequence is synthesized)
ggcagtcttaagtcaactttggtaagacaaattcagtgttcttttaagtgataaacttctagagatggtttttagtctaccatggttaatgttctttccttttctttttcagacaggaaa

SEQ ID NO: 345681 - DNA, 120 bp, Artificial Sequence
  ENSG00000138442_62 (sequence is synthesized)
atctataagagaaacatatcaattacctgttatagaaaggaaatgaatactgaaattcttatctaaaaccagaagagtaaaaaaagcctcatggttttgcaacctcatgtgacaaatact

SEQ ID NO: 345682 - DNA, 120 bp, Artificial Sequence
  ENSG00000138442_63 (sequence is synthesized)
gaggatttacccagccgttgggcggcagctgttcaatggtcgcgtaggctggggatgggcggggtgacctgaagccccgccccagcatacctgcgcagccgcagtcgacaggctctggct

SEQ ID NO: 345683 - DNA, 120 bp, Artificial Sequence
  ENSG00000138442_64 (sequence is synthesized)
gcccatcccttggcgggcgccggccgcggcactgaaacgagccttccctcagctggacatggaggagggctgacgtgctgacgtctacgcccgccccgcttttcgctgatggcgtcattt

SEQ ID NO: 345684 - DNA, 120 bp, Artificial Sequence
  ENSG00000138442_65 (sequence is synthesized)
gatgtgaccaagaactgggactacagctcacagatctcctcttcatacagctgaatgaggaagttgatcttgtcagtcagctcttccagatatgccgtagatgatgttcccttctcaatc

SEQ ID NO: 345685 - DNA, 120 bp, Artificial Sequence
  ENSG00000138442_66 (sequence is synthesized)
tataagtgattattcaaatgtttgttttaacactgtgaatgcatataatatgttaatattttcatcttttagttgtaaggctcctctctatgatctggctgctcatgaagacaaagttct

SEQ ID NO: 345686 - DNA, 120 bp, Artificial Sequence
  ENSG00000138442_67 (sequence is synthesized)
ccctggaaaaaggctaatttcagttctgtggaacacaagttctttgaaaaggtcctgaatgaggaagagacctactgttgtaggcaaataatatgaatcatattacatatgtcttttccc

SEQ ID NO: 345687 - DNA, 80 bp, Artificial Sequence
  ENSG00000138443_0 (sequence is synthesized)
gggaatctttttcgggctcccgggggcggagggaagggagcgcgcgtgcgcgcgcccggccggccgtcgccgcggtgacc

SEQ ID NO: 345688 - DNA, 120 bp, Artificial Sequence
  ENSG00000138443_1 (sequence is synthesized)
ccctcccctgtcgcgcgctggggctgtttctcgctccttccgagttaccgccgccgtcgccgccgctcctcctctcccggtcctgggtttccttggcgctgcggccgccgctccctctgc

SEQ ID NO: 345689 - DNA, 120 bp, Artificial Sequence
  ENSG00000138443_2 (sequence is synthesized)
gacctgtatgaggaggaggaggaggaggatgtgaagatggcggagctgcagatgctgctggaagaggaaatcccggggggccgccgggccctcttcgacagctacacaaatctggaacgg

SEQ ID NO: 345690 - DNA, 120 bp, Artificial Sequence
  ENSG00000138443_3 (sequence is synthesized)
gtggccgattactgcgagaacaactacatacagtcagcagataagcagagagccctagaagaaaccaaagcctacaccacccaatccttagcaagtgttgcctatctgataaacaccttg

SEQ ID NO: 345691 - DNA, 120 bp, Artificial Sequence
  ENSG00000138443_4 (sequence is synthesized)
gccaacaatgtcctgcagatgctggatatccaggcatcccagctacgaaggatggaatcttcaatcaatcatatttcacaaacagttgatattcataaagagaaagttgcaagaagagaa

SEQ ID NO: 345692 - DNA, 120 bp, Artificial Sequence
  ENSG00000138443_5 (sequence is synthesized)
attggtattttgactaccaataaaaacacttcaaggacacataagattattgctccagccaaccttgaacgaccagttcgttatattagaaaacctattgactatacaattctagatgat

SEQ ID NO: 345693 - DNA, 120 bp, Artificial Sequence
  ENSG00000138443_6 (sequence is synthesized)
attggacatggagtaaagtggttgcttagatttaaggtgagtacccagaacatgaagatgggtgggctgccgcgtacaacacctccaactcagaagccccctagtccccctatgtcaggg

SEQ ID NO: 345694 - DNA, 120 bp, Artificial Sequence
  ENSG00000138443_7 (sequence is synthesized)
aaagggacacttgggcggcactccccctatcgcacactggagccagtgcgtcctccagtggtaccaaatgattacgtacctagcccaacccgtaatatggctccctcgcagcagagccct

SEQ ID NO: 345695 - DNA, 120 bp, Artificial Sequence
  ENSG00000138443_8 (sequence is synthesized)
gtgaggacagcttctgtgaatcaaagaaatcgaacttacagcagcagtgggagtagtggagggagccacccaagtagtcggagcagcagtcgagagaacagtggaagtggtagtgtgggg

SEQ ID NO: 345696 - DNA, 120 bp, Artificial Sequence
  ENSG00000138443_9 (sequence is synthesized)
gttcctattgctgttcctactccatctcctcccagtgtctttccagcccctgctggctctgctggcactcctccccttcctgctacttctgcatctgcccctgctcctcttgttcctgct

SEQ ID NO: 345697 - DNA, 120 bp, Artificial Sequence
  ENSG00000138443_10 (sequence is synthesized)
actgtcccttcctccactgccccagacgctgctgctgggggtgcccagacccttgctgatggcttcacttctccaactccccctgttgtttcttccactccccctacaggtcatcctgta

SEQ ID NO: 345698 - DNA, 120 bp, Artificial Sequence
  ENSG00000138443_11 (sequence is synthesized)
cagttctacagcatgaataggcctgcctctcgccatactcccccaacaatagggggctcgttgccctatagacgccctccttccattacttcacaaacaagccttcagaatcagatgaat

SEQ ID NO: 345699 - DNA, 120 bp, Artificial Sequence
  ENSG00000138443_12 (sequence is synthesized)
ggaggacctttttatagccagaatccagtttcagatacaccacctccaccgccacctgtggaagaaccagtctttgatgagtctcccccacctcctcctcctccagaagattacgaagag

SEQ ID NO: 345700 - DNA, 120 bp, Artificial Sequence
  ENSG00000138443_13 (sequence is synthesized)
gaggaagctgctgtggttgagtatagtgatccttatgctgaagaggacccaccgtgggctccacgttcttacttggaaaaggttgtggcaatttatgactatacaaaagacaaggaagat

SEQ ID NO: 345701 - DNA, 120 bp, Artificial Sequence
  ENSG00000138443_14 (sequence is synthesized)
gagctgtcctttcaggaaggagccattatttatgtcatcaagaagaatgacgatggttggtatgagggagttatgaatggagtgactgggctttttcctgggaattacgttgagtctatc

SEQ ID NO: 345702 - DNA, 120 bp, Artificial Sequence
  ENSG00000138443_15 (sequence is synthesized)
atgcattattctgagtaaagctcagcagggctgtgcttgcctcacaggaatagtcaggtcttcccagattatctgaaggccctggggattccactccagtaaagtagaatgaaggataca

SEQ ID NO: 345703 - DNA, 120 bp, Artificial Sequence
  ENSG00000138443_16 (sequence is synthesized)
aatgataaaaattacacttttttttttggtttattccccagtattaaaaacaaagcaagctgagtctgaacaaatggatctttctgccatcatttgtacaatgctgagctgtctggattg

SEQ ID NO: 345704 - DNA, 120 bp, Artificial Sequence
  ENSG00000138443_17 (sequence is synthesized)
aaataaaatgaccatttttatgtatgtcaaaggtataacagcataactgtgtagccaaaacaaaatcagattaagactgattcagaaaaatctgggatctttctcaggaatactgtatac

SEQ ID NO: 345705 - DNA, 120 bp, Artificial Sequence
  ENSG00000138443_18 (sequence is synthesized)
ccttgggatttctcctcctgcagaatctgtggcattggatgttcttcattgcctgtgctaaggggttaacctcatggcccagtgggtaccctagccccttcttttcttccacttgtatga

SEQ ID NO: 345706 - DNA, 120 bp, Artificial Sequence
  ENSG00000138443_19 (sequence is synthesized)
agaggagggaaccaacatttaaataccacacttaaccatttttacaattatttcagatggcttttttcctctgtgacactgtaaattctgcattctctcagcacttgagtgcaccaaacg

SEQ ID NO: 345707 - DNA, 120 bp, Artificial Sequence
  ENSG00000138443_20 (sequence is synthesized)
agtgaatgctgaactcacttgcatcccttcatgtttctgtttgtggattataaggatgatgaaatgtgaaagtctcccaacactctgagggtggtgaacgattgccacccgtttgatttt

SEQ ID NO: 345708 - DNA, 120 bp, Artificial Sequence
  ENSG00000138443_21 (sequence is synthesized)
aatgtgctgctgcatgagactgcattgttgctaatggccagtgtacccagatgtgaagtgtggtaggctggttcatatgtggaggtgggtgtgtgaagctagacacgaaggtccctaagg

SEQ ID NO: 345709 - DNA, 120 bp, Artificial Sequence
  ENSG00000138443_22 (sequence is synthesized)
ttctgaagagacttgaactgtggaaatgctcttagcaggcatcccgaacccctgcttcggtgctgttttgaggagtaggatcttggagttcagaccaactatgactatcatttccttcac

SEQ ID NO: 345710 - DNA, 120 bp, Artificial Sequence
  ENSG00000138443_23 (sequence is synthesized)
tatctagaaaaacgctattctactttggaagagaatagtagttattttcaagtctcctgacagtcactgggagtacaaggtttgctaatgtgctctctggacgttattaatggccagtat

SEQ ID NO: 345711 - DNA, 120 bp, Artificial Sequence
  ENSG00000138443_24 (sequence is synthesized)
tagttgctgctgtattactgactcgcttagctgtagaaagggtaatactctcctgattttgtatgattggactcttaagtagctgctgttagtcagaattaaaacccatctcagactaag

SEQ ID NO: 345712 - DNA, 120 bp, Artificial Sequence
  ENSG00000138443_25 (sequence is synthesized)
aatataatgaataagattaataggccaaaatatgtatctaatcacattgataaaaattaatataactgacacaataaaacacatttcccccatctgtacaataaatacagcttcaaattc

SEQ ID NO: 345713 - DNA, 120 bp, Artificial Sequence
  ENSG00000138443_26 (sequence is synthesized)
agtggagtctgtagggcagataactttaatcatcactactgtagtcagtataagaaatgctgaaaaaaatccaggagggcttgtctctttgtgggtggtcactgtgatgttgggccagct

SEQ ID NO: 345714 - DNA, 120 bp, Artificial Sequence
  ENSG00000138443_27 (sequence is synthesized)
agtcccagtgacttggccagaatagagctttgccaggtaactgccctgtgctaggtgaaaggggaaaagcagtagctggatatatttcaaatgaggttttgaacaagttcagaaagtgga

SEQ ID NO: 345715 - DNA, 120 bp, Artificial Sequence
  ENSG00000138443_28 (sequence is synthesized)
acttgattgaaaagtgaacaagtgtagtagtgtgtgagaaaattcagatggtgtcggatgcagaagttaatattccacttaatgttatctgagcattaaaaatcatcagcatttaactga

SEQ ID NO: 345716 - DNA, 120 bp, Artificial Sequence
  ENSG00000138443_29 (sequence is synthesized)
gaccccactatagagtttccttatcaagactttttggttttaaagttgtttttaatgcattgcaagttacaatagctattttgcttttagatttttcccagcactttgtatttattagct

SEQ ID NO: 345717 - DNA, 120 bp, Artificial Sequence
  ENSG00000138443_30 (sequence is synthesized)
ttcattaacttgcctccagtatacattccacttcgtgcttttcttaggtcatttctacatcccttattccttgttttcctgcagtgtaatggccctgaatgtcctctgagccttcagctc

SEQ ID NO: 345718 - DNA, 120 bp, Artificial Sequence
  ENSG00000138443_31 (sequence is synthesized)
cattatggacccaaactagactatacttggataagttaagctcttcttcgtgtactggtctataattagaaaaactgttttaaattagatgttcccattatttatttaaacagctttttg

SEQ ID NO: 345719 - DNA, 120 bp, Artificial Sequence
  ENSG00000138443_32 (sequence is synthesized)
atgttcccattatttatttaaacagctttttgctgagaaagcttagtggattaatgaggcagagggtgttttgaaatccaataaatagttcccacaggctgggtgtggtggcttatgcct

SEQ ID NO: 345720 - DNA, 120 bp, Artificial Sequence
  ENSG00000138443_33 (sequence is synthesized)
tcccacagctcaccactacagaagcagggaagacaactatgcagaaaacagagttagtggcggtcagcaggaatgcagctggtcttttggacccctacgggatgggggcagtgcagaaga

SEQ ID NO: 345721 - DNA, 120 bp, Artificial Sequence
  ENSG00000138443_34 (sequence is synthesized)
cactggtgaagtcctttatactgaagacctgtggttgggagcaggggtagtccatgggtctgctgattttttttccctatttagtactaatgtgtgtgtgatctttgttttacaaacagt

SEQ ID NO: 345722 - DNA, 120 bp, Artificial Sequence
  ENSG00000138443_35 (sequence is synthesized)
accttttgggttttctgcatattttataatttttgtacagttttgaattctatagattgtcttggaaggatactgtgtgatgggtcaggcacacagtaattggagacttttaatgtatgt

SEQ ID NO: 345723 - DNA, 120 bp, Artificial Sequence
  ENSG00000138443_36 (sequence is synthesized)
aatatttcatagattgcatgctattaatcatctgtgagggtagtattttttgttttattgtaagtttccctctttttttataaattaaaagatggttggtattaggaatttcaaatgaat

SEQ ID NO: 345724 - DNA, 120 bp, Artificial Sequence
  ENSG00000138443_37 (sequence is synthesized)
gcagaaaatcttacatgctgtgtactattaatattataacagacgatccaagtccaaaatctgaccaataaagcaaccattttatcaagatagagggattctaatgggagaggggattct

SEQ ID NO: 345725 - DNA, 120 bp, Artificial Sequence
  ENSG00000138443_38 (sequence is synthesized)
tccctcctgaagtttgtgtgtccagtccccttaaaaaaaatgaatagttgtcttttcttgtcatattaatactcgaaagtccatggtggtattaatgaaagtacactttattgttgcctt

SEQ ID NO: 345726 - DNA, 120 bp, Artificial Sequence
  ENSG00000138443_39 (sequence is synthesized)
tgaacttacggccaaggcaataaatcagaaacaaaaatagtgccaatgtgtcaaaatcgacatctgagagattcagcctcccatttggaataaatatgaatcttctaagctatcttgttt

SEQ ID NO: 345727 - DNA, 120 bp, Artificial Sequence
  ENSG00000138443_40 (sequence is synthesized)
aatattttccatcatttagctacttcctatctccctcagaggcgcctgctgttcccattttagagttgacagtggcctgctaattttgctatgttcctaaaagttactgggtgtgagaca

SEQ ID NO: 345728 - DNA, 120 bp, Artificial Sequence
  ENSG00000138443_41 (sequence is synthesized)
ttttcatcccctcctttttcctactgctggtgtttattatccagctagacaatattttatgcatatttaccgtgatgtctggaccgtacctgtgctccttggcagtttatgttgaagata

SEQ ID NO: 345729 - DNA, 120 bp, Artificial Sequence
  ENSG00000138443_42 (sequence is synthesized)
actaaagatttttctctttgggaggcatcaaaatgatggtagtttgcttttatctttttatgttcattttcttttagtaggtgacctttctgcattaagaactgtttttatcttttacta

SEQ ID NO: 345730 - DNA, 120 bp, Artificial Sequence
  ENSG00000138443_43 (sequence is synthesized)
ccttttcttttctcctttgtggagacagcatgacatgtcctgaaggtcacctttgcctttgaaaaaggtttgatggaggaattcacaggtgactgacaagtctttgaaaagaatgggatc

SEQ ID NO: 345731 - DNA, 120 bp, Artificial Sequence
  ENSG00000138443_44 (sequence is synthesized)
tgctcacttctggtctttttggccgggaactcctgattggtgttaaggtggtaatttcccccatataagatttagaatcactgagtttgagctagatgaaatttttaaaatttctggttg

SEQ ID NO: 345732 - DNA, 120 bp, Artificial Sequence
  ENSG00000138443_45 (sequence is synthesized)
tctcattagactgatgaggtgagttttcttcttcatatgaacagctagttaataacagcagagttctcactcagtgctcagtacttaattttccactgcaccacaactgtcttaactaaa

SEQ ID NO: 345733 - DNA, 120 bp, Artificial Sequence
  ENSG00000138443_46 (sequence is synthesized)
tgtgctgtatttttctttaaaagttaagagttctatttggtgttttcaggaatatacgtgaaaagacatgccatgttttggtaaataccatcagagttgtgtaaaggcgtgtactaagtg

SEQ ID NO: 345734 - DNA, 120 bp, Artificial Sequence
  ENSG00000138443_47 (sequence is synthesized)
caatcttaatttgtggaaataatcttcatttacccctcctaaaactacactcagtataaacactttcccataaggtgtgtgcagtaaaaatgttatattactccaacactggcaggagca

SEQ ID NO: 345735 - DNA, 120 bp, Artificial Sequence
  ENSG00000138443_48 (sequence is synthesized)
cagcacagcagccttattggagagagccttataaaagtgattaaatggaggcattgagctcattacctttaagtttactttgtgctgacctttgttcctgttttgagaatctcatataat

SEQ ID NO: 345736 - DNA, 120 bp, Artificial Sequence
  ENSG00000138443_49 (sequence is synthesized)
tattaaaaaaaaaaaacaattaaaacgaaacggcggggcctagctgtgtataaatgatccttgctgaatatcttaaggttttttgtaagaaaaaagaaaaaccaacaaaaaaagcttatt

SEQ ID NO: 345737 - DNA, 120 bp, Artificial Sequence
  ENSG00000138443_50 (sequence is synthesized)
ttcacattaaaatgaaacctcttttgcaacttaagaattctatggaaaagcagtttttatcatattttgtgtccatgcaccatttttcttaaaatggcttacaaaaaagaatgtaaacaa

SEQ ID NO: 345738 - DNA, 120 bp, Artificial Sequence
  ENSG00000138443_51 (sequence is synthesized)
tttgtgatctggccagttgtacttttagctcccagagggagagttggtggtattatgagttgagtaaaaaccatccaggggaacttgagggagcagtctgttgccagtaatgttccttgt

SEQ ID NO: 345739 - DNA, 120 bp, Artificial Sequence
  ENSG00000138443_52 (sequence is synthesized)
gtgccattaaaccacctccagatgagtggaggaacatcactttttaattttttaattgtatttggaattgttgccgtgtactaagaacttgacctaaataaaatcccacaaagtatattc

SEQ ID NO: 345740 - DNA, 120 bp, Artificial Sequence
  ENSG00000138443_53 (sequence is synthesized)
ttactgaagaagtcgtctttttaaattttcaaagatttaaaatgttgagctttaaatttgatctcaagtttcttccctgaagacagctgttctaattaagaactttctaatcctgttttt

SEQ ID NO: 345741 - DNA, 120 bp, Artificial Sequence
  ENSG00000138443_54 (sequence is synthesized)
gctccactcgcacctggggttttcttaccacttttctccaaatctaattctgttaatgtacagtttttttaattcaacagacaaacactgaagatgggtgttgactaaaaaatattgcag

SEQ ID NO: 345742 - DNA, 120 bp, Artificial Sequence
  ENSG00000138443_55 (sequence is synthesized)
actggtcagaagtgaatctaaaagacaaaccactaactagcctgtgctttgttgctatgagagcctagattataaaagaattttctaatgatgtatctgagggtagcaagtaagtttgtc

SEQ ID NO: 345743 - DNA, 120 bp, Artificial Sequence
  ENSG00000138443_56 (sequence is synthesized)
ttcacaatacccaaaatgatgtttcagcttttctcacttttcaagcccatcttatttcctctgtacctttattattttggtatcattaggtaaggtgaagaataatgtaggaaacaaata

SEQ ID NO: 345744 - DNA, 120 bp, Artificial Sequence
  ENSG00000138443_57 (sequence is synthesized)
cccagctaaaacatttatgggtttctcgtatttgtgaataggattttaggcgtcagagcagtcttgtcttgtctcaaagatagatagtatccaatcttttgttaataagcctattgcttg

SEQ ID NO: 345745 - DNA, 120 bp, Artificial Sequence
  ENSG00000138443_58 (sequence is synthesized)
acttttttgggttactttggaattacacatttggttgaacggctttgtggatctggggcatatgccaattaaggggcacatgccatgcgttctgttttcctgtcagcctgtgtacactgc

SEQ ID NO: 345746 - DNA, 120 bp, Artificial Sequence
  ENSG00000138443_59 (sequence is synthesized)
tgcttctgaaggcataagtacaggtgcagtttccacaaccacgtatgattgacagatggtgaacgaaaggggaaggcttccactttttttgccctagtttggtacataataaagtgattg

SEQ ID NO: 345747 - DNA, 120 bp, Artificial Sequence
  ENSG00000138443_60 (sequence is synthesized)
caaacacattatacatttatacataccttcacatggcagtccaacacgtaattgtgactccaaagatttgaaacaaacaaaaggcattcctttttgtattactttactttgtacttagtt

SEQ ID NO: 345748 - DNA, 67 bp, Artificial Sequence
  ENSG00000138443_61 (sequence is synthesized)
agaaaagtctttctttaaaagctgttgtcacttaatcaccaatgtatttaatggccaaatttcccta

SEQ ID NO: 345749 - DNA, 120 bp, Artificial Sequence
  ENSG00000138443_62 (sequence is synthesized)
tcacttaatcaccaatgtatttaatggccaaatttccctagttggtataaactactcttaaaagttaacaaattgaacatatcaaactagtttatttaccacacttaatttcttctgtgt

SEQ ID NO: 345750 - DNA, 120 bp, Artificial Sequence
  ENSG00000138443_63 (sequence is synthesized)
atggcctatgttttgggtaccctgacatgaaatgcaaaaccagattcttaatggtgccgatccacaaacactcaaagtccccatgtttaaatgaaatctatgaattttttttattaagga

SEQ ID NO: 345751 - DNA, 120 bp, Artificial Sequence
  ENSG00000138443_64 (sequence is synthesized)
tttgataagctgatataatgaaaacatgtaaatgaaaaacatttacactgactgtacgactagtgtgctaagccattacaatagtttactgacataactggcaagagtaacttggaaaat

SEQ ID NO: 345752 - DNA, 120 bp, Artificial Sequence
  ENSG00000138443_65 (sequence is synthesized)
actggcaagagtaacttggaaaataacttaatccagcagaacaaaaacatcctcagaaaaacatcctcagtagtactgaatatatctctctcatatatctatctatctatctatatatat

SEQ ID NO: 345753 - DNA, 120 bp, Artificial Sequence
  ENSG00000138443_66 (sequence is synthesized)
aatcagggagcaaggcacataatgaaatgagcatacatttatgcagaagaaaataatagcaacaaagctgcgagaaaaattgtaacttcatcttcactgagctgtgcataatcctttgaa

SEQ ID NO: 345754 - DNA, 120 bp, Artificial Sequence
  ENSG00000138443_67 (sequence is synthesized)
taataatgtcctctacctggtacattataatgaagttccttgtcttcttcatgctttaaaaaagtatacttctacattgtatctacctatggcaaagctcccacagcctacaagttggtg

SEQ ID NO: 345755 - DNA, 120 bp, Artificial Sequence
  ENSG00000138443_68 (sequence is synthesized)
tgagccttgactcttgttttttaaagaactgagggagggagcaatcccagttaaatataatgtgcaattcccctttaacagtaaacaatgtttttaaaacacttagcacaagctaatttt

SEQ ID NO: 345756 - DNA, 120 bp, Artificial Sequence
  ENSG00000138443_69 (sequence is synthesized)
atcttaaatgtacatctctgtaagagttcactagtggctgatagtaaaatgaagcaaaattgtttgaaacattccagttaatgcttattttctagaaggggttattttacaagtagcaaa

SEQ ID NO: 345757 - DNA, 120 bp, Artificial Sequence
  ENSG00000138443_70 (sequence is synthesized)
aaaaaaaaaaaaagtaggaggtggggaaataatatgaaaaacggcagtttttggtattaggttacaataaatttaacgaatggacagtttgcaaaatataagggtttctccccctttagt

SEQ ID NO: 345758 - DNA, 120 bp, Artificial Sequence
  ENSG00000138443_71 (sequence is synthesized)
gctgcagacaagttttactgcctaagacgttgaggctgcaacaatcatgagcttggtattagtagccatccatgataaacataattaattctcaacttaaccatctataaaatatgtagt

SEQ ID NO: 345759 - DNA, 120 bp, Artificial Sequence
  ENSG00000138443_72 (sequence is synthesized)
gttcaccatcaccctgactcaattcacttctctaaatgtctttggtagaaagcagccagaccccacgtgggtagtgatgtctcttgtgagacacttttcatttctgccaaaactagaaat

SEQ ID NO: 345760 - DNA, 120 bp, Artificial Sequence
  ENSG00000138443_73 (sequence is synthesized)
accaccttcctttactttcattagcacctcaaagtttgcttgctggatttctttaaaaatattctgccaaaagagttgaaggcactgggggtttacagcaagtattttctctttaaaacg

SEQ ID NO: 345761 - DNA, 120 bp, Artificial Sequence
  ENSG00000138443_74 (sequence is synthesized)
gtttattacttcaacaagcaaagagcaaaccaactggagaaatgtatgttttttctttttatttatcaagttttattctacagctaaatttcagatttcttttacatatagaccttgcaa

SEQ ID NO: 345762 - DNA, 120 bp, Artificial Sequence
  ENSG00000138443_75 (sequence is synthesized)
tagaccttgcaagggcacggtaagaactgagcacttgttttatttgagggataaaggtgtagaaattttctctttgaattttataaggaaaggctgggtacagtggctcatgcctgtaat

SEQ ID NO: 345763 - DNA, 66 bp, Artificial Sequence
  ENSG00000138443_76 (sequence is synthesized)
gctgaggcaggaagatcacttgaaaaaaaaaaaaaaaccttaaaagataataagtatctaattctt

SEQ ID NO: 345764 - DNA, 120 bp, Artificial Sequence
  ENSG00000138443_77 (sequence is synthesized)
tcttttatacttgcatttctctttggatcaaatctcaactttgtgagaggtcatacatttctacagggttaggagtaccctgcataatttatacaaatgtaaagtgtatattaaaaaaaa

SEQ ID NO: 345765 - DNA, 120 bp, Artificial Sequence
  ENSG00000138443_78 (sequence is synthesized)
aaaagtgaaagttacctgcaatctaaagggttttcttcccctagaaacagtcaccctctcgtcaagtgtatgacccaattatacctattttatgaaaagcaaggcatcacattgataacc

SEQ ID NO: 345766 - DNA, 120 bp, Artificial Sequence
  ENSG00000138443_79 (sequence is synthesized)
atacaggatcctatgggtttaactggtctaaacttgagtggattaaatcagttgtaattagttagctctgtaggtatatgaaaaacttttggtaatgtacaaaaataggaatgggttttt

SEQ ID NO: 345767 - DNA, 120 bp, Artificial Sequence
  ENSG00000138443_80 (sequence is synthesized)
tacctgtttaaagtcactttgtgtttataacaaaattacttttagctgaggaacaaaggtgacaaagatttctgttggtggctgagagtcaaagcaggccaatccacaccattacctgaa

SEQ ID NO: 345768 - DNA, 120 bp, Artificial Sequence
  ENSG00000138443_81 (sequence is synthesized)
atatttttcaggctaatttataactttatggatttcctcgatacaagtttattagtttattctccatatacaagtttattctcccagaatagcagcaaataaaacttgaattggatgtac

SEQ ID NO: 345769 - DNA, 120 bp, Artificial Sequence
  ENSG00000138443_82 (sequence is synthesized)
agctcctaataaccttgatgtcagagttgtcacttggttggaattattatgatcccccaatttaaattttcttgataaactcagcgttgtttgttttcagtgacaagaaaacatacatgg

SEQ ID NO: 345770 - DNA, 120 bp, Artificial Sequence
  ENSG00000138443_83 (sequence is synthesized)
aaaggggacccaagacagttcaccaagatagttcacagccctttgcaggatatgcctttggtgggtgggagcacctagattttagaggactataaaacgccatgtttactttgtttgaaa

SEQ ID NO: 345771 - DNA, 120 bp, Artificial Sequence
  ENSG00000138443_84 (sequence is synthesized)
ttttctgatgaaaagtcttttgtaacttaacattccacattttcatttaaaaagtcccagaaatataaactatccaatttacaactaaggtgggtatctgtaaaaaccttaagaatagtt

SEQ ID NO: 345772 - DNA, 120 bp, Artificial Sequence
  ENSG00000138443_85 (sequence is synthesized)
actcttcccaagagaattacagcgtctaagggggggaaagaaagcatctgagcagtaaaagtcaagctggtaaaatccaatacagaatatctaataaaccataagttattttactgagaa

SEQ ID NO: 345773 - DNA, 120 bp, Artificial Sequence
  ENSG00000138443_86 (sequence is synthesized)
tagattctgctgccctacagcattggtgccaaaactctaagcatagagtgattctactttgaaattatccatagtagaaattaggagtgtcactaattaagcaagtcactacctctaata

SEQ ID NO: 345774 - DNA, 120 bp, Artificial Sequence
  ENSG00000138443_87 (sequence is synthesized)
acagacttgaagcagccaagctgggtgagagctgcagagcagagggcagtgaaagaaggcacagtactagtgtcgtgcggcagtagatgctttccatgaatacaccagagaaaaagagct

SEQ ID NO: 345775 - DNA, 120 bp, Artificial Sequence
  ENSG00000138443_88 (sequence is synthesized)
acagaaatacagtctaggaaaagctacatcccaacaaaaatccaaattaaagaaaacccactagggagtaaaacagaagtataaagtatcactttagtggttttttaaattcagttcata

SEQ ID NO: 345776 - DNA, 120 bp, Artificial Sequence
  ENSG00000138443_89 (sequence is synthesized)
catgaggttaaaacatttttaatagccatttctgtctgtggaggaatgtaaagggaaatggcctgttgtcggacaagccactggactggggttaaaatgagtctcctcctctagccttac

SEQ ID NO: 345777 - DNA, 120 bp, Artificial Sequence
  ENSG00000138443_90 (sequence is synthesized)
tctcttcctggcatcattagtgttcaaaaggatgtctgctattccaggaaaacagaccagaagcatctgttcaggatggctatcatcaggattgatacaagcaagaaattccaagaaatc

SEQ ID NO: 345778 - DNA, 120 bp, Artificial Sequence
  ENSG00000138443_91 (sequence is synthesized)
ctgcactgaaaacataaaggctgttgttttagggctcaaatcatgggtgaaaaaaggttagcgggtacattttttccccctcaagaaaaactgaagtgttgtctaccttctcatgagaaa

SEQ ID NO: 345779 - DNA, 120 bp, Artificial Sequence
  ENSG00000138443_92 (sequence is synthesized)
atcaccaccacaataaaactcaaaacctcagggatgaatactttgataactggattcatattcttactaactctaacccacaaatatgggtgcccctcaaactataaaactgcaggcaga

SEQ ID NO: 345780 - DNA, 120 bp, Artificial Sequence
  ENSG00000138443_93 (sequence is synthesized)
agactatgagaaattcattcatgaatcacagtagcgcttggcaatctactcaaacattacccaaatttctgtgcatgcttaaattaacaatgcagatgtgttaaagatcacttcataaat

SEQ ID NO: 345781 - DNA, 120 bp, Artificial Sequence
  ENSG00000138443_94 (sequence is synthesized)
atcaaacacaaaacttggtgaacaatttgaaagacctaaaaattaatggtatatattcttattgctccataaccacatgaacataaccgaacaatattctggagatgtagcaatggagag

SEQ ID NO: 345782 - DNA, 120 bp, Artificial Sequence
  ENSG00000138443_95 (sequence is synthesized)
gtgctgttcactctctgtttacgatgcggttttcgtggagtgtgggttatgcaagaccttgagtatactgtactaattaagcacttttgctcattctagaattatttaccatctcttccc

SEQ ID NO: 345783 - DNA, 120 bp, Artificial Sequence
  ENSG00000138443_96 (sequence is synthesized)
ccactttactggcatcactttttccttgtgggacaatgtcaactgatttctgcagtttgcattggtaatcattaacaataggcacagactttcattacaagatgtgctccccttataagt

SEQ ID NO: 345784 - DNA, 120 bp, Artificial Sequence
  ENSG00000138443_97 (sequence is synthesized)
gctgggatggcccatttttattctcttgtttaggagctgctctgagattgttttattcctaatagtccaatttatcataagttgatgagagtacttatttctctcatgtaccaaggaaaa

SEQ ID NO: 345785 - DNA, 120 bp, Artificial Sequence
  ENSG00000138443_98 (sequence is synthesized)
ttcacagaaaaaagcatatagaagtatagtgtgtcgttagagcactgactccacgttataccaaactgcacacgcataaaacgtaatgtcagttactggacttggactgtcccactccat

SEQ ID NO: 345786 - DNA, 120 bp, Artificial Sequence
  ENSG00000138443_99 (sequence is synthesized)
cagaacacctagtaacctgaactaatcacaaccaggctgcagtcagcaagggtcctggtagccccagtagctataaatgaaactgtcttccctctccatgtagtcccatacttaatgagc

SEQ ID NO: 345787 - DNA, 120 bp, Artificial Sequence
  ENSG00000138443_100 (sequence is synthesized)
tttttgtattacatattataacccatatacaaccagattaatgacacctgtacaggggccagttctgttctctcatcacccttcccttctatagagcaatgctcaaaaaatgcattttag

SEQ ID NO: 345788 - DNA, 120 bp, Artificial Sequence
  ENSG00000138443_101 (sequence is synthesized)
aaaatgattttgtttttcataatgcaccatattggggcacaggatgtgtatatttcatataccaattgtctacagatatgtaataacacctacctaaagcacatattttaagaaggtaac

SEQ ID NO: 345789 - DNA, 120 bp, Artificial Sequence
  ENSG00000138443_102 (sequence is synthesized)
tggtgacccaaagacatactgggacagaacattacagagataactgtgttatccatcctcttaaaatcaatcaaagtgaggatcatgaagccaagttgataaagcttcataaaacagtac

SEQ ID NO: 345790 - DNA, 120 bp, Artificial Sequence
  ENSG00000138443_103 (sequence is synthesized)
taaaaaggaactatccagaattatagcactaattatccatgtattgtaggcaaagagcttatctgtcagcacatcctaaatgtgggtggatcactgcagcagtactgcagctagaacagc

SEQ ID NO: 345791 - DNA, 120 bp, Artificial Sequence
  ENSG00000138443_104 (sequence is synthesized)
tgagttaattacgccatgtatttactttctatgcacaaccacatacagatgatgtctgtgaacatttccccatcctgcactagttacccgttctatgaagctgagagattttcctgattt

SEQ ID NO: 345792 - DNA, 120 bp, Artificial Sequence
  ENSG00000138443_105 (sequence is synthesized)
aaagtgccccttcatgtatagcaatgaagtgtcagtcaagcaattctaacttcagccaactggggaaaaacaaacacaaaagccttatagatacaccaaacattctggtgatttttctca

SEQ ID NO: 345793 - DNA, 120 bp, Artificial Sequence
  ENSG00000138443_106 (sequence is synthesized)
accagaaatagcacattctacatctattccttagttatataatacacaacatgcacgaataggctacacatggacagacacttataaataccttctaaataagtgattagaagtttttgg

SEQ ID NO: 345794 - DNA, 120 bp, Artificial Sequence
  ENSG00000138443_107 (sequence is synthesized)
tccaatccacatgatatagaaatcttaagagacaacacacatccccttctatgcctcttccacccaaaatacagaacacccattttcagattaggagagaaaaggaataaatagaataac

SEQ ID NO: 345795 - DNA, 120 bp, Artificial Sequence
  ENSG00000138443_108 (sequence is synthesized)
tctcagctctctctctatatacacatacacatacatatatgtatacatatatacacacactgtacagctgtgtgtacatgcacgtgtacacacacacatacacatatagctggacactac

SEQ ID NO: 345796 - DNA, 120 bp, Artificial Sequence
  ENSG00000138443_109 (sequence is synthesized)
ctgaataacatcataccaggaggctctgaacacctgaattcacagatgatcaggtgagctgattgtagcagtgattacagatatcatgaaaataaagtcctatggtggctaccagtctct

SEQ ID NO: 345797 - DNA, 120 bp, Artificial Sequence
  ENSG00000138443_110 (sequence is synthesized)
ggagagcttggtgttctggtctcttttggggggagcaggagggggtcctctccgcaacgttgcatagcctgatatatgactgcctccgtaaccagccttctgttgatcagacagcagttc

SEQ ID NO: 345798 - DNA, 120 bp, Artificial Sequence
  ENSG00000138443_111 (sequence is synthesized)
agggggtggtggaggcaatgccatatcatccatggtggctgttggttctgctctggacatgcgggaggagagtgagccgtgccgagtgatggactttcgttgcagtgtcctgttgaggtc

SEQ ID NO: 345799 - DNA, 120 bp, Artificial Sequence
  ENSG00000138443_112 (sequence is synthesized)
agccaggaatccaggctggacactaaggctggatttgggagaggtgggcacttgtggcacaactgtggccattgttggctgctcagaaatctcagcttgagtgaggcgggtgctatcatt

SEQ ID NO: 345800 - DNA, 120 bp, Artificial Sequence
  ENSG00000138443_113 (sequence is synthesized)
ccgtttgggtcgtgtgggtggaggggccttcttcactgacattttagaccattgttgtggttgaggattaacgactgccacttttggagaggtgtttcccgagaaaactgctggaatctc

SEQ ID NO: 345801 - DNA, 120 bp, Artificial Sequence
  ENSG00000138443_114 (sequence is synthesized)
aatggggggcagaggaagctctgtttcaggtggagggggtggaaaatcagaatcggatggaggagaaggaaattccaccacggagtcctttccacgcccactcagaacaggggcttttgc

SEQ ID NO: 345802 - DNA, 120 bp, Artificial Sequence
  ENSG00000138443_115 (sequence is synthesized)
tgacacacacccttgttggagaactccaggaaggttgactccagaaagattgagttttccaggcttggggggtgctgcaggaggtggtagggtctccttgctgggagaccctgattctgc

SEQ ID NO: 345803 - DNA, 120 bp, Artificial Sequence
  ENSG00000138443_116 (sequence is synthesized)
tggcggtgtaaacttgctgactagactgtccaccgagggtctcttgggctcggggtgctctgcaccactgctggatttaatgctggagttgcgctgtggggttgggggtggtttctttcc

SEQ ID NO: 345804 - DNA, 120 bp, Artificial Sequence
  ENSG00000138443_117 (sequence is synthesized)
cccagggctggacgtcttactggtctttttgcctggagatccacttttgtcaggggtaggagaagctgtgggtggaggtggtggtggtggggctgggacaggtgatgggggtggaggagg

SEQ ID NO: 345805 - DNA, 120 bp, Artificial Sequence
  ENSG00000138443_118 (sequence is synthesized)
aaacaccaggctgctttcaggagggggaggagggaagtccggagaagggactgggatggagctgggctgccacttgggctttgcttttactgcaggaggggactgtggagctacatttgc

SEQ ID NO: 345806 - DNA, 120 bp, Artificial Sequence
  ENSG00000138443_119 (sequence is synthesized)
tgggacaggctttaagggctgagattccatggcagggggagttggagggggtggaaactggctggctatctgcttcacgaccgagggcaccggtgacagtggagagggagggggttttgc

SEQ ID NO: 345807 - DNA, 120 bp, Artificial Sequence
  ENSG00000138443_120 (sequence is synthesized)
acagaagctctgttgcttgggtaatgttggcgggggtactggaacaggaggggtagggggagagggtggaatgtaagaagcagggaaagctggctgcttttttgctgggggcactggagg

SEQ ID NO: 345808 - DNA, 120 bp, Artificial Sequence
  ENSG00000138443_121 (sequence is synthesized)
agtaggtgtgggtggtgcagcttgagtcacaacaggtgccacagtcttggtgctggttggtgcggggatggtcacaaggggttttgggggagcttggggagggaggggtgcagggatagg

SEQ ID NO: 345809 - DNA, 120 bp, Artificial Sequence
  ENSG00000138443_122 (sequence is synthesized)
aggaggtggggggggtgttgggggagccacctgagtaatatgctgaacttgatggatcttcagtggaggaggcggggcactgaactgtggaagggatggggcacacggtgcaggctttag

SEQ ID NO: 345810 - DNA, 120 bp, Artificial Sequence
  ENSG00000138443_123 (sequence is synthesized)
ctgggccatggcagagcctggggttgggggtggaggagggggagggggtggtggaacaactccattggggggtaccaggatctgaggcttcactgactgtgactgcatcactgggggtgt

SEQ ID NO: 345811 - DNA, 120 bp, Artificial Sequence
  ENSG00000138443_124 (sequence is synthesized)
tggcggcttaaacagggcccctgaatgctgagacgcattctgtagccgtgttattgtgctgtacttgacgaacattggggctgctgagcctgcagaaggtgcagactggctggggagtgg

SEQ ID NO: 345812 - DNA, 120 bp, Artificial Sequence
  ENSG00000138443_125 (sequence is synthesized)
gggaggagggggtggtggagggggtggtggaggaggaggtgggggtggcggaggaggtagaggtggtgaaggctgtgaagcagtgtagggggtgactatcttaggttgcggggataaagg

SEQ ID NO: 345813 - DNA, 120 bp, Artificial Sequence
  ENSG00000138443_126 (sequence is synthesized)
gggcacaagtgaagtgtagggccgattcatagactccattctggcctaaaaggagtataaaaagggagtgggagagagaaaaacacaacaaacaaaacagttacagaggtaagctttgat

SEQ ID NO: 345814 - DNA, 120 bp, Artificial Sequence
  ENSG00000138443_127 (sequence is synthesized)
tgtgtaaaactaaaaagcagggagtctgggacatgcatgaaaaggatgcagaagttggtggtgatcataaagatggacaatgtcaggaaggctaaaatctgattgtgcgggcaagaagga

SEQ ID NO: 345815 - DNA, 120 bp, Artificial Sequence
  ENSG00000138443_128 (sequence is synthesized)
aacagaaaacttgttttaccccacagtaaaatagctagaccatctaacaatctaggaaaaatgtccggctgcaaaagctgtttgaatggtgacaggatgcatgacttctgaccttggctg

SEQ ID NO: 345816 - DNA, 120 bp, Artificial Sequence
  ENSG00000138443_129 (sequence is synthesized)
tatgactttgacacagcctgccctacatggaaccctctgtggcggtcctctgagcactggacttccaaggggagatgtgatggctccagtttacctttcagtccatgactgcatccacat

SEQ ID NO: 345817 - DNA, 120 bp, Artificial Sequence
  ENSG00000138443_130 (sequence is synthesized)
caagcagatgctataactgggtttaggagggcttcctggtggaatgaggatggctttttgatgctagtaagctgacacaggagagtatgagaatgttgagcaggcgtgcacagtcacaca

SEQ ID NO: 345818 - DNA, 120 bp, Artificial Sequence
  ENSG00000138443_131 (sequence is synthesized)
ggaatgaataagcttgacacacacactcgtgttggtgtgagacaattgcatccaacatgcacagaagtccagcaatgcaggtaaaggggggacattctttacatttgttttactggaaaa

SEQ ID NO: 345819 - DNA, 120 bp, Artificial Sequence
  ENSG00000138443_132 (sequence is synthesized)
tacataaagaaatgctttgtaaacattatagcaaaagactgtaaaaatatcatacagaaaaagccagaagaaattaagaggaagctctggaaggctagaataaagaaaatgtatcaagaa

SEQ ID NO: 345820 - DNA, 120 bp, Artificial Sequence
  ENSG00000138443_133 (sequence is synthesized)
atggcagctagcatttgccaacaaccaacccatctgggtagctgaaatgatcacatctggtagtttatttcgtggagctaatcatgcacgatggtggttcaggtactttgaaaagaggaa

SEQ ID NO: 345821 - DNA, 120 bp, Artificial Sequence
  ENSG00000138443_134 (sequence is synthesized)
aggaaggacccttgttttaaaaactttaggtacatcttttaggctctttgaacaaactttgaggatccaagataaaccatttgttttcaattttgaatgacatcgagaatgcatgggtta

SEQ ID NO: 345822 - DNA, 120 bp, Artificial Sequence
  ENSG00000138443_135 (sequence is synthesized)
gtgaactagaaggctcattatagggctgaattctaatagccatccggacattcacatgtttcttttaaaattacacaaaaagattagtctgtgagattgggatacaggcgtcaccgaggt

SEQ ID NO: 345823 - DNA, 120 bp, Artificial Sequence
  ENSG00000138443_136 (sequence is synthesized)
taatgtgtttccagagaacaacccctgaccttaacttgaccctgtcttggctgcttcaggggcgcaggccttagctgtgctggccttctcatttggcacctgagactgaggtaacaggag

SEQ ID NO: 345824 - DNA, 120 bp, Artificial Sequence
  ENSG00000138443_137 (sequence is synthesized)
aagaaatacagagtgatcaagccttaaagcattactgctgacagcagggttcctactcttctgaaactctgtgcaataacggactttgctgcttaatcacagaacattttgggtctgtga

SEQ ID NO: 345825 - DNA, 120 bp, Artificial Sequence
  ENSG00000138443_138 (sequence is synthesized)
ttttgttttccttggccttacacataactaggttctataacttaaaatgcacacggatctcaccattagtaatttggtaaggcaaaggggtttttctttagccatccgaattctgtaaac

SEQ ID NO: 345826 - DNA, 120 bp, Artificial Sequence
  ENSG00000138443_139 (sequence is synthesized)
caacttctttagtacatttttaaaatactagctccatccaaattgattaaatgggggaagggagagagaaattatttcttaaaagtttgagtctctaataagggagttaaactcagtgtt

SEQ ID NO: 345827 - DNA, 120 bp, Artificial Sequence
  ENSG00000138443_140 (sequence is synthesized)
ttgagaatttagatcgttagaaccaattctcaaatgctcatttctgaaggaaagggcttcagccccacatggtgctactaaggccttctcttccctgcgggagcccagttagtgaaccac

SEQ ID NO: 345828 - DNA, 120 bp, Artificial Sequence
  ENSG00000138443_141 (sequence is synthesized)
atatacgaatgaaggaataaaaggaaaaatgtccatttattctcattcgtgaatgtacctgtataagtgattcagaccaaaagcaccccccaccaaaaaattaaataaataaataaaaac

SEQ ID NO: 345829 - DNA, 120 bp, Artificial Sequence
  ENSG00000138443_142 (sequence is synthesized)
aattattagtaaaaataaaatagttgagcccagggtgccactggttcctcaatgatggagtgacctcttgcatattgaaatggtgactacagccaggacacatccttgcctacacaacta

SEQ ID NO: 345830 - DNA, 120 bp, Artificial Sequence
  ENSG00000138443_143 (sequence is synthesized)
cagatgatgtctgatagaaggccatgatgtctttcaaatgaactgaagaacctctctattttcctaattatagtcttgcaataactatactcatccttcagtctcactgcacaatatact

SEQ ID NO: 345831 - DNA, 120 bp, Artificial Sequence
  ENSG00000138443_144 (sequence is synthesized)
atgcaaggctcaggaatccaaaacttttaagggaaatgattttaatttagtcttccacataaagtataatttgaaaaaattcatcaatgcccaaagaaatggcaaaagcattaaaaaaaa

SEQ ID NO: 345832 - DNA, 120 bp, Artificial Sequence
  ENSG00000138443_145 (sequence is synthesized)
gcccaaagaaatggcaaaagcattaaaaaaaaaaaaggtaaggaatgagtctgaataaattaaccaataaagaaataactggactgaatatggtggctcatgcctgtaatcccaggactt

SEQ ID NO: 345833 - DNA, 86 bp, Artificial Sequence
  ENSG00000138443_146 (sequence is synthesized)
cttgaggccaggagttcgagaccagcccaggcaaaatagccagaccttgtctctaccaaaaaataaaaaacactactcaggcaact

SEQ ID NO: 345834 - DNA, 120 bp, Artificial Sequence
  ENSG00000138443_147 (sequence is synthesized)
ggtgggaggatcatttgagcccaggaggcttaagtgagccctgataacaccactgcattccagcctgggtgacgggaaagggagagggagagggagaggaggggatggggagaaggaagg

SEQ ID NO: 345835 - DNA, 120 bp, Artificial Sequence
  ENSG00000138443_148 (sequence is synthesized)
aggaggggatggggagaaggaaggaaaggaagggaaggaagggagagaaggaaggggagggagggagggaagtgaggggagggaggaaaggagggaaggaaggaagaaaagaataaaaaa

SEQ ID NO: 345836 - DNA, 67 bp, Artificial Sequence
  ENSG00000138443_149 (sequence is synthesized)
gggaggaaaggagggaaggaaggaagaaaagaataaaaaagaagagaaaaaaagagagagagaggct

SEQ ID NO: 345837 - DNA, 80 bp, Artificial Sequence
  ENSG00000138443_150 (sequence is synthesized)
cgacagactgacactctgcaggaaagaagagagagaactgtaaacagcttctctagaatttagggcatttgcaatagatg

SEQ ID NO: 345838 - DNA, 120 bp, Artificial Sequence
  ENSG00000138443_151 (sequence is synthesized)
taaacagcttctctagaatttagggcatttgcaatagatggtgttttgccatccaaactgcttaaaggtggaaaggaagaaattgttatttcttaaaaatctgagccactgatgaaagaa

SEQ ID NO: 345839 - DNA, 120 bp, Artificial Sequence
  ENSG00000138443_152 (sequence is synthesized)
ttaaactgccagttttttttgtttttttgagattttaagtcattagagccaatttgtaaaatactcatttccaaggggaagtcaaatcaacaggtctctctgaactgtctttacccacta

SEQ ID NO: 345840 - DNA, 120 bp, Artificial Sequence
  ENSG00000138443_153 (sequence is synthesized)
caattaggaagattgaaaattaataaaggagactgaaataaggccaaataagatccccgataaagacataagagagcaacaatttaaacccaaaagaataccacagaattttcaatgtaa

SEQ ID NO: 345841 - DNA, 120 bp, Artificial Sequence
  ENSG00000138443_154 (sequence is synthesized)
attaaaacgaagctgttaccttgctggactcttccaactgagtgcctcgtttccaggcttcagagaatacggagctcacaatgctctgggaacggacgtgtcctgctggctgggtgtcag

SEQ ID NO: 345842 - DNA, 120 bp, Artificial Sequence
  ENSG00000138443_155 (sequence is synthesized)
aaactccgctatcagactgattggagtggtttgactgagactctgtttaaaatagttttttaaacataggtttaaaagagtcagtattctgacaatattcatatgtatgtctagttagat

SEQ ID NO: 345843 - DNA, 120 bp, Artificial Sequence
  ENSG00000138443_156 (sequence is synthesized)
cttttacacaaggtcaagtgctgtgtacaacagcaccaagttattttactcatttcatcataaacacagccagtattttctactagaaaacttcccttaccttggaattaagaaatctca

SEQ ID NO: 345844 - DNA, 120 bp, Artificial Sequence
  ENSG00000138443_157 (sequence is synthesized)
gattagtgttaaatatttcaccatgagagactgataattataataaatgattcacataacattattggtatcctgacacccagtcttgcatgaaatcaactctaaacaataaaagaatta

SEQ ID NO: 345845 - DNA, 120 bp, Artificial Sequence
  ENSG00000138443_158 (sequence is synthesized)
atgaaccatcagtagaggagtctctcaatcatgtctgcattacattgagaatcagcctttttaatacccctgccttaaggtcacgccagaattgtaacttaggaattcggatctatacac

SEQ ID NO: 345846 - DNA, 120 bp, Artificial Sequence
  ENSG00000138443_159 (sequence is synthesized)
aatgattatttccttttttctagcaatgagcaatacttagaatttgaccctctagtgcgaagtgtgtttcctagggatttaggtattggacccatagggtggcagctgtgctgtatcctg

SEQ ID NO: 345847 - DNA, 120 bp, Artificial Sequence
  ENSG00000138443_160 (sequence is synthesized)
cctggcctgtcagcaaggcacaaaaaagttttgaaaggagtggggcctggtgggaatggctgtgagcatacagtgtctctttgccgcctgagcaaggaggctgaggtgggaggatcattt

SEQ ID NO: 345848 - DNA, 120 bp, Artificial Sequence
  ENSG00000138443_161 (sequence is synthesized)
ccaggagagttaagtgagctatgataacaccactgcattccagcctgggtgatgggagaggaaggaaggaaaaggaaggggaaccatgttctggaagggttgttggttggttttttttcc

SEQ ID NO: 345849 - DNA, 120 bp, Artificial Sequence
  ENSG00000138443_162 (sequence is synthesized)
ccattttaataaatattttcttagaatagttttaagatatctacatattagatatttgaatattagaacagttttagcacagaattcctacatacccggcatccagtttacccatttagc

SEQ ID NO: 345850 - DNA, 120 bp, Artificial Sequence
  ENSG00000138443_163 (sequence is synthesized)
aatatgtttggttttaaagaaattctcctttggggaaaaagtgtcctcttttaattttattcccttttccccattattaacatgttacattactatactacatttgtcacaactaaggaa

SEQ ID NO: 345851 - DNA, 120 bp, Artificial Sequence
  ENSG00000138443_164 (sequence is synthesized)
atgtcctgctactattaactacgctccacactttatttggatttcactagtttttccctcatgtgccttttctgatccaggacaccacgtcacagttagtcatcatgtctcctataacgg

SEQ ID NO: 345852 - DNA, 120 bp, Artificial Sequence
  ENSG00000138443_165 (sequence is synthesized)
cttctcagaatttcctgtttttgatgacttagacagttttgaggaatagtggtcaggtatcttgtagactgtctctcagttttggtttgtctgatgctttttctcttgattagtctgttt

SEQ ID NO: 345853 - DNA, 120 bp, Artificial Sequence
  ENSG00000138443_166 (sequence is synthesized)
atggaacttggggaggaagatcatagaggaaaaaagccattctcacacactatgtcaaaggtccctataaccaatgtgacttagatactgaccttgaccacatggttgtggcagtgtttg

SEQ ID NO: 345854 - DNA, 120 bp, Artificial Sequence
  ENSG00000138443_167 (sequence is synthesized)
tcaggtttctccactgtgaagttacccctaatccccgttccataatcactggaagcaagtcactaagcacagtccacacttgaggacttaggtaagctctacttccttcaggacaaagtg

SEQ ID NO: 345855 - DNA, 120 bp, Artificial Sequence
  ENSG00000138443_168 (sequence is synthesized)
tcttcataaatcatttagaaatctacacaggacagttctctcctcttccccatttatttattcaatgatttatttacatcagtataaactcatggatatttatgtccatgggttacaatc

SEQ ID NO: 345856 - DNA, 120 bp, Artificial Sequence
  ENSG00000138443_169 (sequence is synthesized)
ctatactatattacttattgtattgctcaaattgttccagctttgacctttggagctctttcagactggctcctctgtgtatccctttgacatattctcatcttgtgttttgtgagacag

SEQ ID NO: 345857 - DNA, 90 bp, Artificial Sequence
  ENSG00000138443_170 (sequence is synthesized)
atccctttgacatattctcatcttgtgttttgtgagacagggtctcgttctgttgcacaagctggagcatgaacttttgggctcaagcaa

SEQ ID NO: 345858 - DNA, 120 bp, Artificial Sequence
  ENSG00000138443_171 (sequence is synthesized)
actactaagtctggctaatttaaaaaaaaaaaaaaaaaaaagttgtggagatggggtcttgctgtgctgcccaggctggttttgaactactgggctcacgtgatcccttaacctaggcct

SEQ ID NO: 345859 - DNA, 120 bp, Artificial Sequence
  ENSG00000138443_172 (sequence is synthesized)
cccaaagcattggcattacaggcgtcagccactgtgcctggccctactgtcgttttttaagcattcccttactttctggcattacaagatgctctaggctcatcttgtatatattctctg

SEQ ID NO: 345860 - DNA, 86 bp, Artificial Sequence
  ENSG00000138443_173 (sequence is synthesized)
gaatggtattagaaaccatgatctatttaagcagcatccttggccaaaatttaataaaacgaaaaaacaaaaagaaacctctatga

SEQ ID NO: 345861 - DNA, 120 bp, Artificial Sequence
  ENSG00000138443_174 (sequence is synthesized)
aaatttaataaaacgaaaaaacaaaaagaaacctctatgatctagggactgggtattctcattgttcctggggtatcactgcttctagtcctcagtggacagcactaggaaatgtatgtg

SEQ ID NO: 345862 - DNA, 120 bp, Artificial Sequence
  ENSG00000138443_175 (sequence is synthesized)
tatatacacattctaaatttgtttttacttaatagagatgaaatagagtcatgcagcttttaaatatactactaaagttattatttctttcatcacatccaatgcaaaaatttaaaaatt

SEQ ID NO: 345863 - DNA, 120 bp, Artificial Sequence
  ENSG00000138443_176 (sequence is synthesized)
ctgcttttagatgacatggatctcattcatgaaacattttgaattgaaagaagatttatgttaagatgtaatcatagcatgcacttgtttaaaggatataggaatctgaaggagtgcagc

SEQ ID NO: 345864 - DNA, 120 bp, Artificial Sequence
  ENSG00000138443_177 (sequence is synthesized)
ttcttcatggtttctgagtacaaagattctttccaagtaatgttttatcccaaattatgcattaacagtgtccagcagtatgtatgttttgaataaattttataaatataaataacaaaa

SEQ ID NO: 345865 - DNA, 120 bp, Artificial Sequence
  ENSG00000138443_178 (sequence is synthesized)
gagggcaagaacaaatattagacaccatggctattgtggacatgtttcagatacaccacctccaccgccacctgtggaagaaccagtctttgatgagtctcccccacctcctcctcctcc

SEQ ID NO: 345866 - DNA, 120 bp, Artificial Sequence
  ENSG00000138443_179 (sequence is synthesized)
aggacctttttatagccagaatccagtatctcttgctcctcctcctccctccatcctacaggtaactcctcagttacctttaatgggatttgtggccagagtccaagaaaatatttcaga

SEQ ID NO: 345867 - DNA, 120 bp, Artificial Sequence
  ENSG00000138443_180 (sequence is synthesized)
atgcaaattataccgttgttagattacctttattattatagatgttttttaaaagttatttacttaaaatatctatacttaggcaaattagaggcgttgatcttgagtcgacttttgtga

SEQ ID NO: 345868 - DNA, 120 bp, Artificial Sequence
  ENSG00000138443_181 (sequence is synthesized)
tttcctatttgcctatgaggaacccttaataataaacacaggctatctgtaatgctggcagcttttattatgtaagttaactcacatgtacgatttggaaaatagcaacttaatattagg

SEQ ID NO: 345869 - DNA, 120 bp, Artificial Sequence
  ENSG00000138443_182 (sequence is synthesized)
ttgtttttagattctgtctttttgtgggatggttatcttctctgtgattttgataggaaagtaaatcgtaatgaattttattaaaactcagttgtcatggtaacataatcagccctataa

SEQ ID NO: 345870 - DNA, 120 bp, Artificial Sequence
  ENSG00000138443_183 (sequence is synthesized)
tgaaacttcatccattcccccgcctttttttttttttaaaacaaatttcatacttctttatcaatttaaaaagataaacttgatagattggtggcttgttcaaaaatttttttttctttt

SEQ ID NO: 345871 - DNA, 120 bp, Artificial Sequence
  ENSG00000138443_184 (sequence is synthesized)
gacagtgcatatcctctggtgcttcctgacaaagaatacatggaaagttaaaaaaagaagactgggtacggtggctcattcctgtaatcctagcactttgggaggtcatggtaagaggat

SEQ ID NO: 345872 - DNA, 120 bp, Artificial Sequence
  ENSG00000138443_185 (sequence is synthesized)
tgctggagctcaggtgggaagactagcctgagcaacatgtcagcagataagcagagagccctagaagaaaccaaagcctacaccacccaatccttagcaagtgttgcctatctgataaac

SEQ ID NO: 345873 - DNA, 120 bp, Artificial Sequence
  ENSG00000138448_0 (sequence is synthesized)
agtccccagcctcagacgctgcgtggagcggcggagccggagggaagcaaaggaccgtctgcgctgctgtccccgccccgcgcgctctgcgcccctcgtccctggcggtcgctccgaagc

SEQ ID NO: 345874 - DNA, 120 bp, Artificial Sequence
  ENSG00000138448_1 (sequence is synthesized)
aagctcagccctcttgcctgccccggagctgtcccgggctagccgagaagagagcggccggcaagtttgggcgcgcgcaggcggcgggccgcgggcactgggcgcctcgctggggcgggg

SEQ ID NO: 345875 - DNA, 120 bp, Artificial Sequence
  ENSG00000138448_2 (sequence is synthesized)
gtggctaccgctcccggcttggcgtcccgcgcgcacttcggcgatggcttttccgccgcggcgacggctgcgcctcggtccccgcggcctcccgcttcttctctcgggactcctgctacc

SEQ ID NO: 345876 - DNA, 120 bp, Artificial Sequence
  ENSG00000138448_3 (sequence is synthesized)
tctgtgccgcgccttcaacctagacgtggacagtcctgccgagtactctggccccgagggaagttacttcggcttcgccgtggatttcttcgtgcccagcgcgtcttcccggatgtttct

SEQ ID NO: 345877 - DNA, 120 bp, Artificial Sequence
  ENSG00000138448_4 (sequence is synthesized)
tctcgtgggagctcccaaagcaaacaccacccagcctgggattgtggaaggagggcaggtcctcaaatgtgactggtcttctacccgccggtgccagccaattgaatttgatgcaacagg

SEQ ID NO: 345878 - DNA, 120 bp, Artificial Sequence
  ENSG00000138448_5 (sequence is synthesized)
caatagagattatgccaaggatgatccattggaatttaagtcccatcagtggtttggagcatctgtgaggtcgaaacaggataaaattttggcctgtgccccattgtaccattggagaac

SEQ ID NO: 345879 - DNA, 120 bp, Artificial Sequence
  ENSG00000138448_6 (sequence is synthesized)
tgagatgaaacaggagcgagagcctgttggaacatgctttcttcaagatggaacaaagactgttgagtatgctccatgtagatcacaagatattgatgctgatggacagggattttgtca

SEQ ID NO: 345880 - DNA, 120 bp, Artificial Sequence
  ENSG00000138448_7 (sequence is synthesized)
aggaggattcagcattgattttactaaagctgacagagtacttcttggtggtcctggtagcttttattggcaaggtcagcttatttcggatcaagtggcagaaatcgtatctaaatacga

SEQ ID NO: 345881 - DNA, 120 bp, Artificial Sequence
  ENSG00000138448_8 (sequence is synthesized)
ccccaatgtttacagcatcaagtataataaccaattagcaactcggactgcacaagctatttttgatgacagctatttgggttattctgtggctgtcggagatttcaatggtgatggcat

SEQ ID NO: 345882 - DNA, 120 bp, Artificial Sequence
  ENSG00000138448_9 (sequence is synthesized)
agatgactttgtttcaggagttccaagagcagcaaggactttgggaatggtttatatttatgatgggaagaacatgtcctccttatacaattttactggcgagcagatggctgcatattt

SEQ ID NO: 345883 - DNA, 120 bp, Artificial Sequence
  ENSG00000138448_10 (sequence is synthesized)
cggattttctgtagctgccactgacattaatggagatgattatgcagatgtgtttattggagcacctctcttcatggatcgtggctctgatggcaaactccaagaggtggggcaggtctc

SEQ ID NO: 345884 - DNA, 120 bp, Artificial Sequence
  ENSG00000138448_11 (sequence is synthesized)
agtgtctctacagagagcttcaggagacttccagacgacaaagctgaatggatttgaggtctttgcacggtttggcagtgccatagctcctttgggagatctggaccaggatggtttcaa

SEQ ID NO: 345885 - DNA, 120 bp, Artificial Sequence
  ENSG00000138448_12 (sequence is synthesized)
tgatattgcaattgctgctccatatgggggtgaagataaaaaaggaattgtttatatcttcaatggaagatcaacaggcttgaacgcagtcccatctcaaatccttgaagggcagtgggc

SEQ ID NO: 345886 - DNA, 120 bp, Artificial Sequence
  ENSG00000138448_13 (sequence is synthesized)
tgctcgaagcatgccaccaagctttggctattcaatgaaaggagccacagatatagacaaaaatggatatccagacttaattgtaggagcttttggtgtagatcgagctatcttatacag

SEQ ID NO: 345887 - DNA, 120 bp, Artificial Sequence
  ENSG00000138448_14 (sequence is synthesized)
ggccagaccagttatcactgtaaatgctggtcttgaagtgtaccctagcattttaaatcaagacaataaaacctgctcactgcctggaacagctctcaaagtttcctgttttaatgttag

SEQ ID NO: 345888 - DNA, 120 bp, Artificial Sequence
  ENSG00000138448_15 (sequence is synthesized)
gttctgcttaaaggcagatggcaaaggagtacttcccaggaaacttaatttccaggtggaacttcttttggataaactcaagcaaaagggagcaattcgacgagcactgtttctctacag

SEQ ID NO: 345889 - DNA, 120 bp, Artificial Sequence
  ENSG00000138448_16 (sequence is synthesized)
caggtccccaagtcactccaagaacatgactatttcaagggggggactgatgcagtgtgaggaattgatagcgtatctgcgggatgaatctgaatttagagacaaactcactccaattac

SEQ ID NO: 345890 - DNA, 120 bp, Artificial Sequence
  ENSG00000138448_17 (sequence is synthesized)
tatttttatggaatatcggttggattatagaacagctgctgatacaacaggcttgcaacccattcttaaccagttcacgcctgctaacattagtcgacaggctcacattctacttgactg

SEQ ID NO: 345891 - DNA, 120 bp, Artificial Sequence
  ENSG00000138448_18 (sequence is synthesized)
tggtgaagacaatgtctgtaaacccaagctggaagtttctgtagatagtgatcaaaagaagatctatattggggatgacaaccctctgacattgattgttaaggctcagaatcaaggaga

SEQ ID NO: 345892 - DNA, 120 bp, Artificial Sequence
  ENSG00000138448_19 (sequence is synthesized)
aggtgcctacgaagctgagctcatcgtttccattccactgcaggctgatttcatcggggttgtccgaaacaatgaagccttagcaagactttcctgtgcatttaagacagaaaaccaaac

SEQ ID NO: 345893 - DNA, 120 bp, Artificial Sequence
  ENSG00000138448_20 (sequence is synthesized)
tcgccaggtggtatgtgaccttggaaacccaatgaaggctggaactcaactcttagctggtcttcgtttcagtgtgcaccagcagtcagagatggatacttctgtgaaatttgacttaca

SEQ ID NO: 345894 - DNA, 120 bp, Artificial Sequence
  ENSG00000138448_21 (sequence is synthesized)
aatccaaagctcaaatctatttgacaaagtaagcccagttgtatctcacaaagttgatcttgctgttttagctgcagttgagataagaggagtctcgagtcctgatcatgtctttcttcc

SEQ ID NO: 345895 - DNA, 120 bp, Artificial Sequence
  ENSG00000138448_22 (sequence is synthesized)
gattccaaactgggagcacaaggagaaccctgagactgaagaagatgttgggccagttgttcagcacatctatgagctgagaaacaatggtccaagttcattcagcaaggcaatgctcca

SEQ ID NO: 345896 - DNA, 120 bp, Artificial Sequence
  ENSG00000138448_23 (sequence is synthesized)
tcttcagtggccttacaaatataataataacactctgttgtatatccttcattatgatattgatggaccaatgaactgcacttcagatatggagatcaaccctttgagaattaagatctc

SEQ ID NO: 345897 - DNA, 120 bp, Artificial Sequence
  ENSG00000138448_24 (sequence is synthesized)
atctttgcaaacaactgaaaagaatgacacggttgccgggcaaggtgagcgggaccatctcatcactaagcgggatcttgccctcagtgaaggagatattcacactttgggttgtggagt

SEQ ID NO: 345898 - DNA, 120 bp, Artificial Sequence
  ENSG00000138448_25 (sequence is synthesized)
tgctcagtgcttgaagattgtctgccaagttgggagattagacagaggaaagagtgcaatcttgtacgtaaagtcattactgtggactgagacttttatgaataaagaaaatcagaatca

SEQ ID NO: 345899 - DNA, 120 bp, Artificial Sequence
  ENSG00000138448_26 (sequence is synthesized)
ttcctattctctgaagtcgtctgcttcatttaatgtcatagagtttccttataagaatcttccaattgaggatatcaccaactccacattggttaccactaatgtcacctggggcattca

SEQ ID NO: 345900 - DNA, 120 bp, Artificial Sequence
  ENSG00000138448_27 (sequence is synthesized)
gccagcgcccatgcctgtgcctgtgtgggtgatcattttagcagttctagcaggattgttgctactggctgttttggtatttgtaatgtacaggatgggcttttttaaacgggtccggcc

SEQ ID NO: 345901 - DNA, 120 bp, Artificial Sequence
  ENSG00000138448_28 (sequence is synthesized)
acctcaagaagaacaagaaagggagcagcttcaacctcatgaaaatggtgaaggaaactcagaaacttaactgcagtttttaagttatgctacatcttgacccactagaattagcaactt

SEQ ID NO: 345902 - DNA, 120 bp, Artificial Sequence
  ENSG00000138448_29 (sequence is synthesized)
aaaatgagaattatatttgtcaaccttctccttataaataagttcagacatacatttaataacatagggtgacttgtgtttttaggtatttaaataataaaatttcaagggatagttttt

SEQ ID NO: 345903 - DNA, 120 bp, Artificial Sequence
  ENSG00000138448_30 (sequence is synthesized)
attcaatgtatataagacaggtagtgcctgatttactactttatataaaatagtacctccttcagttactgtttctgatttaatgtacggaactttatttgttgttgttgttgttgttgt

SEQ ID NO: 345904 - DNA, 120 bp, Artificial Sequence
  ENSG00000138448_31 (sequence is synthesized)
tgttgttgttttaaagcagtccaaatttggaccttagcaatcatgtcttttgtataggtacttaatgttaatacatattacactacagtttacttttcagaatactaaagactttataac

SEQ ID NO: 345905 - DNA, 120 bp, Artificial Sequence
  ENSG00000138448_32 (sequence is synthesized)
tgcatgaacttggatttttttaatcactcatatggtagaattttataaacacatacatgataccatccaaattcttgcttttaataacaaaggtacaatattttgttttagtatgaaaat

SEQ ID NO: 345906 - DNA, 120 bp, Artificial Sequence
  ENSG00000138448_33 (sequence is synthesized)
ctggtagatcctattacacttctgtttatattaaatccacaatattttattacatttttaacttgtataaattttaggtcaaatccttcaagccaacctatactaaaaattagttccata

SEQ ID NO: 345907 - DNA, 120 bp, Artificial Sequence
  ENSG00000138448_34 (sequence is synthesized)
atcacaaatggctcttttgtgtaattgtttaatttcacctgaatatcataatgcttaaagccatatggagttggaaattatttccaaagcatatttattccattgttttagtctggctat

SEQ ID NO: 345908 - DNA, 120 bp, Artificial Sequence
  ENSG00000138448_35 (sequence is synthesized)
ttacagtataaaaaaagcatttttattaaaatactgtgtagttctttgagatagttgcttatgcatatagtaagtattacattcttagagtagagcagagtttttagttagtattaattt

SEQ ID NO: 345909 - DNA, 120 bp, Artificial Sequence
  ENSG00000138448_36 (sequence is synthesized)
attttcctccattcatgtacttttccttatatttccaaaactgttactgagaatgggtcaagatcagtgagaaatctttacagttgacaggaacctggaccccttaccccaactttatga

SEQ ID NO: 345910 - DNA, 120 bp, Artificial Sequence
  ENSG00000138448_37 (sequence is synthesized)
gtaatgcttggaataaaaactcttaaggcaactcactgatttacttctagcaatagcatgatgttacaggaatattacctctgtttaagcaaggtaatgtgtaaaatcagtctcggctgt

SEQ ID NO: 345911 - DNA, 120 bp, Artificial Sequence
  ENSG00000138448_38 (sequence is synthesized)
cagaataacttctaaaaggtatttttataagcagttcaagttactgaaaaccttttaaacctttctgaagttcgttagtataaattacttttctaggattattaataaaagccacatagg

SEQ ID NO: 345912 - DNA, 120 bp, Artificial Sequence
  ENSG00000138448_39 (sequence is synthesized)
tggcaagttgtagttttatatggctctgtagagtggtgaaccttctagaggaatatatgatttattcacagttcctcaaggcctggggatgatgatcagttatacctatttttgtgcaat

SEQ ID NO: 345913 - DNA, 120 bp, Artificial Sequence
  ENSG00000138448_40 (sequence is synthesized)
tacatcatgttgtacattagaaatggagagtttaatagctctttaactgctgtcctcattaggtaatgataaatatttcccttaaataattgactattttgctgtgttttaaaaatgatt

SEQ ID NO: 345914 - DNA, 120 bp, Artificial Sequence
  ENSG00000138448_41 (sequence is synthesized)
gaaatttatcttgccatatctcataatttcatgcacaagttgactgagctaatcttgagaatatattcgtaaaataggagcacatttagttgaggtatacaaggtaggactctagacaaa

SEQ ID NO: 345915 - DNA, 120 bp, Artificial Sequence
  ENSG00000138448_42 (sequence is synthesized)
accttctattttagctttagtgaatttcaaaagtaatgggtcttggagtatagatttttattagtagcttgaaagagcttaatcatatgcagtaagtatttttattaccaataaatttaa

SEQ ID NO: 345916 - DNA, 120 bp, Artificial Sequence
  ENSG00000138448_43 (sequence is synthesized)
aattttttaagaaaaatatttttatcctagggccaagtgttgcctgccaccaatcagtaagttagtctataacaaattttaccctaacagttttaccacctagtaacagtcatttctgaa

SEQ ID NO: 345917 - DNA, 120 bp, Artificial Sequence
  ENSG00000138448_44 (sequence is synthesized)
aatatgttggatagaaagtcactctttggcaaaagtgttagaatttgcttttgtgccatctattccttttatggcatctatcttgaaagtaatcttgtattggagattgaaagatgctgt

SEQ ID NO: 345918 - DNA, 120 bp, Artificial Sequence
  ENSG00000138448_45 (sequence is synthesized)
aacatgatatcttaaattacctttatgaaatatagttttgtataatagcatagattttccttcaaaaaatgaacatttatatatctacaaaaatatggagaagagtaatttgaaagccta

SEQ ID NO: 345919 - DNA, 120 bp, Artificial Sequence
  ENSG00000138448_46 (sequence is synthesized)
tttgaaagcctactttctgaagaaaatggtgggatttttttttatcatgattaaatatcaaaaaattgccctatgaaaactttaaatctctaaaacatttgaaatactaccatatttgtg

SEQ ID NO: 345920 - DNA, 120 bp, Artificial Sequence
  ENSG00000138448_47 (sequence is synthesized)
atttattgagaataaaaatccattttgaaatgtaaaatttttatgatctgattcagttttaagaaaacatgaatgaactagaagatattaaaaacatttgacattggtaagaaatattga

SEQ ID NO: 345921 - DNA, 120 bp, Artificial Sequence
  ENSG00000138448_48 (sequence is synthesized)
tactgatattgatttttatataggtatttatttcagaattgatattttgagaaaaatacatgtgagtcattttttctgtttctcttttctcttaacgattatcactgtaattctgaatct

SEQ ID NO: 345922 - DNA, 120 bp, Artificial Sequence
  ENSG00000138448_49 (sequence is synthesized)
gaaaggtaaaacaattagtcaaaatattattgccatcattctacctgtgttatgaaactacttattcatagttaattctcattaacacttacatttccataaagaaaactcaagtattaa

SEQ ID NO: 345923 - DNA, 120 bp, Artificial Sequence
  ENSG00000138448_50 (sequence is synthesized)
taaaagagactttactggcttaagagggctgtgaaagatttttgatagtgaatcatgaccctaagggagagatttgtgtgataaaagtattgtatataatagatcagcgatttttgtaag

SEQ ID NO: 345924 - DNA, 120 bp, Artificial Sequence
  ENSG00000138448_51 (sequence is synthesized)
gcaaacagaatttgtaagttggcagatcttcctaagttgcaaaatgtaatgatgagcttggtggagaagaatgagtcgttcttggaatacctatgtgcagccactacccatctcaatgtc

SEQ ID NO: 345925 - DNA, 120 bp, Artificial Sequence
  ENSG00000138448_52 (sequence is synthesized)
accttgtttgcattcttggatagcttgtatatgtagtagtttgatgaataatttaaagaaaaacacctaaaatttgaaaaatgattgtaggatcaaaaaaggcagatgaaattacttaat

SEQ ID NO: 345926 - DNA, 120 bp, Artificial Sequence
  ENSG00000138448_53 (sequence is synthesized)
actcagtgttttggagagtattccttttagtttgttggttggctggtttgaacgatagaaatatgcagcatgcaatatatgcttatatttcattttaatttctgatatataatgaacttc

SEQ ID NO: 345927 - DNA, 120 bp, Artificial Sequence
  ENSG00000138448_54 (sequence is synthesized)
ttgggagaggtactgaatctttgatgttttttgtcattgttctcaagtgcaatataacaatgtaaccaaatctagataatttcaaagttgtcattaatttagtaagcctaatataaacaa

SEQ ID NO: 345928 - DNA, 120 bp, Artificial Sequence
  ENSG00000138448_55 (sequence is synthesized)
atatttgtattatttttgttagcaggaaagagtgattaagtgaggttatttacccctaaatggtccattctgcattgtatttcaggctggaaatgaattattctttaccagttttgaaac

SEQ ID NO: 345929 - DNA, 120 bp, Artificial Sequence
  ENSG00000138448_56 (sequence is synthesized)
actttgaaatatcctaaggtaacttggaagctgtgtagtatatcaaattaatttgctacctaataacatagaaagtaaatatctttgtggtcacccacattgggtgagacagaaaatgaa

SEQ ID NO: 345930 - DNA, 120 bp, Artificial Sequence
  ENSG00000138448_57 (sequence is synthesized)
tctgttctaaaatttgtaatttgctaacttgatttgagttagtgaaaactggtacagtgttctgcttgatttacaacatgtaacttgtgactgtacaataaacataagcatatggtacca

SEQ ID NO: 345931 - DNA, 120 bp, Artificial Sequence
  ENSG00000138448_58 (sequence is synthesized)
ctttgtagctcctggagattcaattctttcttgccagggtctttctacctctgcctcacatattccctccatctcttcattccacttccctcatccccaccccccactcccctccatcct

SEQ ID NO: 345932 - DNA, 120 bp, Artificial Sequence
  ENSG00000138448_59 (sequence is synthesized)
attggtaagtcattggtttaggcaaatagaataaatttactcaattcaaatgctgtacatgtttttattttgttttttaaagaacgacagcttaacttttttgataatttaaactaatga

SEQ ID NO: 345933 - DNA, 120 bp, Artificial Sequence
  ENSG00000138448_60 (sequence is synthesized)
agttatatgatagcattataacctagtttaatattatcattttactccttaccccgaagtgattaaagctagaccttttagtttagcatcttgtccagtgtaagagatttcttagtatat

SEQ ID NO: 345934 - DNA, 120 bp, Artificial Sequence
  ENSG00000138448_61 (sequence is synthesized)
actaaattatattggagaaattttaggaattttcgtttacaaagttagaaagttggaaattaactgcaacaagtgaggcattttgaagatatttaaggagtaaaaatgggatcagcacat

SEQ ID NO: 345935 - DNA, 120 bp, Artificial Sequence
  ENSG00000138448_62 (sequence is synthesized)
gcagttgttagattttactcaaacctcgtgagcaagccaacgaagagaggaacaactaagctactttaaaaaaaaaattctatgtaatttttatgtaaactctacattggttaagtatgt

SEQ ID NO: 345936 - DNA, 120 bp, Artificial Sequence
  ENSG00000138448_63 (sequence is synthesized)
cattggttaagtatgtgtcagagatttctttgaatattttccctatacataaattcatttttatttgacaaatagacttgtttaaataaagcagtttatataatttgttgtttaaaataa

SEQ ID NO: 345937 - DNA, 120 bp, Artificial Sequence
  ENSG00000138448_64 (sequence is synthesized)
caccatagacatttaaaaatatgtgactatagaactgacgccaaagaacatttcaaaaataacaacagctgtgcttgaacaactacatttatttttataccatgcattcctctcactttc

SEQ ID NO: 345938 - DNA, 120 bp, Artificial Sequence
  ENSG00000138448_65 (sequence is synthesized)
ccactgtgcccaaccttgtttatatttttatcctgacacatattactctgtgttagagacaaatgttgagtttgatcatttttgcataaaaatggtcacattgtaattagaggttaactg

SEQ ID NO: 345939 - DNA, 120 bp, Artificial Sequence
  ENSG00000138448_66 (sequence is synthesized)
tggaaattgctgttatttaaaacctattgctaacatgatttctaaagttgatgtaggggaaggattatggaacagatttttgcccaaggtgtagatacattttcttttttctccttagct

SEQ ID NO: 345940 - DNA, 120 bp, Artificial Sequence
  ENSG00000138449_0 (sequence is synthesized)
cggccctgaaggggacggggcggccccagtcggaggtcgcagggagctccgcccccgactcggtataagagctgggcccggcccacggcggcggcggcggcggcggagagagctggctca

SEQ ID NO: 345941 - DNA, 120 bp, Artificial Sequence
  ENSG00000138449_1 (sequence is synthesized)
agagctggctcagggcgtccgctaggctcggacgacctgctgagcctcccaaaccgcttccataaggctttgcctttccaacttcagctacagtgttagctaagtttggaaagaaggaaa

SEQ ID NO: 345942 - DNA, 120 bp, Artificial Sequence
  ENSG00000138449_2 (sequence is synthesized)
aaagaaaatccctgggccccttttcttttgttctttgccaaagtcgtcgttgtagtctttttgcccaaggctgttgtgtttttagaggtgctatctccagttccttgcactcctgttaac

SEQ ID NO: 345943 - DNA, 120 bp, Artificial Sequence
  ENSG00000138449_3 (sequence is synthesized)
aagcacctcagcgagagcagcagcagcgatagcagccgcagaagagccagcggggtcgcctagtgtcatgaccagggcgggagatcacaaccgccagagaggatgctgtggatccttggc

SEQ ID NO: 345944 - DNA, 120 bp, Artificial Sequence
  ENSG00000138449_4 (sequence is synthesized)
cgactacctgacctctgcaaaattccttctctaccttggtcattctctctctacttggggagatcggatgtggcactttgcggtgtctgtgtttctggtagagctctatggaaacagcct

SEQ ID NO: 345945 - DNA, 120 bp, Artificial Sequence
  ENSG00000138449_5 (sequence is synthesized)
ccttttgacagcagtctacgggctggtggtggcagggtctgttctggtcctgggagccatcatcggtgactgggtggacaagaatgctagacttaaagtggcccagacctcgctggtggt

SEQ ID NO: 345946 - DNA, 120 bp, Artificial Sequence
  ENSG00000138449_6 (sequence is synthesized)
acagaatgtttcagtcatcctgtgtggaatcatcctgatgatggttttcttacataaacatgagcttctgaccatgtaccatggatgggttctcacttcctgctatatcctgatcatcac

SEQ ID NO: 345947 - DNA, 120 bp, Artificial Sequence
  ENSG00000138449_7 (sequence is synthesized)
tattgcaaatattgcaaatttggccagtactgctactgcaatcacaatccaaagggattggattgttgttgttgcaggagaagacagaagcaaactagcaaatatgaatgccacaatacg

SEQ ID NO: 345948 - DNA, 120 bp, Artificial Sequence
  ENSG00000138449_8 (sequence is synthesized)
aaggattgaccagttaaccaacatcttagcccccatggctgttggccagattatgacatttggctccccagtcatcggctgtggctttatttcgggatggaacttggtatccatgtgcgt

SEQ ID NO: 345949 - DNA, 120 bp, Artificial Sequence
  ENSG00000138449_9 (sequence is synthesized)
ggagtacgttctgctctggaaggtttaccagaaaaccccagctctagctgtgaaagctggtcttaaagaagaggaaactgaattgaaacagctgaatttacacaaagatactgagccaaa

SEQ ID NO: 345950 - DNA, 120 bp, Artificial Sequence
  ENSG00000138449_10 (sequence is synthesized)
acccctggagggaactcatctaatgggtgtgaaagactctaacatccatgagcttgaacatgagcaagagcctacttgtgcctcccagatggctgagcccttccgtaccttccgagatgg

SEQ ID NO: 345951 - DNA, 120 bp, Artificial Sequence
  ENSG00000138449_11 (sequence is synthesized)
atgggtctcctactacaaccagcctgtgtttctggctggcatgggtcttgctttcctttatatgactgtcctgggctttgactgcatcaccacagggtacgcctacactcagggactgag

SEQ ID NO: 345952 - DNA, 120 bp, Artificial Sequence
  ENSG00000138449_12 (sequence is synthesized)
tggttccatcctcagtattttgatgggagcatcagctataactggaataatgggaactgtagcttttacttggctacgtcgaaaatgtggtttggttcggacaggtctgatctcaggatt

SEQ ID NO: 345953 - DNA, 120 bp, Artificial Sequence
  ENSG00000138449_13 (sequence is synthesized)
ggcacagctttcctgtttgatcttgtgtgtgatctctgtattcatgcctggaagccccctggacttgtccgtttctccttttgaagatatccgatcaaggttcattcaaggagagtcaat

SEQ ID NO: 345954 - DNA, 120 bp, Artificial Sequence
  ENSG00000138449_14 (sequence is synthesized)
agtcctgaatctgtgcccataatctctgtcagtctgctgtttgcaggcgtcattgctgctagaatcggtctttggtcctttgatttaactgtgacacagttgctgcaagaaaatgtaatt

SEQ ID NO: 345955 - DNA, 120 bp, Artificial Sequence
  ENSG00000138449_15 (sequence is synthesized)
gaatctgaaagaggcattataaatggtgtacagaactccatgaactatcttcttgatcttctgcatttcatcatggtcatcctggctccaaatcctgaagcttttggcttgctcgtattg

SEQ ID NO: 345956 - DNA, 120 bp, Artificial Sequence
  ENSG00000138449_16 (sequence is synthesized)
atttcagtctcctttgtggcaatgggccacattatgtatttccgatttgcccaaaatactctgggaaacaagctctttgcttgcggtcctgatgcaaaagaagttaggaaggaaaatcaa

SEQ ID NO: 345957 - DNA, 120 bp, Artificial Sequence
  ENSG00000138449_17 (sequence is synthesized)
gcaaatacatctgttgtttgagacagtttaactgttgctatcctgttactagattatatagagcacatgtgcttattttgtactgcagaattccaataaatggctgggtgttttgctctg

SEQ ID NO: 345958 - DNA, 120 bp, Artificial Sequence
  ENSG00000138449_18 (sequence is synthesized)
tttttaccacagctgtgccttgagaactaaaagctgtttaggaaacctaagtcagcagaaattaactgattaatttcccttatgttgaggcatggaaaaaaaattggaaaagaaaaactc

SEQ ID NO: 345959 - DNA, 120 bp, Artificial Sequence
  ENSG00000138449_19 (sequence is synthesized)
agtttaaatacggagactataatgataacactgaattcccctatttctcatgagtagatacaatcttacgtaaaagagtggttagtcacgtgaattcagttatcatttgacagattctta

SEQ ID NO: 345960 - DNA, 120 bp, Artificial Sequence
  ENSG00000138449_20 (sequence is synthesized)
tctgtactagaattcagatatgtcagttttctgcaaaactcactcttgttcaagactagctaatttatttttttgcatcttagttatttttaaaaacaaattcttcaagtatgaagacta

SEQ ID NO: 345961 - DNA, 120 bp, Artificial Sequence
  ENSG00000138449_21 (sequence is synthesized)
aattttgataactaatattatccttattgatcctattgatcttaaggtatttacatgtatgtggaaaaacaaaacacttaactagaattctctaataaggtttatggtttagcttaaaga

SEQ ID NO: 345962 - DNA, 120 bp, Artificial Sequence
  ENSG00000138449_22 (sequence is synthesized)
gcacctttgtatttttattatcagatggggcaacatattgtatgaagcatatgtagcacttcacagcatggttatcatgtaagctgcaggtagaagcaaagctgtaaagtagatttatca

SEQ ID NO: 345963 - DNA, 120 bp, Artificial Sequence
  ENSG00000138449_23 (sequence is synthesized)
cacaatgactgcatacagacttcaaatatgtcaatagtttggtcatagaacctagaagccaaaagccacacagaagggcaagaatcccaatttaactcatgttatcatcattagtgatct

SEQ ID NO: 345964 - DNA, 120 bp, Artificial Sequence
  ENSG00000138449_24 (sequence is synthesized)
gtgttgtagaacatgagggtgtaagccttcagcctggcaagttacatgtagaaagcccacacttgtgaaggttttgttttacaaatcacttgatttaacacactcaggtagaatattttt

SEQ ID NO: 345965 - DNA, 120 bp, Artificial Sequence
  ENSG00000138449_25 (sequence is synthesized)
atttttactgttttatacccagaagttatttctacattgttctacagcaagaatattcataaaagtatccctttcaaatgcctttgagaagaatagaagaaaaaaagtttgtatatattt

SEQ ID NO: 345966 - DNA, 120 bp, Artificial Sequence
  ENSG00000138449_26 (sequence is synthesized)
taaaaaattgttttaaaagtcagtttgcaacatgtctgtaccaagatggtactttgccttaaccgtttatatgcactttcatggagactgcaatacgttgctatgagcactttctttatc

SEQ ID NO: 345967 - DNA, 120 bp, Artificial Sequence
  ENSG00000138449_27 (sequence is synthesized)
cttggagtttaatcctttgcttcatctttctacagtatgacataatgatttgctatgttgtaaaatctttgtaaaaaatttctatataaaaatattttgaaaatcttaatttttcctgaa

SEQ ID NO: 345968 - DNA, 120 bp, Artificial Sequence
  ENSG00000138449_28 (sequence is synthesized)
acagggcacatactcatgcgtggctcccttcactactgggtgtcagtctggcctgtgctcaaggtgtggcatctggttggagtttcaatatgtaggatccactaccagggttttcgtgag

SEQ ID NO: 345969 - DNA, 120 bp, Artificial Sequence
  ENSG00000138449_29 (sequence is synthesized)
attaagaagggtaaggtaacctactggcaaaaggggctggtatgccccaggggttggtttggcacagcaggattaaaacgaagtcaaccaaggctagagtctggtgttctttagtcattc

SEQ ID NO: 345970 - DNA, 120 bp, Artificial Sequence
  ENSG00000138449_30 (sequence is synthesized)
tggttgttccaggaggatattttgtcatgttcattaaaagtcccacaagaaaggtgacacatgcttatcccaactttacaggagatcggatgtggcactttgcggtgtctgtgtttctgg

SEQ ID NO: 345971 - DNA, 120 bp, Artificial Sequence
  ENSG00000138449_31 (sequence is synthesized)
aatgagagccagcattcataagaaacttcgcaagagcagtggaatagtgaccattctttattctgcctttgtcctggtgagcacatctgatatggcagaggaaactgaggatgcctggcc

SEQ ID NO: 345972 - DNA, 120 bp, Artificial Sequence
  ENSG00000138449_32 (sequence is synthesized)
ttttggccagtgtgaccttttaatattgatttctgtgtctactgtaatatcccctatagtttgttttgttgttgttttgcccacaacaggcactcattaagtattgtttgaatttaaatt

SEQ ID NO: 345973 - DNA, 120 bp, Artificial Sequence
  ENSG00000138449_33 (sequence is synthesized)
ttgtcctattggtttctaatggcatttctaagagtttactatagaattcagttgtttgttttcagctttttagtgacctatactttgtttgtgctatttaataaatgttatccatatcta

SEQ ID NO: 345974 - DNA, 120 bp, Artificial Sequence
  ENSG00000138459_0 (sequence is synthesized)
actgaacgtgcctgcgcaatgggtgtcgggtccgctttttcccaatccggacgtaatcgtggtttttgttctgcaataggcggcttagagggaggggctttttcgcctatacctactgta

SEQ ID NO: 345975 - DNA, 120 bp, Artificial Sequence
  ENSG00000138459_1 (sequence is synthesized)
gcttctccacgtatggaccctaaaggctactgctgctactacggggctagacagttactgtctcagctctaggatgtgcgttcttccactagaagctcttctgagggaggtaattaaaaa

SEQ ID NO: 345976 - DNA, 120 bp, Artificial Sequence
  ENSG00000138459_2 (sequence is synthesized)
acagtggaatggaaaaacagtgctgtagtcatcctgtaatatgctccttgtcaacaatgtatacattcctgctaggtgccatattcattgctttaagctcaagtcgcatcttactagtga

SEQ ID NO: 345977 - DNA, 120 bp, Artificial Sequence
  ENSG00000138459_3 (sequence is synthesized)
agtattctgccaatgaagaaaacaagtatgattatcttccaactactgtgaatgtgtgctcagaactggtgaagctagttttctgtgtgcttgtgtcattctgtgttataaagaaagatc

SEQ ID NO: 345978 - DNA, 120 bp, Artificial Sequence
  ENSG00000138459_4 (sequence is synthesized)
atcaaagtagaaatttgaaatatgcttcctggaaggaattctctgatttcatgaagtggtccattcctgcctttctttatttcctggataacttgattgtcttctatgtcctgtcctatc

SEQ ID NO: 345979 - DNA, 120 bp, Artificial Sequence
  ENSG00000138459_5 (sequence is synthesized)
ttcaaccagccatggctgttatcttctcaaattttagcattataacaacagctcttctattcaggatagtgctgaagaggcgtctaaactggatccagtgggcttccctcctgactttat

SEQ ID NO: 345980 - DNA, 120 bp, Artificial Sequence
  ENSG00000138459_6 (sequence is synthesized)
ttttgtctattgtggccttgactgccgggactaaaactttacagcacaacttggcaggacgtggatttcatcacgatgcctttttcagcccttccaattcctgccttcttttcagaagtg

SEQ ID NO: 345981 - DNA, 120 bp, Artificial Sequence
  ENSG00000138459_7 (sequence is synthesized)
agtgtcccagaaaagacaattgtacagcaaaggaatggacttttcctgaagctaaatggaacaccacagccagagttttcagtcacatccgtcttggcatgggccatgttcttattatag

SEQ ID NO: 345982 - DNA, 120 bp, Artificial Sequence
  ENSG00000138459_8 (sequence is synthesized)
tccagtgttttatttcttcaatggctaatatctataatgaaaagatactgaaggaagggaaccagctcactgaaagcatcttcatacagaacagcaaactctatttctttggcattctgt

SEQ ID NO: 345983 - DNA, 120 bp, Artificial Sequence
  ENSG00000138459_9 (sequence is synthesized)
ttaatgggctgactctgggccttcagaggagtaaccgtgatcagattaagaactgtggatttttttatggccacagtgcattttcagtagcccttatttttgtaactgcattccagggcc

SEQ ID NO: 345984 - DNA, 120 bp, Artificial Sequence
  ENSG00000138459_10 (sequence is synthesized)
tttcagtggctttcattctgaagttcctggataacatgttccatgtcttgatggcccaggttaccactgtcattatcacaacagtgtctgtcctggtctttgacttcaggccctccctgg

SEQ ID NO: 345985 - DNA, 120 bp, Artificial Sequence
  ENSG00000138459_11 (sequence is synthesized)
aatttttcttggaagccccatcagtccttctctctatatttatttataatgccagcaagcctcaagttccggaatacgcacctaggcaagaaaggatccgagatctaagtggcaatcttt

SEQ ID NO: 345986 - DNA, 120 bp, Artificial Sequence
  ENSG00000138459_12 (sequence is synthesized)
gggagcgttccagtggggatggagaagaactagaaagacttaccaaacccaagagtgatgagtcagatgaagatactttctaactggtacccacatagtttgcagctctcttgaacctta

SEQ ID NO: 345987 - DNA, 120 bp, Artificial Sequence
  ENSG00000138459_13 (sequence is synthesized)
ttttcacattttcagtgtttgtaatatttatcttttcactttgataaaccagaaatgtttctaaatcctaatattctttgcatatatctagctactccctaaatggttccatccaaggct

SEQ ID NO: 345988 - DNA, 120 bp, Artificial Sequence
  ENSG00000138459_14 (sequence is synthesized)
tagagtacccaaaggctaagaaattctaaagaactgatacaggagtaacaatatgaagaattcattaatatctcagtacttgataaatcagaaagttatatgtgcagattattttccttg

SEQ ID NO: 345989 - DNA, 120 bp, Artificial Sequence
  ENSG00000138459_15 (sequence is synthesized)
gccttcaagcttccaaaaaacttgtaataatcatgttagctatagcttgtatatacacatagagatcaatttgccaaatattcacaatcatgtagttctagtttacatgccaaagtcttc

SEQ ID NO: 345990 - DNA, 120 bp, Artificial Sequence
  ENSG00000138459_16 (sequence is synthesized)
cctttttaacattataaaagctaggttgtctcttgaattttgaggccctagagatagtcattttgcaagtaaagagcaacgggaccctttctaaaaacgttggttgaaggacctaaatac

SEQ ID NO: 345991 - DNA, 120 bp, Artificial Sequence
  ENSG00000138459_17 (sequence is synthesized)
ctggccataccatagatttgggatgatgtagtctgtgctaaatattttgctgaagaagcagtttctcagacacaacatctcagaattttaatttttagaaattcatgggaaattggattt

SEQ ID NO: 345992 - DNA, 120 bp, Artificial Sequence
  ENSG00000138459_18 (sequence is synthesized)
tagttaccacttgtattttaagtcatttaaacaagccacggtggggcttttttctcctcagtttgaggagaaaaatcttgatgtcattactcctgaattattacattttggagaataaga

SEQ ID NO: 345993 - DNA, 120 bp, Artificial Sequence
  ENSG00000138459_19 (sequence is synthesized)
gggcattttattttattagttactaattcaagctgtgactattgtatatctttccaagagttgaaatgctggcttcagaatcataccagattgtcagtgaagctgatgcctaggaacttt

SEQ ID NO: 345994 - DNA, 120 bp, Artificial Sequence
  ENSG00000138459_20 (sequence is synthesized)
taaagggatcctttcaaaaggatcacttagcaaacacatgttgacttttaactgatgtatgaatattaatactctaaaaatagaaagaccagtaatatataagtcactttacagtgctac

SEQ ID NO: 345995 - DNA, 120 bp, Artificial Sequence
  ENSG00000138459_21 (sequence is synthesized)
ttcacacttaaaagtgcatggtatttttcatggtattttgcatgcagccagttaactctcgtagatagagaagtcaggtgatagatgatattaaaaattagcaaacaaaagtgacttgct

SEQ ID NO: 345996 - DNA, 120 bp, Artificial Sequence
  ENSG00000138459_22 (sequence is synthesized)
cagggtcatgcagctgggtgatgatagaagagtgggctttaactggcaggcctgtatgtttacagactaccatactgtaaatatgagctttatggtgtcattctcagaaacttacacatt

SEQ ID NO: 345997 - DNA, 120 bp, Artificial Sequence
  ENSG00000138459_23 (sequence is synthesized)
tctgctctcctttctcctaagtttcatgcagatgaatataaggtaatatactattatataattcatttgtgatatccacaataatatgactggcaagaattggtggaaatttgtaattaa

SEQ ID NO: 345998 - DNA, 120 bp, Artificial Sequence
  ENSG00000138459_24 (sequence is synthesized)
aataattattaaacctatgtcttgtgttgccactctgtcatttagggtgggatgtagagtacttttaatcttaaaaaatagagtgagacaaaaacctacacaacttttaaaactttctct

SEQ ID NO: 345999 - DNA, 120 bp, Artificial Sequence
  ENSG00000138459_25 (sequence is synthesized)
ttaagtagatctttacttctaacaataacaaaggcattttcatcagttatgtgaaatacgaagattatatctattatggcgatttattttaaaggtaagggaaatgaggtacagcaggac

SEQ ID NO: 346000 - DNA, 120 bp, Artificial Sequence
  ENSG00000138459_26 (sequence is synthesized)
ctttctaggaaatgtggcatacaaaacatttttatctcataaaacataaaaattacaaaaatattcttacaaaggtatcacatacagaatacattaaatagcagatttcagtagtgcatg

SEQ ID NO: 346001 - DNA, 120 bp, Artificial Sequence
  ENSG00000138459_27 (sequence is synthesized)
gagattgattttcttatttacgattactttttttcctcaccttcctctttggaaagcattttttgcacaaagttaagtttacttatgttaacttgccacttaatgagagaggaagagaaa

SEQ ID NO: 346002 - DNA, 120 bp, Artificial Sequence
  ENSG00000138459_28 (sequence is synthesized)
gagtgagagcacaagatcatgtgctggaactaaaaatgttctattcaacccagcaatccctctactgggtacctacccaaaggaaaataaatcgttttatcaaaaagacacttgcagtgg

SEQ ID NO: 346003 - DNA, 120 bp, Artificial Sequence
  ENSG00000138459_29 (sequence is synthesized)
aagacacttgcagtggtatgtttatcacagcagtattcacagtaacaaaatcatggactcaacctaagtgtccatcagtggtgcctggaataagaaaatgtggtacatatacaccatgga

SEQ ID NO: 346004 - DNA, 120 bp, Artificial Sequence
  ENSG00000138459_30 (sequence is synthesized)
tggaatactttgcagccataaaaaataatgaaaccatgtgctttaaagccacatggatgcagctggaagccattatcctaactgaaataattcagaaacagaaaatcaaataccacatgt

SEQ ID NO: 346005 - DNA, 120 bp, Artificial Sequence
  ENSG00000138459_31 (sequence is synthesized)
taaacagtgggtacatgtggacacaggattccaaagtgagaagggtggtgtattagtccattctcatgctgctacaaagaaatacccgagactgggtaatctataaagaaaaggggttta

SEQ ID NO: 346006 - DNA, 120 bp, Artificial Sequence
  ENSG00000138459_32 (sequence is synthesized)
ctataaagaaaaggggtttaaatgactcgcagttctgcatggctggggaggaggcctcaggaaactcacaagcatggctgaaggcgaaacagaagcaagcaccttcttcacaaggcagca

SEQ ID NO: 346007 - DNA, 120 bp, Artificial Sequence
  ENSG00000138459_33 (sequence is synthesized)
gattacaattcaagatgagatttgggcggggacagaaagcctaatcatatcagatgggaaggacatgagggttgacaaaatatgtattgggtacaatgttcactgtttgagtgatgggtc

SEQ ID NO: 346008 - DNA, 120 bp, Artificial Sequence
  ENSG00000138459_34 (sequence is synthesized)
gagtgatgggtccactagaagcccaaacttcaccattatgcaatgtaccatatatacgcaatgtaacaaacctgtacatgtaccccttcaatctgaaataaaagttgtttttttttttaa

SEQ ID NO: 346009 - DNA, 120 bp, Artificial Sequence
  ENSG00000138459_35 (sequence is synthesized)
acagcgcgcgaagacggggtgcgcgatcctcgcaccccaggcagcccgcgacggaccggacccagctgtcacccagccgcgagggagggcagcggggccgaagggagacctgaggtaatt

SEQ ID NO: 346010 - DNA, 87 bp, Artificial Sequence
  ENSG00000138459_36 (sequence is synthesized)
gaaagggacataggggaccggcgctcagcacacggaggatctctgccagcctctgagttccattagtatttattgatcattattggg

SEQ ID NO: 346011 - DNA, 80 bp, Artificial Sequence
  ENSG00000138459_37 (sequence is synthesized)
tctgagttcctgggatgtggcaggatcataggatagtagtggagagagggtcaacaggtaaacacgtgaacaaaggtctc

SEQ ID NO: 346012 - DNA, 120 bp, Artificial Sequence
  ENSG00000138463_0 (sequence is synthesized)
ggtccggaggccgagggcgaccacagcagcctccgcctcctgctgctcaggactattctgcgctgggctagtcggcggtgacccggactgcgcccggcagtggcttcgcgggcgacgcgt

SEQ ID NO: 346013 - DNA, 120 bp, Artificial Sequence
  ENSG00000138463_1 (sequence is synthesized)
ttcgcgggcgacgcgtcgccatgggctctcgctggagcagcgaagaggagaggcagccgctgctggggcccgggctcgggcctgggctgggggcctcctggagaagccgggaggcggcgg

SEQ ID NO: 346014 - DNA, 120 bp, Artificial Sequence
  ENSG00000138463_2 (sequence is synthesized)
ggcggtcccgggtcccgggcgggtatacgggcgccgctggctggtgctgctgctcttctcgctgctggcgttcgttcagggcctggtctggaacacctggggtcccatccagaactcggc

SEQ ID NO: 346015 - DNA, 120 bp, Artificial Sequence
  ENSG00000138463_3 (sequence is synthesized)
gcgccaggcctacggcttctccagctgggacatcgcgctgctcgtgctgtgggggcccatcggcttcctgccctgcttcgcgttcatgtggctcctggacaagagaggtctccggataac

SEQ ID NO: 346016 - DNA, 120 bp, Artificial Sequence
  ENSG00000138463_4 (sequence is synthesized)
tgtgctcctgacatccttccttatggttttgggaactggtctaagatgcatacctatatcagacttaatccttaaaagaagattaattcatggaggacagatgttaaatggattggcagg

SEQ ID NO: 346017 - DNA, 120 bp, Artificial Sequence
  ENSG00000138463_5 (sequence is synthesized)
tccaactgtaatgaatgcagcaccatttctctctacgacgtggttttctgcagatgaaagggccacagccacagctattgcatcaatgctcagttatcttgggggagcatgtgcattttt

SEQ ID NO: 346018 - DNA, 120 bp, Artificial Sequence
  ENSG00000138463_6 (sequence is synthesized)
agttggaccacttgttgttccagctcccaatgggacatcacctcttcttgctgcagagagcagcagggcgcatattaaagatcgcatagaggctgtgttatatgcagaatttggagttgt

SEQ ID NO: 346019 - DNA, 120 bp, Artificial Sequence
  ENSG00000138463_7 (sequence is synthesized)
ctgcttaatattttctgcaacactagcttatttcccaccccgacctcctcttcctcccagtgttgctgcagctagccagcggctgagttatcggagaagcgtttgtagattattaagcaa

SEQ ID NO: 346020 - DNA, 120 bp, Artificial Sequence
  ENSG00000138463_8 (sequence is synthesized)
ttttcgatttttgatgattgctttagcatatgccataccacttggtgtatttgctggctggtctggagttctggacttaattttaacaccagcgcatgtcagccaagtagatgctggctg

SEQ ID NO: 346021 - DNA, 120 bp, Artificial Sequence
  ENSG00000138463_9 (sequence is synthesized)
gattggattttggtccatagttggaggctgtgttgttggaatagctatggcaaggtttgcagattttatcaggggtatgctgaaactaattcttctcctcctgttttcgggagctacact

SEQ ID NO: 346022 - DNA, 120 bp, Artificial Sequence
  ENSG00000138463_10 (sequence is synthesized)
gtcatccacgtggttcaccctgacctgtttgaacagcatcacacacctacctttaaccacagtgacattgtatgcctcctgtattctcctgggagtgttcttgaatagcagcgtgcctat

SEQ ID NO: 346023 - DNA, 120 bp, Artificial Sequence
  ENSG00000138463_11 (sequence is synthesized)
attttttgagctttttgtggaaactgtctacccagttccagaaggaattacttgtggagttgtcacttttttaagtaatatgtttatgggagtacttttattttttctcacattttatca

SEQ ID NO: 346024 - DNA, 120 bp, Artificial Sequence
  ENSG00000138463_12 (sequence is synthesized)
tacagagttgtcttggttcaactggtgccttcccgggtcgtgtttgctcagtctcctcctcattctgtgcttcagggaatcctatgacagactctatcttgatgtggttgtctccgttta

SEQ ID NO: 346025 - DNA, 120 bp, Artificial Sequence
  ENSG00000138463_13 (sequence is synthesized)
caggaaaagagggagaagaaagaaacttcattcagaggttttgttaggttacagattatcacattaatttaattactactaggtaataataatgggagacttgagtgataataggggatt

SEQ ID NO: 346026 - DNA, 120 bp, Artificial Sequence
  ENSG00000138463_14 (sequence is synthesized)
ttaaaactctacagatggcatacctgtgcctgcttctggggttggaagtgtgacttcttacacataaagcactacctaagtaattctctctctgttttgtgccagtgctaaactactgat

SEQ ID NO: 346027 - DNA, 120 bp, Artificial Sequence
  ENSG00000138463_15 (sequence is synthesized)
tacttgtaattatgaaaagaaataaagggtgtctatcatatgaagataacgccttccctaagtcacatatcagaataggaagatatgccactaacttctaaagaagttcaaaccctgtat

SEQ ID NO: 346028 - DNA, 120 bp, Artificial Sequence
  ENSG00000138463_16 (sequence is synthesized)
ccaattttaatgataaaatagccaagaggtatatcgatgatggaaattagccacatgtacactacattttttctaataaagccatttcttatatgactccttattttaatcaggtcagaa

SEQ ID NO: 346029 - DNA, 120 bp, Artificial Sequence
  ENSG00000138463_17 (sequence is synthesized)
gcccttggccatctttactatggtgatcaggtgctttccagtgacttctgagcataggcactgtgtctccatctcaacttatccttgtttctgtgaaatacaatttcatctactaggccc

SEQ ID NO: 346030 - DNA, 120 bp, Artificial Sequence
  ENSG00000138463_18 (sequence is synthesized)
ttaaataattatgtgagggtgtctaaatgtttaatatgattacattaaatattgtatgaaaaaatgtaattccattaggatctagcactttgttacaagtgaaatgacaagtcacatgga

SEQ ID NO: 346031 - DNA, 120 bp, Artificial Sequence
  ENSG00000138463_19 (sequence is synthesized)
catactgtgtcttctgcctgtatatggtggcatgagatgtaatgtccagagccaacaattatttaccagggttagattttattcagtgacccttgtttaaaaataataatttatcacatt

SEQ ID NO: 346032 - DNA, 120 bp, Artificial Sequence
  ENSG00000138463_20 (sequence is synthesized)
gaaactttcagctctgtcgaatgatttctgaattacatcctgtgtttcagcttaggttgtaaaatactccgttctctgtggagtcagcatatttgagagggcagcgttttgccagtacct

SEQ ID NO: 346033 - DNA, 120 bp, Artificial Sequence
  ENSG00000138463_21 (sequence is synthesized)
atcttctttctacagaagatagctttttaagaaataagagttccacattgagtggctgtcagacacagatttcactgtgacgtaaaatacactgcagtgagaatatggtatcaccactat

SEQ ID NO: 346034 - DNA, 120 bp, Artificial Sequence
  ENSG00000138463_22 (sequence is synthesized)
tcatatttacatcattcccctcacacagaaaaaccaacccttttcccaaaaagtcaagaatactgctatacctttattattctcagcttcctccagcccttcttgtttttcctcacttga

SEQ ID NO: 346035 - DNA, 120 bp, Artificial Sequence
  ENSG00000138463_23 (sequence is synthesized)
aattgaaccttcattgtcagctaagtatatatacttttgtgttttcctggacagagtgcaagtggctcttatcagccaaggtggtgaaggttcaggaaagctgggcagcactgggccctg

SEQ ID NO: 346036 - DNA, 120 bp, Artificial Sequence
  ENSG00000138463_24 (sequence is synthesized)
ctcctctctgcacctgtgtgcgccatgacacacccacatgcagattcccaagtctgtctcccctcccccttagcaagtacaaggctgtgcattaactcacctcggtcctagaggagtatc

SEQ ID NO: 346037 - DNA, 120 bp, Artificial Sequence
  ENSG00000138463_25 (sequence is synthesized)
ctagtactgcttggcaacttctaagaccctaacttgtgaaactagggaagtaagaaaccgttcaaatttaacatctgtcttcagtcatctttaaatcgtctctctttataaacactctgc

SEQ ID NO: 346038 - DNA, 120 bp, Artificial Sequence
  ENSG00000138463_26 (sequence is synthesized)
tcacttagcagaaggactgaaggaactaaggaacttgctaaagagaagaagaaaacaaaagctagacttagttccagttaattctgttattcttctgaaataaaaatgaaataaaaggaa

SEQ ID NO: 346039 - DNA, 120 bp, Artificial Sequence
  ENSG00000138468_0 (sequence is synthesized)
ctttcccctccccctccctctccaagccggaggggtcctgaggtgacagcgcctgcaactgaaatttcagcagcgggagaagatggacaagagaaagctcgggcgacggccatcttcatc

SEQ ID NO: 346040 - DNA, 120 bp, Artificial Sequence
  ENSG00000138468_1 (sequence is synthesized)
cgaaatcatcacagaaggaaaaaggaaaaagtcatcttctgatttatcggagataagaaagatgttaaatgcaaaaccagaggatgtccatgttcaatcaccactgtccaaattcagaag

SEQ ID NO: 346041 - DNA, 120 bp, Artificial Sequence
  ENSG00000138468_2 (sequence is synthesized)
ctcagaacgctggactctccctttgcagtgggaaagaagcctaaggaataaagtcatctctctagaccataaaaataaaaaacatatccgagggtgtcctgttacttccaagtcatcacc

SEQ ID NO: 346042 - DNA, 120 bp, Artificial Sequence
  ENSG00000138468_3 (sequence is synthesized)
agaaaggcaactcaaagttatgttgacgaatgtcctatggacggatttaggacgaaaattcagaaagaccctacctagaaacgatgctaatttatgtgatgccaacaaggtgcaatcaga

SEQ ID NO: 346043 - DNA, 120 bp, Artificial Sequence
  ENSG00000138468_4 (sequence is synthesized)
ctcattgccttcgacatctgttgacagcctagagacatgtcaaaaattagaacctcttcgccaaagccttaatttatctgaaaggatacccagagttatattgacgaatgtcctgggaac

SEQ ID NO: 346044 - DNA, 120 bp, Artificial Sequence
  ENSG00000138468_5 (sequence is synthesized)
ggagttaggaagaaaatacataaggaccccacctgtaactgagggaagtttgagtgatacagacaacttgcaatcagagcaactttcttcatcatctgatggcagcctagaatcttatca

SEQ ID NO: 346045 - DNA, 120 bp, Artificial Sequence
  ENSG00000138468_6 (sequence is synthesized)
aaatctaaaccctcacaagagctgttatttatctgaaaggggctcacaacgaagtaagacagtagatgacaattctgcaaagcagactgcgcacaataaagaaaaacgaagaaaggatga

SEQ ID NO: 346046 - DNA, 120 bp, Artificial Sequence
  ENSG00000138468_7 (sequence is synthesized)
tggcatttctcttttaatatctgatactcagcctgaagaccttaacagtggaagtagaggttgtgatcatctcgaacaggaaagcagaaacaaggatgttaaatattctgattcaaaagt

SEQ ID NO: 346047 - DNA, 120 bp, Artificial Sequence
  ENSG00000138468_8 (sequence is synthesized)
ggaactcactctgatttccaggaagacaaagagaaggcttagaaataatttacctgattctcaatattgtacttctttggataagtcaacagaacagacaaaaaaacaagaagatgactc

SEQ ID NO: 346048 - DNA, 120 bp, Artificial Sequence
  ENSG00000138468_9 (sequence is synthesized)
aacaatatccactgagtttgaaaagccaagtgaaaactatcatcaggatccaaaactgcctgaagaaattacaactaaacctacaaaaagtgattttactaaactatcctcacttaacag

SEQ ID NO: 346049 - DNA, 120 bp, Artificial Sequence
  ENSG00000138468_10 (sequence is synthesized)
tcaggagttgactttgagtaatgccaccaaaagtgcctctgccggttcaaccactgaaaccgttgagaactctaattccattgatattgtggggatttcttccctggttgagaaggatga

SEQ ID NO: 346050 - DNA, 120 bp, Artificial Sequence
  ENSG00000138468_11 (sequence is synthesized)
gaatgagttgaataccatagaaaagcctattctaagaggacataatgaagggaaccaatcactgatctcagctgaaccaattgttgtttccagtgatgaagaaggacctgttgaacataa

SEQ ID NO: 346051 - DNA, 120 bp, Artificial Sequence
  ENSG00000138468_12 (sequence is synthesized)
aagttcagaaattcttaagttacaatctaagcaagaccgtgagacaactaatgaaaatgagagtacttctgaatcagcattgttagaactaccattgattacatgtgaatctgtacagat

SEQ ID NO: 346052 - DNA, 120 bp, Artificial Sequence
  ENSG00000138468_13 (sequence is synthesized)
gtcatctgaattatgcccatataatcctgtcatggagaacatttccagtattatgcctagtaatgagatggatctacaactggattttatatttacttctgtttatattggtaaaataaa

SEQ ID NO: 346053 - DNA, 120 bp, Artificial Sequence
  ENSG00000138468_14 (sequence is synthesized)
aggagcttctaaaggttgtgttacaatcacaaaaaaatatattaagatcccatttcaagtgtccctgaatgagatttcattgctagtggataccacacatttaaagcggtttgggttatg

SEQ ID NO: 346054 - DNA, 120 bp, Artificial Sequence
  ENSG00000138468_15 (sequence is synthesized)
gaaaagtaaggatgataatcacagtaaaaggagtcatgctattcttttcttctgggtctcttcagattatcttcaagagattcagacccaattagaacactctgtattaagccagcaatc

SEQ ID NO: 346055 - DNA, 120 bp, Artificial Sequence
  ENSG00000138468_16 (sequence is synthesized)
aaaatctagtgaattcattttccttgaactacacaatcctgtttcacaaagagaagaattgaagctgaaagatattatgacggaaataagtataatcagtggagaattagagctttctta

SEQ ID NO: 346056 - DNA, 120 bp, Artificial Sequence
  ENSG00000138468_17 (sequence is synthesized)
cccgttgtcttgggttcaggcatttcctttgtttcagaacctctcttcaaaagaaagttcttttattcattattactgtgtttcaacttgttctttccctgctggtgttgctgttgctga

SEQ ID NO: 346057 - DNA, 120 bp, Artificial Sequence
  ENSG00000138468_18 (sequence is synthesized)
agaaatgaagctgaaatcagtatctcagccctcaaacacagatgcggccaagcctacttacaccttcctgcagaagcaaagtagcggttgctactccctttctattacatctaatccaga

SEQ ID NO: 346058 - DNA, 120 bp, Artificial Sequence
  ENSG00000138468_19 (sequence is synthesized)
tgaagaatggcgagaagtcaggcacactggacttgttcagaagttgattgtatatcctccaccacctactaaggggggattaggagtaactaatgaagatctggagtgtttagaagaagg

SEQ ID NO: 346059 - DNA, 120 bp, Artificial Sequence
  ENSG00000138468_20 (sequence is synthesized)
agaaggcatcagatgaacttgttgaacgaagtcacatttttagtagctttttctataaatgcttgacaagaaaggaaaataatttaacagaagataatccaaatctttcaatggcacaga

SEQ ID NO: 346060 - DNA, 120 bp, Artificial Sequence
  ENSG00000138468_21 (sequence is synthesized)
gaagacataaaagagtaagaacatggactcgtcacataaacatttttaataaagattacatctttgtacctgtaaatgagtcgtctcactggtatctcgcagtcatttgttttccatggt

SEQ ID NO: 346061 - DNA, 120 bp, Artificial Sequence
  ENSG00000138468_22 (sequence is synthesized)
tagaagaagctgtgtatgaagattttccacaaactgtatcccagcagtcccaggctcagcagtcccaaaatgacaacaaaacaatagataatgatctacgtactacttcgacactgtctt

SEQ ID NO: 346062 - DNA, 120 bp, Artificial Sequence
  ENSG00000138468_23 (sequence is synthesized)
tgagtgcagaggattcccaaagtaccgagtcgaatatgtcagtaccaaagaaaatgtgtaaaaggccatgtattcttatactagactccttgaaagctgcttctgtacaaaacacagttc

SEQ ID NO: 346063 - DNA, 120 bp, Artificial Sequence
  ENSG00000138468_24 (sequence is synthesized)
agaatttacgagagtatttagaggtagagtgggaagttaaactaaaaactcatcgtcaattcagcaaaacaaacatggtggatctatgccctaaagttcctaaacaggacaatagcagtg

SEQ ID NO: 346064 - DNA, 120 bp, Artificial Sequence
  ENSG00000138468_25 (sequence is synthesized)
attgtggagtatatttattgcagtatgtggaaagcttcttcaaggatcctattgttaactttgaacttccaattcatttggagaagtggtttcctcgtcatgtaataaagaccaaacggg

SEQ ID NO: 346065 - DNA, 120 bp, Artificial Sequence
  ENSG00000138468_26 (sequence is synthesized)
aagatattcgagagctcatcttgaaacttcatttacagcaacagaagggcagcagtagctagttaatctgtacaaacatgacacagatgttctctaagattactggaaagcctcttacca

SEQ ID NO: 346066 - DNA, 120 bp, Artificial Sequence
  ENSG00000138468_27 (sequence is synthesized)
gcatttgtgttagccagctcacagagaagaaaataacttgcagtagttttataataagtcattggaacattatttaaaatatgtaggacacattattagaattgttgggatctcatagat

SEQ ID NO: 346067 - DNA, 120 bp, Artificial Sequence
  ENSG00000138468_28 (sequence is synthesized)
ggaatgggaatgggggtgatatagataaacttactagatataaattaaaattttataaatatttcatatttttctgagtaaatatgattggattatgcaacagcatatgtaatatgggaa

SEQ ID NO: 346068 - DNA, 120 bp, Artificial Sequence
  ENSG00000138468_29 (sequence is synthesized)
tgttttgtagataataaaacttacatgatctgtacttccacgtgactgggtgctgaggggagttaaagcctccctggtgccagccccagtgcttgtcaaatttgctgacaggtcacatca

SEQ ID NO: 346069 - DNA, 120 bp, Artificial Sequence
  ENSG00000138468_30 (sequence is synthesized)
tattgtaattctattctttgcagctcaagcatgcagtatgaatactgtgtattttttaaaaaaataatttagtatcaaggcttcagaaaatgccatttacggcatcccttctgtatgtaa

SEQ ID NO: 346070 - DNA, 120 bp, Artificial Sequence
  ENSG00000138468_31 (sequence is synthesized)
caaaaagacattcataatgttaggaagatgataaaaattcgctcttttaaagtgcagcttattattctcaattgctaaatacgattactctgctttttttttttcatttcttttgatgtc

SEQ ID NO: 346071 - DNA, 120 bp, Artificial Sequence
  ENSG00000138468_32 (sequence is synthesized)
atatgtgagtatcttataatttagttcatttgttcagggtaaaatttgaaacaaaaaattttacctgtgcaaaatagttttttaaaaattatacatgtagctcaacttgaggtactgcta

SEQ ID NO: 346072 - DNA, 120 bp, Artificial Sequence
  ENSG00000138468_33 (sequence is synthesized)
tataaatattcactcacattatcacggaatttatgtatagtttctctaatatagaagataaaattggtgtcctcataactttaacaaagaaaaccctcagtcctatttattaatgggtag

SEQ ID NO: 346073 - DNA, 120 bp, Artificial Sequence
  ENSG00000138468_34 (sequence is synthesized)
aattaaatatataattttatagctcagtttacccagtattcatctgcaaagccagattgctctcattgcttttatatttttaaattgtagcttttagagacctatgatcctcatggaact

SEQ ID NO: 346074 - DNA, 120 bp, Artificial Sequence
  ENSG00000138468_35 (sequence is synthesized)
taattttttattaaatattcaggtaacagttctgaattcatgtgataatggtggcattatatatgattaaacacttcagaactttctaatgttatcaggagtattttgagggagatatga

SEQ ID NO: 346075 - DNA, 120 bp, Artificial Sequence
  ENSG00000138468_36 (sequence is synthesized)
ttatattgtattttctcagataagaaaaatgttttttaacaatattattttaatctgttttaagcatctcttagatttacattataactacataaagcagtgaagcaaaggcaaattaag

SEQ ID NO: 346076 - DNA, 120 bp, Artificial Sequence
  ENSG00000138468_37 (sequence is synthesized)
ataaagctagaaagtctgaacattttatttcaaaatcatacgaatcggggtcagttaagcctcagtattcttagcttttgttgattttggcactatctttatattattaaatatatttgt

SEQ ID NO: 346077 - DNA, 120 bp, Artificial Sequence
  ENSG00000138468_38 (sequence is synthesized)
tgtttggatatttcatataaagatggctataattacatatttcattcccaatttgtgtgtgttggggggtacttttaaaggtgactattgttttgtacatctaattttgggaaagcaagt

SEQ ID NO: 346078 - DNA, 120 bp, Artificial Sequence
  ENSG00000138468_39 (sequence is synthesized)
ctataagacatcttgtgatttcttaatgtttttgtttgtatgtttttcaaagatatcactgtcctttatcatgttttgaagattgtttaaaattcattttcctaaattaatgtgcaagta

SEQ ID NO: 346079 - DNA, 120 bp, Artificial Sequence
  ENSG00000138468_40 (sequence is synthesized)
atgttttgaggatatcagtgttttatattaaacatatttccaattcattaaattgaggtgtaatttttttccttaagaaacatgagctactgttagaaataaatttccagttgtatgctg

SEQ ID NO: 346080 - DNA, 120 bp, Artificial Sequence
  ENSG00000138468_41 (sequence is synthesized)
tggccctaattttgtttcttaattttaggatagattatttaattcacataatttctccttatagttgtattcaaccaattgaaattctcatctaaaataaaaagaatagcttaaaaaatc

SEQ ID NO: 346081 - DNA, 120 bp, Artificial Sequence
  ENSG00000138468_42 (sequence is synthesized)
actcagcccattgagttttaaaacctccctaatgacagatataacagttggagaattctgttaaggtttaatgacagtattttatatcatgcccagatggagctaagcaaaataagtaga

SEQ ID NO: 346082 - DNA, 120 bp, Artificial Sequence
  ENSG00000138468_43 (sequence is synthesized)
tttaactgtgtttatactaagttgcacagccagttttggaatctgaaaagcatttaataaattgctgcctttattctgtccatttcattattgtttatagttattaaatttaagaataac

SEQ ID NO: 346083 - DNA, 120 bp, Artificial Sequence
  ENSG00000138468_44 (sequence is synthesized)
caggggttactataaggagatatatttataatgtgttaaatatgatatatcttaaagaagatggttaaactaaatttaagatatttcaatatataaaaatggctcttgaagtccctatct

SEQ ID NO: 346084 - DNA, 120 bp, Artificial Sequence
  ENSG00000138468_45 (sequence is synthesized)
tggaaaagaaaagataatactcaatcggagtaccattagtagcttgtgaggataaaggaaggaaaatatcattatttatgcctggtcaaatgttttttaccctacagatttgagttacag

SEQ ID NO: 346085 - DNA, 120 bp, Artificial Sequence
  ENSG00000138468_46 (sequence is synthesized)
aataccactgcccagttattgtttcatataagaaatctcttagataataggattttcaatatcagtatatgttaactttatttttacttttaaggttgattgtatatcctccaccaccta

SEQ ID NO: 346086 - DNA, 120 bp, Artificial Sequence
  ENSG00000138468_47 (sequence is synthesized)
acttaagttttaagagaaaatgtactatttttgatgctcctagtaaagtggcttctttatagtatttcctcaagtaggcagtactaccatttgttcaggtcctgggtctgtttgccatga

SEQ ID NO: 346087 - DNA, 120 bp, Artificial Sequence
  ENSG00000138468_48 (sequence is synthesized)
gagccatttctcatccttccactgttttgctgcccatgacagggaggctgacacttgcagtctgcatttccaattgcatgtccctgggggaaatcctggaagttggagggcaaggaagaa

SEQ ID NO: 346088 - DNA, 120 bp, Artificial Sequence
  ENSG00000138468_49 (sequence is synthesized)
agaagctaggttatttcttccctactctctttgcattgggaaatgattctgacagtggctgtatttcctctgtgagtccacctctcacaggacagacctgctataactccagctttcatc

SEQ ID NO: 346089 - DNA, 120 bp, Artificial Sequence
  ENSG00000138472_0 (sequence is synthesized)
agagtagctttctgagggcatatgttagccttcagttttagtgaggagtaagggactaaatccagcaaaaacttaagtgaaaacaacctgaggaaaagctgtagactgtgagtcaagatg

SEQ ID NO: 346090 - DNA, 120 bp, Artificial Sequence
  ENSG00000138472_1 (sequence is synthesized)
gggaatggcaaatctatagctggtgatcagaaagcagttcctacacaagagacccatgtgtggtacagaacatttatgatggaatatccatccggcctgcaaacactacatgaatttaag

SEQ ID NO: 346091 - DNA, 120 bp, Artificial Sequence
  ENSG00000138472_2 (sequence is synthesized)
acacttttgggtctgcaaggtctgaatcagaaggccaataaacatattgatcaagtttataatacctttgacacgaacaaggatggatttgttgactttttggagtttattgctgctgta

SEQ ID NO: 346092 - DNA, 120 bp, Artificial Sequence
  ENSG00000138472_3 (sequence is synthesized)
aatctaatcatgcaagaaaaaatggagcaaaaattaaaatggtattttaagctgtatgatgctgatggaaatggttctattgacaaaaatgaactactggacatgttcatggcggtacaa

SEQ ID NO: 346093 - DNA, 120 bp, Artificial Sequence
  ENSG00000138472_4 (sequence is synthesized)
aactctgagtcctgaagaattcatcaacttggtgttccataagatcgatataaacaatgatggggaattgactttagaagaatttatcaatggcatggcaaaagatcaggatctcctgga

SEQ ID NO: 346094 - DNA, 120 bp, Artificial Sequence
  ENSG00000138472_5 (sequence is synthesized)
gattgtttacaagagcttcgacttctccaatgtgctgagagtaatctgtaatgggaagcagccagacatggagacagactcctccaaatctcctgacaaggctggtctagggaaggtgaa

SEQ ID NO: 346095 - DNA, 120 bp, Artificial Sequence
  ENSG00000138472_6 (sequence is synthesized)
aatgaagtagctgtgagaatacctgtcccagctatcaatgagcacaacatttcagtagagaagaaatagaatcttccccatgtacatgctgttgatttcaggtctttgttataattcata

SEQ ID NO: 346096 - DNA, 120 bp, Artificial Sequence
  ENSG00000138472_7 (sequence is synthesized)
taggcttgtgaatatagcacttattttaatccagtagagacttgcataaagatcctaaacagatgcattgttgcttttctgtgctgtctctgcagattaaaacataatgattacactaaa

SEQ ID NO: 346097 - DNA, 120 bp, Artificial Sequence
  ENSG00000138472_8 (sequence is synthesized)
aagatcgatataaacaatgatggtaatggagctactctctactggatcacttttcctacaaagggaattgactttagaagaatttatcaatggcatggcaaaagatcaggatctcctgga

SEQ ID NO: 346098 - DNA, 120 bp, Artificial Sequence
  ENSG00000138472_9 (sequence is synthesized)
tatttagacaaaagcaggaaccattcaagagaaccctagttgtgacttaggcttcataatgggaccaatccaatgttctcagtatgattcaattgagtaaatatttattgatcatattca

SEQ ID NO: 346099 - DNA, 120 bp, Artificial Sequence
  ENSG00000138483_0 (sequence is synthesized)
attgctgtggctgatgatttccagagtgttctaagatgttatcaggaaaggcatccaacaaatagtaagagaaggaccatttcatttgtacattatttcttcctgtgattctgttttcca

SEQ ID NO: 346100 - DNA, 120 bp, Artificial Sequence
  ENSG00000138483_1 (sequence is synthesized)
acaccttgcctcttgtttcaccatgaaagatgtacacacttcacaccaaaagggtaaaagctgctgctaggcagatgtggacttcaaatctctccaaggtcagacagtctcttaaaaatg

SEQ ID NO: 346101 - DNA, 120 bp, Artificial Sequence
  ENSG00000138483_2 (sequence is synthesized)
tttaccacaaatgtaagattcggcaccaagattcaactggatatcccactgtgacatctgatgattgtaatcaagatgatgatagttatgacggaaaaatgaatcttccagtagtgctcc

SEQ ID NO: 346102 - DNA, 120 bp, Artificial Sequence
  ENSG00000138483_3 (sequence is synthesized)
aagatgttaaaactgctcaagttgaacttttcagccaaatgactgacattgtccatatgataccaaaagtccaggaaaagactgacttgtatcaaaaacagatggaggtcctggaaacca

SEQ ID NO: 346103 - DNA, 120 bp, Artificial Sequence
  ENSG00000138483_4 (sequence is synthesized)
ccacgatacattgtctagagattctggagggagaaaggggtaaagaaatcacagaactgctttacaaactcatacaaccagcaactctgaagaacactttggcctctacagacatggaaa

SEQ ID NO: 346104 - DNA, 120 bp, Artificial Sequence
  ENSG00000138483_5 (sequence is synthesized)
tctcttcagcagaaccagagaaagtgcccagttatccaaagtccactgaccatcttgagaaaaaaacaatttctccccaaatgaaaactctgaagaaacgtaaccatcaaaatgcatcaa

SEQ ID NO: 346105 - DNA, 120 bp, Artificial Sequence
  ENSG00000138483_6 (sequence is synthesized)
ggagctttgaaaaagcaaagccaaatatttacatttacccagacttcagtacatggatcaagctaacttttgttcatggaggaaaatggacatttttcctcagtgctaccaagttagaag

SEQ ID NO: 346106 - DNA, 120 bp, Artificial Sequence
  ENSG00000138483_7 (sequence is synthesized)
aattcatccagtggcttctttctaggccaaccattcttcctgaggaaccccaggtcataacccagagatactgtccattcactgggcccattttgagcttgaccacaatctgtctctcca

SEQ ID NO: 346107 - DNA, 120 bp, Artificial Sequence
  ENSG00000138483_8 (sequence is synthesized)
tcttcaacaatatttacggctttatttgttccttaaaagaagaagtaactcgactatagagttatgttctgctttgcttggcacaaaataaatgtaacctggaggctccaagtattcaca

SEQ ID NO: 346108 - DNA, 120 bp, Artificial Sequence
  ENSG00000138495_0 (sequence is synthesized)
gcgactgccggaagtgactgcggacgaatcggcgtttgccgaggctggcatagatttggctgtctccgctcatagctgcttttggcgcgaaagatgccgggtctggttgactcaaaccct

SEQ ID NO: 346109 - DNA, 120 bp, Artificial Sequence
  ENSG00000138495_1 (sequence is synthesized)
gccccgcctgagtctcaggagaagaagccgctgaagccctgctgcgcttgcccggagaccaagaaggcgcgcgatgcgtgtatcatcgagaaaggagaagaacactgtggacatctaatt

SEQ ID NO: 346110 - DNA, 120 bp, Artificial Sequence
  ENSG00000138495_2 (sequence is synthesized)
tgaagaagattaattttgggagttctttgacgaactttgatatgtggaaaaagtatttataatttattgtaagaagaaagtaaaatattactagtggaagatcttcagttgtgtttcttt

SEQ ID NO: 346111 - DNA, 120 bp, Artificial Sequence
  ENSG00000138495_3 (sequence is synthesized)
tttgtgttcctcatttgctcacgtggctttttcccccaaaggatatataccaacaaatcttgtaacataaggttcttatgttcttattactatgtcattctgggaactctggatatctgt

SEQ ID NO: 346112 - DNA, 120 bp, Artificial Sequence
  ENSG00000138495_4 (sequence is synthesized)
tgtcaggagaaagcagatactgacctcaaccaatgaaatctccagaattaggtgcatagaagtaaaataaccctttaccaattcagaatcagtgtggtagccatatcatctcattcaaca

SEQ ID NO: 346113 - DNA, 120 bp, Artificial Sequence
  ENSG00000138495_5 (sequence is synthesized)
ttgcagcctcaacctgggaggttcaggtgatcctcccctcagcctcctaagtaactgggactacaggtgtgggccaccgtgcctggctaattttttgtgttgttttttagagatggggtt

SEQ ID NO: 346114 - DNA, 80 bp, Artificial Sequence
  ENSG00000138495_6 (sequence is synthesized)
agaggtgtgagccactatgcctggccaagaaatgcttttaagtagggagtgggtatcccacggaagtattgctttctgaa

SEQ ID NO: 346115 - DNA, 120 bp, Artificial Sequence
  ENSG00000138495_7 (sequence is synthesized)
agtagggagtgggtatcccacggaagtattgctttctgaaaaatgaaaatggaattgtagcatgctttattcgaataaaactaaagcctcaggccattttttttttaattaaaaagtaaa

SEQ ID NO: 346116 - DNA, 120 bp, Artificial Sequence
  ENSG00000138495_8 (sequence is synthesized)
ttgagctgttctctgtgcccttcatttagcataaatattttactcagtttatttctttatagagcagtgttactccttggatattgactagaggcaatatttaatatgcgtgattatttc

SEQ ID NO: 346117 - DNA, 120 bp, Artificial Sequence
  ENSG00000138495_9 (sequence is synthesized)
ttatcagatttcccccccaaaatcacttatctgtggaatgtcttcataggcatgggcatatcataagatcaaataaaaacaaagctgtttgaggtaatagcgtttgttttaattccagct

SEQ ID NO: 346118 - DNA, 120 bp, Artificial Sequence
  ENSG00000138495_10 (sequence is synthesized)
cgggaaacgatggagagagaggagaacggcaagcttcaaccactcattccttcctacaaatgtgtgttgagtatctgttatgggttaagcactgcgttaggtccgaagatgtagacatgg

SEQ ID NO: 346119 - DNA, 120 bp, Artificial Sequence
  ENSG00000138495_11 (sequence is synthesized)
ataaagatgcatcttgatataaaggagcttaaagttaatggagacataaaccagtgacttgtatacgacgtgtatcatcgagaaaggagaagaacactgtggacatctaattgaggccca

SEQ ID NO: 346120 - DNA, 120 bp, Artificial Sequence
  ENSG00000138495_12 (sequence is synthesized)
atgaaatggtgcccctacagacatacaaggagattgttcactgctgcgaggagcaggtcttaactctggccactgaacagacctatgctgtggagggtgagacacccatcaaccgcctgt

SEQ ID NO: 346121 - DNA, 120 bp, Artificial Sequence
  ENSG00000138495_13 (sequence is synthesized)
ccctgctgctctctggccgggttcgtgtgagccaggatgggcagtttctgcactacatctttccataccagttcatggactctcctgagtgggaatcactacagccttctgaggaggggg

SEQ ID NO: 346122 - DNA, 120 bp, Artificial Sequence
  ENSG00000138495_14 (sequence is synthesized)
gccctaggatttaaaatatgaaatggtgagtataggtgcttggagaggataaggaaatcaccctgatccaatagctggtaacctgcgaggttacctgtgctgcgtgctgtggggctggtt

SEQ ID NO: 346123 - DNA, 120 bp, Artificial Sequence
  ENSG00000138495_15 (sequence is synthesized)
cagtgcctgtggcctggacattgttctttggagcttcctgctggctgtggtctgcctgctccagctggcacacctggtataccgcctgcgtgaggacaccctccctgaggagtttgacct

SEQ ID NO: 346124 - DNA, 120 bp, Artificial Sequence
  ENSG00000138496_0 (sequence is synthesized)
gggcttcgtgttcctgggtgctgaccgtgcactccccgccgcccgaggacttagagctctggaagtagctctccagcttccttcgtactcgggggccggacttgtacacccgcacgagga

SEQ ID NO: 346125 - DNA, 120 bp, Artificial Sequence
  ENSG00000138496_1 (sequence is synthesized)
gcggggacggcgggcgcagaagtgggccaccatatctggaaactacagtctatgctttgaagcgcaaaagggaataaacatttaaagactcccccggggacctggaggatggacttttcc

SEQ ID NO: 346126 - DNA, 120 bp, Artificial Sequence
  ENSG00000138496_2 (sequence is synthesized)
atggtggccggagcagcagcttacaatgaaaaatcaggtaggattacctcgctctcactcttgtttcagaaagtctttgctcagatctttcctcagtggagaaaggggaatacagaagaa

SEQ ID NO: 346127 - DNA, 120 bp, Artificial Sequence
  ENSG00000138496_3 (sequence is synthesized)
tgtctcccctacaagtgctcagagactggtgctcttggagaaaactatagttggcaaattcccattaaccacaatgacttcaaaattttaaaaaataatgagcgtcagctgtgtgaagtc

SEQ ID NO: 346128 - DNA, 120 bp, Artificial Sequence
  ENSG00000138496_4 (sequence is synthesized)
ctccagaataagtttggctgtatctctaccctggtctctccagttcaggaaggcaacagcaaatctctgcaagtgttcagaaaaatgctgactcctaggatagagttatcagtctggaaa

SEQ ID NO: 346129 - DNA, 120 bp, Artificial Sequence
  ENSG00000138496_5 (sequence is synthesized)
gatgacctcaccacacatgctgttgatgctgtggtgaatgcagccaatgaagatcttctgcatgggggaggcctggccctggccctggtaaaagctggtggatttgaaatccaagaagag

SEQ ID NO: 346130 - DNA, 120 bp, Artificial Sequence
  ENSG00000138496_6 (sequence is synthesized)
agcaaacagtttgttgccagatatggtaaagtgtcagctggtgagatagctgtcacgggagcagggaggcttccctgcaaacagatcatccatgctgttgggcctcggtggatggaatgg

SEQ ID NO: 346131 - DNA, 120 bp, Artificial Sequence
  ENSG00000138496_7 (sequence is synthesized)
gataaacagggatgtactggaaagctgcagagggccattgtaagtattctgaattatgtcatctataaaaatactcacattaagacagtagcaattccagccttgagctctgggattttt

SEQ ID NO: 346132 - DNA, 120 bp, Artificial Sequence
  ENSG00000138496_8 (sequence is synthesized)
cagttccctctgaatttgtgtacaaagactattgtagagactatccgggttagtttgcaagggaagccaatgatgagtaatttgaaagaaattcacctggtgagcaatgaggaccctact

SEQ ID NO: 346133 - DNA, 120 bp, Artificial Sequence
  ENSG00000138496_9 (sequence is synthesized)
gttgctgcctttaaagctgcttcagaattcatcctagggaagagtgagctgggacaagaaaccaccccttctttcaatgcaatggtcgtgaacaacctgaccctccagattgtccagggc

SEQ ID NO: 346134 - DNA, 120 bp, Artificial Sequence
  ENSG00000138496_10 (sequence is synthesized)
cacattgaatggcagacggcagatgtaattgttaattctgtaaacccacatgatattacagttggacctgtggcaaagtcaattctacaacaagcaggagttgaaatgaaatcggaattt

SEQ ID NO: 346135 - DNA, 120 bp, Artificial Sequence
  ENSG00000138496_11 (sequence is synthesized)
cttgccacaaaggctaaacagtttcaacggtcccagttggtactggtcacaaaaggatttaacttgttctgtaaatatatataccatgtactgtggcattcagaatttcctaaacctcag

SEQ ID NO: 346136 - DNA, 120 bp, Artificial Sequence
  ENSG00000138496_12 (sequence is synthesized)
atattaaaacatgcaatgaaggagtgtttggaaaaatgcattgagcaaaatataacttccatttcctttcctgcccttgggactggaaacatggaaataaagaaggaaacagcagcagag

SEQ ID NO: 346137 - DNA, 120 bp, Artificial Sequence
  ENSG00000138496_13 (sequence is synthesized)
acagatttggagatatataaggctttcagttctgaaatggcaaagaggtccaagatgctgagtttgaacaattacagtgtcccccagtcaaccagagaggagaaaagagaaaatgggctt

SEQ ID NO: 346138 - DNA, 120 bp, Artificial Sequence
  ENSG00000138496_14 (sequence is synthesized)
gaagctagatctcctgccatcaatctgatgggattcaacgtggaagagatgtatgaggcccacgcatggatccaaagaatcctgagtctccagaaccaccacatcattgagaataatcat

SEQ ID NO: 346139 - DNA, 120 bp, Artificial Sequence
  ENSG00000138496_15 (sequence is synthesized)
attctgtaccttgggagaaaggaacatgacattttgtctcagcttcagaaaacttcaagtgtctccatcacagaaattatcagcccaggaaggacagagttagagattgaaggagcccgg

SEQ ID NO: 346140 - DNA, 120 bp, Artificial Sequence
  ENSG00000138496_16 (sequence is synthesized)
gctgacctcattgaggtggttatgaacattgaagatatgctttgtaaagtacaggaggaaatggcaaggaaaaaggagcgaggcctttggcgctcgttaggacagtggactattcagcaa

SEQ ID NO: 346141 - DNA, 120 bp, Artificial Sequence
  ENSG00000138496_17 (sequence is synthesized)
caaaaaacccaagacgaaatgaaagaaaatatcatatttctgaaatgtcctgtgcctccaactcaagagcttctagatcaaaagaaacagtttgaaaaatgtggtttgcaggttctaaag

SEQ ID NO: 346142 - DNA, 120 bp, Artificial Sequence
  ENSG00000138496_18 (sequence is synthesized)
gtggagaagatagacaatgaggtccttatggctgcctttcaaagaaagaagaaaatgatggaagaaaaactgcacaggcaacctgtgagccataggctgtttcagcaagtcccataccag

SEQ ID NO: 346143 - DNA, 120 bp, Artificial Sequence
  ENSG00000138496_19 (sequence is synthesized)
ttctgcaatgtggtatgcagagttggctttcaaagaatgtactcgacaccttgcgatccaaaatacggagctggcatatacttcaccaagaacctcaaaaacctggcagagaaggccaag

SEQ ID NO: 346144 - DNA, 120 bp, Artificial Sequence
  ENSG00000138496_20 (sequence is synthesized)
aaaatctctgctgcagataagctgatctatgtgtttgaggctgaagtactcacaggcttcttctgccagggacatccgttaaatattgttcccccaccactgagtcctggagctatagat

SEQ ID NO: 346145 - DNA, 120 bp, Artificial Sequence
  ENSG00000138496_21 (sequence is synthesized)
ggtcatgacagtgtggttgacaatgtctccagccctgaaacctttgttatttttagtggcatgcaggctatacctcagtatttgtggacatgcacccaggaatatgtacagtcacaagat

SEQ ID NO: 346146 - DNA, 120 bp, Artificial Sequence
  ENSG00000138496_22 (sequence is synthesized)
tactcatcaggaccaatgagaccctttgcacagcatccttggaggggattcgcaagtggcagccctgttgattaatctctacatcattttaacagctggtatggccttaccttgggtgaa

SEQ ID NO: 346147 - DNA, 120 bp, Artificial Sequence
  ENSG00000138496_23 (sequence is synthesized)
ctaaccaaataatgaccatcgatggctcaaagagtggcttgaatatatcccatgggttatctgtatggactgactgggttattgaaaggactagccacatactagcatcttagtgccttt

SEQ ID NO: 346148 - DNA, 120 bp, Artificial Sequence
  ENSG00000138496_24 (sequence is synthesized)
atctgtctttatgtcttggggttggggtaggtagataccaaatgaaacactttcaggaccttccttcctcttgcagttgttctttaatctcctttactagaggagataaatattttgcat

SEQ ID NO: 346149 - DNA, 120 bp, Artificial Sequence
  ENSG00000138496_25 (sequence is synthesized)
ataatgaagaaatttttctagtatataacgcaggccttttattttctaaaatgatgatagtataaaaatgttaggataacagaatgattttagattttccagagaatattataaagtgct

SEQ ID NO: 346150 - DNA, 120 bp, Artificial Sequence
  ENSG00000138496_26 (sequence is synthesized)
gagtaggtccggtgcctctgggccctcggggtcccctctcctgcaggctcgaggtgggcggggagaagggggacgggcgcggacccgggtcccagggccaggcctcccttgtgagtagac

SEQ ID NO: 346151 - DNA, 120 bp, Artificial Sequence
  ENSG00000138496_27 (sequence is synthesized)
gctactctgtggaatttggtgagctgacatcagtagattcttccactgatagcatttgttgttgtggggaagggatcatttgtgactgtgatttagaggtcacaaatgatgacccaggtc

SEQ ID NO: 346152 - DNA, 120 bp, Artificial Sequence
  ENSG00000138496_28 (sequence is synthesized)
acaaagtattttggaaagagtggtattttttacttttccttcgtatcttttgttgctgatgcattttacattgatgaaaagtgtgagcagtaagaactacggttcactgtttttctcctt

SEQ ID NO: 346153 - DNA, 120 bp, Artificial Sequence
  ENSG00000138496_29 (sequence is synthesized)
tatgtgtttctgtgtcctatccgcagagaacacgttgaggctttttttttttttttttgccttacttatctcaacaaaattattaccaacagcactgaaccgtcctcatcccttaattaa

SEQ ID NO: 346154 - DNA, 120 bp, Artificial Sequence
  ENSG00000138496_30 (sequence is synthesized)
aagggcattttcccaaatttaagaaagttggtcttttctctttcatccctttgtttcctatagcctgctagtgaatgaattaggtatcatttggcaggtgaagtgcataacatcttaaga

SEQ ID NO: 346155 - DNA, 120 bp, Artificial Sequence
  ENSG00000138496_31 (sequence is synthesized)
tcctcttcatccataggagttctatgtgtaactcccatgtctcttttcagatgtacaaaaacattgcatatataattcttatattgccccctctactcctcagtcactaatgaagatttc

SEQ ID NO: 346156 - DNA, 120 bp, Artificial Sequence
  ENSG00000138496_32 (sequence is synthesized)
tggctttagttctctccaaaagaggaaaagaaatttagtaaaaattatggagagatacttagcggggtggcttgattttgcttggtctattaaatatgtggctcttgatctttatctttc

SEQ ID NO: 346157 - DNA, 120 bp, Artificial Sequence
  ENSG00000138496_33 (sequence is synthesized)
aacatatgtagcatgatccttgctgaggagtcaattccaatagacttggtttctaggatgcaaaggctctagaaatcatcttttctttgttctggagagaacataggcaaaacttggggt

SEQ ID NO: 346158 - DNA, 120 bp, Artificial Sequence
  ENSG00000138496_34 (sequence is synthesized)
aaatgttgaacatagacaattactggggataaaaatagagaaatgaatccctaccaagaagccttttggggcaatcaggaaagtgatgatcagtatagtcccttcattagcaaagtctta

SEQ ID NO: 346159 - DNA, 120 bp, Artificial Sequence
  ENSG00000138496_35 (sequence is synthesized)
ccacccactacttctacttaaattactttcattaagatcatcgctgtgctcttactttccaaatctagtgagtattctcttttcagtcctgtgacagactctgctacttgcctacccaac

SEQ ID NO: 346160 - DNA, 120 bp, Artificial Sequence
  ENSG00000138496_36 (sequence is synthesized)
atctatacacatctttcttactaaaacatctaagacacccactatcctcccaaggaatatggtcccaaggtcttagccagactcatcatcagctcaagttcaggcagttctctctttatt

SEQ ID NO: 346161 - DNA, 79 bp, Artificial Sequence
  ENSG00000138496_37 (sequence is synthesized)
gggattacaggcatgtgccaccacgtgcagttaatttttgtattatctccagctactcgtgatccgtccacctcagcct

SEQ ID NO: 346162 - DNA, 120 bp, Artificial Sequence
  ENSG00000138496_38 (sequence is synthesized)
ccacctcagcctcccaaagtgttgggcttacaggtatgagccaccatgcccagcaggcagttctctcttaaagcttaaaggcaagatactgcccccaacatactcattatatagtgatat

SEQ ID NO: 346163 - DNA, 120 bp, Artificial Sequence
  ENSG00000138496_39 (sequence is synthesized)
aaaaaggagcgggaaaactgcaatgaaaactctcatgttgaaaggggagaagcaaaacacacaacagccactggctcacaccacttatctacatgctgccgaacaggtatagagaggact

SEQ ID NO: 346164 - DNA, 120 bp, Artificial Sequence
  ENSG00000138496_40 (sequence is synthesized)
ccctattccatgttgtaaaacctttattttgcactctgggaaaatcttccttatatattgtggcccttggctatttccaggttcattgcctatcagggagccatggattttctcacaggc

SEQ ID NO: 346165 - DNA, 120 bp, Artificial Sequence
  ENSG00000138496_41 (sequence is synthesized)
tagaatgtgctcaggctgttgcaaccaggcttgtggtttcttcagcaatacagttcctttaaaaattcagtgggcacgaggcctaatttcttctggttaagtttatgtctttataaccta

SEQ ID NO: 346166 - DNA, 120 bp, Artificial Sequence
  ENSG00000138496_42 (sequence is synthesized)
accacagatcttgtctccatatagtctttcaactcaagattttggtctcttacctgctgtctgtgtgctctgcccttctccctatcccttagcttaacagccactgccttgaggcaattc

SEQ ID NO: 346167 - DNA, 120 bp, Artificial Sequence
  ENSG00000138496_43 (sequence is synthesized)
agacatgactcataatgtgacctgcaccaattgactcatctctgtaggctagagagaactcttaacagaaggtgccagacaagcccaggagacaccaatcttgctaccactgaagctgtt

SEQ ID NO: 346168 - DNA, 120 bp, Artificial Sequence
  ENSG00000138496_44 (sequence is synthesized)
gttatttggagtacaaaagctcttagctttttcagccgtgcaatattccaaattataggactctcagtcaatttagatggccacccacaggcaaaggagacagaacttctgttaacaaac

SEQ ID NO: 346169 - DNA, 120 bp, Artificial Sequence
  ENSG00000138496_45 (sequence is synthesized)
ctttattttcttttttctatttatgtttgcattccaaccagttctgaataaatctcttgcttgtaggacttggttgagtgcagcaagaaggcatctacacatgcagtttcttactgggtt

SEQ ID NO: 346170 - DNA, 120 bp, Artificial Sequence
  ENSG00000138496_46 (sequence is synthesized)
gattcatttgttccacaggtatttattaagcacattctatgaatcaggccctgtgctaggggtactagaaatagagtgtaaataaaaaaccatagagttcttgcccttacaatttataat

SEQ ID NO: 346171 - DNA, 120 bp, Artificial Sequence
  ENSG00000138496_47 (sequence is synthesized)
ctcacgagttcacctgttgcccattctttatcttctctcttttttcctctacgatgtcccccttggtgatggcacctgttcccatggcctcaactcctacctcaatgatgacgacttagg

SEQ ID NO: 346172 - DNA, 120 bp, Artificial Sequence
  ENSG00000138496_48 (sequence is synthesized)
aatttctaactcttaactccctacctctctcctgacctgcaggttcatatgtctcactctctttttgacatctttacccagatgtcccataggtaactcaaattgatcccttttcttggt

SEQ ID NO: 346173 - DNA, 120 bp, Artificial Sequence
  ENSG00000138496_49 (sequence is synthesized)
catgattttccctaagaaatatgccctttgtttgctgattctccctaacctggttagtatcatcaccatctacctaccaggtttcctaaggctgaaacattatcatcctccattcctcct

SEQ ID NO: 346174 - DNA, 120 bp, Artificial Sequence
  ENSG00000138496_50 (sequence is synthesized)
tttccctcacccttatacccaggcattcacccagtcctagtgattcactctcatgaagatctcagcccagtttcacctctctattcctactgccttagttaatcttccttcagacctaga

SEQ ID NO: 346175 - DNA, 120 bp, Artificial Sequence
  ENSG00000138496_51 (sequence is synthesized)
ctattactaggtcctctccttgccacaaaacacacccctacctaatctatcctttaccaccagaattatcacgctaaaaattacattcttgcttaatatctgtattcccagttgcctacg

SEQ ID NO: 346176 - DNA, 120 bp, Artificial Sequence
  ENSG00000138496_52 (sequence is synthesized)
ggataaaagcccaaactccttagcagagaatataaggccctagctcccacattatttcagcagtcatcacccactatgttcctcaagactgcagccattaactttttagagttccctaaa

SEQ ID NO: 346177 - DNA, 120 bp, Artificial Sequence
  ENSG00000138496_53 (sequence is synthesized)
catgctgtttactttcatgcctctatcccgttgtctgtggaatgacttccctccttgcccttttcagtgctacaaacccctattctttaagacatagtacaaatggcatctcctggttgg

SEQ ID NO: 346178 - DNA, 120 bp, Artificial Sequence
  ENSG00000138496_54 (sequence is synthesized)
catctttcctgcaggcctacaggcctagtaagtatcttcctcctctgtgctcctgcatacctccattcctttgttatgacatctataactttaataagtactaaaatctgtagtcctaca

SEQ ID NO: 346179 - DNA, 120 bp, Artificial Sequence
  ENSG00000138496_55 (sequence is synthesized)
aaactcaggcatagaactcatttcctttatggctctataatggaactttacccaactctcacgttccccatgaccacagatgtggaaaatttgaatcttgacagttcaaggtgaactcag

SEQ ID NO: 346180 - DNA, 120 bp, Artificial Sequence
  ENSG00000138496_56 (sequence is synthesized)
tcattttcagagttttcatagtcccttcaagattgaaactcagttcctgcaatgtttgccccttttctcctcttttgtctatgctgggagaggcattgtggggagggttgtctggcttat

SEQ ID NO: 346181 - DNA, 120 bp, Artificial Sequence
  ENSG00000138496_57 (sequence is synthesized)
ggctcccattgtcctctgcttgataaaccacctgagctttggtcattagcagtctcctgtgcctttcacactcaggtagtgtctgcacaggccactctatgtcttttccatgctgaagaa

SEQ ID NO: 346182 - DNA, 120 bp, Artificial Sequence
  ENSG00000138496_58 (sequence is synthesized)
attcctttccaggccatgtctgtgttcctcctgccacacaggaaatttttgagcatgttcatcctccaagctgaatgcagggtcttgggtagtggtcctcacctgctccagagacttctc

SEQ ID NO: 346183 - DNA, 120 bp, Artificial Sequence
  ENSG00000138496_59 (sequence is synthesized)
cagccattgccactctccactcaggtgatgaagctggatgagggactgcacccaccagagtcaggccagggtcctgtctgctctgtgagtccctccaattgttcttattccgagatttcc

SEQ ID NO: 346184 - DNA, 120 bp, Artificial Sequence
  ENSG00000138496_60 (sequence is synthesized)
attgttctgccccctcttgactcccagggctctcaagggagtgggggtagtgaagggagccctttcccaagctcccccaagagctctagtcacatcacttctgatacttcttttcccacc

SEQ ID NO: 346185 - DNA, 120 bp, Artificial Sequence
  ENSG00000138496_61 (sequence is synthesized)
agctggaagaaagaactttcatttgtcttgaaatgagaaaaatgttcttagaatattttgtattactctctgctctgtcatttatggtaaacaaaataaaataataaaaaaaaacaaccc

SEQ ID NO: 346186 - DNA, 120 bp, Artificial Sequence
  ENSG00000138496_62 (sequence is synthesized)
ttacaatagctaccatgtacttaatgtttactacaagccaggaacaattttaagcactctataggaattaacttacataaaacagattattttattattcaatttacagaccaagtttgg

SEQ ID NO: 346187 - DNA, 120 bp, Artificial Sequence
  ENSG00000138496_63 (sequence is synthesized)
tgtgtataccatttttaaatgaatttgtgttttattagttacctatagttttcttcttcagtgacatatccacagctttagtttagcacaagcagggcattaaaatctgttgaatgaatg

SEQ ID NO: 346188 - DNA, 120 bp, Artificial Sequence
  ENSG00000138496_64 (sequence is synthesized)
cacggttatattttgtctcggaatgtatagtcttctttatttataccagattttgatttcatctccatttttcctatgcttattctttccgtgttctaatagactgaggtcctcttctct

SEQ ID NO: 346189 - DNA, 120 bp, Artificial Sequence
  ENSG00000138496_65 (sequence is synthesized)
gggactttcctaaaggctgctttagatttgtggtagtaggaatgggactgacagagtggatgaagtcaagtgctgtgtgtgcagagagggagactttgatgacaatggctatcagccctg

SEQ ID NO: 346190 - DNA, 120 bp, Artificial Sequence
  ENSG00000138496_66 (sequence is synthesized)
gacttggaatcctaggtcagtaagactgaaaagagagcagggcagggcaggcacgagggatatagttggaatcgggaggtaggaatgacatcaggacacacagaagcaaggattccagat

SEQ ID NO: 346191 - DNA, 120 bp, Artificial Sequence
  ENSG00000138496_67 (sequence is synthesized)
aggaagcccgtctttgagcaaaataaaagaagtggaatagcatttatcacactgtgttataattgtttacctatttttctatctcactaaactatgagcttaagagggcagagactatgt

SEQ ID NO: 346192 - DNA, 120 bp, Artificial Sequence
  ENSG00000138496_68 (sequence is synthesized)
ctaggtcagtgaatttttgttaaaggaatttattagagaaggggcagggaattttgaagaacgaatcaaaataggagaggattagagggaggagagactcttttgcaactttctatgaaa

SEQ ID NO: 346193 - DNA, 120 bp, Artificial Sequence
  ENSG00000138496_69 (sequence is synthesized)
agcgaattgcatgcaaagtagtattatgcacataagctcctttatttttgaagcagtatagcaggcaatttaaagagcggttctctagcctctttttcagtctttcttttctatggttct

SEQ ID NO: 346194 - DNA, 120 bp, Artificial Sequence
  ENSG00000138587_0 (sequence is synthesized)
acttttggtcgagcggagggcgcgcagctccaccgttgccaagacgccgcgtaaacacccgagcgcgcgcagccaggtgcgctccttggggctgctggctgctgcgtttgcggcgggagg

SEQ ID NO: 346195 - DNA, 120 bp, Artificial Sequence
  ENSG00000138587_1 (sequence is synthesized)
tggtggccgcggtcccacgagagggggtatttttcgtcagccaagatgggttccaaaaggagaaatttgagctgtagtgaaaggcatcagaaattagtagatgaaaactactgcaaaaaa

SEQ ID NO: 346196 - DNA, 120 bp, Artificial Sequence
  ENSG00000138587_2 (sequence is synthesized)
ttacatgtccaagctctaaaaaacgtcaacagtcaaatcaggaatcaaatggtgcagaatgaaaatgataaccgtgttcagcgcaagcaatttctcagattattacaaaatgaacaattt

SEQ ID NO: 346197 - DNA, 120 bp, Artificial Sequence
  ENSG00000138587_3 (sequence is synthesized)
gagttggatatggaagaggccattcaaaaggcagaagaaaacaagagattgaaagaactccagctcaaacaagaagaaaaactggctatggaattggcaaaactgaaacatgaaagtcta

SEQ ID NO: 346198 - DNA, 120 bp, Artificial Sequence
  ENSG00000138587_4 (sequence is synthesized)
aaggacgaaaagatgaggcaacaagtaagagaaaacagcattgagcttagagaattggagaagaaattaaaagcagcttacatgaataaagaaagggcagctcagattgctgaaaaggat

SEQ ID NO: 346199 - DNA, 120 bp, Artificial Sequence
  ENSG00000138587_5 (sequence is synthesized)
gccattaaatatgaacaaatgaaacgtgatgctgaaatagccaaaaccatgatggaagaacacaagagaataataaaggaagagaatgctgcagaagacaaacgaaacaaagcgaaagca

SEQ ID NO: 346200 - DNA, 120 bp, Artificial Sequence
  ENSG00000138587_6 (sequence is synthesized)
cagtactatcttgacttagagaaacaacttgaagaacaagaaaaaaaaaagcaggaagcttatgagcagctgctaaaagagaaactcatgattgatgaaattgttaggaagatctatgaa

SEQ ID NO: 346201 - DNA, 120 bp, Artificial Sequence
  ENSG00000138587_7 (sequence is synthesized)
gaagatcagttggaaaaacaacaaaagttagaaaaaatgaatgcaatgcgaaggtatatagaagagtttcagaaagagcaggctctctggagaaaaaagaaacgtgaggagatggaagaa

SEQ ID NO: 346202 - DNA, 120 bp, Artificial Sequence
  ENSG00000138587_8 (sequence is synthesized)
gacacagaaattagaagaaatgctgcggcaacgtgaagatttggaacaagtgcgacaagaattataccaggaagaacaagctgaaatatataagagcaagctaaaagaagaagcagaaaa

SEQ ID NO: 346203 - DNA, 120 bp, Artificial Sequence
  ENSG00000138587_9 (sequence is synthesized)
gaaattgagaaagcaaaaagagatgaagcaagattttgaagaacaaatggccttgaaggaattagtgctacaggctgcaaaagaggaagaggagaactttagaaaaactatgctagctaa

SEQ ID NO: 346204 - DNA, 120 bp, Artificial Sequence
  ENSG00000138587_10 (sequence is synthesized)
atttgctgaggatgatcgaatagaattaatgaatgctcagaaacaaagaatgaagcagctggaacacaggagggctgtggaaaaacttattgaagagcgtcgccaacaattccttgcaga

SEQ ID NO: 346205 - DNA, 120 bp, Artificial Sequence
  ENSG00000138587_11 (sequence is synthesized)
caaacaacgtgaactagaagagtggcagttgcagcaaaggcggcaaggatttattaatgcaattattgaagaagaaaggctaaaacttcttaaagagcatgctacaaacttactaggcta

SEQ ID NO: 346206 - DNA, 120 bp, Artificial Sequence
  ENSG00000138587_12 (sequence is synthesized)
tctccctaaaggagtatttaaaaaagaggatgatattgatctgcttggtgaagagttcaggaaagtatatcaacaaaggagtgaaatttgtgaagagaaatgatatcatcaaaattgggt

SEQ ID NO: 346207 - DNA, 120 bp, Artificial Sequence
  ENSG00000138587_13 (sequence is synthesized)
aaagcatagattttttgcatgttaccactagatgtcagcataacttttgttttacagttcagtggcattaggtatccattgtctgtttggattttgtaaatcatcactgaatttcataac

SEQ ID NO: 346208 - DNA, 120 bp, Artificial Sequence
  ENSG00000138587_14 (sequence is synthesized)
ttgtaaacaattatcagatacaaattaattttaatcaagctgttatttttgtactgataatttcaaaatccgatttctacaacactacagagcactgtttgcatccccatcctcaagaca

SEQ ID NO: 346209 - DNA, 120 bp, Artificial Sequence
  ENSG00000138587_15 (sequence is synthesized)
gtatatttaccttgactaatacagaactctaccccaaagtgaactgccttctgtctgtgtttacgaactttacttacttgatttagccagggaaataaatatttggaattttcttttaaa

SEQ ID NO: 346210 - DNA, 120 bp, Artificial Sequence
  ENSG00000138587_16 (sequence is synthesized)
tttactattcattgttactttttttttcattttgcaccttggaaacgatgaaagtcagctgttaatgctggaaatgagtagataaacaacagcagcaggtaagtgatgcctgattgtgcc

SEQ ID NO: 346211 - DNA, 120 bp, Artificial Sequence
  ENSG00000138587_17 (sequence is synthesized)
tcagctcggtgtaatcgtaaagacctgggtttctggagccggcctgtctttgaatcctactactgctataccttagctacggacccttgagtaagttgcttttacttttttttttttttg

SEQ ID NO: 346212 - DNA, 89 bp, Artificial Sequence
  ENSG00000138587_18 (sequence is synthesized)
gatttttttaaaaagcaaagtcaactagatgctgctaatgagaagacacaaaggagttacaaataaaagaatggaaaaagacaagacaa

SEQ ID NO: 346213 - DNA, 120 bp, Artificial Sequence
  ENSG00000138592_0 (sequence is synthesized)
gagctgggctggcttccgtcctggtagccaaggctaattctccctcgagttcttgggagatgggcatttggcgagaaggctggcgttagtgaagcgcgcccggcgtcacggaaagaagca

SEQ ID NO: 346214 - DNA, 120 bp, Artificial Sequence
  ENSG00000138592_1 (sequence is synthesized)
cttgtaaggaaatatagcatccattgtgaaagtggaaaagtaaagataattcatcatgcctgctgtggcttcagttcctaaagaactctacctcagttcttcactaaaagaccttaataa

SEQ ID NO: 346215 - DNA, 120 bp, Artificial Sequence
  ENSG00000138592_2 (sequence is synthesized)
gaagacagaagttaaaccagagaaaataagcactaagagttatgtgcacagtgccctgaagatctttaagacagcagaagaatgcagattagatcgtgatgaggaaagggcctatgtact

SEQ ID NO: 346216 - DNA, 120 bp, Artificial Sequence
  ENSG00000138592_3 (sequence is synthesized)
atatatgaaatacgtgactgtttataatcttatcaaaaaaagacctgatttcaagcaacagcaggattatttccattcaatacttggacctggaaacatcaaaaaagctgtcgaagaagc

SEQ ID NO: 346217 - DNA, 120 bp, Artificial Sequence
  ENSG00000138592_4 (sequence is synthesized)
tgaaagactctctgaaagccttaaattaagatatgaagaagctgaagtccggaaaaaacttgaggaaaaagacaggcaggaggaagcacagcggctacaacaaaaaaggcaggaaacagg

SEQ ID NO: 346218 - DNA, 120 bp, Artificial Sequence
  ENSG00000138592_5 (sequence is synthesized)
aagagaggatggtggcacattggctaaaggctctttggagaatgttttggattccaaagacaaaacccaaaagagcaatggtgaaaagaatgaaaaatgtgagaccaaagagaaaggagc

SEQ ID NO: 346219 - DNA, 120 bp, Artificial Sequence
  ENSG00000138592_6 (sequence is synthesized)
aatcacagcaaaggaactatacacaatgatgacggataaaaacatcagcttgattataatggatgctcgaagaatgcaggattatcaggattcctgtattttacattctctcagtgttcc

SEQ ID NO: 346220 - DNA, 120 bp, Artificial Sequence
  ENSG00000138592_7 (sequence is synthesized)
tgaagaagccatcagtccaggagtcactgctagttggattgaagcacacctgccagatgattctaaagacacatggaagaagagggggaatgtggagtatgtggtacttcttgactggtt

SEQ ID NO: 346221 - DNA, 120 bp, Artificial Sequence
  ENSG00000138592_8 (sequence is synthesized)
tagttctgccaaagatttacagattggaacaactctccggagtctgaaagatgcacttttcaagtgggaaagtaaaactgtcctgcgcaatgagcctttggttttagagggaggctatga

SEQ ID NO: 346222 - DNA, 120 bp, Artificial Sequence
  ENSG00000138592_9 (sequence is synthesized)
aaactggctcctttgttatccccagtatacaacaaatgctaaggtcactccacccccacgacgccagaatgaagaggtgtctatctcattggattttacttatccctcattggaagaatc

SEQ ID NO: 346223 - DNA, 120 bp, Artificial Sequence
  ENSG00000138592_10 (sequence is synthesized)
aattccttctaaacctgctgcccagacgccacctgcatctatagaagtagatgaaaatatagaattgataagtggtcaaaatgagagaatgggaccactgaatatatcaactccagttga

SEQ ID NO: 346224 - DNA, 120 bp, Artificial Sequence
  ENSG00000138592_11 (sequence is synthesized)
accagttgctgcttctaaatctgatgtttcacccataattcagccagtgcctagtataaagaatgttccacagattgatcgtactaaaaaaccagcagtcaaattgcctgaagagcatag

SEQ ID NO: 346225 - DNA, 120 bp, Artificial Sequence
  ENSG00000138592_12 (sequence is synthesized)
aataaaatctgaaagtacaaaccatgagcaacaatctcctcagagtggaaaagttattcctgatcgttccaccaagccagtagttttttctccaactctcatgttaacagatgaagaaaa

SEQ ID NO: 346226 - DNA, 120 bp, Artificial Sequence
  ENSG00000138592_13 (sequence is synthesized)
ggctcgtattcatgcagaaactgctcttctaatggaaaaaaacaaacaagaaaaagaacttcgggaaaggcagcaagaggaacagaaagagaaactgaggaaggaagaacaagaacaaaa

SEQ ID NO: 346227 - DNA, 120 bp, Artificial Sequence
  ENSG00000138592_14 (sequence is synthesized)
agccaaaaagaaacaagaagctgaagaaaatgaaattacagagaagcaacaaaaagcaaaagaagaaatggagaagaaagaaagtgaacaggccaagaaagaagataaagaaacctcagc

SEQ ID NO: 346228 - DNA, 120 bp, Artificial Sequence
  ENSG00000138592_15 (sequence is synthesized)
aaagaggggcaaagaaataacaggagtaaaaagacaaagtaaaagtgaacatgaaacttctgatgccaagaaatctgtagaagatagggggaaaaggtgtccaaccccagaaatacagaa

SEQ ID NO: 346229 - DNA, 120 bp, Artificial Sequence
  ENSG00000138592_16 (sequence is synthesized)
aaagtcaacaggagatgtgccccatacatctgtgacaggggattcaggttcaggcaagccatttaagattaaaggacaaccagaaagtggaattctaaggacaggaacttttagagagga

SEQ ID NO: 346230 - DNA, 120 bp, Artificial Sequence
  ENSG00000138592_17 (sequence is synthesized)
tacagacgataccgaaagaaataaagctcaacgagaacctttgacaagagcacgaagtgaagaaatggggaggatcgtaccaggactgccttcaggctgggccaagtttcttgacccaat

SEQ ID NO: 346231 - DNA, 120 bp, Artificial Sequence
  ENSG00000138592_18 (sequence is synthesized)
cactggaacctttcgttattatcattcacccaccaacactgttcatatgtacccaccggaaatggctccttcatctgcacctccttccacccctccaactcataaagccaagccacagat

SEQ ID NO: 346232 - DNA, 120 bp, Artificial Sequence
  ENSG00000138592_19 (sequence is synthesized)
tcctgctgagcgggatagggaaccttccaaactgaagcgctcctactcctccccagatataacccaggctattcaagaggaagagaagaggaagccaacagtaactccaacagttaatcg

SEQ ID NO: 346233 - DNA, 120 bp, Artificial Sequence
  ENSG00000138592_20 (sequence is synthesized)
ggaaaacaagccaacatgttatcctaaagctgagatctcaaggctttctgcttctcagattcggaacctcaatcctgtttttggaggttctggaccagctcttactggacttcgtaactt

SEQ ID NO: 346234 - DNA, 120 bp, Artificial Sequence
  ENSG00000138592_21 (sequence is synthesized)
aggaaatacttgttatatgaactcaatattgcagtgcctatgtaacgctccacatttggctgattatttcaaccgaaactgttatcaggatgatattaacaggtcaaatttgttggggca

SEQ ID NO: 346235 - DNA, 120 bp, Artificial Sequence
  ENSG00000138592_22 (sequence is synthesized)
taaaggtgaagtggcagaagaatttggtataatcatgaaagccctgtggacaggacagtatagatatatcagtccaaaggactttaaaatcaccattgggaagatcaatgaccagtttgc

SEQ ID NO: 346236 - DNA, 120 bp, Artificial Sequence
  ENSG00000138592_23 (sequence is synthesized)
aggatacagtcagcaagattcacaagaattgcttctgttcctaatggatggtctccatgaagatctaaataaagctgataatcggaagagatataaagaagaaaataatgatcatctcga

SEQ ID NO: 346237 - DNA, 120 bp, Artificial Sequence
  ENSG00000138592_24 (sequence is synthesized)
tgactttaaagctgcagaacatgcctggcagaaacacaagcagctcaatgagtctattattgttgcactttttcagggtcaattcaaatctacagtacagtgcctcacatgtcacaaaaa

SEQ ID NO: 346238 - DNA, 120 bp, Artificial Sequence
  ENSG00000138592_25 (sequence is synthesized)
gtctaggacatttgaggccttcatgtatttgtctctaccactagcatccacaagtaaatgtacattacaggattgccttagattattttccaaagaagaaaaactcacagataacaacag

SEQ ID NO: 346239 - DNA, 120 bp, Artificial Sequence
  ENSG00000138592_26 (sequence is synthesized)
attttactgcagtcattgcagagctcgacgggattctctaaaaaagatagaaatctggaagttaccacctgtgcttttagtgcatctgaaacgtttttcctacgatggcaggtggaaaca

SEQ ID NO: 346240 - DNA, 120 bp, Artificial Sequence
  ENSG00000138592_27 (sequence is synthesized)
aaaattacagacatctgtggacttcccgttagaaaatcttgacttgtcacagtatgttattggtccaaagaacaatttgaagaaatataatttgttttctgtttcaaatcactacggtgg

SEQ ID NO: 346241 - DNA, 120 bp, Artificial Sequence
  ENSG00000138592_28 (sequence is synthesized)
gctggatggaggccactacacagcctattgtaaaaatgcagcaagacaacggtggtttaagtttgatgatcatgaagtttctgatatctccgtttcttctgtgaaatcttcagcagctta

SEQ ID NO: 346242 - DNA, 120 bp, Artificial Sequence
  ENSG00000138592_29 (sequence is synthesized)
tatcctcttttatacttcattgggaccacgagtaactgatgtagccacataaggagacataggttataaactagttatcttttaaaaggctcagcaacacaactcttgaaatgcttatca

SEQ ID NO: 346243 - DNA, 120 bp, Artificial Sequence
  ENSG00000138592_30 (sequence is synthesized)
ggataatggtagctatagctggccatttagaggaattctaggacagtgggagctgtgttactagcactatataattccggtcagtgctgacaaataacatttaacaagtattgcagtaat

SEQ ID NO: 346244 - DNA, 120 bp, Artificial Sequence
  ENSG00000138592_31 (sequence is synthesized)
catcacttacaggtaccatttatttcaaaacaacttttttagtctgctccaaagttaaaataattaactagctaagcattattattcgactggtctaaaaactattgttatctttttttt

SEQ ID NO: 346245 - DNA, 120 bp, Artificial Sequence
  ENSG00000138592_32 (sequence is synthesized)
ttccttttcactgttatggccttttcacatttctaaatcccatcttgatatactatgaatactctagaatgatgtaaagcagataggaatgtatgtgtacatatttattgcatacttgca

SEQ ID NO: 346246 - DNA, 120 bp, Artificial Sequence
  ENSG00000138592_33 (sequence is synthesized)
catcaaatcgatgtacatagtttaacacgtggtccttttgtgaaacctagaactcagaggattgctttttttctttcagcctattttgagttaacttcagtgctttcttagggaaatgac

SEQ ID NO: 346247 - DNA, 120 bp, Artificial Sequence
  ENSG00000138592_34 (sequence is synthesized)
agggcaaagcaatttttctgttggctttgggctgtatttgtgcactaaatctttattctaaaaaaaaaaatggaaactttaatttttttaaaacgagaatttcatttacagctacattaa

SEQ ID NO: 346248 - DNA, 120 bp, Artificial Sequence
  ENSG00000138592_35 (sequence is synthesized)
aatcttaatgagaaaaataatttataaccctgtgggtgttctgtctttaatattgtattatcaaatataggacagtaaaaccatagattttatatacacacgtgctatataataacaccc

SEQ ID NO: 346249 - DNA, 120 bp, Artificial Sequence
  ENSG00000138592_36 (sequence is synthesized)
agagtcattctttcaagactagtattctcacatattgagaatattcattctaaatattaaagtaaaaatgccgggagtcaggcatgattgcaaagtgaactgcattataaactacatctt

SEQ ID NO: 346250 - DNA, 120 bp, Artificial Sequence
  ENSG00000138592_37 (sequence is synthesized)
tacagagtgatgtattaagagggttaaaggagcttataatttatttaaccgagggactcagttgctatatatatagtcagtaaaacactccatataaaaataagattctaaaagtgcttc

SEQ ID NO: 346251 - DNA, 120 bp, Artificial Sequence
  ENSG00000138592_38 (sequence is synthesized)
agaaagagaccaccattagcaggctctcagggagaagatgaaaggatggggttcaaattgtgaagctgacaacttttcatgttttacaattagtctaagagaccacttcttggctaaatt

SEQ ID NO: 346252 - DNA, 120 bp, Artificial Sequence
  ENSG00000138592_39 (sequence is synthesized)
attatatcaaatatattcaaatcatattcttaaactcatcgagccatttgaacaaaaattatttttgtttagcttcatgagtatctttggaaaataatttgttgaatatatatgattatg

SEQ ID NO: 346253 - DNA, 120 bp, Artificial Sequence
  ENSG00000138592_40 (sequence is synthesized)
agatattttctgataaacactgaattttgaaacctgaactcactatataattgcagtgttttgaaggcctgcatccattagcattgcattatattcacactgccttttttagtgaaccaa

SEQ ID NO: 346254 - DNA, 120 bp, Artificial Sequence
  ENSG00000138592_41 (sequence is synthesized)
gacccatcttctggacgacagatttatcttaagatgaaaggttgtataacatgcccacaaggcataaaaatgttaatgatgcaagtaagttctaagagtttaatgaccaagcaaaactct

SEQ ID NO: 346255 - DNA, 120 bp, Artificial Sequence
  ENSG00000138592_42 (sequence is synthesized)
accaccagatgctgactgcttgttttgcagtgttcaggaaacaccattttcctggctcttaacgcttttgtattggtatggaaaagggctggcagctatagaacaggagatccatagcat

SEQ ID NO: 346256 - DNA, 120 bp, Artificial Sequence
  ENSG00000138592_43 (sequence is synthesized)
tttgaacagaagtatctggaatctcactgactcgtgtgttatcaaagctatatcaggcctgggtgactgaattcttgcagaaagcagtgtagtggccaccatccaaatcaccaaaatggt

SEQ ID NO: 346257 - DNA, 120 bp, Artificial Sequence
  ENSG00000138592_44 (sequence is synthesized)
tctatgggagaaaggaatgtcaaacttagtattcacatatgaacactaactactggaacagaaatgatagggccaagagatgctttttaaattgtcccttattctaaattaaaaggaagt

SEQ ID NO: 346258 - DNA, 120 bp, Artificial Sequence
  ENSG00000138592_45 (sequence is synthesized)
gataattttgttgttaaatcatgcatatagcctgactgctatattgcttctcatttcattgtaactacttatatgttgtgcccattgactatcatctgtgaataaagaaagacaatattt

SEQ ID NO: 346259 - DNA, 120 bp, Artificial Sequence
  ENSG00000138592_46 (sequence is synthesized)
agcagcatctgattaatgtttatcagtgaacatttagttagcacttaatatacatcaactattaagcattaaaggaaattttacaataagaagataattcaggccgggcacagtggctca

SEQ ID NO: 346260 - DNA, 77 bp, Artificial Sequence
  ENSG00000138592_47 (sequence is synthesized)
acacctgtagtcccagctacttgggaagttggggtgggaggatctctcgagcctgagaggtcgaggctgcaatgagc

SEQ ID NO: 346261 - DNA, 120 bp, Artificial Sequence
  ENSG00000138592_48 (sequence is synthesized)
gggtgacagagtgagaccctgtcttaaaattgtaagttcatttacgtaagatggcttcttttttttttttttaaagttaggataagccacagaagagacatttaacattagaataaggat

SEQ ID NO: 346262 - DNA, 120 bp, Artificial Sequence
  ENSG00000138592_49 (sequence is synthesized)
tagaataaggatcttaactgcatattgctacagcacaaattgagggggctatgtagcaacaacccctcaatcccccatagggtacaaaaaataatgtatctcattttcctttttccatgt

SEQ ID NO: 346263 - DNA, 120 bp, Artificial Sequence
  ENSG00000138592_50 (sequence is synthesized)
ctttcctaacccagtattgtttggaacaaaggcattagagaggtgtacttccaaggaggtgttatggtgtatgataagggtcagcaaaccacggcccgtgggtcaactccaggctgtttt

SEQ ID NO: 346264 - DNA, 120 bp, Artificial Sequence
  ENSG00000138592_51 (sequence is synthesized)
tgtaagacccatgcattagcaacgggttttaaatttttatatggttggggaaaagatccaagtaataatagtattgttatatgtgaaaattttatgaaattcaaatgtcaatgtccttaa

SEQ ID NO: 346265 - DNA, 120 bp, Artificial Sequence
  ENSG00000138592_52 (sequence is synthesized)
agttttatgggaacacagtcatgctcatttgtttacacttttcagtggctgctttaatgatacaacagtaaaactgaatagttgcagccaataccatatggcttatgaggcctaaaatat

SEQ ID NO: 346266 - DNA, 120 bp, Artificial Sequence
  ENSG00000138592_53 (sequence is synthesized)
ggcctaaaatatttactgtttggcctttaacagaataagtttgctgacctctgctgtagaggaagaaaattgattatttgttaacttatttttaattttttgagatggagtctctctctg

SEQ ID NO: 346267 - DNA, 70 bp, Artificial Sequence
  ENSG00000138592_54 (sequence is synthesized)
ctgtgttagccaggatggtctcgatctcgacctcgggatcctcccacttcggcctcccaaagttatttat

SEQ ID NO: 346268 - DNA, 120 bp, Artificial Sequence
  ENSG00000138592_55 (sequence is synthesized)
cgtgagccactgcacccagcctatttatttttagaagcagtttcttgctatgttgcccaggctgtacatgaattcctaggcacaagcagtcctctcacttcaggcccccaaatagctggg

SEQ ID NO: 346269 - DNA, 120 bp, Artificial Sequence
  ENSG00000138592_56 (sequence is synthesized)
tgggactacaggcatacaccaccatgtccagaatgaaaatggatctgactagttaattccaacgtgaattcgggtgtaatagtacattgtgaccttagcgaaattatttgacctttctga

SEQ ID NO: 346270 - DNA, 120 bp, Artificial Sequence
  ENSG00000138592_57 (sequence is synthesized)
ctttctgagctttaatttctcatctattaacatggcttgttttgtatagctgttatcaaatatctcatgtattgagggctagtacacaggagttatttattcaatattcccttcaacctt

SEQ ID NO: 346271 - DNA, 120 bp, Artificial Sequence
  ENSG00000138592_58 (sequence is synthesized)
ttattcaatattcccttcaaccttcgtcttccccacctctctccttacaggtaatagaaatatctgaaattcacatttaaaagatcaaggttccgccaggcctggtggctcacgcctgta

SEQ ID NO: 346272 - DNA, 73 bp, Artificial Sequence
  ENSG00000138592_59 (sequence is synthesized)
ggagccctaaacaggaaatttaacaacagtatggtgtgtggtttatgctttgtgactgcctgggcgtaaagac

SEQ ID NO: 346273 - DNA, 120 bp, Artificial Sequence
  ENSG00000138592_60 (sequence is synthesized)
gtgtgtggtttatgctttgtgactgcctgggcgtaaagacagtccctagtttctgtaaccagtatgctcgggttttaaaggtcacgcaaggacactcgaggtaaagtcttaggcccccct

SEQ ID NO: 346274 - DNA, 120 bp, Artificial Sequence
  ENSG00000138592_61 (sequence is synthesized)
acaaggtgagaagttggattgagatccacatacaaagccaggacctttaaagacattcaccctcaatggaaggattaaaaaacaaaatccaccctctagtgcttgtgttagcttggactc

SEQ ID NO: 346275 - DNA, 120 bp, Artificial Sequence
  ENSG00000138592_62 (sequence is synthesized)
atggtacagagaataaaagtcattcctgggaatttgtcaccatagacctaccttttcaccagtttgggattcaaatttatactacctgtgtggtctgcgaatcctgtgaacttaatatga

SEQ ID NO: 346276 - DNA, 120 bp, Artificial Sequence
  ENSG00000138592_63 (sequence is synthesized)
aaagtatttctagggcagttgccagaaggaaacagaatttctagattgttgcatgttaactcagacctaacaggatatccacatatgaaaccccaatgaagttgagatcacaattcaaaa

SEQ ID NO: 346277 - DNA, 120 bp, Artificial Sequence
  ENSG00000138592_64 (sequence is synthesized)
taatagaacatgcaaggaaacaatttatcataagagtcagaaggcaataagatttaaacccccaaggactttagataatagaattattaagcagaggctacaaataaagtatatttaaat

SEQ ID NO: 346278 - DNA, 120 bp, Artificial Sequence
  ENSG00000138592_65 (sequence is synthesized)
atatttagaagaaggaaacaaactttagaaactaaatagaattttcagaaatgagaaatacaacatagttggccgtccatatttacgggctctgcatcttcagaatcaactaatgtgatg

SEQ ID NO: 346279 - DNA, 120 bp, Artificial Sequence
  ENSG00000138592_66 (sequence is synthesized)
gctctgcatcttcagaatcaactaatgtgatgggaaagatttgaaaaaataatacaacaataaaaatatacatattttaaaatacagtgtaacaactatttacatagtatttatattgta

SEQ ID NO: 346280 - DNA, 120 bp, Artificial Sequence
  ENSG00000138592_67 (sequence is synthesized)
aagtatatgggaggatgtgcataggttacatgcaaatactactccaggcctggcatggtggctcacacgtgtaatcccaacgtttttgggggatggaggtgggcagactgcttgagccca

SEQ ID NO: 346281 - DNA, 86 bp, Artificial Sequence
  ENSG00000138592_68 (sequence is synthesized)
gggcagactgcttgagcccaggagttgtacacaaaatacaaaaattgaccaggcatagtggcacgtgcctatagtcccagctactt

SEQ ID NO: 346282 - DNA, 120 bp, Artificial Sequence
  ENSG00000138592_69 (sequence is synthesized)
gcccaggaggtcgaggctacagtgagctgtgactgagccactgctctccagcctggcaacagaatgagaccttgtctcaaaaaacaaaaacaaaaaacaccagaaaagacaccattttat

SEQ ID NO: 346283 - DNA, 120 bp, Artificial Sequence
  ENSG00000138592_70 (sequence is synthesized)
cattttatatagggcccttgagcatctgtggattttgatagtcaaagggatcctggaaccaactccctgcagatactgaggtacaactgtactggaaattaacttaatgaagatattagg

SEQ ID NO: 346284 - DNA, 62 bp, Artificial Sequence
  ENSG00000138592_71 (sequence is synthesized)
gtacaactgtactggaaattaacttaatgaagatattaggacacagaaaatgaataaaccgg

SEQ ID NO: 346285 - DNA, 89 bp, Artificial Sequence
  ENSG00000138592_72 (sequence is synthesized)
tgaagttggggaaattagcaagaatggagtagtgatggagaatacgtgttaagaggcatgaaaaattgaatgagaatattcagcgtatg

SEQ ID NO: 346286 - DNA, 120 bp, Artificial Sequence
  ENSG00000138592_73 (sequence is synthesized)
taagaggcatgaaaaattgaatgagaatattcagcgtatgtcctgtagaagttctaggaggagagaatcgagtaggggagcaaggcaatattaaaagtgataatggctgaaaatgattaa

SEQ ID NO: 346287 - DNA, 120 bp, Artificial Sequence
  ENSG00000138592_74 (sequence is synthesized)
tgagacatgaatcttcacatttaggaaatgcagcgagccagggataaataaaaataatactgcagaacaacagagacaaagagaaaaagcttaaaagcaaccagaaagaaaaagagagtt

SEQ ID NO: 346288 - DNA, 120 bp, Artificial Sequence
  ENSG00000138592_75 (sequence is synthesized)
tacccacaagaatctaacctgctggtagaagttctccatagcagccatagaaatcagagacaatacagtagcttcaaaataatagagaaaaataactgtcaatctggaatttgatttcta

SEQ ID NO: 346289 - DNA, 120 bp, Artificial Sequence
  ENSG00000138592_76 (sequence is synthesized)
gttatcatccaagaatgaaagtgaattaaagacttctcaaagactgagagacttcaggataacagaccctcactgaaaagcctactgaaatatatgccacatgaattttaaaaactcaat

SEQ ID NO: 346290 - DNA, 120 bp, Artificial Sequence
  ENSG00000138592_77 (sequence is synthesized)
gaaggaagaagtgatacataatagacagtgattaacaaaaaagactgatgaagatccgggcaaatataacccaatatgaacagtagaaaaccatgataatgtctcctttggaggcatatt

SEQ ID NO: 346291 - DNA, 120 bp, Artificial Sequence
  ENSG00000138592_78 (sequence is synthesized)
gacctggtctctaaaaaaaataaaaaagttggccatgcacagtagcatgcctgtagtcccagctacttggcaggcagaggcaggaggatcccttaagcccagagttcaaaactgtagtga

SEQ ID NO: 346292 - DNA, 120 bp, Artificial Sequence
  ENSG00000138592_79 (sequence is synthesized)
agagtgagaccctgtctcaaaaacaaaagatgctgaaaacagtagttcagtgatcagaattacagtgttctaagagctttccatttctttgggagcagagtataaagatcttgattaact

SEQ ID NO: 346293 - DNA, 120 bp, Artificial Sequence
  ENSG00000138592_80 (sequence is synthesized)
ccatttctttgggagcagagtataaagatcttgattaactttaggctttaagtatgaaagctgtcgttttttagcataattactaaagaatcaaaatgtgtaacttccaaagttgtagag

SEQ ID NO: 346294 - DNA, 120 bp, Artificial Sequence
  ENSG00000138592_81 (sequence is synthesized)
ggaaaataaagaaagctttatcagtttagtagcagcaagaacaacaggggaaaacaacacagcagaggtccccaacccccccaggctgcctgtccctgacctgttcaggacctggctgca

SEQ ID NO: 346295 - DNA, 120 bp, Artificial Sequence
  ENSG00000138592_82 (sequence is synthesized)
tggctgcacagcaggaagcgagcggcaaacctaccctgagcaccgcctcctgtcagatcagctgctgcattagattctcacagcagcacaaactctattgtgaactgcgcatgtgaggga

SEQ ID NO: 346296 - DNA, 120 bp, Artificial Sequence
  ENSG00000138592_83 (sequence is synthesized)
gcgtgctccttatgagaatctactgcctgattttctgaggtggaacagtttaatcccaaaaccatgcccgccccggcccccatccatgggaaaaaaaccgcatcagtggaaaaattgtct

SEQ ID NO: 346297 - DNA, 120 bp, Artificial Sequence
  ENSG00000138592_84 (sequence is synthesized)
tccacaaaaatcagtccctggtgccaacaaggttggggactgccgaattagaaaaataaggctaacataaacacaaaagaagatgacgacaagtaaatccgaatttattactagttgaaa

SEQ ID NO: 346298 - DNA, 120 bp, Artificial Sequence
  ENSG00000138592_85 (sequence is synthesized)
tatatgggatgtagtaaatttaccaaatatttactggattttaaatatccagttctagccaggcgcgatggctcacgtctataatctcagcacttggggaggccgaggggggcggatcac

SEQ ID NO: 346299 - DNA, 120 bp, Artificial Sequence
  ENSG00000138592_86 (sequence is synthesized)
gatcatgccactgcactccagcctggggcacagagtgagactctgtctctaaaacaaaacaacaacaacaacaaatccagttctatgcactatataacatttagaactcagaaaaggtgt

SEQ ID NO: 346300 - DNA, 120 bp, Artificial Sequence
  ENSG00000138592_87 (sequence is synthesized)
cagaaaaggtgtatttcccttgagcatcatgttggtgcttaaaatgtttcagattttggagcattttggattttcagattagggatgctcaacttgtcgtaggtagatatgaccaagaga

SEQ ID NO: 346301 - DNA, 120 bp, Artificial Sequence
  ENSG00000138592_88 (sequence is synthesized)
aagctgaagtagctatacatcagctaaaatggtccctaagatagaatgcattgtaaatgagtcactttataatgaaaaaaggtttaaatcacccaaattgtataatttgaaactgctacc

SEQ ID NO: 346302 - DNA, 120 bp, Artificial Sequence
  ENSG00000138592_89 (sequence is synthesized)
tacctaacaaaacagacttgttaaaaacaaatgacagaactatagggaagttttgacaagtctaccatcataatggaagatttcaactattgatcaagcagacaaaaatattagtataga

SEQ ID NO: 346303 - DNA, 120 bp, Artificial Sequence
  ENSG00000138592_90 (sequence is synthesized)
tattagtatagatacagcttttacaatatatacttagatgagtatctgactcctgaaatagaagtgcactgtctcaacaaatgtaaaagagttagtttaggccaggcacggtggctcatg

SEQ ID NO: 346304 - DNA, 88 bp, Artificial Sequence
  ENSG00000138592_91 (sequence is synthesized)
tgtaatcccagctactgaggaggctgaagcaggaaaatcgcttgaaactgggcgtgcactctagcccgggcgacagtgcaagactctg

SEQ ID NO: 346305 - DNA, 120 bp, Artificial Sequence
  ENSG00000138592_92 (sequence is synthesized)
aaaaaaaaaaaaaaaaaaaaagattagtttaatttagaccctagtctttgaacacaatacaattagcagtcaatacaaaatgatacccccacaaaaaatcaatacttttggaaattaaaa

SEQ ID NO: 346306 - DNA, 120 bp, Artificial Sequence
  ENSG00000138592_93 (sequence is synthesized)
tggaaattaaaaaaacacttctaagtaactttataaataaattataaaagtaaaacacttagaagtaaatagtaatgaaaatactatatcaaaacatgggatgcactgatgtctgagaat

SEQ ID NO: 346307 - DNA, 120 bp, Artificial Sequence
  ENSG00000138592_94 (sequence is synthesized)
gtcttaaaaataatacgatgccaagaagagagtgggtcagtattaagatgaattgatcatttattttatattcaaatatcttgcttcagcaagctagttgatggatgcatggcggtttgt

SEQ ID NO: 346308 - DNA, 120 bp, Artificial Sequence
  ENSG00000138592_95 (sequence is synthesized)
tatgctgtccaattttgtatatgtttgaaatattctataataaaaaaaggcagagaaagtgggagatagacatttgtagttttaaatacttatatcttaaaggatagactgagtgttaat

SEQ ID NO: 346309 - DNA, 120 bp, Artificial Sequence
  ENSG00000138592_96 (sequence is synthesized)
acactggacactcagtttaaaacattaaaacataacagaataaaccctaaaagagtagagggaagagataacactgtaagaggaataacccataaagcagaaaacaaagatgtaatacag

SEQ ID NO: 346310 - DNA, 120 bp, Artificial Sequence
  ENSG00000138592_97 (sequence is synthesized)
gcagaaaacaaagatgtaatacagaagatttaaaaaaaggtaaaagttggtgttttaagacaaaataatttggatgttagcctgccacagtggttcatgcctataatccctgcactttgg

SEQ ID NO: 346311 - DNA, 120 bp, Artificial Sequence
  ENSG00000138592_98 (sequence is synthesized)
ttgggaggccaaggcagatggatcgcctgagtccaggagtttgaaaccagcttgggcaacatggcaaaaccccgtctctataaaaaaaaaaagagtacaggccaggcgcggtggctcacg

SEQ ID NO: 346312 - DNA, 120 bp, Artificial Sequence
  ENSG00000138592_99 (sequence is synthesized)
cagcctgggagacagagtgagaccctctctcaaaaatagtaacttggacgtcaatagtaagatttagagaataagagacaaggcggccgggcgcggtggctcatgtaatcccagcacttt

SEQ ID NO: 346313 - DNA, 77 bp, Artificial Sequence
  ENSG00000138592_100 (sequence is synthesized)
gtaagatttagagaataagagacaaggcggccgggcgcggtggctcaggtcaggaaattgagactatcctggctaac

SEQ ID NO: 346314 - DNA, 120 bp, Artificial Sequence
  ENSG00000138592_101 (sequence is synthesized)
ataaaataaaataaaataaaaaagagacaagtcaacgataaaattaaaaatgaaaaaacatgtaatagctacagatcctgaataaatttattgttaataccctaaaaactttatgccagc

SEQ ID NO: 346315 - DNA, 120 bp, Artificial Sequence
  ENSG00000138592_102 (sequence is synthesized)
aatttattgttaataccctaaaaactttatgccagccaactgagaccttagatgaaatagacaaatatctggagaataagttaccaaaatgactgaagagaaatacatggctcacaccta

SEQ ID NO: 346316 - DNA, 120 bp, Artificial Sequence
  ENSG00000138592_103 (sequence is synthesized)
tattttttacagaaattgacaagggccaggaataatcgaaatactactgaaaaataagaataaagttgtgatggtaatgacttagggaataatgatggttcttgctctgccagatatcaa

SEQ ID NO: 346317 - DNA, 120 bp, Artificial Sequence
  ENSG00000138592_104 (sequence is synthesized)
ttcataagctaaattaagaattaattcaatattaatttaataaatttaatattttatagctataattaatacagtacggaattagcccaaatgtgaacaaattgaccaacagacacacac

SEQ ID NO: 346318 - DNA, 120 bp, Artificial Sequence
  ENSG00000138592_105 (sequence is synthesized)
aaatgtgaacaaattgaccaacagacacacacagcataggaaaaccagcattatatgttactgaggaaaagaagaggctgagacatttggttattcatatgcagaaaaatgaaattgaat

SEQ ID NO: 346319 - DNA, 120 bp, Artificial Sequence
  ENSG00000138592_106 (sequence is synthesized)
ccctaatttatactacatttttgtcagaagtgcaaaacaatttaaatgtttggaagatatgtaggtaaatatctttgtaattccagggttggaaaggatttcttaaatgagacacagaaa

SEQ ID NO: 346320 - DNA, 120 bp, Artificial Sequence
  ENSG00000138592_107 (sequence is synthesized)
aggactaactagaaaagattgatgttccaaccaaattaaaacttgattgtcagcaattacaataagatacaacaaccaaatgcagtttgtgaattttggatggattctggtctttgaaaa

SEQ ID NO: 346321 - DNA, 120 bp, Artificial Sequence
  ENSG00000138592_108 (sequence is synthesized)
aaaatgctactaaaaaaaaaaaccttgtgacaattgatatttgaatatgaatctatgaatatgagtgatggaattttaaattttcttacatataattctgctattgtgggtatgtagaag

SEQ ID NO: 346322 - DNA, 120 bp, Artificial Sequence
  ENSG00000138592_109 (sequence is synthesized)
aatgtggttaagggattattttgatctatgaagtgtcacgatacaagatttaaatcagcaaaaagttagatatacgtgtgtatagatgtgcacatatatatgtatagagagtgaaagtaa

SEQ ID NO: 346323 - DNA, 120 bp, Artificial Sequence
  ENSG00000138592_110 (sequence is synthesized)
taaaagtgtatacactgctaaatgttaataactgaatctagctgaaatgtacaccaatgtacaccaatgttttgttttttggttttttttttagagatggagtctcgctctgtctcccag

SEQ ID NO: 346324 - DNA, 120 bp, Artificial Sequence
  ENSG00000138592_111 (sequence is synthesized)
gccaccgtgcccggccgatgtacaccaatgttctctgtacaattctttcagattttctgaatgtttgcaaagttttattttaaaaactggagagagagcacttgaaaagatgctcaacat

SEQ ID NO: 346325 - DNA, 120 bp, Artificial Sequence
  ENSG00000138592_112 (sequence is synthesized)
cattagtcattaggaaaatgcaactcaaaaccatgacataccagttcatacctactttgtatgggatagaataaaaaatgagaggcagtaacaagttcggttgaggatgtggggaaactg

SEQ ID NO: 346326 - DNA, 120 bp, Artificial Sequence
  ENSG00000138592_113 (sequence is synthesized)
gaaccttagttccagttgctggtgggaacgtaaaatgctgctgccactttggaaaacaatttggcagttcctcaaaaaattaaccagagttaccatatgacccagaaatttcacacttag

SEQ ID NO: 346327 - DNA, 120 bp, Artificial Sequence
  ENSG00000138592_114 (sequence is synthesized)
gtatatacccaacagaaatgaaaacatgtttacagaaaatcctgtacataaatgttcatagcagcattactgatgacagccaaaagtggaaacaagccaaatgtccatcactggatggat

SEQ ID NO: 346328 - DNA, 120 bp, Artificial Sequence
  ENSG00000138592_115 (sequence is synthesized)
taaggaaatgtggtatatcctatacaatggaatattatttggcaataaaaaggaatgaagtacagatacatgctatgacatgaatgaaacttgaaaacattatgctgaataaaagaaaat

SEQ ID NO: 346329 - DNA, 120 bp, Artificial Sequence
  ENSG00000138592_116 (sequence is synthesized)
tgaatgaaacttgaaaacattatgctgaataaaagaaaataaaaacagaaggtcatatattctatgattctgtttattaaaatacccagaataggccaggcactgtggctcacgcctgta

SEQ ID NO: 346330 - DNA, 88 bp, Artificial Sequence
  ENSG00000138592_117 (sequence is synthesized)
cgaggcaggtggatcacttgacgtctaaccccatctcaaccaaaatacacaaaaattattggggcatggtggtgcacacctgtggtcc

SEQ ID NO: 346331 - DNA, 120 bp, Artificial Sequence
  ENSG00000138592_118 (sequence is synthesized)
tgtctcaaaaaataaaataaataaaattttaaaaatacgcagaataggcacatctatagaaatatataaagtagaggccaggagaagtggttcatgcctgtaatccgagcactttgggag

SEQ ID NO: 346332 - DNA, 120 bp, Artificial Sequence
  ENSG00000138592_119 (sequence is synthesized)
agcctgggcaacagagcaagactctgttaaaaaaaaaaaaaatagcgagagatcgagagagagtgcacgtgagaagactagtagttgctatggactgggggagaaggaacgggttacagg

SEQ ID NO: 346333 - DNA, 120 bp, Artificial Sequence
  ENSG00000138592_120 (sequence is synthesized)
ttgctatggactgggggagaaggaacgggttacagggtttcttttggggataacgaaaatgttctaaaactggactgtggtgataactgcacaactctgtgaatgtactaaaaactactg

SEQ ID NO: 346334 - DNA, 67 bp, Artificial Sequence
  ENSG00000138592_121 (sequence is synthesized)
tgataactgcacaactctgtgaatgtactaaaaactactgtgagatgggcagatcacttgaggtcag

SEQ ID NO: 346335 - DNA, 82 bp, Artificial Sequence
  ENSG00000138592_122 (sequence is synthesized)
atggtgaaaccacatctctactaaaaatatttttaaaaattagccaggcatggtgtgagaatcatttgaaaccagggggtgg

SEQ ID NO: 346336 - DNA, 90 bp, Artificial Sequence
  ENSG00000138592_123 (sequence is synthesized)
actctgtctccacaactgaacacatttaaggtgaattctgtggtatgtgaactatctctaagaacttctttttatttaagttgggaaaca

SEQ ID NO: 346337 - DNA, 120 bp, Artificial Sequence
  ENSG00000138592_124 (sequence is synthesized)
actatctctaagaacttctttttatttaagttgggaaacaaaaagatcatgtacaacaaaccaaaaacaaaaaagttatttctaacccatgtaacatataacaaggatctagaacatgta

SEQ ID NO: 346338 - DNA, 120 bp, Artificial Sequence
  ENSG00000138592_125 (sequence is synthesized)
aatgactctttccaatcaataagaagaaaaataacccagtttgtaaaaaatgtgcaaaagacaaatatttcatacaataggaaaaactaaaatgagataattttgtatccattagatggc

SEQ ID NO: 346339 - DNA, 120 bp, Artificial Sequence
  ENSG00000138592_126 (sequence is synthesized)
aaaaattaagaagtctgatgatcctggtaggggtatgtattggtataatcacttgtagaaagttaaatatgcacatactttatgatctaagtgacctcactcctaagtatatacatgaga

SEQ ID NO: 346340 - DNA, 120 bp, Artificial Sequence
  ENSG00000138592_127 (sequence is synthesized)
gaaactcttatgcacatatatatgcaggaatgtctgcataatgttgttcatgccagcaaaaatttggaaacaatgaaatatcaataggaaaatggataatttatgatatattcacacaat

SEQ ID NO: 346341 - DNA, 120 bp, Artificial Sequence
  ENSG00000138592_128 (sequence is synthesized)
tattcacacaatatacatcataggctagtgaaattataaccacatgcaacaatatggatatatctttaaaatatttaatgaaaaagtatgcttggcgcggtagctcacacctgtaatccc

SEQ ID NO: 346342 - DNA, 90 bp, Artificial Sequence
  ENSG00000138592_129 (sequence is synthesized)
caagagcgaaactgtcttcaagccacagaaggtaatttaaaaatgtacactcaagatttaaaaagaactacaattccataagaaaaaggc

SEQ ID NO: 346343 - DNA, 120 bp, Artificial Sequence
  ENSG00000138592_130 (sequence is synthesized)
tcaagatttaaaaagaactacaattccataagaaaaaggcaggccacagaataggaaaaagaataaaagacttgtttaggcatttcacaaaagaaagtatacaaatttaagtagttattt

SEQ ID NO: 346344 - DNA, 120 bp, Artificial Sequence
  ENSG00000138592_131 (sequence is synthesized)
aaaccacaatgccattctactatatgggcaaccagaagggccaaaacaaaacgaacaaaagactaccaagtgttaacaaggatttaaggcaactgaaacttccagtcattgctggtgggg

SEQ ID NO: 346345 - DNA, 120 bp, Artificial Sequence
  ENSG00000138592_132 (sequence is synthesized)
gtatgaattggtacagtcgctttggaaagctactgagcagtatgtactaaagccagacatatgcgtatttctgaaccaggagtttcactcctaggtatgtactcaaaagaactgtgtaca

SEQ ID NO: 346346 - DNA, 120 bp, Artificial Sequence
  ENSG00000138592_133 (sequence is synthesized)
ctatgttcaccaaaaaacaagaatgtttatagcaaccctctttgcattagtcaaaagctagtaattacccaaaagttcctgaatggtagaatgaattactaaattgtagtattttcatac

SEQ ID NO: 346347 - DNA, 120 bp, Artificial Sequence
  ENSG00000138592_134 (sequence is synthesized)
aatggaatactatacagcaatgagaatgaataaattacaatataaacaacaatatggatgaacattacataattttgaatgaaaggagccagacacaaaaaaaggatatactgtacaatt

SEQ ID NO: 346348 - DNA, 120 bp, Artificial Sequence
  ENSG00000138592_135 (sequence is synthesized)
ccatttatacgaagcataaaatcaggcaaaaatctataaatctgtcctgccagaagtcagtggttttccagactcgaaggcaggtacaagcacagttagggtgctggtaacattctgttt

SEQ ID NO: 346349 - DNA, 120 bp, Artificial Sequence
  ENSG00000138592_136 (sequence is synthesized)
aaactctgttctgctggttacatgggtatgttcacttgaaaatccatcaagttttatcctcatggtttgtgtacttttctgtatatatgtttcacttcaataaagtttatttttggtcaa

SEQ ID NO: 346350 - DNA, 89 bp, Artificial Sequence
  ENSG00000138592_137 (sequence is synthesized)
aaaaaaaaaaaaaaaaaattacaaaattagctggacatggtgttgtgcctgtagttccatcgagcctgggaggcagaggttgcagtgag

SEQ ID NO: 346351 - DNA, 120 bp, Artificial Sequence
  ENSG00000138592_138 (sequence is synthesized)
tggattttacagtcctggctaaaaatctagatgttaatgaatgaggattcatcctggtatcttcctctgtcagtgtaattgtaatgttttgttctgcagtttttcctacgatggcaggtg

SEQ ID NO: 346352 - DNA, 120 bp, Artificial Sequence
  ENSG00000138592_139 (sequence is synthesized)
gtgcgggtcttgggccctagcacctgttctctgggaagtcgtccgctgtgaacgatgaacgcctttccttccaccagctgctggttaccccggagacaagctctgtccgcggagaggagt

SEQ ID NO: 346353 - DNA, 120 bp, Artificial Sequence
  ENSG00000138592_140 (sequence is synthesized)
ctcgagttcttgggagatgggcatttggcgagaaggctggcgttagtgaagcgcgcccggcgtcacgctgctggttaccccggagacaagctctgtccgcggagaggagtgggacaactc

SEQ ID NO: 346354 - DNA, 120 bp, Artificial Sequence
  ENSG00000138592_141 (sequence is synthesized)
ttgcttggatccactgtcttcctccccgtgaactaccacagaaggccatctacctccaccttgccacctgctatcattacaggcttagacatactcctctacaccttggtatagtaatat

SEQ ID NO: 346355 - DNA, 120 bp, Artificial Sequence
  ENSG00000138592_142 (sequence is synthesized)
ttgtactttgagaaaaagataatttttttcatctctgaatctgttttttaaaatatgaagggcagccaaggcaaggttttttgattctttggtacaagtagcttaagtttttatatgaca

SEQ ID NO: 346356 - DNA, 120 bp, Artificial Sequence
  ENSG00000138592_143 (sequence is synthesized)
aatcctgttcacccgggaggggagccctcatggccttatcacctctttaaaggccccatctcttaatcctgtcacattggcaacacctgaattttggaatatttgacgtgaatctggtgg

SEQ ID NO: 346357 - DNA, 120 bp, Artificial Sequence
  ENSG00000138592_144 (sequence is synthesized)
taacctatgaataagtaagcattttggtgtagggctacagtatgtgaataatttcatgttgacatcaagaacccattttacctttcaaaccatagtacttaccactcagctccagaaaag

SEQ ID NO: 346358 - DNA, 120 bp, Artificial Sequence
  ENSG00000138592_145 (sequence is synthesized)
ctcagctccagaaaagtcaaattaggaaaggggaaaatatctttatccttaggaataatgaaggctgggcatggtggctcacactggtaatcctagcactttgggaggctgacgtgggca

SEQ ID NO: 346359 - DNA, 89 bp, Artificial Sequence
  ENSG00000138592_146 (sequence is synthesized)
gggaggcaaaactccgtctctacaaaaattagctaggtgtggtgatacatgcctatagtccctgctacttgggaggctaaggtgggagg

SEQ ID NO: 346360 - DNA, 120 bp, Artificial Sequence
  ENSG00000138592_147 (sequence is synthesized)
agcccagaaggtcaaggctgcagtgagccgtgattgtgccgctatactccaccagcctgggtgacagaatgagaccctatctcaaaaaagagtaaagccttctctgattagtaaaggaca

SEQ ID NO: 346361 - DNA, 120 bp, Artificial Sequence
  ENSG00000138592_148 (sequence is synthesized)
gacaggatgagagcagtgccagaaggcagaacctcgctgtcatgaactggagcctgttgatgatgaggagaccatgcagggcttgcagccaaaagaaggaagctgaagggatgtaagcaa

SEQ ID NO: 346362 - DNA, 120 bp, Artificial Sequence
  ENSG00000138592_149 (sequence is synthesized)
gtcagattcagatgagaatctggtggtgagcctgcaaataaataagtagtttaatgtagtgctacagtatgtgaataatttcatgttgacatcaagaatctactgtaccttgcttaactt

SEQ ID NO: 346363 - DNA, 82 bp, Artificial Sequence
  ENSG00000138592_150 (sequence is synthesized)
tctcccagagtgttgggattacagctgtgaggcaccacgcccagtcagtgcactgctttttgcatggagaaagtcttgctgc

SEQ ID NO: 346364 - DNA, 120 bp, Artificial Sequence
  ENSG00000138593_0 (sequence is synthesized)
aatcggtgtcgcggccagccagataggggcggaggtccggaacccagtctggacccgagcggggggccatggagaaagcggcccgaggcgctgtttacaccgactagcgcgggcccgttg

SEQ ID NO: 346365 - DNA, 120 bp, Artificial Sequence
  ENSG00000138593_1 (sequence is synthesized)
cggctgcaggcaccatggaccgagcccccacggagcagaatgtcaagctgtcagctgaggtggagccatttattccccagaagaagagtcctgatacatttatgatccctatggctctcc

SEQ ID NO: 346366 - DNA, 120 bp, Artificial Sequence
  ENSG00000138593_2 (sequence is synthesized)
caaatgataatggaagtgtttctggtgtggaaccaactccaattcccagctacctgattacttgttacccatttgtgcaggaaaaccagtccaatagacagtttcctttatataacaatg

SEQ ID NO: 346367 - DNA, 120 bp, Artificial Sequence
  ENSG00000138593_3 (sequence is synthesized)
atatacgatggcaacaacccaatccaaaccctactggaccatactttgcctatcccattatatctgctcagccgcctgtttctacagagtatacatattatcagctgatgccagcaccat

SEQ ID NO: 346368 - DNA, 120 bp, Artificial Sequence
  ENSG00000138593_4 (sequence is synthesized)
gtgcccaggttatgggtttctatcatccttttcctacaccttactccaacacctttcaggctgcaaatactgtaaatgctatcaccacagaatgcactgagcgtccaagtcagcttggac

SEQ ID NO: 346369 - DNA, 120 bp, Artificial Sequence
  ENSG00000138593_5 (sequence is synthesized)
aggtcttcccattgtccagccatcgaagcagaaacagtaacagaggatcagtggtcccaaaacaacagcttttacaacagcacataaaaagcaaaaggccgctggtgaaaaatgtagcta

SEQ ID NO: 346370 - DNA, 120 bp, Artificial Sequence
  ENSG00000138593_6 (sequence is synthesized)
ctcagaaagaaacaaatgcagcaggtcctgatagtcgatcaaaaattgtgcttctggtagatgcttcacagcaaactgatttcccatcagatatcgctaacaagtctctctcagagacca

SEQ ID NO: 346371 - DNA, 120 bp, Artificial Sequence
  ENSG00000138593_7 (sequence is synthesized)
ctgcaacaatgctctggaagtccaagggcaggagaagaagagcatcccaccctactgctgaatcttctagtgagcagggggctagtgaagccgacattgacagtgatagtggttactgca

SEQ ID NO: 346372 - DNA, 120 bp, Artificial Sequence
  ENSG00000138593_8 (sequence is synthesized)
gtcccaaacacagcaacaaccagcctgcagcaggggctttgagaaatcctgattctgggaccatgaatcatgtggaatcatctatgtgtgcaggtggtgtaaattggtccaatgtaactt

SEQ ID NO: 346373 - DNA, 120 bp, Artificial Sequence
  ENSG00000138593_9 (sequence is synthesized)
gccaggcaactcagaaaaaaccttggatggaaaaaaatcagacattttctagaggtggaaggcaaactgaacaaagaaataattcacaggatgaagatgggtttcaagaactaaatgaga

SEQ ID NO: 346374 - DNA, 120 bp, Artificial Sequence
  ENSG00000138593_10 (sequence is synthesized)
atggaaatgctaaggatgagaatattcaacaaaaactttcttctaaagtattggatgatttacctgaaaactcaccaatcaatatagttcagactccaattcctattaccacctcagttc

SEQ ID NO: 346375 - DNA, 120 bp, Artificial Sequence
  ENSG00000138593_11 (sequence is synthesized)
ccaaacgtgcaaaaagtcagaagaagaaagctttagcagcagcccttgccacagctcaagagtattcagaaataagtatggagcaaaaaaaattacaggaagctttatcaaaagcagctg

SEQ ID NO: 346376 - DNA, 120 bp, Artificial Sequence
  ENSG00000138593_12 (sequence is synthesized)
gaaaaaagaataaaacacctgtgcagctagatttaggggacatgttagctgctctggaaaaacaacagcaagcaatgaaagcacggcaaattactaacaccagacctctgtcatatacag

SEQ ID NO: 346377 - DNA, 120 bp, Artificial Sequence
  ENSG00000138593_13 (sequence is synthesized)
tggttactgcagcttcttttcacactaaagactctactaatagaaaacctttaaccaaaagtcagccctgtttgacatcctttaattctgtggacattgcttcttctaaagcaaaaaaag

SEQ ID NO: 346378 - DNA, 120 bp, Artificial Sequence
  ENSG00000138593_14 (sequence is synthesized)
gaaaagagaaggaaattgcaaaactaaaacgacccacagcacttaaaaaggttattttaaaagaaagagaggaaaagaaggggcgcttaactgtggaccacaatcttttgggatccgagg

SEQ ID NO: 346379 - DNA, 120 bp, Artificial Sequence
  ENSG00000138593_15 (sequence is synthesized)
aaccaacagaaatgcacttagattttattgatgacttgccacaggagattgtttcccaggaagatactggactaagcatgcccagtgatacttcactctctccagcaagtcagaactctc

SEQ ID NO: 346380 - DNA, 120 bp, Artificial Sequence
  ENSG00000138593_16 (sequence is synthesized)
catactgtatgacacctgtgtcacaaggctctcctgctagttctggaataggcagtccaatggcatcttcaacaataaccaaaatccacagcaaaagatttagagagtattgtaatcagg

SEQ ID NO: 346381 - DNA, 120 bp, Artificial Sequence
  ENSG00000138593_17 (sequence is synthesized)
ttctttgtaaagagattgatgaatgtgtgactcttcttctccaagagcttgtcagtttccaggaacgcatctaccaaaaagatcctgtaagagcaaaagcaaggagacgactcgttatgg

SEQ ID NO: 346382 - DNA, 120 bp, Artificial Sequence
  ENSG00000138593_18 (sequence is synthesized)
gtctaagagaagttaccaaacatatgaagttaaacaagatcaagtgtgttataatttctccaaactgtgaaaaaatccagtcaaaaggtggtctggatgaggctctctataatgttatag

SEQ ID NO: 346383 - DNA, 120 bp, Artificial Sequence
  ENSG00000138593_19 (sequence is synthesized)
ccatggcacgggaacaagaaattccttttgtgtttgcccttggaaggaaagctctaggacgctgtgtgaacaagctggttcctgttagcgtagtgggaatcttcaactactttggtgctg

SEQ ID NO: 346384 - DNA, 120 bp, Artificial Sequence
  ENSG00000138593_20 (sequence is synthesized)
agagcctgtttaataaattagtagaactcactgaggaggccaggaaagcatataaagatatggttgcagcaatggaacaggagcaggctgaggaagccttaaagaatgtgaagaaggtac

SEQ ID NO: 346385 - DNA, 120 bp, Artificial Sequence
  ENSG00000138593_21 (sequence is synthesized)
cacaccacatgggacattctcggaatccctctgcagcaagtgccatttctttctgcagtgttatttctgaaccgatctctgaagtaaatgaaaaggaatatgaaacaaattggagaaaca

SEQ ID NO: 346386 - DNA, 120 bp, Artificial Sequence
  ENSG00000138593_22 (sequence is synthesized)
tggtggaaacttcagatggactggaagcatcagaaaatgagaaagaggtatcctgtaagcacagcacttctgaaaaacccagtaaacttccatttgacacacccccaattggtaagcagc

SEQ ID NO: 346387 - DNA, 120 bp, Artificial Sequence
  ENSG00000138593_23 (sequence is synthesized)
catcattagtggctacaggcagtactacctcagctacaagtgctgggaaatccacagcaagtgataaagaggaagtgaagccagatgacctggaatgggcctcacagcagagtacagaga

SEQ ID NO: 346388 - DNA, 120 bp, Artificial Sequence
  ENSG00000138593_24 (sequence is synthesized)
ctggctctttggatggcagttgccgagatcttttgaattcctccatcaccagcaccaccagcactcttgtacctggcatgcttgaagaagaagaagatgaagatgaggaggaggaggaag

SEQ ID NO: 346389 - DNA, 120 bp, Artificial Sequence
  ENSG00000138593_25 (sequence is synthesized)
attatactcatgaacccatatctgtagaagtgcagctcaatagtagaattgagtcttgggtctcagagacccagagaactatggaaacccttcagcttggaaaaacccttaatggttctg

SEQ ID NO: 346390 - DNA, 120 bp, Artificial Sequence
  ENSG00000138593_26 (sequence is synthesized)
aggaagacaatgtagagcaaagtggagaagaggaagcagaggcgcctgaggtgctggagccagggatggacagtgaggcatggactgctgaccagcaggccagtcctgggcagcagaagt

SEQ ID NO: 346391 - DNA, 120 bp, Artificial Sequence
  ENSG00000138593_27 (sequence is synthesized)
ccagcaactgcagctcgctcaacaaagagcactctgattctaattacacaacgcaaactacgtaactcaggaaatgtcggctctctatctccagctgtggaagggttgcagccattacct

SEQ ID NO: 346392 - DNA, 120 bp, Artificial Sequence
  ENSG00000138593_28 (sequence is synthesized)
aacaaatatttttgtagcttttacttgttatgatctgtagcttagcttttaattagtatctaagtgtctttctaagaactgtgtggaaaattcagatctgtttcagcttattttgtaatc

SEQ ID NO: 346393 - DNA, 120 bp, Artificial Sequence
  ENSG00000138593_29 (sequence is synthesized)
aaaaacagtgataaaaagaagaccagatcttaaagaaaataaatttcaaatgcttacttaaaagacattttgaaagttaaagaacaaggttctaaggatagaagcagttatcagtgtttg

SEQ ID NO: 346394 - DNA, 120 bp, Artificial Sequence
  ENSG00000138593_30 (sequence is synthesized)
cttcaggactccacctcctctactctaatttgaccaaaaaattgtttgggcttctttaaaaaagaactgggggtggagtcagaaaattaaatgaaaggctgagggtaactaagtccacca

SEQ ID NO: 346395 - DNA, 120 bp, Artificial Sequence
  ENSG00000138593_31 (sequence is synthesized)
gtgttgtatgttaaaaaatcaatgcaacttttatgtggtccacaaatgtttagtcagaagtcactgattattgtaattaattagtgttgggatgggctaaaacagagccttcaaaacttc

SEQ ID NO: 346396 - DNA, 120 bp, Artificial Sequence
  ENSG00000138593_32 (sequence is synthesized)
ggctagcagtggagccaccatcttagattatagctagctagcctcatttgtggaaagtgatagatgctgtctataatagtgaacagtcacccatgataggacctccaggttctgtctcat

SEQ ID NO: 346397 - DNA, 120 bp, Artificial Sequence
  ENSG00000138593_33 (sequence is synthesized)
atttgcttcttacttacctcaggaatgctcttgtacatagacttatttacaaaaagctaggcacatgttgacaggtgaataactgtaaccgattgtatgactgctgcacttacatgtaaa

SEQ ID NO: 346398 - DNA, 120 bp, Artificial Sequence
  ENSG00000138593_34 (sequence is synthesized)
ctcttcagaaacagagtcttatactggtgtgttctcttgcatgcttctggttcaggactcttgatttgagatatggatttgattgagtatccaaacttgtcctgagtgcaaaactgtttc

SEQ ID NO: 346399 - DNA, 120 bp, Artificial Sequence
  ENSG00000138593_35 (sequence is synthesized)
accttttaaaaaatacctattttgcacctagccttgagcaccttccacatagcaatgaccatagttactgtcaggaggtcaaggaaaggaactttgcacaacttgtgacatgtatcctga

SEQ ID NO: 346400 - DNA, 120 bp, Artificial Sequence
  ENSG00000138593_36 (sequence is synthesized)
taatcaaggcttagaggaggaagttttagaagataagagaaagttgttctaattgtgctgaaactattagatgatttagagtatacagatatgtaggtattaattctctattcactatta

SEQ ID NO: 346401 - DNA, 120 bp, Artificial Sequence
  ENSG00000138593_37 (sequence is synthesized)
tttatctctgcccttctctaggagtttgtatacctgcttaggagacaataaatgagctaaatgttttatttgctagtcagtcaccacctggacttcagtgactttacaagtttatgtaat

SEQ ID NO: 346402 - DNA, 120 bp, Artificial Sequence
  ENSG00000138593_38 (sequence is synthesized)
ggtggaagaatgacaaactatgtaatttttttgtcttccatccaactccccaccacccccaactgtcccccccacccccctcacacacatgcacacatccgtacgtgtgtgtgttttcca

SEQ ID NO: 346403 - DNA, 120 bp, Artificial Sequence
  ENSG00000138593_39 (sequence is synthesized)
cttacaagcttccataagcaggcacaaaactgagaaggaaggggtattatccctgccctgattatctggggcagggctttgcctcacagaggcaggagagaagaattgggcagattcttt

SEQ ID NO: 346404 - DNA, 120 bp, Artificial Sequence
  ENSG00000138593_40 (sequence is synthesized)
actgaactcattgggactactgtgctagttttgatgttttataatgctggcatttaattactggagagattggattcttggttgatgatttagtatttgtgaattgtgaaagttcaggag

SEQ ID NO: 346405 - DNA, 120 bp, Artificial Sequence
  ENSG00000138593_41 (sequence is synthesized)
ctgtgtagaaaatgttagtcaatcaactttattattgtgctaaaaggggacattcttatactgtcctgtctaaactgttctccagtatagacttcctaggcactaaatatccaatattta

SEQ ID NO: 346406 - DNA, 120 bp, Artificial Sequence
  ENSG00000138593_42 (sequence is synthesized)
aaggaacacagcaggtaaggaatgaagcctctgaaatagtactcatggatttatacatggcagatcttactgtctctacacatttggaagtgttcgttggtttaaagaaatgatagaggt

SEQ ID NO: 346407 - DNA, 120 bp, Artificial Sequence
  ENSG00000138593_43 (sequence is synthesized)
tttgaactactgacagtcttaaaagtgaatttaaaaactgttcatactttttatggtgtaaatttcctttgctcgatgtcagtgattcagataactcttgaccttgagatgatggctttt

SEQ ID NO: 346408 - DNA, 120 bp, Artificial Sequence
  ENSG00000138593_44 (sequence is synthesized)
cacaggtttcttatattttatatctcttctgaacatgaattgtcattttagatttttgacatttgtatcaaaagagaagttgaggaaatcttcagaacactggtaacttttagttttgct

SEQ ID NO: 346409 - DNA, 120 bp, Artificial Sequence
  ENSG00000138593_45 (sequence is synthesized)
atagacttcagaagtgtttatttatatgttcggtaaatgctctcgcatatgcagtacctcttctgccagcaaatccaagggaccatagcctttttatgagacaggtcacctctagaggac

SEQ ID NO: 346410 - DNA, 120 bp, Artificial Sequence
  ENSG00000138593_46 (sequence is synthesized)
aacccaagaattattaaaggaaatgttaccattttgagagcatgcttaaataaatattaataatgtctttataacttgtttcctttaaattttggaatattgaattacaggctttggagg

SEQ ID NO: 346411 - DNA, 120 bp, Artificial Sequence
  ENSG00000138593_47 (sequence is synthesized)
agttgtgaaaattaggaaagtttttatatattttttgaagtgggcatggttggctctttgaagacctataaagagatccagtgggaagagtaagggttggttcatcatcacaagaaataa

SEQ ID NO: 346412 - DNA, 120 bp, Artificial Sequence
  ENSG00000138593_48 (sequence is synthesized)
aaaacatagtgattttttctcttaatgtgtagaggtggttttactggcaataattaataatagatttctatttcagtatgtaagcatattaactaaaatatgaattacacttccaaagtt

SEQ ID NO: 346413 - DNA, 120 bp, Artificial Sequence
  ENSG00000138593_49 (sequence is synthesized)
agatttctgcttcagtaggtttgtttgctgtgaagattacttctcaaaagacagatgttcatattagcttaattttcggtttaaatatgtttgtaaatgatgtaatatatttcttttgac

SEQ ID NO: 346414 - DNA, 120 bp, Artificial Sequence
  ENSG00000138593_50 (sequence is synthesized)
taaatgtggaaaagtaatgtgtgttatacattgagaagtttttactggctttgactggaggttgtttttgcagagatggtattttatatgattccagtatttggaaaagaattagtcaaa

SEQ ID NO: 346415 - DNA, 120 bp, Artificial Sequence
  ENSG00000138593_51 (sequence is synthesized)
aggaattcacatagtttaaatactgagaaattaatatccaaatatgtacttgtctgatttctaaataagctgggggaggagggaggggtgggaattgaaatgtgcaaatgagtagtgaat

SEQ ID NO: 346416 - DNA, 120 bp, Artificial Sequence
  ENSG00000138593_52 (sequence is synthesized)
gctacactcattttcaactctttaacatgaaactgttcaatcttaacacattgttactttaatatatgtataaagaagtattactgtttgtaaagctgctgtttgcttaaaaaaaaaaaa

SEQ ID NO: 346417 - DNA, 120 bp, Artificial Sequence
  ENSG00000138593_53 (sequence is synthesized)
cacccttgtcatgtattttctgtatgttgggccaacaggttagaacatcaactcatttaaaaatttttatctttttttgatttaaaaaaattctgtgaaataatttatttacagacatct

SEQ ID NO: 346418 - DNA, 120 bp, Artificial Sequence
  ENSG00000138593_54 (sequence is synthesized)
tcctcctccctcatcccttccaacctttacatacatcacagaatcaaccaaactgtttgcctaatctgaaatctgaatcctaatgagaaaaatttaaattttgttggcacatcacacctt

SEQ ID NO: 346419 - DNA, 120 bp, Artificial Sequence
  ENSG00000138593_55 (sequence is synthesized)
ttgttggcacatcacaccttgaaagtatttgtattattttataatttaatttctaaatataccacataagtttataatttaatgtcttaattgtaatgctctaataaaaaactagcaaaa

SEQ ID NO: 346420 - DNA, 120 bp, Artificial Sequence
  ENSG00000138593_56 (sequence is synthesized)
ggacacagtacttcctcagaaagaagacagaatttgcaaaagagaccagataataagcatttaagctctagtcaatcccatagaagcgatccaaattctgagtctttatattttgaggat

SEQ ID NO: 346421 - DNA, 120 bp, Artificial Sequence
  ENSG00000138593_57 (sequence is synthesized)
tcttttgctgtatgaaggataattgttatatcacatttggggggtaataacagcttttttgcactatgtaaatactagtggggattcttctgtactaataaaatgattattgaaatgaaa

SEQ ID NO: 346422 - DNA, 120 bp, Artificial Sequence
  ENSG00000138593_58 (sequence is synthesized)
attgtgaagtttcaaaggtagaatggttctgactgaagaccagttgcaaggaattgccatgtttgagggttgtacaggagagtagaactaattatttacccctataatggacttctaaat

SEQ ID NO: 346423 - DNA, 120 bp, Artificial Sequence
  ENSG00000138593_59 (sequence is synthesized)
tggttaattgcattggcttagtctctaaaggataggtaaaagctgtatctgagggacactgcctagccatgtatagtgctcctactgttatgatgtcgttttttccatgggaggaggatg

SEQ ID NO: 346424 - DNA, 120 bp, Artificial Sequence
  ENSG00000138593_60 (sequence is synthesized)
agaaatgcacttagattttattgatgacttgccacaggagattgtttcccaggaaggtaaggagctccccctttctcctcttctcatggaatggtctgaaatattttaatagatacgtaa

SEQ ID NO: 346425 - DNA, 120 bp, Artificial Sequence
  ENSG00000138593_61 (sequence is synthesized)
gctatcactagttaatgctcctgattggaagacgtgctccatattttacataaatctctttattcttcagagtggtttcttttaaagatgcttttgtagggagatggttaaagagaaggg

SEQ ID NO: 346426 - DNA, 120 bp, Artificial Sequence
  ENSG00000138593_62 (sequence is synthesized)
cacaagtagaagacagaaaaaagagtccagcttgagtattgattggtggtcatatggagttgccaaaaaaggctgtaaaatcgtcacgaaggagttaagaataaaaatctccatctggga

SEQ ID NO: 346427 - DNA, 120 bp, Artificial Sequence
  ENSG00000138593_63 (sequence is synthesized)
tatcattagtctgagcaatttgctgtttgtctctgctaatatatgttagatgttgttaatcgaaatttttaaaattttatatatgtatgtgtatatatatgtgtgtgtgtgtgtatatat

SEQ ID NO: 346428 - DNA, 120 bp, Artificial Sequence
  ENSG00000138593_64 (sequence is synthesized)
tattttagcatgtgagaaatgacatttcctctttaagaccgactttgaataattcagtaatagaatacaagaaataacttcctcatttttcaatacttctaagcattataaaaagtttag

SEQ ID NO: 346429 - DNA, 120 bp, Artificial Sequence
  ENSG00000138593_65 (sequence is synthesized)
ttgcaacttttagactttaaccatttctctattaagaggagtaaataaaatgatactgaaatttggaaattgttgatatggattagtttctcattttttctaagagaaaattgaattctt

SEQ ID NO: 346430 - DNA, 120 bp, Artificial Sequence
  ENSG00000138594_0 (sequence is synthesized)
gaaggaggaacccaccgcacctacagggcggtcgagtgagggagctgctggcgggtgggtctggcaactctttgggaggccgacgcgggcggaccggcgggtgctgggaaccgagcctcg

SEQ ID NO: 346431 - DNA, 120 bp, Artificial Sequence
  ENSG00000138594_1 (sequence is synthesized)
gcttgcggccggcagtttccgtgggtctgtgaagaggtcggcggcccctgcgggcgccagtcagctttaagaaaaagtagagatcacttctgactgtactgaacagcaaaaattaagtga

SEQ ID NO: 346432 - DNA, 120 bp, Artificial Sequence
  ENSG00000138594_2 (sequence is synthesized)
cttgctgccctgcacatcatggcactgccattccgtaaggacttagaaaagtacaaagaccttgatgaagatgagctccttgggaatctgtcagaaacagaactgaaacaactggaaact

SEQ ID NO: 346433 - DNA, 120 bp, Artificial Sequence
  ENSG00000138594_3 (sequence is synthesized)
gttttggatgatcttgaccccgagaatgcccttctgcctgcagggttccggcagaagaaccagacatcaaagtccaccacagggccatttgatagagagcatctcctttcatatctggag

SEQ ID NO: 346434 - DNA, 120 bp, Artificial Sequence
  ENSG00000138594_4 (sequence is synthesized)
aaagaagcattggagcataaagacagggaagactatgtgccctacactggagaaaaaaaagggaaaatatttatccccaaacagaaacctgtacagacttttacagaagaaaaagtgtct

SEQ ID NO: 346435 - DNA, 120 bp, Artificial Sequence
  ENSG00000138594_5 (sequence is synthesized)
cttgatccagaattagaagaagctttgacaagtgcttctgatacagaattgtgtgacctcgcagcaattcttgggatgcacaatttgataacgaatacaaagttctgtaatataatggga

SEQ ID NO: 346436 - DNA, 120 bp, Artificial Sequence
  ENSG00000138594_6 (sequence is synthesized)
agtagtaatggtgttgaccaagaacatttttcaaatgtggtcaaaggtgaaaagattcttccggtatttgatgagccaccaaatccaaccaatgtagaagagagtttgaagagaactaaa

SEQ ID NO: 346437 - DNA, 120 bp, Artificial Sequence
  ENSG00000138594_7 (sequence is synthesized)
gaaaacgatgctcatcttgttgaagttaatttgaataatataaagaatatcccaattccaaccctaaaagattttgcaaaggctttggaaaccaacacacatgtgaaatgtttcagtctt

SEQ ID NO: 346438 - DNA, 120 bp, Artificial Sequence
  ENSG00000138594_8 (sequence is synthesized)
gcagccacccggagcaatgaccctgttgctactgcttttgcagaaatgctgaaagtgaacaaaactttgaagagcttaaatgtggagtccaactttatcacgggagttgggattctggca

SEQ ID NO: 346439 - DNA, 120 bp, Artificial Sequence
  ENSG00000138594_9 (sequence is synthesized)
ctgattgatgcgttaagagataatgaaaccctggcagagctcaagattgacaatcagaggcagcagttggggacagctgtagaattggaaatggccaagatgcttgaggaaaatacaaat

SEQ ID NO: 346440 - DNA, 120 bp, Artificial Sequence
  ENSG00000138594_10 (sequence is synthesized)
atccttaaatttggatatcagtttacacagcagggaccacgaaccagagcagctaatgctataacaaaaaacaatgacttagtgcgtaagagacgagttgaaggagatcaccagtaagtc

SEQ ID NO: 346441 - DNA, 120 bp, Artificial Sequence
  ENSG00000138594_11 (sequence is synthesized)
tgcaaaggtgtaatctttggaagacttcagaagatcaccaagggctcatgttggtgacatcatgtaaaattttcctgggtagaagggaaaagactggaaaaatttttttagtgacatgca

SEQ ID NO: 346442 - DNA, 120 bp, Artificial Sequence
  ENSG00000138594_12 (sequence is synthesized)
ttagttgttatcaaattgtaaaatcagtaatgtgatattttatattctgaaacatttctactttctgctaaaatcaattttaatttagtttaattgaatgatttatgatgaatcttgggc

SEQ ID NO: 346443 - DNA, 120 bp, Artificial Sequence
  ENSG00000138594_13 (sequence is synthesized)
tcttgggcaaaaaaatacaactgtaaaaaatttcacaggtcatttgtgtagaataatttgaacattgtgaggaccaatcttttttaaatcaaaagggatgttgctggtatcagaattgtt

SEQ ID NO: 346444 - DNA, 120 bp, Artificial Sequence
  ENSG00000138594_14 (sequence is synthesized)
attgcttcatttagacataaaacacttaagtgttttcttcactccgtgacctggagagttttccattttttaaaatacatgaacttggcaagggtgtgatttttctttatcaagagaaca

SEQ ID NO: 346445 - DNA, 120 bp, Artificial Sequence
  ENSG00000138594_15 (sequence is synthesized)
aaatgccagaatgttaaaacagttaactcaaaatctagtcatctgtgtaggagctaaagcaggtctccagggagagagggtggtcgtctgtgcattccaggttactgcacttgtctgatg

SEQ ID NO: 346446 - DNA, 120 bp, Artificial Sequence
  ENSG00000138594_16 (sequence is synthesized)
tgacgtagcaacacccaggtcttcttaaaacaaagtcatcagctttgccaggttacatactttatttaaaagtatagtgaggtcgaagttcattccagtgtttcattttaataatgtggg

SEQ ID NO: 346447 - DNA, 120 bp, Artificial Sequence
  ENSG00000138594_17 (sequence is synthesized)
cattattaaatttttgtggaagctaatagtaaaaaataaaagctgttttcaccacctccctccccaccccccaaaaaaggcgtacagccaactcttagttatttagggtaagagaaaaaa

SEQ ID NO: 346448 - DNA, 120 bp, Artificial Sequence
  ENSG00000138594_18 (sequence is synthesized)
gaaaactgttaaacaatgaaatcaaagataataaatatgatagatttccagtatgaggcacttgcaaaacagtcatttaaactgatggttactgtaagtcagttggaagctggcatgtat

SEQ ID NO: 346449 - DNA, 120 bp, Artificial Sequence
  ENSG00000138594_19 (sequence is synthesized)
gtaaattacttggtgttacaccatatccgaagaagttcctatgtgcagtgcagaattgcataaacagtatttaatcactgctacaaatcttccaaccaagaaggaaaactgctattcttc

SEQ ID NO: 346450 - DNA, 120 bp, Artificial Sequence
  ENSG00000138594_20 (sequence is synthesized)
ataaatctaatttttagtatatgcttcctttcatcttatacttttatcaatatttataaaagtcatttctataataaaagcagtctttcttgctcaaagtattaaggtgaacaattgaat

SEQ ID NO: 346451 - DNA, 120 bp, Artificial Sequence
  ENSG00000138594_21 (sequence is synthesized)
agagtactgtggtcgggagactgatttgagactgcagagctgatgctgggtagagggtctggacttgtattcatgttctgtctcagggcagcccctggagcaggagatggcagaggcatt

SEQ ID NO: 346452 - DNA, 120 bp, Artificial Sequence
  ENSG00000138594_22 (sequence is synthesized)
tacagctgcagaaaacagggaggaatggaatctgaggtagccctggcctcaaaattcaggcctggctgtatcatttacagagatttttctggagggaaaagtctcatttctgaggaaggc

SEQ ID NO: 346453 - DNA, 73 bp, Artificial Sequence
  ENSG00000138594_23 (sequence is synthesized)
agatttttctggagggaaaagtctcatttctgaggaaggcaaggtggctaatcattattaattttttttaaac

SEQ ID NO: 346454 - DNA, 70 bp, Artificial Sequence
  ENSG00000138594_24 (sequence is synthesized)
ccactgcactgcagttttttgaaattgaattgcaatatgtctgctactttggcttgggctggacagttta

SEQ ID NO: 346455 - DNA, 120 bp, Artificial Sequence
  ENSG00000138594_25 (sequence is synthesized)
tgcaatatgtctgctactttggcttgggctggacagtttatctaataagcaaggcagcttcttgtgtgctatggtaataagccttcttaacaggctaagcttccctcataagaactgtgg

SEQ ID NO: 346456 - DNA, 120 bp, Artificial Sequence
  ENSG00000138594_26 (sequence is synthesized)
tttttttttttttgttttggtttgttttggttttttggttttgttttgttttgttttttaaatcagtatccaatgttttataggggccaaaggttaactttgcactattccctgtcagtt

SEQ ID NO: 346457 - DNA, 120 bp, Artificial Sequence
  ENSG00000138594_27 (sequence is synthesized)
tgtcagttaaaggccactgatatttttctaagttagcaaggctcacttgcttgctttcttgcctcccttgcctccatccctctcccttcctaccttctctatttacctatttctctccct

SEQ ID NO: 346458 - DNA, 120 bp, Artificial Sequence
  ENSG00000138594_28 (sequence is synthesized)
ccctctcttctcctctctttttttttccccgcatatgcagctttttgattgtacttgattttatagagactgcacagttccagcaagattgggagtcaggcatggagcaggcatctcagg

SEQ ID NO: 346459 - DNA, 120 bp, Artificial Sequence
  ENSG00000138594_29 (sequence is synthesized)
ctaccagaaagaattggtcacctagactttcagtcaggcatcctcgtttgcattgtcctgtaagtcaattagttgataaatagttcccccttcatcccttaagttttgtttttgtttttg

SEQ ID NO: 346460 - DNA, 120 bp, Artificial Sequence
  ENSG00000138594_30 (sequence is synthesized)
tttttaatataggtaagtgggactctacctaaaattttgcatcatacttatgggtaatatctttttcatatattatttatcaaagtatgaagttgagtattttgcttgtaccatttcaat

SEQ ID NO: 346461 - DNA, 120 bp, Artificial Sequence
  ENSG00000138594_31 (sequence is synthesized)
tctgcattatagtagttcattgtataactgaaagaaatgatttcttcataagtgacattaaatatgaacattcatccaattgaatttacaaaatctttccaaaattataagggagaaaaa

SEQ ID NO: 346462 - DNA, 120 bp, Artificial Sequence
  ENSG00000138594_32 (sequence is synthesized)
tcgggtttacttcaatctttaaaaatctggcacctcttagtaactttcagtatttctaaattgctctaaaattttataataaatagattagggttttgcaatagtcttaatttttaagcc

SEQ ID NO: 346463 - DNA, 120 bp, Artificial Sequence
  ENSG00000138594_33 (sequence is synthesized)
tgtgtttttaaattgctatttttaaaaaagctttttattacccattttataaaatgttatactcatatttgtctgaatttttccagtattcctacatgaaattgtatgtattaaaaactc

SEQ ID NO: 346464 - DNA, 120 bp, Artificial Sequence
  ENSG00000138594_34 (sequence is synthesized)
ttagtggcaaatattaatactattaaaatggattttggtgctatattcttgtagctaaagcctagtagaattctcaagaataggtgaaatacactttcaaagttgcctgtcatttaaaag

SEQ ID NO: 346465 - DNA, 120 bp, Artificial Sequence
  ENSG00000138594_35 (sequence is synthesized)
accaaataagcattttgtattaaataaattagcagatggttagagacttcaaggagagttagcttggtcatttaattgcgacttcatgttatttgattgaaataacccacatccttgctt

SEQ ID NO: 346466 - DNA, 120 bp, Artificial Sequence
  ENSG00000138594_36 (sequence is synthesized)
tgtataagatattcgctctggagaagttacatgtaaatagaattctataaattgttttccagttgaccgagtatctgttgtgtttttgtttaaaaagaggattccatgacataataaaaa

SEQ ID NO: 346467 - DNA, 69 bp, Artificial Sequence
  ENSG00000138594_37 (sequence is synthesized)
gcgtggtggcacaccgggaggcggaggttgcagttagctgaggtcgcgccattgcactccagcatgggc

SEQ ID NO: 346468 - DNA, 60 bp, Artificial Sequence
  ENSG00000138594_38 (sequence is synthesized)
ctgaggcaggagaatcactagaactcgggaggcggaggttgcagttagctgaggtctttt

SEQ ID NO: 346469 - DNA, 120 bp, Artificial Sequence
  ENSG00000138594_39 (sequence is synthesized)
tatttaactcttgctgtcattaaaataagatgacaacatttatgaagttttataaaatcttacattttagggtctgtgttcccagggctgcctcactttttccctaaaaaactaggaacc

SEQ ID NO: 346470 - DNA, 120 bp, Artificial Sequence
  ENSG00000138594_40 (sequence is synthesized)
actgttaacctcccagcagatgcaaggatcatgctttctctggagtccttagtcacttccattctttgcaagtttagtactgcccaaatttactcattctacagtgttactgcactttga

SEQ ID NO: 346471 - DNA, 120 bp, Artificial Sequence
  ENSG00000138594_41 (sequence is synthesized)
acgtattgacccatgtcacccaagagaagcaaacatatggatgcactagagacaactcgggttgctgctctcagttaagggctatgagttcttggggtctaagtatctgtaaaattatcc

SEQ ID NO: 346472 - DNA, 120 bp, Artificial Sequence
  ENSG00000138594_42 (sequence is synthesized)
tctccatcagctctcactgatcattaatgtttctggatatttcttaccctaagatttgcttaccaacaaatcaaagaaacgcttcactaattatttttaaattgagaaaatagtattcag

SEQ ID NO: 346473 - DNA, 120 bp, Artificial Sequence
  ENSG00000138594_43 (sequence is synthesized)
ctgggattacaggcttgagccaccacactcagccttattcttatattttaatttggtcattcttagatctacagattgaacatccctaattgaaaactttttgagtactaacatagtgtt

SEQ ID NO: 346474 - DNA, 120 bp, Artificial Sequence
  ENSG00000138594_44 (sequence is synthesized)
attgaaaactttttgagtactaacatagtgttcaaaggaaatgcttattggagcatttagaatttcagattttcagattagggatgctgaactggtgtaatgcccagtattccaaaatcc

SEQ ID NO: 346475 - DNA, 120 bp, Artificial Sequence
  ENSG00000138594_45 (sequence is synthesized)
aaaataatttgaaatctgaaacacttaatggtcccagcatgttggataagggatactcaacctgtattgatttttctccactataattcagttctataagttcttccctataaaaaatga

SEQ ID NO: 346476 - DNA, 120 bp, Artificial Sequence
  ENSG00000138594_46 (sequence is synthesized)
atgaattagaaatttgataataaaacatattttattaattttaaactctatcttgcagtctgatcattcagaaaggtcaacctagaaaaaagacatggctaagtaaactattttaagcca

SEQ ID NO: 346477 - DNA, 120 bp, Artificial Sequence
  ENSG00000138594_47 (sequence is synthesized)
gaaaaaagacatggctaagtaaactattttaagccataactaagtattttggaaagccttcattaacacataaagaattttggccaagtactgtggcttatgcctgtaatcctagcactt

SEQ ID NO: 346478 - DNA, 120 bp, Artificial Sequence
  ENSG00000138594_48 (sequence is synthesized)
ctacaaaaagtacaaaaattagctgggtgcggtggcgcatgcctgtagtcccatctactcggaagactgaggcagcagaaccgcttgagcctaggaggtggaggttgcagtaagatgaga

SEQ ID NO: 346479 - DNA, 120 bp, Artificial Sequence
  ENSG00000138594_49 (sequence is synthesized)
ccgcttgagcctaggaggtggaggttgcagtaagatgagatcatgctgctgtactctagcctgggcaatgagagtgaaactcttatctcaaaaaaaaaaaaaaaaaaagagctatactca

SEQ ID NO: 346480 - DNA, 120 bp, Artificial Sequence
  ENSG00000138594_50 (sequence is synthesized)
tagtactttgggagaccaagcagggaggattacttgagaccaggagtttgagactaccatggacaacatagcaagaccccatctttacaaaaaatttaaaaattagccagacacctatag

SEQ ID NO: 346481 - DNA, 120 bp, Artificial Sequence
  ENSG00000138594_51 (sequence is synthesized)
agaattgcttgagcctgggaggttgaagcagcagtgagctttgatcatgccactgcattccagcctgggtaacaagagtgagactgtctcaaaaaacaaaacaaaacaaaaaaatgggtt

SEQ ID NO: 346482 - DNA, 120 bp, Artificial Sequence
  ENSG00000138594_52 (sequence is synthesized)
aaaacaaaacaaaacaaaaaaatgggtttttttgttgttgtttttgtcttttacttaggacacctgctctagaggctagataaaaatagattgtaatggccgggtgcagtggctcacact

SEQ ID NO: 346483 - DNA, 120 bp, Artificial Sequence
  ENSG00000138594_53 (sequence is synthesized)
cagagtgagactccatctcaaaaaaatatatgtattaagaaataccaccagcagtgttttgctaacatagctgtaacaaattattaagttcttttttttttttaagatggaggttcactc

SEQ ID NO: 346484 - DNA, 64 bp, Artificial Sequence
  ENSG00000138594_54 (sequence is synthesized)
ttattaagttcttttttttttttaagatggaggttcactcttgtcgcccagatgattttcctgc

SEQ ID NO: 346485 - DNA, 120 bp, Artificial Sequence
  ENSG00000138594_55 (sequence is synthesized)
aggtgtttgccaccgcgcccagcccaaattattacattcgtaagacagacacctcttagaatctatatatatgaggttttactcccttttctacactcagtatgttttaattgatgcaaa

SEQ ID NO: 346486 - DNA, 120 bp, Artificial Sequence
  ENSG00000138594_56 (sequence is synthesized)
gcaattaattggcctaaaatgtttcaaatattatagtctatacattcagaaagtaaggtttaagaatgaattattggtgcttcttggtgggtgtatatagcagtttttagaagtttaaat

SEQ ID NO: 346487 - DNA, 120 bp, Artificial Sequence
  ENSG00000138594_57 (sequence is synthesized)
ttcacctctactcagaaagataagcttttgattcagtggtttcaaattttcagatcaatccatttaagaattgttttttcaaatgtatatacacgtataacataaaaatttttgtaattt

SEQ ID NO: 346488 - DNA, 120 bp, Artificial Sequence
  ENSG00000138594_58 (sequence is synthesized)
caaatgtctttttttcagttttttggatgaattattatatttggttttagttacatttaaaagcttgaaaattacctttctaacaatcatttgaatgtcattcattgtcacatgaaatca

SEQ ID NO: 346489 - DNA, 120 bp, Artificial Sequence
  ENSG00000138594_59 (sequence is synthesized)
ggtatttacgtttttttctaatgctaaaatatccaacattgtaattgccctatttttccatttttataagtataaaagcaatgaattttaacactggtatttaaataatacaaaatatta

SEQ ID NO: 346490 - DNA, 120 bp, Artificial Sequence
  ENSG00000138594_60 (sequence is synthesized)
tccaaattcataacagcacagtgaagtttcttttgaagactatgtactggaagcatttagaacttaccaatatatactgggataaatcgtttcaataaagtttatcaaatattctgtaaa

SEQ ID NO: 346491 - DNA, 120 bp, Artificial Sequence
  ENSG00000138594_61 (sequence is synthesized)
aaaggtaaatttaacccagttgccttaaactaaggacttcccatatgctgtccaagttatttattcacagttatgttagctttccagaaaacctcctctttctcacctttctgagtatgt

SEQ ID NO: 346492 - DNA, 120 bp, Artificial Sequence
  ENSG00000138594_62 (sequence is synthesized)
gatttctttggaggaaagacagacctgatcccttagtaaaccagaaagatcatgattataaacctgcctacatcaagaggattacataaccaccactgggcaattggtttccgctaagtc

SEQ ID NO: 346493 - DNA, 120 bp, Artificial Sequence
  ENSG00000138594_63 (sequence is synthesized)
tgtgaagatacagcaaaacagcagctgtctgcaagccaggaagggaaccctcaccaggaaccaaaccatgatctcggacgtcccagcctctaggaacgcctttccatcttcctagagtgc

SEQ ID NO: 346494 - DNA, 120 bp, Artificial Sequence
  ENSG00000138594_64 (sequence is synthesized)
ctaacctggcctgtgtgcttgtaagcttctgctcattcttcaatacccagcagagacttcctcctccatgcagccttccaagacccacctgagtacagaaattggctcttcctcctgctg

SEQ ID NO: 346495 - DNA, 120 bp, Artificial Sequence
  ENSG00000138594_65 (sequence is synthesized)
agtgaggagaggcaggtggcaacgtcagtcttttacaaagaatatccccgattgcagtcagagagaggagaagagaaggaatatgaaatctcagtttccagagagagatgcagatgccag

SEQ ID NO: 346496 - DNA, 120 bp, Artificial Sequence
  ENSG00000138594_66 (sequence is synthesized)
ggacattcaaactgcctatggagaggtccacatagtgaaaaactaaggcccctgccaaaacccatgtgagccatcttggaaacagatccttcagccctaggcaagcccttagataatgta

SEQ ID NO: 346497 - DNA, 120 bp, Artificial Sequence
  ENSG00000138594_67 (sequence is synthesized)
gtgccagccaacatcttgacagcagcctgcaagagactctgagttagaaacaaccagcgaagccattcctgaattcctaatcctcagaatcagcatgataatagtaaatgcttattgtaa

SEQ ID NO: 346498 - DNA, 120 bp, Artificial Sequence
  ENSG00000138594_68 (sequence is synthesized)
cacctgccatgccgtgaggacattcaaactgcctatggagaggtccacatagtgaaaaactaaggcccctgccaaaacccatatcagataccatcagcataatgtcatcaatgcagtgga

SEQ ID NO: 346499 - DNA, 120 bp, Artificial Sequence
  ENSG00000138594_69 (sequence is synthesized)
ccagtgtgacatggggaacataaagatggtcacgatttttgcagactccatatgcaaagtattataggcctttccatctatccggagtgacctaccagagacaggacagtttgaccagca

SEQ ID NO: 346500 - DNA, 120 bp, Artificial Sequence
  ENSG00000138594_70 (sequence is synthesized)
tcttcaacacccagcaagaagtcttatcctccatgcagccttctaagacctctctaagcacaggtatcagatcctcctctggatcactctgtcttgttactgcatttatctcactggatt

SEQ ID NO: 346501 - DNA, 120 bp, Artificial Sequence
  ENSG00000138594_71 (sequence is synthesized)
tcagtgacgtgtgtagacaactaatttgtgcctgcctgatctgtgagctcttcattcaaagcagttggctcctgagtacaggataaacccctagaattgaataaatttggtcttacctca

SEQ ID NO: 346502 - DNA, 120 bp, Artificial Sequence
  ENSG00000138594_72 (sequence is synthesized)
agattgggacttgactgagattgatccagggctagttaccatgtatttcctgatggaagaatgttaactttaagaaaaagtagagatcacttctgactgtactgaacagcaaaaattaag

SEQ ID NO: 346503 - DNA, 120 bp, Artificial Sequence
  ENSG00000138594_73 (sequence is synthesized)
attcattacaaactctaacatggacatagattttcatttctcttcagtatatagctaggagtgtattgctgggtcacatggtaactctatgtttaactttttgagcagcagccagttttc

SEQ ID NO: 346504 - DNA, 120 bp, Artificial Sequence
  ENSG00000138594_74 (sequence is synthesized)
cacagtagctgtaccattttacattcctctcagcaatgtccccatttttccacattcttgccaacacttgttattatctatcttttttattatacttatcctagtggaggcagcagttgg

SEQ ID NO: 346505 - DNA, 120 bp, Artificial Sequence
  ENSG00000138594_75 (sequence is synthesized)
ctttggaagacttcagaagatcaccaagggctcatagactgcacagttccagcaagattgggagtcaggcatggagcaggcatctcaggctaccagaaagaattggtcacctagactttc

SEQ ID NO: 346506 - DNA, 120 bp, Artificial Sequence
  ENSG00000138594_76 (sequence is synthesized)
cctagagtgcctaacctggcctgtgtgcttgtaagcttctgctcattcttcaatacccagcagagacttcctcctccatgcagccttccaagacccacctgagtacaggcctttccatct

SEQ ID NO: 346507 - DNA, 120 bp, Artificial Sequence
  ENSG00000138594_77 (sequence is synthesized)
aaaggtcaaagtagcataatgaaataaagtgtacgttggctcctaaatccagaaagatccaccaaacattcttttgcactggtaggtggtttaaggtacagcaccttatccttcattttg

SEQ ID NO: 346508 - DNA, 120 bp, Artificial Sequence
  ENSG00000138594_78 (sequence is synthesized)
gaggggctatccagacatgctccagaccattagtcccccagaaacttcactgaggtggcatgcccctaaattttgatggggattatctcccactctctggtttgcacgctgattactaag

SEQ ID NO: 346509 - DNA, 120 bp, Artificial Sequence
  ENSG00000138594_79 (sequence is synthesized)
gagtaaaagtagaggctgtcagtaaggacaagattagtgtatgcagaagagctccacagagaaggcaaatatgtgtgtggtggatttcaaacgtacctgcaaatcctttgccattcttcc

SEQ ID NO: 346510 - DNA, 86 bp, Artificial Sequence
  ENSG00000138594_80 (sequence is synthesized)
tggatttcaaacgtacctgcaaatcctttgccattcttcccatcaagaggaatcaaattcccgtccctttgtattttttgtttttt

SEQ ID NO: 346511 - DNA, 120 bp, Artificial Sequence
  ENSG00000138600_0 (sequence is synthesized)
agtcgcgctgctgtggcggccgctgtagcagcggcggtccagtcgtagcccggccgcccgcgcctgtccggtccggtccggccacggaggcagcgcagcggcgggactccgagcctaccc

SEQ ID NO: 346512 - DNA, 120 bp, Artificial Sequence
  ENSG00000138600_1 (sequence is synthesized)
cgccgagtgagctgcgccgcaccgtgccgtcccacccggcacccaccagtccgatggggccgcagcggcggctgtcccctgccggggccgccctactctggggcttcctgctccagctga

SEQ ID NO: 346513 - DNA, 120 bp, Artificial Sequence
  ENSG00000138600_2 (sequence is synthesized)
cagccgctcaggaagcaatcttgcatgcgtctggaaatggcacaaccaaggactactgcatgctttataacccttattggacagctcttccaagtaccctagaaaatgcaacttccatta

SEQ ID NO: 346514 - DNA, 120 bp, Artificial Sequence
  ENSG00000138600_3 (sequence is synthesized)
gtttgatgaatctgacttccacaccactatgcaacctttctgatattcctcctgttggcataaagagcaaagcagttgtggttccatggggaagctgccattttcttgaaaaagccagaa

SEQ ID NO: 346515 - DNA, 120 bp, Artificial Sequence
  ENSG00000138600_4 (sequence is synthesized)
ttgcacagaaaggaggtgctgaagcaatgttagttgtcaataacagtgtcctatttcctccctcaggtaacagatctgaatttcctgatgtgaaaatactgattgcatttataagctaca

SEQ ID NO: 346516 - DNA, 120 bp, Artificial Sequence
  ENSG00000138600_5 (sequence is synthesized)
aagactttagagatatgaaccagactctaggagataacattactgtgaaaatgtattctccatcgtggcctaactttgattatactatggtggttatttttgtaattgcggtgttcactg

SEQ ID NO: 346517 - DNA, 120 bp, Artificial Sequence
  ENSG00000138600_6 (sequence is synthesized)
tggcattaggtggatactggagtggactagttgaattggaaaacttgaaagcagtgacaactgaagatagagaaatgaggaaaaagaaggaagaatatttaacttttagtcctcttacag

SEQ ID NO: 346518 - DNA, 120 bp, Artificial Sequence
  ENSG00000138600_7 (sequence is synthesized)
ttgtaatatttgtggtcatctgctgtgttatgatggtcttactttatttcttctacaaatggttggtttatgttatgatagcaattttctgcatagcatcagcaatgagtctgtacaact

SEQ ID NO: 346519 - DNA, 120 bp, Artificial Sequence
  ENSG00000138600_8 (sequence is synthesized)
gtcttgctgcactaattcataagataccatatggacaatgcacgattgcatgtcgtggcaaaaacatggaagtgagacttatttttctctctggactgtgcatagcagtagctgttgttt

SEQ ID NO: 346520 - DNA, 120 bp, Artificial Sequence
  ENSG00000138600_9 (sequence is synthesized)
gggctgtgtttcgaaatgaagacaggtgggcttggattttacaggatatcttggggattgctttctgtctgaatttaattaaaacactgaagttgcccaacttcaagtcatgtgtgatac

SEQ ID NO: 346521 - DNA, 120 bp, Artificial Sequence
  ENSG00000138600_10 (sequence is synthesized)
ttctaggccttctcctcctctatgatgtattttttgttttcataacaccattcatcacaaagaatggtgagagtatcatggttgaactcgcagctggaccttttggaaataatgaaaagt

SEQ ID NO: 346522 - DNA, 120 bp, Artificial Sequence
  ENSG00000138600_11 (sequence is synthesized)
tgccagtagtcatcagagtaccaaaactgatctatttctcagtaatgagtgtgtgcctcatgcctgtttcaatattgggttttggagacattattgtaccaggcctgttgattgcatact

SEQ ID NO: 346523 - DNA, 120 bp, Artificial Sequence
  ENSG00000138600_12 (sequence is synthesized)
gtagaagatttgatgttcagactggttcttcttacatatactatgtttcgtctacagttgcctatgctattggcatgatacttacatttgttgttctggtgctgatgaaaaaggggcaac

SEQ ID NO: 346524 - DNA, 120 bp, Artificial Sequence
  ENSG00000138600_13 (sequence is synthesized)
ctgctctcctctatttagtaccttgcacacttattactgcctcagttgttgcctggagacgtaaggaaatgaaaaagttctggaaaggtaacagctatcagatgatggaccatttggatt

SEQ ID NO: 346525 - DNA, 120 bp, Artificial Sequence
  ENSG00000138600_14 (sequence is synthesized)
gtgcaacaaatgaagaaaaccctgtgatatctggtgaacagattgtccagcaataatattatgtggaactgctataatgtgtcattgattttctacaaatagacttcgactttttaaatt

SEQ ID NO: 346526 - DNA, 120 bp, Artificial Sequence
  ENSG00000138600_15 (sequence is synthesized)
gacttttgaattgacaatctgaaagagtcttcaatgatatgcttgcaaaaatatatttttatgagctggtactgacagttacatcataaataactaaaacgctttgcttttaatgttaaa

SEQ ID NO: 346527 - DNA, 120 bp, Artificial Sequence
  ENSG00000138600_16 (sequence is synthesized)
gttgtgccttcacattaaataaaacatatggtctgtgtagtttccgagatgtactatatacagtatatttttctaaaaaaaaatgccttgacccacccctatacttttttttaacgaaat

SEQ ID NO: 346528 - DNA, 120 bp, Artificial Sequence
  ENSG00000138600_17 (sequence is synthesized)
atacttttttttaacgaaatctgtttctttcagctctgatggtagatacaagtagttactatttctgaatgggttttactgtaaagaattatgcaaattggccaggcgcggtggctcacg

SEQ ID NO: 346529 - DNA, 120 bp, Artificial Sequence
  ENSG00000138600_18 (sequence is synthesized)
aaaaaaaagatttatgcaaattatatctgctctgtagaaataactgtttaacaccatgcaagaaggcggttcaacggtgaaaatttggaccttatatcactgcagaggttagaaatacat

SEQ ID NO: 346530 - DNA, 120 bp, Artificial Sequence
  ENSG00000138600_19 (sequence is synthesized)
aattttggaaatataagtgcatatttttgtagtatttttttaaacccaatcctttcataaacttgagaactgaaattacttcagactgcacgtgtattatattaagaacatttttccaga

SEQ ID NO: 346531 - DNA, 120 bp, Artificial Sequence
  ENSG00000138600_20 (sequence is synthesized)
tatagagaaacataatatatagaactagtcactaaaaggagacagacactgaaatctagttttcattggtttgacagccttttttttttaaatgtagcttaaatttcagtactaacattc

SEQ ID NO: 346532 - DNA, 120 bp, Artificial Sequence
  ENSG00000138600_21 (sequence is synthesized)
agtttcactttggtatttctgatctttgcaatttggttctgttaatgttaaggtttgattttttaaaaaaattatttttcttaagaaattatgtattaatacatatggctcatcgttgaa

SEQ ID NO: 346533 - DNA, 120 bp, Artificial Sequence
  ENSG00000138600_22 (sequence is synthesized)
tacagcattcctaacattatcccacattcccccactcccacccgttatctttttttcttcctgatgcccaccccttttcccataggtaatgattcttaatcttggtggaggatgtacaaa

SEQ ID NO: 346534 - DNA, 120 bp, Artificial Sequence
  ENSG00000138600_23 (sequence is synthesized)
gtgcggttcagagaaaagaattggcaacaacagcaagagacttggtgttagtctcagtttaattacaatacaaggaagagttgagtaatttgccgcatctcaagaccttgtatctcagtt

SEQ ID NO: 346535 - DNA, 90 bp, Artificial Sequence
  ENSG00000138600_24 (sequence is synthesized)
ctcagttttctaatctgtaaaatgagtaggttagaccagctaatcactctggtaccttccaacttgaaaaaagttttttccccattcttt

SEQ ID NO: 346536 - DNA, 120 bp, Artificial Sequence
  ENSG00000138600_25 (sequence is synthesized)
ggtaccttccaacttgaaaaaagttttttccccattctttggtaaattttagatgtggcctgaacattctcctggaagtcagaggtcaaattatctttccattttcttttattttagtaa

SEQ ID NO: 346537 - DNA, 120 bp, Artificial Sequence
  ENSG00000138600_26 (sequence is synthesized)
tatgtgaacagaactatatctttcatctaaggccagttcaatttattaaaaataaaactaatgccttttaaaattgatcagacctttgatacttgaactaaattttgcattagagacttt

SEQ ID NO: 346538 - DNA, 120 bp, Artificial Sequence
  ENSG00000138600_27 (sequence is synthesized)
ttaaaaattgttcgcttttgctgaataaattgcaaatagagaagcttcattgacagtcagtccctctctgcttaatgcagttatgggtcctttcgtttatggcaaatgacttacctgaca

SEQ ID NO: 346539 - DNA, 120 bp, Artificial Sequence
  ENSG00000138600_28 (sequence is synthesized)
agagttaattttgcctccattgtatcaagtttgaatattttccaagaaatctgatttatttggcagactctgagagagagaacagattaagtgccgttttaaaactctgtattttcattt

SEQ ID NO: 346540 - DNA, 120 bp, Artificial Sequence
  ENSG00000138600_29 (sequence is synthesized)
ataataataaaatatttgccaaaatacagctgttttgtaaaattatctgcaccctcatccaagctttatatttaatagccttaatcacattttatgaagaatgttaaagaaaattttttt

SEQ ID NO: 346541 - DNA, 76 bp, Artificial Sequence
  ENSG00000138600_30 (sequence is synthesized)
attttttttttactacatcgaaatgagataattaatttcttttttttttttttgagatcttggctcactacaacct

SEQ ID NO: 346542 - DNA, 82 bp, Artificial Sequence
  ENSG00000138600_31 (sequence is synthesized)
gcctcagactccccaaaataagataatttctcaaaataatttggtttcatataactggagtagtaattaatattttaacttc

SEQ ID NO: 346543 - DNA, 120 bp, Artificial Sequence
  ENSG00000138600_32 (sequence is synthesized)
ataactggagtagtaattaatattttaacttcatcaactagatgtatctcctcagtagcatagtaactggtacatccagaaatctgaaatccgagttacttgatacaaattctactttat

SEQ ID NO: 346544 - DNA, 120 bp, Artificial Sequence
  ENSG00000138600_33 (sequence is synthesized)
ctaaccattagttattaaggaggtaaaatcttgttctaatttgctattaaaatcttattggttaaatagaaataagaaaaagtataattaagtttcttcatcctcaatgtcaactttata

SEQ ID NO: 346545 - DNA, 120 bp, Artificial Sequence
  ENSG00000138600_34 (sequence is synthesized)
ttgtaattaaatgtgtagcaaccaagctgacaatagtgattaagaaattaaagtacagaaatattttatttggggactcaaaatgaacaaaagatagataagattaaaatttcacttaaa

SEQ ID NO: 346546 - DNA, 120 bp, Artificial Sequence
  ENSG00000138600_35 (sequence is synthesized)
aagctgccatctcttcctctcttgccctcccaccaccaataactttaaggggaagagaagctggttttttccctaaacatgtctttaaaataatgatacactgtatttattaattcttga

SEQ ID NO: 346547 - DNA, 120 bp, Artificial Sequence
  ENSG00000138600_36 (sequence is synthesized)
tgcaaaaaaaaaaaagttagaaaatccctttgaacatttttgtggcttatcaacagaaatcactatctcaaattgtaatgtagattacttttgtctcagtttagtttagcaaaaataaat

SEQ ID NO: 346548 - DNA, 120 bp, Artificial Sequence
  ENSG00000138600_37 (sequence is synthesized)
ttacttttgtctcagtttagtttagcaaaaataaatgtgaggcttgtggggaaagaccttgatattctaatacattatattttcttctagcttgtagatttttttttttttttttttttg

SEQ ID NO: 346549 - DNA, 120 bp, Artificial Sequence
  ENSG00000138600_38 (sequence is synthesized)
tggcacttgtagatttttttttagattagcaattccttagtagaatctgcaatttatttctcttttaaagagaattttaacccatctgctattggcattcttatattttacttgtccata

SEQ ID NO: 346550 - DNA, 120 bp, Artificial Sequence
  ENSG00000138600_39 (sequence is synthesized)
gagattttagtgaattgatacatttataataaatacaaatgagctttccagttttctttgctctttcaatttatgctttagtataagcaaaaattactatttttacatttttaaaaattg

SEQ ID NO: 346551 - DNA, 79 bp, Artificial Sequence
  ENSG00000138600_40 (sequence is synthesized)
aagcaaaaattactatttttacatttttaaaaattgtgggtacatgtaggtgtatatatttatggagtggatcatggag

SEQ ID NO: 346552 - DNA, 120 bp, Artificial Sequence
  ENSG00000138600_41 (sequence is synthesized)
atatatatatatatatgtatatatgaactaatttatttaggcttaatctctaaaatttcagcctgatcttaaccaatgaaatttcaaaaacaaaaactgtacttcagtctacaattgaat

SEQ ID NO: 346553 - DNA, 120 bp, Artificial Sequence
  ENSG00000138600_42 (sequence is synthesized)
atttcaaaaacaaaaactgtacttcagtctacaattgaatggaattcagtgtagaccagtacaatggaatgtactggctgagatgggagggtcccttgagcccaggagtttgaggctgta

SEQ ID NO: 346554 - DNA, 120 bp, Artificial Sequence
  ENSG00000138600_43 (sequence is synthesized)
tccagcctaggtgacatagcaagatgccatctcaaagaaatatagatatataacataaaataaataactttatacatttcctggaggaaaagtactctgtaaattcaagagatctgaatc

SEQ ID NO: 346555 - DNA, 120 bp, Artificial Sequence
  ENSG00000138600_44 (sequence is synthesized)
aaattactcaaccttttggaatttgatcctctactgtaatactcatatgctagattactgaattttcagagtgaaaaaaaattgacagggtaatatataggccatattatagtgaagatc

SEQ ID NO: 346556 - DNA, 120 bp, Artificial Sequence
  ENSG00000138600_45 (sequence is synthesized)
ataagtataaatgtcctcgtttaatctttccatattgaggacagcctctgcatataaaaatgttcattgggagaaaaattatttttaaaactaaatttttatagtagtcctccattactg

SEQ ID NO: 346557 - DNA, 120 bp, Artificial Sequence
  ENSG00000138600_46 (sequence is synthesized)
gcaattaaggagcaacccacaaaatgtcattatgtggttctttgattaggcataaaaagtattgcaaacagcttttctattcctttggaatatgaatctttttaatgtctaaagttaacc

SEQ ID NO: 346558 - DNA, 120 bp, Artificial Sequence
  ENSG00000138600_47 (sequence is synthesized)
tgcaacattttctagtaggacaagtcaatgtaaattaggtaatttttgcctgttttataccttctgttgcattttgttcaaatgaaaacattttttaaaacatgattgaatttttacttc

SEQ ID NO: 346559 - DNA, 120 bp, Artificial Sequence
  ENSG00000138600_48 (sequence is synthesized)
tcagataattggtttgagtgtggaatttcttttttaacactttgatatgtaagttagtgtaaattaatacttttataacactactaggctttatatttttatggaatgttttaaaatttg

SEQ ID NO: 346560 - DNA, 120 bp, Artificial Sequence
  ENSG00000138600_49 (sequence is synthesized)
aatgttttaaaatttgaaatttttgaagtgttaatttagcagtactttatcattatgtgccaatactgacaagaaaaacaattttttatgtatttaatatactatggtattcaataaatt

SEQ ID NO: 346561 - DNA, 120 bp, Artificial Sequence
  ENSG00000138600_50 (sequence is synthesized)
tgtatccggttaataatttgccttcctgtgtaattcactggccacatagtgcatgttaaggtattgtaaaacttatttctcagaaaatatagctcttttcttagttattctaaattatta

SEQ ID NO: 346562 - DNA, 120 bp, Artificial Sequence
  ENSG00000138600_51 (sequence is synthesized)
aatacctattgacttgggtttcatcctagaatgatggaaacttggtggaagccactggtcaaccctcagctccccatgagaaagtaaggattgtattttagatatgttcattggacttta

SEQ ID NO: 346563 - DNA, 120 bp, Artificial Sequence
  ENSG00000138600_52 (sequence is synthesized)
aatcataccctctgagacaagactcttctttgggggaaaaaaaaatccagattgccaaaaaaaattaggcctgttctgttttctatgtttcaaggcctgagttctatccttggtaaagag

SEQ ID NO: 346564 - DNA, 86 bp, Artificial Sequence
  ENSG00000138600_53 (sequence is synthesized)
gccactgcactccactaaattagtaaataaaagatatgagtaaagattgccaagaagttcattggcggcctctgttttgttttttg

SEQ ID NO: 346565 - DNA, 120 bp, Artificial Sequence
  ENSG00000138600_54 (sequence is synthesized)
ccaggtaaattagcaattacatattagataaagtttataaatactgtatctctttatttttaatcactaatgtttaattttgagtgttatatttgctccatttgctaacaagaagctata

SEQ ID NO: 346566 - DNA, 120 bp, Artificial Sequence
  ENSG00000138604_0 (sequence is synthesized)
acacaagcgcttccttgccgagaggctggagctgcggcaccgcaggcctgagccaccccttctctgctgtctccttctcttcctcagggctcccgtgtctgctcgccctccgacgctgct

SEQ ID NO: 346567 - DNA, 120 bp, Artificial Sequence
  ENSG00000138604_1 (sequence is synthesized)
caggaatttgacaagaaactgaagttttgattcagatatattttgaattgaaaccagagatgttctagagtttagattctttcatttgattaaggtatggtctgaatatgcgttgcttgg

SEQ ID NO: 346568 - DNA, 120 bp, Artificial Sequence
  ENSG00000138604_2 (sequence is synthesized)
cagctcgggtcaactataagactttgattattatctgcgcactcttcactttggtcacagtacttttgtggaataagtgttccagtgacaaagcaatccagtttccacggcgttcgagta

SEQ ID NO: 346569 - DNA, 120 bp, Artificial Sequence
  ENSG00000138604_3 (sequence is synthesized)
gtggcttcagagtggatgggtttgaaaaaagagcagcagcatctgagagtaacaactatatgaaccacgtggccaaacaacagtctgaggaagcattccctcaggaacagcagaaagcac

SEQ ID NO: 346570 - DNA, 120 bp, Artificial Sequence
  ENSG00000138604_4 (sequence is synthesized)
cccctgttgttgggggcttcaatagcaatgtgggaagtaaggtgttagggctcaaatatgaagaaattgactgtctcataaatgatgaacacacaattaaagggagacgagaggggaacg

SEQ ID NO: 346571 - DNA, 120 bp, Artificial Sequence
  ENSG00000138604_5 (sequence is synthesized)
aagtctttcttccattcacttgggttgagaaatattttgatgtttatggaaaggtggttcagtatgatggctatgatcggtttgaattctctcatagctattccaaagtctatgcacaga

SEQ ID NO: 346572 - DNA, 120 bp, Artificial Sequence
  ENSG00000138604_6 (sequence is synthesized)
gagccccctatcaccccgatggtgtgtttatgtcttttgaaggctacaatgtggaagtccgagacagagtcaagtgcataagtggggttgaaggtgtgccattatctacacaatggggac

SEQ ID NO: 346573 - DNA, 120 bp, Artificial Sequence
  ENSG00000138604_7 (sequence is synthesized)
ctcaaggctatttctatccaatccagattgcacagtatggattaagtcattacagcaagaatctaactgagaaacctcctcacatagaggtatatgaaacagcagaagacagagacaaaa

SEQ ID NO: 346574 - DNA, 120 bp, Artificial Sequence
  ENSG00000138604_8 (sequence is synthesized)
acaagcctaatgactggactgtgccaaagggctgctttatggcgaatgtggctgataagtctagattcaccaatgtcaaacagtttattgcaccagaaaccagtgaaggtgtatccttgc

SEQ ID NO: 346575 - DNA, 120 bp, Artificial Sequence
  ENSG00000138604_9 (sequence is synthesized)
aactgggaaacacaaaagattttattatttcatttgacctcaagttcttgacaaatggaagtgtgtccgtggttctagagaccacagaaaagaatcagctcttcactatacattatgtct

SEQ ID NO: 346576 - DNA, 120 bp, Artificial Sequence
  ENSG00000138604_10 (sequence is synthesized)
caaatgctcagctaattgcttttaaagaaagagatatatactatggcattgggcccagaacttcatggagcacagttaccagggacctggtcactgacctcaggaaaggagtgggtcttt

SEQ ID NO: 346577 - DNA, 120 bp, Artificial Sequence
  ENSG00000138604_11 (sequence is synthesized)
caaacacaaaagctgtcaagccaaccaaaataatgcccaagaaggtggttaggttgattgcaaaaggtaagggattcctcgacaacattaccatctctaccacagcccacatggctgcat

SEQ ID NO: 346578 - DNA, 120 bp, Artificial Sequence
  ENSG00000138604_12 (sequence is synthesized)
tttttgctgctagtgattggctagtaaggaaccaggatgagaaaggtggctggccaattatggtgacccgtaagttaggggaagggttcaagtctttagagccaggatggtattctgcca

SEQ ID NO: 346579 - DNA, 120 bp, Artificial Sequence
  ENSG00000138604_13 (sequence is synthesized)
tggcccaagggcaagccatttctacattagtcagggcctatctgttaacaaaagaccatatattcctcaattcagctttaagggcaacagccccttataagtttctatctgagcagcatg

SEQ ID NO: 346580 - DNA, 120 bp, Artificial Sequence
  ENSG00000138604_14 (sequence is synthesized)
gagttaaagctgtgtttatgaataaacatgactggtatgaagaatatccaaccacacctagctcttttgttttaaatggctttatgtattctttaattgggctgtatgacttaaaagaaa

SEQ ID NO: 346581 - DNA, 120 bp, Artificial Sequence
  ENSG00000138604_15 (sequence is synthesized)
ctgcaggggaaaaactcggaaaagaagcaaggtccttgtatgagcgtggcatggaatctcttaaagccatgctgcccttgtatgacactggctcaggaaccatctatgacctccgtcact

SEQ ID NO: 346582 - DNA, 120 bp, Artificial Sequence
  ENSG00000138604_16 (sequence is synthesized)
tcatgcttggcatcgctcctaacctggctcgctgggactatcataccacccacatcaatcagttgcagctactcagtaccattgatgagtccccagtcttcaaagaatttgtcaagaggt

SEQ ID NO: 346583 - DNA, 120 bp, Artificial Sequence
  ENSG00000138604_17 (sequence is synthesized)
ggaaaagctaccttaaaggcagcagggcaaagcacaactagagctcacaaccaaaactgcacttcagcctctgctgtacacagaaactacaggctctgtctcaggagagcataggcacat

SEQ ID NO: 346584 - DNA, 120 bp, Artificial Sequence
  ENSG00000138604_18 (sequence is synthesized)
tttaaaaggttatgtactaggtttttgtggattctatcaaagtgataagtgatccttaaaaccagccttctaaaataattgcattccatgggttgggtatttagaaatgtaggtggcatt

SEQ ID NO: 346585 - DNA, 120 bp, Artificial Sequence
  ENSG00000138604_19 (sequence is synthesized)
tagaacacaatgtttaatcaatgggctgaacaaagatgcttcactttgccttgcccatcaccctatacagtttcgcagatagtctagtcactctatgtgagaaagataatggtaagtagt

SEQ ID NO: 346586 - DNA, 120 bp, Artificial Sequence
  ENSG00000138604_20 (sequence is synthesized)
tgctactggccaactgtctagcacttacctgaaaacttagtatggagctcttttaaaatgtgattatttatatttatgttgaaagcggactttaaaaaaaataatgtgctgtaacacagt

SEQ ID NO: 346587 - DNA, 120 bp, Artificial Sequence
  ENSG00000138604_21 (sequence is synthesized)
atgtacttgtagcctggatagcagactgtgttcaactttttaaaaagatgtttcctttctaaagattaatttcttgggagcaaatgagtatttgttgcatttgttcaatttgttgtatat

SEQ ID NO: 346588 - DNA, 120 bp, Artificial Sequence
  ENSG00000138604_22 (sequence is synthesized)
ggtgaatatttaattatggttttcttgaaacgtgtaaattaaaaacacaatcagtgttcaggcttcagttatataatgtaagcacaactaaaatgaaacttgttgactgcacaagaaatt

SEQ ID NO: 346589 - DNA, 120 bp, Artificial Sequence
  ENSG00000138604_23 (sequence is synthesized)
acaaaaatgtttctgttttgaaacttgatctacaatcagtaaaagtttgataatcagtatatcccttcccaacccccattgtgacagtttctttttgtcactgtctagaattttgtattt

SEQ ID NO: 346590 - DNA, 120 bp, Artificial Sequence
  ENSG00000138604_24 (sequence is synthesized)
tatttcagactataccttggagttttgtatattttgagagagatatttttgggacattattttggaaacttattacaaatctaaatttggaaaggagctagtagctttaaggccaccacc

SEQ ID NO: 346591 - DNA, 120 bp, Artificial Sequence
  ENSG00000138604_25 (sequence is synthesized)
atattttacttttttaggatttttccccctttaaataaaaatattagatcaaatactatatgcaagaaatcatagcaaagtttttttttcctaccaagatcattcttgatcatcagcttc

SEQ ID NO: 346592 - DNA, 120 bp, Artificial Sequence
  ENSG00000138604_26 (sequence is synthesized)
ccaaactagtaagtctgtgcatcattgggtgtttttttttaatttaattttaaattatcccagctattagatagaagggatgttactgcacttatgtgtaatcagatctttatttaggta

SEQ ID NO: 346593 - DNA, 120 bp, Artificial Sequence
  ENSG00000138604_27 (sequence is synthesized)
tacatatcctcctataccgcacataaatagatttcagagcccccatacaatgggcagtgtctgctatagggcttcaggcattaaataaaaccgagggttgttgattttgctgtgacagta

SEQ ID NO: 346594 - DNA, 120 bp, Artificial Sequence
  ENSG00000138604_28 (sequence is synthesized)
cactaaatcaatactatatcttatacagtttgaaaatatgataccctacactttcaggggaccgagtctgacaaacacaatacatttatctgtgacctatatcaagtacacatttaggag

SEQ ID NO: 346595 - DNA, 120 bp, Artificial Sequence
  ENSG00000138604_29 (sequence is synthesized)
ccaggtaggttacctgcttacacactatattttaattgaattcaaactatcaagcactacttagaaactggaaaacatatatatgttagcatcaaagggggcagaagcaaagaagataca

SEQ ID NO: 346596 - DNA, 120 bp, Artificial Sequence
  ENSG00000138604_30 (sequence is synthesized)
gatctgcactgaagacattagactggccatagaaaagtaagcttgaactcccaattgatgtgaccacactcttcttaattttgttcacagtaaaaacacttttttgagttattaggctta

SEQ ID NO: 346597 - DNA, 120 bp, Artificial Sequence
  ENSG00000138604_31 (sequence is synthesized)
cccctagcttttgacctttgcatttcatatatgttagatgtctcagcaagaatatctggtctcccctaatttttattcccagtgccgatgttcaaaataaactttctccagtctgggaac

SEQ ID NO: 346598 - DNA, 120 bp, Artificial Sequence
  ENSG00000138604_32 (sequence is synthesized)
cttttttacttccccatatttgttattatttagaatggttcatacgtctgctttgtttgcatactggtcttcagattatgagactcgatgataacagtatggtactgcttctgtgacaaa

SEQ ID NO: 346599 - DNA, 120 bp, Artificial Sequence
  ENSG00000138604_33 (sequence is synthesized)
tatcgtgccttaacaatgtggctgtccttttccactgaagaaggaaagacgttttgatctagaaatagcgttgtgatttccttgctgttggttttacactgccttccacattgcaacagc

SEQ ID NO: 346600 - DNA, 120 bp, Artificial Sequence
  ENSG00000138604_34 (sequence is synthesized)
aagttgatttcttgtgatcccagaattttctaagaggatgagttgaatctatagcagcattgtcagtacagaccagtggttctcaaactttaaaatgcctcagcatcacttgggagctta

SEQ ID NO: 346601 - DNA, 120 bp, Artificial Sequence
  ENSG00000138604_35 (sequence is synthesized)
ttgaaatgcagatcccagagtcagtaaatctgcctgtgaagtatgatagtctgcatttgtaatgagcattcaagtgattctgatgcaggtgagctgggggcatacagggaggaacactgc

SEQ ID NO: 346602 - DNA, 120 bp, Artificial Sequence
  ENSG00000138604_36 (sequence is synthesized)
cctggactatccattgcatttttgcctctaaacaactacagaattttctagggttttaaattatgtaaaatgtttacttattctgagcttagagagaatggggagggtatttttaaattt

SEQ ID NO: 346603 - DNA, 120 bp, Artificial Sequence
  ENSG00000138604_37 (sequence is synthesized)
tattgttttatttctttaagtttttctttgctttaagattataggtattaggtttgtttttgtttttccacttatcttgagttcactttgatgttaaatctattgctacttcagttgtaa

SEQ ID NO: 346604 - DNA, 120 bp, Artificial Sequence
  ENSG00000138604_38 (sequence is synthesized)
aaccagccaaaagtttctggatgaaggtcaagtttgaccttttaggagttattgtacataaaggcttcatccacgaaccatccagcgcacagaagcaagtgcaaaaatgacacaagcaca

SEQ ID NO: 346605 - DNA, 120 bp, Artificial Sequence
  ENSG00000138604_39 (sequence is synthesized)
actctccagacgtggctccttctcctttctcagtgcagactctcactgaaagctgctattttcatcctccttgtggttgcttttcttgtttctcttccattgtacatgtgggttatatac

SEQ ID NO: 346606 - DNA, 120 bp, Artificial Sequence
  ENSG00000138604_40 (sequence is synthesized)
catatgttaaatatgcaataaagtgtttacaggatgcccttctgaagggtagtcctttgtaaagctgtacagactttgcagtttaagcacaatgtgcacatgttagttttatatacagca

SEQ ID NO: 346607 - DNA, 120 bp, Artificial Sequence
  ENSG00000138604_41 (sequence is synthesized)
aaacttgattttttgcagatggaaaggtattttgtttctatacaaagtaaatggattgtttgtgcttaatgtaaagccgctttataaaactgtaaaataaagtttttttcttaaaaagaa

SEQ ID NO: 346608 - DNA, 120 bp, Artificial Sequence
  ENSG00000138604_42 (sequence is synthesized)
ttaatattgaaaatagaactgtggtgacattagctatacgcatctaaattgtgcagaatttgaatgtaggaaacaggattatgaaacatgacatctgtagccatgagcaaaagtaacaca

SEQ ID NO: 346609 - DNA, 120 bp, Artificial Sequence
  ENSG00000138604_43 (sequence is synthesized)
cacaaaaagccagtccttaaaaggtaatttatagcgttgcactatttgttaacaaataatgaatgagagtgaaagaatacttaatttttgtttttcacatctggttaatttggtactaga

SEQ ID NO: 346610 - DNA, 120 bp, Artificial Sequence
  ENSG00000138604_44 (sequence is synthesized)
tctggtcattatgagagcagtattataaggaagcccacaacttcctgataaccctgtaagatcccccagaagtaaatcagtgaggaatggtattaggaataggcttgtaatgtctggata

SEQ ID NO: 346611 - DNA, 120 bp, Artificial Sequence
  ENSG00000138604_45 (sequence is synthesized)
aatgatgttagacaaaaagcaaattcaagtgattttcttattcaagttcaaaatgggtcataaagcagcagagacaactcgcagcatcaacaatgcatttggcccagaaattgctaacaa

SEQ ID NO: 346612 - DNA, 120 bp, Artificial Sequence
  ENSG00000138604_46 (sequence is synthesized)
aacaatgcatttggcccagaaattgctaacaaaggtacagtgcagtggtggttcaagaacttttgcaaaggagacgagagccgtgaagatgaggagtgttgtgcccggccatcaaaagtt

SEQ ID NO: 346613 - DNA, 120 bp, Artificial Sequence
  ENSG00000138604_47 (sequence is synthesized)
ggcaacgaccaattgagagcaatcatcgaagctgatcctcttacaacactagaagttgccgagaactcaacatcaaccatcctacggtcattcagcatttgaagcaaattagaaggttgt

SEQ ID NO: 346614 - DNA, 120 bp, Artificial Sequence
  ENSG00000138604_48 (sequence is synthesized)
atcagattgtgacgtgcgttggtaagtggattttatatgacaaccgctgatgaccagcttggtggttggactgagaagaagctccagagcacttcccaaagccaaacttctaccaaaatg

SEQ ID NO: 346615 - DNA, 120 bp, Artificial Sequence
  ENSG00000138604_49 (sequence is synthesized)
ttaatggtcactgtttgatggtctgctgccggtctgatccactacagctttctgagttccagcaaaaccattacatctgagaagtatgctcaacaaatctctgagatgcatggaaagctg

SEQ ID NO: 346616 - DNA, 120 bp, Artificial Sequence
  ENSG00000138604_50 (sequence is synthesized)
caacgcctgcagccagcattgatcaacataaagggcccagtccttcggcacaacaatgcctgacaatgcgtcgcacaaccaacgcttcaaaagttgaatgaattgggcacaaagttttgc

SEQ ID NO: 346617 - DNA, 120 bp, Artificial Sequence
  ENSG00000138604_51 (sequence is synthesized)
ctcatccaccgtattcacctgacttcttgccaactgactaccacttcttcaagcatctcagcaactttttgcagggaagatgtttccacaaccagaatgcagaaaaagctttccaagagt

SEQ ID NO: 346618 - DNA, 83 bp, Artificial Sequence
  ENSG00000138604_52 (sequence is synthesized)
tgtttccacaaccagaatgcagaaaaagctttccaagagtttatcgaatcccagatcacacatttttacactacaggaataaa

SEQ ID NO: 346619 - DNA, 120 bp, Artificial Sequence
  ENSG00000138606_0 (sequence is synthesized)
gtactaaccactatacgatcacggcgagctaccgggacgccacgacgagcagctgacccagtgttgcccttctcgtctagatggcggccattccagctttcctaagcgtccattatctac

SEQ ID NO: 346620 - DNA, 120 bp, Artificial Sequence
  ENSG00000138606_1 (sequence is synthesized)
caggttcctcccgcacccacgttcacccgcaagagcagccgggagcgctgtggactccctagcccgaagtctcctcttggctgtacgcacggaccgcaaaagaagggacatgaaagtgct

SEQ ID NO: 346621 - DNA, 120 bp, Artificial Sequence
  ENSG00000138606_2 (sequence is synthesized)
ttgcaaccaaaggattcctatgaggccgggcctgcaatgatgtgaagcccctgaggacgcccgaatggtggcccaaagtctctctgacgctcaccatgccctgactatcatgctatctga

SEQ ID NO: 346622 - DNA, 120 bp, Artificial Sequence
  ENSG00000138606_3 (sequence is synthesized)
acgactttggctgggactggagctcttaaattttacaagaaggaaaatcagttctgacccaccaccatacaacttccttgaggcgcgagggtgtccacaatctccacagaggcggcattg

SEQ ID NO: 346623 - DNA, 120 bp, Artificial Sequence
  ENSG00000138606_4 (sequence is synthesized)
ggtcaccgctggaggatgcagcaggagggaggacccgtgaggagcgccccctgtaggaccggaaccctggagggttcgcggcaagggtctccggggcataggaaacgggcatcccccaag

SEQ ID NO: 346624 - DNA, 120 bp, Artificial Sequence
  ENSG00000138606_5 (sequence is synthesized)
ggtagtctgagttccgcccagccccattcctggatgctcacgccgtctcccctaaactcccactgcgctcaccgggagcccatctcatcatcaccacagcccgtggctaatgggccaaaa

SEQ ID NO: 346625 - DNA, 120 bp, Artificial Sequence
  ENSG00000138606_6 (sequence is synthesized)
cagaagaagaaaagcaactggcggagtacaacgcgcctgcgcattatcagactcagggacaggctggaacctcgccccctagctatcctagaagactatgcggacccgtttgatgttcag

SEQ ID NO: 346626 - DNA, 120 bp, Artificial Sequence
  ENSG00000138606_7 (sequence is synthesized)
gagactggcgaaggctcagcaggagcttcaggagccccagagaaggtccctgaaaatgatggctacatggagccctatgaggctcaaaagatgatggccgagatccggggctccaaggag

SEQ ID NO: 346627 - DNA, 120 bp, Artificial Sequence
  ENSG00000138606_8 (sequence is synthesized)
acagcaactcagcccttgcctctgtatgacacaccctatgagccagaggaggatggggccaccgcggaaggtgagggggccccctggccccgggagtcccgcctgccagaggatgatgag

SEQ ID NO: 346628 - DNA, 120 bp, Artificial Sequence
  ENSG00000138606_9 (sequence is synthesized)
aggccccctgaggagtatgaccagccctgggagtggaagaaggagcggatttccaaagcctttgcagttgacattaaggtcatcaaagacctaccttggcctccacctgtgggacagctg

SEQ ID NO: 346629 - DNA, 120 bp, Artificial Sequence
  ENSG00000138606_10 (sequence is synthesized)
gaccggagaagagctgcctgtcacctggccgggaggagaaggggcggctacctccccgactctctgcagggaaccccaagtcagccaaacccctaagcatggagcccagcagccccctgg

SEQ ID NO: 346630 - DNA, 120 bp, Artificial Sequence
  ENSG00000138606_11 (sequence is synthesized)
gggagtggacagatccagcactgcctctggaaaaccaggtctggtatcacggggccatcagccgaaccgacgccgagaacctgctccggctgtgcaaagaggccagctacctggtgcgca

SEQ ID NO: 346631 - DNA, 120 bp, Artificial Sequence
  ENSG00000138606_12 (sequence is synthesized)
acagtgagaccagcaagaatgacttctccctctccctcaagagcagccagggattcatgcacatgaagctgtcccgaaccaaggaacacaaatatgtgctgggccagaacagcccgccct

SEQ ID NO: 346632 - DNA, 120 bp, Artificial Sequence
  ENSG00000138606_13 (sequence is synthesized)
tcagcagcgtccctgaaattgtgcaccactatgccagccgcaagctacccattaagggagccgaacacatgtccctgctctaccctgtggccatccggactctttagatgtgaagccagg

SEQ ID NO: 346633 - DNA, 120 bp, Artificial Sequence
  ENSG00000138606_14 (sequence is synthesized)
gcactgtgatagacctgtacccagccctgtgcccatcacctggctgagggctgtggctcttgccagggacgtgatctttcaaacctttcttctcctgggatccagtagaagctggagatt

SEQ ID NO: 346634 - DNA, 120 bp, Artificial Sequence
  ENSG00000138606_15 (sequence is synthesized)
ccttaatttattctaaagggaaagggctcctggggccttggagtaaggggttgtctggagctggggaaagaggaatccctggagagaaaggatagcccctggaggaagggggttccagag

SEQ ID NO: 346635 - DNA, 120 bp, Artificial Sequence
  ENSG00000138606_16 (sequence is synthesized)
ctactgggatggtagggagtttcagactggcagctccggctcctttccgaccttagggcagaggtggtgacctccaccaccaccaccctctccccactgggtccgtgcgaggtagtgcag

SEQ ID NO: 346636 - DNA, 120 bp, Artificial Sequence
  ENSG00000138606_17 (sequence is synthesized)
aattcggccccttggggcgccttaccacctctctgcctccgtccccgacttccaccccagaccgtcggagggctccgcccagagtctggtaagaggtttggggaagacaggcccctggga

SEQ ID NO: 346637 - DNA, 120 bp, Artificial Sequence
  ENSG00000138606_18 (sequence is synthesized)
agcagccggctttggggggtggggagagaaggggaggggctcgggcagagggaactgtgcagtccccaggccgccccggctccgggccagaggcaataaataaacccgatcctgccgggc

SEQ ID NO: 346638 - DNA, 120 bp, Artificial Sequence
  ENSG00000138606_19 (sequence is synthesized)
acagccgcgcccgcgcctccggcgccgtccccgggctgacgggggagggagcggagaagcgagcgcagattctgcgtataaatcagctctggagcagacacagcccggctgtgaaaagca

SEQ ID NO: 346639 - DNA, 120 bp, Artificial Sequence
  ENSG00000138606_20 (sequence is synthesized)
gagttgccacctgggtgcccatgggcactgcaggctagagctgaggaggcccacgccagcctcggaggggtcgcagctctgggcatgggcccaggacttggctagctatcctagaagact

SEQ ID NO: 346640 - DNA, 80 bp, Artificial Sequence
  ENSG00000138606_21 (sequence is synthesized)
ccccatgttactgagcggagctcctccggctggctcccgcccggggccgcgaacgcaggggagcgctgggggcggcccgg

SEQ ID NO: 346641 - DNA, 80 bp, Artificial Sequence
  ENSG00000138606_22 (sequence is synthesized)
aggagggggcggcagcggcggagtagccaagtggctccgggagcacctgggcttccgcggggggggcggcggcggagggg

SEQ ID NO: 346642 - DNA, 120 bp, Artificial Sequence
  ENSG00000138606_23 (sequence is synthesized)
ctaccgcccccctgcgccctctccggccgcgccccccgcgccgcccccggacatcctggccgcctacaggctgcagcgggagcgcgacttcgaagacccctactccggggggtcgtccgg

SEQ ID NO: 346643 - DNA, 120 bp, Artificial Sequence
  ENSG00000138606_24 (sequence is synthesized)
cgccacccctgtcgcccccggacccacgccgcccccgcgccacggctctcccccacaccgccttattcgggtcgagaccccggggcccccggcgccgcctgctgatgagcggatctccgg

SEQ ID NO: 346644 - DNA, 120 bp, Artificial Sequence
  ENSG00000138606_25 (sequence is synthesized)
tggtttcagggacagcaagcagggtggaaggggactccagtattccccttatgcccaaccaagctggggaggtccccatcccccatgaacaatccccaggcactgggggtcctgagatgt

SEQ ID NO: 346645 - DNA, 120 bp, Artificial Sequence
  ENSG00000138606_26 (sequence is synthesized)
ctgagactcagcccctgctctcaaggagctcagagtccattgggagaaatagttgatccgcagcatccagctcagaagggttctgttctagttgtgtggcctggcccccttaacctctct

SEQ ID NO: 346646 - DNA, 120 bp, Artificial Sequence
  ENSG00000138606_27 (sequence is synthesized)
aggcctcagtttccttactaatgaaatggatgggggataatatagggaaggattaggtgaaataatgcatgggaagtgcttagcatagtgctaagggctcaataaattatcactgtcatt

SEQ ID NO: 346647 - DNA, 120 bp, Artificial Sequence
  ENSG00000138606_28 (sequence is synthesized)
attaatggaagcccaagatgttctagaagcataggcaaggagataggagctttgcgtgagggagtctgtagggtgttggggggggctggttcctggaaggagggcagggcagtggacaca

SEQ ID NO: 346648 - DNA, 120 bp, Artificial Sequence
  ENSG00000138606_29 (sequence is synthesized)
aagtatttctgtttactctgaggaagagtgtgtgtgtctgtgtgtgtgttcggggatggggggtgtctgagcttttgggtcctggaagacgtagaggaggcaaggccctccctccccatc

SEQ ID NO: 346649 - DNA, 120 bp, Artificial Sequence
  ENSG00000138606_30 (sequence is synthesized)
aggctttcctcccaggagcagcagatcagcctcccagactccctggtagcatggccagccctgccctgggcaaccaggagttctgcctggtagaccctgcaccccgttaggaagccagtg

SEQ ID NO: 346650 - DNA, 120 bp, Artificial Sequence
  ENSG00000138606_31 (sequence is synthesized)
gggtggtatgttcatttgccccccaccatcactagtaggacacctgcaccactttctaccacattctctgggaccatcagagtacagatataccctcccattcagacaaatccaatctat

SEQ ID NO: 346651 - DNA, 120 bp, Artificial Sequence
  ENSG00000138606_32 (sequence is synthesized)
caatctatgggaacttggggctgctaaacaagacatatttgggggataattattcaacttccctcaaagataatagaaaaagtggtgggtgtgttggctcacatctgtaatcccagcact

SEQ ID NO: 346652 - DNA, 120 bp, Artificial Sequence
  ENSG00000138606_33 (sequence is synthesized)
agaagcatttcccagaaaagtttttgtcaaaaatttgatttacataacctcagaaatgtgtattgctttaaaaattataaagttcatggagcataccaagcagcctgtataccatttcta

SEQ ID NO: 346653 - DNA, 120 bp, Artificial Sequence
  ENSG00000138606_34 (sequence is synthesized)
aaccaactactcccctgcaagatagatctcttttttatagacagaaaataaattcaaagaggtttgttacttgcccaaggccacccggtaataaagtccccaaaccaggatttgaaccca

SEQ ID NO: 346654 - DNA, 120 bp, Artificial Sequence
  ENSG00000138606_35 (sequence is synthesized)
tttccaaagcctttgcagccagactggaaaaccacaggattctaatattcttcctgtaaagcacacaccattgaggatgggccgtttatctccagaagtctccttggagaatcaatactg

SEQ ID NO: 346655 - DNA, 120 bp, Artificial Sequence
  ENSG00000138606_36 (sequence is synthesized)
tttggattgcttaatgggaaaatctatgctcgtcattaggaaacctcgttagcagtccagcagccgccagtggcatcactcttctcaggatggggggtggggattaaatttcaataaaac

SEQ ID NO: 346656 - DNA, 120 bp, Artificial Sequence
  ENSG00000138606_37 (sequence is synthesized)
ccccctggccccgggagtcccgcctgccagaggatgatgagaggccccctgaggagtatgaccagccctgggagtggaagaaggagcggatttccaaagcctttgcaggggacacccaca

SEQ ID NO: 346657 - DNA, 120 bp, Artificial Sequence
  ENSG00000138613_0 (sequence is synthesized)
gtcggtttccgcggtggccatgactgcggccgtgttcttcggctgcgccttcattgccttcgggcctgcgctcgccctttatgtcttcaccatcgccaccgagccgttgcgtatcatctt

SEQ ID NO: 346658 - DNA, 120 bp, Artificial Sequence
  ENSG00000138613_1 (sequence is synthesized)
cctcatcgccggagctttcttctggttggtgtctctactgatttcgtcccttgtttggttcatggcaagagtcattattgacaacaaagatggaccaacacagaaatatctgctgatctt

SEQ ID NO: 346659 - DNA, 120 bp, Artificial Sequence
  ENSG00000138613_2 (sequence is synthesized)
tggagcgtttgtctctgtctatatccaagaaatgttccgatttgcatattataaactcttaaaaaaagccagtgaaggtttgaagagtataaacccaggtgagacagcaccctctatgcg

SEQ ID NO: 346660 - DNA, 120 bp, Artificial Sequence
  ENSG00000138613_3 (sequence is synthesized)
actgctggcctatgtttctggcttgggctttggaatcatgagtggagtattttcctttgtgaataccctatctgactccttggggccaggcacagtgggcattcatggagattctcctca

SEQ ID NO: 346661 - DNA, 120 bp, Artificial Sequence
  ENSG00000138613_4 (sequence is synthesized)
attcttcctttattcagctttcatgacgctggtcattatcttgctgcatgtattctggggcattgtattttttgatggctgtgagaagaaaaagtggggcatcctccttatcgttctcct

SEQ ID NO: 346662 - DNA, 120 bp, Artificial Sequence
  ENSG00000138613_5 (sequence is synthesized)
gacccacctgctggtgtcagcccagaccttcataagttcttattatggaataaacctggcgtcagcatttataatcctggtgctcatgggcacctgggcattcttagctgcgggaggcag

SEQ ID NO: 346663 - DNA, 120 bp, Artificial Sequence
  ENSG00000138613_6 (sequence is synthesized)
ctgccgaagcctgaaactctgcctgctctgccaagacaagaactttcttctttacaaccagcgctccagataacctcagggaaccagcacttcccaaaccgcagactacatctttagagg

SEQ ID NO: 346664 - DNA, 120 bp, Artificial Sequence
  ENSG00000138613_7 (sequence is synthesized)
aagcacaactgtgcctttttctgaaaatccctttttctggtggaattgagaaagaaataaaactatgcagatatgcgttccattcacttggctttcacacaactgctctccgaaaggggt

SEQ ID NO: 346665 - DNA, 120 bp, Artificial Sequence
  ENSG00000138613_8 (sequence is synthesized)
gctcagtggtgtgcgtcctggctgcacgagaatcacctgggacagtgtaaagccgactgattctgggctccaccttccagagctaattggcctgggcacgtggtgagttttaaaagcttc

SEQ ID NO: 346666 - DNA, 120 bp, Artificial Sequence
  ENSG00000138613_9 (sequence is synthesized)
ccaggtgattctgatgtgcagccatgttgagacccactggtttggtatccaaataggagcttcctgagaacaccttaagtggatgagaatctggtctttagctgtctcctaactcaactc

SEQ ID NO: 346667 - DNA, 120 bp, Artificial Sequence
  ENSG00000138613_10 (sequence is synthesized)
gtgctgagcaagtaagtatctgaatgtcaaatcctggttatcttttatcttcctaagttctgaagtcacaaaaggctaaagggctatcacccctgctcactgtttgcgtgtacttcacca

SEQ ID NO: 346668 - DNA, 120 bp, Artificial Sequence
  ENSG00000138613_11 (sequence is synthesized)
tcttaggagaacacggtaggttgggcttctaaatgcaataataaattacgctgactgtggtaacttagccaaagtaagatactgattaagccgtatttttctgaagtgcttccattccag

SEQ ID NO: 346669 - DNA, 120 bp, Artificial Sequence
  ENSG00000138613_12 (sequence is synthesized)
gttttgctttctgaggcattacattgtttttgagtatagattacattttattaactaaaaatgattgttttgtgacttccttgggaaggtattttaaaatcaggaatttttatgcaatgt

SEQ ID NO: 346670 - DNA, 120 bp, Artificial Sequence
  ENSG00000138613_13 (sequence is synthesized)
ctataagcctgtttaaagctttccatgggctctgccccaaggccgttggctgcagcgttcaccatctgagtgccagttgctggactagttgaggtgaagtgcattgttttctctctgagc

SEQ ID NO: 346671 - DNA, 120 bp, Artificial Sequence
  ENSG00000138613_14 (sequence is synthesized)
agctgtgcggggagctgagtgatgtgccctgggacaggcttcactggagctggtggaagtataaccagaagcacaaggaaatgagccaaaagggtgtcattgacacttttcatttgctcc

SEQ ID NO: 346672 - DNA, 120 bp, Artificial Sequence
  ENSG00000138613_15 (sequence is synthesized)
tgtgatactaacaacactttcacccaaatggcttaatgtaatattggaaatagatcttaaactgccaaatctcacactattgcataatccatatgctctttagatctagtcagtgtctct

SEQ ID NO: 346673 - DNA, 120 bp, Artificial Sequence
  ENSG00000138613_16 (sequence is synthesized)
gggttttggtagcagatacagcgttccctttacaggaatacccaaggtgttctttcagcttccagacaggtcctttgatttcctttataaagggaaaattctggcaaatcgtgcctttac

SEQ ID NO: 346674 - DNA, 120 bp, Artificial Sequence
  ENSG00000138613_17 (sequence is synthesized)
gacctatacattaaagtgatgtctcagtgaataccatacatgcagtagaacattcagaagagaggagcagcaatcctgaggggctgggggagtgacagtggcaggacggatgggcgggtt

SEQ ID NO: 346675 - DNA, 120 bp, Artificial Sequence
  ENSG00000138613_18 (sequence is synthesized)
tgacagattgtggtgggaagaagaatgatcatgtttaaagctaacatagccagtgttttgggctagccacacatcattccagagaccaaaaccttactcatgaactagacctttatcgat

SEQ ID NO: 346676 - DNA, 120 bp, Artificial Sequence
  ENSG00000138613_19 (sequence is synthesized)
atcagtgaacccccatgtttaaaatattagaatgtttagagataaaatagagataatagagataaaagaagaggagggcttctatcaatgctgtaaacagtctgataagcgactgtggtt

SEQ ID NO: 346677 - DNA, 120 bp, Artificial Sequence
  ENSG00000138613_20 (sequence is synthesized)
attcccctaaagtttacttcagcactaacactagtgcttccgctggagtttgcagttttccagctttatacaggattttcctttgactggaagagtcaaggatatagagactcaacagtg

SEQ ID NO: 346678 - DNA, 120 bp, Artificial Sequence
  ENSG00000138613_21 (sequence is synthesized)
acatttattgtacaacatcaaggggaataggatactcatcaaactgggattattcttatcaaaacatggtcttctttgaataagaaaaatacatagttggttattatggacttaaaactg

SEQ ID NO: 346679 - DNA, 120 bp, Artificial Sequence
  ENSG00000138613_22 (sequence is synthesized)
tgttaaatggatattctgataaaatatttgctgctctgtagagtgtggaaagtctgagaatattagctttactcatcttgagctttgaggatgttctctgtacgccgatggtttcatatt

SEQ ID NO: 346680 - DNA, 120 bp, Artificial Sequence
  ENSG00000138613_23 (sequence is synthesized)
aactaaaaaagctgggtattgtaaaatctcatttataaaaactcagatgagaagaaaattttctttgatggtgagactgttgtcttagttcaggaaattatttaataatcctttgttacc

SEQ ID NO: 346681 - DNA, 120 bp, Artificial Sequence
  ENSG00000138613_24 (sequence is synthesized)
tgtgaatgaaggaactttgtaattctgatttatcgtaaaacatgagcctttccagagtcagcttagacactgttgtcgcaaatagccatgctttgccttatgccaaggaggcccagaggg

SEQ ID NO: 346682 - DNA, 120 bp, Artificial Sequence
  ENSG00000138613_25 (sequence is synthesized)
agggcctagtcttcctctgttgctgtacatatattgaaatgcttttttttttttattttgcatttgttatctataatgagctttctgagccctgatattatgtgagacaaacaggagtta

SEQ ID NO: 346683 - DNA, 120 bp, Artificial Sequence
  ENSG00000138613_26 (sequence is synthesized)
ttgatgttatacactcccttccattcaggattttctgcttggagggaaatatgttgaccttagagaattgtgaatattgttgcaattcttgaatatattaccatgtgaataatagagact

SEQ ID NO: 346684 - DNA, 120 bp, Artificial Sequence
  ENSG00000138613_27 (sequence is synthesized)
gtgttgctctctagtataagctatatttatttttgattcatttgaattactagttataactggagaaattttgttacctctatcctggcttgcctgactggctgtataatagcagcagcc

SEQ ID NO: 346685 - DNA, 120 bp, Artificial Sequence
  ENSG00000138613_28 (sequence is synthesized)
tcttttagagcatcttaatgaaaacatggatgaaaggaattaatgatgatatctgcagactgcgtagaaaatggcttttgttcccagcgttaacattttcttctcaatcacatttcaatg

SEQ ID NO: 346686 - DNA, 120 bp, Artificial Sequence
  ENSG00000138613_29 (sequence is synthesized)
tttgtggagagtggcagattcacaccagaaacactaggtgttcatatccatagcatggatgcagaataagcagttgggagagaagcttcttcctacctggtactcctcccattcacctca

SEQ ID NO: 346687 - DNA, 120 bp, Artificial Sequence
  ENSG00000138613_30 (sequence is synthesized)
gcccagccccagacaggcgttagcattcagtgtgggccctcaggcagccctgaagcctggctgggtcatcagatgggggcagcctgtgacgggcaccagcggcctgattccagggaagag

SEQ ID NO: 346688 - DNA, 120 bp, Artificial Sequence
  ENSG00000138613_31 (sequence is synthesized)
ttcctggagggtgttggctgtttttgttagctcagtttttttctgggctccaccattcctaactccaggtagacaagatagatgtcacacacaacaattttaaagtattttgcttagtgc

SEQ ID NO: 346689 - DNA, 120 bp, Artificial Sequence
  ENSG00000138613_32 (sequence is synthesized)
attttgtttatgattgcagtgtttgtttcttatttaataggctttttacttcattctattaaattttagtgtttagaagaggcgggtactgtcactgtgtaaaatatgtaatattttata

SEQ ID NO: 346690 - DNA, 120 bp, Artificial Sequence
  ENSG00000138613_33 (sequence is synthesized)
tgttataccatgtcatatatacttgcaatatcagaccttgcattcaatatacaatgcaattgactctttgcagacctgcatttttcagtgaacaataaaaagattgtctggcactcctca

SEQ ID NO: 346691 - DNA, 120 bp, Artificial Sequence
  ENSG00000138613_34 (sequence is synthesized)
ctgtaataagtctcatggtggctggaatgttcttttctaccctttgactttgagctcagtcatgtggcttgaattggccaattagtggttatgatgtaagttagaggcttaaaaagtatt

SEQ ID NO: 346692 - DNA, 120 bp, Artificial Sequence
  ENSG00000138613_35 (sequence is synthesized)
tgcatgattggaccttccttcttggactctggtgccatgagaagaagataccttgggaagttaatggccacttagcctggacccttgaatgaatatacccagagccacacagagcccacc

SEQ ID NO: 346693 - DNA, 120 bp, Artificial Sequence
  ENSG00000138613_36 (sequence is synthesized)
ctgccattcatttcctttcctcttcccgcttccctctctgattcatcatttagccaagcacatgcctctccagagccagctgtccactgcttcaggaagaacataagcaccctttcccct

SEQ ID NO: 346694 - DNA, 120 bp, Artificial Sequence
  ENSG00000138613_37 (sequence is synthesized)
tgaatcaggccactgccatctcatgcctgcgttgcactgaggacctccagtctggaagctcattttccatatctttacaaagcagatctatcactctgaactgttgtctcgacccgagtt

SEQ ID NO: 346695 - DNA, 120 bp, Artificial Sequence
  ENSG00000138613_38 (sequence is synthesized)
taaatgggcaaagatattagtgaacttctaggtgctgaggaaacaacaaagagcaaagcaaagtccctgtcccccaggagttcgcgttttaacggggaagaaaaataagcaagtgaaatg

SEQ ID NO: 346696 - DNA, 120 bp, Artificial Sequence
  ENSG00000138613_39 (sequence is synthesized)
gacgactgtgagaagacggagcagggagatgttactattgcttgtagggtggtcacagaatgcctgcaaaaacaacccttttgaagaattgggaaaaaaataaaaaccatttggctgaaa

SEQ ID NO: 346697 - DNA, 120 bp, Artificial Sequence
  ENSG00000138613_40 (sequence is synthesized)
ctttatgtcttcaccatcgccaccgagccgttgcgtatcatcttcctcatcgccgggtgaggcggtcgcgtcgggaaacccggacgccggggctcccctcccccgctggggttacccgcg

SEQ ID NO: 346698 - DNA, 120 bp, Artificial Sequence
  ENSG00000138613_41 (sequence is synthesized)
accctcggcgcccccaccgcgcggctcgaccttgttgcgtttcagacgggaggagggttgagagggggagagcggagatccggctccccaaaggcgcctcgccctcttaggaagaagcgc

SEQ ID NO: 346699 - DNA, 120 bp, Artificial Sequence
  ENSG00000138614_0 (sequence is synthesized)
tccaaggaccgccccgcccagcgcggagtgcaggcgccggattcccttctgtcgcgcggccttatagttccggctgtggcgcgcggacggaaagtttatgccgacggaaagtttatgccg

SEQ ID NO: 346700 - DNA, 120 bp, Artificial Sequence
  ENSG00000138614_1 (sequence is synthesized)
acggactgtgtccggcgatgggcacgggcatttcttcgtttatagctgtctgtttgcattctgattgggaacactgggatcattttcatcatgccgacagtggtggtaatggatgtatcc

SEQ ID NO: 346701 - DNA, 120 bp, Artificial Sequence
  ENSG00000138614_2 (sequence is synthesized)
ctttccatgacccgacctgtgtctattgaggggtccgaggaataccagcgtaagcacctagcagcccatggtttaacgatgctgtttgagcacatggccacaaattacaagcttgaattt

SEQ ID NO: 346702 - DNA, 120 bp, Artificial Sequence
  ENSG00000138614_3 (sequence is synthesized)
acagcacttgtggttttttcatcactttgggagttgatggtccccttcacgagagattataataccctacaggaagcactaagtaatatggatgattatgacaaaacctgcttggagtct

SEQ ID NO: 346703 - DNA, 120 bp, Artificial Sequence
  ENSG00000138614_4 (sequence is synthesized)
gcattagttggtgtttgcaatatcgttcagcaagaatggggtggtgcaattccttgccaggttgtcctggtgacagacggctgtcttggcattggtagagggtcactgcgacattcccta

SEQ ID NO: 346704 - DNA, 120 bp, Artificial Sequence
  ENSG00000138614_5 (sequence is synthesized)
gccactcaaaatcaacgaagtgagagcaacaggtttccactaccttttcctttcccatctaagttatatatcatgtgcatggcgaatttggaggagctccagagcaccgattccttggaa

SEQ ID NO: 346705 - DNA, 120 bp, Artificial Sequence
  ENSG00000138614_6 (sequence is synthesized)
tgccttgaacgtctcatagatttaaacaatggtgaagggcagatttttactattgatggccccctgtgcttgaagaatgtacagtctatgtttggaaaactgatagatttggcatatacg

SEQ ID NO: 346706 - DNA, 120 bp, Artificial Sequence
  ENSG00000138614_7 (sequence is synthesized)
cctttccatgctgttctcaagtgtggccacctaactgctgatgtacaagtcttccccaggccagaaccttttgttgtagatgaagaaattgatcctatccctaaagtcattaacacagat

SEQ ID NO: 346707 - DNA, 120 bp, Artificial Sequence
  ENSG00000138614_8 (sequence is synthesized)
ttggaaatagtgggatttattgatatagctgatatttcaagtcccccagttctgtccagacatctggtcttacctatagcacttaacaaagaaggtgatgaggtgggtactggcatcact

SEQ ID NO: 346708 - DNA, 120 bp, Artificial Sequence
  ENSG00000138614_9 (sequence is synthesized)
aggtcctgaatggcatggaatgctctactcccaagctgacagcaagaagaaatcaaacctcatgatgtctctctttgagcctggcccagaacctctcccatggctagggaaaatggcaca

SEQ ID NO: 346709 - DNA, 120 bp, Artificial Sequence
  ENSG00000138614_10 (sequence is synthesized)
gttgggtcctatttcagatgctaaagaaaacccttatggcgaggatgacaataagagtccattccccctgcagcccaaaaacaaacgcagttatgcccagaatgtgactgtctggatcaa

SEQ ID NO: 346710 - DNA, 120 bp, Artificial Sequence
  ENSG00000138614_11 (sequence is synthesized)
acccagcggcctgcagacagatgtacagaagattttaagaaatgcaaggaaactacctgaaaaaacacagacattctataaggagctgaaccgtttgcgaaaggccgctctagcctttgg

SEQ ID NO: 346711 - DNA, 120 bp, Artificial Sequence
  ENSG00000138614_12 (sequence is synthesized)
tttcctggacctgctgaaaggggtggctgacatgctggaaagggaatgcacactgctgcctgagacagcccaccctgatgctgcattccagctgacccatgctgcccagcagctcaagct

SEQ ID NO: 346712 - DNA, 120 bp, Artificial Sequence
  ENSG00000138614_13 (sequence is synthesized)
ggccagtaccggcacctctgagtatgccgcttatgaccagaacatcacacctttgcacacggacttctctgggagcagcactgaaagaatttgaaactgacttttggagctttccttctt

SEQ ID NO: 346713 - DNA, 120 bp, Artificial Sequence
  ENSG00000138614_14 (sequence is synthesized)
ttttcatttcaactgaaaatgctttaggtaaaaacctttccagtatgttcacctctagaatagccacccaaagaccttcctgaggctgcctcagaagcaccacttgctgttttgaatgac

SEQ ID NO: 346714 - DNA, 120 bp, Artificial Sequence
  ENSG00000138614_15 (sequence is synthesized)
tctactagtatgagaaggatgtgaaggtggttggctggttgggctttaacttcctgggattcataatttttaagcttggaagatagctgctgttcccatgatgggcacatttcctgagaa

SEQ ID NO: 346715 - DNA, 120 bp, Artificial Sequence
  ENSG00000138614_16 (sequence is synthesized)
gcttgaatgactgatgagcatagagcacccctgccttcctcaggaaacctgaccggcaggggctctctggcttcctgaaagcttcacctcttccctcgtttatatctcaactgtaagggc

SEQ ID NO: 346716 - DNA, 120 bp, Artificial Sequence
  ENSG00000138614_17 (sequence is synthesized)
attttcaagcttctgttcatggaatgagcaactcagactgtctggagcttgctgagtacaaacacaccaccactaagtttcagaactttccttagaacttgggcaaaatgtggtggtaac

SEQ ID NO: 346717 - DNA, 120 bp, Artificial Sequence
  ENSG00000138614_18 (sequence is synthesized)
tcttaagtgcttttggtatctcttgagattctaacttttaaagagcaaccattaatgtgtaaaatgattcctattattcaaggtttttttttaatgaaaataaaatatttgattttctag

SEQ ID NO: 346718 - DNA, 120 bp, Artificial Sequence
  ENSG00000138614_19 (sequence is synthesized)
tattttacagcttagtttatttttcagtatataccactagtgctatattgtatatactgtagcattgaactccattggtttcagctgaggctggtattttatttgaaaagattctgggtc

SEQ ID NO: 346719 - DNA, 120 bp, Artificial Sequence
  ENSG00000138614_20 (sequence is synthesized)
tcaaatgttctttgaaatttcagagtgttgcctcatctggggaacatagctggagttgttatccatcctgctgatgggtgcataaagggtcaaggtgttctttttggtgttgttcatttc

SEQ ID NO: 346720 - DNA, 120 bp, Artificial Sequence
  ENSG00000138614_21 (sequence is synthesized)
ccttatatagaattcttatgtccattccaccagaaatgttgacaagagtgtgctttgactttgacagaagagtaaagtaacattattctgatacacgttttattaaacacttaaattctt

SEQ ID NO: 346721 - DNA, 120 bp, Artificial Sequence
  ENSG00000138614_22 (sequence is synthesized)
gtatccctggtattctgaatttcagaatgttggtctcttcattgattttgctaggcactcagtggaccctttccatctggcaattcatgatcttcagtactgggaagatcaattatttct

SEQ ID NO: 346722 - DNA, 120 bp, Artificial Sequence
  ENSG00000138614_23 (sequence is synthesized)
ttgatttcctctttctgtattctctgttctccttttctggaacatatatttgtgatttgtgtttgtaattttctatctctttctgcccattttcccatttttaaaatttttgttctgtct

SEQ ID NO: 346723 - DNA, 120 bp, Artificial Sequence
  ENSG00000138614_24 (sequence is synthesized)
atataggctccagacaactaatgacagtacaaaataggctctgattagatgttgaaatgtttggtactgatactaagtgctaggggataaaagggtctacaaaaaccactatctgccaga

SEQ ID NO: 346724 - DNA, 120 bp, Artificial Sequence
  ENSG00000138614_25 (sequence is synthesized)
aaaacttgaaacaatttcatggaaggggtaagataggatctggacttggaatataggtagatgctaaagaaaacccttatggcgaggatgacaataagagtccattccccctgcagccca

SEQ ID NO: 346725 - DNA, 120 bp, Artificial Sequence
  ENSG00000138614_26 (sequence is synthesized)
actgtgtccggcgatgggcacggggtgagtggggaggccgagggcccgggactgcctttcgctgcttgttggggttacaggtgaaggggttatgggtgaagaacaacccagggccagcgc

SEQ ID NO: 346726 - DNA, 120 bp, Artificial Sequence
  ENSG00000138614_27 (sequence is synthesized)
ttggccttcccgccaccgtggcggccgccccgcgctgtctgtgaggcgccagttccggggcgctgctcccggcctcccctcgctctgaggctcggggtccccagctccgcgtaaactgca

SEQ ID NO: 346727 - DNA, 120 bp, Artificial Sequence
  ENSG00000138614_28 (sequence is synthesized)
cgatttcgccctctgctcagctcccctctgccccctctttccaagagagacttccagatcccacattttcttgactgatttttaaggtaaaaatacatctcccagatgtgattttcagtc

SEQ ID NO: 346728 - DNA, 120 bp, Artificial Sequence
  ENSG00000138614_29 (sequence is synthesized)
gagatgaaattatatctgagaactggggagggactcccggaggctgacgggaaagccaaagagcaggaagcactaagtaatatggatgattatgacaaaacctgcttggagtctgcatta

SEQ ID NO: 346729 - DNA, 120 bp, Artificial Sequence
  ENSG00000138614_30 (sequence is synthesized)
atatgcttagagctcttttgccttctttacaatccagtattataatttgacatccaggaagactatctgttttactgttcctaattgtgtcatttcattttccccaagttgtacattttt

SEQ ID NO: 346730 - DNA, 120 bp, Artificial Sequence
  ENSG00000138614_31 (sequence is synthesized)
cagataaagtgatgggtagtaatggttttttaaagtaaatctatactgtctgtagatactgacttccttataatgactcagcaaaatttcaaattaacttgctcttgggcttttcagaat

SEQ ID NO: 346731 - DNA, 120 bp, Artificial Sequence
  ENSG00000138614_32 (sequence is synthesized)
ttcctcaccaaaaatgtcagattttgttctgttttacagatggtcagatcttagttttggaaccaacttgaaaggaaaacaacccttgcgtcctgaaaaattaacttcatatgtatcgta

SEQ ID NO: 346732 - DNA, 120 bp, Artificial Sequence
  ENSG00000138615_0 (sequence is synthesized)
aggcgaaggcttggacccccagctgaggagtcctgctcaagacacggtcactggatctgagaaacttcccaggggaccgcattccagagtcagtgactctgtgaagcacccacatctacc

SEQ ID NO: 346733 - DNA, 120 bp, Artificial Sequence
  ENSG00000138615_1 (sequence is synthesized)
tcttgccacgttcccacgggcttgggggaaagatggtggggaccaaggcctgggtgttctccttcctggtcctggaagtcacatctgtgttggggagacagacgatgctcacccagtcag

SEQ ID NO: 346734 - DNA, 120 bp, Artificial Sequence
  ENSG00000138615_2 (sequence is synthesized)
taagaagagtccagcctgggaagaagaaccccagcatctttgccaagcctgccgacaccctggagagccctggtgagtggacaacatggttcaacatcgactacccaggcgggaagggcg

SEQ ID NO: 346735 - DNA, 120 bp, Artificial Sequence
  ENSG00000138615_3 (sequence is synthesized)
actatgagcggctggacgccattcgcttctactatggggaccgtgtatgtgcccgtcccctgcggctagaggctcggaccactgactggacacctgcgggcagcactggccaggtggtcc

SEQ ID NO: 346736 - DNA, 120 bp, Artificial Sequence
  ENSG00000138615_4 (sequence is synthesized)
atggtagtccccgtgagggtttctggtgcctcaacagggagcagcggcctggccagaactgctctaattacaccgtacgcttcctctgcccaccaggatccctgcgccgagacacagagc

SEQ ID NO: 346737 - DNA, 120 bp, Artificial Sequence
  ENSG00000138615_5 (sequence is synthesized)
gcatctggagcccatggtctccctggagcaagtgctcagctgcctgtggtcagactggggtccagactcgcacacgcatttgcttggcagagatggtgtcgctgtgcagtgaggccagcg

SEQ ID NO: 346738 - DNA, 120 bp, Artificial Sequence
  ENSG00000138615_6 (sequence is synthesized)
aagagggtcagcactgcatgggccaggactgtacagcctgtgacctgacctgcccaatgggccaggtgaatgctgactgtgatgcctgcatgtgccaggacttcatgcttcatggggctg

SEQ ID NO: 346739 - DNA, 120 bp, Artificial Sequence
  ENSG00000138615_7 (sequence is synthesized)
tctcccttcccggaggtgccccagcctcaggggctgctatctacctcctgaccaagacgccgaagctgctgacccagacagacagtgatgggagattccgaatccctggcttgtgccctg

SEQ ID NO: 346740 - DNA, 120 bp, Artificial Sequence
  ENSG00000138615_8 (sequence is synthesized)
atggcaaaagcatcctgaagatcacaaaggtcaagtttgcccccattgtactcacaatgcccaagactagcctgaaggcagccaccatcaaggcagagtttgtgagggcagagactccat

SEQ ID NO: 346741 - DNA, 120 bp, Artificial Sequence
  ENSG00000138615_9 (sequence is synthesized)
acatggtgatgaaccctgagacaaaagcacggagagctgggcagagcgtgtctctgtgctgtaaggccacagggaagcccaggccagacaagtatttttggtatcataatgacacattgc

SEQ ID NO: 346742 - DNA, 120 bp, Artificial Sequence
  ENSG00000138615_10 (sequence is synthesized)
tggatccttccctctacaagcatgagagcaagctggtgctgaggaaactgcagcagcaccaggctggggagtacttttgcaaggcccagagtgatgctggggctgtgaagtccaaggttg

SEQ ID NO: 346743 - DNA, 120 bp, Artificial Sequence
  ENSG00000138615_11 (sequence is synthesized)
cccagctgattgtcatagcatctgatgagactccttgcaacccagttcctgagagctatcttatccggctgccccatgattgctttcagaatgccaccaactccttctactatgacgtgg

SEQ ID NO: 346744 - DNA, 120 bp, Artificial Sequence
  ENSG00000138615_12 (sequence is synthesized)
gacgctgccctgttaagacttgtgcagggcagcaggataatgggatcaggtgccgtgatgctgtgcagaactgctgtggcatctccaagacagaggaaagggagatccagtgcagtggct

SEQ ID NO: 346745 - DNA, 120 bp, Artificial Sequence
  ENSG00000138615_13 (sequence is synthesized)
acacgctacccaccaaggtggccaaggagtgcagctgccagcggtgtacggaaactcggagcatcgtgcggggccgtgtcagtgctgctgacaatggggagcccatgcgctttggccatg

SEQ ID NO: 346746 - DNA, 120 bp, Artificial Sequence
  ENSG00000138615_14 (sequence is synthesized)
tgtacatggggaacagccgtgtaagcatgactggctacaagggcactttcaccctccatgtcccccaggacactgagaggctggtgctcacatttgtggacaggctgcagaagtttgtca

SEQ ID NO: 346747 - DNA, 120 bp, Artificial Sequence
  ENSG00000138615_15 (sequence is synthesized)
acaccaccaaagtgctacctttcaacaagaaggggagtgccgtgttccatgaaatcaagatgcttcgtcggaaaaagcccatcactttggaagccatggagaccaacatcatccccctgg

SEQ ID NO: 346748 - DNA, 120 bp, Artificial Sequence
  ENSG00000138615_16 (sequence is synthesized)
gggaagtggttggtgaagaccccatggctgaactggagattccatccaggagtttctacaggcagaatggggagccctacataggaaaagtgaaggccagtgtgaccttcctggatcccc

SEQ ID NO: 346749 - DNA, 120 bp, Artificial Sequence
  ENSG00000138615_17 (sequence is synthesized)
ggaatatttccacagccacagctgcccagactgacctgaacttcatcaatgacgaaggagacactttcccccttcggacgtatggcatgttctctgtggacttcagagatgaggtcacct

SEQ ID NO: 346750 - DNA, 120 bp, Artificial Sequence
  ENSG00000138615_18 (sequence is synthesized)
cagagccacttaatgctggcaaagtgaaggtccaccttgactcgacccaggtcaagatgccagagcacatatccacagtgaaactctggtcactcaatccagacacagggctgtgggagg

SEQ ID NO: 346751 - DNA, 120 bp, Artificial Sequence
  ENSG00000138615_19 (sequence is synthesized)
aggaaggtgatttcaaatttgaaaatcaaaggaggaacaaaagagaagacagaaccttcctggtgggcaacctggagattcgtgagaggaggctctttaacctggatgttcctgaaagca

SEQ ID NO: 346752 - DNA, 120 bp, Artificial Sequence
  ENSG00000138615_20 (sequence is synthesized)
ggcggtgctttgttaaggtgagggcctaccggagtgagaggttcttgcctagtgagcagatccagggggttgtgatctccgtgattaacctggagcctagaactggcttcttgtccaacc

SEQ ID NO: 346753 - DNA, 120 bp, Artificial Sequence
  ENSG00000138615_21 (sequence is synthesized)
ctagggcctggggccgctttgacagtgtcatcacaggccccaacggggcctgtgtgcctgccttctgtgatgaccagtcccctgatgcctactctgcctatgtcttggcaagcctggctg

SEQ ID NO: 346754 - DNA, 120 bp, Artificial Sequence
  ENSG00000138615_22 (sequence is synthesized)
gggaggaactgcaagcagtggagtcttctcctaaattcaacccaaatgcaattggcgtccctcagccctatctcaacaagctcaactaccgtcggacggaccatgaggatccacgggtta

SEQ ID NO: 346755 - DNA, 120 bp, Artificial Sequence
  ENSG00000138615_23 (sequence is synthesized)
cccaactcagctgaggagagcaatgggcccatctatgcctttgagaacctccgggcatgtgaagaggcaccacccagtgcagcccacttccggttctaccagattgagggggatcgatat

SEQ ID NO: 346756 - DNA, 120 bp, Artificial Sequence
  ENSG00000138615_24 (sequence is synthesized)
gactacaacacagtccccttcaacgaagatgaccctatgagctggactgaagactatctggcatggtggccaaagccgatggaattcagggcctgctatatcaaggtgaagattgtgggg

SEQ ID NO: 346757 - DNA, 120 bp, Artificial Sequence
  ENSG00000138615_25 (sequence is synthesized)
ccactggaagtgaatgtgcgatcccgcaacatggggggcactcatcggcagacagtggggaagctgtatggaatccgagatgtgaggagcactcgggacagggaccagcccaatgtctca

SEQ ID NO: 346758 - DNA, 120 bp, Artificial Sequence
  ENSG00000138615_26 (sequence is synthesized)
gctgcctgtctggagttcaagtgcagtgggatgctctatgatcaggaccgtgtggaccgcaccctggtgaaggtcatcccccagggcagctgccgtcgagccagtgtgaaccccatgctg

SEQ ID NO: 346759 - DNA, 120 bp, Artificial Sequence
  ENSG00000138615_27 (sequence is synthesized)
catgagtacctggtcaaccacttgccacttgcagtcaacaacgacaccagtgagtacaccatgctggcacccttggacccactgggccacaactatggcatctacactgtcactgaccag

SEQ ID NO: 346760 - DNA, 120 bp, Artificial Sequence
  ENSG00000138615_28 (sequence is synthesized)
gaccctcgcacggccaaggagatcgcgctcggccggtgctttgatggcacatccgatggctcctccagaatcatgaagagcaatgtgggagtagccctcaccttcaactgtgtagagagg

SEQ ID NO: 346761 - DNA, 120 bp, Artificial Sequence
  ENSG00000138615_29 (sequence is synthesized)
caagtaggccgccagagtgccttccagtacctccaaagcaccccagcccagtcccctgctgcaggcactgtccaaggaagagtgccctcgaggaggcagcagcgagcgagcaggggtggc

SEQ ID NO: 346762 - DNA, 120 bp, Artificial Sequence
  ENSG00000138615_30 (sequence is synthesized)
cagcgccagggtggagtggtggcctctctgagatttcctagagttgctcaacagcccctgatcaactaagttttgtggtacttcaccctcttctgccctcatttcatgtgacagccattg

SEQ ID NO: 346763 - DNA, 120 bp, Artificial Sequence
  ENSG00000138615_31 (sequence is synthesized)
tgagactgatgcacaaactgtcacttggttaatttaagcacttctgttttcgtgaatttgcttgtttgtttcttcatgcctttacttactttgtcccatgctactgattggcacgtggcc

SEQ ID NO: 346764 - DNA, 120 bp, Artificial Sequence
  ENSG00000138615_32 (sequence is synthesized)
cccacaatggcacaataaagcccctttgtgaaactgttctttaaatgaaacacaagaaattggccactggtaaaactctgcagcttcaactgtacttcatttaatgccattaatgcaaat

SEQ ID NO: 346765 - DNA, 120 bp, Artificial Sequence
  ENSG00000138615_33 (sequence is synthesized)
atacttcctcttctttttgcatggttttgcccacctctgcaatagtgataatctgatgctgaagatcaaataaccaatataaagcatatttcttggccttgctccacaggacataggcaa

SEQ ID NO: 346766 - DNA, 120 bp, Artificial Sequence
  ENSG00000138615_34 (sequence is synthesized)
gccttgatcatagttcatacatataaatggtggtgaaataaagaaataaaacacaatacttttacttgaaatgtaaataacttatttatttctttgctaaatttggaattctagtgcaca

SEQ ID NO: 346767 - DNA, 120 bp, Artificial Sequence
  ENSG00000138615_35 (sequence is synthesized)
ttcaaagttaagctattaaatatagggtgatcatagttcctctaccaagtctggaaagaacatctcctggtatccacaattacaccaggttgctaactgtatttgtacatttccctttgc

SEQ ID NO: 346768 - DNA, 120 bp, Artificial Sequence
  ENSG00000138615_36 (sequence is synthesized)
attcgcttctgttcttgctagaaacccagtgtagcccagggcagatgtcaataaatgcatactctgtatttcgattctgaggccactgtcctgtcttaactattaaagtgagccagcttc

SEQ ID NO: 346769 - DNA, 120 bp, Artificial Sequence
  ENSG00000138615_37 (sequence is synthesized)
tcagaggagtacaggggactctggaaagcagtcacaggtggtgtaagtcctcgccccctaagttacagggcagggcaacataggcacacactccagcagtcaaatttgttctcatggatc

SEQ ID NO: 346770 - DNA, 120 bp, Artificial Sequence
  ENSG00000138615_38 (sequence is synthesized)
acattttccgtttgcagaaaagagcagattcctggagttgtgagcatgttctgggctcctgagcaagactaaaaacacgtcccgatttttttctttccttctttccaatactttggagct

SEQ ID NO: 346771 - DNA, 120 bp, Artificial Sequence
  ENSG00000138615_39 (sequence is synthesized)
tatacaatggcttggcccagggtctgacaagctggccaagtggtcctttggctctcccaacagcctgttgccttctccagctgggctggccggcctcactcagaaatgggcttttacttt

SEQ ID NO: 346772 - DNA, 120 bp, Artificial Sequence
  ENSG00000138615_40 (sequence is synthesized)
tttctttatgctcttctaaagatgttcaacttttccagacaccagatctctgttgtgtgttacagaccctgtccctggagcaaaacaattggtccaaacgggcagagttttggttttgga

SEQ ID NO: 346773 - DNA, 120 bp, Artificial Sequence
  ENSG00000138615_41 (sequence is synthesized)
aaaggtatttggtttaaaatagtaaatcagaggcccataggtggtgccagagcgatctcagcggcattacagtcagggtagtggggtgtggggttggataggatgcactcactgccccta

SEQ ID NO: 346774 - DNA, 120 bp, Artificial Sequence
  ENSG00000138615_42 (sequence is synthesized)
tcccaacccctccagaatctgtcaggcaagagtccaaagggtttgggagaagagaggacactgtttacaatcaggacaaaaagctttccctgatgccctggccagcctagtgcagctcct

SEQ ID NO: 346775 - DNA, 120 bp, Artificial Sequence
  ENSG00000138615_43 (sequence is synthesized)
ttacccatctctggcctgggctggatttgtactcttggatcaccatctgcccggctcctgggaatttggtttgtaagcaattagaaatttctctagctgagcacatcacaataaccatag

SEQ ID NO: 346776 - DNA, 120 bp, Artificial Sequence
  ENSG00000138615_44 (sequence is synthesized)
aaaaagcaagcatctgcaggagtgaggactagtggtcttgtgattgcaacttgacccacttccagactccacatctgtcccactgctcccaggaagcagctctcactgactgcttgggga

SEQ ID NO: 346777 - DNA, 120 bp, Artificial Sequence
  ENSG00000138615_45 (sequence is synthesized)
ggcttgactgcccctgttgtgagtgcacagctatctgcagcaccatcgccccagccacttcaggagccagagtgcctgctgcttcaacctgaccaccagttcacttcaaactcacggggg

SEQ ID NO: 346778 - DNA, 120 bp, Artificial Sequence
  ENSG00000138615_46 (sequence is synthesized)
gagggggagggtcgggggggggtgggttgctggggaaggtgggctgactggttccccactctagggcactttccttgctgttctcaattgagggcctgaataaatggactccagcacaca

SEQ ID NO: 346779 - DNA, 120 bp, Artificial Sequence
  ENSG00000138617_0 (sequence is synthesized)
gcggcgcagcagcctcgcccgtcgcggagagtgggctctgcccgccgtcccccgggggctgcttcccgccccaggcctccgcggaggacacgtgtcagcacgttcccgcggttgtcattc

SEQ ID NO: 346780 - DNA, 120 bp, Artificial Sequence
  ENSG00000138617_1 (sequence is synthesized)
cattgtcatagcccttcccctaggccgggaacccctcccccccaccagccccagttcctttatccctgggcccaacctccccgccgacccgcggtccaggcctcggtctctctcttcggc

SEQ ID NO: 346781 - DNA, 120 bp, Artificial Sequence
  ENSG00000138617_2 (sequence is synthesized)
ggcgagccgcggcccagaccccggcagaggacacttgtcggcacgttctcacccctgtcatctcagccccctgcctagctccaccccaggcttgggaacccggcccctgacggcccattg

SEQ ID NO: 346782 - DNA, 120 bp, Artificial Sequence
  ENSG00000138617_3 (sequence is synthesized)
tccgcgggcccagcccccgcgctgaacgcacgctcgcccttgcccctaaccagcgcgtctaccccggcaacgcgcagtgacctgggatgcagccctcaggctgggcggccgccagggagg

SEQ ID NO: 346783 - DNA, 120 bp, Artificial Sequence
  ENSG00000138617_4 (sequence is synthesized)
cggcgggccgcgacatgctggccgccgacctccggtgcagcctcttcgcctcggccctgcagagctacaagcgcgactcggtgctgcggcccttccccgcgtcctacgcccgcggcgact

SEQ ID NO: 346784 - DNA, 120 bp, Artificial Sequence
  ENSG00000138617_5 (sequence is synthesized)
gtaaggactttgaagccctgcttgcagatgccagcaagttacctaacctgaaagaacttctccagtcctccggagacaaccacaaacgggcctgggacctggtgagctggattttatcct

SEQ ID NO: 346785 - DNA, 120 bp, Artificial Sequence
  ENSG00000138617_6 (sequence is synthesized)
caaaggtcctgacaatccacagtgcagggaaggcagagtttgaaaagatccaaaagctgactggggctcctcacacgcctgttcctgcaccggacttcctgtttgaaattgagtactttg

SEQ ID NO: 346786 - DNA, 120 bp, Artificial Sequence
  ENSG00000138617_7 (sequence is synthesized)
acccagccaacgccaaattttatgagaccaaaggagaacgagacctaatctatgcatttcatggtagccgcctagaaaacttccattccattatccacaatggcctgcactgccatctga

SEQ ID NO: 346787 - DNA, 120 bp, Artificial Sequence
  ENSG00000138617_8 (sequence is synthesized)
acaagacatccttgttcggagaggggacctacctcaccagtgacttgagcctggccctcatatacagcccccatggccatgggtggcagcacagcctcctcggccccatccttagctgtg

SEQ ID NO: 346788 - DNA, 120 bp, Artificial Sequence
  ENSG00000138617_9 (sequence is synthesized)
tggccgtgtgtgaggtcattgaccatccggacgtcaagtgccaaaccaagaagaaggattccaaggagatagatcgcagacgagcgagaatcaaacatagtgaagggggagacatccctc

SEQ ID NO: 346789 - DNA, 120 bp, Artificial Sequence
  ENSG00000138617_10 (sequence is synthesized)
ccaagtacttcgtggtcaccaataaccagctgctgcgagtgaagtacctcctggtgtattcacagaagccacccaagagcagggcttcgagccagctctcctggttttccagccattggt

SEQ ID NO: 346790 - DNA, 120 bp, Artificial Sequence
  ENSG00000138617_11 (sequence is synthesized)
aagataatctttctgggcctggtgtgggggctacctcaactatgtgccttatggtaacttgttctgtacctcctatgcctcatgtccagccaggttgagcctaggggccagttgggggac

SEQ ID NO: 346791 - DNA, 120 bp, Artificial Sequence
  ENSG00000138617_12 (sequence is synthesized)
cacaggacaattttcatatggcctaaatgtatccattgcctttgatgatgttcccagccatactccagtcaacggggactactagtccctcactcttaggttttaggggagtccttccat

SEQ ID NO: 346792 - DNA, 120 bp, Artificial Sequence
  ENSG00000138617_13 (sequence is synthesized)
ctgctccttcttaaactgtcctagggagttggcttttcagccagggccaaaggaaaaagccctgctgcatttaaaaacaaagtgtccaagctgtcagtggtgtgtttacaatctctcctg

SEQ ID NO: 346793 - DNA, 120 bp, Artificial Sequence
  ENSG00000138617_14 (sequence is synthesized)
gcagaggttggccctttctctaatgccttctggaaggcggaaaatgtgggaactataaatcactaggcggttgccttgttttgacttgagacacccaagaggaacagtcatgtttctcat

SEQ ID NO: 346794 - DNA, 120 bp, Artificial Sequence
  ENSG00000138617_15 (sequence is synthesized)
aaaaatcagtgggatcatttttgaattccatcagcctttgtatgtgagtgcaaaacattttaacagttttctcaaatcaacaaacagccttctcctatagctgtacttgcccccctcccc

SEQ ID NO: 346795 - DNA, 120 bp, Artificial Sequence
  ENSG00000138617_16 (sequence is synthesized)
aaaaaaccatggatgagaaagaaaggagtcaggggcctgataaaaaatacagacttaatgagcaactcaagatgagaaaactgctctttttccaaaaattaccaactgctgattacagct

SEQ ID NO: 346796 - DNA, 120 bp, Artificial Sequence
  ENSG00000138617_17 (sequence is synthesized)
gaaatggaaccaaatgtttgttttctgatttttttttaatagctgtttaacaaattagtctttgctgagtaaaaggggaaatttctaaacctagtgcactgtttggccagtgtccacagc

SEQ ID NO: 346797 - DNA, 120 bp, Artificial Sequence
  ENSG00000138617_18 (sequence is synthesized)
ctcttttctggctgtgttttagagaaagggatttgagctataggctcgcctcctgttctcattctcacaaagctgccttgactgtggcctgcaaccacgagtgccatgctttcaggtctt

SEQ ID NO: 346798 - DNA, 120 bp, Artificial Sequence
  ENSG00000138617_19 (sequence is synthesized)
ctgtggcctactggccttcaagacagaggcctgccccagtgtgccacagatccatgtggatggagcctccttcagaggggtcacaggtctttgagactcagcctgggctttaatgtgtag

SEQ ID NO: 346799 - DNA, 120 bp, Artificial Sequence
  ENSG00000138617_20 (sequence is synthesized)
gaaaagccttctggccacccagagagccggagccctgcttgctgtattctctgctcccttcttcctgctgggttttagccataatagggcccggtacgatttgggagtgacatttctgta

SEQ ID NO: 346800 - DNA, 120 bp, Artificial Sequence
  ENSG00000138617_21 (sequence is synthesized)
aagaagaggaaaaatcatttttctataatttgtaaagttgtgaaagagccactaccacagtttttacattgattattggaacatttcagaataaataaagatattttcttaatgatttaa

SEQ ID NO: 346801 - DNA, 120 bp, Artificial Sequence
  ENSG00000138617_22 (sequence is synthesized)
ttttctttgataccgaggtggctttttttcttttgctgtttgcagtaacttgctattgctgctgctactgctccgtgcgtgggtctggcctatgagctgtaacactcaccctgaaagtgt

SEQ ID NO: 346802 - DNA, 120 bp, Artificial Sequence
  ENSG00000138617_23 (sequence is synthesized)
gtagtttcgctcttgaagccagtgaggccggaaaccaactgggaagaaggaacaactccagatgtgctgctttaaagagttgtaatgctcaccgtgaaggtctgtagtttcattcctgag

SEQ ID NO: 346803 - DNA, 120 bp, Artificial Sequence
  ENSG00000138617_24 (sequence is synthesized)
cgaacccaccagaaggaagaaactccgaatgcatctgaaggtcagaaggaacaagctctggatacgccgcctttaagaaccctgagattcaccacgagagtctgcggcttcgttcttgaa

SEQ ID NO: 346804 - DNA, 120 bp, Artificial Sequence
  ENSG00000138617_25 (sequence is synthesized)
gagggcttcgagccagctctcctggttttccagccattggtttaccgtcatgatatccctgtatctgctgctgctgctcatagcactgggaatctgaagaggtgtctgtggccagagtaa

SEQ ID NO: 346805 - DNA, 120 bp, Artificial Sequence
  ENSG00000138617_26 (sequence is synthesized)
cacctgccatgctgtgaggacacccaggccacatagagagagtgaggccacatgtaggttttacagccagaagccccactgaaaaccaaacctgcaaccagcatcaactgccaaacatgt

SEQ ID NO: 346806 - DNA, 120 bp, Artificial Sequence
  ENSG00000138617_27 (sequence is synthesized)
actgaagaggctgagatgattccagcacttgtggatgactgcaaccacatgagagacccagagcaagagctacctagctgagcccagttactcccagaatcatgagagaactatgtaatt

SEQ ID NO: 346807 - DNA, 120 bp, Artificial Sequence
  ENSG00000138617_28 (sequence is synthesized)
gattgttattactatataagccactaagtttacatatgatatgttatgcagcagtagacagctggaacaggagccaataaacaccgaatgaataaatgtggataggtctggttgaatgaa

SEQ ID NO: 346808 - DNA, 120 bp, Artificial Sequence
  ENSG00000138621_0 (sequence is synthesized)
gatatttgggagcggccccgagacgcgcctggcgcggatcctaaatcccgacagctttatagagcccaggcctggcaggctcccagaacttgaagccaccagaccccacatggaaccaaa

SEQ ID NO: 346809 - DNA, 120 bp, Artificial Sequence
  ENSG00000138621_1 (sequence is synthesized)
ggcctcctgtccagctgctgcacccttgatggagagaaaattccatgttcttgtgggtgtcacggggagtgtcgcagccctgaagttgcctcttctggtgtcaaagcttttggacattcc

SEQ ID NO: 346810 - DNA, 120 bp, Artificial Sequence
  ENSG00000138621_2 (sequence is synthesized)
tgggctggaagtagcagtggtcacaactgagagagccaaacatttctacagcccccaggacattcctgtcaccctctacagcgacgctgatgaatgggagatatggaagagccgctctga

SEQ ID NO: 346811 - DNA, 120 bp, Artificial Sequence
  ENSG00000138621_3 (sequence is synthesized)
cccagttctgcacattgacctgcggaggtgggcagacctcctgctggtggctcctcttgatgccaacactctggggaaggtggccagtggcatctgtgacaacttgcttacctgcgtcat

SEQ ID NO: 346812 - DNA, 120 bp, Artificial Sequence
  ENSG00000138621_4 (sequence is synthesized)
gcgggcctgggaccgcagcaagcccctgctcttctgcccggccatgaacaccgccatgtgggagcacccgatcacagcgcagcaggtagaccagctcaaggcctttggctatgtcgagat

SEQ ID NO: 346813 - DNA, 120 bp, Artificial Sequence
  ENSG00000138621_5 (sequence is synthesized)
cccctgtgtggccaagaagctggtgtgcggagatgaaggtctcggggccatggctgaagtggggaccatcgtggacaaagtgaaagaagtcctcttccagcacagtggcttccagcagag

SEQ ID NO: 346814 - DNA, 120 bp, Artificial Sequence
  ENSG00000138621_6 (sequence is synthesized)
ttgacctgggatttctgtcatgggtgtccctctgtactcagaatgggttcaggccaagtcggtgaagatggatgttggcaaaataggaggataccctcatttgctgaatgggggacctgc

SEQ ID NO: 346815 - DNA, 120 bp, Artificial Sequence
  ENSG00000138621_7 (sequence is synthesized)
tctgagcctgcccaggggccaggcctgctccaggttaaactggacggaaggcccaggtctcagtttctttcaaccaggagaggccgctgcctagagcccctccccaccttttcctggatg

SEQ ID NO: 346816 - DNA, 120 bp, Artificial Sequence
  ENSG00000138621_8 (sequence is synthesized)
ggtgaggcaagccaggagagcaagcagtgttgtcctcacgggaggaggactgagcgactgggaaaactcggctctacatctcacccagaacggcttttagaaacaccacagctggagagt

SEQ ID NO: 346817 - DNA, 120 bp, Artificial Sequence
  ENSG00000138621_9 (sequence is synthesized)
atcagcgaagcctgcgagttggcaggactctgaggtttcctgcagaccatgccatgagattgaaggtgcggggaaataaagaaaaatcaccatttaggagactccattctttccctacaa

SEQ ID NO: 346818 - DNA, 120 bp, Artificial Sequence
  ENSG00000138621_10 (sequence is synthesized)
cccagctgtggtcccagagatcagggggtgttgccaggtgtggctggggaagggtctgggttcacaactcaccggcactctttagtccccgtataacatggtggttaaggataaagatct

SEQ ID NO: 346819 - DNA, 120 bp, Artificial Sequence
  ENSG00000138621_11 (sequence is synthesized)
gaagccagacagcccctagttccaatcccagctctgccgcttactagcagtggcagtttggttcaggacttagccttcctgaccttcacttacctcagctatcttgttatcctaccctca

SEQ ID NO: 346820 - DNA, 120 bp, Artificial Sequence
  ENSG00000138621_12 (sequence is synthesized)
gggagttgttgagaggattcagtgaaattttgtgtgcagaatacccatgccactgagtgcctggaacgtagtaaatgtcaaatcaatggaagttaaaactaggcatgcatatatgccaga

SEQ ID NO: 346821 - DNA, 120 bp, Artificial Sequence
  ENSG00000138621_13 (sequence is synthesized)
gagctttcctagcatttactgcaatgccctgtctcattttgggaaaaaggaaatcctggatgctaagttgacacatccctttatgcaagtgacaggtaagcagccaggagggttgaccct

SEQ ID NO: 346822 - DNA, 120 bp, Artificial Sequence
  ENSG00000138621_14 (sequence is synthesized)
gccctgggtcccaggcctcttgcctgcttcttggtttcctctgttctcatcctttcagctttgctggacctgaggcaggggcctgggtgtctgtgcctccctaccccccagtacacatga

SEQ ID NO: 346823 - DNA, 120 bp, Artificial Sequence
  ENSG00000138621_15 (sequence is synthesized)
ccaagggaagtagatccagagacaccatgcactctggcccagaaaccctctgctacccagcttttgacttaattgccatttggtgtggctgcagcggggagggcttgtctgcgtatttgg

SEQ ID NO: 346824 - DNA, 120 bp, Artificial Sequence
  ENSG00000138621_16 (sequence is synthesized)
agctgaggctgaggctggcttcctgccctctggcttccaggccaggtgtgagggacatcccatgtgggctctgagagcactgagagtagaggtgccttgaggggaccaggaagcctactg

SEQ ID NO: 346825 - DNA, 120 bp, Artificial Sequence
  ENSG00000138621_17 (sequence is synthesized)
gctggaatcagtgctccagcagcctccacagcctttatctcaacagcacttgacttcaccaggtgaccctttgggataaaattgccttagggtatgaaataaactataactaaaatggta

SEQ ID NO: 346826 - DNA, 120 bp, Artificial Sequence
  ENSG00000138621_18 (sequence is synthesized)
tttcctgcagaccatgccatgagattgaaggttggactgcagtggtgcgatcatggctcacatacagcctcgacttccctggactcaggtgttcctcgcacctcagccaccagaggagta

SEQ ID NO: 346827 - DNA, 120 bp, Artificial Sequence
  ENSG00000138621_19 (sequence is synthesized)
atcagacccaacaccaggccgtgggggatatgaagtcccgcggaatcaaacccatgagaaaagacaagagagaaagtcggaccaggggcccaactatagggaggctgggaaggccctgag

SEQ ID NO: 346828 - DNA, 88 bp, Artificial Sequence
  ENSG00000138621_20 (sequence is synthesized)
ctctgggagcccaggcttgaggattgtaaggaagcagtgtatcaagcgaatgagctacagctgtgatggtttagcattttctttgaaa

SEQ ID NO: 346829 - DNA, 120 bp, Artificial Sequence
  ENSG00000138621_21 (sequence is synthesized)
agtagctaagcagacatgaggcttgcagctaaggagggaagtcctctctcaagccagcctgtgaagacagcacctgcctgccctgaccctcctgtggcctccaggcctgtggctctggta

SEQ ID NO: 346830 - DNA, 120 bp, Artificial Sequence
  ENSG00000138621_22 (sequence is synthesized)
acaacttgcttgtgagtgatgtcctggtgccctcgtccgtccctgggcctcacacccagtttgctgagctgcagacatccttgtacaaggagacctgctgctgtggggccccggtctgcc

SEQ ID NO: 346831 - DNA, 120 bp, Artificial Sequence
  ENSG00000138621_23 (sequence is synthesized)
gcctatggtctggcagctggaacagacaggctgggctcaagtctgtggtcagggccctctgggcagaggcaatgaagaaaacatctgtctagcttctggcctgcaggaggccctagtctc

SEQ ID NO: 346832 - DNA, 120 bp, Artificial Sequence
  ENSG00000138621_24 (sequence is synthesized)
gggcacagccctggtcctgatgggtcagtgtgacctgccactgctccccaggagtgtccccctctcccctgcccttgcacccagccaggtgcccacaggaagacccttcttccttgctct

SEQ ID NO: 346833 - DNA, 120 bp, Artificial Sequence
  ENSG00000138621_25 (sequence is synthesized)
ttgtccctcctcgtgggctgcctgggtgtgctcttccactgtctctgcccagccccatcgcctcccgcttcagctctgccttctccgcagatctgggtatacacgtgggcaatgtaattg

SEQ ID NO: 346834 - DNA, 120 bp, Artificial Sequence
  ENSG00000138621_26 (sequence is synthesized)
ggggttcacttcttcatagatggctcatatacactttatcacccttgtagctttcctgtatattaggggaagcttagaggggaagaggggagaaagacggggcagtggcgagagccgatg

SEQ ID NO: 346835 - DNA, 120 bp, Artificial Sequence
  ENSG00000138621_27 (sequence is synthesized)
ggtggtagggagaaatggaagtccagctgtccaaagtgggcactgtcctaggcctaagatgcctccagggagctgttgcccttaaaggggagctgcctttgtttatatgatcgtcctggg

SEQ ID NO: 346836 - DNA, 120 bp, Artificial Sequence
  ENSG00000138622_0 (sequence is synthesized)
gctggagccgctcctatggcaacccgcgagctgcggcggcttcatgaatattccggggcgcgggagcccgagcgctgccggagggcgcttcgggggaggcggccgctgatgtaagcccgg

SEQ ID NO: 346837 - DNA, 120 bp, Artificial Sequence
  ENSG00000138622_1 (sequence is synthesized)
ctccgctcggttgcggcgggagccccgggacgggccggacgggccggggcagaggaggcgaggcgagctcgcgggtggccagccacaaagcccgggcggcgagacagacggacagccagc

SEQ ID NO: 346838 - DNA, 120 bp, Artificial Sequence
  ENSG00000138622_2 (sequence is synthesized)
ggccagccacaaagcccgggcggcgagacagacggacagccagccctcccgcgggacgcacgcccgggacccgcgcgggccgtgcgctctgcactccggagcggttccctgagcgccgcg

SEQ ID NO: 346839 - DNA, 120 bp, Artificial Sequence
  ENSG00000138622_3 (sequence is synthesized)
gcgcccctgaacgccagagggagggagggaggcaagaagggagcgcggggtccccgcgcccagccgggcccgggaggaggtgtagcgcggcgagcccggggactcggagcgggactagga

SEQ ID NO: 346840 - DNA, 120 bp, Artificial Sequence
  ENSG00000138622_4 (sequence is synthesized)
tgtagcgcggcgagcccggggactcggagcgggactaggatcctccccgcggcgcgcagcctgcccaagcatgggcgcctgaggctgcccccacgccggcggcaaaggacgcgtccccac

SEQ ID NO: 346841 - DNA, 80 bp, Artificial Sequence
  ENSG00000138622_5 (sequence is synthesized)
gcgccgcgctcctgcccccggcccggtccgaccccggcccctggcgccatggacaagctgccgccgtccatgcgcaagcg

SEQ ID NO: 346842 - DNA, 120 bp, Artificial Sequence
  ENSG00000138622_6 (sequence is synthesized)
gctctacagcctcccgcagcaggtgggggccaaggcgtggatcatggacgaggaagaggacgccgaggaggagggggccgggggccgccaagaccccagccgcaggagcatccggctgcg

SEQ ID NO: 346843 - DNA, 120 bp, Artificial Sequence
  ENSG00000138622_7 (sequence is synthesized)
cgggtggcacggagtcccggagctcggccctcggggcagcggacagcgaagggccggcccgcggcgcgggcaagtccagcacgaacggcgactgcaggcgcttccgcgggagcctggcct

SEQ ID NO: 346844 - DNA, 120 bp, Artificial Sequence
  ENSG00000138622_8 (sequence is synthesized)
tgcaggcgcttccgcgggagcctggcctcgctgggcagccggggcggcggcagcggcggcacggggagcggcagcagtcacggacacctgcatgactccgcggaggagcggcggctcatc

SEQ ID NO: 346845 - DNA, 80 bp, Artificial Sequence
  ENSG00000138622_9 (sequence is synthesized)
ggctcatcgccgagggcgacgcgtcccccggcgaggacaggacgcccccaggcctggcggccgagcccgagcgccccggc

SEQ ID NO: 346846 - DNA, 120 bp, Artificial Sequence
  ENSG00000138622_10 (sequence is synthesized)
accgcagccggcctccgcctcctgcgagcagccctcggtggacaccgctatcaaagtggagggaggcgcggctgccggcgaccagatcctcccggaggccgaggtgcgcctgggccaggc

SEQ ID NO: 346847 - DNA, 120 bp, Artificial Sequence
  ENSG00000138622_11 (sequence is synthesized)
cggcttcatgcagcgccagttcggggccatgctccaacccggggtcaacaaattctccctaaggatgttcggcagccagaaagccgtggagcgcgaacaggagagggtcaagtcggccgg

SEQ ID NO: 346848 - DNA, 120 bp, Artificial Sequence
  ENSG00000138622_12 (sequence is synthesized)
attttggattatccacccctacagtgacttcagattttactgggacctgaccatgctgctgctgatggtgggaaacctgattatcattcctgtgggcatcaccttcttcaaggatgagaa

SEQ ID NO: 346849 - DNA, 120 bp, Artificial Sequence
  ENSG00000138622_13 (sequence is synthesized)
caccacaccctggattgtcttcaatgtggtgtcagacacattcttcctcatcgacttggtcctcaacttccgcacagggatcgtggtggaggacaacacagagatcatcctggacccgca

SEQ ID NO: 346850 - DNA, 120 bp, Artificial Sequence
  ENSG00000138622_14 (sequence is synthesized)
gcggattaaaatgaagtacctgaaaagctggttcatggtagatttcatttcctccatccccgtggactacatcttcctcattgtggagacacgcatcgactcggaggtctacaagactgc

SEQ ID NO: 346851 - DNA, 120 bp, Artificial Sequence
  ENSG00000138622_15 (sequence is synthesized)
ccgggccctgcgcattgtccgcttcacgaagatcctcagcctcttacgcctgttacgcctctcccgcctcattcgatatattcaccagtgggaagagatcttccacatgacctacgacct

SEQ ID NO: 346852 - DNA, 120 bp, Artificial Sequence
  ENSG00000138622_16 (sequence is synthesized)
ggccagcgccgtggtgcgcatcgtgaacctcatcggcatgatgctcctgctctgccactgggacggctgcctgcagttcctggtacccatgctacaggacttccctgacgactgctgggt

SEQ ID NO: 346853 - DNA, 120 bp, Artificial Sequence
  ENSG00000138622_17 (sequence is synthesized)
gtccatcaacaacatggtgaacaactcctgggggaagcagtactcctacgcgctcttcaaggccatgagccacatgctgtgcatcggctacgggcggcaggcgcccgtgggcatgtccga

SEQ ID NO: 346854 - DNA, 120 bp, Artificial Sequence
  ENSG00000138622_18 (sequence is synthesized)
cgtctggctcaccatgctcagcatgatcgtgggtgccacctgctacgccatgttcattggccacgccactgccctcatccagtccctggactcctcccggcgccagtaccaggaaaagta

SEQ ID NO: 346855 - DNA, 120 bp, Artificial Sequence
  ENSG00000138622_19 (sequence is synthesized)
caagcaggtggagcagtacatgtcctttcacaagctcccgcccgacacccggcagcgcatccacgactactacgagcaccgctaccagggcaagatgttcgacgaggagagcatcctggg

SEQ ID NO: 346856 - DNA, 120 bp, Artificial Sequence
  ENSG00000138622_20 (sequence is synthesized)
cgagctaagcgagcccctgcgggaggagatcatcaactttaactgtcggaagctggtggcctccatgccactgtttgccaatgcggaccccaacttcgtgacgtccatgctgaccaagct

SEQ ID NO: 346857 - DNA, 120 bp, Artificial Sequence
  ENSG00000138622_21 (sequence is synthesized)
gcgtttcgaggtcttccagcctggggactacatcatccgggaaggcaccattggcaagaagatgtacttcatccagcatggcgtggtcagcgtgctcaccaagggcaacaaggagaccaa

SEQ ID NO: 346858 - DNA, 120 bp, Artificial Sequence
  ENSG00000138622_22 (sequence is synthesized)
gctggccgacggctcctactttggagagatctgcctgctgacccggggccggcgcacagccagcgtgagggccgacacctactgccgcctctactcgctgagcgtggacaacttcaatga

SEQ ID NO: 346859 - DNA, 120 bp, Artificial Sequence
  ENSG00000138622_23 (sequence is synthesized)
ggtgctggaggagtaccccatgatgcgaagggccttcgagaccgtggcgctggaccgcctggaccgcattggcaagaagaactccatcctcctccacaaagtccagcacgacctcaactc

SEQ ID NO: 346860 - DNA, 120 bp, Artificial Sequence
  ENSG00000138622_24 (sequence is synthesized)
cggcgtcttcaactaccaggagaatgagatcatccagcagattgtgcagcatgaccgggagatggcccactgcgcgcaccgcgtccaggctgctgcctctgccaccccaacccccacgcc

SEQ ID NO: 346861 - DNA, 120 bp, Artificial Sequence
  ENSG00000138622_25 (sequence is synthesized)
cgtcatctggaccccgctgatccaggcaccactgcaggctgccgctgccaccacttctgtggccatagccctcacccaccaccctcgcctgcctgctgccatcttccgccctcccccagg

SEQ ID NO: 346862 - DNA, 120 bp, Artificial Sequence
  ENSG00000138622_26 (sequence is synthesized)
atctgggctgggcaacctcggtgccgggcagacgccaaggcacctgaaacggctgcagtccctgatcccttctgcgctgggctccgcctcgcccgccagcagcccgtcccaggtggacac

SEQ ID NO: 346863 - DNA, 120 bp, Artificial Sequence
  ENSG00000138622_27 (sequence is synthesized)
accgtcttcatcctccttccacatccaacagctggctggattctctgcccccgctggactgagcccactcctgccctcatccagctcctccccaccccccggggcctgtggctccccctc

SEQ ID NO: 346864 - DNA, 120 bp, Artificial Sequence
  ENSG00000138622_28 (sequence is synthesized)
tcctcctccgactctcccctgctcaccccgctgcagccaggcgcccgctccccgcaggctgcccagccatctcccgcgccacccggggcccggggaggcctgggactcccggagcacttc

SEQ ID NO: 346865 - DNA, 120 bp, Artificial Sequence
  ENSG00000138622_29 (sequence is synthesized)
ctgccacccccaccctcatccagatccccgtcatctagccccgggcagctgggccagcctcccggggagttgtccctaggtctggccactggcccactgagcacgccagagacaccccca

SEQ ID NO: 346866 - DNA, 120 bp, Artificial Sequence
  ENSG00000138622_30 (sequence is synthesized)
cggcagcctgagccgccgtcccttgtggcaggggcctctgggggggcttcccctgtaggctttactccccgaggaggtctcagcccccctggccacagcccaggccccccaagaaccttc

SEQ ID NO: 346867 - DNA, 120 bp, Artificial Sequence
  ENSG00000138622_31 (sequence is synthesized)
cttcccgagtgccccgccccgggcctctggctcccacggatccttgctcctgccacctgcatccagccccccaccaccccaggtcccccagcgccggggcacacccccgctcacccccgg

SEQ ID NO: 346868 - DNA, 120 bp, Artificial Sequence
  ENSG00000138622_32 (sequence is synthesized)
ctcacccaggacctcaagctcatctccgcgtctcagccagccctgcctcaggacggggcgcagactctccgcagagcctccccgcactcctcaggggagtccatggctgccttcccgctc

SEQ ID NO: 346869 - DNA, 120 bp, Artificial Sequence
  ENSG00000138622_33 (sequence is synthesized)
ttccccagggctgggggtggcagcgggggcagtgggagcagcgggggcctcggtccccctgggaggccctatggtgccatccccggccagcacgtcactctgcctcggaagacatcctca

SEQ ID NO: 346870 - DNA, 120 bp, Artificial Sequence
  ENSG00000138622_34 (sequence is synthesized)
ggttctttgccaccccctctgtctttgtttggggcaagagccacctcttctggggggccccctctgactgctggaccccagagggaacctggggccaggcctgagccagtgcgctccaaa

SEQ ID NO: 346871 - DNA, 120 bp, Artificial Sequence
  ENSG00000138622_35 (sequence is synthesized)
ctgccatccaatctatgagctgggcccttccttccctcttctttcttcttttctctcccttccttcttccttcaggtttaactgtgattaggagatataccaataacagtaataattatt

SEQ ID NO: 346872 - DNA, 120 bp, Artificial Sequence
  ENSG00000138622_36 (sequence is synthesized)
taaaaaaccacacacaccagaaaaacaaaagacagcagaaaataaccaggtattcttagagctatagatttttggtcacttgcttttatagactattttaatactcagcactagagggag

SEQ ID NO: 346873 - DNA, 120 bp, Artificial Sequence
  ENSG00000138622_37 (sequence is synthesized)
ggagggggagggaggagggagcaggcaggtcccaaatgcaaaagccagagaaaggcagatggggtctccggggctgggcaggggtgggagtggccagtgttggcggttcttagagcagat

SEQ ID NO: 346874 - DNA, 120 bp, Artificial Sequence
  ENSG00000138622_38 (sequence is synthesized)
gtgtcattgtgttcatttagagaaacagctgccatcagcccgttagctgtaacttggagctccactctgcccccagaaaggggctgccctggggtgtgccctggggagcctcagaagcct

SEQ ID NO: 346875 - DNA, 120 bp, Artificial Sequence
  ENSG00000138622_39 (sequence is synthesized)
gcgaccttgggagaaaagggccagggccctgagggcctagcattttttctactgtaaacgtagcaagatctgtatatgaatatgtatatgtatatgtatgtaagatgtgtatatgtatag

SEQ ID NO: 346876 - DNA, 120 bp, Artificial Sequence
  ENSG00000138622_40 (sequence is synthesized)
ctatgtagcgctctgtagagccatgtagatagccactcacatgtgcgcacacgtgtgcggtctagtttaatcccatgttgacaggatgcccaggtcaccttacacccagcaacccgcctt

SEQ ID NO: 346877 - DNA, 120 bp, Artificial Sequence
  ENSG00000138622_41 (sequence is synthesized)
ggcccacaggctgtgcactgcatggtctagggacgttctctctccagtcctcagggaagaggaccccaggacttcgcagcaggccccctctctccccatctctggtctcaaagccagtcc

SEQ ID NO: 346878 - DNA, 120 bp, Artificial Sequence
  ENSG00000138622_42 (sequence is synthesized)
cagcctgacctctcaccacacggaagtggaagactcccctttcctagggcctcaagcacacaccgccacctctggggccgtcagtttgcccatctgtacagtgggaggtgagcggaactt

SEQ ID NO: 346879 - DNA, 120 bp, Artificial Sequence
  ENSG00000138622_43 (sequence is synthesized)
ctgtttattgagtctgctctgtgccaagcactggtttcgcactttacacacattaactccttcagtttcacaaagaccatggggtgggtactttgattctccccatttagcagaggaaga

SEQ ID NO: 346880 - DNA, 120 bp, Artificial Sequence
  ENSG00000138622_44 (sequence is synthesized)
aacagttttgggtaatttttccagaatcatgtaactaggagtggcagagtggggactgatttgaggttcgagtccacgcctccttgaggcccaagtctgtgttccttccatcagaaaact

SEQ ID NO: 346881 - DNA, 120 bp, Artificial Sequence
  ENSG00000138622_45 (sequence is synthesized)
gtgttgaggggggctgaggtagatggtccccaagcatggtacagaaggaagacaccagattttggcagcagtcaggcctgggtttgaatcccagccctgccacttcttagctgtatgatc

SEQ ID NO: 346882 - DNA, 120 bp, Artificial Sequence
  ENSG00000138622_46 (sequence is synthesized)
ttgggcaagttatctgacctttctgtcacctcatttgtaaaatgggaataattatggtactgcctcacaaggacctatgaggaccagatgagaaaaatctatatgtgaaatgcccagccc

SEQ ID NO: 346883 - DNA, 120 bp, Artificial Sequence
  ENSG00000138622_47 (sequence is synthesized)
agcgcctggcacataccatggtaggtgctcaataaaaaatcacatttcttctgcccctcatatgcccagcctattgctccagcaaactatgtgagagcccagggagctttggctgagggc

SEQ ID NO: 346884 - DNA, 120 bp, Artificial Sequence
  ENSG00000138622_48 (sequence is synthesized)
tccaagacttaaaatctcaggactcaggaggtggctgggcctccctaagggcccaaggaaggtgtgtggccagaggtgggtgggagccaggccttgagaagtgggaagacttcaacaggg

SEQ ID NO: 346885 - DNA, 120 bp, Artificial Sequence
  ENSG00000138622_49 (sequence is synthesized)
agagagggagggaatggtgggtgggatggagtgtatggtggggagattcctgaggtggatgtggagtggtggatcagggctttgggaggggatccccaggctgaggggtcagagggacgg

SEQ ID NO: 346886 - DNA, 120 bp, Artificial Sequence
  ENSG00000138622_50 (sequence is synthesized)
ccttgggtgatagggtaagggattgtctgggcttagtcctggcaactaggagccataagcaggttccagattgcgggaacgagaaagcagctcagatgcctttggaggcaccatcctccc

SEQ ID NO: 346887 - DNA, 120 bp, Artificial Sequence
  ENSG00000138622_51 (sequence is synthesized)
tcctcccagatgggatcttgccagagccaaggtcaggggtctgcccctgcctatagggccagagcaggtatggctgcaatccccaagtaatgagaagggctggtcccacattatccatcc

SEQ ID NO: 346888 - DNA, 120 bp, Artificial Sequence
  ENSG00000138622_52 (sequence is synthesized)
agaaccttccatgctccaagccagaatgttggcaagatcgggttttgccttgagctatcctgggatgtgagacaaaccgatttctccatagatgggctgcagggagtgggaggcagtact

SEQ ID NO: 346889 - DNA, 120 bp, Artificial Sequence
  ENSG00000138622_53 (sequence is synthesized)
ccaggagagaagtgggtgaaggttcctgggatcttaggtaaagactagacgccgcctagtactggtctctactgtgctggctcaggagttctgagaactggaaggacttagcctcaacct

SEQ ID NO: 346890 - DNA, 120 bp, Artificial Sequence
  ENSG00000138622_54 (sequence is synthesized)
gagttctgcacacaccccttccccttaaggaaggcagctctgagaggcagcaggacttgatccaaacccacagtcttgtcctggaggcagcaggggtgaaggtggagggtccagggccat

SEQ ID NO: 346891 - DNA, 120 bp, Artificial Sequence
  ENSG00000138622_55 (sequence is synthesized)
gaggagcccccttgccatcagagcctggcctaaccaccctcttctctacttacacacacatgcattttataatagctctgacccaacctggccactctgcagagactgggacagacaggt

SEQ ID NO: 346892 - DNA, 120 bp, Artificial Sequence
  ENSG00000138622_56 (sequence is synthesized)
gcaggcaatgggccctcccacacccagtcacctacaaggaattttcaaatccacttttaaaacagaaaccggtaaatgcgccgtattgtatattttatttaaataaaaaaaattccagca

SEQ ID NO: 346893 - DNA, 80 bp, Artificial Sequence
  ENSG00000138623_0 (sequence is synthesized)
agtctcggctgattgccgctgtcgctcccggggccacgggatgacgcctcctccgcccggacgtgccgcccccagcgcac

SEQ ID NO: 346894 - DNA, 120 bp, Artificial Sequence
  ENSG00000138623_1 (sequence is synthesized)
tccgctgcggctgcggctgctgctgctgctctgggcggccgccgcctccgcccagggccacctaaggagcggaccccgcatcttcgccgtctggaaaggccatgtagggcaggaccgggt

SEQ ID NO: 346895 - DNA, 120 bp, Artificial Sequence
  ENSG00000138623_2 (sequence is synthesized)
ggactttggccagactgagccgcacacggtgcttttccacgagccaggcagctcctctgtgtgggtgggaggacgtggcaaggtctacctctttgacttccccgagggcaagaacgcatc

SEQ ID NO: 346896 - DNA, 120 bp, Artificial Sequence
  ENSG00000138623_3 (sequence is synthesized)
tgtgcgcacggtgaatatcggctccacaaaggggtcctgtctggataagcgggactgcgagaactacatcactctcctggagaggcggagtgaggggctgctggcctgtggcaccaacgc

SEQ ID NO: 346897 - DNA, 120 bp, Artificial Sequence
  ENSG00000138623_4 (sequence is synthesized)
ccggcaccccagctgctggaacctggtgaatggcactgtggtgccacttggcgagatgagaggctacgcccccttcagcccggacgagaactccctggttctgtttgaaggggacgaggt

SEQ ID NO: 346898 - DNA, 120 bp, Artificial Sequence
  ENSG00000138623_5 (sequence is synthesized)
gtattccaccatccggaagcaggaatacaatgggaagatccctcggttccgccgcatccggggcgagagtgagctgtacaccagtgatactgtcatgcagaacccacagttcatcaaagc

SEQ ID NO: 346899 - DNA, 120 bp, Artificial Sequence
  ENSG00000138623_6 (sequence is synthesized)
caccatcgtgcaccaagaccaggcttacgatgacaagatctactacttcttccgagaggacaatcctgacaagaatcctgaggctcctctcaatgtgtcccgtgtggcccagttgtgcag

SEQ ID NO: 346900 - DNA, 120 bp, Artificial Sequence
  ENSG00000138623_7 (sequence is synthesized)
gggggaccagggtggggaaagttcactgtcagtctccaagtggaacacttttctgaaagccatgctggtatgcagtgatgctgccaccaacaagaacttcaacaggctgcaagacgtctt

SEQ ID NO: 346901 - DNA, 120 bp, Artificial Sequence
  ENSG00000138623_8 (sequence is synthesized)
cctgctccctgaccccagcggccagtggagggacaccagggtctatggtgttttctccaacccctggaactactcagccgtctgtgtgtattccctcggtgacattgacaaggtcttccg

SEQ ID NO: 346902 - DNA, 120 bp, Artificial Sequence
  ENSG00000138623_9 (sequence is synthesized)
tacctcctcactcaagggctaccactcaagccttcccaacccgcggcctggcaagtgcctcccagaccagcagccgatacccacagagaccttccaggtggctgaccgtcacccagaggt

SEQ ID NO: 346903 - DNA, 120 bp, Artificial Sequence
  ENSG00000138623_10 (sequence is synthesized)
ggcgcagagggtggagcccatggggcctctgaagacgccattgttccactctaaataccactaccagaaagtggccgtccaccgcatgcaagccagccacggggagacctttcatgtgct

SEQ ID NO: 346904 - DNA, 120 bp, Artificial Sequence
  ENSG00000138623_11 (sequence is synthesized)
ttacctaactacagacaggggcactatccacaaggtggtggaaccgggggagcaggagcacagcttcgccttcaacatcatggagatccagcccttccgccgcgcggctgccatccagac

SEQ ID NO: 346905 - DNA, 120 bp, Artificial Sequence
  ENSG00000138623_12 (sequence is synthesized)
catgtcgctggatgctgagcggaggaagctgtatgtgagctcccagtgggaggtgagccaggtgcccctggacctgtgtgaggtctatggcgggggctgccacggttgcctcatgtcccg

SEQ ID NO: 346906 - DNA, 120 bp, Artificial Sequence
  ENSG00000138623_13 (sequence is synthesized)
agacccctactgcggctgggaccaaggccgctgcatctccatctacagctccgaacggtcagtgctgcaatccattaatccagccgagccacacaaggagtgtcccaaccccaaaccaga

SEQ ID NO: 346907 - DNA, 120 bp, Artificial Sequence
  ENSG00000138623_14 (sequence is synthesized)
aaggtttccctggccccaaactctcgctactacctgagctgccccatggaatcccgccacgccacctactcatggcgccacaaggagaacgtggagcagagctgcgaacctggtcaccag

SEQ ID NO: 346908 - DNA, 120 bp, Artificial Sequence
  ENSG00000138623_15 (sequence is synthesized)
agccccaactgcatcctgttcatcgagaacctcacggcgcagcagtacggccactacttctgcgaggcccaggagggctcctacttccgcgaggctcagcactggcagctgctgcccgag

SEQ ID NO: 346909 - DNA, 120 bp, Artificial Sequence
  ENSG00000138623_16 (sequence is synthesized)
gacggcatcatggccgagcacctgctgggtcatgcctgtgccctggccgcctccctctggctgggggtgctgcccacactcactcttggcttgctggtccactagggcctcccgaggctg

SEQ ID NO: 346910 - DNA, 120 bp, Artificial Sequence
  ENSG00000138623_17 (sequence is synthesized)
ggcatgcctcaggcttctgcagcccagggcactagaacgtctcacactcagagccggctggcccgggagctccttgcctgccacttcttccaggggacagaataacccagtggaggatgc

SEQ ID NO: 346911 - DNA, 120 bp, Artificial Sequence
  ENSG00000138623_18 (sequence is synthesized)
caggcctggagacgtccagccgcaggcggctgctgggccccaggtggcgcacggatggtgaggggctgagaatgagggcaccgactgtgaagctggggcatcgatgacccaagactttat

SEQ ID NO: 346912 - DNA, 120 bp, Artificial Sequence
  ENSG00000138623_19 (sequence is synthesized)
cttctggaaaatatttttcagactcctcaaacttgactaaatgcagcgatgctcccagcccaagagcccatgggtcggggagtgggtttggataggagagctgggactccatctcgaccc

SEQ ID NO: 346913 - DNA, 120 bp, Artificial Sequence
  ENSG00000138623_20 (sequence is synthesized)
tggggctgaggcctgagtccttctggactcttggtacccacattgcctccttcccctccctctctcatggctgggtggctggtgttcctgaagacccagggctaccctctgtccagccct

SEQ ID NO: 346914 - DNA, 120 bp, Artificial Sequence
  ENSG00000138623_21 (sequence is synthesized)
gtcctctgcagctccctctctggtcctgggtcccacaggacagccgccttgcatgtttattgaaggatgtttgctttccggacggaaggacggaaaaagctctatttttatgttaggctt

SEQ ID NO: 346915 - DNA, 120 bp, Artificial Sequence
  ENSG00000138623_22 (sequence is synthesized)
atttcatgtatagctacttccgactgcatctgtatgaaaataccaaaactacatgcgggggggtgggtgggaaagggaggggctgggaagggatgggttggggagcgggggtgatcccag

SEQ ID NO: 346916 - DNA, 120 bp, Artificial Sequence
  ENSG00000138623_23 (sequence is synthesized)
tctgaggctcccggggatgagataagagtctggagacgggcatgggttcttggagagtggcatgagctggctctgccctgggagcccggtctgagggggacgttgttggagcccctagtg

SEQ ID NO: 346917 - DNA, 120 bp, Artificial Sequence
  ENSG00000138623_24 (sequence is synthesized)
ttgggggtggttatgggagggggtggggtgagggaaacgggagaatgaaggagaaaactgagccctagtttcaccgtgttcatttggaaggacgagccgggtcctcagggggaggttcca

SEQ ID NO: 346918 - DNA, 120 bp, Artificial Sequence
  ENSG00000138623_25 (sequence is synthesized)
ggactctgcccttggcgttgagggttggggggcggggggcctcctcccttcctctcagcccccttccccaggggctgtgcttccatgctcctagcctcccaccttcgctcaggacatgtt

SEQ ID NO: 346919 - DNA, 120 bp, Artificial Sequence
  ENSG00000138623_26 (sequence is synthesized)
ataacttaggctaaactgtgaaaattccggtggggatggcctgggccgagctctccaggcaggcggccctgcccccagccctgtccatccatttcaggggggagctgggcccttctccgg

SEQ ID NO: 346920 - DNA, 120 bp, Artificial Sequence
  ENSG00000138623_27 (sequence is synthesized)
ctgtgtctggccacccagggcagtggctggggccagtggccttccagctttggcccctgcacctcttctcaatgcactttaataatgtaacatattactaataaacaagctatttattta

SEQ ID NO: 346921 - DNA, 120 bp, Artificial Sequence
  ENSG00000138623_28 (sequence is synthesized)
agacgctgcgcggggcgggtgcggagtgtgctgcacccggagggagtgcgtgcgcgcagctctgcgggtcccgggctgtccccgcgctgtccccgcgtggagcgtgtgggtttgggccat

SEQ ID NO: 346922 - DNA, 120 bp, Artificial Sequence
  ENSG00000138623_29 (sequence is synthesized)
cttgtcctgtgggccccaggtacatggggcaggatacagtcctgcagagggagccctcttggtgggatgagcgagacgggagaaaaaaggaggacgctgagggctgggttccccacgttc

SEQ ID NO: 346923 - DNA, 120 bp, Artificial Sequence
  ENSG00000138623_30 (sequence is synthesized)
attcagaagccttgtcctgggatcccagtccgtggggaggacacatcctcccctgggagctctttgtccctcctcacggctgcttccccactgcctccccagacaaggccccactgcaga

SEQ ID NO: 346924 - DNA, 120 bp, Artificial Sequence
  ENSG00000138629_0 (sequence is synthesized)
tccggtttccggcgagagggccagagtgagtgtttacaccggcggcagtgcggccgggttccttccgcgggacggggagaaagagagagcgcgaaagagagaggatgtctctctcagact

SEQ ID NO: 346925 - DNA, 120 bp, Artificial Sequence
  ENSG00000138629_1 (sequence is synthesized)
ggcacctggcggtgaagctggctgaccagccacttactccaaagtctattcttcggttgccagagacagaactgggagaatactcgctagggggctatagtatttcatttctgaagcagc

SEQ ID NO: 346926 - DNA, 120 bp, Artificial Sequence
  ENSG00000138629_2 (sequence is synthesized)
ttattgctggcaaactccaggagtctgttccagaccctgagctgattgatctgatctactgtggtcggaagctaaaagatgaccagacacttgacttctatggcattcaacctgggtcca

SEQ ID NO: 346927 - DNA, 120 bp, Artificial Sequence
  ENSG00000138629_3 (sequence is synthesized)
ctgtccatgttctgcgaaagtcctggcctgaacctgatcagaaaccggaacctgtggacaaagtggctgccatgagagagttccgggtgttgcacactgccctgcacagcagctcctctt

SEQ ID NO: 346928 - DNA, 120 bp, Artificial Sequence
  ENSG00000138629_4 (sequence is synthesized)
acagggaggcggtctttaagatgctcagcaataaggagtctctggatcagatcattgtggccaccccaggcctcagcagtgaccctattgctcttggggttctccaggacaaggacctct

SEQ ID NO: 346929 - DNA, 120 bp, Artificial Sequence
  ENSG00000138629_5 (sequence is synthesized)
gcctgctcacccagccctcgtcaatgccattgtcctggttctgcactccgtagcaggcagtgccccaatgcctgggactgactcctcttcccggagcatgccctccagctcataccggga

SEQ ID NO: 346930 - DNA, 120 bp, Artificial Sequence
  ENSG00000138629_6 (sequence is synthesized)
tatgccaggtggcttcctgtttgaagggctctcagatgatgaggatgactttcacccaaacaccaggtccacaccctctagcagtactcccagctcccgcccagcctccctggggtacag

SEQ ID NO: 346931 - DNA, 120 bp, Artificial Sequence
  ENSG00000138629_7 (sequence is synthesized)
tggagctgctgggccccggcccatcacccagagtgagctggccaccgccttggccctggccagcactccggagagcagctctcacacaccgactcctggcacccagggtcattcctcagg

SEQ ID NO: 346932 - DNA, 120 bp, Artificial Sequence
  ENSG00000138629_8 (sequence is synthesized)
gacctcaccaatgtcctctggtgtccagtcagggacgcccatcaccaatgatctcttcagccaagccctacagcatgcccttcaggcctctgggcagcccagccttcagagccagtggca

SEQ ID NO: 346933 - DNA, 120 bp, Artificial Sequence
  ENSG00000138629_9 (sequence is synthesized)
gccccagctgcagcagctacgtgacatgggcatccaggacgatgagctgagcctgcgggccctgcaggccaccggtggggacatccaagcagccctggagctcatctttgctggaggagc

SEQ ID NO: 346934 - DNA, 120 bp, Artificial Sequence
  ENSG00000138629_10 (sequence is synthesized)
cccatgaactccctgcttcccctgaacccccagcaagttgcagaggctactgcccttgggaggcactcatgaaggtgcctccatctctcccttccccaatatacctgatggtcaactctc

SEQ ID NO: 346935 - DNA, 120 bp, Artificial Sequence
  ENSG00000138629_11 (sequence is synthesized)
agagtgagtgtttacaccggcggcagtgcggccgggttccttccgcgggacgggtgagggcgctggggccctgggcagcgcgggctcgatgtgtgtcagccaagtagctggtcccactgg

SEQ ID NO: 346936 - DNA, 120 bp, Artificial Sequence
  ENSG00000138629_12 (sequence is synthesized)
ccgcgggacgggtgagggcgctggggccctgggcagcgcgggctcgatgtgtgtcagccaagtagctggtcccactggagcgaggtctctttggaagcaataatgatgactataacaaga

SEQ ID NO: 346937 - DNA, 120 bp, Artificial Sequence
  ENSG00000138629_13 (sequence is synthesized)
gtttacaccggcggcagtgcggccgggttccttccgcgggacggggatgaagaaactgaggcctagagagctgtccatcacagtatgagtagagagagaaccccagattctagttctggc

SEQ ID NO: 346938 - DNA, 120 bp, Artificial Sequence
  ENSG00000138629_14 (sequence is synthesized)
ggcgctggggccctgggcagcgcgggctcgatgtgtgtcagccaagtagctggtcccactggagcggtgaggtcgccaccggatagtgttcctgccccattactagcgatctgtgacctt

SEQ ID NO: 346939 - DNA, 120 bp, Artificial Sequence
  ENSG00000138629_15 (sequence is synthesized)
gggccagtgattttactgagtcttgcttccctcatctttaaaatgtggctaatgcctgccttagggaaccgttgtgaggattaagtgagacatggtatataaaacgacctccttctggca

SEQ ID NO: 346940 - DNA, 120 bp, Artificial Sequence
  ENSG00000138629_16 (sequence is synthesized)
taaacttgaggtggaagataccttgaggatgcttgaaggtctgctaggcagcttcacagccttttctttcctcttctctatcagaggtctctttggaagcaataatgatgactataacaa

SEQ ID NO: 346941 - DNA, 120 bp, Artificial Sequence
  ENSG00000138639_0 (sequence is synthesized)
ctttctaacttctgggactctttgcgcaactgctaggatttctcaagtgcatgtggcaacacagcccagctccgggtggaaaccagcagggctctggaggggctcggagaccaggggagc

SEQ ID NO: 346942 - DNA, 120 bp, Artificial Sequence
  ENSG00000138639_1 (sequence is synthesized)
tgtcaaggctgcggcggggaccagagaggagcctggcgggggtggctgggtggctgggggaatccccccaacttcccatcgcaggcgcagctctctcggccgcctatttcctccgaaacc

SEQ ID NO: 346943 - DNA, 120 bp, Artificial Sequence
  ENSG00000138639_2 (sequence is synthesized)
cgcgctgcggagcagcccagtgcatagagttcaacacttccccttgttgtggaaagtaaaggagcctcactaccacctttttttctttgcgttttcttactgctggtcctgggagccttt

SEQ ID NO: 346944 - DNA, 120 bp, Artificial Sequence
  ENSG00000138639_3 (sequence is synthesized)
tccttcggagcagcagccctgtccggcatctgtcttgagctcccagcaaggaaagtccatcagcttgataatggaggagaacaatgactccacggagaacccccaacaaggccaagggcg

SEQ ID NO: 346945 - DNA, 120 bp, Artificial Sequence
  ENSG00000138639_4 (sequence is synthesized)
gcagaatgccatcaagtgtgggtggctgaggaagcaaggaggctttgtcaagacttggcatactcgctggtttgtgctcaagggggatcagctctattatttcaaagatgaagatgaaac

SEQ ID NO: 346946 - DNA, 120 bp, Artificial Sequence
  ENSG00000138639_5 (sequence is synthesized)
caagcccttgggtactatttttctgcctggaaataaagtttctgagcatccctgcaatgaagagaacccagggaagttcctttttgaagtagttccaggaggcgatcgagatcggatgac

SEQ ID NO: 346947 - DNA, 120 bp, Artificial Sequence
  ENSG00000138639_6 (sequence is synthesized)
agcaaatcatgaaagctacctcctcatggcaagcacccagaatgatatggaagactgggtgaagtcaatccgccgagtcatatggggacctttcggaggaggcatttttggacagaaact

SEQ ID NO: 346948 - DNA, 120 bp, Artificial Sequence
  ENSG00000138639_7 (sequence is synthesized)
ggaggatactgttcgttatgagaagagatatgggaaccgtctggctccgatgttggtggagcagtgcgtggactttatccgacaaagggggctgaaagaagagggtctctttcgactgcc

SEQ ID NO: 346949 - DNA, 120 bp, Artificial Sequence
  ENSG00000138639_8 (sequence is synthesized)
aggccaggctaatcttgttaaggagctccaagatgcctttgactgtggggagaagccatcatttgacagcaacacagatgtacacacggtggcatcacttcttaagctgtacctccgaga

SEQ ID NO: 346950 - DNA, 120 bp, Artificial Sequence
  ENSG00000138639_9 (sequence is synthesized)
acttccagaaccagttattccttatgcgaagtatgaagattttttgtcatgtgccaaactgctcagcaaggaagaggaagcaggtgttaaggaattagcaaagcaggtgaagagtttgcc

SEQ ID NO: 346951 - DNA, 120 bp, Artificial Sequence
  ENSG00000138639_10 (sequence is synthesized)
agtggtaaattacaacctcctcaagtatatttgcagattcttggatgaagtacagtcctactcgggagttaacaaaatgagtgtgcagaacttggcaacggtctttggtcctaatatcct

SEQ ID NO: 346952 - DNA, 120 bp, Artificial Sequence
  ENSG00000138639_11 (sequence is synthesized)
gcgccccaaagtggaagatcctttgactatcatggagggcactgtggtggtccagcagttgatgtcagtgatgattagcaaacatgattgcctctttcccaaagatgcagaactacaaag

SEQ ID NO: 346953 - DNA, 120 bp, Artificial Sequence
  ENSG00000138639_12 (sequence is synthesized)
caagccccaagatggagtgagcaacaacaatgaaattcagaagaaagccaccatggggcagttacagaacaaggagaacaataacaccaaggacagccctagtaggcagtgctcctggga

SEQ ID NO: 346954 - DNA, 120 bp, Artificial Sequence
  ENSG00000138639_13 (sequence is synthesized)
caagtctgagtcaccccagagaagcagcatgaacaatggatcccccacagctctatcaggcagcaaaaccaacagcccaaagaacagtgttcacaagctagatgtgtctagaagcccccc

SEQ ID NO: 346955 - DNA, 120 bp, Artificial Sequence
  ENSG00000138639_14 (sequence is synthesized)
tctcatggtcaaaaagaacccagcctttaataagggtagtgggatagttaccaatgggtccttcagcagcagtaatgcagaaggtcttgagaaaacccaaaccacccccaatgggagcct

SEQ ID NO: 346956 - DNA, 120 bp, Artificial Sequence
  ENSG00000138639_15 (sequence is synthesized)
acaggccagaaggagctcttcactgaaggtatctggtaccaaaatgggcacgcacagtgtacagaatggaacggtgcgcatgggcattttgaacagcgacacactcgggaaccccacaaa

SEQ ID NO: 346957 - DNA, 120 bp, Artificial Sequence
  ENSG00000138639_16 (sequence is synthesized)
tgttcgaaacatgagctggctgccaaatggctatgtgaccctgagggataacaagcagaaagaacaagctggagagttaggccagcacaacagactgtccacctatgataatgtccatca

SEQ ID NO: 346958 - DNA, 120 bp, Artificial Sequence
  ENSG00000138639_17 (sequence is synthesized)
acagttctccatgatgaaccttgatgacaagcagagcattgacagtgctacctggtccacttcctcctgtgaaatctccctccctgagaactccaactcctgtcgctcttctaccaccac

SEQ ID NO: 346959 - DNA, 120 bp, Artificial Sequence
  ENSG00000138639_18 (sequence is synthesized)
ctgcccagagcaagacttttttggggggaactttgaggaccctgttttggatgggcccccgcaggacgacctttcccaccccagggactatgaaagcaaaagtgaccacaggagtgtggg

SEQ ID NO: 346960 - DNA, 120 bp, Artificial Sequence
  ENSG00000138639_19 (sequence is synthesized)
agcagcaaccacagtgcactgcacagtttagtttccagcctgaaacaggaaatgaccaaacagaagatagagtatgagtccaggataaagagcttagaacagcgaaacttgactttggaa

SEQ ID NO: 346961 - DNA, 120 bp, Artificial Sequence
  ENSG00000138639_20 (sequence is synthesized)
acagaaatgatgagcctccatgatgaactggatcaggagaggaaaaagttcacaatgatagaaataaaaatgcgaaatgccgagcgagcaaaagaagatgccgagaaaagaaatgacatg

SEQ ID NO: 346962 - DNA, 120 bp, Artificial Sequence
  ENSG00000138639_21 (sequence is synthesized)
ctacagaaagaaatggagcagtttttttccacgtttggagaactgacagtggaacccaggagaaccgagagaggaaacacaatatggattcagtgagcctgctttcgcctgctgtctctg

SEQ ID NO: 346963 - DNA, 120 bp, Artificial Sequence
  ENSG00000138639_22 (sequence is synthesized)
atggctctggcaaggactccagggattctggtgggatatgacttagaaccaggtggctggtcacctggatgtacagaagtctaactggtgaaggaatatcatttacagacattaaacatc

SEQ ID NO: 346964 - DNA, 120 bp, Artificial Sequence
  ENSG00000138639_23 (sequence is synthesized)
catatctgcaatgtgtaccaaagttatatcatgccccataatgctactgtcaagtgttacaactggatatgtgtatatagagtagtttttcaaaagtaaactaaaaatgagaagcatatt

SEQ ID NO: 346965 - DNA, 120 bp, Artificial Sequence
  ENSG00000138639_24 (sequence is synthesized)
tcaagaattattttattgcaagtcttgtatttaaatgttaaatcaatatgttgttgcaatttagcttgctttcaagcttcaccccttgcacttaacataagctatttttggcattgtgtt

SEQ ID NO: 346966 - DNA, 120 bp, Artificial Sequence
  ENSG00000138639_25 (sequence is synthesized)
tggcattgtgttatcatcggcttattttatagatcaatatttttatttcccttttttgctgaggaaatgaagataagcaaaaatataaatatatatataaatatatgagttattaaaatc

SEQ ID NO: 346967 - DNA, 120 bp, Artificial Sequence
  ENSG00000138639_26 (sequence is synthesized)
tgtggctgtgctgtttgtgccaatagactttgtcatgaccaaaaagagaaatgtaaatagttttataaaatacagtcgaatcaccaggaacctttgagctgcttttaaaattcttcccct

SEQ ID NO: 346968 - DNA, 120 bp, Artificial Sequence
  ENSG00000138639_27 (sequence is synthesized)
ggcaccactcagttttgcttttgcgaggcgatttgacataggaactttgagactccatgagaaagtccctttctgaggcccactgtctaccttgccagatcctcagtgcgtatcgccaat

SEQ ID NO: 346969 - DNA, 120 bp, Artificial Sequence
  ENSG00000138639_28 (sequence is synthesized)
gcaggatgctccttagaaaagaaaaaatggtaaagaatggcatttaacgattcaggctttgaattactctgtccctctggaccgaatctctttaactgctggatagttttagaggaattc

SEQ ID NO: 346970 - DNA, 120 bp, Artificial Sequence
  ENSG00000138639_29 (sequence is synthesized)
tcctgctacttaggtactgggaaacaatgcttgctaaaccatgcccacgtgagcacctgtctcccactcaaacctctcccatctcccaacaactgcactttagaataccagcagtgaaat

SEQ ID NO: 346971 - DNA, 120 bp, Artificial Sequence
  ENSG00000138639_30 (sequence is synthesized)
ggtattactgtttccctctgagtgaaactgctagagtatatgtcacgtagtgacatttttttctcactcaggctattgccatctgggattctctccctactacagctggcaaagttggtt

SEQ ID NO: 346972 - DNA, 120 bp, Artificial Sequence
  ENSG00000138639_31 (sequence is synthesized)
tgcagcaagaagatagtgggagggggccaggctgcaggagaaggagaaaagtttagaagaaacaaaccattttgcttctaattttgacagtatcactttcctgttaaaacatacaataat

SEQ ID NO: 346973 - DNA, 120 bp, Artificial Sequence
  ENSG00000138639_32 (sequence is synthesized)
tttaaaaggtgaatgcctaaagttccaattttagcaaatatgggaacctcagcaatgctaattttctagaaaaacccagggctctttggagctagagttttgggagaacagttcttcaca

SEQ ID NO: 346974 - DNA, 120 bp, Artificial Sequence
  ENSG00000138639_33 (sequence is synthesized)
ataaggcaatggttttgagaggccaggcaaataatctttctcaccgtagaacaaaaagttacaaaaggcataatcggaaatagagactacatacttgagtttatggggtttgtgttgttt

SEQ ID NO: 346975 - DNA, 120 bp, Artificial Sequence
  ENSG00000138639_34 (sequence is synthesized)
gaaggttcaatgcttgcatgtgtttatttattttcaagagggaaagtggtctgtactgctttcatccttgccactgtcttgcttttattttttactctcccactgagcaagcgtctgtgg

SEQ ID NO: 346976 - DNA, 120 bp, Artificial Sequence
  ENSG00000138639_35 (sequence is synthesized)
tcctatggtatcaaccagtatctttatagcaataatttctttaattcccttttctctctctttccaattatttaaccagttacttccacctggacatacgataggaaattcaaactcaaa

SEQ ID NO: 346977 - DNA, 120 bp, Artificial Sequence
  ENSG00000138639_36 (sequence is synthesized)
atatgaaaattgatcttaataactctcccttcatatcttttcacctatttccagtccttatcatagttgataaaaacctcagactcatccagaaagctatatgatgcactagtaaaaaaa

SEQ ID NO: 346978 - DNA, 120 bp, Artificial Sequence
  ENSG00000138639_37 (sequence is synthesized)
acaaagatattcaaactgcttgggttcaaatggtatacaatttgccagctgttactgaaccttctatgcataactttttttttcctctgtgcaattggaataataaaaatactactccca

SEQ ID NO: 346979 - DNA, 120 bp, Artificial Sequence
  ENSG00000138639_38 (sequence is synthesized)
ataactcattaggcttgaatgagatgctttgaactgtggtgactacagtaatgttcccctctgcatgttgaagtgacaagtgcctccttggcctattgctgatcctgcctgctgtagaaa

SEQ ID NO: 346980 - DNA, 120 bp, Artificial Sequence
  ENSG00000138639_39 (sequence is synthesized)
tttttacctgagctcagtagctggggagcccactagtgctggggagcgagccgtggtttccattcctgggtgatggagtcatgggagaaactgcagtgagcaaacacagtaggacctgag

SEQ ID NO: 346981 - DNA, 120 bp, Artificial Sequence
  ENSG00000138639_40 (sequence is synthesized)
ttgggctcgaatgtgctttaagcgactcaggacagagcagctgctctgtctcccagcttgcaagtgcagcctgcatttgtcactgaccactgaagtgtatgtttgtgcaaggcatttttg

SEQ ID NO: 346982 - DNA, 120 bp, Artificial Sequence
  ENSG00000138639_41 (sequence is synthesized)
ggatgggaggatactgactaagtctgagaaggaggagaaagaaaattagctacaggaagagtttatatccccttctacaagaaaacttaaatatagctaccaccgctttgaaaggaatgg

SEQ ID NO: 346983 - DNA, 120 bp, Artificial Sequence
  ENSG00000138639_42 (sequence is synthesized)
tttgtgtccaaacagcattttccagacaagctctgtacttttttgccaaaagaattaactttaaactgaaggcagtggacagttaaacaagagtcggcactgggaacagctgtgcgtaga

SEQ ID NO: 346984 - DNA, 120 bp, Artificial Sequence
  ENSG00000138639_43 (sequence is synthesized)
gaagatgggtcagacaggtttcattcttttttgaatcatgactgagaaccttaatttgaggcttggttagtgttgacgcagataatgactgcaggtttatatactagtacaaatgaatgc

SEQ ID NO: 346985 - DNA, 120 bp, Artificial Sequence
  ENSG00000138639_44 (sequence is synthesized)
actcacacacacatactctgaccacataactactggattttcatttgtccatgagactccatagttgaccacaagtcatgatacagtatttgttcaggactattggagatgaatttgatt

SEQ ID NO: 346986 - DNA, 120 bp, Artificial Sequence
  ENSG00000138639_45 (sequence is synthesized)
ttacagcgctcttgtgatgtgaaatttgacaaggggttataggttgaatgctttgcccagtggaatcactgacatatttcctcacaaaattgtatcttcaaggaggttttgcaaaaaaca

SEQ ID NO: 346987 - DNA, 120 bp, Artificial Sequence
  ENSG00000138639_46 (sequence is synthesized)
gggagtttgaagacagaaaggaaaggggagaaacctgcagagagcatcaaaggatggggggtgctataaaagaagcaggggggtcctttgaaagaaatctatcatgcactgaaatgcttt

SEQ ID NO: 346988 - DNA, 120 bp, Artificial Sequence
  ENSG00000138639_47 (sequence is synthesized)
ctggagaaggtgccattattttcctcccctcttgctcagatgaaaggagccagcaaggacagtcctgaaatattcctcaggggactttttgtcattgttcctctttcctcttgcacagag

SEQ ID NO: 346989 - DNA, 120 bp, Artificial Sequence
  ENSG00000138639_48 (sequence is synthesized)
ctatttgctgacctttccagaggaatctcagtccagctgagaagacagttcttaataaaaacaaaaaaatgcaaaaaccaattcctgctgtttgaatgggaatggtagcttgcttgctgc

SEQ ID NO: 346990 - DNA, 120 bp, Artificial Sequence
  ENSG00000138639_49 (sequence is synthesized)
agttcttttcctgtgacattttggaatgtctgcagaaacttaaaaaaaagaaaaaaaaaaccttaaaaactccctggattaggcaagagaaaaggaagtttttttttgctaaacaggagt

SEQ ID NO: 346991 - DNA, 120 bp, Artificial Sequence
  ENSG00000138639_50 (sequence is synthesized)
aaatgagaggtggtaacttatccctaagccaggacctggatgatcaaaaccttcaaattctagggatcagcacttcaaaaataacaagtaaacaagcatgaggagtggctgttgggtttc

SEQ ID NO: 346992 - DNA, 120 bp, Artificial Sequence
  ENSG00000138639_51 (sequence is synthesized)
gctcagaggcaggttttaaaggaagccaaaaccgggttcagaacttcaggcctgtacgatgcctgaagaccggaattctggggggtgcccggctggtgccttagcctcaactcctttcat

SEQ ID NO: 346993 - DNA, 120 bp, Artificial Sequence
  ENSG00000138639_52 (sequence is synthesized)
gatgcagtgagctgaggaggcataaccttgattgatgtggtaacagtttacaacatagattatttggccacaggagtttgcattgtttctattaagttacaaagtcaaaaattgggcacc

SEQ ID NO: 346994 - DNA, 120 bp, Artificial Sequence
  ENSG00000138639_53 (sequence is synthesized)
ctgttttagagagagccatgtcttcaagaccaggaagtaacagataaaacctcttctccaacattgctattctaaatcatctgtttcacatgcagtgcgtatgacataatggcttttgat

SEQ ID NO: 346995 - DNA, 120 bp, Artificial Sequence
  ENSG00000138639_54 (sequence is synthesized)
gaacaaagcctaagaagtttaagactgtgtaatatggaatatgaaggttgtcctttcaaacaaatttataggaaattcaagcttgcttctgtaattatggacttaaatatagtatgtgag

SEQ ID NO: 346996 - DNA, 120 bp, Artificial Sequence
  ENSG00000138639_55 (sequence is synthesized)
tagatcatttgaaaagatgcttcctgaattattaatacagtatgtaatagctgctaaattaggttttataattctaaatcatcttacggagtgtgaagagaagtgttccaaatgtatctt

SEQ ID NO: 346997 - DNA, 120 bp, Artificial Sequence
  ENSG00000138639_56 (sequence is synthesized)
aagctccctggtctccttcagttcattgtcatctttcacccttttacccattgcttgctttgagttggagataataaaatcgctaattgaggccaagaggcaaattatacttgtctaata

SEQ ID NO: 346998 - DNA, 120 bp, Artificial Sequence
  ENSG00000138639_57 (sequence is synthesized)
ccattgccctatcccggtgttactctccactatcctttgaattgacctcacacacactgagactttccgtatacagctcaagcaccatttccgatcccctctctgatcaaaaaaaaagaa

SEQ ID NO: 346999 - DNA, 120 bp, Artificial Sequence
  ENSG00000138639_58 (sequence is synthesized)
tagaaaaataattgtgccagaaaaataattgtgcctggaaaatatacctctcaatgtataactcaagacctgggatgggatatgccatatatgtgctcctgtttaagaaaccaaatatgc

SEQ ID NO: 347000 - DNA, 120 bp, Artificial Sequence
  ENSG00000138639_59 (sequence is synthesized)
aaaattgaaacagaataaatttaaatagagagtgatgattggcactacaagtcactgcagggtgtcttacatgatagcttcccagtccattttaaaataaaattcaaagttttaattgag

SEQ ID NO: 347001 - DNA, 120 bp, Artificial Sequence
  ENSG00000138640_0 (sequence is synthesized)
aactccaggcagtccttccagccatgtgggttcagcggaaagagaagcaaaaccactcttcctaaaatgttagaagctgctcttcgcttaccttggggcctttgcattgggagctgtttt

SEQ ID NO: 347002 - DNA, 120 bp, Artificial Sequence
  ENSG00000138640_1 (sequence is synthesized)
tcacatcaaagaatatgtgctgaatggaattttagtattttgctgtcgttttaatattttcgtctggtcttcctcagttcttccagacgctttctgagagaatgggggcaggagctctag

SEQ ID NO: 347003 - DNA, 120 bp, Artificial Sequence
  ENSG00000138640_2 (sequence is synthesized)
ccatctgtcaaagtaaagcagcggttcggctgaaagaagacatgaaaaagatagtggcagtgccattaaatgaacagaaggattttacctatcagaagttatttggagtcagtctccaag

SEQ ID NO: 347004 - DNA, 120 bp, Artificial Sequence
  ENSG00000138640_3 (sequence is synthesized)
aacttgaacggcaggggctcaccgagaatggcattccagcagtagtgtggaatatagtggaatatttgacgcagcatggacttacccaagaaggtctttttagggtgaatggtaacgtga

SEQ ID NO: 347005 - DNA, 120 bp, Artificial Sequence
  ENSG00000138640_4 (sequence is synthesized)
aggtggtggaacaacttcgactgaagttcgagagtggagtgcccgtggagctcgggaaggacggtgatgtctgctcagcagccagtctgttgaagctgtttctgagggagctgcctgaca

SEQ ID NO: 347006 - DNA, 120 bp, Artificial Sequence
  ENSG00000138640_5 (sequence is synthesized)
gtctgatcacctcagcgttgcagcctcgattcattcaactctttcaggatggcagaaatgatgttcaggagagtagcttaagagacttaataaaagagctgccagacacccactactgcc

SEQ ID NO: 347007 - DNA, 120 bp, Artificial Sequence
  ENSG00000138640_6 (sequence is synthesized)
tcctcaagtacctttgccagttcttgacaaaagtagccaagcatcatgtgcagaatcgcatgaatgttcacaatctcgccactgtatttgggccaaattgctttcatgtgccacctgggc

SEQ ID NO: 347008 - DNA, 120 bp, Artificial Sequence
  ENSG00000138640_7 (sequence is synthesized)
ttgaaggcatgaaggaacaggacctgtgcaacaagataatggctaaaattctagaaaattacaataccctgtttgaagtagagtatacagaaaatgatcatctgagatgtgaaaacctgg

SEQ ID NO: 347009 - DNA, 120 bp, Artificial Sequence
  ENSG00000138640_8 (sequence is synthesized)
ctaggcttatcatagtaaaagaggtctattataagaactccctgcccatccttttaacaagaggcttagaaagagacatgccaaaaccacctccaaaaaccaagatcccaaaatccagga

SEQ ID NO: 347010 - DNA, 120 bp, Artificial Sequence
  ENSG00000138640_9 (sequence is synthesized)
gtgagggatctattcaggcccacagagtactgcaaccagagctatctgatggcattcctcagctcagcttgcggctaagttatagaaaagcctgcttggaagacatgaattcagcagagg

SEQ ID NO: 347011 - DNA, 120 bp, Artificial Sequence
  ENSG00000138640_10 (sequence is synthesized)
gtgctattagtgccaagttggtacccagttcacaggaagatgaaagacctctgtcacctttctatttgagtgctcatgtaccccaagtcagcaatgtgtctgcaaccggagaactcttag

SEQ ID NO: 347012 - DNA, 120 bp, Artificial Sequence
  ENSG00000138640_11 (sequence is synthesized)
aaagaaccatccgatcagctgtagaacaacatctttttgatgttaataactctggaggtcaaagttcagaggactcagaatctggaacactatcagcatcttctgccacatctgccagac

SEQ ID NO: 347013 - DNA, 120 bp, Artificial Sequence
  ENSG00000138640_12 (sequence is synthesized)
agcgccgccgccagtccaaggagcaggatgaagttcgacatgggagagacaagggacttatcaacaaagaaaatactccttctgggttcaaccaccttgatgattgtattttgaatactc

SEQ ID NO: 347014 - DNA, 120 bp, Artificial Sequence
  ENSG00000138640_13 (sequence is synthesized)
aggaagtcgaaaaggtacacaaaaatacttttggttgtgctggagaaaggagcaagcctaaacgtcagaaatccagtactaaactttctgagcttcatgacaatcaggacggtcttgtga

SEQ ID NO: 347015 - DNA, 120 bp, Artificial Sequence
  ENSG00000138640_14 (sequence is synthesized)
atatggaaagtctcaattccacacgatctcatgagagaactggacctgatgattttgaatggatgtctgatgaaaggaaaggaaatgaaaaagatggtggacacactcagcattttgaga

SEQ ID NO: 347016 - DNA, 120 bp, Artificial Sequence
  ENSG00000138640_15 (sequence is synthesized)
gccccacaatgaagatccaggagcatcccagcctatctgacaccaaacagcagagaaatcaagatgccggtgaccaggaggagagctttgtctccgaagtgccccagtcggacctgactg

SEQ ID NO: 347017 - DNA, 120 bp, Artificial Sequence
  ENSG00000138640_16 (sequence is synthesized)
cattgtgtgatgaaaagaactgggaagagcctatccctgctttctcctcctggcagcgggagaacagtgactctgatgaagcccacctctcgccgcaggctgggcgcctgatccgtcagc

SEQ ID NO: 347018 - DNA, 120 bp, Artificial Sequence
  ENSG00000138640_17 (sequence is synthesized)
tgctggacgaagacagcgaccccatgctctctcctcggttctacgcttatgggcagagcaggcaatacctggatgacacagaagtgcctccttccccaccaaactcccattctttcatga

SEQ ID NO: 347019 - DNA, 120 bp, Artificial Sequence
  ENSG00000138640_18 (sequence is synthesized)
ggcggcgaagctcctctctggggtcctatgatgatgagcaagaggacctgacacctgcccagctcacacgaaggattcagagccttaaaaagaagatccggaagtttgaagatagattcg

SEQ ID NO: 347020 - DNA, 120 bp, Artificial Sequence
  ENSG00000138640_19 (sequence is synthesized)
aagaagagaagaagtacagaccttcccacagtgacaaagcagccaatccggaggttctgaaatggacaaatgaccttgccaaattccggagacaacttaaagaatcaaaactaaagatat

SEQ ID NO: 347021 - DNA, 120 bp, Artificial Sequence
  ENSG00000138640_20 (sequence is synthesized)
ctgaagaggacctaactcccaggatgcggcagcgaagcaacacactccccaagagttttggttcccaacttgagaaagaagatgagaagaagcaagagctggtggataaagcaataaagc

SEQ ID NO: 347022 - DNA, 120 bp, Artificial Sequence
  ENSG00000138640_21 (sequence is synthesized)
ccagtgttgaagccacattggaatctattcagaggaagctccaggagaagcgagcggaaagcagccgccctgaggacattaaggatatgaccaaagaccagattgctaatgagaaagtgg

SEQ ID NO: 347023 - DNA, 120 bp, Artificial Sequence
  ENSG00000138640_22 (sequence is synthesized)
ctctgcagaaagctctgttatattatgaaagcattcatggacggccggtaacaaagaacgaacggcaggtgatgaagccactatacgacaggtaccggctggtcaaacagatcctctccc

SEQ ID NO: 347024 - DNA, 120 bp, Artificial Sequence
  ENSG00000138640_23 (sequence is synthesized)
gagctaacaccatacccatcattggttccccctccagcaagcggagaagccctttgctgcagccaattatcgagggcgaaactgcttccttcttcaaggagataaaggaagaagaggagg

SEQ ID NO: 347025 - DNA, 120 bp, Artificial Sequence
  ENSG00000138640_24 (sequence is synthesized)
tatttccccaatggatgataaaataccatcaaaatgcagccaggacacagggctttcaaatctccatgctgcctcaatacctgaactcctggaacacctccaggaaatgagagaagaaaa

SEQ ID NO: 347026 - DNA, 120 bp, Artificial Sequence
  ENSG00000138640_25 (sequence is synthesized)
gaaaaggattcgaaagaaacttcgggattttgaagacaactttttcagacagaatggaagaaatgtccagaaggaagaccgcactcctatggctgaagaatacagtgaatataagcacat

SEQ ID NO: 347027 - DNA, 120 bp, Artificial Sequence
  ENSG00000138640_26 (sequence is synthesized)
aaaggcgaaactgaggctcctggaggtgctcatcagcaagagagacactgattccaagtccatgtgaggggcatggccaagcacagggggctggcagctgcggtgagagtttactgtccc

SEQ ID NO: 347028 - DNA, 120 bp, Artificial Sequence
  ENSG00000138640_27 (sequence is synthesized)
cagagaaagtgcagctctggaaggcagccttggggctggccctgcaaagcatgcagcccttctgcctctagaccatttggcatcggctcctgtttccattgcctgccttagaaactggct

SEQ ID NO: 347029 - DNA, 120 bp, Artificial Sequence
  ENSG00000138640_28 (sequence is synthesized)
ggaagaagacaatgtgacctgacttaggcattttgtaattggaaagtcaagactgcagtatgtgcacatgcgcacgcgcatgcacgcacacacacacacagtagtggagctttcctaaca

SEQ ID NO: 347030 - DNA, 120 bp, Artificial Sequence
  ENSG00000138640_29 (sequence is synthesized)
ctagcagagattaatcactacattagacaacactcatctacagagaatatacactgttcttccctggataactgagaaacaagagaccattctctgtctaactgtgataaaaacaagctc

SEQ ID NO: 347031 - DNA, 120 bp, Artificial Sequence
  ENSG00000138640_30 (sequence is synthesized)
aggactttattctatagagcaaacttgctgtggagggccatgctctccttggacccagttaactgcaaacgtgcattggagccctatttgctgccgctgccattctagtgacctttccac

SEQ ID NO: 347032 - DNA, 120 bp, Artificial Sequence
  ENSG00000138640_31 (sequence is synthesized)
agagctgcgccttcctcacgtgtgtgaaaggttttccccttcagccctcaggtagatggaagctgcatctgcccacgatggcagtgcagtcatcatcttcaggatgtttcttcaggactt

SEQ ID NO: 347033 - DNA, 120 bp, Artificial Sequence
  ENSG00000138640_32 (sequence is synthesized)
cctcagctgacaaggaattttggtccctgcctaggaccgggtcatctgcagaggacagagagatggtaagcagctgtatgaatgctgattttaaaaccaggtcatgggagaagagcctgg

SEQ ID NO: 347034 - DNA, 120 bp, Artificial Sequence
  ENSG00000138640_33 (sequence is synthesized)
agattctttcctgaacactgactgcacttaccagtctgattttatcgtcaaacaccaagccaggctagcatgctcatggcaatctgtttggggctgttttgttgtggcactagccaaaca

SEQ ID NO: 347035 - DNA, 120 bp, Artificial Sequence
  ENSG00000138640_34 (sequence is synthesized)
taaaggggcttaagtcagcctgcatacagaggatcggggagagaaggggcctgtgttctcagcctcctgagtacttaccagagtttaatttttttaaaaaaaatctgcactaaaatcccc

SEQ ID NO: 347036 - DNA, 120 bp, Artificial Sequence
  ENSG00000138640_35 (sequence is synthesized)
aaactgacaggtaaatgtagccctcagagctcagcccaaggcagaatctaaatcacactattttcgagatcatgtataaaaagaaaaaaaagaagtcatgctgtgtggccaattataatt

SEQ ID NO: 347037 - DNA, 120 bp, Artificial Sequence
  ENSG00000138640_36 (sequence is synthesized)
tttttcaaagactttgtcacaaaactgtctatattagacattttggagggaccaggaaatgtaagacaccaaatcctccatctcttcagtgtgcctgatgtcacctcatgatttgctgtt

SEQ ID NO: 347038 - DNA, 120 bp, Artificial Sequence
  ENSG00000138640_37 (sequence is synthesized)
acttttttaactcctgcgccaaggacagtgggttctgtgtccacctttgtgctttgcgaggccgagcccaggcatctgctcgcctgccacggctgaccagagaaggtgcttcaggagctc

SEQ ID NO: 347039 - DNA, 120 bp, Artificial Sequence
  ENSG00000138640_38 (sequence is synthesized)
tgccttagacgacgtgttacagtatgaacacacagcagaggcaccctcgtatgttttgaaagttgccttctgaaagggcacagttttaaggaaaagaaaaagaatgtaaaactatactga

SEQ ID NO: 347040 - DNA, 120 bp, Artificial Sequence
  ENSG00000138640_39 (sequence is synthesized)
cccgttttcagttttaaagggtcgtgagaaactggctggtccaatgggatttacagcaacattttccattgctgaagtgaggtagcagctctcttctgtcagctgaatgttaaggatggg

SEQ ID NO: 347041 - DNA, 120 bp, Artificial Sequence
  ENSG00000138640_40 (sequence is synthesized)
gaaaaagaatgcctttaagtttgctcttaatcgtatggaagcttgagctatgtgttggaagtgccctggttttaatccatacacaaagacggtacataatcctacaggtttaaatgtaca

SEQ ID NO: 347042 - DNA, 120 bp, Artificial Sequence
  ENSG00000138640_41 (sequence is synthesized)
taaaaatatagtttggaattctttgctctactgtttacattgcagattgctataatttcaaggagtgagattataaataaaatgatgcactttaggatgtttcctatttttgaaatctga

SEQ ID NO: 347043 - DNA, 120 bp, Artificial Sequence
  ENSG00000138640_42 (sequence is synthesized)
acatgaatcattcacatgaccaaaaattgtgtttttttaaaaatacatgtctagtctgtcctttaatagctctcttaaataagctatgatattaatcagatcattaccagttagctttta

SEQ ID NO: 347044 - DNA, 120 bp, Artificial Sequence
  ENSG00000138640_43 (sequence is synthesized)
aagcacatttgtttaagactatgtttttggaaaaatacgctacagaatttttttttaagctacaaataaatgagatgctactaattgttttggaatctgttgtttctgccaaaggtaaat

SEQ ID NO: 347045 - DNA, 120 bp, Artificial Sequence
  ENSG00000138640_44 (sequence is synthesized)
taactaaagatttattcaggaatccccatttgaatttgtatgattcaataaaagaaaacaccaagtaagttatataaaataaattgtgtatgagatgttgtgttttcctttgtaatttcc

SEQ ID NO: 347046 - DNA, 120 bp, Artificial Sequence
  ENSG00000138640_45 (sequence is synthesized)
actaactaactaactaacttatattcttcatggaatggagcccagaagaaatgagaggaagcccttttcacactagatcttatttgaagaaatgtttgttagtcagtcagtcagtggttt

SEQ ID NO: 347047 - DNA, 120 bp, Artificial Sequence
  ENSG00000138640_46 (sequence is synthesized)
ctggctctgccgagggagatgtgttccccagcaaccatttctgcagcccagaatctcaaggcactagaggcggtgtcttaattaattggcttcacaaagacaaaatgctctggactggga

SEQ ID NO: 347048 - DNA, 120 bp, Artificial Sequence
  ENSG00000138640_47 (sequence is synthesized)
tttttcctttgctgtgttgggaatatgtgtttattaattagcacatgccaacaaaataaatgtcaagagttatttcataagtgtaagtaaacttaagaattaaagagtgcagacttataa

SEQ ID NO: 347049 - DNA, 120 bp, Artificial Sequence
  ENSG00000138640_48 (sequence is synthesized)
agcaacttggtttttaattttcagtattgctataattttggacagaagattttatttaattctttctcataaaaattccatatggatataaccctcagattattattcctgtgtatagtg

SEQ ID NO: 347050 - DNA, 120 bp, Artificial Sequence
  ENSG00000138640_49 (sequence is synthesized)
aatccttcttatgaaatctattattccaaatgcttattaaattgaaatatagccttctaaaattcaagaataatagcaattttatgttttcttgttgctataaagtcatctcaaaaacac

SEQ ID NO: 347051 - DNA, 120 bp, Artificial Sequence
  ENSG00000138640_50 (sequence is synthesized)
ttgcatgagcccagtgctctgatcaactggccgcaccacctttactacagaagcctgatgttacagcaggaataagtgcatatggctgtgatcaggagtgctaggttactaactagattg

SEQ ID NO: 347052 - DNA, 120 bp, Artificial Sequence
  ENSG00000138640_51 (sequence is synthesized)
aattcctgaagacaatattactgtgtctttttgtctcttttgtgtctggcacaatttgaagcccaacctcagattctaagtcccatatattagtttttggtaacaatcatcagtaaagga

SEQ ID NO: 347053 - DNA, 120 bp, Artificial Sequence
  ENSG00000138640_52 (sequence is synthesized)
gaatattttaaaaacctataaaggagtccttgacaatactatctaaatctttttatacattgataattttataatataccctgtatatattaggtaaatgcctgtaggtctccaaagacc

SEQ ID NO: 347054 - DNA, 120 bp, Artificial Sequence
  ENSG00000138640_53 (sequence is synthesized)
tagaattgagaatcagagggtaaacatccaaacaaatcccctagatgtgggaaaataaggaagttatcttatttcgtcgtcatttatattgaggtgaatcatgatggagctggtatgaga

SEQ ID NO: 347055 - DNA, 120 bp, Artificial Sequence
  ENSG00000138640_54 (sequence is synthesized)
tttcctcaggaggtttcttgaagcttatcaggtttacagaccataacatactctttgctgattcatatagcaatgaatgataaaatcagaggcacttggtttgggcacttaaaggaatgt

SEQ ID NO: 347056 - DNA, 120 bp, Artificial Sequence
  ENSG00000138640_55 (sequence is synthesized)
tttcatctcttctcccagttgaggccatgactttgaagaaaggttaaaatggtttgagtatcaagtagcatcctacaaaaggatctaaaactagattttctagtttgctcagttaaaatg

SEQ ID NO: 347057 - DNA, 120 bp, Artificial Sequence
  ENSG00000138640_56 (sequence is synthesized)
ataaaatgagataattggagactatcagttgtaaatctgagttagaaataacacggtagctgaaaaaaatgtcagtgattcacaagaaaaaataagaaaacaacattacttcagttttgc

SEQ ID NO: 347058 - DNA, 120 bp, Artificial Sequence
  ENSG00000138640_57 (sequence is synthesized)
ctcagaaaagttaaatgattttttaaatagaaaaaaatcgccctcaagtttgttcctctagtgcctatggtactttgaaaaggatctctttttaaaatgttaaaaggtaattaactttgt

SEQ ID NO: 347059 - DNA, 120 bp, Artificial Sequence
  ENSG00000138640_58 (sequence is synthesized)
ttcagcagcatctctcaatcacatataccccataaatatgtacaactattaaaggacctataatgataattaaaaataaaatattttaaaaatcttttataaacaatttttaacactcat

SEQ ID NO: 347060 - DNA, 120 bp, Artificial Sequence
  ENSG00000138640_59 (sequence is synthesized)
acctttttactagggcagataaaataataaggtgaacctgaagtataatggaaatagataaatataatcttaggcagggcaaacttgctgagataaagctaattgctggaatatgccaat

SEQ ID NO: 347061 - DNA, 90 bp, Artificial Sequence
  ENSG00000138640_60 (sequence is synthesized)
tcatattgaaacgcagtccctggtgttggagcagggcggatccttcgtgaatgacttagtgccatccccttggtgatgagtgagttcttg

SEQ ID NO: 347062 - DNA, 120 bp, Artificial Sequence
  ENSG00000138640_61 (sequence is synthesized)
atgacttagtgccatccccttggtgatgagtgagttcttgctgtgagttcacaggagacctgcttgtttaaaagtgtgtggcacttccccccctcactcttgctcccactctcgccatgt

SEQ ID NO: 347063 - DNA, 120 bp, Artificial Sequence
  ENSG00000138640_62 (sequence is synthesized)
ctctcgccatgtgatatgcctgctccccttcttcttctgccgtgattgtgagcttcctgaggcctcattagaggcagatgttctgtatggcctgctgaactgtgagtcaattaaacctct

SEQ ID NO: 347064 - DNA, 120 bp, Artificial Sequence
  ENSG00000138640_63 (sequence is synthesized)
ctattaatgaaagccaccaggtgactggcagttttcggagtcaaagaagcctgtgtgtaggatctagggagtcaggtttgaaaaaaagatgtcagcgacttaagacccgtgtcacgtgac

SEQ ID NO: 347065 - DNA, 120 bp, Artificial Sequence
  ENSG00000138640_64 (sequence is synthesized)
tccctctacttgccagcactgaggctgtggatcaaatttcaactccaggcagtccttccagccatgtgggttcagcggaaagagaagcaaaaccactcttcctaaaatttcttccagacg

SEQ ID NO: 347066 - DNA, 120 bp, Artificial Sequence
  ENSG00000138640_65 (sequence is synthesized)
agccagcttattttggagaagttgtatcttgttcttgggcatgttagccttgtttttcatcccaatttgaagaaggtagctatgccctttttacaaaactataatttgcaataaatcaaa

SEQ ID NO: 347067 - DNA, 120 bp, Artificial Sequence
  ENSG00000138640_66 (sequence is synthesized)
gggcatttaaaaaatctgtaatcagaaatgttgattagcagaaagagaaggagtatgacatagtgaataattttttaaatagtaataaagttcaaattattgccaatagatggaaaatta

SEQ ID NO: 347068 - DNA, 120 bp, Artificial Sequence
  ENSG00000138640_67 (sequence is synthesized)
tgaacagactatgccagtatcagaaaaatataacctcagcttcatttactggaaataaaccagtctattttagtagattctttgttgctagccacaggaacttttgtaaagcttaatatt

SEQ ID NO: 347069 - DNA, 120 bp, Artificial Sequence
  ENSG00000138640_68 (sequence is synthesized)
ttattctccttcttattccataaagctctttaatttttgatacgtgaaatgtgatcctgcaatccagggactttgcttttaactctcctattaatcacctctgatatcaaatacattctt

SEQ ID NO: 347070 - DNA, 120 bp, Artificial Sequence
  ENSG00000138640_69 (sequence is synthesized)
ctagttaagagagagagaacatttacactccaaaagctctcagaaactcagcaactttttttttaatagcatatctacttctccacttcattaatatacaggcttattcagctgcccaga

SEQ ID NO: 347071 - DNA, 120 bp, Artificial Sequence
  ENSG00000138640_70 (sequence is synthesized)
actagtaatattacagtcttcagaatgactgtctaaatttagattctggcttagatcctagtgactacagggttccaggtcattcacagcctaatttgggtagaagttctactgtaataa

SEQ ID NO: 347072 - DNA, 120 bp, Artificial Sequence
  ENSG00000138640_71 (sequence is synthesized)
ctatcctgattgtaattctaaaggtgttaacttttaagtaatggcatttcataggatatgttagggtctcgtgaataaatatctcagatgcaggatccactaattttttgtcttattcag

SEQ ID NO: 347073 - DNA, 120 bp, Artificial Sequence
  ENSG00000138640_72 (sequence is synthesized)
aagctccgtgatagtaaaaagtctatattttttcttatatttgttctgcccagtaaacctttgtttggtgacttacatgtgagaaaggtgtaagtagaaaactgttgaataattctgaaa

SEQ ID NO: 347074 - DNA, 120 bp, Artificial Sequence
  ENSG00000138640_73 (sequence is synthesized)
cctagattctagaacaggtaaaaatgaatttgtaaatagaatgcttatttagtaagcattaaacacagatccatacctcattactaacttagacattgggcttgatctggaatttctggt

SEQ ID NO: 347075 - DNA, 120 bp, Artificial Sequence
  ENSG00000138640_74 (sequence is synthesized)
aatctgctccaggtagtcagtcagaatatcagtaagtaatgagtatttattataggttctaattagtatggttttacagtttttctattgttgtaaaatatacataaaataaaatatacc

SEQ ID NO: 347076 - DNA, 120 bp, Artificial Sequence
  ENSG00000138640_75 (sequence is synthesized)
catcaagccatgatttttatttctgtgctggatgcattagcagctgtgacttggaaggttttatcctgaaggagtggaattgctgcagacgtcttggggttttggtgagcagtagatatt

SEQ ID NO: 347077 - DNA, 120 bp, Artificial Sequence
  ENSG00000138640_76 (sequence is synthesized)
agattcctcaattctaagtctgacccaccctgattctctaacaatctgggttttgctatttagctttccaatgtggataatacctaagggagacattatagggcacaatggccatttctg

SEQ ID NO: 347078 - DNA, 120 bp, Artificial Sequence
  ENSG00000138640_77 (sequence is synthesized)
tgatgctgtcacatatgtttgttaaaaggatgttagaagttcaatacacaattctatgcaagcaggatataataaactgtcataattttactagtttaaacaaagataaaaatatgagga

SEQ ID NO: 347079 - DNA, 120 bp, Artificial Sequence
  ENSG00000138640_78 (sequence is synthesized)
actgtcacagagctggaaatttttggatccttttagttcatctgatttaggttataaattatgatggttgttccttcttacccccaacctgacaactattaacatgatgtacactcattt

SEQ ID NO: 347080 - DNA, 120 bp, Artificial Sequence
  ENSG00000138640_79 (sequence is synthesized)
taaaatagttttgcagtctgttttctctattgagtggctacattgtgttattaaatgtgtatatttatatcgaatacagatgttcaataatatatctgtaatgtacatatgtgttgctaa

SEQ ID NO: 347081 - DNA, 120 bp, Artificial Sequence
  ENSG00000138640_80 (sequence is synthesized)
gagtctgataattaaatgattattaaatgatacttgtaatgaaagtctgccccaaaaagtgaccagatttttattggggttgctgtgtatctccaggaagaagaggaggggtcagaagac

SEQ ID NO: 347082 - DNA, 120 bp, Artificial Sequence
  ENSG00000138640_81 (sequence is synthesized)
actgccttatacagaactctagagatgaaaaatcaaaggcaatcattttttaaaaaacagtgattgtttttctaacagtcatttaactccaaagcaagagttaaacctgaagcagaagtg

SEQ ID NO: 347083 - DNA, 120 bp, Artificial Sequence
  ENSG00000138640_82 (sequence is synthesized)
agttttaagagtttcacttgtcatatttctgtgatagttccgagcctggggcgatcatttacgtgctgtagttaggaatgattatttcagtatatggggccctcttgtctactgagggaa

SEQ ID NO: 347084 - DNA, 120 bp, Artificial Sequence
  ENSG00000138640_83 (sequence is synthesized)
taaatgtagagaagcagccgataaaatagcattgcctgaagaagtttggaggctgagagcagcagtagactggccaactgcagagcaagttgtttctccagccgtgcggtgcagcctcat

SEQ ID NO: 347085 - DNA, 120 bp, Artificial Sequence
  ENSG00000138640_84 (sequence is synthesized)
gcccccaacccagcttagccactgtaagaagacgttcactgtacagacgaccaaacttgccgtggaagagacagttgtgagattcccttgcaaatttacatacgagaatggcttgtgaaa

SEQ ID NO: 347086 - DNA, 120 bp, Artificial Sequence
  ENSG00000138640_85 (sequence is synthesized)
aatctccatgctgcctcaatgtatgtcattttggtggtggtggtgaaatgttttggtaaaaatagctcacttaaatattatcttagcctttgtatctaaataaattagctgataaaatac

SEQ ID NO: 347087 - DNA, 120 bp, Artificial Sequence
  ENSG00000138640_86 (sequence is synthesized)
aagtgactacctggggtgtatctggataaaacggtgattttttaaaaaatttctttttttatatgcttcagcccatgttatttgagggaacttttgagtcttgtttaaacaaccagaagt

SEQ ID NO: 347088 - DNA, 120 bp, Artificial Sequence
  ENSG00000138640_87 (sequence is synthesized)
tctctctctaaagggcatcgtgtggttctgtacatcacagcccatcacttaacacacgctgagcacagatgtcatctctttctttcaaagaaaaatatgacaaagtgccatgggatttca

SEQ ID NO: 347089 - DNA, 120 bp, Artificial Sequence
  ENSG00000138640_88 (sequence is synthesized)
caagggctaagaattcccaagtagcaggaacccccagaagctggatctgttgccagcatgtttggctttcaggaaatggaaaacatgcatttccgcgccccctcaatgctctcagcagtt

SEQ ID NO: 347090 - DNA, 120 bp, Artificial Sequence
  ENSG00000138640_89 (sequence is synthesized)
tctgcatttacttgcctcccctttctgcacagctcctgttgagttacacattcatcacatttatgacaactcaaatttaacttaatttccttgcaatgcttcctctctcttagacctgaa

SEQ ID NO: 347091 - DNA, 120 bp, Artificial Sequence
  ENSG00000138640_90 (sequence is synthesized)
ctgttctcccaatactcagtgagaaaacaaccacaggaaatctgggaatgtgcagctagccccgcttaattgatctaagcagccagggccggcaggggagctttcacgtacacagcctct

SEQ ID NO: 347092 - DNA, 120 bp, Artificial Sequence
  ENSG00000138640_91 (sequence is synthesized)
attcctggcttgcaggactgtttacctaaggggcaaagaagtccacctgcgaaagacaccatgttgctactacagccttagcaacagcagtagcccggttttcattgttgttgtttacag

SEQ ID NO: 347093 - DNA, 120 bp, Artificial Sequence
  ENSG00000138640_92 (sequence is synthesized)
tcatgagagccatactcctttaagaaaacaccaaactcctttccctcattcctggccccaatcagtaatcaccaagactgtcagctgcctgcagttatcgggaagagcagcctggggaaa

SEQ ID NO: 347094 - DNA, 120 bp, Artificial Sequence
  ENSG00000138640_93 (sequence is synthesized)
attgaggagcagaaggagtagggtgcgggggaggaggaggagcgcctttagtgctgcagcagctgctgctctgattggcccggtggttcagctgcttccctggaacaaaaggtcaaagtg

SEQ ID NO: 347095 - DNA, 120 bp, Artificial Sequence
  ENSG00000138640_94 (sequence is synthesized)
agtgtattgctccctctcttagctgcacacttcatttgtggctttaggtttttcattacttttcagtccttttaaccattatatctgagcaacatgtgagagatgttagagattttgatt

SEQ ID NO: 347096 - DNA, 120 bp, Artificial Sequence
  ENSG00000138640_95 (sequence is synthesized)
tgagttgaagtaaaaataagaccacaactattcatcttcaaacacattttaattcaggtgtttctgttgtaaccatgcaacctcctgtggtaaatatgactgactgctcttttttcttac

SEQ ID NO: 347097 - DNA, 120 bp, Artificial Sequence
  ENSG00000138640_96 (sequence is synthesized)
cctccacaatgaaaagaagctgtccagtaaacgaaatccctcctgcttcatgtccacttagcatggcagataattcgtactctacactctcctgtggaacagagagccttacagcttact

SEQ ID NO: 347098 - DNA, 120 bp, Artificial Sequence
  ENSG00000138640_97 (sequence is synthesized)
gttgtatcatcacagttctatgatggcaatgtataaaaattaagattgaggcatgatattttaatgtcttttttattttcagtcacattaatttatcagggttaattagtgcctggtatc

SEQ ID NO: 347099 - DNA, 120 bp, Artificial Sequence
  ENSG00000138640_98 (sequence is synthesized)
acatattttttttttttttggtgatgggttccttattcaatttttaaagattagaccatcttaaaatatttttagtgttgactgtgacaatttgttttttggctttcaaaacaaattatt

SEQ ID NO: 347100 - DNA, 120 bp, Artificial Sequence
  ENSG00000138640_99 (sequence is synthesized)
gtgtgttttaagtatgatgaccctagttttattggaggtatatatctacctccttttgcttttttatttgctaaactagctcatactgtatctcataaaaagtactttactatcttattt

SEQ ID NO: 347101 - DNA, 120 bp, Artificial Sequence
  ENSG00000138640_100 (sequence is synthesized)
aaaactttgtaagtattttaatggctgggtaatcctttatcatgtgtatatgccataatttacgtatgatagtaatttggttatttagaatgcttacattttcattctattataaataaa

SEQ ID NO: 347102 - DNA, 120 bp, Artificial Sequence
  ENSG00000138640_101 (sequence is synthesized)
tctaggcgctgcgtgggttccactcaccgcctggccgtttcggggccgcagtgcctccctggccggcagggggaggcacacgctcgccttgtcctggcgcttttcccagtggcccggctc

SEQ ID NO: 347103 - DNA, 120 bp, Artificial Sequence
  ENSG00000138640_102 (sequence is synthesized)
tgccgacgaggctcttttctccctagggggaaattttaaaatctcacccccccagtgctggggggaaagcggaggatcctcgcgtgccgggagcgggctgcgaatggggcagggcgagcg

SEQ ID NO: 347104 - DNA, 120 bp, Artificial Sequence
  ENSG00000138640_103 (sequence is synthesized)
cacgtggggcgtgtttacaaacagcagccgcgccgccttgcggaggcggtccaggtgtcggagcccagagtcagcgcgcgtggaaagtgctagcccgagcgaggatcatgaggcacgcaa

SEQ ID NO: 347105 - DNA, 120 bp, Artificial Sequence
  ENSG00000138640_104 (sequence is synthesized)
tcagcgttgcagcctcgattcattcaactctttcaggaaaggggaaagatcctgatgtgacatcttgacagttgatcctttaataaacctaatggaagttaacaaaggaagattatttgg

SEQ ID NO: 347106 - DNA, 120 bp, Artificial Sequence
  ENSG00000138640_105 (sequence is synthesized)
tgctcccactctcgccatgtgatatgcctgctccccttcttcttctgccgtgattgtgagcttcctgaggcctcattagaggcagatgttctgtatggcctgctgaactgaggtctatta

SEQ ID NO: 347107 - DNA, 120 bp, Artificial Sequence
  ENSG00000138640_106 (sequence is synthesized)
taagaactccctgcccatccttttaacaagaggcttagaaagagacatgccaaaaccacctccaaaaaccaaggaacatggatggagctggaggctatcatgcttgttgactcacaagca

SEQ ID NO: 347108 - DNA, 120 bp, Artificial Sequence
  ENSG00000138641_0 (sequence is synthesized)
ggctacatgattccctgaaagataagaacaatgttatgttggggatattggtctctgggccaacctggtatcagcaccaacctgcagggaattgtggctgagccccaggtgtgtgggttc

SEQ ID NO: 347109 - DNA, 120 bp, Artificial Sequence
  ENSG00000138641_1 (sequence is synthesized)
atatctgacagaagtgtcaaggaagtggcctgtgggggaaaccactctgtgttcctgctggaagatggggaagtttacacatgtggtttgaacaccaaggggcaactgggccatgagagg

SEQ ID NO: 347110 - DNA, 120 bp, Artificial Sequence
  ENSG00000138641_2 (sequence is synthesized)
gaaggaaacaagccagaacaaattggagctctggcagatcagcatatcattcatgtggcatgtggcgagtcccacagtctggccctcagtgaccgaggccagctgttttcttggggtgca

SEQ ID NO: 347111 - DNA, 120 bp, Artificial Sequence
  ENSG00000138641_3 (sequence is synthesized)
gggagtgatggtcagctaggactcatgactactgaggattctgtggcagtgcccaggttaatacaaaagctgaaccagcaaacaatattacaagtttcctgtggcaactggcattgcttg

SEQ ID NO: 347112 - DNA, 120 bp, Artificial Sequence
  ENSG00000138641_4 (sequence is synthesized)
gctcttgcggctgatggccagttcttcacctggggaaagaacagccatgggcagcttggcttagggaaggagttcccctcccaagccagcccacagagggtgaggtccctggaggggatc

SEQ ID NO: 347113 - DNA, 120 bp, Artificial Sequence
  ENSG00000138641_5 (sequence is synthesized)
ccactggctcaggtggctgccggaggggctcacagctttgccctgtctctctcaggagctgtttttggctgggggatgaataatgccgggcagctagggctcagtgatgaaaaagatcga

SEQ ID NO: 347114 - DNA, 120 bp, Artificial Sequence
  ENSG00000138641_6 (sequence is synthesized)
gaatctccatgccatgtaaaactcttacgcacgcaaaaagttgtctatattagttgtggagaagaacacacagcagttctcacaaagagtggaggtgtgtttacctttggcgctggttcc

SEQ ID NO: 347115 - DNA, 120 bp, Artificial Sequence
  ENSG00000138641_7 (sequence is synthesized)
tgtgggcaacttggacacgactccatgaatgatgaggttaaccctagaagagttctagagctgatgggtagtgaagtaactcaaattgcttgtggcagacaacataccctagccttcgtg

SEQ ID NO: 347116 - DNA, 120 bp, Artificial Sequence
  ENSG00000138641_8 (sequence is synthesized)
ccttcttctggactcatctatgcatttggttgtggagcaagaggtcaattaggaactgggcacacttgtaatgttaagtgcccatctcctgtcaagggttactgggctgcccacagtggc

SEQ ID NO: 347117 - DNA, 120 bp, Artificial Sequence
  ENSG00000138641_9 (sequence is synthesized)
cagctttcagcccgagctgatcgctttaaatatcatatcgttaagcagatcttctctggaggagaccagacttttgtactttgctccaaatacgagaattattctcctgctgttgacttc

SEQ ID NO: 347118 - DNA, 120 bp, Artificial Sequence
  ENSG00000138641_10 (sequence is synthesized)
aggactatgaaccaagcacattataccagtttaataaatgatgaaaccatagcagtttggagacaaaaactctcagaacacaacaatgcaaatacaatcaatggtgttgttcagatatta

SEQ ID NO: 347119 - DNA, 120 bp, Artificial Sequence
  ENSG00000138641_11 (sequence is synthesized)
tcttctgcagcctgttggaatggaagttttcttgaaaaaaaaattgatgaacattttaaaacgagtcccaaaatccctgggattgacctgaactcaactagggtgttatttgagaagtta

SEQ ID NO: 347120 - DNA, 120 bp, Artificial Sequence
  ENSG00000138641_12 (sequence is synthesized)
atgaactctcagcactccatgattctagaacagattttgaacagttttgaaagttgtctgattccccagttgtcaagctcaccaccagatgttgaagccatgagaatctatttaatacta

SEQ ID NO: 347121 - DNA, 120 bp, Artificial Sequence
  ENSG00000138641_13 (sequence is synthesized)
cctgagtttcccctactccaggattccaagtattatataacattgactattcccttggctatggccattcttcggctggatacaaaccccagcaaagtactagataactggtggtctcag

SEQ ID NO: 347122 - DNA, 120 bp, Artificial Sequence
  ENSG00000138641_14 (sequence is synthesized)
gtatgcccgaaatatttcatgaagctggtaaacctctataaaggtgcagtcctttatctactgaggggaagaaagacattcttaattcccgtactgtttaacaattatatcacagcagct

SEQ ID NO: 347123 - DNA, 120 bp, Artificial Sequence
  ENSG00000138641_15 (sequence is synthesized)
ctcaaactcttggagaagttatataaggtaaatcttaaagtgaagcatgtggaatatgatacattttacattcctgagatttccaatctcgtggacattcaggaagactacctcatgtgg

SEQ ID NO: 347124 - DNA, 120 bp, Artificial Sequence
  ENSG00000138641_16 (sequence is synthesized)
ttcttgcatcaagcagggatgaaggctagaccatcaataatacaggatactgtaacactttgttcctaccctttcatctttgatgcccaagccaagaccaaaatgttacagacagatgct

SEQ ID NO: 347125 - DNA, 120 bp, Artificial Sequence
  ENSG00000138641_17 (sequence is synthesized)
gaactacagatgcaggtggcagtcaatggagccaacctgcagaatgtcttcatgcttctcaccctggagcctctgctggccagaagccccttcctggtccttcacgttcgcaggaacaac

SEQ ID NO: 347126 - DNA, 120 bp, Artificial Sequence
  ENSG00000138641_18 (sequence is synthesized)
cttgttggagatgccctaagagagctgagcattcattctgatattgatttgaaaaagcctctcaaagtaatctttgatggtgaagaagcagtggatgccggtggtgttacaaaggaattt

SEQ ID NO: 347127 - DNA, 120 bp, Artificial Sequence
  ENSG00000138641_19 (sequence is synthesized)
gacacgtgttttgtagagcacaactggtttcacttgattggtataacctgtggactagctatctacaactccactgtggtcgatctccacttcccattggctctctacaagaagttactc

SEQ ID NO: 347128 - DNA, 120 bp, Artificial Sequence
  ENSG00000138641_20 (sequence is synthesized)
aatgtaaagcctggcttggaagacttaaaggagttgtcacccactgaaggaaggagtctccaagagcttttagattaccccggggaggatgtggaggagactttctgcctcaacttcacg

SEQ ID NO: 347129 - DNA, 120 bp, Artificial Sequence
  ENSG00000138641_21 (sequence is synthesized)
atctgccgagaaagctatggagtgattgaacagaagaagctgatacctgggggagataatgtaactgtgtgcaaggataacaggcaggaatttgtggatgcttatgtgaattatgtcttc

SEQ ID NO: 347130 - DNA, 120 bp, Artificial Sequence
  ENSG00000138641_22 (sequence is synthesized)
caaatctcagttcatgaatggtacacagccttctctagtggcttcctaaaggtgtgtggtggcaaagtacttgagctcttccagccttcagaactgagggctatgatggtggggaacagc

SEQ ID NO: 347131 - DNA, 120 bp, Artificial Sequence
  ENSG00000138641_23 (sequence is synthesized)
aactacaactgggaagaactggaagagactgccatctacaagggagattactcggccacacatcccactgtaaaactattttgggaaacatttcatgagtttccattggaaaagaagaag

SEQ ID NO: 347132 - DNA, 120 bp, Artificial Sequence
  ENSG00000138641_24 (sequence is synthesized)
aagtttctcttgttcctgacaggcagcgatcggattcccatctacggcatggccagtctgcagattgtcatccagtccacagccagcggggaggagtacttgccggtggcccacacttgc

SEQ ID NO: 347133 - DNA, 120 bp, Artificial Sequence
  ENSG00000138641_25 (sequence is synthesized)
tacaaccttcttgacctccccaagtacagcagcaaagagattctgagtgcccggctgacccaggcccttgacaactatgaagggtttagtttggcctgaggcttctcagcttgtccagta

SEQ ID NO: 347134 - DNA, 120 bp, Artificial Sequence
  ENSG00000138641_26 (sequence is synthesized)
tttcccttcgttcctcagtgtccacattgaggcctatacagaaaatcatggggagtgatttctatttttttattgtctaagtgggttgggacttttaaatactgagcctggttgatgtgt

SEQ ID NO: 347135 - DNA, 120 bp, Artificial Sequence
  ENSG00000138641_27 (sequence is synthesized)
ttctgggattgtatagcagtaaacaacctttttgaaaaattagaggttggggatggggtgaaaaattggcccttgtatgggaggtgtttttgtttttgttttaaaccaaactacccagta

SEQ ID NO: 347136 - DNA, 120 bp, Artificial Sequence
  ENSG00000138641_28 (sequence is synthesized)
ttccttgcacttgtgaatgtgttgcactctgctggatgaaatggcagtggatttttaaactttaatttcccaaatgtctctctcagccctgatgttttctcacagtgcttccttgtcctt

SEQ ID NO: 347137 - DNA, 120 bp, Artificial Sequence
  ENSG00000138641_29 (sequence is synthesized)
ctcttaacttctcattcctctataagaatgatttagactgacctgtccttttttatctgcgcatgcgagaacatcaccttcctctgtacacttggaaatgcctctggcttgttgcagccc

SEQ ID NO: 347138 - DNA, 120 bp, Artificial Sequence
  ENSG00000138641_30 (sequence is synthesized)
tcctttaacccaaaggaggaaaggactgcttcagaaactcccaattccaaaaagctgagtctgggtccattattttggcagaactcctaagaatttatgggagcctatataaacatatct

SEQ ID NO: 347139 - DNA, 120 bp, Artificial Sequence
  ENSG00000138641_31 (sequence is synthesized)
tgcttttaaaaagttcttgagggaatagcaactttcccatggctgtgcctatttcctagaccttttaaaagatgtgcagagcagcttagcattcgttgcagctgagcctaattttttctt

SEQ ID NO: 347140 - DNA, 120 bp, Artificial Sequence
  ENSG00000138641_32 (sequence is synthesized)
gctcatccttgtccctttgacaataaggttaattgatagacccaccacctcttgcactctcgcttttggagcaagttgcattaactattttgagtctctatattgtccaagaaaagtaga

SEQ ID NO: 347141 - DNA, 120 bp, Artificial Sequence
  ENSG00000138641_33 (sequence is synthesized)
aataataaatttactttccctttttctatcaccttatgtcctctaccattttctccttcctcccttcccttattttctccttttcgtaccctgtgtcctccctgattttcctttcgtttc

SEQ ID NO: 347142 - DNA, 120 bp, Artificial Sequence
  ENSG00000138641_34 (sequence is synthesized)
ttctttattttatcccattctctgttacttgactcagtgctcccttcctctcctctccttctagtggatgcatgcagcctttttttcaatttttatttaaattgcaaaatttttactcag

SEQ ID NO: 347143 - DNA, 120 bp, Artificial Sequence
  ENSG00000138641_35 (sequence is synthesized)
attttttttcctcttccctaattgctaagatttaaggacgttctttattatgaaactttatcacattcgaaatgtttgtttacagtgggattttaggggggattgtgtttaaatcaaata

SEQ ID NO: 347144 - DNA, 120 bp, Artificial Sequence
  ENSG00000138641_36 (sequence is synthesized)
tatgtattttaaaaataatgacatgctcaaccttcctcatcatggagtaagaaaattctacatgattaaagaatccatgtaagtctaattttaaattcctagtaactagagaaaagactt

SEQ ID NO: 347145 - DNA, 120 bp, Artificial Sequence
  ENSG00000138641_37 (sequence is synthesized)
atttatataaaatgaagtatttatgaactgtgataaagcatcaaatcttgatgaaggattgtagatttttgctttttctttttgtttttaaaacttattccaattgctaaattggtagtt

SEQ ID NO: 347146 - DNA, 120 bp, Artificial Sequence
  ENSG00000138641_38 (sequence is synthesized)
tggtagtttttcagtctttataaatacaggattaaaaatatatatacagttatatgaaatgtttattttctatgtgtgtgcatatagttcaatattatgcaataaatttggtgttttaac

SEQ ID NO: 347147 - DNA, 120 bp, Artificial Sequence
  ENSG00000138641_39 (sequence is synthesized)
cttattattgtgacgccgaaaacggagaaaccccgggtccggcgagaggggctgtgacagtcggagtcccaagctgcggttcggctgctgccgagaactgcaaggtgtggaatatttctg

SEQ ID NO: 347148 - DNA, 120 bp, Artificial Sequence
  ENSG00000138641_40 (sequence is synthesized)
agccaggggagaagatttcttacttctgtgacacaattaaaatggataggtacccactctgaagtgtattctgcgacagtagaaaaggggatcaaggagaaacttcaattaatgaaaaat

SEQ ID NO: 347149 - DNA, 120 bp, Artificial Sequence
  ENSG00000138641_41 (sequence is synthesized)
atgctttcggaattttttttttgacagatcgctttaaatatcatatcgttaagcagatcttctctggaggagaccagacttttgtactttgctccaaatacgagaattgatgaacatttt

SEQ ID NO: 347150 - DNA, 120 bp, Artificial Sequence
  ENSG00000138641_42 (sequence is synthesized)
gtgtgtacgggtgtgtgtgtgtgtgtacgccgacacgtcggtgcggaccgacgcgggggtgtcaggagctgggacggccgggggcagaactgcaaggtgtggaatatttctggcttctag

SEQ ID NO: 347151 - DNA, 120 bp, Artificial Sequence
  ENSG00000138641_43 (sequence is synthesized)
ctagtccaatgccaagtgtgtgacctgtgttttggccctacatttatttaaagcctgaatttggggagtatctgcaaagcactgaaggttttggacattgtcttttcctgctgttgaaag

SEQ ID NO: 347152 - DNA, 120 bp, Artificial Sequence
  ENSG00000138641_44 (sequence is synthesized)
ccagggcaaccagaccgagaggagcatgtgtaacctgaaacaggtgagcctatggagacagtacctaatgcgactgtgcacggaatatgtgtatgcagcatgagctccagggaataaaac

SEQ ID NO: 347153 - DNA, 120 bp, Artificial Sequence
  ENSG00000138641_45 (sequence is synthesized)
aggaccgttgagtccacactgatttttgcaggctccggacactttgctgagataaaaaccttccattcctcagtgatttggagagtgtctttcatgggagtagcacctgaaatgttttta

SEQ ID NO: 347154 - DNA, 120 bp, Artificial Sequence
  ENSG00000138641_46 (sequence is synthesized)
actttgaggtcttttggagggaatgaagataaggtattttttaacatcaattaataatttctgtacttactatgcatgaagctgtagagttgagatcctagagaataaataaagcaggaa

SEQ ID NO: 347155 - DNA, 120 bp, Artificial Sequence
  ENSG00000138641_47 (sequence is synthesized)
atactgttgtgttaggccgttcttgcattgctgtaaagagcacctgaaacagggtgatttatgaagaaaagagttttaattggctcacagttctgcaggctctacagggagcatgatgca

SEQ ID NO: 347156 - DNA, 120 bp, Artificial Sequence
  ENSG00000138641_48 (sequence is synthesized)
gccatctgcttggcttctggggaggcctcaggaatcttacagtcatggcagaaggcaaagaaggagcagacacttcacatggcagaagcaggagcaagaggaagagtggagaggaggtgc

SEQ ID NO: 347157 - DNA, 80 bp, Artificial Sequence
  ENSG00000138641_49 (sequence is synthesized)
ggcagaagcaggagcaagaggaagagtggagaggaggtgccatactttttacaccaccagatctcatgtgaactcagagc

SEQ ID NO: 347158 - DNA, 120 bp, Artificial Sequence
  ENSG00000138641_50 (sequence is synthesized)
gcctcacctccaacattgggattactgcaattcaacatgagttttgaccagaacatacattcaaactataccagttattttgtttccacagaccttggtggtggtgtatacattttattg

SEQ ID NO: 347159 - DNA, 120 bp, Artificial Sequence
  ENSG00000138641_51 (sequence is synthesized)
ttgttgctaataatgacagttcgcatgtattgaatgcttaatgacgtttcattactatgcaaagcactcaaaataatctaagaactagttagtggttattatccccatgttagagataag

SEQ ID NO: 347160 - DNA, 120 bp, Artificial Sequence
  ENSG00000138641_52 (sequence is synthesized)
ggaacaaagtcttaaggaggtcaagtaatttgcccaagatcacatagattctggaggcaggatttaaacccaggtcattctaaatcatgtgtactatgttacctctactttgctgttggc

SEQ ID NO: 347161 - DNA, 120 bp, Artificial Sequence
  ENSG00000138641_53 (sequence is synthesized)
attttggtatataacatgatgtgatttctttttaagccattttttttcttcccttaaaaaatagttaaatagcagtcttggtttcattggaaatcaaagtcaggcagtcattaatattga

SEQ ID NO: 347162 - DNA, 120 bp, Artificial Sequence
  ENSG00000138641_54 (sequence is synthesized)
atgactgcttcaccttgaaataataaatctgaggctgaaatggagctagagaatcattaaaaggaagtgtaacttattaattttgattttgaagtcgataaagtgacacacttatggctt

SEQ ID NO: 347163 - DNA, 120 bp, Artificial Sequence
  ENSG00000138641_55 (sequence is synthesized)
gatcaggaatttgtttgaaacagtaaccatcataagttttagtactggattataagaaactcaaggacacagacaaactcttttcctttttgtaaacctagcatatagcacaggacctgg

SEQ ID NO: 347164 - DNA, 120 bp, Artificial Sequence
  ENSG00000138641_56 (sequence is synthesized)
catgaacttgtcactcagtagacatttttggaatggatatatgagcatctgaaatgtagtgcaacttaaaatataaataaacaagattttgtctgggtgatgttcccagaagcaaaagaa

SEQ ID NO: 347165 - DNA, 120 bp, Artificial Sequence
  ENSG00000138642_0 (sequence is synthesized)
ggagcctgtcgcagcgggaccgacggaatccggagcaggcgacagggcgcagaagcgggatgtacttctgttggggcgccgactccagggagctgcagcgccggaggacggcgggcagcc

SEQ ID NO: 347166 - DNA, 120 bp, Artificial Sequence
  ENSG00000138642_1 (sequence is synthesized)
ccggggctgagctactgcaggcggccagcggggagcgccactctctgctgctgctgaccaaccacagggtcctctcgtgcggagacaacagcaggggtcagctgggccgcaggggcgcgc

SEQ ID NO: 347167 - DNA, 120 bp, Artificial Sequence
  ENSG00000138642_2 (sequence is synthesized)
agcgcggggagctgccagaaccaattcaggcattggaaaccctaattgttgatctcgtgagctgcgggaaggagcactccctggctgtgtgccacaaaggaagggtcttcgcatggggag

SEQ ID NO: 347168 - DNA, 120 bp, Artificial Sequence
  ENSG00000138642_3 (sequence is synthesized)
ctggttctgaagggcagctggggattggagaattcaaggaaataagtttcacacctaagaaaataatgactctgaatgatataaaaataatacaagtttcctgtggacactaccactccc

SEQ ID NO: 347169 - DNA, 120 bp, Artificial Sequence
  ENSG00000138642_4 (sequence is synthesized)
tggcattatcaaaagatagccaagtgttttcgtggggaaagaacagccatgggcagctgggcttggggaaggagttcccctcccaagccagcccgcagagggtgaggtccctggagggga

SEQ ID NO: 347170 - DNA, 120 bp, Artificial Sequence
  ENSG00000138642_5 (sequence is synthesized)
tcccactggctcaggtggctgccggaggggctcacagctttgccctgtctctctgtgggacttcgtttggctggggaagtaacagtgccgggcagctggccctcagtgggcgtaatgtcc

SEQ ID NO: 347171 - DNA, 120 bp, Artificial Sequence
  ENSG00000138642_6 (sequence is synthesized)
cagtgcaaagcaacaagcctctctcagtcggtgcactgaagaatctaggtgtggtttatatcagctgtggtgatgcacacactgcggtgcttacccaggacgggaaagtgttcacatttg

SEQ ID NO: 347172 - DNA, 120 bp, Artificial Sequence
  ENSG00000138642_7 (sequence is synthesized)
gagacaatcgctctggacagctgggatacagccccactcctgagaagagaggtccacaacttgtggaaagaattgatggcctagtttcgcagatagattgtggaagttatcacaccctgg

SEQ ID NO: 347173 - DNA, 120 bp, Artificial Sequence
  ENSG00000138642_8 (sequence is synthesized)
catatgtgcacaccactggtcaggtggtatcttttggtcatggaccaagtgacacaagcaagccaactcatccggaggccctgacagagaactttgacattagctgcctgatttctgctg

SEQ ID NO: 347174 - DNA, 120 bp, Artificial Sequence
  ENSG00000138642_9 (sequence is synthesized)
aagacttcgtggatgttcaagtcaaacacatttttgctggaacatatgccaactttgtgacaactcatcaggatactagttccacacgtgctcccgggaaaaccctgccagaaataagcc

SEQ ID NO: 347175 - DNA, 120 bp, Artificial Sequence
  ENSG00000138642_10 (sequence is synthesized)
gaattagccagtccatggcagaaaaatggatagcagtgaaaagaagaagtactgaacatgaaatggctaaaagtgaaattagaatgatattttcatctcctgcttgtctgactgcaagtt

SEQ ID NO: 347176 - DNA, 120 bp, Artificial Sequence
  ENSG00000138642_11 (sequence is synthesized)
ttttaaagaaaagaggaactggagaaacgacttccattgatgtggacttagaaatggcaagagataccttcaagaagttaacaaaaaaggaatggatttcttccatgataactacgtgtc

SEQ ID NO: 347177 - DNA, 120 bp, Artificial Sequence
  ENSG00000138642_12 (sequence is synthesized)
tcgaggatgatctgctcagagctcttccatgccattctccacaccaagaagctttatcagttttcctcctgctcccagaatgtcctgtgatgcatgattctaagaactggaagaacctgg

SEQ ID NO: 347178 - DNA, 120 bp, Artificial Sequence
  ENSG00000138642_13 (sequence is synthesized)
tggttccatttgcaaaggctgtgtgtgaaatgagtaaacaatctttgcaagtcctaaagaagtgttgggcatttttgcaagaatcttctctgaatccgctgatccagatgcttaaagcag

SEQ ID NO: 347179 - DNA, 120 bp, Artificial Sequence
  ENSG00000138642_14 (sequence is synthesized)
ccatcatctctcagctgcttcatcagactaaaaccgaacaggatcactgtaatgttaaagctcttttaggaatgatgaaagaactgcataaggtaaacaaagctaactgtcgactaccag

SEQ ID NO: 347180 - DNA, 120 bp, Artificial Sequence
  ENSG00000138642_15 (sequence is synthesized)
agacagctctttcgggataaccacctgatacctgcagaaacccccagtcctgttattttcagtgattttccatttatctttaattcgctatccaaaattaaattattgcaagctgattca

SEQ ID NO: 347181 - DNA, 120 bp, Artificial Sequence
  ENSG00000138642_16 (sequence is synthesized)
catataaagatgcagatgtcagaaaagaaagcatacatgcttatgcatgaaacaattctgcaaaaaaaggatgaatttcctccatcacccagatttatacttagagtcagacgaagtcgc

SEQ ID NO: 347182 - DNA, 120 bp, Artificial Sequence
  ENSG00000138642_17 (sequence is synthesized)
ctggttaaagatgctctgcgtcaattaagtcaagctgaagctactgacttctgcaaagtattagtggttgaatttattaatgaaatttgtcctgagtctggaggggttagttcagagttc

SEQ ID NO: 347183 - DNA, 120 bp, Artificial Sequence
  ENSG00000138642_18 (sequence is synthesized)
ttccactgtatgtttgaagagatgaccaagccagaatatggaatgttcatgtatcctgaaatgggttcctgcatgtggtttcctgccaagcctaaacctgagaagaaaagatatttcctc

SEQ ID NO: 347184 - DNA, 120 bp, Artificial Sequence
  ENSG00000138642_19 (sequence is synthesized)
tttggaatgctgtgtggactctccttattcaatttaaatgttgctaaccttcctttcccactggctctgtataaaaaacttctggaccaaaagccatcattggaagatttaaaagaactc

SEQ ID NO: 347185 - DNA, 120 bp, Artificial Sequence
  ENSG00000138642_20 (sequence is synthesized)
agtcctcggttggggaagagtttgcaagaagttctagatgatgctgctgatgacattggagatgcgctctgcatacgcttttctatacactgggaccaaaatgatgttgacttaattcca

SEQ ID NO: 347186 - DNA, 120 bp, Artificial Sequence
  ENSG00000138642_21 (sequence is synthesized)
aatgggatctccatacctgtggaccaaaccaacaagagagactatgtttctaagtatattgattacattttcaacgtctctgtaaaagcagtttatgaggaatttcagagaggattttat

SEQ ID NO: 347187 - DNA, 120 bp, Artificial Sequence
  ENSG00000138642_22 (sequence is synthesized)
agagtctgtgagaaggagatacttagacatttctaccctgaagaactaatgacagcaatcattggaaatactgattatgactggaaacagtttgaacagaattcaaagtatgagcaagga

SEQ ID NO: 347188 - DNA, 120 bp, Artificial Sequence
  ENSG00000138642_23 (sequence is synthesized)
taccaaaaatcacatcctactatacagttgttttggaaggctttccacaaactaaccttggatgaaaagaaaaaattcctctttttccttacaggacgtgataggctgcatgcaagaggc

SEQ ID NO: 347189 - DNA, 120 bp, Artificial Sequence
  ENSG00000138642_24 (sequence is synthesized)
atacagaaaatggaaatagtatttcgctgtcctgaaactttcagtgaaagagatcacccaacatcaataacttgtcataatattctctccctccctaagtattctacaatggaaagaatg

SEQ ID NO: 347190 - DNA, 120 bp, Artificial Sequence
  ENSG00000138642_25 (sequence is synthesized)
gaggaagcacttcaagtagccatcaacaacaacagaggatttgtctcacccatgctcacacagtcataatcacctctgagagactcagggtgggctttctcacacttggatccttctgtt

SEQ ID NO: 347191 - DNA, 120 bp, Artificial Sequence
  ENSG00000138642_26 (sequence is synthesized)
cttccttacacctaaataatacaagagattaatgaatagtggttagaagtagttgagggagagattgggggaatggggagatgatgatgatggtcaaagggtgcaaaatctcacacaaga

SEQ ID NO: 347192 - DNA, 120 bp, Artificial Sequence
  ENSG00000138642_27 (sequence is synthesized)
ctgaggcaggagaatagggtacagagatagggatctaaggatgacttggacacactccctggcactgaagagtctgaacactggcctgtgattggtccattccaggaccttcatttgcat

SEQ ID NO: 347193 - DNA, 120 bp, Artificial Sequence
  ENSG00000138642_28 (sequence is synthesized)
aaggtatcaaaccacatcagcctctgattggccatgggccagacctgcactctggccaatgattggttcattccaggacattcatttgcataaggagtcaaaccacaccagtcttggatt

SEQ ID NO: 347194 - DNA, 120 bp, Artificial Sequence
  ENSG00000138642_29 (sequence is synthesized)
ggctgtgagccaattcacctcagtctctaattggctgtgagtcagtctttcatttacatagggtgtaaccatcaagaaacctctacagggtacttaagccccagaagattttgctaccag

SEQ ID NO: 347195 - DNA, 120 bp, Artificial Sequence
  ENSG00000138642_30 (sequence is synthesized)
ggctcttgagccacttgctctagcccactcccaccctgtggaatgtactttcacttttgctgcttcactgccttgtgctccaataaatccactccttcaccacccattcatgcatgtcgc

SEQ ID NO: 347196 - DNA, 120 bp, Artificial Sequence
  ENSG00000138642_31 (sequence is synthesized)
agcacttgaagttcaggcagcgagagttgacatggggccagggctgcgcccctggggcgggttgaagacagggtgagtctcttgatattcaggaaatcatcgcgcacccagtcaccagcg

SEQ ID NO: 347197 - DNA, 120 bp, Artificial Sequence
  ENSG00000138642_32 (sequence is synthesized)
actttcttttagacttcgtggatgttcaagtcaaacacatttttgctggaacatatgccaactttgtgacaactcatcagattagacccccccaccaccaccatttcagatttatttttt

SEQ ID NO: 347198 - DNA, 120 bp, Artificial Sequence
  ENSG00000138642_33 (sequence is synthesized)
ctttatgggtaagtgtgtttgttgaatttgcatcatgtaaatgcacatacacatgtaacttgtgtcaacagcagctgtttccatcttcaggagggaactgaattttccctgtccaggact

SEQ ID NO: 347199 - DNA, 120 bp, Artificial Sequence
  ENSG00000138642_34 (sequence is synthesized)
ttctgacatgtcctggagggaatttcccagtggcacctccttcagtaggaggattgccatgtgtgtgagtgtgcaggggtgtgtgtagcaggggtggcatgtagcgtctcagctgtcctg

SEQ ID NO: 347200 - DNA, 120 bp, Artificial Sequence
  ENSG00000138642_35 (sequence is synthesized)
tgttgcaagggtcacatcaccgagtccccaactcaagtttattgcttaataaaattaatgatgatagataacagtcatgactaattttaactgcagtcaccaagtgtcaggcagcaatcg

SEQ ID NO: 347201 - DNA, 120 bp, Artificial Sequence
  ENSG00000138642_36 (sequence is synthesized)
aagttcttcaaatggatcaagatgtttaatgctcatatcaactctcgttgattttatttttcacattgacagatgaaaaaacggagtctcagagaggtgaatttatgcaaagttgcactg

SEQ ID NO: 347202 - DNA, 120 bp, Artificial Sequence
  ENSG00000138642_37 (sequence is synthesized)
ttagtaagtggtagagctggattcaaatccaggcagtccaacccagtagcttacaccattatccaccatgctatagtgccttcctaattgttaacaggagggattttattattacatttc

SEQ ID NO: 347203 - DNA, 120 bp, Artificial Sequence
  ENSG00000138642_38 (sequence is synthesized)
tgggtgagttctgaaatatgtttatggaaacaaaggccttcatagttatttttctaatttgtactttttcctattatgaggaatgttttaaaattgatgtttaaacttgatgtttaaaac

SEQ ID NO: 347204 - DNA, 120 bp, Artificial Sequence
  ENSG00000138642_39 (sequence is synthesized)
attcctgacgacaggaaaaagtacaaattagaaacataatagactctgtctgtagtccctggcacagaatgtggtcagaggcaaaggtttctgtgctgttgggatagttaggagactata

SEQ ID NO: 347205 - DNA, 120 bp, Artificial Sequence
  ENSG00000138642_40 (sequence is synthesized)
ctttggttgctctatcatagccattcaatcagccactcaacaaaaattgagaccctttttatatatcaggctctgctcttggtgcctgggacaaaagtgaatagtacagacaaagttacc

SEQ ID NO: 347206 - DNA, 120 bp, Artificial Sequence
  ENSG00000138642_41 (sequence is synthesized)
gacaaagttaccctcattcatagcatttggactccacaggcagggccggaccataaatatgtaaatgcaaaataaataagattgtattagaggcccggcatggtggctcacgcctgtaat

SEQ ID NO: 347207 - DNA, 74 bp, Artificial Sequence
  ENSG00000138642_42 (sequence is synthesized)
caaaccccatctctagtaaaaacacaaaaactagctgggagtggtggtacgagcctgtaatcccagctacttgg

SEQ ID NO: 347208 - DNA, 69 bp, Artificial Sequence
  ENSG00000138642_43 (sequence is synthesized)
tggaggttgcagtgggctgagatcgtgccatgcactccagcctggcgcacagggcaacactttgtctcc

SEQ ID NO: 347209 - DNA, 120 bp, Artificial Sequence
  ENSG00000138642_44 (sequence is synthesized)
aggctgtgtgtgaaatgagtaaacaatctttgcaagtcctaataaacaaagctaactgtcgactaccagaaaatactttcaacataaatgaactctccaacttattaaacttttatatag

SEQ ID NO: 347210 - DNA, 120 bp, Artificial Sequence
  ENSG00000138642_45 (sequence is synthesized)
attatgtatcttttaaaaaggtacagtcttgtttagaatgaagccattgaagtggcctcattgtctggggtgacacccaaggttctttgtctcacagccatggagatcaaggacatggac

SEQ ID NO: 347211 - DNA, 120 bp, Artificial Sequence
  ENSG00000138642_46 (sequence is synthesized)
acacacaaagggtgaggtatagagcagaaacttaataggcgaaaagagaatagctctctgctacagagaggggtcccagaaaaatgagttgctgatctgtggtgaaatgcagggtttttt

SEQ ID NO: 347212 - DNA, 120 bp, Artificial Sequence
  ENSG00000138642_47 (sequence is synthesized)
atagatgagctagtgaggaggtggtgtctgatctacatagggcatgaaaaacgagttaggaccaggtgtaccatccgcatagggcacgaatctctggcagcccctaccccaatctttgat

SEQ ID NO: 347213 - DNA, 120 bp, Artificial Sequence
  ENSG00000138646_0 (sequence is synthesized)
agtagctgaggctgcggttccccgacgccacgcagctgcgcgcagctggttcccgctctgcagcgcaacgcctgaggcagtgggcgcgctcagtcccgggaccaggcgttctctcctctc

SEQ ID NO: 347214 - DNA, 120 bp, Artificial Sequence
  ENSG00000138646_1 (sequence is synthesized)
gcctctgggcctgggaccccgcaaagcggcgatggagcggaggtcgcggaggaagtcgcggcgcaacgggcgctcgaccgcgggcaaggccgccgcgacccagcccgcgaagtctccggg

SEQ ID NO: 347215 - DNA, 120 bp, Artificial Sequence
  ENSG00000138646_2 (sequence is synthesized)
cgcacagctctggctctttcccagcgccgcgggcctccaccgcgcgctgctccggagggtggaggtgacgcgccaactctgctgctcgccggggcgcctcgcggtcttggaacgcggcgg

SEQ ID NO: 347216 - DNA, 120 bp, Artificial Sequence
  ENSG00000138646_3 (sequence is synthesized)
ggcgggcgtccaggttcaccagctgctcgccgggagcggcggcgcccggacgccgaaatgcattaaattaggaaaaaacatgaagatacattccgtggaccaaggagcagagcacatgct

SEQ ID NO: 347217 - DNA, 120 bp, Artificial Sequence
  ENSG00000138646_4 (sequence is synthesized)
gattctctcatcagatggaaaaccatttgagtatgacaactatagcatgaaacatctaaggtttgaaagcattttacaagaaaaaaaaataattcagatcacatgtggagattaccattc

SEQ ID NO: 347218 - DNA, 120 bp, Artificial Sequence
  ENSG00000138646_5 (sequence is synthesized)
tcttgcactctcaaaaggtggtgagctttttgcctggggacagaacctgcatgggcagcttggagttggaaggaaatttccctcaaccaccacaccacagattgtggagcacctcgcagg

SEQ ID NO: 347219 - DNA, 120 bp, Artificial Sequence
  ENSG00000138646_6 (sequence is synthesized)
agtacccttggctcagatttctgccggagaagcccacagcatggccttatccatgtctggcaacatttattcatggggaaaaaatgaatgtggacaactaggcctgggccacactgagag

SEQ ID NO: 347220 - DNA, 120 bp, Artificial Sequence
  ENSG00000138646_7 (sequence is synthesized)
taaagatgatccatcccttattgaaggactagacaatcagaaagttgaatttgtcgcttgtggtggctctcacagtgccctactcacacaggatgggctgctgtttactttcggtgctgg

SEQ ID NO: 347221 - DNA, 120 bp, Artificial Sequence
  ENSG00000138646_8 (sequence is synthesized)
aaaacatgggcaacttggtcataattcaacacagaatgagctaagaccctgtttggtggctgagcttgttgggtatagagtgactcagatagcatgtggaaggtggcacacacttgccta

SEQ ID NO: 347222 - DNA, 120 bp, Artificial Sequence
  ENSG00000138646_9 (sequence is synthesized)
tgtttctgatttgggaaaggtcttttcctttggttctggaaaagatggacaactgggaaatggtggaacacgtgaccagctgatgccgcttccagtgaaagtatcatcaagtgaagaact

SEQ ID NO: 347223 - DNA, 120 bp, Artificial Sequence
  ENSG00000138646_10 (sequence is synthesized)
caaacttgaaagccatacctcagaaaaggagttaataatgattgctggagggaatcaaagcattttgctctggataaagaaagagaattcatatgttaatctgaagaggacaattcctac

SEQ ID NO: 347224 - DNA, 120 bp, Artificial Sequence
  ENSG00000138646_11 (sequence is synthesized)
tctgaatgaagggactgtaaagagatggattgctgatgtggagactaaacggtggcagagcacaaaaagggaaatccaagagatattttcatctcctgcttgtctaactggaagtttttt

SEQ ID NO: 347225 - DNA, 120 bp, Artificial Sequence
  ENSG00000138646_12 (sequence is synthesized)
aaggaaaagaagaactacagaaatgatgcctgtttatttggacttaaataaagcaagaaacatcttcaaggagttaacccaaaaggactggattactaacatgataaccacctgcctcaa

SEQ ID NO: 347226 - DNA, 120 bp, Artificial Sequence
  ENSG00000138646_13 (sequence is synthesized)
agataatctgctcaaaagacttccatttcattctccaccccaagaagctttagaaattttcttccttctcccagaatgtcctatgatgcatatttccaacaactgggagagccttgtggt

SEQ ID NO: 347227 - DNA, 120 bp, Artificial Sequence
  ENSG00000138646_14 (sequence is synthesized)
gaccagtcttcactggttctggaagagtattgggcaactctgcaagaatccactttcagcaaactggtccagatgtttaaaacagccgtcatatgccagttggattactgggatgaaagt

SEQ ID NO: 347228 - DNA, 120 bp, Artificial Sequence
  ENSG00000138646_15 (sequence is synthesized)
gctgaggagaatggtaatgttcaagctctcctagaaatgttgaagaagctgcacagggtaaaccaggtgaaatgtcaactacctgaaagtattttccaagtagacgaactcttgcaccgt

SEQ ID NO: 347229 - DNA, 120 bp, Artificial Sequence
  ENSG00000138646_16 (sequence is synthesized)
ctcaatttttttgtagaagtatgcagaaggtacttgtggaaaatgactgtggacgcttcagaaaatgtacaatgctgcgtcatattcagtcactttccatttatctttaataatctgtcg

SEQ ID NO: 347230 - DNA, 120 bp, Artificial Sequence
  ENSG00000138646_17 (sequence is synthesized)
aaaattaaactactacatacagacacacttttaaaaatagagagtaaaaaacataaagcttatcttaggtcggcagcaattgaggaagaaagagagtctgaattcgctttgaggcccacg

SEQ ID NO: 347231 - DNA, 120 bp, Artificial Sequence
  ENSG00000138646_18 (sequence is synthesized)
tttgatctaacagtcagaaggaatcacttgattgaggatgttttgaatcagctaagtcaatttgagaatgaagacctgaggaaagagttatgggtttcatttagtggagaaattgggtat

SEQ ID NO: 347232 - DNA, 120 bp, Artificial Sequence
  ENSG00000138646_19 (sequence is synthesized)
gacctcggaggagtcaagaaagagttcttctactgtctgtttgcagagatgatccagccggaatatgggatgttcatgtatcctgaaggggcttcctgcatgtggtttcctgtcaagcct

SEQ ID NO: 347233 - DNA, 120 bp, Artificial Sequence
  ENSG00000138646_20 (sequence is synthesized)
aaatttgagaagaaaagatacttcttttttggggttctatgtggactttccctgttcaattgcaatgttgccaaccttcctttcccactggcactgtttaagaaacttttggaccaaatg

SEQ ID NO: 347234 - DNA, 120 bp, Artificial Sequence
  ENSG00000138646_21 (sequence is synthesized)
ccatcattggaagacttgaaagaactcagtcctgatttgggaaagaatttgcaaacacttctggatgatgaaggtgataactttgaggaagtattttacatccattttaatgtgcactgg

SEQ ID NO: 347235 - DNA, 120 bp, Artificial Sequence
  ENSG00000138646_22 (sequence is synthesized)
gacagaaacgacacaaacttaattcctaatggaagtagcataactgtcaaccagactaacaagagagactatgtttctaagtatatcaattacattttcaacgactctgtaaaggcggtt

SEQ ID NO: 347236 - DNA, 120 bp, Artificial Sequence
  ENSG00000138646_23 (sequence is synthesized)
tatgaagaatttcggagaggattttataaaatgtgcgacgaagacattatcaaattattccaccccgaagaactgaaggatgtgattgttggaaatacagattatgattggaaaacattt

SEQ ID NO: 347237 - DNA, 120 bp, Artificial Sequence
  ENSG00000138646_24 (sequence is synthesized)
gaaaagaatgcacgttatgaaccaggatataacagttcacatcccaccatagtgatgttttggaaggctttccacaaattgactctggaagaaaagaaaaaattccttgtatttcttaca

SEQ ID NO: 347238 - DNA, 120 bp, Artificial Sequence
  ENSG00000138646_25 (sequence is synthesized)
ggaactgacagactacaaatgaaagatttaaataatatgaaaataacattttgctgtcctgaaagttggaatgaaagagaccctataagagcactgacatgtttcagtgtcctcttcctc

SEQ ID NO: 347239 - DNA, 120 bp, Artificial Sequence
  ENSG00000138646_26 (sequence is synthesized)
cctaaatattctacaatggaaacagttgaagaagcgcttcaagaagccatcaacaacaacagaggatttggctgaccagcttgcttgtccaacagccttattttgttgttgttatcgttg

SEQ ID NO: 347240 - DNA, 85 bp, Artificial Sequence
  ENSG00000138646_27 (sequence is synthesized)
atttctgtctctagtgataagcaggaaagagggatgaagaagagggtttactggccggttagaacccgtgactgtattctctccc

SEQ ID NO: 347241 - DNA, 120 bp, Artificial Sequence
  ENSG00000138646_28 (sequence is synthesized)
gtttactggccggttagaacccgtgactgtattctctcccttggatacccctatgcctacatcatattccttacctcttttgggaaatatttttcaaaaataaaataaccgaaaaattaa

SEQ ID NO: 347242 - DNA, 120 bp, Artificial Sequence
  ENSG00000138646_29 (sequence is synthesized)
gagaaagtagtcactgctccaactttgggagtcgttctcagtgatgggattttaccttggccttcagttgcacttctcccacattctcatcgaagtgggggaaatagttgcccgcgttct

SEQ ID NO: 347243 - DNA, 120 bp, Artificial Sequence
  ENSG00000138646_30 (sequence is synthesized)
ttaaaattttgcccatctgtggagtgaagaaattggtatcttgctgcgagtttattttgcgtttaactactggacgtttgcgttcctttttcgaatgcattaaattaggaaaaaacatga

SEQ ID NO: 347244 - DNA, 88 bp, Artificial Sequence
  ENSG00000138646_31 (sequence is synthesized)
gttactgctatctttaggttttctttttgcaggtgctccaaacatgcttcctttatttttatttttatttttttggaaccagtggtgc

SEQ ID NO: 347245 - DNA, 120 bp, Artificial Sequence
  ENSG00000138646_32 (sequence is synthesized)
gatctcggcttactgcatgcttcgtttattaatttagtttttcttaatgtagtttttattatttccctattttattttactggttgatatggggatactactttctgttctactctccat

SEQ ID NO: 347246 - DNA, 120 bp, Artificial Sequence
  ENSG00000138646_33 (sequence is synthesized)
ttttttctctctgggtcgcactgtagttccttctttctttctctctccttccctcctcccctccttcctccctctagcctcaccccattttttaatctctctctgtgttcatatccctct

SEQ ID NO: 347247 - DNA, 120 bp, Artificial Sequence
  ENSG00000138646_34 (sequence is synthesized)
tctctttccctctcaatctttgatctctcacccttcctcctttcagctcccgcacttgctctgtttgccacaactagcattttctatttcagctgcaagttttctcattcgctcctttct

SEQ ID NO: 347248 - DNA, 120 bp, Artificial Sequence
  ENSG00000138646_35 (sequence is synthesized)
ttcaaggaaagatggaaagttcagttctcttaactttggcagaaccacagccccactgggggtccgaggtgaaatggttccctaattatgtacctttattgggaccctacaacacttagt

SEQ ID NO: 347249 - DNA, 120 bp, Artificial Sequence
  ENSG00000138646_36 (sequence is synthesized)
gctgcctgtatcaacaacccagaaactactcagtggactatttcatcaacatttgttagagctcattttcttttgttttctaaaatcctcctgtgggggccagtttaactttctttctgt

SEQ ID NO: 347250 - DNA, 120 bp, Artificial Sequence
  ENSG00000138646_37 (sequence is synthesized)
aagattctgagtcattgctactaaatacaaccatggaaagattaccaaaaatagaagcccttttgtgcgtctgtgaagggaagggattggatcagttcatcattaagggctccttctgtt

SEQ ID NO: 347251 - DNA, 88 bp, Artificial Sequence
  ENSG00000138646_38 (sequence is synthesized)
actgctatctttaggttttctttttgcaggtgctccaaacatgcttcctttatttttatttttatttttttggaaccagtgataacca

SEQ ID NO: 347252 - DNA, 120 bp, Artificial Sequence
  ENSG00000138650_0 (sequence is synthesized)
agaaactgccagcccagaccacaggctcagaggctgaagcaggaggaaggaaggactggaaggaaaaagagacaggttagagggaaagaggcttgggaagaaaacagcagaaaagaaact

SEQ ID NO: 347253 - DNA, 120 bp, Artificial Sequence
  ENSG00000138650_1 (sequence is synthesized)
gctcattacacttacagagaggcaagtaacggtggagatgaggacagagggaaccaagactctgaaagacaaaaaatacaaatagagcgaaagaggaaaaaaatgtcaagaagaacatcc

SEQ ID NO: 347254 - DNA, 120 bp, Artificial Sequence
  ENSG00000138650_2 (sequence is synthesized)
atccggagaaatgaagagaatgaaagttttaagctgcagagccgttctgtgcttttccggcacaaaattatatcgctgattttaagcccttttgcatttgccagccgttgacattaagag

SEQ ID NO: 347255 - DNA, 120 bp, Artificial Sequence
  ENSG00000138650_3 (sequence is synthesized)
gcatgtttaacggtgccaacagcatctccttttccttctcctcttcctcttcttcttcttcctcctcctcctcctctttttcctcctcctcgttctcctcccatcagcaagaagacaaac

SEQ ID NO: 347256 - DNA, 120 bp, Artificial Sequence
  ENSG00000138650_4 (sequence is synthesized)
cgaggacagtcttgaaatatcgaaatttcctctttgggatttgccagcgccaagactgtcggaataaaggacgctgactattgtattattgttattttattaattagtcagtggaaagat

SEQ ID NO: 347257 - DNA, 120 bp, Artificial Sequence
  ENSG00000138650_5 (sequence is synthesized)
tacagatgaggaaaggggacgcctgtcacccttcctgtgctaagatttaaaaaaaaatgaggctggattgcgggaagctctaaaatgaagcaaaaggagtaagatttttaaagacagaaa

SEQ ID NO: 347258 - DNA, 120 bp, Artificial Sequence
  ENSG00000138650_6 (sequence is synthesized)
gccacaggagcccccacgtagcgcacttttatttgtattttttcagatttttttttgtttcgtggtggtgggggaggtgattgggtggctgactggctgcgggaagctacttcctttcct

SEQ ID NO: 347259 - DNA, 120 bp, Artificial Sequence
  ENSG00000138650_7 (sequence is synthesized)
tttggagatgattgtgctattattgtttgccttgctctggatggtggaaggagtcttttcccagcttcactacacggtacaggaggagcaggaacatggcactttcgtggggaatatcgc

SEQ ID NO: 347260 - DNA, 120 bp, Artificial Sequence
  ENSG00000138650_8 (sequence is synthesized)
tgaagatctgggtctggacattacaaaactttcggctcgcgggtttcagacggtgcccaactcaaggaccccttacttagacctcaacctggagacaggggtgctgtacgtgaacgagaa

SEQ ID NO: 347261 - DNA, 120 bp, Artificial Sequence
  ENSG00000138650_9 (sequence is synthesized)
aatagaccgcgaacaaatctgcaaacagagcccctcctgtgtcctgcacctggaggtctttctggagaaccccctggagctgttccaggtggagatcgaggtgctggacattaatgacaa

SEQ ID NO: 347262 - DNA, 120 bp, Artificial Sequence
  ENSG00000138650_10 (sequence is synthesized)
ccccccctctttcccggagccagacctgacggtggaaatctctgagagcgccacgccaggcactcgcttccccttggagagcgcattcgacccagacgtgggcaccaactccttgcgcga

SEQ ID NO: 347263 - DNA, 120 bp, Artificial Sequence
  ENSG00000138650_11 (sequence is synthesized)
ctacgagatcacccccaacagctacttctccctggacgtgcagacccagggggatggcaaccgattcgctgagctggtgctggagaagccactggaccgagagcagcaagcggtgcaccg

SEQ ID NO: 347264 - DNA, 120 bp, Artificial Sequence
  ENSG00000138650_12 (sequence is synthesized)
ctacgtgctgaccgcggtggacggaggaggtgggggaggagtaggagaaggagggggaggtggcgggggagcaggcctgcccccccagcagcagcgcaccggcacggccctactcaccat

SEQ ID NO: 347265 - DNA, 120 bp, Artificial Sequence
  ENSG00000138650_13 (sequence is synthesized)
ccgagtgctggactccaatgacaatgtgcccgctttcgaccaacccgtctacactgtgtccctaccagagaactctcccccaggcactctcgtgatccagctcaacgccaccgacccgga

SEQ ID NO: 347266 - DNA, 120 bp, Artificial Sequence
  ENSG00000138650_14 (sequence is synthesized)
cgagggccagaacggtgaggtcgtgtactccttcagcagccacatttcgccccgggcgcgggagcttttcggactctcgccgcgcactggcagactggaggtaagcggcgagttggacta

SEQ ID NO: 347267 - DNA, 120 bp, Artificial Sequence
  ENSG00000138650_15 (sequence is synthesized)
tgaagagagcccagtgtaccaagtgtacgtgcaagccaaggacctgggccccaacgccgtgcctgcgcactgcaaggtgctagtgcgagtactggatgctaatgacaacgcgccagagat

SEQ ID NO: 347268 - DNA, 120 bp, Artificial Sequence
  ENSG00000138650_16 (sequence is synthesized)
cagcttcagcaccgtgaaggaagcggtgagtgagggcgcggcgcccggcactgtggtggcccttttcagcgtgactgaccgcgactcagaggagaatgggcaggtgcagtgcgagctact

SEQ ID NO: 347269 - DNA, 120 bp, Artificial Sequence
  ENSG00000138650_17 (sequence is synthesized)
gggagacgtgcctttccgcctcaagtcttcctttaagaattactacaccatcgttaccgaagcccccctggaccgagaggcgggggactcctacaccctgactgtagtggctcgggaccg

SEQ ID NO: 347270 - DNA, 120 bp, Artificial Sequence
  ENSG00000138650_18 (sequence is synthesized)
gggcgagcctgcgctctccaccagtaagtcgatccaggtacaagtgtcggatgtgaacgacaacgcgccgcgtttcagccagccggtctacgacgtgtatgtgactgaaaacaacgtgcc

SEQ ID NO: 347271 - DNA, 120 bp, Artificial Sequence
  ENSG00000138650_19 (sequence is synthesized)
tggcgcctacatctacgcggtgagcgccaccgaccgggatgagggcgccaacgcccagcttgcctactctatcctcgagtgccagatccagggcatgagcgtcttcacctacgtttctat

SEQ ID NO: 347272 - DNA, 120 bp, Artificial Sequence
  ENSG00000138650_20 (sequence is synthesized)
caactctgagaacggctacttgtacgccctgcgctccttcgactatgagcagctgaaggacttcagttttcaggtggaagcccgggacgctggcagcccccaggcgctggctggtaacgc

SEQ ID NO: 347273 - DNA, 120 bp, Artificial Sequence
  ENSG00000138650_21 (sequence is synthesized)
cactgtcaacatcctcatagtggatcaaaatgacaacgcccctgccatcgtggcgcctctaccagggcgcaacgggactccagcgcgtgaggtgctgccccgctcggcggagccgggtta

SEQ ID NO: 347274 - DNA, 120 bp, Artificial Sequence
  ENSG00000138650_22 (sequence is synthesized)
cctgctcacccgcgtggccgccgtggacgcggacgacggcgagaacgcccggctcacttacagcatcgtgcgtggcaacgaaatgaacctctttcgcatggactggcgcaccggggagct

SEQ ID NO: 347275 - DNA, 120 bp, Artificial Sequence
  ENSG00000138650_23 (sequence is synthesized)
gcgcacagcacgccgagtcccggccaagcgcgacccccagcggccttatgagctggtgatcgaggtgcgcgaccatgggcagccgcccctttcctccaccgccaccctggtggttcagct

SEQ ID NO: 347276 - DNA, 120 bp, Artificial Sequence
  ENSG00000138650_24 (sequence is synthesized)
ggtggatggcgccgtggagccccagggcgggggcgggagcggaggcggagggtcaggagagcaccagcgccccagtcgctctggcggcggggaaacctcgctagacctcaccctcatcct

SEQ ID NO: 347277 - DNA, 120 bp, Artificial Sequence
  ENSG00000138650_25 (sequence is synthesized)
catcatcgcgttgggctcggtgtccttcatcttcctgctggccatgatcgtgctggccgtgcgttgccaaaaagagaagaagctcaacatctatacttgtctggccagcgattgctgcct

SEQ ID NO: 347278 - DNA, 120 bp, Artificial Sequence
  ENSG00000138650_26 (sequence is synthesized)
ctgctgctgctgctgcggtggcggaggttcgacctgctgtggccgccaagcccgggcgcgcaagaagaaactcagcaagtcagacatcatgctggtgcagagctccaatgtacccagtaa

SEQ ID NO: 347279 - DNA, 120 bp, Artificial Sequence
  ENSG00000138650_27 (sequence is synthesized)
cccggcccaggtgccgatagaggagtccgggggctttggctcccaccaccacaaccagaattactgctatcaggtatgcctgacccctgagtccgccaagaccgacctgatgtttcttaa

SEQ ID NO: 347280 - DNA, 120 bp, Artificial Sequence
  ENSG00000138650_28 (sequence is synthesized)
gccctgcagcccttcgcggagtacggacactgagcacaacccctgcggggccatcgtcaccggttacaccgaccagcagcctgatatcatctccaacggaagcattttgtccaacgagac

SEQ ID NO: 347281 - DNA, 120 bp, Artificial Sequence
  ENSG00000138650_29 (sequence is synthesized)
taaacaccagcgagcagagctcagctatctagttgacagacctcgccgagttaacagttctgcattccaggaagccgacatagtaagctctaaggacagtggtcatggagacagtgaaca

SEQ ID NO: 347282 - DNA, 120 bp, Artificial Sequence
  ENSG00000138650_30 (sequence is synthesized)
gggagatagtgatcatgatgccaccaaccgtgcccagtcagctggtatggatctcttctccaattgcactgaggaatgtaaagctctgggccactcagatcggtgctggatgccttcttt

SEQ ID NO: 347283 - DNA, 120 bp, Artificial Sequence
  ENSG00000138650_31 (sequence is synthesized)
tgtcccttctgatggacgccaggctgctgattatcgcagcaatctgcatgttcctggcatggactctgttccagacactgaggtgtttgaaactccagaagcccagcctggggcagagcg

SEQ ID NO: 347284 - DNA, 120 bp, Artificial Sequence
  ENSG00000138650_32 (sequence is synthesized)
gtccttttccacctttggcaaagagaaggcccttcacagcactctggagaggaaggagctggatggactgctgactaatacgcgagcgccttacaaaccaccatatttgacacggaaaag

SEQ ID NO: 347285 - DNA, 120 bp, Artificial Sequence
  ENSG00000138650_33 (sequence is synthesized)
gatatgctagtcaattctacaggacttacctgaagcagcatgatttgcacaaagtcgaccaacaaaagcatcaacttttcaacttcattatcttggccatccagttagtcatgtgtaact

SEQ ID NO: 347286 - DNA, 120 bp, Artificial Sequence
  ENSG00000138650_34 (sequence is synthesized)
gagtattagatttcggatggagtcatcatggccaattataggacctaattgctctcagcaggcctgagaaatgagttgaaatgtgcagaactgtagaaactttagaggcaacagattttg

SEQ ID NO: 347287 - DNA, 120 bp, Artificial Sequence
  ENSG00000138650_35 (sequence is synthesized)
aaaggaaatttgtgcattataaatgcaatatcactgttttaaacttgactgttttatattatttttgtgtgatcaagtgttccgcaagctattccaactttacaagagaaattgtgatta

SEQ ID NO: 347288 - DNA, 120 bp, Artificial Sequence
  ENSG00000138650_36 (sequence is synthesized)
tgttcttttcacctgtgggttataaaaaatgttgtattctgaagacccacaaaatatcaaagacattctgtagtttatacaccgtgttgcaaagtgtttactgtactatttcaaagcttc

SEQ ID NO: 347289 - DNA, 120 bp, Artificial Sequence
  ENSG00000138650_37 (sequence is synthesized)
taaatataaaatatatatattatattatataattttcctaaaatgtggtacaactcagttggtttttaaatggatgcatacagtccacatcatacaataaaataaaaggtaattcagggt

SEQ ID NO: 347290 - DNA, 120 bp, Artificial Sequence
  ENSG00000138650_38 (sequence is synthesized)
gggtcccaaagacaaacttactaagaaaaaatcattaatagttttctcccaatttccatatcttactcaaccgtgtttttccttgtttaaaagaaaatgatgctctaagctacaaaattt

SEQ ID NO: 347291 - DNA, 120 bp, Artificial Sequence
  ENSG00000138650_39 (sequence is synthesized)
tgtcaaaaactcatattgaattttcaatgccaaagatgtagctattgatgttatcagacagagcactgactatgtactatcaaactatctaacaatctgcataagtctgattctatttct

SEQ ID NO: 347292 - DNA, 120 bp, Artificial Sequence
  ENSG00000138650_40 (sequence is synthesized)
atgactttgaatttagaatcacttaaagcttttataaagaatcgataaattcacctgtatttgttgttagaaaaaaactgggtgtctgtacattttgtggtgtaaaatatgtaattgaag

SEQ ID NO: 347293 - DNA, 120 bp, Artificial Sequence
  ENSG00000138650_41 (sequence is synthesized)
atgtaattgaagattactattttaagaagtcatcagtcatatcactcacacagaattttattttacatagttttgtgacttaattacacatgaatataaaatctataattctatatgaat

SEQ ID NO: 347294 - DNA, 120 bp, Artificial Sequence
  ENSG00000138650_42 (sequence is synthesized)
agaaacatctgaactggtaaagaataactataaaatatgaaagctctaaatttaaaataaatttagagatagaatcatggtacattattgtttcagtattccatgtgaaaattttatagc

SEQ ID NO: 347295 - DNA, 120 bp, Artificial Sequence
  ENSG00000138650_43 (sequence is synthesized)
ttaaatgtagtcagtgtttgattaatgaaaaaattcttcatgagtcagccttcaaaagttaagcttgccttttacttttatgtcaacaatattaattattaaatttagtaagacgcactt

SEQ ID NO: 347296 - DNA, 120 bp, Artificial Sequence
  ENSG00000138650_44 (sequence is synthesized)
tcctttcttttatatattttttctactgttgtgtatgccttgttagaacacattcgagagaggaaaaaaatcagagaatataagataatctttcaagcaaaaaacagaattgtcacagct

SEQ ID NO: 347297 - DNA, 120 bp, Artificial Sequence
  ENSG00000138650_45 (sequence is synthesized)
cccctcgccctctaaactatgatatcaaaacatcatatcaaagcttcaacattatatcaaaatgtttgcccagttcaaattagaaacctgttttgaaatactttccttaatttttaactg

SEQ ID NO: 347298 - DNA, 120 bp, Artificial Sequence
  ENSG00000138650_46 (sequence is synthesized)
atcttatattcaatgacagtttgagctgcactgtgttattaaagaatagactaaaacttaacatttgacaaatgttcttcatcaaattttatgtaacttaagtggaaatttttccctaga

SEQ ID NO: 347299 - DNA, 120 bp, Artificial Sequence
  ENSG00000138650_47 (sequence is synthesized)
acacacacacacacacacacacacttaggtcctgatatgtacatttagagtgatatattggtatcactcatttgactgttatcaaattagatattaatatatcatattccaatcagttca

SEQ ID NO: 347300 - DNA, 120 bp, Artificial Sequence
  ENSG00000138650_48 (sequence is synthesized)
agatattaatatatcatattccaatcagttcatatatcaaaataatgtatgtaatgttccagccttttgaagtctctttaaacatatatgaagctaacagatcatatgtaatacaaaaag

SEQ ID NO: 347301 - DNA, 120 bp, Artificial Sequence
  ENSG00000138650_49 (sequence is synthesized)
cacataaattcactaagtgcagcagtaacattttcttaaactttggcattactacattaatattttgaatgatagactattttagtaaggaaatgtttatacataatttaactggaaaaa

SEQ ID NO: 347302 - DNA, 120 bp, Artificial Sequence
  ENSG00000138650_50 (sequence is synthesized)
agtctgtttgttccaactcttttttttagcaagaaaatgattttcttgttgagtcactctgctttaattaaaatgtttcacgcatcattttgcaatcatgggtgaatatccacatccatc

SEQ ID NO: 347303 - DNA, 120 bp, Artificial Sequence
  ENSG00000138650_51 (sequence is synthesized)
ttccttactgcatgcattgaaaataagattatactcacttcatgtatagtaattatattgtcatttacctcaaagacattttctttaattatttaaccttttatatcattgtatataatc

SEQ ID NO: 347304 - DNA, 120 bp, Artificial Sequence
  ENSG00000138650_52 (sequence is synthesized)
tcctttgaaccaacttttttattatatatttgtgtattagttattttcatatatcctaggaactagttatactaacttacattttagttatcatcaatctacaaaaccaaaaccagaact

SEQ ID NO: 347305 - DNA, 120 bp, Artificial Sequence
  ENSG00000138650_53 (sequence is synthesized)
tcttcctaatttgcgggacaaatagaattgtttaaggataaaatgctacattattaggtcattaatcaacttatctgttgcatccaaagtaaattagaagttacaacagagtaaggatat

SEQ ID NO: 347306 - DNA, 120 bp, Artificial Sequence
  ENSG00000138650_54 (sequence is synthesized)
gattcttgtaagttggttaaaatgttttcttccaatgagggggactataaaatggaaagtgcaaccaacaaataatgaaggtttctaattaagcatttactagattaatatatcaaggaa

SEQ ID NO: 347307 - DNA, 120 bp, Artificial Sequence
  ENSG00000138650_55 (sequence is synthesized)
ttttaggataggttttctctttaatctggtcattctaatatccaatcttacataattttatatacatcaaagaataatatccatcgtattagacagtatttcgtcaataaattatttcag

SEQ ID NO: 347308 - DNA, 120 bp, Artificial Sequence
  ENSG00000138650_56 (sequence is synthesized)
aaaaaaaaatcatgtcatttactccttgttaacatggttagttttagagcagtcaaagtcaaaaaaaatttcctgtggaaacagtgtcttaatgtttcaaaggtatgtcaaaagacaatt

SEQ ID NO: 347309 - DNA, 120 bp, Artificial Sequence
  ENSG00000138650_57 (sequence is synthesized)
tttagaaaatatttcatccacatgtagaattctaatttttaacgtgtgaacatagtttggtgaaatcatcttaaatcaaatttaaatatcacatcagaattacttcacagatataatagc

SEQ ID NO: 347310 - DNA, 120 bp, Artificial Sequence
  ENSG00000138650_58 (sequence is synthesized)
gtcaatgatatatgtatcatcttttcttggcaaatattaaggaaatatgtgtattttattttttaaagatattaaatgcactgcctttatcaaacattgcaaattaagaactatagtaga

SEQ ID NO: 347311 - DNA, 120 bp, Artificial Sequence
  ENSG00000138650_59 (sequence is synthesized)
atatttaaatattttaatttctcattgttttatttgttaattggattgtaatttgccatcagattctctgtattatagaagctatcttgcttcttcaataagaggaggaaaaagaatctc

SEQ ID NO: 347312 - DNA, 120 bp, Artificial Sequence
  ENSG00000138650_60 (sequence is synthesized)
acaattcccaatataatctttaacaactgtacgttaattgtaccattttaccttctaaacattatttactggagctcagttagtctttaaaacaattactcaggcagagtgtggcaaaag

SEQ ID NO: 347313 - DNA, 120 bp, Artificial Sequence
  ENSG00000138650_61 (sequence is synthesized)
ttcagcaagatcaagaaaagtatttaagttattgactgatcatagcactgttatttgtcattgcatgtgtttttccccctcatgtttctatgtgtgctattgatacccaaggaactcaaa

SEQ ID NO: 347314 - DNA, 120 bp, Artificial Sequence
  ENSG00000138650_62 (sequence is synthesized)
aatacttaaaatattggtatacttgatgatttttctgaaaatcttatatttttcatattacaaattcttgagttctttatctttttcaagtctaattttgtagtggtaaaggctttgcac

SEQ ID NO: 347315 - DNA, 120 bp, Artificial Sequence
  ENSG00000138650_63 (sequence is synthesized)
ttaacatccttttgtgttcctttttaacaaggaaaaacagaaaataatggaattccatattttttacaccatggagtagtaaaattattttatatattgttagtacttcaacaaacatcc

SEQ ID NO: 347316 - DNA, 120 bp, Artificial Sequence
  ENSG00000138650_64 (sequence is synthesized)
ctctgctaagtcagacaaaatccttatacagtaatttgtgaaactgttcagtagagtattcttttcttcaaatcttggcataggttttagattatagcattctgtatgaatgcaggtaga

SEQ ID NO: 347317 - DNA, 120 bp, Artificial Sequence
  ENSG00000138650_65 (sequence is synthesized)
tgggtgccgccagagtattgcaggcaataatacgactaaaattctaatacttttagtgtgcatgcgtgtatttctaatcactgttattttttaagtatttgtaaaattagaaaaattgct

SEQ ID NO: 347318 - DNA, 120 bp, Artificial Sequence
  ENSG00000138650_66 (sequence is synthesized)
tttatttcttgaaaagttgtcacatgcttagtttgaagttttactctccagatgtttttgagttgcataaaaatcttgcattcatcattcaaaaaatactaaatttcacatgagactcaa

SEQ ID NO: 347319 - DNA, 120 bp, Artificial Sequence
  ENSG00000138650_67 (sequence is synthesized)
aaatttctgaatgatggaactcagacttccaatacattcatacatgctagagctgaaagtaagcagggaatttcagctctaaacacatttttgagacagttatctgtgagtgaaaacagg

SEQ ID NO: 347320 - DNA, 120 bp, Artificial Sequence
  ENSG00000138650_68 (sequence is synthesized)
gtattataacaaaagatgagtttcaatcttaactacagtgtttgttactgtgaatgctataataatacataagtaaaatgagtgtaaatgtaataaattattttatactgctgtatacat

SEQ ID NO: 347321 - DNA, 120 bp, Artificial Sequence
  ENSG00000138650_69 (sequence is synthesized)
atgaaataaataaaactaggatacatattatgccatttttccatgcatggatcttccactgacgcctgtgggagctttgaataaaaatcagtggcaaatatggctctaagtttaaaaaca

SEQ ID NO: 347322 - DNA, 120 bp, Artificial Sequence
  ENSG00000138650_70 (sequence is synthesized)
ctccatcagaaagcctcctctagcccggcccttgtatctctggtgcactgtatctatttttaggatattagcttatgtgtatcgttgtgggagcagagatgggcggtcaccttctcccac

SEQ ID NO: 347323 - DNA, 120 bp, Artificial Sequence
  ENSG00000138650_71 (sequence is synthesized)
tccttcgtgtgtaacctaactttcgcgttgttccaccctttcacatttattttcattccgtccccttggtactttgccaccttggagctccctcctttgctcttccatcctgtcagtcct

SEQ ID NO: 347324 - DNA, 120 bp, Artificial Sequence
  ENSG00000138650_72 (sequence is synthesized)
ttcccttctcagtaacctgggcatgaagggaaactgcgtgaagggagagggaaatgtggaggagggacttactttctagcactggcaaaggtcttttttctttgcgtctgtcccaggcat

SEQ ID NO: 347325 - DNA, 120 bp, Artificial Sequence
  ENSG00000138650_73 (sequence is synthesized)
taataaagttggctctattttgctttgtttaacgatgcttttagtcgcgtgtacaagtaagctatagattgtttaactttacacagttgtctaacctcgaattcatgttttagtgaacaa

SEQ ID NO: 347326 - DNA, 120 bp, Artificial Sequence
  ENSG00000138650_74 (sequence is synthesized)
gttaccagatccttctcctctgaactcgggttgcaaaaaaagccttcagttcggctctggacagcatttacagacgctcttgaagccgagcgcccacacagtgtgaatttgaatgaagct

SEQ ID NO: 347327 - DNA, 120 bp, Artificial Sequence
  ENSG00000138650_75 (sequence is synthesized)
gcgttggcacaaacccctgttaagagtaaactaacgaaaggcttaaacaattgttgtcttaaatatatctttttagctaataatcaccttcttgccactgttttggataaatcacgctgt

SEQ ID NO: 347328 - DNA, 120 bp, Artificial Sequence
  ENSG00000138650_76 (sequence is synthesized)
tggctttcttcataaaagaatttggcttgtcaattctgacttctttttaaaaggatggagaagtgacaaagtcggagggtgggggttggggggagaacaaagttggtttatgtgaaagaa

SEQ ID NO: 347329 - DNA, 120 bp, Artificial Sequence
  ENSG00000138650_77 (sequence is synthesized)
agcttggaccggaaaggtgtgtgggtggtagaggtggggaggcgaatgcagagggcctttggaggggaaaagaatgggggtggtggggggcgggcaggattatgaactcctttcctggca

SEQ ID NO: 347330 - DNA, 120 bp, Artificial Sequence
  ENSG00000138650_78 (sequence is synthesized)
ggttattttatttgagtcttagatattattaattgactttcatgaatatttgtacagctcatttgtatcttaagcacattttgaaaataaacaacaacataattccatgaaatatccaaa

SEQ ID NO: 347331 - DNA, 120 bp, Artificial Sequence
  ENSG00000138650_79 (sequence is synthesized)
ggctgtcaacaaccacatgagtgagcttggaaacagactcccaagttgagcattcagatgagaccacagcccctgctgacagtttgactgcaacctttgagagtccttagccagaggcac

SEQ ID NO: 347332 - DNA, 120 bp, Artificial Sequence
  ENSG00000138650_80 (sequence is synthesized)
ccagttaagctgcactaaaatttttgaaccacacagattgtgagataataaatatttgtggttttatgttgtgaggttttggggtatattgccatgtggcaataaatagttaatacatta

SEQ ID NO: 347333 - DNA, 120 bp, Artificial Sequence
  ENSG00000138650_81 (sequence is synthesized)
tgtaggtgagaatcctattgtctgatacagtaatatgaagtattgatttttctggtgtgatgtggccattttcaaaaccaatatgtataatgtacacaccctgttgctttaccttcgtct

SEQ ID NO: 347334 - DNA, 120 bp, Artificial Sequence
  ENSG00000138650_82 (sequence is synthesized)
tcaattttcagttcttgcttactcctctttccctgaccttgcacacaaaaaatcatccccactatttttgggattgatctactggcttaaaaaaaataaagctgtacttaccagatgaaa

SEQ ID NO: 347335 - DNA, 120 bp, Artificial Sequence
  ENSG00000138653_0 (sequence is synthesized)
agacactaagactggagctagagagtgctcttggaatattgttgaggcagattgcatgaactgaaagctccttctaattaacctggagccaagtgaacctgaatactggatatctcatgt

SEQ ID NO: 347336 - DNA, 120 bp, Artificial Sequence
  ENSG00000138653_1 (sequence is synthesized)
tctaacacgggataaattcaagttagaaaaagacaaaatattgaaatgcttctctagattatgcttagaggattctgcagcaattctcagtattggacatattcaaaatctcctcaacgt

SEQ ID NO: 347337 - DNA, 120 bp, Artificial Sequence
  ENSG00000138653_2 (sequence is synthesized)
atatccttcccatctattgccttccagctttaactcagttgtgctcccttcaaacattttacatgatttgcgatggttacatgaactctggggaagtgatatttgcaacatctcatactt

SEQ ID NO: 347338 - DNA, 120 bp, Artificial Sequence
  ENSG00000138653_3 (sequence is synthesized)
tattcactatggcactttaggaaacgaaattgggaaaaagcttccaaaacattattctaaaaaatgaatcttattgtgaaacttcggagaagttttcgaacattgattgttctcttagct

SEQ ID NO: 347339 - DNA, 120 bp, Artificial Sequence
  ENSG00000138653_4 (sequence is synthesized)
accttttgcttggtgagcattgtcatttctgcctattttctctactctggctacaaacaggaaatgacacttattgaaaccactgcagaagcagaatgcactgacatcaaaattctacca

SEQ ID NO: 347340 - DNA, 120 bp, Artificial Sequence
  ENSG00000138653_5 (sequence is synthesized)
tataggtcaatggagctgaaaacagttaaacctattgacacatccaaaacggaccctactgtccttctcttcgtggagagccaatactctcaactcggtcaagatatcatagctattttg

SEQ ID NO: 347341 - DNA, 120 bp, Artificial Sequence
  ENSG00000138653_6 (sequence is synthesized)
gagtccagccgatttcagtaccacatggttattgcccctggaaagggagatatacctcctcttacagataatggcaaagggaaatatactttagttatttatgaaaatattctgaagtat

SEQ ID NO: 347342 - DNA, 120 bp, Artificial Sequence
  ENSG00000138653_7 (sequence is synthesized)
gtcagcatggactcatggaatcgagagcttttagaaaaatactgtgtggaatacagtgttagtataatcggttttcataaagccaatgagaacagcttaccaagtacacaattaaaaggc

SEQ ID NO: 347343 - DNA, 120 bp, Artificial Sequence
  ENSG00000138653_8 (sequence is synthesized)
tttccgttaaaccttttcaataatctagctctaaaggactgttttgttaaccctcaatctcctttgctgcatattaccaaagcccccaaggttgagaaaggccctcttcctggggaagac

SEQ ID NO: 347344 - DNA, 120 bp, Artificial Sequence
  ENSG00000138653_9 (sequence is synthesized)
tggactattttccaatataatcattcaacctaccagcctgtacttttaactgagttacagacagaaaaatccctgtcatccttgtctagcaaaacactctttgcaacggtgattcaggat

SEQ ID NO: 347345 - DNA, 120 bp, Artificial Sequence
  ENSG00000138653_10 (sequence is synthesized)
ctggggcttcatgatggaattcagagagtactttttggcaacaacttgaacttttggctgcacaagctcatcttcatagatgccatctccttcttgtcagggaagaggctgacattgtcc

SEQ ID NO: 347346 - DNA, 120 bp, Artificial Sequence
  ENSG00000138653_11 (sequence is synthesized)
ttggacaggtacatccttgtggacattgatgatatatttgttgggaaagagggaacaaggatgaatgtcaaagatgtgaaggcattactagagactcaaaatttactgcgcactcaggtt

SEQ ID NO: 347347 - DNA, 120 bp, Artificial Sequence
  ENSG00000138653_12 (sequence is synthesized)
ggatgagttctggtggtttcctcacatgtggagccacatgcagccccacctcttccacaacgagtcatctttagtagagcagatgattctcaacaaggaatttgcactggaacatggaat

SEQ ID NO: 347348 - DNA, 120 bp, Artificial Sequence
  ENSG00000138653_13 (sequence is synthesized)
accaatcaacatgggctatgctgtggccccacatcactcaggggtctacccggttcacattcagctgtatgcagcttggaagaaggtctggggtattcaagtcaccagcactgaagaata

SEQ ID NO: 347349 - DNA, 120 bp, Artificial Sequence
  ENSG00000138653_14 (sequence is synthesized)
tccacatctgaaacctgcccggtacagaaagggcttcattcacaatagcatcatggtcctccctcgacagacttgtgggttgttcactcacactattttctacaaagaatatccaggagg

SEQ ID NO: 347350 - DNA, 120 bp, Artificial Sequence
  ENSG00000138653_15 (sequence is synthesized)
accccaagaactggataaaagtatcagaggaggtgaactttttctcacaatccttctaaacccaatcagcattttcatgacccatttatcaaactatggaaatgaccgcctagggttata

SEQ ID NO: 347351 - DNA, 120 bp, Artificial Sequence
  ENSG00000138653_16 (sequence is synthesized)
tacctttgtgaacttggtcaactttgtgcagagctggaccaacctgaaattgcaaactctgcctccagtgcaactggcccaccagtattttgagctcttccctgagcagaaagaccctct

SEQ ID NO: 347352 - DNA, 120 bp, Artificial Sequence
  ENSG00000138653_17 (sequence is synthesized)
atggcagaatccatgtgatgataaacgacacaaagacatctggtccagagagaaaacttgtgaccacttaccaaaatttctagtaattggtccacaaaaaacaggaacaactgcacttta

SEQ ID NO: 347353 - DNA, 120 bp, Artificial Sequence
  ENSG00000138653_18 (sequence is synthesized)
tttatttcttcttatgcatccttcaatcatcagcaatctccctagtccaaagacatttgaggaagttcagttctttaatggcaacaactatcacaaaggaatagactggtatatggactt

SEQ ID NO: 347354 - DNA, 120 bp, Artificial Sequence
  ENSG00000138653_19 (sequence is synthesized)
tttccctacaccatccaatactacaagtgactttctgtttgaaaagagtgctaattacttccattcggaagaagctccaagacgagccgcatctcttgtccccaaagccaagatcatcac

SEQ ID NO: 347355 - DNA, 120 bp, Artificial Sequence
  ENSG00000138653_20 (sequence is synthesized)
catcctcattgacccctcagacagggcatactcttggtaccagcaccaacgatcacatgaagatccagctgctctgaggttcaatttctatgaagttatttcaacaggacattgggctcc

SEQ ID NO: 347356 - DNA, 120 bp, Artificial Sequence
  ENSG00000138653_21 (sequence is synthesized)
atctgacttaaaaactttgcagagaagatgcctagtacctggatggtatgcagtccacatagaaagatggctaacttactttgctacttctcagttgctaattattgatggacagcagct

SEQ ID NO: 347357 - DNA, 120 bp, Artificial Sequence
  ENSG00000138653_22 (sequence is synthesized)
gagatctgacccagctactgtgatggatgaagtccagaagtttctgggagttacacctcgttataattactctgaagcactaacgtttgatccccaaaagggtttttggtgtcaattact

SEQ ID NO: 347358 - DNA, 120 bp, Artificial Sequence
  ENSG00000138653_23 (sequence is synthesized)
ggaaggaggaaagacaaaatgccttggaaaaagcaaaggccgaaaatatccacctatggatccagagtctagaacgttcctctctaattactaccgagatcataatgtggaactatccaa

SEQ ID NO: 347359 - DNA, 120 bp, Artificial Sequence
  ENSG00000138653_24 (sequence is synthesized)
actgctacacagactgggacagcctctgccatcgtggctgagacaggaactgcagaaagtgagatagcactggagacaagaactaagcctctcaagatacttttagtgttaaaaaaaaaa

SEQ ID NO: 347360 - DNA, 120 bp, Artificial Sequence
  ENSG00000138653_25 (sequence is synthesized)
tgctgtactcggtctgctccctggtgtaattctcgtgtccaagaaggaagctgcattttaacggtgtgctgaacagaggtttgaatcattccagctggctgcttgttttgaaaaggacaa

SEQ ID NO: 347361 - DNA, 120 bp, Artificial Sequence
  ENSG00000138653_26 (sequence is synthesized)
ataaattcaagttagaaaaagacaaaatattgaaatgcttctctaggcattactagagactcaaaatttactgcgcactcaggttgcaaattttaccttcaaccttggattttcagggaa

SEQ ID NO: 347362 - DNA, 120 bp, Artificial Sequence
  ENSG00000138653_27 (sequence is synthesized)
tagcatttttaaatgtgttttattttcctgtcttttaaactaaatcatatttattttctttatttacagcacatcttactggtcatgcatttaaatctatattaaaatacttttcttgat

SEQ ID NO: 347363 - DNA, 120 bp, Artificial Sequence
  ENSG00000138658_0 (sequence is synthesized)
atggaaagccaagaatttattgttctatatactcatcaaaagatgaagaagtcaaaagtgtggcaagatggaattctgaagatcactcacttaggaaacaaagcaattttatatgatgac

SEQ ID NO: 347364 - DNA, 120 bp, Artificial Sequence
  ENSG00000138658_1 (sequence is synthesized)
aaaggagcatgtttggagagtctgtttcttaaatgccttgaggtgaaacctggagatgacttagaaagtgatcgatacttaatcacagttgaagaggttaaagttgctggagccataggt

SEQ ID NO: 347365 - DNA, 120 bp, Artificial Sequence
  ENSG00000138658_2 (sequence is synthesized)
attgttaagcagaatgtcaataaagaagcaccagagttaaattcaaggacatttatatcctctggccgatctcttggatgtcagccctctggcttaaaaaggaagtttactggttttcaa

SEQ ID NO: 347366 - DNA, 120 bp, Artificial Sequence
  ENSG00000138658_3 (sequence is synthesized)
ggaccacgtcaggttccaaagaaaatggttattatggaaagtggtgaatcagctgcatcacatgaggctaagaaaactggccctactattttttctccattctgcagcatgcctcctttg

SEQ ID NO: 347367 - DNA, 120 bp, Artificial Sequence
  ENSG00000138658_4 (sequence is synthesized)
tttcctactgttggcaagaaagatgtaaataatatactggcagaccctgagaacattgtgacttacaagaacagggagagaaatgccatggatttttcttcggttttttctccatccttc

SEQ ID NO: 347368 - DNA, 120 bp, Artificial Sequence
  ENSG00000138658_5 (sequence is synthesized)
cagattaacccagaagtgctgtgtgaagaaaattatttttgctcacctgtcaattctggaaataagctttcagactctttactgaccaatgagcctgtgaaaagagatagtttggcatct

SEQ ID NO: 347369 - DNA, 120 bp, Artificial Sequence
  ENSG00000138658_6 (sequence is synthesized)
cactattcaggagtttcacaaaacatcagaagcaaagcacagatattagctcttctgaagtccgaatcatctagttcatgtgaggaactaaattctgagatgacagagcattttcctcaa

SEQ ID NO: 347370 - DNA, 120 bp, Artificial Sequence
  ENSG00000138658_7 (sequence is synthesized)
aaacaaccacaaggaagtttaaaaattgctactaaaccaaagtacctaattcaacaggaagagtgtgctgagatgaagagcacagaaaatttatactaccagcatcaatcagaaaatacc

SEQ ID NO: 347371 - DNA, 120 bp, Artificial Sequence
  ENSG00000138658_8 (sequence is synthesized)
atgagaaataaaagccggtgggccatgtatttatcctcacagagttcacctatacattcttctactgtagatgggaatgatacagaaaggaaacccaaggcccaggaagatgatgtaaat

SEQ ID NO: 347372 - DNA, 120 bp, Artificial Sequence
  ENSG00000138658_9 (sequence is synthesized)
tctaatttgaaagacctttcattacaaaaaattatacagttcgttgaaacgtatgctgaagagaggaaaaagtataatgtagaccagtcagtcggtaataatgatccatcctggaatcag

SEQ ID NO: 347373 - DNA, 120 bp, Artificial Sequence
  ENSG00000138658_10 (sequence is synthesized)
gaagtaaaattagaaattccttcattcaatgaaagcagtagcttacaggttacttgtagcagtgcagaaaatgatggtatattatcagaatctgacattcaagaagataataaaatacct

SEQ ID NO: 347374 - DNA, 120 bp, Artificial Sequence
  ENSG00000138658_11 (sequence is synthesized)
tttaatcaaaatgacaaggggtgcattaaaggatcagttctcattaaagaaaatgctcaggaggtaaatacatgtggaacactggaaaaggagtatgaacaatcagagtcatctctgcca

SEQ ID NO: 347375 - DNA, 120 bp, Artificial Sequence
  ENSG00000138658_12 (sequence is synthesized)
gaactgaaacatctccaaattgaatctagtaataattctaggatctctgatgacattacagacatgatttctgaaagtaaaatggataatgaaagtcttaatagtattcatgaatctctg

SEQ ID NO: 347376 - DNA, 120 bp, Artificial Sequence
  ENSG00000138658_13 (sequence is synthesized)
agtaatgtaacacaaccatttttggaggtaacttttaatctgaacaattttgagaccagtgacactgaggaggaatcacaggaaagcaacaaaatttcccaggattcagagagttgggta

SEQ ID NO: 347377 - DNA, 120 bp, Artificial Sequence
  ENSG00000138658_14 (sequence is synthesized)
aaggacattttggttaatgatggcaattcatgttttcaaaagaggtctgagaatacaaactgtgaagagattgagggtgaacatttgccattcttaacatctgttagtgacaaacctaca

SEQ ID NO: 347378 - DNA, 120 bp, Artificial Sequence
  ENSG00000138658_15 (sequence is synthesized)
gtgacatttcctgttaaagagactctgccatcacagttttgtgataaaacttatgtgggttttgacatgggaatatgtaaaactgaaaacacaggaaaagaaatagaggagtatagtgac

SEQ ID NO: 347379 - DNA, 120 bp, Artificial Sequence
  ENSG00000138658_16 (sequence is synthesized)
acattaagcaattttgaatctttcaagtggactgatgctgtatacggagataataaagaagatgctaataaacctattcaagaagtcagaattaactatgattttgctttacccccgaat

SEQ ID NO: 347380 - DNA, 120 bp, Artificial Sequence
  ENSG00000138658_17 (sequence is synthesized)
aaatctaaaggtataaacatgaatttacatattcctcatattcaaaaccagattgctgaaaacagtaatctattttcagaagatgctcaacctcagccttttattttgggaagtgactta

SEQ ID NO: 347381 - DNA, 120 bp, Artificial Sequence
  ENSG00000138658_18 (sequence is synthesized)
gacaaaaatgatgaacatgttttaccctcaacttctagtagtgacaacagtgtccaactattaaataccaatcagaatcactatgaatgtattgcacttgataaatcaaatacccacatt

SEQ ID NO: 347382 - DNA, 120 bp, Artificial Sequence
  ENSG00000138658_19 (sequence is synthesized)
tccaattctttgttttacccactgggaaaaaagcatcttatttccaaagacacagaagcacatatatctgaacctgaagatttgggaaagattagaagtccaccccctgaccatgttgag

SEQ ID NO: 347383 - DNA, 120 bp, Artificial Sequence
  ENSG00000138658_20 (sequence is synthesized)
gttgaaactgccagagaaggcaaacaatactggaatcctagaaattcttcagaactttctggattagtaaataccatttctattttaaagtcgctatgtgaacacagtactgctttagac

SEQ ID NO: 347384 - DNA, 120 bp, Artificial Sequence
  ENSG00000138658_21 (sequence is synthesized)
agcttggaaatattgaaaaagaaaaatactgtctttcagcaaggaactcaacagacgtatgagccagatagccctcctgaagtgaggaaaccatttattacagtagtttcaccaaagtct

SEQ ID NO: 347385 - DNA, 120 bp, Artificial Sequence
  ENSG00000138658_22 (sequence is synthesized)
cctcatctgcacaaggattctcaacagatactaaaagaagatgaagttgaactaagtgaaccacttcagtctgtgcagttctcttcctcgggaagtaaagaagagactgcttttcaagct

SEQ ID NO: 347386 - DNA, 120 bp, Artificial Sequence
  ENSG00000138658_23 (sequence is synthesized)
gttattcctaaacaaatagagagaaaaacctgtgaccctaagcctgttgagtttcaaggacatcaagtaaaaggatcagctactagtggtgtaatggtcagaggacacagctcacagcta

SEQ ID NO: 347387 - DNA, 120 bp, Artificial Sequence
  ENSG00000138658_24 (sequence is synthesized)
ggatgcagtcagtttccagatagcactgagtatgaaaactttatgacagagacaccagagttacctagcacgtgtatgcagattgacttcttgcaggtgacatcaccagaagaaaacatc

SEQ ID NO: 347388 - DNA, 120 bp, Artificial Sequence
  ENSG00000138658_25 (sequence is synthesized)
tctacattgagccctgtttctaccttttctttgaactcaagagatgaagacttcatggtagaattctctgagacgtccctgaaagcaagaactttacctgatgatcttcattttctcaac

SEQ ID NO: 347389 - DNA, 120 bp, Artificial Sequence
  ENSG00000138658_26 (sequence is synthesized)
ttggaggggatgaaaaaatcccgttctctggagaatgagaaccttcaaaggctttcattattaagtagaacccaggttccacttattactttgccacgtactgatgggccacctgactta

SEQ ID NO: 347390 - DNA, 120 bp, Artificial Sequence
  ENSG00000138658_27 (sequence is synthesized)
cccccatgctcaatttgtgtgaaaagtcagcagttctttcgtttagcattgagcctgaggaccaaaatgaaacctttttctctgaagaatctagggaagtgaatccaggggatgtttcac

SEQ ID NO: 347391 - DNA, 120 bp, Artificial Sequence
  ENSG00000138658_28 (sequence is synthesized)
ttaataatatatctactcagagcaagtggctgaaatatcaaaacacatcccaatgcaacgtggctactccaaacagagttgataagagaataactgatggcttctttgctgaggctgttt

SEQ ID NO: 347392 - DNA, 120 bp, Artificial Sequence
  ENSG00000138658_29 (sequence is synthesized)
ctgggatgcattttagagacacaagtgaaagacagagtgatgctgtcaatgaaagctctttagactctgtgcatttgcaaatgataaaaggcatgctctatcaacagcggcaggatttta

SEQ ID NO: 347393 - DNA, 120 bp, Artificial Sequence
  ENSG00000138658_30 (sequence is synthesized)
gcagtcaagattcggtttccagaaagaaagtactttctctgaatttaaagcagacttctaagacagaggaaattaaaaatgtattaggagggtctacctgctacaactacagtgtaaagg

SEQ ID NO: 347394 - DNA, 120 bp, Artificial Sequence
  ENSG00000138658_31 (sequence is synthesized)
atttacaggagataagtggctctgagctgtgctttccaagtgggcagaaaataaaatctgcttatcttccccaaaggcaaattcacataccagctgtttttcagtctcctgctcattata

SEQ ID NO: 347395 - DNA, 120 bp, Artificial Sequence
  ENSG00000138658_32 (sequence is synthesized)
agcagactttcacatcttgcctcatagaacatctaaatatattgctgtttgggttagcacaaaacctgcagaaagctctttcaaaagttgacatatcattttatacatcattgaagggag

SEQ ID NO: 347396 - DNA, 120 bp, Artificial Sequence
  ENSG00000138658_33 (sequence is synthesized)
agaaactgaaaaacgcagaaaataatgtaccatcctgccatcatagtcaacctgcaaaacttgtcatggttaaaaaggaaggtccaaataagggtcgtctcttttatacatgtgatggac

SEQ ID NO: 347397 - DNA, 120 bp, Artificial Sequence
  ENSG00000138658_34 (sequence is synthesized)
ccaaagctgatcgatgtaaattctttaaatggcttgaggacgtgactccaggatattcaacacaggaaggagctcgacctggcatggttttaagtgatattaagagtattggcttatatt

SEQ ID NO: 347398 - DNA, 120 bp, Artificial Sequence
  ENSG00000138658_35 (sequence is synthesized)
taagaagtcaaaagataccactttatgaggaatgccagcttttggtgagaaaaggatttgattttcagagaaaacagtatggcaaactaaagaagtttactactgtaaatcctgagtttt

SEQ ID NO: 347399 - DNA, 120 bp, Artificial Sequence
  ENSG00000138658_36 (sequence is synthesized)
ataatgaaccaaaaaccaaactttatcttaagctaagtcggaaggaaagatcttcagcttatagcaaaaatgatctttgggtggtttcaaaaaccctagactttgagctggatactttta

SEQ ID NO: 347400 - DNA, 120 bp, Artificial Sequence
  ENSG00000138658_37 (sequence is synthesized)
tcgcatgtagtgctttctttggaccatcatctatcaatgagatagaaatactgcctttgaaaggctatttcccttctaattggcccactaacatggttgtccatgcgttattggtttgta

SEQ ID NO: 347401 - DNA, 120 bp, Artificial Sequence
  ENSG00000138658_38 (sequence is synthesized)
atgctagcacagaactgactactttgaaaaacattcaggactactttaatccagctactctacctctaacacagtacctgttaacaacgtcttcgccaactatagttagtaacaaaagag

SEQ ID NO: 347402 - DNA, 120 bp, Artificial Sequence
  ENSG00000138658_39 (sequence is synthesized)
tcagtaagagaaaatttatcccaccagccttcacaaatgtcagtacaaaatttgaactactcagcctaggagcaacattgaagttagctagtgagttgattcaggtacacaagttaaaca

SEQ ID NO: 347403 - DNA, 120 bp, Artificial Sequence
  ENSG00000138658_40 (sequence is synthesized)
aggatcaagctacagctctaattcaaatagctcaaatgatggcatcacatgaaagcattgaagaagtgaaggaactgcaaactcataccttccctatcacaatcatacatggtgtgtttg

SEQ ID NO: 347404 - DNA, 120 bp, Artificial Sequence
  ENSG00000138658_41 (sequence is synthesized)
gagcaggaaagagttacttgctggcagtggtgattttgttctttgtacagctgtttgaaaagagtgaagctcccaccattggaaatgcaaggccgtggaaacttctgatttcttcttcta

SEQ ID NO: 347405 - DNA, 120 bp, Artificial Sequence
  ENSG00000138658_42 (sequence is synthesized)
ctaatgtggctgttgacagagtacttcttgggcttctcagtcttggatttgaaaactttatcagagttgggagtgttaggaagattgccaaaccaattttaccttatagcttgcatgctg

SEQ ID NO: 347406 - DNA, 120 bp, Artificial Sequence
  ENSG00000138658_43 (sequence is synthesized)
gctcagaaaatgaaagtgaacagttaaaagaactacatgcactaatgaaagaagacctgactcctacggaaagagtctatgtgagaaaaagcattgagcagcataaactggggaccaata

SEQ ID NO: 347407 - DNA, 120 bp, Artificial Sequence
  ENSG00000138658_44 (sequence is synthesized)
gaaccctgctgaagcaggttcgagtagttggagttacctgtgcagcctgcccattcccatgcatgaatgatcttaaatttcctgtagttgtgctggatgagtgtagtcagataactgaac

SEQ ID NO: 347408 - DNA, 120 bp, Artificial Sequence
  ENSG00000138658_45 (sequence is synthesized)
cggcctctctccttcccattgcaaggtttgagtgtgaaaagctgattcttgttggggatcccaaacagctacctcctactattcagggttctgatgcagctcatgaaaatggattggaac

SEQ ID NO: 347409 - DNA, 120 bp, Artificial Sequence
  ENSG00000138658_46 (sequence is synthesized)
aaactctttttgatcgactttgcttaatgggtcacaagccaattctattgagaactcaataccgttgtcatcctgcaatcagtgctattgctaatgatctgttttacaaaggagccctca

SEQ ID NO: 347410 - DNA, 120 bp, Artificial Sequence
  ENSG00000138658_47 (sequence is synthesized)
tgaatggtgtaacagaaatagagcggagccctttattggaatggctaccaaccctgtgtttttataatgttaaaggactagaacagatagaaagagataacagctttcataatgtggcag

SEQ ID NO: 347411 - DNA, 120 bp, Artificial Sequence
  ENSG00000138658_48 (sequence is synthesized)
aagctacgtttacactcaagctgattcaatcactgattgcaagtggaatagcaggctctatgattggtgtgataacattatacaaatcccagatgtacaagctttgtcatttactcagtg

SEQ ID NO: 347412 - DNA, 120 bp, Artificial Sequence
  ENSG00000138658_49 (sequence is synthesized)
ctgtggactttcaccatcctgatattaaaactgtgcaggtgtccacagtagatgcttttcagggagctgaaaaggagatcattattctgtcctgtgtaaggacaagacaagtaggattca

SEQ ID NO: 347413 - DNA, 120 bp, Artificial Sequence
  ENSG00000138658_50 (sequence is synthesized)
ttgattcagaaaaaagaatgaatgttgcattgactagaggaaagaggcatttgttgattgtgggaaatttagcctgtttgaggaaaaatcaactttggggacgagtgatccaacactgcg

SEQ ID NO: 347414 - DNA, 120 bp, Artificial Sequence
  ENSG00000138658_51 (sequence is synthesized)
aaggaagggaagatggattgcaacatgcaaaccagtatgaaccacagctgaaccatctccttaaagattattttgaaaaacaagtggaagaaaaacagaagaaaaagagtgaaaaagaga

SEQ ID NO: 347415 - DNA, 120 bp, Artificial Sequence
  ENSG00000138658_52 (sequence is synthesized)
aaacagaagaaaaagagtgaaaaagagaaatctaaagataaatctcattcataaaaagacatggtgtaaatattttgtatttatgtaaattcagactcattttacatgatatatttttta

SEQ ID NO: 347416 - DNA, 120 bp, Artificial Sequence
  ENSG00000138658_53 (sequence is synthesized)
taatgacgtcacgttgtttcgcgggagaaattcgaaagtggattttgtgcaatttgacaggtggtataaatagttgaatatttcctattttctggacccagctggtttataacttcagaa

SEQ ID NO: 347417 - DNA, 120 bp, Artificial Sequence
  ENSG00000138658_54 (sequence is synthesized)
gcatatcctttgtgttgtcttctggttccaaattattatggtcatgctagtgctattatccaactttatcttcaactatagcatacatttgttgagtgcccattatatatctcacacaag

SEQ ID NO: 347418 - DNA, 120 bp, Artificial Sequence
  ENSG00000138658_55 (sequence is synthesized)
tccagatttttttgtgtccagttaaaaaaaatggttagattgatgtatataaatagttttatatcctttccccttaatatcgttgtattatcttacattattaataattcttcttaaaca

SEQ ID NO: 347419 - DNA, 120 bp, Artificial Sequence
  ENSG00000138658_56 (sequence is synthesized)
tttaccatccatcctatggctatcttgtgctttggacaaatagttctctgttttggtcatttaaataatttccagcattttgctattataagtaacactttaataaatgtttttacacat

SEQ ID NO: 347420 - DNA, 120 bp, Artificial Sequence
  ENSG00000138658_57 (sequence is synthesized)
tacaatgaagtcctaggtaaaaaaataaatatcctttgatttcattatgttatttatccaatttgaaatgaattttcatggaaatagaaataagaccaattcatgtgatgtagttttacc

SEQ ID NO: 347421 - DNA, 120 bp, Artificial Sequence
  ENSG00000138658_58 (sequence is synthesized)
tgaaatgagggctagattaattatctaagttaggtttgtataatagagcatgggttttaaagtcagtccgccacttatttgtggtgtggtattgggggaaaaaattcaatattcttgtat

SEQ ID NO: 347422 - DNA, 120 bp, Artificial Sequence
  ENSG00000138658_59 (sequence is synthesized)
ctgtacttgggataattaactaactatttcctagtgttgttgtgaagatttcatcaagtaatatgtaaaatgctcaacaaagtgtcagcatgtagtaagtattcaacaaacgtcagttct

SEQ ID NO: 347423 - DNA, 120 bp, Artificial Sequence
  ENSG00000138658_60 (sequence is synthesized)
cttctaccctcctcgatattggagtatgtatccatttacagtatatatccacttactgtttatttccataaaaaactgttctctgtaatgcttacaaagtgatggctaagttatgaatta

SEQ ID NO: 347424 - DNA, 120 bp, Artificial Sequence
  ENSG00000138658_61 (sequence is synthesized)
gcaatttgacaggtgaggtgaagtgtttctcgggatttcctaggaatgacttgagcgatttggggcgaagggacgaaagactctgctccttaagaagagaaccgggaaggatgctgtttg

SEQ ID NO: 347425 - DNA, 66 bp, Artificial Sequence
  ENSG00000138658_62 (sequence is synthesized)
tattacaggcaattttatatgatgacaaaggagcatgtttggagagtctgtttcttaaatgccttg

SEQ ID NO: 347426 - DNA, 120 bp, Artificial Sequence
  ENSG00000138658_63 (sequence is synthesized)
ctgcagccttgacctccagtgctcaagccatcctcctgcttcagcctccaaagtagctgggaccacagttctcttcctcgggaagtaaagaagagactgcttttcaagctgttattccta

SEQ ID NO: 347427 - DNA, 120 bp, Artificial Sequence
  ENSG00000138658_64 (sequence is synthesized)
aacaaatagagagaaaaacctgtgaccctaaggtaaaatttgtgaagaacatcgatttatttaaccaactacattttcttttctgtttaaaacaaaaaaacaaaaaaacaagtatcagag

SEQ ID NO: 347428 - DNA, 120 bp, Artificial Sequence
  ENSG00000138658_65 (sequence is synthesized)
ttttcacaggcagaaggttagtagcataataaataagtctggttttaagaacaagaaaaactatttaatgactcctgcccccctttttggtcttaaactttctctatactactaatgagc

SEQ ID NO: 347429 - DNA, 120 bp, Artificial Sequence
  ENSG00000138658_66 (sequence is synthesized)
taataataacagtgtttacattatccttccgtacataggatactctaggggttggacacaaagccatgtagagtaaaattaatgaatactctgtggggaacaaaatgagtatctttatac

SEQ ID NO: 347430 - DNA, 120 bp, Artificial Sequence
  ENSG00000138658_67 (sequence is synthesized)
cctttaacttattatagtctattctgccacttatacttctgagtatatagaagtatacgtaaccaacatctaagtagtgctacctattctatatcaaaaattaacaaagacaacagcata

SEQ ID NO: 347431 - DNA, 120 bp, Artificial Sequence
  ENSG00000138658_68 (sequence is synthesized)
taacacagtacctgttaacaacgtaagtcattttttacctttgagtcattggtattaaaaaatggtaatcagaagtaaatatgaaaattcaataaaagtacagtatataaatgttgccaa

SEQ ID NO: 347432 - DNA, 120 bp, Artificial Sequence
  ENSG00000138660_0 (sequence is synthesized)
actcacgctgggctaggagctgaggcgagaagggccatgcggacggcgagggagtccagagccttgagcccggtgctcctccctcgcgcagcggtggctctgcggccgctggagtaaaca

SEQ ID NO: 347433 - DNA, 120 bp, Artificial Sequence
  ENSG00000138660_1 (sequence is synthesized)
ctgcctttgttccctagcgcctcgtctttcgtcgccccgtgccctcacgccgccgggctctggccggcccgccctcggtccttgaaccccatttcggctcgtgccgtgcggatgcagctg

SEQ ID NO: 347434 - DNA, 120 bp, Artificial Sequence
  ENSG00000138660_2 (sequence is synthesized)
ccgggcctgggtttgggcattgagcgggaggaggaggaggagcggcggcgcctgggcggcatgcgatggggaactgctgctggacgcagtgcttcggactgcttcgcaaggaagcggggc

SEQ ID NO: 347435 - DNA, 120 bp, Artificial Sequence
  ENSG00000138660_3 (sequence is synthesized)
ggctgcagcgagtaggcggcggcggaggatccaagtattttagaacatgctcaagaggtgagcacttaacaatagagtttgagaatctagtagaaagtgatgaaggggagagcccaggaa

SEQ ID NO: 347436 - DNA, 120 bp, Artificial Sequence
  ENSG00000138660_4 (sequence is synthesized)
gcagtcataggcctcttactgaggaagaaattgttgacctaagagaaaggcattatgattccattgccgaaaaacaaaaagatcttgataagaaaattcaaaaagagttagccttacaag

SEQ ID NO: 347437 - DNA, 120 bp, Artificial Sequence
  ENSG00000138660_5 (sequence is synthesized)
aagagaagttaagactagaagaagaagctttatacgctgcacagcgtgaagcagccagggcagcaaagcagcgaaagctcttggagcaagaaaggcagagaattgtgcagcaatatcatc

SEQ ID NO: 347438 - DNA, 120 bp, Artificial Sequence
  ENSG00000138660_6 (sequence is synthesized)
cttccaacaatggagaatatcaaagttcaggaccagaagatgacttcgaatcttgtttgagaaatatgaagtcacagtatgaagtttttcgaagtagtagactctcatcagatgctacag

SEQ ID NO: 347439 - DNA, 120 bp, Artificial Sequence
  ENSG00000138660_7 (sequence is synthesized)
ttttgacaccaaatacagaaagcagttgtgatttaatgaccaaaactaaatcaactagtggaaatgacgacagcacatccttagatctagagtgggaagatgaagaaggaatgaatagaa

SEQ ID NO: 347440 - DNA, 120 bp, Artificial Sequence
  ENSG00000138660_8 (sequence is synthesized)
tgcttccaatgagagaacgttccaaaacagaggaagacattctacgggcagcacttaagtatagcaacaagaagactggaagtaatcctacatcagcctctgatgattccaatgggctgg

SEQ ID NO: 347441 - DNA, 120 bp, Artificial Sequence
  ENSG00000138660_9 (sequence is synthesized)
agtgggaaaatgattttgttagtgccgaaatggatgataatggaaattccgagtattctggatttgtaaatcctgtattagaactgtctgattctggcataaggcattctgacacagatc

SEQ ID NO: 347442 - DNA, 120 bp, Artificial Sequence
  ENSG00000138660_10 (sequence is synthesized)
aacagactcgatagggtaaaattgtgtgaccttgtttatcagttatgaccaaatgttaaaaaccaactagaatgtataagtgattgtgcttagcctttttgtaagggagatgtgtaagaa

SEQ ID NO: 347443 - DNA, 120 bp, Artificial Sequence
  ENSG00000138660_11 (sequence is synthesized)
accatgttgtaaatgcttattttattacaaaggagtagggatgataggatctgaattgatacagaattaagtgcaatttcatcatctgccttctgcttttcaagaccaatttaatggtcc

SEQ ID NO: 347444 - DNA, 120 bp, Artificial Sequence
  ENSG00000138660_12 (sequence is synthesized)
tgtcatgttactgattaaatttactttgtcttgtctttatagcatttctgtttactatggtagatttccactttcaatttttaaaattaattttactttgaatgatttatgaagcctatt

SEQ ID NO: 347445 - DNA, 120 bp, Artificial Sequence
  ENSG00000138660_13 (sequence is synthesized)
tcattgtctaactatgaaaatattaagacttttttgttaattctcagccgatgtgaaggaagcatgaggagggatcgtcagattcagatttagaatagtgttcccgtttccagcattatt

SEQ ID NO: 347446 - DNA, 120 bp, Artificial Sequence
  ENSG00000138660_14 (sequence is synthesized)
tatttctatgacttctttggattttattatctaatagtaagtacagttgatgtgggtagatgactctaagaaatgctgaagtatcggcattacatgtgtttatttacatgtcctagtatg

SEQ ID NO: 347447 - DNA, 120 bp, Artificial Sequence
  ENSG00000138660_15 (sequence is synthesized)
tgtcctagtatgataatgttgattcaatctgaacaaaagataatataaaaataacccttcagagtttggacatttcaagttggtaataataaaaaataatatttaagaagatatatatat

SEQ ID NO: 347448 - DNA, 120 bp, Artificial Sequence
  ENSG00000138660_16 (sequence is synthesized)
ttttttccacttcattttacatgccactatattgactttaattgatatacagtattaagtttttaggtgccattatttttaaaaaattctatatttccaatgaacgatgttagattttac

SEQ ID NO: 347449 - DNA, 120 bp, Artificial Sequence
  ENSG00000138660_17 (sequence is synthesized)
acagaacatattctctgcatgatttcagaaaagaaaatctaaaaaggtaatacgggtatttcaaataaaatcctttctggtatgaaaggctccattgattttattaagccttcctttacc

SEQ ID NO: 347450 - DNA, 120 bp, Artificial Sequence
  ENSG00000138660_18 (sequence is synthesized)
ttgtagtacaaggtgctttaatgggatagaactaagcatatcaatatctataactgcattttgtgctagacaattactgttcttttctctaaaatgtatatgtcaatttacaaggccagg

SEQ ID NO: 347451 - DNA, 120 bp, Artificial Sequence
  ENSG00000138660_19 (sequence is synthesized)
gatagaaaacactccataattgctttccttgattttgctgaggatttggtatgattttagtaagcaaactgttttttggtttttccttaatgtttttaattttttttcctcttgcaacaa

SEQ ID NO: 347452 - DNA, 120 bp, Artificial Sequence
  ENSG00000138660_20 (sequence is synthesized)
tgacggtgcatgttcttataaatataggaaggtccagatataaatagtaacctaaagttcttgctgtgcttaaaaaaaaaaatcatgtggccctttcaatatttgaactgctaagcaatg

SEQ ID NO: 347453 - DNA, 120 bp, Artificial Sequence
  ENSG00000138660_21 (sequence is synthesized)
ggccctttcaatatttgaactgctaagcaatgacatctgtagttttatctccttttttatgtcatagaaattaatatgatactttaaatatgtaaatataatacattaggtaatgctatt

SEQ ID NO: 347454 - DNA, 120 bp, Artificial Sequence
  ENSG00000138660_22 (sequence is synthesized)
agctgtgtcttggaaatatttttaaggtaatctatattcacattgcctgtgttaatgctttttaaagtttgtatacatcagatgtatatttttggtttggcataagctacgattgtaatt

SEQ ID NO: 347455 - DNA, 120 bp, Artificial Sequence
  ENSG00000138660_23 (sequence is synthesized)
tttcttggctttttgttcataaagaattttttgaaggaatggtaacaaatggtaatttacaaatggttgtgaataaacacatttttacacttaaaggtaataagttatttgactattatt

SEQ ID NO: 347456 - DNA, 120 bp, Artificial Sequence
  ENSG00000138660_24 (sequence is synthesized)
ctgacttgtaattattttattaaatctgatgtgaagacaaaagtaaattaagaaagcaagatggaactagaaaatgtgttttaactgttaaaaaaaagttaacgttttgttttgtgttta

SEQ ID NO: 347457 - DNA, 120 bp, Artificial Sequence
  ENSG00000138660_25 (sequence is synthesized)
taaaaagtactagaaataacttattcagcaaatattggaatagtatttaatattattggaactgtgtctggtgggtgttagggacatagaagtacaaagacatataaggtctctgctctt

SEQ ID NO: 347458 - DNA, 120 bp, Artificial Sequence
  ENSG00000138660_26 (sequence is synthesized)
tgcttaccattctggtgagagagagagacaataataagtaaacatacatgcaagaaaatcacaggtcacagttagaaaatatacaagattataggagagagagtaactgggggccaattg

SEQ ID NO: 347459 - DNA, 120 bp, Artificial Sequence
  ENSG00000138660_27 (sequence is synthesized)
actacttctcataggtcaggacaatcctctctgaggagatagcttggctaaaacttaattgttttaagttttagttgttaacttgttaattgtttacttggctaaaacctaattgttaag

SEQ ID NO: 347460 - DNA, 120 bp, Artificial Sequence
  ENSG00000138660_28 (sequence is synthesized)
caggaaacagtcaagtaaaacctggtatgaagcatgttataagcaaagggaacggcaagtacaaagtacctgaggtgggaaagagtttgttatgttctgtgaataaaaagaccactggga

SEQ ID NO: 347461 - DNA, 120 bp, Artificial Sequence
  ENSG00000138660_29 (sequence is synthesized)
atgaagcatcatgagtgagggggaagagtggtatgagatgatactggagtggtagttaagggccagatgatgcaagaccttgtagaccaagaatgagttttatttgatgtgtaatagaaa

SEQ ID NO: 347462 - DNA, 120 bp, Artificial Sequence
  ENSG00000138660_30 (sequence is synthesized)
gccactgaaattttttgtaagcaaggatgtacagtcatcatatacacattttcaaacgattgctttagttgctgtgtagagaatggattgtaagaaggcaagagtggatatatagcactc

SEQ ID NO: 347463 - DNA, 120 bp, Artificial Sequence
  ENSG00000138660_31 (sequence is synthesized)
ccaatggaatatagtgtgccttgggtttacaatggctgtgaaaaggcagagcagatttgttttagaggtagaatcatcaggattttctgatgggttggatataagactaaaggaaggggt

SEQ ID NO: 347464 - DNA, 120 bp, Artificial Sequence
  ENSG00000138660_32 (sequence is synthesized)
agaatcagatactactgtaggggtaacacatctggcatggtgccgtggctaccttgctcactgcacatagtccacgtaggcaaaactcaaccacagtctgacacaggtcttggtagaaaa

SEQ ID NO: 347465 - DNA, 120 bp, Artificial Sequence
  ENSG00000138660_33 (sequence is synthesized)
catcgtgatcctctctggatcctccatggcaagataggccatcgtaaaggagctgtcaaagggccatttatcttgcaaaatacctccctgtcttgcaaaaggctgccgtgaggcaatttc

SEQ ID NO: 347466 - DNA, 120 bp, Artificial Sequence
  ENSG00000138660_34 (sequence is synthesized)
tcatccagctggtttccagtgacctcactctcattcaggtgcagataccgactataaaaatgtttagctatagtttagagttggctcctcaacagagctatttctacttgtcatctgtca

SEQ ID NO: 347467 - DNA, 120 bp, Artificial Sequence
  ENSG00000138660_35 (sequence is synthesized)
tcttgtccccttggttcagtgtcatccagggatgtccctaaggaccaggtatacagggagctgactccatcctgatactgcttttgctgtctgtgtaaataataaactgtctcaatctat

SEQ ID NO: 347468 - DNA, 120 bp, Artificial Sequence
  ENSG00000138660_36 (sequence is synthesized)
ttggactcattgtctccctactggccaaatctatagatgtctgacagccagcctagtagctgcaagtgcccttaactataacttcttggttctgatttgacttcagtgtaatgggaggaa

SEQ ID NO: 347469 - DNA, 120 bp, Artificial Sequence
  ENSG00000138660_37 (sequence is synthesized)
caggtttgggaaagtggggaaaatgaaagagttctatttgaaaagttaactttgaggtgttcataagatatttggatgaagatgtcaagtaggtgatgggatatatgtctgcagcccaag

SEQ ID NO: 347470 - DNA, 120 bp, Artificial Sequence
  ENSG00000138660_38 (sequence is synthesized)
aaagaggtctaggttcaagtttgggagtcattagtaggaaaatggtattttaagtcattaaaccagctgagttcaccccaggggagcacataggcagaaaagccccactaagtgttgaca

SEQ ID NO: 347471 - DNA, 120 bp, Artificial Sequence
  ENSG00000138660_39 (sequence is synthesized)
tttagaagttgggggtagtgaaacagtcgtcaaaagaaacagatacaggaggaatgcaggaaccagagaatagtgtcacaggagccaggaaataagagggctcaacaatagcaaatgctt

SEQ ID NO: 347472 - DNA, 120 bp, Artificial Sequence
  ENSG00000138660_40 (sequence is synthesized)
tgaaaagaggtccgctgctttagttgcatttggagacagttacacaaatgaagggatggaaactggggagttggggatgaagaataaagaacagctaatgcagacaatttgaaaagagag

SEQ ID NO: 347473 - DNA, 120 bp, Artificial Sequence
  ENSG00000138660_41 (sequence is synthesized)
cagagaaatggggtagctggaaggggatgtggagttatagaagggtttttatttaaaagatactagctttagagtagataggcagatatgaacagggcaggacagcgccacaaagactgt

SEQ ID NO: 347474 - DNA, 120 bp, Artificial Sequence
  ENSG00000138660_42 (sequence is synthesized)
gagggctggtgacagggaagggaaaatctaacaggagacatcttgagctcatgggcaacaacttcccaataagaatttaagatggcagagtttggccttcctctgggggcatgaccagac

SEQ ID NO: 347475 - DNA, 120 bp, Artificial Sequence
  ENSG00000138660_43 (sequence is synthesized)
atgcgcagtaaggggcaaaatgacagagtttgacaaatatatgaccttcccatggggcttggccgggagtgctagcccagtaagggaaaattgccctaagagagcatgtgcataacttca

SEQ ID NO: 347476 - DNA, 120 bp, Artificial Sequence
  ENSG00000138660_44 (sequence is synthesized)
atcaccaaaaggcccttccagatactggcaaaccactgcacatacagggagggaagagatggggaaaaaaataggaaataataaatctctaagagccctaagacaaaggtcaagctgggt

SEQ ID NO: 347477 - DNA, 120 bp, Artificial Sequence
  ENSG00000138660_45 (sequence is synthesized)
actcaatcttttgacgtcccccttcgttccatccaagtgtacttttttttgcttcaataaactcttgtttctgccttaaatataattctgtctcttggctgaattctttctcccaagaag

SEQ ID NO: 347478 - DNA, 120 bp, Artificial Sequence
  ENSG00000138660_46 (sequence is synthesized)
acaaagatcaaggactatggagcgtgcccatactcaccactggtaacactagaacttttgaaatgatatattttggaattatgcccgcttttttttcaatagataaatatatttttctag

SEQ ID NO: 347479 - DNA, 120 bp, Artificial Sequence
  ENSG00000138660_47 (sequence is synthesized)
cagaggccagaggtttcgtttaactatgtaaacatgtcctaatcataatttcttgagaatacagacatctaaaaaagattttatgttaaatatgtagtgttttcccatcttcatttattt

SEQ ID NO: 347480 - DNA, 120 bp, Artificial Sequence
  ENSG00000138660_48 (sequence is synthesized)
ggtatttctggttaattgtctgacagtaaaggagttcacaaaagaaatctgagattccacattgaaatcctaaatgtaaaacaacaacaacaataacaataaaaatggagagaaacagaa

SEQ ID NO: 347481 - DNA, 120 bp, Artificial Sequence
  ENSG00000138660_49 (sequence is synthesized)
taagtatttccataatagtacaaaacttgtatttgtttttctcattaatcgtctcattagttctaacaattacgtttacaatttttattatttttgttttagaatttttattttctggtt

SEQ ID NO: 347482 - DNA, 120 bp, Artificial Sequence
  ENSG00000138660_50 (sequence is synthesized)
acatatgcctccttccctttgtggtagaacattttattgcggtgtagagcatcattcacctcaagatgtgtatatacgcattcatgtttatgtgttccctaaaaattattccttctaaaa

SEQ ID NO: 347483 - DNA, 120 bp, Artificial Sequence
  ENSG00000138660_51 (sequence is synthesized)
gacattgtcttggaagaaaactgagaacatttaagttgaaacattattattaatttaaactgactttattgcatttttaagagtggtctcatttcccatatagatgtgatacaatagctg

SEQ ID NO: 347484 - DNA, 120 bp, Artificial Sequence
  ENSG00000138660_52 (sequence is synthesized)
aagaaggtattttataattcacaattttacctgaaaaatttaacgtaatctgtgttgatttatgtaaatctaccttggtctttatttaaatggaaataaattcaaggccttgaaaaatca

SEQ ID NO: 347485 - DNA, 120 bp, Artificial Sequence
  ENSG00000138663_0 (sequence is synthesized)
gctgccagaggcccccgcatccaccgctgagctgggagaaagatggcggcagccgtgcgacaggatttggcccagctcatgaattcgagcggctctcataaagatctggctggcaagtat

SEQ ID NO: 347486 - DNA, 120 bp, Artificial Sequence
  ENSG00000138663_1 (sequence is synthesized)
cgtcagatcctggaaaaagccattcagttatctggagcagaacaactagaagctttgaaagcttttgtggaagcaatggtaaatgagaatgtcagtctcgtgatctcgcggcagttgctg

SEQ ID NO: 347487 - DNA, 120 bp, Artificial Sequence
  ENSG00000138663_2 (sequence is synthesized)
actgatttttgcacacatcttcctaacttgcctgatagcacagccaaagaaatctatcacttcaccttggaaaagatccagcctagagtcatttcatttgaggagcaggttgcttccata

SEQ ID NO: 347488 - DNA, 120 bp, Artificial Sequence
  ENSG00000138663_3 (sequence is synthesized)
agacagcatcttgcatctatatatgagaaagaagaagattggagaaatgcagcccaagtgttggtgggaattcctttggaaacaggacaaaaacagtacaatgtagattataaactggag

SEQ ID NO: 347489 - DNA, 120 bp, Artificial Sequence
  ENSG00000138663_4 (sequence is synthesized)
acttacttgaagattgctaggctatatctggaggatgatgatccagtccaggcagaggcttacataaatcgagcatcgttgcttcagaatgaatcaaccaatgaacaattacagatacat

SEQ ID NO: 347490 - DNA, 120 bp, Artificial Sequence
  ENSG00000138663_5 (sequence is synthesized)
tataaggtatgctatgcacgtgttcttgattatagaagaaaattcattgaagctgcacaaaggtacaatgagctctcttacaagacaatagtccacgaaagtgaaagactagaggcctta

SEQ ID NO: 347491 - DNA, 120 bp, Artificial Sequence
  ENSG00000138663_6 (sequence is synthesized)
aacttgctgcctatgggatcctagagaaaatgtatctagataggatcatcagaggaaatcaacttcaagaatttgctgccatgctgatgcctcaccaaaaagcaactacagctgatggtt

SEQ ID NO: 347492 - DNA, 120 bp, Artificial Sequence
  ENSG00000138663_7 (sequence is synthesized)
ccagcatcttggacagagctgttattgaacacaatttgttgtctgcaagcaaattatataataatattaccttcgaagaacttggagctcttttagagatccctgcagctaaggcggaaa

SEQ ID NO: 347493 - DNA, 120 bp, Artificial Sequence
  ENSG00000138663_8 (sequence is synthesized)
agatagcatctcaaatgataaccgaaggacgtatgaatggatttattgaccagattgatggaatagttcattttgaaacacgagaagccctgccaacgtgggataagcagatccaatcac

SEQ ID NO: 347494 - DNA, 120 bp, Artificial Sequence
  ENSG00000138663_9 (sequence is synthesized)
tttgtttccaagtgaataaccttttggagaaaattagtcaaacagcaccagaatggacagcacaagccatggaagcccagatggctcagtgaatccttgcagaacttctgtgcacatgac

SEQ ID NO: 347495 - DNA, 120 bp, Artificial Sequence
  ENSG00000138663_10 (sequence is synthesized)
atctttttccatgttgtgcagatcagtttcactatctccaaagcatttgcatcatgaccttatacatttcaatcccttttatgctggattccgtttaaagaagacattattagagcagga

SEQ ID NO: 347496 - DNA, 120 bp, Artificial Sequence
  ENSG00000138663_11 (sequence is synthesized)
agtacaagcatttaaaatatgtagttcccatatatttcagggtctctgtgtattaagctaactcagatgttttgaaagctttttctttaaacagaggtgaaatatctgtggctaaaaagt

SEQ ID NO: 347497 - DNA, 120 bp, Artificial Sequence
  ENSG00000138663_12 (sequence is synthesized)
ttgagatttgtgataactttgtagtcatgtaaaacttaagtgcttcatgcctctccaaatgtggttattctaataaatggagaaatgagccaaataaaagtagtactttgtttttagtta

SEQ ID NO: 347498 - DNA, 120 bp, Artificial Sequence
  ENSG00000138663_13 (sequence is synthesized)
atttagtagacaaaaatgaggtcataagataggtttttttttcctgaagaaacattgtgaaaataacattgtgaaatttgatgctcatttatttctcttagggcagcagcgttctcggat

SEQ ID NO: 347499 - DNA, 120 bp, Artificial Sequence
  ENSG00000138663_14 (sequence is synthesized)
aggagataatcatccaatttcatttttgacaaaacagtgtgccaaacgacattttatgatgcaaaatcaagtaaatattaggttgttacaactccaactgacatttgcttataaagtaaa

SEQ ID NO: 347500 - DNA, 77 bp, Artificial Sequence
  ENSG00000138663_15 (sequence is synthesized)
gggggatattaatcattactccaggacgacagagggaaaatcgctttgtactggacaaactggaatgtctgaccaac

SEQ ID NO: 347501 - DNA, 120 bp, Artificial Sequence
  ENSG00000138663_16 (sequence is synthesized)
aaatcgctttgtactggacaaactggaatgtctgaccaaccattataaagtgcacggagtgggaggaggaatagggacattttaattgtatttctaaaaagtatcttctgtggtgaatcg

SEQ ID NO: 347502 - DNA, 120 bp, Artificial Sequence
  ENSG00000138663_17 (sequence is synthesized)
gaaacaaaactcattctttaccacaggcagtttaagcgctgcctgaaagatcgaaggacggtaaaccacagacgtgagaaacggaactttgcgaaaacgcagtcgttttatgtaccggct

SEQ ID NO: 347503 - DNA, 120 bp, Artificial Sequence
  ENSG00000138663_18 (sequence is synthesized)
actcattggagttacaccagagactcactactggagttcatcagccaatccaaagtccaagcgtgagagccagagcctgtaggagagacctgggcaggcctcagacctgaggagtggagc

SEQ ID NO: 347504 - DNA, 120 bp, Artificial Sequence
  ENSG00000138663_19 (sequence is synthesized)
tccgcatcactcaaccctgggggcggagctagcccaggctcccacacccgacgctctggcccacacagacgctactctgtagcatctcaggttccctctggctgcactctggaggaccac

SEQ ID NO: 347505 - DNA, 120 bp, Artificial Sequence
  ENSG00000138663_20 (sequence is synthesized)
aaccaccaatccatcttctgtctctggatttacctagtctggatagttcatataaatggaatcatacaatatgtgacatgtgaccttttggctgattccactcagcatagtatctttagg

SEQ ID NO: 347506 - DNA, 120 bp, Artificial Sequence
  ENSG00000138663_21 (sequence is synthesized)
atccaccgctgagctgggagaaagatggcggcagccgtgcgacaggatttggcccagctcatgaattcgagcggctctcataaagatctggctggcaaaacattattttcatttggtatt

SEQ ID NO: 347507 - DNA, 120 bp, Artificial Sequence
  ENSG00000138663_22 (sequence is synthesized)
ggtcggctggggaggcaaatgttgggagaagcagaaagctggaggggaccttgtgcaggggccttcgaggctatagacttgaaatgattgtcagcttgttcagttcttgatagaatcttt

SEQ ID NO: 347508 - DNA, 120 bp, Artificial Sequence
  ENSG00000138663_23 (sequence is synthesized)
ctggtcccttaggattttggaacagcggtctgagagacgactgctaccctggccttagtagccttccctggtacctcttcccatcgctggccggcctcacaccgaatctggcctctcttt

SEQ ID NO: 347509 - DNA, 120 bp, Artificial Sequence
  ENSG00000138663_24 (sequence is synthesized)
ggaccttcctcctctttttttttgattcagagaaatgtatattctggggccttgatgctgcgtttttcggggagatggcttcttggggctggctgaggttgaggcggtatggccgctgtc

SEQ ID NO: 347510 - DNA, 120 bp, Artificial Sequence
  ENSG00000138663_25 (sequence is synthesized)
gggtcaggatgtctacagtagtgatgtttgcaggaatctgaattttgtcgaaatttatatagaatgcttaggttcactccaagttaaaatgtgtgacgtgcctgttctgcaagcagttgt

SEQ ID NO: 347511 - DNA, 120 bp, Artificial Sequence
  ENSG00000138668_0 (sequence is synthesized)
gtcggccattttaggtggtccgcggcggcgccattaaagcgaggaggaggcgagagcggccgccgctggtgcttattcttttttagtgcagcgggagagagcgggagtgtgcgccgcgcg

SEQ ID NO: 347512 - DNA, 120 bp, Artificial Sequence
  ENSG00000138668_1 (sequence is synthesized)
agagtgggaggcgaagggggcaggccagggagaggcgcaggagcctttgcagccacgcgcgcgccttccctgtcttgtgtgcttcgcgaggtagagcgggcgcgcggcagcggcggggat

SEQ ID NO: 347513 - DNA, 120 bp, Artificial Sequence
  ENSG00000138668_2 (sequence is synthesized)
tactttgctgctagtttcggttcgcggcagcggcgggtgtagtctcggcggcagcggcggagacactagcactatgtcggaggagcagttcggcggggacggggcggcggcagcggcaac

SEQ ID NO: 347514 - DNA, 120 bp, Artificial Sequence
  ENSG00000138668_3 (sequence is synthesized)
cgagcaggagggagccatggtggcggcgacacagggggcagcggcggcggcgggaagcggagccgggaccgggggcggaaccgcgtctggaggcaccgaagggggcagcgccgagtcgga

SEQ ID NO: 347515 - DNA, 120 bp, Artificial Sequence
  ENSG00000138668_4 (sequence is synthesized)
cgaagggggcagcgccgagtcggagggggcgaagattgacgccagtaagaacgaggaggatgaaggccattcaaactcctccccacgacactctgaagcagcgacggcacagcgggaaga

SEQ ID NO: 347516 - DNA, 120 bp, Artificial Sequence
  ENSG00000138668_5 (sequence is synthesized)
atggaaaatgtttataggaggccttagctgggacactacaaagaaagatctgaaggactacttttccaaatttggtgaagttgtagactgcactctgaagttagatcctatcacagggcg

SEQ ID NO: 347517 - DNA, 120 bp, Artificial Sequence
  ENSG00000138668_6 (sequence is synthesized)
atcaaggggttttggctttgtgctatttaaagaatcggagagtgtagataaggtcatggatcaaaaagaacataaattgaatgggaaggtgattgatcctaaaagggccaaagccatgaa

SEQ ID NO: 347518 - DNA, 120 bp, Artificial Sequence
  ENSG00000138668_7 (sequence is synthesized)
aacaaaagagccggttaaaaaaatttttgttggtggcctttctccagatacacctgaagagaaaataagggagtactttggtggttttggtgaggtggaatccatagagctccccatgga

SEQ ID NO: 347519 - DNA, 120 bp, Artificial Sequence
  ENSG00000138668_8 (sequence is synthesized)
caacaagaccaataagaggcgtgggttctgctttattacctttaaggaagaagaaccagtgaagaagataatggaaaagaaataccacaatgttggtcttagtaaatgtgaaataaaagt

SEQ ID NO: 347520 - DNA, 120 bp, Artificial Sequence
  ENSG00000138668_9 (sequence is synthesized)
agccatgtcgaaggaacaatatcagcaacagcaacagtggggatctagaggaggatttgcaggaagagctcgtggaagaggtggtggccccagtcaaaactggaaccagggatatagtaa

SEQ ID NO: 347521 - DNA, 120 bp, Artificial Sequence
  ENSG00000138668_10 (sequence is synthesized)
ctattggaatcaaggctatggcaactatggatataacagccaaggttacggtggttatggaggatatgactacactggttacaacaactactatggatatggtgattatagcaaccagca

SEQ ID NO: 347522 - DNA, 120 bp, Artificial Sequence
  ENSG00000138668_11 (sequence is synthesized)
gagtggttatgggaaggtatccaggcgaggtggtcatcaaaatagctacaaaccatactaaattattccatttgcaacttatccccaacaggtggtgaagcagtattttccaatttgaag

SEQ ID NO: 347523 - DNA, 120 bp, Artificial Sequence
  ENSG00000138668_12 (sequence is synthesized)
tgaatggaagtatgacgttgggtccctctgaagtttaattctgagttctcattaaaagaaatttgctttcattgttttatttcttaattgctatgcttcagaatcaatttgtgttttatg

SEQ ID NO: 347524 - DNA, 120 bp, Artificial Sequence
  ENSG00000138668_13 (sequence is synthesized)
ccctttcccccagtattgtagagcaagtcttgtgttaaaagcccagtgtgacagtgtcatgatgtagtagtgtcttactggttttttaataaatccttttgtataaaaatgtattggctc

SEQ ID NO: 347525 - DNA, 120 bp, Artificial Sequence
  ENSG00000138668_14 (sequence is synthesized)
ttttatcatcagaataggaaaaattgtcatggattcaagttattaaaagcataagtttggaagacaggcttgccgaaattgaggacatgattaaaattgcagtgaagtttgaaatgtttt

SEQ ID NO: 347526 - DNA, 120 bp, Artificial Sequence
  ENSG00000138668_15 (sequence is synthesized)
tagcaaaatctaatttttgccataatgtgtcctccctgtccaaattgggaatgacttaatgtcaatttgtttgttggttgttttaataatacttccttatgtagccattaagatttatat

SEQ ID NO: 347527 - DNA, 120 bp, Artificial Sequence
  ENSG00000138668_16 (sequence is synthesized)
gaatattttcccaaatgcccagtttttgcttaatatgtattgtgctttttagaacaaatctggataaatgtgcaaaagtacccctttgcacagatagttaatgttttatgcttccattaa

SEQ ID NO: 347528 - DNA, 120 bp, Artificial Sequence
  ENSG00000138668_17 (sequence is synthesized)
ataaaaaggacttaaaatctgttaattataatagaaatgcggctagttcagagagatttttagagctgtggtggacttcatagatgaattcaagtgttgagggaggattaaagaaatata

SEQ ID NO: 347529 - DNA, 120 bp, Artificial Sequence
  ENSG00000138668_18 (sequence is synthesized)
taccgtgtttatgtgtgtgtgcttatttgtttgaatgattttattttccatttctcaaaggttttatttttttggttagggccttaaaatttcaggactgtgattattagtatgtgtgcc

SEQ ID NO: 347530 - DNA, 120 bp, Artificial Sequence
  ENSG00000138668_19 (sequence is synthesized)
taaggaactttttgagtcactcttaagaaagtgaaactgaagagtctaagtgataactataggattaagtcagaattgtttttcctgtcatttgttggaagcttcttgagttctgttatt

SEQ ID NO: 347531 - DNA, 120 bp, Artificial Sequence
  ENSG00000138668_20 (sequence is synthesized)
agcattcagggaattgatacccatcaacttgaatggaaaatcgtttgtaggtattacttaagtgaatgttaagagttccaccctgagtggtaatctaaggctgtgcagtcagttacttca

SEQ ID NO: 347532 - DNA, 120 bp, Artificial Sequence
  ENSG00000138668_21 (sequence is synthesized)
gactgctcagaatagttcattagaaaggtaacaaatgagaaatgtattattatacagttctatagtagtgaagtgatggaatacctttcttacttttgtggagttacatctgatgctaag

SEQ ID NO: 347533 - DNA, 120 bp, Artificial Sequence
  ENSG00000138668_22 (sequence is synthesized)
aatttgacctccaactaagcaaacattttaatgagcaaaagttagtgttattaaagtttttttatgatagatccaaattgaggacctgtgtcctgtttttataagattgcaacccagcta

SEQ ID NO: 347534 - DNA, 120 bp, Artificial Sequence
  ENSG00000138668_23 (sequence is synthesized)
tgctcatttgtttatgttttgtatatggctgcttttgtgttacagtggtagagtttagtagttaggacagagacctgcaaagcaaaataatttacagtctggccctttacagaaaagttt

SEQ ID NO: 347535 - DNA, 120 bp, Artificial Sequence
  ENSG00000138668_24 (sequence is synthesized)
gctgactcatggtcaaaataaatgaaaattttttgtgttagggttgttaagctagggttctttttggtatcatatgcttattttatgtaaatctctcaataaaaaattatttttaagaga

SEQ ID NO: 347536 - DNA, 120 bp, Artificial Sequence
  ENSG00000138668_25 (sequence is synthesized)
acccagaagtgcttaccatattataacatagtgactttcaaagatatgtaacacaggtgctcttaagcttttgcctttttgtcctattattaacaagtcagtaaagttaacaggtaaagt

SEQ ID NO: 347537 - DNA, 120 bp, Artificial Sequence
  ENSG00000138668_26 (sequence is synthesized)
actgctaatgggtacaaattaaggaattgcagcaaaaaagtattgcctactaactctgacattataccttgtttgtacccgccagcgggaacttcattgcaggccctgtgtcgcgctgac

SEQ ID NO: 347538 - DNA, 120 bp, Artificial Sequence
  ENSG00000138668_27 (sequence is synthesized)
ttcacgattctcacaggcccgctcaatgcggacagggtacgagatgctcacgctctcgaatgctgccgtttggtatggtctcttccaacatcctgtatcagcattataaaataaaatgga

SEQ ID NO: 347539 - DNA, 120 bp, Artificial Sequence
  ENSG00000138668_28 (sequence is synthesized)
agggtacgagatgctcacgctctcgaatgctgccgtttggtggtgaagcagtattttccaatttgaagattcatttgaaggtggctcctgccacctgctaatagcagttcaaactaaatt

SEQ ID NO: 347540 - DNA, 120 bp, Artificial Sequence
  ENSG00000138668_29 (sequence is synthesized)
cccattatggactcagagtcacttggcttttcaaagctgttagggtagattatgtgatctgttttggaataaggatattgtaaatacttcattagcaggtctttgaaggttggataatgt

SEQ ID NO: 347541 - DNA, 120 bp, Artificial Sequence
  ENSG00000138668_30 (sequence is synthesized)
gtttttctcattgagcacctactctatgcagagtattgctggggtagagtatacaaagatgaaatagacaaacattcttaaatacagacaattaagaggaagaaatctagattagaagga

SEQ ID NO: 347542 - DNA, 120 bp, Artificial Sequence
  ENSG00000138668_31 (sequence is synthesized)
gacttttgttgaaaataggaaaggaattaagaatagggtgtagtgccttatcagttgaaatgcatgtgtaagtgcaaatttaatgagactaatcattatagactcattagtgaggctgga

SEQ ID NO: 347543 - DNA, 120 bp, Artificial Sequence
  ENSG00000138668_32 (sequence is synthesized)
cgcgatggctcatgcctgtagtaatcccagcacttgggaggccgaagtgggtggattactggagaccaggagatgaagaccatcctggacaacatagtgggaccccgtctcaattaaaag

SEQ ID NO: 347544 - DNA, 120 bp, Artificial Sequence
  ENSG00000138668_33 (sequence is synthesized)
taaaacaaacttagactcattagtgaaataggtagataatagaggtttcttttatgaattaatgaaagttgagaaatttgtggccttgggctccagatacgtcccacagacatttattgc

SEQ ID NO: 347545 - DNA, 120 bp, Artificial Sequence
  ENSG00000138668_34 (sequence is synthesized)
ttgattgaaacaataagtgcttttttagtgttgaggatttgagatattgcccacaaaactcagtatctagctttttaaaaaatacttgcaagagcacgcaacatgggaactgacgctgcc

SEQ ID NO: 347546 - DNA, 120 bp, Artificial Sequence
  ENSG00000138668_35 (sequence is synthesized)
ctcctgtacggcagcatctctcaaactgagtagtagcttccatcttggtttgggcatatgctctccagtttttagtagtcctcaccaccctacttcctgttttctctcaaatacattttt

SEQ ID NO: 347547 - DNA, 120 bp, Artificial Sequence
  ENSG00000138668_36 (sequence is synthesized)
attctgtttttcttagatttgactgttttcttcttgttctttgtgggcatttgaatttgtgacccttgagttaggtagtaaatgtcagtgcgtggtaaagcttatttttgtaaatagttg

SEQ ID NO: 347548 - DNA, 120 bp, Artificial Sequence
  ENSG00000138668_37 (sequence is synthesized)
tgaagaccttagatggaatgggtgttctaatttgaagaattccttaaaaggattagaataaatagggagaaacaggagactagaacttcagtgccaaatacatgttttctttgtgtgttt

SEQ ID NO: 347549 - DNA, 120 bp, Artificial Sequence
  ENSG00000138668_38 (sequence is synthesized)
tttgacatttattttgtacaaatttggataggcagaaaggttagtgtagccttgccaagtgcaaatgtcttcaggtttcaaattcctggaaacttgaaactgcagccattttattgcttg

SEQ ID NO: 347550 - DNA, 120 bp, Artificial Sequence
  ENSG00000138668_39 (sequence is synthesized)
gttcctcccagcctatatcacacacacattataagggtagggtgtatgtgtggttctatatatgtttgctgggcatttgttttacttggatttaaaaattttaagctcagttcagatctt

SEQ ID NO: 347551 - DNA, 120 bp, Artificial Sequence
  ENSG00000138668_40 (sequence is synthesized)
ttaagctcaaggtattctaaatgtcacttcttggaccaaccaataatcttggcatgatgtgtcttaatcctataaaactgaataataccacatgttgccagttaaaactaatagtatcct

SEQ ID NO: 347552 - DNA, 120 bp, Artificial Sequence
  ENSG00000138668_41 (sequence is synthesized)
atgttgagcttgatagaaccaaaaaacttgacttttagacatggaaagccctgacttcattgtgcaactaaggtagttgctctccacctgatttgtagcaactgttgagtcgtcaggtaa

SEQ ID NO: 347553 - DNA, 120 bp, Artificial Sequence
  ENSG00000138668_42 (sequence is synthesized)
agggttctactagaagcaatcttacatttttttggaggagagtggttgcattggttgcattgttttaagtggtttttcttttccttccttggttagaccagttcttggagttatatcctt

SEQ ID NO: 347554 - DNA, 120 bp, Artificial Sequence
  ENSG00000138668_43 (sequence is synthesized)
tcttaggtgactaggcctgctgcacaataataggttaattaaagtcagaagaaggtcagcaaagatggattgggtgagattggggcccttttcttagaagggcagagatactaagcactg

SEQ ID NO: 347555 - DNA, 120 bp, Artificial Sequence
  ENSG00000138668_44 (sequence is synthesized)
attgtggttgacaatttgttctaaattttaagatattttttgctggtggttgtgaaagggtcagctgtccatcctttgaaacttaaaacttttaaactgtaagggtgaggggattgtctc

SEQ ID NO: 347556 - DNA, 120 bp, Artificial Sequence
  ENSG00000138668_45 (sequence is synthesized)
ccattttatacaataagtcaagtaatcagctcattctgaatgcctgccattgtatgcattcactacatatttggtaaattatttgataaatgattgctcagggtgaatttttcacacttg

SEQ ID NO: 347557 - DNA, 120 bp, Artificial Sequence
  ENSG00000138668_46 (sequence is synthesized)
ggaattaagctacccttaattttttgagattgtttaaaattaggtactgttctgattattagtatgtaaccactaccgttctggttctaacacttgttttattttagaccagcagagtgg

SEQ ID NO: 347558 - DNA, 120 bp, Artificial Sequence
  ENSG00000138668_47 (sequence is synthesized)
ttttaatgcattttttacaggcccagtaatggttaaatacgtcagcttactgaataattttaactatttattcttctaaggatacagcttgtctctggattttccagtcttaattttata

SEQ ID NO: 347559 - DNA, 120 bp, Artificial Sequence
  ENSG00000138668_48 (sequence is synthesized)
ttttattaatctattttaatgcttgcttttcccatttatagacgttgtagcagtaattgcaagaagttcttgagctgaattcctgttgtgacaacttcctataattacagtagataactt

SEQ ID NO: 347560 - DNA, 120 bp, Artificial Sequence
  ENSG00000138668_49 (sequence is synthesized)
tttcttttagtcgtatataacttttctataacttgtgatggacaagagatatgcttatccaataaaataagcttaaatattagatgctcttgggtcaaaatgtccttttaccaaattgac

SEQ ID NO: 347561 - DNA, 120 bp, Artificial Sequence
  ENSG00000138668_50 (sequence is synthesized)
ctttttatgagttctttgggtaaatactttaaagctttttatattttaaagaatacttgtaaaagcatatcacatcttaaaccagtggtgcacatgtggatttacagctcatggactcta

SEQ ID NO: 347562 - DNA, 120 bp, Artificial Sequence
  ENSG00000138668_51 (sequence is synthesized)
ctgttcagctttaatttataaaacatatcacacatttaatgttatacagtatttacatatagtggaacatagggataactcagttttatgtaaatttttgttaagtgttgtagcctgccc

SEQ ID NO: 347563 - DNA, 120 bp, Artificial Sequence
  ENSG00000138668_52 (sequence is synthesized)
gacagcgccaggggcacagggctgacatctcagggctaattccctcctccagtgcgtaaatccaggcttaagccgccgcagggtgtgagcctcccctcccccacccgaacgccgcagctg

SEQ ID NO: 347564 - DNA, 120 bp, Artificial Sequence
  ENSG00000138669_0 (sequence is synthesized)
caccgtgtgcacggcggggctggctgagctgacctgcgctgggctccggcgccgcaggcggctggggagggcggcgtgggagaggacgctgagacgcaggggcggccgcgccgaggtgac

SEQ ID NO: 347565 - DNA, 120 bp, Artificial Sequence
  ENSG00000138669_1 (sequence is synthesized)
gacgcaggggcggccgcgccgaggtgacaagctgcgcacctggaaagttacccggctgtctggtccctgagcaaaatgggaaatggttcagtgaaacctaaacattctaagcacccagat

SEQ ID NO: 347566 - DNA, 120 bp, Artificial Sequence
  ENSG00000138669_2 (sequence is synthesized)
ggacactctgggaacctcaccactgatgctctgcggaacaaggtgacagagctggagagagagttgaggaggaaggatgctgagatccaggagcgggagtaccatttgaaggagctgcgg

SEQ ID NO: 347567 - DNA, 120 bp, Artificial Sequence
  ENSG00000138669_3 (sequence is synthesized)
gagcagctgtcgaagcagactgtggccattgctgaactcacagaggagctccagaacaagtgcatccagctgaacaagctgcaggatgtggtgcatatgcagggaggaagcccgcttcag

SEQ ID NO: 347568 - DNA, 120 bp, Artificial Sequence
  ENSG00000138669_4 (sequence is synthesized)
gcctctccagataaagtgcctcttgaggtccaccggaagacctctggattggtctctctccatagcaggaggggagcaaaggctggcgtgtctgctgagccaacaacccggacctatgac

SEQ ID NO: 347569 - DNA, 120 bp, Artificial Sequence
  ENSG00000138669_5 (sequence is synthesized)
ctgaacaaaccccctgaattttcctttgagaaagcaagagtcagaaaagactccagtgagaagaagctcattacagatgcccttaataaaaatcagtttctgaaaagactggatcctcag

SEQ ID NO: 347570 - DNA, 120 bp, Artificial Sequence
  ENSG00000138669_6 (sequence is synthesized)
cagatcaaagacatggtggaatgcatgtatgggagaaactatcagcaagggagttacattattaagcaaggagaaccaggaaaccatatctttgtgctggcagagggtcgactagaggtg

SEQ ID NO: 347571 - DNA, 120 bp, Artificial Sequence
  ENSG00000138669_7 (sequence is synthesized)
ttccaaggggagaaattgctgtcctccatccctatgtggaccacatttggggagcttgccattttatacaattgtacaaggactgcctctgtgaaagctattaccaatgttaaaacatgg

SEQ ID NO: 347572 - DNA, 120 bp, Artificial Sequence
  ENSG00000138669_8 (sequence is synthesized)
gcactagatcgagaggtattccagaatataatgaggaggacagcccaagctagagatgaacaatacagaaacttcctcagaagtgtatccttgctgaagaatttacctgaagataaatta

SEQ ID NO: 347573 - DNA, 120 bp, Artificial Sequence
  ENSG00000138669_9 (sequence is synthesized)
accaagatcattgactgcttggaagtggaatactatgacaaaggagattacatcattagagagggcgaggaaggaagtacctttttcattttggcaaaaggaaaggtaaaagtaacacag

SEQ ID NO: 347574 - DNA, 120 bp, Artificial Sequence
  ENSG00000138669_10 (sequence is synthesized)
agcacagaaggccatgatcaaccacagctgataaaaacactgcagaaaggagaatactttggagaaaaagctcttatcagtgatgatgtcaggtcagctaacattattgctgaagaaaat

SEQ ID NO: 347575 - DNA, 120 bp, Artificial Sequence
  ENSG00000138669_11 (sequence is synthesized)
gatgttgcatgcctggttatagatcgagaaacattcaaccaaactgtcggtacatttgaagagctgcaaaaataccttgaaggatatgtggcaaacctgaaccgtgatgatgaaaaaaga

SEQ ID NO: 347576 - DNA, 120 bp, Artificial Sequence
  ENSG00000138669_12 (sequence is synthesized)
catgcgaagcggtccatgtctaactggaagctgtccaaagcactctctctggaaatgattcagctgaaggagaaggtggccagattttcctcatcatccccattccagaaccttgagatt

SEQ ID NO: 347577 - DNA, 120 bp, Artificial Sequence
  ENSG00000138669_13 (sequence is synthesized)
attgcaacactgggcgttggtgggttcggaagagttgagcttgttaaagtaaaaaatgagaatgttgcttttgctatgaagtgtataaggaagaagcacatagttgacaccaagcagcag

SEQ ID NO: 347578 - DNA, 120 bp, Artificial Sequence
  ENSG00000138669_14 (sequence is synthesized)
gagcatgtctactcagagaagaggatcctagaggagctgtgctctccattcattgtgaaattatatcgtactttcaaggacaataagtatgtatacatgcttctggaggcctgcttaggt

SEQ ID NO: 347579 - DNA, 120 bp, Artificial Sequence
  ENSG00000138669_15 (sequence is synthesized)
ggggagctctggagtatattaagggacagaggcagctttgatgaacccacctccaaattctgcgttgcttgtgtgacagaagcatttgattacctgcatcgactaggtattatctacaga

SEQ ID NO: 347580 - DNA, 120 bp, Artificial Sequence
  ENSG00000138669_16 (sequence is synthesized)
gacttgaaaccagaaaacttaattctagatgctgagggttaccttaaattggttgactttggatttgcgaagaaaatagggtctggacagaaaacatggacattctgtgggactccagaa

SEQ ID NO: 347581 - DNA, 120 bp, Artificial Sequence
  ENSG00000138669_17 (sequence is synthesized)
tatgtagctcctgaagtcattctcaacaagggacatgacttcagtgtggatttctggtcactgggaattctagtgtatgagctcctaacgggcaacccacccttttctggggttgaccaa

SEQ ID NO: 347582 - DNA, 120 bp, Artificial Sequence
  ENSG00000138669_18 (sequence is synthesized)
atgatgacctacaatttgattctcaaaggaattgaaaaaatggattttcccaggaagataacacgacgacctgaggatttgattcggaggctttgcaggcaaaatccaacagaaaggctg

SEQ ID NO: 347583 - DNA, 120 bp, Artificial Sequence
  ENSG00000138669_19 (sequence is synthesized)
ggaaatctgaagaatggaataaatgacattaagaaacacaggtggttaaatggttttaattgggagggactgaaagcacggagccttccatcacctttgcaaagagagctcaagggaccc

SEQ ID NO: 347584 - DNA, 120 bp, Artificial Sequence
  ENSG00000138669_20 (sequence is synthesized)
aatatcctcctgaaaagggaatgcctccagatgagctatcaggctgggataaagacttctgacagaagaaaagttgattactgcctgtactctacagaagaggacctcaaggatcaataa

SEQ ID NO: 347585 - DNA, 120 bp, Artificial Sequence
  ENSG00000138669_21 (sequence is synthesized)
tccaacacattattttcttttcagagtattataatatctttggaagaccattagggaaaagaaattcctgcacaatgggaagaggagaatggtgtggatatggttctgagttatagtgtc

SEQ ID NO: 347586 - DNA, 120 bp, Artificial Sequence
  ENSG00000138669_22 (sequence is synthesized)
ttatttagatgctgtgaattattgatgtattacattatttgcttttctcaactgctagaggctaccccattttcctttccacaatcagagccatttttgttaaagtggcagttttttctg

SEQ ID NO: 347587 - DNA, 120 bp, Artificial Sequence
  ENSG00000138669_23 (sequence is synthesized)
caatctattgttccattccaatcatatccttctcgtttgagtactactaacgtttaaaaagggtcttgcccttgaataactaagtcatacaaatagaaggaaaaacaatggtgaattttg

SEQ ID NO: 347588 - DNA, 120 bp, Artificial Sequence
  ENSG00000138669_24 (sequence is synthesized)
gagagctccccagctctcagcaacttcatataagcatggtggtatcttaaaatggtggtttgcagaaaccatggtagccaacagaacctcctgactttcacctgcttttaacctgaaaat

SEQ ID NO: 347589 - DNA, 120 bp, Artificial Sequence
  ENSG00000138669_25 (sequence is synthesized)
atattaatacgcctctgacatgagtccagggagaggcaagattgagcaatagtcagtggcaccatttcctaaagtaactgaatcaatcaatccagtcaggtaattattttctattgggga

SEQ ID NO: 347590 - DNA, 120 bp, Artificial Sequence
  ENSG00000138669_26 (sequence is synthesized)
acttagaaaaaaaagtaaagcaagaaatattttctctcctttatgatcagtgataccttagagacttttcgaaagtccttgttaaagatagttacaatgtgtggttaaatgatgctaaaa

SEQ ID NO: 347591 - DNA, 120 bp, Artificial Sequence
  ENSG00000138669_27 (sequence is synthesized)
tattttcacaaccagagtagaaaacgtgctggaacaaaattgcgaaggcttttgcctcccagtaaatagaaaggaaaatatattctagtaggtaagactgctgactctttgaaaatctga

SEQ ID NO: 347592 - DNA, 120 bp, Artificial Sequence
  ENSG00000138669_28 (sequence is synthesized)
ggtattttgaaaaattctgtgatagttgctattaataaaccaaaattgtatagaatcatcgttaatttttaatataaatcccattgacaaatgttgatgcactgtagtcactgctgagtt

SEQ ID NO: 347593 - DNA, 120 bp, Artificial Sequence
  ENSG00000138669_29 (sequence is synthesized)
aatagcgctttttaaagacatctgagtcatggatgtgtttataaatttagattgttaagacaggcaagccaccagaaaagtgataggatttcagaagtaaaagggacaacagcatccctc

SEQ ID NO: 347594 - DNA, 120 bp, Artificial Sequence
  ENSG00000138669_30 (sequence is synthesized)
ctatcccttccttgcactctcccaaataataagtaggatagtttcaatagcatgggacctagtacctaagaacttcactggtgaatggttgtatgtattgaccatgatcattcccttacc

SEQ ID NO: 347595 - DNA, 120 bp, Artificial Sequence
  ENSG00000138669_31 (sequence is synthesized)
ctccttccaaaatgaatgagaagcagagacttttctgtattttttaaatctagcagagtaaaaatactgtataagttccgggattattcaagcttctggttatattttcatatgttaatg

SEQ ID NO: 347596 - DNA, 120 bp, Artificial Sequence
  ENSG00000138669_32 (sequence is synthesized)
ttctatgtcaaaaggaacctctacccagtccccactcataatttcatcatccagaaaaaagccagctatatgcttccttaatgagttaagctagataagtgaagcccaatccagaaaggt

SEQ ID NO: 347597 - DNA, 120 bp, Artificial Sequence
  ENSG00000138669_33 (sequence is synthesized)
gcatccttaacaaattagatttccacatttataatccttttgctgaaccaaagagtttttgtttcctggagctgtatttttaaagattatgtattgtacatagaataatcatttttaata

SEQ ID NO: 347598 - DNA, 120 bp, Artificial Sequence
  ENSG00000138669_34 (sequence is synthesized)
ggattgacataacctgcttaaagaatttctaagagtttttaaagatttttatttgaatttggttggtttgtactgtatgtttttccatgtatatatttttaaatttccaacctataaaga

SEQ ID NO: 347599 - DNA, 120 bp, Artificial Sequence
  ENSG00000138669_35 (sequence is synthesized)
tagaaaatttatgtattgggtggatattagaactatacagttataataggaatgatattctcaaagcagatcaatagttgtaatttttaaaaccctacatatatagaaataaccaagtta

SEQ ID NO: 347600 - DNA, 120 bp, Artificial Sequence
  ENSG00000138669_36 (sequence is synthesized)
gagtactacaggtttatttttcctgtgattgaccatgtcaatgtgttatcctcccatgtgattttttattgtttccttagagtactttaaaagatgaagaaatgagagactgaaccattg

SEQ ID NO: 347601 - DNA, 120 bp, Artificial Sequence
  ENSG00000138669_37 (sequence is synthesized)
aataatcccaactccaccatttcctaactgagtgactctgggaaagtgatttagcttttttgagtactagctttctcattcatagaaaaaggcagagtaaagtaatatttacttagaggt

SEQ ID NO: 347602 - DNA, 120 bp, Artificial Sequence
  ENSG00000138669_38 (sequence is synthesized)
ttgtttcagggattaagttatgtagagagtcttttgcccggtatctgtgaaataaccattgctgcatagacgggagctactgttactgtctctattaaaattaaaggggccttaataacc

SEQ ID NO: 347603 - DNA, 120 bp, Artificial Sequence
  ENSG00000138669_39 (sequence is synthesized)
atttagtcctgaatcttatgtatcattggtatctgtatgcagaattgtacttatcaaatccagtatctgtcttttttttcttttaaatcatgaagtaaaaatgattgaccaaaaacttcg

SEQ ID NO: 347604 - DNA, 120 bp, Artificial Sequence
  ENSG00000138669_40 (sequence is synthesized)
aggcggctggggagggcggcgtgggagaggacgctgagacgcaggggcggccgcgccgaggtgacaagctgcgcacctggaaagttacccggctgtctggtgaggtccctgagcaaaatg

SEQ ID NO: 347605 - DNA, 120 bp, Artificial Sequence
  ENSG00000138669_41 (sequence is synthesized)
tggcaaaaggaaaggtcctccactttggacagataaaggagcttctaccagtagagtcccatgcaattctgtttgaacactggctttggagtggaggccacaggaccccctaagaaataa

SEQ ID NO: 347606 - DNA, 120 bp, Artificial Sequence
  ENSG00000138670_0 (sequence is synthesized)
gtagtttcagtataaacaaggaacccgactggttagacagattttgtttttcttcttcccgcgcgctttagctccctgtcctttggtcgcatttgtgggcgcgcggcacgcagccgggag

SEQ ID NO: 347607 - DNA, 120 bp, Artificial Sequence
  ENSG00000138670_1 (sequence is synthesized)
gccgaggactcggagttcacctgcaggaaagtatgcctcagactcctcccttttcagcaatgtttgacagcagtggttacaatcgaaacctctatcagtctgcagaggacagctgtggag

SEQ ID NO: 347608 - DNA, 120 bp, Artificial Sequence
  ENSG00000138670_2 (sequence is synthesized)
ggttgtattaccatgacaacaacctcctctctggatccctggaagcactcatccagcacttagtacctaatgtggattactatccagatagaacatacatatttaccttcctactcagtt

SEQ ID NO: 347609 - DNA, 120 bp, Artificial Sequence
  ENSG00000138670_3 (sequence is synthesized)
ctcggttatttatgcatccgtatgagctaatggccaaagtttgccacttatgtgttgagcaccagagactaagtgatcctgatagtgataagaaccagatgagaaaaattgcacccaaaa

SEQ ID NO: 347610 - DNA, 120 bp, Artificial Sequence
  ENSG00000138670_4 (sequence is synthesized)
tccttcaactcctcacggaatggacggaaacatttccctatgattttcgggatgaaagaatgatgagaaacttaaaagatctggctcaccgaatagccagtggcgaagagcagacataca

SEQ ID NO: 347611 - DNA, 120 bp, Artificial Sequence
  ENSG00000138670_5 (sequence is synthesized)
gaaagaatgtccagcaaatgatgcagtgtctgatccgcaagcttgctgcgctcagccagtacgaagaagtcctggcaaaaatcagctccacatccacagatcggctcacagttctcaaga

SEQ ID NO: 347612 - DNA, 120 bp, Artificial Sequence
  ENSG00000138670_6 (sequence is synthesized)
ccaagccacagtctatacaaagggatatcattactgtctgcaacgacccttacacgttggcccagcagctgactcatatagagctggagaggctcaattatattgggccagaagaatttg

SEQ ID NO: 347613 - DNA, 120 bp, Artificial Sequence
  ENSG00000138670_7 (sequence is synthesized)
ttcaggcgttcgtgcagaaggaccctttggataatgacaagagttgctacagtgaacggaagaaaacacgaaacttagaagcttacgtggaatggtttaatcgcctcagctacttggttg

SEQ ID NO: 347614 - DNA, 120 bp, Artificial Sequence
  ENSG00000138670_8 (sequence is synthesized)
ctacagaaatctgtatgcctgttaagaaaaaacaccgagcaagaatgattgagtatttcattgacgtagctcgggagtgttttaacattggcaacttcaactccttgatggcgataatct

SEQ ID NO: 347615 - DNA, 120 bp, Artificial Sequence
  ENSG00000138670_9 (sequence is synthesized)
gaacagctcttcgtggggcagcacaaaggtctttaactgctcatagtagtagagaaaagattgtgataccattcttcagtctcttaatcaaagatatttatttcctcaatgagggttgtg

SEQ ID NO: 347616 - DNA, 120 bp, Artificial Sequence
  ENSG00000138670_10 (sequence is synthesized)
ccaaccgccttcccaatggccatgtcaattttgagaaattttgggaactggccaaacaagtgagtgaatttatgacatggaaacaagtggagtgtccatttgagagggaccggaagatct

SEQ ID NO: 347617 - DNA, 120 bp, Artificial Sequence
  ENSG00000138670_11 (sequence is synthesized)
tgcagtatctgctcacagtaccagtcttcagtgaagatgctctctacttggcttcttatgagagtgaaggacctgaaaatcatatagagaaagacagatggaagtctttaaggtcgagcc

SEQ ID NO: 347618 - DNA, 120 bp, Artificial Sequence
  ENSG00000138670_12 (sequence is synthesized)
tcttaggcagagtttaacacatgggagctgcctgcctgctgctgctgctgcttcctgcagatcatggaggggctggcctttgttttctggcatctcgtaccacgaacactcatgaagacc

SEQ ID NO: 347619 - DNA, 120 bp, Artificial Sequence
  ENSG00000138670_13 (sequence is synthesized)
ctgcagtcattggagcacccgggtcagcaaagcacacaagctcactcaagaccagatggagaacttatttcctgcagctgacagatagactcagattttgtgagactgaaatgttcactg

SEQ ID NO: 347620 - DNA, 120 bp, Artificial Sequence
  ENSG00000138670_14 (sequence is synthesized)
aagacacttgagaaagaatcctctaaaaatcccggctctgcacattattcatctcctggaatttccatgtgaatcacagctctgcacctggatggagttttcttttgtgtgtgtgtgttt

SEQ ID NO: 347621 - DNA, 120 bp, Artificial Sequence
  ENSG00000138670_15 (sequence is synthesized)
tttttaatttggttgaacatttgctgctaatgggacttgcccagctgagtgctggctctgaggaagcccacgtttcttttgttaacttaaatgaagaaaggagtggagggaggggatcta

SEQ ID NO: 347622 - DNA, 120 bp, Artificial Sequence
  ENSG00000138670_16 (sequence is synthesized)
aaacccccccgtttagatcccaaaccttagctcaatcagtattgccagagaggggtaagactggttggaagctgactgcagactttgtttccccttagtatgtgctgtgttgtaaatttt

SEQ ID NO: 347623 - DNA, 120 bp, Artificial Sequence
  ENSG00000138670_17 (sequence is synthesized)
tctcctccctcctcctacaaggttttgagttggctgctggttagcaaactcctttttacccatataagttatttaatataataatgaagctcaacactgtggtaggaaaatagccactag

SEQ ID NO: 347624 - DNA, 120 bp, Artificial Sequence
  ENSG00000138670_18 (sequence is synthesized)
gtttatttttgttgtcagtgccatgtaatctaaagtctgactcgtaggaagggacaagggaacagaagtcacatactcgccaccgacaaggtgatgtgctgtcatccttcggtgttcacc

SEQ ID NO: 347625 - DNA, 120 bp, Artificial Sequence
  ENSG00000138670_19 (sequence is synthesized)
tttttttttttgctcttctgagctgtttacaactgaccactgtgttccacagatgtatttttcaatagctttttgttacttagttttccatgatgcctgttatttttctcttgtaaattt

SEQ ID NO: 347626 - DNA, 120 bp, Artificial Sequence
  ENSG00000138670_20 (sequence is synthesized)
aaatgagctgactttaaggatcttgggaaaacccatggcataattacaattttctttttaatcgacttttcattacttttgggagtctgttggtaactaaagatgtcaacaaagaataaa

SEQ ID NO: 347627 - DNA, 120 bp, Artificial Sequence
  ENSG00000138670_21 (sequence is synthesized)
ttggagaagttacctgtccccactatagcagtaaacaaaacagatgaaaaacaccttgctgttaactcaatggttgatctaattgtgaaatcgttcaccttgttaaacatctaagtaagt

SEQ ID NO: 347628 - DNA, 120 bp, Artificial Sequence
  ENSG00000138670_22 (sequence is synthesized)
ctgtagtcgctctgcaaacagccattatatttatttactctagaagaaactgtagagtagtaattcgtgctaatgagaaaaacaaaataccatgttcaaaacagatgtatttgaaaactt

SEQ ID NO: 347629 - DNA, 120 bp, Artificial Sequence
  ENSG00000138670_23 (sequence is synthesized)
aatgacatggttccaaaaactagagcatgtatgtatgctgtgcatcatctcagcagacctaaaatatccccaagttgtccctttacagccatcaatatattttacactctgcggccagga

SEQ ID NO: 347630 - DNA, 120 bp, Artificial Sequence
  ENSG00000138670_24 (sequence is synthesized)
atggcaaagtttctcgccgagctcctgggctgcacgttgccgagcaagggcgcctctcccatgtttgagtctaaaagtcattcccgagttggcctgaaatcaagcaccaagcaaaagacc

SEQ ID NO: 347631 - DNA, 120 bp, Artificial Sequence
  ENSG00000138670_25 (sequence is synthesized)
accattttcagcacattggccagtgagaagtccttatctgactgcaaaaaggaacagcaatggaaaccttccatgtacagcagcataactccagtttgctttccaagccctctgattgag

SEQ ID NO: 347632 - DNA, 120 bp, Artificial Sequence
  ENSG00000138670_26 (sequence is synthesized)
cccaggcagagcctgggtgggaaatggtgccgaattatgcatcctaatctccactgcttcctctctgttttgcctttgggcaagccctccacatcacatattggtctatttagtatgtca

SEQ ID NO: 347633 - DNA, 120 bp, Artificial Sequence
  ENSG00000138670_27 (sequence is synthesized)
agtgagaatgattataccatcccacttcaaagggatatgatctagagttttatgtgattaatttggggctatgttcatgtcaactcatgcacaggatttatgttgcaagtatgttttaat

SEQ ID NO: 347634 - DNA, 120 bp, Artificial Sequence
  ENSG00000138670_28 (sequence is synthesized)
tttactttacttttaccttttttcctcccaaaaaggtttgacacagctagttagatgataaatggcatgttagtagacataaacactagtggatacaaagtaaataacattattctatta

SEQ ID NO: 347635 - DNA, 120 bp, Artificial Sequence
  ENSG00000138670_29 (sequence is synthesized)
accgaggataaatagtagattaataaatcataaatagaaatagacattctgggccatggcagaaagaaaataaatacgctcctgttgagaatgagtagaggaggacaggactgctgtggt

SEQ ID NO: 347636 - DNA, 120 bp, Artificial Sequence
  ENSG00000138670_30 (sequence is synthesized)
atgagtttaagttccaggtaaaagggaaatacagctggtcatgtaatattcactgtcagaaaaggggaagtatagtaattattgagggacttaaatgaaaaatttagaaactttcttctg

SEQ ID NO: 347637 - DNA, 120 bp, Artificial Sequence
  ENSG00000138670_31 (sequence is synthesized)
aagaactttgtatagggtcatagaatgagatcctacaaactgctctttatggtgtttacaacataccttcctggatagaagctgagttcatagattcatgtgtaaattagcaaagataat

SEQ ID NO: 347638 - DNA, 120 bp, Artificial Sequence
  ENSG00000138670_32 (sequence is synthesized)
tcttgggggaggagaagactgagaaaatgaggcaagtcttccagtgctcagaagttgatttaaggatagactctagtataggtagagattaaaagtaagtctcttagataggctttcata

SEQ ID NO: 347639 - DNA, 120 bp, Artificial Sequence
  ENSG00000138670_33 (sequence is synthesized)
aatatcacttccctcagttgagcctttgataagcactaactactagctgtgacaaattcaaggttatcctttttgaagcaggaccagagggctggtattctgtgttgagacttgctgggc

SEQ ID NO: 347640 - DNA, 120 bp, Artificial Sequence
  ENSG00000138670_34 (sequence is synthesized)
aaggatgcccttgtagtttccatgttgcaggtcaacttctgggaacaagtcattcaggcacagatacactttcacctggaaaaagtagatgaagcatttggcaatgatgttgcattttat

SEQ ID NO: 347641 - DNA, 120 bp, Artificial Sequence
  ENSG00000138670_35 (sequence is synthesized)
tcgtcttaaaatgcattttccattatgaataaccttccttgagaactctttcagtggtgtgctgcaacgtataacttgataccctatcctttttttctgagacagagccttgctctgttc

SEQ ID NO: 347642 - DNA, 120 bp, Artificial Sequence
  ENSG00000138670_36 (sequence is synthesized)
gacagagccttgctctgttcctcaggctagagtgtagagttgcgatcatggctcactgcatccttgacttctctggcttaatcaatcctcccacctcagcttccctagtagctgggacta

SEQ ID NO: 347643 - DNA, 89 bp, Artificial Sequence
  ENSG00000138670_37 (sequence is synthesized)
ctagtagctgggactacaggtgcatgcaactgtgcctggctcgttttttctattttttgtagagacaaagctttgggctcaagcaatcc

SEQ ID NO: 347644 - DNA, 120 bp, Artificial Sequence
  ENSG00000138670_38 (sequence is synthesized)
tgtgagtcactgcacccagccgcaattttttgtgagaaaaggggaagtatattaattgttgagggaattaagtgaaaaatttaaaaaccttcatctgaagaactttggggctatgttcat

SEQ ID NO: 347645 - DNA, 120 bp, Artificial Sequence
  ENSG00000138670_39 (sequence is synthesized)
gtcagctcatgcacaggatttatgttgcaagtgtgttttaattttactttacttatacctttttacttccaaaaaggtttgacacagctagttagatgataataagtggcatcttaatag

SEQ ID NO: 347646 - DNA, 120 bp, Artificial Sequence
  ENSG00000138670_40 (sequence is synthesized)
atataaacattttaatgccatttatcccaattttacaaaatcagactaaaattatgtaaggctagcttttgaaaaatttgtatgggctttcctgtattatgttctcatgaaaatgggatt

SEQ ID NO: 347647 - DNA, 120 bp, Artificial Sequence
  ENSG00000138670_41 (sequence is synthesized)
aaccattttactgttactttttgacattatattatgatgaacccaagtgctcgagacagccattatttctgccgggccgaatgagtcatttcctgagtcactgtgcaagttatgacggtt

SEQ ID NO: 347648 - DNA, 120 bp, Artificial Sequence
  ENSG00000138670_42 (sequence is synthesized)
ataatcattttgccagtttgcctcttacaggttctagccaggtatgaattgataggtcccttgcttacaaaggcaaaagttaagcatcatggtgcagttttgtagtaaatcttatgttag

SEQ ID NO: 347649 - DNA, 120 bp, Artificial Sequence
  ENSG00000138670_43 (sequence is synthesized)
aggggttagccgtggagttccttggcagggtcagtgctggctcagtgaccttggtttatgtatctgaagctgctcaaaagatcagtgacatcataagggctttttcttgtatgaaggctg

SEQ ID NO: 347650 - DNA, 120 bp, Artificial Sequence
  ENSG00000138670_44 (sequence is synthesized)
agacctaagtcaaacagttttcatttcagtttggttgtctttagctacttaacattatatgtcagtcatcttatcttccctctattgcctttataacttagttctttccaaaagaaacac

SEQ ID NO: 347651 - DNA, 120 bp, Artificial Sequence
  ENSG00000138670_45 (sequence is synthesized)
cttaaaaatctttttcttttaagataaaatgttggcattttgaaaataccaaatggatggtccttgttgttgcggcagtcaaaggggagatcatttttatttgtgtttacctgatgagaa

SEQ ID NO: 347652 - DNA, 120 bp, Artificial Sequence
  ENSG00000138670_46 (sequence is synthesized)
ttggtctttttgtttaacagaatcaagccattcgagagctgggtagaacagagagaagggccaaacagccttgtgaccctggcttcttttcaacactcctgggttaataacatattcttg

SEQ ID NO: 347653 - DNA, 120 bp, Artificial Sequence
  ENSG00000138670_47 (sequence is synthesized)
taaactaagggttgagtggagagatgtcacctgccttgatcgggttgggtttcacagggagatgttgtttctttagctgcttctattcagtattcagaattcaaatccacacttgccagc

SEQ ID NO: 347654 - DNA, 120 bp, Artificial Sequence
  ENSG00000138670_48 (sequence is synthesized)
tggtttatctgagtgtgttttggctagtcctctaaatccttgctcctttctcatctctataaatcacagaagtaactgccttgtgttaatgccctttcagctctgaaactgtgtgatcga

SEQ ID NO: 347655 - DNA, 120 bp, Artificial Sequence
  ENSG00000138670_49 (sequence is synthesized)
tgtccttcctccagttctttggcttcaggctccttatcagtcacgtgcttaggtggctctcctcagagagaccttcccttggcacccaactatgatcataccccctcccattatgggctt

SEQ ID NO: 347656 - DNA, 120 bp, Artificial Sequence
  ENSG00000138670_50 (sequence is synthesized)
tcactgctcttcccttcatagtcattcttagcactctgtgatgagtaatgatagctggccctctctctgtatttgtgggatctgcatccatgggttcaaccaacctcagattgaaaatat

SEQ ID NO: 347657 - DNA, 120 bp, Artificial Sequence
  ENSG00000138670_51 (sequence is synthesized)
tcaaaaaatattaagtctgtactgaacacatatagactttttttccttgtcattattccctaaacaatacagtatcacagtgatttacatagcatttacgttgcgttagctattataagt

SEQ ID NO: 347658 - DNA, 120 bp, Artificial Sequence
  ENSG00000138670_52 (sequence is synthesized)
gatgatttaaagtatacaggaggatgtgcggatgttgtatgaaaatactgtaccatcttagagcggagacttgaccatctgcagattttagaatcccagggaagtcctggaaccaatctc

SEQ ID NO: 347659 - DNA, 120 bp, Artificial Sequence
  ENSG00000138670_53 (sequence is synthesized)
ccaatctcccgaggatactgagggatgactgtacttgcatttttattgcttgttttcccctctagaccccatgctgtgccctctttgttcaccacggcatccttaactcctagctcagta

SEQ ID NO: 347660 - DNA, 120 bp, Artificial Sequence
  ENSG00000138670_54 (sequence is synthesized)
cctggcacctagtattctctcagtagtgtttgaatgaatgagtcaatcaatgaatgaatgaacaaatgaattactggaatagggaaaaattatttccctctattggaaggaatatgggtc

SEQ ID NO: 347661 - DNA, 120 bp, Artificial Sequence
  ENSG00000138670_55 (sequence is synthesized)
tgggttgggatttgttgcttcttgcctgggacttttttttttttttttctccttttggcagtcagtgaatccaggtgtgccgtatatataatttagtcaggttcttctgaatctaccagg

SEQ ID NO: 347662 - DNA, 120 bp, Artificial Sequence
  ENSG00000138670_56 (sequence is synthesized)
acagttctacataatttggcataatatgtttctcccctggggatttgcccaaaatgaagtggtttattaggacttgcctgcaagaaacatgaaatgaaactaatgattgaattacatgac

SEQ ID NO: 347663 - DNA, 120 bp, Artificial Sequence
  ENSG00000138670_57 (sequence is synthesized)
aaatgactgtagtgagtagaatgcaattttctcttccttaaggggctggtctttataataagagcttctatctttatttgccaggtaattactgtcactggcatttgaagttataaaaaa

SEQ ID NO: 347664 - DNA, 120 bp, Artificial Sequence
  ENSG00000138670_58 (sequence is synthesized)
gaataagtacatatttagtaattcatgactcagtgaggaaccatgcttaacaacacaaagcttgatttctcaaatggaatcaactggcagcaggaaacttttaaaagaggtcatatacat

SEQ ID NO: 347665 - DNA, 120 bp, Artificial Sequence
  ENSG00000138670_59 (sequence is synthesized)
acactctctcacatgctcacacactagttgttgttgaatagctttcccccatactctattgcatacatttttcccttatattttgatgcagttttttgctaacaacctgattatacattc

SEQ ID NO: 347666 - DNA, 78 bp, Artificial Sequence
  ENSG00000138670_60 (sequence is synthesized)
ttttgatgcagttttttgctaacaacctgattatacattcctctgcctcttcccccagtaaatttttctaaaattgcg

SEQ ID NO: 347667 - DNA, 73 bp, Artificial Sequence
  ENSG00000138670_61 (sequence is synthesized)
gaaaaaagaattgcaaaataaaaatctttcagcagatatgctggtaaagcattgcttctcacacttggcttat

SEQ ID NO: 347668 - DNA, 120 bp, Artificial Sequence
  ENSG00000138670_62 (sequence is synthesized)
agatatgctggtaaagcattgcttctcacacttggcttatacaaggatcagctgaggagcatccagagcatgtgacacaagtgcactgcagaccaagtcgatcagaatctctggggtgga

SEQ ID NO: 347669 - DNA, 120 bp, Artificial Sequence
  ENSG00000138670_63 (sequence is synthesized)
acccaggctgcccccattcagcggttctgctcattgcttcccagcaggtacccttgtgtggtaccctgaatagaagtggtaatttcttactaaagtattttctgcagggatcccgggaag

SEQ ID NO: 347670 - DNA, 120 bp, Artificial Sequence
  ENSG00000138670_64 (sequence is synthesized)
gggtgaggagaaggtgcatgatgtaggaatgataacatgcatggaatagcagctgaggcatagaataataaatatttttaaatgagttgttggcttttttaagtgaaaagaactttcttg

SEQ ID NO: 347671 - DNA, 120 bp, Artificial Sequence
  ENSG00000138670_65 (sequence is synthesized)
tgcatgtctcatgcctgtgttatccaaaaaatcccattctgtgggaaaattttaaaacattttatttttaatatatcaagtaatataggaatatattcacttagattttgtttaaaaaga

SEQ ID NO: 347672 - DNA, 120 bp, Artificial Sequence
  ENSG00000138670_66 (sequence is synthesized)
attcatacaaagcaaaagaggccaaaaaactccattcaatccagcttctctcttaaaggtaacaagtgttgtcaattttgtgtgtatccttccggcgctgctcctatgtatacaggtgtt

SEQ ID NO: 347673 - DNA, 120 bp, Artificial Sequence
  ENSG00000138670_67 (sequence is synthesized)
cacagaaagtagtgtgtatggcttttgtttccatgtatgtttacctagtattcatcaccctgcttgttttctctgtgttatgtcttggaaacccttccatgtcaatgtaggtagctgtat

SEQ ID NO: 347674 - DNA, 120 bp, Artificial Sequence
  ENSG00000138670_68 (sequence is synthesized)
cttctttcagctgctatacagtagtccagtatgtgattgggccatgtttctttttctttttaaaaactattctattggacacaaacaagttaaatttgtttatactgaaaactcaggcgt

SEQ ID NO: 347675 - DNA, 120 bp, Artificial Sequence
  ENSG00000138670_69 (sequence is synthesized)
tttctgagaaagacttagcaaagaagattaagtcccttcttcatatcaaactctgtttagtaaagtagtaacatatagttgtgggttgctcttgtaaacaggctttactgactgtgaaac

SEQ ID NO: 347676 - DNA, 120 bp, Artificial Sequence
  ENSG00000138670_70 (sequence is synthesized)
ttcaactttgtaacatgtattttctactctgcacttgatcttagccaaaagggtgagaagcgattctaccctggatagtatatgctgtaattaagtatctccaagaaggtgtttattagc

SEQ ID NO: 347677 - DNA, 120 bp, Artificial Sequence
  ENSG00000138670_71 (sequence is synthesized)
cattctgagtaatacactgggaaatatttgcataattattagaagtagtatctaactctcatgtagtcatttgttatgacattttggacaaaggactgaataaaacattttaagttggta

SEQ ID NO: 347678 - DNA, 120 bp, Artificial Sequence
  ENSG00000138670_72 (sequence is synthesized)
cgcagccgcggggcagccccgagccacggccccggctggcgggcgggctgcgggcaggatcctggcgctcgggctctggcaaggggaaaggacagaaacggcgcatcgggagggaccctg

SEQ ID NO: 347679 - DNA, 120 bp, Artificial Sequence
  ENSG00000138670_73 (sequence is synthesized)
atgaatgcctgttgaatgatgaataaacggatgaagggaaccaagaggctgtgttccctgccacgtggggtgagccaatgggctgaagaagcatgaggaaaaggagactcgggtatggca

SEQ ID NO: 347680 - DNA, 120 bp, Artificial Sequence
  ENSG00000138670_74 (sequence is synthesized)
atgggctgaagaagcatgaggaaaaggagactcgggtatggcaggtggctgtgtggagaggacacttggaacagcaatggaaaccttccatgtacagcagcataactccagtttgctttc

SEQ ID NO: 347681 - DNA, 120 bp, Artificial Sequence
  ENSG00000138670_75 (sequence is synthesized)
attcatcctcctgtagcttcctgagaagtcatgggagaccaccattttcagcacattggccagtgagaagtccttatctgactgcaaaaagaggctgtgttccctgccacgtggggtgag

SEQ ID NO: 347682 - DNA, 120 bp, Artificial Sequence
  ENSG00000138670_76 (sequence is synthesized)
gtaagtgatggagccaggattacaacctgcccttccttacaacctgctcttccttacaacctctgacaccatattctgaaagaggaaagtatgcctcagactcctcccttttcagcaatg

SEQ ID NO: 347683 - DNA, 120 bp, Artificial Sequence
  ENSG00000138670_77 (sequence is synthesized)
actatccagatgtaggtattcatgtttctctgaaacacatccttggcaatgagtagaaattgcagtacagtaggcagggaccatagataatacagaattatatctaggttgctaagaatt

SEQ ID NO: 347684 - DNA, 120 bp, Artificial Sequence
  ENSG00000138670_78 (sequence is synthesized)
tttctaacaagaaattgcatattgattatcaagtgcattgaaatcaaatcgagcctggataaggatcagattttggtatactatgtgtatcaatttcttttcaggttagttacaacattg

SEQ ID NO: 347685 - DNA, 120 bp, Artificial Sequence
  ENSG00000138670_79 (sequence is synthesized)
tagatggtctgataccatctaaatgaagtatctgtagagttgattcatgcatatagcttagtccttaaatagaaatgtcagagaacattggatgctcccagaatatgtaatgcctttttt

SEQ ID NO: 347686 - DNA, 120 bp, Artificial Sequence
  ENSG00000138670_80 (sequence is synthesized)
gccaataggcaaagtaagaatgaacctacttttatcagacactatgattcgagccagttggctgttatttctttttgccttgagctatttcggtgaaataataaaattgatcttataaaa

SEQ ID NO: 347687 - DNA, 120 bp, Artificial Sequence
  ENSG00000138674_0 (sequence is synthesized)
gcggaatagtgggttttgctgcaaccggtttattttccttctgttttcacccattctggcacaatctggcgccatcgtccttcttgtgaggccaagcctgaaaatgcgaagcagagaggc

SEQ ID NO: 347688 - DNA, 120 bp, Artificial Sequence
  ENSG00000138674_1 (sequence is synthesized)
aggaccaaaattgaggcgaatccaggaacctgccaatgggtctccgggtgcggtctctgaaactggaggatatcgggaggaaaggctctccgatgcggagataatggggaagctcttggc

SEQ ID NO: 347689 - DNA, 120 bp, Artificial Sequence
  ENSG00000138674_2 (sequence is synthesized)
atggttggctgtaggtatgtgataccggaggagcaggagtcaaataggatacgccgacttttaattcaaggaacccttttctgaaacactttgccacaatgaaggaaataagattacagc

SEQ ID NO: 347690 - DNA, 120 bp, Artificial Sequence
  ENSG00000138674_3 (sequence is synthesized)
cgaagatacatattaaggatgaagttaaaggaagtagatcgtacagccatgcaggcatggagccctgcccagaatcaccccatttacctagcaacaggaacatctgctcagcaattggat

SEQ ID NO: 347691 - DNA, 120 bp, Artificial Sequence
  ENSG00000138674_4 (sequence is synthesized)
gcaacatttagtacgaatgcttcccttgagatatttgaattagacctctctgatccatccttggatatgaaatcttgtgccacattctcctcttctcacaggtaccacaagttgatttgg

SEQ ID NO: 347692 - DNA, 120 bp, Artificial Sequence
  ENSG00000138674_5 (sequence is synthesized)
gggccttataaaatggattccaaaggagatgtctctggagttctgattgcaggtggtgaaaatggaaatattattctctatgatccttctaaaattatagctggagacaaggaagttgtg

SEQ ID NO: 347693 - DNA, 120 bp, Artificial Sequence
  ENSG00000138674_6 (sequence is synthesized)
attgcccagaatgacaagcatactggcccagtgagagccttggatgtgaacattttccagactaatctggtagcttctggtgctaatgaatctgaaatctacatatgggatctaaataat

SEQ ID NO: 347694 - DNA, 120 bp, Artificial Sequence
  ENSG00000138674_7 (sequence is synthesized)
tttgcaaccccaatgacaccaggagccaaaacacagccgccagaagatatcagctgcattgcatggaacagacaagttcagcatattttagcatcagccagtcccagtggccgggccact

SEQ ID NO: 347695 - DNA, 120 bp, Artificial Sequence
  ENSG00000138674_8 (sequence is synthesized)
gtatgggatcttagaaaaaatgagccaatcatcaaagtcagtgaccatagtaacagaatgcattgttctgggttggcatggcatcctgatgttgctactcagatggtccttgcctccgag

SEQ ID NO: 347696 - DNA, 120 bp, Artificial Sequence
  ENSG00000138674_9 (sequence is synthesized)
gatgaccggttaccagtgatccagatgtgggatcttcgatttgcttcctctccacttcgtgtcctggaaaaccatgccagggggattttggcaattgcttggagcatggcagatcctgaa

SEQ ID NO: 347697 - DNA, 120 bp, Artificial Sequence
  ENSG00000138674_10 (sequence is synthesized)
ttgttactgagctgtggaaaagatgctaagattctctgctccaatccaaacacaggagaggtgttatatgaacttcccaccaacacacagtggtgcttcgatattcagtggtgtccccga

SEQ ID NO: 347698 - DNA, 120 bp, Artificial Sequence
  ENSG00000138674_11 (sequence is synthesized)
aatcctgctgtcttatcagctgcttcgtttgatgggcgtatcagtgtttattctatcatgggaggtagcacagatggtttaagacagaaacaagttgacaagctttcatcatcttttggg

SEQ ID NO: 347699 - DNA, 120 bp, Artificial Sequence
  ENSG00000138674_12 (sequence is synthesized)
aatcttgatccctttggcacaggacagccccttcctccgttacaaattccacagcagactgctcagcatagtatagtgctgcctctgaagaagccgcccaagtggattcgaaggcctgtt

SEQ ID NO: 347700 - DNA, 120 bp, Artificial Sequence
  ENSG00000138674_13 (sequence is synthesized)
ggtgcttctttttcatttggaggcaaactggttacgtttgagaatgtcagaatgccttctcatcagggagctgagcagcagcagcagcagcaccatgtgttcattagtcaggttgtaaca

SEQ ID NO: 347701 - DNA, 120 bp, Artificial Sequence
  ENSG00000138674_14 (sequence is synthesized)
gaaaaggagttcctcagccgatcagaccaacttcagcaggctgtgcagtcacaaggatttatcaattattgccaaaaaaaaattgatgcttctcagactgaatttgagaaaaatgtgtgg

SEQ ID NO: 347702 - DNA, 120 bp, Artificial Sequence
  ENSG00000138674_15 (sequence is synthesized)
tcctttttgaaggtaaactttgaggatgattctcgtggaaaataccttgaacttctaggatacagaaaagaagatctaggaaagaagattgctttggccttgaacaaagtggatggagcc

SEQ ID NO: 347703 - DNA, 120 bp, Artificial Sequence
  ENSG00000138674_16 (sequence is synthesized)
aatgtggctcttaaagactctgaccaagtagcacagagtgatggggaggagagccctgctgctgaagagcagctcttgggagagcacattaaagaggaaaaagaagaatctgaatttcta

SEQ ID NO: 347704 - DNA, 120 bp, Artificial Sequence
  ENSG00000138674_17 (sequence is synthesized)
atctctgtcagtggggacattgatggtttaattactcaggctttgctgacgggcaattttgagagtgctgttgacctttgtttacatgataaccgcatggccgatgccattatattggcc

SEQ ID NO: 347705 - DNA, 120 bp, Artificial Sequence
  ENSG00000138674_18 (sequence is synthesized)
atagcaggtggacaagaactcttggctcgaacccagaaaaaatacttcgcaaaatcccaaagcaaaattaccaggctcatcactgcagtggtgatgaagaactggaaagagattgttgag

SEQ ID NO: 347706 - DNA, 120 bp, Artificial Sequence
  ENSG00000138674_19 (sequence is synthesized)
tcttgtgatcttaaaaattggagagaggctttagctgcagtattgacttatgcaaagccggatgaattttcagccctttgtgatcttttgggaaccaggcttgaaaatgaaggagatagc

SEQ ID NO: 347707 - DNA, 120 bp, Artificial Sequence
  ENSG00000138674_20 (sequence is synthesized)
ctcctgcagactcaagcatgtctctgctatatttgtgcagggaatgtagagaaattagttgcatgttggactaaagctcaagatggaagccaccctttgtcacttcaggatctgattgag

SEQ ID NO: 347708 - DNA, 120 bp, Artificial Sequence
  ENSG00000138674_21 (sequence is synthesized)
aaagttgtcatcctgcgaaaagctgtgcaactcactcaagccatggacactagtactgtaggagttctcttggctgcgaagatgagtcagtatgccaatttgttggcagctcagggcagt

SEQ ID NO: 347709 - DNA, 120 bp, Artificial Sequence
  ENSG00000138674_22 (sequence is synthesized)
attgctgcagccttggcttttcttcctgacaacaccaaccagccaaatatcatgcagcttcgtgacagactttgtagagcacaaggagagcctgtagcaggacatgaatcacctaaaatt

SEQ ID NO: 347710 - DNA, 120 bp, Artificial Sequence
  ENSG00000138674_23 (sequence is synthesized)
ccgtacgagaaacagcagctccccaagggcaggcctggaccagttgctggccaccaccagatgccaagagttcaaactcaacaatattatccccatggagaaaatcctccacctccgggt

SEQ ID NO: 347711 - DNA, 120 bp, Artificial Sequence
  ENSG00000138674_24 (sequence is synthesized)
ttcataatgcatggaaatgttaatccaaatgctgctggtcagcttcccacatctccaggtcatatgcacacccaggtaccaccttatccacagccacagccttatcaaccagcccagccg

SEQ ID NO: 347712 - DNA, 120 bp, Artificial Sequence
  ENSG00000138674_25 (sequence is synthesized)
tatcccttcggaacaggggggtcagcaatgtatcgacctcagcagcctgttgctcctcctacttcaaacgcttaccctaacaccccttacatatcttctgcttcttcctatactgggcag

SEQ ID NO: 347713 - DNA, 120 bp, Artificial Sequence
  ENSG00000138674_26 (sequence is synthesized)
tctcagctgtacgcagcacagcaccaggcctcttcacctacctccagccctgctacttctttccctcctcccccttcctctggagcatccttccagcatggcggaccaggagctccacca

SEQ ID NO: 347714 - DNA, 120 bp, Artificial Sequence
  ENSG00000138674_27 (sequence is synthesized)
tcatcttcagcttatgcactgcctcctggaacaacaggtacactgcctgctgccagtgagctgcctgcgtcccaaagaacaggtcctcagaatggttggaatgaccctccagctttgaac

SEQ ID NO: 347715 - DNA, 120 bp, Artificial Sequence
  ENSG00000138674_28 (sequence is synthesized)
agagtacccaaaaagaagaagatgcctgaaaacttcatgcctcctgttcccatcacatcaccaatcatgaacccgttgggtgacccccagtcacaaatgctgcagcaacagccttcagct

SEQ ID NO: 347716 - DNA, 120 bp, Artificial Sequence
  ENSG00000138674_29 (sequence is synthesized)
ccagtaccactgtcaagccagtcttcattcccacagccacatcttccaggtggccagcccttccatggcgtacagcaacctcttggtcaaacaggcatgccaccatctttttcaaagccc

SEQ ID NO: 347717 - DNA, 120 bp, Artificial Sequence
  ENSG00000138674_30 (sequence is synthesized)
aatattgaaggtgccccaggggctcctattggaaataccttccagcatgtgcagtctttgccaacaaaaaaaattaccaagaaacctattccagatgagcacctcattctaaagaccaca

SEQ ID NO: 347718 - DNA, 120 bp, Artificial Sequence
  ENSG00000138674_31 (sequence is synthesized)
tttgaggatcttattcagcgctgcctttcttcagcaacagaccctcaaaccaagaggaagctagatgatgccagcaaacgtttggagtttctgtatgataaacttagggaacagacactt

SEQ ID NO: 347719 - DNA, 120 bp, Artificial Sequence
  ENSG00000138674_32 (sequence is synthesized)
tcaccaacaatcaccagtggtttacacaacattgcaaggagcattgaaactcgaaactactcagaaggattgaccatgcatacccacatagttagcaccagcaacttcagtgagacctct

SEQ ID NO: 347720 - DNA, 120 bp, Artificial Sequence
  ENSG00000138674_33 (sequence is synthesized)
gctttcatgccagttctcaaagttgttctcacccaggccaataagctgggtgtctaaaaggacagcttctcttccactcaatattgccatttttccaaagaaacatgttaaaaaaaaaaa

SEQ ID NO: 347721 - DNA, 120 bp, Artificial Sequence
  ENSG00000138674_34 (sequence is synthesized)
cattagcatgtttgcatagcaaccagtcaagagcatttacactatttctgctgatatactcaccttagaactgctcagaaccctggtgctttatttttgttttaatcttttgttgccagt

SEQ ID NO: 347722 - DNA, 120 bp, Artificial Sequence
  ENSG00000138674_35 (sequence is synthesized)
gatgattttcctattctgcaaatagtgtatttcctggattacacatagtatggtttcctgaagtattctgataaatgtgttttttaaaacctcaatatactttttagaaaaggagcatct

SEQ ID NO: 347723 - DNA, 120 bp, Artificial Sequence
  ENSG00000138674_36 (sequence is synthesized)
ggttatgcataaagcagagctaaaactaaatttctttcatgtcctccctacttcctcagtgtcaatcagattaaagtgtgtaatcctattttatgtgtgtatagtcttttttgaaacagc

SEQ ID NO: 347724 - DNA, 120 bp, Artificial Sequence
  ENSG00000138674_37 (sequence is synthesized)
tgcttaaaatttagtttattttttgtgtcttaggattcctgagtaaataactacatctacaaactgctacatgggttttagcagatattaataaaaatgggatcactggctttaactata

SEQ ID NO: 347725 - DNA, 120 bp, Artificial Sequence
  ENSG00000138674_38 (sequence is synthesized)
cggggaaagatgtcgctcccggaagtgttgggcgcagggcgtggctgcggctgcggctgccacgttggaacggaacgtggaggtggccctggccggggaggaggggcggcggcgaatgct

SEQ ID NO: 347726 - DNA, 120 bp, Artificial Sequence
  ENSG00000138674_39 (sequence is synthesized)
acgcaggatccggctgccgaaggtcctcgccagcaggatgaagttaaaggaagtagatcgtacagccatgcaggcatggagccctgcccagaatcaccccatttacctagcaacaggtac

SEQ ID NO: 347727 - DNA, 120 bp, Artificial Sequence
  ENSG00000138674_40 (sequence is synthesized)
atgacaagcatactggcccagtgagagccttggatgtgaacattttccagttatggtttcttcttgcagactaatctggtagcttctggtgctaatgaatctgaaatctacatatgggat

SEQ ID NO: 347728 - DNA, 120 bp, Artificial Sequence
  ENSG00000138674_41 (sequence is synthesized)
gtgagagccttggatgtgaacattttccagagattaatactctatgaaataattagaaattaaatgtaatggctgggcatgtggctcacacctgtgtaatcccagcactttgagaggccg

SEQ ID NO: 347729 - DNA, 87 bp, Artificial Sequence
  ENSG00000138674_42 (sequence is synthesized)
aaaactcaaaaaaagaaaaaagaaatgtaatgcagatttaacaaatagtcaattaagattctttgtactgttgccttcataaacatt

SEQ ID NO: 347730 - DNA, 120 bp, Artificial Sequence
  ENSG00000138674_43 (sequence is synthesized)
gtcaattaagattctttgtactgttgccttcataaacatttctggttgttaattatataaatgcacagcttaataacgatcttagcctgaacaggatggtgaaaccctgtcattacaaaa

SEQ ID NO: 347731 - DNA, 120 bp, Artificial Sequence
  ENSG00000138674_44 (sequence is synthesized)
gaaggtcctcgccaggtgcgtccgcccgttgctttttgtcctcttcgccggtccttaagctttgaggtagagcccaggccaaaactgggaccgcagcctgggtctccgctgccccgcacc

SEQ ID NO: 347732 - DNA, 120 bp, Artificial Sequence
  ENSG00000138674_45 (sequence is synthesized)
agcctgaggcccggtctctggtgacggcgcgcccctagtcttggtttcgggcccggcggaacaacgcctggcatctggactccagtgatcgcgcccgtccgcattcgccgacgtctccac

SEQ ID NO: 347733 - DNA, 120 bp, Artificial Sequence
  ENSG00000138674_46 (sequence is synthesized)
caaaagccacccgaggctggcgacagtgtcttgccggggagtagtagccgggctggtaactggagtttgagattaggagactttcagacccttgtgcacaaagagcaggatgaagttaaa

SEQ ID NO: 347734 - DNA, 120 bp, Artificial Sequence
  ENSG00000138674_47 (sequence is synthesized)
ccttatccacagccacagcgtaagtagtgtgaccccaaagtcctttcagagcagtatttatgatctaatttagtaactttactttgaagccccaaagtcattgtcaaatcaataagtaag

SEQ ID NO: 347735 - DNA, 120 bp, Artificial Sequence
  ENSG00000138674_48 (sequence is synthesized)
aaccattgtgcataggattcctgagtccctgctacaaagagacatgtttttttaggaggtggcctgaatcactatgctaggaagtagctcctttgtcacactgttcagagtagttgactc

SEQ ID NO: 347736 - DNA, 120 bp, Artificial Sequence
  ENSG00000138674_49 (sequence is synthesized)
ctgttcctcagccattactaagacttgttaaagataatcaagtgtcccatgattttggtataaagaaacagaattttagaaattattttttacatattctttttcttcaggcaagatgac

SEQ ID NO: 347737 - DNA, 120 bp, Artificial Sequence
  ENSG00000138674_50 (sequence is synthesized)
acaaattatttttggaaaaatggtttcaaggggcatttgttattactgtttttccattttatttatttatttaatagactttgtattttagagcagtcttaggttcagaacaaaattgag

SEQ ID NO: 347738 - DNA, 120 bp, Artificial Sequence
  ENSG00000138674_51 (sequence is synthesized)
cagaaagtacagagtgcccccactattgacatcctacgccacagtggtgtatttgttacaatcgatgaacctacatcaatgtctcattatcacccaaagtccacagtttacactctcagt

SEQ ID NO: 347739 - DNA, 120 bp, Artificial Sequence
  ENSG00000138674_52 (sequence is synthesized)
gttgtacattctgtggattttaacaaatgtgtaatgacatgtatctattagtggcatttttaaaagaaaataattatacctggaaagtgaaatattgccactatttgaaaatttaaatgc

SEQ ID NO: 347740 - DNA, 120 bp, Artificial Sequence
  ENSG00000138674_53 (sequence is synthesized)
aggaagtgctgtcccctcagtgatatttctgagcttcattagttaaatagtagaaaaacaatccatgcaaacaattagggaaacattgttattttaaatatgaagggataaaattttctc

SEQ ID NO: 347741 - DNA, 120 bp, Artificial Sequence
  ENSG00000138674_54 (sequence is synthesized)
ttaaaaaagaacagtaagaaaaaagtgatgtttaagagttaattggatctaacaacttaaataaattccctctgtcaaaaaaccagttactttcttaattagaagacatttcacatgact

SEQ ID NO: 347742 - DNA, 120 bp, Artificial Sequence
  ENSG00000138674_55 (sequence is synthesized)
ttgttctcttattaaattaatttacactttctggggattaatgaagggagaagaaacaattataaaatgagtaaagtttagaatgtcttcagtaaacactgttaagtaatttttacattt

SEQ ID NO: 347743 - DNA, 120 bp, Artificial Sequence
  ENSG00000138674_56 (sequence is synthesized)
caggcgtgagccaccacgcccggccataatctgttcaagtttcttagttgtagttgcctccatttctttataaaatgaagccattcaacattttaagtataaggtttagtgcaatgagat

SEQ ID NO: 347744 - DNA, 120 bp, Artificial Sequence
  ENSG00000138674_57 (sequence is synthesized)
atgccaggtatcgtgctgctgttacaaagaacttgatttgtttattttctgaacatgtcggtgatgttttcgtgaccagaaatacaccataggacacaggaacttttttttttagatgga

SEQ ID NO: 347745 - DNA, 120 bp, Artificial Sequence
  ENSG00000138674_58 (sequence is synthesized)
ggcgcaagccaccatgccaggaaatttttatagttttataaaaattttatagctgggattacatgcatgcgccaccacgcccagctaattttcatagttttagtagagatggggttttac

SEQ ID NO: 347746 - DNA, 90 bp, Artificial Sequence
  ENSG00000138674_59 (sequence is synthesized)
gcccacctttggccaccgtaggaacttaatgtttatgtcagttatcagttagtctatggtaaaattggttttgttatccattgttttgct

SEQ ID NO: 347747 - DNA, 120 bp, Artificial Sequence
  ENSG00000138674_60 (sequence is synthesized)
agtctatggtaaaattggttttgttatccattgttttgcttaaagtcacagttcctaaattaagtaacgacttactgcagttagatttcatgcccatccatagggggattttggcaattg

SEQ ID NO: 347748 - DNA, 120 bp, Artificial Sequence
  ENSG00000138674_61 (sequence is synthesized)
tctaggaaagaaggtaaacttttgggaaagttagatggcatgctctttatgaatcatacttttaaaaaataaagttctacacagattatctcaaatcacccaataaacatttaataataa

SEQ ID NO: 347749 - DNA, 120 bp, Artificial Sequence
  ENSG00000138674_62 (sequence is synthesized)
gcctgtttaaccagtattcttcatgaccttggattttatttatgattatataatgggaggtaatatttagggaaggcatagatcttagttgtaaatttggatctgagaacttttctggaa

SEQ ID NO: 347750 - DNA, 120 bp, Artificial Sequence
  ENSG00000138674_63 (sequence is synthesized)
taacttggtatgtcatctactctgtagatgaagaatcatgtgtaaattttttttgtcagtaaatcattccacagttttattctggctaaattgttgcttttttcatctctttagcacatt

SEQ ID NO: 347751 - DNA, 120 bp, Artificial Sequence
  ENSG00000138674_64 (sequence is synthesized)
aattcctccctggttccatctggtggtcactgttgtctcttcacaggatcaggaaaagtctcagaaaagggtcagtcttgcagttcttgggtctgatgattcaaatattttcataaccag

SEQ ID NO: 347752 - DNA, 120 bp, Artificial Sequence
  ENSG00000138674_65 (sequence is synthesized)
aggcagtttggggatggcatttttcaaatactgaagctattgaattcaagtgtatttggggcatttgagcctcaaaaatataatggtgtaaatttttaatttgggattgtaacttatttt

SEQ ID NO: 347753 - DNA, 120 bp, Artificial Sequence
  ENSG00000138674_66 (sequence is synthesized)
gattaaaatcatttctatagactgagataactttttagttttctgctactatctgaataaacttgtaactaattgaaatttctgtttcttctccttggtgtagcttatcaaccagcccag

SEQ ID NO: 347754 - DNA, 120 bp, Artificial Sequence
  ENSG00000138674_67 (sequence is synthesized)
taaatttactcactgttgcttcttatgattaaactagctctgaatgttgttggttgggtcttttgtcttcctggttcactaatagccttttaatactacattcttcaccttcccctgtaa

SEQ ID NO: 347755 - DNA, 120 bp, Artificial Sequence
  ENSG00000138674_68 (sequence is synthesized)
gtttttttagcagactttgtattttcattattaggagagaatagtaaactgatctttgaaagtcatacaccagtataaataaaaacttcaccaccctaaatttagcacactcttttactt

SEQ ID NO: 347756 - DNA, 120 bp, Artificial Sequence
  ENSG00000138674_69 (sequence is synthesized)
taaatggaaacagtgtcaagatatcttacctaccaagtgaagaccttgttcctattaagagatgtgagtgtgagaatccagggctacatagtgatccccacactcggctggtaaaacctt

SEQ ID NO: 347757 - DNA, 120 bp, Artificial Sequence
  ENSG00000138674_70 (sequence is synthesized)
tttcagggttaaggcagaattttgaagtattaggtgatcgattcagttttattttttttcctttcaggattctaaaggaaaacattctctgttatctgttataggtcctcagaatggttg

SEQ ID NO: 347758 - DNA, 120 bp, Artificial Sequence
  ENSG00000138675_0 (sequence is synthesized)
gcaggcgtgcacggagcagtgagatcactggcgttataaatatcccggtgccagcgcggagatccgctcgggtggcctctctcttcccctctccccttctcttccccgaggctatgtcca

SEQ ID NO: 347759 - DNA, 120 bp, Artificial Sequence
  ENSG00000138675_1 (sequence is synthesized)
cccggtgcggcgaggcgggcagagccagaggcacgcagccgcacaggggctacagagcccagaatcagccctacaagatgcacttaggacccccgcggctggaagaatgagcttgtcctt

SEQ ID NO: 347760 - DNA, 120 bp, Artificial Sequence
  ENSG00000138675_2 (sequence is synthesized)
cctcctcctcctcttcttcagccacctgatcctcagcgcctgggctcacggggagaagcgtctcgcccccaaagggcaacccggacccgctgccactgataggaaccctagaggctccag

SEQ ID NO: 347761 - DNA, 120 bp, Artificial Sequence
  ENSG00000138675_3 (sequence is synthesized)
cagcagacagagcagcagtagcgctatgtcttcctcttctgcctcctcctcccccgcagcttctctgggcagccaaggaagtggcttggagcagagcagtttccagtggagcccctcggg

SEQ ID NO: 347762 - DNA, 120 bp, Artificial Sequence
  ENSG00000138675_4 (sequence is synthesized)
gcgccggaccggcagcctctactgcagagtgggcatcggtttccatctgcagatctacccggatggcaaagtcaatggatcccacgaagccaatatgttaagtgttttggaaatatttgc

SEQ ID NO: 347763 - DNA, 120 bp, Artificial Sequence
  ENSG00000138675_5 (sequence is synthesized)
tgtgtctcaggggattgtaggaatacgaggagttttcagcaacaaatttttagcgatgtcaaaaaaaggaaaactccatgcaagtgccaagttcacagatgactgcaagttcagggagcg

SEQ ID NO: 347764 - DNA, 120 bp, Artificial Sequence
  ENSG00000138675_6 (sequence is synthesized)
ttttcaagaaaatagctataatacctatgcctcagcaatacatagaactgaaaaaacagggcgggagtggtatgtggccctgaataaaagaggaaaagccaaacgagggtgcagcccccg

SEQ ID NO: 347765 - DNA, 120 bp, Artificial Sequence
  ENSG00000138675_7 (sequence is synthesized)
ggttaaaccccagcatatctctacccattttctgccaagattcaagcagtcggagcagccagaactttctttcacggttactgttcctgaaaagaaaaagccacctagccctatcaagcc

SEQ ID NO: 347766 - DNA, 120 bp, Artificial Sequence
  ENSG00000138675_8 (sequence is synthesized)
aaagattcccctttctgcacctcggaaaaataccaactcagtgaaatacagactcaagtttcgctttggataatattcctcttggccttgtgagaaaccattctttcccctcaggagttt

SEQ ID NO: 347767 - DNA, 120 bp, Artificial Sequence
  ENSG00000138675_9 (sequence is synthesized)
ctataggtgtcttcagagttctgaagaaaaattactggacacagcttcagctatacttacactgtattgaagtcacgtcatttgtttcaatgtgactgaaacaaaatgttttttgatagg

SEQ ID NO: 347768 - DNA, 120 bp, Artificial Sequence
  ENSG00000138675_10 (sequence is synthesized)
aaggaaactggaattctttgtactaatacagggagcacactccttcagttcagcaagacataaagccttttgctttatgcttgagggatatttagaactttgtattttcggaaagttaaa

SEQ ID NO: 347769 - DNA, 120 bp, Artificial Sequence
  ENSG00000138675_11 (sequence is synthesized)
taacagggactacgtatttttctgacttttacagattaacctgaaagaacatacatgatacatttttatttttggtttccaaagaatattttgatgcagataaaatattttgttaacttt

SEQ ID NO: 347770 - DNA, 120 bp, Artificial Sequence
  ENSG00000138675_12 (sequence is synthesized)
tgtttttttttgtttgttttcttaaaagtacctctgcattgagcatattttcttacttttattattttaattaatatgacataagcaatcattttatgctgtttatgaattataaatgtg

SEQ ID NO: 347771 - DNA, 120 bp, Artificial Sequence
  ENSG00000138675_13 (sequence is synthesized)
tttatagctcatttgtaatatggaaatcttttacatttttcctattcactgcacttttttattgtttttatttctagccatacctcagataatatgtttagttttacattttaaaatgtt

SEQ ID NO: 347772 - DNA, 120 bp, Artificial Sequence
  ENSG00000138675_14 (sequence is synthesized)
taaattctctttcacagcaccaaaggctcagcttggatttgtgtgtatgtgtatgtcaattcatgacattatgtggaatcctaaacctttggtggctgggatatgatgggttagaagcaa

SEQ ID NO: 347773 - DNA, 120 bp, Artificial Sequence
  ENSG00000138675_15 (sequence is synthesized)
ggagaaaatataaggactttttgatggaattaaatgtgggaggtaaggaaaaggatttagaggtaaaagtacactaagtttgcaacatttattgagatctaagtctgtcttgccttcatt

SEQ ID NO: 347774 - DNA, 120 bp, Artificial Sequence
  ENSG00000138675_16 (sequence is synthesized)
tctctttttatctcccccttgccctcattcttgaacagctggaggaatacattttattctgtccatgaagcatacactatgaaattcaagtgcttaaaaatacttctatgactctctgct

SEQ ID NO: 347775 - DNA, 120 bp, Artificial Sequence
  ENSG00000138675_17 (sequence is synthesized)
atcccactgtatagatccacagggagcaaacacttagaaatgatagagaactgaaggagatcaatggtttaacagttatccatgccaagtcccattgtcagaaatattcttattactcag

SEQ ID NO: 347776 - DNA, 120 bp, Artificial Sequence
  ENSG00000138675_18 (sequence is synthesized)
cttaatttgggaatttgttgtgttgaaatggcatttaatttcaacctaaatactgactgctggacataaatcacagaaaatttaacttaagaaaatttacaaaatttattctcaggtaat

SEQ ID NO: 347777 - DNA, 120 bp, Artificial Sequence
  ENSG00000138675_19 (sequence is synthesized)
cattttaataaagttctgcaaaatacacgtttatcttacattcagaaatgtggcaaaaaaggcatagctaaaggctaaacatatggctttagtagtaacaaaagggttcatagaaacttc

SEQ ID NO: 347778 - DNA, 120 bp, Artificial Sequence
  ENSG00000138675_20 (sequence is synthesized)
atggtttgcatttaaacatgtttaaagtgtacttataaactatttttttcttaaagcaaactatgatttattttggtgcacaaatacaaagtggaaacttaccaaaattgaactagctac

SEQ ID NO: 347779 - DNA, 120 bp, Artificial Sequence
  ENSG00000138675_21 (sequence is synthesized)
catataagcagattgctttaatttgatgggaaaatagtacacacatatatataacaaataatatattaaaaaacccatccatcaactaaaacattatatgtatacatcagtatagtgttt

SEQ ID NO: 347780 - DNA, 120 bp, Artificial Sequence
  ENSG00000138675_22 (sequence is synthesized)
tattataaagccaattatctgattaagcattctttccactgaatgcataatgtttaaatagcataaaatgaaatgctacaaaaattgaactaatttatactttaaagtatttctgggtta

SEQ ID NO: 347781 - DNA, 120 bp, Artificial Sequence
  ENSG00000138675_23 (sequence is synthesized)
aatgaaacaatgaaattttttagtatgttcaactctcatccaaatggcatatgaccctgtttacacagcctaaagctaaaaatattactctagtttattctaatctattgttaagtattg

SEQ ID NO: 347782 - DNA, 120 bp, Artificial Sequence
  ENSG00000138675_24 (sequence is synthesized)
tgcactgtataccaagttcttagggcacatgaaaaattttagctgccaaacaggaactagtaaacatatgttcctaataagtgaagggaaagataataatgatggtcaacaataagccac

SEQ ID NO: 347783 - DNA, 120 bp, Artificial Sequence
  ENSG00000138675_25 (sequence is synthesized)
gtcaatgcataagttgtataggctaaatgttgcttgtaggctacattaaactcaaatgtaatagtttatcttatactcctggtttgatttgattagcatattaacgtgaaagtaggatag

SEQ ID NO: 347784 - DNA, 120 bp, Artificial Sequence
  ENSG00000138675_26 (sequence is synthesized)
ctactaaatatatattatgcaagtcaggaatcattaatttcaaaatttaaagccatgctaaaattaaaaagaaaatattaaattacacaattacacttgtctttactggccatacaaaat

SEQ ID NO: 347785 - DNA, 120 bp, Artificial Sequence
  ENSG00000138675_27 (sequence is synthesized)
gcctccccaaagtgctgggattacaggtacaatgatgtataattaatgcttagtgaagcataaagttacctacatcaattaattaaatgaacttatgtacagaaaacatgtataaatata

SEQ ID NO: 347786 - DNA, 120 bp, Artificial Sequence
  ENSG00000138675_28 (sequence is synthesized)
gtacagaaaacatgtataaatataagtctatactaatgcttacaactttctaagagggttcttgcttatgtagctttttattattttaagtaactagaaccaccaaatatcaaataaaat

SEQ ID NO: 347787 - DNA, 120 bp, Artificial Sequence
  ENSG00000138675_29 (sequence is synthesized)
tatttggttatggttatgttcatctaaacacaacaataacttttatattaatatttaggagtctattttgtctataggtgacaaacatctccagactaacatgtcagttttatcaattat

SEQ ID NO: 347788 - DNA, 120 bp, Artificial Sequence
  ENSG00000138675_30 (sequence is synthesized)
attatgtttaattatttaagatttctttatgtggaacatctatagagataaatagaaattttcaataagatgtagtaacactgtgatttatctttcaagagtctctcttcacttccttct

SEQ ID NO: 347789 - DNA, 120 bp, Artificial Sequence
  ENSG00000138675_31 (sequence is synthesized)
aaagagactaatttgagagtacaggtgcatattaattttcttggttctttcagctgaattatattggtccagaagttcaaaatcatgtgacaataataagggatactgacagaagttatt

SEQ ID NO: 347790 - DNA, 120 bp, Artificial Sequence
  ENSG00000138675_32 (sequence is synthesized)
gacaataataagggatactgacagaagttatttccaagtttgtgtatatattataaaaattacatatataaaactaaggcttttatttctgttatttttaagcttttatttcttgtagct

SEQ ID NO: 347791 - DNA, 120 bp, Artificial Sequence
  ENSG00000138675_33 (sequence is synthesized)
tttcttattaaatcaatcttgaaatagaaaatgtaataactttcttaccattaacattttttacccttccatagaagggagggaataaatcatgacttatcccattttcaataacaaaac

SEQ ID NO: 347792 - DNA, 120 bp, Artificial Sequence
  ENSG00000138675_34 (sequence is synthesized)
gaaactatggcactaaccaaaaacttgcattctggcataatttttacagttgcagagaattgtttctgggctcattaaaaaaagtagtattgcagacattgctgcaatgggaagcagaca

SEQ ID NO: 347793 - DNA, 120 bp, Artificial Sequence
  ENSG00000138675_35 (sequence is synthesized)
ctcagtagggccagatcgctcttccagcgcgggttggtccaccaggcagagccccagccagggcctgtcaggtacccagggagaccggaaatgtagccaggagacagcagcgctcacagt

SEQ ID NO: 347794 - DNA, 120 bp, Artificial Sequence
  ENSG00000138675_36 (sequence is synthesized)
cacctggtttcagtgtcagcctggttgctcctagatgttcctaacttgctccatctcagaccaaagactccacgggccattgggctccttcttacacaggctccagaggagcgtggacac

SEQ ID NO: 347795 - DNA, 120 bp, Artificial Sequence
  ENSG00000138675_37 (sequence is synthesized)
atcaggaagaggggctgaaggccttggacaatattgtcactcaattcaacgcctatgaagatttcctggactcgcagatcactactgtggacttgtactacctggagccaatcccctccc

SEQ ID NO: 347796 - DNA, 120 bp, Artificial Sequence
  ENSG00000138675_38 (sequence is synthesized)
cagctacccccgctgcagggtggtgggggacagagtggagttcttgtcctgtgccacgggagaacccggacgcgcaggaattaacaagtcatcagtgctaggaagctgggaggcggacga

SEQ ID NO: 347797 - DNA, 120 bp, Artificial Sequence
  ENSG00000138675_39 (sequence is synthesized)
agttttgaaggaaacctctggataaatggacaaggcctaatttttttttgtagtcaatccaactgtactggccaatttttgaaataagattatatgattaggtattagcagagacaaaga

SEQ ID NO: 347798 - DNA, 120 bp, Artificial Sequence
  ENSG00000138675_40 (sequence is synthesized)
gttacctcctccatcttactctgccctatttgaaagtctcaggggagaaaagggaacaagatgctgatccaacctgagtggagtcaggtgaggcatctttacatctaagaattttttttt

SEQ ID NO: 347799 - DNA, 89 bp, Artificial Sequence
  ENSG00000138675_41 (sequence is synthesized)
acatctaagaacaagttctagggtacatgtccacaatgcacatgtctgtcacacatgcacacatgtgccatgctggtgtgctgcaccca

SEQ ID NO: 347800 - DNA, 79 bp, Artificial Sequence
  ENSG00000138675_42 (sequence is synthesized)
cctgtcatcacccaccccacagcaggccccggtatgtgatgttccccttcgtgtgtccatgtgttcttattgttcaatt

SEQ ID NO: 347801 - DNA, 120 bp, Artificial Sequence
  ENSG00000138678_0 (sequence is synthesized)
agcttccagcacagcccgcggcccggtgccagctccgccggcgaccggtgtgccaaagtgcggtgctcccgcagggaacctggctcggggagggcctccgtgagtcatctgctgagttgt

SEQ ID NO: 347802 - DNA, 120 bp, Artificial Sequence
  ENSG00000138678_1 (sequence is synthesized)
cgcaatcgccacccagaggaaatcaggcaccgggcggggcgggttcctggctgcgctcgcgcgctctgcccgcgccgcggtgtgcctccgcttacccgcagctccgaccactggctcgcg

SEQ ID NO: 347803 - DNA, 120 bp, Artificial Sequence
  ENSG00000138678_2 (sequence is synthesized)
ctacccaggtctccgcacgccgcggtggcttcagcccagacctgggcagccagcggagaaagagttaactggcaggggcgaggaggagcccagggaggaaggaaggatattgccgtaatt

SEQ ID NO: 347804 - DNA, 120 bp, Artificial Sequence
  ENSG00000138678_3 (sequence is synthesized)
ctgaaagtttttttccttcctctcttcccttcgcagaggtgagtgccgggctcggcgctctgctcctggagctcccgcgggactgcctggggacagggactgctgtggcgctcggccctc

SEQ ID NO: 347805 - DNA, 120 bp, Artificial Sequence
  ENSG00000138678_4 (sequence is synthesized)
cactgcggacctctcctgagtgggtgcgccgagtcatggagggcgcagagctggccgggaagatcctttccacctggctgacgctggttctcggcttcatccttttaccttcggtcttcg

SEQ ID NO: 347806 - DNA, 120 bp, Artificial Sequence
  ENSG00000138678_5 (sequence is synthesized)
gagtgtctctgggcatctccgagatctacatgaagatcctagtgaaaactttagagtgggccacaatacgaattgaaaaaggaaccccaaaggagtcgattcttaaaaactctgcttctg

SEQ ID NO: 347807 - DNA, 120 bp, Artificial Sequence
  ENSG00000138678_6 (sequence is synthesized)
ttggtattatccaaagagatgagtcacccatggaaaaagggctctctggtctacgaggaagggactttgagctgtctgacgtgttttatttctccaagaagggattggaagccattgtag

SEQ ID NO: 347808 - DNA, 120 bp, Artificial Sequence
  ENSG00000138678_7 (sequence is synthesized)
aagatgaagtgacccagaggttttcctcagaggagctagtgtcatggaatctcctcacaagaaccaatgtaaatttccagtacatcagtctgcggctcactatggtgtgggtgctgggcg

SEQ ID NO: 347809 - DNA, 120 bp, Artificial Sequence
  ENSG00000138678_8 (sequence is synthesized)
tcatagtgcgctattgtgtcctactgcctctgagggttaccttggctttcattgggatcagtttgctggttataggaactacactggttgggcagctgccagacagcagcctcaaaaact

SEQ ID NO: 347810 - DNA, 120 bp, Artificial Sequence
  ENSG00000138678_9 (sequence is synthesized)
ggctgagtgaactggtccatctgacttgctgccggatctgtgtgcgagccctctctggtaccattcattatcataacaagcagtacagaccccagaagggaggcatttgtgttgccaacc

SEQ ID NO: 347811 - DNA, 120 bp, Artificial Sequence
  ENSG00000138678_10 (sequence is synthesized)
atacttcccccattgatgttttaatcttgacaacggatggatgttatgctatggttggccaggttcatggcggcttgatgggaattattcagagagctatggtcaaggcttgtcctcatg

SEQ ID NO: 347812 - DNA, 120 bp, Artificial Sequence
  ENSG00000138678_11 (sequence is synthesized)
tctggtttgaacgctcagaaatgaaggatcgacacctggttactaagagactaaaagaacatattgctgataagaagaaactacccatactaatttttcctgaaggaacttgcatcaaca

SEQ ID NO: 347813 - DNA, 120 bp, Artificial Sequence
  ENSG00000138678_12 (sequence is synthesized)
ccatacatccagttgcaattaagtataaccctcagttcggtgatgcattttggaacagtagtaaatacaacatggtgagctacctgcttcgaatgatgaccagctgggccatcgtctgtg

SEQ ID NO: 347814 - DNA, 120 bp, Artificial Sequence
  ENSG00000138678_13 (sequence is synthesized)
acgtgtggtacatgccccccatgaccagagaggaaggagaagatgcagtccagtttgctaacagggttaagtctgctattgctatacaaggaggcctgactgaacttccctgggatggag

SEQ ID NO: 347815 - DNA, 120 bp, Artificial Sequence
  ENSG00000138678_14 (sequence is synthesized)
gactaaagagagcaaaggtgaaggacatctttaaggaagagcagcagaaaaattacagcaagatgattgtgggcaatggatctctcagctaagaggacggatgacagcctttagatctag

SEQ ID NO: 347816 - DNA, 120 bp, Artificial Sequence
  ENSG00000138678_15 (sequence is synthesized)
ttttgttttgttttgttttattgttttgtttttattattgttaatcttttctacagaatgattgtctctacctctttatgccagaggcagaacctacaggtgccctttttggcttttgtt

SEQ ID NO: 347817 - DNA, 120 bp, Artificial Sequence
  ENSG00000138678_16 (sequence is synthesized)
cctacaggtgccctttttggcttttgttgttgttgtaacattagccccatggattgtaaggtggtttactgagttaaaacagattctgcttttgtaaaatgatggcatcactgtggactg

SEQ ID NO: 347818 - DNA, 120 bp, Artificial Sequence
  ENSG00000138678_17 (sequence is synthesized)
aatgaaatatttgtatagaaaaaagtgcttgaaaagtgtgtttggaactcatcgatagggtaattctccaaaaatgcccaaactctttttctgtaattagccttgccactttcttcagtc

SEQ ID NO: 347819 - DNA, 120 bp, Artificial Sequence
  ENSG00000138678_18 (sequence is synthesized)
acttaaatggtgagattacacatcagtgcaagatgaccattatggttatggtctactgcaaggttgaaaggaaaaatggaggattgtatttaggaaaagggacaactttgtggccacctg

SEQ ID NO: 347820 - DNA, 120 bp, Artificial Sequence
  ENSG00000138678_19 (sequence is synthesized)
ctctgaaagtcaaaaggaaatgtaaattagtgtcattagtgtgttggaagagaaatactattcagtaagcttcgccaaagaaaagtgagtcaaagttaatgtgtgtgcgcatttatatgt

SEQ ID NO: 347821 - DNA, 120 bp, Artificial Sequence
  ENSG00000138678_20 (sequence is synthesized)
aggcagctcgtagaccacattttaaccagcaactggtaacaaagagcttagttttccttgtttgaatgctgtagatctgtacctagtacccctcccatctactgatttgtttgtttttgt

SEQ ID NO: 347822 - DNA, 120 bp, Artificial Sequence
  ENSG00000138678_21 (sequence is synthesized)
aaccaaacacattttcagatagaaggagccttaaaaaaaaaaaatcacattgagtaacttcagtatgaatgaatgagagtgtgtggagctacccctcaccctccacccctttgtgctttt

SEQ ID NO: 347823 - DNA, 120 bp, Artificial Sequence
  ENSG00000138678_22 (sequence is synthesized)
tattcccgaattttcccagtctcttaaacagaaaaatgactgatataattatcttttggaaactgagccttaattttttttagagggggaaataagttttccccaactcacacagcataa

SEQ ID NO: 347824 - DNA, 120 bp, Artificial Sequence
  ENSG00000138678_23 (sequence is synthesized)
gcaatgtttgacagcaatataatgccgttgtaaactactgagagtattgtatctgttctggtaaccatgtacagaatgtgaaactgtcttatgaatataaataaattctatatttctaaa

SEQ ID NO: 347825 - DNA, 120 bp, Artificial Sequence
  ENSG00000138678_24 (sequence is synthesized)
agcttccagcacagcccgcggcccggtgccagctccgccggcgaccggtgtgccaaagtgcggtgctcccgcagggaacctggctcggggagggcctccaggtgagtgccgggctcggcg

SEQ ID NO: 347826 - DNA, 120 bp, Artificial Sequence
  ENSG00000138678_25 (sequence is synthesized)
agatgaaaactctcctcctgaaaggacctttgctgagtgctgggggaggcggggcgcggggaagaacggagaccgcccaggaggctgcggcactcctgggctaaaggtgagtgccgggct

SEQ ID NO: 347827 - DNA, 120 bp, Artificial Sequence
  ENSG00000138678_26 (sequence is synthesized)
actcagcattcactggagtagcataaaagctgaccaatcttggccttgctaccaaagagggccgagcagcactgagtctcaaaactgaaacagagccctgtttgctgttggatttttctg

SEQ ID NO: 347828 - DNA, 120 bp, Artificial Sequence
  ENSG00000138678_27 (sequence is synthesized)
gcaaatcacctgtcttagccagatttttaaaaaatgtaattctgtagtcatggtaggatatatgatgggattggaaggccaatgtatttatattgctgtgacttagatatagtccagtca

SEQ ID NO: 347829 - DNA, 120 bp, Artificial Sequence
  ENSG00000138678_28 (sequence is synthesized)
tccagtcactgaattttcaaagataaaaattaccacctttaaattagatatgatctcacttgagtataagcaattaaaaaaataaattagatatgtatactttacctcaataaaaaatat

SEQ ID NO: 347830 - DNA, 120 bp, Artificial Sequence
  ENSG00000138678_29 (sequence is synthesized)
aagaacggagaccgcccaggaggctgcggcactcctgggctaagtactgccagggagctcccccgttgggtgacggaggaggtggggcgagggcagcgcgcagaaatagggcgctgggcg

SEQ ID NO: 347831 - DNA, 120 bp, Artificial Sequence
  ENSG00000138678_30 (sequence is synthesized)
gcatttgagctgaaatatgaatcttatattttaaaacaaatacaaatgattatgagatggtattaaaaactcgataactaagatattcttgcaattttttttttttttaaaccaggaagg

SEQ ID NO: 347832 - DNA, 120 bp, Artificial Sequence
  ENSG00000138684_0 (sequence is synthesized)
ctcagtcaagctgaagtgaaaacgagaccaaggtctagctctactgttggtacttatgagatccagtcctggcaacatggagaggattgtcatctgtctgatggtcatcttcttggggac

SEQ ID NO: 347833 - DNA, 120 bp, Artificial Sequence
  ENSG00000138684_1 (sequence is synthesized)
actggtccacaaatcaagctcccaaggtcaagatcgccacatgattagaatgcgtcaacttatagatattgttgatcagctgaaaaattatgtgaatgacttggtccctgaatttctgcc

SEQ ID NO: 347834 - DNA, 120 bp, Artificial Sequence
  ENSG00000138684_2 (sequence is synthesized)
agctccagaagatgtagagacaaactgtgagtggtcagctttttcctgctttcagaaggcccaactaaagtcagcaaatacaggaaacaatgaaaggataatcaatgtatcaattaaaaa

SEQ ID NO: 347835 - DNA, 120 bp, Artificial Sequence
  ENSG00000138684_3 (sequence is synthesized)
gctgaagaggaaaccaccttccacaaatgcagggagaagacagaaacacagactaacatgcccttcatgtgattcttatgagaaaaaaccacccaaagaattcctagaaagattcaaatc

SEQ ID NO: 347836 - DNA, 120 bp, Artificial Sequence
  ENSG00000138684_4 (sequence is synthesized)
acttctccaaaagatgattcatcagcatctgtcctctagaacacacggaagtgaagattcctgaggatctaacttgcagttggacactatgttacatactctaatatagtagtgaaagtc

SEQ ID NO: 347837 - DNA, 120 bp, Artificial Sequence
  ENSG00000138684_5 (sequence is synthesized)
atttctttgtattccaagtggaggagtacaatatattagcgatgggaaaaaaaaactcataagtgtgcaaagtcaggattatttccccataatcactatacaatagtctgatttcctatg

SEQ ID NO: 347838 - DNA, 120 bp, Artificial Sequence
  ENSG00000138684_6 (sequence is synthesized)
ttattgatttctatgacttctgaagtttttactttatctcactgcccaactttgacatttcttggttgaaggagaaggctaaaatttttaaccaaaaatacagttttgacatctattgat

SEQ ID NO: 347839 - DNA, 120 bp, Artificial Sequence
  ENSG00000138684_7 (sequence is synthesized)
tttatattaaccttgagcttgattaccaccagaatgaggtctattatgatcataacttaaaacatatataccttcattccagctgataatatagaagcatagaagcaaaatatataaaag

SEQ ID NO: 347840 - DNA, 120 bp, Artificial Sequence
  ENSG00000138684_8 (sequence is synthesized)
aaagcaaaatgaaaagttgacatctttattcttttaaggaaatgaaaactgagtgtttaaaaacttatatctgaatagttttttaaatctcagaatgtctaacatataaatatgtaattt

SEQ ID NO: 347841 - DNA, 120 bp, Artificial Sequence
  ENSG00000138684_9 (sequence is synthesized)
atgcaccgggggatactagatggctataaaagccttacttctttattggggtttataaaaatatttaaatactatagatatgaatgtatttatggaatagactcttagtcagtggcaata

SEQ ID NO: 347842 - DNA, 120 bp, Artificial Sequence
  ENSG00000138684_10 (sequence is synthesized)
gagtattaagaagtggatttaatattaccttcctccagcccccagtccccttataagctaacattttaagcttgtggaaatggcaatttaaacctatagagggacatatgccaggttgtc

SEQ ID NO: 347843 - DNA, 120 bp, Artificial Sequence
  ENSG00000138684_11 (sequence is synthesized)
ttctggaaccaaacatagttttaaaagtattgtagctctcttctcaaactgttataatgatcatattatgagcaagctagtaactccaaatatttgtctccttctttcttctttcgtttc

SEQ ID NO: 347844 - DNA, 120 bp, Artificial Sequence
  ENSG00000138684_12 (sequence is synthesized)
ttttcttccttctttttaaaatgaaacttctgctttgacaaaatttcacaacatgtttaacattttggacacttatagttactatactttggataagacaaattcaatcacctatataat

SEQ ID NO: 347845 - DNA, 120 bp, Artificial Sequence
  ENSG00000138684_13 (sequence is synthesized)
gccaggactcctgtccaagttgaaaacagactttcgcataagcattccaatctttcagacttgggtagtaaaaacaagcaacctactctacctgccatttcatatcaactccagcacagc

SEQ ID NO: 347846 - DNA, 120 bp, Artificial Sequence
  ENSG00000138684_14 (sequence is synthesized)
ttgtttaaacatgaagttaaaaactctagaaaagtaaaatgttcgctagaatggtataagctatttgagaatctcttattgttaaaatagttgtgattatgcaagaggatgtgggatgag

SEQ ID NO: 347847 - DNA, 120 bp, Artificial Sequence
  ENSG00000138684_15 (sequence is synthesized)
aaatgctttatgctctgagaagaaaaattatgtgcttaaaacaaatacagacttaacctacagttctaaaagatatattgagaattatttaatcaaatctcaatgaaatgttttatcatc

SEQ ID NO: 347848 - DNA, 120 bp, Artificial Sequence
  ENSG00000138684_16 (sequence is synthesized)
agcaagtagactcagaaaaaagaaaaaaaaatttatcatcagaaacaaggtactctgttttaacattttagaacatgtatgacaaaggaattatgtgcctgatgatgataatatatatct

SEQ ID NO: 347849 - DNA, 120 bp, Artificial Sequence
  ENSG00000138684_17 (sequence is synthesized)
aaaatgtgcctcagtttcaaatacgccagcccgggttgttgtgacaaaatgtggaagcaggcacaaagatagtgagaaagatggaatctgtatttcttgtttctgaatgtatagctatta

SEQ ID NO: 347850 - DNA, 120 bp, Artificial Sequence
  ENSG00000138684_18 (sequence is synthesized)
acttcttggatattgtatttcatatttaaaataatgtatttcttttggcatgtttattgttaaaaatttctgttccaattattttgatcagggtctctatcttaaaagtaaaaataactc

SEQ ID NO: 347851 - DNA, 120 bp, Artificial Sequence
  ENSG00000138684_19 (sequence is synthesized)
agtgagggtttggctaagagccttcattaaacagagtttaaacacccagataaactctgctgtttaaccagagttaaacccaccagcactccaggaaaggcaatgcattggaataaacaa

SEQ ID NO: 347852 - DNA, 120 bp, Artificial Sequence
  ENSG00000138684_20 (sequence is synthesized)
gatgaagcagtgagacttgaacagctccatcttcactgctctatgttcaagatggccagttcttaaaaggaatataaagataacccataaatataactgttcatctatggacagtaatac

SEQ ID NO: 347853 - DNA, 120 bp, Artificial Sequence
  ENSG00000138684_21 (sequence is synthesized)
aggagacgtgaaattttgttgactatgaaatagtggtcactgtttaaactctttgggtttccatttctttatctgtagaatgagagtgctggacttaatctctaatgtctattctttctt

SEQ ID NO: 347854 - DNA, 120 bp, Artificial Sequence
  ENSG00000138684_22 (sequence is synthesized)
ttttaaagctttaaatgtctatgaatatctaaagttctgggtattcttacagaaacatctgatcatacttctgagtaaaactttctactgagtctgatgttcagttgctcagtattattt

SEQ ID NO: 347855 - DNA, 120 bp, Artificial Sequence
  ENSG00000138684_23 (sequence is synthesized)
caataacatttgtagcaacactcactgcaggaacaagggacatattccaagaaaaaaaaggaaggaaggaaggaggggagaaaaggaaacattattataggtcatgagagttcagggaaa

SEQ ID NO: 347856 - DNA, 120 bp, Artificial Sequence
  ENSG00000138684_24 (sequence is synthesized)
attaatcatgatctttattattttagttcaaagtgtcttcttggaacacttgtataaaattgtagcattattattctatattattgctctgttgtatttacatatgcatctgagaattta

SEQ ID NO: 347857 - DNA, 120 bp, Artificial Sequence
  ENSG00000138684_25 (sequence is synthesized)
gctaatatgaactatgtagtttataacttaataattatttattatatatttgattttaaatgttcatgtttatggcttcttatttaagacctgatcatattaaatactacccgcccagta

SEQ ID NO: 347858 - DNA, 120 bp, Artificial Sequence
  ENSG00000138684_26 (sequence is synthesized)
tgattttctgctttatctttacctatccagatttgcttcttagttactcacggtatactatttccacagatgattcatcagcatctgtcctctagaacacacggaagtgaagattcctga

SEQ ID NO: 347859 - DNA, 120 bp, Artificial Sequence
  ENSG00000138685_0 (sequence is synthesized)
gccagattagcggacgcggtgcccgcggttgcaacgggatcccgggcgctgcagcttgggaggcggctctccccaggcggcgtccgcggagacacccatccgtgaaccccaggtcccggg

SEQ ID NO: 347860 - DNA, 80 bp, Artificial Sequence
  ENSG00000138685_1 (sequence is synthesized)
gtcccgggccgccggctcgccgcgcaccaggggccggcggacagaagagcggccgagcggctcgaggctgggggaccgcg

SEQ ID NO: 347861 - DNA, 80 bp, Artificial Sequence
  ENSG00000138685_2 (sequence is synthesized)
acggcggctccccgcgcggctccagcggctcggggatcccggccgggccccgcagggaccatggcagccgggagcatcac

SEQ ID NO: 347862 - DNA, 120 bp, Artificial Sequence
  ENSG00000138685_3 (sequence is synthesized)
tcaccacgctgcccgccttgcccgaggatggcggcagcggcgccttcccgcccggccacttcaaggaccccaagcggctgtactgcaaaaacgggggcttcttcctgcgcatccaccccg

SEQ ID NO: 347863 - DNA, 120 bp, Artificial Sequence
  ENSG00000138685_4 (sequence is synthesized)
acggccgagttgacggggtccgggagaagagcgaccctcacatcaagctacaacttcaagcagaagagagaggagttgtgtctatcaaaggagtgtgtgctaaccgttacctggctatga

SEQ ID NO: 347864 - DNA, 120 bp, Artificial Sequence
  ENSG00000138685_5 (sequence is synthesized)
aggaagatggaagattactggcttctaaatgtgttacggatgagtgtttcttttttgaacgattggaatctaataactacaatacttaccggtcaaggaaatacaccagttggtatgtgg

SEQ ID NO: 347865 - DNA, 120 bp, Artificial Sequence
  ENSG00000138685_6 (sequence is synthesized)
cactgaaacgaactgggcagtataaacttggatccaaaacaggacctgggcagaaagctatactttttcttccaatgtctgctaagagctgattttaatggccacatctaatctcatttc

SEQ ID NO: 347866 - DNA, 120 bp, Artificial Sequence
  ENSG00000138685_7 (sequence is synthesized)
acatgaaagaagaagtatattttagaaatttgttaatgagagtaaaagaaaataaatgtgtatagctcagtttggataattggtcaaacaattttttatccagtagtaaaatatgtaacc

SEQ ID NO: 347867 - DNA, 120 bp, Artificial Sequence
  ENSG00000138685_8 (sequence is synthesized)
attgtcccagtaaagaaaaataacaaaagttgtaaaatgtatattctcccttttatattgcatctgctgttacccagtgaagcttacctagagcaatgatctttttcacgcatttgcttt

SEQ ID NO: 347868 - DNA, 120 bp, Artificial Sequence
  ENSG00000138685_9 (sequence is synthesized)
attcgaaaagaggcttttaaaatgtgcatgtttagaaacaaaatttcttcatggaaatcatatacattagaaaatcacagtcagatgtttaatcaatccaaaatgtccactatttcttat

SEQ ID NO: 347869 - DNA, 120 bp, Artificial Sequence
  ENSG00000138685_10 (sequence is synthesized)
gtcattcgttagtctacatgtttctaaacatataaatgtgaatttaatcaattcctttcatagttttataattctctggcagttccttatgatagagtttataaaacagtcctgtgtaaa

SEQ ID NO: 347870 - DNA, 120 bp, Artificial Sequence
  ENSG00000138685_11 (sequence is synthesized)
ctgctggaagttcttccacagtcaggtcaattttgtcaaacccttctctgtacccatacagcagcagcctagcaactctgctggtgatgggagttgtattttcagtcttcgccaggtcat

SEQ ID NO: 347871 - DNA, 120 bp, Artificial Sequence
  ENSG00000138685_12 (sequence is synthesized)
tgagatccatccactcacatcttaagcattcttcctggcaaaaatttatggtgaatgaatatggctttaggcggcagatgatatacatatctgacttcccaaaagctccaggatttgtgt

SEQ ID NO: 347872 - DNA, 120 bp, Artificial Sequence
  ENSG00000138685_13 (sequence is synthesized)
gctgttgccgaatactcaggacggacctgaattctgattttataccagtctcttcaaaaacttctcgaaccgctgtgtctcctacgtaaaaaaagagatgtacaaatcaataataattac

SEQ ID NO: 347873 - DNA, 120 bp, Artificial Sequence
  ENSG00000138685_14 (sequence is synthesized)
acttttagaaactgtatcatcaaagattttcagttaaagtagcattatgtaaaggctcaaaacattaccctaacaaagtaaagttttcaatacaaattctttgccttgtggatatcaaga

SEQ ID NO: 347874 - DNA, 120 bp, Artificial Sequence
  ENSG00000138685_15 (sequence is synthesized)
aatcccaaaatattttcttaccactgtaaattcaagaagcttttgaaatgctgaatatttctttggctgctacttggaggcttatctacctgtacatttttggggtcagctctttttaac

SEQ ID NO: 347875 - DNA, 120 bp, Artificial Sequence
  ENSG00000138685_16 (sequence is synthesized)
gaaaagttaaaacattttgcatggctgcagttcctttgtttcttgagataagattccaaagaacttagattcatttcttcaacaccgaaatgctggaggtgtttgatcagttttcaagaa

SEQ ID NO: 347876 - DNA, 120 bp, Artificial Sequence
  ENSG00000138685_17 (sequence is synthesized)
acttggaatataaataattttataattcaacaaaggttttcacattttataaggttgatttttcaattaaatgcaaatttgtgtggcaggatttttattgccattaacatatttttgtgg

SEQ ID NO: 347877 - DNA, 120 bp, Artificial Sequence
  ENSG00000138685_18 (sequence is synthesized)
ctgctttttctacacatccagatggtccctctaactgggctttctctaattttgtgatgttctgtcattgtctcccaaagtatttaggagaagccctttaaaaagctgccttcctctacc

SEQ ID NO: 347878 - DNA, 120 bp, Artificial Sequence
  ENSG00000138685_19 (sequence is synthesized)
actttgctggaaagcttcacaattgtcacagacaaagatttttgttccaatactcgttttgcctctatttttcttgtttgtcaaatagtaaatgatatttgcccttgcagtaattctact

SEQ ID NO: 347879 - DNA, 120 bp, Artificial Sequence
  ENSG00000138685_20 (sequence is synthesized)
ggtgaaaaacatgcaaagaagaggaagtcacagaaacatgtctcaattcccatgtgctgtgactgtagactgtcttaccatagactgtcttacccatcccctggatatgctcttgttttt

SEQ ID NO: 347880 - DNA, 120 bp, Artificial Sequence
  ENSG00000138685_21 (sequence is synthesized)
tccctctaatagctatggaaagatgcatagaaagagtataatgttttaaaacataaggcatttgtctgccatttttcaattacatgctgacttcccttacaattgagatttgcccatagg

SEQ ID NO: 347881 - DNA, 120 bp, Artificial Sequence
  ENSG00000138685_22 (sequence is synthesized)
gagatttgcccataggttaaacatggttagaaacaactgaaagcataaaagaaaaatctaggccgggtgcagtggctcatgcctatattccctgcactttgggaggccaaagcaggagga

SEQ ID NO: 347882 - DNA, 120 bp, Artificial Sequence
  ENSG00000138685_23 (sequence is synthesized)
gttcaagaccaacctggtgaaaccccgtctctacaaaaaaacacaaaaaatagccaggcatggtggcgtgtacatgtggtctcagatacttgggaggctgaggtgggagggttgatcact

SEQ ID NO: 347883 - DNA, 120 bp, Artificial Sequence
  ENSG00000138685_24 (sequence is synthesized)
gatacttgggaggctgaggtgggagggttgatcacttgaggctgagaggtcaaggttgcagtgagccataatcgtgccactgcagtccagcctaggcaacagagtgagactttgtctcaa

SEQ ID NO: 347884 - DNA, 120 bp, Artificial Sequence
  ENSG00000138685_25 (sequence is synthesized)
ttactctgatgtgcaatacatttgttattaaatttattatttaagatggtagcactagtcttaaattgtataaaatatcccctaacatgtttaaatgtccatttttattcattatgcttt

SEQ ID NO: 347885 - DNA, 120 bp, Artificial Sequence
  ENSG00000138685_26 (sequence is synthesized)
aataattatggggaaatacatgtttgttattaaatttattattaaagatagtagcactagtcttaaatttgatataacatctcctaacttgtttaaatgtccatttttattctttatgtt

SEQ ID NO: 347886 - DNA, 120 bp, Artificial Sequence
  ENSG00000138685_27 (sequence is synthesized)
tgtttgaaaataaattatggggatcctatttagctcttagtaccactaatcaaaagttcggcatgtagctcatgatctatgctgtttctatgtcgtggaagcactggatgggggtagtga

SEQ ID NO: 347887 - DNA, 120 bp, Artificial Sequence
  ENSG00000138685_28 (sequence is synthesized)
gcaaatctgccctgctcagcagtcaccatagcagctgactgaaaatcagcactgcctgagtagttttgatcagtttaacttgaatcactaactgactgaaaattgaatgggcaaataagt

SEQ ID NO: 347888 - DNA, 120 bp, Artificial Sequence
  ENSG00000138685_29 (sequence is synthesized)
gcttttgtctccagagtatgcgggagacccttccacctcaagatggatatttcttccccaaggatttcaagatgaattgaaatttttaatcaagatagtgtgctttattctgttgtattt

SEQ ID NO: 347889 - DNA, 120 bp, Artificial Sequence
  ENSG00000138685_30 (sequence is synthesized)
tttattattttaatatactgtaagccaaactgaaataacatttgctgttttataggtttgaagaacataggaaaaactaagaggttttgtttttatttttgctgatgaagagatatgttt

SEQ ID NO: 347890 - DNA, 120 bp, Artificial Sequence
  ENSG00000138685_31 (sequence is synthesized)
gaggttttgtttttatttttgctgatgaagagatatgtttaaatatgttgtattgttttgtttagttacaggacaataatgaaatggagtttatatttgttatttctattttgttatatt

SEQ ID NO: 347891 - DNA, 120 bp, Artificial Sequence
  ENSG00000138685_32 (sequence is synthesized)
gtgggttttcctggtgtttccctctgactctagtgcactgatgatctctgataaggctcagctgctttatagttctctggctaatgcagcagatactcttcctgccagtggtaatacgat

SEQ ID NO: 347892 - DNA, 120 bp, Artificial Sequence
  ENSG00000138685_33 (sequence is synthesized)
tttttaagaaggcagtttgtcaattttaatcttgtggatacctttatactcttagggtattattttatacaaaagccttgaggattgcattctattttctatatgaccctcttgatattt

SEQ ID NO: 347893 - DNA, 120 bp, Artificial Sequence
  ENSG00000138685_34 (sequence is synthesized)
aaaaaacactatggataacaattcttcatttacctagtattatgaaagaatgaaggagttcaaacaaatgtgtttcccagttaactagggtttactgtttgagccaatataaatgtttaa

SEQ ID NO: 347894 - DNA, 120 bp, Artificial Sequence
  ENSG00000138685_35 (sequence is synthesized)
ctgtttgtgatggcagtattcctaaagtacattgcatgttttcctaaatacagagtttaaataatttcagtaattcttagatgattcagcttcatcattaagaatatcttttgttttatg

SEQ ID NO: 347895 - DNA, 120 bp, Artificial Sequence
  ENSG00000138685_36 (sequence is synthesized)
ttgagttagaaatgccttcatatagacatagtctttcagacctctactgtcagttttcatttctagctgctttcagggttttatgaattttcaggcaaagctttaatttacactaagctt

SEQ ID NO: 347896 - DNA, 120 bp, Artificial Sequence
  ENSG00000138685_37 (sequence is synthesized)
aggaagtatggctaatgccaacggcagtttttttcttcttaattccacatgactgaggcatatatgatctctgggtaggtgagttgttgtgacaaccacaagcactttttttttttttaa

SEQ ID NO: 347897 - DNA, 120 bp, Artificial Sequence
  ENSG00000138685_38 (sequence is synthesized)
agaaaaaaaggtagtgaatttttaatcatctggactttaagaaggattctggagtatacttaggcctgaaattatatatatttggcttggaaatgtgtttttcttcaattacatctacaa

SEQ ID NO: 347898 - DNA, 120 bp, Artificial Sequence
  ENSG00000138685_39 (sequence is synthesized)
gtaagtacagctgaaattcagaggacccataagagttcacatgaaaaaaatcaatttatttgaaaaggcaagatgcaggagagaggaagccttgcaaacctgcagactgctttttgccca

SEQ ID NO: 347899 - DNA, 120 bp, Artificial Sequence
  ENSG00000138685_40 (sequence is synthesized)
atatagattgggtaaggctgcaaaacataagcttaattagctcacatgctctgctctcacgtggcaccagtggatagtgtgagagaattaggctgtagaacaaatggccttctctttcag

SEQ ID NO: 347900 - DNA, 120 bp, Artificial Sequence
  ENSG00000138685_41 (sequence is synthesized)
cattcacaccactacaaaatcatcttttatatcaacagaagaataagcataaactaagcaaaaggtcaataagtacctgaaaccaagattggctagagatatatcttaatgcaatccatt

SEQ ID NO: 347901 - DNA, 120 bp, Artificial Sequence
  ENSG00000138685_42 (sequence is synthesized)
ttctgatggattgttacgagttggctatataatgtatgtatggtattttgatttgtgtaaaagttttaaaaatcaagctttaagtacatggacatttttaaataaaatatttaaagacaa

SEQ ID NO: 347902 - DNA, 120 bp, Artificial Sequence
  ENSG00000138685_43 (sequence is synthesized)
tttagaaaattgccttaatatcattgttggctaaatagaataggggacatgcatattaaggaaaaggtcatggagaaataatattggtatcaaacaaatacattgatttgtcatgataca

SEQ ID NO: 347903 - DNA, 120 bp, Artificial Sequence
  ENSG00000138685_44 (sequence is synthesized)
cattgaatttgatccaatagtttaaggaataggtaggaaaatttggtttctatttttcgatttcctgtaaatcagtgacataaataattcttagcttattttatatttccttgtcttaaa

SEQ ID NO: 347904 - DNA, 120 bp, Artificial Sequence
  ENSG00000138685_45 (sequence is synthesized)
tactgagctcagtaagttgtgttaggggattatttctcagttgagactttcttatatgacattttactatgttttgactacctgactattaaaaataaatagtagatacaattttcataa

SEQ ID NO: 347905 - DNA, 120 bp, Artificial Sequence
  ENSG00000138685_46 (sequence is synthesized)
agtgaagaattatataatcactgctttataactgactttattatatttatttcaaagttcatttaaaggctactattcatcctctgtgatggaatggtcaggaatttgttttctcatagt

SEQ ID NO: 347906 - DNA, 120 bp, Artificial Sequence
  ENSG00000138685_47 (sequence is synthesized)
ttaattccaacaacaatattagtcgtatccaaaataacctttaatgctaaactttactgatgtatatccaaagcttctcattttcagacagattaatccagaagcagtcataaacagaag

SEQ ID NO: 347907 - DNA, 120 bp, Artificial Sequence
  ENSG00000138685_48 (sequence is synthesized)
aataggtggtatgttcctaatgatattatttctactaatggaataaactgtaatattagaaattatgctgctaattatatcagctctgaggtaatttctgaaatgttcagactcagtcgg

SEQ ID NO: 347908 - DNA, 120 bp, Artificial Sequence
  ENSG00000138685_49 (sequence is synthesized)
aacaaattggaaaatttaaatttttattcttagctataaagcaagaaagtaaacacattaatttcctcaacatttttaagccaattaaaaatataaaagatacacaccaatatcttcttc

SEQ ID NO: 347909 - DNA, 120 bp, Artificial Sequence
  ENSG00000138685_50 (sequence is synthesized)
aggctctgacaggcctcctggaaacttccacatatttttcaactgcagtataaagtcagaaaataaagttaacataactttcactaacacacacatatgtagatttcacaaaatccacct

SEQ ID NO: 347910 - DNA, 120 bp, Artificial Sequence
  ENSG00000138685_51 (sequence is synthesized)
ataattggtcaaagtggttgagaatatattttttagtaattgcatgcaaaatttttctagcttccatcctttctccctcgtttcttctttttttgggggagctggtaactgatgaaatct

SEQ ID NO: 347911 - DNA, 120 bp, Artificial Sequence
  ENSG00000138685_52 (sequence is synthesized)
tttcccaccttttctcttcaggaaatataagtggttttgtttggttaacgtgatacattctgtatgaatgaaacattggagggaaacatctactgaatttctgtaatttaaaatattttg

SEQ ID NO: 347912 - DNA, 120 bp, Artificial Sequence
  ENSG00000138685_53 (sequence is synthesized)
ctgctagttaactatgaacagatagaagaatcttacagatgctgctataaataagtagaaaatataaatttcatcactaaaatatgctattttaaaatctatttcctatattgtatttct

SEQ ID NO: 347913 - DNA, 120 bp, Artificial Sequence
  ENSG00000138685_54 (sequence is synthesized)
aatcagatgtattactcttattatttctattgtatgtgttaatgattttatgtaaaaatgtaattgcttttcatgagtagtatgaataaaattgattagtttgtgttttcttgtctccca

SEQ ID NO: 347914 - DNA, 120 bp, Artificial Sequence
  ENSG00000138685_55 (sequence is synthesized)
cggccccagaaaacccgagcgagtagggggcggcgcgcaggagggaggagaactgggggcgcgggaggctggtgggtgtggggggtggagatgtagaagatgtgacgccgcggcccggcg

SEQ ID NO: 347915 - DNA, 120 bp, Artificial Sequence
  ENSG00000138686_0 (sequence is synthesized)
cctgtcgccccgcctgtgcagcccaggacctaggcgcggtagctggggctggcttttgaggggcgcgggcagccttctgactgggtcggaggcctgcgggcccgaagcctctgtccctcc

SEQ ID NO: 347916 - DNA, 120 bp, Artificial Sequence
  ENSG00000138686_1 (sequence is synthesized)
tgttcttgtccggcgctgcttagcccctccgcgtagtcatcatggatctgattttaaaccgaatggattatctgcaggtgggagtaacatctcagaagactatgaagctaattcctgcct

SEQ ID NO: 347917 - DNA, 120 bp, Artificial Sequence
  ENSG00000138686_2 (sequence is synthesized)
caagacacagagctacacaaaaggtggttattggagatcatgatggggtagttatgtgctttggcatgaagaaaggagaagcagcagcagtgttcaagactttacccgggccgaagattg

SEQ ID NO: 347918 - DNA, 120 bp, Artificial Sequence
  ENSG00000138686_3 (sequence is synthesized)
caaggctggaactgggaggggttatcaacacacctcaggagaaaatttttattgctgcagcatctgagattagaggcttcacaaaaagaggaaaacagttcctctcctttgaaacaaacc

SEQ ID NO: 347919 - DNA, 120 bp, Artificial Sequence
  ENSG00000138686_4 (sequence is synthesized)
tcactgaaagcattaaagctatgcacatatctggctcagacctctttctcagtgcaagttacatctataaccattattgtgactgcaaagaccaacattattacctttctggggataaaa

SEQ ID NO: 347920 - DNA, 120 bp, Artificial Sequence
  ENSG00000138686_5 (sequence is synthesized)
tcaatgatgtgatctgccttccagtggaaagattatctcgtatcacacctgtattggcctgccaggacagagtgctcagagttttacagggatctgatgtgatgtatgcagttgaagttc

SEQ ID NO: 347921 - DNA, 120 bp, Artificial Sequence
  ENSG00000138686_6 (sequence is synthesized)
ctggaccccctactgtcttagcactacacaatggaaatggcggtgactctggagaagaccttttgtttgggacatcagacggaaaacttgcgcttatacagattactacatccaaaccag

SEQ ID NO: 347922 - DNA, 120 bp, Artificial Sequence
  ENSG00000138686_7 (sequence is synthesized)
tacgcaagtgggaaattcaaaatgagaaaaagagaggaggtattttgtgtattgacagctttgacattgtgggtgatggggttaaagatttacttgttgggagagatgacggaatggtgg

SEQ ID NO: 347923 - DNA, 120 bp, Artificial Sequence
  ENSG00000138686_8 (sequence is synthesized)
aagtgtatagttttgataatgcaaatgaacctgttctacgatttgatcagatgttgtctgaaagcgtcacatctatccagggtggttgtgtaggaaaagacagctatgatgaaatcgtgg

SEQ ID NO: 347924 - DNA, 120 bp, Artificial Sequence
  ENSG00000138686_9 (sequence is synthesized)
tgtccacatattcaggctgggttacaggtctgacaacagagcccattcataaggaaagtggaccaggagaagaactaaaaattaatcaggagatgcagaataaaatttcttccttacgga

SEQ ID NO: 347925 - DNA, 120 bp, Artificial Sequence
  ENSG00000138686_10 (sequence is synthesized)
atgagttggaacatttgcagtataaggtattgcaggaaagagagaattatcaacagtcttctcaatcaagcaaagcaaaatcagcagtaccttcctttggtataaatgataaatttacac

SEQ ID NO: 347926 - DNA, 120 bp, Artificial Sequence
  ENSG00000138686_11 (sequence is synthesized)
taaataaagatgatgccagttacagccttatcttagaggtacagactgcaatagataatgtcttaatacagagtgatgttccaatagatttacttgatgtggataaaaattctgctgttg

SEQ ID NO: 347927 - DNA, 120 bp, Artificial Sequence
  ENSG00000138686_12 (sequence is synthesized)
ttagctttagcagctgtgattctgagtcaaacgacaacttccttcttgccacttatcggtgccaggcagatactacaaggctggaactcaagattcgctcaattgaaggccagtatggca

SEQ ID NO: 347928 - DNA, 120 bp, Artificial Sequence
  ENSG00000138686_13 (sequence is synthesized)
cactacaagcatatgtgactccaagaattcaacccaaaacctgtcaggtccgccagtaccacatcaaacctctttcactccatcaaagaactcactttattgatcatgacagacccatga

SEQ ID NO: 347929 - DNA, 120 bp, Artificial Sequence
  ENSG00000138686_14 (sequence is synthesized)
atacactgaccctaacaggccagttcagttttgctgaagttcactcctgggtggttttttgtctgcctgaagttccagaaaaacctccagcaggagaatgtgtgacattttactttcaga

SEQ ID NO: 347930 - DNA, 120 bp, Artificial Sequence
  ENSG00000138686_15 (sequence is synthesized)
acacctttctagatacacaacttgaaagtacctacagaaaaggagagggagtttttaaatctgacaacatttctactatctccatcctaaaagatgtgctttctaaagaagctacaaaaa

SEQ ID NO: 347931 - DNA, 120 bp, Artificial Sequence
  ENSG00000138686_16 (sequence is synthesized)
ggaaaattaacctcaacatatcatacgagataaatgaagtatcagtcaaacacactttaaagctaatccacccaaagctggagtaccagttgcttttggctaagaaagtgcagttaattg

SEQ ID NO: 347932 - DNA, 120 bp, Artificial Sequence
  ENSG00000138686_17 (sequence is synthesized)
atgctttaaaagaattacagattcatgagggaaatacgaactttctgataccagaatatcactgtattctagaagaggcagatcacctacaggaagaatacaaaaagcaacctgcacatc

SEQ ID NO: 347933 - DNA, 120 bp, Artificial Sequence
  ENSG00000138686_18 (sequence is synthesized)
ttgaaagactctatggcatgatcactgatcttttcatagataaatttaagtttaaaggcaccaatgtaaaaactaaagtaccccttctattggaaattctggacagttatgaccaaaatg

SEQ ID NO: 347934 - DNA, 120 bp, Artificial Sequence
  ENSG00000138686_19 (sequence is synthesized)
cattgatttcattcttcgatgcagcatgacatacaaataaggtaaagtcccaaagaagtggtctgtttaaatgaaaaatgttaaaagagaattagaagttaactgtgtatgtactttaat

SEQ ID NO: 347935 - DNA, 120 bp, Artificial Sequence
  ENSG00000138686_20 (sequence is synthesized)
aatgcttttttatatctaaaaatatttgagatataatggctttttaaagtaatgcttctatttcttttgacaaattgaactttctaaaactaaaagagtctttttatttttaaaacacaa

SEQ ID NO: 347936 - DNA, 120 bp, Artificial Sequence
  ENSG00000138686_21 (sequence is synthesized)
acaagtagaatgatttaaataggattttaatgaatttttggcaagtggctgttttaatttttaaattgagaagtaatatgtggaaaattaaaatatattcaaatgtattacaaggtacat

SEQ ID NO: 347937 - DNA, 120 bp, Artificial Sequence
  ENSG00000138686_22 (sequence is synthesized)
aaacacataaacatgtagaccgctttataggcttcaaaatgtatttttatatattaccttatttgatcttcacaactgttgtaaaatttgtcaaatcatataagaaaactgattctcagt

SEQ ID NO: 347938 - DNA, 120 bp, Artificial Sequence
  ENSG00000138686_23 (sequence is synthesized)
gaaattttgtgattaagaggacatgctaatattttgtaaagctgggaccagaacccaagtactggtacttgctttgtgtcctggttactatgtatgttgccagctagtggaaataaccta

SEQ ID NO: 347939 - DNA, 120 bp, Artificial Sequence
  ENSG00000138686_24 (sequence is synthesized)
ccaattgttttttctaggagataggattgatttgcaactgatattccttttgcttggtagtgttttatgactctgctgcagtttgtggaaatgctggacttggctcagtgctataaattg

SEQ ID NO: 347940 - DNA, 120 bp, Artificial Sequence
  ENSG00000138686_25 (sequence is synthesized)
tagccaggaaataagaagagcttacacagagtcgggggatcttaattagacatgctgtaaccagtggagctattcagcgtgcttcaagtgaagagtgcagaaatagtgatgccatcttag

SEQ ID NO: 347941 - DNA, 120 bp, Artificial Sequence
  ENSG00000138686_26 (sequence is synthesized)
attttcctacactagtatcttctagatctctttttatcatatatgacattaaggctacagaagttttgtgcattaatcttaattcatatttattaatttcaagggaatattgaaaggttt

SEQ ID NO: 347942 - DNA, 120 bp, Artificial Sequence
  ENSG00000138686_27 (sequence is synthesized)
taaaatggcatacagataatggaaaataagctttatgtttcaagaagggcagactcacgaattttttagaaaacagtgcttcttaatgatatgctattatacttattagttatgtgcaag

SEQ ID NO: 347943 - DNA, 120 bp, Artificial Sequence
  ENSG00000138686_28 (sequence is synthesized)
atataaaaatttgttaaaggcacgtatagttaagagagttttattttaataaggtcatattgtttttactatgtttaaaaaactttacttctgaaaggaacataattatatctaggtcac

SEQ ID NO: 347944 - DNA, 120 bp, Artificial Sequence
  ENSG00000138686_29 (sequence is synthesized)
gaaaggaacataattatatctaggtcactagaacgtcattgtgttttttgttggttgccacagcttggggaaaaatagaaaaaaattaatgactgtatttgaatattttgtaatgcactg

SEQ ID NO: 347945 - DNA, 120 bp, Artificial Sequence
  ENSG00000138686_30 (sequence is synthesized)
ctatttattatatatatcaacagtagttcaaggtgccatcttaaattaattgcatcttcattaggaaaaataaaaagcataaaacacaatttctggttactatgaataaacgcctaaatg

SEQ ID NO: 347946 - DNA, 120 bp, Artificial Sequence
  ENSG00000138686_31 (sequence is synthesized)
ttaagatgacattacagtcttgacacttgagtactgtattactatgtgagctccgtgttaaataatttatgcacattatttaatcctaacaaccatatgactgtagttattagtccctat

SEQ ID NO: 347947 - DNA, 120 bp, Artificial Sequence
  ENSG00000138686_32 (sequence is synthesized)
atgtatgcagttgaagttcctggaccccctactgtcttagcactacacaatggaaatggcggtaatcaggattttatttttcacaaatcaactatgtgttttaatagtaagtgaaaatgg

SEQ ID NO: 347948 - DNA, 120 bp, Artificial Sequence
  ENSG00000138686_33 (sequence is synthesized)
ttatattatgtgaaagaatatcaatgaacattatgtacttgagataaattagtggttactgttttaagggcttttataaacatgtggaaacaatttttaaataatttgacatattaattt

SEQ ID NO: 347949 - DNA, 120 bp, Artificial Sequence
  ENSG00000138686_34 (sequence is synthesized)
ttttaacttgagtcaaatgtgttgttttgtaagtttttaagagaagcatatttggaagaaaaaggattttttttgcctcaccatacacaatttctgagctattatcagaatggagtactt

SEQ ID NO: 347950 - DNA, 120 bp, Artificial Sequence
  ENSG00000138686_35 (sequence is synthesized)
tgactacagagaacctttacctgcctttttgttttgttttcttcttccatcacctttatcttccccaaaaatcaaattaaaggaagaaattgggttggagggaggatgttatataacttg

SEQ ID NO: 347951 - DNA, 120 bp, Artificial Sequence
  ENSG00000138686_36 (sequence is synthesized)
ttaataggctttctggaaaataaaattaactaaaggtattttattagtcagaaactaaatttgacctacaatcaatattaaattggttgttgaaatttttttaaagaactttatagtatt

SEQ ID NO: 347952 - DNA, 120 bp, Artificial Sequence
  ENSG00000138686_37 (sequence is synthesized)
gatcatgtaagagaagctgggcagaaagataaaaagattacatcagtcatgattcatgaaccagtcatgaatcagttgacaacaaatttattgcacagaatatttctgtattttgtcaag

SEQ ID NO: 347953 - DNA, 120 bp, Artificial Sequence
  ENSG00000138686_38 (sequence is synthesized)
tttaattcttttacttgataaaatgcaagtatattaagaaataagtatactgtgatgaattaatctatatatatgaacaaacctggtataaaatgaatgtaatctatgaacctttagagc

SEQ ID NO: 347954 - DNA, 120 bp, Artificial Sequence
  ENSG00000138686_39 (sequence is synthesized)
aacctttagagcttagactgtatttcacacaaataattgtcatgttttgttgctattgtgaattataaaaatgcagcatttaaaatttttaaggcaaaatttaataaaggatatacagta

SEQ ID NO: 347955 - DNA, 120 bp, Artificial Sequence
  ENSG00000138688_0 (sequence is synthesized)
cctcggttgggacccctcccctcctcctccgcccccttgggtgtcggtggctgcggccagggtctggacctgggcggcggccccgggcggcggggctaaagggtgtgggcaccggcagag

SEQ ID NO: 347956 - DNA, 120 bp, Artificial Sequence
  ENSG00000138688_1 (sequence is synthesized)
gcaccggcagagcttcgcaggctgcatccggctcggtgctgctgccgtcgccgcccctgccgccgcccaaggccctcggcgttccccggagagaggccagagggatttcgggctgcctcg

SEQ ID NO: 347957 - DNA, 120 bp, Artificial Sequence
  ENSG00000138688_2 (sequence is synthesized)
gcactcgcccaggtttgttaagatgaaacactgcagaaaggctatctgaagaaaagtagaaggaaaaacagaacgttgcaaactctggaaaaaaacttgggcctttagatgttgttctgg

SEQ ID NO: 347958 - DNA, 120 bp, Artificial Sequence
  ENSG00000138688_3 (sequence is synthesized)
aaaaactttagtaatggatcaaaggaagaatgagagtattgttcctagtataactcaattagaagattttcttacagaacacaattccaatgttgtttggctccttgttgctaccatttt

SEQ ID NO: 347959 - DNA, 120 bp, Artificial Sequence
  ENSG00000138688_4 (sequence is synthesized)
gtcctgtggatggattatttacctcacatattataattcccggaatgttggtcttattttaacactagttcttaacagattatacaagcatggctatatccatattggttccttctcttt

SEQ ID NO: 347960 - DNA, 120 bp, Artificial Sequence
  ENSG00000138688_5 (sequence is synthesized)
ctctgttctttctggaaaagtcatggttcgtgaaatctattacattacagaagacatgtctattaggattcaagatggattcatcatttttcggtggtggaaaatgtataacccaaaaca

SEQ ID NO: 347961 - DNA, 120 bp, Artificial Sequence
  ENSG00000138688_6 (sequence is synthesized)
gaagcaacatgatccaaaggcagaaaccaggttatacatcacagtcaatgactttgaatttcatgtctataatcgctcggatctttatggacgccttcaagagttgtttggtttggagcc

SEQ ID NO: 347962 - DNA, 120 bp, Artificial Sequence
  ENSG00000138688_7 (sequence is synthesized)
aacaataattccacctaagaaagatgatgataaaacacgggaaattggaagaacaagaacccaatcgaaaattgaaagagttaaagtaaaaacagaatcccaagaccccacatcttcatg

SEQ ID NO: 347963 - DNA, 120 bp, Artificial Sequence
  ENSG00000138688_8 (sequence is synthesized)
gagatcacttattccagtcataaaggtcaatgtgagcacaggacgtttggcctttggaaatcactaccagccgcaaactctgtgcatcaactttgatgatgctttcttaacttatactac

SEQ ID NO: 347964 - DNA, 120 bp, Artificial Sequence
  ENSG00000138688_9 (sequence is synthesized)
aaaaccaccttcaagtcatcttgaccaattcatgcatattgtgaaaggaaagcttgaaaatgttcgagtcatgcttgttcctagtccaagatatgttggtcttcaaaatgatgaaccacc

SEQ ID NO: 347965 - DNA, 120 bp, Artificial Sequence
  ENSG00000138688_10 (sequence is synthesized)
gagattaatgggagaaggttttgtggtgatgcagtcaaatgatgttgacatctactactacatggatgagccaggacttgttccggaagaaacagaagaaaatattgaaggagaaatgag

SEQ ID NO: 347966 - DNA, 120 bp, Artificial Sequence
  ENSG00000138688_11 (sequence is synthesized)
cagtgaggattgcaaattacaagacttgcctccatgttggggactggatatagtttgtggtaaaggaacagattttaattatggaccatgggccgataggcagagagattgtttgtggaa

SEQ ID NO: 347967 - DNA, 120 bp, Artificial Sequence
  ENSG00000138688_12 (sequence is synthesized)
gtttttctttccacctgactatcaagttctgaaagtttctgaaattgcacagcctgggagaccaagacagatccttgcttttgaattacgaatgaatattattgcagatgctacaattga

SEQ ID NO: 347968 - DNA, 120 bp, Artificial Sequence
  ENSG00000138688_13 (sequence is synthesized)
tttgctgtttaccaaaaatagggaaacaaatgctgtacatgtaaatgtaggagctggctcatatttagaaattaatattccaatgacagttgaagaaaatggttacactcctgctattaa

SEQ ID NO: 347969 - DNA, 120 bp, Artificial Sequence
  ENSG00000138688_14 (sequence is synthesized)
gggacaactcttacatgtggatgccactaccagcatgcaatatcggacccttttagaagcagaaatgttagcattccacatcaatgccagctacccccgaatatggaacatgccgcagac

SEQ ID NO: 347970 - DNA, 120 bp, Artificial Sequence
  ENSG00000138688_15 (sequence is synthesized)
atggcagtgtgaattagaggtttataaagccacttaccacttcatctttgcacagaaaaacttctttacagatttaattcaagactggtctagtgacagtcctccagacattttttcatt

SEQ ID NO: 347971 - DNA, 120 bp, Artificial Sequence
  ENSG00000138688_16 (sequence is synthesized)
tgttccatatacgtggaattttaaaatcatgtttcatcagtttgaaatgatttgggctgctaatcaacacaattggatcgactgttctactaaacaacaggaaaatgtgtatctggcagc

SEQ ID NO: 347972 - DNA, 120 bp, Artificial Sequence
  ENSG00000138688_17 (sequence is synthesized)
ctgtggagaaacactaaacattgatttttctttgccttttacggactttgttccagctacatgtaataccaagttctctttaagaggagaagatgttgatcttcatttgtttctaccaga

SEQ ID NO: 347973 - DNA, 120 bp, Artificial Sequence
  ENSG00000138688_18 (sequence is synthesized)
ctgccaccctagtaaatattctttatttatgctggtaaaaaattgccatccaaataagatgattcatgatactggtattcctgctgagtgtcaaagtggccagaaaacagttaaaccaaa

SEQ ID NO: 347974 - DNA, 120 bp, Artificial Sequence
  ENSG00000138688_19 (sequence is synthesized)
atggcgcaacgttactcaggaaaagtctggttgggttgaatgctggactgtcccaagtgtcatgcttacaattgattatacatggcatccaatttatccacaaaaagcagatgaacagct

SEQ ID NO: 347975 - DNA, 120 bp, Artificial Sequence
  ENSG00000138688_20 (sequence is synthesized)
gaaacaatcattatcagaaatggaagagacaatgctatctgtattaaggccatcccagaagacatcagacagagttgtttcttctccctctacttcttcacgcccacctattgatccctc

SEQ ID NO: 347976 - DNA, 120 bp, Artificial Sequence
  ENSG00000138688_21 (sequence is synthesized)
agaacttccacctgataaacttcatgtagaaatggaactttctccagattctcagataactctctatggacctctactaaatgcctttttgtgtataaaggaaaactactttggggaaga

SEQ ID NO: 347977 - DNA, 120 bp, Artificial Sequence
  ENSG00000138688_22 (sequence is synthesized)
tgacatgtatatggattttgaagaggttatctcaagtcctgttttgtcactgtcaacatcatccagctctgggtggactgctgttggaatggaaaatgacaaaaaggaaaatgaaggttc

SEQ ID NO: 347978 - DNA, 120 bp, Artificial Sequence
  ENSG00000138688_23 (sequence is synthesized)
agccaagtcaattcatccacttgccttgcgtccttgggatattactgtacttgttaatttgtacaaagttcatgggcgtcttcctgttcatggaactactgatggtcctgaatgccctac

SEQ ID NO: 347979 - DNA, 120 bp, Artificial Sequence
  ENSG00000138688_24 (sequence is synthesized)
agctttcttggaaagactatgttttgaaatgaaaaaaggatttagggagaccatgctgcaacttatcctgtcacccctgaatgtgtttgtcagtgataactatcagcagcgaccccctgt

SEQ ID NO: 347980 - DNA, 120 bp, Artificial Sequence
  ENSG00000138688_25 (sequence is synthesized)
ggatgaagtactcagggaaggtcacatcaatttgtcaggtctccagctgagagcacacgctatgttctcagcagaaggtcttcctttgggaagcgattccttagaatacgcatggttaat

SEQ ID NO: 347981 - DNA, 120 bp, Artificial Sequence
  ENSG00000138688_26 (sequence is synthesized)
tgatgtgcaggctggaagtcttacagctaaggtcacagcaccacagctggcatgcctcttggagtggggacagacatttgtttttcatgtggtatgtcgggagtatgaactggaaagacc

SEQ ID NO: 347982 - DNA, 120 bp, Artificial Sequence
  ENSG00000138688_27 (sequence is synthesized)
gaaatcagttataatatgtcagcatggaattgatcgtcggttctgtgaatccaagttgagttgtattcctgggccttgtccaacttcagatgatttgaaatatactatgattcgtttagc

SEQ ID NO: 347983 - DNA, 120 bp, Artificial Sequence
  ENSG00000138688_28 (sequence is synthesized)
agtagatggagccgatatttacattgttgagcatggttgtgctacaaatataaagatgggtgcaattcgagttgcaaactgtaatctccacaatcaatcggttggggaaggaatcagtgc

SEQ ID NO: 347984 - DNA, 120 bp, Artificial Sequence
  ENSG00000138688_29 (sequence is synthesized)
tgcaattcaggattttcaagtgagacagtacattgagcaattaaataattgcagaattggacttcagcctgcagtgctacggagggcctattggcttgaagctgggtcagccaatttagg

SEQ ID NO: 347985 - DNA, 120 bp, Artificial Sequence
  ENSG00000138688_30 (sequence is synthesized)
acttattactgttgatattgctttagctgctgaccatcattctaaacatgaggcacaaagacatttcttagaaactcatgatgccagaactaagaggttgtggtttttatggccagatga

SEQ ID NO: 347986 - DNA, 120 bp, Artificial Sequence
  ENSG00000138688_31 (sequence is synthesized)
tatcctgaagaataagaggtgtagaaacaaatgtggttgtctcggtggctgcagattctttggtggcacagtaactggcctagatttcttcaaacttgaagagttgacaccttccagtag

SEQ ID NO: 347987 - DNA, 120 bp, Artificial Sequence
  ENSG00000138688_32 (sequence is synthesized)
ctctgcattttcaagcacaagtgcagagtctgatatgtattatggacagtctctgctacagcctggagaatggataattactaaagaaattcccaaaattatagatggtaatgtgaatgg

SEQ ID NO: 347988 - DNA, 120 bp, Artificial Sequence
  ENSG00000138688_33 (sequence is synthesized)
catgaagaggaaagaatgggaaaacaaatcagtgggaatagaagtagagagaaaaactcagcaccttagtcttcaagtaccattacgatctcatagttcatcctcttcctcagaagagaa

SEQ ID NO: 347989 - DNA, 120 bp, Artificial Sequence
  ENSG00000138688_34 (sequence is synthesized)
cagtagttctagtgctgcacagcctttgttggctggtgaaaaggaaagtccttcatctgttgctgatgaccatttggttcaaaaagagttcttgcatgggacaaaaagagatgatggcca

SEQ ID NO: 347990 - DNA, 120 bp, Artificial Sequence
  ENSG00000138688_35 (sequence is synthesized)
agcaagtatccctacagaaatttcaggaaacagccctgtgtctcctaatactcaggataagtcagtaggtcaatctcctcttagatctcccttgaaacgacaagcctctgtctgttccac

SEQ ID NO: 347991 - DNA, 120 bp, Artificial Sequence
  ENSG00000138688_36 (sequence is synthesized)
ccgtcttggaagtactaagagtcttactgctgctttctatggggacaagcagcctgtaacagttggagtccagtttagtagtgatgtctctcgaagtgatgagaatgtactagactcacc

SEQ ID NO: 347992 - DNA, 120 bp, Artificial Sequence
  ENSG00000138688_37 (sequence is synthesized)
aaagcagaggagaagttttggttcattcccatatacaccatcagcagactctaattcatttcatcagtatcgatcaatggattccagcatgtcaatggctgatagtgaagcctacttttc

SEQ ID NO: 347993 - DNA, 120 bp, Artificial Sequence
  ENSG00000138688_38 (sequence is synthesized)
tgctgctgaggaatttgagcccattagcagtgatgaaggccctggaacttatccgggtagaaaaaagaagaaaaagcaaacccagcagattgactacagtaggggttccatatatcacag

SEQ ID NO: 347994 - DNA, 120 bp, Artificial Sequence
  ENSG00000138688_39 (sequence is synthesized)
tgtagaagggccacttactggacatggagaaagcattcaggattccagaactctgccattcaaaactcatccttctcaggcttcatttgtttctgcgttaggtggagaagatgatgttat

SEQ ID NO: 347995 - DNA, 120 bp, Artificial Sequence
  ENSG00000138688_40 (sequence is synthesized)
agaacatctatatattgtagaaggtgagaaaacagtggagagtgaacagattactccgcaacaacccgtgatgaattgttatcagacttaccttactcagttccaggtaattaattggtc

SEQ ID NO: 347996 - DNA, 120 bp, Artificial Sequence
  ENSG00000138688_41 (sequence is synthesized)
agttaagcacccaaccaacaaaagaacctctaaatcctcattgcatcgtccccttgatctggatacaccaaccagtgaagaaagttcatcgtcatttgaacagctttctgttccaacttt

SEQ ID NO: 347997 - DNA, 120 bp, Artificial Sequence
  ENSG00000138688_42 (sequence is synthesized)
taaggttatcaagcaggggctcacagctaattctttgctagacagaggcatgcaactttcaggatcaacttcaaatacgccgtatactccattggaaaaaaaactcgctgataacacaga

SEQ ID NO: 347998 - DNA, 120 bp, Artificial Sequence
  ENSG00000138688_43 (sequence is synthesized)
tgatgaaacattaacagaagagtggaccctggatcaaccagtgtcccagaccaggacaacagccatagttgaagtaaaaggaactgttgatattgttttgactcccctggtggctgaagc

SEQ ID NO: 347999 - DNA, 120 bp, Artificial Sequence
  ENSG00000138688_44 (sequence is synthesized)
tttagacagatatattgaagcaatggttcattgtgctagtacccgacatccagctgcaattgtagatgatcttcatgctaaagtcctcagggaagctgtccaaaatagcaagactacctt

SEQ ID NO: 348000 - DNA, 120 bp, Artificial Sequence
  ENSG00000138688_45 (sequence is synthesized)
ttcagaaaatttatcttccaaacaagacattagaggaacaaaaactgagcagtctacaataggaacgactaaccaaggacaagcacagacaaatcttacaatgaagcaagataatgtaac

SEQ ID NO: 348001 - DNA, 120 bp, Artificial Sequence
  ENSG00000138688_46 (sequence is synthesized)
aattaaaggtcttcagactaatgttagcataccaaaggtaaacttatgtttgttacaagcctcagtggaagaatctccaactacggctcctagtaggagtgtgactcatgtttccctagt

SEQ ID NO: 348002 - DNA, 120 bp, Artificial Sequence
  ENSG00000138688_47 (sequence is synthesized)
ggcattgtgttttgacagaattgctacacaggttcgcatgaacagaggtgtggttgaagagacttcaaacaatgcagaacctggtagaacatcaaattttgataggtatgttcatgccac

SEQ ID NO: 348003 - DNA, 120 bp, Artificial Sequence
  ENSG00000138688_48 (sequence is synthesized)
aaagatgcagcctcagtcatctggatctctcagatcaaatgctggagcagaaaaaggcaaagaaattgcagctaagttaaacattcatcgagttcatgggcaacttaggggtcttgatac

SEQ ID NO: 348004 - DNA, 120 bp, Artificial Sequence
  ENSG00000138688_49 (sequence is synthesized)
aacagacattgggacctgtgcaatcactgctattccttttgagaagtccaaagttttatttactcttgaagagttggatgaatttacttttgtggatgaaactgatcagcaagctgttcc

SEQ ID NO: 348005 - DNA, 120 bp, Artificial Sequence
  ENSG00000138688_50 (sequence is synthesized)
agatgtaactcgaataggtcccagccaagaaaaatggggatggataatgtttgaatgtggacttgaaaatttaaccataaaaggaggaagacagtctggtgctgttttatataacagttt

SEQ ID NO: 348006 - DNA, 120 bp, Artificial Sequence
  ENSG00000138688_51 (sequence is synthesized)
tggaattatgggtaaagctagtgacacagaaaggggtggagtgctgacatccaataattcttctgattctccaaccggcagtggctataatactgatgtctctgatgataatcttccatg

SEQ ID NO: 348007 - DNA, 120 bp, Artificial Sequence
  ENSG00000138688_52 (sequence is synthesized)
tgaccggacaagcccttcctcagacttaaatggaaattctgtttcagatgaacaggatgaaggagtcgaatctgatgatttgaaaaaagatctacctctgatgcctcctcctccagattc

SEQ ID NO: 348008 - DNA, 120 bp, Artificial Sequence
  ENSG00000138688_53 (sequence is synthesized)
atgtagcatgaagttgaccattaaagaaatttggtttagttttgcagctcccaccaatgtgagatctcacacacatgcattttctaggcagctgaaccttttaagcactgcaacaccagc

SEQ ID NO: 348009 - DNA, 120 bp, Artificial Sequence
  ENSG00000138688_54 (sequence is synthesized)
tgttggtgcatggcttgttcccattgaccaactcaagtcatctttaaacaaattggaaactgagggaaccttgagaatttgtgctgttatgggatgcataatgacagaagcattagagaa

SEQ ID NO: 348010 - DNA, 120 bp, Artificial Sequence
  ENSG00000138688_55 (sequence is synthesized)
taaaagtgtacattttcccctaagaagtaaatacaacaggcttacaaaagttgctcgctttctccaagaaaatccttcatgtttactatgtaatatactacaccactatctgcaccaggc

SEQ ID NO: 348011 - DNA, 120 bp, Artificial Sequence
  ENSG00000138688_56 (sequence is synthesized)
aaattactccatcattgatgatgctacaatgagcgatggacttcctgctttggtaactttgaagaaaggtttagttgcactggcaaggcagtggatgaagtttattgtggtgacaccagc

SEQ ID NO: 348012 - DNA, 120 bp, Artificial Sequence
  ENSG00000138688_57 (sequence is synthesized)
ctttaaaggagttagcttacatagaccagctcagcctctgaaacctcaaatagctatggaccatgaacatgaagatggacttggattggacaatgggggtggtcttcaaagtgataccag

SEQ ID NO: 348013 - DNA, 120 bp, Artificial Sequence
  ENSG00000138688_58 (sequence is synthesized)
tgctgatggagcagaatttgagttcgatgcagccacagtcagtgaacacacaatgctattagaaggaacagctaaccggcctccacctggtagctctggacctgtaactggagctgagat

SEQ ID NO: 348014 - DNA, 120 bp, Artificial Sequence
  ENSG00000138688_59 (sequence is synthesized)
aatgaggaaactttctaaaactcatacccatagtgactctgcattaaaaataaagggcattcacccatatcattctctgagctataccagtggagacactgccactgattctccagtgca

SEQ ID NO: 348015 - DNA, 120 bp, Artificial Sequence
  ENSG00000138688_60 (sequence is synthesized)
tgttggacgtgctgggatgccagtaaaggacagtccaaggaaggagagcctactcagctacctgactggaagcttcccaagcctgcacaacctcctggaaggtactcctcagagaagcag

SEQ ID NO: 348016 - DNA, 120 bp, Artificial Sequence
  ENSG00000138688_61 (sequence is synthesized)
tgctgctgtgaaaagtagctccctaacgagaacaggaaatacagtagccactgatatgttatctgaacatcccttgctatctgagccatcatctgtgagtttctataattggatgtcaaa

SEQ ID NO: 348017 - DNA, 120 bp, Artificial Sequence
  ENSG00000138688_62 (sequence is synthesized)
tgctgtgggtaatcgaggaagtgtgttacaagaatctcctgttacaaaatcaggacacaatagtcttcccacaggtgttgcacccaatcttccaacaataccctcagcctcagatttcaa

SEQ ID NO: 348018 - DNA, 120 bp, Artificial Sequence
  ENSG00000138688_63 (sequence is synthesized)
cactgtcttgtctagtgaccaaaatactttggatgggacacattctcagcatagcaccagtcaggatgatgtggcaggtgtagaagaagcaaaccaagggtttcctgctgttcagcttgc

SEQ ID NO: 348019 - DNA, 120 bp, Artificial Sequence
  ENSG00000138688_64 (sequence is synthesized)
tgatgcacaggttgttttcaagcctcttctgagtcatacagggatccagtcacaggatacaatgccattctgctaccgaatgtactttggagaacacctttcattttcagggactttgga

SEQ ID NO: 348020 - DNA, 120 bp, Artificial Sequence
  ENSG00000138688_65 (sequence is synthesized)
ctgcctcagagcagatattgtggattcagacacagccaaagagagaaaaggcaaaagagcaagaaggcaaggccatgtgaatcttcctccacttgagttcaaaccagcattaatgttggg

SEQ ID NO: 348021 - DNA, 120 bp, Artificial Sequence
  ENSG00000138688_66 (sequence is synthesized)
ctaccagtgccctttcttttcatgatctcagcaagcggtattataacacctttcactgcaactttactatttcctgtcagtcaataagccagcatgtagatatggctttggttcgtctta

SEQ ID NO: 348022 - DNA, 120 bp, Artificial Sequence
  ENSG00000138688_67 (sequence is synthesized)
ttcatcagtttagcacaatgatagatgacatcaaagcaactcagactgatattaaacttagcagatatacagccggatctgcttccccaacacctaccttcaaaaccagaaaacatcggg

SEQ ID NO: 348023 - DNA, 120 bp, Artificial Sequence
  ENSG00000138688_68 (sequence is synthesized)
actttcgttcatctgactttagccgcagttctagaggaagtcttaatggtggcaatagagtaaataatgcaaagaacaaacggaccaacaatgagaataacaaaaaggaatctcgaaaca

SEQ ID NO: 348024 - DNA, 120 bp, Artificial Sequence
  ENSG00000138688_69 (sequence is synthesized)
agaattcattaggaagatctgaaagaagaacatcaaaagtgtctaggaaaggttcaaaagatgtggtggatcacatgactattcatatggatgactctgattcaattacagtgtcagaac

SEQ ID NO: 348025 - DNA, 120 bp, Artificial Sequence
  ENSG00000138688_70 (sequence is synthesized)
aaagtgagccttcagctgagtgctggcagaatatgtataaattgcttaacttctattcacttatctccgatccaacaggaatattggaaaagtcttcagaaacatttggaccagcaggag

SEQ ID NO: 348026 - DNA, 120 bp, Artificial Sequence
  ENSG00000138688_71 (sequence is synthesized)
ttcggagccctacagagccaacatgtaaagttgtgtttgagaatgaacaagacaacagcagtttgactaagactcagaggaaacgtagcttggtaacttctgaacctcagcatgttactc

SEQ ID NO: 348027 - DNA, 120 bp, Artificial Sequence
  ENSG00000138688_72 (sequence is synthesized)
taatagtgtttgggattggcatggtgaaccgcacacacctagaggcagatattggtggactaacaatggaatcagaactgaagaggatccatggcagttttactcttaaggaaaaaatga

SEQ ID NO: 348028 - DNA, 120 bp, Artificial Sequence
  ENSG00000138688_73 (sequence is synthesized)
aagatgttttacatcaaaagatgactgagacttgtgctactgctcatattggtggggttaatattgtgctgcttgaagggattacaccaaatatacaactggaggattttcctacatctc

SEQ ID NO: 348029 - DNA, 120 bp, Artificial Sequence
  ENSG00000138688_74 (sequence is synthesized)
ctacaagtacagccaaacaagagtttctaactgtagtgaaatgtagtattgccaagtcccaagccctctacagtgcccaaagagggctgaagacaaacaatgctgctgtgttcaaagtag

SEQ ID NO: 348030 - DNA, 120 bp, Artificial Sequence
  ENSG00000138688_75 (sequence is synthesized)
gagctatcagtatcaacattcctcagcaccctgccaccttacatagcatgatggttcgaagttctcaccaactatctaaacaaatctcagacctaatcagacagccttctacagccccac

SEQ ID NO: 348031 - DNA, 120 bp, Artificial Sequence
  ENSG00000138688_76 (sequence is synthesized)
agcctgtaaaagaagatattgcaaccccactaccttctgaaaaaaccccaacaagtgttaatcaaactcctgttgaaacaaatgaatttcctcagctaccagaaggcttagaaaagaagc

SEQ ID NO: 348032 - DNA, 120 bp, Artificial Sequence
  ENSG00000138688_77 (sequence is synthesized)
ctattgttcttaaattcagtgccatgttagatggtatagccattggagcagcacttttaccatctctgaaagcagaatacaagatgggaagaatgagaagtcatggaatgacaggtgcac

SEQ ID NO: 348033 - DNA, 120 bp, Artificial Sequence
  ENSG00000138688_78 (sequence is synthesized)
agacaagatttacatttgagctgccaaatcacagattgcgttttacttcaaaagtttctgccacagatatgtcaaccattcctccttctgccagtcttaaccttccccctgttaccatgt

SEQ ID NO: 348034 - DNA, 120 bp, Artificial Sequence
  ENSG00000138688_79 (sequence is synthesized)
cagggaaatatataatggaagaacatgatagttattcggatcaggtgtggagtatagatgaactgccttctaaacaaggttactatttacagggaaattatctgcgttgtgtggcagaag

SEQ ID NO: 348035 - DNA, 120 bp, Artificial Sequence
  ENSG00000138688_80 (sequence is synthesized)
ttggttcctttgaacataatcttacaactgatcttctaaaccacttggtatttgtacagaaagtgttcatgaaggaagttaatgaagtaatacaaaaagtttctggtggggagcagccta

SEQ ID NO: 348036 - DNA, 120 bp, Artificial Sequence
  ENSG00000138688_81 (sequence is synthesized)
ttcctctctggaacgaacatgatggaacagcagatggagataaacctaaaattctcctctattccctaaacttgcagttcaagggtattcaagtaacggccactactccatcaatgagag

SEQ ID NO: 348037 - DNA, 120 bp, Artificial Sequence
  ENSG00000138688_82 (sequence is synthesized)
ctgtaagatttgaaactggattgattgaactggaactttctaaccgacttcaaaccaaagcttcaccaggaagtagcagctatctgaaactgtttggcaaatgccaggtggatttaaatc

SEQ ID NO: 348038 - DNA, 120 bp, Artificial Sequence
  ENSG00000138688_83 (sequence is synthesized)
tggcattaggacaaattgtcaaacatcaggtttatgaggaagctggttctgattttcatcaagttgcctattttaaaaccagaattggattaagaaatgccctccgagaagaaatcagtg

SEQ ID NO: 348039 - DNA, 120 bp, Artificial Sequence
  ENSG00000138688_84 (sequence is synthesized)
gttcttcagatagggaagctgtgcttattactttgaatagaccaattgtttatgcacagcctgtggcctttgatagagctgtgctgttttggctgaattataaggccgcctatgacaact

SEQ ID NO: 348040 - DNA, 120 bp, Artificial Sequence
  ENSG00000138688_85 (sequence is synthesized)
ggaatgaacaacgaatggctttacataaggatattcatatggctacaaaggaagtagtagatatgctacctggtatccagcaaacatcagcccaggcctttgggactctttttctccagc

SEQ ID NO: 348041 - DNA, 120 bp, Artificial Sequence
  ENSG00000138688_86 (sequence is synthesized)
tcactgtcaatgatctgggaatttgcctacctatcacaaatactgcacagtctaatcatactggagaccttgacactggttctgctttggtattaaccattgaaagtactctcatcactg

SEQ ID NO: 348042 - DNA, 120 bp, Artificial Sequence
  ENSG00000138688_87 (sequence is synthesized)
catgctcttcagagtctctggttagcaaagggcatttcaaaaacttttgtatccgttttgctgatggatttgagacatcatgggatgactggaaaccagaaattcatggggatttagtga

SEQ ID NO: 348043 - DNA, 120 bp, Artificial Sequence
  ENSG00000138688_88 (sequence is synthesized)
tgaatgcctgtgtagttccagatggcacctatgaagtatgttcaagaactacaggacaagcagcagctgaaagcagtagtgctggaacctggacactcaacgtattgtggaaaatgtgtg

SEQ ID NO: 348044 - DNA, 120 bp, Artificial Sequence
  ENSG00000138688_89 (sequence is synthesized)
ggattgatgttcacatggatcctaacattggcaaaaggcttaatgctctgggcaatactcttacaacactgacaggagaggaagacatagatgacattgctgacttaaattcagtgaaca

SEQ ID NO: 348045 - DNA, 120 bp, Artificial Sequence
  ENSG00000138688_90 (sequence is synthesized)
tagctgacctgtcagatgaggatgaagttgatactatgtctcccactatccatactgaagccacagattatcgaagacaggcagcatctgctagccagccgggagaacttagaggaagaa

SEQ ID NO: 348046 - DNA, 120 bp, Artificial Sequence
  ENSG00000138688_91 (sequence is synthesized)
aaattatgaagcgtatagtggatatcagagaactgaatgaacaggccaaagtaatagatgatctgaaaaaattaggtgcaagtgaaggaaccataaaccaggaaattcaacgttaccaac

SEQ ID NO: 348047 - DNA, 120 bp, Artificial Sequence
  ENSG00000138688_92 (sequence is synthesized)
agttagaatctgtggctgtgaatgacattagaagagatgttcgtaaaaaattacggaggtccagtatgcgggctgcttccctaaaggataagtggggtttgagttacaaaccaagttaca

SEQ ID NO: 348048 - DNA, 120 bp, Artificial Sequence
  ENSG00000138688_93 (sequence is synthesized)
gccgatcaaaaagcatttctgcttctggaagaccacctcttaagcgaatggaaagggcaagttctcgagtaggagaaactgaagagctcccagaaatccgtgtggatgcagcatctcctg

SEQ ID NO: 348049 - DNA, 120 bp, Artificial Sequence
  ENSG00000138688_94 (sequence is synthesized)
gacctagagtaacttttaatatccaggatacatttccagaggagacagaactggaccttttgtcagtaaccattgaaggtccatcccattattcatcaaatagtgaaggatcatgttctg

SEQ ID NO: 348050 - DNA, 120 bp, Artificial Sequence
  ENSG00000138688_95 (sequence is synthesized)
tgttcagttctcccaaaactccaggaggcttttcaccaggcattcctttccaaactgaagagggccgacgggatgacagtttgtcttctaccagtgaagattccgagaaggatgaaaaag

SEQ ID NO: 348051 - DNA, 120 bp, Artificial Sequence
  ENSG00000138688_96 (sequence is synthesized)
atgaagaccatgagagggaaaggttttatatttacaggaaaccctcacatacgtctcgtaaaaaagcaacaggctttgctgctgttcatcagctatttacagaacgctggccaacaacac

SEQ ID NO: 348052 - DNA, 120 bp, Artificial Sequence
  ENSG00000138688_97 (sequence is synthesized)
cagtcaatagaagtcttagtggcacagctacagagagaaatattgactttgaacttgatatacgggttgaaattgatagtggaaaatgtgtactccacccaaccacccttctacaagaac

SEQ ID NO: 348053 - DNA, 120 bp, Artificial Sequence
  ENSG00000138688_98 (sequence is synthesized)
atgatgatataagtttgagaaggagttatgatcgaagttccaggagcttagatcaagattcaccttcaaaaaagaagaagtttcaaactaattatgcttctaccacccatttaatgaccg

SEQ ID NO: 348054 - DNA, 120 bp, Artificial Sequence
  ENSG00000138688_99 (sequence is synthesized)
gcaagaaagtgccatcatctctacagacaaagcctagtgacttagaaacaacagtattttacattcccggagttgatgtaaagttgcattacaattccaagacgctaaagactgaatcac

SEQ ID NO: 348055 - DNA, 120 bp, Artificial Sequence
  ENSG00000138688_100 (sequence is synthesized)
ctaatgcctccaggggatcttccttgccaagaacactgtccaaagagtccaagctgtatggtatgaaagatagtgcaacatctcctccttctcctcctttaccttccactgtccagagca

SEQ ID NO: 348056 - DNA, 120 bp, Artificial Sequence
  ENSG00000138688_101 (sequence is synthesized)
agactaacaccttacttcctccccagcccccacctattcctgcagccaaaggaaaaggaagtggaggagtaaaaacagccaagttatatgcctgggtagcacttcagtcattgccagaag

SEQ ID NO: 348057 - DNA, 120 bp, Artificial Sequence
  ENSG00000138688_102 (sequence is synthesized)
aaatggttattagtccctgcctattagactttctggaaaaagctctggaaactatcccaattacaccagttgaaaggaattatacagctgtcagctcacaagatgaagatatgggacatt

SEQ ID NO: 348058 - DNA, 120 bp, Artificial Sequence
  ENSG00000138688_103 (sequence is synthesized)
ttgaaataccagatcctatggaagaatcaacaacatcactagtgtcgtcttcaacatctgcttactcttccttccctgtagatgttgtggtttatgtacgagttcagccctcacagatca

SEQ ID NO: 348059 - DNA, 120 bp, Artificial Sequence
  ENSG00000138688_104 (sequence is synthesized)
aatttagctgtttaccagtatcaagagtagaatgcatgttaaagctgccatccctggatttggtgttttcttcaaaccgaggagaactggagactttagggactacatatcctgcagaga

SEQ ID NO: 348060 - DNA, 120 bp, Artificial Sequence
  ENSG00000138688_105 (sequence is synthesized)
ctttatcccctggaggtaatgctactcagagtggaacaaagacttctgctagcaaaactggaataccaggttcatcgggattaggcagccctcttggccgaagtcgacatagtagtagtc

SEQ ID NO: 348061 - DNA, 120 bp, Artificial Sequence
  ENSG00000138688_106 (sequence is synthesized)
agtcagacctgaccagttccagcagtagttcatctggcttgagcttcactgcatgcatgtctgacttttccctttatgtatttcatccatatggagcagggaaacaaaaaactgctgttt

SEQ ID NO: 348062 - DNA, 120 bp, Artificial Sequence
  ENSG00000138688_107 (sequence is synthesized)
ctggcctcacacctggatcaggaggattagggaatgtggatgaggagcccacttcagtcactggtcgaaaagattcactcagtataaaccttgagtttgtaaaagtgagtttgtcacgga

SEQ ID NO: 348063 - DNA, 120 bp, Artificial Sequence
  ENSG00000138688_108 (sequence is synthesized)
tcaggcgttcaggaggtgcctcattttttgaaagtcagtctgtaagcaagtctgcaagcaaaatggatactacgttaataaatatatctgctgtttgtgatatagggtctgcctccttta

SEQ ID NO: 348064 - DNA, 120 bp, Artificial Sequence
  ENSG00000138688_109 (sequence is synthesized)
aatatgatatgcgccgactcagtgaaattctggcatttccaagagcatggtatagaagaagtattgcaagacgtctattccttggagaccaaactataaatttgccaacatctggcccag

SEQ ID NO: 348065 - DNA, 120 bp, Artificial Sequence
  ENSG00000138688_110 (sequence is synthesized)
ggacacctgattccattgaaggggtaagccaacacctttcccctgaatcatcaagaaaagcttactgcaagacctgggagcagccaagtcagtcagcctccttcacccacatgcctcagt

SEQ ID NO: 348066 - DNA, 120 bp, Artificial Sequence
  ENSG00000138688_111 (sequence is synthesized)
cacctaatgtgttcaatgagcatatgacaaacagcaccatgtcaccagggacagtaggacagagcctaaaatccccagcttccataagatcaaggagtgtatctgattcttcagttcctc

SEQ ID NO: 348067 - DNA, 120 bp, Artificial Sequence
  ENSG00000138688_112 (sequence is synthesized)
gaagagattcactttcaaaaacatcaactccttttaacaaatcaaacaaagcagcaagccaacaagggaccccatgggaaacacttgtcgtgtttgctatcaacttgaagcaattaaacg

SEQ ID NO: 348068 - DNA, 120 bp, Artificial Sequence
  ENSG00000138688_113 (sequence is synthesized)
ttcaaatgaatatgagtaatgtaatgggaaatacaacttggacaactagtggtttgaagagccagggccgtctgtcagtaggaagtaatcgtgatcgagagatcagcatgtctgttggtc

SEQ ID NO: 348069 - DNA, 120 bp, Artificial Sequence
  ENSG00000138688_114 (sequence is synthesized)
tgggaagatcacaattagattctaaaggaggagtagttggagggaccatagatgtcaatgctttggagatggttgctcatatttctgaacatccaaatcagcaacccagtcacaaaattc

SEQ ID NO: 348070 - DNA, 120 bp, Artificial Sequence
  ENSG00000138688_115 (sequence is synthesized)
agattactatgggttctactgaagctcgtgttgattacatgggctcaagtatcctcatgggcatcttcagtaatgctgatcttaagcttcaggatgaatggaaagtaaacttgtataata

SEQ ID NO: 348071 - DNA, 120 bp, Artificial Sequence
  ENSG00000138688_116 (sequence is synthesized)
cattggattcaagcataactgataaaagtgagattttcgtccatggagatttgaagtgggatattttccaagtaatgatatcaaggtcaaccacaccagatctgataaaaataggaatga

SEQ ID NO: 348072 - DNA, 120 bp, Artificial Sequence
  ENSG00000138688_117 (sequence is synthesized)
agctccaggaatttttcacacaacaatttgataccagcaaacgagctctgtctacctggggaccagttccttaccttccgccaaagacaatgactagcaacctagaaaaaagttcacaag

SEQ ID NO: 348073 - DNA, 120 bp, Artificial Sequence
  ENSG00000138688_118 (sequence is synthesized)
aacaattacttgatgcagcacatcatcgacactggcctggagtattgaaggtggtatcaggatgccacatatccttatttcagattccattaccagaagatggaatgcaatttggaggat

SEQ ID NO: 348074 - DNA, 120 bp, Artificial Sequence
  ENSG00000138688_119 (sequence is synthesized)
caatgagcttacatggaaatcatatgacactggcatgttttcatggtccaaattttcgttcaaaatcttgggccctttttcatttagaagaaccaaatattgctttttggactgaagctc

SEQ ID NO: 348075 - DNA, 120 bp, Artificial Sequence
  ENSG00000138688_120 (sequence is synthesized)
agaaaatctgggaagatggctccagtgatcattctacatatattgtacaaacactagattttcacctgggtcataatactatggttaccaaaccatgtggtgctttggaaagtcctatgg

SEQ ID NO: 348076 - DNA, 120 bp, Artificial Sequence
  ENSG00000138688_121 (sequence is synthesized)
caacaataaccaagataacaaggcgtcgccatgaaaatccaccccatggagtagcaagtgtgaaagaatggttcaattatgttacagctacaaggaatgaagagctaaatctgcttcgta

SEQ ID NO: 348077 - DNA, 120 bp, Artificial Sequence
  ENSG00000138688_122 (sequence is synthesized)
atgttgatgctaacaacactgagaatagcactactgtgaagaattctagtttgttgagtggattcagaggaggttctagctacaaccatgaaacagagactatctttgcattaccaagga

SEQ ID NO: 348078 - DNA, 120 bp, Artificial Sequence
  ENSG00000138688_123 (sequence is synthesized)
tgcagcttgactttaaatccattcatgttcaagaaccacaggagccttcattacaggatgccagcctgaagccaaaagtagaatgtagtgtggtgacagagttcactgaccacatttgtg

SEQ ID NO: 348079 - DNA, 120 bp, Artificial Sequence
  ENSG00000138688_124 (sequence is synthesized)
tgactatggatgctgagctcatcatgtttcttcatgatttagtatcagcttatcttaaagaaaaagaaaaagccatctttccacctcggattttatctactcgaccaggacaaaaaagtc

SEQ ID NO: 348080 - DNA, 120 bp, Artificial Sequence
  ENSG00000138688_125 (sequence is synthesized)
caattattatacatgacgacaattcctctgataaagatagagaagatagcatcacttatactactgtggactggagagattttatgtgcaatacatggcatctagaacctactcttagat

SEQ ID NO: 348081 - DNA, 120 bp, Artificial Sequence
  ENSG00000138688_126 (sequence is synthesized)
taatttcttggactggaagaaagattgatccagtaggtgttgattatattcttcaaaaattgggctttcatcatgctaggactactattcctaaatggcttcaaagaggagtcatggatc

SEQ ID NO: 348082 - DNA, 120 bp, Artificial Sequence
  ENSG00000138688_127 (sequence is synthesized)
cactggacaaggttctgtcagttcttatcaaaaagctcggtactgcactacaggatgaaaaggaaaagaaaggcaaagacaaagaagaacactaaaaaagtaatttgatctgtgaacaaa

SEQ ID NO: 348083 - DNA, 120 bp, Artificial Sequence
  ENSG00000138688_128 (sequence is synthesized)
ttatgattgtgtctgttttattacactggagtgtttttttagtataataatttgaaatataactttaaaataattctaaatttgtggctataattaaaagtttgtaagttaacctgttct

SEQ ID NO: 348084 - DNA, 120 bp, Artificial Sequence
  ENSG00000138688_129 (sequence is synthesized)
agttccatcattctgtgtacagtgaagtattgcatgataatgtaaattttgtgaaaaactagattaaaatatataactgcttgttatggtttataattatataatgtgcaatacaattcc

SEQ ID NO: 348085 - DNA, 120 bp, Artificial Sequence
  ENSG00000138688_130 (sequence is synthesized)
tgcatctttaaaatgtctgcagaataactgtgaatttttttgttattggattggccgtaacttttagaaaaaaatcttgttgatgataatgtgattttggggaggtcattaattgctttt

SEQ ID NO: 348086 - DNA, 120 bp, Artificial Sequence
  ENSG00000138688_131 (sequence is synthesized)
ttgctttttcttttttaaatgtagacttatataaatacctgtttgtatatagcttgagtaattgtgatatgattgtataccactaaaatattgttaactattataataaagtcacagtaa

SEQ ID NO: 348087 - DNA, 120 bp, Artificial Sequence
  ENSG00000138688_132 (sequence is synthesized)
gaatagtttttaaaatatttaaatttttttcatggctgtgaattatttagttattgttttgtagctgtaatataggcccttttatataatagattaaagcttactggtaatcaaggaaaa

SEQ ID NO: 348088 - DNA, 120 bp, Artificial Sequence
  ENSG00000138688_133 (sequence is synthesized)
gtgaggtactttgcttgattaaactttaatataattcaaatttctgtttaattggaactttttataaaatccattaaatggaatttataaatgttctagccaaaggaaaaggaagtggag

SEQ ID NO: 348089 - DNA, 120 bp, Artificial Sequence
  ENSG00000138688_134 (sequence is synthesized)
acttcatttctttctttttgttttaaagagaaatgtttttcttaagtttatttgaacatttcaacattattactgtttaaaagttttcttaacctcaggttcatgaacctttagtatgtt

SEQ ID NO: 348090 - DNA, 120 bp, Artificial Sequence
  ENSG00000138688_135 (sequence is synthesized)
cttttaatatccaggatacaatagcagaaattagaaggaagaagatcagcttcaaagttgtattctaatttcatagcatattaaacattatattaaaatgtttattttgttttttgtgta

SEQ ID NO: 348091 - DNA, 120 bp, Artificial Sequence
  ENSG00000138688_136 (sequence is synthesized)
gctacaattcggtattctataagaaagagaaaggtatttctccctatattgaacacgtggtatttagctacttgtcactcacattctgtacagaatagaaaataaactttggtaagaaaa

SEQ ID NO: 348092 - DNA, 120 bp, Artificial Sequence
  ENSG00000138688_137 (sequence is synthesized)
ttaagtggtatggccccaaattaggaacttctatttcccatgtttctatttcccatgtgttttttccatgctatttacttgctcgttatagaacagagaagacatgatctttatagtctt

SEQ ID NO: 348093 - DNA, 120 bp, Artificial Sequence
  ENSG00000138688_138 (sequence is synthesized)
aagtaaaatttcattctgatttttagtatgtcagtagtgtaactttctgtggttggcccttttgcttccttccttggtgtactatttcatatgttcatgaatctgacctttctttcagtt

SEQ ID NO: 348094 - DNA, 120 bp, Artificial Sequence
  ENSG00000138688_139 (sequence is synthesized)
cagagtgaagaaattcaactctgagataatttttaaatgtttaaatttatatattttttctttttttaattgaaatatgaatctgattcatgttttttctttttacaatcagtttccaga

SEQ ID NO: 348095 - DNA, 120 bp, Artificial Sequence
  ENSG00000138688_140 (sequence is synthesized)
gatgtgcaggctggaagtcttacagctaaggtcacagcaccacagttgagttgtattcctgggccttgtccaacttcagatgatttgaaatatactatgattcgtttagcagtagatgga

SEQ ID NO: 348096 - DNA, 120 bp, Artificial Sequence
  ENSG00000138688_141 (sequence is synthesized)
ggagatggccacaaactcacctttgggcagcgacttgtaaatcacctactaggcctgacacccccaaatcagcgccattctgttcctgcagagtatctgtgtgacccagagatgtggggc

SEQ ID NO: 348097 - DNA, 120 bp, Artificial Sequence
  ENSG00000138688_142 (sequence is synthesized)
ctataaaaagggaatcaattataaggagaacagggtaattttctagcttttctagctaggagtaaagcttcattatcaatgttaatattcaaatatttaccacacagtttttatataaag

SEQ ID NO: 348098 - DNA, 120 bp, Artificial Sequence
  ENSG00000138688_143 (sequence is synthesized)
tatgttgtttcattgtcaaacttgaccttttaaataatctgatttaactcctttttaatttaaatcctgttttaattcatgacactggaagctatatatataataacctttttttcattt

SEQ ID NO: 348099 - DNA, 120 bp, Artificial Sequence
  ENSG00000138688_144 (sequence is synthesized)
caccttctcaagaataacttgtatgcctgtttgaatgttcattgcatttccactgatggcattctgatgggagtcattcttgccattcagaattttagttataggtgaatcagagacaag

SEQ ID NO: 348100 - DNA, 120 bp, Artificial Sequence
  ENSG00000138688_145 (sequence is synthesized)
tttgacttttctgagccacatataatttgttgggtgtaatgtgtgtagacctatataatatttcaaagaatttgagactttctttgggaaaaattcaggatgagtacttttctagaagtc

SEQ ID NO: 348101 - DNA, 120 bp, Artificial Sequence
  ENSG00000138688_146 (sequence is synthesized)
attaatatattattaaaattatattacttggccctccattgttggaaaaatcttatttttctactatatggagtaattttctaagaactttgttttcttacatatgtttaaagtaggatt

SEQ ID NO: 348102 - DNA, 120 bp, Artificial Sequence
  ENSG00000138688_147 (sequence is synthesized)
tgaaagtagcccttatgatactaaggattaggtaataaggttctttgcttgtcatgtcccaaagcaagattacatcatttgtacctgctgttagtgatgtggataatagtttcaaaaaac

SEQ ID NO: 348103 - DNA, 120 bp, Artificial Sequence
  ENSG00000138688_148 (sequence is synthesized)
aaaagtgaatttactggtatgtaagtctggtctagaattctagatgtgatccttttggataaattgtcccccaccacccctttcacttaatccttagaaggcacaaaagccttaatgtat

SEQ ID NO: 348104 - DNA, 120 bp, Artificial Sequence
  ENSG00000138688_149 (sequence is synthesized)
tatttgtttctaattggccactgaagtttagttgaattgccgtattattgtaacatttcacctgagtcatatatttattataatatgaatgctcatcttgatatttcaaaagactggaat

SEQ ID NO: 348105 - DNA, 120 bp, Artificial Sequence
  ENSG00000138688_150 (sequence is synthesized)
ttgataggaatgttacatactcaattttgataaaaagttttagaatgggtataaaacatataatttagaggtaggtagtagcaacaagaaagtaataaagaacctagatgccctttatac

SEQ ID NO: 348106 - DNA, 120 bp, Artificial Sequence
  ENSG00000138688_151 (sequence is synthesized)
ctggaagaaatcgtcagagggtagcaaaaattaatattctagaaatggtgagaaaatgaatagaattgaaaagggatattttggagttgaacgtcatctcaatataatattagaatgtat

SEQ ID NO: 348107 - DNA, 120 bp, Artificial Sequence
  ENSG00000138688_152 (sequence is synthesized)
atatgtgaaaagaaatgcataatggaatgtataaaaatggatgaaaagcaatagtcattgctcactggtcttgtaactgtcctctccttattatctcccatttcccatccctaagtatac

SEQ ID NO: 348108 - DNA, 120 bp, Artificial Sequence
  ENSG00000138688_153 (sequence is synthesized)
tagtaaaaactgaagcatattccaaagcagcttgttccctacgaagggaataaagccatgctgatcctgcaagactgggtacaattcctttattccaaggcctgctagaatcttacatgt

SEQ ID NO: 348109 - DNA, 120 bp, Artificial Sequence
  ENSG00000138688_154 (sequence is synthesized)
ttataaattgcctttataaggtaaaacatttctctttctcctgcataaaatcttggcatcactgtttgctgcacagttcatgactctgtaggcacttttatgtttattccattctctgta

SEQ ID NO: 348110 - DNA, 120 bp, Artificial Sequence
  ENSG00000138688_155 (sequence is synthesized)
tgttttaaaagtaaaatttatattttccaagagtttaaattatgtacttatttgaggggataatgtcatgtgtatctatccctcaatgtttttaacagctctaatcaattagggtgtttt

SEQ ID NO: 348111 - DNA, 120 bp, Artificial Sequence
  ENSG00000138688_156 (sequence is synthesized)
ttttttttaaactgaagatttgaagaattatgatatatacttacttaagcttctatttacataaacaaaagtgctttaatcttcaaaatacctggttttaaaaaaactgtagctcaatgt

SEQ ID NO: 348112 - DNA, 120 bp, Artificial Sequence
  ENSG00000138688_157 (sequence is synthesized)
gatatttagatactttttcacataaaagtttggtttatgattggagaattttaggtgcttttctatgtggagatttcagttagctatataagagggaagatatataaccttgaataaaag

SEQ ID NO: 348113 - DNA, 120 bp, Artificial Sequence
  ENSG00000138688_158 (sequence is synthesized)
gatttgcgttaaaagttgctgaagtgaaatttttcagttgcaattagttttcattttgacagtgcattttgtcattcataaaggaaaagtaacataagcatgtaaatgatattaaaggta

SEQ ID NO: 348114 - DNA, 120 bp, Artificial Sequence
  ENSG00000138688_159 (sequence is synthesized)
gaaaaaaatcattggctaacaagttgcttatttagcagaagttttaagacagtgtttgggttctttcaagctacgttaacattcttcagaagcttttgaactctaaacccttgtttagaa

SEQ ID NO: 348115 - DNA, 120 bp, Artificial Sequence
  ENSG00000138688_160 (sequence is synthesized)
gttataatatgtcagcatggaattgatcgtcggttctgtgaatccaaggtatattaacaaatatgttagcaatattataaacatttatgaattttaaaaaatggaatattgagatatcag

SEQ ID NO: 348116 - DNA, 120 bp, Artificial Sequence
  ENSG00000138688_161 (sequence is synthesized)
cttcaagtcaaatacacatagccatgcagcaaactacagttttttcagttaataaaattattttttaaattcttacccattttagttttaagtatctaaaatatgagataattattaaaa

SEQ ID NO: 348117 - DNA, 120 bp, Artificial Sequence
  ENSG00000138688_162 (sequence is synthesized)
aaaagaaacagaattataaaaattatattttgcttacatttttactgttaacattcatgtcatattgcattattatacttgttgggatatggctatatatttatgtagaagatttagaaa

SEQ ID NO: 348118 - DNA, 120 bp, Artificial Sequence
  ENSG00000138688_163 (sequence is synthesized)
aagatttagaaattgaagcaaagagaaggttgaattcttcacatgacatggtttgcagaccactctggacatgccgtttctcccataatgtaatagcaaggttggtcatttgccaggttt

SEQ ID NO: 348119 - DNA, 120 bp, Artificial Sequence
  ENSG00000138688_164 (sequence is synthesized)
cctgactccacatgttatgctcttttcacaacattgtgccaccttcattaagagtcattacaatatcttcacaagggttgcaaaaagtagatggtaatccctaaaaccatgtgcagtggc

SEQ ID NO: 348120 - DNA, 120 bp, Artificial Sequence
  ENSG00000138688_165 (sequence is synthesized)
aatgaaatgccatagtattattgtgcaataaatactctcccttatgaatttggggagggaggcattttcttcccctgattttggaagcatggttatttcagaaaatctggaaaacatggc

SEQ ID NO: 348121 - DNA, 120 bp, Artificial Sequence
  ENSG00000138688_166 (sequence is synthesized)
tgtttcaaaagagaaaaataacttaccctggttctacaacacagtggttaacaacttagtttttctttctagttcgttcctatatgtctttccttttttgttcttctgctatacaaatta

SEQ ID NO: 348122 - DNA, 120 bp, Artificial Sequence
  ENSG00000138688_167 (sequence is synthesized)
tatttgtttgctgttatattactgtgaattgaaattagttcatcctacttttatgtccaaaaaaaatctgtaacgcatccttatatattgacaataaaggaaacagctatacttggtgat

SEQ ID NO: 348123 - DNA, 120 bp, Artificial Sequence
  ENSG00000138696_0 (sequence is synthesized)
acattgactgctctgctgctgcaatgggttggctggaagaactaaactggcagcttcacattttcttgctcattcttctctctatgcacacaagggcaaacttccttgataacatgcttt

SEQ ID NO: 348124 - DNA, 120 bp, Artificial Sequence
  ENSG00000138696_1 (sequence is synthesized)
tgcgaagtgcaggaaaattaaatgtgggcaccaagaaagaggatggtgagagtacagcccccaccccccgtccaaaggtcttgcgttgtaaatgccaccaccattgtccagaagactcag

SEQ ID NO: 348125 - DNA, 120 bp, Artificial Sequence
  ENSG00000138696_2 (sequence is synthesized)
tcaacaatatttgcagcacagacggatattgtttcacgatgatagaagaggatgactctgggttgcctgtggtcacttctggttgcctaggactagaaggctcagattttcagtgtcggg

SEQ ID NO: 348126 - DNA, 120 bp, Artificial Sequence
  ENSG00000138696_3 (sequence is synthesized)
acactcccattcctcatcaaagaagatcaattgaatgctgcacagaaaggaacgaatgtaataaagacctacaccctacactgcctccattgaaaaacagagattttgttgatggaccta

SEQ ID NO: 348127 - DNA, 120 bp, Artificial Sequence
  ENSG00000138696_4 (sequence is synthesized)
tacaccacagggctttacttatatctgtgactgtctgtagtttgctcttggtccttatcatattattttgttacttccggtataaaagacaagaaaccagacctcgatacagcattgggt

SEQ ID NO: 348128 - DNA, 120 bp, Artificial Sequence
  ENSG00000138696_5 (sequence is synthesized)
tagaacaggatgaaacttacattcctcctggagaatccctgagagacttaattgagcagtctcagagctcaggaagtggatcaggcctccctctgctggtccaaaggactatagctaagc

SEQ ID NO: 348129 - DNA, 120 bp, Artificial Sequence
  ENSG00000138696_6 (sequence is synthesized)
agattcagatggtgaaacagattggaaaaggtcgctatggggaagtttggatgggaaagtggcgtggcgaaaaggtagctgtgaaagtgttcttcaccacagaggaagccagctggttca

SEQ ID NO: 348130 - DNA, 120 bp, Artificial Sequence
  ENSG00000138696_7 (sequence is synthesized)
gagagacagaaatatatcagacagtgttgatgaggcatgaaaacattttgggtttcattgctgcagatatcaaagggacagggtcctggacccagttgtacctaatcacagactatcatg

SEQ ID NO: 348131 - DNA, 120 bp, Artificial Sequence
  ENSG00000138696_8 (sequence is synthesized)
aaaatggttccctttatgattatctgaagtccaccaccctagacgctaaatcaatgctgaagttagcctactcttctgtcagtggcttatgtcatttacacacagaaatctttagtactc

SEQ ID NO: 348132 - DNA, 120 bp, Artificial Sequence
  ENSG00000138696_9 (sequence is synthesized)
aaggcaaaccagcaattgcccatcgagatctgaaaagtaaaaacattctggtgaagaaaaatggaacttgctgtattgctgacctgggcctggctgttaaatttattagtgatacaaatg

SEQ ID NO: 348133 - DNA, 120 bp, Artificial Sequence
  ENSG00000138696_10 (sequence is synthesized)
aagttgacataccacctaacactcgagttggcaccaaacgctatatgcctccagaagtgttggacgagagcttgaacagaaatcacttccagtcttacatcatggctgacatgtatagtt

SEQ ID NO: 348134 - DNA, 120 bp, Artificial Sequence
  ENSG00000138696_11 (sequence is synthesized)
ttggcctcatcctttgggaggttgctaggagatgtgtatcaggaggtatagtggaagaataccagcttccttatcatgacctagtgcccagtgacccctcttatgaggacatgagggaga

SEQ ID NO: 348135 - DNA, 120 bp, Artificial Sequence
  ENSG00000138696_12 (sequence is synthesized)
ttgtgtgcatcaagaagttacgcccctcattcccaaaccggtggagcagtgatgagtgtctaaggcagatgggaaaactcatgacagaatgctgggctcacaatcctgcatcaaggctga

SEQ ID NO: 348136 - DNA, 120 bp, Artificial Sequence
  ENSG00000138696_13 (sequence is synthesized)
cagccctgcgggttaagaaaacacttgccaaaatgtcagagtcccaggacattaaactctgataggagaggaaaagtaagcatctctgcagaaagccaacaggtactcttctgtttgtgg

SEQ ID NO: 348137 - DNA, 120 bp, Artificial Sequence
  ENSG00000138696_14 (sequence is synthesized)
gcagagcaaaagacatcaaataagcatccacagtacaagccttgaacatcgtcctgcttcccagtgggttcagacctcacctctcagggagcgacctgggcaaagacagagaagctccca

SEQ ID NO: 348138 - DNA, 120 bp, Artificial Sequence
  ENSG00000138696_15 (sequence is synthesized)
gaaggagagattgatccatgtctgtttgtaggacggagaaaccgcttgggtaacttgttcaagatatgatgcatgttgctttctaagaaagccctgtattttgtgattgccttttttttt

SEQ ID NO: 348139 - DNA, 120 bp, Artificial Sequence
  ENSG00000138696_16 (sequence is synthesized)
ttttaagatgctttcattttgccaaaataaaacagataatgtggatggtttaagggttatagtattatagtttaaataataacaacaaaattcttcccaggaactctgctggaaggtaaa

SEQ ID NO: 348140 - DNA, 120 bp, Artificial Sequence
  ENSG00000138696_17 (sequence is synthesized)
ttaaaatacttgtttttccattggtaaaatattgttgcactctgtgaaccaaaagacagtctaagttggaggacatagaacggaactcatcttaaacatactccccaccccgtcttggcc

SEQ ID NO: 348141 - DNA, 120 bp, Artificial Sequence
  ENSG00000138696_18 (sequence is synthesized)
tcctcagaccactttggccatccctgcatttggggccgctatggtaatgtgaatgcactgggtacaaacaccgcctgtctaggaccacatttggaattcctgcaggtggccttttgcagc

SEQ ID NO: 348142 - DNA, 120 bp, Artificial Sequence
  ENSG00000138696_19 (sequence is synthesized)
ttcaggcaatatggaacaaatgaaggtttatgtgactctaatagaagtaattgttgataggtgttcttcagatccacttctgtttctgattgagttaggcatctctttcatggtaaaacc

SEQ ID NO: 348143 - DNA, 120 bp, Artificial Sequence
  ENSG00000138696_20 (sequence is synthesized)
ttttttttttttttttttttaatgtgcagaggattgacctgtgcatgcttttgatctctcattcaaaggatcaatattaaataaaattgtcatgagctgtgttgaagacagggtgctttc

SEQ ID NO: 348144 - DNA, 120 bp, Artificial Sequence
  ENSG00000138696_21 (sequence is synthesized)
aattgtcatgagctgtgttgaagacagggtgctttcaaatagaggtaatttgctcttgtgttgtaagaggaacatgtcaacaaagataggaaatgagggtgatcgtgcagatggcttgta

SEQ ID NO: 348145 - DNA, 120 bp, Artificial Sequence
  ENSG00000138696_22 (sequence is synthesized)
gagataagggatagagaggaaacatccgtcaggctaatttaactacattttattttaaaaatagagaaacataacctctagatgggacagcagaggacagttagtagaggccacaaactg

SEQ ID NO: 348146 - DNA, 120 bp, Artificial Sequence
  ENSG00000138696_23 (sequence is synthesized)
ttatgggctgctgtgttttgttctaaaatcaatatggttggagcatgtatatcttaggtgatcatttcacatcttaggaatgcctactcattttattttattctagtgatgctcaattca

SEQ ID NO: 348147 - DNA, 120 bp, Artificial Sequence
  ENSG00000138696_24 (sequence is synthesized)
ctatttaatttattatattttctcttctgtggcacttatacaaaatatctcttcacctacttagttctacagggttttaactttggagcaacatgaataaaatcatcgagaaggccaata

SEQ ID NO: 348148 - DNA, 120 bp, Artificial Sequence
  ENSG00000138696_25 (sequence is synthesized)
ttgtttagcaacatgaatacaatacagtttaaagttgtacacatcctgctcaactttattcatatacatttcctttctgtggttttcttttgcttcttagaaattctgttagtggttagt

SEQ ID NO: 348149 - DNA, 120 bp, Artificial Sequence
  ENSG00000138696_26 (sequence is synthesized)
aaagaatttgaaagtactttctccttgctgtttttttttttttttaagacattcctcccagaatactccagggggcagtgttttataacacattttccccactgggtgattgaaggatgg

SEQ ID NO: 348150 - DNA, 120 bp, Artificial Sequence
  ENSG00000138696_27 (sequence is synthesized)
aggatttttgaaaatttgacagctacatgaaacatgagaaaacattttcctcacttctgaagtcggtttgcagctggtaacttgttcatccagaaaacattctaaagcaatgagactttg

SEQ ID NO: 348151 - DNA, 120 bp, Artificial Sequence
  ENSG00000138696_28 (sequence is synthesized)
tgagctgtgcttacagtttgggagaatcatgaagattctttctatattttgcatttacttcccagtgcttcatagctgcattttgtttgtaactaagacagaagaatttcgtaatccttg

SEQ ID NO: 348152 - DNA, 120 bp, Artificial Sequence
  ENSG00000138696_29 (sequence is synthesized)
aaattgaaaaaaaaaaaattgtgtttttaaagagtgaaaacagttagaaaacaagtagaactgtaatcagaacgctgcttcaattgatattaaaaataacctcaataataatgtaaaggt

SEQ ID NO: 348153 - DNA, 120 bp, Artificial Sequence
  ENSG00000138696_30 (sequence is synthesized)
tcctttctcttgtgtcagttatattcttagggatagcctagaaggaatatatggttagaactaagtgtgactaatcatctgagccttgaagagaaacttcagtgcctctaaacagatcat

SEQ ID NO: 348154 - DNA, 120 bp, Artificial Sequence
  ENSG00000138696_31 (sequence is synthesized)
ctacaaaacaacaggtaaacatttatgccagttaagtgggtcatgtttttgtttcttgggtttttcctaaatttaagtgaggttgggcttaccttgtagataaaattatgttttcttttt

SEQ ID NO: 348155 - DNA, 120 bp, Artificial Sequence
  ENSG00000138696_32 (sequence is synthesized)
ggtaaatacttgaacgtggataacgtcaaatcagaatattttgtgaggaggtgatgatttgaaattaagctagatttctagggaggtgttggttccaatgaaggatgggaagaaattaaa

SEQ ID NO: 348156 - DNA, 120 bp, Artificial Sequence
  ENSG00000138696_33 (sequence is synthesized)
atagtcttcaaacttcttccttattatatttggttgctttggaaaagattggtcctatcctcaatctaatttattcactattaatattttaaaaacattcctgagatacttaaaaagacc

SEQ ID NO: 348157 - DNA, 120 bp, Artificial Sequence
  ENSG00000138696_34 (sequence is synthesized)
cacttagcgattatagttgctcaatgaaacaagaatttatttatgcatagatttttctctgtatcttaccaaaatccactttacttagataacactaaattgttcttaaagactactcat

SEQ ID NO: 348158 - DNA, 120 bp, Artificial Sequence
  ENSG00000138696_35 (sequence is synthesized)
ttcccaataatcctttatgatttcaaaatttctagtggctcagaagtgaattttattttatttgtctttcacttgaataaatgagaacccagaaattaataatgttgtttattgcttact

SEQ ID NO: 348159 - DNA, 120 bp, Artificial Sequence
  ENSG00000138696_36 (sequence is synthesized)
gtcaggactatttcaaagactaagaagagtttcttctaacccctccctctcaaaggaatcctaaattattagttgttagataagttttgtatgctaagatattcaggtttatagtttatg

SEQ ID NO: 348160 - DNA, 120 bp, Artificial Sequence
  ENSG00000138696_37 (sequence is synthesized)
tatgtgtgtatatatataaatatatatgtatatataaatattatgttcagtttggagtctggcacaactccattatgtggattagagagtaagatattatggatgataaagtactaaatg

SEQ ID NO: 348161 - DNA, 120 bp, Artificial Sequence
  ENSG00000138696_38 (sequence is synthesized)
aaacataatatttatttataaaagtgtgtagattgttaaatcacaaaaagagtgctatgaccattatgtatgaggaaacaggcctttgacctcctggaaagcactgctcaaaagtcatta

SEQ ID NO: 348162 - DNA, 120 bp, Artificial Sequence
  ENSG00000138696_39 (sequence is synthesized)
gtgcccatttttgaattccccaaacagaaagcttcttagaaaacatgctgagattttatttacagggaattctttgacacatttcaattggtgtgtagtcaagtatagcaagtacttaat

SEQ ID NO: 348163 - DNA, 120 bp, Artificial Sequence
  ENSG00000138696_40 (sequence is synthesized)
aatgactgaatttcatgttcctacagtcatacatattcattagaagttttatgttgttggtctgatctgattcttctttgtttgtgggtggaacggcactgagagaagtatagtttttta

SEQ ID NO: 348164 - DNA, 120 bp, Artificial Sequence
  ENSG00000138696_41 (sequence is synthesized)
aacttgaacatgttcagtagttacattgccttagaaaacccagacacatagcagtggaaatgaaagaaatggcatcagaagtgacttaatttagcaattgtgattcctcttgtaaaacaa

SEQ ID NO: 348165 - DNA, 120 bp, Artificial Sequence
  ENSG00000138696_42 (sequence is synthesized)
aacaaaaaaacaatgccatattttttggagaaaagttggcaatataggggtttcgttgtctgtttcacaagaagactcatttgttcttttgggggaaccagtgccttacagattttgtat

SEQ ID NO: 348166 - DNA, 120 bp, Artificial Sequence
  ENSG00000138696_43 (sequence is synthesized)
atactgtaattattcaggactagggaacaaacaattgtattgtatttgttacagattgtatatggctttgttttaacattcccctaaataaaatggcttcattctccccttggaaaaaaa

SEQ ID NO: 348167 - DNA, 120 bp, Artificial Sequence
  ENSG00000138696_44 (sequence is synthesized)
acatagcccaagatatagccaggaaaccacttcactaactgtaaagagccaacagacttcacaaggacgaaacttccagtttgttatttacggtgccacaaaaggtattgggctacttca

SEQ ID NO: 348168 - DNA, 120 bp, Artificial Sequence
  ENSG00000138696_45 (sequence is synthesized)
ggctccaaggtctcctcaggatgtgggctttggtggtggagcaggaaaataattttgctgagatttgttcctgtggtgttactgaaagatatagtagtaagggcccaagatttaaggttc

SEQ ID NO: 348169 - DNA, 120 bp, Artificial Sequence
  ENSG00000138696_46 (sequence is synthesized)
agctgagctgtattaggcaaccacagtctgggctgcatttcttaactgctgaataacatatcacaggtgcaggattagtgctgcctacggtgctgggctttttagtggaaacccctagca

SEQ ID NO: 348170 - DNA, 120 bp, Artificial Sequence
  ENSG00000138696_47 (sequence is synthesized)
ggcgcggggcgcggagtcggcggggcctcgcgggacgccgggcagtgcggagaccgcggcgctgaggacgcgggagccgggagcgcagccgcggggtggagttcagcctactctttctta

SEQ ID NO: 348171 - DNA, 120 bp, Artificial Sequence
  ENSG00000138696_48 (sequence is synthesized)
gttcagcctactctttcttagatgtgaaaggaaaggaagatcatttcatgccttgttgataaaggttcagacttctgctgattcataaccatttggctctgagctatgacaagagaggaa

SEQ ID NO: 348172 - DNA, 120 bp, Artificial Sequence
  ENSG00000138696_49 (sequence is synthesized)
gtctgagcagctgagaactttgccggagtattaccacggtgttcagtaacacagacctgtgccatgagcaagtaaagcactgagcaagtgtcagggtcaatatttatagaccactacgta

SEQ ID NO: 348173 - DNA, 120 bp, Artificial Sequence
  ENSG00000138696_50 (sequence is synthesized)
gctgccttgcatagagagaaaacgggagagtaacatgcacacagagggcaaggaaagaaagactgcagtggagggaatgttaatttccaattttttctgaaaatgtattctttctaactg

SEQ ID NO: 348174 - DNA, 120 bp, Artificial Sequence
  ENSG00000138696_51 (sequence is synthesized)
gctaatgaggagggctgcctgctgggtaagaatgttgttggtggcagagccgttttgtgtactgctgttgagaatgccgggtacattcacaagacgtttcctgcgtgtggtaggaacagc

SEQ ID NO: 348175 - DNA, 120 bp, Artificial Sequence
  ENSG00000138696_52 (sequence is synthesized)
aggacattaaactctgataggagaggaaaattatattcttagggatagcctagaaggaatatatggttagaactaagtgtgactaatcatctgagccttgaagagaaacttcagtgcctc

SEQ ID NO: 348176 - DNA, 120 bp, Artificial Sequence
  ENSG00000138698_0 (sequence is synthesized)
gggtccctccctggctgcgggagagacggaggtagagggaggacacagagccgcgccgcccgcaccacagaccttcgcctcgccccgccggttcctcaccctcggggagcaacatggata

SEQ ID NO: 348177 - DNA, 120 bp, Artificial Sequence
  ENSG00000138698_1 (sequence is synthesized)
atctcagtgataccttgaagaagctgaagataacagctgttgacaagactgaggatagtttagaaggatgcttggattgtctgcttcaagccctggctcaaaataatacggaaacaagtg

SEQ ID NO: 348178 - DNA, 120 bp, Artificial Sequence
  ENSG00000138698_2 (sequence is synthesized)
aaaaaatccaagcaagtggaatacttcagctgtttgcaagtctgttgactccacagtcttcctgcaaagccaaagtagctaacatcatagcagaagtagccaaaaatgagtttatgcgaa

SEQ ID NO: 348179 - DNA, 120 bp, Artificial Sequence
  ENSG00000138698_3 (sequence is synthesized)
ttccatgtgtggatgctggattgatttcaccactggtgcagctgctaaatagcaaagaccaggaagtgctgcttcaaacgggcagggctctaggaaacatatgttacgatagccatgagg

SEQ ID NO: 348180 - DNA, 120 bp, Artificial Sequence
  ENSG00000138698_4 (sequence is synthesized)
gcagaagtgcagttgaccaagcaggtggtgcacagattgtaattgaccatttaaggtcactgtgcagtataacagatcccgccaatgagaagctcttgactgtcttttgtggcatgctga

SEQ ID NO: 348181 - DNA, 120 bp, Artificial Sequence
  ENSG00000138698_5 (sequence is synthesized)
tgaactatagcaatgagaatgattcgcttcaagctcagcttatcaatatgggtgttattcctaccttagtgaaattactgggcatccactgccaaaatgcagctcttacagaaatgtgtc

SEQ ID NO: 348182 - DNA, 120 bp, Artificial Sequence
  ENSG00000138698_6 (sequence is synthesized)
ttgttgcatttggtaatttagcagaacttgagtcaagtaaagaacagtttgccagtacaaacattgctgaagagctagtaaaactcttcaagaaacaaatagaacatgataagagagaaa

SEQ ID NO: 348183 - DNA, 120 bp, Artificial Sequence
  ENSG00000138698_7 (sequence is synthesized)
tgatttttgaagttcttgctccattggcagaaaatgatgctattaaactacagctggttgaagcaggcctagtagagtgtctactagagattgttcagcaaaaagtggatagtgacaaag

SEQ ID NO: 348184 - DNA, 120 bp, Artificial Sequence
  ENSG00000138698_8 (sequence is synthesized)
aagatgatattactgagctcaaaactggttcagatctcatggttttattacttcttggagatgaatccatgcagaagttatttgaaggaggaaaaggtagtgtatttcaaagggtactct

SEQ ID NO: 348185 - DNA, 120 bp, Artificial Sequence
  ENSG00000138698_9 (sequence is synthesized)
cttggatcccatcaaataaccaccagctacagcttgctggagcattggcaattgcaaattttgccagaaatgatgcaaattgtattcatatggtagacaatgggattgtagaaaaactta

SEQ ID NO: 348186 - DNA, 120 bp, Artificial Sequence
  ENSG00000138698_10 (sequence is synthesized)
tggatttactggacagacatgtagaagatggaaatgtaacagtacagcatgcagcactaagtgccctcagaaacctggccattccagttataaataaagcaaagatgttatcagctgggg

SEQ ID NO: 348187 - DNA, 120 bp, Artificial Sequence
  ENSG00000138698_11 (sequence is synthesized)
tcacagaggcagttttgaaatttcttaaatctgaaatgcctcctgttcagttcaaacttctgggaacattaagaatgttaatagatgcacaagcagaagctgctgaacaattgggaaaga

SEQ ID NO: 348188 - DNA, 120 bp, Artificial Sequence
  ENSG00000138698_12 (sequence is synthesized)
atgttaagttagtggagcgtttggtggaatggtgtgaagccaaagatcatgctggtgtgatgggggagtcaaacagactgctgtctgcccttatacgacacagtaaatcaaaagatgtaa

SEQ ID NO: 348189 - DNA, 120 bp, Artificial Sequence
  ENSG00000138698_13 (sequence is synthesized)
ttaaaaccattgtgcagagtggtggcatcaagcatctagttaccatggcaactagtgaacatgtaataatgcagaatgaagctcttgttgctttggcattaatagcagctttagaattgg

SEQ ID NO: 348190 - DNA, 120 bp, Artificial Sequence
  ENSG00000138698_14 (sequence is synthesized)
gcactgctgagaaagatctagaaagtgctaaacttgtacagattttacatagactgctagcagatgagagaagtgctcctgaaatcaaatataattccatggtcctgatatgtgctctta

SEQ ID NO: 348191 - DNA, 120 bp, Artificial Sequence
  ENSG00000138698_15 (sequence is synthesized)
aaagtgttgcccagcaggcctctctcacagagcagagacttactgtggaaagctgagaactgcccgatacacggcatcatcccatctctaatttcccctctgtcctccatccagcggctt

SEQ ID NO: 348192 - DNA, 120 bp, Artificial Sequence
  ENSG00000138698_16 (sequence is synthesized)
cttccgcttcattctctaccataccacttgtgcatgcatgtgatgttctaataccaattgaagaaccgctgtaggtacctccctaataagatttctaaacctatagttagtgtgatcatg

SEQ ID NO: 348193 - DNA, 120 bp, Artificial Sequence
  ENSG00000138698_17 (sequence is synthesized)
actttgtcaaaggcaagtctccacccataaccgttctcttgtattcctgttgcttgagctacattaagtagaatgtgcatgttgtagtcctatgatgatgtaaacttggtactacataat

SEQ ID NO: 348194 - DNA, 120 bp, Artificial Sequence
  ENSG00000138698_18 (sequence is synthesized)
gacttgctccacacatgcagtaaactacataatgatgtactggtaaactagaaacaaagaatgcagcaggatctgtctagcttattaaagatgaaactgaattggaaaaatagctccatt

SEQ ID NO: 348195 - DNA, 120 bp, Artificial Sequence
  ENSG00000138698_19 (sequence is synthesized)
ttttggtgcttgggaagcacagtgaccaaaaaagttgtatggctgcttattcattagtctttcctactgatgtcaaatccatggtacctagagttaaataaaattccaatgctcttactc

SEQ ID NO: 348196 - DNA, 120 bp, Artificial Sequence
  ENSG00000138698_20 (sequence is synthesized)
tttaacttctggtttctcctttttcctttttagactattgaaactgccacaaacttggcaagactttctgaggtttctgattccatatttaattgactattatcaatagcctgatattga

SEQ ID NO: 348197 - DNA, 120 bp, Artificial Sequence
  ENSG00000138698_21 (sequence is synthesized)
aaaacatttgtagttttcagtgtgaaactaaggggttgaagaatcactattacaatccctattacagagcatttcgggttttgcttgtattttagattctgatacatacgctgtttcact

SEQ ID NO: 348198 - DNA, 120 bp, Artificial Sequence
  ENSG00000138698_22 (sequence is synthesized)
caggaactacttctaccagttaatcagcattatccagcacttgtctttaaaattcatttggcgcttgtttgttttcaactgaggaaattgagtatagttcattgaagaatggaatttttt

SEQ ID NO: 348199 - DNA, 120 bp, Artificial Sequence
  ENSG00000138698_23 (sequence is synthesized)
tttttttttttttttttgctgtttttcatcattcagctagaaagtgagaagttttatcttccatagtccttttaaatcttatgttagaactagcaggacgtaggtggaaagatgaagaaa

SEQ ID NO: 348200 - DNA, 120 bp, Artificial Sequence
  ENSG00000138698_24 (sequence is synthesized)
taagcttgtctagactaaagaaaggaaagcaggttataaaagccatagtagccagtccagttcattctgcagatggccccataccaatcgctgttagagtttgccacctccactttccca

SEQ ID NO: 348201 - DNA, 120 bp, Artificial Sequence
  ENSG00000138698_25 (sequence is synthesized)
ctgagaactgcagcaattttaaaggatatgagaaagccaagactcaagagatgagaagacccccttggcgaaatatagtgtactcttcactgccactgccaccaccaaatgggtttttag

SEQ ID NO: 348202 - DNA, 120 bp, Artificial Sequence
  ENSG00000138698_26 (sequence is synthesized)
agctttgaaacacaatctttgtaaattaatcaaaacctccctgtgacccacctgccttctccccatacccaaatttgaccactactggcctaaaaggcaagatgggcttcgatatagaag

SEQ ID NO: 348203 - DNA, 120 bp, Artificial Sequence
  ENSG00000138698_27 (sequence is synthesized)
gactgcaagacagtagaaagggctgccacggaggtgacagtagctccttcctctccaacatgtgatgctacacatctctgtggataatctaagttggacttttgactctaaaacagctat

SEQ ID NO: 348204 - DNA, 120 bp, Artificial Sequence
  ENSG00000138698_28 (sequence is synthesized)
aatccaagaaagttaaattctaatggaggtaaagaatcttgactgattgttccctttgatgtccaaataagggaactattgtgagtacgtatgctacacttactataagaatgatactgt

SEQ ID NO: 348205 - DNA, 120 bp, Artificial Sequence
  ENSG00000138698_29 (sequence is synthesized)
ttgttgtctttctcctgggctggatagtggactatattttattacaggctttgaaagacatctgtaatgttgcatatctgttcatattaataacttaataaatagtatatgaagctataa

SEQ ID NO: 348206 - DNA, 120 bp, Artificial Sequence
  ENSG00000138698_30 (sequence is synthesized)
gcttacaataaatttttctgtagatattaagaagctagaaatccatttagattgtattagtttattttttgaagcatttgagatatttccatcaatattttaaaaagtaaatccaattag

SEQ ID NO: 348207 - DNA, 120 bp, Artificial Sequence
  ENSG00000138698_31 (sequence is synthesized)
agctcttacagaaatgtgtcttgttgcatttggtaatttagcagaacttgggtgtacaggaagtgtggtgcctgcatctgcttctggtgagggactcaggaagcttacaatcatggcaga

SEQ ID NO: 348208 - DNA, 120 bp, Artificial Sequence
  ENSG00000138698_32 (sequence is synthesized)
agggagcgagagagagagacaaaggggaagtcacagactcttaaccagatctcatatgaactaactcacttatcaccaaggggatggtactaaccattcatgagggacctgcccccatta

SEQ ID NO: 348209 - DNA, 120 bp, Artificial Sequence
  ENSG00000138698_33 (sequence is synthesized)
tctaattacctcctgcctggcctcacctccaatattggaaattacgtttcaacatgagatttggaagggacaaacagccaaaccacatcagggagttttcattggacaaataaggaaaaa

SEQ ID NO: 348210 - DNA, 120 bp, Artificial Sequence
  ENSG00000138698_34 (sequence is synthesized)
acagtatactgagggagccctggcctggtaggagagaaaagaggtaagtaaagagttgcaaagacaaccttgtctaccttgctgatttctctggtatacagggaaaataagccattgaaa

SEQ ID NO: 348211 - DNA, 120 bp, Artificial Sequence
  ENSG00000138698_35 (sequence is synthesized)
acagtttgatacaagttgctgtgctaagatagcagatttgtttgagaggctgcgtagaccacctctattcagcctagtctcccccagtctatgttaaaagataaatatgcagctaattta

SEQ ID NO: 348212 - DNA, 120 bp, Artificial Sequence
  ENSG00000138698_36 (sequence is synthesized)
gttcagcccaggttcatactataatttcagtggttactgccctaccccatttggaggaagaaaggataagagaaaaatatgtgtatctaagacttctcgagtttatataatgagtcagtt

SEQ ID NO: 348213 - DNA, 120 bp, Artificial Sequence
  ENSG00000138698_37 (sequence is synthesized)
atgcccatgtaatagctaggttgtatacatcaacacgggagtggaacatgtatgcaccagaataatgtttctcctttcagagtgagctttcttgcctgttaacaagtaatgtatttttat

SEQ ID NO: 348214 - DNA, 120 bp, Artificial Sequence
  ENSG00000138698_38 (sequence is synthesized)
tgattcgtgtaaatatcaagtgtttaaaattcatgtcacatacttctgaatatgacatattactaaatgctacagttactttttgtcaaaatgtttttaataaaagtgttaaataacaaa

SEQ ID NO: 348215 - DNA, 120 bp, Artificial Sequence
  ENSG00000138698_39 (sequence is synthesized)
tgatgaacaaagaattcgtaagtggcatataaaattaataattagccaacattaaatttcaatgtttcaaaaatgtaaaatggttaatttactaaatgggactaatttttgaagggctgc

SEQ ID NO: 348216 - DNA, 120 bp, Artificial Sequence
  ENSG00000138698_40 (sequence is synthesized)
cagttttgatcagtatcaaaaacaaaaactccacagccctatagtatgatttaagcattcttactgtgaacattttaaaaataaacaatattaaaatagttttatcttcgttatatatat

SEQ ID NO: 348217 - DNA, 120 bp, Artificial Sequence
  ENSG00000138709_0 (sequence is synthesized)
agttaccagctttggctgctcgcgcctccccaactcgggtaaagctcctcggcctcggcgtgctgcgcctccgcggctgccctgcgccagaattcggttccctcaaaattataaaggcag

SEQ ID NO: 348218 - DNA, 120 bp, Artificial Sequence
  ENSG00000138709_1 (sequence is synthesized)
gaaagctcaagacaaagaaatccaacaaggctagtgatttcagtgatatggagaattggccaacaccaagtgaattagtgaacactggatttcagagcgtcctcagccaaggaaataaaa

SEQ ID NO: 348219 - DNA, 120 bp, Artificial Sequence
  ENSG00000138709_2 (sequence is synthesized)
agccacaaaatagaaaagaaaaagaagagaaggttgaaaagagaagtaacagtgacagcaaagaaaaccgggaaacaaaattaaatggtcctggtgaaaacgtcagtgaggatgaggctc

SEQ ID NO: 348220 - DNA, 120 bp, Artificial Sequence
  ENSG00000138709_3 (sequence is synthesized)
agtcaagtaatcaacgtaagagagctaataagcacaagtgggtaccactccacttagatgttgtaagatcagagagtcaagaaagacctggatcccggaacagctcaagatgtcaacctg

SEQ ID NO: 348221 - DNA, 120 bp, Artificial Sequence
  ENSG00000138709_4 (sequence is synthesized)
aagcaaataaaccaacacataacaataggagaaatgatacacgaagttggaagcgagatagagaaaaaagggatgatcaagatgacgtttccagtgtgagaagtgagggtggtaatatcc

SEQ ID NO: 348222 - DNA, 120 bp, Artificial Sequence
  ENSG00000138709_5 (sequence is synthesized)
gaggttcctttagaggtcgaggaagaggccgaggacggggaagaggacgaggcagaggaaatcctcgattgaactttgattattcatatggttatcaagaacatggtgaaaggactgatc

SEQ ID NO: 348223 - DNA, 120 bp, Artificial Sequence
  ENSG00000138709_6 (sequence is synthesized)
aaccatttcaaacagaacttaataccagtatgatgtattactatgatgatggtacaggtgtacaggtgtatcctgtggaagaagcattgcttaaagagtatattaagcgtcaaattgaat

SEQ ID NO: 348224 - DNA, 120 bp, Artificial Sequence
  ENSG00000138709_7 (sequence is synthesized)
attacttcagtgtagaaaatttggaacgagacttctttcttcggggaaagatggatgaacaaggtttcttgcctatttccctgattgctggttttcagcgtgttcaggctctcactacaa

SEQ ID NO: 348225 - DNA, 120 bp, Artificial Sequence
  ENSG00000138709_8 (sequence is synthesized)
accttaatctcatcttagaggcactgaaggatagcacagaagtagaaattgtggatgagaaaatgagaaaaaagatagaaccagaaaaatggccaattccaggccctcctccacgcagtg

SEQ ID NO: 348226 - DNA, 120 bp, Artificial Sequence
  ENSG00000138709_9 (sequence is synthesized)
tgccaccaacagacttctctcaactgattgattgtccagagtttgtaccaggccaagccttttgctcacatacagagtctgccccaaattctccaagaattggaagcccattgagcccaa

SEQ ID NO: 348227 - DNA, 120 bp, Artificial Sequence
  ENSG00000138709_10 (sequence is synthesized)
agaaaaacagtgaaacaagtattcttcaagcaatgtctagaggtttgtctaccagtttgcctgacttggactcagaaccttggatagaagttaaaaaaagacatcagccagccccagtga

SEQ ID NO: 348228 - DNA, 120 bp, Artificial Sequence
  ENSG00000138709_11 (sequence is synthesized)
aattgagggaatcagtgtctgtccctgaagggtcattaaatcagctatgttcttcagaagaaccagaacaagaagaacttgattttttgtttgatgaagagattgaacaaataggacgaa

SEQ ID NO: 348229 - DNA, 120 bp, Artificial Sequence
  ENSG00000138709_12 (sequence is synthesized)
aaaacacatttactgattggtctgataatgattcagattatgaaattgatgaccaagacttaaacaagattttgattgtaactcagacaccaccttatgtgaaaaaacatcctggaggag

SEQ ID NO: 348230 - DNA, 120 bp, Artificial Sequence
  ENSG00000138709_13 (sequence is synthesized)
atcgaacaggcacccacatgtctcgggcaaaaatcacatctgaacttgctaaagttatcaatgatggcttatactattatgaacaggatctatggatggaagaagatgaaaacaaacaca

SEQ ID NO: 348231 - DNA, 120 bp, Artificial Sequence
  ENSG00000138709_14 (sequence is synthesized)
cagccataaagcaagaagttgagaactttaagaagctaaatctcattagtaaagagcagtttgaaaacctaacacctgaacttccttttgagccaaaccaagaagttcctgtagcacctt

SEQ ID NO: 348232 - DNA, 120 bp, Artificial Sequence
  ENSG00000138709_15 (sequence is synthesized)
cacagtccaggcaaggaggtgttcaaggagtgcttcacattcccaagaaagatttgactgatgaattagctcagaagttatttgatgtttcagaaataacttcagcagcaatggttcatt

SEQ ID NO: 348233 - DNA, 120 bp, Artificial Sequence
  ENSG00000138709_16 (sequence is synthesized)
cgttgcctacagcagttccagaatctcctagaattcatcctacaagaacacccaaaacacctcgaacacctaggttacaagatcctaacaaaacaccaagattttatcctgttgttaaag

SEQ ID NO: 348234 - DNA, 120 bp, Artificial Sequence
  ENSG00000138709_17 (sequence is synthesized)
aaccaaaagccattgatgtaaagagtccaagaaagagaaaaacaaggcatagcacaaatccccctctagagtgtcatgttggttgggtaatggattccagagaccgtgggccaggaacat

SEQ ID NO: 348235 - DNA, 120 bp, Artificial Sequence
  ENSG00000138709_18 (sequence is synthesized)
cctctgtcagcacttcaaatgcttcaccttcagaaggcgcaccactagcaggaagttatggatgtactcctcattcattcccaaagttccagcatccttctcatgaacttttgaaggaaa

SEQ ID NO: 348236 - DNA, 120 bp, Artificial Sequence
  ENSG00000138709_19 (sequence is synthesized)
atggctttacccaacaagtgtaccacaagtatcgtcgaagatgcctaagtgagagaaaacgcttgggaattggtcagtcccaagaaatgaataccctctttcgtttctggtcctttttcc

SEQ ID NO: 348237 - DNA, 120 bp, Artificial Sequence
  ENSG00000138709_20 (sequence is synthesized)
gcttgggaagatgcaaaagaaaattacaggtatgggttagaatgtctgttcaggttttatagttatggactggaaaaaaaattcaggcgagaaatttttcaggatttccaagaagaaacc

SEQ ID NO: 348238 - DNA, 120 bp, Artificial Sequence
  ENSG00000138709_21 (sequence is synthesized)
aaaaaagactacgaatctggtcagctgtatggactagaaaagttttgggcttatttgaaatattctcaatctaagacacagtctattgacccaaaacttcaggaatacctctgtagtttt

SEQ ID NO: 348239 - DNA, 120 bp, Artificial Sequence
  ENSG00000138709_22 (sequence is synthesized)
aagaggttagaagacttccgtgttgatccccctattagtgatgaatttggaagaaaaagacattcctctacttctggtgaggagagtaatcgtcatagacttccacctaattcctctaca

SEQ ID NO: 348240 - DNA, 120 bp, Artificial Sequence
  ENSG00000138709_23 (sequence is synthesized)
aagccaccaaatgctgctaaacctacatctaccagtgagcttcaggtaccaataaactctcccagaaggaatatttcaccggagtccagtgacaattcacattaaacagtgctgcctgtg

SEQ ID NO: 348241 - DNA, 120 bp, Artificial Sequence
  ENSG00000138709_24 (sequence is synthesized)
tcctgtggtctcaagaaatggtgaaatgcctgagaaatagactcttatgaaagttctttgtccttgaagtcaacatttacatcagtatttatttggggaaaatcttctggtgtttaattg

SEQ ID NO: 348242 - DNA, 120 bp, Artificial Sequence
  ENSG00000138709_25 (sequence is synthesized)
tgataataagaaagaagaaaaagaaagaaaagtggtagcattttttctaacaagataaattctaaaaatgttttccctgatttcacaaacaaggatagtcttggtgaccttttatagaga

SEQ ID NO: 348243 - DNA, 120 bp, Artificial Sequence
  ENSG00000138709_26 (sequence is synthesized)
tcttctagtaatgtattttgatctcagatttctttttcaaagccatggttttacaaaaacagcattccttaaatatatttaaaaaacaatacaaggaatgcctaacatttcagctcatac

SEQ ID NO: 348244 - DNA, 120 bp, Artificial Sequence
  ENSG00000138709_27 (sequence is synthesized)
ttcttaaagaagatatagtatgttgtattctcttcttagagctttcttaaagaatccacaatccaattaccccactgtcaattcatatttgaacttaccaaaacaaaggaggattacgta

SEQ ID NO: 348245 - DNA, 120 bp, Artificial Sequence
  ENSG00000138709_28 (sequence is synthesized)
aaaggaggattacgtatatgttttttaaattcaaaaaagaatatgaaattatacctttagtatccctttgagacatatagtttaaagaaaactttttttaaaacaaaagtaggaatatat

SEQ ID NO: 348246 - DNA, 120 bp, Artificial Sequence
  ENSG00000138709_29 (sequence is synthesized)
caatgagtatatgcacttttgatgctaggttttgcttttctccccccagtcatatctcatgatttccacagttgttgtattggtgtggagttttctgaattggctataagctgattacat

SEQ ID NO: 348247 - DNA, 120 bp, Artificial Sequence
  ENSG00000138709_30 (sequence is synthesized)
attagaggtttatttttatgattctatataaacgtgcacgagtaatttaaaacctgcattgggattgattggaatattgtcctaaattaattaaatcttgcactgttttgaatgcatctg

SEQ ID NO: 348248 - DNA, 120 bp, Artificial Sequence
  ENSG00000138709_31 (sequence is synthesized)
ctatttatacatctgcaagtgggtatgtcataaggagtcagattatctttaatttaaaatgaatacttagttttacctttttgtttattttttgtttaattttgtttttataaatgtttt

SEQ ID NO: 348249 - DNA, 120 bp, Artificial Sequence
  ENSG00000138709_32 (sequence is synthesized)
caagagttatagcaaattgatttctaatttttattgctattacaactgatgtaaatggtagtttcagtttttgtgagatttaaaaaaataaagcacttattctgaattttttgaattgat

SEQ ID NO: 348250 - DNA, 120 bp, Artificial Sequence
  ENSG00000138709_33 (sequence is synthesized)
ttttaattatttttatttagaatatagttgaaaagctgtaatattcagttttgctagtaaaagaccatttttttgtgtgaatgaagtttcaattataaacttacattcactttattgagc

SEQ ID NO: 348251 - DNA, 120 bp, Artificial Sequence
  ENSG00000138709_34 (sequence is synthesized)
actacataatttacagatattttgttgtattggcaaaagcaagtggtttccatatgctaaattaattgtattttctttttgagcagattggatatcttgttcttataaattataatattg

SEQ ID NO: 348252 - DNA, 120 bp, Artificial Sequence
  ENSG00000138709_35 (sequence is synthesized)
aaatacatataatctttggatggatgggctgttaatttgtaaataggttttcattaagttatttctcatgataagtaataatcagcagttttataatatttactatttggagggtcattt

SEQ ID NO: 348253 - DNA, 120 bp, Artificial Sequence
  ENSG00000138709_36 (sequence is synthesized)
tgatgctttaaattgcagaaatagtcaaatttgaatattcagaaaataaatttatttagatatattgtaaagagggtgcaaaacaagcaatgggttagaataatagatcttcaagtcttt

SEQ ID NO: 348254 - DNA, 120 bp, Artificial Sequence
  ENSG00000138709_37 (sequence is synthesized)
tcttaaatggggtatgtagttccagcttttcagtgagaaatttccaaaccgtgcttattagctttaaatggtctcttgaaatgatcataaatttttctcagtgtcctttttgtgttgaac

SEQ ID NO: 348255 - DNA, 120 bp, Artificial Sequence
  ENSG00000138709_38 (sequence is synthesized)
acatatatctgaaacctgtatttaaccagatatttctactcaactgaatatacaagtgtaaatttgattggaaaattgtatattataaatgaaaatacaataatcaggagttttgtggtt

SEQ ID NO: 348256 - DNA, 120 bp, Artificial Sequence
  ENSG00000138709_39 (sequence is synthesized)
caggagttttgtggtttgtattaattagtagttttatcatatttttattataaaagtaatacatgtacattgggaaatttagaaaagcacaaagaagaaaataaagtacttgttataaaa

SEQ ID NO: 348257 - DNA, 80 bp, Artificial Sequence
  ENSG00000138709_40 (sequence is synthesized)
cggcagcggcggccacggccgccgggctctcgggttgtctgtccccagttggagccggccggtgtcccggcggagagacg

SEQ ID NO: 348258 - DNA, 120 bp, Artificial Sequence
  ENSG00000138709_41 (sequence is synthesized)
ggcagtcgggttccctggcctcggggccaccccggctggggcggctggggcagagggacgatgtctactcgcgccccgatgcccgccgcccattctcgggaggatccgcccgcggtgact

SEQ ID NO: 348259 - DNA, 120 bp, Artificial Sequence
  ENSG00000138709_42 (sequence is synthesized)
gctgagagggagtcgctgttggccgcggcgaaccggccggccgagcagccgcccccgcccgaatgtgagggcaaagaggcggcgagggaggagagggccgcggccgccactagcgctggg

SEQ ID NO: 348260 - DNA, 80 bp, Artificial Sequence
  ENSG00000138709_43 (sequence is synthesized)
gcgcggggagagccgtcgccggcgctggtgctgggacgcagcgtgccccaggcggctgtccccgtgaggcccctggcgct

SEQ ID NO: 348261 - DNA, 120 bp, Artificial Sequence
  ENSG00000138709_44 (sequence is synthesized)
accgccgccgccgtcgccgttgccgccgttgctgcgggatccgccggccgaggacgcccgggaagaggtggcagctggccctgcggaaaagcggcagccgccgctgctgccgcctaaggg

SEQ ID NO: 348262 - DNA, 120 bp, Artificial Sequence
  ENSG00000138709_45 (sequence is synthesized)
ccgctgctgccgcctaagggaaatccctggaccaaaaagcctccccagcacctgtccccagacacgacaggtccgccaccgcccccgctggaaaccctggaggcagaattcggttccctc

SEQ ID NO: 348263 - DNA, 120 bp, Artificial Sequence
  ENSG00000138709_46 (sequence is synthesized)
gttagaagacttccgtgttgataatcaccatgatcgattacttctgctcatcataaacatctagttcctaagcaggatatgagaatctgccttcctgtgacctctcctgggctcagtgac

SEQ ID NO: 348264 - DNA, 120 bp, Artificial Sequence
  ENSG00000138709_47 (sequence is synthesized)
actccagtcgccgccccaccccacatcaatgccacttccaagtttgacttgcatcttacaaaccatatttctgtttactttttttctgccctgggacatttttaataacttttagataac

SEQ ID NO: 348265 - DNA, 120 bp, Artificial Sequence
  ENSG00000138709_48 (sequence is synthesized)
aacttcaacaaaaatttacctcccaccaagagaagttgtctttattgtgagaagttgtctttattcccaagaaggggaataacttactctttaagtcagttttattacaggtaaatttgt

SEQ ID NO: 348266 - DNA, 120 bp, Artificial Sequence
  ENSG00000138709_49 (sequence is synthesized)
accagctttttcctctacttgtgttaagacctgtctccaatagacattccaattgaggattgtggaaatagcaaattacattggtgtctgcccaccactgaaggcaaaaagctggtttat

SEQ ID NO: 348267 - DNA, 120 bp, Artificial Sequence
  ENSG00000138709_50 (sequence is synthesized)
ctaggccacaggcagagcccgcaggggaggcaggtaacttctcggaccaccagattatcttgatcttcagccagctttattgttgttctacattttaataaacactacatgtttatttta

SEQ ID NO: 348268 - DNA, 120 bp, Artificial Sequence
  ENSG00000138709_51 (sequence is synthesized)
aaacctacatctaccagtgagcttcaggaggctgatccgatagagtaatacctaattatatcaccatgagatggcaaaacggaatgtcagatctgtagacttttgacaggaaaaatcacc

SEQ ID NO: 348269 - DNA, 120 bp, Artificial Sequence
  ENSG00000138709_52 (sequence is synthesized)
attgtatgttgctgtttatattttctcaaacttgaggctctattttatgaaatgttgaatataaatacattgtatttaacttgaaaaattcctggaaatatacctgataattaccacctg

SEQ ID NO: 348270 - DNA, 120 bp, Artificial Sequence
  ENSG00000138709_53 (sequence is synthesized)
tcttctgaagctcttggatgtcatttgatcggaatatgcagtggaataggtgactcactgaaatgcctttataaatactggaacaaatcctgctgcaaaaatgaaagcgatcagactgtc

SEQ ID NO: 348271 - DNA, 120 bp, Artificial Sequence
  ENSG00000138709_54 (sequence is synthesized)
ttctgttcaagaatgtctattcccacctcttggtggaggaagttgggccaacactgcagtggagataaccacctttgcgataatgagagacagaccagaggactgctactctttttatag

SEQ ID NO: 348272 - DNA, 120 bp, Artificial Sequence
  ENSG00000138709_55 (sequence is synthesized)
gagctgcctatttctgtgtaattggcctgggctgcatgggctgcttttattcatggtgggaaagttaattattattattctggaaataccgcaagattatgttttctgtttccagggtta

SEQ ID NO: 348273 - DNA, 120 bp, Artificial Sequence
  ENSG00000138709_56 (sequence is synthesized)
tgtacttgtgtccagatgaataaagcagaaaaagaggggattgagtagcatttcccagattcttaagtactttgctattcgatttgcctttcagtgtagtgtacattgtaaaactcagat

SEQ ID NO: 348274 - DNA, 120 bp, Artificial Sequence
  ENSG00000138709_57 (sequence is synthesized)
attgtcatgatgtttcacttggacataagacttattaatgtggtcacttaaggggtaaggaatttaagaactggatgaggttatttcttcctttactcttcaaaatgtatttttgataca

SEQ ID NO: 348275 - DNA, 120 bp, Artificial Sequence
  ENSG00000138709_58 (sequence is synthesized)
tcagtatgagaggacgtcccatcaacaaagcatcgatgatggacagtctcacactatttttatcatatgtttctttgtcagccttctgcttctaatcccagtaagcaacttggacaggca

SEQ ID NO: 348276 - DNA, 120 bp, Artificial Sequence
  ENSG00000138709_59 (sequence is synthesized)
ttttaaaagctgaagaaaagtgacattattttagctagtggtttttaatttattttttgttaagatataatgggtgattatataagttagatttatttatgatatcaacttgggtccaag

SEQ ID NO: 348277 - DNA, 120 bp, Artificial Sequence
  ENSG00000138709_60 (sequence is synthesized)
atgatagttttagctagcttatgaacattgggttcacaaggcattgggtaagttagataaaatagcatatactttctctgcagggtaggtaagataggtcagtcaagttggtaatgcctg

SEQ ID NO: 348278 - DNA, 120 bp, Artificial Sequence
  ENSG00000138709_61 (sequence is synthesized)
gctcacatacaggtaacatcttttcttctagagcaaacgatgtaacagtgggttatttggtccaatttacttacttatttatttattttcagtttatttagatttgataggaaaattaaa

SEQ ID NO: 348279 - DNA, 120 bp, Artificial Sequence
  ENSG00000138709_62 (sequence is synthesized)
gctaactgaaagacttttgagtcccattttgtattcatattgcctcactcacagagttacaaattaaataaggatttaagaattatgaggaaagctgtcttatgtttcttgttcttaaat

SEQ ID NO: 348280 - DNA, 120 bp, Artificial Sequence
  ENSG00000138709_63 (sequence is synthesized)
tatatgtgtactttgtcatgtatggagtttctatcttttatttttactaaataactatagatatgtatcgttttcccctgtaaaattggaatagtatgattggattattctaaaaaggtc

SEQ ID NO: 348281 - DNA, 120 bp, Artificial Sequence
  ENSG00000138709_64 (sequence is synthesized)
ttatactcaagagtggggtagtcttcctttaattttgttaccaatacgctttaatcttgtcttggaaagataaaatgacctgcattctaaattagaattggggttctgtttaatttggtt

SEQ ID NO: 348282 - DNA, 120 bp, Artificial Sequence
  ENSG00000138709_65 (sequence is synthesized)
ttatatgctcattgcttacctggctctcaccgcagctgtatgagccagtggctttagagagcactcttcttgcctctttctgttttccccacttagtctatggtgcatgatctaaggtag

SEQ ID NO: 348283 - DNA, 120 bp, Artificial Sequence
  ENSG00000138709_66 (sequence is synthesized)
tggaaatggttgtggacaaactataaatgactaaactggatgattatctctcttggtctagtcattactgtggtgctagggttactttttacaatcttgttctaattttttttaacttct

SEQ ID NO: 348284 - DNA, 120 bp, Artificial Sequence
  ENSG00000138709_67 (sequence is synthesized)
tgcatttcatcccagatcctggttcctatcctagttattaaggtaaaatagagaaccagaatagtttatcaggtatctgcattccttcaatatgaattataatggtacagatatggggat

SEQ ID NO: 348285 - DNA, 120 bp, Artificial Sequence
  ENSG00000138709_68 (sequence is synthesized)
aaaaggaatctttttctgctattaagtttatcagaaaagccccaatagttaaatatttgttttcagtagagggtataataagggaaaattatataacattatatgccaaataggaaactg

SEQ ID NO: 348286 - DNA, 120 bp, Artificial Sequence
  ENSG00000138709_69 (sequence is synthesized)
atcttggttggaaataaagttgtaggaagaaaagctagccaattagtggctgagtagaggggactgcctgtcggtggggcttcatatcatcaacaagaagtgtgctagccttcttggctc

SEQ ID NO: 348287 - DNA, 120 bp, Artificial Sequence
  ENSG00000138709_70 (sequence is synthesized)
ctcatttcttttcttcctggaatccccagtactgcttttagccttctgtaaccactgccttcttggaggacctgcctcaggctatgatagcttgttacgtgacttagagccttagcagtt

SEQ ID NO: 348288 - DNA, 120 bp, Artificial Sequence
  ENSG00000138709_71 (sequence is synthesized)
ctctgcctgtcctactgctgtgggaaaggaagtgtgtttttataatgcttctcagttgaaagtctttcctagtgtaagcattgctattttatttgtaatacttaggttcggtaagtaata

SEQ ID NO: 348289 - DNA, 120 bp, Artificial Sequence
  ENSG00000138709_72 (sequence is synthesized)
cctatcttaaatccttttagaacagagatactagtacattctactaataatcagttaaaattatccttcccccattctctatccctttacccagctttgtttttcaccatagcatatatc

SEQ ID NO: 348290 - DNA, 120 bp, Artificial Sequence
  ENSG00000138709_73 (sequence is synthesized)
tctataattctatatattttacttacttttattctcttggagaaaaaactatggatgtaataccaatgacaataggatttttttctatttgttcattactattgtatttctagtgttaga

SEQ ID NO: 348291 - DNA, 120 bp, Artificial Sequence
  ENSG00000138709_74 (sequence is synthesized)
tagaatagtttctggcacaaagaaatgttcaattcatgtttgtgggtaaataaattatggagtaaacattatgcattaaccaaaggaacccaaccattgtgtataatatttgttctgtgg

SEQ ID NO: 348292 - DNA, 120 bp, Artificial Sequence
  ENSG00000138709_75 (sequence is synthesized)
gaaatgttttcagtctgccaagtaacaaatttgtaagccaacttgagaaacatcctatttgtaggtgattatttccttaaattatagacaataattaaaagccatgtattgagttcttga

SEQ ID NO: 348293 - DNA, 120 bp, Artificial Sequence
  ENSG00000138722_0 (sequence is synthesized)
acatctcaaactggcaaaactcagtcttagcagattcagtgtggaagcagctatcaaaaaggccataaggattttgtccccaaatttcacatgagctaccttgcttcaaactactgagat

SEQ ID NO: 348294 - DNA, 120 bp, Artificial Sequence
  ENSG00000138722_1 (sequence is synthesized)
gaagggggcaagattatttgtccttctttctagtttatggagtgggggcattgggcttaacaacagtaagcattcttggactatacctgaggatgggaactctcagaagactatgccttc

SEQ ID NO: 348295 - DNA, 120 bp, Artificial Sequence
  ENSG00000138722_2 (sequence is synthesized)
tgcttcagttcctccaaataaaatacaaagtttgcaaatactgccaaccactcgggtcatgtcggcggagatagctacaactccagaggcaagaacttctgaagacagtcttcttaaatc

SEQ ID NO: 348296 - DNA, 120 bp, Artificial Sequence
  ENSG00000138722_3 (sequence is synthesized)
aacactgcctccctcagaaacaagtgcacctgctgagggtgtgagaaatcaaactctcacatccacagagaaagcagaaggagtggtcaagttacagaatcttaccctcccaaccaacgc

SEQ ID NO: 348297 - DNA, 120 bp, Artificial Sequence
  ENSG00000138722_4 (sequence is synthesized)
tagcatcaagttcaatcctggagcagaatcagtggtcctttccaattctacactgaaatttcttcagagctttgccagaaagtcaaatgaacaagcaacttctctaaacacagttggagg

SEQ ID NO: 348298 - DNA, 120 bp, Artificial Sequence
  ENSG00000138722_5 (sequence is synthesized)
cactggaggcattggaggcgttggaggcactggaggcgtgggaaatcgagccccacgggaaacatacctcagccggggtgacagcagttccagccaaagaactgactaccaaaaatcaaa

SEQ ID NO: 348299 - DNA, 120 bp, Artificial Sequence
  ENSG00000138722_6 (sequence is synthesized)
tttcgaaacaactagaggaaagaattggtgtgcttatgtacataccaggttatctcccacagtgatattggacaaccaggtcacttatgtcccaggtgggaaaggaccttgtggctggac

SEQ ID NO: 348300 - DNA, 120 bp, Artificial Sequence
  ENSG00000138722_7 (sequence is synthesized)
cggtggatcctgtcctcagagatctcagaagatatccaatcctgtctataggatgcaacataaaattgtcacctcattggattggaggtgctgtcctggatacagtgggccgaaatgtca

SEQ ID NO: 348301 - DNA, 120 bp, Artificial Sequence
  ENSG00000138722_8 (sequence is synthesized)
actaagagcccaggaacagcaaagtttgatacacaccaaccaggctgaaagtcatacagctgttggcagaggagtagctgagcagcagcagcagcaaggctgtggtgacccagaagtgat

SEQ ID NO: 348302 - DNA, 120 bp, Artificial Sequence
  ENSG00000138722_9 (sequence is synthesized)
gcaaaaaatgactgatcaggtgaactaccaggcaatgaaactgactcttctgcagaagaagattgacaatatttctttgactgtgaatgatgtaaggaacacttactcctccctagaagg

SEQ ID NO: 348303 - DNA, 120 bp, Artificial Sequence
  ENSG00000138722_10 (sequence is synthesized)
aaaagtcagcgaagataaaagcagagaatttcaatctcttctaaaaggtctaaaatccaaaagcattaatgtactgataagagacatagtaagagaacaatttaaaatttttcaaaatga

SEQ ID NO: 348304 - DNA, 120 bp, Artificial Sequence
  ENSG00000138722_11 (sequence is synthesized)
catgcaagagactgtagcacagctcttcaagactgtatcaagtctatcagaggacctcgaaagcaccaggcaaataattcaaaaagttaatgaatctgtggtttcaatagcagcccagca

SEQ ID NO: 348305 - DNA, 120 bp, Artificial Sequence
  ENSG00000138722_12 (sequence is synthesized)
aaagtttgttttggtgcaagagaatcggcccactttgactgatatagtggaactaaggaatcacattgtgaatgtaaggcaagaaatgactcttacatgtgagaagcctattaaagaact

SEQ ID NO: 348306 - DNA, 120 bp, Artificial Sequence
  ENSG00000138722_13 (sequence is synthesized)
agaagtaaagcagactcatttagaaggtgctctagaacaggaacactcaagaagcattctgtattatgaatccctcaataaaactctttctaaattgaaggaagtacatgagcagctttt

SEQ ID NO: 348307 - DNA, 120 bp, Artificial Sequence
  ENSG00000138722_14 (sequence is synthesized)
atcaactgaacaggtatcagaccagaagaatgctccagctgctgagtcagttagcaataatgtcactgagtacatgtctactttacatgaaaatataaagaagcagagtttgatgatgct

SEQ ID NO: 348308 - DNA, 120 bp, Artificial Sequence
  ENSG00000138722_15 (sequence is synthesized)
gcaaatgtttgaagatttgcacattcaagaaagcaagattaacaatctcaccgtctctttggagatggagaaagagtctctcagaggtgaatgtgaagacatgttatccaaatgcagaaa

SEQ ID NO: 348309 - DNA, 120 bp, Artificial Sequence
  ENSG00000138722_16 (sequence is synthesized)
tgattttaaatttcaacttaaggacacagaagagaatttacatgtgttaaatcaaacattggctgaagttctctttccaatggacaataagatggacaaaatgagtgagcaactaaatga

SEQ ID NO: 348310 - DNA, 120 bp, Artificial Sequence
  ENSG00000138722_17 (sequence is synthesized)
tttgacttatgatatggagatccttcaacccttgcttgagcagggagcatcactcagacagacaatgacatatgaacaaccaaaggaagcaatagtgataaggaaaaagatagaaaatct

SEQ ID NO: 348311 - DNA, 120 bp, Artificial Sequence
  ENSG00000138722_18 (sequence is synthesized)
gactagtgctgtcaatagtctaaattttattatcaaagaacttacaaaaagacacaacttacttagaaatgaagtacagggtcgtgatgatgccttagaaagacgtatcaatgaatatgc

SEQ ID NO: 348312 - DNA, 120 bp, Artificial Sequence
  ENSG00000138722_19 (sequence is synthesized)
cttagaaatggaagatggcctcaataagacaatgactattataaataatgctattgatttcattcaagataactatgccctaaaagagactttaagtactattaaggataatagtgagat

SEQ ID NO: 348313 - DNA, 120 bp, Artificial Sequence
  ENSG00000138722_20 (sequence is synthesized)
tttggtcaatgacaatcagagatataactttgttttgcaagtcgccaagacccttgcaggtattcccagagatgagaaactaaatcagtccaacttccaaaagatgtatcaaatgttcaa

SEQ ID NO: 348314 - DNA, 120 bp, Artificial Sequence
  ENSG00000138722_21 (sequence is synthesized)
tgaaaccacttcccaagtgagaaaataccagcaaaatatgagtcatttggaagaaaaactactcttaactaccaagatttccaaaaattttgagactcggttgcaagacattgagtctaa

SEQ ID NO: 348315 - DNA, 120 bp, Artificial Sequence
  ENSG00000138722_22 (sequence is synthesized)
agttacccagacgctcataccttattatatttcagttaaaaaaggcagtgtagttacaaatgagagagatcaggctcttcaactgcaagtattaaattccagatttaaggcgttggaagc

SEQ ID NO: 348316 - DNA, 120 bp, Artificial Sequence
  ENSG00000138722_23 (sequence is synthesized)
aaaatctatccatctttcaattaacttcttttcgcttaacaaaactctccacgaagttttaacaatgtgtcacaatgcttctacaagtgtgtcagaactgaatgctaccatccctaagtg

SEQ ID NO: 348317 - DNA, 120 bp, Artificial Sequence
  ENSG00000138722_24 (sequence is synthesized)
gataaaacattccctgccagatattcaacttcttcagaaaggtctaacagaatttgtggaaccaataattcaaataaaaactcaagctgccctatctaatttaacttgttgtatagatcg

SEQ ID NO: 348318 - DNA, 120 bp, Artificial Sequence
  ENSG00000138722_25 (sequence is synthesized)
atcgttgcctggtagtctggcaaatgttgtcaagtctcagaagcaagtaaaatcattgccaaagaaaattaacgcacttaagaaaccaacggtaaatcttaccacagtcctgataggccg

SEQ ID NO: 348319 - DNA, 120 bp, Artificial Sequence
  ENSG00000138722_26 (sequence is synthesized)
gactcaaagaaacacggacaacataatatatcctgaggagtattcaagctgtagtcggcatccgtgccaaaatgggggcacgtgcataaatggaagaactagctttacctgtgcctgcag

SEQ ID NO: 348320 - DNA, 120 bp, Artificial Sequence
  ENSG00000138722_27 (sequence is synthesized)
acatccttttactggtgacaactgcactatcaagcttgtggaagaaaatgctttagctccagatttttccaaaggatcttacagatatgcacccatggtggcattttttgcatctcatac

SEQ ID NO: 348321 - DNA, 120 bp, Artificial Sequence
  ENSG00000138722_28 (sequence is synthesized)
gtatggaatgactatacctggtcctatcctgtttaataacttggatgtcaattatggagcttcatataccccaagaactggaaaatttagaattccgtatcttggagtatatgttttcaa

SEQ ID NO: 348322 - DNA, 120 bp, Artificial Sequence
  ENSG00000138722_29 (sequence is synthesized)
gtacaccatcgagtcatttagtgctcatatttctggatttttagtggttgatggaatagacaagcttgcatttgagtctgaaaatattaacagtgaaatacactgtgatagggttttaac

SEQ ID NO: 348323 - DNA, 120 bp, Artificial Sequence
  ENSG00000138722_30 (sequence is synthesized)
tggggatgccttattagaattaaattatgggcaggaagtctggttacgacttgcaaaaggaacaattccagccaagtttccccctgttactacatttagtggctatttattatatcgtac

SEQ ID NO: 348324 - DNA, 120 bp, Artificial Sequence
  ENSG00000138722_31 (sequence is synthesized)
ataagttagtatgaaaaacagactatcacctttattgagaaacagccagtgttttcatttatctttgcttgcacatctgctctgttttggtttttctacaggaaatgaaaatcaacttgt

SEQ ID NO: 348325 - DNA, 120 bp, Artificial Sequence
  ENSG00000138722_32 (sequence is synthesized)
ttttttaatatgagtaaacttgtatgtctattttataaaattatttgaatattgtttaatgtctgaatatgaaagagttcttgatcctaaagaaatttagtggcacagaaaacaaagtga

SEQ ID NO: 348326 - DNA, 120 bp, Artificial Sequence
  ENSG00000138722_33 (sequence is synthesized)
atttgttagcataattattcctattcttatttcttcattttaagtcattgcaatggaaagtaatattataaaatggtaattacaacatattatcagtcacagttttctttccaattaaac

SEQ ID NO: 348327 - DNA, 120 bp, Artificial Sequence
  ENSG00000138722_34 (sequence is synthesized)
tccctgtatataaatatataacacacattttctagattcacaaatttaaataaattactcaaaaaatgaaaattgattttgtaaacttttatttttactctttacgttgagttgatcaat

SEQ ID NO: 348328 - DNA, 120 bp, Artificial Sequence
  ENSG00000138722_35 (sequence is synthesized)
cgttgagttgatcaattttccatactaagattttcattcagaatcaaaattaagaaagttggactgaaaatatgaaaaatgcttaactattgttctcttcctataattctctaattataa

SEQ ID NO: 348329 - DNA, 120 bp, Artificial Sequence
  ENSG00000138722_36 (sequence is synthesized)
catagtaatttacatgtagttggacatgtacactcaagtctaagaatatatgagtggatcatttaccgccccccgccccacaacatctataaggggcaaaaagtctttttctaataagta

SEQ ID NO: 348330 - DNA, 120 bp, Artificial Sequence
  ENSG00000138722_37 (sequence is synthesized)
ttcttctatggtagtacctacagatctgcccttcttcttctaaagggtaagtcataatctgtgtaatactacaatttatgggatgctcactatgccctgtttctcttctaaacaatttac

SEQ ID NO: 348331 - DNA, 120 bp, Artificial Sequence
  ENSG00000138722_38 (sequence is synthesized)
atgtaatgtctcattcctcacaataacccttgtaaagtgggcatgattaccatgatttttatagttgaagaacctaagacacagagaccaaggcccatgagctcatagggctgaggcagg

SEQ ID NO: 348332 - DNA, 120 bp, Artificial Sequence
  ENSG00000138722_39 (sequence is synthesized)
atttggaatcaggccatgtcttctccagagcccacatccatcctttctctatattgcctcccacagatgtgctaaaatttatttaactaatcctttatcctctatttgtgttgtctccca

SEQ ID NO: 348333 - DNA, 120 bp, Artificial Sequence
  ENSG00000138722_40 (sequence is synthesized)
ttttttattattacaatattactgtggtgaacatgcttaaaaatacattccttggatatctgacaacgtgtttctgaaaaacagattttcataagtaataataaaaataataataaaaaa

SEQ ID NO: 348334 - DNA, 120 bp, Artificial Sequence
  ENSG00000138722_41 (sequence is synthesized)
agagaggccaagaggtttctgcttctattgatgttagcatttggttataaccacgggcaaagaatattaagctttgtcagagacccttcagcacttccatagagccatcccactagaggt

SEQ ID NO: 348335 - DNA, 120 bp, Artificial Sequence
  ENSG00000138722_42 (sequence is synthesized)
atccgttagcctgcctttgtggtctgcacgctgggaaagcctgacacctactggaatagaaacagtttacaacgcccggaatatgctcaagtcacagttttgcaaggaagggggaaacaa

SEQ ID NO: 348336 - DNA, 120 bp, Artificial Sequence
  ENSG00000138722_43 (sequence is synthesized)
gacgtcctgtgcccagatcgacaggcatcctgggccgtggagcccatttttcttacttaaaattcagtctttttcctattctgctgcaaactacgatttgagatcaacaggaaaataggt

SEQ ID NO: 348337 - DNA, 120 bp, Artificial Sequence
  ENSG00000138735_0 (sequence is synthesized)
gtggagcagagagtgcttggcgggcgggtgccccgaagcctgaggaattgatgcatagtcggggtgcgtggactccaggacgcgcccctttgcagaaagagtccgtgccccgctgccgcc

SEQ ID NO: 348338 - DNA, 120 bp, Artificial Sequence
  ENSG00000138735_1 (sequence is synthesized)
tgctctgggcagcggccgtcgggcagcgggtgctggccgtcttggccgggagggtgacacacgcccggcagtgatggtcgaggagcccgcccgggttcgacgcccgggtcccactcgccg

SEQ ID NO: 348339 - DNA, 120 bp, Artificial Sequence
  ENSG00000138735_2 (sequence is synthesized)
gggggcggcgcagcgcggggcgagcgggaggcgacgggcggcggcgcggaggccggggccgtgagggagctggttctgagtcgccgacctcacctcacctcacctgcgcgcgttgttgcc

SEQ ID NO: 348340 - DNA, 120 bp, Artificial Sequence
  ENSG00000138735_3 (sequence is synthesized)
cgacctcacctcacctcacctgcgcgcgttgttgcccctacggagcctcctggagtccaggatcggcggagttcgaaaacgaacttcccacgtttgctatgttgccctttggagacaaaa

SEQ ID NO: 348341 - DNA, 120 bp, Artificial Sequence
  ENSG00000138735_4 (sequence is synthesized)
caagagaaatggtcaatgcatggtttgctgagagagttcacaccatccctgtgtgcaaggaaggtatcagaggccacaccgaatcttgctcttgtcccttgcagcagagtcctcgtgcag

SEQ ID NO: 348342 - DNA, 120 bp, Artificial Sequence
  ENSG00000138735_5 (sequence is synthesized)
ataacagtgcccctggaacaccaaccaggaaaatctctgcctctgaatttgaccggcctcttagacccattgttgtcaaggattctgagggaactgtgagcttcctctctgactcagaaa

SEQ ID NO: 348343 - DNA, 120 bp, Artificial Sequence
  ENSG00000138735_6 (sequence is synthesized)
agaaggaacagatgcctctaacccctccaaggtttgatcatgatgaaggggaccagtgctcaagactcttggaattagtgaaggatatttctagtcatttggatgtcacagccttatgtc

SEQ ID NO: 348344 - DNA, 120 bp, Artificial Sequence
  ENSG00000138735_7 (sequence is synthesized)
acaaaattttcttgcatatccatggactgatatctgctgaccgctattccctgttccttgtctgtgaagacagctccaatgacaagtttcttatcagccgcctctttgatgttgctgaag

SEQ ID NO: 348345 - DNA, 120 bp, Artificial Sequence
  ENSG00000138735_8 (sequence is synthesized)
gttcaacactggaagaagtttcaaataactgtatccgcttagaatggaacaaaggcattgtgggacatgtggcagcgcttggtgagcccttgaacatcaaagatgcatatgaggatcctc

SEQ ID NO: 348346 - DNA, 120 bp, Artificial Sequence
  ENSG00000138735_9 (sequence is synthesized)
ggttcaatgcagaagttgaccaaattacaggctacaagacacaaagcattctttgtatgccaattaagaatcatagggaagaggttgttggtgtagcccaggccatcaacaagaaatcag

SEQ ID NO: 348347 - DNA, 120 bp, Artificial Sequence
  ENSG00000138735_10 (sequence is synthesized)
gaaacggtgggacatttactgaaaaagatgaaaaggactttgctgcttatttggcattttgtggtattgttcttcataatgctcagctctatgagacttcactgctggagaacaagagaa

SEQ ID NO: 348348 - DNA, 120 bp, Artificial Sequence
  ENSG00000138735_11 (sequence is synthesized)
atcaggtgctgcttgaccttgctagtttaatttttgaagaacaacaatcattagaagtaattttgaagaaaatagctgccactattatctctttcatgcaagtgcagaaatgcaccattt

SEQ ID NO: 348349 - DNA, 120 bp, Artificial Sequence
  ENSG00000138735_12 (sequence is synthesized)
tccgattctttttctagtgtgtttcacatggagtgtgaggaattagaaaaatcatctgatacattaacaagggaacatgatgcaaacaaaatcaattacatgtatgctcagtatgtcaaa

SEQ ID NO: 348350 - DNA, 120 bp, Artificial Sequence
  ENSG00000138735_13 (sequence is synthesized)
aatactatggaaccacttaatatcccagatgtcagtaaggataaaagatttccctggacaactgaaaatacaggaaatgtaaaccagcagtgcattagaagtttgctttgtacacctata

SEQ ID NO: 348351 - DNA, 120 bp, Artificial Sequence
  ENSG00000138735_14 (sequence is synthesized)
aaaaatggaaagaagaataaagttataggggtttgccaacttgttaataagatggaggagaatactggcaaggttaagcctttcaaccgaaatgacgaacagtttctggaagcttttgtc

SEQ ID NO: 348352 - DNA, 120 bp, Artificial Sequence
  ENSG00000138735_15 (sequence is synthesized)
atcttttgtggcttggggatccagaacacgcagatgtatgaagcagtggagagagccatggccaagcaaatggtcacattggaggttctgtcgtatcatgcttcagcagcagaggaagaa

SEQ ID NO: 348353 - DNA, 120 bp, Artificial Sequence
  ENSG00000138735_16 (sequence is synthesized)
acaagagagctacagtcgttagcggctgctgtggtgccatctgcccagacccttaaaattactgactttagcttcagtgactttgagctgtctgatctggaaacagcactgtgtacaatt

SEQ ID NO: 348354 - DNA, 120 bp, Artificial Sequence
  ENSG00000138735_17 (sequence is synthesized)
cggatgtttactgacctcaaccttgtgcagaacttccagatgaaacatgaggttctttgcagatggattttaagtgttaagaagaattatcggaagaatgttgcctatcataattggaga

SEQ ID NO: 348355 - DNA, 120 bp, Artificial Sequence
  ENSG00000138735_18 (sequence is synthesized)
catgcctttaatacagctcagtgcatgtttgctgctctaaaagcaggcaaaattcagaacaagctgactgacctggagatacttgcattgctgattgctgcactaagccacgatttggat

SEQ ID NO: 348356 - DNA, 120 bp, Artificial Sequence
  ENSG00000138735_19 (sequence is synthesized)
caccgtggtgtgaataactcttacatacagcgaagtgaacatccacttgcccagctttactgccattcaatcatggaacaccatcattttgaccagtgcctgatgattcttaatagtcca

SEQ ID NO: 348357 - DNA, 120 bp, Artificial Sequence
  ENSG00000138735_20 (sequence is synthesized)
ggcaatcagattctcagtggcctctccattgaagaatataagaccacgttgaaaataatcaagcaagctattttagctacagacctagcactgtacattaagaggcgaggagaatttttt

SEQ ID NO: 348358 - DNA, 120 bp, Artificial Sequence
  ENSG00000138735_21 (sequence is synthesized)
gaacttataagaaaaaatcaattcaatttggaagatcctcatcaaaaggagttgtttttggcaatgctgatgacagcttgtgatctttctgcaattacaaaaccctggcctattcaacaa

SEQ ID NO: 348359 - DNA, 120 bp, Artificial Sequence
  ENSG00000138735_22 (sequence is synthesized)
cggatagcagaacttgtagcaactgaattttttgatcaaggagacagagagagaaaagaactcaacatagaacccactgatctaatgaacagggagaagaaaaacaaaatcccaagtatg

SEQ ID NO: 348360 - DNA, 120 bp, Artificial Sequence
  ENSG00000138735_23 (sequence is synthesized)
caagttgggttcatagatgccatctgcttgcaactgtatgaggccctgacccacgtgtcagaggactgtttccctttgctagatggctgcagaaagaacaggcagaaatggcaggccctt

SEQ ID NO: 348361 - DNA, 120 bp, Artificial Sequence
  ENSG00000138735_24 (sequence is synthesized)
gcagaacagcaggagaagatgctgattaatggggaaagcggccaggccaagcggaactgagtggcctatttcatgcagagttgaagtttacagagatggtgtgttctgcaatatgcctag

SEQ ID NO: 348362 - DNA, 120 bp, Artificial Sequence
  ENSG00000138735_25 (sequence is synthesized)
agttaagatttatcctaatgttgatgtaatcttccatttttattgactacgtgtttaacttttatttctaagtagtcatttttatttgcataattatttgcagaatcaaaagttttctgc

SEQ ID NO: 348363 - DNA, 120 bp, Artificial Sequence
  ENSG00000138735_26 (sequence is synthesized)
aaaaaataacctatatttagcttgagagtatattatgtaactttttaaagccaagttttcatttcaaatcattttctttctattgttttgcttgaattaacattgtctgcattccttaag

SEQ ID NO: 348364 - DNA, 120 bp, Artificial Sequence
  ENSG00000138735_27 (sequence is synthesized)
gacacagcaactgatagcagagagtgaacagaatctgcagggaattaaaagaggaaaaaaacaattatttaaagtttattatgattatttcacataataattaagaattagcaatactta

SEQ ID NO: 348365 - DNA, 120 bp, Artificial Sequence
  ENSG00000138735_28 (sequence is synthesized)
ctataggtggacagattattaatttattgaggcatttcagcttttcctgttgataagtgacatttgtggtgatcccattctgaatgacaaaggacaactaattccctgaagaataggatt

SEQ ID NO: 348366 - DNA, 120 bp, Artificial Sequence
  ENSG00000138735_29 (sequence is synthesized)
gactatagagaagtatgtatgtaaagcactgaggggaaaaaaaagattactgaaaagaggtaatataatgtccttcaccacattatatttgttctctctttcctccaatgtctttggtca

SEQ ID NO: 348367 - DNA, 120 bp, Artificial Sequence
  ENSG00000138735_30 (sequence is synthesized)
taaagttataggtaaaacctttcctttaacctatactctaaacttatttttaaaaatgtattcccagctatacttctttctttcaaatgtaaagaataaaatgttttaaaaaagataaaa

SEQ ID NO: 348368 - DNA, 120 bp, Artificial Sequence
  ENSG00000138735_31 (sequence is synthesized)
aaaagattcttttctcttagtagagagagagattaggaattacagtagataatggaaagaggcacaagctatgctggcttccatcctgtagcttttagaatgttctttgtgaaaggaaag

SEQ ID NO: 348369 - DNA, 120 bp, Artificial Sequence
  ENSG00000138735_32 (sequence is synthesized)
aaagaaaacttcctgctgtaagaataatgatgccctaaggaaaaaacatctgttctcctgtccattgcactgtattttaaggaaagcagctgttatctgctttgagttaaaaggctgctg

SEQ ID NO: 348370 - DNA, 120 bp, Artificial Sequence
  ENSG00000138735_33 (sequence is synthesized)
tctgtatagtgtctgtatttggtatatactttgccactgctgtatttttatttttgcacaacttttgagagtatagcatgaatgtttttagaggactattacatattttttgtatatttg

SEQ ID NO: 348371 - DNA, 120 bp, Artificial Sequence
  ENSG00000138735_34 (sequence is synthesized)
ttttatgctactgaactgaaaggatcaacaacatccactgttagcacattgataaaagcattgtttgtgatatttcgtgtactgcaaagtgtatgcagtattcttgcactgaggtttttt

SEQ ID NO: 348372 - DNA, 120 bp, Artificial Sequence
  ENSG00000138735_35 (sequence is synthesized)
tgcttggggattattttaaataattggtttttgtgttttctgaattaccattttttcaagaatgtttggaatctttcctttttcaaaagtaggttaggagcaaattatcatacattctgt

SEQ ID NO: 348373 - DNA, 120 bp, Artificial Sequence
  ENSG00000138735_36 (sequence is synthesized)
gacatttaaagcctttataggatagtgaaaaatgctggctgagtggattttaagagaaataattgtatttgttaacagtgtctttttttaaaaagttaaggcactctgaaacaaatggaa

SEQ ID NO: 348374 - DNA, 120 bp, Artificial Sequence
  ENSG00000138735_37 (sequence is synthesized)
agtcctatgaaactgtattgtaaagaaaacattatttaattgatatgctgttttgtgagagaacaggcaagacagaactttgtcacttcagtgcagtacatttttctgaaagctacccat

SEQ ID NO: 348375 - DNA, 120 bp, Artificial Sequence
  ENSG00000138735_38 (sequence is synthesized)
aaaatcactttcatctcacctacctgatgcaaagcaggtgaaaccttaggagatgatccagtcactgacttgattgagggataagtgtgatttagaaatggaatggccttggatgtctat

SEQ ID NO: 348376 - DNA, 120 bp, Artificial Sequence
  ENSG00000138735_39 (sequence is synthesized)
tctgagcttccttttcaaaataaaagtgacaattgtagcattgacttgaagtgagacatggttatagataagagagtacaaaatgactctttttcctgtcaattgaaatttaaagaaaag

SEQ ID NO: 348377 - DNA, 120 bp, Artificial Sequence
  ENSG00000138735_40 (sequence is synthesized)
ttttaattatataaatagcaaagggctattgccaatactagggtcaaaaatgaatttgagggaacagtgggtaagaaactttatgcctgaataacatttagcagtattgtgattgaaaaa

SEQ ID NO: 348378 - DNA, 120 bp, Artificial Sequence
  ENSG00000138735_41 (sequence is synthesized)
ttgccatattttgatgtataggacaagtcaactgagatccagagaatcctggatgtgaatgctaaacactggcccttaactcacattcaatgtattttcttcccataacatttagtatag

SEQ ID NO: 348379 - DNA, 120 bp, Artificial Sequence
  ENSG00000138735_42 (sequence is synthesized)
ttaatattttcttagaatttgagcccatttaagtggattaatattctacatgtgtgcccctaaagacacatttactcaatattggagaagtagataatgaattaagcaactggtctagga

SEQ ID NO: 348380 - DNA, 120 bp, Artificial Sequence
  ENSG00000138735_43 (sequence is synthesized)
aaggaaaatttgtttcaaatatgcaggaatgtttggatttggggagagtagaaggagagatttgcttgatttgttaacttctacctccaacccacaaaaaagatatttgatctgagtttc

SEQ ID NO: 348381 - DNA, 120 bp, Artificial Sequence
  ENSG00000138735_44 (sequence is synthesized)
tatcactaatttggatagaaaatttctaagggacatggtaatccagcattctcaaggacctttcgccaaaatgtgttttccatctatgtcccgattcccctaaattttgcctaaaattca

SEQ ID NO: 348382 - DNA, 120 bp, Artificial Sequence
  ENSG00000138735_45 (sequence is synthesized)
gtatgttccttaagtttttaaaattctgagtgtgtacaaatatcttgacataatgcagttttatttttatcattctggtaaaaaaacaaaaaatagaagcaaaacacattgtattgccat

SEQ ID NO: 348383 - DNA, 120 bp, Artificial Sequence
  ENSG00000138735_46 (sequence is synthesized)
tattttgtatttggtaaaggttaatctaggaagttaccaactgtttaatgctatatgtattgtatacttgtattttcaggatattttattttttttgccatacagataaaatttgtaagg

SEQ ID NO: 348384 - DNA, 120 bp, Artificial Sequence
  ENSG00000138735_47 (sequence is synthesized)
ttgcccctttgtggcactggtgtgtaaaatacacagactatcactaaaataatagttatatatacatacaggtgtatacttatgcatgcatacataaatccttagtatagaaaaattgca

SEQ ID NO: 348385 - DNA, 120 bp, Artificial Sequence
  ENSG00000138735_48 (sequence is synthesized)
taaagaatagcaatctttaataaacctttttattacattgtgatttagcagttatgctaaaatatgtacttatgctttagtagtttgtttggtcccctctagtatgtgtcactgagaaat

SEQ ID NO: 348386 - DNA, 120 bp, Artificial Sequence
  ENSG00000138735_49 (sequence is synthesized)
tttttaaagacatggtagatcgtgtttagaggctttgtatgtgtgtcattttaataagcaagaagatatatttagattagaaatggtttggtctgcctttgaatattgtttattttactt

SEQ ID NO: 348387 - DNA, 120 bp, Artificial Sequence
  ENSG00000138735_50 (sequence is synthesized)
tactagttgagacattaaaggaagctgggcaatgcctattttatttctttgttggatattttagttcatacaaagcagagtacttctttagggctggttaattggttcaaataattttta

SEQ ID NO: 348388 - DNA, 120 bp, Artificial Sequence
  ENSG00000138735_51 (sequence is synthesized)
atttcctttctagtatcttctcaagttggaaaaatatacatacagtcctccttcaccttactctgtatttatattacccataactagcaagaagttcttgttctagattttttgtttgtt

SEQ ID NO: 348389 - DNA, 120 bp, Artificial Sequence
  ENSG00000138735_52 (sequence is synthesized)
tagttataacagagtaacataccatttaattacaatttttagccagaaaagtccccactattttactaacttgttaaaagatatctatataattgcctggccttatatttttcagtagat

SEQ ID NO: 348390 - DNA, 120 bp, Artificial Sequence
  ENSG00000138735_53 (sequence is synthesized)
tagaccgtgccaatcacaatcctgggtggatttgtgtaagtcacttaacctctgtgtgcctaaacaagttgtgcttttttaaaaggagttatgtttgggcaaagcctttgtcttcaagca

SEQ ID NO: 348391 - DNA, 120 bp, Artificial Sequence
  ENSG00000138735_54 (sequence is synthesized)
gaatgtcacagaaggcagctactttataagccccaatgggccatggagaccactgtcagaaatgggatattagtctagagagaaggtgatctattcccacatgtcatttctaatgttgag

SEQ ID NO: 348392 - DNA, 120 bp, Artificial Sequence
  ENSG00000138735_55 (sequence is synthesized)
tttccatgactgaacaaagagaatatatttattcagcttcacttgcagatcactagtgaatgtgagatttagagctcattgagtatattgcttcaaggtacaaacccaggatgatgatgt

SEQ ID NO: 348393 - DNA, 120 bp, Artificial Sequence
  ENSG00000138735_56 (sequence is synthesized)
tgtcaccactgtctcttaattttgaataatagtttcctttaataggagtattagagataagaaagtatatgaaaatatactggaaatattggattcttggagaaaactgttcagtcacag

SEQ ID NO: 348394 - DNA, 120 bp, Artificial Sequence
  ENSG00000138735_57 (sequence is synthesized)
atatattcttgcctagcagtgaagtgcctttattttcagcatagcaaataaatattagacctgttccaatttgatctacaatttttttctgtgtttttcaccagattgtactcctaaaac

SEQ ID NO: 348395 - DNA, 120 bp, Artificial Sequence
  ENSG00000138735_58 (sequence is synthesized)
ttaacaggccatcacaagcaattgtcttttgtttacaagattgatttaatatgagaggatacaaaatgtcatcgttatcctctcttatgaacaactgtagtcaaaataaggtggcacaat

SEQ ID NO: 348396 - DNA, 120 bp, Artificial Sequence
  ENSG00000138735_59 (sequence is synthesized)
ttaattgttttgtatcagaaatacactgacccaccttttattgagtcctgccacatgttaggtaccgtgctctgctgtggagacagagcagtgaccccaaggagctcacggtccctgaag

SEQ ID NO: 348397 - DNA, 120 bp, Artificial Sequence
  ENSG00000138735_60 (sequence is synthesized)
gaggtgctagagaagagacttagcttctgatactgccaatttaatgtgagaacatggggtatactgcatcatttccattttcatcaataacatatgttttatgcaccttctttacctgaa

SEQ ID NO: 348398 - DNA, 120 bp, Artificial Sequence
  ENSG00000138735_61 (sequence is synthesized)
acttactaagaatctaccagtaaacaaacatcctgtctttttgcaagtatgaatcacttaacctgctgatagttgaagaacactttaggagttttgtattcttgtatatagtttattttt

SEQ ID NO: 348399 - DNA, 120 bp, Artificial Sequence
  ENSG00000138735_62 (sequence is synthesized)
tccatgtgctagccaggtaaagattacacagttcttctggactgttaaattgtgcatggttttggaccccttctgctctactacagagagtgaagaagaaagtattaaagctcactttac

SEQ ID NO: 348400 - DNA, 120 bp, Artificial Sequence
  ENSG00000138735_63 (sequence is synthesized)
cattccatatacttactaaaagcctgtgtaaacatgtcttaatgaatgttgttgaaagcaatgtaaatagttgaaaatataaatttatattacagtttaagaaaaccttatgaggcatca

SEQ ID NO: 348401 - DNA, 120 bp, Artificial Sequence
  ENSG00000138735_64 (sequence is synthesized)
ctagccactgttaatatctatttgtattcttataccttttcaatatatttgaacaaatatagtttctggcactatttttatactaggaaaaggagttactatgtatattatgcttagctt

SEQ ID NO: 348402 - DNA, 120 bp, Artificial Sequence
  ENSG00000138735_65 (sequence is synthesized)
ttaaggcattttaaataaccatgaatgttgatttcattactttcctttcctccatcacgagagtcatttcagatgactctttcatgacaaaatcactttaaaggaacacttacctccgat

SEQ ID NO: 348403 - DNA, 120 bp, Artificial Sequence
  ENSG00000138735_66 (sequence is synthesized)
tcctgtataaagtcatgagatggtcaaggtggttttccattgtgcaaattcttcacctgtcagtggtttcctcattttgccatgctttgtaaaaataaaaagaatgatcaagtaggtatg

SEQ ID NO: 348404 - DNA, 120 bp, Artificial Sequence
  ENSG00000138735_67 (sequence is synthesized)
gcaactgtatgaggtatttatatgaaaactactagacttgctaaacttggactgttgtgaattagaacctaaaattgaagagattaatattaggcgcctatattttgcttctaaatcaag

SEQ ID NO: 348405 - DNA, 120 bp, Artificial Sequence
  ENSG00000138735_68 (sequence is synthesized)
aaataaaattattagcagtatggtttcttttactgatgaacatgtttgtattgaacaaggaacacatactaatatctattgagtgcctactatgtgctaatctccaacaaattgatttgg

SEQ ID NO: 348406 - DNA, 120 bp, Artificial Sequence
  ENSG00000138735_69 (sequence is synthesized)
ggatgctaagaagaattatgtgccagtgttaccctcaaggagcaatactgtatatactatgcgttagcatattctttttttaagtctaaattttagcctaaataaagaaaagtaatccaa

SEQ ID NO: 348407 - DNA, 120 bp, Artificial Sequence
  ENSG00000138735_70 (sequence is synthesized)
ctctatgggatctttccttaggaccacaatttctcattttattttttaaaacttttttctcattggaagaattatacatgttcattacagaaagcaaaaccaataaaaggcataataaag

SEQ ID NO: 348408 - DNA, 120 bp, Artificial Sequence
  ENSG00000138735_71 (sequence is synthesized)
gtcgaaagccggcccgactggagcaggacgaagggggagggtctcgaggccgagtcctgttcttctgagggacggaccccagctggggtggaaaagcagtaccagagagcctccgaggcg

SEQ ID NO: 348409 - DNA, 120 bp, Artificial Sequence
  ENSG00000138735_72 (sequence is synthesized)
cgcggtgccaaccatggagcgggccggccccagcttcgggcagcagcgacagcagcagcagccccagcagcagaagcagcagcagagggatcaggactcggtcgaagcatggctggacga

SEQ ID NO: 348410 - DNA, 120 bp, Artificial Sequence
  ENSG00000138735_73 (sequence is synthesized)
atcaacgaaaagcaggaagagttttaactcctggaatcatctgagaaactatttcaaactataaatttatataccctacttctgaaagttctgattcagcaagtcttgggtagaagctgg

SEQ ID NO: 348411 - DNA, 120 bp, Artificial Sequence
  ENSG00000138735_74 (sequence is synthesized)
actaccaagctcccccaggtgactctgaatgtgcaggtagcgagtgaagaaaccactggctcccagggactgaccgaggaacactctttctcacaaaggaccagccgactccaacagggt

SEQ ID NO: 348412 - DNA, 120 bp, Artificial Sequence
  ENSG00000138735_75 (sequence is synthesized)
tctgtcgtatcatgcttcagcagcagaggaagaaacaagagagctacagtcgttagcgggatgcaaagtcactgataatacaaagcaaaaggcattaaataacttatactgactgtgtaa

SEQ ID NO: 348413 - DNA, 120 bp, Artificial Sequence
  ENSG00000138738_0 (sequence is synthesized)
gcgcccccgcagcaggaatggcaggaacggatccgggccgagcccgacccgggacgaggaggggctgagccgcgggggatcctggaatcggcagggaggtggggattctgggaggaaaac

SEQ ID NO: 348414 - DNA, 120 bp, Artificial Sequence
  ENSG00000138738_1 (sequence is synthesized)
tccatttcctccttccctgccggtttctcccctctaccctggcaccccaaatttcgatgtgccgcctgccgggcgctaagcgccggtgttgagagaggcggcggccgccgcgcccgggaa

SEQ ID NO: 348415 - DNA, 120 bp, Artificial Sequence
  ENSG00000138738_2 (sequence is synthesized)
aatgctgggcatgtacgtgccggacaggttctccctgaagtcctcccgggttcaggacggcatggggctctacacggcccgcagagtgcgaaagggtgaaaagttcggaccctttgctgg

SEQ ID NO: 348416 - DNA, 120 bp, Artificial Sequence
  ENSG00000138738_3 (sequence is synthesized)
agagaagagaatgcctgaagacttggatgaaaatatggattacaggttgatgtgggaggttcgtgggagtaagggagaagttttgtacattttggatgctaccaacccacggcactccaa

SEQ ID NO: 348417 - DNA, 120 bp, Artificial Sequence
  ENSG00000138738_4 (sequence is synthesized)
ctggcttcgcttcgttcatgaggcaccatctcaggagcagaagaacttggctgccattcaagaaggagaaaacattttctatttggcagttgaagatatagaaacagacacggagcttct

SEQ ID NO: 348418 - DNA, 120 bp, Artificial Sequence
  ENSG00000138738_5 (sequence is synthesized)
gattggctacctggatagtgacatggaggctgaggaggaagaacagcaaattatgacagtcatcaaagaaggggaagttgaaaattctagaagacaatcaacagcgggcagaaaagatcg

SEQ ID NO: 348419 - DNA, 120 bp, Artificial Sequence
  ENSG00000138738_6 (sequence is synthesized)
ccttggctgtaaagaggactatgcttgtcctcaatgtgaatcgagttttaccagtgaggatattcttgctgagcatctccagacattgcaccagaaacccacagaggagaaagaatttaa

SEQ ID NO: 348420 - DNA, 120 bp, Artificial Sequence
  ENSG00000138738_7 (sequence is synthesized)
gtgcaagaactgtgggaagaaattcccagttaagcaggctttgcaaagacatgttcttcagtgcacagcgaaaagcagtctaaaggagtcttcgcgaagttttcagtgctctgtttgcaa

SEQ ID NO: 348421 - DNA, 120 bp, Artificial Sequence
  ENSG00000138738_8 (sequence is synthesized)
ttcttccttcagttcagcatcgagttttgagcagcaccaggagacttgccggggggatgccaggtttgtgtgcaaggctgacagctgtggaaagaggctgaagagcaaggatgccctgaa

SEQ ID NO: 348422 - DNA, 120 bp, Artificial Sequence
  ENSG00000138738_9 (sequence is synthesized)
aagacaccaggaaaatgtccacactggagatcctaagaaaaagcttatatgttcagtgtgcaataaaaagtgttcttcagcatcaagcctacaggaacatagaaagattcatgagatatt

SEQ ID NO: 348423 - DNA, 120 bp, Artificial Sequence
  ENSG00000138738_10 (sequence is synthesized)
tgattgtcaagaatgtatgaagaaatttatttcagctaatcagctaaaacgtcatatgatcacccactcagaaaaacgaccctataattgcgagatttgtaataagtctttcaagaggct

SEQ ID NO: 348424 - DNA, 120 bp, Artificial Sequence
  ENSG00000138738_11 (sequence is synthesized)
tgatcaagtgggtgctcacaaagtaatacacagcgaagacaaaccttacaaatgcaaactttgtggaaagggatttgcccacagaaatgtttacaagaatcataagaagacccactctga

SEQ ID NO: 348425 - DNA, 120 bp, Artificial Sequence
  ENSG00000138738_12 (sequence is synthesized)
ggagagaccgttccaatgtgaagaatgtaaagctttgttccggaccccattttctttacagagacacctgctaatacataacagtgagaggactttcaagtgccatcactgcgatgctac

SEQ ID NO: 348426 - DNA, 120 bp, Artificial Sequence
  ENSG00000138738_13 (sequence is synthesized)
ctttaagaggaaggatacattaaatgttcatgtccaggtggttcatgaaagacacaagaagtataggtgtgagctatgtaataaggcctttgttacaccttcagtgcttagaagtcataa

SEQ ID NO: 348427 - DNA, 120 bp, Artificial Sequence
  ENSG00000138738_14 (sequence is synthesized)
gaaaacacatacaggagaaaaggagaaaatctgtccatattgtggccagaaatttgccagcagtggtacactcagagttcatatccggagccacacaggtgagcgtccctatcaatgtcc

SEQ ID NO: 348428 - DNA, 120 bp, Artificial Sequence
  ENSG00000138738_15 (sequence is synthesized)
ttactgtgaaaaaggattcagtaaaaatgatggactgaagatgcacattcgtactcacaccagggagaagccgtacaagtgctcagagtgcagcaaggccttcagccagaagcgaggcct

SEQ ID NO: 348429 - DNA, 120 bp, Artificial Sequence
  ENSG00000138738_16 (sequence is synthesized)
ggatgagcacaagaggacgcacactggagaaaagccttttcagtgtgatgtttgtgatttggcttttagcctgaagaaaatgctgattcgacacaagatgactcataatcccaatcgtcc

SEQ ID NO: 348430 - DNA, 120 bp, Artificial Sequence
  ENSG00000138738_17 (sequence is synthesized)
cctggcagaatgccagttttgccataagaagtttacaaggaatgactacctcaaagtgcacatggacaatatccatggtgtagctgacagctaataggggctgtaaaggaattaaactat

SEQ ID NO: 348431 - DNA, 120 bp, Artificial Sequence
  ENSG00000138738_18 (sequence is synthesized)
tcagaagggctcctaatatgaatcccagatttttatcacctgatcagcataacagaagtagccaaaagtgacttactggtctcatagttcttatttgcctacatttagagtctgtagatg

SEQ ID NO: 348432 - DNA, 120 bp, Artificial Sequence
  ENSG00000138738_19 (sequence is synthesized)
catatgcaaccaaaaaaaagtcttacttttaacaagaaatggtataaatggaaaaaaaatacaactccatagccttgcaaaatgcaacttgtgctctgtcttataaaaatggagaaagga

SEQ ID NO: 348433 - DNA, 120 bp, Artificial Sequence
  ENSG00000138738_20 (sequence is synthesized)
gtcatggctctctttcttggccatccctctgtaatgaagtttataatatacttccctaataggcctttttattttattgttattctttgtgtgtctgtgtgtctgtgtgtctgtatgtgt

SEQ ID NO: 348434 - DNA, 120 bp, Artificial Sequence
  ENSG00000138738_21 (sequence is synthesized)
ctgtgtgtgtgcactcacttgcaaatgccagttgttgcagctggttttaccaatttaaatagaaataaatcaagatatccaactatttctttgcagatgaggataagaataagttatcaa

SEQ ID NO: 348435 - DNA, 120 bp, Artificial Sequence
  ENSG00000138738_22 (sequence is synthesized)
caagagctgagcttatctaatagctctgtgcaacaaatgagtttaaaatagatatttgataactaaaacatctattaaaatattgctcattttagaggattcttaggaaacattatttat

SEQ ID NO: 348436 - DNA, 120 bp, Artificial Sequence
  ENSG00000138738_23 (sequence is synthesized)
tctcatcattcagatgcagacattcatggtctggaatacttttataagttctacacaaaaatgaccatcacatttaaatattcagcaggctacccctcttgaatttagaccatttagctt

SEQ ID NO: 348437 - DNA, 120 bp, Artificial Sequence
  ENSG00000138738_24 (sequence is synthesized)
tagaaattaacagtataccaatatatataattaaaaatagaaaccaaatagattctctgtatttggcaacagagtggcagaacaatagtggcatctccacatttgttaggatgaacatag

SEQ ID NO: 348438 - DNA, 120 bp, Artificial Sequence
  ENSG00000138738_25 (sequence is synthesized)
ccctttcccctctccttccataaaagtgcacagaacatgttagtgcagatacagtcctcagaacattaacattccattttgcaaaagacattttccagaatcttggcagtaggtaattct

SEQ ID NO: 348439 - DNA, 120 bp, Artificial Sequence
  ENSG00000138738_26 (sequence is synthesized)
gaaacacttttgaattaccttcaatcatcccatataattaggaatccagaatacaaagtacaaacttggcaattgttatgattgaaactgtcactgatgcttaagggaaattgaagcaag

SEQ ID NO: 348440 - DNA, 120 bp, Artificial Sequence
  ENSG00000138738_27 (sequence is synthesized)
aagcataatttcttcctttaggttatatttcagcaaaatacttgacagcaacatacaatgaacagcttgtttggagagatgatatgatacaatgtaatagtgatgtcaaaataacctgga

SEQ ID NO: 348441 - DNA, 120 bp, Artificial Sequence
  ENSG00000138738_28 (sequence is synthesized)
ggaatatccaaaaaccagaaaaacgttaaaatgaagcccaactcatgaacctctctaactgaagcccagtcaaaagaaaggaagtatagttttaaggaagttatttggttctaatgagtt

SEQ ID NO: 348442 - DNA, 120 bp, Artificial Sequence
  ENSG00000138738_29 (sequence is synthesized)
aaggagaaaggttatctgagacacagttctttgacttcaggaatctcattttagaattatattcatgcccagttccagttttaaaaagaaacataaagattcaatgtagacatttgaatg

SEQ ID NO: 348443 - DNA, 120 bp, Artificial Sequence
  ENSG00000138738_30 (sequence is synthesized)
ataaattttggtcttgtttctcactatatcatttgtttcaacaatatatttttagatctaaagtgttttcattttaatatgatagtgtgtttaatatcatttgaatataaaaagacagct

SEQ ID NO: 348444 - DNA, 120 bp, Artificial Sequence
  ENSG00000138738_31 (sequence is synthesized)
atataaaaagacagctgtaaaatttgatagtgtgtattatttaagcacatcctgtatatttctttgaatgctgctttctctatatgggatgctttatatcccgattatgtgatgaatgta

SEQ ID NO: 348445 - DNA, 120 bp, Artificial Sequence
  ENSG00000138738_32 (sequence is synthesized)
aaacttgaaaggagtccaaattccaattttgtgtaatctcagtgagtcacagttcacatggctgctggggaaattaccctgaaaactgtggtgtcgctatgctgtggagtaaacagacag

SEQ ID NO: 348446 - DNA, 120 bp, Artificial Sequence
  ENSG00000138738_33 (sequence is synthesized)
gcaagaggtgctgggctttatcctgctgaaggtttatagacatggaaatctttagaaaatggtgtagaaggacctacaccagagagtggtacaccactctctcctttcagaggactgaaa

SEQ ID NO: 348447 - DNA, 120 bp, Artificial Sequence
  ENSG00000138738_34 (sequence is synthesized)
ccaaaacaagtccttagtagactatttgtatgctgtaaatttttatccaaaagacaagtattcatgggtagtttcagatatattagcatttgcttgctaaaacttttaaattacttagta

SEQ ID NO: 348448 - DNA, 120 bp, Artificial Sequence
  ENSG00000138738_35 (sequence is synthesized)
ataaccaaaaaaagacactattttaggcatgattgatcaattgaaagcatagataatcataaggaaaagtcttacagacaagctgaagtacaggtacctactttgaaatgtcttctgttt

SEQ ID NO: 348449 - DNA, 120 bp, Artificial Sequence
  ENSG00000138738_36 (sequence is synthesized)
cctgctgtgaaagattttggctggggtattttcttgagaaaagaccagacccttaggtgcctataaagtctaagtaattgagacttagaaattggctaagtaaatttaagagacgttcaa

SEQ ID NO: 348450 - DNA, 120 bp, Artificial Sequence
  ENSG00000138738_37 (sequence is synthesized)
taatgtaggtgggttcagatacccttttataataactgtcttcttagtatattaacactcaagatgtttgtgtatctttaatttgcctttgtttcacaataactggcttttgttttcctt

SEQ ID NO: 348451 - DNA, 120 bp, Artificial Sequence
  ENSG00000138738_38 (sequence is synthesized)
ttcatggtgtgttgttggctatatagaggcatttattggtaaattataatcagcagttgcaccatggaagtattcttggtgataaattcttggggttacatagtatagttaacatgttat

SEQ ID NO: 348452 - DNA, 120 bp, Artificial Sequence
  ENSG00000138738_39 (sequence is synthesized)
tttcaagaaacatgagtgtgtgtgtctgtgtgtgtgtgtctgaagagtatcacttatatgcagtgcatatacatgtaagtgcattactttgctcaaatatcttctgacctattacagtca

SEQ ID NO: 348453 - DNA, 120 bp, Artificial Sequence
  ENSG00000138738_40 (sequence is synthesized)
actcatgcatgagtgtgaacatgtattacagaaggtcttacagccttagtttctgttttagattttatgtgctgcttcctttctcaaacaaaagcatgaaaggaaagaggataagtacta

SEQ ID NO: 348454 - DNA, 120 bp, Artificial Sequence
  ENSG00000138738_41 (sequence is synthesized)
gaaatattcatttttttccttcacaaatctaaatgttgcttatgaaaactcatcttagagtaatgaatatgtggaagtgggtaggtaggaggaaatgtgcctctttaaaatcctaaaatt

SEQ ID NO: 348455 - DNA, 120 bp, Artificial Sequence
  ENSG00000138738_42 (sequence is synthesized)
ctctttaaaatcctaaaattttaccattgatattgacatttgtttgcgtgtatataaatggagcatgtgtaaatatagaattccaatagcattttttattttattataaatctataataa

SEQ ID NO: 348456 - DNA, 120 bp, Artificial Sequence
  ENSG00000138738_43 (sequence is synthesized)
ggggcttcctttccccaggctgcagcgatctgtttttaattctcgctcttgaggagagagctggcttttccattgtgtttcacacagatgtggagcgctggcagtggatttttttctttc

SEQ ID NO: 348457 - DNA, 120 bp, Artificial Sequence
  ENSG00000138738_44 (sequence is synthesized)
actgaacactatttctttctcaggttgaatttagcagcatttgttctttttcccattcctgaattaattataactgtaagccttagttaaagtctagttatgtttgggtggtcagatgca

SEQ ID NO: 348458 - DNA, 120 bp, Artificial Sequence
  ENSG00000138738_45 (sequence is synthesized)
tgcattaagaattaatatttttaagtaacaattttaaatgttttggcatgtgacatttcttttataaattgttaaaatttatcattattaagtgatgtccttctgccttattatttttac

SEQ ID NO: 348459 - DNA, 120 bp, Artificial Sequence
  ENSG00000138738_46 (sequence is synthesized)
gctgttatataattgtgggtcattttttgcatgcatactttcatgcttcttagtaattcagtttcacatacctacagaatttaaatgcttttcttcttacctgcataggtaatgcatgga

SEQ ID NO: 348460 - DNA, 120 bp, Artificial Sequence
  ENSG00000138738_47 (sequence is synthesized)
atgaccccgaaactctactagggagcatgtattacaaaatcttgctgatgtttgagttttgtaggtatgtcttcaccatttcttcctgttccgctttgctggttgtcttgtagttttgag

SEQ ID NO: 348461 - DNA, 120 bp, Artificial Sequence
  ENSG00000138738_48 (sequence is synthesized)
tgatggactgaagatgcacattcgtactcacaccagggttccagtgtgactcaagatggattttgccactctggccatcacatcctcattccaggcaacaggaaggaggaggcaagagaa

SEQ ID NO: 348462 - DNA, 120 bp, Artificial Sequence
  ENSG00000138738_49 (sequence is synthesized)
ggtaacaggatacgcccctgctgattacacttccactaaggagctttctggaagtcctacccaccaacttccacatgaccacacttggcggagaagccgtacaagtgctcagagtgcagc

SEQ ID NO: 348463 - DNA, 120 bp, Artificial Sequence
  ENSG00000138738_50 (sequence is synthesized)
aactcatagtttttaacctgtgtgtgtgtgtgtgcacgcgcgcacgcgcatgttttgtgtgtgaatgagagattaagcattttacattggtattgtcattaactcatcttttcttagtat

SEQ ID NO: 348464 - DNA, 120 bp, Artificial Sequence
  ENSG00000138738_51 (sequence is synthesized)
ttttcagtgtgatacacattaaaagaaaaggaagaaatactctgagaagattaagaaaccgaaatttgtcatttatgcattatggctaacttcagctgatattttgggggaagaaaaagg

SEQ ID NO: 348465 - DNA, 120 bp, Artificial Sequence
  ENSG00000138738_52 (sequence is synthesized)
gagctgtaacacagacaagactgagacctgctccttgcttgccacattgcgagtgaagagaaggagagaagagctgcagcctttcagggatcccagacctgggagctccccaagccaggg

SEQ ID NO: 348466 - DNA, 120 bp, Artificial Sequence
  ENSG00000138738_53 (sequence is synthesized)
ctgtgactccttctttggggtgctgcagttcctggtgtctccgagcttctggatgccactgtgttccctggtgtcagctgtggaagctacttgcggtgtgcctgtcccagctgcagcctg

SEQ ID NO: 348467 - DNA, 120 bp, Artificial Sequence
  ENSG00000138738_54 (sequence is synthesized)
gcagagagctggcacctgtgctggcacctggagctgcccacccttctgcagcagccggcatatctgactgtgcattggccagaccccacactcactctcacaccccttgccgctccatgc

SEQ ID NO: 348468 - DNA, 120 bp, Artificial Sequence
  ENSG00000138738_55 (sequence is synthesized)
agtctcccttggcaggtgtggaatccaggccattagtgtgagctgaacacagcctgccaggtcgagtgagcagaatgagctcagtgggctgaagcaaaaatttgggcaaaggcacgactg

SEQ ID NO: 348469 - DNA, 120 bp, Artificial Sequence
  ENSG00000138738_56 (sequence is synthesized)
gccacagaggtttccagccagaaaagcaacaccccaaagatcccataataataggagtgcaaaacctgttgtaaactgtgcatgccagggatctaggttgtgtgttccttatgagaatct

SEQ ID NO: 348470 - DNA, 120 bp, Artificial Sequence
  ENSG00000138738_57 (sequence is synthesized)
cctgttcctgatgccaaaaaggttgggcactgctattctataccgctgtaggatgactatagttaacaataatatatagtttcaaaaagctagaaggaagacattgaatgttcccaacac

SEQ ID NO: 348471 - DNA, 120 bp, Artificial Sequence
  ENSG00000138738_58 (sequence is synthesized)
aaagaaatgatacatgtttgagatgatggatatgctgattatcttgatctgatcactatacatgatatgtattgtaacatcactaggtaccccatgaatatgtacaattatgtgtcaaga

SEQ ID NO: 348472 - DNA, 120 bp, Artificial Sequence
  ENSG00000138738_59 (sequence is synthesized)
taaataagtaataaaataaaaagctttatcttattccccaaaaaaagacagcttgaggaaaggaaaaaggaagattactagcagagttgtaggctattgtctatggtactttactgcatg

SEQ ID NO: 348473 - DNA, 120 bp, Artificial Sequence
  ENSG00000138738_60 (sequence is synthesized)
aagaaggtacagaggctgaatggaagaggggttgtaaaactggagtatgggctttcctttcacatggagctttgtttaacagaagtctagaaagtagatataagaatcattatcatggtt

SEQ ID NO: 348474 - DNA, 120 bp, Artificial Sequence
  ENSG00000138738_61 (sequence is synthesized)
agtttatgtcaaaactatacatactgtcttattatacttaattaaatgggtaatcatttgactagtgtgtctatgagttcgtaagttggtacttaatggttatattatttaattcacctc

SEQ ID NO: 348475 - DNA, 120 bp, Artificial Sequence
  ENSG00000138738_62 (sequence is synthesized)
agtggacagagattaaaacagagtcattttctggttccttttcctgtggttaattaagtcctttgagatatggctgtatacactttatggtggtttacacatgtctgttttattagtttt

SEQ ID NO: 348476 - DNA, 120 bp, Artificial Sequence
  ENSG00000138738_63 (sequence is synthesized)
gcagacagtagacaggaacaaaaaggggcatagtcattcttgctgtgagttaaccctacacttctccaagcagtagaatgtaaactcaactaggcttttgagaactttccctcagtgact

SEQ ID NO: 348477 - DNA, 120 bp, Artificial Sequence
  ENSG00000138738_64 (sequence is synthesized)
taattaattccatgcccatttctggactttggaatatagcatgcatctatgtagcttgttttttactttatcaaatttaaaatgctcattatcgaacatttatatttttatattaaactt

SEQ ID NO: 348478 - DNA, 120 bp, Artificial Sequence
  ENSG00000138738_65 (sequence is synthesized)
ttgtaagtataacctgcttggtttcaaatatttcacatgcaacatgacattggttggaataatgttatgttgtatgtaaaagtgtaagttgtatgtaaaagattaatatcacaatccttt

SEQ ID NO: 348479 - DNA, 120 bp, Artificial Sequence
  ENSG00000138738_66 (sequence is synthesized)
gaaatactttgcaccttgctattgaataaagttgatgacttttaattctgttgacataatctagaacccatagggaaactctatgataatgttttacttctagaaagtcagtcaataagt

SEQ ID NO: 348480 - DNA, 80 bp, Artificial Sequence
  ENSG00000138738_67 (sequence is synthesized)
atggggtttcaccatgttggacagaggcctctcaaaatgctggcattacaggcatgaaccaccatgcctggctgggtaga

SEQ ID NO: 348481 - DNA, 120 bp, Artificial Sequence
  ENSG00000138738_68 (sequence is synthesized)
attctatcttaaaaaacccagctgattaaataaaatattctgttgaaatgtaaaagaattaacacaatcactttatgaattaataaatttagttttttcttttacaaacacatttggtta

SEQ ID NO: 348482 - DNA, 120 bp, Artificial Sequence
  ENSG00000138738_69 (sequence is synthesized)
cacatttggttaattttaattttgctttgaattccttgtggatatatcactttctcttttaatactatacagtattagtacatggaaaagtgaaaggcctgttttatatatgagaaaggt

SEQ ID NO: 348483 - DNA, 87 bp, Artificial Sequence
  ENSG00000138738_70 (sequence is synthesized)
catggaaaagtgaaaggcctgttttatatatgagaaaggtggtatatgaagctgtgaagatgtctcaaatttaaaaagaaagcattt

SEQ ID NO: 348484 - DNA, 120 bp, Artificial Sequence
  ENSG00000138738_71 (sequence is synthesized)
ggtggggtttcatggctctttttgctgcggggaaaaaaagtatttcaattacagaaagatgccaagaatgaacttgagctactcctatttgtcagtgtagcatttcacttctctctatgg

SEQ ID NO: 348485 - DNA, 120 bp, Artificial Sequence
  ENSG00000138738_72 (sequence is synthesized)
tgtacttctaatttattagaaactccataaattgaagggattggaagggtgagattggaaaagtaattgggtggtgctttcacaattacatttttggtttaattttcacctagaatgatt

SEQ ID NO: 348486 - DNA, 120 bp, Artificial Sequence
  ENSG00000138738_73 (sequence is synthesized)
caaacaactcaataggaaaaaaatcaaataatctaatgaaaacatgaagaaaatatctgaatagacatttttcaaaagaagacaaatggccaacaggagatcctaagaaaaagcttatat

SEQ ID NO: 348487 - DNA, 120 bp, Artificial Sequence
  ENSG00000138741_0 (sequence is synthesized)
aattaacttctcttagtcttcaagcctagtacttgaatgtcaagtacctgcaagcctcaatgtccaagacttttaagagcggaaggtacgatgagttccatctttactagggtcacaagg

SEQ ID NO: 348488 - DNA, 120 bp, Artificial Sequence
  ENSG00000138741_1 (sequence is synthesized)
aaggcatgggtatatggaaatttttattattattccatctgaatatcattttctagagaataggagcttttgttctgaagggctgccggcttccttctgggatctagcagccagggttag

SEQ ID NO: 348489 - DNA, 120 bp, Artificial Sequence
  ENSG00000138741_2 (sequence is synthesized)
atcacaggtgtcactttcaggcgagtagttagcaacggtatcgctagcaactgagccgacccctgcagccagaggtttgcagtgggtagtgtgtattccagaaagggccctgacatgtga

SEQ ID NO: 348490 - DNA, 120 bp, Artificial Sequence
  ENSG00000138741_3 (sequence is synthesized)
aaggaaggaatgtgccctaatattctacagttgttttatcgttgctactgattaggtccatggagggaagcccatccctgagacgcatgacagtgatgcgggagaagggccggcgccagg

SEQ ID NO: 348491 - DNA, 120 bp, Artificial Sequence
  ENSG00000138741_4 (sequence is synthesized)
ctgtcaggggcccggccttcatgttcaatgaccgcggcaccagcctcaccgccgaggaggagcgcttcctcgacgccgccgagtacggcaacatcccagtggtgcgcaagatgctggagg

SEQ ID NO: 348492 - DNA, 120 bp, Artificial Sequence
  ENSG00000138741_5 (sequence is synthesized)
agtccaagacgctgaacgtcaactgcgtggactacatgggccagaacgcgctgcagctggctgtgggcaacgagcacctggaggtgaccgagctgctgctcaagaaggagaacctggcgc

SEQ ID NO: 348493 - DNA, 120 bp, Artificial Sequence
  ENSG00000138741_6 (sequence is synthesized)
gcattggcgacgccctgctgctcgccatcagcaagggctacgtgcgcatcgtagaggccatcctcaaccaccctggcttcgcggccagcaagcgtctcactctgagcccctgtgagcagg

SEQ ID NO: 348494 - DNA, 120 bp, Artificial Sequence
  ENSG00000138741_7 (sequence is synthesized)
agctgcaggacgacgacttctacgcttacgacgaggacggcacgcgcttctcgccggacatcacccccatcatcctggcggcgcactgccagaaatacgaagtggtgcacatgctgctga

SEQ ID NO: 348495 - DNA, 120 bp, Artificial Sequence
  ENSG00000138741_8 (sequence is synthesized)
tgaagggtgccaggatcgagcggccgcacgactatttctgcaagtgcggggactgcatggagaagcagaggcacgactccttcagccactcacgctcgaggatcaatgcctacaaggggc

SEQ ID NO: 348496 - DNA, 120 bp, Artificial Sequence
  ENSG00000138741_9 (sequence is synthesized)
tggccagcccggcttacctctcattgtccagcgaggacccggtgcttacggccctagagctcagcaacgagctggccaagctggccaacatagagaaggagttcaagaatgactatcgga

SEQ ID NO: 348497 - DNA, 120 bp, Artificial Sequence
  ENSG00000138741_10 (sequence is synthesized)
agctctccatgcaatgcaaagactttgtagtgggtgtgctggatctctgccgagactcagaagaggtagaagccattctgaatggagatctggaatcagcagagcctctggaggtacaca

SEQ ID NO: 348498 - DNA, 120 bp, Artificial Sequence
  ENSG00000138741_11 (sequence is synthesized)
ggcacaaagcttcattaagtcgtgtcaaacttgccattaagtatgaagtcaaaaagtttgtggctcatcccaactgccagcagcagctcttgacgatctggtatgagaacctctcaggcc

SEQ ID NO: 348499 - DNA, 120 bp, Artificial Sequence
  ENSG00000138741_12 (sequence is synthesized)
taagggagcagaccatagctatcaagtgtctcgttgtgctggtcgtggccctgggccttccattcctggccattggctactggatcgcaccttgcagcaggctggggaaaattctgcgaa

SEQ ID NO: 348500 - DNA, 120 bp, Artificial Sequence
  ENSG00000138741_13 (sequence is synthesized)
gcccttttatgaagtttgtagcacatgcagcttctttcatcatcttcctgggtctgcttgtgttcaatgcctcagacaggttcgaaggcatcaccacgctgcccaatatcacagttactg

SEQ ID NO: 348501 - DNA, 120 bp, Artificial Sequence
  ENSG00000138741_14 (sequence is synthesized)
actatcccaaacagatcttcagggtgaaaaccacccagtttacatggactgaaatgctaattatggtctgggttcttggaatgatgtggtctgaatgtaaagagctctggctggaaggac

SEQ ID NO: 348502 - DNA, 120 bp, Artificial Sequence
  ENSG00000138741_15 (sequence is synthesized)
ccagattcctagctttccttcaggcaacgaaggcacaacagtatgtggacagttacgtccaagagagtgacctcagtgaagtgacactcccaccagagatacagtatttcacttatgcta

SEQ ID NO: 348503 - DNA, 120 bp, Artificial Sequence
  ENSG00000138741_16 (sequence is synthesized)
gagataaatggctcccttctgaccctcagattatatctgaaggcctttatgccatagctgttgtgctcagcttctctcggattgcgtacatcctccctgcaaatgagagctttggccccc

SEQ ID NO: 348504 - DNA, 120 bp, Artificial Sequence
  ENSG00000138741_17 (sequence is synthesized)
tgcagatctctcttggaaggactgtaaaggacatattcaagttcatggtcctctttattatggtgttttttgcctttatgattggcatgttcatactttattcttactaccttggggcta

SEQ ID NO: 348505 - DNA, 120 bp, Artificial Sequence
  ENSG00000138741_18 (sequence is synthesized)
aagttaatgctgcttttaccactgtagaagaaagtttcaagactttattttggtcaatatttgggttgtctgaagtgacttccgttgtgctcaaatatgatcacaaattcatagaaaata

SEQ ID NO: 348506 - DNA, 120 bp, Artificial Sequence
  ENSG00000138741_19 (sequence is synthesized)
ttggatacgttctttatggaatatacaatgtaactatggtggtcgttttactcaacatgctaattgctatgattaatagctcatatcaagaaattgaggatgacagtgatgtagaatgga

SEQ ID NO: 348507 - DNA, 120 bp, Artificial Sequence
  ENSG00000138741_20 (sequence is synthesized)
agtttgctcgttcaaaactttggttatcctattttgatgatggaaaaacattacctccacctttcagtctagttcctagtccaaaatcatttgtttatttcatcatgcgaattgttaact

SEQ ID NO: 348508 - DNA, 120 bp, Artificial Sequence
  ENSG00000138741_21 (sequence is synthesized)
ttcccaaatgcagaaggagaaggcttcagaaggatatagaaatgggaatgggtaactcaaagtccaggttaaacctcttcactcagtctaactcaagagtttttgaatcacacagtttta

SEQ ID NO: 348509 - DNA, 120 bp, Artificial Sequence
  ENSG00000138741_22 (sequence is synthesized)
acagcattctcaatcagccaacacgttatcagcagataatgaaaagacttataaagcggtatgttttgaaagcacaagtagacaaagaaaatgatgaagttaatgaaggtgaattaaaag

SEQ ID NO: 348510 - DNA, 120 bp, Artificial Sequence
  ENSG00000138741_23 (sequence is synthesized)
aaatcaagcaagatatctccagccttcgttatgaacttttggaagacaagagccaagcaactgaggaattagccattctaattcataaacttagtgagaaactgaatcccagcatgctga

SEQ ID NO: 348511 - DNA, 120 bp, Artificial Sequence
  ENSG00000138741_24 (sequence is synthesized)
gatgtgaatgatgcagcaacctggatttggctttgactatagcacaaatgtgggcaataatatttctaagtatgaaatacttgaaaaactatgatgtaaatttttagtattaactacctt

SEQ ID NO: 348512 - DNA, 120 bp, Artificial Sequence
  ENSG00000138741_25 (sequence is synthesized)
tatcatgtgaacctttaaaagttagctcttaatggttttattgttttatcacatgaaaatgcattttatttgtctgctttgacattacagtggcataccattgtgttgaaaagcccaata

SEQ ID NO: 348513 - DNA, 120 bp, Artificial Sequence
  ENSG00000138741_26 (sequence is synthesized)
ttactatattattgaaacttttattcattttagagtaaactccacatctttgcactacctgtttgcctccaagagactatcagttccttggggacagggaccatgtcttattcatctttg

SEQ ID NO: 348514 - DNA, 120 bp, Artificial Sequence
  ENSG00000138741_27 (sequence is synthesized)
tgtctccagcatctagtacagtgcctggtatatagtaggtgctcaataaatgttgaaaccaactgaactgccaacaaaataaaaataaaaagtcttcactatgtagcataccttcccttg

SEQ ID NO: 348515 - DNA, 120 bp, Artificial Sequence
  ENSG00000138741_28 (sequence is synthesized)
tccaagttctgaagaggttttttttttttttttttaatagaaactgaagacattttacaaccagctatgacttggtaagacattcttagaattttaggtgtcactgataatcctagaacc

SEQ ID NO: 348516 - DNA, 120 bp, Artificial Sequence
  ENSG00000138741_29 (sequence is synthesized)
actgagccccaagtgaagaatttaacaacaaaatgggttaatgaaaaatataattacattgtatatttaagtttcatagaattatttaaaacaacacattaaagatttttctaaaatata

SEQ ID NO: 348517 - DNA, 120 bp, Artificial Sequence
  ENSG00000138741_30 (sequence is synthesized)
gagtaacgatgctgtcctagcaagtgatgctgtcggagacaggagacgggcgccgaggaggcatcgccgccgccgcggggctggagagcctctcccagcaccagagccccgctcggcccc

SEQ ID NO: 348518 - DNA, 120 bp, Artificial Sequence
  ENSG00000138741_31 (sequence is synthesized)
gggcttcctcgtcgcagccacggccgcggcagctgctcccacggtttgatggtgggcggcggcagctcggcttcggcgctagcctctaactgctggatcgcgggccgcgacgctctccgc

SEQ ID NO: 348519 - DNA, 120 bp, Artificial Sequence
  ENSG00000138741_32 (sequence is synthesized)
ggccccggaagccgcgggaggtggtgaaggggcgccgcgggaagactgcactgccgcgaaggcggaggaggccggcagccggcacccccacactcggaccgcagccggcgcgatgtccac

SEQ ID NO: 348520 - DNA, 120 bp, Artificial Sequence
  ENSG00000138741_33 (sequence is synthesized)
ctcggaccgcagccggcgcgatgtccaccaaggtcaggaagtgcaaagaacaagcaagggtgaccttcccggcgccggaggaggaggaagacgagggcgaggacgagggcgcggagccgc

SEQ ID NO: 348521 - DNA, 120 bp, Artificial Sequence
  ENSG00000138741_34 (sequence is synthesized)
ggggctggaggggcgtcaacggggggctggagccgcgctcggcgccctcgcagcgggagccgcacggctactgcccgccgcccttctcccacgggccggacctgtccatggagggaagcc

SEQ ID NO: 348522 - DNA, 120 bp, Artificial Sequence
  ENSG00000138741_35 (sequence is synthesized)
atttctgcctctgctgctttaatgctaaatgagatatcaacagctgacttcatatctcacctgtgagctccctgctgagttttggagggtctgctcatgggaagaaataggaaagagcag

SEQ ID NO: 348523 - DNA, 120 bp, Artificial Sequence
  ENSG00000138741_36 (sequence is synthesized)
tgactatgggcgtacttggaaagacatggccaagcatccccaggtgtgtttcagttccttttggggcatttattgccatcgttgcttacaatgattgacatctttgtttcttatcaaagg

SEQ ID NO: 348524 - DNA, 120 bp, Artificial Sequence
  ENSG00000138741_37 (sequence is synthesized)
ttccagttccactttctatataaaatatattgtgatatatctacatatgccttattacataattgtgctgaatgctggtaatatccgcaatgcctcttgactttaatgggaaaaggcatg

SEQ ID NO: 348525 - DNA, 120 bp, Artificial Sequence
  ENSG00000138741_38 (sequence is synthesized)
cagaccagtaagttccccagtcacttcagagactataaaacactcaaagcattttttaaccagctaggtttaaatctctcatagagttatgtttaacatcctgagtctgcagtcagttgc

SEQ ID NO: 348526 - DNA, 120 bp, Artificial Sequence
  ENSG00000138741_39 (sequence is synthesized)
tgtcaagtcgtataggaatacgaattgtgatcatagatcaaagattttcagaggtccttaaaaccaactaaatacatgctactttaaaatcattgctatcatgcagaaaagctctttaga

SEQ ID NO: 348527 - DNA, 120 bp, Artificial Sequence
  ENSG00000138741_40 (sequence is synthesized)
catgaagacagaaataagtgttaaatggaactacataaagctctttaaagattatttcttaatttctactttttgggagttaaattaagaaaggaactttataaatgttttgctaccatt

SEQ ID NO: 348528 - DNA, 120 bp, Artificial Sequence
  ENSG00000138741_41 (sequence is synthesized)
gtagaacacttcattaacttttgtgccatgctaagagtattcgtcttaaacatttttcaaactttatgtactttatgttgtgtctcagaactgaataaaatattgaatttttccattgtt

SEQ ID NO: 348529 - DNA, 120 bp, Artificial Sequence
  ENSG00000138741_42 (sequence is synthesized)
atatgttaccatatgttaagatagtaaagatacaaagtttctataatagatgtttctgatagttttatagtatggtccaggattccaagtgtgaaaagtttttgcttatagctatggaac

SEQ ID NO: 348530 - DNA, 120 bp, Artificial Sequence
  ENSG00000138741_43 (sequence is synthesized)
tgaatattttgtaattttcttctttgcggttggaaaaaatgttgaatgaaaaagtggcagattcagctggggacattcagcctaagattcttggaatctgaagatcagagaagtatgaag

SEQ ID NO: 348531 - DNA, 120 bp, Artificial Sequence
  ENSG00000138741_44 (sequence is synthesized)
ataagcctcatggtatccacaccatgtggataaaaagctgacttttttttttttttttttttgtccatgcccctcacaactgtagagctcttaacaggcattttttctttatttactatg

SEQ ID NO: 348532 - DNA, 120 bp, Artificial Sequence
  ENSG00000138741_45 (sequence is synthesized)
tacaaactggtatagttttaatatttcatctttttccttattcatcatttcaaggtgttgtttcagaagaaggtgtgatgacaaggtgtagtgagtgtggttgatgtttttgatgccctg

SEQ ID NO: 348533 - DNA, 120 bp, Artificial Sequence
  ENSG00000138741_46 (sequence is synthesized)
cccagatgccctctactggaccagtgcacctgtctcccagattctcctgtgcagttcctagccaatcacttcccctggagaattgccctcagctaaaaagaagaagccttgctcgggatg

SEQ ID NO: 348534 - DNA, 120 bp, Artificial Sequence
  ENSG00000138741_47 (sequence is synthesized)
tgatgcctccgcctccccatggccagtgactgatgggtgggggcacaaagggctggccccttgtctcaagatggggccaactattcagtgcagttcatgctccagagctcctgaaaggat

SEQ ID NO: 348535 - DNA, 120 bp, Artificial Sequence
  ENSG00000138741_48 (sequence is synthesized)
tagggtgatgccagactcaagctgagatgaaatcctggtttagattcttcctctgccttttccagtttccttccttccctttctccagagagcatccccttaatgagtcaccacatccaa

SEQ ID NO: 348536 - DNA, 120 bp, Artificial Sequence
  ENSG00000138741_49 (sequence is synthesized)
atcttattaggttttgcttttagggaactcacactaagccataaggtattaatgtggtagcatacggttgagatgaggattagtcgaggggattgctgtcagaattagtccttcacttga

SEQ ID NO: 348537 - DNA, 120 bp, Artificial Sequence
  ENSG00000138741_50 (sequence is synthesized)
ggataaagatagctctgggtcagcaagtcttttccctagtcacttttaacaggtacctttgggaaaacaaacctcaaagaagttgttggggcaactcagagaagggagcatttaaacagg

SEQ ID NO: 348538 - DNA, 120 bp, Artificial Sequence
  ENSG00000138741_51 (sequence is synthesized)
accaaaaacaactttatagaaaaaaacattaattaaaggattgtcaaagccccaggactcttttttccttaggacatctctcattttttacctctttgctattcttatttttttctcatt

SEQ ID NO: 348539 - DNA, 120 bp, Artificial Sequence
  ENSG00000138741_52 (sequence is synthesized)
tacagataaagaaaagaaagcaacactcaaagtgcttcttagacttattgttcgaaaagttgggtactttgtaagtgcctgctgtattgaatttacagagcacccatgactttatggaag

SEQ ID NO: 348540 - DNA, 120 bp, Artificial Sequence
  ENSG00000138741_53 (sequence is synthesized)
tcacaatctgttgaaaagtttgggttcttagacttgaaataatgagaaaactttgaaaaatggtacagagtatctttacagagtttatgcacaataaaaacaaaaatgatatgttgtgat

SEQ ID NO: 348541 - DNA, 120 bp, Artificial Sequence
  ENSG00000138741_54 (sequence is synthesized)
tattaaaagcaaatttggtacaatttaggataactatcttacccaatatgtcaatatatttatatttcaaatgtgcaagccaagtgaaagcagcttttgtaaatgggaagataaattgtc

SEQ ID NO: 348542 - DNA, 120 bp, Artificial Sequence
  ENSG00000138741_55 (sequence is synthesized)
tgatggacaatgtctaaagagaactgaagccacactaatgactgtggtatgggacaaaccatttaacttctctggtcttcataaatggttcaggcaaacagggttatgctacatcagggg

SEQ ID NO: 348543 - DNA, 120 bp, Artificial Sequence
  ENSG00000138741_56 (sequence is synthesized)
ttcctagtccctggagctcatagaggtgttttaggaggttaatgtcatcatccaaggtggtaatctttctttccatgtctttttaaattttttaaataaagtttttaaaatacattttta

SEQ ID NO: 348544 - DNA, 84 bp, Artificial Sequence
  ENSG00000138741_57 (sequence is synthesized)
ttttaaattttttaaataaagtttttaaaatacatttttagaggcgggtctcactatgttgtccaggctagtctttaactttat

SEQ ID NO: 348545 - DNA, 120 bp, Artificial Sequence
  ENSG00000138741_58 (sequence is synthesized)
aatcgcagcactttgggacgttgaagcaggtcgatggcttcagttcaggagttcgagaccagcagggcaacatggtgaaactgtctctacaaaaaatacaaaaaaaattagccgggcatg

SEQ ID NO: 348546 - DNA, 85 bp, Artificial Sequence
  ENSG00000138741_59 (sequence is synthesized)
aaattagccgggcatggtggcatgtgtctgtggttccagttactcaggaggctggggtgagaggatagttcacgccactgcactc

SEQ ID NO: 348547 - DNA, 120 bp, Artificial Sequence
  ENSG00000138741_60 (sequence is synthesized)
aaaaaaaaaaaaaaaaaaatctaaaatgggtatttataactttgttcagtttaaaaaagagtttgagaatttctaaatttataccatgtgttaggggaaactaatgtttttactcatgac

SEQ ID NO: 348548 - DNA, 120 bp, Artificial Sequence
  ENSG00000138741_61 (sequence is synthesized)
tttactcatgactcagtcactcagctgaccaccactagcgtgttgatggttttaactttaatgcagtttaaattgcttttatttttagccataagttgtttaacttatactcataatggt

SEQ ID NO: 348549 - DNA, 120 bp, Artificial Sequence
  ENSG00000138741_62 (sequence is synthesized)
tgctttagcaccataacataaggttataaattactgaggtgcatggtaattctgcaaatttgtctctaaagtggtctttgtcacatctgagaggcagccatcttctgttgagttttataa

SEQ ID NO: 348550 - DNA, 120 bp, Artificial Sequence
  ENSG00000138741_63 (sequence is synthesized)
agaccaccaagatgtctctgataccctaaaacatctttaaaaagaggacacacagtggtaatttaacttgacattttctttattgtgaataaaaattccttaccctgctaattaattatt

SEQ ID NO: 348551 - DNA, 120 bp, Artificial Sequence
  ENSG00000138741_64 (sequence is synthesized)
tgaggaatacttaaaattagtaggttgaaatctttactaatcatttagaaacaaaacatagtatgtactttaaaaataataaattgcatttttagatgcaaaatcaaagaattccaaata

SEQ ID NO: 348552 - DNA, 120 bp, Artificial Sequence
  ENSG00000138741_65 (sequence is synthesized)
tcatattatgcaaactttttgtattgttttgatgctatatcatagcctcatttcactgttttaaaataaatttgagcttcaaaataaacttttactttccttctacacaattaattgaac

SEQ ID NO: 348553 - DNA, 120 bp, Artificial Sequence
  ENSG00000138741_66 (sequence is synthesized)
agtggacatcacttgctaaatggaaagtaagcactgccagcattgtctgtctttggtgtttttttttttacctatttattagaaccatagtatttcttcattattaatttgtatgaacta

SEQ ID NO: 348554 - DNA, 120 bp, Artificial Sequence
  ENSG00000138741_67 (sequence is synthesized)
ttaactcttttctcctatatttttgttttcatttaaacattgttgtgacatattgaaatgtttatctttacttttcattttttttaagttagttttttgtttgttttttagagatggggc

SEQ ID NO: 348555 - DNA, 120 bp, Artificial Sequence
  ENSG00000138741_68 (sequence is synthesized)
tagagatggggccttgctattttgcccaggctggattgttgggctcaagcaatcttgagcctcagccttcaaatagctgagactacaggcatgtaacaccatatctgcttttttcctttg

SEQ ID NO: 348556 - DNA, 120 bp, Artificial Sequence
  ENSG00000138741_69 (sequence is synthesized)
tggtttcttctattccttttgagatcagtttccttctgttatgggctgaattgtgtcccctcaaaactcatgttaaagtcctcgccttcagtatctcagactataactatagttggagat

SEQ ID NO: 348557 - DNA, 120 bp, Artificial Sequence
  ENSG00000138741_70 (sequence is synthesized)
agggtctttaaagaggtaattaatttaaaatgagataatatgactggtgtgcttataaaaagacaagatgagacacagacagacatagagggaggaccacgtgaagacacggagaagatg

SEQ ID NO: 348558 - DNA, 120 bp, Artificial Sequence
  ENSG00000138741_71 (sequence is synthesized)
acgatctataagccaagaagagaggcctctgaagatcggttttattccctgctgacaccttgatctatgacttctagactccaagactgtgagaaaataaatttctgttgttgaaaagcc

SEQ ID NO: 348559 - DNA, 120 bp, Artificial Sequence
  ENSG00000138741_72 (sequence is synthesized)
cgtctctctgtggttcagtcacatttggggtaaaactggaaccgaagccctatagggtcccctgagggagagagtgggcatcgggcagccggggaaccgctttagtgataactttgactg

SEQ ID NO: 348560 - DNA, 120 bp, Artificial Sequence
  ENSG00000138741_73 (sequence is synthesized)
cggttcccaggcggtgcagggtcagcggctcgcgccccggcgcgcgggctctctttttctctttctttctttccctctctctctttctaaacgaaggagcggtcggcgcgctaatgcatg

SEQ ID NO: 348561 - DNA, 120 bp, Artificial Sequence
  ENSG00000138741_74 (sequence is synthesized)
aatttccaatcttggagacagcttttaatcagtgcgagacgcagagaagataaaaagagggtgatcggtttcacagggtccatggagggaagcccatccctgagacgcatgacagtgatg

SEQ ID NO: 348562 - DNA, 120 bp, Artificial Sequence
  ENSG00000138744_0 (sequence is synthesized)
acggcttacccgggctccgacagcggctgcaggtctccaagttgcggccgctggagcccgagccatgcggaccgcggaccgggaggcgcgcccggggcttccgtccctgctgctgctgct

SEQ ID NO: 348563 - DNA, 120 bp, Artificial Sequence
  ENSG00000138744_1 (sequence is synthesized)
gctggccggggccgggctgtcagccgcctcgcccccagcagcgccgcgcttcaacgtgagcctggactcggtccccgagctgcgctggctgcccgtgctgcggcactacgacttggactt

SEQ ID NO: 348564 - DNA, 120 bp, Artificial Sequence
  ENSG00000138744_2 (sequence is synthesized)
ggtgcgcgccgcgatggcgcaagtcatcggggacagagtccccaagtgggtgcacgtgttaatcggaaaagtggtcctggagctggagcgcttcctgccccagcccttcaccggcgagat

SEQ ID NO: 348565 - DNA, 120 bp, Artificial Sequence
  ENSG00000138744_3 (sequence is synthesized)
ccgcggcatgtgtgacttcatgaacctcagcctggcggactgccttctggtcaacctggcctacgagtcctccgtgttctgcaccagtattgtggctcaagactccagaggccacattta

SEQ ID NO: 348566 - DNA, 120 bp, Artificial Sequence
  ENSG00000138744_4 (sequence is synthesized)
ccatggtcggaatttggattatccttttgggaatgtcttacgcaagctgacagtggatgtgcaattcttaaagaatgggcagattgcattcacaggaactacttttattggctatgtagg

SEQ ID NO: 348567 - DNA, 120 bp, Artificial Sequence
  ENSG00000138744_5 (sequence is synthesized)
attatggactggccagagcccacacaagtttacagtttctggtgatgaacgagataaaggctggtggtgggagaatgctatcgctgccctgtttcggagacacattcccgtcagctggct

SEQ ID NO: 348568 - DNA, 120 bp, Artificial Sequence
  ENSG00000138744_6 (sequence is synthesized)
gatccgcgctaccctgagtgagtcggaaaacttcgaagcagctgttggcaagttggccaagactccccttattgctgatgtttattacattgttggtggcacgtccccccgggagggggt

SEQ ID NO: 348569 - DNA, 120 bp, Artificial Sequence
  ENSG00000138744_7 (sequence is synthesized)
gagcgtggttccgagttgagacaaattacgaccactggaagccagcacccaaggaagatgaccggagaacatctgccatcaaggcccttaatgctacaggacaagcaaacctcagcctgg

SEQ ID NO: 348570 - DNA, 120 bp, Artificial Sequence
  ENSG00000138744_8 (sequence is synthesized)
aggcacttttccagattttgtcggtggttccagtttataacaacttcacaatttatactacggtaatgagcgccggtagcccagacaagtacatgactaggatcagaaacccgagtagaa

SEQ ID NO: 348571 - DNA, 120 bp, Artificial Sequence
  ENSG00000138744_9 (sequence is synthesized)
agtaagtcagcagaagagcgagttcgcccgtgctgtgaaagatgattttttaaaaaatgaaattcttgaagagctgcaccttaaaaaataagacaaagtgaaagtattgtattatgttac

SEQ ID NO: 348572 - DNA, 120 bp, Artificial Sequence
  ENSG00000138744_10 (sequence is synthesized)
aaacaatgcaggctccttcctcatttaactttacaaccttgcgaagtgggtccaggagatttggagtttgtggtaaagccagtaatgggcattgtcctgcattcccttcccttcatggtt

SEQ ID NO: 348573 - DNA, 120 bp, Artificial Sequence
  ENSG00000138744_11 (sequence is synthesized)
tgcctcgatcctctctaagcttctatcctggcctgaataactcaaagataattggtctcagagatcaagccatatcctcaggccttatttccatcttctcatgattctgccatcatacct

SEQ ID NO: 348574 - DNA, 120 bp, Artificial Sequence
  ENSG00000138744_12 (sequence is synthesized)
ttgcttctccgctaatgaaatgagctggcaagacctctgttcattgtgaagtgcttctgaaagagcctaagaaaaaaggctcatctgaaagaaatggagaactctatttcgaaccaagcc

SEQ ID NO: 348575 - DNA, 120 bp, Artificial Sequence
  ENSG00000138744_13 (sequence is synthesized)
tgtttgaatgtgtgttagtctgatctttgatcatgtgtttccatgtaatgggagtctcgttttttataatgtttctaacgttttattgaaaaacctatggccctccttctttctcaatag

SEQ ID NO: 348576 - DNA, 120 bp, Artificial Sequence
  ENSG00000138744_14 (sequence is synthesized)
ctactttcttactgctttttgaaaataatatgcaaccaaattatttcttaatgtcacataattaagtaataaaatgtcaaaagaaatgttggcaaggagaataaaaaaatttccaagaaa

SEQ ID NO: 348577 - DNA, 83 bp, Artificial Sequence
  ENSG00000138744_15 (sequence is synthesized)
accaggcatgacggtgcacgcctgttatcacagctacttgggaagcagcggctggagaattgcttgaacctgggaagtcgagg

SEQ ID NO: 348578 - DNA, 120 bp, Artificial Sequence
  ENSG00000138744_16 (sequence is synthesized)
gttatcacagctacttgggaagcagcggctggagaattgcttgaacctgggaagtcgaggctgcaagtgagctgagatcatgccatggcagtctagcctgggcaacagagcgagactctg

SEQ ID NO: 348579 - DNA, 120 bp, Artificial Sequence
  ENSG00000138744_17 (sequence is synthesized)
tggcctgctaacttaagtgtgttatcagtgtaagacacaaaaaaatcacacccctggaaaaacaaagccagaagagaggtttgcatcaattatgcttataggaaggacggtcatttatta

SEQ ID NO: 348580 - DNA, 120 bp, Artificial Sequence
  ENSG00000138744_18 (sequence is synthesized)
tttattattcagtgtctacttaaagaggtcacccagttttccatagggaaatctcttttagagagtgatcaatcatccacttatgcagagtcagctctttcctctgctttcccatgccca

SEQ ID NO: 348581 - DNA, 120 bp, Artificial Sequence
  ENSG00000138744_19 (sequence is synthesized)
tcccaggtttaaatcttgattctatcaattactgtacttcctttgtgaacctgagaaattactcattccctaattttgcagactacagctcatggaggctcataactactttactgcgat

SEQ ID NO: 348582 - DNA, 120 bp, Artificial Sequence
  ENSG00000138744_20 (sequence is synthesized)
agttataaatgttaaatgaagtagtctatgtaaagttgtagccaaataataaatggtccttcattctgcaagtgtgattgacccacaccactttcttgtgtatgatctttaaaaaattat

SEQ ID NO: 348583 - DNA, 120 bp, Artificial Sequence
  ENSG00000138744_21 (sequence is synthesized)
acttagatcttttgtttatagcatggtccctttaaaactataatctagtgtgtgctgttgtcaactgtgtaaacttttagagagacagaattaatcaatgttcattgagtacgcaaagca

SEQ ID NO: 348584 - DNA, 120 bp, Artificial Sequence
  ENSG00000138744_22 (sequence is synthesized)
tgttttgctgtaaaacagaatacagagtgcaaaagccagattttggctgtaaggacaaggactatattccctttgttctttgcatttaggggttgattcacaaatactaaaaactcattt

SEQ ID NO: 348585 - DNA, 120 bp, Artificial Sequence
  ENSG00000138744_23 (sequence is synthesized)
actaactactcagtcatctgcttttacaaacactttttttcataaaaaattcaaacagtacagaaatatttaaagtaaaagtttctcctttccagtcccatttctttactttgccactat

SEQ ID NO: 348586 - DNA, 120 bp, Artificial Sequence
  ENSG00000138744_24 (sequence is synthesized)
taacaatttgatttctagctgaattactttaaaaatgattttaagtggtaacgataatataaatgcataataaattctcaaaggaaatctgctaaatattaagttattactgaatgaagg

SEQ ID NO: 348587 - DNA, 120 bp, Artificial Sequence
  ENSG00000138744_25 (sequence is synthesized)
ataatattatttattatttattcatgttttttctccattgttctataatgagctaatactcttaataaagagacaaaggaataaatgcaatgaaaataaattatttcagctgctctgaaa

SEQ ID NO: 348588 - DNA, 120 bp, Artificial Sequence
  ENSG00000138744_26 (sequence is synthesized)
acgccctaaggatgtagccccgctcgcagtgcacacgcagtcgcacgccgccgacctctgagcgggtcagacgcccttgtgctttttgtttctagggacagagtccccaagtgggtgcac

SEQ ID NO: 348589 - DNA, 90 bp, Artificial Sequence
  ENSG00000138744_27 (sequence is synthesized)
gttaatagtgaatatgaaaaactccgtgaaatcttctggtagatgaaaacgttagggtaaaagttttatttggttgaaatcatgtattaa

SEQ ID NO: 348590 - DNA, 81 bp, Artificial Sequence
  ENSG00000138744_28 (sequence is synthesized)
gcgccactgcactccagcctatgacattttctcaacttgcttttatataagttaaaatgtccatcttcaccaaagtttttc

SEQ ID NO: 348591 - DNA, 120 bp, Artificial Sequence
  ENSG00000138744_29 (sequence is synthesized)
aacttgcttttatataagttaaaatgtccatcttcaccaaagtttttctttatattaaaaagaaaaagtcatagttgtaatatatgttcattgtttaaaagaaaaaaagagaaagaatta

SEQ ID NO: 348592 - DNA, 120 bp, Artificial Sequence
  ENSG00000138744_30 (sequence is synthesized)
aaaacagggcggtgcctgcttgcctagaaacctccagcgcttcctctttgcctctctgggtaaatctgagctgcacatcgtaggcttcgagagggaaagcagattctccgattcaacact

SEQ ID NO: 348593 - DNA, 120 bp, Artificial Sequence
  ENSG00000138744_31 (sequence is synthesized)
aaactttccctctacgtgtagccccgggttttctcttccccaatccaggttctgcaccagtattgtggctcaagactccagaggccacatttaccatggtcggaatttggattatccttt

SEQ ID NO: 348594 - DNA, 120 bp, Artificial Sequence
  ENSG00000138744_32 (sequence is synthesized)
tataacaaattatttcccttggctgaattcccagaagtaggattactgagttaacagttatgaatgtttaaatggtttctgaaatggtttggtcaaaataaaattgttagaaattataaa

SEQ ID NO: 348595 - DNA, 120 bp, Artificial Sequence
  ENSG00000138750_0 (sequence is synthesized)
acttggtctcctgctttcgcgacatggccttcaattttggggctccctcgggcacctccggtaccgctgcagccaccgcggcccccgcgggtgggtttggaggatttgggacaacatcta

SEQ ID NO: 348596 - DNA, 120 bp, Artificial Sequence
  ENSG00000138750_1 (sequence is synthesized)
caactgcaggttctgcattcagcttttctgccccaactaacacaggcactactggactctttggtggtactcagaacaaaggttttggatttggtactggttttggcacaacaacgggaa

SEQ ID NO: 348597 - DNA, 120 bp, Artificial Sequence
  ENSG00000138750_2 (sequence is synthesized)
ctagtactggtttaggtactggtttgggaactggactgggatttggaggatttaatacacagcagcagcagcaaactacattaggtggtctcttcagtcagcctacacaagctcctaccc

SEQ ID NO: 348598 - DNA, 120 bp, Artificial Sequence
  ENSG00000138750_3 (sequence is synthesized)
agtccaaccagctgataaatactgcgagtgctctttctgctccaacgctgttgggagatgagagagatgctattttggcaaaatggaatcaactgcaggccttttggggaacaggaaaag

SEQ ID NO: 348599 - DNA, 120 bp, Artificial Sequence
  ENSG00000138750_4 (sequence is synthesized)
ggtatttcaacaataatattccgccagtggaattcacacaagaaaatcccttttgccgatttaaggcagtaggttatagttgcatgcccagtaataaagatgaagatgggctagtggttt

SEQ ID NO: 348600 - DNA, 120 bp, Artificial Sequence
  ENSG00000138750_5 (sequence is synthesized)
tagttttcaacaaaaaagaaacagagattcgaagccaacaacaacagttggtagaatcattgcataaagttttgggaggaaaccagacccttactgtaaatgtagagggcactaaaacat

SEQ ID NO: 348601 - DNA, 120 bp, Artificial Sequence
  ENSG00000138750_6 (sequence is synthesized)
tgccagatgatcagacagaagttgttatttatgttgttgagcgttcgccaaatggtacttcaagaagagttccagctacaacgctatatgcccattttgaacaagccaatataaaaacac

SEQ ID NO: 348602 - DNA, 120 bp, Artificial Sequence
  ENSG00000138750_7 (sequence is synthesized)
aattgcagcaacttggtgtaaccctttctatgactagaacagaactttctcctgcacagatcaaacagcttttacagaatcctcctgctggtgttgatcctattatctgggaacaggcca

SEQ ID NO: 348603 - DNA, 120 bp, Artificial Sequence
  ENSG00000138750_8 (sequence is synthesized)
aggtagataaccctgattctgaaaagttaattcctgtaccaatggtgggttttaaggaacttctccgaagactgaaggttcaagatcagatgactaagcagcatcaaaccagattagata

SEQ ID NO: 348604 - DNA, 120 bp, Artificial Sequence
  ENSG00000138750_9 (sequence is synthesized)
tcccatagaactttacaggtcctaatcaaacaggaaattcaaaggaagagtggttatgccattcaggctgatgaagagcagttgcgagttcagctggatacgattcagggtgaactaaat

SEQ ID NO: 348605 - DNA, 120 bp, Artificial Sequence
  ENSG00000138750_10 (sequence is synthesized)
gcacctactcagttcaagggccgactaaatgaattgatgtctcaaatcaggatgcagaatcattttggagcagtcagatctgaagaaaggtattacatagatgcagatctgttacgagaa

SEQ ID NO: 348606 - DNA, 120 bp, Artificial Sequence
  ENSG00000138750_11 (sequence is synthesized)
atcaagcagcatttgaaacaacaacaggaaggccttagccatttgattagcatcattaaagacgatctagaagatataaagctggtcgaacatggattgaatgaaaccatccacatcaga

SEQ ID NO: 348607 - DNA, 120 bp, Artificial Sequence
  ENSG00000138750_12 (sequence is synthesized)
ggtggtgtctttagttgacagttcacaaacttgtgtaaaggtttgtgaaatgcatcttcttactgcatcagaccttccttaagaatgaaaccgaccacatggagggaaaaagaaaacaat

SEQ ID NO: 348608 - DNA, 120 bp, Artificial Sequence
  ENSG00000138750_13 (sequence is synthesized)
tctttcttggattggttttttgagaagtttactgacaaattactgttcatcaaatctgaaatagtcacctcacagctcttcaaagaaaacctttgaaagatttatatctaaaagctgtat

SEQ ID NO: 348609 - DNA, 120 bp, Artificial Sequence
  ENSG00000138750_14 (sequence is synthesized)
ttactttaaaagaagtgcataattaccaaaattgtatgtactattgtacatttttacaacagcattttcttaaacataatctgtgtttaatgattattgtccattgagcctgtactctgc

SEQ ID NO: 348610 - DNA, 120 bp, Artificial Sequence
  ENSG00000138750_15 (sequence is synthesized)
tttccataccaagtaaatatgaaataatctactttgcacataacagaacaaactataattacttggctgttggagatttgtacttgagtataaatgtacaccagtttttgtatttgtgaa

SEQ ID NO: 348611 - DNA, 120 bp, Artificial Sequence
  ENSG00000138750_16 (sequence is synthesized)
ctcatctgtgggaggagtaaagaaaatccaaaagcatttaatgttttgtttttgttctataaagatatgaaaatgtatttttatattattttacttatttggaatttacagagcacacct

SEQ ID NO: 348612 - DNA, 120 bp, Artificial Sequence
  ENSG00000138750_17 (sequence is synthesized)
aagcaattaggatataacaaaactacttaaccatttttgcaaccattttgttttttaagcctttttatttctaaaaagatgaaaacttataaataaattcttaatttgtaattactttta

SEQ ID NO: 348613 - DNA, 120 bp, Artificial Sequence
  ENSG00000138750_18 (sequence is synthesized)
agtaacctacttggtctcctgctttcgcgacatggccttcaattttggggctccctcgggcacctccggtaccgctgcagccaccgcggcccccgcgggatttggtgggcttgagactgc

SEQ ID NO: 348614 - DNA, 120 bp, Artificial Sequence
  ENSG00000138750_19 (sequence is synthesized)
caactccaccgccagtgggtttaattttgggggtttcggattaactgctaatcctgcagtgaactttaatattgggaatttcggtgtttctactacctcggcgactccgttcaattttgg

SEQ ID NO: 348615 - DNA, 120 bp, Artificial Sequence
  ENSG00000138750_20 (sequence is synthesized)
gaaagttgatgtaaaattacatgagtgttactaaaaccttcacttcttgtattttgtagtaataggcttaaggtctgaaaattgttcactgcgtttcttcaggttaattcctgtaccaat

SEQ ID NO: 348616 - DNA, 120 bp, Artificial Sequence
  ENSG00000138750_21 (sequence is synthesized)
aaagttatgtaatcttcaagcaggaattttgtatacttgtgtttcttatctccaattagaacttcctttctaaagtaaactcagtcatggttcttttggctagtattagtgtttcgaata

SEQ ID NO: 348617 - DNA, 120 bp, Artificial Sequence
  ENSG00000138750_22 (sequence is synthesized)
taatgtacagagagagaaatagaaatttttaatagatggttttgaaaccatcctttcagaagaaaacattgtcttttacaagtcttcgtcggcagttgtaatttgactcagtcttaactt

SEQ ID NO: 348618 - DNA, 120 bp, Artificial Sequence
  ENSG00000138750_23 (sequence is synthesized)
ggagactttagaggcattggaaaagggcgggcggcggcagagtgggccgaggcggcacccgaggaggccacgggggtactcggggtcccactagaagctcgcttgccgcgcgctttttga

SEQ ID NO: 348619 - DNA, 120 bp, Artificial Sequence
  ENSG00000138750_24 (sequence is synthesized)
agagcaagaccctgtctcaaaaaaaacaattaagtctatatcattgtatttatatgataacttttgcctagttaaaatggacagaaacataattcaaatcctgaactgttgaaccctact

SEQ ID NO: 348620 - DNA, 120 bp, Artificial Sequence
  ENSG00000138750_25 (sequence is synthesized)
actgttgaaccctactgttgtttgattttcagctgatttctttcagtaactaattgtactactactacttgcataactaaaaagagatgattctgttgttattggtggtttttatttgta

SEQ ID NO: 348621 - DNA, 120 bp, Artificial Sequence
  ENSG00000138750_26 (sequence is synthesized)
gagaaggggagcgcgctgcgcgtcgcaggagtaacctacttggtctcctgctttcgcgacatggccttcaattttggggctccctcgggcacctccggtaccgctgcagccaccgcggcc

SEQ ID NO: 348622 - DNA, 120 bp, Artificial Sequence
  ENSG00000138750_27 (sequence is synthesized)
cccgcggatctgctattactaaaacatttttgatgttgtggagcatgatgagaaactgactagtgtttctattgcgtagccaattcagattatatcatagttattctatggaagtgaaga

SEQ ID NO: 348623 - DNA, 120 bp, Artificial Sequence
  ENSG00000138750_28 (sequence is synthesized)
attgcacaatacaagaggaaactcatggatctttcccatagaactttacaggtagtaatttggattttcccccccagtgtttataagactatgtgtgtgaaataatgtactaaatataga

SEQ ID NO: 348624 - DNA, 120 bp, Artificial Sequence
  ENSG00000138750_29 (sequence is synthesized)
gcggagactttagaggcattggaaaagggcgggcggcggcagagtgggccgaggcggcacccgaggaggccacgggggtactcggggtcccactagaagctcgcttgccgcgcgtgggtt

SEQ ID NO: 348625 - DNA, 120 bp, Artificial Sequence
  ENSG00000138750_30 (sequence is synthesized)
agaggtgttggttggttattaatgctaataaaattagtatcatcttgtcatatatctacttatttgggaaatagttttgaatatttgtattcatttagttttttattatatagctaatat

SEQ ID NO: 348626 - DNA, 120 bp, Artificial Sequence
  ENSG00000138750_31 (sequence is synthesized)
gacatggccttcaattttggggctccctcgggcacctccggtaccgctgcagccaccgcggcccccgcgggctttttgataccacattggtaatcagctgaagactgacaataagttaca

SEQ ID NO: 348627 - DNA, 120 bp, Artificial Sequence
  ENSG00000138750_32 (sequence is synthesized)
tcttgtattttctatattgcaatattgatgaatctgtgttgtataccagaaataaatgagattaaaggaagattccaaaaaatctgcaatataattcgacactaatggttcaaacatttg

SEQ ID NO: 348628 - DNA, 120 bp, Artificial Sequence
  ENSG00000138755_0 (sequence is synthesized)
aaagaatttctcaggctcaaaatccaatacaggagtgacttggaactccattctatcactatgaagaaaagtggtgttcttttcctcttgggcatcatcttgctggttctgattggagtg

SEQ ID NO: 348629 - DNA, 120 bp, Artificial Sequence
  ENSG00000138755_1 (sequence is synthesized)
caaggaaccccagtagtgagaaagggtcgctgttcctgcatcagcaccaaccaagggactatccacctacaatccttgaaagaccttaaacaatttgccccaagcccttcctgcgagaaa

SEQ ID NO: 348630 - DNA, 120 bp, Artificial Sequence
  ENSG00000138755_2 (sequence is synthesized)
attgaaatcattgctacactgaagaatggagttcaaacatgtctaaacccagattcagcagatgtgaaggaactgattaaaaagtgggagaaacaggtcagccaaaagaaaaagcaaaag

SEQ ID NO: 348631 - DNA, 120 bp, Artificial Sequence
  ENSG00000138755_3 (sequence is synthesized)
aatgggaaaaaacatcaaaaaaagaaagttctgaaagttcgaaaatctcaacgttctcgtcaaaagaagactacataagagaccacttcaccaataagtattctgtgttaaaaatgttct

SEQ ID NO: 348632 - DNA, 120 bp, Artificial Sequence
  ENSG00000138755_4 (sequence is synthesized)
attttaattataccgctatcattccaaaggaggatggcatataatacaaaggcttattaatttgactagaaaatttaaaacattactctgaaattgtaactaaagttagaaagttgattt

SEQ ID NO: 348633 - DNA, 120 bp, Artificial Sequence
  ENSG00000138755_5 (sequence is synthesized)
taagaatccaaacgttaagaattgttaaaggctatgattgtctttgttcttctaccacccaccagttgaatttcatcatgcttaaggccatgattttagcaatacccatgtctacacaga

SEQ ID NO: 348634 - DNA, 120 bp, Artificial Sequence
  ENSG00000138755_6 (sequence is synthesized)
tgttcacccaaccacatcccactcacaacagctgcctggaagagcagccctaggcttccacgtactgcagcctccagagagtatctgaggcacatgtcagcaagtcctaagcctgttagc

SEQ ID NO: 348635 - DNA, 120 bp, Artificial Sequence
  ENSG00000138755_7 (sequence is synthesized)
atgctggtgagccaagcagtttgaaattgagctggacctcaccaagctgctgtggccatcaacctctgtatttgaatcagcctacaggcctcacacacaatgtgtctgagagattcatgc

SEQ ID NO: 348636 - DNA, 120 bp, Artificial Sequence
  ENSG00000138755_8 (sequence is synthesized)
tgattgttattgggtatcaccactggagatcaccagtgtgtggctttcagagcctcctttctggctttggaagccatgtgattccatcttgcccgctcaggctgaccactttatttcttt

SEQ ID NO: 348637 - DNA, 120 bp, Artificial Sequence
  ENSG00000138755_9 (sequence is synthesized)
ttgttcccctttgcttcattcaagtcagctcttctccatcctaccacaatgcagtgcctttcttctctccagtgcacctgtcatatgctctgatttatctgagtcaactcctttctcatc

SEQ ID NO: 348638 - DNA, 120 bp, Artificial Sequence
  ENSG00000138755_10 (sequence is synthesized)
ttgtccccaacaccccacagaagtgctttcttctcccaattcatcctcactcagtccagcttagttcaagtcctgcctcttaaataaacctttttggacacacaaattatcttaaaactc

SEQ ID NO: 348639 - DNA, 120 bp, Artificial Sequence
  ENSG00000138755_11 (sequence is synthesized)
tgtttcacttggttcagtaccacatgggtgaacactcaatggttaactaattcttgggtgtttatcctatctctccaaccagattgtcagctccttgagggcaagagccacagtatattt

SEQ ID NO: 348640 - DNA, 120 bp, Artificial Sequence
  ENSG00000138755_12 (sequence is synthesized)
ccctgtttcttccacagtgcctaataatactgtggaactaggttttaataattttttaattgatgttgttatgggcaggatggcaaccagaccattgtctcagagcaggtgctggctctt

SEQ ID NO: 348641 - DNA, 120 bp, Artificial Sequence
  ENSG00000138755_13 (sequence is synthesized)
tcctggctactccatgttggctagcctctggtaacctcttacttattatcttcaggacactcactacagggaccagggatgatgcaacatccttgtctttttatgacaggatgtttgctc

SEQ ID NO: 348642 - DNA, 120 bp, Artificial Sequence
  ENSG00000138755_14 (sequence is synthesized)
agcttctccaacaataagaagcacgtggtaaaacacttgcggatattctggactgtttttaaaaaatatacagtttaccgaaaatcatataatcttacaatgaaaaggactttatagatc

SEQ ID NO: 348643 - DNA, 120 bp, Artificial Sequence
  ENSG00000138755_15 (sequence is synthesized)
agccagtgaccaaccttttcccaaccatacaaaaattccttttcccgaaggaaaagggctttctcaataagcctcagctttctaagatctaacaagatagccaccgagatccttatcgaa

SEQ ID NO: 348644 - DNA, 120 bp, Artificial Sequence
  ENSG00000138755_16 (sequence is synthesized)
actcattttaggcaaatatgagttttattgtccgtttacttgtttcagagtttgtattgtgattatcaattaccacaccatctcccatgaagaaagggaacggtgaagtactaagcgcta

SEQ ID NO: 348645 - DNA, 120 bp, Artificial Sequence
  ENSG00000138755_17 (sequence is synthesized)
gaggaagcagccaagtcggttagtggaagcatgattggtgcccagttagcctctgcaggatgtggaaacctccttccaggggaggttcagtgaattgtgtaggagaggttgtctgtggcc

SEQ ID NO: 348646 - DNA, 120 bp, Artificial Sequence
  ENSG00000138755_18 (sequence is synthesized)
agaatttaaacctatactcactttcccaaattgaatcactgctcacactgctgatgatttagagtgctgtccggtggagatcccacccgaacgtcttatctaatcatgaaactccctagt

SEQ ID NO: 348647 - DNA, 120 bp, Artificial Sequence
  ENSG00000138755_19 (sequence is synthesized)
tccttcatgtaacttccctgaaaaatctaagtgtttcataaatttgagagtctgtgacccacttaccttgcatctcacaggtagacagtatataactaacaaccaaagactacatattgt

SEQ ID NO: 348648 - DNA, 120 bp, Artificial Sequence
  ENSG00000138755_20 (sequence is synthesized)
cactgacacacacgttataatcatttatcatatatatacatacatgcatacactctcaaagcaaataatttttcacttcaaaacagtattgacttgtataccttgtaatttgaaatattt

SEQ ID NO: 348649 - DNA, 120 bp, Artificial Sequence
  ENSG00000138755_21 (sequence is synthesized)
tctttgttaaaatagaatggtatcaataaatagaccattaatcagaaaacagatcttgattttttttctcttgaatgtacccttcaactgttgaatgtttaatagtaaatcttatatgtc

SEQ ID NO: 348650 - DNA, 120 bp, Artificial Sequence
  ENSG00000138755_22 (sequence is synthesized)
cttatttactttttagctttctctcaaataaagtgtaacactagttgagataacacatgaaagctctttaaagggtcgatcgggaacaggaaaaaaaacctatggaaaatatgacaacac

SEQ ID NO: 348651 - DNA, 80 bp, Artificial Sequence
  ENSG00000138756_0 (sequence is synthesized)
cggggcccaggctgtgcgcttggggagcgcggaatgtgaggcttggcgggccgcagcacgctcggacgggccaggggcgg

SEQ ID NO: 348652 - DNA, 120 bp, Artificial Sequence
  ENSG00000138756_1 (sequence is synthesized)
cttgcccttgcacgctccctgcgccctccagctcgccggcgggaccatgaagaagttctctcggatgcccaagtcggagggcggcagcggcggcggagcggcgggtggcggggctggcgg

SEQ ID NO: 348653 - DNA, 120 bp, Artificial Sequence
  ENSG00000138756_2 (sequence is synthesized)
ggccggggccggggccggctgcggctccggcggctcgtccgtgggggtccgggtgttcgcggtcggccgccaccaggtcaccctggaagagtcgctggccgaaggtggattctccacagt

SEQ ID NO: 348654 - DNA, 120 bp, Artificial Sequence
  ENSG00000138756_3 (sequence is synthesized)
tttcctcgtgcgtactcacggtggaatccgatgtgcattgaagcgaatgtatgtcaataacatgccagacctcaatgtttgtaaaagggaaattacaattatgaaagagctatctggtca

SEQ ID NO: 348655 - DNA, 120 bp, Artificial Sequence
  ENSG00000138756_4 (sequence is synthesized)
caaaaatattgtgggctatttggactgtgctgttaattcaattagtgataatgtatgggaagtccttatcttaatggaatattgtcgagctggacaggtagtgaatcaaatgaataagaa

SEQ ID NO: 348656 - DNA, 120 bp, Artificial Sequence
  ENSG00000138756_5 (sequence is synthesized)
gctacagacgggttttacagaaccagaagtgttacagatattctgtgatacctgtgaagctgttgcaaggttgcatcagtgtaagactccaataattcaccgggatctgaaggtagaaaa

SEQ ID NO: 348657 - DNA, 120 bp, Artificial Sequence
  ENSG00000138756_6 (sequence is synthesized)
tattttgttgaatgatggtgggaactatgtactttgtgactttggcagtgccactaataaatttcttaatcctcaaaaagatggagttaatgtagtagaagaagaaattaaaaagtatac

SEQ ID NO: 348658 - DNA, 120 bp, Artificial Sequence
  ENSG00000138756_7 (sequence is synthesized)
aactctgtcatacagagcccctgaaatgatcaacctttatggagggaaacccatcaccaccaaggctgatatctgggcactgggatgtctactctataaactttgtttcttcactcttcc

SEQ ID NO: 348659 - DNA, 120 bp, Artificial Sequence
  ENSG00000138756_8 (sequence is synthesized)
ttttggtgagagtcaggttgctatctgtgatggcaacttcaccatcccagacaattctcgttactcccgtaacatacattgcttaataaggttcatgcttgaaccagatccggaacatag

SEQ ID NO: 348660 - DNA, 120 bp, Artificial Sequence
  ENSG00000138756_9 (sequence is synthesized)
acctgatatatttcaagtgtcatattttgcatttaaatttgccaaaaaggattgtccagtctccaacatcaataattcttctattccttcagctcttcctgaaccgatgactgctagtga

SEQ ID NO: 348661 - DNA, 120 bp, Artificial Sequence
  ENSG00000138756_10 (sequence is synthesized)
agcagctgctaggaaaagccaaataaaagccagaataacagataccattggaccaacagaaacctcaattgcaccaagacaaagaccaaaggccaactctgctactactgccactcccag

SEQ ID NO: 348662 - DNA, 120 bp, Artificial Sequence
  ENSG00000138756_11 (sequence is synthesized)
tgtgctgaccattcaaagttcagcaacacctgttaaagtccttgctcctggtgaattcggtaaccatagaccaaaaggggcactaagacctggaaatggccctgaaattttattgggtca

SEQ ID NO: 348663 - DNA, 120 bp, Artificial Sequence
  ENSG00000138756_12 (sequence is synthesized)
gggacctcctcagcagccgccacagcagcatagagtactccagcaactacagcagggagattggagattacagcaactccatttacagcatcgtcatcctcaccagcagcagcagcagca

SEQ ID NO: 348664 - DNA, 120 bp, Artificial Sequence
  ENSG00000138756_13 (sequence is synthesized)
cagcagcagcagcagcagcagcagcaccaccaccaccaccaccaccacctacttcaagatgcttatatgcagcagtatcaacatgcaacacagcagcaacagatgcttcaacaacaattt

SEQ ID NO: 348665 - DNA, 120 bp, Artificial Sequence
  ENSG00000138756_14 (sequence is synthesized)
acatgcaacacagcagcaacagatgcttcaacaacaatttttaatgcattcggtatatcaaccacaaccttctgcatcacagtatcctacaatgatgccgcagtatcagcaggctttctt

SEQ ID NO: 348666 - DNA, 120 bp, Artificial Sequence
  ENSG00000138756_15 (sequence is synthesized)
agccttagtttcctacacttcatcacttccagctcaggttggaaccataatggactcctcctatagtgccaataggtcagttgctgataaagaggccattgcaaatttcacaaatcagaa

SEQ ID NO: 348667 - DNA, 120 bp, Artificial Sequence
  ENSG00000138756_16 (sequence is synthesized)
gaacatcagcaatccacctgatatgtcagggtggaatccttttggagaggataatttctctaagttaacagaagaggaactattggacagagaatttgaccttctaagatcaaataggct

SEQ ID NO: 348668 - DNA, 120 bp, Artificial Sequence
  ENSG00000138756_17 (sequence is synthesized)
cgaggagagagcatcctcagataagaatgtagactcactttctgctccacataaccatcctccagaagatccttttggttctgttcctttcatttctcattcaggttctcctgaaaagaa

SEQ ID NO: 348669 - DNA, 120 bp, Artificial Sequence
  ENSG00000138756_18 (sequence is synthesized)
agctgaacattcatctataaatcaagaaaatggcactgcaaaccctatcaagaacggtaaaacaagtccagcatctaaagatcagcggactggaaagaaaacctcagtacagggtcaagt

SEQ ID NO: 348670 - DNA, 120 bp, Artificial Sequence
  ENSG00000138756_19 (sequence is synthesized)
gcaaaaggggaatgatgaatctgaaagtgattttgaatcagatcccccttctcctaagagcagtgaagaggaagagcaagatgatgaagaagttcttcagggggaacaaggagattttaa

SEQ ID NO: 348671 - DNA, 120 bp, Artificial Sequence
  ENSG00000138756_20 (sequence is synthesized)
tgatgatgatactgaaccagaaaatctgggtcataggcctctcctcatggattctgaagatgaggaagaagaggagaaacatagctctgattctgattatgagcaggctaaagcaaagta

SEQ ID NO: 348672 - DNA, 120 bp, Artificial Sequence
  ENSG00000138756_21 (sequence is synthesized)
cagtgacatgagctctgtctacagagacagatctggcagtggaccaacccaagatcttaatacaatactcctcacctcagcccaattatcctctgatgttgcagtggagactcccaaaca

SEQ ID NO: 348673 - DNA, 120 bp, Artificial Sequence
  ENSG00000138756_22 (sequence is synthesized)
ggagtttgatgtatttggcgctgtccccttctttgcagtgcgtgctcaacagccccagcaagaaaagaatgaaaagaacctccctcaacacaggtttcctgctgcaggactggagcagga

SEQ ID NO: 348674 - DNA, 120 bp, Artificial Sequence
  ENSG00000138756_23 (sequence is synthesized)
ggaatttgatgtattcacaaaggcgccttttagcaagaaggtgaatgtacaagaatgccatgcagtggggcctgaggcacatactatccctggttatcccaaaagtgtagatgtatttgg

SEQ ID NO: 348675 - DNA, 120 bp, Artificial Sequence
  ENSG00000138756_24 (sequence is synthesized)
ctccactccatttcagcccttcctcacatcaacaagtaaaagtgaaagcaatgaggacctttttgggcttgtgccctttgatgaaataacggggagccagcagcaaaaagtcaaacagcg

SEQ ID NO: 348676 - DNA, 120 bp, Artificial Sequence
  ENSG00000138756_25 (sequence is synthesized)
cagcttacagaaactgtcctctcgccaaaggcgcacaaagcaggatatgtccaaaagtaatgggaagcggcatcatggcacgccaactagcacaaagaagactttgaagcctacctatcg

SEQ ID NO: 348677 - DNA, 120 bp, Artificial Sequence
  ENSG00000138756_26 (sequence is synthesized)
cactccagagagggctcgcaggcacaaaaaagtgggccgccgagactctcaaagtagcaatgaatttttaaccatctcagactccaaggagaacattagtgttgcactgactgatgggaa

SEQ ID NO: 348678 - DNA, 120 bp, Artificial Sequence
  ENSG00000138756_27 (sequence is synthesized)
agatagggggaatgtcttacaacctgaggagagcctgttggaccccttcggtgccaagcccttccattctccagacctgtcatggcaccctccacatcagggcctgagcgacatccgtgc

SEQ ID NO: 348679 - DNA, 120 bp, Artificial Sequence
  ENSG00000138756_28 (sequence is synthesized)
tgatcacaatactgtcctgccagggcggccaagacaaaattcactacatgggtcattccatagtgcagatgtattgaaaatggatgattttggtgccgtgccctttacagaacttgtggt

SEQ ID NO: 348680 - DNA, 120 bp, Artificial Sequence
  ENSG00000138756_29 (sequence is synthesized)
gcaaagcatcactccacatcagtcccaacagtcccaaccagtcgaattagacccatttggtgctgctccatttccttctaaacagtagatacttctgatggattctcggcattaactcct

SEQ ID NO: 348681 - DNA, 120 bp, Artificial Sequence
  ENSG00000138756_30 (sequence is synthesized)
gtttcaaaaaagtgtgaacagttttatgaatttgaaagaaaatttggtagctctttatagcattcattcttaaagatcagtcagaataggtgatttctaaataaaccaaatagaagaatg

SEQ ID NO: 348682 - DNA, 120 bp, Artificial Sequence
  ENSG00000138756_31 (sequence is synthesized)
gggagctaaattgcaagctctaactaagggtttctgctactgacatcacaacacagaaatgcaagtgtggtacttccagtgaaagcacatggcacctttctaggtgtgtagccactgaga

SEQ ID NO: 348683 - DNA, 120 bp, Artificial Sequence
  ENSG00000138756_32 (sequence is synthesized)
agggacagtgaaactgttatttttgatatcagaatgtcatttttatgtgcatatccctaaaattagggttatttctacatacactagttacacttgtgaattttttttaaggtctctttt

SEQ ID NO: 348684 - DNA, 120 bp, Artificial Sequence
  ENSG00000138756_33 (sequence is synthesized)
aatttccagacagttaaaaacaatctagttatcttaaagcattagaaagttattatctggagagtgcagagatttcagtccatacacctttctccacaaagcagagccagaagtaactga

SEQ ID NO: 348685 - DNA, 120 bp, Artificial Sequence
  ENSG00000138756_34 (sequence is synthesized)
ctattgtgcctaaaactctgtttcatttttaaaaacaagtgccattaaaatggaatatctaatgataagcatatgaaataatgtgtaattagctcaatttaactattccacaacttacat

SEQ ID NO: 348686 - DNA, 120 bp, Artificial Sequence
  ENSG00000138756_35 (sequence is synthesized)
attccaaaacaatgttatacatgataaatatatataatttttgtcagttaaaacaaattaaaaaaatggactatcgtcgcacagaagcctagaacaaaaatatgaagagaaatatctgac

SEQ ID NO: 348687 - DNA, 120 bp, Artificial Sequence
  ENSG00000138756_36 (sequence is synthesized)
aacactttatgcatggcttcttgccccaaacttttattgtgatggccctaataaagcagattattggaaaaattggaggacaagggttgtataaaaattttattttatgaagaaaatatg

SEQ ID NO: 348688 - DNA, 120 bp, Artificial Sequence
  ENSG00000138756_37 (sequence is synthesized)
tagcggaaactgaattttcaagacatttacaatgtgaaatcatgttgcatttaacaatgtactttattagcaacttcaccaaatattccccaagtcataagcaacaattatttttattag

SEQ ID NO: 348689 - DNA, 120 bp, Artificial Sequence
  ENSG00000138756_38 (sequence is synthesized)
gttttggggggtggagtagttttaataaagtgcacagaatggtgacacccacaaagccttatataaaggcaggattcatgcatcctgctgcaagtacctctgcactaatataccagatcc

SEQ ID NO: 348690 - DNA, 120 bp, Artificial Sequence
  ENSG00000138756_39 (sequence is synthesized)
taaaatgcatataaggtggactagcatcttaattctgctagttgattgtgtctttactgaaaagaacccagctaccaatttgcctttttttacaccacaaatcctaattagaaacttgag

SEQ ID NO: 348691 - DNA, 120 bp, Artificial Sequence
  ENSG00000138756_40 (sequence is synthesized)
gttttatagaaatcatttaatgatagagattacatatgtgaattaatgtgaatatagtatctgtgcttcctgtgtctatgactattttaagatataattgtgctgcgctatcagattaac

SEQ ID NO: 348692 - DNA, 120 bp, Artificial Sequence
  ENSG00000138756_41 (sequence is synthesized)
atttggaagtttctagaacagttaatgctatttacagaaaggagtagaaactcatcaactggcactctctttgatttttatattttaaattaactctcttcgatctcaaagtatatttta

SEQ ID NO: 348693 - DNA, 120 bp, Artificial Sequence
  ENSG00000138756_42 (sequence is synthesized)
cgagtaattttattaggaatctcttatagtgccccaatgggataagctatttgcctattttcacagttctgaacttggaaagaagcaaagtatatgtaactaaaccacatatttgtcttt

SEQ ID NO: 348694 - DNA, 120 bp, Artificial Sequence
  ENSG00000138756_43 (sequence is synthesized)
ttattgctttttcccttcttttatatgctaaatcaaatatagatttgtggatagggaagcaatatgtgaatcacaatgtagcagaggcagaccaagcattacattattatttagagctgg

SEQ ID NO: 348695 - DNA, 120 bp, Artificial Sequence
  ENSG00000138756_44 (sequence is synthesized)
actgcaccaattacttgtcctcgtgccaaaggcaaatatgtttgcacctttttttttttttctgattctcaggttgattaatactgctaatgcaaatgctcaagtagatgtttaaaaact

SEQ ID NO: 348696 - DNA, 120 bp, Artificial Sequence
  ENSG00000138756_45 (sequence is synthesized)
ttacaaaatagattcaagtgatactttcttttaaaagtgaagagttgatgattacacatagtaaattcatgaactacagtaggtttgtatcaaacaattttttttaatgaaaatctgttg

SEQ ID NO: 348697 - DNA, 120 bp, Artificial Sequence
  ENSG00000138756_46 (sequence is synthesized)
aggtgtacacaatatgcttcttgattgtattagtccttggtctctgctagacctcatgagtttcatcatttagaaaaggggtagaggatgaactaatgtctccttcagatgtaaacatga

SEQ ID NO: 348698 - DNA, 120 bp, Artificial Sequence
  ENSG00000138756_47 (sequence is synthesized)
aatacctagagttttacttgcttttcaatacactgaataattttaaatgattctgacactgatgtagaccctttgacttataaattctgaggaaacaactgacagcataaaatatttaca

SEQ ID NO: 348699 - DNA, 120 bp, Artificial Sequence
  ENSG00000138756_48 (sequence is synthesized)
ttcttataacacagcacagtgactttcttctttcaagattgtagctcagagaaaagatacaggattcaattgggggttcaataggatagaaatggagagattcctttgtgttgtagtaga

SEQ ID NO: 348700 - DNA, 120 bp, Artificial Sequence
  ENSG00000138756_49 (sequence is synthesized)
ggcattttcctaaggagtatagatttatactttgcattttcattcatcatcccccagaatcatggtcaaggtgtaggtcactccacacagctgatgctcaggttattcccttgtgagaat

SEQ ID NO: 348701 - DNA, 120 bp, Artificial Sequence
  ENSG00000138756_50 (sequence is synthesized)
tatgagaataaagctcccaagatatgtgaaagtgcttaacacagtacctggcacacagcactcaataaaagtttggctctattatgggatggttcaattctggtttaaggaaggaagaaa

SEQ ID NO: 348702 - DNA, 120 bp, Artificial Sequence
  ENSG00000138756_51 (sequence is synthesized)
ggttattatatatgtaccactaagcaaatatatatatatatatatatttggggttttttttccctaatattatttgggtgtcccctgtgcttctttaggatgtagttataactaaacctg

SEQ ID NO: 348703 - DNA, 120 bp, Artificial Sequence
  ENSG00000138756_52 (sequence is synthesized)
ttatacttgaacatcactaagagaagtaaattattatgaagctagcaaaaatcttgaggccaaagttgtttcttaacagctttaataatgcttgttgattttgaataatcctttaaaaag

SEQ ID NO: 348704 - DNA, 120 bp, Artificial Sequence
  ENSG00000138756_53 (sequence is synthesized)
tggaccatttgcttattttaatatcacgtcagtaaaatgttagtattaaaaagatcagctttttatggcattgaagaatgtatctgctaagacacaaaaattgcatggtaagtataatag

SEQ ID NO: 348705 - DNA, 120 bp, Artificial Sequence
  ENSG00000138756_54 (sequence is synthesized)
gtggaggaggaaaggttgtaggccggatgaaaatttaactgactagaacatttattcaggagtgtaattattttcccttaccccaatccctgtgtacgtgttgggtatagttacgacatt

SEQ ID NO: 348706 - DNA, 120 bp, Artificial Sequence
  ENSG00000138756_55 (sequence is synthesized)
atccggatttgcaaatagacacaactttcagtcttaccctgtttattgtttaagagtgatagactgttgtcctcttgctggtggaaaatctaaggtggagcccactcttctatgctgaag

SEQ ID NO: 348707 - DNA, 120 bp, Artificial Sequence
  ENSG00000138756_56 (sequence is synthesized)
ttcaccaggcagagcagttttcttacaagtcagctactctgcttggtttattttaggttttggtacttcacgtaagcactgttagaaggtacaagtgtattaatatcactagttttgagg

SEQ ID NO: 348708 - DNA, 120 bp, Artificial Sequence
  ENSG00000138756_57 (sequence is synthesized)
cgcttgggtacatttgtttttaatatatttagaatgtgcagtaaacttttttctcatttttttttctttttagcaaacttgttattttaggtccaattattgagttgacagtctactgtg

SEQ ID NO: 348709 - DNA, 120 bp, Artificial Sequence
  ENSG00000138756_58 (sequence is synthesized)
agaatgagatgacatatctactgtgagaataccataaatgatgaatagtttatttgagaacttttatactcagtggtgttttatatattaagataaaaatatgtacacacatgcatgtca

SEQ ID NO: 348710 - DNA, 120 bp, Artificial Sequence
  ENSG00000138756_59 (sequence is synthesized)
catctctctactgtggagttaatgtgaatttttaaaaaatggaattgcaaccacaatcatatctaagagaacattcactcctagtgagggtttacaaaagctactaagagaataaggtag

SEQ ID NO: 348711 - DNA, 120 bp, Artificial Sequence
  ENSG00000138756_60 (sequence is synthesized)
atgataatgcaaagggtcatgatttggggttatttttgttttattttaaaatttatactgctacttttgaaagaattgtttttatgactatgctctttttgtgattgaaaagtcatctaa

SEQ ID NO: 348712 - DNA, 120 bp, Artificial Sequence
  ENSG00000138756_61 (sequence is synthesized)
tagaagctgtatagaagctactttttaattgctggcaaacagctttaagtgcactttctttgattacacttccattttttgttaaacttgaattttctgaagccttttatgtaccactaa

SEQ ID NO: 348713 - DNA, 120 bp, Artificial Sequence
  ENSG00000138756_62 (sequence is synthesized)
gcaaataactttaacctttaaataaagcaaatttacatctttattgtatttctacttgttacaaaacatacttgctaaagtaacttcagtcctcaaatatagctgggaaacaattatgag

SEQ ID NO: 348714 - DNA, 120 bp, Artificial Sequence
  ENSG00000138756_63 (sequence is synthesized)
atagactcagtctccccctcccaccccttttcccctgccatatctaattaagcactaactgattttattactttattgcctttacactgcttattctttttgactgaattctgtccctga

SEQ ID NO: 348715 - DNA, 120 bp, Artificial Sequence
  ENSG00000138756_64 (sequence is synthesized)
ttcactgttttgtttgaaatttaaagttattttcttactgtatttatcatacctgttttaatctgttttctttaaatgcaataaatcccaaatggattgcatattctttataatcagtga

SEQ ID NO: 348716 - DNA, 120 bp, Artificial Sequence
  ENSG00000138756_65 (sequence is synthesized)
aagtaagggacacttgaaggcttattttgcttcacagtaaaataacagctctattattattcagcaaggccaaagacttttgagaatgtgtatggaaaattctttttgtgcatttgaggg

SEQ ID NO: 348717 - DNA, 120 bp, Artificial Sequence
  ENSG00000138756_66 (sequence is synthesized)
caaaattcaggccatcttcttatacatatactatcaaattatgttgtgtgcattagaaatcagttgcttgatagtagctattaaacccaatattgctgatagtatgctaatatcctaaaa

SEQ ID NO: 348718 - DNA, 120 bp, Artificial Sequence
  ENSG00000138756_67 (sequence is synthesized)
cttaaatattgcatatctatgaatgttaaattcagaatatctctaaaacatggaaaattgatgtttcaataaaaagggagacattttattattttgccttactaatgattttgcagctct

SEQ ID NO: 348719 - DNA, 120 bp, Artificial Sequence
  ENSG00000138756_68 (sequence is synthesized)
gtttttctgcacactcaatagaaaatattgtgggtctgagatgccctttgaaaatgcctgaaagaaaacatgggctactacattatgttaatgttttgtaatgtccttttaatgagtggt

SEQ ID NO: 348720 - DNA, 120 bp, Artificial Sequence
  ENSG00000138756_69 (sequence is synthesized)
gacataaaagggctgctttgttgtcctgatatggcaaaaattaaataaattctttttcactttaaatcagatatctcaatgtttttacttggaatcattgcttttctttgaactacctaa

SEQ ID NO: 348721 - DNA, 120 bp, Artificial Sequence
  ENSG00000138756_70 (sequence is synthesized)
tatatgtcaagcttcgccacacatattttagaaatgtcctttttgaaagaatgatgtgagtgttttgagtaggttgccaaataggagcaaaaagctcacttctagagtatgtagataatt

SEQ ID NO: 348722 - DNA, 120 bp, Artificial Sequence
  ENSG00000138756_71 (sequence is synthesized)
ttcaggtttctgaggctttgtgtgtgtgtgtgtgtgtgcacgcgcatgtgtgtgcaggtgtgcacacaaaacaagtgtgttttccccttttgcatgtgaaaagaaggtcttaataatccc

SEQ ID NO: 348723 - DNA, 120 bp, Artificial Sequence
  ENSG00000138756_72 (sequence is synthesized)
tagtttatagttcctagttcctatttcatttaggtaattggccttatgagaatgtttaatagatgaaatgctttgttctgaattggtatatattttatgtaaaattcctgtaagaatagt

SEQ ID NO: 348724 - DNA, 120 bp, Artificial Sequence
  ENSG00000138756_73 (sequence is synthesized)
ttgggatttaaatttgtattttatatattggttatatgattatgaaaattaaattgatgattaaatgcagatataaaaataagttctgagccgttaataaaggtttctaaataaaaccga

SEQ ID NO: 348725 - DNA, 120 bp, Artificial Sequence
  ENSG00000138756_74 (sequence is synthesized)
attaaggatcacttaaaaattaatacaggtattttggataatagtaataattattttgaatagaattatcttgaaggacctttttactatggccttggaactttcttgaataattcccca

SEQ ID NO: 348726 - DNA, 120 bp, Artificial Sequence
  ENSG00000138756_75 (sequence is synthesized)
gtgttcactaaactcactttttcttttgtgtcactttttcaatagaataatcaagtttgtcattcatacttctagtgtagagctgttctgtgattgatctacccttagcttgggataatg

SEQ ID NO: 348727 - DNA, 120 bp, Artificial Sequence
  ENSG00000138756_76 (sequence is synthesized)
ttatttataaaatagcaatttctgcattttctgtaggcattaataaagtttgctagaatcatcactgatcttagagtggaacagaaaatacatattttttatccttataatgtgccccta

SEQ ID NO: 348728 - DNA, 120 bp, Artificial Sequence
  ENSG00000138756_77 (sequence is synthesized)
ttaacagcaaccactatattagtgactttaagctactctttttcttaaaatacttaaaagaggatttttgattctggccaagtgagcctacctttacaactttttaaaaagatttatttc

SEQ ID NO: 348729 - DNA, 120 bp, Artificial Sequence
  ENSG00000138756_78 (sequence is synthesized)
atcttgctgtagttttctagtaatagagctgcttctgtagatgattgttttttacgtttctgattttgtcaccaatgtgaaaggaaggaacatagtaaatagatgcagtgctgacagtgc

SEQ ID NO: 348730 - DNA, 120 bp, Artificial Sequence
  ENSG00000138756_79 (sequence is synthesized)
tttaggactggagcattgttttgtataatatcatttcttttttcagatgccgcagtatcagcaggctttctttcaacagcagatgctagctcaacatcagccgtctcaacaacaggcatc

SEQ ID NO: 348731 - DNA, 120 bp, Artificial Sequence
  ENSG00000138757_0 (sequence is synthesized)
taaagcccacgtcatgttcttcctttactgcagggcctcttaatggggcttaaaacctaggatgggttaagtaaacaatgtaggtgagtttagtgtgcaaacagctgaaatcaccggctg

SEQ ID NO: 348732 - DNA, 120 bp, Artificial Sequence
  ENSG00000138757_1 (sequence is synthesized)
cattttaagctcgtctacagcagcaacctgcagacacctattcagagagattactaaattccctccttcccattaataaaaaggaccagaatatcagtctacaaaagacactgcgttgct

SEQ ID NO: 348733 - DNA, 120 bp, Artificial Sequence
  ENSG00000138757_2 (sequence is synthesized)
gcgaaccagctctcgcttgcgcgatcaggaagaagggcggcaaggctggagcctcgggaccggagaaaggcagcctgcttgtgacgtcaaatcagcggactcttatcttggctttaggcc

SEQ ID NO: 348734 - DNA, 120 bp, Artificial Sequence
  ENSG00000138757_3 (sequence is synthesized)
ggttccggttccccggctttccgggcgcgagcgtgtgcgagcgcggcagcgtactgcgcgtgctccgcagagggacacgggaaggttgggtccggctctggaggagatgcgtgattggct

SEQ ID NO: 348735 - DNA, 120 bp, Artificial Sequence
  ENSG00000138757_4 (sequence is synthesized)
gacgctgtgctcgggggttccctggccctttcggcaggggtaaaacaataagagggggcggtggcaaagggggcgggacgtccgtggtccttgtcgcacgtcgcagcgcctggcgcccgg

SEQ ID NO: 348736 - DNA, 120 bp, Artificial Sequence
  ENSG00000138757_5 (sequence is synthesized)
gaagaggtggttgtgaggcagacgaactcgcggctctccggcttccgaggcttccgagttgtcggaggaagggggcggcgagcaataagaacccgccgcacccggtcctcagcgactctt

SEQ ID NO: 348737 - DNA, 120 bp, Artificial Sequence
  ENSG00000138757_6 (sequence is synthesized)
ctgacctccgcgcgacgtacccgccgccgccgttggctggagcatttgacattgtgcagcaaagaaatggttatggagaagcccagtccgctgcttgtagggcgggagtttgtgaggcaa

SEQ ID NO: 348738 - DNA, 120 bp, Artificial Sequence
  ENSG00000138757_7 (sequence is synthesized)
tattatactttgctgaataaagctccggaatatttacacaggttttatggcaggaattcttcctatgttcatggtggagtagatgctagtggaaagccccaggaagctgtttatggccaa

SEQ ID NO: 348739 - DNA, 120 bp, Artificial Sequence
  ENSG00000138757_8 (sequence is synthesized)
aatgatatacaccacaaagtattatctctgaacttcagtgaatgtcatactaaaattcgtcatgtggatgctcatgcaaccttgagtgatggagtagttgtccaggtcatgggtttgctg

SEQ ID NO: 348740 - DNA, 120 bp, Artificial Sequence
  ENSG00000138757_9 (sequence is synthesized)
tctaacagtggacaaccagaaagaaagtttatgcaaacctttgttctggctcctgaaggatctgttccaaataaattttatgttcacaatgatatgtttcgttatgaagatgaagtgttt

SEQ ID NO: 348741 - DNA, 120 bp, Artificial Sequence
  ENSG00000138757_10 (sequence is synthesized)
ggtgattctgagcctgaacttgatgaagaatcagaagatgaagtagaagaggaacaagaagaaagacaaccatctcctgaacctgtgcaagaaaatgctaacagtggttactatgaagct

SEQ ID NO: 348742 - DNA, 120 bp, Artificial Sequence
  ENSG00000138757_11 (sequence is synthesized)
caccctgtgactaatggcatagaggagcctttggaagaatcctctcatgaacctgaacctgagccagaatctgaaacaaagactgaagagctgaaaccacaagtggaggagaagaactta

SEQ ID NO: 348743 - DNA, 120 bp, Artificial Sequence
  ENSG00000138757_12 (sequence is synthesized)
gaagaactagaggagaaatctactactcctcctccggcagaacctgtttctctgccacaagaaccaccaaaggctttctcctgggcttcagtgaccagtaaaaacctgcctcctagtggt

SEQ ID NO: 348744 - DNA, 120 bp, Artificial Sequence
  ENSG00000138757_13 (sequence is synthesized)
actgtttcttcctctggaattccaccccatgttaaagcaccagtctcacagccaagagtcgaagctaaaccagaagttcaatctcagccacctcgtgtgcgtgaacaacgacctagagaa

SEQ ID NO: 348745 - DNA, 120 bp, Artificial Sequence
  ENSG00000138757_14 (sequence is synthesized)
cgacctggttttcctcctagaggaccaagaccaggcagaggagatatggaacagaatgactctgacaaccgtagaataattcgctatccagatagtcatcaactttttgttggtaacttg

SEQ ID NO: 348746 - DNA, 120 bp, Artificial Sequence
  ENSG00000138757_15 (sequence is synthesized)
ccacatgatattgatgaaaatgagctaaaggaattcttcatgagttttggaaacgttgtggaacttcgcatcaataccaagggtgttgggggaaagcttccaaattttggttttgtggtt

SEQ ID NO: 348747 - DNA, 120 bp, Artificial Sequence
  ENSG00000138757_16 (sequence is synthesized)
tttgatgactctgaaccagttcagagaatcttaattgcaaaaccgattatgtttcgaggggaagtacgtttaaatgtggaagagaaaaaaacaagagctgcaagagagcgagaaaccaga

SEQ ID NO: 348748 - DNA, 120 bp, Artificial Sequence
  ENSG00000138757_17 (sequence is synthesized)
ggtggtggtgatgatcgcagggatattaggcgcaatgatcgaggtcccggtggtccacgtggaattgtgggtggtggaatgatgcgtgatcgtgatggaagaggacctcctccaaggggt

SEQ ID NO: 348749 - DNA, 120 bp, Artificial Sequence
  ENSG00000138757_18 (sequence is synthesized)
ggcatggcacagaaacttggctctggaagaggaaccgggcaaatggagggccgcttcacaggacagcgtcgctgaagctccactgttggcaaagtcttggcagtggtacattattcatcg

SEQ ID NO: 348750 - DNA, 120 bp, Artificial Sequence
  ENSG00000138757_19 (sequence is synthesized)
tgtttgcattcttgttaattttttttttggctttggaatgtgacacagcctttttgatcatttctttgatgtgaaaagcatctttggttatcagttaaattgaggtggacattatttccc

SEQ ID NO: 348751 - DNA, 120 bp, Artificial Sequence
  ENSG00000138757_20 (sequence is synthesized)
tatctacgacaaagtgaacttaaaaggacatgcccactgaattcaggtcctttgagtaaaaaaaaaatcttctgctgcacattttgtttaagtgttactgtttctgcctgttaatgctgg

SEQ ID NO: 348752 - DNA, 120 bp, Artificial Sequence
  ENSG00000138757_21 (sequence is synthesized)
gaacacaaatagtgcaatttgtgcaattggagaatcttgccttttttcttggctccccccaaaaatacaaaccaacagaaacttgttatgcactcatcaaaatgtactaatgggtactct

SEQ ID NO: 348753 - DNA, 120 bp, Artificial Sequence
  ENSG00000138757_22 (sequence is synthesized)
gaactcattaacattgacatctgcaacaggaggcaacagggaaaaaatctcatcttcttttccagtagaaaatagtttgtgaaatgatgagggcattttatctgcttgctgtgaccagcg

SEQ ID NO: 348754 - DNA, 120 bp, Artificial Sequence
  ENSG00000138757_23 (sequence is synthesized)
tgtgtacacataaaccttaacaagactacaagtatattccagaaggaaatcattttagttatgaactaaataataaaaattagaacttcaaatgcgatggtcttgactattagaccagat

SEQ ID NO: 348755 - DNA, 120 bp, Artificial Sequence
  ENSG00000138757_24 (sequence is synthesized)
ttagtagctccatatctaagatttttctacctgcccctcttcagtacagggatggctggctgctcaacacactcctcctccccttttttcctttctttaagctgtgtacagtgaaaattg

SEQ ID NO: 348756 - DNA, 120 bp, Artificial Sequence
  ENSG00000138757_25 (sequence is synthesized)
tctttactgtatttttgttctctggtaatgtaataagcatgatggtgccttctattaatacatcattccagtcttgctggtaattttgtacagtatagtgtatgaattgctgtgctgcaa

SEQ ID NO: 348757 - DNA, 120 bp, Artificial Sequence
  ENSG00000138757_26 (sequence is synthesized)
agccaaacagctgcaaaatgttgaaaaatcatcgaaatgtataaaaattgcagtatctttaaaatcagtaaaatggactagcatattatttatcttgttcttcagttaacaactttgtgt

SEQ ID NO: 348758 - DNA, 120 bp, Artificial Sequence
  ENSG00000138757_27 (sequence is synthesized)
tctctgtgggagggagggagtcctgtgtgtttgtggggagagggaaggaggaagtcagttatttgagtaagcctctagttgacttttctcttagcctgaatgtggacgttgaaacatatc

SEQ ID NO: 348759 - DNA, 120 bp, Artificial Sequence
  ENSG00000138757_28 (sequence is synthesized)
acttcagggcttggaaaagtcagtcaacttgacgtacatttttagtgacattttaaaagcagtcagattctataaatggcaagtaagcctgaagtgaggatactgcaattttcggagaaa

SEQ ID NO: 348760 - DNA, 120 bp, Artificial Sequence
  ENSG00000138757_29 (sequence is synthesized)
agaacagcagctctttaagtgtttgcattttctatttggggggcagggaactgtcattcattttgcacaattcttgaactgatgtcagcacccgagtggctcctgaatttaagtctggga

SEQ ID NO: 348761 - DNA, 120 bp, Artificial Sequence
  ENSG00000138757_30 (sequence is synthesized)
cgacatcttttatttttacatgaatctttaaacaattctgtgagcaaagtttgtagctgctggattattgtctgtctttatagcaagttccagtaaaccacaagtatggcaaagcttatc

SEQ ID NO: 348762 - DNA, 120 bp, Artificial Sequence
  ENSG00000138757_31 (sequence is synthesized)
caattttatgcttggagcagtcagtacataccagtttctgatgtttcaggcaggagtggggtaaataagtgtgaccacttaaagctgctcgttagcatggaagacttctccattctatct

SEQ ID NO: 348763 - DNA, 120 bp, Artificial Sequence
  ENSG00000138757_32 (sequence is synthesized)
ttgtaaaacagacaagatatgcacttgacatagtagcaaattggttctgaattatgcaactgtttgctatttagtaaactagcaaatgatgcatgtattttgtttttcatgtactgggca

SEQ ID NO: 348764 - DNA, 120 bp, Artificial Sequence
  ENSG00000138757_33 (sequence is synthesized)
atatgagtaaaatctgtccctttttccccctttgaatgaggtcttccatgtttgagggaaagtcttgcactattgcatatattttggggacacagattttcatagtttccatttttgggg

SEQ ID NO: 348765 - DNA, 120 bp, Artificial Sequence
  ENSG00000138757_34 (sequence is synthesized)
ggcttaaggattttttttttttctgtttgaaacagttttatactttctgatatagtacttgaaattcttaccagaaaattactttggagttttgaagcctttattaatactacttttaaa

SEQ ID NO: 348766 - DNA, 120 bp, Artificial Sequence
  ENSG00000138757_35 (sequence is synthesized)
gaagcagttgttttattgtcaatgttttttttcccccaagcatattttcttgtatttctgtttccatatatatatatatatatataatttccaattcaggatattgccctgccatccatg

SEQ ID NO: 348767 - DNA, 120 bp, Artificial Sequence
  ENSG00000138757_36 (sequence is synthesized)
aaaactgttctggcaccaaaagtaatgacaaatgttaagtgtaataatagaaaagtagagcaaagagccattcagcttcagtctttacataccatgaataaaacattaaaacatcatatg

SEQ ID NO: 348768 - DNA, 120 bp, Artificial Sequence
  ENSG00000138757_37 (sequence is synthesized)
gagaagtttacatggtgattgttcacctgcagtactgtggagttttaacattttgtcctcttttcagtgaaacagagtaaaaatattcatctaccattactgttatttgctgattttgtt

SEQ ID NO: 348769 - DNA, 120 bp, Artificial Sequence
  ENSG00000138757_38 (sequence is synthesized)
ttattttttgatggtaatattctatccttatgacactattgcaaccaaattggctttaccatcttggctttagtaggtatagaagacaatggattaccatctttattgctgtaatgtgtt

SEQ ID NO: 348770 - DNA, 120 bp, Artificial Sequence
  ENSG00000138757_39 (sequence is synthesized)
aagcattatatgctagtagaatctagtttaattgtttcaggtggaaagtattctttgagtttccatattgaatgtgtttggactaaacaaacaataaactactgatgtctgcagcattta

SEQ ID NO: 348771 - DNA, 120 bp, Artificial Sequence
  ENSG00000138757_40 (sequence is synthesized)
gagcccgggagccggaggtgtagcggcagagacattgttcttgccggctccctacggtgccgtgtgtgcgtgagagaagaccagtctttcctctagcatttgacattgtgcagcaaagaa

SEQ ID NO: 348772 - DNA, 120 bp, Artificial Sequence
  ENSG00000138757_41 (sequence is synthesized)
ctgcgcagaccccgcctcccaccgcaggggcacgcctcctacccccacccttcgcggattgatcctgctggccgcagccacccacgtggtggaagcccggccctgcaggctggagaggat

SEQ ID NO: 348773 - DNA, 120 bp, Artificial Sequence
  ENSG00000138757_42 (sequence is synthesized)
ttgattagactacgcgtttcgacttgcagggtgtttaatcgtcgccaagcgggacttactgcaagctatcaaatctgaggtcttattttgttgagtcgaaagtgaaattttcctttggcc

SEQ ID NO: 348774 - DNA, 120 bp, Artificial Sequence
  ENSG00000138757_43 (sequence is synthesized)
agggttactagacacccctcattccactgccactggagggcgcatttctcagctcttgctcttcaaacctgctgaaaggaattcctagatctaaacaccagtttccttcatgtccttatc

SEQ ID NO: 348775 - DNA, 120 bp, Artificial Sequence
  ENSG00000138757_44 (sequence is synthesized)
gctccgcggcgcgaggcaatcgtccggtgtgtgagcccgggagccggaggtgtagcggcagagacattgttcttgccggctccctacggtgccgtgtgtgcgtgagagaagaccagtctt

SEQ ID NO: 348776 - DNA, 120 bp, Artificial Sequence
  ENSG00000138757_45 (sequence is synthesized)
gacgcagatgcgaaagtggcggcctccgggcaccatttctgtgcacggaaacagaatccgggtttgaaggcagccgccgcttcgcttacccagttaggccgggcacggtggctcacgcct

SEQ ID NO: 348777 - DNA, 120 bp, Artificial Sequence
  ENSG00000138757_46 (sequence is synthesized)
tatatatattttgcatttcctgtctcctcattatctgacagtatctttgtaaacatgtctaaactgtattcaatattttattcatttgatggcaaaaagtgtttttaactgcaactcaca

SEQ ID NO: 348778 - DNA, 120 bp, Artificial Sequence
  ENSG00000138757_47 (sequence is synthesized)
gtaataaaaacattttatgtcatattctggtacataacacattcatatctatatatgcacacgcttattcttatatgtactctagtattttatttttagagtcatggtctcctctgtcac

SEQ ID NO: 348779 - DNA, 120 bp, Artificial Sequence
  ENSG00000138757_48 (sequence is synthesized)
tctgtcactcagggtggagtgcagtgatatgatcatagcccactgtggcctcaaacttttggcctcaagcgatctcccagcttgcagcttgcattcccaaagtactgggattacaggcat

SEQ ID NO: 348780 - DNA, 120 bp, Artificial Sequence
  ENSG00000138757_49 (sequence is synthesized)
aaaagaggttgtgtcgacggaggcagaagcgacgcagatgcgaaagtggcggcctccgggcaccatttctgtgcacggaaacagaatccgggtttgaaggcagccgccgcttcgcttacc

SEQ ID NO: 348781 - DNA, 120 bp, Artificial Sequence
  ENSG00000138757_50 (sequence is synthesized)
cagtacctagtgttccgtcgtgtttgaccaacccccctctccctgccaccgcgggtttaatccgaacgtgttcggatactggaactcatttgacattgtgcagcaaagaaatggttatgg

SEQ ID NO: 348782 - DNA, 120 bp, Artificial Sequence
  ENSG00000138757_51 (sequence is synthesized)
gacgcagatgcgaaagtggcggcctccgggcaccatttctgtgcacggaaacagaatccgggtttgaagatcttctttgtgaagctttcattcaatggtgtaccacaaaagattgaaggt

SEQ ID NO: 348783 - DNA, 81 bp, Artificial Sequence
  ENSG00000138757_52 (sequence is synthesized)
ggcaaggtttcagcatttgacattgtgcagcaaagaaatggttatggagaagcccagtccgctgcttgtagggcgggagtt

SEQ ID NO: 348784 - DNA, 120 bp, Artificial Sequence
  ENSG00000138757_53 (sequence is synthesized)
ttggggatgaggtggcgaagtggggggggaggcacgcagcagctcccgaaggcgcgctgatggaagcttaatacaggaagtgtgggagcaggctttctggaggggatgttttaggcattt

SEQ ID NO: 348785 - DNA, 120 bp, Artificial Sequence
  ENSG00000138757_54 (sequence is synthesized)
ttttgtttatgtatttacatggagtggttcatcttgcatttttgtgatttttttttttggtagcaataccttttatgctatttcagtgttgatataactttaatgaaaaaatgtgactgt

SEQ ID NO: 348786 - DNA, 120 bp, Artificial Sequence
  ENSG00000138757_55 (sequence is synthesized)
aaaaagcaacttattgtgagttacacagcattaagtgggaaaacaaaagctacctacagtcctagattggtacagaatatcttgataaaaatttatttttctcatacataggacactatg

SEQ ID NO: 348787 - DNA, 120 bp, Artificial Sequence
  ENSG00000138757_56 (sequence is synthesized)
tcacatgttcaaatttggtgctgttaatgaagtatgacctttttctattatgttaaattgtttagtaaattattttatgtatatgaaagaagctgtggggtttgtttgttacctgagaaa

SEQ ID NO: 348788 - DNA, 120 bp, Artificial Sequence
  ENSG00000138758_0 (sequence is synthesized)
cgggtggccatgttgctctaataaagcgggaggggcggcggcgtggggggagcagatgccgctggctgccagcgggacgccggcgagcagagcgcagccgcgagggaggcgcgagggagg

SEQ ID NO: 348789 - DNA, 120 bp, Artificial Sequence
  ENSG00000138758_1 (sequence is synthesized)
cgagccggagcccgagcactagcagcagccggagtcggcgtaaagcacccgggcgcagccggagccggtgccgcagctgcgatggccgtggccgtggggagaccgtctaatgaagagctt

SEQ ID NO: 348790 - DNA, 120 bp, Artificial Sequence
  ENSG00000138758_2 (sequence is synthesized)
cgaaacttgtctttgtctggccatgtgggatttgacagcctccctgaccagctggtcaacaagtctacttctcaaggattctgtttcaacatcctttgtgttggtgagacaggcattggc

SEQ ID NO: 348791 - DNA, 120 bp, Artificial Sequence
  ENSG00000138758_3 (sequence is synthesized)
aaatccacgttaatggacactttgttcaacaccaaatttgaaagtgacccagctactcacaatgaaccaggtgttcggttaaaagccagaagttatgagcttcaggaaagcaatgtacgg

SEQ ID NO: 348792 - DNA, 120 bp, Artificial Sequence
  ENSG00000138758_4 (sequence is synthesized)
ctgaagttaaccattgttgacaccgtgggatttggagaccagataaataaagatgacagctataagccgatagtagaatatattgatgcccagttcgaggcctacctgcaagaggaattg

SEQ ID NO: 348793 - DNA, 120 bp, Artificial Sequence
  ENSG00000138758_5 (sequence is synthesized)
aagattaaacgttctctcttcaactaccatgacacgaggatccatgcctgcctctactttattgcccctactggacattcactaaagtccctggatctggtcaccatgaaaaagctggac

SEQ ID NO: 348794 - DNA, 120 bp, Artificial Sequence
  ENSG00000138758_6 (sequence is synthesized)
agtaaggtgaacatcattccaataattgcaaaagctgacaccattgccaagaatgaactgcacaaattcaagagtaagatcatgagtgaactggtcagcaatggggtccagatatatcag

SEQ ID NO: 348795 - DNA, 120 bp, Artificial Sequence
  ENSG00000138758_7 (sequence is synthesized)
tttcccactgatgaagaaacggtggcagagattaacgcaacaatgagtgtccatctcccatttgcagtggttggcagcaccgaagaggtgaagattggcaacaagatggcaaaggccagg

SEQ ID NO: 348796 - DNA, 120 bp, Artificial Sequence
  ENSG00000138758_8 (sequence is synthesized)
cagtacccctggggtgtggtgcaggttgagaatgaaaatcattgcgattttgtgaaacttcgagagatgctgatccgcgtgaacatggaggacttgcgagagcagactcacacccgccac

SEQ ID NO: 348797 - DNA, 120 bp, Artificial Sequence
  ENSG00000138758_9 (sequence is synthesized)
tatgaattgtaccgacgctgtaagcttgaagagatggggttcaaggacactgaccctgacagcaaacccttcagtcttcaggagacatatgaagcaaaaaggaatgaattcctgggagaa

SEQ ID NO: 348798 - DNA, 120 bp, Artificial Sequence
  ENSG00000138758_10 (sequence is synthesized)
ctgcagaagaaagaagaagaaatgagacaaatgtttgttatgagagtgaaggagaaagaagctgaacttaaggaggcagagaaagagcttcacgagaagtttgaccttctaaagcggaca

SEQ ID NO: 348799 - DNA, 120 bp, Artificial Sequence
  ENSG00000138758_11 (sequence is synthesized)
caccaagaagaaaagaagaaagtggaagacaagaagaaggagcttgaggaggaggtgaacaacttccagaagaagaaagcagcggctcagttactacagtcccaggcccagcaatctggg

SEQ ID NO: 348800 - DNA, 120 bp, Artificial Sequence
  ENSG00000138758_12 (sequence is synthesized)
gcccagcaaaccaagaaagacaaggataagaaaaatgcaagcttcacataaagcctggcaagccaaggatgttcccgcattcacctgcttttgcagtaatatcgtatctctgccatgtgt

SEQ ID NO: 348801 - DNA, 120 bp, Artificial Sequence
  ENSG00000138758_13 (sequence is synthesized)
gttctttagttttattttattttattttatttttttacccttcctcaaacaccagtaactattattaactcgttttgctgaatgttgttgggtggtagaaaatgatagaacaagggaata

SEQ ID NO: 348802 - DNA, 120 bp, Artificial Sequence
  ENSG00000138758_14 (sequence is synthesized)
accgcgaatgctctgtgcagctggactctgtttccggaaagtaaatgatttgctttttatgcctgttctgaatggcagcacgaagcaggcctgttacttgtatgtcgctttggacagagg

SEQ ID NO: 348803 - DNA, 120 bp, Artificial Sequence
  ENSG00000138758_15 (sequence is synthesized)
aaagtggggtaaaatgctacctgtacgtctgacatgaaaacttctcaccgcctcagcagctgaactaaaaacctgaatagccatgacaagagtttgcattttcttgatgattcatctcca

SEQ ID NO: 348804 - DNA, 120 bp, Artificial Sequence
  ENSG00000138758_16 (sequence is synthesized)
tgagtgcacaatccctgaactcactgtcttttctccacacttgtcctaagccaaggtagatttgtacgtagacagactggtgagcaagcattatattttatttttacccttgcatgacat

SEQ ID NO: 348805 - DNA, 120 bp, Artificial Sequence
  ENSG00000138758_17 (sequence is synthesized)
tttcattttaatcaataacattatttggcctgagcttgtgggtctgttcagactgtctcctctcatggtttgaaactgcatctgaatgcctgccttcaatcctggccaagttggagtaga

SEQ ID NO: 348806 - DNA, 120 bp, Artificial Sequence
  ENSG00000138758_18 (sequence is synthesized)
ctggtatgagaaaactatgattagttcacatttactggtgcatccttgatcctctcacagatagaggtcttaaaggttggatcatgtaacattgcttagtagaagaatcttcttctaagg

SEQ ID NO: 348807 - DNA, 120 bp, Artificial Sequence
  ENSG00000138758_19 (sequence is synthesized)
atgatgggctttctacagcctgcttaccactaacagtaaggaatctttcataaacacacctcagtttgttcccagtgggcttagagggaggacctgatgactgattccaggatacttgta

SEQ ID NO: 348808 - DNA, 120 bp, Artificial Sequence
  ENSG00000138758_20 (sequence is synthesized)
cttctaataacatttttcatgaatcatgagaaaatttccacagatacttcccttagaaaatttgctataaactctgtatcattggtagcacaaatttgagcgaggccttgtcaattttaa

SEQ ID NO: 348809 - DNA, 120 bp, Artificial Sequence
  ENSG00000138758_21 (sequence is synthesized)
ggtggaaataggaaggaccacaacatgacccgtaagtcaagaaggtagacatttcatatccagcttccttgcttagtctcctttcagtatttggcaataaaagaaagaagaaatagaaca

SEQ ID NO: 348810 - DNA, 120 bp, Artificial Sequence
  ENSG00000138758_22 (sequence is synthesized)
gctgaagtctcaaatcattgtctggaattttcctcaccttggctagctccacctgctctttgtctaaggcccttgcctcatcagggattagaactggcccatatgccagaacctgtacta

SEQ ID NO: 348811 - DNA, 120 bp, Artificial Sequence
  ENSG00000138758_23 (sequence is synthesized)
catctgtgtgattgttttttcccctctactaacaagatcctcccagctttctctctacatgtagaaaggataacatttctcatgaacccactgcccctctgcattttcctcactggttag

SEQ ID NO: 348812 - DNA, 120 bp, Artificial Sequence
  ENSG00000138758_24 (sequence is synthesized)
agattaagtaaataggatagaatatgctgcgtctcccctgacacacactttcttttttgaatgagcaagtctccattttgatttcagcaaagattttttctccttttctttgtcctcaac

SEQ ID NO: 348813 - DNA, 120 bp, Artificial Sequence
  ENSG00000138758_25 (sequence is synthesized)
catacttagaggaaagaaggaatggtcttccatgaactgattatgcttaattaagcaaagtaaggaaattagtttcatggaagcctaaacaaagctggaatagaaactacacactagaca

SEQ ID NO: 348814 - DNA, 120 bp, Artificial Sequence
  ENSG00000138758_26 (sequence is synthesized)
cagcagtagtcatagtcttcacaggtttaggagctactggaccaacattcttgtttttgcttttgtttttttaaataattctagtctggagctaactgtggagcagccaaatagtagctg

SEQ ID NO: 348815 - DNA, 120 bp, Artificial Sequence
  ENSG00000138758_27 (sequence is synthesized)
gcatgttgattcaaaccatgggctgaatttgctcataggctgtgcatcagacaaaagcttgaatatttgtgttgtatgcttgttccaaccaccgcttgtgtgagcatttttgtggcttgt

SEQ ID NO: 348816 - DNA, 120 bp, Artificial Sequence
  ENSG00000138758_28 (sequence is synthesized)
acagaaagtacacttttaaattgtctcttgcatcactaaaatttttttaaaatgagcataacaacgaaaggcatccagctgactttttgattccaagattattgattggattgacttttt

SEQ ID NO: 348817 - DNA, 120 bp, Artificial Sequence
  ENSG00000138758_29 (sequence is synthesized)
tgcattaaatttttcccagcaaaataaatcatatggcgagtcagggaataaaaagtcaaaagaaacaaatagaagcttttttttttaaaaaatgtattgcttctgaacttttttctgcca

SEQ ID NO: 348818 - DNA, 120 bp, Artificial Sequence
  ENSG00000138758_30 (sequence is synthesized)
ctgctccctagccctgtttagtttgttattgctgcttttcttttttctttctgtatctatgcctttttttcacagtagtccttggctctgcacggaataaatgataccctcaaatctaat

SEQ ID NO: 348819 - DNA, 120 bp, Artificial Sequence
  ENSG00000138758_31 (sequence is synthesized)
tggatgtgctttcgcctttgcatgtaagtacggtagtaagaaacctttgagatctttctgacttttcaaaattagagaaagcaaatgggatggatagattttttttttcttttcaagggg

SEQ ID NO: 348820 - DNA, 120 bp, Artificial Sequence
  ENSG00000138758_32 (sequence is synthesized)
ggcaggaaggtaatggtttgagtagcctttgtttaaaaaaaagactaaatatatttaaaaggccacatttatatttttttcacaagaaccacataataaattccacttcttgacctgaat

SEQ ID NO: 348821 - DNA, 60 bp, Artificial Sequence
  ENSG00000138758_33 (sequence is synthesized)
cacaagaaccacataataaattccacttcttgacctgaatttggaaatccgaaattacta

SEQ ID NO: 348822 - DNA, 120 bp, Artificial Sequence
  ENSG00000138758_34 (sequence is synthesized)
agccaagattgcaccactgcattccaacctgggtgatgaagtgagactctccaaaaaaaaaaaagaaattattaatccctgcctgtgctctacatagcctcatgggcatcattggatagc

SEQ ID NO: 348823 - DNA, 120 bp, Artificial Sequence
  ENSG00000138758_35 (sequence is synthesized)
tcattggatagctcagagggcccttgattctggcaaggcaaataaagccagaatgagaaattaccatcttctactagagaaaaccaagagaaaaatttttatgctaggatgcctttatga

SEQ ID NO: 348824 - DNA, 120 bp, Artificial Sequence
  ENSG00000138758_36 (sequence is synthesized)
ccacttaattttttaatcttagtttaatggtctctccctggtgctaactgctgacagtggccacctcttttttggggattgaggggcctacataactagctggccttaccccatatcttt

SEQ ID NO: 348825 - DNA, 120 bp, Artificial Sequence
  ENSG00000138758_37 (sequence is synthesized)
tgttcaaacataataccatctttttgcttcttctgaactttagatctccataacacatgtactgtagaatgtgatggaaaagcattgatgagaatttattggcagttcagattgtgtttt

SEQ ID NO: 348826 - DNA, 120 bp, Artificial Sequence
  ENSG00000138758_38 (sequence is synthesized)
cccaacttaggctctttattaattggttaaggttttctccaaaaagggcatttcaacaatgggaattatttaatgtaacagtgggcacagattacttatcttccttctctgctttgtgac

SEQ ID NO: 348827 - DNA, 120 bp, Artificial Sequence
  ENSG00000138758_39 (sequence is synthesized)
tcaccagcagtaacacacacaatccacatcttgtgcacctcaaatgaacagacttggtttccttgctttcttgacatttccatgactgtttcacatacaaactattgggtgaggtttttc

SEQ ID NO: 348828 - DNA, 120 bp, Artificial Sequence
  ENSG00000138758_40 (sequence is synthesized)
agctgttaccgacccacgtcctgctgtctctgtgtggtcctacaaaaactgtccattcccacccctttgctttgccatttgcaagagtctggaattgtcaggtctcagcttcgaaaagtc

SEQ ID NO: 348829 - DNA, 120 bp, Artificial Sequence
  ENSG00000138758_41 (sequence is synthesized)
ctggttccactgacaggacacattctttagtgggaattaagacctacaaagtctagtttgtatgtaggtatgaagggaattttttaaataaattgaaaagctgtgaacagcattagaact

SEQ ID NO: 348830 - DNA, 120 bp, Artificial Sequence
  ENSG00000138758_42 (sequence is synthesized)
ttgtctatttcttaattttaaaatatgctgatatgccttaaactgtagttgtagatccttgtcattttgctgtttgaaaataaccaatgtgttttctaaaactgtcgtgtaatctacttt

SEQ ID NO: 348831 - DNA, 120 bp, Artificial Sequence
  ENSG00000138758_43 (sequence is synthesized)
cattgttaatgcagaattgtcatatatgtaagctgcatgttagacatttgtcttttttaaactaaagtaattgtattgatgtgaagcatatcattttttcaaatatgaaagtgatcactt

SEQ ID NO: 348832 - DNA, 120 bp, Artificial Sequence
  ENSG00000138758_44 (sequence is synthesized)
agcaacatgcttggtaatttggcatctgttaaggtaggagagtggtgaacagataatctatgcatatatcactagtgccaagacataaagcgggggaaaatatatttttacccaaacatt

SEQ ID NO: 348833 - DNA, 120 bp, Artificial Sequence
  ENSG00000138758_45 (sequence is synthesized)
ataagaaaaatagtccttggctctgcacggaataaatgataccctcaaatctaattggatgtgctttcgcctttgcatctgaccatctgcctcttgagagagagagaagtgggcatcctt

SEQ ID NO: 348834 - DNA, 120 bp, Artificial Sequence
  ENSG00000138758_46 (sequence is synthesized)
cctttaaattcaggaaccactgttgttttatttgactttttctgttacttgcatcccttatataagttgttttggatttgggactatgttttgggggagaaaaactccagttagttctgt

SEQ ID NO: 348835 - DNA, 120 bp, Artificial Sequence
  ENSG00000138758_47 (sequence is synthesized)
tttttgtattggttattcagcttacttttggtatcaaaattatgccagttttaagctcacttgagtgaagtttaagtcacaagattctgtttaacatgctttccttgttttggaaacaac

SEQ ID NO: 348836 - DNA, 120 bp, Artificial Sequence
  ENSG00000138758_48 (sequence is synthesized)
caaaaacttcccttttttgttacgggattttgacctacaaatcctaatcatgtttaaaatgtgccggtgttgggtagatgacttttctgcctctggggttcaatttatatttaaagatac

SEQ ID NO: 348837 - DNA, 120 bp, Artificial Sequence
  ENSG00000138758_49 (sequence is synthesized)
cttaaaataacttactggcccatccctgcctttttatttgttgtgaagctctgtaccttgtgtccacagctttttaccaagacccatatgtcttggaccatgggaaatgaaccccaaaca

SEQ ID NO: 348838 - DNA, 120 bp, Artificial Sequence
  ENSG00000138758_50 (sequence is synthesized)
agtacatgtctcttctcccagataacagcatcattaacaatggttctgattcacattgtcttctcagagttacctaggtggatttctctacaatatctgcaaaaaaacctgctgagaatc

SEQ ID NO: 348839 - DNA, 120 bp, Artificial Sequence
  ENSG00000138758_51 (sequence is synthesized)
cttgatgattcatctccatgagtgcacaatccctgaactcactgtcttttctccacacttgtcctaagccaaggtagatttgtacgtagacagactgctgaccatctgcctcttgagaga

SEQ ID NO: 348840 - DNA, 120 bp, Artificial Sequence
  ENSG00000138758_52 (sequence is synthesized)
gcggctcagttactacagtcccaggcccagcaatctggggcccagcaaaccaagaaagacaaggataagaaaaacttcttctttatgtaaccatcctgttgacaagccctactctctcct

SEQ ID NO: 348841 - DNA, 120 bp, Artificial Sequence
  ENSG00000138758_53 (sequence is synthesized)
ttttaaagtctgggtcaaatattgcactgctgtttgtacttgtcaatgtctgcccatagtggatactgaagtgacttaccactaccaaaaatagtcatattcaataatattaattaaaaa

SEQ ID NO: 348842 - DNA, 120 bp, Artificial Sequence
  ENSG00000138758_54 (sequence is synthesized)
gcttccctcccaccctgtcttccttggagtactgcagaatctgtaagcgtccctggaatgcacacgtggaccttgtcattcccaaacagactttctgctgtctacatcggtaaactctgc

SEQ ID NO: 348843 - DNA, 120 bp, Artificial Sequence
  ENSG00000138758_55 (sequence is synthesized)
aaaactccagcagttacagagcctgtgctaggagctacagggtgaagagggggaagaagactcaagaaacctgtaaaactaatggaggagaggaaaccagctcatgtgctgagaagtttt

SEQ ID NO: 348844 - DNA, 120 bp, Artificial Sequence
  ENSG00000138758_56 (sequence is synthesized)
gagcactagcagcagccggagtcggcgtaaagcacccgggcgcagccggagccggtgccgcagctgcgatggccgtggccgtggggagaccgtcttcttcaggagacatatgaagcaaaa

SEQ ID NO: 348845 - DNA, 120 bp, Artificial Sequence
  ENSG00000138758_57 (sequence is synthesized)
agaagcaactcaaagaaagcaaacagcttggaacctaaggcatgaaaaggaagagcactcaggaatccagcctttttagttggggcaggcaattaatgctctgtgatttgaagaaatgtt

SEQ ID NO: 348846 - DNA, 120 bp, Artificial Sequence
  ENSG00000138758_58 (sequence is synthesized)
tatgaggtgcccaaatgtgatgttacacatttttaaaaataaaaagtagatgagaagaaaccgggtgagaaagaagccaagacccaggagagtgagtgacctgcttaagacccataggct

SEQ ID NO: 348847 - DNA, 120 bp, Artificial Sequence
  ENSG00000138758_59 (sequence is synthesized)
cagaactggagccaaatcccctgacacttgcccacactacaaacccaaggacagtagaactaaggcgttctagataggtcatttgtagacagattcttcagtcgtttcacactgccaagt

SEQ ID NO: 348848 - DNA, 120 bp, Artificial Sequence
  ENSG00000138758_60 (sequence is synthesized)
ggagaaaacccaaactccccttctagtcaccgatcttgtgtttaggaccctggacactggtttatttatggtgaaaagaatctcactgttggagctgggctgcagatggaatgaatcaag

SEQ ID NO: 348849 - DNA, 120 bp, Artificial Sequence
  ENSG00000138758_61 (sequence is synthesized)
gaaatgcttgctggattgagatggtgatgatggaaggatctggtgggtgaagattaatacatatgttgtcaggcattgtgataattgctttatttgcattatctcaactaacttacctag

SEQ ID NO: 348850 - DNA, 120 bp, Artificial Sequence
  ENSG00000138758_62 (sequence is synthesized)
actgcccaaggtcctccaagtagtaaacaatggtgtggtgttgagctcttgccatctgggtcctgagcccaggtttctgccagttctcttgcagaggtgcagagcctggtcgatatattt

SEQ ID NO: 348851 - DNA, 120 bp, Artificial Sequence
  ENSG00000138758_63 (sequence is synthesized)
acaaaggtgcggctgctgattacagtttgccccattcatttttgccaaacacctttaacttccggaggctcttcctttgtcaagcacttttactattagctttcagtggttcggtaaaat

SEQ ID NO: 348852 - DNA, 120 bp, Artificial Sequence
  ENSG00000138758_64 (sequence is synthesized)
tctaacaacaaagaatcaggaggaaaggagaatagcttttaggagatctatgtattttcttatatcactgacgggtggagacgcaaaatgtgaaggggagaaatggatgtagaattaata

SEQ ID NO: 348853 - DNA, 120 bp, Artificial Sequence
  ENSG00000138758_65 (sequence is synthesized)
tcctagccgaagcccagaccccgtcagaatccagtggtagggatagggctggcaaggctggggtgctgttgcccacaccgtagtgagtcatggggtggttctgggtaaagttgtggggtg

SEQ ID NO: 348854 - DNA, 120 bp, Artificial Sequence
  ENSG00000138758_66 (sequence is synthesized)
aggctgccaggccaggttcaccacctcctggtcgaggagaggattgtccagatggtgcccaagcagttttctttctttttttttgtttgagacggagccttgctctgtcaccaggctgga

SEQ ID NO: 348855 - DNA, 61 bp, Artificial Sequence
  ENSG00000138758_67 (sequence is synthesized)
agctgtttcttaatggggatttgaattcaggtggtgtgaggtgtgtctgggctctgtgcct

SEQ ID NO: 348856 - DNA, 120 bp, Artificial Sequence
  ENSG00000138758_68 (sequence is synthesized)
gagctgcttctcttaccctttgggataagaggctgctggggaagagccctaatccccaaatctgcctcagtgtcaggagacagaaggatcagccccagactcaaagggcaaagggcatgg

SEQ ID NO: 348857 - DNA, 120 bp, Artificial Sequence
  ENSG00000138758_69 (sequence is synthesized)
gtggacctcactggagtggcttgctctacttccctactggacatgagctccatagcagaacagataaccagcagagaactgggtgaatctataagccgatagtagaatatattgatgccc

SEQ ID NO: 348858 - DNA, 120 bp, Artificial Sequence
  ENSG00000138758_70 (sequence is synthesized)
agcactagcagcagccggagtcggcgtaaagcacccgggcgcagccggagccggtgccgcagctgcgatggccgtggccgtggggagaccgtctctcagaggcgtctgtactactgaaat

SEQ ID NO: 348859 - DNA, 120 bp, Artificial Sequence
  ENSG00000138758_71 (sequence is synthesized)
ggataagaaaaagtaagcaggtgtcacccccctgtatcggggacctctaacaatttattcctcttgcatgtctctacttttcccatttacagactggaaactggtcctttaccagaaaga

SEQ ID NO: 348860 - DNA, 120 bp, Artificial Sequence
  ENSG00000138758_72 (sequence is synthesized)
taaaagcaagtattttctctacagtgcagggaagatgatgaaggtttttaaatttttttaaaaggtacacaaagattaatttataaaactttaccacaattgaccaagcaatcaggcctg

SEQ ID NO: 348861 - DNA, 120 bp, Artificial Sequence
  ENSG00000138758_73 (sequence is synthesized)
gaggaacctgttgtctccagtagcatcttccacaccaacactaggagtctcaaagaagacaggttgatgtctcttcagcaccctctgaagacaattctcatgactcttgatagagagcat

SEQ ID NO: 348862 - DNA, 120 bp, Artificial Sequence
  ENSG00000138758_74 (sequence is synthesized)
cctaaaatcacaattgttaaaattattttcctattctgtgttgtaagacttcgtaagccagtcactgaaattctcgttcccaaaatgaaacatttggaagagctgctagtggccactagt

SEQ ID NO: 348863 - DNA, 120 bp, Artificial Sequence
  ENSG00000138758_75 (sequence is synthesized)
ttcctcaaaattcaatatgatgaattgttttattgtgaaatgggatccaaatgcctatccagttgacacctctgccaacctcaagccaaacctaaacccattcataaaaggtttttttta

SEQ ID NO: 348864 - DNA, 120 bp, Artificial Sequence
  ENSG00000138758_76 (sequence is synthesized)
aatagggtcttaatgtcatgtgccaaagggtcagattctgctcttgagttggtcacttcctgtgatactccagtagcagctgcctgaaaccagtgggagatttaggcctcccttgacatt

SEQ ID NO: 348865 - DNA, 120 bp, Artificial Sequence
  ENSG00000138758_77 (sequence is synthesized)
ctcctgtgatttgaagctctcctttgaatcatcataaagcctagttttatgtcaatgctatcggttttgacaggaagcacgatggtaagaataccactaacgaaaacctttgtggtgtct

SEQ ID NO: 348866 - DNA, 120 bp, Artificial Sequence
  ENSG00000138758_78 (sequence is synthesized)
caatgacaaatatgcagatgccaccctcctttgtctaatgtacggtgctttagggcagctatttaatataaagcaactcagaacttgtttcaggaagtgttgctctttcgccttacatgc

SEQ ID NO: 348867 - DNA, 120 bp, Artificial Sequence
  ENSG00000138758_79 (sequence is synthesized)
caaggttctagggaaaaagctgaccatatgtaaaaacattgatgctcaagcacataaagaattacattctttaaacatagagtacataggatcaagtctctgcacaataattgagatgtg

SEQ ID NO: 348868 - DNA, 120 bp, Artificial Sequence
  ENSG00000138758_80 (sequence is synthesized)
ttatagggaaaagtgagcacagtgctattgtccacttagtcttggtgaatgtgcagtaggctcacccctaaggaatctcatgttgcctgcagtaaaaataaaaatggactgctacaatga

SEQ ID NO: 348869 - DNA, 120 bp, Artificial Sequence
  ENSG00000138759_0 (sequence is synthesized)
ctttcctctgaagcttccgaacagtctgcttcagggagcgcagcctgaggcggtgtggtgcggtgcggctgcagggcgggcgagtccccggagctgccctcagcgctgcacagtttccag

SEQ ID NO: 348870 - DNA, 120 bp, Artificial Sequence
  ENSG00000138759_1 (sequence is synthesized)
cgagcggaccccggcagatgaggtctgccgagccgggtggctcgaccaaggagtgggtgtgggtgggtctttcggggctcccggcgacccgcggtgccgacgcaacgccgacgtatggtg

SEQ ID NO: 348871 - DNA, 120 bp, Artificial Sequence
  ENSG00000138759_2 (sequence is synthesized)
ccaagcgaactttaaaaagctgcttcggacaaaccagagccaggatttccactgtcggggacccgggatcggaagggtctagcccgagggaaatgctggaagatcccatcggccagtgac

SEQ ID NO: 348872 - DNA, 120 bp, Artificial Sequence
  ENSG00000138759_3 (sequence is synthesized)
cagcaactttccggcgagattttgacgcggagaactgtgctctgcctcctcttattctcccaaagctcacgttggcgtcctgccttgcgggggaactcggcgcgctctctgcctgagcag

SEQ ID NO: 348873 - DNA, 120 bp, Artificial Sequence
  ENSG00000138759_4 (sequence is synthesized)
cgagtgaattgaaccccagcccgctccggcgcctccgggctgatgagtgtcgctctccgcccgtccatctctttttcccggaggtaaaggcccgcggtcccccaccttcagtgcgcccgg

SEQ ID NO: 348874 - DNA, 120 bp, Artificial Sequence
  ENSG00000138759_5 (sequence is synthesized)
gttccaagcgccggagccagcgttttggcggagccgcttcttggatgctgaaggctgggctcctccatcgtgggtgccgaggcggcgatgggtgtcctcaaagtgtggctcgggctggcc

SEQ ID NO: 348875 - DNA, 120 bp, Artificial Sequence
  ENSG00000138759_6 (sequence is synthesized)
ctagcgttggcggaatttgcagtattgcctcatcattccgaaggtgcttgtgtctatcaggattccttgttggcggatgccacaatttggaagcccgattcatgccagagctgccgttgc

SEQ ID NO: 348876 - DNA, 120 bp, Artificial Sequence
  ENSG00000138759_7 (sequence is synthesized)
catggtgatattgttatctgcaaacctgctgtttgcagaaaccctcaatgtgcctttgagaagggagaagtgcttcaaatagctgccaaccaatgctgtcctgagtgtgttttgaggact

SEQ ID NO: 348877 - DNA, 120 bp, Artificial Sequence
  ENSG00000138759_8 (sequence is synthesized)
ccaggatcttgccatcatgaaaagaaaatccatgagcatgggacagaatgggcctcttctccatgtagtgtgtgctcttgcaatcatggggaagtccgatgtaccccccaaccatgccca

SEQ ID NO: 348878 - DNA, 120 bp, Artificial Sequence
  ENSG00000138759_9 (sequence is synthesized)
ccgctgtcatgtggacaccaggagctggcattcatccctgaaggaagctgctgcccagtttgtgtgggccttgggaaaccctgttcctatgaaggccatgtgtttcaggatggggaggac

SEQ ID NO: 348879 - DNA, 120 bp, Artificial Sequence
  ENSG00000138759_10 (sequence is synthesized)
tggcggctgagccggtgtgccaaatgtctgtgtagaaatggggttgcccagtgcttcacagctcagtgtcagcctctattttgtaaccaggatgagactgtagtccgagtccctggaaaa

SEQ ID NO: 348880 - DNA, 120 bp, Artificial Sequence
  ENSG00000138759_11 (sequence is synthesized)
tgttgcccgcagtgctctgcaagatcctgctctgcagctggccaagtatacgagcatggtgagcagtggagcgaaaatgcctgcaccacgtgtatatgtgaccggggtgaggtcaggtgt

SEQ ID NO: 348881 - DNA, 120 bp, Artificial Sequence
  ENSG00000138759_12 (sequence is synthesized)
cacaagcaggcctgcctgcccctgagatgcggaaagggtcagagcagggctcggcgtcatgggcaatgctgtgaggaatgtgtgtctcctgccgggagctgctcctatgatggagttgtg

SEQ ID NO: 348882 - DNA, 120 bp, Artificial Sequence
  ENSG00000138759_13 (sequence is synthesized)
cggtaccaggacgaaatgtggaagggctcggcctgtgagttctgcatgtgtgatcatggccaagtgacctgccagactggagagtgtgccaaagtggagtgtgcccgggatgaagaatta

SEQ ID NO: 348883 - DNA, 120 bp, Artificial Sequence
  ENSG00000138759_14 (sequence is synthesized)
attcacttagatggaaagtgttgtcctgaatgcatttcaaggaatggttattgtgtttatgaagaaactggagaatttatgtcatcaaatgctagtgaagttaaacgtattccagaggga

SEQ ID NO: 348884 - DNA, 120 bp, Artificial Sequence
  ENSG00000138759_15 (sequence is synthesized)
gagaagtgggaagatggcccttgcaaggtgtgtgagtgccgaggggctcaggtaacttgctacgagccctcttgcccaccatgtccagtgggcacactggccttagaggtgaagggacag

SEQ ID NO: 348885 - DNA, 120 bp, Artificial Sequence
  ENSG00000138759_16 (sequence is synthesized)
tgctgtccagactgcacatcagttcattgccatccagattgtttgacatgctctcagtctccagaccactgtgacctctgccaagatcctaccaagttactgcagaatggatggtgtgtg

SEQ ID NO: 348886 - DNA, 120 bp, Artificial Sequence
  ENSG00000138759_17 (sequence is synthesized)
cacagctgtggactgggtttttaccaagctggcagtctctgtttagcctgccagccccagtgctccacgtgtaccagtgggctggagtgctcatcctgccagcctcccctgctgatgcgg

SEQ ID NO: 348887 - DNA, 120 bp, Artificial Sequence
  ENSG00000138759_18 (sequence is synthesized)
cacgggcagtgtgtgcctacctgtggggacggcttctaccaagatcgccattcctgtgcagtctgccatgagtcctgtgcaggttgctggggcccaacggagaagcactgcttggcctgc

SEQ ID NO: 348888 - DNA, 120 bp, Artificial Sequence
  ENSG00000138759_19 (sequence is synthesized)
agagatcccctccacgtgctgagagatggcggctgtgagagcagctgtggaaaaggcttctacaacaggcagggcacctgtagcgcttgtgaccaatcctgtgacagttgtggccccagt

SEQ ID NO: 348889 - DNA, 120 bp, Artificial Sequence
  ENSG00000138759_20 (sequence is synthesized)
agccccaggtgtcttacctgtactgagaagacagtgctgcatgatgggaaatgcatgtctgaatgccctggcgggtactatgctgatgccactggcaggtgcaaagtttgtcataactca

SEQ ID NO: 348890 - DNA, 120 bp, Artificial Sequence
  ENSG00000138759_21 (sequence is synthesized)
tgtgccagctgctctgggcccacaccctctcactgtacagcctgcagcccccccaaggctctgcgtcaaggccactgtctgccccgctgtggagagggtttctactctgaccatggagtc

SEQ ID NO: 348891 - DNA, 120 bp, Artificial Sequence
  ENSG00000138759_22 (sequence is synthesized)
tgcaaagcctgtcactcctcctgcctggcttgtatgggtcccgcaccctctcactgtactgggtgtaagaagccagaggaaggactgcaagtggagcagctgtctgacgtgggcatcccc

SEQ ID NO: 348892 - DNA, 120 bp, Artificial Sequence
  ENSG00000138759_23 (sequence is synthesized)
tctggcgagtgtctagcccagtgtagagcccatttttacttggagagcactggcatatgtgaagcttgccaccagtcctgtttcagatgtgcagggaaaagcccacataactgcacagac

SEQ ID NO: 348893 - DNA, 120 bp, Artificial Sequence
  ENSG00000138759_24 (sequence is synthesized)
tgtgggccttcccatgtgctgttggatgggcagtgcctctcccagtgcccagatggctactttcaccaggaaggtagttgcacagagtgtcacccaacctgcaggcagtgtcatgggccg

SEQ ID NO: 348894 - DNA, 120 bp, Artificial Sequence
  ENSG00000138759_25 (sequence is synthesized)
ttggagtctgactgcatctcctgttaccctcacatctctcttaccaatggtaactgcaggaccagctgcagggaagagcagttcctcaacctcgtgggatactgtgctgactgccatcac

SEQ ID NO: 348895 - DNA, 120 bp, Artificial Sequence
  ENSG00000138759_26 (sequence is synthesized)
ctgtgccagcactgtgcagctgatctccacaacactgggagcatctgcctcaggtgccagaatgcccactacctgctgctcggggaccactgtgttcctgactgcccttcaggatactat

SEQ ID NO: 348896 - DNA, 120 bp, Artificial Sequence
  ENSG00000138759_27 (sequence is synthesized)
gcagagagaggagcttgtaaaaaatgccactcctcctgcagaacctgccagggcagaggacctttctcctgctcctcatgtgacaccaacctcgtgctgtcccacactggcacctgcagc

SEQ ID NO: 348897 - DNA, 120 bp, Artificial Sequence
  ENSG00000138759_28 (sequence is synthesized)
accacctgcttccctgggcactatcttgatgacaatcatgtttgccagccatgcaacacacactgtggaagctgtgattcacaggccagctgtacctcctgccgagatccaaacaaggtt

SEQ ID NO: 348898 - DNA, 120 bp, Artificial Sequence
  ENSG00000138759_29 (sequence is synthesized)
ctgctctttggggaatgtcaatacgagagctgcgccccacagtactatcttgacttctccaccaacacgtgcaaagagtgtgattggagctgcagtgcatgcagtgggcccctgaaaaca

SEQ ID NO: 348899 - DNA, 120 bp, Artificial Sequence
  ENSG00000138759_30 (sequence is synthesized)
gactgcctgcagtgcatggatggctatgttctccaggatggggcctgcgtggagcagtgcttgtcatcattttaccaggactcgggcctctgcaagaactgtgacagctactgtctccag

SEQ ID NO: 348900 - DNA, 120 bp, Artificial Sequence
  ENSG00000138759_31 (sequence is synthesized)
tgccaaggtccccatgagtgtacccgctgcaaagggccatttctcctcttggaagcccagtgtgtccaggaatgtgggaaggggtactttgcagatcatgcaaagcacaaatgcacagcc

SEQ ID NO: 348901 - DNA, 120 bp, Artificial Sequence
  ENSG00000138759_32 (sequence is synthesized)
tgccctcaggggtgcttgcagtgcagccacagggaccgttgtcacctctgtgaccatgggttctttctgaagagtggcctctgtgtttacaactgtgttcctggcttttctgtccacacc

SEQ ID NO: 348902 - DNA, 120 bp, Artificial Sequence
  ENSG00000138759_33 (sequence is synthesized)
tctaatgaaacatgttctggcaaaatacacacccctagtcttcatgtgaatggttccctgatcctcccaattggttcaataaagccactggatttttccctcctgaatgtccaagaccag

SEQ ID NO: 348903 - DNA, 120 bp, Artificial Sequence
  ENSG00000138759_34 (sequence is synthesized)
gagggtagggtcgaagatctcctatttcatgttgtgagcactcccaccaatggtcagctagtgctctcaagaaatggaaaagaggttcagctggacaaggctggccgttttagctggaaa

SEQ ID NO: 348904 - DNA, 120 bp, Artificial Sequence
  ENSG00000138759_35 (sequence is synthesized)
gatgtgaacgagaagaaagtgcgttttgtgcacagcaaagaaaaactcaggaaaggttaccttttcctgaaaattagtgaccagcagttcttctctgagccacagctgatcaacatacaa

SEQ ID NO: 348905 - DNA, 120 bp, Artificial Sequence
  ENSG00000138759_36 (sequence is synthesized)
gcattttcaacacaggccccctatgtgctgagaaatgaagttctccacattagcagaggagagagggcaaccatcaccacccagatgcttgacatccgagatgatgacaacccacaggat

SEQ ID NO: 348906 - DNA, 120 bp, Artificial Sequence
  ENSG00000138759_37 (sequence is synthesized)
gtggtcattgaaataatcgatcctccacttcatggccaattgcttcagacacttcagtccccggcaacccctatctatcaattccagctggatgaactctctagaggccttctccactat

SEQ ID NO: 348907 - DNA, 120 bp, Artificial Sequence
  ENSG00000138759_38 (sequence is synthesized)
gctcatgatggttcagacagcacatccgatgttgcagtcttgcaggccaatgatggacactccttccataatatactgttccaagtgaagaccgtgcctcagaatgacaggggtcttcag

SEQ ID NO: 348908 - DNA, 120 bp, Artificial Sequence
  ENSG00000138759_39 (sequence is synthesized)
cttgtggctaattcgatggtgtgggttccagaaggggggatgctgcagatcaccaacagaatcttacaggccgaggctcctggtgccagtgctgaagaaatcatctacaagattacacaa

SEQ ID NO: 348909 - DNA, 120 bp, Artificial Sequence
  ENSG00000138759_40 (sequence is synthesized)
gactacccccagtttggggaggtggtccttctagtgaatatgcctgcagacagccctgcagatgaagggcagcacctgcctgatgggaggacagctacccccaccagcaccttcacccag

SEQ ID NO: 348910 - DNA, 120 bp, Artificial Sequence
  ENSG00000138759_41 (sequence is synthesized)
caggacatcaatgaaggcatcgtatggtacaggcactcaggagccccagcccagagcgactccttccgcttcgaggtgtccagtgcctccaatgcccagacccgcctggagagccacatg

SEQ ID NO: 348911 - DNA, 120 bp, Artificial Sequence
  ENSG00000138759_42 (sequence is synthesized)
ttcaacatcgcgatcttaccacagacacctgaagcacctaaagtgtctctggaagcatctctccatatgactgctagagaagatggcctgactgttattcagcctcattccctctccttc

SEQ ID NO: 348912 - DNA, 120 bp, Artificial Sequence
  ENSG00000138759_43 (sequence is synthesized)
ataaactctgagaagccaagtggaaagattgtctacaacatcactctacctctgcatccaaatcaaggtatcatcgagcaccgggaccaccctcactctcctatccggtatttcacgcaa

SEQ ID NO: 348913 - DNA, 120 bp, Artificial Sequence
  ENSG00000138759_44 (sequence is synthesized)
gaggatattaaccagggcaaagtcatgtaccgccctcccccggcagcaccccacctccaggagctcatggccttctcgttcgctggtctcccagaatcagtgaaattccacttcacagtt

SEQ ID NO: 348914 - DNA, 120 bp, Artificial Sequence
  ENSG00000138759_45 (sequence is synthesized)
tcagatggagaacacacaagtccggagatggtcctcaccattcacttacttcccagtgatcagcaactgccagtgttccaggtcacagctccacggctggcggtcagcccaggaggcagc

SEQ ID NO: 348915 - DNA, 120 bp, Artificial Sequence
  ENSG00000138759_46 (sequence is synthesized)
acttctgtaggacttcaggtggtagtaagagatgctgagacagcgcccaaagaactcttctttgagcttcggagacctccacagcatggtgtgcttcttaagcatacagctgagttccga

SEQ ID NO: 348916 - DNA, 120 bp, Artificial Sequence
  ENSG00000138759_47 (sequence is synthesized)
aggccgatggccacaggtgacactttcacctatgaggatgttgagaaaaatgctctacagtatatacatgatggttcctctacccgggaagacagcatggagatctcagtcacagatggc

SEQ ID NO: 348917 - DNA, 120 bp, Artificial Sequence
  ENSG00000138759_48 (sequence is synthesized)
ctcacagtgacaatgctggaggtgagagtagaggtgtccctgtcagaagaccgagggcctcgactggctgctggctcctctctgagcattactgttgccagtaaaagcacagccataatc

SEQ ID NO: 348918 - DNA, 120 bp, Artificial Sequence
  ENSG00000138759_49 (sequence is synthesized)
actaggtcacaccttgcttacgtggatgattcttcccccgacccagagatctggattcagttaaattatctgccctcatatggtactctcttaagaatctcaggatctgaggtggaagag

SEQ ID NO: 348919 - DNA, 120 bp, Artificial Sequence
  ENSG00000138759_50 (sequence is synthesized)
ctctcagaagtttccaatttcacaatggaagacatcaataacaagaaaatcagatactcagctgtgtttgaaactgatggtcatctggttactgatagcttctatttctctgtctctgac

SEQ ID NO: 348920 - DNA, 120 bp, Artificial Sequence
  ENSG00000138759_51 (sequence is synthesized)
atggaccacaaccatctggataatcagatatttaccatcatgatcactcctgctgaaaatccacctccagtcattgcttttgctgaccttatcacggttgatgagggagggagagcacca

SEQ ID NO: 348921 - DNA, 120 bp, Artificial Sequence
  ENSG00000138759_52 (sequence is synthesized)
ctctcatttcaccatttttttgctactgatgatgatgacaacctccagagagatgccatcattaaactaagtgctctgcccaaatatggctgcattgagaacacaggaacaggtgatcgt

SEQ ID NO: 348922 - DNA, 120 bp, Artificial Sequence
  ENSG00000138759_53 (sequence is synthesized)
tttggccctgaaactgccagtgacctagaggcatcatttcctattcaagacgtcctggaaaactacatttactactttcagagtgttcatgaaagcattgagccaacccatgatattttt

SEQ ID NO: 348923 - DNA, 120 bp, Artificial Sequence
  ENSG00000138759_54 (sequence is synthesized)
agtttttatgtgagtgatggaaccagtcgttcagaaattcacagcatcaatatcaccattgagaggaagaacgatgagcctcccaggatgaccttgcagcccctcagagtgcagctgagc

SEQ ID NO: 348924 - DNA, 120 bp, Artificial Sequence
  ENSG00000138759_55 (sequence is synthesized)
tcgggagtggtgataagcaattcttctttgagcctgcaagacctggacaccccagataatgagctcatttttgtattgacaaaaaagcctgaccacggtcatgtactctggaggcaaact

SEQ ID NO: 348925 - DNA, 120 bp, Artificial Sequence
  ENSG00000138759_56 (sequence is synthesized)
gcttctgagcctctggagaatgggagagttttagtccagggctcaaccttcacctaccaggatatcctagctgggctggttgggtatgtgcctagtgtccctggcatggtcgtggatgag

SEQ ID NO: 348926 - DNA, 120 bp, Artificial Sequence
  ENSG00000138759_57 (sequence is synthesized)
ttccagttctccctcactgatggcctccacgtggacacagggaggatgaagatctacacagaactgcctgcaagtgacacacctcacttggctataaaccaaggcctacagctctcagca

SEQ ID NO: 348927 - DNA, 120 bp, Artificial Sequence
  ENSG00000138759_58 (sequence is synthesized)
gggtctgtagcacgcatcacagaacagcacttgaaagtgacagatattgactcagatgaccatcaggttatgtacatcatgaaggaagatcctggtgcagggcgcctgcagatgatgaag

SEQ ID NO: 348928 - DNA, 120 bp, Artificial Sequence
  ENSG00000138759_59 (sequence is synthesized)
catggcaacctggagcaaatttctattaaaggccccatccgaagtttcacccaggcagacattagccaaggccacgtagaatatagtcatggaacaggagaacctggagggagctttgct

SEQ ID NO: 348929 - DNA, 120 bp, Artificial Sequence
  ENSG00000138759_60 (sequence is synthesized)
tttaaatttgatgtggttgatggagaaggcaacagattgattgacaagtcattttccatcagcattctagaagacaaatccccaccagtcatcaccaccaataaaggactggtcttggat

SEQ ID NO: 348930 - DNA, 120 bp, Artificial Sequence
  ENSG00000138759_61 (sequence is synthesized)
gaaaactcagtgaagaaaatcaccaccctgcagctgtctgccactgaccaggacagtgggcctacagaattgatctacagaatcaccagacagccccagctgggccacttggaacatgca

SEQ ID NO: 348931 - DNA, 120 bp, Artificial Sequence
  ENSG00000138759_62 (sequence is synthesized)
gcatcaccaggtatccagattagttcctttactcaagctgatctgacttcacgaaatgttcagtatgtccattctagtgaggctgagaaacattcagatgccttcagctttacactgtct

SEQ ID NO: 348932 - DNA, 120 bp, Artificial Sequence
  ENSG00000138759_63 (sequence is synthesized)
gatggagtcagtgaggtgactcagactttccatatcactcttcaccctgtcgatgattcgctgcccgtcgtacagaacttaggaatgcgggtgcaggagggcatgaggaagaccatcaca

SEQ ID NO: 348933 - DNA, 120 bp, Artificial Sequence
  ENSG00000138759_64 (sequence is synthesized)
gagtttgagcttaaggcggtggatgctgacacagaggccgagtctgtcacattcaccatcgtgcagcctccacgccatggcaccatcgagcgaaccagcaatgggcagcatttccacctc

SEQ ID NO: 348934 - DNA, 120 bp, Artificial Sequence
  ENSG00000138759_65 (sequence is synthesized)
acctccaccttcaccatgaaagatatctaccagaaccgggtcagctacagccatgacggcagtaactccctcaaggaccggttcaccttcactgtttctgatgggacaaaccccttcttt

SEQ ID NO: 348935 - DNA, 120 bp, Artificial Sequence
  ENSG00000138759_66 (sequence is synthesized)
cagcagcacctcagccgttccgagtagacatcctcccggtagatgatggcacgcctagaattgtcaccaacctgggactccagtggctggaatacatggatggcaaggcaaccaacctga

SEQ ID NO: 348936 - DNA, 120 bp, Artificial Sequence
  ENSG00000138759_67 (sequence is synthesized)
tcaccaagaaggaactgctgaccatggacccagacaccgaggacgcgcagcttgtctatgagataacgacgggccctaagcatggctttgtggagaacaagctgcagcctggcagagctg

SEQ ID NO: 348937 - DNA, 120 bp, Artificial Sequence
  ENSG00000138759_68 (sequence is synthesized)
ctgccactttcacccaggaggatgtgaacttggggttgattcgttatgtgttgcacaaggagaagatccgtgagatgatggatagttttcagtttctggtgaaagacagtaaacccaatg

SEQ ID NO: 348938 - DNA, 120 bp, Artificial Sequence
  ENSG00000138759_69 (sequence is synthesized)
tggtcagcgacaatgtcttccatatccagtggtcactcatcagctttaaatataccagctacaatgtcagtgagaaggcagggtctgtcagtgtcacggtgcagaggactgggaacctga

SEQ ID NO: 348939 - DNA, 120 bp, Artificial Sequence
  ENSG00000138759_70 (sequence is synthesized)
accaatatgccatcgtcctgtgtcgcaccgagcaaggcaccgccagctccagctccagggtcagctcccaacctgggcaacaggactatgtagagtatgctggccaggtccagtttgatg

SEQ ID NO: 348940 - DNA, 120 bp, Artificial Sequence
  ENSG00000138759_71 (sequence is synthesized)
agcgagaggacaccaagtcctgcaccattgtcatcaacgatgatgacgtgtttgaaaatgttgagagtttcactgtggagctcagcatgccagcttatgccctgttaggggaattcaccc

SEQ ID NO: 348941 - DNA, 120 bp, Artificial Sequence
  ENSG00000138759_72 (sequence is synthesized)
aggcgaaggtcattatcaacgataccgaggatgaacccacattagagtttgacaagaagatctactgggttaacgagagcgctggttttctgtttgcacctattgaaagaaaaggagatg

SEQ ID NO: 348942 - DNA, 120 bp, Artificial Sequence
  ENSG00000138759_73 (sequence is synthesized)
caagcagcattgtatctgcaatttgctacacagtccctaagtcagctatgggaagtagcctctatgctctagaatcaggctctgattttaaatctagagggatgtctgccgcgagtcgtg

SEQ ID NO: 348943 - DNA, 120 bp, Artificial Sequence
  ENSG00000138759_74 (sequence is synthesized)
tgatattcgggcctggtgtgaccatgtccacctgtgatgtcatgcttattgatgacagcgagtatgaagaggaagaagagtttgagattgccttggcagatgcctctgacaatgcccgca

SEQ ID NO: 348944 - DNA, 120 bp, Artificial Sequence
  ENSG00000138759_75 (sequence is synthesized)
ttggaagggtggcgacagccaaggtgctcattagtggtcccaacgatgcctcgactgtgtccctgggcaacacggctttcactgtcagtgaggacgcaggcacagtaaagattccagtta

SEQ ID NO: 348945 - DNA, 120 bp, Artificial Sequence
  ENSG00000138759_76 (sequence is synthesized)
tccgccatggtactgacctctctactttcgcatctgtctggtgtgcaacgcggccctcagacccagcttctgccacaccaggagttgactacgttcccagctctcggaaggtggaatttg

SEQ ID NO: 348946 - DNA, 120 bp, Artificial Sequence
  ENSG00000138759_77 (sequence is synthesized)
ggcctggtgtcattgaacagtattgcaccttgactatcttggatgacactcagtatccggtaattgaaggactggagacatttgtggttttcctcagctcagcacaaggagccgaactga

SEQ ID NO: 348947 - DNA, 120 bp, Artificial Sequence
  ENSG00000138759_78 (sequence is synthesized)
ccaaacccttccaggcagtcattgcaattaatgacacattccaagatgtgcccagcatgcagtttgccaaggatttgctcctagtgaaggagaaggagggtgtcctgcatgtccctatca

SEQ ID NO: 348948 - DNA, 120 bp, Artificial Sequence
  ENSG00000138759_79 (sequence is synthesized)
ctcggagcggagacctgagctatgagtcatcagtgaggtgctatactcagagccattccgctcaggtcatggaggactttgaggagagacaaaatgcagactcttcacggattacatttc

SEQ ID NO: 348949 - DNA, 120 bp, Artificial Sequence
  ENSG00000138759_80 (sequence is synthesized)
tcaaaggggacaaagtgaagaactgtacggtctatatccacgatgactccatgtttgagccagaggaacagttcagggtctacctcggccttcctcttggaaaccactggagtggagcta

SEQ ID NO: 348950 - DNA, 120 bp, Artificial Sequence
  ENSG00000138759_81 (sequence is synthesized)
gaattggaaagaataacatggccaccatcaccatatccaatgatgaagatgcccccaccattgagtttgaagaagctgcataccaagtccgggaacccgcaggcccagatgccattgcga

SEQ ID NO: 348951 - DNA, 120 bp, Artificial Sequence
  ENSG00000138759_82 (sequence is synthesized)
ttctgaacatcaaggtgatccgcagaggggatcagaacaggacctccaaggttcgctgcagcacgcgggatggctctgcccagtctggtgtggattattacccaaagagccgagtcttga

SEQ ID NO: 348952 - DNA, 120 bp, Artificial Sequence
  ENSG00000138759_83 (sequence is synthesized)
agttcagtcccggtgtggatcatatcttttttaaagttgagatcctgtccaatgaagaccgggaatggcatgaatctttctcactagtccttggcccagatgacccagtggaagcagttc

SEQ ID NO: 348953 - DNA, 120 bp, Artificial Sequence
  ENSG00000138759_84 (sequence is synthesized)
ttggggatgtgactactgccacggtgacaattctagaccaggaggcagcagggagcctcatattgccagcaccacccattgtggtcacacttgctgactatgaccatgtggaagaagtta

SEQ ID NO: 348954 - DNA, 120 bp, Artificial Sequence
  ENSG00000138759_85 (sequence is synthesized)
ccaaggaaggagtcaagaaatccccctccccaggctacccactggtctgtgtcaccccctgcgaccctcatttccccagatacgctgtcatgaaggagcgctgcagtgaggccggcatca

SEQ ID NO: 348955 - DNA, 120 bp, Artificial Sequence
  ENSG00000138759_86 (sequence is synthesized)
accagacatctgtgcagttcagctgggaagtggctgcccccactgatggcaatggggcccggtctccctttgaaaccatcactgacaacacaccattcaccagtgtcaaccacatggtcc

SEQ ID NO: 348956 - DNA, 120 bp, Artificial Sequence
  ENSG00000138759_87 (sequence is synthesized)
tggacagcatttacttcagccggaggttccatgtgcgttgtgtggccaaggctgtggacaaggtgggccatgtggggacccccttaaggagcaacattgttaccattggaacagacagtg

SEQ ID NO: 348957 - DNA, 120 bp, Artificial Sequence
  ENSG00000138759_88 (sequence is synthesized)
ctatctgccacacaccagtggtggctgggacatccagaggcttccaggctcagtccttcatcgcaaccttgaaatacctggatgtcaaacataaggagcatccgaacagaatccacattt

SEQ ID NO: 348958 - DNA, 120 bp, Artificial Sequence
  ENSG00000138759_89 (sequence is synthesized)
cggtgcagatcccacaccaggatggaatgctgccccttatctccaccatgccgttgcacaacttacattttctactgtctgagtccatctacagacaccagcacgtctgctccaatttag

SEQ ID NO: 348959 - DNA, 120 bp, Artificial Sequence
  ENSG00000138759_90 (sequence is synthesized)
ttaccacctatgacctgagaggcatctcagaggcagggttcctggatgatgtggtctatgatagcactgccctggggcctggctacgatcgccccttccagtttgaccccagcgtgcgag

SEQ ID NO: 348960 - DNA, 120 bp, Artificial Sequence
  ENSG00000138759_91 (sequence is synthesized)
agccgaagaccatccagctctacaaacacctgaacctgaagagctgcgtgtggacctttgatgcttattatgacatgactgagctgattgacgtctgtgggggctctgtaaccgctgact

SEQ ID NO: 348961 - DNA, 120 bp, Artificial Sequence
  ENSG00000138759_92 (sequence is synthesized)
tccaggtgagggactctgcccagtccttcttgacagtgcacgtgcctctatatgtgtcctacatctatgtgacagcccccaggggctgggcctccttggagcaccacaccgagatggagt

SEQ ID NO: 348962 - DNA, 120 bp, Artificial Sequence
  ENSG00000138759_93 (sequence is synthesized)
tttctttcttctatgacactgttctctggagaacaggaatccagacagacagcgtgctctctgcaaggcttcagataataagaatctacattcgagaggatggccgtcttgtcattgaat

SEQ ID NO: 348963 - DNA, 120 bp, Artificial Sequence
  ENSG00000138759_94 (sequence is synthesized)
tcaagacccatgccaaattcagaggacagtttgtgatggagcatcacactctcccagaagtgaaatctttcgtattgactccagaccacctaggaggaattgaatttgacttgcagctat

SEQ ID NO: 348964 - DNA, 120 bp, Artificial Sequence
  ENSG00000138759_95 (sequence is synthesized)
tatggagcgctcagacttttgattctccacatcaactctggagagccacaagctcttataacaggaaggactactcaggagagtacaccatctacctgatcccttgcacagtgcagccca

SEQ ID NO: 348965 - DNA, 120 bp, Artificial Sequence
  ENSG00000138759_96 (sequence is synthesized)
cacagccatgggttgacccaggagagaagcctttggcctgcactgcacatgccccagaaagattcctgatacccattgcattccagcagaccaaccgccctgtgccagttgtgtattcac

SEQ ID NO: 348966 - DNA, 120 bp, Artificial Sequence
  ENSG00000138759_97 (sequence is synthesized)
ttaacactgaatttcagctctgcaataatgagaaggtgttcctaatggatcccaatacatctgatatgtcactagcagaaatggattacaaaggagccttttcaaaaggtcaaatccttt

SEQ ID NO: 348967 - DNA, 120 bp, Artificial Sequence
  ENSG00000138759_98 (sequence is synthesized)
atggccgagtactttggaatccagaacaaaatcttaattctgcttacaaactccagctggagaaagtctatctttgtacgggcaaggatggttatgtgcctttctttgatcccacgggga

SEQ ID NO: 348968 - DNA, 120 bp, Artificial Sequence
  ENSG00000138759_99 (sequence is synthesized)
caatctacaatgaagggccccagtatggatgcattcagccaaacaaacacctaaaacacagattcctgctgttggaccgcaatcagccagaggtaactgataagtacttccatgatgtgc

SEQ ID NO: 348969 - DNA, 120 bp, Artificial Sequence
  ENSG00000138759_100 (sequence is synthesized)
cttttgaggctcactttgcctctgagttgcctgatttccatgtggtcagtaacatgccaggtgtggatggatttactctaaaagtagatgcactctataaggtggaagcaggacaccagt

SEQ ID NO: 348970 - DNA, 120 bp, Artificial Sequence
  ENSG00000138759_101 (sequence is synthesized)
ggtatctccaggtcatctacatcattggccctgacaccatctcagggccccgggtccagcgctctctcacagctccactcagacgcaaccgaagggacctggtagagcccgatggccagc

SEQ ID NO: 348971 - DNA, 120 bp, Artificial Sequence
  ENSG00000138759_102 (sequence is synthesized)
tgatccttgatgattccctcatctatgacaatgaaggagaccaagtcaagaatggcaccaatatgaagtccctgaatctggagatgcaagagttggcggtagctgcgtccctgtcacaga

SEQ ID NO: 348972 - DNA, 120 bp, Artificial Sequence
  ENSG00000138759_103 (sequence is synthesized)
ctggggcgtccattggcagtgccctggctgcaatcatgcttctacttctggtgtttttggtggcttgttttatcaacaggaaatgccagaaacagaggaagaagaagcccgcagaggaca

SEQ ID NO: 348973 - DNA, 120 bp, Artificial Sequence
  ENSG00000138759_104 (sequence is synthesized)
ttttggaagaatatcctctgaataccaaggtagaagtgcccaagaggcacccggaccgggtggagaagaacgtgaatagacactactgcactgtgcggaacgtcaacatcctgagtgagc

SEQ ID NO: 348974 - DNA, 120 bp, Artificial Sequence
  ENSG00000138759_105 (sequence is synthesized)
ctgaggcggcttacacgttcaaaggtgctaaagtcaaaagactgaatctagaagtcagagttcacaacaatttacaagatggaacagaagtttaatggaggagacctatgtgtatttttt

SEQ ID NO: 348975 - DNA, 120 bp, Artificial Sequence
  ENSG00000138759_106 (sequence is synthesized)
tctaaaatcatttttataaaatggggggaaatactggtatttttataatctcgcagataaaaaagggaaaactatagctttgagtggcagacagcacacatcacatgcatcaactcacaa

SEQ ID NO: 348976 - DNA, 120 bp, Artificial Sequence
  ENSG00000138759_107 (sequence is synthesized)
ctgagctacctcattcagcaaagaaccactgagaaccccagagtattacagttatttccgtagatccctttaatagtgtcaacaactgtacacagctccttctgtaaggctggtcttaga

SEQ ID NO: 348977 - DNA, 120 bp, Artificial Sequence
  ENSG00000138759_108 (sequence is synthesized)
aaacaagtactttagtatcaggacaggagttgaacaattaggttagcagatggagatgagaggactgggtagagtaccatggcagatctcagagagaagaagtaggtacgggcctttggt

SEQ ID NO: 348978 - DNA, 120 bp, Artificial Sequence
  ENSG00000138759_109 (sequence is synthesized)
tccctcccccagccccagctttctcctacagggcttttcctgagtccccagacagcagagtatgaactgctgacacccagattccattaaaaattctgctaatcgacacaacacatatat

SEQ ID NO: 348979 - DNA, 120 bp, Artificial Sequence
  ENSG00000138759_110 (sequence is synthesized)
ttgctcatgatttcacttgacagcgtatgctccttggcctctaattgtactttgcttttccagagccctttttacctggggatttcagtgtgcttaagtaaaatcctctgaaaaccacgg

SEQ ID NO: 348980 - DNA, 120 bp, Artificial Sequence
  ENSG00000138759_111 (sequence is synthesized)
gagcctctgcctcctcagccacagagaactccctcctacaaagggggagactgaaacccgagttaaggaggggcctggcaggcgtatcagagcacattagtgatgcccttcaccccaggg

SEQ ID NO: 348981 - DNA, 120 bp, Artificial Sequence
  ENSG00000138759_112 (sequence is synthesized)
aggtgtctgttcccaactagtttatgtggcactgagacatccatccctgaccaaggatgctgcgaaacaggatcaatgtactacggccttttaattcaacattgccataaatgctttaaa

SEQ ID NO: 348982 - DNA, 120 bp, Artificial Sequence
  ENSG00000138759_113 (sequence is synthesized)
gaaaacccaccacactttcctcctactccggtctttgcccgttcctgtaacagacaatcccatgtcctaggtatggttttttattctgttagtgcttcgggaaagtaagtgattcatttg

SEQ ID NO: 348983 - DNA, 120 bp, Artificial Sequence
  ENSG00000138759_114 (sequence is synthesized)
aataaggcaaattaggagaaagcccaggttggggtgaaatcagacttaacagatacatgctggttctccttgctgtgtgtgacacagcagacagaggcactattcctggtgcagtatttc

SEQ ID NO: 348984 - DNA, 120 bp, Artificial Sequence
  ENSG00000138759_115 (sequence is synthesized)
agggatttctctttgaggggttcttttctggtagctcaggcaattatttttaccatatcagcacatgacaaggccatgaacacatggctctaaaataatttagtgttcaagtatcagctt

SEQ ID NO: 348985 - DNA, 120 bp, Artificial Sequence
  ENSG00000138759_116 (sequence is synthesized)
aactattttgtgtaggctacacacagcttgcttttgtttctcttctgtttctgccttattggcggaaacataagcgtgcatgccatgttgttttgaattggaggcacaatttcattattc

SEQ ID NO: 348986 - DNA, 120 bp, Artificial Sequence
  ENSG00000138759_117 (sequence is synthesized)
gagagtaaaagacatgtcctcttctgatgcatggcacaccatagtcaccaagcaaataacagagccttcacattgtgtaatatttgtatgagaatgactcaagctctttgagaacattcc

SEQ ID NO: 348987 - DNA, 120 bp, Artificial Sequence
  ENSG00000138759_118 (sequence is synthesized)
aaactagtaacatttcgctactaaaagctagaaaggatgaactgtgaaaggttctaggcagctctgtgagactccaagctccttgaaagtaggacctttgtgagccacgcctttcattct

SEQ ID NO: 348988 - DNA, 120 bp, Artificial Sequence
  ENSG00000138759_119 (sequence is synthesized)
tcaacagtgccttgcatgtaacaagcactccagaaatgtttgttgaatgaatgaatggtgtcatgggtgaatgatggggagtaaatttaggaaggggaagtgagagagtatggtggcaat

SEQ ID NO: 348989 - DNA, 120 bp, Artificial Sequence
  ENSG00000138759_120 (sequence is synthesized)
atcacaagggaggagagaggaaaacaattatcttctctacttggattatgagataaccttttcttggaggaaagaaacaccgctttacaaaggcatgactctggcggtggtcctaaggaa

SEQ ID NO: 348990 - DNA, 120 bp, Artificial Sequence
  ENSG00000138759_121 (sequence is synthesized)
gcatgagcagaaaattcataaaaatgtatcatcagcaggagatgagactatgaattggcatccagaacaggagatttagagcaaaatctaatttagcattctgagatgagtgtcaggttt

SEQ ID NO: 348991 - DNA, 120 bp, Artificial Sequence
  ENSG00000138759_122 (sequence is synthesized)
tcaggagagaatgagttggggtgagcccagagtctgaaactcctgactggtcaggtgctacttaagaccagcttgggcaattcagggcagaactcctgtatcagcctcatggacacccag

SEQ ID NO: 348992 - DNA, 120 bp, Artificial Sequence
  ENSG00000138759_123 (sequence is synthesized)
aattggtatctcatggctggagagctgatcagccaggcacagaatctccagaacaacctagagagtgaatgctaatttgtagagcgaacttccatttggcccattatttgtaactgtgta

SEQ ID NO: 348993 - DNA, 120 bp, Artificial Sequence
  ENSG00000138759_124 (sequence is synthesized)
actgctccaagtgccagaatgcttacacgttaaagcagcacctttccatttgcccacatattcttcttgcacaccccttccattactgctgaataggacattgcatgggaagagtacaga

SEQ ID NO: 348994 - DNA, 120 bp, Artificial Sequence
  ENSG00000138759_125 (sequence is synthesized)
ggtggcagaatgaagctagagtgggaaggactaaagactgagccccagagtgctcccagcaaccgccacgtacaaggtctgaaatgacaagggcaagagtgagataggaaactgtgtgtg

SEQ ID NO: 348995 - DNA, 120 bp, Artificial Sequence
  ENSG00000138759_126 (sequence is synthesized)
aaaggaaagcccttgcagtatttctgcctccctttctttctgcctttcaccccactaaatgtatgttattgaatgccagtacttctctagtggatgcacacttgttaaatagtgttaaga

SEQ ID NO: 348996 - DNA, 120 bp, Artificial Sequence
  ENSG00000138759_127 (sequence is synthesized)
gatgtggagatgagatatacccctttgatgtagaattattcatttggtttgtttcatacttcattataggaatcaagtaatttgatgactaatgtggattatatttcagtcaaagctctg

SEQ ID NO: 348997 - DNA, 120 bp, Artificial Sequence
  ENSG00000138759_128 (sequence is synthesized)
ctttcaatttctctgatttgctcactaatgccttgtgtgtgttttactaaccttttatatcttgccttcaagtgagaaggaacaaacaactctcagtggttactacttgcttttatatgc

SEQ ID NO: 348998 - DNA, 120 bp, Artificial Sequence
  ENSG00000138759_129 (sequence is synthesized)
tggctgtgaaggttaaaagaaagaatggtctgtaccattctgctttgctgcccttttattgtaccccaggcctcctagaggactcctgcagattctattgttgggtgggaaatagtgttg

SEQ ID NO: 348999 - DNA, 120 bp, Artificial Sequence
  ENSG00000138759_130 (sequence is synthesized)
gaatgtgtttgcacagtcttatgatattcagtctcagtctgctataggtatttgttattcttggatactacacacctgctcagactgagtaaacatttgtggtgctgtcaacctgatttc

SEQ ID NO: 349000 - DNA, 120 bp, Artificial Sequence
  ENSG00000138759_131 (sequence is synthesized)
ttgactctcaaatgatttttgtatttccaatatgaatttgtgtgttatgaatttctgatttctccaatagtatatgccactatataaatttgtattaataaatgacagtcttgttggttt

SEQ ID NO: 349001 - DNA, 120 bp, Artificial Sequence
  ENSG00000138759_132 (sequence is synthesized)
actttggaagttggaaaggttgagcccttgaccacaatatttcacaccattagagagctttctttatagggactcaaaagcaaagaagattggatttgaccttcaaaattgaaggtcgtt

SEQ ID NO: 349002 - DNA, 120 bp, Artificial Sequence
  ENSG00000138759_133 (sequence is synthesized)
cttaaaatatagccttcaggaatcttgtagaattaaggttggcatttggggaaggcttgagttagaaatctaaatttccatttcaggattgaatttatttgttcggtgtgaaaaacagtt

SEQ ID NO: 349003 - DNA, 120 bp, Artificial Sequence
  ENSG00000138759_134 (sequence is synthesized)
tgtgaaggtcagagatgctttgccagtctcatatataaatgaaaacttacatatgtctatgtttctctgaaattgtgtttggttctatatgcatatttgccttttcttattttactgcat

SEQ ID NO: 349004 - DNA, 120 bp, Artificial Sequence
  ENSG00000138759_135 (sequence is synthesized)
ttatttatttaattgtaacatcaaagaaatgtgttccttgatgctgtatttattctcatttgagcaactacacaggcttgctctaccgagagagagacacaggggaggggaaagataaat

SEQ ID NO: 349005 - DNA, 120 bp, Artificial Sequence
  ENSG00000138759_136 (sequence is synthesized)
ctcagaatgaaataccctctgccttgggaaaataaaatgtaaagaaccctctgcactcttaagggtcagtggtggaaaggggctggcaccagggcagggagacagctttagagacccaca

SEQ ID NO: 349006 - DNA, 120 bp, Artificial Sequence
  ENSG00000138759_137 (sequence is synthesized)
ctttcaaatatagtgtccttctacaggtactgtggtatgcttagcattttctaagagagttctgagttatattagtatggtcttttatcttcaaagtatgttaatacttgtacttgtcaa

SEQ ID NO: 349007 - DNA, 120 bp, Artificial Sequence
  ENSG00000138759_138 (sequence is synthesized)
agcacatatccatatttttggtctagaaaatatggtcattgtacttacggaagatatctgagaaaacttttatgaaatgtccatcagcttcttttgaagggggcattttgttgcctggac

SEQ ID NO: 349008 - DNA, 120 bp, Artificial Sequence
  ENSG00000138759_139 (sequence is synthesized)
ttttataggagacatttgtttcatgtctggaaactcatgttactgcttctccttgggcatttagtaaatacttgtggatttaaatagaacttctaataatactcttgcaaatcctgaaaa

SEQ ID NO: 349009 - DNA, 120 bp, Artificial Sequence
  ENSG00000138759_140 (sequence is synthesized)
aggtgcttgtgtctatcaggattccttgttggcggaaggtggatgagccattggaggtgccagagaggaggaatggcaacactggacttatcatctaattaaactgctgaaatgagagtg

SEQ ID NO: 349010 - DNA, 120 bp, Artificial Sequence
  ENSG00000138759_141 (sequence is synthesized)
tgcttgtttccagggaaactatattaaatactttaaaaagactccatagggagtaagaaatgaccagaagggactaaaaataacttgaaaaacactgaataatctattttggggtgtgtt

SEQ ID NO: 349011 - DNA, 120 bp, Artificial Sequence
  ENSG00000138759_142 (sequence is synthesized)
tcttactccataatacccatgcacccctgggctcacaagactttctctaaagtcagcccttgtggaacacagcgtgactgttaaatcaggaatccatcagagggaaactacctaggtaat

SEQ ID NO: 349012 - DNA, 120 bp, Artificial Sequence
  ENSG00000138759_143 (sequence is synthesized)
aggtttaactgtgatgtccagtgtgaggaggaaaattaatttttcatttcaaagttttcacacaccttctgttcttttccaactatatcaagtattgaaaaaactctccttttgcatcac

SEQ ID NO: 349013 - DNA, 120 bp, Artificial Sequence
  ENSG00000138759_144 (sequence is synthesized)
cacaagcaaacacatatccttttgaaagttcttcctgggatcaatgacttgactcttcacttcaatttttctgtctgtgaaatggagatgaactatttacttctcaggactgttgtgaag

SEQ ID NO: 349014 - DNA, 120 bp, Artificial Sequence
  ENSG00000138759_145 (sequence is synthesized)
tgaagcaactcgtccagtgctgtgacttacagtgctcaataaaggttggctgctattattgttgttctatagcagtgacgactggcaaggttggataaatgactcttcttccctggatca

SEQ ID NO: 349015 - DNA, 120 bp, Artificial Sequence
  ENSG00000138759_146 (sequence is synthesized)
aaagtgttaagtgttgggattttcctacttgggatacttttgctgagaaatgctgacaaagtgaatcacaaggcactaactcttagcaaatttgaaagaatatttttcaaggataattta

SEQ ID NO: 349016 - DNA, 120 bp, Artificial Sequence
  ENSG00000138759_147 (sequence is synthesized)
aaaatgtggaatgttgactatatataacactgcaggaaaatccaggctttggagtttgaatcttggcaccactacatacatgctgtgtggtctcagatataatactttatacagccaggt

SEQ ID NO: 349017 - DNA, 120 bp, Artificial Sequence
  ENSG00000138759_148 (sequence is synthesized)
gtcactttcattatctacttaattgggattatatttctcctaggtttgatgtgacagttaactgagaacatacttgtgaaagaacccagaactgtccctgcaaggaacacgtactcacat

SEQ ID NO: 349018 - DNA, 120 bp, Artificial Sequence
  ENSG00000138759_149 (sequence is synthesized)
cattcaggtggtaacaagatgtcggagtagaaatgagtgagttatagagtccagggtcttggttcaggttctggccctgtaattactagctgtatagcttggagtaagtcacttgaatga

SEQ ID NO: 349019 - DNA, 120 bp, Artificial Sequence
  ENSG00000138759_150 (sequence is synthesized)
aatgaggtctcagtttctaaattagtaaattaagagagttaggttagcttttctccaagattccttagcccagtatcgtgtagtagagctttctgtgatgatgggaatgttccatagctg

SEQ ID NO: 349020 - DNA, 120 bp, Artificial Sequence
  ENSG00000138759_151 (sequence is synthesized)
tgctgtccagtgtggtagctacgagccacatgtggttattgagtacttgaagtgtggctgacgatactgaggaactgaattttaaatttcacttaatgtcaatgaattaaagtttaaatt

SEQ ID NO: 349021 - DNA, 120 bp, Artificial Sequence
  ENSG00000138759_152 (sequence is synthesized)
tgagtagccacatatagatagtggctactatattggacagtgcaacattagagttttaaaattcttaacgtactctagtacttaaaatacagcctcatgaatggttctcaccctgggtgg

SEQ ID NO: 349022 - DNA, 120 bp, Artificial Sequence
  ENSG00000138759_153 (sequence is synthesized)
aagcttactggagtacttttagcagttgtgagaaaagtaatacaaagtttgttatagtacctaagtttgctgtttttgtttgtttatataatttgaacagttttgaagtcaacacagtta

SEQ ID NO: 349023 - DNA, 120 bp, Artificial Sequence
  ENSG00000138759_154 (sequence is synthesized)
caacactactctctccatattgctaaatatgttttcttttttgttgtcgtggttttttttttaaaccaagcaattgttatggatcaatgctttcttgaataaaagaaaaggagtaaaatt

SEQ ID NO: 349024 - DNA, 120 bp, Artificial Sequence
  ENSG00000138759_155 (sequence is synthesized)
caaggtcagccagttctcttctgcctaccaggcttccgtggactgcacctacactagtaaaatgagaattaaatatctggtagtctatggcaataaactgtgcactctttgttttgagga

SEQ ID NO: 349025 - DNA, 120 bp, Artificial Sequence
  ENSG00000138759_156 (sequence is synthesized)
gcatatcatctacagagaattgatgacatcctgaataaataatttgactcaatagccaggccatctatgagtggttgaggagatgaaagggaagtattatagtttcctttctgttcccac

SEQ ID NO: 349026 - DNA, 120 bp, Artificial Sequence
  ENSG00000138759_157 (sequence is synthesized)
aagtagccttgctgttgggtgaatagtttgactctaaagctacgtgaaaaaaaaatcattagtttgtatttttcattgtaaacatatgttcattaaaaaaattttataatacacccacta

SEQ ID NO: 349027 - DNA, 120 bp, Artificial Sequence
  ENSG00000138760_0 (sequence is synthesized)
actctcccgagctgcgctaggcgggcgccacggctgcccggcgaaggaaaccgaaaccgagtccgggcccgtccctccgcggccccatccgcccggtgcacccggggccgcgctcgccag

SEQ ID NO: 349028 - DNA, 120 bp, Artificial Sequence
  ENSG00000138760_1 (sequence is synthesized)
gccgcggagcccagagctgcgcgcacgaaccgtgcgccgggagggcgtgggcgtggcgccgaagggtcccgggtcttcgacgcctctgcggcggctcctccctccttgcagttggatccc

SEQ ID NO: 349029 - DNA, 120 bp, Artificial Sequence
  ENSG00000138760_2 (sequence is synthesized)
tggcgggtgcggcccggcccggcccgtgagcggcgcacagaatgggccgatgctgcttctacacggcggggacgttgtccctgctcctgctggtgaccagcgtcacgctgctggtggccc

SEQ ID NO: 349030 - DNA, 120 bp, Artificial Sequence
  ENSG00000138760_3 (sequence is synthesized)
gggtcttccagaaggctgtagaccagagtatcgagaagaaaattgtgttaaggaatggtactgaggcatttgactcctgggagaagccccctctgcctgtgtatactcagttctatttct

SEQ ID NO: 349031 - DNA, 120 bp, Artificial Sequence
  ENSG00000138760_4 (sequence is synthesized)
tcaatgtcaccaatccagaggagatcctcagaggggagacccctcgggtggaagaagtggggccatacacctacagggaactcagaaacaaagcaaatattcaatttggagataatggaa

SEQ ID NO: 349032 - DNA, 120 bp, Artificial Sequence
  ENSG00000138760_5 (sequence is synthesized)
caacaatatctgctgttagcaacaaggcctatgtttttgaacgagaccaatctgttggagaccctaaaattgacttaattagaacattaaatattcctgtattgactgtcatagagtggt

SEQ ID NO: 349033 - DNA, 120 bp, Artificial Sequence
  ENSG00000138760_6 (sequence is synthesized)
cccaggtgcacttcctcagggagatcatcgaggccatgttgaaagcctatcagcagaagctctttgtgactcacacagttgacgaattgctctggggctacaaagatgaaatcttgtccc

SEQ ID NO: 349034 - DNA, 120 bp, Artificial Sequence
  ENSG00000138760_7 (sequence is synthesized)
ttatccatgttttcaggcccgatatctctccctattttggcctattctatgagaaaaatgggactaatgatggagactatgtttttctaactggagaagacagttaccttaactttacaa

SEQ ID NO: 349035 - DNA, 120 bp, Artificial Sequence
  ENSG00000138760_8 (sequence is synthesized)
aaattgtggaatggaatgggaaaacgtcacttgactggtggataacagacaagtgcaatatgattaatggaacagatggagattcttttcacccactaataaccaaagatgaggtccttt

SEQ ID NO: 349036 - DNA, 120 bp, Artificial Sequence
  ENSG00000138760_9 (sequence is synthesized)
atgtcttcccatctgacttttgcaggtcagtgtatattactttcagtgactatgagagtgtacagggactgcctgcctttcggtataaagttcctgcagaaatattagccaatacgtcag

SEQ ID NO: 349037 - DNA, 120 bp, Artificial Sequence
  ENSG00000138760_10 (sequence is synthesized)
acaatgccggcttctgtatacctgagggaaactgcctgggctcaggagttctgaatgtcagcatctgcaagaatggtgcacccatcattatgtctttcccacacttttaccaagcagatg

SEQ ID NO: 349038 - DNA, 120 bp, Artificial Sequence
  ENSG00000138760_11 (sequence is synthesized)
agaggtttgtttctgccatagaaggcatgcacccaaatcaggaagaccatgagacatttgtggacattaatcctttgactggaataatcctaaaagcagccaagaggttccaaatcaaca

SEQ ID NO: 349039 - DNA, 120 bp, Artificial Sequence
  ENSG00000138760_12 (sequence is synthesized)
tttatgtcaaaaaattagatgactttgttgaaacgggagacattagaaccatggttttcccagtgatgtacctcaatgagagtgttcacattgataaagagacggcgagtcgactgaagt

SEQ ID NO: 349040 - DNA, 120 bp, Artificial Sequence
  ENSG00000138760_13 (sequence is synthesized)
ctatgattaacactactttgatcatcaccaacataccctacatcatcatggcgctgggtgtgttctttggtttggtttttacctggcttgcatgcaaaggacagggatccatggatgagg

SEQ ID NO: 349041 - DNA, 120 bp, Artificial Sequence
  ENSG00000138760_14 (sequence is synthesized)
gaacagcggatgaaagagcacccctcattcgaacctaaacattgcctttgcttggtgaagaaactgtgtgagctgtcctgacctggacgatgacgtggggaaaccctccacctccttgca

SEQ ID NO: 349042 - DNA, 120 bp, Artificial Sequence
  ENSG00000138760_15 (sequence is synthesized)
ggcttgttgcctgttgaaagaaggaaaaagacacggcgctggcaagtgataggaacattctggccagaggttaaagagcaggctgacatggctggccattaagctttataaaatcatgtg

SEQ ID NO: 349043 - DNA, 120 bp, Artificial Sequence
  ENSG00000138760_16 (sequence is synthesized)
ggctctgaaattgttcttttatgtgtctagcaagtatttaataaacccttgtatagtaattttgttgttgttgggtgctggtagctccagaattttgtgaccactattgtgggtaaaatg

SEQ ID NO: 349044 - DNA, 120 bp, Artificial Sequence
  ENSG00000138760_17 (sequence is synthesized)
tctctgcatcacttgttaatgctactggtctaacttcattcagtatgcttcattcaccgaactttgtgctcaaaatgcgtatataccattttatgttgtattcctccatttcacttgcaa

SEQ ID NO: 349045 - DNA, 120 bp, Artificial Sequence
  ENSG00000138760_18 (sequence is synthesized)
aacagaagtaaataagagttcgggacccagggtaaaatggtagcttcatccaatatatcattcaaatgcatctgatttctaaaacatattacattttatgctgatcttcagttcataatt

SEQ ID NO: 349046 - DNA, 120 bp, Artificial Sequence
  ENSG00000138760_19 (sequence is synthesized)
cagtcttccaactgcaataaaatactgggtagaatcaaatgggaaaggggttgggtggggcaatacccatgagttgatagtgataagctcctaaggatttttaacttgtacttttgtgaa

SEQ ID NO: 349047 - DNA, 120 bp, Artificial Sequence
  ENSG00000138760_20 (sequence is synthesized)
cgaagagaatgcataaataatgttggtgaggataaagtacagatatttcatgtagaattaattgctagttatgatgcttgtggatagttaactgttttttttttagtcaaaatgatcatg

SEQ ID NO: 349048 - DNA, 120 bp, Artificial Sequence
  ENSG00000138760_21 (sequence is synthesized)
ctacgaaaagatgcttctgagagaatgtaatgagtaactgatttttcttcctgagtcgcccttgccaaatatgttactgtattaattaatctaatattgagtgattatttgtaaaattat

SEQ ID NO: 349049 - DNA, 120 bp, Artificial Sequence
  ENSG00000138760_22 (sequence is synthesized)
gaatatgggaaatccatctatctacagcctaagttacacataagtttcagaaagtctgattagactaaagagatatttcttctgggacagccgccttcttggtaattttgaagttctttt

SEQ ID NO: 349050 - DNA, 120 bp, Artificial Sequence
  ENSG00000138760_23 (sequence is synthesized)
tacaagttccttcctcagtttcagttctttccagtgttttgtagctcactgtcactcactgaatagagaaacgtgtgccctatacttcctgtgacaatcattttgctgacagaatgatgg

SEQ ID NO: 349051 - DNA, 120 bp, Artificial Sequence
  ENSG00000138760_24 (sequence is synthesized)
atgtttaaaatattgcacaaagtactttaaagaaaggtctgttaggaccagaagcagagacaccacttttcaaaggacttcttggtttcagcataacctaagacagggaattgggagcca

SEQ ID NO: 349052 - DNA, 120 bp, Artificial Sequence
  ENSG00000138760_25 (sequence is synthesized)
tcatatgtcacagtgttcagaattcaagcatatttaagggcattttctttgattctcaaagttcagcattcattttgaattgagaagcctatacatttagctgacaaagtgcttatagaa

SEQ ID NO: 349053 - DNA, 120 bp, Artificial Sequence
  ENSG00000138760_26 (sequence is synthesized)
tttcttaacaactgaaccattcaaaaggattttttttgtttaaaactggatttcaatgtaagcaaatgaagaaaaaaatatagatttcatttccatagcttcttatccctgtattgaggt

SEQ ID NO: 349054 - DNA, 120 bp, Artificial Sequence
  ENSG00000138760_27 (sequence is synthesized)
aataaattgttttactgacaatttttcctttttctacactaaaacaatatgtgatatatttcccctcttgaagaggcaattcattaaactctcaaattttctatagaatcaagatagaac

SEQ ID NO: 349055 - DNA, 120 bp, Artificial Sequence
  ENSG00000138760_28 (sequence is synthesized)
ctttagatactccaactcaccaaaatgtaaaaaaactaacaaaaatatttggtcttcaataatgctaaatatctacatttttagaatttatcaacatttaactagataattgggcatgtc

SEQ ID NO: 349056 - DNA, 120 bp, Artificial Sequence
  ENSG00000138760_29 (sequence is synthesized)
ttaattatgcatgtacttatccatactaataaaattgacaatgctagtgcatacttattggtttagtcctattatcaggatataatcatctgtgaggaggatattttaaatactgtaaat

SEQ ID NO: 349057 - DNA, 120 bp, Artificial Sequence
  ENSG00000138760_30 (sequence is synthesized)
aaatgataacagttaatgatatacacatttagactgagttgcacactggcagggagaccaaaaacattacttccatacttgtgtcatgattcttttttttttgagagagtctcactctgt

SEQ ID NO: 349058 - DNA, 120 bp, Artificial Sequence
  ENSG00000138760_31 (sequence is synthesized)
ccaccgggcctggcctgttttatgattcttaatagttacttggtttaaatcacatttgatactatccttctgaaaagtctgagacagatctacaaactacagtcaaaattatagattaag

SEQ ID NO: 349059 - DNA, 120 bp, Artificial Sequence
  ENSG00000138760_32 (sequence is synthesized)
aggaatgaatgcacctatttggctttaagttgaagatgaattatttctcatgctcattttcttgcggcagttatcttagaaagacccccaaaggctttgtgattgtaagcactgtcatga

SEQ ID NO: 349060 - DNA, 120 bp, Artificial Sequence
  ENSG00000138760_33 (sequence is synthesized)
tcacagaatgcaagcttctggtaccatgatcctcaacttagagaggaagaaaccaagacagagagcttaactcacttctctcagggaaaattaggagttgagcacaggacaggaaatggg

SEQ ID NO: 349061 - DNA, 120 bp, Artificial Sequence
  ENSG00000138760_34 (sequence is synthesized)
ctttgccacttttagctccaggcttttctaaccagacttgatttcctcatgttctagaaagatcactaatggtcaagtggaacaagcactacacgactaacccctattggggtttttaac

SEQ ID NO: 349062 - DNA, 120 bp, Artificial Sequence
  ENSG00000138760_35 (sequence is synthesized)
ttaagggaggctaatttttaatttaaactgctcgagatatgagttctgcaaaaggtggtccgcatccttggccctctggacattatcactaaattgcttgtgcctgttaacaagaatact

SEQ ID NO: 349063 - DNA, 120 bp, Artificial Sequence
  ENSG00000138760_36 (sequence is synthesized)
gaccagaatgctcttcatgtagcttatacagttggttcacttcatgcggttcttgacatgtttatttctacccttaatgcaatgaaatgtttcattaataaaaaaccactttatataaaa

SEQ ID NO: 349064 - DNA, 120 bp, Artificial Sequence
  ENSG00000138760_37 (sequence is synthesized)
ggagccattaagttatgttgaaatatacatatataaaaagaaaaatacttcttttcttttctttaaagtacatcttggacttttttctaagatgtatcaaataaggtcttttcaaatgat

SEQ ID NO: 349065 - DNA, 120 bp, Artificial Sequence
  ENSG00000138760_38 (sequence is synthesized)
gacaaaattcagattttaggatttgttttcataatttcttcctgggtgttcaggattagcaattgtgcaaataaatatgcccctaggattttttggtagctaataattttaaaaatgttt

SEQ ID NO: 349066 - DNA, 120 bp, Artificial Sequence
  ENSG00000138760_39 (sequence is synthesized)
atttgccccttgttttcattcagaaattctagcaatgaaatttgtataccatttcttacttcagatttttatgttggattttatactctcaaaattcataaattgacaccagaaatcaat

SEQ ID NO: 349067 - DNA, 120 bp, Artificial Sequence
  ENSG00000138760_40 (sequence is synthesized)
agactggcagcctactgtgatttcagtgggctctgtttataatggtaattctacctaataacgacacctattctacatctattctatactgagacccatgagactttctttttttttaaa

SEQ ID NO: 349068 - DNA, 88 bp, Artificial Sequence
  ENSG00000138760_41 (sequence is synthesized)
cagtggctccatcacagctcactgaagcttctacctcctgggctccagggatcctcctgtgtcggccagggactccaggcgtgaacca

SEQ ID NO: 349069 - DNA, 120 bp, Artificial Sequence
  ENSG00000138760_42 (sequence is synthesized)
ggatcctcctgtgtcggccagggactccaggcgtgaaccactgttcctgggctggcccagtaaacattctaattcacctacaccaacccctgccgactctcccaccctaacccctaggtg

SEQ ID NO: 349070 - DNA, 120 bp, Artificial Sequence
  ENSG00000138760_43 (sequence is synthesized)
accgctccatatgcagctggacactgatgatggacccaggacctagacagtatgaggtccctgccacctagtcccaggggtgtaggtcgggtttataatgagcctctggccctgcttagg

SEQ ID NO: 349071 - DNA, 120 bp, Artificial Sequence
  ENSG00000138760_44 (sequence is synthesized)
cggaaggtagcgccaccttgtggccaaagatgcccacatgtttacaagagcttttccccttttgtggtgtctggataactcagagcctgcaaatggtctctttgtaaatattacacttac

SEQ ID NO: 349072 - DNA, 120 bp, Artificial Sequence
  ENSG00000138760_45 (sequence is synthesized)
aaaatgcagtactgggaaaggacagagaagaggctttgtcttccatatgcagccagaaaggagctcactgcctgatttttcagctatttaatctcaacctttacatttatatttccaacc

SEQ ID NO: 349073 - DNA, 120 bp, Artificial Sequence
  ENSG00000138760_46 (sequence is synthesized)
accaatccagaggagatcctcagaggggagacccctcgggtggaagaagtggggccatacacctacagagacaaagtcttgctctgttgctcatgctggaatgcagtggcatgatcatag

SEQ ID NO: 349074 - DNA, 120 bp, Artificial Sequence
  ENSG00000138760_47 (sequence is synthesized)
caccttagcctcccaagtagctgacactacagggaactcagaaacaaagcaaatattcaatttggagataatggaacaacaatatctgctgttagcaacaaggcctatgtttttgaacga

SEQ ID NO: 349075 - DNA, 120 bp, Artificial Sequence
  ENSG00000138760_48 (sequence is synthesized)
aaatacttagcccagggcccatcacacagtaaccaatattaagtgttggctcttagttactatgatatgctctgtcaagcatcaactgacctggtctacttccagtcaataggtagtctc

SEQ ID NO: 349076 - DNA, 120 bp, Artificial Sequence
  ENSG00000138760_49 (sequence is synthesized)
tacatggaagccaaataaaagatactgttgtccatatttcagcagagtggtttcctcaggggaggcagagaaggaatggaatcaagagcattacgtagacaggttcagttatatccataa

SEQ ID NO: 349077 - DNA, 120 bp, Artificial Sequence
  ENSG00000138760_50 (sequence is synthesized)
tataatttttatttgtctaagtggcagatacaaaggtatttgttagagtattttatctctttctggtgcctaaaatttttcattaaaaaatgctgtaggggtggtttggtttgtgcagtg

SEQ ID NO: 349078 - DNA, 120 bp, Artificial Sequence
  ENSG00000138760_51 (sequence is synthesized)
aaaccacctatgttattcacaaccttgcgagagatgtatcaacagctctggttcagagatgaaaaagtgaggcccagaaggctcttccggccagccttcaaaggaagggctgaaggctca

SEQ ID NO: 349079 - DNA, 120 bp, Artificial Sequence
  ENSG00000138760_52 (sequence is synthesized)
gtggtgactgtgtacatcaaagtggttaggcactatgcagtgtaagcagtggtcatattacatgggactatgtttgaaatcagtaagaatgaaaggcagaattacgttgaactccattta

SEQ ID NO: 349080 - DNA, 120 bp, Artificial Sequence
  ENSG00000138760_53 (sequence is synthesized)
aataaatgactggggcaaaatatggaatctgatttttcttggagggggggattgagtatcaaagtgtgtattccaataaagtatctgtccaatgtgacacttttcaagtgcctaagaccc

SEQ ID NO: 349081 - DNA, 120 bp, Artificial Sequence
  ENSG00000138760_54 (sequence is synthesized)
tacgaggccacggccatcgctgcctgttctaccttagctttggctctgccgtgccctggcttccctggctttgccggtggcccgtccacactggcatatgtccatgcaggtctagagagg

SEQ ID NO: 349082 - DNA, 120 bp, Artificial Sequence
  ENSG00000138760_55 (sequence is synthesized)
cctcttatttcttttttatgtgagtctccattctaaatgttatcatcttaattttgtaccacatattgttttttcttgtttggatgatatcaccgttgctacaataaacaccttccacta

SEQ ID NO: 349083 - DNA, 120 bp, Artificial Sequence
  ENSG00000138760_56 (sequence is synthesized)
caattcatcttctgctttattacacgttgagttgacagaatgccttccaaacattcctttctacttaccctgtgagcttttggccatgttgtacctgagaactgttgctaacttgcggat

SEQ ID NO: 349084 - DNA, 120 bp, Artificial Sequence
  ENSG00000138760_57 (sequence is synthesized)
gtgggatgatcacttgagcccaggagttctcaagtccatcctgggcaacatggcgagaccactgtctctaaaaaacaaaacaaacaaaaaagaatatattgtcagcccaatagaaagatc

SEQ ID NO: 349085 - DNA, 120 bp, Artificial Sequence
  ENSG00000138760_58 (sequence is synthesized)
agtttctttcaagaacaatgtttcataacatggctattgaatggtaaaaaaaaatcatggcttttctgtgatgctttttatttctagaatgccatgttgtgtttttttttctggacagtg

SEQ ID NO: 349086 - DNA, 120 bp, Artificial Sequence
  ENSG00000138760_59 (sequence is synthesized)
gtttagaagtcttaacagtaataatagctcatgtttactaagcacctgatgtatgccagtcactgtcctaagtgctttacatatttacatgtagttaatgcatgcaaaacattaactgat

SEQ ID NO: 349087 - DNA, 120 bp, Artificial Sequence
  ENSG00000138760_60 (sequence is synthesized)
ttcatgttcaaaacaatgctaaggctgggcacggtggctcatgcttgtattcccagcactttgagaggccgagatgtgaggattgcttgaggccaggggttcaagatcagcctgggcaac

SEQ ID NO: 349088 - DNA, 120 bp, Artificial Sequence
  ENSG00000138760_61 (sequence is synthesized)
accctgtctctacaaaaaaaaaaaaattaaaaaattagctgggtgtggcggcacacacctgtagttacagctgctcaggaggctgaggcagagagattgcttgaacccaggagttcgagg

SEQ ID NO: 349089 - DNA, 120 bp, Artificial Sequence
  ENSG00000138760_62 (sequence is synthesized)
gttcgaggttgcactgtgctatgattgtgctgctgcactccagcctgggcaatagagtgattccgcacctccccaccaaaaaaaaaaaaaagctaaaagaaaaagtggacaactcagttt

SEQ ID NO: 349090 - DNA, 120 bp, Artificial Sequence
  ENSG00000138760_63 (sequence is synthesized)
taagaaagtacgtatcatggcaaagattctcagtgattttgaagcagagttagttttaaaccctgacacaaatgtcccagtgtttcttaatgtcagagctactctgctcctttccatgaa

SEQ ID NO: 349091 - DNA, 120 bp, Artificial Sequence
  ENSG00000138760_64 (sequence is synthesized)
tgaggcagaattatcagtggcacaactgacaaaactattttcttcatcttgaagagtagttttaacagccacatgttgcagaattattcacaatgaacttactagatagtagacattcag

SEQ ID NO: 349092 - DNA, 120 bp, Artificial Sequence
  ENSG00000138760_65 (sequence is synthesized)
cggcctgtttttataattggggaaactagggctcagagagggaacgtgattttgatgcgactcctccctctgagcagatccctggcggaactcagggtcttctcatatttgccctgtgat

SEQ ID NO: 349093 - DNA, 120 bp, Artificial Sequence
  ENSG00000138760_66 (sequence is synthesized)
tccctcttgggctgtaattcctctttaaaatttctctggagagctctctgtgtagtccctttctcctgaatagtaatgtgctcacttttgctcccttatctatctcattttaaaatctcc

SEQ ID NO: 349094 - DNA, 120 bp, Artificial Sequence
  ENSG00000138760_67 (sequence is synthesized)
tttcaggcctggcatggtggcgtgtgcctgtagacccagctactcaggaggctatggtggaagggtcgtttgagcccagtttgattctagcctgggcaacatagcgagactccatctttt

SEQ ID NO: 349095 - DNA, 120 bp, Artificial Sequence
  ENSG00000138760_68 (sequence is synthesized)
ggaacttcttccttactggataactttacctgaggaattcaactgtacttcactgaagggctgtcagctggcttattaggataaattctgggattttatgctgggcatagtgatttcgtg

SEQ ID NO: 349096 - DNA, 120 bp, Artificial Sequence
  ENSG00000138760_69 (sequence is synthesized)
cttattttactgctggaccaaatgggaagcaaaggaagtgtgtcaaagaaggtggagggttagaaggtaccatctaatatttggggaatagaatctctttggatgtatcccctgggagtt

SEQ ID NO: 349097 - DNA, 120 bp, Artificial Sequence
  ENSG00000138760_70 (sequence is synthesized)
aactttatgtctttgaaaacaataacctgaaagaaaaggaagaatatataacagttacacatctgatctttggtgtcagactgcctgagttcaaatcccagttctgccacttaacagcta

SEQ ID NO: 349098 - DNA, 120 bp, Artificial Sequence
  ENSG00000138760_71 (sequence is synthesized)
tacgaccctagaaactgtgcttcagtttcttcatctgtaaaatgggataataaaagcctcccttatgagtttttcatgaggattagatgatatagtagacttaaaggacttggcccagtg

SEQ ID NO: 349099 - DNA, 120 bp, Artificial Sequence
  ENSG00000138760_72 (sequence is synthesized)
ttagcatatagtaagagctcaataaaggtttaagtattattaaatatgataaaacagctccaagattatagagcaagacagccagggtcctgcttggaaagaatccctgatgtatccgaa

SEQ ID NO: 349100 - DNA, 120 bp, Artificial Sequence
  ENSG00000138760_73 (sequence is synthesized)
gatacctatgatttaggtatcactgcataataaatgattggaacatgggtgtagttactttcctggaaggctaggataaagagttgggttcgcctttccaagtgaccagcagcccagcca

SEQ ID NO: 349101 - DNA, 120 bp, Artificial Sequence
  ENSG00000138760_74 (sequence is synthesized)
ggaacctgaatacctgcaatgagccttttctgtagaagcccttcttaaattttctgcagcttccttttttttacaacagtggccttttttcctccagtttcctcaactaagtgtccaagg

SEQ ID NO: 349102 - DNA, 120 bp, Artificial Sequence
  ENSG00000138760_75 (sequence is synthesized)
caaatgtgaagtagaaaataaatacgtgaaaccatctgagtaaaattagctgaatttccctgacttccatattcttccattatttctcttatcccctgccagtcactttagcctgaatta

SEQ ID NO: 349103 - DNA, 120 bp, Artificial Sequence
  ENSG00000138760_76 (sequence is synthesized)
gctgtgaggcaaactattttgccatttctatgtgtggatcttccagtgtgactttatgcagtcattgaaattgtcttaagcacaaatgaaacctcatggaaatgttaattactgctccta

SEQ ID NO: 349104 - DNA, 120 bp, Artificial Sequence
  ENSG00000138760_77 (sequence is synthesized)
caattaaccttcctcatatattcaacaagcaaggaattattgagaactaatacctctgagacactactccttagtaggtttcaaaccaggaaggaggcaagttgaatagagtctaagttt

SEQ ID NO: 349105 - DNA, 120 bp, Artificial Sequence
  ENSG00000138760_78 (sequence is synthesized)
tataatccagatcaacacagagaagggtactgctctggtattgagggtgggagtggtcagagaaggcctcctggaaaggttaggcctgctgaatcttcaagaacaagcagcagcccaaga

SEQ ID NO: 349106 - DNA, 120 bp, Artificial Sequence
  ENSG00000138760_79 (sequence is synthesized)
ggggaggtgagtgagatgagccaccttcctataggtctctcctccttccatgcccccactccccacccaaacttttcacactggggagaagtttctgacatgaacatctaacttgttttc

SEQ ID NO: 349107 - DNA, 120 bp, Artificial Sequence
  ENSG00000138760_80 (sequence is synthesized)
tctcttctgtgtttcagggaacagcggatgaaagagcacccctcattcgaacctaaacattgcctttgcttggtgaagaaactgtgtgagctgtcctgacctggacgatgacgtggggaa

SEQ ID NO: 349108 - DNA, 120 bp, Artificial Sequence
  ENSG00000138760_81 (sequence is synthesized)
ttttttagctgacagtgggttggggcaccccaagccagattaactttgagtttcttctagaaattgcctagagttaagttatcttatagagtgtgtgaaaaatggagtgttttttggaaa

SEQ ID NO: 349109 - DNA, 120 bp, Artificial Sequence
  ENSG00000138760_82 (sequence is synthesized)
tagtgatttgtagatttatcatggccaggcatgaattacaggccagtgaaaagtcccactcttgcttagtagtcattgagtgatgtgtagtagctacagcacaaatacttttcaaaccac

SEQ ID NO: 349110 - DNA, 120 bp, Artificial Sequence
  ENSG00000138760_83 (sequence is synthesized)
cacatgttttgggctatttggccattgcctctatgaaagctgatttgggccagggacctactttttctcccccttgatctaattaaaactgttgtgtctgtgtatgaataagatactgtg

SEQ ID NO: 349111 - DNA, 120 bp, Artificial Sequence
  ENSG00000138760_84 (sequence is synthesized)
cactcaggcagaccctccgcgctagagctcttcttgcgtccctgtcttccagggcttggtaggcgagggttaaagaaggatgaggaaggatggagccgactctgttccctttacagtgat

SEQ ID NO: 349112 - DNA, 120 bp, Artificial Sequence
  ENSG00000138760_85 (sequence is synthesized)
aagtaaggctatggatcctgacttttaaaaaggccttcggttgtgttctgtcgtttgcatctctccccactccttccgtctacaccccaatctcagaaaattgtgttaaggaatggtact

SEQ ID NO: 349113 - DNA, 120 bp, Artificial Sequence
  ENSG00000138760_86 (sequence is synthesized)
gtggaacctaggattccaaccgtaaagcaggaagcattctagcagggactctggcctagcaagagtccctgtttcttccttttcttccttttcacccagtacaattctgtcttaccattc

SEQ ID NO: 349114 - DNA, 120 bp, Artificial Sequence
  ENSG00000138760_87 (sequence is synthesized)
aaattgtctgcaagcctgaatttttgtggccatgggacaaagaatgccatctttagcttcacaaaggaaaagtcctgcaacatttttgacccccaacatggggctcaagaagcgaaaatt

SEQ ID NO: 349115 - DNA, 86 bp, Artificial Sequence
  ENSG00000138760_88 (sequence is synthesized)
ttgaggccgggtgcggtggctaatgcctgtaattccaggactttgggagaccgaggtgggtggatcatttgaggttaagacatctc

SEQ ID NO: 349116 - DNA, 78 bp, Artificial Sequence
  ENSG00000138760_89 (sequence is synthesized)
aaaaatacaaaaattagccagctgtggtgatgtacacctgtaatctcacctactcaggagactgaggcaggtaagaca

SEQ ID NO: 349117 - DNA, 120 bp, Artificial Sequence
  ENSG00000138760_90 (sequence is synthesized)
gtatttagcaaaatagtcactattttctggtcctggttcagtcttgtgtagcagttaggccctagtaggacagttagatgaagattaaattttttagttactgtatcagttagggttgcc

SEQ ID NO: 349118 - DNA, 120 bp, Artificial Sequence
  ENSG00000138760_91 (sequence is synthesized)
agagaaactgaatcaagagggtgtatatgtagagatgagaaagagggagagaaagaaatttatattatggaattggcttatgtgattatgggagctggtaagtctgaaatccatagagca

SEQ ID NO: 349119 - DNA, 120 bp, Artificial Sequence
  ENSG00000138760_92 (sequence is synthesized)
ggccagcagctggaaactcaggtaaaagttgatgatgtggtcttgagtttgaaatctgtagggtgggctgcaacctggaaatccaggcagaatttcgatgttgcagtcttgaggagaatt

SEQ ID NO: 349120 - DNA, 120 bp, Artificial Sequence
  ENSG00000138760_93 (sequence is synthesized)
cctcctctaagaaacctctgtttttgcttgtaaggctttgaacagattggagggggcccagccactcattattgagggtaacctcccttaaagttaacggattgtagatattaatcacac

SEQ ID NO: 349121 - DNA, 120 bp, Artificial Sequence
  ENSG00000138760_94 (sequence is synthesized)
ctacaaaataccttcaccacaccatctgggctagtgtttgaccaaacaactgggcaccatagtctagccaagttgtcataaaattatcacagttactttaaatgatcatattcacatatt

SEQ ID NO: 349122 - DNA, 120 bp, Artificial Sequence
  ENSG00000138760_95 (sequence is synthesized)
caagaatggtaagaactcagagaggggacatgataggggtgtcaagaatgcagaaggattggagttcaacaaagaatatgtagctgggcgtagtggcgcacacctacagtcccagctact

SEQ ID NO: 349123 - DNA, 120 bp, Artificial Sequence
  ENSG00000138760_96 (sequence is synthesized)
taagagctggaatcttagaagcaaagtggaattacatttgtggctccatcacttacttgtggtgatcctaggcctctctgagtcataattttctcatctgtaaacctgggacagtaatac

SEQ ID NO: 349124 - DNA, 120 bp, Artificial Sequence
  ENSG00000138760_97 (sequence is synthesized)
ctactgtaggtgactactctaggaattgaatgagataatatcccaaaaacacccagcacagagctggcacgtggtacatgctcagttggctcttgttgcaaagacagtacttcagtggcc

SEQ ID NO: 349125 - DNA, 120 bp, Artificial Sequence
  ENSG00000138760_98 (sequence is synthesized)
tagttacaaaacactctgaggagtgacagttttgttctgtcgactggagccttccctgatgactctaaggagactagtcatcattttaaggaatctgccttcagtatcttgtgttttgat

SEQ ID NO: 349126 - DNA, 120 bp, Artificial Sequence
  ENSG00000138760_99 (sequence is synthesized)
tgctagacagactggaatctaacttttggggtacatgtttgcaaagataactaagaaatcagcaaattctgggtaatttaagaaataagtgtactagaatcttcatataaatgtgtctgt

SEQ ID NO: 349127 - DNA, 120 bp, Artificial Sequence
  ENSG00000138760_100 (sequence is synthesized)
ttgtagttacatgtaagttatgacagaagggcaaaagatttttaaaacctgttattcctcagaaaatttcacttaaatgttcacatgaatctgcctgtgtctgagagctgatttggagaa

SEQ ID NO: 349128 - DNA, 120 bp, Artificial Sequence
  ENSG00000138760_101 (sequence is synthesized)
atgatggaaagaaattttccttctcaagaacactatttgggcaaaactcccttctggggagctgctcacgtaggaaacagaaacaggtaaaaggagccattggcagacattgttgaagca

SEQ ID NO: 349129 - DNA, 120 bp, Artificial Sequence
  ENSG00000138760_102 (sequence is synthesized)
gggaaatagctcacactcagatagatgccagctagccctttgtctcccccttctttgaaaccatgctggtttaagacacctatgataaattcttttctgaatcacatatcacgtttactg

SEQ ID NO: 349130 - DNA, 120 bp, Artificial Sequence
  ENSG00000138760_103 (sequence is synthesized)
tagttatatctcctcagtttctcctgcttccgcccagtttgagggaaaaaaaaaaaacgcaggtttttttcttcaataaattcttgattggcaaacttctcctttttattatttttgtgt

SEQ ID NO: 349131 - DNA, 120 bp, Artificial Sequence
  ENSG00000138760_104 (sequence is synthesized)
ttcctaaaaatacttgctgtttgtagaatattgaataacagagattagcaagaaaaagaaaaattaaaatcactattcacaaaatctgtgtcagcctgataatatttttattttatttta

SEQ ID NO: 349132 - DNA, 120 bp, Artificial Sequence
  ENSG00000138760_105 (sequence is synthesized)
agcctgataatatttttattttattttactcaatgtgttgtacaattttttccaataacaactttaaaaggtaatctaatgttttacattttataaaacatgtgctctttataaaattct

SEQ ID NO: 349133 - DNA, 120 bp, Artificial Sequence
  ENSG00000138760_106 (sequence is synthesized)
aagtaaattactgataagtccctctctatcagaggcaggtgcagttcagatgtcaactcctgatattttctggtcttgatattacatagttgaaatcatacgatagatacaattttatat

SEQ ID NO: 349134 - DNA, 120 bp, Artificial Sequence
  ENSG00000138760_107 (sequence is synthesized)
atttagcattatattggtattcacatttacaaacttttaagggtttgttattacaattctaagatgaggtttttatcgtttcataggaaaaattcaagcaatatttaccaatttatagga

SEQ ID NO: 349135 - DNA, 120 bp, Artificial Sequence
  ENSG00000138760_108 (sequence is synthesized)
tctctttgcaattgctcctgatcatccatgttcctgtttgtgggcaggggcatgaaagatctttttgaaaatgcagaagggcccttttctgccaacttctgttcagtagtggcatatttg

SEQ ID NO: 349136 - DNA, 120 bp, Artificial Sequence
  ENSG00000138760_109 (sequence is synthesized)
aagtccctccacccccaacttctaatttgcttttttgtgaaagactagattaagtccaggtgtgtggagtggaaccttgtatttttgctgcctcctaggaagagcgtgattattctcttc

SEQ ID NO: 349137 - DNA, 120 bp, Artificial Sequence
  ENSG00000138760_110 (sequence is synthesized)
tctagaaaaataaaatattagacctggaagtctggaagtgacattggagactgttgccacaccacctttttaccgaggaggaaactctatccagttattggaaaaaatgtcttagaaccc

SEQ ID NO: 349138 - DNA, 86 bp, Artificial Sequence
  ENSG00000138760_111 (sequence is synthesized)
tccaccctctacagtggtgcgattttggctcactgcagcctcgacttcccgggctcaagtgatcctcccacctctgccttccaagt

SEQ ID NO: 349139 - DNA, 74 bp, Artificial Sequence
  ENSG00000138760_112 (sequence is synthesized)
ctctacagtggtgcgattttggctcactgcagcctcgacttcccgggctcaagtgatcctcccacctctgcctt

SEQ ID NO: 349140 - DNA, 89 bp, Artificial Sequence
  ENSG00000138760_113 (sequence is synthesized)
gtcatgagccaccatgcccagggtggtttcaccacattgctcaggctggtctcaaacttttgagctcaagcaatccgcctgccttggcc

SEQ ID NO: 349141 - DNA, 120 bp, Artificial Sequence
  ENSG00000138760_114 (sequence is synthesized)
aggcgtgtgcaactatgccaggcctccagtgcaaattaagcctaaactaggccagaattgttgctcattatttctatggaattaagctcttcagatacctcactcattacactaggtggt

SEQ ID NO: 349142 - DNA, 120 bp, Artificial Sequence
  ENSG00000138760_115 (sequence is synthesized)
aattcctctgctctgcatacactaagtgttattctagtacatttccttctatcagcagtctctggaattctagttagcccacaactttgctgagcactttctgtagagggctgtggtcct

SEQ ID NO: 349143 - DNA, 120 bp, Artificial Sequence
  ENSG00000138760_116 (sequence is synthesized)
gattactatagatgtaaccaagaaagaaattatactttccacataccatttttgcagtgtttcatttatttattcatttaatcagccagcattaatcaagcacctactgtgtgctgggtg

SEQ ID NO: 349144 - DNA, 120 bp, Artificial Sequence
  ENSG00000138760_117 (sequence is synthesized)
ctatacccagtgtggaggtgactgaggttaagtcttgccttcagggacttcacagccattgcaagacaaacagttacaatgcagagtgcaaggacaatgatggaagtagagagtgagatg

SEQ ID NO: 349145 - DNA, 120 bp, Artificial Sequence
  ENSG00000138760_118 (sequence is synthesized)
gaaacttagggaggaggcctttgactaggcctgaggtagccagagaaaacttttggaaggaagtgatgctgagctggatttttaaggatgaattggaattatctgacataaaacaaaagg

SEQ ID NO: 349146 - DNA, 120 bp, Artificial Sequence
  ENSG00000138760_119 (sequence is synthesized)
tgatactgtctcaatatttctgaatacattttacctcctttttccaatctattttaagagtaaaaaaaatgtcttcaggagaagacaagatattaatgaataaatgtcccttctgattac

SEQ ID NO: 349147 - DNA, 120 bp, Artificial Sequence
  ENSG00000138760_120 (sequence is synthesized)
tctgacttataaatggattttcagtatgtttggtttgctaacaggaggacattcccaaattgtattaaacaaaggaaagatatagcaaaaaacagttacacactggatgtttagtcatca

SEQ ID NO: 349148 - DNA, 120 bp, Artificial Sequence
  ENSG00000138760_121 (sequence is synthesized)
accccaatatggcctgagtccttgcctcttcccaggagcaaggctccagggctgtgtgggagcacactttctgatttcattgtctgaaacgctgctgatgttttgtatgtgtgtgtgaaa

SEQ ID NO: 349149 - DNA, 120 bp, Artificial Sequence
  ENSG00000138760_122 (sequence is synthesized)
cctcagcagagaatggctttgtagactgggccaagtctcagcgtgttgtgttttgaagtgcagcggtttcctcctgagttggcagactgtgattattaaaccatgaagggttactcctta

SEQ ID NO: 349150 - DNA, 120 bp, Artificial Sequence
  ENSG00000138760_123 (sequence is synthesized)
ccctgacccttttaaggttgccccttgatattcttattttattttattttatttttttaagagacaaggtctggctttgttgcccaggctggagtgcagtagagcagtcatagctcactg

SEQ ID NO: 349151 - DNA, 61 bp, Artificial Sequence
  ENSG00000138760_124 (sequence is synthesized)
actgccgcaagtgttcaccaccacacccagataattttttttgtagagatgaggtcttgct

SEQ ID NO: 349152 - DNA, 81 bp, Artificial Sequence
  ENSG00000138760_125 (sequence is synthesized)
cccaccaccatgcctggctactgcttgatattcttaagtgacttttagggcctccctccatttccattccccacataacta

SEQ ID NO: 349153 - DNA, 120 bp, Artificial Sequence
  ENSG00000138760_126 (sequence is synthesized)
cttttagggcctccctccatttccattccccacataactagttttaaagcagttccagaatttacttttgtctgagacagatctttctgtttcttacccgctccttttctccacctatcc

SEQ ID NO: 349154 - DNA, 120 bp, Artificial Sequence
  ENSG00000138760_127 (sequence is synthesized)
tgcgtataagcaataagcaagtagcagaggctgttagagtctttgctggtgaccaccaattccaaacactggggaatcaggatccctttaatcatttttaaacgattagtagagggagac

SEQ ID NO: 349155 - DNA, 120 bp, Artificial Sequence
  ENSG00000138760_128 (sequence is synthesized)
gcttgaatcagagcattttctctgttgcaatgttccccttttccctattacaatacctcctccctctcccatacaataatctttccaataaagtctctccttaccaggttagaaaacaaa

SEQ ID NO: 349156 - DNA, 120 bp, Artificial Sequence
  ENSG00000138760_129 (sequence is synthesized)
ttaatagaggaagcagacaacaagatctttctttttcaaaactgctgaatgataaaaatgcctgacaattctgttgtaatcgattgctcaataaattattgctgactgattcatgtgcta

SEQ ID NO: 349157 - DNA, 120 bp, Artificial Sequence
  ENSG00000138760_130 (sequence is synthesized)
tgaatcagtactattctcagtggtgggaattcagagataaaaatcctagttcctgccttgggtgctcatgctctgactctggagtcagatgacccattttgattcccgcctctgcaactt

SEQ ID NO: 349158 - DNA, 120 bp, Artificial Sequence
  ENSG00000138760_131 (sequence is synthesized)
actagttctctgtgcttccatttccttatctataaaatggggataaaaataggacctcctccacatggtttttacaaagattgagtcaatgagtcatgtataaagtgcttagactagtgc

SEQ ID NO: 349159 - DNA, 120 bp, Artificial Sequence
  ENSG00000138760_132 (sequence is synthesized)
atgagtcatgtataaagtgcttagactagtgcctagcacataattagtgatacttaagtgtttgctcttactattagttggattaggctatttttgcattgctatgaagaaatacctgag

SEQ ID NO: 349160 - DNA, 90 bp, Artificial Sequence
  ENSG00000138760_133 (sequence is synthesized)
tggctcatggttctgcaggctgtacacacatggcacactggctctgctcggcttctggggaagcctcaaaggagcaggcacgttacatgg

SEQ ID NO: 349161 - DNA, 120 bp, Artificial Sequence
  ENSG00000138760_134 (sequence is synthesized)
tgagggatcctcccctatgacccaaacagctcccacctggccctacctccaacactgaagattacagttcaacatgagatttggaggggacatccaaactatatcattccacccctggcc

SEQ ID NO: 349162 - DNA, 88 bp, Artificial Sequence
  ENSG00000138760_135 (sequence is synthesized)
ttggaggggacatccaaactatatcattccacccctggcctccaaatttcatgtccttctcacatgttaaaatataatcatcccttct

SEQ ID NO: 349163 - DNA, 120 bp, Artificial Sequence
  ENSG00000138760_136 (sequence is synthesized)
atgaattccttctacctataagcctgtaaaatcaaacaagttatttcctttcaagatacaatgggtgtatcagcattgggcaaacattcccatttgagaagggagaaattggccataaga

SEQ ID NO: 349164 - DNA, 120 bp, Artificial Sequence
  ENSG00000138760_137 (sequence is synthesized)
aaggggctacaggccccaagcaagtctgaaacccaacagggcagttattaaatcataaagctccaaaatcatcttctttgactccgtgtctcacatccagagcacactggtgcaaggggt

SEQ ID NO: 349165 - DNA, 120 bp, Artificial Sequence
  ENSG00000138760_138 (sequence is synthesized)
gggctcccaaggccttaggcagctccgcctcagtagcttttttatgctgagattgcaagctgatggtggctctaccattctggtgtctcaaggacggtggccttcttcccacagctccac

SEQ ID NO: 349166 - DNA, 120 bp, Artificial Sequence
  ENSG00000138760_139 (sequence is synthesized)
taggcagtgcctcagtggggactctttgtggagccttcagctccgcatttcccctcctcactgccctagtagagtttctcttgagggctctgcccttggagcaggcttctgctggggcac

SEQ ID NO: 349167 - DNA, 120 bp, Artificial Sequence
  ENSG00000138760_140 (sequence is synthesized)
ttaggctttctcatacatcatctgaaatctaggtggaggatgccaagcttccttcactcttgcactctgtgttcctgcaggcttaacatcacatggaagctgccaaagcttatggcttgc

SEQ ID NO: 349168 - DNA, 120 bp, Artificial Sequence
  ENSG00000138760_141 (sequence is synthesized)
accctccagaggagtggcctgaactgtacctgagcccctttgagccatgtctggagctggagtggctgggatgtgggaaacagcacagggaagtagtgcccctggcctggtccctgaaac

SEQ ID NO: 349169 - DNA, 120 bp, Artificial Sequence
  ENSG00000138760_142 (sequence is synthesized)
cactcagtcctcttaggtctcagggcctgtgatggaaggggctgtctcagagatctctgaaatgttttcaaggccttttacccattgtcttgactctcagcacttggcttctttttagtt

SEQ ID NO: 349170 - DNA, 120 bp, Artificial Sequence
  ENSG00000138760_143 (sequence is synthesized)
actctcagcacttggcttctttttagttatgcaaatcgttttagcaatggttgctctacagcctgcttgaatttatctccccacaaaaatattttgttttgttttgtttttgagacaggg

SEQ ID NO: 349171 - DNA, 120 bp, Artificial Sequence
  ENSG00000138760_144 (sequence is synthesized)
tgcagccttgacctcctgggctcaagggttccccctgcctcagcctcccaagtatctaggactacaggcaagtgccaccatgcctggctaatttttaactttttttttttttgagacaga

SEQ ID NO: 349172 - DNA, 120 bp, Artificial Sequence
  ENSG00000138760_145 (sequence is synthesized)
ttttttttgagacagagtctccctatgttgcccagactgcggaaatgcttttctttctctgccacatggccaggttgcaaattttccaaacctctatgttctgcttcccttttaaaaata

SEQ ID NO: 349173 - DNA, 120 bp, Artificial Sequence
  ENSG00000138760_146 (sequence is synthesized)
aggtccaactttaagtcatttttttactcccacatctgagtgtaggctgttagaagcagccaggcgacatcttgaatgctttgctgcctagaaatctctgccagatatcctaaatcatca

SEQ ID NO: 349174 - DNA, 120 bp, Artificial Sequence
  ENSG00000138760_147 (sequence is synthesized)
ctctcaagttcaaacttccacagatccctggggtgtgaacacaatgcagccaagatctttgctaaggcataacacatgtgaactttgctccagtcccaataagttcctcatttccatctg

SEQ ID NO: 349175 - DNA, 120 bp, Artificial Sequence
  ENSG00000138760_148 (sequence is synthesized)
agaccttttcagcctgaacttcactgtccatgtcactgtcagcaatttggtcacgatcatttaatcagtctttaagacattgcaaactttccctcatcttcttgtcttcttctgagccct

SEQ ID NO: 349176 - DNA, 120 bp, Artificial Sequence
  ENSG00000138760_149 (sequence is synthesized)
ccaaactcttcccttctctgcccattacccagtttcaaagctgcttccacattttccagctatctttatagcaatatttgactctcagtaccaattttctaaattaggttgttcttacat

SEQ ID NO: 349177 - DNA, 60 bp, Artificial Sequence
  ENSG00000138760_150 (sequence is synthesized)
ggaccagtctggctaacacagcaaaaccccacctctactaaacatacaaagattagcctg

SEQ ID NO: 349178 - DNA, 120 bp, Artificial Sequence
  ENSG00000138760_151 (sequence is synthesized)
ggaccagtctggctaacacagcaaaaccccacctctactaaacatacaaagattagcctggcatggtggtgcccacctgtattcccagctagtcaggaggctaaggcaggagaattgctt

SEQ ID NO: 349179 - DNA, 120 bp, Artificial Sequence
  ENSG00000138764_0 (sequence is synthesized)
actcttaacaaaaacaaggggctcggggaggtttccgctgaggcggcgggggtgcggcggtgggctggtcttccgcggccggcgttgcgccgcggcggagggtgggcgcgcggggagcgg

SEQ ID NO: 349180 - DNA, 120 bp, Artificial Sequence
  ENSG00000138764_1 (sequence is synthesized)
gatggagccggggctgtgaggccgaggcggcggtgcctgggaggaagggtcggatgccggaccgggggcaccgctgaggcggtgggtccccgacctgcgagacaggtttggaagcccccg

SEQ ID NO: 349181 - DNA, 120 bp, Artificial Sequence
  ENSG00000138764_2 (sequence is synthesized)
ctgcgcccagtccgtgcggaccgcgaggccgcgggcgggtggaggcgcgtctccggcacgatgaaggatttgggggcagagcacttggcaggtcatgaaggggtccaacttctcgggttg

SEQ ID NO: 349182 - DNA, 120 bp, Artificial Sequence
  ENSG00000138764_3 (sequence is synthesized)
ttgaacgtctacctggaacaagaagagagattccaacctcgagaaaaagggctgagtttgattgaggctaccccggagaatgataacactttgtgtccaggattgagaaatgccaaagtt

SEQ ID NO: 349183 - DNA, 120 bp, Artificial Sequence
  ENSG00000138764_4 (sequence is synthesized)
gaagatttaaggagtttagccaacttttttggatcttgcactgaaacttttgtcctggctgtcaatattttggacaggttcttggctcttatgaaggtgaaacctaaacatttgtcttgc

SEQ ID NO: 349184 - DNA, 120 bp, Artificial Sequence
  ENSG00000138764_5 (sequence is synthesized)
attggagtctgttcttttttgctggctgctagaatagttgaagaagactgcaatattccatccactcatgatgtgatccggattagtcagtgtaaatgtactgcttctgacataaaacgg

SEQ ID NO: 349185 - DNA, 120 bp, Artificial Sequence
  ENSG00000138764_6 (sequence is synthesized)
atggaaaaaataatttcagaaaaattgcactatgaattggaagctactactgccttaaactttttgcacttataccatactattatactttgtcatacttcagaaaggaaagaaatactg

SEQ ID NO: 349186 - DNA, 120 bp, Artificial Sequence
  ENSG00000138764_7 (sequence is synthesized)
agccttgataaactagaagctcagctgaaagcttgcaactgccgactcatcttttcaaaagcaaaaccatctgtattagccttgtgccttctcaatttggaagtggaaactttgaaatct

SEQ ID NO: 349187 - DNA, 120 bp, Artificial Sequence
  ENSG00000138764_8 (sequence is synthesized)
gttgaattactggaaattctcttgctagttaaaaaacattccaagattaatgacactgagttcttctactggagagagttggtttctaaatgcctagccgagtattcttctcctgaatgt

SEQ ID NO: 349188 - DNA, 120 bp, Artificial Sequence
  ENSG00000138764_9 (sequence is synthesized)
tgcaaaccagatcttaagaagttggtttggatcgtttcaaggcgcacagcccagaacctccacaacagctactatagtgttcctgagctgccaacgatacctgaggggggttgttttgat

SEQ ID NO: 349189 - DNA, 120 bp, Artificial Sequence
  ENSG00000138764_10 (sequence is synthesized)
gaaagtgaaagtgaggactcttgtgaagatatgagttgtggagaggagagtctcagcagctctcctcccagtgatcaagagtgcaccttctttttcaacttcaaagtggcacaaacactg

SEQ ID NO: 349190 - DNA, 120 bp, Artificial Sequence
  ENSG00000138764_11 (sequence is synthesized)
tgctttccatcttagaaatctgattgttctgtcagaatttatatttacaggtttcaaagcaataaatgggggaataggtagtttcctggtttagcccccatctagtcaggaattaatata

SEQ ID NO: 349191 - DNA, 120 bp, Artificial Sequence
  ENSG00000138764_12 (sequence is synthesized)
ctggaatacctaccttctatttgttattcagatcagatctggcctattttcatatttatcctaagccatcaaatggggtagtgcctcttaaaccattaacagtactttagacattggcac

SEQ ID NO: 349192 - DNA, 120 bp, Artificial Sequence
  ENSG00000138764_13 (sequence is synthesized)
tttatttttctcgtagatctttagctactttggggaggagggaaggtgctgataccttcaatttgttacttttcaagatttttaaaaataactagtgtagcttatcttaaacattttata

SEQ ID NO: 349193 - DNA, 120 bp, Artificial Sequence
  ENSG00000138764_14 (sequence is synthesized)
aaaccttcagatgtctttaagcagattggaagtatgcaagtgcttccttagcagggacagtggataatccttaatggtttatcatagatttcaccctccccccttctcagaagagtgagt

SEQ ID NO: 349194 - DNA, 120 bp, Artificial Sequence
  ENSG00000138764_15 (sequence is synthesized)
atgctcttaaatgtcaaacacatttttgttgttttgttttttaaatgatcagtgtctatttgatgtgatgcagatcttataaatttgggaattataatattgacatttctgtgattttta

SEQ ID NO: 349195 - DNA, 120 bp, Artificial Sequence
  ENSG00000138764_16 (sequence is synthesized)
tatatgtaatgtcttaattgagatttctgttaaggcagaaataattaggctagggctcttagttttcattcctattgcccaagtattgtcaaactatggtattattttaatgttacttta

SEQ ID NO: 349196 - DNA, 120 bp, Artificial Sequence
  ENSG00000138764_17 (sequence is synthesized)
aaaatccataatctgctagttttgcatgtacttatatgaaaacagtgcagtaagttgaaaactcagtatctatggaattgataaatgttgatctggtgtagtatattttatcgcattttc

SEQ ID NO: 349197 - DNA, 120 bp, Artificial Sequence
  ENSG00000138764_18 (sequence is synthesized)
ttatattaaaaaatgtctgcatgattacattttatttcctttgtaatttacatttcagaatagtgtattgctatatgggtgccaagattgaatatgaagaacccgagtgtttgtagtatt

SEQ ID NO: 349198 - DNA, 120 bp, Artificial Sequence
  ENSG00000138764_19 (sequence is synthesized)
atagttttaagcaaatctgtgtggtgatacagccataagaatggggcttatataaactctgtacatgtaagattttgtacagagaatttttaactttataaattgtatatgaacatgtaa

SEQ ID NO: 349199 - DNA, 120 bp, Artificial Sequence
  ENSG00000138764_20 (sequence is synthesized)
atcttttaaaatgtacataaaatactgtatttttttaccttgtgtgtgatagtctagtcattgcatgtaaatataatttattatgtattctgtagtataaatcatacattgatgacttac

SEQ ID NO: 349200 - DNA, 120 bp, Artificial Sequence
  ENSG00000138764_21 (sequence is synthesized)
atttttactggtaagtcaacatccgttggatgttttctgaagtggctctttttgaagtgataatagattgtaattcaaaataaaattattaatgaattctccttgtttgggatcacatct

SEQ ID NO: 349201 - DNA, 120 bp, Artificial Sequence
  ENSG00000138764_22 (sequence is synthesized)
agagtgagccttctaactggctagcagaagttctctaggtttggcatctgtgccttggagatactgaaagagaatctgtcatttgacaattgacctctttgtgggatggactcattaagt

SEQ ID NO: 349202 - DNA, 120 bp, Artificial Sequence
  ENSG00000138764_23 (sequence is synthesized)
atgctctcagagactggtatattaccagaatgcctattaattttcagtgagaggcaacaggtattaagtagaacagaatgctcaggttggcagattagaacgatctttcaggagacaaag

SEQ ID NO: 349203 - DNA, 120 bp, Artificial Sequence
  ENSG00000138764_24 (sequence is synthesized)
caagttttaatcagttgtttggttaataagtatggggtgttcgctgtgatagggccccgccagcttctggctcttgtggacctcaaaagtatcaggtggttttgcaagtggtggtccttt

SEQ ID NO: 349204 - DNA, 120 bp, Artificial Sequence
  ENSG00000138764_25 (sequence is synthesized)
cccctgccccaccccaataggttccccatctgtctagtttgatttttgtagacctttgttttctctagttagaaaatcaggtacactgaatatggttttcatgtaacacctcttctctgg

SEQ ID NO: 349205 - DNA, 120 bp, Artificial Sequence
  ENSG00000138764_26 (sequence is synthesized)
agataggggtatgttttcctacccttctagtggagaatcctacttgaggatgacctttcctctcttactaaataatattagtaaatagtgggcaatatattctgctttcagattttgatt

SEQ ID NO: 349206 - DNA, 120 bp, Artificial Sequence
  ENSG00000138764_27 (sequence is synthesized)
tgttgagatgtaaaagttgtttggggcttaccaaatctcaagactctctttagctcctgcaggattgtattgcttttcttactggatatttttcctgggtaagcatctttgtggcttcat

SEQ ID NO: 349207 - DNA, 120 bp, Artificial Sequence
  ENSG00000138764_28 (sequence is synthesized)
ctcttccccctgtggttttcagtgtatttagtcgagacctctctgctgagcttgcaacctgtttattcacatggcctgccatgccacttggaggtttctgattactcccaaacctgctgg

SEQ ID NO: 349208 - DNA, 120 bp, Artificial Sequence
  ENSG00000138764_29 (sequence is synthesized)
ttctttatgtctttctcagcgaataattccatctattcatgttggaaacttaggtgatatgctcatctccttttgcctgtttatggaggtcaccagcctctatcatttgtatgatttcgt

SEQ ID NO: 349209 - DNA, 120 bp, Artificial Sequence
  ENSG00000138764_30 (sequence is synthesized)
ttacactgtttatatctctctgtcccccctttttctgccattggcatggtttagacctgtactctttatcagcagaggtactgtaatatatttgtgatccctcagcttccaggcttactc

SEQ ID NO: 349210 - DNA, 120 bp, Artificial Sequence
  ENSG00000138764_31 (sequence is synthesized)
ctggtctctgccttcctatctacatatccttttaaaataaaattttaactatctcctgaaaaattgttgagtaggtcacgcacaatcaggagaaaaatctattcatgacatacaagtctc

SEQ ID NO: 349211 - DNA, 120 bp, Artificial Sequence
  ENSG00000138764_32 (sequence is synthesized)
tgtctaatctgaacactgcacctgtctctggcctttttttcttgtcatttcctagaccttaaaaaatgtgtattgagaaagaactctgttagctatacagaagatgaactgggcaatata

SEQ ID NO: 349212 - DNA, 120 bp, Artificial Sequence
  ENSG00000138764_33 (sequence is synthesized)
gagtagcagcatggagaccagtctgactgaactaaggcagtggaagtgtggatgaggaagagaggtgaaaattgagaagcgctatcctttctctttgggcattattaggaggctcacaga

SEQ ID NO: 349213 - DNA, 120 bp, Artificial Sequence
  ENSG00000138764_34 (sequence is synthesized)
caagtccaggagcctggttataccctcctgtgccattcaaccaggtggctttcccatgactgtgatgaataaaattgagaagcccctgcccttttcagagcagagggtgaggagaaagct

SEQ ID NO: 349214 - DNA, 120 bp, Artificial Sequence
  ENSG00000138764_35 (sequence is synthesized)
accattttgtcctcatccttacccccgttgacttggcgagagatttgacctttcaggttttgatcctgtcattttctaggatgtggtgcacgcactttgctgttgcgcatggtgaagtat

SEQ ID NO: 349215 - DNA, 120 bp, Artificial Sequence
  ENSG00000138764_36 (sequence is synthesized)
tgtgcctaggtcctgggtcttcatctgtttggctctgctactgtttcctcctcccaggaagtgtggttagacaaataatgtgttttaattacctgtcacactcaggattaatacatactc

SEQ ID NO: 349216 - DNA, 120 bp, Artificial Sequence
  ENSG00000138764_37 (sequence is synthesized)
aggttaactgtagagaggcattggcttcagaacactcctcgtgacaattttaaccattttctttgtctagagtctgcctttttcttttttacaatttcttttatttcaacactaggtttc

SEQ ID NO: 349217 - DNA, 120 bp, Artificial Sequence
  ENSG00000138764_38 (sequence is synthesized)
aatatggtgttcctgctacctcccacctccctcctccctcatcacacatgcaaattgtcagcttattgagacaacccacttagattcatatatggacaaggacaaggtattttgcatttg

SEQ ID NO: 349218 - DNA, 120 bp, Artificial Sequence
  ENSG00000138764_39 (sequence is synthesized)
ttactggaattcagttttcctaactatttactaccagaaatggtcaataacttactttgtgtttagcaaatcaaattgtgtgatagatagtttcccagtatgatggccagtcagtctttc

SEQ ID NO: 349219 - DNA, 120 bp, Artificial Sequence
  ENSG00000138764_40 (sequence is synthesized)
catccctgtgcctacatgctgctcttcccgtccacaagtggagtctgtttctcttgagttttggctggccttatgaatggctttgcttactgaagtgcagcagaagaaatttagtatatg

SEQ ID NO: 349220 - DNA, 120 bp, Artificial Sequence
  ENSG00000138764_41 (sequence is synthesized)
tccaagcctaggctttaagagactggcagctttccttttatcctttttggaagctagccaccatgctgcaaagaagctcagctggattactgaaagatgagaggccatgtggagagagac

SEQ ID NO: 349221 - DNA, 120 bp, Artificial Sequence
  ENSG00000138764_42 (sequence is synthesized)
tcttgaggatgagagattatcttggatgttccagccttaagctcccagctgaatgtgggtgtatcctcagctacaccacagaaaacagaggaactactcagtcgatcccaatcaacccac

SEQ ID NO: 349222 - DNA, 120 bp, Artificial Sequence
  ENSG00000138764_43 (sequence is synthesized)
agactcactagaaataacaaattattgttttaagccacgaggttttgggggagggttgttaaacagtaatagataagtgagacagattgcttgttatttatggtcaaatggtgattatct

SEQ ID NO: 349223 - DNA, 120 bp, Artificial Sequence
  ENSG00000138764_44 (sequence is synthesized)
ctggtgagattacaggtgatgttttttttaagttatgcctatctgtagtttcctttttttcctaaaattgatttgaattattagtgtattaacagaataaagaatgaactttaaaacaca

SEQ ID NO: 349224 - DNA, 120 bp, Artificial Sequence
  ENSG00000138764_45 (sequence is synthesized)
ggtcttacccagcgctggccggcggacctgaccacggctcctccccctgccacacctccctggccgtggtggggattgccctggggctctggcggacgtgactggtcccttcacccgctc

SEQ ID NO: 349225 - DNA, 120 bp, Artificial Sequence
  ENSG00000138764_46 (sequence is synthesized)
cttgtcggggtgtgctggggcgacccttgctggaggtactggcctcagccctttctcccgcttccccacccctcttacccccagattacattctctgtgtggtgtctttactgcagatga

SEQ ID NO: 349226 - DNA, 120 bp, Artificial Sequence
  ENSG00000138764_47 (sequence is synthesized)
actgaattgtcacattgatcttggacttctcagcttccagaactaatcccatccagggtatgacattgaacttactcatcacgtctctatagtgtcttctggatgggattgaaatctgct

SEQ ID NO: 349227 - DNA, 120 bp, Artificial Sequence
  ENSG00000138764_48 (sequence is synthesized)
gtgagtttagacctttatctgtttcacaagactccctgtattgagttgaacatgaagactcatctttcccagttccctaataagagttcccaggcttaaagctctatgagaggcatcaca

SEQ ID NO: 349228 - DNA, 120 bp, Artificial Sequence
  ENSG00000138764_49 (sequence is synthesized)
tccttaaagaatgctgatgaaggaaaatcctttctgcagccagaactttgaacagtaaacctgattgttcattttgcctggaaggggaaagggcctgaggagtttggaactaagacccct

SEQ ID NO: 349229 - DNA, 120 bp, Artificial Sequence
  ENSG00000138764_50 (sequence is synthesized)
agacagcagagcctaagggaggaatgactctaccaggagacaaaataatgactctgttaaagttgagatggccggctgcctcatacctctgattcaaaagtaaaggagttgctgtactgg

SEQ ID NO: 349230 - DNA, 66 bp, Artificial Sequence
  ENSG00000138764_51 (sequence is synthesized)
acctggacctgaagcagacctgcagagaggatcaagtgcagagacaagctgctgctgagatcatca

SEQ ID NO: 349231 - DNA, 120 bp, Artificial Sequence
  ENSG00000138764_52 (sequence is synthesized)
gaggatcaagtgcagagacaagctgctgctgagatcatcataggggacctcttctaacatatgagttcctgaggaagtgctgtgaccttccaatgctgccactggtagtctcatttcaaa

SEQ ID NO: 349232 - DNA, 120 bp, Artificial Sequence
  ENSG00000138764_53 (sequence is synthesized)
gagtaaaatgtgaaaatccaatggcagcagctattgtgatatgccagacagcaggaattgggactaaaaatcaagggatacttgtgataatagatccatagtactttggagctggaagaa

SEQ ID NO: 349233 - DNA, 120 bp, Artificial Sequence
  ENSG00000138764_54 (sequence is synthesized)
acccagcttcaaaaaacagcttgatttgcagctcttcattcaaaaagaatcccatccagggtatgacattgaacttactcatcacgtctctatagtgtcttctggagtttggaactaaga

SEQ ID NO: 349234 - DNA, 120 bp, Artificial Sequence
  ENSG00000138764_55 (sequence is synthesized)
cccctgagttcctgcctgttcctcctgaaagccttccctatctgtggataatgggcttgccttgccaacttccacaattgcataaaacaagtccttgcaatgaatctcaacatgtattaa

SEQ ID NO: 349235 - DNA, 120 bp, Artificial Sequence
  ENSG00000138764_56 (sequence is synthesized)
tttattatactcagaactggaatagtgtaagacatcagagaaagcaagcacctacactaagagctaagaattaaagcccccactcttcaggtaagcaaattaaccagaagtagtatttta

SEQ ID NO: 349236 - DNA, 87 bp, Artificial Sequence
  ENSG00000138764_57 (sequence is synthesized)
aaggtcctctccaagagtagagatagggtctcgcgatgttgcccagggctggtcttacatactcccaggctcaagtgatcctcctgc

SEQ ID NO: 349237 - DNA, 120 bp, Artificial Sequence
  ENSG00000138764_58 (sequence is synthesized)
ctgagattacaggtgtgagccactgcactcggcctcttttccctttttaaagtggttgttttccatctttctcctatttcccttgctcttgaaatacagctaaaaaaccccaaaaaaaca

SEQ ID NO: 349238 - DNA, 120 bp, Artificial Sequence
  ENSG00000138764_59 (sequence is synthesized)
ttgaaatacagctaaaaaaccccaaaaaaacaaaactgaaaaagaattctgggctttgtaatgttagtatgaattcctaatattgtgctgtggtgaagagattgaggggtaggtgcctgg

SEQ ID NO: 349239 - DNA, 120 bp, Artificial Sequence
  ENSG00000138764_60 (sequence is synthesized)
ctggccgtggtggggattgccctggggctctggcggacgtgactggtcccttcacccgctccttgtcggggtgtgctggggcgacccttgctggagatgaaggatttgggggcagagcac

SEQ ID NO: 349240 - DNA, 120 bp, Artificial Sequence
  ENSG00000138767_0 (sequence is synthesized)
gcgcgcgcgcgcgcgtgtttgtgtgtgtgtttcccctgccgcggggaaatggctgctgttgcttctgggccagaggaagagaatgaggtagagtgttcttttgcctccgagtaggaccga

SEQ ID NO: 349241 - DNA, 120 bp, Artificial Sequence
  ENSG00000138767_1 (sequence is synthesized)
gagtgttgggaagaggagcgcgtccccggggaaatgagactaatagggatgccaaaggaaaaatatgatcctccagatcctcgcagaatttataccatcatgtcagcagaggaggtagcc

SEQ ID NO: 349242 - DNA, 120 bp, Artificial Sequence
  ENSG00000138767_2 (sequence is synthesized)
aatgggaaaaaatctcactgggcagaattagaaatctcgggtagagtgcggagcctaagtacatcactttggtcattgacacacttgacagcgctgcacctaaatgacaattaccttagt

SEQ ID NO: 349243 - DNA, 120 bp, Artificial Sequence
  ENSG00000138767_3 (sequence is synthesized)
cgcattccacctgatattgccaagcttcataatctggtttacctggatctgtcatccaataaactcagaagtttaccagcagaactaggaaacatggtgtctctcagggaattgctttta

SEQ ID NO: 349244 - DNA, 120 bp, Artificial Sequence
  ENSG00000138767_4 (sequence is synthesized)
aataacaatctgttacgggttttgccttatgaacttggtcggctcttccagctacaaactctaggtttgaaaggcaatcctttatcacaggatattctcaacttataccaggacccagat

SEQ ID NO: 349245 - DNA, 120 bp, Artificial Sequence
  ENSG00000138767_5 (sequence is synthesized)
ggaacccgaaagctactgaacttcatgcttgacaatctcgcagttcatccagagcagcttcctccgaggccatggattacattaaaagaacgagaccaaattctgccgtcagcatcattc

SEQ ID NO: 349246 - DNA, 120 bp, Artificial Sequence
  ENSG00000138767_6 (sequence is synthesized)
acggttatgtgttacaatgtgttatgtgataaatacgctacccggcagctatatggctattgcccatcctgggcattaaactgggaatacaggaaaaagggaattatggaagaaattgtt

SEQ ID NO: 349247 - DNA, 120 bp, Artificial Sequence
  ENSG00000138767_7 (sequence is synthesized)
aactgtgacgcagatatcattagtcttcaggaagtggaaacagagcaatacttcactctctttctgccagcattgaaggagcgtggatatgatggatttttttctccaaagtcacgtgcc

SEQ ID NO: 349248 - DNA, 120 bp, Artificial Sequence
  ENSG00000138767_8 (sequence is synthesized)
aaaatcatgtctgagcaggagagaaagcatgtagatggttgtgcaatattcttcaaaacagaaaaatttacattggtgcagaagcatacagtggaatttaaccaagtggcgatggctaat

SEQ ID NO: 349249 - DNA, 120 bp, Artificial Sequence
  ENSG00000138767_9 (sequence is synthesized)
tcagatggatccgaagctatgctgaacagagtgatgacaaaagataacattggtgtcgctgtggtattagaggtccacaaagaactatttggagcaggtatgaagcctattcatgctgca

SEQ ID NO: 349250 - DNA, 120 bp, Artificial Sequence
  ENSG00000138767_10 (sequence is synthesized)
gacaaacagctgcttatagtggcaaatgcccacatgcattgggacccagagtattctgatgtgaagctcatccagaccatgatgtttgtctcagaggttaaaaacattctggagaaagcc

SEQ ID NO: 349251 - DNA, 120 bp, Artificial Sequence
  ENSG00000138767_11 (sequence is synthesized)
tctagtaggcctggaagcccaactgcagatcctaattccatcccgctggtgctatgtgcagatcttaactcattgccagattcaggtgttgtggaatacttaagcaatggaggagtagct

SEQ ID NO: 349252 - DNA, 120 bp, Artificial Sequence
  ENSG00000138767_12 (sequence is synthesized)
gacaaccataaagacttcaaggaactaaggtacaatgagtgtcttatgaacttcagctgcaatggaaagaatggaagctcagaagggagaatcacacatggcttccaacttaagagcgcc

SEQ ID NO: 349253 - DNA, 120 bp, Artificial Sequence
  ENSG00000138767_13 (sequence is synthesized)
tatgaaaataacttgatgccttacaccaattacacctttgatttcaaaggcgtgattgactacattttctattccaagactcatatgaacgtgcttggtgtcctggggcctttagatcct

SEQ ID NO: 349254 - DNA, 120 bp, Artificial Sequence
  ENSG00000138767_14 (sequence is synthesized)
caatggctggttgagaacaacatcactgggtgtccacaccctcacatcccttcagaccacttctcactgttaacacaacttgaactccaccctccactcctgcctcttgtcaatggtgtt

SEQ ID NO: 349255 - DNA, 120 bp, Artificial Sequence
  ENSG00000138767_15 (sequence is synthesized)
cacttgcctaatcggaggtagtggagtactgccccgccaagacggggatctgttgctatggacctgtacagttgtaaatcaaagtatgtaggagtgaagtatggccatccttaagctgct

SEQ ID NO: 349256 - DNA, 120 bp, Artificial Sequence
  ENSG00000138767_16 (sequence is synthesized)
tcttcaggtttctttcattatgtgtttgctgtaagactttgtacatttttgtgcatattggtatcatttggcagtagggctggaaccaaagtattactctctttacaaaattttaattta

SEQ ID NO: 349257 - DNA, 120 bp, Artificial Sequence
  ENSG00000138767_17 (sequence is synthesized)
acatgtttttaaattggaccttctttatattgtattaacagccagcattcaaaattgataaattaccaatttgaggcccaataacagtgtatttgtttttccaaaacaaatactttcttt

SEQ ID NO: 349258 - DNA, 120 bp, Artificial Sequence
  ENSG00000138767_18 (sequence is synthesized)
tgaatggtttcagtgagccaaccattttataaaaggcaatttttaaaaactataaatacagtattttaaactgaatgatgatatgccttccagggaaaaccttgaatttttcctttataa

SEQ ID NO: 349259 - DNA, 120 bp, Artificial Sequence
  ENSG00000138767_19 (sequence is synthesized)
ctgacttttggattccaaagtcatttgcacattaacagagtacttaaatttacttgttcagtccataaactatgatatagcctctatacatggtaagaaaatttgaaaaattaaagatgg

SEQ ID NO: 349260 - DNA, 120 bp, Artificial Sequence
  ENSG00000138767_20 (sequence is synthesized)
ttgcacagtatacttttataatccagcatgtaacaccacatgacaatttgttggccaaatgctggtttggagtttttttgaggaatcactttggtttttttgtcctttatatataacctt

SEQ ID NO: 349261 - DNA, 120 bp, Artificial Sequence
  ENSG00000138767_21 (sequence is synthesized)
attggaagtattaattctaagcctgtctctcaagtttatttatagagaaaaagtaagtaatctgtattgccacataccttgaaaatagaatgtggtatgtttaggatgcccacggaatga

SEQ ID NO: 349262 - DNA, 120 bp, Artificial Sequence
  ENSG00000138767_22 (sequence is synthesized)
atttttccttattccaattcaaccttctgtctggttgtgccaggaaaacagatgttatatgacctatgtcatttttgccattatagtcaaatgttaaaagaagaaaaaagtctgctgaat

SEQ ID NO: 349263 - DNA, 120 bp, Artificial Sequence
  ENSG00000138767_23 (sequence is synthesized)
aaaaaggccttgatcaaagtttcagatggggaaaatcatacagatattttatgtgtttccaacatagattatgtggctgttggtttcttgagatgacagtgcaaaggatttgggagagag

SEQ ID NO: 349264 - DNA, 120 bp, Artificial Sequence
  ENSG00000138767_24 (sequence is synthesized)
aacaaatttggggcagtagttgaaaacgttgggtcattttcctgactctagctgccaaatggccatcatatgcttttaatctttgtttcagttgtctgtcagggttgaattaagaagcta

SEQ ID NO: 349265 - DNA, 120 bp, Artificial Sequence
  ENSG00000138767_25 (sequence is synthesized)
ctggtttattcccaattgttgatgcctttaggtatgttggaatcttttttttgcctaggaggggccagttgaaaatctgtgactcaagaggcagtgaacagaatactgttttctggggaa

SEQ ID NO: 349266 - DNA, 120 bp, Artificial Sequence
  ENSG00000138767_26 (sequence is synthesized)
aaattggttggctacttgatgttaattatggcacagtaacaggaaaaggttgtgtctgtgtttttaagtttttctttattctgcttttttgctgctataagagttttctgaaatttatat

SEQ ID NO: 349267 - DNA, 120 bp, Artificial Sequence
  ENSG00000138767_27 (sequence is synthesized)
tttaaacttttcatgcactttactgtttctagtctcaaaatgtgatatttttaataaacaagaaattttccattatgtgaatgaaattttaaaagacaatagcctatatttgtgtctcac

SEQ ID NO: 349268 - DNA, 120 bp, Artificial Sequence
  ENSG00000138767_28 (sequence is synthesized)
taatatataaagtataggtcaaatttaaattatttaattagttttaaatatacacaatttgtctcctctttcaaacctgacatcttcggctgttttattagtcttaaatgatgcatttac

SEQ ID NO: 349269 - DNA, 120 bp, Artificial Sequence
  ENSG00000138767_29 (sequence is synthesized)
tttggtcattttatgctaatttcttccatagtaaattaatcaggctatataaggtaatatttccccagagggtaattttagtgggacgagggtggtgggatgatgtcatatcatacatgg

SEQ ID NO: 349270 - DNA, 120 bp, Artificial Sequence
  ENSG00000138767_30 (sequence is synthesized)
gattgcatcagaagggttctgtaaagcctgaactcccttttaaaagtgcctagtgatagaggcgttgtttgtcatctattataattggaatgtcattgtagttcagtgaattttgatgta

SEQ ID NO: 349271 - DNA, 120 bp, Artificial Sequence
  ENSG00000138767_31 (sequence is synthesized)
aataaaatatcttttaaaaatgttaaagtaccaggataaacaaacaaaaagaaacaacccttaagatgacagattttcctcaacatgcaggtttcccttcttatatacctcaagtatcca

SEQ ID NO: 349272 - DNA, 120 bp, Artificial Sequence
  ENSG00000138767_32 (sequence is synthesized)
acatctagccatgcaaattgattacctgaagcatagtactggaaagtagaatagcatgaaaaacttaattttgtggacattacctttttttgtaatcagctactgtatgttttattttag

SEQ ID NO: 349273 - DNA, 120 bp, Artificial Sequence
  ENSG00000138767_33 (sequence is synthesized)
atcttttgttttgggtgggttttctgctctggaggtatatgcactaacaaaacattttcctcctttcatatacgcatgttaattagcaatgtgagcaatatttcctaccatacttcactc

SEQ ID NO: 349274 - DNA, 120 bp, Artificial Sequence
  ENSG00000138767_34 (sequence is synthesized)
ccaatattttttgagatgtttgtataaaatggaatttaaagttcacttatgattgtatatgaaccacagaggagcccatttattaataaaaaacttttttaatagttaaatgtagaggga

SEQ ID NO: 349275 - DNA, 120 bp, Artificial Sequence
  ENSG00000138767_35 (sequence is synthesized)
aaaaataaaaaaaaatgggaaacattgtaaacagcttaagtttattttgtgtatgatcgaggcactctgttgcaggaaggtgtgtaattgggttctctctgcttcaaatgcgctctttca

SEQ ID NO: 349276 - DNA, 120 bp, Artificial Sequence
  ENSG00000138767_36 (sequence is synthesized)
gcatggtaacccaaatttcatgtgcacggtttccctttagcccactgcccaaatttcacatacccttcaccctttgttccctttgtaaaaggagtggtatctgttttgagctgccaattc

SEQ ID NO: 349277 - DNA, 120 bp, Artificial Sequence
  ENSG00000138767_37 (sequence is synthesized)
agatgatcagaaatgctgctttcctcagcattgtcttgttaaaccgcatgccatttggaactttggcagtgagaagccaaaaggaagaggtgaatgacatatatatatatatattcaatg

SEQ ID NO: 349278 - DNA, 120 bp, Artificial Sequence
  ENSG00000138767_38 (sequence is synthesized)
aaagtaaaatatatatgctcatatactttctagttatcagaatgagttaagctttatgccattgggctgctgcatattttaatcagaagataaaagaaaatctgggcatttttagaatgt

SEQ ID NO: 349279 - DNA, 120 bp, Artificial Sequence
  ENSG00000138767_39 (sequence is synthesized)
gatacatgtttttttaaaactgttaaatattatttcgatatttgtctaagaaccggaatgttcttaaaatttactaaaacagtattgtttgaggaagagaaaactgtactgtttgccatt

SEQ ID NO: 349280 - DNA, 120 bp, Artificial Sequence
  ENSG00000138767_40 (sequence is synthesized)
attacagtcatacaagtgcatgtcaagtcacccactctctcaggcatcagtatccacctcatagctttacacattttgatggggaatattgcagcatcctcaggcctgacatctgggaaa

SEQ ID NO: 349281 - DNA, 120 bp, Artificial Sequence
  ENSG00000138767_41 (sequence is synthesized)
ggctcagatccacctactgctccttgctcgttgattttgttttaaaatattgtgcctggtgtcaacttttaagcaacagcactgcctaaaagcaagcagagaacagaatcccagcaccat

SEQ ID NO: 349282 - DNA, 120 bp, Artificial Sequence
  ENSG00000138767_42 (sequence is synthesized)
tctataggcaactttttagaattcagatatagtaaatctgttccagatttatgatgttttatgtaaaaaaaattttgtataataacatagctgaatatttttgtttcatttctttgatgt

SEQ ID NO: 349283 - DNA, 120 bp, Artificial Sequence
  ENSG00000138767_43 (sequence is synthesized)
aaggcgtgtgaacattcgtttgaatatcacatgttgaagtcaggtatggcacaatgggttctgagaccagcttttcctcccctcccatttgccttgttccaagctctttcttttcaaatt

SEQ ID NO: 349284 - DNA, 120 bp, Artificial Sequence
  ENSG00000138767_44 (sequence is synthesized)
acttttctgatattcataggcaggtatttaattttactaattagcatcctgtgtgaatgtattaaagaagccactgtgttttagtgtagttggcaaaaatataaaagctgtttcttattt

SEQ ID NO: 349285 - DNA, 120 bp, Artificial Sequence
  ENSG00000138767_45 (sequence is synthesized)
gcccctatttttttggtgtcttaaagttatatattaaatcacagagaagcaagggagaaagttgaaagatatctaaggctcatatcacttgattctatggtagattatattagaattgag

SEQ ID NO: 349286 - DNA, 120 bp, Artificial Sequence
  ENSG00000138767_46 (sequence is synthesized)
gatgtggcacattaaaactggaacatgggcaaatatagtgttccattttaaaattctaagtttatattgttaaatgggtgaaaatttaagtttatatttgcatttccaagcgtttctaaa

SEQ ID NO: 349287 - DNA, 120 bp, Artificial Sequence
  ENSG00000138767_47 (sequence is synthesized)
aatcactaatgccatctatacttttagtatgaaacagcagactatagaaagcacagggaagaataggctaaatacattctttgaagaaccagaggcatataaccacatcattatgtcatt

SEQ ID NO: 349288 - DNA, 120 bp, Artificial Sequence
  ENSG00000138767_48 (sequence is synthesized)
cctaatacatggctagattttctaatgataaaattgactgtgtcccaatgcttatttgattctaagcttttttattctgtttctgagatattttaatagctttgcaaaatatgctgacca

SEQ ID NO: 349289 - DNA, 120 bp, Artificial Sequence
  ENSG00000138767_49 (sequence is synthesized)
gtttttggaaaataatggtttttatagcaagcaaagactttatggcacattttcaaaatagcactcatacatacttacattttgacagaaatgtgaattctcacattgatgagatattct

SEQ ID NO: 349290 - DNA, 120 bp, Artificial Sequence
  ENSG00000138767_50 (sequence is synthesized)
ttttcccacctgccctaccctttaaaaaaggtcacttttctaatgtgtagtagattcatttacgcctttccctttgagtcataccatgtttggagaactgtgtgaattgtaggtagagaa

SEQ ID NO: 349291 - DNA, 120 bp, Artificial Sequence
  ENSG00000138767_51 (sequence is synthesized)
attaactagggaagccagaagcttgaactaaagttttaaatttgtaggcagatgagaacttttatactatggttgctttgggcgattctaattttgtaatagcatcatgatcaccaaaat

SEQ ID NO: 349292 - DNA, 120 bp, Artificial Sequence
  ENSG00000138767_52 (sequence is synthesized)
taattcaaacattttagtacatctttaatctgtcttatttaccaaagttctaatctgtttaagaacaggatgccaagagcatctttcattttatagaatgatatgctcacctttataagt

SEQ ID NO: 349293 - DNA, 120 bp, Artificial Sequence
  ENSG00000138767_53 (sequence is synthesized)
gtcacctaaaagcttgagggtaaaaaagaagcagcccatatatctaaactacaggatgtcttgaacaagattcacagaaagaaagaaaaaaaagcagttctttccaggaaggtggtaagg

SEQ ID NO: 349294 - DNA, 120 bp, Artificial Sequence
  ENSG00000138767_54 (sequence is synthesized)
aagagcatgcatatttcttgttttaaccaaataccttttttatgtaaatgtctctattaaaccccaggtcctacaccaggaaatagggtgataaccaggaaaataccaagctttaaccca

SEQ ID NO: 349295 - DNA, 120 bp, Artificial Sequence
  ENSG00000138767_55 (sequence is synthesized)
gttggcagttccttgtggcatacatttggttagacttgggtttttcctggaaccaaaggaaaataagcatgttgagttcttcgttcaacagacatgacattgaagtaatagaatattttt

SEQ ID NO: 349296 - DNA, 120 bp, Artificial Sequence
  ENSG00000138767_56 (sequence is synthesized)
taagtaaaatagttttcactttcaaagcctatgacataaggacatttgtgcttattaattgttaatttttttttatggtacattgtataaactgagtagcattgaactgcattttagaag

SEQ ID NO: 349297 - DNA, 120 bp, Artificial Sequence
  ENSG00000138767_57 (sequence is synthesized)
tatgtcatcagaaacaaatcacattatggaaaggatatacaaatgccaagtgatatgactcttttggcatggtggtagcatggtccattcagctttcagaatctttcggaggctctagtt

SEQ ID NO: 349298 - DNA, 120 bp, Artificial Sequence
  ENSG00000138767_58 (sequence is synthesized)
tggtgcctagtactagttatttttgttagaacaatctctcaaaatttagataattttccagttgtatgtctgtcacttttaactctaaagcgtaagaatcatggtaaccctctcagaagt

SEQ ID NO: 349299 - DNA, 120 bp, Artificial Sequence
  ENSG00000138767_59 (sequence is synthesized)
ggtcctttcttgctcatttcagtttcgtattaacttcaaatcactgatgtattgtctttcaagctatcaattgttatatgtaccaatttaatttagtttgtagttatctgaagtcacaaa

SEQ ID NO: 349300 - DNA, 120 bp, Artificial Sequence
  ENSG00000138767_60 (sequence is synthesized)
attggttcagcattgatgtcaaacaatggctttgcttcttaccaaacagacttagtatcctgctgcttgtttcaatcttgatgcagtaagtgatgcagtatctgggtctgtatttactta

SEQ ID NO: 349301 - DNA, 120 bp, Artificial Sequence
  ENSG00000138767_61 (sequence is synthesized)
gaaactgtactgtcctttctctgtgcttaacttgctaaaaatatattcccttacctgtgaaattcctgagcggtgctctgccaacttttcaaggggagggatttggatggctgtgttact

SEQ ID NO: 349302 - DNA, 120 bp, Artificial Sequence
  ENSG00000138767_62 (sequence is synthesized)
gcacactggatctggaattgttcagggttatgagtgacaaatttcttaaacaccagcagcactgagatgtgcactatgggcattcgtacagttgttgtccaaatgcaaacaactttttca

SEQ ID NO: 349303 - DNA, 120 bp, Artificial Sequence
  ENSG00000138767_63 (sequence is synthesized)
tcttggagaagctgagatacagagttcaatagaactacttggaatattttgagaaggttgaatgtttcatctttggctttgttgtctctggagtggggaagtatggagggcttttttttt

SEQ ID NO: 349304 - DNA, 120 bp, Artificial Sequence
  ENSG00000138767_64 (sequence is synthesized)
ttttttttttttttttttttaaagagagtgtgtatgtactttttctctctataagggccagggtgttggtcaaattcaccatcgattaatttatatcttctgttgtgatttttttcaact

SEQ ID NO: 349305 - DNA, 120 bp, Artificial Sequence
  ENSG00000138767_65 (sequence is synthesized)
tttcaactatataacaagtgccaactaattgtccatgggacaatctacttttccactcaatttatcgttttgagtagggaaaggttcatttattttcattacctggcattaagttaaaga

SEQ ID NO: 349306 - DNA, 120 bp, Artificial Sequence
  ENSG00000138767_66 (sequence is synthesized)
attcattattttgcatacatttgagtcattctgtgacctataaagtgtttttgtaactatctaattctaatggttgcaaagcaaagcacatgactgtaaaaccaagcaaggtgttttagt

SEQ ID NO: 349307 - DNA, 120 bp, Artificial Sequence
  ENSG00000138767_67 (sequence is synthesized)
aactttttccctgaatacttggtagtttccattgatactattccaaaacaaattctgctgttttaggttgtatatttactttgcttttgttctaagaaaaagccaaggactaaatcaact

SEQ ID NO: 349308 - DNA, 120 bp, Artificial Sequence
  ENSG00000138767_68 (sequence is synthesized)
tgtttttgtgtttcagtaatcagtttaaaatctaagatttttttttaaattagactatttaatgaagtgccatgtaattgtagcttgctagtgtttaatgtttaatagactggttctgta

SEQ ID NO: 349309 - DNA, 120 bp, Artificial Sequence
  ENSG00000138767_69 (sequence is synthesized)
ggtgttttaaccatttaacactctctgccatccctggagaaagtggttctactcttactgaacacattctctctgacaaaatcaccagctgctttatttttctatttattacagttaaac

SEQ ID NO: 349310 - DNA, 120 bp, Artificial Sequence
  ENSG00000138767_70 (sequence is synthesized)
agttgatgaggtctgaatcttgaccaaaactgctcagctgagatgtttttcacaatagacactgtacaaagtgtgcgtgcaaaaggacacggttggtagtattttttcattaatgtgaac

SEQ ID NO: 349311 - DNA, 120 bp, Artificial Sequence
  ENSG00000138767_71 (sequence is synthesized)
attgactaaaaaaaagcagtcctgccttttaaatcttgtggcagctcagaagggaggtgcttaagaaccttaactactatgtcagataacaaaatatttttttccattttggagattggt

SEQ ID NO: 349312 - DNA, 120 bp, Artificial Sequence
  ENSG00000138767_72 (sequence is synthesized)
tactgctcacacatgatgtatagggctaaatatatgcttgtttccttgcacctgtgtacttcccctctctccctccctttccttcccctgtaggcaataaatggccattttgcaactgca

SEQ ID NO: 349313 - DNA, 120 bp, Artificial Sequence
  ENSG00000138767_73 (sequence is synthesized)
gtccagaactggttcagctgcttccccatttttagaaggttggcttttgccttcctgcttcttatttcatggtcacaagatggttattatttctccgagcactagctgtaaggggcaagg

SEQ ID NO: 349314 - DNA, 120 bp, Artificial Sequence
  ENSG00000138767_74 (sequence is synthesized)
tataaaagcatgaagggatatatatgctgtctttgttaggtggggcctctgagaaactttttacaataatcagacttcttgtgtcttagtggccagaactgtatcacatggtcacttgca

SEQ ID NO: 349315 - DNA, 120 bp, Artificial Sequence
  ENSG00000138767_75 (sequence is synthesized)
gtgtgtgtgtgtgtcgggggtggcccggggccgggaccccagagtggcgtgtccctcccgctttgtggctgcggctcccgagcctcgcagactaatagggatgccaaaggaaaaatatga

SEQ ID NO: 349316 - DNA, 120 bp, Artificial Sequence
  ENSG00000138768_0 (sequence is synthesized)
cttcgagccgccacgtaatgccacgtccccgcgcatgcgcatcttggccgctgctggcggctgtttccgggcttagagggctggagtggccgccgagttggaggcggtggtggcagcagt

SEQ ID NO: 349317 - DNA, 120 bp, Artificial Sequence
  ENSG00000138768_1 (sequence is synthesized)
aggagtgtgtagagtgcgggattggggcccaggccctgcggagggcgggggaagttgtcttcttttttttccggaggggccggtaaacctggtggctgaacggcaagatgaatttcctcc

SEQ ID NO: 349318 - DNA, 120 bp, Artificial Sequence
  ENSG00000138768_2 (sequence is synthesized)
gcggggtaatggggggtcagagtgccggaccccagcacacagaagccgagacgattcaaaagctttgtgacagagtagcttcatctactttattggatgatcgaagaaatgctgttcgtg

SEQ ID NO: 349319 - DNA, 120 bp, Artificial Sequence
  ENSG00000138768_3 (sequence is synthesized)
ctctcaaatcattatctaagaaataccgcttggaagtgggtatacaagctatggaacatcttattcatgttttacaaacagatcgttcagattctgaaataataggttatgctttggaca

SEQ ID NO: 349320 - DNA, 120 bp, Artificial Sequence
  ENSG00000138768_4 (sequence is synthesized)
cactatataatataatatctaatgaagaagaagaagaagtagaagaaaattccacaagacagagtgaagatttgggaagccaatttacagaaattttcattaagcagcaggaaaatgtca

SEQ ID NO: 349321 - DNA, 120 bp, Artificial Sequence
  ENSG00000138768_5 (sequence is synthesized)
ctcttctgttatctttattggaggagtttgatttccatgtccgctggcctggtgtgaagcttcttacttctcttttaaaacaactagggcctcaggtgcaacaaattattttagtcagtc

SEQ ID NO: 349322 - DNA, 120 bp, Artificial Sequence
  ENSG00000138768_6 (sequence is synthesized)
ctatgggtgtttcaagattgatggacttactagcggattccagggaagttatacgtaatgatggcgtcttactactgcaggcactaacaagaagcaatggtgcaatccagaaaattgttg

SEQ ID NO: 349323 - DNA, 120 bp, Artificial Sequence
  ENSG00000138768_7 (sequence is synthesized)
cttttgaaaatgctttcgagagactactggacattatttcagaggaggggaacagtgatggaggtatagtagttgaagattgtttgattttgctccaaaacttattaaaaaacaacaact

SEQ ID NO: 349324 - DNA, 120 bp, Artificial Sequence
  ENSG00000138768_8 (sequence is synthesized)
ccaatcaaaatttttttaaagaaggctcatatattcaacgtatgaaaccttggtttgaagttggagatgaaaattctggctggtctgcacagaaagtgaccaatctacatctaatgctac

SEQ ID NO: 349325 - DNA, 120 bp, Artificial Sequence
  ENSG00000138768_9 (sequence is synthesized)
agcttgttcgtgtattggtatctcccaccaaccctcctggtgctaccagtagctgccagaaggctatgttccagtgtgggttattgcagcagctttgtactatcctaatggctactgggg

SEQ ID NO: 349326 - DNA, 120 bp, Artificial Sequence
  ENSG00000138768_10 (sequence is synthesized)
ttcctgctgatatcctgactgagaccataaatactgtatcagaagttattcgaggctgccaagtaaaccaagactactttgcatctgtaaatgcaccttcaaacccaccaagaccggcaa

SEQ ID NO: 349327 - DNA, 120 bp, Artificial Sequence
  ENSG00000138768_11 (sequence is synthesized)
ttgtagtacttctcatgtccatggttaatgaaaggcagccatttgttttgcgctgtgctgttctctattgtttccagtgtttcttgtataaaaaccaaaaaggacaaggagaaatcgtgt

SEQ ID NO: 349328 - DNA, 120 bp, Artificial Sequence
  ENSG00000138768_12 (sequence is synthesized)
caacacttttaccttctaccattgatgcaacaggtaattcagtttcagctggccagttattatgtggaggtttgttttctactgattcactttcaaactggtgtgctgctgtggcccttg

SEQ ID NO: 349329 - DNA, 120 bp, Artificial Sequence
  ENSG00000138768_13 (sequence is synthesized)
cccatgcgttgcaagaaaatgccacccagaaagaacagttgctcagggttcaacttgctacaagtattggcaaccctccagtttctttacttcaacagtgcaccaatattctttcacagg

SEQ ID NO: 349330 - DNA, 120 bp, Artificial Sequence
  ENSG00000138768_14 (sequence is synthesized)
gaagcaaaatacaaacaagagttggattattaatgttgctttgtacctggctaagcaattgtcccattgcagtaacgcattttcttcacaattcagccaatgttccatttcttacaggac

SEQ ID NO: 349331 - DNA, 120 bp, Artificial Sequence
  ENSG00000138768_15 (sequence is synthesized)
aaattgcagaaaatcttggagaagaagagcagttggtccaaggcttatgtgcccttttgttgggcatttcgatttatttcaatgataactcacttgagagctacatgaaagagaagctaa

SEQ ID NO: 349332 - DNA, 120 bp, Artificial Sequence
  ENSG00000138768_16 (sequence is synthesized)
tattccagagcatctcagaaaccccagccaaactttcccagtccagaatacatgatatttgatcatgagtttacgaagctggtaaaagaacttgaaggtgttataactaaggctatttat

SEQ ID NO: 349333 - DNA, 120 bp, Artificial Sequence
  ENSG00000138768_17 (sequence is synthesized)
aagtccagtgaagaagataaaaaagaagaagaggtgaaaaaaacattagaacagcatgacaatattgtgactcactacaaaaatatgattcgagagcaggatctccaacttgaggaatta

SEQ ID NO: 349334 - DNA, 120 bp, Artificial Sequence
  ENSG00000138768_18 (sequence is synthesized)
aggcagcaggtttctacattaaaatgtcaaaatgaacagctccagacggcagtcacacagcaagtatcacagatccagcagcacaaagaccagtataatcttcttaaaatacagctagga

SEQ ID NO: 349335 - DNA, 120 bp, Artificial Sequence
  ENSG00000138768_19 (sequence is synthesized)
aaagacaatcagcatcaaggttcttacagtgagggggctcagatgaatggcattcagccagaagaaattggtagattgcgagaagagatagaagaattaaaacgtaatcaggaactttta

SEQ ID NO: 349336 - DNA, 120 bp, Artificial Sequence
  ENSG00000138768_20 (sequence is synthesized)
caaagccagctgactgaaaaggactctatgattgaaaatatgaaatcttcccaaacatctggcacaaatgaacagtcttcagcaatagtttcagctagagattctgaacaagttgcagaa

SEQ ID NO: 349337 - DNA, 120 bp, Artificial Sequence
  ENSG00000138768_21 (sequence is synthesized)
ttaaaacaggaactggcaactttaaagtctcagttaaactcacaatctgtggagatcaccaaactacagacagaaaagcaggaactgttacagaaaacagaagcgtttgcaaaatcagtt

SEQ ID NO: 349338 - DNA, 120 bp, Artificial Sequence
  ENSG00000138768_22 (sequence is synthesized)
gaggtacaaggagagaccgagactataatagccaccaaaactactgatgtagaaggaagactgtcagcattattacaagagaccaaagagttaaagaatgaaattaaagctctgtctgag

SEQ ID NO: 349339 - DNA, 120 bp, Artificial Sequence
  ENSG00000138768_23 (sequence is synthesized)
gaaagaactgccattaaagagcagctggattcatctaatagtaccattgccattttacaaactgagaaagacaaactagagttggaaattacagattctaaaaaagaacaagatgatctc

SEQ ID NO: 349340 - DNA, 120 bp, Artificial Sequence
  ENSG00000138768_24 (sequence is synthesized)
ttggtgctcttggccgatcaagatcagaaaatactgtcattgaagaataaactcaaggatcttggtcatccagttgaagaagaggatgaacttgaatctggagaccaagaggatgaggat

SEQ ID NO: 349341 - DNA, 120 bp, Artificial Sequence
  ENSG00000138768_25 (sequence is synthesized)
gatgaaagtgaagatcctggcaaggatctagatcatatctagttttcaaatctctaggaacaatagagattatatcataactctgaagatggactctaaactttggtttacctccatgga

SEQ ID NO: 349342 - DNA, 120 bp, Artificial Sequence
  ENSG00000138768_26 (sequence is synthesized)
aaataaagatttagaaaccaggtggaaaacattcactattaagactattgatatatttttgtaatgttgccacccatgttgaaaaccttaaaactgaatttatgtagaacacacatcttt

SEQ ID NO: 349343 - DNA, 120 bp, Artificial Sequence
  ENSG00000138768_27 (sequence is synthesized)
tatttaaatccatctgaactgtcccaaaatgtaatttgcaaagagcttcaaacaccaaaaatataccattttaaggcatgtggtgacaatgctatttgccttagttcattcgttgtttac

SEQ ID NO: 349344 - DNA, 120 bp, Artificial Sequence
  ENSG00000138768_28 (sequence is synthesized)
tttgcaaaatttgtgacttttaagtactaacacatttgattgaatgtgtattgaattggaattattatttctaaattcagcatttgagtccttagttgatgattttcttttaaagaaatt

SEQ ID NO: 349345 - DNA, 120 bp, Artificial Sequence
  ENSG00000138768_29 (sequence is synthesized)
agtttatttaaaagcaagatagcctgggttgggagttagtgcatatcatcagccctccatctaatgtgattgctaagatgtgcaggataggacagcttagaatgagtgccttgacaccta

SEQ ID NO: 349346 - DNA, 120 bp, Artificial Sequence
  ENSG00000138768_30 (sequence is synthesized)
catatggctgcattccatacctcagtgaagaagccgaaggatgctgacacacagtgatgtggagggcattccggagaaacttttgcaacagtgtattaatgtgattggttttctttttgt

SEQ ID NO: 349347 - DNA, 120 bp, Artificial Sequence
  ENSG00000138768_31 (sequence is synthesized)
tttaagctaaacatctaaaacaaatttcaagttaacagttcatacaactcagatttagtagtattgtttatcataaaacatattatgttcctagttttaaaaagacccaaagtatgatta

SEQ ID NO: 349348 - DNA, 120 bp, Artificial Sequence
  ENSG00000138768_32 (sequence is synthesized)
atataatttattggcatttttgctgaataggtttaagtcagataatagattttaaaaaagcaaatgaggcaatgtgtcaaaatttaatgtttcataataaaaatagatacgttgacttaa

SEQ ID NO: 349349 - DNA, 120 bp, Artificial Sequence
  ENSG00000138768_33 (sequence is synthesized)
ttctatcccaaattgtttccttatgccctaatagaagagtaacctaaaaatgcccttgagaaaatatgagtatttaagtatcctttttttagatatcatatttaaacatttagccaataa

SEQ ID NO: 349350 - DNA, 120 bp, Artificial Sequence
  ENSG00000138768_34 (sequence is synthesized)
aatgtatttaaatgaatttgaacattattttaaggatatagctttacataataattgtgatattgctaccagccacactgttccagtgttgaattgtttaccaggaaaattatcattcac

SEQ ID NO: 349351 - DNA, 120 bp, Artificial Sequence
  ENSG00000138768_35 (sequence is synthesized)
agatgaaatgtgattgcaaaagtgctgccaaagtaattgaatgaagaaaattacatatttgaatcttctacttcaaaaatgaaaaactgaagtttcccgttggcttttaaaatgttatgt

SEQ ID NO: 349352 - DNA, 120 bp, Artificial Sequence
  ENSG00000138769_0 (sequence is synthesized)
cctcctgacgagaaccaaggcgtgtggggacgcagggcctctgcgtgtcagggagcagaacctgggccgagccctaggtgaaggggcggggtggttggccctgagccaatcatggctcgt

SEQ ID NO: 349353 - DNA, 120 bp, Artificial Sequence
  ENSG00000138769_1 (sequence is synthesized)
gacgactcggctcggccaatcagaagaagggaggcctggcgctctcggggcgggtgagaaaccgcccccccttgcagctccgcggccaacgccttcgcccaggggtagttggagcggtgc

SEQ ID NO: 349354 - DNA, 120 bp, Artificial Sequence
  ENSG00000138769_2 (sequence is synthesized)
aggttcccaggctccaggtactgggcgccttacgagctgggaggtggtgcctctcacccagctaattgctctctagcccttggccttcacaggtgttggtgcctgccgtgaacgcattct

SEQ ID NO: 349355 - DNA, 120 bp, Artificial Sequence
  ENSG00000138769_3 (sequence is synthesized)
gacctgggccgtatctgtctcccaagactttgtgcctatggttggggacagagtgaggtcgttgccttgacgacgacagcatgcggcccgtggtcctcctaagtgtgagcttgcggcgga

SEQ ID NO: 349356 - DNA, 120 bp, Artificial Sequence
  ENSG00000138769_4 (sequence is synthesized)
ccgaggcccacctgcctccctgcctgcttcgccctggactcgtgactgcgtccgcagaagaaatcacaacagcgctggaattgctagtttgctaggcagcatcttttggacctgcgaacc

SEQ ID NO: 349357 - DNA, 120 bp, Artificial Sequence
  ENSG00000138769_5 (sequence is synthesized)
atatgcatttcacctcaaatttgtttccaagttgaaaacctttgggtctttctatgcgaacggattgaagaaacgcaaaaagtttctacggactttaaattaaaatggaaaaatatgaaa

SEQ ID NO: 349358 - DNA, 120 bp, Artificial Sequence
  ENSG00000138769_6 (sequence is synthesized)
acctgggtttggttggagaagggagttatggaatggtgatgaagtgtaggaataaagatactggaagaattgtggccataaagaagttcttagaaagtgacgatgacaaaatggttaaaa

SEQ ID NO: 349359 - DNA, 120 bp, Artificial Sequence
  ENSG00000138769_7 (sequence is synthesized)
agattgcaatgcgagaaatcaagttactaaagcaacttaggcatgaaaacttggtgaatctcttggaagtgtgtaagaaaaaaaaacgatggtacctagtctttgaatttgttgaccaca

SEQ ID NO: 349360 - DNA, 120 bp, Artificial Sequence
  ENSG00000138769_8 (sequence is synthesized)
caattcttgatgacttggagctctttccaaatggactagactaccaagtagttcaaaagtatttgtttcagattattaatggaattggattttgtcacagtcacaatatcatacacagag

SEQ ID NO: 349361 - DNA, 120 bp, Artificial Sequence
  ENSG00000138769_9 (sequence is synthesized)
atataaagccagagaatatattagtctcccagtctggcgttgtcaagctatgcgattttggatttgcgcgaacattggcagctcctggggaggtttatactgattatgtggcaacccgat

SEQ ID NO: 349362 - DNA, 120 bp, Artificial Sequence
  ENSG00000138769_10 (sequence is synthesized)
ggtacagagctccagaactattggttggtgatgtcaagtatggcaaggctgttgatgtgtgggccattggttgtctggtaactgaaatgttcatgggggaacccctatttcctggagatt

SEQ ID NO: 349363 - DNA, 120 bp, Artificial Sequence
  ENSG00000138769_11 (sequence is synthesized)
ctgatattgatcagctatatcatattatgatgtgtttaggtaatctaattccaaggcatcaggagctttttaataaaaatcctgtgtttgctggagtaaggttgcctgaaatcaaggaaa

SEQ ID NO: 349364 - DNA, 120 bp, Artificial Sequence
  ENSG00000138769_12 (sequence is synthesized)
gagaacctcttgaaagacgctatcctaagctctctgaagtggtgatagatttagcaaagaaatgcttacatattgaccccgacaaaagacccttctgtgctgagctcctacaccatgatt

SEQ ID NO: 349365 - DNA, 120 bp, Artificial Sequence
  ENSG00000138769_13 (sequence is synthesized)
tctttcaaatggatggatttgctgagaggttttcccaagaactacagttaaaagtacagaaagatgccagaaatgtttctttatctaaaaaatcccaaaacagaaagaaggaaaaagaaa

SEQ ID NO: 349366 - DNA, 120 bp, Artificial Sequence
  ENSG00000138769_14 (sequence is synthesized)
agaaaaacacttgtggtacaggataccaatgctgatcccaaaattaaggattataaactatttaaaataaaaggctcaaaaattgatggagaaaaagctgaaaaaggcaatagagcttca

SEQ ID NO: 349367 - DNA, 120 bp, Artificial Sequence
  ENSG00000138769_15 (sequence is synthesized)
aatgccagctgtctccatgacagtaggacaagccacaacaaaatagtgccttcaacaagcctcaaagactgcagcaatgtcagcgtggaccacacaaggaatccaagcgtggcaattccc

SEQ ID NO: 349368 - DNA, 120 bp, Artificial Sequence
  ENSG00000138769_16 (sequence is synthesized)
ccacttacacacaatctttctgcagttgctcccagcattaattctggaatggggactgagactataccaattcagggttacagagtggatgagaaaactaagaagtgttctattccattt

SEQ ID NO: 349369 - DNA, 120 bp, Artificial Sequence
  ENSG00000138769_17 (sequence is synthesized)
gttaaaccgaacagacattccccatcaggcatttataacattaatgtgaccacattagtatcaggacctcccctgtcagatgattcaggggctgatttgcctcaaatggaacaccagcac

SEQ ID NO: 349370 - DNA, 120 bp, Artificial Sequence
  ENSG00000138769_18 (sequence is synthesized)
tgagaaccattttggttctgaactggatgatgctcttgcacttgagatgacatcttcttgcagcaagagtgctgatatcccaagaggagagattcatggttttgatcatttccttctgaa

SEQ ID NO: 349371 - DNA, 120 bp, Artificial Sequence
  ENSG00000138769_19 (sequence is synthesized)
ctgcctgcattttctgaggaaggccttctagaagaaggaaagacaaagacttccaaatgtttcaaaggaagattgaacaaatggccctccccaactgttatcccattacctttcacgtcc

SEQ ID NO: 349372 - DNA, 120 bp, Artificial Sequence
  ENSG00000138769_20 (sequence is synthesized)
accgatgctatttcaagacatatccagtggaataacagtgatatggttcttgttacatgaatgtgtatttactgttaggagattgtatattttaagttaccatgattaaaagtgtgtaaa

SEQ ID NO: 349373 - DNA, 120 bp, Artificial Sequence
  ENSG00000138769_21 (sequence is synthesized)
aaagggggacagagagaaatactataaaaggccatgttactcatgcattgaactttgtgtgttttctgtataaatgtgtacatttatttaggagtgggtttcttgggggtaggtgataaa

SEQ ID NO: 349374 - DNA, 120 bp, Artificial Sequence
  ENSG00000138769_22 (sequence is synthesized)
aattaggatcagttgaagaaaattgaagaaactaggatcagtaagagaaactgtttgctttacctgaatttaactatgaaaacacacttaacaatcttacacgtttctagatattaagtg

SEQ ID NO: 349375 - DNA, 120 bp, Artificial Sequence
  ENSG00000138769_23 (sequence is synthesized)
aatatgtaactcctgtccatgggtagatgtgtatctttgacttctgtaattatttttgatattctatcagtgtattatgagactctggcctccctgcagatcttctaagaaccacactaa

SEQ ID NO: 349376 - DNA, 120 bp, Artificial Sequence
  ENSG00000138769_24 (sequence is synthesized)
tgcaagcgtgacagagaaacctctttcgaatgacttactacaactctggcattggttagttccatgtattgtaagattctggtgctaatgctccatacagaattgatcaggactgattac

SEQ ID NO: 349377 - DNA, 120 bp, Artificial Sequence
  ENSG00000138769_25 (sequence is synthesized)
tcttctgtggaccaattgctattgaactacccagctgaagagggtttggggagagaacgttcattattatggactccacttttgtcccctggtagtttaagggtgatactagaatccaga

SEQ ID NO: 349378 - DNA, 120 bp, Artificial Sequence
  ENSG00000138769_26 (sequence is synthesized)
gaagttcctgtctccttgtggcctcaaacactcaggccgtctcaaaagcttttcaccaaggtgcaaaatcatttacctgcattccacacatcttttccaatgcatggatccaaaactttt

SEQ ID NO: 349379 - DNA, 120 bp, Artificial Sequence
  ENSG00000138769_27 (sequence is synthesized)
taggtgggaggaataaactaagttggctacaggttcttgatttctgggtttctacacatgctctgcatttatcattttagagaatggttgtttagggaaccagaatttgtgagttttttt

SEQ ID NO: 349380 - DNA, 120 bp, Artificial Sequence
  ENSG00000138769_28 (sequence is synthesized)
gtgaccacattagtctctagtgaaaaaaacctcttttgggcaagtaagaaaagaagagaatactccaggacagatgtccgtttgcctgaactaaactataatcatctccctgaactaaga

SEQ ID NO: 349381 - DNA, 120 bp, Artificial Sequence
  ENSG00000138769_29 (sequence is synthesized)
gcactgggaggcatagctcgaaattccaggctaacaaagaaagagagcaaaattctttcagaatctcgaattccttctctggctgctattgacctgcacacccccagtattacattacat

SEQ ID NO: 349382 - DNA, 120 bp, Artificial Sequence
  ENSG00000138769_30 (sequence is synthesized)
aagaatttaactagaacttttctttattactctgaggagcttaatactgaaattctgaccttggatatttaagcctcaaaagagtaggacattcaagaggaggcaaataaggggtttcaa

SEQ ID NO: 349383 - DNA, 120 bp, Artificial Sequence
  ENSG00000138769_31 (sequence is synthesized)
tgtacaagtctataggtggtggttaaattaaaattggtcttgatttaaaagctctacttttaatctgtgaccagctgtttgacaacattagtatggataacatgctgaaaaaactagggt

SEQ ID NO: 349384 - DNA, 120 bp, Artificial Sequence
  ENSG00000138769_32 (sequence is synthesized)
atcagcattaataggctgcatattaaaaagttactactttatttttactttgaaaaacactgccaatagattctgcagcatggcaaacaggtaatacttaaagccaaatggcgcttcggc

SEQ ID NO: 349385 - DNA, 120 bp, Artificial Sequence
  ENSG00000138769_33 (sequence is synthesized)
ttatttcaatactatttttatgtaaagatcagtgtgagaatatcagctcaatggttgaggttctaggatcaattgccttgcagtttttatactagcttttgatatcttttgcctattaaa

SEQ ID NO: 349386 - DNA, 120 bp, Artificial Sequence
  ENSG00000138769_34 (sequence is synthesized)
acactttgtgaactttagaattaaggaactaaaaaatatttaccataagtccaagttatgacttgaggatcatatctgattagaactgtggcagaactactagaaaaagattctgcaaat

SEQ ID NO: 349387 - DNA, 120 bp, Artificial Sequence
  ENSG00000138769_35 (sequence is synthesized)
tggtttcagtgattcttgttgatgtaatcaacaagattacataatcaacaataatagatattgaaccaaaatgatcctttttttaagtttaaggttatttagtttctcttgcaaggatat

SEQ ID NO: 349388 - DNA, 120 bp, Artificial Sequence
  ENSG00000138769_36 (sequence is synthesized)
gatttagtcacacactaatagggaatatgtgtatgtactggtggggagcagtgggcttgctgcatgtatgtatgttttaaaattaataaatattatcttactgggctccatagatggttt

SEQ ID NO: 349389 - DNA, 120 bp, Artificial Sequence
  ENSG00000138769_37 (sequence is synthesized)
aaatttagatttatttaattaagaggctataaataatatatacactactgtatggtatttaacaaataagttttaaatctgttaattcttctggaaaactttggatgtagggatggcaag

SEQ ID NO: 349390 - DNA, 120 bp, Artificial Sequence
  ENSG00000138769_38 (sequence is synthesized)
ctaattttcttgtatagctggtgatataagcagcatggtcataaaataacatttcttataaagactaactggtaatagttgtgacagaacctggttttcctgactgagaatcccttgctt

SEQ ID NO: 349391 - DNA, 120 bp, Artificial Sequence
  ENSG00000138769_39 (sequence is synthesized)
gcttagaatatctgacttcccattgaaatggaacatagaaaatgtgttttcttatgtgactctcattattggttcctttatcttagttgtgctacaatataaggctggacctgtaataca

SEQ ID NO: 349392 - DNA, 120 bp, Artificial Sequence
  ENSG00000138769_40 (sequence is synthesized)
ctatgtatcagactagactgaaaaatgtgatcgatttgttttctaagtcctcctctatataactgaaccatggtcaggggattagagaagcaacagagcactgctcctaaggctttaggc

SEQ ID NO: 349393 - DNA, 120 bp, Artificial Sequence
  ENSG00000138769_41 (sequence is synthesized)
tagtcttagtgaattggactgaatggatttttctctgttgttttttgcattaagtgtttttgcactagaagagggtgcttaacactcctctatctatatgaataaaaaattatgttctca

SEQ ID NO: 349394 - DNA, 120 bp, Artificial Sequence
  ENSG00000138769_42 (sequence is synthesized)
tagacttttattaaaattaaatatgatagtgaagtattgagaattttgtttggatacacataaagtgaaaccttaattgtgcatatattatcccaacccatcatagtcataaacgtgaaa

SEQ ID NO: 349395 - DNA, 120 bp, Artificial Sequence
  ENSG00000138771_0 (sequence is synthesized)
actctttctctcaagaggaggcaagtggctgtggcggccgcagcagtggctgatcatcactgaaaataccaaagaaaagaactgagctgcctccttcatattttttccattgaggattaa

SEQ ID NO: 349396 - DNA, 120 bp, Artificial Sequence
  ENSG00000138771_1 (sequence is synthesized)
tttaccgtgctttttcattttctctacatcctgcaaaagtttttttctctcctaagaaacaaactatgaactgattgttgaaaaaaagaagtaaaaagttttagcacagcttctctgtct

SEQ ID NO: 349397 - DNA, 120 bp, Artificial Sequence
  ENSG00000138771_2 (sequence is synthesized)
cttcgggacaagttagaaaattctgaagtgagccgaagcatagtaagtgctttctttctttttaagctacttctggggagggaggaggctattgtaatggtaaatttcactccgagagga

SEQ ID NO: 349398 - DNA, 120 bp, Artificial Sequence
  ENSG00000138771_3 (sequence is synthesized)
agaaagggttgataatcaatcaaaaatgaggtattcctttgagtatttgtgattttcttactatattgtaagatgcttttaattttctctgtaaaataggcagaaatggttttagtgtgt

SEQ ID NO: 349399 - DNA, 120 bp, Artificial Sequence
  ENSG00000138771_4 (sequence is synthesized)
gtatgtgtgaaataaaagctcagaaaagcaatcttcagagcgccactgaaggaagttttgacgaacggagtagagatgtataccacttgggggcttcagtgagaacccagaattcctgga

SEQ ID NO: 349400 - DNA, 120 bp, Artificial Sequence
  ENSG00000138771_5 (sequence is synthesized)
ggaggatttacattcagaaatgttgaagtgaaaattccttctggttcagcatcttggagttcagcttggaagaacattttacgtatggaagaatttgcttctccaaacctctcttttggc

SEQ ID NO: 349401 - DNA, 120 bp, Artificial Sequence
  ENSG00000138771_6 (sequence is synthesized)
cattgtgtgtcctgaaggatgggacaacttgtgctgtagaagcactgcttgcctgagtttgcttcaggcattttaaatttaacttgagggatcatgtgtttggcatgatgaggaccactg

SEQ ID NO: 349402 - DNA, 120 bp, Artificial Sequence
  ENSG00000138771_7 (sequence is synthesized)
aagacttccacaagcctagtgccacattaaactctaacacggccaccaagggaaggtacatttatctggaggcattcctggagggaggagctccctggggttttactctaaagggtggcc

SEQ ID NO: 349403 - DNA, 120 bp, Artificial Sequence
  ENSG00000138771_8 (sequence is synthesized)
tggagcacggagaaccattaatcatctctaaggtcgaagaagggggcaaagcagacaccctgagctccaaactgcaggctggggatgaggttgtgcacatcaatgaggtgactctgagca

SEQ ID NO: 349404 - DNA, 120 bp, Artificial Sequence
  ENSG00000138771_9 (sequence is synthesized)
gctccagaaaggaggcagtttccctggtgaaaggatcctacaagaccctcaggctggtagtgcgcagagatgtgtgcacagacccaggccatgcagatactggtgcctctaacttcgtca

SEQ ID NO: 349405 - DNA, 120 bp, Artificial Sequence
  ENSG00000138771_10 (sequence is synthesized)
gcccagaacacctcacctctggcccccagcacaggaaagcagcgtggtcaggaggggttaaacttcggctgaagcacaggcgcagtgagcctgcaggccgacctcactcgtggcacacaa

SEQ ID NO: 349406 - DNA, 120 bp, Artificial Sequence
  ENSG00000138771_11 (sequence is synthesized)
ctaaatctggggagaagcaacccgatgccagcatgatgcagatatctcagggtatgatcggccctccttggcaccaaagctaccattccagctcctctactagtgacctctccaactatg

SEQ ID NO: 349407 - DNA, 120 bp, Artificial Sequence
  ENSG00000138771_12 (sequence is synthesized)
accatgcttatctaaggcggagccctgaccagtgcagctcccaggggagcatggagagcctggagcccagtggggcatacccaccctgtcatctttcccctgccaagtccaccggcagca

SEQ ID NO: 349408 - DNA, 120 bp, Artificial Sequence
  ENSG00000138771_13 (sequence is synthesized)
ttgaccagctcagccacttccataacaagagagactcggcttacagctctttctccaccagttctagcatcctagagtatccacaccctggcatctctggccgggagcgttcaggctcca

SEQ ID NO: 349409 - DNA, 120 bp, Artificial Sequence
  ENSG00000138771_14 (sequence is synthesized)
tggacaatacttctgctcgaggtggcctcctcgaagggatgaggcaggcagatattcgctatgtcaagacagtctatgacacccggaggggagtctcagcagagtatgaggtgaactctt

SEQ ID NO: 349410 - DNA, 120 bp, Artificial Sequence
  ENSG00000138771_15 (sequence is synthesized)
cagccctgctgcttcaaggtagggaggcccgagcctcagcaaatggtcagggctatgataaatggtctaatattcctcggggcaagggagtgccacccccatcctggagccagcagtgcc

SEQ ID NO: 349411 - DNA, 120 bp, Artificial Sequence
  ENSG00000138771_16 (sequence is synthesized)
ccagttccttggagactgccacggacaaccttcctcctaaggtgggtgcacccctgcctccagctcggagtgacagttacgcagcatttcggcaccgtgagcggcccagctcctggtcta

SEQ ID NO: 349412 - DNA, 120 bp, Artificial Sequence
  ENSG00000138771_17 (sequence is synthesized)
gccttgatcagaaacggctctgccggcctcaggcaaactctttaggctccctgaagtctccattcatagaggagcagctgcatactgtgctggagaagagtccagagaacagccccccag

SEQ ID NO: 349413 - DNA, 120 bp, Artificial Sequence
  ENSG00000138771_18 (sequence is synthesized)
tgaagcccaagcataactatacccagaaggcccaacctggccaacctctgctgccgaccagcatctacccggtaccttccctggagccacactttgcccaggtgcctcagccttctgtga

SEQ ID NO: 349414 - DNA, 120 bp, Artificial Sequence
  ENSG00000138771_19 (sequence is synthesized)
gtagcaacggtatgctctaccctgcactggccaaggagagtggatacatagcccctcagggagcatgcaacaagatggctaccattgatgagaatgggaaccagaatggatctggcaggc

SEQ ID NO: 349415 - DNA, 120 bp, Artificial Sequence
  ENSG00000138771_20 (sequence is synthesized)
ctgggtttgccttctgccagcccttagaacatgacttgctgtccccagtggagaagaaaccagaagctacagccaagtatgtcccctccaaagtccatttctgttcagtgcctgaaaatg

SEQ ID NO: 349416 - DNA, 120 bp, Artificial Sequence
  ENSG00000138771_21 (sequence is synthesized)
aggaggatgcctccctgaagagacatctcacacctccccaaggcaacagcccacattccaatgagagaaagagcacccacagtaacaaaccatcttctcatccccacagcctcaaatgcc

SEQ ID NO: 349417 - DNA, 120 bp, Artificial Sequence
  ENSG00000138771_22 (sequence is synthesized)
ctcaggctcaggcctggcaagcgggtgaagacaagagatcttccaggctctcagagccctgggagggcgatttccaggaagaccacaatgccaacctctggaggaggctggagagagaag

SEQ ID NO: 349418 - DNA, 120 bp, Artificial Sequence
  ENSG00000138771_23 (sequence is synthesized)
gcctaggccagagcctgtcaggcaactttggcaagaccaagtcagccttctcatctctccagaacattcctgagagtctgagaagacacagcagcctggagctaggccggggaacccagg

SEQ ID NO: 349419 - DNA, 120 bp, Artificial Sequence
  ENSG00000138771_24 (sequence is synthesized)
agggttaccccgggggcaggcccacctgtgcagtcaacaccaaggcagaagaccctgggaggaaagccgctcctgacctcgggagccatctggaccggcaggtttcctacccgcggcccg

SEQ ID NO: 349420 - DNA, 120 bp, Artificial Sequence
  ENSG00000138771_25 (sequence is synthesized)
aggggaggaccggtgcctcggcttctttcaacagcacagacccaagtcccgaagagccgcctgccccctcgcacccgcacacatccagtctgggccggagggggcccggcccaggcagcg

SEQ ID NO: 349421 - DNA, 120 bp, Artificial Sequence
  ENSG00000138771_26 (sequence is synthesized)
cctcggctcttcagggctttcagtacgggaagccccactgctcggtgctggagaaggtctccaaattcgagcagcgagagcaagggagccagagaccgagtgtgggcggctctggttttg

SEQ ID NO: 349422 - DNA, 120 bp, Artificial Sequence
  ENSG00000138771_27 (sequence is synthesized)
gccataactataggccccacaggaccgtctcaacttccagtacttctgggaatgacttcgaggagacaaaagcacacattcgtttctctgagtcagctgaacccctaggcaacggggagc

SEQ ID NO: 349423 - DNA, 120 bp, Artificial Sequence
  ENSG00000138771_28 (sequence is synthesized)
agcacttcaaaaacggggagctgaagttggaagaggcttcccggcagccctgcggtcagcagctgagcggaggagcgtcggacagcggccgtggcccccagaggccggacgctcggctcc

SEQ ID NO: 349424 - DNA, 120 bp, Artificial Sequence
  ENSG00000138771_29 (sequence is synthesized)
tccgtagccagagcaccttccagctctccagcgagccagagagggagcccgagtggcgggacaggcccggctcgcccgaatcgcccctgctggatgcccccttcagccgcgcctaccgga

SEQ ID NO: 349425 - DNA, 120 bp, Artificial Sequence
  ENSG00000138771_30 (sequence is synthesized)
acagcatcaaggacgcacagtcccgtgtcttgggggccacctcctttcgacgtcgagacctggagctgggggcgcccgtggcgtcgaggtcctggcggccacggccttcctcggcccacg

SEQ ID NO: 349426 - DNA, 120 bp, Artificial Sequence
  ENSG00000138771_31 (sequence is synthesized)
gcctccccgcacacgccccgggagcggcacagcgtgacccctgctgagggcgacctggccaggcccgtgccccctgccgcccggagaggtgctcgccggcgcctgactcccgagcagaag

SEQ ID NO: 349427 - DNA, 120 bp, Artificial Sequence
  ENSG00000138771_32 (sequence is synthesized)
gtgctcgccggcgcctgactcccgagcagaagaagcgctcctactcggagcccgagaagatgaacgaggtggggatcgtggaggaggccgaaccggcacccctgggcccgcagagaaatg

SEQ ID NO: 349428 - DNA, 120 bp, Artificial Sequence
  ENSG00000138771_33 (sequence is synthesized)
ggatgcgtttcccggagagcagcgtggccgaccggcgccgtctcttcgagcgcgatggcaaggcctgctccacgctcagcctgtcggggcccgagctgaagcagttccagcagagcgccc

SEQ ID NO: 349429 - DNA, 120 bp, Artificial Sequence
  ENSG00000138771_34 (sequence is synthesized)
tggcggactacatccagcgcaagaccggcaagcggcctacctccgccgccggctgcagcctccaggagcccgggccactgcgtgagcgcgcccagagtgcctacctccagcccggccccg

SEQ ID NO: 349430 - DNA, 120 bp, Artificial Sequence
  ENSG00000138771_35 (sequence is synthesized)
cggcgctcgaaggctccggcctcgcctcggcctccagcttgagctcactgcgggagcccagcctgcagccccgcagggaggccacgctcctgccggccacagttgcagaaacccagcagg

SEQ ID NO: 349431 - DNA, 120 bp, Artificial Sequence
  ENSG00000138771_36 (sequence is synthesized)
ctccccgagatcgcagcagctccttcgccggtggccgccgcctcggggaacggcgacgcggggacctgcttagcggagcaaacggtggaacaaggggcacccagagaggggatgagaccc

SEQ ID NO: 349432 - DNA, 120 bp, Artificial Sequence
  ENSG00000138771_37 (sequence is synthesized)
ccagggagccatcctcctggggggccagggccgggaagtccatgtcggccgaggacctgctggaacgctcggacgtccttgcgggccctgtccatgtgaggtccaggtcatctcccgcca

SEQ ID NO: 349433 - DNA, 120 bp, Artificial Sequence
  ENSG00000138771_38 (sequence is synthesized)
ccgcagacaagcgccaggatgtgcttttggggcaagacagtggctttggtcttgtgaaggatccatgttatttggctggtcctggatctaggtcactcagttgttcagaaagaggccaag

SEQ ID NO: 349434 - DNA, 120 bp, Artificial Sequence
  ENSG00000138771_39 (sequence is synthesized)
aagagatgctgccgctcttccaccatctcacccctcgttggggtggttcaggctgcaaagccattggtgattcctccgttcctagtgaatgtcctggaaccctggaccatcagaggcaag

SEQ ID NO: 349435 - DNA, 120 bp, Artificial Sequence
  ENSG00000138771_40 (sequence is synthesized)
ccagtaggacaccctgccccaggccaccactggcaggaacgcaagggctggtcacagacaccagggctgcacccctgaccccaattggcacccctctgccttcagccattccctctggct

SEQ ID NO: 349436 - DNA, 120 bp, Artificial Sequence
  ENSG00000138771_41 (sequence is synthesized)
actgctcacaggacggtcagacagggcgacagcctctcccgccctacacccctgccatgatgcacagaagcaatggtcacaccctgacccagcctcccggtccaagaggctgtgagggcg

SEQ ID NO: 349437 - DNA, 120 bp, Artificial Sequence
  ENSG00000138771_42 (sequence is synthesized)
atggcccagagcatggggtagaagagggaacgaggaagagggtctcgctgcctcagtggccacctccttctcgagcaaagtgggcccacgcagccagagaggacagccttcctgaggaat

SEQ ID NO: 349438 - DNA, 120 bp, Artificial Sequence
  ENSG00000138771_43 (sequence is synthesized)
cctcagcccctgattttgcaaacctgaagcactatcaaaaacagcagagtcttccaagtttatgcagcacttctgacccagacacacctcttggggccccgagcactccagggaggatct

SEQ ID NO: 349439 - DNA, 120 bp, Artificial Sequence
  ENSG00000138771_44 (sequence is synthesized)
ccctccgaatatctgagtctgtcctgcgggactccccgccacctcatgaggattatgaagacgaagtgtttgtgagggatccgcaccccaaggccacgtccagccccacatttgaacctc

SEQ ID NO: 349440 - DNA, 120 bp, Artificial Sequence
  ENSG00000138771_45 (sequence is synthesized)
ggcgcagctggacagtgaggatcccgaggggccacgccccagcttcaacaaactttctaaagtgacaattgcaagggaaaggcacatgcctggtgcagcccatgtggtaggtagtcagac

SEQ ID NO: 349441 - DNA, 120 bp, Artificial Sequence
  ENSG00000138771_46 (sequence is synthesized)
actggcttccagactccaaacttctatcaagggttcagaggctgagtccacaccaccctccttcatgagcgttcacgcccaacttgctgggtctcttggtgggcagccagcacccatcca

SEQ ID NO: 349442 - DNA, 120 bp, Artificial Sequence
  ENSG00000138771_47 (sequence is synthesized)
gactcaaagcctcagccatgatccagtcagtggaactcagggtttagaaaagaaagtcagtcctgatcctcagaagagttcagaagacatcagaacagaggctttggccaaggaaattgt

SEQ ID NO: 349443 - DNA, 120 bp, Artificial Sequence
  ENSG00000138771_48 (sequence is synthesized)
ccaccaagacaaatctctagcagacattttggatccagactccaggctgaagacaacaatggacctgatggaaggtttgtttccccgagatgtgaacttgctgaaggaaaacagtgtaaa

SEQ ID NO: 349444 - DNA, 120 bp, Artificial Sequence
  ENSG00000138771_49 (sequence is synthesized)
gaggaaggccatacagagaactgtcagctcttcaggatgtgaaggcaagaggaatgaagacaaggaagcagtgagcatgttggttaactgccctgcctactacagtgtgtctgctcccaa

SEQ ID NO: 349445 - DNA, 120 bp, Artificial Sequence
  ENSG00000138771_50 (sequence is synthesized)
ggctgagctactgaacaaaatcaaagagatgccagcagaagtgaatgaggaagaggaacaggcagatgtcaatgaaaagaaggctgagctcattggaagtctcacccacaagctggagac

SEQ ID NO: 349446 - DNA, 120 bp, Artificial Sequence
  ENSG00000138771_51 (sequence is synthesized)
cctccaggaggcgaaggggagcctgctcacggacatcaagctcaacaacgccctgggagaagaggtggaggctctgatcagcgagctctgcaagcccaatgagtttgacaagtataggat

SEQ ID NO: 349447 - DNA, 120 bp, Artificial Sequence
  ENSG00000138771_52 (sequence is synthesized)
gttcataggggatttggacaaggtggtcaacctgctgctctccctctcggggcgtctagcccgtgttgagaatgtccttagcggccttggtgaagatgccagtaatgaagaaaggagctc

SEQ ID NO: 349448 - DNA, 120 bp, Artificial Sequence
  ENSG00000138771_53 (sequence is synthesized)
tctttacgagaaaaggaagatcctggctggtcagcatgaggatgcccgggagctgaaggagaacctggatcgcagggagcgagtagtgctgggcatcttggccaattacctttcagagga

SEQ ID NO: 349449 - DNA, 120 bp, Artificial Sequence
  ENSG00000138771_54 (sequence is synthesized)
gcagctccaggactaccagcacttcgtgaaaatgaagtccacgctcctcattgagcaacggaagctggatgacaagatcaagctgggccaggagcaggtcaagtgtctgctggagagcct

SEQ ID NO: 349450 - DNA, 120 bp, Artificial Sequence
  ENSG00000138771_55 (sequence is synthesized)
gccctcagatttcattcccaaggctggggccctggctctgcccccaaacctcacgagtgagcccattcctgctgggggctgtactttcagtggtattttcccaacattaacctctccact

SEQ ID NO: 349451 - DNA, 120 bp, Artificial Sequence
  ENSG00000138771_56 (sequence is synthesized)
ttaacctcttctaaaatacccaaccaaaagatcactgtttctctcaacactatttaatctgaaaaatgtttcagtacaaaccactgtttgaactatctgggttattggtgtttgttcctg

SEQ ID NO: 349452 - DNA, 120 bp, Artificial Sequence
  ENSG00000138771_57 (sequence is synthesized)
atgaaaggaaaaaaattctctccaggaggaagcctttttccttcttgcccttcctgattgatcttctgagagctcgaatgctgctggacacgtacccctttctattattactttgtagta

SEQ ID NO: 349453 - DNA, 120 bp, Artificial Sequence
  ENSG00000138771_58 (sequence is synthesized)
gaaagaaagttaatgaaactgagaactgattggagggtgtttgatcatttagtttttaacaggctgaggcaacatggatcagtgtgtgtccccctcaggaatgtatccacagtggccttc

SEQ ID NO: 349454 - DNA, 120 bp, Artificial Sequence
  ENSG00000138771_59 (sequence is synthesized)
cttgctggtgggcagtgtatcctgatggcagggtacaagtaccattaatgaagggtctgcaacataaagccttaaaaagacacacactaagaaaactgtaaaaccttgaacattgttatt

SEQ ID NO: 349455 - DNA, 120 bp, Artificial Sequence
  ENSG00000138771_60 (sequence is synthesized)
tatattttttaaaatggaaaagatcactatgtttgttgtgctaaccacttatttgattctgttttgtggtggacatagatgattacgtttgagctttgtattttgtgaaaaccttaatga

SEQ ID NO: 349456 - DNA, 120 bp, Artificial Sequence
  ENSG00000138771_61 (sequence is synthesized)
aatgaattccaaagatagtcacgttgagcgtgaagactttttttcttacattcctgtcttatttttaccaacacgagcaggcattctgcgcttccactggactgagtatgggggagtcct

SEQ ID NO: 349457 - DNA, 120 bp, Artificial Sequence
  ENSG00000138771_62 (sequence is synthesized)
gctcccctcctgtctcacaccttccccaggaggaaggcctcatgcactgcggttattgcatcatttcctagtgcttcatgtcattatcactggtggggaaacaaagctaaattttattaa

SEQ ID NO: 349458 - DNA, 120 bp, Artificial Sequence
  ENSG00000138771_63 (sequence is synthesized)
caaagacaactctcagacctatataataggaggaggacgtccagaatccaacaaaattcaaacggagcccatgctgttctcctgaacaagatttgggctaaatacggcctgtttattgag

SEQ ID NO: 349459 - DNA, 120 bp, Artificial Sequence
  ENSG00000138771_64 (sequence is synthesized)
gctgttttaatgatgctttaaaaaaaaaaaatgttttctaaaatgtcaaacctgttgaccacactttgattaaaaactgcctccttaacctctgaagactgattttgctttatcatgttt

SEQ ID NO: 349460 - DNA, 120 bp, Artificial Sequence
  ENSG00000138771_65 (sequence is synthesized)
caataataacatttcagaggttactctgtagccccagttgtaagcttataaaaacaaactggaaggctgaggaggttatgggctggcagccaggctatgtttacagctgctggagatggc

SEQ ID NO: 349461 - DNA, 120 bp, Artificial Sequence
  ENSG00000138771_66 (sequence is synthesized)
agtagccttatactttgagcaggtagtacatcccaggctgtgctagaggtagatttgttttttcacgtttgatctgtggctggtggccacctttgttgatttgggcttacgagtttcata

SEQ ID NO: 349462 - DNA, 120 bp, Artificial Sequence
  ENSG00000138771_67 (sequence is synthesized)
gtagccagtcttagaaaattgggggagtaaaattttgaagtaaaaaaaaaaaaaaaatgacaagggaaccaaatgctccttctccccttagtacattttcattacttaatgaagttttat

SEQ ID NO: 349463 - DNA, 120 bp, Artificial Sequence
  ENSG00000138771_68 (sequence is synthesized)
ctcctatgtaagaatatcaaaattgtagtttgggtctccagtagagatgtcttttgattaacttataaacaactggccacccagaagtttcctttgcatagtcaaccaaagctatggctt

SEQ ID NO: 349464 - DNA, 120 bp, Artificial Sequence
  ENSG00000138771_69 (sequence is synthesized)
tgttctttggagcttatatactgcatgactccattgatacaaataagacagcaccttggtttcccagggatgttttcattcagaggtcctgtctcccaggaaagcagtagaaccagtgac

SEQ ID NO: 349465 - DNA, 120 bp, Artificial Sequence
  ENSG00000138771_70 (sequence is synthesized)
agcattcaacagccacactgcatggtcatcagtcttaggccaacatgggagcctgaaattaactccatcagtaactacctgtgtgtcttgctgatactgaatgagccctcacaagccaag

SEQ ID NO: 349466 - DNA, 120 bp, Artificial Sequence
  ENSG00000138771_71 (sequence is synthesized)
ccaggtggaagacagccagcaaacgtctacagttattcttagtgaaattcctcagaggaatccagggggctcccagttcccaacactcttcgagatgaccatttttcgggatttgactgg

SEQ ID NO: 349467 - DNA, 120 bp, Artificial Sequence
  ENSG00000138771_72 (sequence is synthesized)
ggaacattttacatattcagtctttctcaaaaatttttatttattttcttgagaaagggtcttactatgttgcccaggctggagtgcagagtggtgcgataacagctcattgcagtctga

SEQ ID NO: 349468 - DNA, 79 bp, Artificial Sequence
  ENSG00000138771_73 (sequence is synthesized)
agtagctgggaccacaggtgtgcaccactatgcttggctaattttttgattttttatagagacgggggtctggatcctt

SEQ ID NO: 349469 - DNA, 84 bp, Artificial Sequence
  ENSG00000138771_74 (sequence is synthesized)
ccgctttggtccccagccacttttctaatttatagacataaaagtaattgactcccacagcacagtaacaggcaatgctgcttg

SEQ ID NO: 349470 - DNA, 120 bp, Artificial Sequence
  ENSG00000138771_75 (sequence is synthesized)
taattgactcccacagcacagtaacaggcaatgctgcttggcatgccacaaacatctgaaagcttgtgacactcctaggattgtgtccattctttcattatgtggaaactttgttctgtt

SEQ ID NO: 349471 - DNA, 120 bp, Artificial Sequence
  ENSG00000138771_76 (sequence is synthesized)
atgtgaaatgggtaaggcaccaagtgagactttgaaatctaatttttaggtggatgtgatatttattgtaataggacttgacctctgtactttaaagaaatcactaaccaaattttcaaa

SEQ ID NO: 349472 - DNA, 120 bp, Artificial Sequence
  ENSG00000138771_77 (sequence is synthesized)
gtttccttttaaatgcgtttagctagaaatctatgtatttatccctttcctattttgcattcttctcccactatttttaaaaactcatttacagtagaaaccattcttctttctcccaac

SEQ ID NO: 349473 - DNA, 120 bp, Artificial Sequence
  ENSG00000138771_78 (sequence is synthesized)
agtatcctttgccaagaccatgagaacagtaaggagcatgttgttggtcagggtttcagaatacgcgtgatgtcactgagaatgtttgctcacagtcaataattgtctttgtggatgtga

SEQ ID NO: 349474 - DNA, 120 bp, Artificial Sequence
  ENSG00000138771_79 (sequence is synthesized)
taattttggagatacacttctggtcagaactcaggtgagataatcttgcaatactccaaatgcagatactccagccacccgcaaggttccaggaaaggacaatgtcctgcgagaaaatca

SEQ ID NO: 349475 - DNA, 120 bp, Artificial Sequence
  ENSG00000138771_80 (sequence is synthesized)
ggaggcctccacttcctgggccacttgagaagttcctgggcatgtcactacatgttggttgactcagccatttctcatgctgttttgtttcttgcggtggccacttaaccccaaagaatg

SEQ ID NO: 349476 - DNA, 120 bp, Artificial Sequence
  ENSG00000138771_81 (sequence is synthesized)
aagggaggatccacagtgaaagtgcctgagtttctctatgagaccagatgctgtcgaaaccaaacatcttttcctttgctctatgggaacattttagggtttgttttgcacagctggttt

SEQ ID NO: 349477 - DNA, 120 bp, Artificial Sequence
  ENSG00000138771_82 (sequence is synthesized)
ccagactagaagattaacaagtttgggtccacccctaagaatcagtggctgtcttttaaggtgaggagtgtgggcttaactgaggtcctttgagggagctataaaggagaaacaacctgg

SEQ ID NO: 349478 - DNA, 120 bp, Artificial Sequence
  ENSG00000138771_83 (sequence is synthesized)
gacatcccagttttcctattcctccactgttaatatctcatctaaaataattcatgagtttaaatggtaaatatatgctttaagctctacctttaaacttgtatgttattcaggcatctc

SEQ ID NO: 349479 - DNA, 120 bp, Artificial Sequence
  ENSG00000138771_84 (sequence is synthesized)
ttattaagatactgggtctctggatacccaaggaaatgttggctttttattcttatgtggttccaaatttacttctcttcagtttaattgtccatggtagtgctggcttcattgttaggt

SEQ ID NO: 349480 - DNA, 120 bp, Artificial Sequence
  ENSG00000138771_85 (sequence is synthesized)
tggagttattattttccttttagaacaacatgaattttattcaccttactattagaaaaaggaataactacagccagaaataacttcatttcctacaaggtataaaaagtggtcaagtga

SEQ ID NO: 349481 - DNA, 120 bp, Artificial Sequence
  ENSG00000138771_86 (sequence is synthesized)
atgtgaaggggcttttctacacaggaatatattatcgggaacaaagtatttcctgctgccttaactctttgggatgcataggataaaatgataaagaccattttaatatcagaaagggtt

SEQ ID NO: 349482 - DNA, 120 bp, Artificial Sequence
  ENSG00000138771_87 (sequence is synthesized)
gtcttattaatttttaaataaaacttcacatttcttaatggggagctcattcagaaactaaataatggtttctcaaagtgtggtcaggatacgatctgcatcagaatccttggaatgctt

SEQ ID NO: 349483 - DNA, 120 bp, Artificial Sequence
  ENSG00000138771_88 (sequence is synthesized)
gttaaaaataccaattgctatgacaaaaccaagtctgctggaaactgcatttcagcaggtttcccatgttattctgatgtattttaacatttgagagccactaccaatcatctgtacagt

SEQ ID NO: 349484 - DNA, 120 bp, Artificial Sequence
  ENSG00000138771_89 (sequence is synthesized)
gccactaccaatcatctgtacagttcctactgttatgatcacaataagactaacatgaatttaataatctgaataatttttaaaatttaaataaacagaaattgaagttaaatttaaaaa

SEQ ID NO: 349485 - DNA, 120 bp, Artificial Sequence
  ENSG00000138771_90 (sequence is synthesized)
gcagtcattcaaactgccttttgtgtttggctaatcagggcagcccaggttcccagcggaggtgcgtctgtggtgtcagacacctgtgtctcagctctgtcttcctcgggctggctcctg

SEQ ID NO: 349486 - DNA, 120 bp, Artificial Sequence
  ENSG00000138771_91 (sequence is synthesized)
cggatccttcctgggccagaaccgtgcctctaggccacctcccccaagccaccaagcccccgcggtgggccagccttggcccagtgtcacgcaggacagaaatgaccaacagataactga

SEQ ID NO: 349487 - DNA, 120 bp, Artificial Sequence
  ENSG00000138771_92 (sequence is synthesized)
aatggacctgcctgggcatagacttccttaagtgtttcctttataattttttgagaagaaggctatgctcaggatctttagaagctggtggtaacttcacaatcactggctccatcaggc

SEQ ID NO: 349488 - DNA, 120 bp, Artificial Sequence
  ENSG00000138771_93 (sequence is synthesized)
aacgagagacttgctgaaggagaaacaaactgtgaagtctgaccctagggaatgagtgctatgcggatcagatcaagagagggcggctgcctggctctgatgcttcccagacttgggacc

SEQ ID NO: 349489 - DNA, 73 bp, Artificial Sequence
  ENSG00000138771_94 (sequence is synthesized)
gggcggctgcctggctctgatgcttcccagacttgggacccaaaactcaagaagacaacgaaaccagcttacc

SEQ ID NO: 349490 - DNA, 120 bp, Artificial Sequence
  ENSG00000138771_95 (sequence is synthesized)
gcattctatcatcagatgattttccttgcttccctcctcctcttgcccacaaaaatagaattccagcatttctaagctataggctattgttcaagatgccagctcttctcagggagtcat

SEQ ID NO: 349491 - DNA, 120 bp, Artificial Sequence
  ENSG00000138771_96 (sequence is synthesized)
taagggtcaccttctcttcttccctcttacagagcaggaattgaattttaattggccaatttacagaggggactggcattgagagtccctcccacttgcgctgagctgggcaagttcaag

SEQ ID NO: 349492 - DNA, 120 bp, Artificial Sequence
  ENSG00000138771_97 (sequence is synthesized)
ggagcagaaagagcagtagcagggcagaatggctttttattccacgactgaatatgacatccaattggccagagggttgctatctgggatgtttctatttgccacaaggcgcagtgagcc

SEQ ID NO: 349493 - DNA, 120 bp, Artificial Sequence
  ENSG00000138771_98 (sequence is synthesized)
gacacatgcttatagatggggattatcaacacgcctccagagacatggatggacattcctcccctaccttgcagagatccgggtagaagcctctttgcgctggattaatctggctttgta

SEQ ID NO: 349494 - DNA, 120 bp, Artificial Sequence
  ENSG00000138771_99 (sequence is synthesized)
tttcgtagtgccgtcactttcctgagaagtcttacctttataccttggcacacgtcatcgtcctgagattctgtttcctttgatttattgatgccagagtgactaaggacatttcattta

SEQ ID NO: 349495 - DNA, 120 bp, Artificial Sequence
  ENSG00000138771_100 (sequence is synthesized)
ttaactttctttttttctatgtgatctctatactttaaaaaagactggggtgtcttcctggaaacataataggaaggaatgtctgtttcatgaataaatcatttgtgtagtcaaaatgta

SEQ ID NO: 349496 - DNA, 120 bp, Artificial Sequence
  ENSG00000138771_101 (sequence is synthesized)
attgttgagcgcgttgggccccgccggcgatgccgcgcgccgcctcctcggagcggcggcgaagtttgaacttggcgtcggcctggagccccgagcagcccgggggcggcggccgcgagg

SEQ ID NO: 349497 - DNA, 120 bp, Artificial Sequence
  ENSG00000138771_102 (sequence is synthesized)
cacccgctctcccagttcagttttccttgtgattacagaaaagtagcatttgttttcatgagttgagtttctcaagtgtcccttacctggtttccttataaagatataggtatctagatt

SEQ ID NO: 349498 - DNA, 120 bp, Artificial Sequence
  ENSG00000138771_103 (sequence is synthesized)
ctgccctcctctcccatgccaatctcattgctggcctgttgtggatatggtggtaagcaagggcggctgcctggctctgatgcttcccagacttgggacccaaaactcaagaagacaacg

SEQ ID NO: 349499 - DNA, 120 bp, Artificial Sequence
  ENSG00000138771_104 (sequence is synthesized)
tggtagtgcgcagcctctccccaccggtcactgttagcctcgagtttgaccctcaacatccccagaggatgcctcctaggactcgaacctcatttagtgtctctactgctgatggacgcc

SEQ ID NO: 349500 - DNA, 120 bp, Artificial Sequence
  ENSG00000138771_105 (sequence is synthesized)
atgagtggagctgtcgaccaccttgggtgaagtggtggtctccacgtcccacctgggcagcacgatggccacagaaaggttgtatctaccccacccagcacaacacatgcagaaatttca

SEQ ID NO: 349501 - DNA, 120 bp, Artificial Sequence
  ENSG00000138771_106 (sequence is synthesized)
aaagagcctatttaagtagatgagcatagatagataattctgggagaacatccttaaaaggagtttggttttttgtttgctttgtgtgggtttttgtctaaataaactagactgctttaa

SEQ ID NO: 349502 - DNA, 120 bp, Artificial Sequence
  ENSG00000138771_107 (sequence is synthesized)
aaaccacctcgtttgacagtttgcttcagtgaatccagtttttcccttattaccaaaaccaaattacaggggagtttgtctttataacagttaatataactttcttcctttttgcttaga

SEQ ID NO: 349503 - DNA, 120 bp, Artificial Sequence
  ENSG00000138771_108 (sequence is synthesized)
aaatctgggttttctgagattgggaaataatgctttattgcttcagaggaacatggataaaaaaggaagacacgacactcagtagtggattcgccttcgtagggcagagaactttgttag

SEQ ID NO: 349504 - DNA, 120 bp, Artificial Sequence
  ENSG00000138771_109 (sequence is synthesized)
ctcatcctttatgtttcagagaaggtcggattataaatgcaagcacctacatttaagcaacagttgagatgcttaagaacgtgcttctgtgtgattctgattaatccttaactatgctct

SEQ ID NO: 349505 - DNA, 120 bp, Artificial Sequence
  ENSG00000138771_110 (sequence is synthesized)
gatttcattttacttgtaaatcaattgacacatacttcagggaccatcctgtcttttctctggggttgctgtcaccgtatttgtaacttgaggatttaataattgaagattgataaaaaa

SEQ ID NO: 349506 - DNA, 90 bp, Artificial Sequence
  ENSG00000138771_111 (sequence is synthesized)
agcttggatctcctgggcatagctgggactacagcctctccccaccggtcactgttagcctcgagtttgaccctcaacatccccagagga

SEQ ID NO: 349507 - DNA, 120 bp, Artificial Sequence
  ENSG00000138772_0 (sequence is synthesized)
agcgcggagcacctgcgcccgcggctgacaccttcgctcgcagtttgttcgcagtttactcgcacaccagtttcccccaccgcgctttggattagtgtgatctcagctcaaggcaaaggt

SEQ ID NO: 349508 - DNA, 120 bp, Artificial Sequence
  ENSG00000138772_1 (sequence is synthesized)
gggatatcatggcatctatctgggttggacaccgaggaacagtaagagattatccagactttagcccatcagtggatgctgaagctattcagaaagcaatcagaggaattggaactgatg

SEQ ID NO: 349509 - DNA, 120 bp, Artificial Sequence
  ENSG00000138772_2 (sequence is synthesized)
agaaaatgctcatcagcattctgactgagaggtcaaatgcacagcggcagctgattgttaaggaatatcaagcagcatatggaaaggagctgaaagatgacttgaagggtgatctctctg

SEQ ID NO: 349510 - DNA, 120 bp, Artificial Sequence
  ENSG00000138772_3 (sequence is synthesized)
gccactttgagcatctcatggtggccctagtgactccaccagcagtctttgatgcaaagcagctaaagaaatccatgaagggcgcgggaacaaacgaagatgccttgattgaaatcttaa

SEQ ID NO: 349511 - DNA, 120 bp, Artificial Sequence
  ENSG00000138772_4 (sequence is synthesized)
ctaccaggacaagcaggcaaatgaaggatatctctcaagcctattatacagtatacaagaagagtcttggagatgacattagttccgaaacatctggtgacttccggaaagctctgttga

SEQ ID NO: 349512 - DNA, 120 bp, Artificial Sequence
  ENSG00000138772_5 (sequence is synthesized)
caaattcactgagatcctgtgtttaaggagctttcctcaattaaaactaacatttgatgaatacagaaatatcagccaaaaggacattgtggacagcataaaaggagaattatctgggca

SEQ ID NO: 349513 - DNA, 120 bp, Artificial Sequence
  ENSG00000138772_6 (sequence is synthesized)
ttttgaagacttactgttggccatagttaattgtgtgaggaacacgccggcctttttagccgaaagactgcatcgagccttgaagggtattggaactgatgagtttactctgaaccgaat

SEQ ID NO: 349514 - DNA, 120 bp, Artificial Sequence
  ENSG00000138772_7 (sequence is synthesized)
aatggtgtccagatcagaaattgaccttttggacattcgaacagagttcaagaagcattatggctattccctatattcagcaattaaatcggatacttctggagactatgaaatcacact

SEQ ID NO: 349515 - DNA, 120 bp, Artificial Sequence
  ENSG00000138772_8 (sequence is synthesized)
cttaaaaatctgtggtggagatgactgaaccaagaagataatctccaaaggtccacgatgggctttcccaacagctccaccttacttcttctcatactatttaagagaacaagcaaatat

SEQ ID NO: 349516 - DNA, 120 bp, Artificial Sequence
  ENSG00000138772_9 (sequence is synthesized)
aaacagcaacttgtgttcctaacaggaattttcattgttctataacaacaacaacaaaagcgattattattttagagcatctcatttataatgtagcagctcataaatgaaattgaaaat

SEQ ID NO: 349517 - DNA, 120 bp, Artificial Sequence
  ENSG00000138772_10 (sequence is synthesized)
ggtattaaagatctgcaactactatccaacttatatttctgctttcaaagttaagaatctttatagttctactccattaaatataaagcaagataataaaaattgttgcttttgttaaaa

SEQ ID NO: 349518 - DNA, 120 bp, Artificial Sequence
  ENSG00000138772_11 (sequence is synthesized)
actcgcacaccagtttcccccaccgcgctttggctagcagcgtaagggatccacttagccatctcggcctccccagtcctaaaggtctaggggacagaaaaaagctgggagtcggaaggt

SEQ ID NO: 349519 - DNA, 120 bp, Artificial Sequence
  ENSG00000138772_12 (sequence is synthesized)
ctcgaccctgggcagggctggcggctggcgcccgcgcccggccccaacccagctgcgtgggtggggagctggagggacctcagtcctgcatttcagagtcgaggagactgggcccacggg

SEQ ID NO: 349520 - DNA, 120 bp, Artificial Sequence
  ENSG00000138772_13 (sequence is synthesized)
ggggaaagtgccgtgccatgggtgggtcacccaggtcttggtggggcccaagctgatactcagctgtcctcgctccctgaaagcttcgcttattacagctagcagcgtaagggatccact

SEQ ID NO: 349521 - DNA, 120 bp, Artificial Sequence
  ENSG00000138772_14 (sequence is synthesized)
cctcctcaaagagcagatgtgtctttataacagactgtaggcttggagccttgtaaaatgtacatggagtttcacaatcaagcacaaggaatccaactgaaggcagctaaactttgtgtt

SEQ ID NO: 349522 - DNA, 120 bp, Artificial Sequence
  ENSG00000138772_15 (sequence is synthesized)
ccacaagccatttctgcccagggtttgaccaagtcatcaaaaatagtgactttcttgcagtgcacacttgtgatgggtggacttggatgcccttttggtctggactctcccagtggtaga

SEQ ID NO: 349523 - DNA, 120 bp, Artificial Sequence
  ENSG00000138772_16 (sequence is synthesized)
gagaaggggaaagagaaagagagatcattgaagaaaatcatctagggagtttgggttttgttgtagatgatttccttaaaaaggaacaaaagaaaaacaaaaacttctgtgcccagattt

SEQ ID NO: 349524 - DNA, 120 bp, Artificial Sequence
  ENSG00000138772_17 (sequence is synthesized)
tcatggtttaaagagggagttttttagcttgctacttgatcttctgcatatcaaataaaaaactagaatatattcaaatgtgctcaactgcgttgctttaaataattttgtggtgcttct

SEQ ID NO: 349525 - DNA, 120 bp, Artificial Sequence
  ENSG00000138772_18 (sequence is synthesized)
agatgctaatattccacttgtatgaaagatgaaaattcatgtataatattaaattttaaaagttcatcctctattttaaatagaaaatgagaaggcaggccaggcgcggtggctcacgcc

SEQ ID NO: 349526 - DNA, 120 bp, Artificial Sequence
  ENSG00000138772_19 (sequence is synthesized)
aaaaaaaaaaaaaaagaaaatgagaaggtaaaaatatggcttaatgttgatagaatgtcatatttcttttccacttagattagttttctacagtagctaatttgtctactgatttgcctc

SEQ ID NO: 349527 - DNA, 120 bp, Artificial Sequence
  ENSG00000138772_20 (sequence is synthesized)
tttgtctactgatttgcctcataggttaatagtattctaacccatatagagataggtacagagaagtattgaccacattattttcactgcttcacagtaagtgcaggcagtaaaacttgt

SEQ ID NO: 349528 - DNA, 120 bp, Artificial Sequence
  ENSG00000138772_21 (sequence is synthesized)
tttagaatgccaaacctcaagcttgagacccagtagatcctgtggcctctcaaactgccttgcttaaaataaaccaagctgagttggcagcctttaatgatgccgtaaccctgtgtttgc

SEQ ID NO: 349529 - DNA, 120 bp, Artificial Sequence
  ENSG00000138772_22 (sequence is synthesized)
ttgtctgtctttactgccagatggtgcgctccatgagtacagactcctgtttatcctcagaccctagggccttgtgcacagaagatgcttacctccatctctttaccagccattttctgt

SEQ ID NO: 349530 - DNA, 120 bp, Artificial Sequence
  ENSG00000138772_23 (sequence is synthesized)
ggtcccacacgtaccttcaaagtcatatcctaagtgaacacatcctttccttcatctcgcccagccccacatctgctccccttcccctgttcagtcatcccagagaatggccccaacagg

SEQ ID NO: 349531 - DNA, 120 bp, Artificial Sequence
  ENSG00000138772_24 (sequence is synthesized)
aatttgcccaactctctgaagtcgtaccattcctccccagacttcttgactatgcctcagccaccccaggcttctttccattcctcaactgtggcaagtctattctcacatcacagtctt

SEQ ID NO: 349532 - DNA, 120 bp, Artificial Sequence
  ENSG00000138772_25 (sequence is synthesized)
tgcatccattccttctctggaatgctcatcctctagatctttacctagctgactccttctcatctttcaggtttcagctctcctcctgagagaggtctcccctaactgtaccaggccaat

SEQ ID NO: 349533 - DNA, 120 bp, Artificial Sequence
  ENSG00000138772_26 (sequence is synthesized)
tggttccctttcagtcactctccatgccatttccagctttcttttcttcatatttctgatcactatttacttaagcaatagttaatttgctttgctgtctgtctccatctactagaacat

SEQ ID NO: 349534 - DNA, 120 bp, Artificial Sequence
  ENSG00000138772_27 (sequence is synthesized)
aagctccatgcagacagagatataatctgttctgttcaccgccattggcacagcacatggaataatgcctggctatagtcgacgctcataagcatttgctggatgaattacatagatgaa

SEQ ID NO: 349535 - DNA, 120 bp, Artificial Sequence
  ENSG00000138772_28 (sequence is synthesized)
ctcagctagaaattttacactatctctctttttcattatcctgtagcgatacatcattatgttttgtcaatccatttacataagcaactctcaaatcttcccattttctccatccctact

SEQ ID NO: 349536 - DNA, 120 bp, Artificial Sequence
  ENSG00000138772_29 (sequence is synthesized)
gcctttattctaaggatggccatcatcatctcttaattactcagtctcctcaagatgagtctcaaagcctctagtcttaactcccttatcttccttctactcctaccttgcaatctgttt

SEQ ID NO: 349537 - DNA, 120 bp, Artificial Sequence
  ENSG00000138772_30 (sequence is synthesized)
ctcatgctgcagtcaaagtgattttctgaaaccacgaatttgatctgatctcaacattctcatgtttaaaatattacaagagctctccacacttaggataaagtcagaatttcatttcat

SEQ ID NO: 349538 - DNA, 120 bp, Artificial Sequence
  ENSG00000138772_31 (sequence is synthesized)
ggttaacaaggtctggcctttccagacacatttctttttatccctctttgttaacttacgtatccttgaacgtggcgttctttattgccctaaaccttcacgcctgctatttcctctata

SEQ ID NO: 349539 - DNA, 120 bp, Artificial Sequence
  ENSG00000138772_32 (sequence is synthesized)
ggaagtttctctcctccctacatgaacctactccttcctcttgttgactgtttagtccttgcttaaatgtcactttctcagacttttcctaatccctaatctttcttaggcccccctgaa

SEQ ID NO: 349540 - DNA, 120 bp, Artificial Sequence
  ENSG00000138772_33 (sequence is synthesized)
gtatgctcccatggtacccaatattttcaacatgtcagactgttttgcaatggcttactttcttgcctgtattctttacaaaactggaagcttaacatgggtatctcatctctgctttgc

SEQ ID NO: 349541 - DNA, 120 bp, Artificial Sequence
  ENSG00000138772_34 (sequence is synthesized)
agcatttagcatgatgctgtcacagagtaggtgctcaacaaatatttcttgaataatgaatgatgagtttgataataaatgaaaaagaatcactatagttgaatattttgcacaccatta

SEQ ID NO: 349542 - DNA, 120 bp, Artificial Sequence
  ENSG00000138777_0 (sequence is synthesized)
gtcattgacgccatgagcgcgctgctgcggctgctgcgcacgggtgccccagccgctgcgtgcctgcggttggggaccagtgcagggaccgggtcgcgccgtgctatggccctgtaccac

SEQ ID NO: 349543 - DNA, 120 bp, Artificial Sequence
  ENSG00000138777_1 (sequence is synthesized)
actgaggagcgcggccagccctgctcgcagaattaccgcctcttctttaagaatgtaactggtcactacatttccccctttcatgatattcctctgaaggtgaactctaaagaggaaaat

SEQ ID NO: 349544 - DNA, 120 bp, Artificial Sequence
  ENSG00000138777_2 (sequence is synthesized)
ggcattcctatgaagaaagcacgaaatgatgaatatgagaatctgtttaatatgattgtagaaatacctcggtggacaaatgctaaaatggagattgccaccaaggagccaatgaatccc

SEQ ID NO: 349545 - DNA, 120 bp, Artificial Sequence
  ENSG00000138777_3 (sequence is synthesized)
attaaacaatatgtaaaggatggaaagctacgctatgtggcgaatatcttcccttacaagggttatatatggaattatggtaccctccctcagacttgggaagatccccatgaaaaagat

SEQ ID NO: 349546 - DNA, 120 bp, Artificial Sequence
  ENSG00000138777_4 (sequence is synthesized)
aagagcacgaactgctttggagataatgatcctattgatgtttgcgaaataggctcaaagattctttcttgtggagaagttattcatgtgaagatccttggaattttggctcttattgat

SEQ ID NO: 349547 - DNA, 120 bp, Artificial Sequence
  ENSG00000138777_5 (sequence is synthesized)
gaaggtgaaacagattggaaattaattgctatcaatgcgaatgatcctgaagcctcaaagtttcatgatattgatgatgttaagaagttcaaaccgggttacctggaagctactcttaat

SEQ ID NO: 349548 - DNA, 120 bp, Artificial Sequence
  ENSG00000138777_6 (sequence is synthesized)
catcaatgttggaaagcattgcttatgaagaagtgtaatggaggagctataaattgcacaaacgtgcagatatctgatagccctttccgttgcactcaagaggaagcaagatcattagtt
